United States Patent Application Publication US 2005/0244851 A1 - sequence listing, part 2

SEQ ID NO: 39349 - DNA, 25 bp, Homo sapien
ccgttagaaagaattgtgccgttga

SEQ ID NO: 39350 - DNA, 25 bp, Homo sapien
tcaacggcacaattctttctaacgg

SEQ ID NO: 39351 - DNA, 25 bp, Homo sapien
atagtgtgctcatcaaccttggtac

SEQ ID NO: 39352 - DNA, 25 bp, Homo sapien
gtaccaaggttgatgagcacactat

SEQ ID NO: 39353 - DNA, 25 bp, Homo sapien
acacgctacaagtggacccgtctac

SEQ ID NO: 39354 - DNA, 25 bp, Homo sapien
gtagacgggtccacttgtagcgtgt

SEQ ID NO: 39355 - DNA, 25 bp, Homo sapien
gcgaatcttgcaaggccattgttgt

SEQ ID NO: 39356 - DNA, 25 bp, Homo sapien
acaacaatggccttgcaagattcgc

SEQ ID NO: 39357 - DNA, 25 bp, Homo sapien
gcccaccccgtcgtggcgaggggct

SEQ ID NO: 39358 - DNA, 25 bp, Homo sapien
agcccctcgccacgacggggtgggc

SEQ ID NO: 39359 - DNA, 25 bp, Homo sapien
cgcccaccccgtcgtggcgaggggc

SEQ ID NO: 39360 - DNA, 25 bp, Homo sapien
gcccctcgccacgacggggtgggcg

SEQ ID NO: 39361 - DNA, 25 bp, Homo sapien
acgtcggcggagaacacccgtggcc

SEQ ID NO: 39362 - DNA, 25 bp, Homo sapien
ggccacgggtgttctccgccgacgt

SEQ ID NO: 39363 - DNA, 25 bp, Homo sapien
aagtaaagttacttcattcaacgat

SEQ ID NO: 39364 - DNA, 25 bp, Homo sapien
atcgttgaatgaagtaactttactt

SEQ ID NO: 39365 - DNA, 25 bp, Homo sapien
tactggttcttatactgggaagtac

SEQ ID NO: 39366 - DNA, 25 bp, Homo sapien
gtacttcccagtataagaaccagta

SEQ ID NO: 39367 - DNA, 25 bp, Homo sapien
gatcctctgtttacccgttggagat

SEQ ID NO: 39368 - DNA, 25 bp, Homo sapien
atctccaacgggtaaacagaggatc

SEQ ID NO: 39369 - DNA, 25 bp, Homo sapien
gtctacgtctcggtagcccccgcaa

SEQ ID NO: 39370 - DNA, 25 bp, Homo sapien
ttgcgggggctaccgagacgtagac

SEQ ID NO: 39371 - DNA, 25 bp, Homo sapien
tttagataccctgtgacctctcgag

SEQ ID NO: 39372 - DNA, 25 bp, Homo sapien
ctcgagaggtcacagggtatctaaa

SEQ ID NO: 39373 - DNA, 25 bp, Homo sapien
attatttttgataccggtgtgactg

SEQ ID NO: 39374 - DNA, 25 bp, Homo sapien
cagtcacaccggtatcaaaaataat

SEQ ID NO: 39375 - DNA, 25 bp, Homo sapien
actgtcctatggaaaaggtcgtaga

SEQ ID NO: 39376 - DNA, 25 bp, Homo sapien
tctacgaccttttccataggacagt

SEQ ID NO: 39377 - DNA, 25 bp, Homo sapien
cggcagtcggcgtgcgcggcgaaca

SEQ ID NO: 39378 - DNA, 25 bp, Homo sapien
tgttcgccgcgcacgccgactgccg

SEQ ID NO: 39379 - DNA, 25 bp, Homo sapien
tattacgaaggaccaacttgttgac

SEQ ID NO: 39380 - DNA, 25 bp, Homo sapien
gtcaacaagttggtccttcgtaata

SEQ ID NO: 39381 - DNA, 25 bp, Homo sapien
agaccccaggcctcctctcaagcct

SEQ ID NO: 39382 - DNA, 25 bp, Homo sapien
aggcttgagaggaggcctggggtct

SEQ ID NO: 39383 - DNA, 25 bp, Homo sapien
ctatcgttgtgagccgtgtcactgt

SEQ ID NO: 39384 - DNA, 25 bp, Homo sapien
acagtgacacggctcacaacgatag

SEQ ID NO: 39385 - DNA, 25 bp, Homo sapien
gaccaccgcgggaagtgctcccacc

SEQ ID NO: 39386 - DNA, 25 bp, Homo sapien
ggtgggagcacttcccgcggtggtc

SEQ ID NO: 39387 - DNA, 25 bp, Homo sapien
gacccggcgccaagggttgacaccg

SEQ ID NO: 39388 - DNA, 25 bp, Homo sapien
cggtgtcaacccttggcgccgggtc

SEQ ID NO: 39389 - DNA, 25 bp, Homo sapien
atacgtcttcgcaaggcgcctggcg

SEQ ID NO: 39390 - DNA, 25 bp, Homo sapien
cgccaggcgccttgcgaagacgtat

SEQ ID NO: 39391 - DNA, 25 bp, Homo sapien
ggcggacccgcctcagcgtcttgtg

SEQ ID NO: 39392 - DNA, 25 bp, Homo sapien
cacaagacgctgaggcgggtccgcc

SEQ ID NO: 39393 - DNA, 25 bp, Homo sapien
gcgtccgcaccccaacgccgctctc

SEQ ID NO: 39394 - DNA, 25 bp, Homo sapien
gagagcggcgttggggtgcggacgc

SEQ ID NO: 39395 - DNA, 25 bp, Homo sapien
gcgccgacgccccgcctctcgacgc

SEQ ID NO: 39396 - DNA, 25 bp, Homo sapien
gcgtcgagaggcggggcgtcggcgc

SEQ ID NO: 39397 - DNA, 25 bp, Homo sapien
gatcgcgccgacgccccgcctctcg

SEQ ID NO: 39398 - DNA, 25 bp, Homo sapien
cgagaggcggggcgtcggcgcgatc

SEQ ID NO: 39399 - DNA, 25 bp, Homo sapien
gcggtttccgctacgggtgcacggt

SEQ ID NO: 39400 - DNA, 25 bp, Homo sapien
accgtgcacccgtagcggaaaccgc

SEQ ID NO: 39401 - DNA, 25 bp, Homo sapien
tagaccaaatcttgagaaaagaaac

SEQ ID NO: 39402 - DNA, 25 bp, Homo sapien
gtttcttttctcaagatttggtcta

SEQ ID NO: 39403 - DNA, 25 bp, Homo sapien
ccgacgtaagatatgactggtatgt

SEQ ID NO: 39404 - DNA, 25 bp, Homo sapien
acataccagtcatatcttacgtcgg

SEQ ID NO: 39405 - DNA, 25 bp, Homo sapien
gaagacatacacatcccgtaaatat

SEQ ID NO: 39406 - DNA, 25 bp, Homo sapien
atatttacgggatgtgtatgtcttc

SEQ ID NO: 39407 - DNA, 25 bp, Homo sapien
ttttattattgacctgtagttaaaa

SEQ ID NO: 39408 - DNA, 25 bp, Homo sapien
ttttaactacaggtcaataataaaa

SEQ ID NO: 39409 - DNA, 25 bp, Homo sapien
gataccaactattcccttgaggttt

SEQ ID NO: 39410 - DNA, 25 bp, Homo sapien
aaacctcaagggaatagttggtatc

SEQ ID NO: 39411 - DNA, 25 bp, Homo sapien
ttggtccaggtccaaaccatatcgg

SEQ ID NO: 39412 - DNA, 25 bp, Homo sapien
ccgatatggtttggacctggaccaa

SEQ ID NO: 39413 - DNA, 25 bp, Homo sapien
gccctaaggtcaccccgcggagcga

SEQ ID NO: 39414 - DNA, 25 bp, Homo sapien
tcgctccgcggggtgaccttagggc

SEQ ID NO: 39415 - DNA, 25 bp, Homo sapien
cctggacgacgaagaacagccgtgg

SEQ ID NO: 39416 - DNA, 25 bp, Homo sapien
ccacggctgttcttcgtcgtccagg

SEQ ID NO: 39417 - DNA, 25 bp, Homo sapien
ctgaccgcaccggacgaagtgggta

SEQ ID NO: 39418 - DNA, 25 bp, Homo sapien
tacccacttcgtccggtgcggtcag

SEQ ID NO: 39419 - DNA, 25 bp, Homo sapien
actgaccgcaccggacgaagtgggt

SEQ ID NO: 39420 - DNA, 25 bp, Homo sapien
acccacttcgtccggtgcggtcagt

SEQ ID NO: 39421 - DNA, 25 bp, Homo sapien
tctcaactcaaatcggtgcggggtg

SEQ ID NO: 39422 - DNA, 25 bp, Homo sapien
caccccgcaccgatttgagttgaga

SEQ ID NO: 39423 - DNA, 25 bp, Homo sapien
ttcgttacaccattgtccgcatggg

SEQ ID NO: 39424 - DNA, 25 bp, Homo sapien
cccatgcggacaatggtgtaacgaa

SEQ ID NO: 39425 - DNA, 25 bp, Homo sapien
aaccttataagattgtttactctaa

SEQ ID NO: 39426 - DNA, 25 bp, Homo sapien
ttagagtaaacaatcttataaggtt

SEQ ID NO: 39427 - DNA, 25 bp, Homo sapien
agtttggactaatcagttgtgattt

SEQ ID NO: 39428 - DNA, 25 bp, Homo sapien
aaatcacaactgattagtccaaact

SEQ ID NO: 39429 - DNA, 25 bp, Homo sapien
catctaaaactattacacaaagaag

SEQ ID NO: 39430 - DNA, 25 bp, Homo sapien
cttctttgtgtaatagttttagatg

SEQ ID NO: 39431 - DNA, 25 bp, Homo sapien
agtggctatcataacggaccgaaga

SEQ ID NO: 39432 - DNA, 25 bp, Homo sapien
tcttcggtccgttatgatagccact

SEQ ID NO: 39433 - DNA, 25 bp, Homo sapien
acagttttattgtaagaacttgtct

SEQ ID NO: 39434 - DNA, 25 bp, Homo sapien
agacaagttcttacaataaaactgt

SEQ ID NO: 39435 - DNA, 25 bp, Homo sapien
tctgtcgacgctgaagccgggtcct

SEQ ID NO: 39436 - DNA, 25 bp, Homo sapien
aggacccggcttcagcgtcgacaga

SEQ ID NO: 39437 - DNA, 25 bp, Homo sapien
cgaacacgaagtccctcacatagac

SEQ ID NO: 39438 - DNA, 25 bp, Homo sapien
gtctatgtgagggacttcgtgttcg

SEQ ID NO: 39439 - DNA, 25 bp, Homo sapien
caaagatgtcggaaggactgttaag

SEQ ID NO: 39440 - DNA, 25 bp, Homo sapien
cttaacagtccttccgacatctttg

SEQ ID NO: 39441 - DNA, 25 bp, Homo sapien
cccgtggctcgagggccctcgtccc

SEQ ID NO: 39442 - DNA, 25 bp, Homo sapien
gggacgagggccctcgagccacggg

SEQ ID NO: 39443 - DNA, 25 bp, Homo sapien
attttctgtgctggttgttgagacc

SEQ ID NO: 39444 - DNA, 25 bp, Homo sapien
ggtctcaacaaccagcacagaaaat

SEQ ID NO: 39445 - DNA, 25 bp, Homo sapien
tgtctttattttctgtgctggttgt

SEQ ID NO: 39446 - DNA, 25 bp, Homo sapien
acaaccagcacagaaaataaagaca

SEQ ID NO: 39447 - DNA, 25 bp, Homo sapien
taactacgactgcagtggaaaaacc

SEQ ID NO: 39448 - DNA, 25 bp, Homo sapien
ggtttttccactgcagtcgtagtta

SEQ ID NO: 39449 - DNA, 25 bp, Homo sapien
aggtgaccgcgtccggcgacgggcg

SEQ ID NO: 39450 - DNA, 25 bp, Homo sapien
cgcccgtcgccggacgcggtcacct

SEQ ID NO: 39451 - DNA, 25 bp, Homo sapien
agaggggtcacggatcactagtctt

SEQ ID NO: 39452 - DNA, 25 bp, Homo sapien
aagactagtgatccgtgacccctct

SEQ ID NO: 39453 - DNA, 25 bp, Homo sapien
gtcgcttccgctgtcgagagaaccg

SEQ ID NO: 39454 - DNA, 25 bp, Homo sapien
cggttctctcgacagcggaagcgac

SEQ ID NO: 39455 - DNA, 25 bp, Homo sapien
aggaggctctcacgccgctggagcc

SEQ ID NO: 39456 - DNA, 25 bp, Homo sapien
ggctccagcggcgtgagagcctcct

SEQ ID NO: 39457 - DNA, 25 bp, Homo sapien
gcgggacggccagcgatcgaggctc

SEQ ID NO: 39458 - DNA, 25 bp, Homo sapien
gagcctcgatcgctggccgtcccgc

SEQ ID NO: 39459 - DNA, 25 bp, Homo sapien
ccgggacagaccgtagttctatact

SEQ ID NO: 39460 - DNA, 25 bp, Homo sapien
agtatagaactacggtctgtcccgg

SEQ ID NO: 39461 - DNA, 25 bp, Homo sapien
atatttacaatagttcgtgtgtaaa

SEQ ID NO: 39462 - DNA, 25 bp, Homo sapien
tttacacacgaactattgtaaatat

SEQ ID NO: 39463 - DNA, 25 bp, Homo sapien
aaatagaaacatcggattgtagacg

SEQ ID NO: 39464 - DNA, 25 bp, Homo sapien
cgtctacaatccgatgtttctattt

SEQ ID NO: 39465 - DNA, 25 bp, Homo sapien
gaccggcggcgttgggcgaactcgc

SEQ ID NO: 39466 - DNA, 25 bp, Homo sapien
gcgagttcgcccaacgccgccggtc

SEQ ID NO: 39467 - DNA, 25 bp, Homo sapien
cgatgaccggccccggtcgctccgg

SEQ ID NO: 39468 - DNA, 25 bp, Homo sapien
ccggagcgaccggggccggtcatcg

SEQ ID NO: 39469 - DNA, 25 bp, Homo sapien
actgccttaacaaggcgacgacgac

SEQ ID NO: 39470 - DNA, 25 bp, Homo sapien
gtcgtcgtcgccttgttaaggcagt

SEQ ID NO: 39471 - DNA, 25 bp, Homo sapien
aatcctgaatccaaacgcgaaagag

SEQ ID NO: 39472 - DNA, 25 bp, Homo sapien
ctctttcgcgtttggattcaggatt

SEQ ID NO: 39473 - DNA, 25 bp, Homo sapien
gacggtgctcgaagaccccgtgtgt

SEQ ID NO: 39474 - DNA, 25 bp, Homo sapien
acacacggggtcttcgagcaccgtc

SEQ ID NO: 39475 - DNA, 25 bp, Homo sapien
gcgccgcagcaaccgctcgcacccc

SEQ ID NO: 39476 - DNA, 25 bp, Homo sapien
ggggtgcgagcggttgctgcggcgc

SEQ ID NO: 39477 - DNA, 25 bp, Homo sapien
tagtacttataatacgtgtttacga

SEQ ID NO: 39478 - DNA, 25 bp, Homo sapien
tcgtaaacacgtattataagtacta

SEQ ID NO: 39479 - DNA, 25 bp, Homo sapien
ccagaagggtacgcagtggaggagg

SEQ ID NO: 39480 - DNA, 25 bp, Homo sapien
cctcctccactgcgtacccttctgg

SEQ ID NO: 39481 - DNA, 25 bp, Homo sapien
aagggaaagttatccgtcaggtcag

SEQ ID NO: 39482 - DNA, 25 bp, Homo sapien
ctgacctgacggataactttccctt

SEQ ID NO: 39483 - DNA, 25 bp, Homo sapien
aaaactcttcttggattacatatac

SEQ ID NO: 39484 - DNA, 25 bp, Homo sapien
gtatatgtaatccaagaagagtttt

SEQ ID NO: 39485 - DNA, 25 bp, Homo sapien
tttacatctacataacagatcatct

SEQ ID NO: 39486 - DNA, 25 bp, Homo sapien
agatgatctgttatgtagatgtaaa

SEQ ID NO: 39487 - DNA, 25 bp, Homo sapien
tgtccagtccgttaaccgttagtgt

SEQ ID NO: 39488 - DNA, 25 bp, Homo sapien
acactaacggttaacggactggaca

SEQ ID NO: 39489 - DNA, 25 bp, Homo sapien
attccccgtatcagaaaccgcgatt

SEQ ID NO: 39490 - DNA, 25 bp, Homo sapien
aatcgcggtttctgatacggggaat

SEQ ID NO: 39491 - DNA, 25 bp, Homo sapien
cgtccggcgggcgacgtcgcgaccc

SEQ ID NO: 39492 - DNA, 25 bp, Homo sapien
gggtcgcgacgtcgcccgccggacg

SEQ ID NO: 39493 - DNA, 25 bp, Homo sapien
acgacaacacgccaacagtctgaag

SEQ ID NO: 39494 - DNA, 25 bp, Homo sapien
cttcagactgttggcgtgttgtcgt

SEQ ID NO: 39495 - DNA, 25 bp, Homo sapien
gtacaaactgatacttaaagtacct

SEQ ID NO: 39496 - DNA, 25 bp, Homo sapien
aggtactttaagtatcagtttgtac

SEQ ID NO: 39497 - DNA, 25 bp, Homo sapien
gtctttgttattcaagacttaatac

SEQ ID NO: 39498 - DNA, 25 bp, Homo sapien
gtattaagtcttgaataacaaagac

SEQ ID NO: 39499 - DNA, 25 bp, Homo sapien
aatgcgtacgaacattttcgtcaag

SEQ ID NO: 39500 - DNA, 25 bp, Homo sapien
cttgacgaaaatgttcgtacgcatt

SEQ ID NO: 39501 - DNA, 25 bp, Homo sapien
aagaactacttatatatagtgaagt

SEQ ID NO: 39502 - DNA, 25 bp, Homo sapien
acttcactatatataagtagttctt

SEQ ID NO: 39503 - DNA, 25 bp, Homo sapien
cgtctgcccgtcggaaggtcccgac

SEQ ID NO: 39504 - DNA, 25 bp, Homo sapien
gtcgggaccttccgacgggcagacg

SEQ ID NO: 39505 - DNA, 25 bp, Homo sapien
ttgactttggacagggattaagact

SEQ ID NO: 39506 - DNA, 25 bp, Homo sapien
agtcttaatccctgtccaaagtcaa

SEQ ID NO: 39507 - DNA, 25 bp, Homo sapien
tacatgtctaccttccacctatatt

SEQ ID NO: 39508 - DNA, 25 bp, Homo sapien
aatataggtggaaggtagacatgta

SEQ ID NO: 39509 - DNA, 25 bp, Homo sapien
tagactcggtcgggaccgtgcgacc

SEQ ID NO: 39510 - DNA, 25 bp, Homo sapien
ggtcgcacggtcccgaccgagtcta

SEQ ID NO: 39511 - DNA, 25 bp, Homo sapien
actaccgtacggtatttctacagac

SEQ ID NO: 39512 - DNA, 25 bp, Homo sapien
gtctgtagaaataccgtacggtagt

SEQ ID NO: 39513 - DNA, 25 bp, Homo sapien
tctttagagtgagttacacggtcgt

SEQ ID NO: 39514 - DNA, 25 bp, Homo sapien
acgaccgtgtaactcactctaaaga

SEQ ID NO: 39515 - DNA, 25 bp, Homo sapien
tgaccgccgcaacgaccggagggtc

SEQ ID NO: 39516 - DNA, 25 bp, Homo sapien
gaccctccggtcgttgcggcggtca

SEQ ID NO: 39517 - DNA, 25 bp, Homo sapien
tagaacatgtagaatccttcatgtc

SEQ ID NO: 39518 - DNA, 25 bp, Homo sapien
gacatgaaggattctacatgttcta

SEQ ID NO: 39519 - DNA, 25 bp, Homo sapien
ggctctaccacgaccccaaccgccc

SEQ ID NO: 39520 - DNA, 25 bp, Homo sapien
gggcggttggggtcgtggtagagcc

SEQ ID NO: 39521 - DNA, 25 bp, Homo sapien
gaccgtccctaggtgacctcgaggg

SEQ ID NO: 39522 - DNA, 25 bp, Homo sapien
ccctcgaggtcacctagggacggtc

SEQ ID NO: 39523 - DNA, 25 bp, Homo sapien
tgggcgaaggtgaccgcgtccggcg

SEQ ID NO: 39524 - DNA, 25 bp, Homo sapien
cgccggacgcggtcaccttcgccca

SEQ ID NO: 39525 - DNA, 25 bp, Homo sapien
agtattggtgatcatcgactgttgg

SEQ ID NO: 39526 - DNA, 25 bp, Homo sapien
ccaacagtcgatgatcaccaatact

SEQ ID NO: 39527 - DNA, 25 bp, Homo sapien
gacgtttcagagcattcggaaagag

SEQ ID NO: 39528 - DNA, 25 bp, Homo sapien
ctctttccgaatgctctgaaacgtc

SEQ ID NO: 39529 - DNA, 25 bp, Homo sapien
gtccaaagactttggtgtcatcgtt

SEQ ID NO: 39530 - DNA, 25 bp, Homo sapien
aacgatgacaccaaagtctttggac

SEQ ID NO: 39531 - DNA, 25 bp, Homo sapien
tccaggtgtacctgcggaggagaag

SEQ ID NO: 39532 - DNA, 25 bp, Homo sapien
cttctcctccgcaggtacacctgga

SEQ ID NO: 39533 - DNA, 25 bp, Homo sapien
tagtaaggtggagaggtatttaaag

SEQ ID NO: 39534 - DNA, 25 bp, Homo sapien
ctttaaatacctctccaccttacta

SEQ ID NO: 39535 - DNA, 25 bp, Homo sapien
tcctactatctccgtcgttgagggg

SEQ ID NO: 39536 - DNA, 25 bp, Homo sapien
cccctcaacgacggagatagtagga

SEQ ID NO: 39537 - DNA, 25 bp, Homo sapien
accgtaagtgtcaatggaataagta

SEQ ID NO: 39538 - DNA, 25 bp, Homo sapien
tacttattccattgacacttacggt

SEQ ID NO: 39539 - DNA, 25 bp, Homo sapien
tctaccaacattgtgaaaaacaaat

SEQ ID NO: 39540 - DNA, 25 bp, Homo sapien
atttgtttttcacaatgttggtaga

SEQ ID NO: 39541 - DNA, 25 bp, Homo sapien
cgtcggcggagcgaagagggaccga

SEQ ID NO: 39542 - DNA, 25 bp, Homo sapien
tcggtccctcttcgctccgccgacg

SEQ ID NO: 39543 - DNA, 25 bp, Homo sapien
tgccttccgcagttccccgaggagt

SEQ ID NO: 39544 - DNA, 25 bp, Homo sapien
actcctcggggaactgcggaaggca

SEQ ID NO: 39545 - DNA, 25 bp, Homo sapien
aaggagattccgacagtcatggagg

SEQ ID NO: 39546 - DNA, 25 bp, Homo sapien
cctccatgactgtcggaatctcctt

SEQ ID NO: 39547 - DNA, 25 bp, Homo sapien
aggaggagtaccggctaacccctca

SEQ ID NO: 39548 - DNA, 25 bp, Homo sapien
tgaggggttagccggtactcctcct

SEQ ID NO: 39549 - DNA, 25 bp, Homo sapien
tctcgggtgagggtgcgtaggagcg

SEQ ID NO: 39550 - DNA, 25 bp, Homo sapien
cgctcctacgcaccctcacccgaga

SEQ ID NO: 39551 - DNA, 25 bp, Homo sapien
ggccctcacgatgccggcctcgagg

SEQ ID NO: 39552 - DNA, 25 bp, Homo sapien
cctcgaggccggcatcgtgagggcc

SEQ ID NO: 39553 - DNA, 25 bp, Homo sapien
aaggttctcgcttagggaggtgcga

SEQ ID NO: 39554 - DNA, 25 bp, Homo sapien
tcgcacctccctaagcgagaacctt

SEQ ID NO: 39555 - DNA, 25 bp, Homo sapien
aaaccggtaagcgatttctgcaagg

SEQ ID NO: 39556 - DNA, 25 bp, Homo sapien
ccttgcagaaatcgcttaccggttt

SEQ ID NO: 39557 - DNA, 25 bp, Homo sapien
tgtggtaaaacactgtcacctgtct

SEQ ID NO: 39558 - DNA, 25 bp, Homo sapien
agacaggtgacagtgttttaccaca

SEQ ID NO: 39559 - DNA, 25 bp, Homo sapien
gatgggtctgtcctcgtcattaccg

SEQ ID NO: 39560 - DNA, 25 bp, Homo sapien
cggtaatgacgaggacagacccatc

SEQ ID NO: 39561 - DNA, 25 bp, Homo sapien
attggaccgcagacgtttgtgactt

SEQ ID NO: 39562 - DNA, 25 bp, Homo sapien
aagtcacaaacgtctgcggtccaat

SEQ ID NO: 39563 - DNA, 25 bp, Homo sapien
acgtatctgtgtacgttggtcgtcc

SEQ ID NO: 39564 - DNA, 25 bp, Homo sapien
ggacgaccaacgtacacagatacgt

SEQ ID NO: 39565 - DNA, 25 bp, Homo sapien
gcttctttcttaaactcgtcccgtc

SEQ ID NO: 39566 - DNA, 25 bp, Homo sapien
gacgggacgagtttaagaaagaagc

SEQ ID NO: 39567 - DNA, 25 bp, Homo sapien
ctcagtgaaagtgtcaaacattccg

SEQ ID NO: 39568 - DNA, 25 bp, Homo sapien
cggaatgtttgacactttcactgag

SEQ ID NO: 39569 - DNA, 25 bp, Homo sapien
accccggtcactgactcggagaacc

SEQ ID NO: 39570 - DNA, 25 bp, Homo sapien
ggttctccgagtcagtgaccggggt

SEQ ID NO: 39571 - DNA, 25 bp, Homo sapien
tcctgttcgagggtccgcacatggg

SEQ ID NO: 39572 - DNA, 25 bp, Homo sapien
cccatgtgcggaccctcgaacagga

SEQ ID NO: 39573 - DNA, 25 bp, Homo sapien
ggagccgatctgtgcctacgggctc

SEQ ID NO: 39574 - DNA, 25 bp, Homo sapien
gagcccgtaggcacagatcggctcc

SEQ ID NO: 39575 - DNA, 25 bp, Homo sapien
cattgacttccgatatgacgattgt

SEQ ID NO: 39576 - DNA, 25 bp, Homo sapien
acaatcgtcatatcggaagtcaatg

SEQ ID NO: 39577 - DNA, 25 bp, Homo sapien
ggaggcgccaccgcagggtgtccgg

SEQ ID NO: 39578 - DNA, 25 bp, Homo sapien
ccggacaccctgcggtggcgcctcc

SEQ ID NO: 39579 - DNA, 25 bp, Homo sapien
gcgctgcggctgcggccctcccccg

SEQ ID NO: 39580 - DNA, 25 bp, Homo sapien
cgggggagggccgcagccgcagcgc

SEQ ID NO: 39581 - DNA, 25 bp, Homo sapien
ccgtcgcgcgccgagctcgacggac

SEQ ID NO: 39582 - DNA, 25 bp, Homo sapien
gtccgtcgagctcggcgcgcgacgg

SEQ ID NO: 39583 - DNA, 25 bp, Homo sapien
gtaaaagtctgtatgacaatagtgt

SEQ ID NO: 39584 - DNA, 25 bp, Homo sapien
acactattgtcatacagacttttac

SEQ ID NO: 39585 - DNA, 25 bp, Homo sapien
tgaagacttttctcttaactcatgt

SEQ ID NO: 39586 - DNA, 25 bp, Homo sapien
acatgagttaagagaaaagtcttca

SEQ ID NO: 39587 - DNA, 25 bp, Homo sapien
ccacactgccgcggtgccccaggac

SEQ ID NO: 39588 - DNA, 25 bp, Homo sapien
gtcctggggcaccgcggcagtgtgg

SEQ ID NO: 39589 - DNA, 25 bp, Homo sapien
cgacttgactcctcattgctcaggg

SEQ ID NO: 39590 - DNA, 25 bp, Homo sapien
ccctgagcaatgaggagtcaagtcg

SEQ ID NO: 39591 - DNA, 25 bp, Homo sapien
acaacatcggagtgtctaagaagac

SEQ ID NO: 39592 - DNA, 25 bp, Homo sapien
gtcttcttagacactccgatgttgt

SEQ ID NO: 39593 - DNA, 25 bp, Homo sapien
ctgtgtataagtcctggttgactgt

SEQ ID NO: 39594 - DNA, 25 bp, Homo sapien
acagtcaaccaggacttatacacag

SEQ ID NO: 39595 - DNA, 25 bp, Homo sapien
caataacctcaatacattatattaa

SEQ ID NO: 39596 - DNA, 25 bp, Homo sapien
ttaatataatgtattgaggttattg

SEQ ID NO: 39597 - DNA, 25 bp, Homo sapien
gttatatgacatcattatttgccat

SEQ ID NO: 39598 - DNA, 25 bp, Homo sapien
atggcaaataatgatgtcatataac

SEQ ID NO: 39599 - DNA, 25 bp, Homo sapien
gtcctgtagcaggtaagatcctacc

SEQ ID NO: 39600 - DNA, 25 bp, Homo sapien
ggtaggatcttacctgctacaggac

SEQ ID NO: 39601 - DNA, 25 bp, Homo sapien
aacttaagataacacaatcaaaact

SEQ ID NO: 39602 - DNA, 25 bp, Homo sapien
agttttgattgtgttatcttaagtt

SEQ ID NO: 39603 - DNA, 25 bp, Homo sapien
acctcacaattcatatactttacga

SEQ ID NO: 39604 - DNA, 25 bp, Homo sapien
tcgtaaagtatatgaattgtgaggt

SEQ ID NO: 39605 - DNA, 25 bp, Homo sapien
gttctaccacaatgacaacggcttg

SEQ ID NO: 39606 - DNA, 25 bp, Homo sapien
caagccgttgtcattgtggtagaac

SEQ ID NO: 39607 - DNA, 25 bp, Homo sapien
gtccctgcggacgacgtgcgtcagg

SEQ ID NO: 39608 - DNA, 25 bp, Homo sapien
cctgacgcacgtcgtccgcagggac

SEQ ID NO: 39609 - DNA, 25 bp, Homo sapien
actcgaagagtaagaacgtgtgtat

SEQ ID NO: 39610 - DNA, 25 bp, Homo sapien
atacacacgttcttactcttcgagt

SEQ ID NO: 39611 - DNA, 25 bp, Homo sapien
cttaaaaaaggtatagactacagac

SEQ ID NO: 39612 - DNA, 25 bp, Homo sapien
gtctgtagtctataccttttttaag

SEQ ID NO: 39613 - DNA, 25 bp, Homo sapien
acatttaacacaatagacttcttaa

SEQ ID NO: 39614 - DNA, 25 bp, Homo sapien
ttaagaagtctattgtgttaaatgt

SEQ ID NO: 39615 - DNA, 25 bp, Homo sapien
tcattcttccggataaataacgtaa

SEQ ID NO: 39616 - DNA, 25 bp, Homo sapien
ttacgttatttatccggaagaatga

SEQ ID NO: 39617 - DNA, 25 bp, Homo sapien
tcgaattcaggttacaggtccatat

SEQ ID NO: 39618 - DNA, 25 bp, Homo sapien
atatggacctgtaacctgaattcga

SEQ ID NO: 39619 - DNA, 25 bp, Homo sapien
ttttcatgtactactagggtgttag

SEQ ID NO: 39620 - DNA, 25 bp, Homo sapien
ctaacaccctagtagtacatgaaaa

SEQ ID NO: 39621 - DNA, 25 bp, Homo sapien
aaatattagacttgtgttcagtgta

SEQ ID NO: 39622 - DNA, 25 bp, Homo sapien
tacactgaacacaagtctaatattt

SEQ ID NO: 39623 - DNA, 25 bp, Homo sapien
tatccctggtgggaataagtcaaag

SEQ ID NO: 39624 - DNA, 25 bp, Homo sapien
ctttgacttattcccaccagggata

SEQ ID NO: 39625 - DNA, 25 bp, Homo sapien
ccatcacgaattgtcatttcggaag

SEQ ID NO: 39626 - DNA, 25 bp, Homo sapien
cttccgaaatgacaattcgtgatgg

SEQ ID NO: 39627 - DNA, 25 bp, Homo sapien
caccctccccggccgtctgtcgcgg

SEQ ID NO: 39628 - DNA, 25 bp, Homo sapien
ccgcgacagacggccggggagggtg

SEQ ID NO: 39629 - DNA, 25 bp, Homo sapien
accaatgtgaaaatctacgtcgacg

SEQ ID NO: 39630 - DNA, 25 bp, Homo sapien
cgtcgacgtagattttcacattggt

SEQ ID NO: 39631 - DNA, 25 bp, Homo sapien
attctcattctcattcataacaaag

SEQ ID NO: 39632 - DNA, 25 bp, Homo sapien
ctttgttatgaatgagaatgagaat

SEQ ID NO: 39633 - DNA, 25 bp, Homo sapien
tctctcttgctagcaatcccgaccc

SEQ ID NO: 39634 - DNA, 25 bp, Homo sapien
gggtcgggattgctagcaagagaga

SEQ ID NO: 39635 - DNA, 25 bp, Homo sapien
ggcaccactagggaggtgttcctcc

SEQ ID NO: 39636 - DNA, 25 bp, Homo sapien
ggaggaacacctccctagtggtgcc

SEQ ID NO: 39637 - DNA, 25 bp, Homo sapien
gtttcggagcctacagtcggggaga

SEQ ID NO: 39638 - DNA, 25 bp, Homo sapien
tctccccgactgtaggctccgaaac

SEQ ID NO: 39639 - DNA, 25 bp, Homo sapien
cggccgcgcggctccgtttcccggc

SEQ ID NO: 39640 - DNA, 25 bp, Homo sapien
gccgggaaacggagccgcgcggccg

SEQ ID NO: 39641 - DNA, 25 bp, Homo sapien
ttatacgttatgtactaacgaaact

SEQ ID NO: 39642 - DNA, 25 bp, Homo sapien
agtttcgttagtacataacgtataa

SEQ ID NO: 39643 - DNA, 25 bp, Homo sapien
gtgcacgccaagaggcgcctcgcga

SEQ ID NO: 39644 - DNA, 25 bp, Homo sapien
tcgcgaggcgcctcttggcgtgcac

SEQ ID NO: 39645 - DNA, 25 bp, Homo sapien
acattacacggtcttgtaagtgtaa

SEQ ID NO: 39646 - DNA, 25 bp, Homo sapien
ttacacttacaagaccgtgtaatgt

SEQ ID NO: 39647 - DNA, 25 bp, Homo sapien
gcgcgtgcgcaagggcggcgggcct

SEQ ID NO: 39648 - DNA, 25 bp, Homo sapien
aggcccgccgcccttgcgcacgcgc

SEQ ID NO: 39649 - DNA, 25 bp, Homo sapien
tccggcacagacaacggaaatctgt

SEQ ID NO: 39650 - DNA, 25 bp, Homo sapien
acagatttccgttgtctgtgccgga

SEQ ID NO: 39651 - DNA, 25 bp, Homo sapien
gttgtgcacgcgcccagtggtttgg

SEQ ID NO: 39652 - DNA, 25 bp, Homo sapien
ccaaaccactgggcgcgtgcacaac

SEQ ID NO: 39653 - DNA, 25 bp, Homo sapien
aatgttccacctgtagtcacgccaa

SEQ ID NO: 39654 - DNA, 25 bp, Homo sapien
ttggcgtgactacaggtggaacatt

SEQ ID NO: 39655 - DNA, 25 bp, Homo sapien
ttagtgaaagtatcgaactttcttt

SEQ ID NO: 39656 - DNA, 25 bp, Homo sapien
aaagaaagttcgatactttcactaa

SEQ ID NO: 39657 - DNA, 25 bp, Homo sapien
tcagttctttatgagattctcgttt

SEQ ID NO: 39658 - DNA, 25 bp, Homo sapien
aaacgagaatctcataaagaactga

SEQ ID NO: 39659 - DNA, 25 bp, Homo sapien
gctagatcgtgacgtcggcaggaac

SEQ ID NO: 39660 - DNA, 25 bp, Homo sapien
gttcctgccgacgtcacgatctagc

SEQ ID NO: 39661 - DNA, 25 bp, Homo sapien
acaggtccggccttgtgacacgagg

SEQ ID NO: 39662 - DNA, 25 bp, Homo sapien
cctcgtgtcacaaggccggacctgt

SEQ ID NO: 39663 - DNA, 25 bp, Homo sapien
tgttagaagacccagtaagcacagt

SEQ ID NO: 39664 - DNA, 25 bp, Homo sapien
actgtgcttactgggtcttctaaca

SEQ ID NO: 39665 - DNA, 25 bp, Homo sapien
atcgaccggcgagtgacagagccgt

SEQ ID NO: 39666 - DNA, 25 bp, Homo sapien
acggctctgtcactcgccggtcgat

SEQ ID NO: 39667 - DNA, 25 bp, Homo sapien
gacgttcttagtgacgtttactcac

SEQ ID NO: 39668 - DNA, 25 bp, Homo sapien
gtgagtaaacgtcactaagaacgtc

SEQ ID NO: 39669 - DNA, 25 bp, Homo sapien
acaaagaactccgtttacttcatgg

SEQ ID NO: 39670 - DNA, 25 bp, Homo sapien
ccatgaagtaaacggagttctttgt

SEQ ID NO: 39671 - DNA, 25 bp, Homo sapien
gatgtacctgggggccccgaagagg

SEQ ID NO: 39672 - DNA, 25 bp, Homo sapien
cctcttcggggcccccaggtacatc

SEQ ID NO: 39673 - DNA, 25 bp, Homo sapien
ttgtttatggttatggctcaggtac

SEQ ID NO: 39674 - DNA, 25 bp, Homo sapien
gtacctgagccataaccataaacaa

SEQ ID NO: 39675 - DNA, 25 bp, Homo sapien
tactcggtacgtcggcacgaggtct

SEQ ID NO: 39676 - DNA, 25 bp, Homo sapien
agacctcgtgccgacgtaccgagta

SEQ ID NO: 39677 - DNA, 25 bp, Homo sapien
cacgtttaagagaggtactcggtac

SEQ ID NO: 39678 - DNA, 25 bp, Homo sapien
gtaccgagtacctctcttaaacgtg

SEQ ID NO: 39679 - DNA, 25 bp, Homo sapien
tcaggaacggacacgttcttacggg

SEQ ID NO: 39680 - DNA, 25 bp, Homo sapien
cccgtaagaacgtgtccgttcctga

SEQ ID NO: 39681 - DNA, 25 bp, Homo sapien
cgtcgcccccacgtcgcccctctcg

SEQ ID NO: 39682 - DNA, 25 bp, Homo sapien
cgagaggggcgacgtgggggcgacg

SEQ ID NO: 39683 - DNA, 25 bp, Homo sapien
gacgcccgtcgcccccacgtcgccc

SEQ ID NO: 39684 - DNA, 25 bp, Homo sapien
gggcgacgtgggggcgacgggcgtc

SEQ ID NO: 39685 - DNA, 25 bp, Homo sapien
cctcaccgtcgtatcaaacttatag

SEQ ID NO: 39686 - DNA, 25 bp, Homo sapien
ctataagtttgatacgacggtgagg

SEQ ID NO: 39687 - DNA, 25 bp, Homo sapien
taaggtgaacagacctgacacgagg

SEQ ID NO: 39688 - DNA, 25 bp, Homo sapien
cctcgtgtcaggtctgttcacctta

SEQ ID NO: 39689 - DNA, 25 bp, Homo sapien
gaaaagccatcataagagcccaacg

SEQ ID NO: 39690 - DNA, 25 bp, Homo sapien
cgttgggctcttatgatggcttttc

SEQ ID NO: 39691 - DNA, 25 bp, Homo sapien
aattttataacaaaggtcactataa

SEQ ID NO: 39692 - DNA, 25 bp, Homo sapien
ttatagtgacctttgttataaaatt

SEQ ID NO: 39693 - DNA, 25 bp, Homo sapien
ggcgctacgcccacagaatggggtt

SEQ ID NO: 39694 - DNA, 25 bp, Homo sapien
aaccccattctgtgggcgtagcgcc

SEQ ID NO: 39695 - DNA, 25 bp, Homo sapien
agaacattaacctatctgacagggt

SEQ ID NO: 39696 - DNA, 25 bp, Homo sapien
accctgtcagataggttaatgttct

SEQ ID NO: 39697 - DNA, 25 bp, Homo sapien
acgagcaaacgagtaaagatagtct

SEQ ID NO: 39698 - DNA, 25 bp, Homo sapien
agactatctttactcgtttgctcgt

SEQ ID NO: 39699 - DNA, 25 bp, Homo sapien
cttcgccgcgagcgcgggcctgagg

SEQ ID NO: 39700 - DNA, 25 bp, Homo sapien
cctcaggcccgcgctcgcggcgaag

SEQ ID NO: 39701 - DNA, 25 bp, Homo sapien
tgtctatgtctcctgtattgggagt

SEQ ID NO: 39702 - DNA, 25 bp, Homo sapien
actcccaatacaggagacatagaca

SEQ ID NO: 39703 - DNA, 25 bp, Homo sapien
ccctcccccgccgacagcagcggcg

SEQ ID NO: 39704 - DNA, 25 bp, Homo sapien
cgccgctgctgtcggcgggggaggg

SEQ ID NO: 39705 - DNA, 25 bp, Homo sapien
tcccccgccgacagcagcggcggcg

SEQ ID NO: 39706 - DNA, 25 bp, Homo sapien
cgccgccgctgctgtcggcggggga

SEQ ID NO: 39707 - DNA, 25 bp, Homo sapien
ctcccccgccgacagcagcggcggc

SEQ ID NO: 39708 - DNA, 25 bp, Homo sapien
gccgccgctgctgtcggcgggggag

SEQ ID NO: 39709 - DNA, 25 bp, Homo sapien
cctcccccgccgacagcagcggcgg

SEQ ID NO: 39710 - DNA, 25 bp, Homo sapien
ccgccgctgctgtcggcgggggagg

SEQ ID NO: 39711 - DNA, 25 bp, Homo sapien
tccgagccagacgtatcttgggtgc

SEQ ID NO: 39712 - DNA, 25 bp, Homo sapien
gcacccaagatacgtctggctcgga

SEQ ID NO: 39713 - DNA, 25 bp, Homo sapien
tcatcacaggaaaataaaagtttat

SEQ ID NO: 39714 - DNA, 25 bp, Homo sapien
ataaacttttattttcctgtgatga

SEQ ID NO: 39715 - DNA, 25 bp, Homo sapien
ctccccgtgtccccgcgcacgtccc

SEQ ID NO: 39716 - DNA, 25 bp, Homo sapien
gggacgtgcgcggggacacggggag

SEQ ID NO: 39717 - DNA, 25 bp, Homo sapien
ttgagtaggacatagaaaccattgt

SEQ ID NO: 39718 - DNA, 25 bp, Homo sapien
acaatggtttctatgtcctactcaa

SEQ ID NO: 39719 - DNA, 25 bp, Homo sapien
atttagtccacgatgacgtggttgc

SEQ ID NO: 39720 - DNA, 25 bp, Homo sapien
gcaaccacgtcatcgtggactaaat

SEQ ID NO: 39721 - DNA, 25 bp, Homo sapien
acagtgtttctcagaaataaacgag

SEQ ID NO: 39722 - DNA, 25 bp, Homo sapien
ctcgtttatttctgagaaacactgt

SEQ ID NO: 39723 - DNA, 25 bp, Homo sapien
acggtcctcaaaagttcggagacac

SEQ ID NO: 39724 - DNA, 25 bp, Homo sapien
gtgtctccgaacttttgaggaccgt

SEQ ID NO: 39725 - DNA, 25 bp, Homo sapien
gtaacccacatgttaaccgttacag

SEQ ID NO: 39726 - DNA, 25 bp, Homo sapien
ctgtaacggttaacatgtgggttac

SEQ ID NO: 39727 - DNA, 25 bp, Homo sapien
atcaattttgattacatcctactac

SEQ ID NO: 39728 - DNA, 25 bp, Homo sapien
gtagtaggatgtaatcaaaattgat

SEQ ID NO: 39729 - DNA, 25 bp, Homo sapien
aagaagaagtgtgacactaagttcg

SEQ ID NO: 39730 - DNA, 25 bp, Homo sapien
cgaacttagtgtcacacttcttctt

SEQ ID NO: 39731 - DNA, 25 bp, Homo sapien
gaggtcagtgggccgccggcgggag

SEQ ID NO: 39732 - DNA, 25 bp, Homo sapien
ctcccgccggcggcccactgacctc

SEQ ID NO: 39733 - DNA, 25 bp, Homo sapien
ggaggtcagtgggccgccggcggga

SEQ ID NO: 39734 - DNA, 25 bp, Homo sapien
tcccgccggcggcccactgacctcc

SEQ ID NO: 39735 - DNA, 25 bp, Homo sapien
ggtcagtgggccgccggcgggaggc

SEQ ID NO: 39736 - DNA, 25 bp, Homo sapien
gcctcccgccggcggcccactgacc

SEQ ID NO: 39737 - DNA, 25 bp, Homo sapien
cttttgccagctatacctagagaag

SEQ ID NO: 39738 - DNA, 25 bp, Homo sapien
cttctctaggtatagctggcaaaag

SEQ ID NO: 39739 - DNA, 25 bp, Homo sapien
taaacagatgacggactcttagttt

SEQ ID NO: 39740 - DNA, 25 bp, Homo sapien
aaactaagagtccgtcatctgttta

SEQ ID NO: 39741 - DNA, 25 bp, Homo sapien
tataaacaaatataggcttcttctc

SEQ ID NO: 39742 - DNA, 25 bp, Homo sapien
gagaagaagcctatatttgtttata

SEQ ID NO: 39743 - DNA, 25 bp, Homo sapien
actttaacattatcgtgtgtcatcg

SEQ ID NO: 39744 - DNA, 25 bp, Homo sapien
cgatgacacacgataatgttaaagt

SEQ ID NO: 39745 - DNA, 25 bp, Homo sapien
ctctgtgtctttcagagtcatggta

SEQ ID NO: 39746 - DNA, 25 bp, Homo sapien
taccatgactctgaaagacacagag

SEQ ID NO: 39747 - DNA, 25 bp, Homo sapien
ggtcctggcgcctggcggcgcgcgt

SEQ ID NO: 39748 - DNA, 25 bp, Homo sapien
acgcgcgccgccaggcgccaggacc

SEQ ID NO: 39749 - DNA, 25 bp, Homo sapien
gggtcctggcgcctggcggcgcgcg

SEQ ID NO: 39750 - DNA, 25 bp, Homo sapien
cgcgcgccgccaggcgccaggaccc

SEQ ID NO: 39751 - DNA, 25 bp, Homo sapien
ttctccagaacccgcggacttctaa

SEQ ID NO: 39752 - DNA, 25 bp, Homo sapien
ttagaagtccgcgggttctggagaa

SEQ ID NO: 39753 - DNA, 25 bp, Homo sapien
ttcgggttcggaccgcgcgtctcac

SEQ ID NO: 39754 - DNA, 25 bp, Homo sapien
gtgagacgcgcggtccgaacccgaa

SEQ ID NO: 39755 - DNA, 25 bp, Homo sapien
gtgtccagaactttggaccatgtat

SEQ ID NO: 39756 - DNA, 25 bp, Homo sapien
atacatggtccaaagttctggacac

SEQ ID NO: 39757 - DNA, 25 bp, Homo sapien
agccagaggctcggcggtcggcggg

SEQ ID NO: 39758 - DNA, 25 bp, Homo sapien
cccgccgaccgccgagcctctggct

SEQ ID NO: 39759 - DNA, 25 bp, Homo sapien
cagccagaggctcggcggtcggcgg

SEQ ID NO: 39760 - DNA, 25 bp, Homo sapien
ccgccgaccgccgagcctctggctg

SEQ ID NO: 39761 - DNA, 25 bp, Homo sapien
atctgcgccccggcgctcggtggcc

SEQ ID NO: 39762 - DNA, 25 bp, Homo sapien
ggccaccgagcgccggggcgcagat

SEQ ID NO: 39763 - DNA, 25 bp, Homo sapien
cgtcccctgagctcggtctaggacg

SEQ ID NO: 39764 - DNA, 25 bp, Homo sapien
cgtcctagaccgagctcaggggacg

SEQ ID NO: 39765 - DNA, 25 bp, Homo sapien
cttcgcacgcgggagtgtggtccgc

SEQ ID NO: 39766 - DNA, 25 bp, Homo sapien
gcggaccacactcccgcgtgcgaag

SEQ ID NO: 39767 - DNA, 25 bp, Homo sapien
aaaacatcttcgtctaaattcttgg

SEQ ID NO: 39768 - DNA, 25 bp, Homo sapien
ccaagaatttagacgaagatgtttt

SEQ ID NO: 39769 - DNA, 25 bp, Homo sapien
agactacaactggtcgacgacgggt

SEQ ID NO: 39770 - DNA, 25 bp, Homo sapien
acccgtcgtcgaccagttgtagtct

SEQ ID NO: 39771 - DNA, 25 bp, Homo sapien
gttctcggtaacgcctacaaagagg

SEQ ID NO: 39772 - DNA, 25 bp, Homo sapien
cctctttgtaggcgttaccgagaac

SEQ ID NO: 39773 - DNA, 25 bp, Homo sapien
agtggagatgccgactgggggaagg

SEQ ID NO: 39774 - DNA, 25 bp, Homo sapien
ccttcccccagtcggcatctccact

SEQ ID NO: 39775 - DNA, 25 bp, Homo sapien
taatggtctaattatgggactttat

SEQ ID NO: 39776 - DNA, 25 bp, Homo sapien
ataaagtcccataattagaccatta

SEQ ID NO: 39777 - DNA, 25 bp, Homo sapien
gtctctgacgaaggtgtccaacaca

SEQ ID NO: 39778 - DNA, 25 bp, Homo sapien
tgtgttggacaccttcgtcagagac

SEQ ID NO: 39779 - DNA, 25 bp, Homo sapien
acacaatttaattatcgatggacat

SEQ ID NO: 39780 - DNA, 25 bp, Homo sapien
atgtccatcgataattaaattgtgt

SEQ ID NO: 39781 - DNA, 25 bp, Homo sapien
atactcattcttatcattgttcggt

SEQ ID NO: 39782 - DNA, 25 bp, Homo sapien
accgaacaatgataagaatgagtat

SEQ ID NO: 39783 - DNA, 25 bp, Homo sapien
acggactcgttacttcatctactct

SEQ ID NO: 39784 - DNA, 25 bp, Homo sapien
agagtagatgaagtaacgagtccgt

SEQ ID NO: 39785 - DNA, 25 bp, Homo sapien
cttattagacttgttgaagtcttga

SEQ ID NO: 39786 - DNA, 25 bp, Homo sapien
tcaagacttcaacaagtctaataag

SEQ ID NO: 39787 - DNA, 25 bp, Homo sapien
gccgaggaggtactgggccgcggga

SEQ ID NO: 39788 - DNA, 25 bp, Homo sapien
tcccgcggcccagtacctcctcggc

SEQ ID NO: 39789 - DNA, 25 bp, Homo sapien
cgagtaaagtaagtctttctggtaa

SEQ ID NO: 39790 - DNA, 25 bp, Homo sapien
ttaccagaaagacttactttactcg

SEQ ID NO: 39791 - DNA, 25 bp, Homo sapien
actacacgagtaaagtaagtctttc

SEQ ID NO: 39792 - DNA, 25 bp, Homo sapien
gaaagacttactttactcgtgtagt

SEQ ID NO: 39793 - DNA, 25 bp, Homo sapien
atgtattattctgggaaaaacctat

SEQ ID NO: 39794 - DNA, 25 bp, Homo sapien
ataggtttttcccagaataatacat

SEQ ID NO: 39795 - DNA, 25 bp, Homo sapien
attgtgacagcatgactacaccttt

SEQ ID NO: 39796 - DNA, 25 bp, Homo sapien
aaaggtgtagtcatgctgtcacaat

SEQ ID NO: 39797 - DNA, 25 bp, Homo sapien
ggttttcgttggtaggagtcccatc

SEQ ID NO: 39798 - DNA, 25 bp, Homo sapien
gatgggactcctaccaacgaaaacc

SEQ ID NO: 39799 - DNA, 25 bp, Homo sapien
taataagaatgcatgacaaacaaga

SEQ ID NO: 39800 - DNA, 25 bp, Homo sapien
tcttgtttgtcatgcattcttatta

SEQ ID NO: 39801 - DNA, 25 bp, Homo sapien
gtgtgcaggtccttggacttatcgg

SEQ ID NO: 39802 - DNA, 25 bp, Homo sapien
ccgataagtccaaggacctgcacac

SEQ ID NO: 39803 - DNA, 25 bp, Homo sapien
gagtcagagtactagaaatttaaat

SEQ ID NO: 39804 - DNA, 25 bp, Homo sapien
atttaaatttctagtactctgactc

SEQ ID NO: 39805 - DNA, 25 bp, Homo sapien
aacccaacactgaacccatggtgta

SEQ ID NO: 39806 - DNA, 25 bp, Homo sapien
tacaccatgggttcagtgttgggtt

SEQ ID NO: 39807 - DNA, 25 bp, Homo sapien
tgaaacattacgtgacactttataa

SEQ ID NO: 39808 - DNA, 25 bp, Homo sapien
ttataaagtgtcacgtaatgtttca

SEQ ID NO: 39809 - DNA, 25 bp, Homo sapien
ttatatcttatagaaggccaaggga

SEQ ID NO: 39810 - DNA, 25 bp, Homo sapien
tcccttggccttctataagatataa

SEQ ID NO: 39811 - DNA, 25 bp, Homo sapien
tactcttataaaatctagactcaat

SEQ ID NO: 39812 - DNA, 25 bp, Homo sapien
attgagtctagattttataagagta

SEQ ID NO: 39813 - DNA, 25 bp, Homo sapien
gaccgcctgcgccctgccccgaccc

SEQ ID NO: 39814 - DNA, 25 bp, Homo sapien
gggtcggggcagggcgcaggcggtc

SEQ ID NO: 39815 - DNA, 25 bp, Homo sapien
gttagagaagtgttcgaggttttat

SEQ ID NO: 39816 - DNA, 25 bp, Homo sapien
ataaaacctcgaacacttctctaac

SEQ ID NO: 39817 - DNA, 25 bp, Homo sapien
ccctgggttccctgtgtctcttccg

SEQ ID NO: 39818 - DNA, 25 bp, Homo sapien
cggaagagacacagggaacccaggg

SEQ ID NO: 39819 - DNA, 25 bp, Homo sapien
tttgtggacttaattctacaaaaat

SEQ ID NO: 39820 - DNA, 25 bp, Homo sapien
atttttgtagaattaagtccacaaa

SEQ ID NO: 39821 - DNA, 25 bp, Homo sapien
tcggacgagggtttatacagggata

SEQ ID NO: 39822 - DNA, 25 bp, Homo sapien
tatccctgtataaaccctcgtccga

SEQ ID NO: 39823 - DNA, 25 bp, Homo sapien
cagaaacggtgtatttaagtataag

SEQ ID NO: 39824 - DNA, 25 bp, Homo sapien
cttatacttaaatacaccgtttctg

SEQ ID NO: 39825 - DNA, 25 bp, Homo sapien
accgacacttcggtgtcgacggcat

SEQ ID NO: 39826 - DNA, 25 bp, Homo sapien
atgccgtcgacaccgaagtgtcggt

SEQ ID NO: 39827 - DNA, 25 bp, Homo sapien
caacgttccgtaaattgtgacaata

SEQ ID NO: 39828 - DNA, 25 bp, Homo sapien
tattgtcacaatttacggaacgttg

SEQ ID NO: 39829 - DNA, 25 bp, Homo sapien
gcggtcgtctgcctcggacctgcgg

SEQ ID NO: 39830 - DNA, 25 bp, Homo sapien
ccgcaggtccgaggcagacgaccgc

SEQ ID NO: 39831 - DNA, 25 bp, Homo sapien
ccgtatctttcgacacttaacggct

SEQ ID NO: 39832 - DNA, 25 bp, Homo sapien
agccgttaagtgtcgaaagatacgg

SEQ ID NO: 39833 - DNA, 25 bp, Homo sapien
aggccagcggcggccgtccgtctcc

SEQ ID NO: 39834 - DNA, 25 bp, Homo sapien
ggagacggacggccgccgctggcct

SEQ ID NO: 39835 - DNA, 25 bp, Homo sapien
cctcgacaggccagcggcggccgtc

SEQ ID NO: 39836 - DNA, 25 bp, Homo sapien
gacggccgccgctggcctgtcgagg

SEQ ID NO: 39837 - DNA, 25 bp, Homo sapien
ccctcgacaggccagcggcggccgt

SEQ ID NO: 39838 - DNA, 25 bp, Homo sapien
acggccgccgctggcctgtcgaggg

SEQ ID NO: 39839 - DNA, 25 bp, Homo sapien
tgatttcttccgtatttccgcatta

SEQ ID NO: 39840 - DNA, 25 bp, Homo sapien
taatgcggaaatacggaagaaatca

SEQ ID NO: 39841 - DNA, 25 bp, Homo sapien
acccttccagagactcaggtgcaga

SEQ ID NO: 39842 - DNA, 25 bp, Homo sapien
tctgcacctgagtctctggaagggt

SEQ ID NO: 39843 - DNA, 25 bp, Homo sapien
acctcgtcgacatatctataaataa

SEQ ID NO: 39844 - DNA, 25 bp, Homo sapien
ttatttatagatatgtcgacgaggt

SEQ ID NO: 39845 - DNA, 25 bp, Homo sapien
ggagaccgtcgtgctcgactatcct

SEQ ID NO: 39846 - DNA, 25 bp, Homo sapien
aggatagtcgagcacgacggtctcc

SEQ ID NO: 39847 - DNA, 25 bp, Homo sapien
gtgtattaaatatcaggtatggttc

SEQ ID NO: 39848 - DNA, 25 bp, Homo sapien
gaaccatacctgatatttaatacac

SEQ ID NO: 39849 - DNA, 25 bp, Homo sapien
ttagaggttagactaacagtagtaa

SEQ ID NO: 39850 - DNA, 25 bp, Homo sapien
ttactactgttagtctaacctctaa

SEQ ID NO: 39851 - DNA, 25 bp, Homo sapien
gtgtcgtcggcagggccgaaggttc

SEQ ID NO: 39852 - DNA, 25 bp, Homo sapien
gaaccttcggccctgccgacgacac

SEQ ID NO: 39853 - DNA, 25 bp, Homo sapien
tcttcgtacgattttatgaagaaaa

SEQ ID NO: 39854 - DNA, 25 bp, Homo sapien
ttttcttcataaaatcgtacgaaga

SEQ ID NO: 39855 - DNA, 25 bp, Homo sapien
tcgacctatgagtaacggacggtgg

SEQ ID NO: 39856 - DNA, 25 bp, Homo sapien
ccaccgtccgttactcataggtcga

SEQ ID NO: 39857 - DNA, 25 bp, Homo sapien
gaatccgaaccttgttgttactgga

SEQ ID NO: 39858 - DNA, 25 bp, Homo sapien
tccagtaacaacaaggttcggattc

SEQ ID NO: 39859 - DNA, 25 bp, Homo sapien
aattataatcttttaacatttcgct

SEQ ID NO: 39860 - DNA, 25 bp, Homo sapien
agcgaaatgttaaaagattataatt

SEQ ID NO: 39861 - DNA, 25 bp, Homo sapien
ggtcctcggacgttcgcgtccgacg

SEQ ID NO: 39862 - DNA, 25 bp, Homo sapien
cgtcggacgcgaacgtccgaggacc

SEQ ID NO: 39863 - DNA, 25 bp, Homo sapien
gtacggagccagagcctacagggtg

SEQ ID NO: 39864 - DNA, 25 bp, Homo sapien
caccctgtaggctctggctccgtac

SEQ ID NO: 39865 - DNA, 25 bp, Homo sapien
acctcgtttccttgctgtggtccga

SEQ ID NO: 39866 - DNA, 25 bp, Homo sapien
tcggaccacagcaaggaaacgaggt

SEQ ID NO: 39867 - DNA, 25 bp, Homo sapien
ggcatcattggttcccgggtcttct

SEQ ID NO: 39868 - DNA, 25 bp, Homo sapien
agaagacccgggaaccaatgatgcc

SEQ ID NO: 39869 - DNA, 25 bp, Homo sapien
tgtctacggacaagcaagacgtcgg

SEQ ID NO: 39870 - DNA, 25 bp, Homo sapien
ccgacgtcttgcttgtccgtagaca

SEQ ID NO: 39871 - DNA, 25 bp, Homo sapien
gcaaccgttttagctagtcgacttg

SEQ ID NO: 39872 - DNA, 25 bp, Homo sapien
caagtcgactagctaaaacggttgc

SEQ ID NO: 39873 - DNA, 25 bp, Homo sapien
gataattttgttcacctttgtgatc

SEQ ID NO: 39874 - DNA, 25 bp, Homo sapien
gatcacaaaggtgaacaaaattatc

SEQ ID NO: 39875 - DNA, 25 bp, Homo sapien
taacaattacatattctctacatct

SEQ ID NO: 39876 - DNA, 25 bp, Homo sapien
agatgtagagaatatgtaattgtta

SEQ ID NO: 39877 - DNA, 25 bp, Homo sapien
aacctgggttctgagcgtcgagtcc

SEQ ID NO: 39878 - DNA, 25 bp, Homo sapien
ggactcgacgctcagaacccaggtt

SEQ ID NO: 39879 - DNA, 25 bp, Homo sapien
gattattacaggactctcgaacgag

SEQ ID NO: 39880 - DNA, 25 bp, Homo sapien
ctcgttcgagagtcctgtaataatc

SEQ ID NO: 39881 - DNA, 25 bp, Homo sapien
gtaaagttcaaacatatttatcatg

SEQ ID NO: 39882 - DNA, 25 bp, Homo sapien
catgataaatatgtttgaactttac

SEQ ID NO: 39883 - DNA, 25 bp, Homo sapien
agtaaagttcaaacatatttatcat

SEQ ID NO: 39884 - DNA, 25 bp, Homo sapien
atgataaatatgtttgaactttact

SEQ ID NO: 39885 - DNA, 25 bp, Homo sapien
ttccgtatatccacccgaccagtat

SEQ ID NO: 39886 - DNA, 25 bp, Homo sapien
atactggtcgggtggatatacggaa

SEQ ID NO: 39887 - DNA, 25 bp, Homo sapien
ggcggactgaggccccggctccgcc

SEQ ID NO: 39888 - DNA, 25 bp, Homo sapien
ggcggagccggggcctcagtccgcc

SEQ ID NO: 39889 - DNA, 25 bp, Homo sapien
gtgttatccgaacccaacctgagag

SEQ ID NO: 39890 - DNA, 25 bp, Homo sapien
ctctcaggttgggttcggataacac

SEQ ID NO: 39891 - DNA, 25 bp, Homo sapien
tattctagtcaatgtaactacaaca

SEQ ID NO: 39892 - DNA, 25 bp, Homo sapien
tgttgtagttacattgactagaata

SEQ ID NO: 39893 - DNA, 25 bp, Homo sapien
aggtctgacgacttgaggtaccgac

SEQ ID NO: 39894 - DNA, 25 bp, Homo sapien
gtcggtacctcaagtcgtcagacct

SEQ ID NO: 39895 - DNA, 25 bp, Homo sapien
ccatgacatgtactgtacttaaaac

SEQ ID NO: 39896 - DNA, 25 bp, Homo sapien
gttttaagtacagtacatgtcatgg

SEQ ID NO: 39897 - DNA, 25 bp, Homo sapien
tcggtcggctctctcgtggccgact

SEQ ID NO: 39898 - DNA, 25 bp, Homo sapien
agtcggccacgagagagccgaccga

SEQ ID NO: 39899 - DNA, 25 bp, Homo sapien
atccgtgtcccgctatggcacatgt

SEQ ID NO: 39900 - DNA, 25 bp, Homo sapien
acatgtgccatagcgggacacggat

SEQ ID NO: 39901 - DNA, 25 bp, Homo sapien
cctataaggtctcaatagtagtaat

SEQ ID NO: 39902 - DNA, 25 bp, Homo sapien
attactactattgagaccttatagg

SEQ ID NO: 39903 - DNA, 25 bp, Homo sapien
agatgttggtccacataggaattac

SEQ ID NO: 39904 - DNA, 25 bp, Homo sapien
gtaattcctatgtggaccaacatct

SEQ ID NO: 39905 - DNA, 25 bp, Homo sapien
cagaagacgaagtcaatcgagaagt

SEQ ID NO: 39906 - DNA, 25 bp, Homo sapien
acttctcgattgacttcgtcttctg

SEQ ID NO: 39907 - DNA, 25 bp, Homo sapien
aagttactatcggaaaaacagacaa

SEQ ID NO: 39908 - DNA, 25 bp, Homo sapien
ttgtctgtttttccgatagtaactt

SEQ ID NO: 39909 - DNA, 25 bp, Homo sapien
tttaacttcatttactcataaaatg

SEQ ID NO: 39910 - DNA, 25 bp, Homo sapien
cattttatgagtaaatgaagttaaa

SEQ ID NO: 39911 - DNA, 25 bp, Homo sapien
tgagcttctcaaatgtcgacgcgac

SEQ ID NO: 39912 - DNA, 25 bp, Homo sapien
gtcgcgtcgacatttgagaagctca

SEQ ID NO: 39913 - DNA, 25 bp, Homo sapien
ccggacgtcaggcaggtgttactct

SEQ ID NO: 39914 - DNA, 25 bp, Homo sapien
agagtaacacctgcctgacgtccgg

SEQ ID NO: 39915 - DNA, 25 bp, Homo sapien
gtgcaatagaattcccacttaagaa

SEQ ID NO: 39916 - DNA, 25 bp, Homo sapien
ttcttaagtgggaattctattgcac

SEQ ID NO: 39917 - DNA, 25 bp, Homo sapien
tgtaggccgaactgttactccgcgc

SEQ ID NO: 39918 - DNA, 25 bp, Homo sapien
gcgcggagtaacagttcggcctaca

SEQ ID NO: 39919 - DNA, 25 bp, Homo sapien
gatctcacctcttataacggaaagt

SEQ ID NO: 39920 - DNA, 25 bp, Homo sapien
actttccgttataagaggtgagatc

SEQ ID NO: 39921 - DNA, 25 bp, Homo sapien
gcactctacgggtctcgccccggga

SEQ ID NO: 39922 - DNA, 25 bp, Homo sapien
tcccggggcgagacccgtagagtgc

SEQ ID NO: 39923 - DNA, 25 bp, Homo sapien
gagtacgtcatagttcataaacctt

SEQ ID NO: 39924 - DNA, 25 bp, Homo sapien
aaggtttatgaactatgacgtactc

SEQ ID NO: 39925 - DNA, 25 bp, Homo sapien
atgggtcaaattgtatatacctcag

SEQ ID NO: 39926 - DNA, 25 bp, Homo sapien
ctgaggtatatacaatttgacccat

SEQ ID NO: 39927 - DNA, 25 bp, Homo sapien
ctatacacgtaggtaaaaatagagt

SEQ ID NO: 39928 - DNA, 25 bp, Homo sapien
actctatttttacctacgtgtatag

SEQ ID NO: 39929 - DNA, 25 bp, Homo sapien
cactataaaaggtagtcaacaaaag

SEQ ID NO: 39930 - DNA, 25 bp, Homo sapien
cttttgttgactaccttttatagtg

SEQ ID NO: 39931 - DNA, 25 bp, Homo sapien
tgaagtggttgggctttcctaaggt

SEQ ID NO: 39932 - DNA, 25 bp, Homo sapien
accttaggaaagcccaaccacttca

SEQ ID NO: 39933 - DNA, 25 bp, Homo sapien
caagttaagatctacgaaataatag

SEQ ID NO: 39934 - DNA, 25 bp, Homo sapien
ctattatttcgtagatcttaacttg

SEQ ID NO: 39935 - DNA, 25 bp, Homo sapien
gcttgacacgttcgtagaaaggtac

SEQ ID NO: 39936 - DNA, 25 bp, Homo sapien
gtacctttctacgaacgtgtcaagc

SEQ ID NO: 39937 - DNA, 25 bp, Homo sapien
atcaaacctctaactacagtggtgg

SEQ ID NO: 39938 - DNA, 25 bp, Homo sapien
ccaccactgtagttagaggtttgat

SEQ ID NO: 39939 - DNA, 25 bp, Homo sapien
ggggaacggcacgggtcgcactacc

SEQ ID NO: 39940 - DNA, 25 bp, Homo sapien
ggtagtgcgacccgtgccgttcccc

SEQ ID NO: 39941 - DNA, 25 bp, Homo sapien
tgtctcttgaaagatatctctcgag

SEQ ID NO: 39942 - DNA, 25 bp, Homo sapien
ctcgagagatatctttcaagagaca

SEQ ID NO: 39943 - DNA, 25 bp, Homo sapien
tccccggtctggggccgagacaaga

SEQ ID NO: 39944 - DNA, 25 bp, Homo sapien
tcttgtctcggccccagaccgggga

SEQ ID NO: 39945 - DNA, 25 bp, Homo sapien
gctccactctagtcgtcttcgcctt

SEQ ID NO: 39946 - DNA, 25 bp, Homo sapien
aaggcgaagacgactagagtggagc

SEQ ID NO: 39947 - DNA, 25 bp, Homo sapien
aaagaagtcgagtttcatttgtggg

SEQ ID NO: 39948 - DNA, 25 bp, Homo sapien
cccacaaatgaaactcgacttcttt

SEQ ID NO: 39949 - DNA, 25 bp, Homo sapien
cggaccgaggccgatccgaagcgcc

SEQ ID NO: 39950 - DNA, 25 bp, Homo sapien
ggcgcttcggatcggcctcggtccg

SEQ ID NO: 39951 - DNA, 25 bp, Homo sapien
acgtcgagtcgggtgcgcgggcggc

SEQ ID NO: 39952 - DNA, 25 bp, Homo sapien
gccgcccgcgcacccgactcgacgt

SEQ ID NO: 39953 - DNA, 25 bp, Homo sapien
cttcacgggtcacaactaaagtcgt

SEQ ID NO: 39954 - DNA, 25 bp, Homo sapien
acgactttagttgtgacccgtgaag

SEQ ID NO: 39955 - DNA, 25 bp, Homo sapien
ccgccaccgtgctagccgcgggcgc

SEQ ID NO: 39956 - DNA, 25 bp, Homo sapien
gcgcccgcggctagcacggtggcgg

SEQ ID NO: 39957 - DNA, 25 bp, Homo sapien
gcgcgtcggggcttgagtccgccgc

SEQ ID NO: 39958 - DNA, 25 bp, Homo sapien
gcggcggactcaagccccgacgcgc

SEQ ID NO: 39959 - DNA, 25 bp, Homo sapien
gggtgcgggtccgtgggcgcgtcgg

SEQ ID NO: 39960 - DNA, 25 bp, Homo sapien
ccgacgcgcccacggacccgcaccc

SEQ ID NO: 39961 - DNA, 25 bp, Homo sapien
ttgacggtaatctcggaatccgctt

SEQ ID NO: 39962 - DNA, 25 bp, Homo sapien
aagcggattccgagattaccgtcaa

SEQ ID NO: 39963 - DNA, 25 bp, Homo sapien
ccatcgactcggtagtcgctcctgt

SEQ ID NO: 39964 - DNA, 25 bp, Homo sapien
acaggagcgactaccgagtcgatgg

SEQ ID NO: 39965 - DNA, 25 bp, Homo sapien
agagttcttacaacacgtgaatagg

SEQ ID NO: 39966 - DNA, 25 bp, Homo sapien
cctattcacgtgttgtaagaactct

SEQ ID NO: 39967 - DNA, 25 bp, Homo sapien
ttacattgtcattaataaaggaaat

SEQ ID NO: 39968 - DNA, 25 bp, Homo sapien
atttcctttattaatgacaatgtaa

SEQ ID NO: 39969 - DNA, 25 bp, Homo sapien
gataggtatgagtctttagaaagac

SEQ ID NO: 39970 - DNA, 25 bp, Homo sapien
gtctttctaaagactcatacctatc

SEQ ID NO: 39971 - DNA, 25 bp, Homo sapien
cctactcatactagcagggtcgact

SEQ ID NO: 39972 - DNA, 25 bp, Homo sapien
agtcgaccctgctagtatgagtagg

SEQ ID NO: 39973 - DNA, 25 bp, Homo sapien
agagggatacacgagtcagtttacg

SEQ ID NO: 39974 - DNA, 25 bp, Homo sapien
cgtaaactgactcgtgtatccctct

SEQ ID NO: 39975 - DNA, 25 bp, Homo sapien
tctgacaataaacttgtagatctcg

SEQ ID NO: 39976 - DNA, 25 bp, Homo sapien
cgagatctacaagtttattgtcaga

SEQ ID NO: 39977 - DNA, 25 bp, Homo sapien
tcaacgtctaagtgtgactccactc

SEQ ID NO: 39978 - DNA, 25 bp, Homo sapien
gagtggagtcacacttagacgttga

SEQ ID NO: 39979 - DNA, 25 bp, Homo sapien
acactatcagcaatatgaaaattaa

SEQ ID NO: 39980 - DNA, 25 bp, Homo sapien
ttaattttcatattgctgatagtgt

SEQ ID NO: 39981 - DNA, 25 bp, Homo sapien
actatcagcaatatgaaaattaatg

SEQ ID NO: 39982 - DNA, 25 bp, Homo sapien
cattaattttcatattgctgatagt

SEQ ID NO: 39983 - DNA, 25 bp, Homo sapien
gaaggatctccctcgtcgcgggggt

SEQ ID NO: 39984 - DNA, 25 bp, Homo sapien
acccccgcgacgagggagatccttc

SEQ ID NO: 39985 - DNA, 25 bp, Homo sapien
ctccaagtggtagtggttgacagta

SEQ ID NO: 39986 - DNA, 25 bp, Homo sapien
tactgtcaaccactaccacttggag

SEQ ID NO: 39987 - DNA, 25 bp, Homo sapien
taaggattacaaaatattcttgttt

SEQ ID NO: 39988 - DNA, 25 bp, Homo sapien
aaacaagaatattttgtaatcctta

SEQ ID NO: 39989 - DNA, 25 bp, Homo sapien
ataaggattacaaaatattcttgtt

SEQ ID NO: 39990 - DNA, 25 bp, Homo sapien
aacaagaatattttgtaatccttat

SEQ ID NO: 39991 - DNA, 25 bp, Homo sapien
aataaggattacaaaatattcttgt

SEQ ID NO: 39992 - DNA, 25 bp, Homo sapien
acaagaatattttgtaatccttatt

SEQ ID NO: 39993 - DNA, 25 bp, Homo sapien
cacaccgagagtctgagagaccctc

SEQ ID NO: 39994 - DNA, 25 bp, Homo sapien
gagggtctctcagactctcggtgtg

SEQ ID NO: 39995 - DNA, 25 bp, Homo sapien
acttcgttaacgttgttcagttatg

SEQ ID NO: 39996 - DNA, 25 bp, Homo sapien
cataactgaacaacgttaacgaagt

SEQ ID NO: 39997 - DNA, 25 bp, Homo sapien
atctcgcccctttccctaagaggtg

SEQ ID NO: 39998 - DNA, 25 bp, Homo sapien
cacctcttagggaaaggggcgagat

SEQ ID NO: 39999 - DNA, 25 bp, Homo sapien
atttatatccttgtgtaaaagagta

SEQ ID NO: 40000 - DNA, 25 bp, Homo sapien
tactcttttacacaaggatataaat

SEQ ID NO: 40001 - DNA, 25 bp, Homo sapien
gacacaacagttgtcggtcggggtc

SEQ ID NO: 40002 - DNA, 25 bp, Homo sapien
gaccccgaccgacaactgttgtgtc

SEQ ID NO: 40003 - DNA, 25 bp, Homo sapien
tgtcggacccagatcccgaggtcga

SEQ ID NO: 40004 - DNA, 25 bp, Homo sapien
tcgacctcgggatctgggtccgaca

SEQ ID NO: 40005 - DNA, 25 bp, Homo sapien
ccggcggtggctccggagcggaacg

SEQ ID NO: 40006 - DNA, 25 bp, Homo sapien
cgttccgctccggagccaccgccgg

SEQ ID NO: 40007 - DNA, 25 bp, Homo sapien
accggcggtggctccggagcggaac

SEQ ID NO: 40008 - DNA, 25 bp, Homo sapien
gttccgctccggagccaccgccggt

SEQ ID NO: 40009 - DNA, 25 bp, Homo sapien
cttacagatctcgtgccaagaagcg

SEQ ID NO: 40010 - DNA, 25 bp, Homo sapien
cgcttcttggcacgagatctgtaag

SEQ ID NO: 40011 - DNA, 25 bp, Homo sapien
cttcggagaagatcctaggaatcac

SEQ ID NO: 40012 - DNA, 25 bp, Homo sapien
gtgattcctaggatcttctccgaag

SEQ ID NO: 40013 - DNA, 25 bp, Homo sapien
gacgctcacccgcccacccagcgag

SEQ ID NO: 40014 - DNA, 25 bp, Homo sapien
ctcgctgggtgggcgggtgagcgtc

SEQ ID NO: 40015 - DNA, 25 bp, Homo sapien
ttaacatttgtttccatagtattat

SEQ ID NO: 40016 - DNA, 25 bp, Homo sapien
ataatactatggaaacaaatgttaa

SEQ ID NO: 40017 - DNA, 25 bp, Homo sapien
aacatttgtttccatagtattataa

SEQ ID NO: 40018 - DNA, 25 bp, Homo sapien
ttataatactatggaaacaaatgtt

SEQ ID NO: 40019 - DNA, 25 bp, Homo sapien
taacatttgtttccatagtattata

SEQ ID NO: 40020 - DNA, 25 bp, Homo sapien
tataatactatggaaacaaatgtta

SEQ ID NO: 40021 - DNA, 25 bp, Homo sapien
ctgtctctttcctcgggccggaggg

SEQ ID NO: 40022 - DNA, 25 bp, Homo sapien
ccctccggcccgaggaaagagacag

SEQ ID NO: 40023 - DNA, 25 bp, Homo sapien
gaccaccaccgtcggcgggtggtcc

SEQ ID NO: 40024 - DNA, 25 bp, Homo sapien
ggaccacccgccgacggtggtggtc

SEQ ID NO: 40025 - DNA, 25 bp, Homo sapien
aaaaacaactctcttggagttagag

SEQ ID NO: 40026 - DNA, 25 bp, Homo sapien
ctctaactccaagagagttgttttt

SEQ ID NO: 40027 - DNA, 25 bp, Homo sapien
gactatgtctttatcgattaggaag

SEQ ID NO: 40028 - DNA, 25 bp, Homo sapien
cttcctaatcgataaagacatagtc

SEQ ID NO: 40029 - DNA, 25 bp, Homo sapien
aaggaacttacaatctcagtcatgg

SEQ ID NO: 40030 - DNA, 25 bp, Homo sapien
ccatgactgagattgtaagttcctt

SEQ ID NO: 40031 - DNA, 25 bp, Homo sapien
ggcacccttggcgacccgtcaccgt

SEQ ID NO: 40032 - DNA, 25 bp, Homo sapien
acggtgacgggtcgccaagggtgcc

SEQ ID NO: 40033 - DNA, 25 bp, Homo sapien
gacgcccggcacccttggcgacccg

SEQ ID NO: 40034 - DNA, 25 bp, Homo sapien
cgggtcgccaagggtgccgggcgtc

SEQ ID NO: 40035 - DNA, 25 bp, Homo sapien
gacacaaaatgacggttgagactag

SEQ ID NO: 40036 - DNA, 25 bp, Homo sapien
ctagtctcaaccgtcattttgtgtc

SEQ ID NO: 40037 - DNA, 25 bp, Homo sapien
cgaccccgggtccaggtgcaggatg

SEQ ID NO: 40038 - DNA, 25 bp, Homo sapien
catcctgcacctggacccggggtcg

SEQ ID NO: 40039 - DNA, 25 bp, Homo sapien
tccccgaccccgggtccaggtgcag

SEQ ID NO: 40040 - DNA, 25 bp, Homo sapien
ctgcacctggacccggggtcgggga

SEQ ID NO: 40041 - DNA, 25 bp, Homo sapien
gcggccgcggagcaatcccggcccg

SEQ ID NO: 40042 - DNA, 25 bp, Homo sapien
cgggccgggattgctccgcggccgc

SEQ ID NO: 40043 - DNA, 25 bp, Homo sapien
acgcggccgcggagcaatcccggcc

SEQ ID NO: 40044 - DNA, 25 bp, Homo sapien
ggccgggattgctccgcggccgcgt

SEQ ID NO: 40045 - DNA, 25 bp, Homo sapien
gaacgtggacacgtgacaaaaaaca

SEQ ID NO: 40046 - DNA, 25 bp, Homo sapien
tgttttttgtcacgtgtccacgttc

SEQ ID NO: 40047 - DNA, 25 bp, Homo sapien
aattttcgcgtgtaggtgaagtcga

SEQ ID NO: 40048 - DNA, 25 bp, Homo sapien
tcgacttcacctacacgcgaaaatt

SEQ ID NO: 40049 - DNA, 25 bp, Homo sapien
accctgttgtcgttcttctcaacgc

SEQ ID NO: 40050 - DNA, 25 bp, Homo sapien
gcgttgagaagaacgacaacagggt

SEQ ID NO: 40051 - DNA, 25 bp, Homo sapien
taatacgaaactgtgaagtgttcac

SEQ ID NO: 40052 - DNA, 25 bp, Homo sapien
gtgaacacttcacagtttcgtatta

SEQ ID NO: 40053 - DNA, 25 bp, Homo sapien
tgccccgccctttaccggacgcacc

SEQ ID NO: 40054 - DNA, 25 bp, Homo sapien
ggtgcgtccggtaaagggcggggca

SEQ ID NO: 40055 - DNA, 25 bp, Homo sapien
gggcgccatcgagcgggcgcacccg

SEQ ID NO: 40056 - DNA, 25 bp, Homo sapien
cgggtgcgcccgctcgatggcgccc

SEQ ID NO: 40057 - DNA, 25 bp, Homo sapien
tctttatggtcgtcccggactgcac

SEQ ID NO: 40058 - DNA, 25 bp, Homo sapien
gtgcagtccgggacgaccataaaga

SEQ ID NO: 40059 - DNA, 25 bp, Homo sapien
tttctcctaggggagcgggaggacc

SEQ ID NO: 40060 - DNA, 25 bp, Homo sapien
ggtcctcccgctcccctaggagaaa

SEQ ID NO: 40061 - DNA, 25 bp, Homo sapien
accgaaatagatatgattccaatag

SEQ ID NO: 40062 - DNA, 25 bp, Homo sapien
ctattggaatcatatctatttcggt

SEQ ID NO: 40063 - DNA, 25 bp, Homo sapien
acttaacactactactatcatccgt

SEQ ID NO: 40064 - DNA, 25 bp, Homo sapien
acggatgatagtagtagtgttaagt

SEQ ID NO: 40065 - DNA, 25 bp, Homo sapien
ttatttactttcaccactaattccg

SEQ ID NO: 40066 - DNA, 25 bp, Homo sapien
cggaattagtggtgaaagtaaataa

SEQ ID NO: 40067 - DNA, 25 bp, Homo sapien
agacgccctggactctccaaagagt

SEQ ID NO: 40068 - DNA, 25 bp, Homo sapien
actctttggagagtccagggcgtct

SEQ ID NO: 40069 - DNA, 25 bp, Homo sapien
taatttcgttgatgaagacttataa

SEQ ID NO: 40070 - DNA, 25 bp, Homo sapien
ttataagtcttcatcaacgaaatta

SEQ ID NO: 40071 - DNA, 25 bp, Homo sapien
aaattttgtagcctcactactgagg

SEQ ID NO: 40072 - DNA, 25 bp, Homo sapien
cctcagtagtgaggctacaaaattt

SEQ ID NO: 40073 - DNA, 25 bp, Homo sapien
ttgaggtccgtttgacgactctagg

SEQ ID NO: 40074 - DNA, 25 bp, Homo sapien
cctagagtcgtcaaacggacctcaa

SEQ ID NO: 40075 - DNA, 25 bp, Homo sapien
agatctcttaatcaaaagtacagtg

SEQ ID NO: 40076 - DNA, 25 bp, Homo sapien
cactgtacttttgattaagagatct

SEQ ID NO: 40077 - DNA, 25 bp, Homo sapien
acatgagttctcatagtgtttgaaa

SEQ ID NO: 40078 - DNA, 25 bp, Homo sapien
tttcaaacactatgagaactcatgt

SEQ ID NO: 40079 - DNA, 25 bp, Homo sapien
cgacggccgcgtctccccgtcagta

SEQ ID NO: 40080 - DNA, 25 bp, Homo sapien
tactgacggggagacgcggccgtcg

SEQ ID NO: 40081 - DNA, 25 bp, Homo sapien
acttatacattgaacaaagctttac

SEQ ID NO: 40082 - DNA, 25 bp, Homo sapien
gtaaagctttgttcaatgtataagt

SEQ ID NO: 40083 - DNA, 25 bp, Homo sapien
tacattgaacaaagctttactttac

SEQ ID NO: 40084 - DNA, 25 bp, Homo sapien
gtaaagtaaagctttgttcaatgta

SEQ ID NO: 40085 - DNA, 25 bp, Homo sapien
aagatactactgtgtttatagtaaa

SEQ ID NO: 40086 - DNA, 25 bp, Homo sapien
tttactataaacacagtagtatctt

SEQ ID NO: 40087 - DNA, 25 bp, Homo sapien
ggcctccccgcacctctcggcgggc

SEQ ID NO: 40088 - DNA, 25 bp, Homo sapien
gcccgccgagaggtgcggggaggcc

SEQ ID NO: 40089 - DNA, 25 bp, Homo sapien
cagggtacctctactttcagcgact

SEQ ID NO: 40090 - DNA, 25 bp, Homo sapien
agtcgctgaaagtagaggtaccctg

SEQ ID NO: 40091 - DNA, 25 bp, Homo sapien
gccggtcggtcaaacgaactcgact

SEQ ID NO: 40092 - DNA, 25 bp, Homo sapien
agtcgagttcgtttgaccgaccggc

SEQ ID NO: 40093 - DNA, 25 bp, Homo sapien
aggaacctttataggctagaataac

SEQ ID NO: 40094 - DNA, 25 bp, Homo sapien
gttattctagcctataaaggttcct

SEQ ID NO: 40095 - DNA, 25 bp, Homo sapien
attaagaaacttcaaaagtcacgag

SEQ ID NO: 40096 - DNA, 25 bp, Homo sapien
ctcgtgacttttgaagtttcttaat

SEQ ID NO: 40097 - DNA, 25 bp, Homo sapien
aagtacacgtaactataaatcttgt

SEQ ID NO: 40098 - DNA, 25 bp, Homo sapien
acaagatttatagttacgtgtactt

SEQ ID NO: 40099 - DNA, 25 bp, Homo sapien
aataagagtcactaaaaagtacacg

SEQ ID NO: 40100 - DNA, 25 bp, Homo sapien
cgtgtactttttagtgactcttatt

SEQ ID NO: 40101 - DNA, 25 bp, Homo sapien
ttgaccaccggattacggaatcgat

SEQ ID NO: 40102 - DNA, 25 bp, Homo sapien
atcgattccgtaatccggtggtcaa

SEQ ID NO: 40103 - DNA, 25 bp, Homo sapien
ccggtgcgacgagtgcagtcgtcac

SEQ ID NO: 40104 - DNA, 25 bp, Homo sapien
gtgacgactgcactcgtcgcaccgg

SEQ ID NO: 40105 - DNA, 25 bp, Homo sapien
gatgtagctttcatcccaattaaac

SEQ ID NO: 40106 - DNA, 25 bp, Homo sapien
gtttaattgggatgaaagctacatc

SEQ ID NO: 40107 - DNA, 25 bp, Homo sapien
ggagataatattaatttgtacaaaa

SEQ ID NO: 40108 - DNA, 25 bp, Homo sapien
ttttgtacaaattaatattatctcc

SEQ ID NO: 40109 - DNA, 25 bp, Homo sapien
aggagataatattaatttgtacaaa

SEQ ID NO: 40110 - DNA, 25 bp, Homo sapien
tttgtacaaattaatattatctcct

SEQ ID NO: 40111 - DNA, 25 bp, Homo sapien
aaggagataatattaatttgtacaa

SEQ ID NO: 40112 - DNA, 25 bp, Homo sapien
ttgtacaaattaatattatctcctt

SEQ ID NO: 40113 - DNA, 25 bp, Homo sapien
taaggagataatattaatttgtaca

SEQ ID NO: 40114 - DNA, 25 bp, Homo sapien
tgtacaaattaatattatctcctta

SEQ ID NO: 40115 - DNA, 25 bp, Homo sapien
cgggcgaggtatcgacacagtcact

SEQ ID NO: 40116 - DNA, 25 bp, Homo sapien
agtgactgtgtcgatacctcgcccg

SEQ ID NO: 40117 - DNA, 25 bp, Homo sapien
acaaaacattgtatcattgtttaat

SEQ ID NO: 40118 - DNA, 25 bp, Homo sapien
attaaacaatgatacaatgttttgt

SEQ ID NO: 40119 - DNA, 25 bp, Homo sapien
acattgtatcattgtttaatacaac

SEQ ID NO: 40120 - DNA, 25 bp, Homo sapien
gttgtattaaacaatgatacaatgt

SEQ ID NO: 40121 - DNA, 25 bp, Homo sapien
aaaacattgtatcattgtttaatac

SEQ ID NO: 40122 - DNA, 25 bp, Homo sapien
gtattaaacaatgatacaatgtttt

SEQ ID NO: 40123 - DNA, 25 bp, Homo sapien
atatatgaggtatgaaacaagaagt

SEQ ID NO: 40124 - DNA, 25 bp, Homo sapien
acttcttgtttcatacctcatatat

SEQ ID NO: 40125 - DNA, 25 bp, Homo sapien
cacacccggaccgtccgtgtccgac

SEQ ID NO: 40126 - DNA, 25 bp, Homo sapien
gtcggacacggacggtccgggtgtg

SEQ ID NO: 40127 - DNA, 25 bp, Homo sapien
acatgggtccttagtcgggttccat

SEQ ID NO: 40128 - DNA, 25 bp, Homo sapien
atggaacccgactaaggacccatgt

SEQ ID NO: 40129 - DNA, 25 bp, Homo sapien
agtatccactctaacaacctctgac

SEQ ID NO: 40130 - DNA, 25 bp, Homo sapien
gtcagaggttgttagagtggatact

SEQ ID NO: 40131 - DNA, 25 bp, Homo sapien
agtctcgaagggtttcttgaggtgt

SEQ ID NO: 40132 - DNA, 25 bp, Homo sapien
acacctcaagaaacccttcgagact

SEQ ID NO: 40133 - DNA, 25 bp, Homo sapien
tagattgaagagatagcgtatacaa

SEQ ID NO: 40134 - DNA, 25 bp, Homo sapien
ttgtatacgctatctcttcaatcta

SEQ ID NO: 40135 - DNA, 25 bp, Homo sapien
ggactcttcttgttaacctttggtc

SEQ ID NO: 40136 - DNA, 25 bp, Homo sapien
gaccaaaggttaacaagaagagtcc

SEQ ID NO: 40137 - DNA, 25 bp, Homo sapien
acttttagagttcaaggtgcgttaa

SEQ ID NO: 40138 - DNA, 25 bp, Homo sapien
ttaacgcaccttgaactctaaaagt

SEQ ID NO: 40139 - DNA, 25 bp, Homo sapien
aagaagacgaatactccgaaaactg

SEQ ID NO: 40140 - DNA, 25 bp, Homo sapien
cagttttcggagtattcgtcttctt

SEQ ID NO: 40141 - DNA, 25 bp, Homo sapien
cgaggtttggcgacctacgaggacc

SEQ ID NO: 40142 - DNA, 25 bp, Homo sapien
ggtcctcgtaggtcgccaaacctcg

SEQ ID NO: 40143 - DNA, 25 bp, Homo sapien
gcgcccggcgcctccacgtcacgtg

SEQ ID NO: 40144 - DNA, 25 bp, Homo sapien
cacgtgacgtggaggcgccgggcgc

SEQ ID NO: 40145 - DNA, 25 bp, Homo sapien
ggcgcccggcgcctccacgtcacgt

SEQ ID NO: 40146 - DNA, 25 bp, Homo sapien
acgtgacgtggaggcgccgggcgcc

SEQ ID NO: 40147 - DNA, 25 bp, Homo sapien
cgggcgcccggcgcctccacgtcac

SEQ ID NO: 40148 - DNA, 25 bp, Homo sapien
gtgacgtggaggcgccgggcgcccg

SEQ ID NO: 40149 - DNA, 25 bp, Homo sapien
gcccggcgcctccacgtcacgtgcc

SEQ ID NO: 40150 - DNA, 25 bp, Homo sapien
ggcacgtgacgtggaggcgccgggc

SEQ ID NO: 40151 - DNA, 25 bp, Homo sapien
cgggcggtgcgactagggcctgtga

SEQ ID NO: 40152 - DNA, 25 bp, Homo sapien
tcacaggccctagtcgcaccgcccg

SEQ ID NO: 40153 - DNA, 25 bp, Homo sapien
acaggagtctattgttaccggaaca

SEQ ID NO: 40154 - DNA, 25 bp, Homo sapien
tgttccggtaacaatagactcctgt

SEQ ID NO: 40155 - DNA, 25 bp, Homo sapien
gacggcctcgaacgggctgtggtcc

SEQ ID NO: 40156 - DNA, 25 bp, Homo sapien
ggaccacagcccgttcgaggccgtc

SEQ ID NO: 40157 - DNA, 25 bp, Homo sapien
gcagaagttacggtgaggcctccgt

SEQ ID NO: 40158 - DNA, 25 bp, Homo sapien
acggaggcctcaccgtaacttctgc

SEQ ID NO: 40159 - DNA, 25 bp, Homo sapien
caggacaaccggttccgctcgaggt

SEQ ID NO: 40160 - DNA, 25 bp, Homo sapien
acctcgagcggaaccggttgtcctg

SEQ ID NO: 40161 - DNA, 25 bp, Homo sapien
gaagtactatttatagttaatgtct

SEQ ID NO: 40162 - DNA, 25 bp, Homo sapien
agacattaactataaatagtacttc

SEQ ID NO: 40163 - DNA, 25 bp, Homo sapien
tactacttcccttctaaagacgtaa

SEQ ID NO: 40164 - DNA, 25 bp, Homo sapien
ttacgtctttagaagggaagtagta

SEQ ID NO: 40165 - DNA, 25 bp, Homo sapien
ggtggccgttcattcgaaggattat

SEQ ID NO: 40166 - DNA, 25 bp, Homo sapien
ataatccttcgaatgaacggccacc

SEQ ID NO: 40167 - DNA, 25 bp, Homo sapien
ccctctacccttcggactgcgcggg

SEQ ID NO: 40168 - DNA, 25 bp, Homo sapien
cccgcgcagtccgaagggtagaggg

SEQ ID NO: 40169 - DNA, 25 bp, Homo sapien
tccgagaacggaagtctcctcggga

SEQ ID NO: 40170 - DNA, 25 bp, Homo sapien
tcccgaggagacttccgttctcgga

SEQ ID NO: 40171 - DNA, 25 bp, Homo sapien
tacctccaggaacatgcagggacgt

SEQ ID NO: 40172 - DNA, 25 bp, Homo sapien
acgtccctgcatgttcctggaggta

SEQ ID NO: 40173 - DNA, 25 bp, Homo sapien
tcactattagtgttcttatatttgt

SEQ ID NO: 40174 - DNA, 25 bp, Homo sapien
acaaatataagaacactaatagtga

SEQ ID NO: 40175 - DNA, 25 bp, Homo sapien
agggcacaattacttattactttac

SEQ ID NO: 40176 - DNA, 25 bp, Homo sapien
gtaaagtaataagtaattgtgccct

SEQ ID NO: 40177 - DNA, 25 bp, Homo sapien
gactagagtggagtcacagtaccac

SEQ ID NO: 40178 - DNA, 25 bp, Homo sapien
gtggtactgtgactccactctagtc

SEQ ID NO: 40179 - DNA, 25 bp, Homo sapien
ccggtctcgcctgagaaggtcagag

SEQ ID NO: 40180 - DNA, 25 bp, Homo sapien
ctctgaccttctcaggcgagaccgg

SEQ ID NO: 40181 - DNA, 25 bp, Homo sapien
gggtacatcagaaccggtctcgcct

SEQ ID NO: 40182 - DNA, 25 bp, Homo sapien
aggcgagaccggttctgatgtaccc

SEQ ID NO: 40183 - DNA, 25 bp, Homo sapien
tgacgaattgtccttctactcgaac

SEQ ID NO: 40184 - DNA, 25 bp, Homo sapien
gttcgagtagaaggacaattcgtca

SEQ ID NO: 40185 - DNA, 25 bp, Homo sapien
cccgtggtgtatgtcttccagaaac

SEQ ID NO: 40186 - DNA, 25 bp, Homo sapien
gtttctggaagacatacaccacggg

SEQ ID NO: 40187 - DNA, 25 bp, Homo sapien
ataatcgtataatttaagtgtttgt

SEQ ID NO: 40188 - DNA, 25 bp, Homo sapien
acaaacacttaaattatacgattat

SEQ ID NO: 40189 - DNA, 25 bp, Homo sapien
aataatcgtataatttaagtgtttg

SEQ ID NO: 40190 - DNA, 25 bp, Homo sapien
caaacacttaaattatacgattatt

SEQ ID NO: 40191 - DNA, 25 bp, Homo sapien
cactacaagcttgagacgttgttac

SEQ ID NO: 40192 - DNA, 25 bp, Homo sapien
gtaacaacgtctcaagcttgtagtg

SEQ ID NO: 40193 - DNA, 25 bp, Homo sapien
gcggcagccgcccgtggcccggaac

SEQ ID NO: 40194 - DNA, 25 bp, Homo sapien
gttccgggccacgggcggctgccgc

SEQ ID NO: 40195 - DNA, 25 bp, Homo sapien
cctggtccttcgagatctgagttcc

SEQ ID NO: 40196 - DNA, 25 bp, Homo sapien
ggaactcagatctcgaaggaccagg

SEQ ID NO: 40197 - DNA, 25 bp, Homo sapien
ccgccgtcacggcaaggcctccgga

SEQ ID NO: 40198 - DNA, 25 bp, Homo sapien
tccggaggccttgccgtgacggcgg

SEQ ID NO: 40199 - DNA, 25 bp, Homo sapien
cccgccgtcacggcaaggcctccgg

SEQ ID NO: 40200 - DNA, 25 bp, Homo sapien
ccggaggccttgccgtgacggcggg

SEQ ID NO: 40201 - DNA, 25 bp, Homo sapien
cgccgtcacggcaaggcctccggac

SEQ ID NO: 40202 - DNA, 25 bp, Homo sapien
gtccggaggccttgccgtgacggcg

SEQ ID NO: 40203 - DNA, 25 bp, Homo sapien
aaacgagcgaggacagtggtcatcc

SEQ ID NO: 40204 - DNA, 25 bp, Homo sapien
ggatgaccactgtcctcgctcgttt

SEQ ID NO: 40205 - DNA, 25 bp, Homo sapien
gtctctcggtgtggcccccgccggg

SEQ ID NO: 40206 - DNA, 25 bp, Homo sapien
cccggcgggggccacaccgagagac

SEQ ID NO: 40207 - DNA, 25 bp, Homo sapien
gtacaattgttctcactactttagc

SEQ ID NO: 40208 - DNA, 25 bp, Homo sapien
gctaaagtagtgagaacaattgtac

SEQ ID NO: 40209 - DNA, 25 bp, Homo sapien
acactgaccttctggtctgacgacc

SEQ ID NO: 40210 - DNA, 25 bp, Homo sapien
ggtcgtcagaccagaaggtcagtgt

SEQ ID NO: 40211 - DNA, 25 bp, Homo sapien
taccggaaacagaataacattattg

SEQ ID NO: 40212 - DNA, 25 bp, Homo sapien
caataatgttattctgtttccggta

SEQ ID NO: 40213 - DNA, 25 bp, Homo sapien
tgccctccagactctcggcgaaagg

SEQ ID NO: 40214 - DNA, 25 bp, Homo sapien
cctttcgccgagagtctggagggca

SEQ ID NO: 40215 - DNA, 25 bp, Homo sapien
cccttgtgtcggtgtctcgctccaa

SEQ ID NO: 40216 - DNA, 25 bp, Homo sapien
ttggagcgagacaccgacacaaggg

SEQ ID NO: 40217 - DNA, 25 bp, Homo sapien
ctcgtcctgccgaaatcgttagtgt

SEQ ID NO: 40218 - DNA, 25 bp, Homo sapien
acactaacgatttcggcaggacgag

SEQ ID NO: 40219 - DNA, 25 bp, Homo sapien
gagagtccaatttgaattcaaacag

SEQ ID NO: 40220 - DNA, 25 bp, Homo sapien
ctgtttgaattcaaattggactctc

SEQ ID NO: 40221 - DNA, 25 bp, Homo sapien
cttcttttagggagtgtgtgaaaac

SEQ ID NO: 40222 - DNA, 25 bp, Homo sapien
gttttcacacactccctaaaagaag

SEQ ID NO: 40223 - DNA, 25 bp, Homo sapien
cgcccgtcgtggaggactgggcccg

SEQ ID NO: 40224 - DNA, 25 bp, Homo sapien
cgggcccagtcctccacgacgggcg

SEQ ID NO: 40225 - DNA, 25 bp, Homo sapien
gaccgaccccgacgcccgtcgtgga

SEQ ID NO: 40226 - DNA, 25 bp, Homo sapien
tccacgacgggcgtcggggtcggtc

SEQ ID NO: 40227 - DNA, 25 bp, Homo sapien
cgcacctcgaaacggtcgcaccgta

SEQ ID NO: 40228 - DNA, 25 bp, Homo sapien
tacggtgcgaccgtttcgaggtgcg

SEQ ID NO: 40229 - DNA, 25 bp, Homo sapien
gcgccggcgaggtggctcaggaccg

SEQ ID NO: 40230 - DNA, 25 bp, Homo sapien
cggtcctgagccacctcgccggcgc

SEQ ID NO: 40231 - DNA, 25 bp, Homo sapien
aacgagaggcgccaggcggcgccgg

SEQ ID NO: 40232 - DNA, 25 bp, Homo sapien
ccggcgccgcctggcgcctctcgtt

SEQ ID NO: 40233 - DNA, 25 bp, Homo sapien
cgggaccgatgactagagtttcgat

SEQ ID NO: 40234 - DNA, 25 bp, Homo sapien
atcgaaactctagtcatcggtcccg

SEQ ID NO: 40235 - DNA, 25 bp, Homo sapien
ccgggcaccgtctaagcggtgaggg

SEQ ID NO: 40236 - DNA, 25 bp, Homo sapien
ccctcaccgcttagacggtgcccgg

SEQ ID NO: 40237 - DNA, 25 bp, Homo sapien
gggcccgacacgtccggaggtcacg

SEQ ID NO: 40238 - DNA, 25 bp, Homo sapien
cgtgacctccggacgtgtcgggccc

SEQ ID NO: 40239 - DNA, 25 bp, Homo sapien
gaccgtaggagtcgtggggtgtccg

SEQ ID NO: 40240 - DNA, 25 bp, Homo sapien
cggacaccccacgactcctacggtc

SEQ ID NO: 40241 - DNA, 25 bp, Homo sapien
tacccagccaggaaggttctgtggc

SEQ ID NO: 40242 - DNA, 25 bp, Homo sapien
gccacagaaccttcctggctgggta

SEQ ID NO: 40243 - DNA, 25 bp, Homo sapien
ggtcttcgtcggcagccccagtgcg

SEQ ID NO: 40244 - DNA, 25 bp, Homo sapien
cgcactggggctgccgacgaagacc

SEQ ID NO: 40245 - DNA, 25 bp, Homo sapien
aaatgttgtgcacaccgtagaggac

SEQ ID NO: 40246 - DNA, 25 bp, Homo sapien
gtcctctacggtgtgcacaacattt

SEQ ID NO: 40247 - DNA, 25 bp, Homo sapien
aagctagtcattacgtttaatagac

SEQ ID NO: 40248 - DNA, 25 bp, Homo sapien
gtctattaaacgtaatgactagctt

SEQ ID NO: 40249 - DNA, 25 bp, Homo sapien
caacacgccaggacgggtgtgctct

SEQ ID NO: 40250 - DNA, 25 bp, Homo sapien
agagcacacccgtcctggcgtgttg

SEQ ID NO: 40251 - DNA, 25 bp, Homo sapien
tgtgggtacgtacacccccccgaga

SEQ ID NO: 40252 - DNA, 25 bp, Homo sapien
tctcgggggggtgtacgtacccaca

SEQ ID NO: 40253 - DNA, 25 bp, Homo sapien
taatagctactttaattgttttcgt

SEQ ID NO: 40254 - DNA, 25 bp, Homo sapien
acgaaaacaattaaagtagctatta

SEQ ID NO: 40255 - DNA, 25 bp, Homo sapien
cgaaagacaaagaggtaaacgacat

SEQ ID NO: 40256 - DNA, 25 bp, Homo sapien
atgtcgtttacctctttgtctttcg

SEQ ID NO: 40257 - DNA, 25 bp, Homo sapien
aaatcatgaacactaaaatcactct

SEQ ID NO: 40258 - DNA, 25 bp, Homo sapien
agagtgattttagtgttcatgattt

SEQ ID NO: 40259 - DNA, 25 bp, Homo sapien
aggaagtagactgtcctacatgact

SEQ ID NO: 40260 - DNA, 25 bp, Homo sapien
agtcatgtaggacagtctacttcct

SEQ ID NO: 40261 - DNA, 25 bp, Homo sapien
ttcagttgacttacagttataggag

SEQ ID NO: 40262 - DNA, 25 bp, Homo sapien
ctcctataactgtaagtcaactgaa

SEQ ID NO: 40263 - DNA, 25 bp, Homo sapien
acctagggcgacaccacggaaggac

SEQ ID NO: 40264 - DNA, 25 bp, Homo sapien
gtccttccgtggtgtcgccctaggt

SEQ ID NO: 40265 - DNA, 25 bp, Homo sapien
ccacgactcgtcttctggggcacga

SEQ ID NO: 40266 - DNA, 25 bp, Homo sapien
tcgtgccccagaagacgagtcgtgg

SEQ ID NO: 40267 - DNA, 25 bp, Homo sapien
gtgtcgagacgatccaagcggtgtc

SEQ ID NO: 40268 - DNA, 25 bp, Homo sapien
gacaccgcttggatcgtctcgacac

SEQ ID NO: 40269 - DNA, 25 bp, Homo sapien
cggaaagacacgagacttaattaaa

SEQ ID NO: 40270 - DNA, 25 bp, Homo sapien
tttaattaagtctcgtgtctttccg

SEQ ID NO: 40271 - DNA, 25 bp, Homo sapien
cccacggcacggcacctgaaacggg

SEQ ID NO: 40272 - DNA, 25 bp, Homo sapien
cccgtttcaggtgccgtgccgtggg

SEQ ID NO: 40273 - DNA, 25 bp, Homo sapien
ggaaacttaatgtgaagtttcaggt

SEQ ID NO: 40274 - DNA, 25 bp, Homo sapien
acctgaaacttcacattaagtttcc

SEQ ID NO: 40275 - DNA, 25 bp, Homo sapien
gacgggatgcatcgagggctgcgcg

SEQ ID NO: 40276 - DNA, 25 bp, Homo sapien
cgcgcagccctcgatgcatcccgtc

SEQ ID NO: 40277 - DNA, 25 bp, Homo sapien
ggtttgtctcccgtttcttgtagac

SEQ ID NO: 40278 - DNA, 25 bp, Homo sapien
gtctacaagaaacgggagacaaacc

SEQ ID NO: 40279 - DNA, 25 bp, Homo sapien
tcccgggagactcgtacgccacggg

SEQ ID NO: 40280 - DNA, 25 bp, Homo sapien
cccgtggcgtacgagtctcccggga

SEQ ID NO: 40281 - DNA, 25 bp, Homo sapien
tttatatcaaacgtaactcagttgt

SEQ ID NO: 40282 - DNA, 25 bp, Homo sapien
acaactgagttacgtttgatataaa

SEQ ID NO: 40283 - DNA, 25 bp, Homo sapien
gtccagggtccgtggacaccgtcgg

SEQ ID NO: 40284 - DNA, 25 bp, Homo sapien
ccgacggtgtccacggaccctggac

SEQ ID NO: 40285 - DNA, 25 bp, Homo sapien
ggagaacaaatgtaagaaccgtccg

SEQ ID NO: 40286 - DNA, 25 bp, Homo sapien
cggacggttcttacatttgttctcc

SEQ ID NO: 40287 - DNA, 25 bp, Homo sapien
gtgtcaccatcttcacggacatttg

SEQ ID NO: 40288 - DNA, 25 bp, Homo sapien
caaatgtccgtgaagatggtgacac

SEQ ID NO: 40289 - DNA, 25 bp, Homo sapien
gattaattcgatatagaactttccg

SEQ ID NO: 40290 - DNA, 25 bp, Homo sapien
cggaaagttctatatcgaattaatc

SEQ ID NO: 40291 - DNA, 25 bp, Homo sapien
attttcgattaattcgatatagaac

SEQ ID NO: 40292 - DNA, 25 bp, Homo sapien
gttctatatcgaattaatcgaaaat

SEQ ID NO: 40293 - DNA, 25 bp, Homo sapien
ccagtaaatgttatctttctaggta

SEQ ID NO: 40294 - DNA, 25 bp, Homo sapien
tacctagaaagataacatttactgg

SEQ ID NO: 40295 - DNA, 25 bp, Homo sapien
cgatctttacctcagtatccggagt

SEQ ID NO: 40296 - DNA, 25 bp, Homo sapien
actccggatactgaggtaaagatcg

SEQ ID NO: 40297 - DNA, 25 bp, Homo sapien
taactaaaccactcttggcaaaaag

SEQ ID NO: 40298 - DNA, 25 bp, Homo sapien
ctttttgccaagagtggtttagtta

SEQ ID NO: 40299 - DNA, 25 bp, Homo sapien
acggtaaagttactattgacacaac

SEQ ID NO: 40300 - DNA, 25 bp, Homo sapien
gttgtgtcaatagtaactttaccgt

SEQ ID NO: 40301 - DNA, 25 bp, Homo sapien
gcgctcgcgggggtcaccggcgtca

SEQ ID NO: 40302 - DNA, 25 bp, Homo sapien
tgacgccggtgacccccgcgagcgc

SEQ ID NO: 40303 - DNA, 25 bp, Homo sapien
ggcgctcgcgggggtcaccggcgtc

SEQ ID NO: 40304 - DNA, 25 bp, Homo sapien
gacgccggtgacccccgcgagcgcc

SEQ ID NO: 40305 - DNA, 25 bp, Homo sapien
gggcgctcgcgggggtcaccggcgt

SEQ ID NO: 40306 - DNA, 25 bp, Homo sapien
acgccggtgacccccgcgagcgccc

SEQ ID NO: 40307 - DNA, 25 bp, Homo sapien
cgggcgctcgcgggggtcaccggcg

SEQ ID NO: 40308 - DNA, 25 bp, Homo sapien
cgccggtgacccccgcgagcgcccg

SEQ ID NO: 40309 - DNA, 25 bp, Homo sapien
ggagatgcgtcggtcgggaagcggg

SEQ ID NO: 40310 - DNA, 25 bp, Homo sapien
cccgcttcccgaccgacgcatctcc

SEQ ID NO: 40311 - DNA, 25 bp, Homo sapien
gttatattaaactgaacaattagta

SEQ ID NO: 40312 - DNA, 25 bp, Homo sapien
tactaattgttcagtttaatataac

SEQ ID NO: 40313 - DNA, 25 bp, Homo sapien
ttatgagactgatttgaattgtgac

SEQ ID NO: 40314 - DNA, 25 bp, Homo sapien
gtcacaattcaaatcagtctcataa

SEQ ID NO: 40315 - DNA, 25 bp, Homo sapien
agacacgacggtacaaaaccagtgt

SEQ ID NO: 40316 - DNA, 25 bp, Homo sapien
acactggttttgtaccgtcgtgtct

SEQ ID NO: 40317 - DNA, 25 bp, Homo sapien
ctctcgggctccctcgaggcgcgac

SEQ ID NO: 40318 - DNA, 25 bp, Homo sapien
gtcgcgcctcgagggagcccgagag

SEQ ID NO: 40319 - DNA, 25 bp, Homo sapien
tcctctcgggctccctcgaggcgcg

SEQ ID NO: 40320 - DNA, 25 bp, Homo sapien
cgcgcctcgagggagcccgagagga

SEQ ID NO: 40321 - DNA, 25 bp, Homo sapien
ttgagcagacttcggtctgctccgg

SEQ ID NO: 40322 - DNA, 25 bp, Homo sapien
ccggagcagaccgaagtctgctcaa

SEQ ID NO: 40323 - DNA, 25 bp, Homo sapien
ctaatcggtaaacaaggactccaag

SEQ ID NO: 40324 - DNA, 25 bp, Homo sapien
cttggagtccttgtttaccgattag

SEQ ID NO: 40325 - DNA, 25 bp, Homo sapien
accaggttggtcacgttcgacgcta

SEQ ID NO: 40326 - DNA, 25 bp, Homo sapien
tagcgtcgaacgtgaccaacctggt

SEQ ID NO: 40327 - DNA, 25 bp, Homo sapien
acctttgtactgtcaatttaaatat

SEQ ID NO: 40328 - DNA, 25 bp, Homo sapien
atatttaaattgacagtacaaaggt

SEQ ID NO: 40329 - DNA, 25 bp, Homo sapien
taaagatccgaaagctatctgcatc

SEQ ID NO: 40330 - DNA, 25 bp, Homo sapien
gatgcagatagctttcggatcttta

SEQ ID NO: 40331 - DNA, 25 bp, Homo sapien
ccggtgtcgaaacagcgactcgaag

SEQ ID NO: 40332 - DNA, 25 bp, Homo sapien
cttcgagtcgctgtttcgacaccgg

SEQ ID NO: 40333 - DNA, 25 bp, Homo sapien
gagacccgggattaatcgagaaatc

SEQ ID NO: 40334 - DNA, 25 bp, Homo sapien
gatttctcgattaatcccgggtctc

SEQ ID NO: 40335 - DNA, 25 bp, Homo sapien
gtcgtaagagatagacatccaaact

SEQ ID NO: 40336 - DNA, 25 bp, Homo sapien
agtttggatgtctatctcttacgac

SEQ ID NO: 40337 - DNA, 25 bp, Homo sapien
gagggctctggacgtggtcgaaacg

SEQ ID NO: 40338 - DNA, 25 bp, Homo sapien
cgtttcgaccacgtccagagccctc

SEQ ID NO: 40339 - DNA, 25 bp, Homo sapien
cccgtctcggcgcttccgtcgcccc

SEQ ID NO: 40340 - DNA, 25 bp, Homo sapien
ggggcgacggaagcgccgagacggg

SEQ ID NO: 40341 - DNA, 25 bp, Homo sapien
aagactcaatatacgaaaagaagac

SEQ ID NO: 40342 - DNA, 25 bp, Homo sapien
gtcttcttttcgtatattgagtctt

SEQ ID NO: 40343 - DNA, 25 bp, Homo sapien
ctctcttatgggtatagttgaaagt

SEQ ID NO: 40344 - DNA, 25 bp, Homo sapien
actttcaactatacccataagagag

SEQ ID NO: 40345 - DNA, 25 bp, Homo sapien
taaaaccaacatgaagtgccgacat

SEQ ID NO: 40346 - DNA, 25 bp, Homo sapien
atgtcggcacttcatgttggtttta

SEQ ID NO: 40347 - DNA, 25 bp, Homo sapien
tcttgttgtagaacgagtgtgaatg

SEQ ID NO: 40348 - DNA, 25 bp, Homo sapien
cattcacactcgttctacaacaaga

SEQ ID NO: 40349 - DNA, 25 bp, Homo sapien
acacacctgagctgattctggacac

SEQ ID NO: 40350 - DNA, 25 bp, Homo sapien
gtgtccagaatcagctcaggtgtgt

SEQ ID NO: 40351 - DNA, 25 bp, Homo sapien
gcgtccccggctcgtaggcggggcc

SEQ ID NO: 40352 - DNA, 25 bp, Homo sapien
ggccccgcctacgagccggggacgc

SEQ ID NO: 40353 - DNA, 25 bp, Homo sapien
gacgttcctgaagggccactagggc

SEQ ID NO: 40354 - DNA, 25 bp, Homo sapien
gccctagtggcccttcaggaacgtc

SEQ ID NO: 40355 - DNA, 25 bp, Homo sapien
cgcctctgggtctatcgggacgtcg

SEQ ID NO: 40356 - DNA, 25 bp, Homo sapien
cgacgtcccgatagacccagaggcg

SEQ ID NO: 40357 - DNA, 25 bp, Homo sapien
ttacgcttatgtcatttgttgttac

SEQ ID NO: 40358 - DNA, 25 bp, Homo sapien
gtaacaacaaatgacataagcgtaa

SEQ ID NO: 40359 - DNA, 25 bp, Homo sapien
gggcgtgcgcgcagacgggcgggtg

SEQ ID NO: 40360 - DNA, 25 bp, Homo sapien
cacccgcccgtctgcgcgcacgccc

SEQ ID NO: 40361 - DNA, 25 bp, Homo sapien
taggagttattatagactacactgt

SEQ ID NO: 40362 - DNA, 25 bp, Homo sapien
acagtgtagtctataataactccta

SEQ ID NO: 40363 - DNA, 25 bp, Homo sapien
gtttaggagttattatagactacac

SEQ ID NO: 40364 - DNA, 25 bp, Homo sapien
gtgtagtctataataactcctaaac

SEQ ID NO: 40365 - DNA, 25 bp, Homo sapien
tagtttaggagttattatagactac

SEQ ID NO: 40366 - DNA, 25 bp, Homo sapien
gtagtctataataactcctaaacta

SEQ ID NO: 40367 - DNA, 25 bp, Homo sapien
catgaaggaaaaagagaacctagta

SEQ ID NO: 40368 - DNA, 25 bp, Homo sapien
tactaggttctctttttccttcatg

SEQ ID NO: 40369 - DNA, 25 bp, Homo sapien
tccctgtcggctacggggcgtggag

SEQ ID NO: 40370 - DNA, 25 bp, Homo sapien
ctccacgccccgtagccgacaggga

SEQ ID NO: 40371 - DNA, 25 bp, Homo sapien
gtccctgtcggctacggggcgtgga

SEQ ID NO: 40372 - DNA, 25 bp, Homo sapien
tccacgccccgtagccgacagggac

SEQ ID NO: 40373 - DNA, 25 bp, Homo sapien
tgtaagaagccagaagaggagtggt

SEQ ID NO: 40374 - DNA, 25 bp, Homo sapien
accactcctcttctggcttcttaca

SEQ ID NO: 40375 - DNA, 25 bp, Homo sapien
ccattctgataagagatacaagtgc

SEQ ID NO: 40376 - DNA, 25 bp, Homo sapien
gcacttgtatctcttatcagaatgg

SEQ ID NO: 40377 - DNA, 25 bp, Homo sapien
ccgatggcgccgcgcttcctgaccc

SEQ ID NO: 40378 - DNA, 25 bp, Homo sapien
gggtcaggaagcgcggcgccatcgg

SEQ ID NO: 40379 - DNA, 25 bp, Homo sapien
gaccgagggtcgcccgatggcgccg

SEQ ID NO: 40380 - DNA, 25 bp, Homo sapien
cggcgccatcgggcgaccctcggtc

SEQ ID NO: 40381 - DNA, 25 bp, Homo sapien
ttggatattttcaggtttatctggt

SEQ ID NO: 40382 - DNA, 25 bp, Homo sapien
accagataaacctgaaaatatccaa

SEQ ID NO: 40383 - DNA, 25 bp, Homo sapien
agttaactacatccttcttaatttc

SEQ ID NO: 40384 - DNA, 25 bp, Homo sapien
gaaattaagaaggatgtagttaact

SEQ ID NO: 40385 - DNA, 25 bp, Homo sapien
ggaggtccatgtcctagtcgacccc

SEQ ID NO: 40386 - DNA, 25 bp, Homo sapien
ggggtcgactaggacatggacctcc

SEQ ID NO: 40387 - DNA, 25 bp, Homo sapien
gtcccggttcgactggagcgtttcc

SEQ ID NO: 40388 - DNA, 25 bp, Homo sapien
ggaaacgctccagtcgaaccgggac

SEQ ID NO: 40389 - DNA, 25 bp, Homo sapien
cagcacgggtggtcgggcacaggac

SEQ ID NO: 40390 - DNA, 25 bp, Homo sapien
gtcctgtgcccgaccacccgtgctg

SEQ ID NO: 40391 - DNA, 25 bp, Homo sapien
gagaaaggggtctccggcggcggag

SEQ ID NO: 40392 - DNA, 25 bp, Homo sapien
ctccgccgccggagacccctttctc

SEQ ID NO: 40393 - DNA, 25 bp, Homo sapien
gaaaggcccgttacacctcctgcta

SEQ ID NO: 40394 - DNA, 25 bp, Homo sapien
tagcaggaggtgtaacgggcctttc

SEQ ID NO: 40395 - DNA, 25 bp, Homo sapien
gaacagatcgtcgttctttacttct

SEQ ID NO: 40396 - DNA, 25 bp, Homo sapien
agaagtaaagaacgacgatctgttc

SEQ ID NO: 40397 - DNA, 25 bp, Homo sapien
ccgtgatcttcgaaccaggaggttg

SEQ ID NO: 40398 - DNA, 25 bp, Homo sapien
caacctcctggttcgaagatcacgg

SEQ ID NO: 40399 - DNA, 25 bp, Homo sapien
cgggaccgctacttttgaggagaac

SEQ ID NO: 40400 - DNA, 25 bp, Homo sapien
gttctcctcaaaagtagcggtcccg

SEQ ID NO: 40401 - DNA, 25 bp, Homo sapien
aaatcttataggtgtaacaccagtg

SEQ ID NO: 40402 - DNA, 25 bp, Homo sapien
cactggtgttacacctataagattt

SEQ ID NO: 40403 - DNA, 25 bp, Homo sapien
cgaaaacgacaccccgcagacagga

SEQ ID NO: 40404 - DNA, 25 bp, Homo sapien
tcctgtctgcggggtgtcgttttcg

SEQ ID NO: 40405 - DNA, 25 bp, Homo sapien
aaaagaacaattgtattctacgaac

SEQ ID NO: 40406 - DNA, 25 bp, Homo sapien
gttcgtagaatacaattgttctttt

SEQ ID NO: 40407 - DNA, 25 bp, Homo sapien
gacacctcgtccactgtaaaaatcg

SEQ ID NO: 40408 - DNA, 25 bp, Homo sapien
cgatttttacagtggacgaggtgtc

SEQ ID NO: 40409 - DNA, 25 bp, Homo sapien
ggatgaaggtcactgacctaaaact

SEQ ID NO: 40410 - DNA, 25 bp, Homo sapien
agttttaggtcagtgaccttcatcc

SEQ ID NO: 40411 - DNA, 25 bp, Homo sapien
aataccgggcaggtcctatagacgt

SEQ ID NO: 40412 - DNA, 25 bp, Homo sapien
acgtctataggacctgcccggtatt

SEQ ID NO: 40413 - DNA, 25 bp, Homo sapien
ccgtcgtctaagtgtcccggagact

SEQ ID NO: 40414 - DNA, 25 bp, Homo sapien
agtctccgggacacttagacgacgg

SEQ ID NO: 40415 - DNA, 25 bp, Homo sapien
gacctactaattgcagtcactggag

SEQ ID NO: 40416 - DNA, 25 bp, Homo sapien
ctccagtgactgcaattagtaggtc

SEQ ID NO: 40417 - DNA, 25 bp, Homo sapien
tctcgtgttaaggacctagggacgt

SEQ ID NO: 40418 - DNA, 25 bp, Homo sapien
acgtccctaggtccttaacacgaga

SEQ ID NO: 40419 - DNA, 25 bp, Homo sapien
cccttgaccggccgccctcgcggcg

SEQ ID NO: 40420 - DNA, 25 bp, Homo sapien
cgccgcgagggcggccggtcaaggg

SEQ ID NO: 40421 - DNA, 25 bp, Homo sapien
caagacgagagttagggtcttattc

SEQ ID NO: 40422 - DNA, 25 bp, Homo sapien
gaataagaccctaactctcgtcttg

SEQ ID NO: 40423 - DNA, 25 bp, Homo sapien
gaggtgtgggcaaacgaaccgagtg

SEQ ID NO: 40424 - DNA, 25 bp, Homo sapien
cactcggttcgtttgcccacacctc

SEQ ID NO: 40425 - DNA, 25 bp, Homo sapien
cgacccgagactacaccgcgtcacg

SEQ ID NO: 40426 - DNA, 25 bp, Homo sapien
cgtgacgcggtgtagtctcgggtcg

SEQ ID NO: 40427 - DNA, 25 bp, Homo sapien
caggtaccagcaccgcgggactcgg

SEQ ID NO: 40428 - DNA, 25 bp, Homo sapien
ccgagtcccgcggtgctggtacctg

SEQ ID NO: 40429 - DNA, 25 bp, Homo sapien
tcggtctcttagggttgcttaccag

SEQ ID NO: 40430 - DNA, 25 bp, Homo sapien
ctggtaagcaaccctaagagaccga

SEQ ID NO: 40431 - DNA, 25 bp, Homo sapien
cctggtacccgacgactcacacgcc

SEQ ID NO: 40432 - DNA, 25 bp, Homo sapien
ggcgtgtgagtcgtcgggtaccagg

SEQ ID NO: 40433 - DNA, 25 bp, Homo sapien
actggaaagccaacaactccctgac

SEQ ID NO: 40434 - DNA, 25 bp, Homo sapien
gtcagggagttgttggctttccagt

SEQ ID NO: 40435 - DNA, 25 bp, Homo sapien
aactttctatcatctcttactttag

SEQ ID NO: 40436 - DNA, 25 bp, Homo sapien
ctaaagtaagagatgatagaaagtt

SEQ ID NO: 40437 - DNA, 25 bp, Homo sapien
gtccgtctggggtctcctcccgggc

SEQ ID NO: 40438 - DNA, 25 bp, Homo sapien
gcccgggaggagaccccagacggac

SEQ ID NO: 40439 - DNA, 25 bp, Homo sapien
taccaatgatggtatttttaccgat

SEQ ID NO: 40440 - DNA, 25 bp, Homo sapien
atcggtaaaaataccatcattggta

SEQ ID NO: 40441 - DNA, 25 bp, Homo sapien
ataattattctacaagtgactgtct

SEQ ID NO: 40442 - DNA, 25 bp, Homo sapien
agacagtcacttgtagaataattat

SEQ ID NO: 40443 - DNA, 25 bp, Homo sapien
acaacgtgatacatttaaaacaggt

SEQ ID NO: 40444 - DNA, 25 bp, Homo sapien
acctgttttaaatgtatcacgttgt

SEQ ID NO: 40445 - DNA, 25 bp, Homo sapien
aacaaaagtagtaattctacttcat

SEQ ID NO: 40446 - DNA, 25 bp, Homo sapien
atgaagtagaattactacttttgtt

SEQ ID NO: 40447 - DNA, 25 bp, Homo sapien
taaaattgacgtatacactatactt

SEQ ID NO: 40448 - DNA, 25 bp, Homo sapien
aagtatagtgtatacgtcaatttta

SEQ ID NO: 40449 - DNA, 25 bp, Homo sapien
cgaggtacctcaccggcctcgggtc

SEQ ID NO: 40450 - DNA, 25 bp, Homo sapien
gacccgaggccggtgaggtacctcg

SEQ ID NO: 40451 - DNA, 25 bp, Homo sapien
tttctcaaggacagaagaactcccg

SEQ ID NO: 40452 - DNA, 25 bp, Homo sapien
cgggagttcttctgtccttgagaaa

SEQ ID NO: 40453 - DNA, 25 bp, Homo sapien
gacaatgttcgtttctcctaagagt

SEQ ID NO: 40454 - DNA, 25 bp, Homo sapien
actcttaggagaaacgaacattgtc

SEQ ID NO: 40455 - DNA, 25 bp, Homo sapien
taactatacaagagtaatttcagag

SEQ ID NO: 40456 - DNA, 25 bp, Homo sapien
ctctgaaattactcttgtatagtta

SEQ ID NO: 40457 - DNA, 25 bp, Homo sapien
gccccgcccggcgagcgcagcggta

SEQ ID NO: 40458 - DNA, 25 bp, Homo sapien
taccgctgcgctcgccgggcggggc

SEQ ID NO: 40459 - DNA, 25 bp, Homo sapien
tccgccccgcccggcgagcgcagcg

SEQ ID NO: 40460 - DNA, 25 bp, Homo sapien
cgctgcgctcgccgggcggggcgga

SEQ ID NO: 40461 - DNA, 25 bp, Homo sapien
cgctccgccccgcccggcgagcgca

SEQ ID NO: 40462 - DNA, 25 bp, Homo sapien
tgcgctcgccgggcggggcggagcg

SEQ ID NO: 40463 - DNA, 25 bp, Homo sapien
gactccggtccgccccccgctccgc

SEQ ID NO: 40464 - DNA, 25 bp, Homo sapien
gcggagcggggggcggaccggagtc

SEQ ID NO: 40465 - DNA, 25 bp, Homo sapien
gggactagccgggacccggagccag

SEQ ID NO: 40466 - DNA, 25 bp, Homo sapien
ctggctccgggtcccggctagtccc

SEQ ID NO: 40467 - DNA, 25 bp, Homo sapien
gggcggtcgcggagctagtcgttca

SEQ ID NO: 40468 - DNA, 25 bp, Homo sapien
tgaacgactagctccgcgaccgccc

SEQ ID NO: 40469 - DNA, 25 bp, Homo sapien
acgaagcatccattagcactatgaa

SEQ ID NO: 40470 - DNA, 25 bp, Homo sapien
ttcatagtgctaatggatgcttcgt

SEQ ID NO: 40471 - DNA, 25 bp, Homo sapien
accgtcactacgaagcatccattag

SEQ ID NO: 40472 - DNA, 25 bp, Homo sapien
ctaatggatgcttcgtagtgacggt

SEQ ID NO: 40473 - DNA, 25 bp, Homo sapien
taaggcatcggaggcacctaacgag

SEQ ID NO: 40474 - DNA, 25 bp, Homo sapien
ctcgttaggtgcctccgatgcctta

SEQ ID NO: 40475 - DNA, 25 bp, Homo sapien
gttgttgatcctaaatgttacctat

SEQ ID NO: 40476 - DNA, 25 bp, Homo sapien
ataggtaacatttaggatcaacaac

SEQ ID NO: 40477 - DNA, 25 bp, Homo sapien
tatcggtgatgactaatgtcggtcg

SEQ ID NO: 40478 - DNA, 25 bp, Homo sapien
cgaccgacattagtcatcaccgata

SEQ ID NO: 40479 - DNA, 25 bp, Homo sapien
acgtaagtctggtagtaatcttgac

SEQ ID NO: 40480 - DNA, 25 bp, Homo sapien
gtcaagattactaccagacttacgt

SEQ ID NO: 40481 - DNA, 25 bp, Homo sapien
ggccgtcgacgcttggtgggacccg

SEQ ID NO: 40482 - DNA, 25 bp, Homo sapien
cgggtcccaccaagcgtcgacggcc

SEQ ID NO: 40483 - DNA, 25 bp, Homo sapien
gccgcgcctcccacgacgccgggtc

SEQ ID NO: 40484 - DNA, 25 bp, Homo sapien
gacccggcgtcgtgggaggcgcggc

SEQ ID NO: 40485 - DNA, 25 bp, Homo sapien
cttatgttatcaccttcaataaaac

SEQ ID NO: 40486 - DNA, 25 bp, Homo sapien
gttttattgaaggtgataacataag

SEQ ID NO: 40487 - DNA, 25 bp, Homo sapien
ccccgtgaccgttcaccaggtcaag

SEQ ID NO: 40488 - DNA, 25 bp, Homo sapien
cttgacctggtgaacggtcacgggg

SEQ ID NO: 40489 - DNA, 25 bp, Homo sapien
gtggcgtccttcgcgagtcgacccc

SEQ ID NO: 40490 - DNA, 25 bp, Homo sapien
ggggtcgactcgcgaaggacgccac

SEQ ID NO: 40491 - DNA, 25 bp, Homo sapien
ttttggtaaccgtttcagtcgacac

SEQ ID NO: 40492 - DNA, 25 bp, Homo sapien
gtgtcgactgaaacggttaccaaaa

SEQ ID NO: 40493 - DNA, 25 bp, Homo sapien
tccaatctttttagaatatcaagta

SEQ ID NO: 40494 - DNA, 25 bp, Homo sapien
tacttgatattctaaaaagattgga

SEQ ID NO: 40495 - DNA, 25 bp, Homo sapien
tattaacattgttcaaatttctgat

SEQ ID NO: 40496 - DNA, 25 bp, Homo sapien
atcagaaatttgaacaatgttaata

SEQ ID NO: 40497 - DNA, 25 bp, Homo sapien
acattgttcaaatttctgatcttat

SEQ ID NO: 40498 - DNA, 25 bp, Homo sapien
ataagatcagaaatttgaacaatgt

SEQ ID NO: 40499 - DNA, 25 bp, Homo sapien
ttaacattgttcaaatttctgatct

SEQ ID NO: 40500 - DNA, 25 bp, Homo sapien
agatcagaaatttgaacaatgttaa

SEQ ID NO: 40501 - DNA, 25 bp, Homo sapien
ggtgaaccctcgtgtcttgagtcag

SEQ ID NO: 40502 - DNA, 25 bp, Homo sapien
ctgactcaagacacgagggttcacc

SEQ ID NO: 40503 - DNA, 25 bp, Homo sapien
aagtgactagcctctactattcgag

SEQ ID NO: 40504 - DNA, 25 bp, Homo sapien
ctcgaatagtagaggctagtcactt

SEQ ID NO: 40505 - DNA, 25 bp, Homo sapien
gacacacccatattgctaactcgag

SEQ ID NO: 40506 - DNA, 25 bp, Homo sapien
ctcgagttagcaatatgggtgtgtc

SEQ ID NO: 40507 - DNA, 25 bp, Homo sapien
cataatcagaagattcctataacac

SEQ ID NO: 40508 - DNA, 25 bp, Homo sapien
gtgttataggaatcttctgattatg

SEQ ID NO: 40509 - DNA, 25 bp, Homo sapien
gattcctcttgtaagctcagacctc

SEQ ID NO: 40510 - DNA, 25 bp, Homo sapien
gaggtctgagcttacaagaggaatc

SEQ ID NO: 40511 - DNA, 25 bp, Homo sapien
acgacgtaagagactcggtaaaaca

SEQ ID NO: 40512 - DNA, 25 bp, Homo sapien
tgttttaccgagtctcttacgtcgt

SEQ ID NO: 40513 - DNA, 25 bp, Homo sapien
ataccgtcatataactactaaaaag

SEQ ID NO: 40514 - DNA, 25 bp, Homo sapien
ctttttagtagttatatgacggtat

SEQ ID NO: 40515 - DNA, 25 bp, Homo sapien
tataccgtcatataactactaaaaa

SEQ ID NO: 40516 - DNA, 25 bp, Homo sapien
tttttagtagttatatgacggtata

SEQ ID NO: 40517 - DNA, 25 bp, Homo sapien
ttttataccgtcatataactactaa

SEQ ID NO: 40518 - DNA, 25 bp, Homo sapien
ttagtagttatatgacggtataaaa

SEQ ID NO: 40519 - DNA, 25 bp, Homo sapien
gactttggagatctggtttttacat

SEQ ID NO: 40520 - DNA, 25 bp, Homo sapien
atgtaaaaaccagatctccaaagtc

SEQ ID NO: 40521 - DNA, 25 bp, Homo sapien
agaccgcggtctcgcgcgggggtcg

SEQ ID NO: 40522 - DNA, 25 bp, Homo sapien
cgacccccgcgcgagaccgcggtct

SEQ ID NO: 40523 - DNA, 25 bp, Homo sapien
gcgaccaacgcgtagaccgcggtct

SEQ ID NO: 40524 - DNA, 25 bp, Homo sapien
agaccgcggtctacgcgttggtcgc

SEQ ID NO: 40525 - DNA, 25 bp, Homo sapien
ccgcggcgaccaacgcgtagaccgc

SEQ ID NO: 40526 - DNA, 25 bp, Homo sapien
gcggtctacgcgttggtcgccgcgg

SEQ ID NO: 40527 - DNA, 25 bp, Homo sapien
ctgcgcgtccgcagcccgcggcgac

SEQ ID NO: 40528 - DNA, 25 bp, Homo sapien
gtcgccgcgggctgcggacgcgcag

SEQ ID NO: 40529 - DNA, 25 bp, Homo sapien
tcctacccctgaccataacttcatg

SEQ ID NO: 40530 - DNA, 25 bp, Homo sapien
catgaagttatggtcaggggtagga

SEQ ID NO: 40531 - DNA, 25 bp, Homo sapien
ctcgacccgagtaagcaagaccgtc

SEQ ID NO: 40532 - DNA, 25 bp, Homo sapien
gacggtcttgcttactcgggtcgag

SEQ ID NO: 40533 - DNA, 25 bp, Homo sapien
ttacatacactataaactcgaagac

SEQ ID NO: 40534 - DNA, 25 bp, Homo sapien
gtcttcgagtttatagtgtatgtaa

SEQ ID NO: 40535 - DNA, 25 bp, Homo sapien
gcgatctggtactttacagtaactc

SEQ ID NO: 40536 - DNA, 25 bp, Homo sapien
gagttactgtaaagtaccagatcgc

SEQ ID NO: 40537 - DNA, 25 bp, Homo sapien
gaagtttttgcccatcgtcgttatt

SEQ ID NO: 40538 - DNA, 25 bp, Homo sapien
aataacgacgatgggcaaaaacttc

SEQ ID NO: 40539 - DNA, 25 bp, Homo sapien
gaaccataatctagaacacgtcaaa

SEQ ID NO: 40540 - DNA, 25 bp, Homo sapien
tttgacgtgttctagattatggttc

SEQ ID NO: 40541 - DNA, 25 bp, Homo sapien
aagtaataaacttctaaactgaatg

SEQ ID NO: 40542 - DNA, 25 bp, Homo sapien
cattcagtttagaagtttattactt

SEQ ID NO: 40543 - DNA, 25 bp, Homo sapien
gagaggccccttgggtacgacacca

SEQ ID NO: 40544 - DNA, 25 bp, Homo sapien
tggtgtcgtacccaaggggcctctc

SEQ ID NO: 40545 - DNA, 25 bp, Homo sapien
tatctccacaccgagtccaagggtg

SEQ ID NO: 40546 - DNA, 25 bp, Homo sapien
cacccttggactcggtgtggagata

SEQ ID NO: 40547 - DNA, 25 bp, Homo sapien
cgtctccggcggcagaccaggggaa

SEQ ID NO: 40548 - DNA, 25 bp, Homo sapien
ttcccctggtctgccgccggagacg

SEQ ID NO: 40549 - DNA, 25 bp, Homo sapien
atcagcacattgatgttcgtcgaag

SEQ ID NO: 40550 - DNA, 25 bp, Homo sapien
cttcgacgaacatcaatgtgctgat

SEQ ID NO: 40551 - DNA, 25 bp, Homo sapien
cagacaagggtgtacgactcgtagg

SEQ ID NO: 40552 - DNA, 25 bp, Homo sapien
cctacgagtcgtacacccttgtctg

SEQ ID NO: 40553 - DNA, 25 bp, Homo sapien
tataaagtattaacaagaacaacga

SEQ ID NO: 40554 - DNA, 25 bp, Homo sapien
tcgttgttcttgttaatactttata

SEQ ID NO: 40555 - DNA, 25 bp, Homo sapien
ccggactcgcgtgtcacagcgtttt

SEQ ID NO: 40556 - DNA, 25 bp, Homo sapien
aaaacgctgtgacacgcgagtccgg

SEQ ID NO: 40557 - DNA, 25 bp, Homo sapien
ggcgagcacgccctccccgatacga

SEQ ID NO: 40558 - DNA, 25 bp, Homo sapien
tcgtatcggggagggcgtgctcgcc

SEQ ID NO: 40559 - DNA, 25 bp, Homo sapien
tccatgtaacttagcgagagtctag

SEQ ID NO: 40560 - DNA, 25 bp, Homo sapien
ctagactctcgctaagttacatgga

SEQ ID NO: 40561 - DNA, 25 bp, Homo sapien
tgagaccggttgagctcgtttttac

SEQ ID NO: 40562 - DNA, 25 bp, Homo sapien
gtaaaaacgagctcaaccggtctca

SEQ ID NO: 40563 - DNA, 25 bp, Homo sapien
ttactgccaccgtggcaactcagag

SEQ ID NO: 40564 - DNA, 25 bp, Homo sapien
ctctgagttgccacggtggcagtaa

SEQ ID NO: 40565 - DNA, 25 bp, Homo sapien
cctcttttcagaagatctcgttcga

SEQ ID NO: 40566 - DNA, 25 bp, Homo sapien
tcgaacgagatcttctgaaaagagg

SEQ ID NO: 40567 - DNA, 25 bp, Homo sapien
taagatggttgtgtagaaaacatag

SEQ ID NO: 40568 - DNA, 25 bp, Homo sapien
ctatgttttctacacaaccatctta

SEQ ID NO: 40569 - DNA, 25 bp, Homo sapien
gctcccgaagcacctgagccacgca

SEQ ID NO: 40570 - DNA, 25 bp, Homo sapien
tgcgtggctcaggtgcttcgggagc

SEQ ID NO: 40571 - DNA, 25 bp, Homo sapien
ggtgtcaggggggcggcgctaccgc

SEQ ID NO: 40572 - DNA, 25 bp, Homo sapien
gcggtagcgccgcccccctgacacc

SEQ ID NO: 40573 - DNA, 25 bp, Homo sapien
ttttcattctttaacaagtcgttaa

SEQ ID NO: 40574 - DNA, 25 bp, Homo sapien
ttaacgacttgttaaagaatgaaaa

SEQ ID NO: 40575 - DNA, 25 bp, Homo sapien
gacccttggtagacaacattatcat

SEQ ID NO: 40576 - DNA, 25 bp, Homo sapien
atgataatgttgtctaccaagggtc

SEQ ID NO: 40577 - DNA, 25 bp, Homo sapien
ggactcggaccgaagggcactctgg

SEQ ID NO: 40578 - DNA, 25 bp, Homo sapien
ccagagtgcccttcggtccgagtcc

SEQ ID NO: 40579 - DNA, 25 bp, Homo sapien
gaggggtcgcggcgcgcggccggta

SEQ ID NO: 40580 - DNA, 25 bp, Homo sapien
taccggccgcgcgccgcgacccctc

SEQ ID NO: 40581 - DNA, 25 bp, Homo sapien
cgaggggtcgcggcgcgcggccggt

SEQ ID NO: 40582 - DNA, 25 bp, Homo sapien
accggccgcgcgccgcgacccctcg

SEQ ID NO: 40583 - DNA, 25 bp, Homo sapien
aagaacattcgcgaaacatgtaaag

SEQ ID NO: 40584 - DNA, 25 bp, Homo sapien
ctttacatgtttcgcgaatgttctt

SEQ ID NO: 40585 - DNA, 25 bp, Homo sapien
ttccaagaaccggtacatctaccag

SEQ ID NO: 40586 - DNA, 25 bp, Homo sapien
ctggtagatgtaccggttcttggaa

SEQ ID NO: 40587 - DNA, 25 bp, Homo sapien
gagaacaagtcttatcttaagtaaa

SEQ ID NO: 40588 - DNA, 25 bp, Homo sapien
tttacttaagataagacttgttctc

SEQ ID NO: 40589 - DNA, 25 bp, Homo sapien
cctctgtttacggaggaggtggcta

SEQ ID NO: 40590 - DNA, 25 bp, Homo sapien
tagccacctcctccgtaaacagagg

SEQ ID NO: 40591 - DNA, 25 bp, Homo sapien
ccgtggttccgtccgtcgtgacacc

SEQ ID NO: 40592 - DNA, 25 bp, Homo sapien
ggtgtcacgacggacggaaccacgg

SEQ ID NO: 40593 - DNA, 25 bp, Homo sapien
cttaccgcggagtagggacaggacc

SEQ ID NO: 40594 - DNA, 25 bp, Homo sapien
ggtcctgtccctactccgcggtaag

SEQ ID NO: 40595 - DNA, 25 bp, Homo sapien
aattactcttgaacgtcgaacgact

SEQ ID NO: 40596 - DNA, 25 bp, Homo sapien
agtcgttcgacgttcaagagtaatt

SEQ ID NO: 40597 - DNA, 25 bp, Homo sapien
gacaccgccctcaagcacccgactg

SEQ ID NO: 40598 - DNA, 25 bp, Homo sapien
cagtcgggtgcttgagggcggtgtc

SEQ ID NO: 40599 - DNA, 25 bp, Homo sapien
aagtttcttcctgtatacgtggtgt

SEQ ID NO: 40600 - DNA, 25 bp, Homo sapien
acaccacgtatacaggaagaaactt

SEQ ID NO: 40601 - DNA, 25 bp, Homo sapien
acgaggacgggcaccgaagggcgtc

SEQ ID NO: 40602 - DNA, 25 bp, Homo sapien
gacgcccttcggtgcccgtcctcgt

SEQ ID NO: 40603 - DNA, 25 bp, Homo sapien
cgctacaccgcggacctcaggtgcg

SEQ ID NO: 40604 - DNA, 25 bp, Homo sapien
cgcacctgaggtccgcggtgtagcg

SEQ ID NO: 40605 - DNA, 25 bp, Homo sapien
ccggcgtaccgggtctccgtgtctc

SEQ ID NO: 40606 - DNA, 25 bp, Homo sapien
gagacacggagacccggtacgccgg

SEQ ID NO: 40607 - DNA, 25 bp, Homo sapien
ccggcgtcaggaaggacctgctcga

SEQ ID NO: 40608 - DNA, 25 bp, Homo sapien
tcgagcaggtccttcctgacgccgg

SEQ ID NO: 40609 - DNA, 25 bp, Homo sapien
tccggctactgtgaaaggcataaat

SEQ ID NO: 40610 - DNA, 25 bp, Homo sapien
atttatgcctttcacagtagccgga

SEQ ID NO: 40611 - DNA, 25 bp, Homo sapien
ttctaaacacaaaaatccggctact

SEQ ID NO: 40612 - DNA, 25 bp, Homo sapien
agtagccggatttttgtgtttagaa

SEQ ID NO: 40613 - DNA, 25 bp, Homo sapien
tcgttcacgcgccggctcacctcgg

SEQ ID NO: 40614 - DNA, 25 bp, Homo sapien
ccgaggtgagccggcgcgtgaacga

SEQ ID NO: 40615 - DNA, 25 bp, Homo sapien
gttcgaaccgagacttcggcgaaag

SEQ ID NO: 40616 - DNA, 25 bp, Homo sapien
ctttcgccgaagtctcggttcgaac

SEQ ID NO: 40617 - DNA, 25 bp, Homo sapien
taccgtttcggagagcaaccttcga

SEQ ID NO: 40618 - DNA, 25 bp, Homo sapien
tcgaaggttgctctccgaaacggta

SEQ ID NO: 40619 - DNA, 25 bp, Homo sapien
ggcgaccggggctgctgggacgctg

SEQ ID NO: 40620 - DNA, 25 bp, Homo sapien
cagcgtcccagcagccccggtcgcc

SEQ ID NO: 40621 - DNA, 25 bp, Homo sapien
gggacgctggctccgcgaacgtcga

SEQ ID NO: 40622 - DNA, 25 bp, Homo sapien
tcgacgttcgcggagccagcgtccc

SEQ ID NO: 40623 - DNA, 25 bp, Homo sapien
ggcgggacctgtggcgcggccgtcg

SEQ ID NO: 40624 - DNA, 25 bp, Homo sapien
cgacggccgcgccacaggtcccgcc

SEQ ID NO: 40625 - DNA, 25 bp, Homo sapien
cggcgggacctgtggcgcggccgtc

SEQ ID NO: 40626 - DNA, 25 bp, Homo sapien
gacggccgcgccacaggtcccgccg

SEQ ID NO: 40627 - DNA, 25 bp, Homo sapien
tttaacataaacgtgggaataacac

SEQ ID NO: 40628 - DNA, 25 bp, Homo sapien
gtgttattcccacgtttatgttaaa

SEQ ID NO: 40629 - DNA, 25 bp, Homo sapien
aactacaaagacatctgaactattg

SEQ ID NO: 40630 - DNA, 25 bp, Homo sapien
caatagttcagatgtctttgtagtt

SEQ ID NO: 40631 - DNA, 25 bp, Homo sapien
cggtcactcccgccgggagtcccta

SEQ ID NO: 40632 - DNA, 25 bp, Homo sapien
tagggactcccggcgggagtgaccg

SEQ ID NO: 40633 - DNA, 25 bp, Homo sapien
gttgttgtgacatttgaccaataaa

SEQ ID NO: 40634 - DNA, 25 bp, Homo sapien
tttattggtcaaatgtcacaacaac

SEQ ID NO: 40635 - DNA, 25 bp, Homo sapien
agttgttgtgacatttgaccaataa

SEQ ID NO: 40636 - DNA, 25 bp, Homo sapien
ttattggtcaaatgtcacaacaact

SEQ ID NO: 40637 - DNA, 25 bp, Homo sapien
cacattatcagaataactatttcat

SEQ ID NO: 40638 - DNA, 25 bp, Homo sapien
atgaaatagttattctgataatgtg

SEQ ID NO: 40639 - DNA, 25 bp, Homo sapien
gagggccccggttcccactcgtctc

SEQ ID NO: 40640 - DNA, 25 bp, Homo sapien
gagacgagtgggaaccggggccctc

SEQ ID NO: 40641 - DNA, 25 bp, Homo sapien
tgtttctttgtgtaagatcaagatg

SEQ ID NO: 40642 - DNA, 25 bp, Homo sapien
catcttgatcttacacaaagaaaca

SEQ ID NO: 40643 - DNA, 25 bp, Homo sapien
ttcatattctttacctatatgataa

SEQ ID NO: 40644 - DNA, 25 bp, Homo sapien
ttatcatataggtaaagaatatgaa

SEQ ID NO: 40645 - DNA, 25 bp, Homo sapien
cagtcggcgtccagtgggccgggag

SEQ ID NO: 40646 - DNA, 25 bp, Homo sapien
ctcccggcccactggacgccgactg

SEQ ID NO: 40647 - DNA, 25 bp, Homo sapien
acccagtcggcgtccagtgggccgg

SEQ ID NO: 40648 - DNA, 25 bp, Homo sapien
ccggcccactggacgccgactgggt

SEQ ID NO: 40649 - DNA, 25 bp, Homo sapien
gctccccagcggaccgacgaggtgg

SEQ ID NO: 40650 - DNA, 25 bp, Homo sapien
ccacctcgtcggtccgctggggagc

SEQ ID NO: 40651 - DNA, 25 bp, Homo sapien
accgaaaggagaccacaacctgtct

SEQ ID NO: 40652 - DNA, 25 bp, Homo sapien
agacaggttgtggtctcctttcggt

SEQ ID NO: 40653 - DNA, 25 bp, Homo sapien
tctttccgacgttcgtaggattttc

SEQ ID NO: 40654 - DNA, 25 bp, Homo sapien
gaaaatcctacgaacgtcggaaaga

SEQ ID NO: 40655 - DNA, 25 bp, Homo sapien
gttggatagaggtgattccggcact

SEQ ID NO: 40656 - DNA, 25 bp, Homo sapien
agtgccggaatcacctctatccaac

SEQ ID NO: 40657 - DNA, 25 bp, Homo sapien
taaggttagagggtgacgaagaatc

SEQ ID NO: 40658 - DNA, 25 bp, Homo sapien
gattcttcgtcaccctctaacctta

SEQ ID NO: 40659 - DNA, 25 bp, Homo sapien
ataagtcgttaacagcgtgacacat

SEQ ID NO: 40660 - DNA, 25 bp, Homo sapien
atgtgtcacgctgttaacgacttat

SEQ ID NO: 40661 - DNA, 25 bp, Homo sapien
taaacgacaatgttttgtatatccg

SEQ ID NO: 40662 - DNA, 25 bp, Homo sapien
cggatatacaaaacattgtcgttta

SEQ ID NO: 40663 - DNA, 25 bp, Homo sapien
acccgtctctctattcgacgcggct

SEQ ID NO: 40664 - DNA, 25 bp, Homo sapien
agccgcgtcgaatagagagacgggt

SEQ ID NO: 40665 - DNA, 25 bp, Homo sapien
cagtgccatattcgtgttccgacat

SEQ ID NO: 40666 - DNA, 25 bp, Homo sapien
atgtcggaacacgaatatggcactg

SEQ ID NO: 40667 - DNA, 25 bp, Homo sapien
gtgggcgtccctgtcacaggaggtg

SEQ ID NO: 40668 - DNA, 25 bp, Homo sapien
cacctcctgtgacagggacgcccac

SEQ ID NO: 40669 - DNA, 25 bp, Homo sapien
cttatttgactcattcaggttgaag

SEQ ID NO: 40670 - DNA, 25 bp, Homo sapien
cttcaacctgaatgagtcaaataag

SEQ ID NO: 40671 - DNA, 25 bp, Homo sapien
aaagaggagtcaaaccctcgaaaca

SEQ ID NO: 40672 - DNA, 25 bp, Homo sapien
tgtttcgagggtttgactcctcttt

SEQ ID NO: 40673 - DNA, 25 bp, Homo sapien
ggcatcggtcgctgacgtccgcgaa

SEQ ID NO: 40674 - DNA, 25 bp, Homo sapien
ttcgcggacgtcagcgaccgatgcc

SEQ ID NO: 40675 - DNA, 25 bp, Homo sapien
gcgacccggggccgacatctgcgga

SEQ ID NO: 40676 - DNA, 25 bp, Homo sapien
tccgcagatgtcggccccgggtcgc

SEQ ID NO: 40677 - DNA, 25 bp, Homo sapien
tagtcgtttaatgagtgttgacctt

SEQ ID NO: 40678 - DNA, 25 bp, Homo sapien
aaggtcaacactcattaaacgacta

SEQ ID NO: 40679 - DNA, 25 bp, Homo sapien
agaaggtccagacgcggagcgggac

SEQ ID NO: 40680 - DNA, 25 bp, Homo sapien
gtcccgctccgcgtctggaccttct

SEQ ID NO: 40681 - DNA, 25 bp, Homo sapien
cgtgcctgaacccagggttcggaac

SEQ ID NO: 40682 - DNA, 25 bp, Homo sapien
gttccgaaccctgggttcaggcacg

SEQ ID NO: 40683 - DNA, 25 bp, Homo sapien
cggccgtcgccgcagctccccacgg

SEQ ID NO: 40684 - DNA, 25 bp, Homo sapien
ccgtggggagctgcggcgacggccg

SEQ ID NO: 40685 - DNA, 25 bp, Homo sapien
gcgctcgggtgtcccaggtccttct

SEQ ID NO: 40686 - DNA, 25 bp, Homo sapien
agaaggacctgggacacccgagcgc

SEQ ID NO: 40687 - DNA, 25 bp, Homo sapien
agacaatggcactaattattttggt

SEQ ID NO: 40688 - DNA, 25 bp, Homo sapien
accaaaataattagtgccattgtct

SEQ ID NO: 40689 - DNA, 25 bp, Homo sapien
gaccttctagaagttcgaaaaccat

SEQ ID NO: 40690 - DNA, 25 bp, Homo sapien
atggttttcgaacttctagaaggtc

SEQ ID NO: 40691 - DNA, 25 bp, Homo sapien
gtcctcgagacctcccagaagaact

SEQ ID NO: 40692 - DNA, 25 bp, Homo sapien
agttcttctgggaggtctcgaggac

SEQ ID NO: 40693 - DNA, 25 bp, Homo sapien
tgacttattataaaggatagagacc

SEQ ID NO: 40694 - DNA, 25 bp, Homo sapien
ggtctctatcctttataataagtca

SEQ ID NO: 40695 - DNA, 25 bp, Homo sapien
tcgtgtggccgagaacgtgtctaac

SEQ ID NO: 40696 - DNA, 25 bp, Homo sapien
gttagacacgttctcggccacacga

SEQ ID NO: 40697 - DNA, 25 bp, Homo sapien
agtcctagaacaaccacgacatagt

SEQ ID NO: 40698 - DNA, 25 bp, Homo sapien
actatgtcgtggttgttctaggact

SEQ ID NO: 40699 - DNA, 25 bp, Homo sapien
atattttatacagttgagggatatc

SEQ ID NO: 40700 - DNA, 25 bp, Homo sapien
gatatccctcaactgtataaaatat

SEQ ID NO: 40701 - DNA, 25 bp, Homo sapien
ggaacgacgtccctcaccgtcgcag

SEQ ID NO: 40702 - DNA, 25 bp, Homo sapien
ctgcgacggtgagggacgtcgttcc

SEQ ID NO: 40703 - DNA, 25 bp, Homo sapien
agttagaagaacatctaacttttag

SEQ ID NO: 40704 - DNA, 25 bp, Homo sapien
ctaaaagttagatgttcttctaact

SEQ ID NO: 40705 - DNA, 25 bp, Homo sapien
aaacgttaaagtcatggatatttaa

SEQ ID NO: 40706 - DNA, 25 bp, Homo sapien
ttaaatatccatgactttaacgttt

SEQ ID NO: 40707 - DNA, 25 bp, Homo sapien
cacgacgaaccgcagacgtgcgtta

SEQ ID NO: 40708 - DNA, 25 bp, Homo sapien
taacgcacgtctgcggttcgtcgtg

SEQ ID NO: 40709 - DNA, 25 bp, Homo sapien
tcactcgaagtttaagtacttgatt

SEQ ID NO: 40710 - DNA, 25 bp, Homo sapien
aatcaagtacttaaacttcgagtga

SEQ ID NO: 40711 - DNA, 25 bp, Homo sapien
ccatcgcccttctcgtgtccccacc

SEQ ID NO: 40712 - DNA, 25 bp, Homo sapien
ggtggggacacgagaagggcgatgg

SEQ ID NO: 40713 - DNA, 25 bp, Homo sapien
gtcgtggaacacttccctacggcgg

SEQ ID NO: 40714 - DNA, 25 bp, Homo sapien
ccgccgtagggaagtgttccacgac

SEQ ID NO: 40715 - DNA, 25 bp, Homo sapien
ggggctccgccccaggcgtagggac

SEQ ID NO: 40716 - DNA, 25 bp, Homo sapien
gtccctacgcctggggcggagcccc

SEQ ID NO: 40717 - DNA, 25 bp, Homo sapien
ggaagctctctttctccacaggcct

SEQ ID NO: 40718 - DNA, 25 bp, Homo sapien
aggcctgtggagaaagagagcttcc

SEQ ID NO: 40719 - DNA, 25 bp, Homo sapien
acagtttcgtggaagtatgggtgct

SEQ ID NO: 40720 - DNA, 25 bp, Homo sapien
agcacccatacttccacgaaactgt

SEQ ID NO: 40721 - DNA, 25 bp, Homo sapien
ggtgccaccaaatgttcgaagctac

SEQ ID NO: 40722 - DNA, 25 bp, Homo sapien
gtagcttcgaacatttggtggcacc

SEQ ID NO: 40723 - DNA, 25 bp, Homo sapien
tccctgtttcgggtgtggccggtgc

SEQ ID NO: 40724 - DNA, 25 bp, Homo sapien
gcaccggccacacccgaaacaggga

SEQ ID NO: 40725 - DNA, 25 bp, Homo sapien
ctctgccccccggcgttatgtcggg

SEQ ID NO: 40726 - DNA, 25 bp, Homo sapien
cccgacataacgccggggggcagag

SEQ ID NO: 40727 - DNA, 25 bp, Homo sapien
gtccgcgcctctgccccccggcgtt

SEQ ID NO: 40728 - DNA, 25 bp, Homo sapien
aacgccggggggcagaggcgcggac

SEQ ID NO: 40729 - DNA, 25 bp, Homo sapien
gattacgtgtgtttcagggctttat

SEQ ID NO: 40730 - DNA, 25 bp, Homo sapien
ataaagccctgaaacacacgtaatc

SEQ ID NO: 40731 - DNA, 25 bp, Homo sapien
ggtcggaggtcgacagccccctccc

SEQ ID NO: 40732 - DNA, 25 bp, Homo sapien
gggagggggctgtcgacctccgacc

SEQ ID NO: 40733 - DNA, 25 bp, Homo sapien
gaaaacgaaatgaccacgagtccgt

SEQ ID NO: 40734 - DNA, 25 bp, Homo sapien
acggactcgtggtcatttcgttttc

SEQ ID NO: 40735 - DNA, 25 bp, Homo sapien
gtacgaacacctggacgatgtcacc

SEQ ID NO: 40736 - DNA, 25 bp, Homo sapien
ggtgacatcgtccaggtgttcgtac

SEQ ID NO: 40737 - DNA, 25 bp, Homo sapien
cgaggaccgagctcgacaaaggaga

SEQ ID NO: 40738 - DNA, 25 bp, Homo sapien
tctcctttgtcgagctcggtcctcg

SEQ ID NO: 40739 - DNA, 25 bp, Homo sapien
gacgggcgtcaggagggccggcctg

SEQ ID NO: 40740 - DNA, 25 bp, Homo sapien
caggccggccctcctgacgcccgtc

SEQ ID NO: 40741 - DNA, 25 bp, Homo sapien
tacttaacctgtttcgaccggtcaa

SEQ ID NO: 40742 - DNA, 25 bp, Homo sapien
ttgaccggtcgaaacaggttaagta

SEQ ID NO: 40743 - DNA, 25 bp, Homo sapien
accagagtctccgtgcaagtgatgt

SEQ ID NO: 40744 - DNA, 25 bp, Homo sapien
acatcacttgcacggagactctggt

SEQ ID NO: 40745 - DNA, 25 bp, Homo sapien
aatgagaagaagaaatttgtttaca

SEQ ID NO: 40746 - DNA, 25 bp, Homo sapien
tgtaaacaaatttcttcttctcatt

SEQ ID NO: 40747 - DNA, 25 bp, Homo sapien
tcttaaaagtgaagccttgttctaa

SEQ ID NO: 40748 - DNA, 25 bp, Homo sapien
ttagaacaaggcttcacttttaaga

SEQ ID NO: 40749 - DNA, 25 bp, Homo sapien
tcgacccacactattggagaagtac

SEQ ID NO: 40750 - DNA, 25 bp, Homo sapien
gtacttctccaatagtgtgggtcga

SEQ ID NO: 40751 - DNA, 25 bp, Homo sapien
gatccgtgtacgcgtctagcttgga

SEQ ID NO: 40752 - DNA, 25 bp, Homo sapien
tccaagctagacgcgtacacggatc

SEQ ID NO: 40753 - DNA, 25 bp, Homo sapien
gagcttcggccctgtcgtcgaacgg

SEQ ID NO: 40754 - DNA, 25 bp, Homo sapien
ccgttcgacgacagggccgaagctc

SEQ ID NO: 40755 - DNA, 25 bp, Homo sapien
cgtggccgacacgtagggtgtgaca

SEQ ID NO: 40756 - DNA, 25 bp, Homo sapien
tgtcacaccctacgtgtcggccacg

SEQ ID NO: 40757 - DNA, 25 bp, Homo sapien
ggggcgcctgcgccctcactcgcga

SEQ ID NO: 40758 - DNA, 25 bp, Homo sapien
tcgcgagtgagggcgcaggcgcccc

SEQ ID NO: 40759 - DNA, 25 bp, Homo sapien
cggggcgcctgcgccctcactcgcg

SEQ ID NO: 40760 - DNA, 25 bp, Homo sapien
cgcgagtgagggcgcaggcgccccg

SEQ ID NO: 40761 - DNA, 25 bp, Homo sapien
cgcggggcgcctgcgccctcactcg

SEQ ID NO: 40762 - DNA, 25 bp, Homo sapien
cgagtgagggcgcaggcgccccgcg

SEQ ID NO: 40763 - DNA, 25 bp, Homo sapien
gggcgcggggcgcctgcgccctcac

SEQ ID NO: 40764 - DNA, 25 bp, Homo sapien
gtgagggcgcaggcgccccgcgccc

SEQ ID NO: 40765 - DNA, 25 bp, Homo sapien
aaatcgggacgcatgtagacttacg

SEQ ID NO: 40766 - DNA, 25 bp, Homo sapien
cgtaagtctacatgcgtcccgattt

SEQ ID NO: 40767 - DNA, 25 bp, Homo sapien
gggagatgactgatgtccttatctg

SEQ ID NO: 40768 - DNA, 25 bp, Homo sapien
cagataaggacatcagtcatctccc

SEQ ID NO: 40769 - DNA, 25 bp, Homo sapien
atcagttaccataaagaattgtaat

SEQ ID NO: 40770 - DNA, 25 bp, Homo sapien
attacaattctttatggtaactgat

SEQ ID NO: 40771 - DNA, 25 bp, Homo sapien
aactcgttcaaaacgacgatcgacg

SEQ ID NO: 40772 - DNA, 25 bp, Homo sapien
cgtcgatcgtcgttttgaacgagtt

SEQ ID NO: 40773 - DNA, 25 bp, Homo sapien
tttttgtcactggttaagactacag

SEQ ID NO: 40774 - DNA, 25 bp, Homo sapien
ctgtagtcttaaccagtgacaaaaa

SEQ ID NO: 40775 - DNA, 25 bp, Homo sapien
ggctctacctagggtccggggcgac

SEQ ID NO: 40776 - DNA, 25 bp, Homo sapien
gtcgccccggaccctaggtagagcc

SEQ ID NO: 40777 - DNA, 25 bp, Homo sapien
gacctctaccattttatacgtcaac

SEQ ID NO: 40778 - DNA, 25 bp, Homo sapien
gttgacgtataaaatggtagaggtc

SEQ ID NO: 40779 - DNA, 25 bp, Homo sapien
gacgtgtccgccggtggcgggcgag

SEQ ID NO: 40780 - DNA, 25 bp, Homo sapien
ctcgcccgccaccggcggacacgtc

SEQ ID NO: 40781 - DNA, 25 bp, Homo sapien
acgacgtgtccgccggtggcgggcg

SEQ ID NO: 40782 - DNA, 25 bp, Homo sapien
cgcccgccaccggcggacacgtcgt

SEQ ID NO: 40783 - DNA, 25 bp, Homo sapien
ggcgacagaaaggcccgcccgccgc

SEQ ID NO: 40784 - DNA, 25 bp, Homo sapien
gcggcgggcgggcctttctgtcgcc

SEQ ID NO: 40785 - DNA, 25 bp, Homo sapien
gttccgaactcggaggaggcccctg

SEQ ID NO: 40786 - DNA, 25 bp, Homo sapien
caggggcctcctccgagttcggaac

SEQ ID NO: 40787 - DNA, 25 bp, Homo sapien
gacttgtatggatcccctgaaacgg

SEQ ID NO: 40788 - DNA, 25 bp, Homo sapien
ccgtttcaggggatccatacaagtc

SEQ ID NO: 40789 - DNA, 25 bp, Homo sapien
gaccgtgggtccctcctcttcggga

SEQ ID NO: 40790 - DNA, 25 bp, Homo sapien
tcccgaagaggagggacccacggtc

SEQ ID NO: 40791 - DNA, 25 bp, Homo sapien
gataaatatgacgttaaattagaat

SEQ ID NO: 40792 - DNA, 25 bp, Homo sapien
attctaatttaacgtcatatttatc

SEQ ID NO: 40793 - DNA, 25 bp, Homo sapien
cccccgcggccgctcctacacgagt

SEQ ID NO: 40794 - DNA, 25 bp, Homo sapien
actcgtgtaggagcggccgcggggg

SEQ ID NO: 40795 - DNA, 25 bp, Homo sapien
gtcctccctcgcggaccgtgtccct

SEQ ID NO: 40796 - DNA, 25 bp, Homo sapien
agggacacggtccgcgagggaggac

SEQ ID NO: 40797 - DNA, 25 bp, Homo sapien
cgcctacactgtctgggaggtcctg

SEQ ID NO: 40798 - DNA, 25 bp, Homo sapien
caggacctcccagacagtgtaggcg

SEQ ID NO: 40799 - DNA, 25 bp, Homo sapien
caaaggtctggcctggcccgcgtac

SEQ ID NO: 40800 - DNA, 25 bp, Homo sapien
gtacgcgggccaggccagacctttg

SEQ ID NO: 40801 - DNA, 25 bp, Homo sapien
ggtgggacgggtgagtgagacccgt

SEQ ID NO: 40802 - DNA, 25 bp, Homo sapien
acgggtctcactcacccgtcccacc

SEQ ID NO: 40803 - DNA, 25 bp, Homo sapien
gtcggcgcacgcgacggcaaattgg

SEQ ID NO: 40804 - DNA, 25 bp, Homo sapien
ccaatttgccgtcgcgtgcgccgac

SEQ ID NO: 40805 - DNA, 25 bp, Homo sapien
tggtgcctctcgtccaggcggcagg

SEQ ID NO: 40806 - DNA, 25 bp, Homo sapien
cctgccgcctggacgagaggcacca

SEQ ID NO: 40807 - DNA, 25 bp, Homo sapien
acggcggcgcgcgattcggtccagg

SEQ ID NO: 40808 - DNA, 25 bp, Homo sapien
cctggaccgaatcgcgcgccgccgt

SEQ ID NO: 40809 - DNA, 25 bp, Homo sapien
gcgagcgaccgagcggctgcgggag

SEQ ID NO: 40810 - DNA, 25 bp, Homo sapien
ctcccgcagccgctcggtcgctcgc

SEQ ID NO: 40811 - DNA, 25 bp, Homo sapien
tggcctaggtcctcaggctcggtcg

SEQ ID NO: 40812 - DNA, 25 bp, Homo sapien
cgaccgagcctgaggacctaggcca

SEQ ID NO: 40813 - DNA, 25 bp, Homo sapien
atagagaaaacataagacaggtaaa

SEQ ID NO: 40814 - DNA, 25 bp, Homo sapien
tttacctgtcttatgttttctctat

SEQ ID NO: 40815 - DNA, 25 bp, Homo sapien
gtccgtccctaagcaccggttatag

SEQ ID NO: 40816 - DNA, 25 bp, Homo sapien
ctataaccggtgcttagggacggac

SEQ ID NO: 40817 - DNA, 25 bp, Homo sapien
attttcacagtacattatcaatttt

SEQ ID NO: 40818 - DNA, 25 bp, Homo sapien
aaaattgataatgtactgtgaaaat

SEQ ID NO: 40819 - DNA, 25 bp, Homo sapien
aattttcacagtacattatcaattt

SEQ ID NO: 40820 - DNA, 25 bp, Homo sapien
aaattgataatgtactgtgaaaatt

SEQ ID NO: 40821 - DNA, 25 bp, Homo sapien
tgtggggagactaacgagagtgcgt

SEQ ID NO: 40822 - DNA, 25 bp, Homo sapien
acgcactctcgttagtctccccaca

SEQ ID NO: 40823 - DNA, 25 bp, Homo sapien
ttgaacattaagatctacaaagttt

SEQ ID NO: 40824 - DNA, 25 bp, Homo sapien
aaactttgtagatcttaatgttcaa

SEQ ID NO: 40825 - DNA, 25 bp, Homo sapien
tcggctcgcgccgccgtcgccttgc

SEQ ID NO: 40826 - DNA, 25 bp, Homo sapien
gcaaggcgacggcggcgcgagccga

SEQ ID NO: 40827 - DNA, 25 bp, Homo sapien
gacatccgtttgacgggtgacaacg

SEQ ID NO: 40828 - DNA, 25 bp, Homo sapien
cgttgtcacccgtcaaacggatgtc

SEQ ID NO: 40829 - DNA, 25 bp, Homo sapien
tactagcagactggaccacggaagt

SEQ ID NO: 40830 - DNA, 25 bp, Homo sapien
acttccgtggtccagtctgctagta

SEQ ID NO: 40831 - DNA, 25 bp, Homo sapien
agggtgttttccagagtgtagactc

SEQ ID NO: 40832 - DNA, 25 bp, Homo sapien
gagtctacactctggaaaacaccct

SEQ ID NO: 40833 - DNA, 25 bp, Homo sapien
agaacgtgtctatgtacatggaccg

SEQ ID NO: 40834 - DNA, 25 bp, Homo sapien
cggtccatgtacatagacacgttct

SEQ ID NO: 40835 - DNA, 25 bp, Homo sapien
acggagctcacgaccagataccggt

SEQ ID NO: 40836 - DNA, 25 bp, Homo sapien
accggtatctggtcgtgagctccgt

SEQ ID NO: 40837 - DNA, 25 bp, Homo sapien
ccagccaccacaatgtgtgtaagta

SEQ ID NO: 40838 - DNA, 25 bp, Homo sapien
tacttacacacattgtggtggctgg

SEQ ID NO: 40839 - DNA, 25 bp, Homo sapien
cccggaccagcgacaccgaagtcgg

SEQ ID NO: 40840 - DNA, 25 bp, Homo sapien
ccgacttcggtgtcgctggtccggg

SEQ ID NO: 40841 - DNA, 25 bp, Homo sapien
ggtttcaagtattggttaaaatgac

SEQ ID NO: 40842 - DNA, 25 bp, Homo sapien
gtcattttaaccaatacttgaaacc

SEQ ID NO: 40843 - DNA, 25 bp, Homo sapien
cttcttcttgttgacagtaatatac

SEQ ID NO: 40844 - DNA, 25 bp, Homo sapien
gtatattactgtcaacaagaagaag

SEQ ID NO: 40845 - DNA, 25 bp, Homo sapien
gatcgccctctgtgtcccggcgtcc

SEQ ID NO: 40846 - DNA, 25 bp, Homo sapien
ggacgccgggacacagagggcgatc

SEQ ID NO: 40847 - DNA, 25 bp, Homo sapien
cggctgaaggagggcagcaccggtc

SEQ ID NO: 40848 - DNA, 25 bp, Homo sapien
gaccggtgctgccctccttcagccg

SEQ ID NO: 40849 - DNA, 25 bp, Homo sapien
gggactgggcgcgaggaggaccagc

SEQ ID NO: 40850 - DNA, 25 bp, Homo sapien
gctggtcctcctcgcgcccagtccc

SEQ ID NO: 40851 - DNA, 25 bp, Homo sapien
ttatttacaaagttgacactgcgac

SEQ ID NO: 40852 - DNA, 25 bp, Homo sapien
gtcgcagtgtcaactttgtaaataa

SEQ ID NO: 40853 - DNA, 25 bp, Homo sapien
gggcacgcgaaagccgggccggtca

SEQ ID NO: 40854 - DNA, 25 bp, Homo sapien
tgaccggcccggctttcgcgtgccc

SEQ ID NO: 40855 - DNA, 25 bp, Homo sapien
gtcacaccttcactatagagggagg

SEQ ID NO: 40856 - DNA, 25 bp, Homo sapien
cctccctctatagtgaaggtgtgac

SEQ ID NO: 40857 - DNA, 25 bp, Homo sapien
ccaggtcacgggaaaacgttcacaa

SEQ ID NO: 40858 - DNA, 25 bp, Homo sapien
ttgtgaacgttttcccgtgacctgg

SEQ ID NO: 40859 - DNA, 25 bp, Homo sapien
ggtgctccccgggactcacagagta

SEQ ID NO: 40860 - DNA, 25 bp, Homo sapien
tactctgtgagtcccggggagcacc

SEQ ID NO: 40861 - DNA, 25 bp, Homo sapien
aaagggtatggaaagagtgttagtc

SEQ ID NO: 40862 - DNA, 25 bp, Homo sapien
gactaacactctttccatacccttt

SEQ ID NO: 40863 - DNA, 25 bp, Homo sapien
gcagtacacttgtcttaatcagtag

SEQ ID NO: 40864 - DNA, 25 bp, Homo sapien
ctactgattaagacaagtgtactgc

SEQ ID NO: 40865 - DNA, 25 bp, Homo sapien
ggtgcaggcggagacgccttcgagg

SEQ ID NO: 40866 - DNA, 25 bp, Homo sapien
cctcgaaggcgtctccgcctgcacc

SEQ ID NO: 40867 - DNA, 25 bp, Homo sapien
tgggacactgccagttctggtctag

SEQ ID NO: 40868 - DNA, 25 bp, Homo sapien
ctagaccagaactggcagtgtccca

SEQ ID NO: 40869 - DNA, 25 bp, Homo sapien
catctctccgcgaagtagaccagag

SEQ ID NO: 40870 - DNA, 25 bp, Homo sapien
ctctggtctacttcgcggagagatg

SEQ ID NO: 40871 - DNA, 25 bp, Homo sapien
tcttccacccgccgtcgcggtcggg

SEQ ID NO: 40872 - DNA, 25 bp, Homo sapien
cccgaccgcgacggcgggtggaaga

SEQ ID NO: 40873 - DNA, 25 bp, Homo sapien
tgacgtttgacggttgcaagtagcc

SEQ ID NO: 40874 - DNA, 25 bp, Homo sapien
ggctacttgcaaccgtcaaacgtca

SEQ ID NO: 40875 - DNA, 25 bp, Homo sapien
tcataaaccctgaaacttacgcaag

SEQ ID NO: 40876 - DNA, 25 bp, Homo sapien
cttgcgtaagtttcagggtttatga

SEQ ID NO: 40877 - DNA, 25 bp, Homo sapien
aggtcccggaattgggtatgacaag

SEQ ID NO: 40878 - DNA, 25 bp, Homo sapien
cttgtcatacccaattccgggacct

SEQ ID NO: 40879 - DNA, 25 bp, Homo sapien
gggtctgttaaaagagacctttcaa

SEQ ID NO: 40880 - DNA, 25 bp, Homo sapien
ttgaaaggtctcttttaacagaccc

SEQ ID NO: 40881 - DNA, 25 bp, Homo sapien
ggttgtaggacccatcctcgtaaac

SEQ ID NO: 40882 - DNA, 25 bp, Homo sapien
gtttacgaggatgggtcctacaacc

SEQ ID NO: 40883 - DNA, 25 bp, Homo sapien
gcccaggtgtgatgcgcggttcaca

SEQ ID NO: 40884 - DNA, 25 bp, Homo sapien
tgtgaaccgcgcatcacacctgggc

SEQ ID NO: 40885 - DNA, 25 bp, Homo sapien
agaatgagtaaaacgtgagaacgaa

SEQ ID NO: 40886 - DNA, 25 bp, Homo sapien
ttcgttctcacgttttactcattct

SEQ ID NO: 40887 - DNA, 25 bp, Homo sapien
tccaagcaaaagaatgagtaaaacg

SEQ ID NO: 40888 - DNA, 25 bp, Homo sapien
cgttttactcattcttttgcttgga

SEQ ID NO: 40889 - DNA, 25 bp, Homo sapien
cttgtagtaggttgagaacaggtct

SEQ ID NO: 40890 - DNA, 25 bp, Homo sapien
agacctgttctcaacctactacaag

SEQ ID NO: 40891 - DNA, 25 bp, Homo sapien
acatagaagtctaaggctccggacc

SEQ ID NO: 40892 - DNA, 25 bp, Homo sapien
ggtccggagccttagacttctatgt

SEQ ID NO: 40893 - DNA, 25 bp, Homo sapien
tgtcaggacctttgctttcggacaa

SEQ ID NO: 40894 - DNA, 25 bp, Homo sapien
ttgtccgaaagcaaaggtcctgaca

SEQ ID NO: 40895 - DNA, 25 bp, Homo sapien
ccttggagaccggtgttctaggact

SEQ ID NO: 40896 - DNA, 25 bp, Homo sapien
agtcctagaacaccggtctccaagg

SEQ ID NO: 40897 - DNA, 25 bp, Homo sapien
cgtcctattccaccagtgcattgag

SEQ ID NO: 40898 - DNA, 25 bp, Homo sapien
ctcaatgcactggtggaataggacg

SEQ ID NO: 40899 - DNA, 25 bp, Homo sapien
ggcattatgtcagaacagtgctagg

SEQ ID NO: 40900 - DNA, 25 bp, Homo sapien
cctagcactgttctgacataatgcc

SEQ ID NO: 40901 - DNA, 25 bp, Homo sapien
gggctactgagtggggtcgccgtga

SEQ ID NO: 40902 - DNA, 25 bp, Homo sapien
tcacggcgaccccactcagtagccc

SEQ ID NO: 40903 - DNA, 25 bp, Homo sapien
cgctggtagataccctatgagttct

SEQ ID NO: 40904 - DNA, 25 bp, Homo sapien
agaactcatagggtatctaccagcg

SEQ ID NO: 40905 - DNA, 25 bp, Homo sapien
tcgtcgcgggcagccctcggtactg

SEQ ID NO: 40906 - DNA, 25 bp, Homo sapien
cagtaccgagggctgcccgcgacga

SEQ ID NO: 40907 - DNA, 25 bp, Homo sapien
aatccctggtatatagacttcctca

SEQ ID NO: 40908 - DNA, 25 bp, Homo sapien
tgaggaagtctatataccagggatt

SEQ ID NO: 40909 - DNA, 25 bp, Homo sapien
gtcctgtcccagtaccctcccgtcg

SEQ ID NO: 40910 - DNA, 25 bp, Homo sapien
cgacgggagggtactgggacaggac

SEQ ID NO: 40911 - DNA, 25 bp, Homo sapien
atctacagtcccacaacgatttcat

SEQ ID NO: 40912 - DNA, 25 bp, Homo sapien
atgaaatcgttgtgggactgtagat

SEQ ID NO: 40913 - DNA, 25 bp, Homo sapien
aatactcacagtcgatacagagacg

SEQ ID NO: 40914 - DNA, 25 bp, Homo sapien
cgtctctgtatcgactgtgagtatt

SEQ ID NO: 40915 - DNA, 25 bp, Homo sapien
atctcgggcgccgacgaatacggtc

SEQ ID NO: 40916 - DNA, 25 bp, Homo sapien
gaccgtattcgtcggcgcccgagat

SEQ ID NO: 40917 - DNA, 25 bp, Homo sapien
cattgttaattacgacactatttta

SEQ ID NO: 40918 - DNA, 25 bp, Homo sapien
taaaatagtgtcgtaattaacaatg

SEQ ID NO: 40919 - DNA, 25 bp, Homo sapien
caatcattgttaattacgacactat

SEQ ID NO: 40920 - DNA, 25 bp, Homo sapien
atagtgtcgtaattaacaatgattg

SEQ ID NO: 40921 - DNA, 25 bp, Homo sapien
gggtctgggtgaccggccggcctgc

SEQ ID NO: 40922 - DNA, 25 bp, Homo sapien
gcaggccggccggtcacccagaccc

SEQ ID NO: 40923 - DNA, 25 bp, Homo sapien
ggccctgggcgtcggtcccaggcgg

SEQ ID NO: 40924 - DNA, 25 bp, Homo sapien
ccgcctgggaccgacgcccagggcc

SEQ ID NO: 40925 - DNA, 25 bp, Homo sapien
gggcggccgcacacgcgccccacgc

SEQ ID NO: 40926 - DNA, 25 bp, Homo sapien
gcgtggggcgcgtgtgcggccgccc

SEQ ID NO: 40927 - DNA, 25 bp, Homo sapien
cggggcggccgcacacgcgccccac

SEQ ID NO: 40928 - DNA, 25 bp, Homo sapien
gtggggcgcgtgtgcggccgccccg

SEQ ID NO: 40929 - DNA, 25 bp, Homo sapien
ctataaagacattaacgaaagggaa

SEQ ID NO: 40930 - DNA, 25 bp, Homo sapien
ttccctttcgttaatgtctttatag

SEQ ID NO: 40931 - DNA, 25 bp, Homo sapien
tcacacacgtaacttaaggaccaat

SEQ ID NO: 40932 - DNA, 25 bp, Homo sapien
attggtccttaagttacgtgtgtga

SEQ ID NO: 40933 - DNA, 25 bp, Homo sapien
agtgatccagagtccagaaggttcg

SEQ ID NO: 40934 - DNA, 25 bp, Homo sapien
cgaaccttctggactctggatcact

SEQ ID NO: 40935 - DNA, 25 bp, Homo sapien
ctctcttgaatatagggtcattggt

SEQ ID NO: 40936 - DNA, 25 bp, Homo sapien
accaatgaccctatattcaagagag

SEQ ID NO: 40937 - DNA, 25 bp, Homo sapien
ccgagacggacgtcgcgcccgcggt

SEQ ID NO: 40938 - DNA, 25 bp, Homo sapien
accgcgggcgcgacgtccgtctcgg

SEQ ID NO: 40939 - DNA, 25 bp, Homo sapien
gctcgaccctaaacgagacctagag

SEQ ID NO: 40940 - DNA, 25 bp, Homo sapien
ctctaggtctcgtttagggtcgagc

SEQ ID NO: 40941 - DNA, 25 bp, Homo sapien
acgtatacagacgaatagacagtga

SEQ ID NO: 40942 - DNA, 25 bp, Homo sapien
tcactgtctattcgtctgtatacgt

SEQ ID NO: 40943 - DNA, 25 bp, Homo sapien
gtattgtgtagaaccactgtttaac

SEQ ID NO: 40944 - DNA, 25 bp, Homo sapien
gttaaacagtggttctacacaatac

SEQ ID NO: 40945 - DNA, 25 bp, Homo sapien
taaaactattcttacaaccataagt

SEQ ID NO: 40946 - DNA, 25 bp, Homo sapien
acttatggttgtaagaatagtttta

SEQ ID NO: 40947 - DNA, 25 bp, Homo sapien
atactagaacaacaaatgacacaag

SEQ ID NO: 40948 - DNA, 25 bp, Homo sapien
cttgtgtcatttgttgttctagtat

SEQ ID NO: 40949 - DNA, 25 bp, Homo sapien
tagatactagaacaacaaatgacac

SEQ ID NO: 40950 - DNA, 25 bp, Homo sapien
gtgtcatttgttgttctagtatcta

SEQ ID NO: 40951 - DNA, 25 bp, Homo sapien
agtatctcactatggtctaaatttt

SEQ ID NO: 40952 - DNA, 25 bp, Homo sapien
aaaatttagaccatagtgagatact

SEQ ID NO: 40953 - DNA, 25 bp, Homo sapien
agtatctacaaacgtcctgaccgga

SEQ ID NO: 40954 - DNA, 25 bp, Homo sapien
tccggtcaggacgtttgtagatact

SEQ ID NO: 40955 - DNA, 25 bp, Homo sapien
gaccggctcctgtcccggtgtcctg

SEQ ID NO: 40956 - DNA, 25 bp, Homo sapien
caggacaccgggacaggagccggtc

SEQ ID NO: 40957 - DNA, 25 bp, Homo sapien
aataacgaagtattttatgaacctg

SEQ ID NO: 40958 - DNA, 25 bp, Homo sapien
caggttcataaaatacttcgttatt

SEQ ID NO: 40959 - DNA, 25 bp, Homo sapien
aaaggaggcgtacaaattgaagtca

SEQ ID NO: 40960 - DNA, 25 bp, Homo sapien
tgacttcaatttgtacgcctccttt

SEQ ID NO: 40961 - DNA, 25 bp, Homo sapien
tctcggggcgcaccagggtgtccgg

SEQ ID NO: 40962 - DNA, 25 bp, Homo sapien
ccggacaccctggtgcgccccgaga

SEQ ID NO: 40963 - DNA, 25 bp, Homo sapien
cccagggcgcacaccgacctcccat

SEQ ID NO: 40964 - DNA, 25 bp, Homo sapien
atgggaggtcggtgtgcgccctggg

SEQ ID NO: 40965 - DNA, 25 bp, Homo sapien
ggtcccagggcgcacaccgacctcc

SEQ ID NO: 40966 - DNA, 25 bp, Homo sapien
ggaggtcggtgtgcgccctgggacc

SEQ ID NO: 40967 - DNA, 25 bp, Homo sapien
gatctaaaagttggtcggtatttta

SEQ ID NO: 40968 - DNA, 25 bp, Homo sapien
taaaataccgaccaacttttagatc

SEQ ID NO: 40969 - DNA, 25 bp, Homo sapien
gtactttctctggtggcggttcctc

SEQ ID NO: 40970 - DNA, 25 bp, Homo sapien
gaggaaccgccaccagagaaagtac

SEQ ID NO: 40971 - DNA, 25 bp, Homo sapien
agtccggaagagtgcgcaaaggtgt

SEQ ID NO: 40972 - DNA, 25 bp, Homo sapien
acacctttgcgcactcttccggact

SEQ ID NO: 40973 - DNA, 25 bp, Homo sapien
cgcgcactcggctgcagacacagga

SEQ ID NO: 40974 - DNA, 25 bp, Homo sapien
tcctgtgtctgcagccgagtgcgcg

SEQ ID NO: 40975 - DNA, 25 bp, Homo sapien
aggacagacaaaggctcgtcaacag

SEQ ID NO: 40976 - DNA, 25 bp, Homo sapien
ctgttgacgagcctttgtctgtcct

SEQ ID NO: 40977 - DNA, 25 bp, Homo sapien
ttattctcaatttagttttttacat

SEQ ID NO: 40978 - DNA, 25 bp, Homo sapien
atgtaaaaaactaaattgagaataa

SEQ ID NO: 40979 - DNA, 25 bp, Homo sapien
gttattctcaatttagttttttaca

SEQ ID NO: 40980 - DNA, 25 bp, Homo sapien
tgtaaaaaactaaattgagaataac

SEQ ID NO: 40981 - DNA, 25 bp, Homo sapien
tatccgggaccataaagaacgttct

SEQ ID NO: 40982 - DNA, 25 bp, Homo sapien
agaacgttctttatggtcccggata

SEQ ID NO: 40983 - DNA, 25 bp, Homo sapien
atctcagacttaattggggtgacaa

SEQ ID NO: 40984 - DNA, 25 bp, Homo sapien
ttgtcaccccaattaagtctgagat

SEQ ID NO: 40985 - DNA, 25 bp, Homo sapien
gccgtttactcggactcttcgttaa

SEQ ID NO: 40986 - DNA, 25 bp, Homo sapien
ttaacgaagagtccgagtaaacggc

SEQ ID NO: 40987 - DNA, 25 bp, Homo sapien
tcgttactgcactaaaactatgcct

SEQ ID NO: 40988 - DNA, 25 bp, Homo sapien
aggcatagttttagtgcagtaacga

SEQ ID NO: 40989 - DNA, 25 bp, Homo sapien
ggaatttccataggactcttatcct

SEQ ID NO: 40990 - DNA, 25 bp, Homo sapien
aggataagagtcctatggaaattcc

SEQ ID NO: 40991 - DNA, 25 bp, Homo sapien
aaatctactccctaacctcatctag

SEQ ID NO: 40992 - DNA, 25 bp, Homo sapien
ctagatgaggttagggagtagattt

SEQ ID NO: 40993 - DNA, 25 bp, Homo sapien
gacctctctccacaccacccccccc

SEQ ID NO: 40994 - DNA, 25 bp, Homo sapien
ggggggggtggtgtggagagaggtc

SEQ ID NO: 40995 - DNA, 25 bp, Homo sapien
cgaggggttggggtatcagtaggac

SEQ ID NO: 40996 - DNA, 25 bp, Homo sapien
gtcctactgataccccaacccctcg

SEQ ID NO: 40997 - DNA, 25 bp, Homo sapien
tccttacatgaaaacctctaagagg

SEQ ID NO: 40998 - DNA, 25 bp, Homo sapien
cctcttagaggttttcatgtaagga

SEQ ID NO: 40999 - DNA, 25 bp, Homo sapien
gacgttcatccacttacttctcttt

SEQ ID NO: 41000 - DNA, 25 bp, Homo sapien
aaagagaagtaagtggatgaacgtc

SEQ ID NO: 41001 - DNA, 25 bp, Homo sapien
tcgggtccaccgctccgattgtcgt

SEQ ID NO: 41002 - DNA, 25 bp, Homo sapien
acgacaatcggagcggtggacccga

SEQ ID NO: 41003 - DNA, 25 bp, Homo sapien
tagacatcgttatttcattaagaat

SEQ ID NO: 41004 - DNA, 25 bp, Homo sapien
attcttaatgaaataacgatgtcta

SEQ ID NO: 41005 - DNA, 25 bp, Homo sapien
tgtaataatagtccagacaatttgt

SEQ ID NO: 41006 - DNA, 25 bp, Homo sapien
acaaattgtctggactattattaca

SEQ ID NO: 41007 - DNA, 25 bp, Homo sapien
ccgtagccctaccatgcggaacggg

SEQ ID NO: 41008 - DNA, 25 bp, Homo sapien
cccgttccgcatggtagggctacgg

SEQ ID NO: 41009 - DNA, 25 bp, Homo sapien
agacgtcgccattctagttcggaac

SEQ ID NO: 41010 - DNA, 25 bp, Homo sapien
gttccgaactagaatggcgacgtct

SEQ ID NO: 41011 - DNA, 25 bp, Homo sapien
acaagaatatgagtatccgagaagc

SEQ ID NO: 41012 - DNA, 25 bp, Homo sapien
gcttctcggatactcatattcttgt

SEQ ID NO: 41013 - DNA, 25 bp, Homo sapien
ccgtcgccaactttgtagactcttc

SEQ ID NO: 41014 - DNA, 25 bp, Homo sapien
gaagagtctacaaagttggcgacgg

SEQ ID NO: 41015 - DNA, 25 bp, Homo sapien
atagtgaaagtctaagttttaatat

SEQ ID NO: 41016 - DNA, 25 bp, Homo sapien
atattaaaacttagactttcactat

SEQ ID NO: 41017 - DNA, 25 bp, Homo sapien
tcgcggaagttgaaagacacggacg

SEQ ID NO: 41018 - DNA, 25 bp, Homo sapien
cgtccgtgtctttcaacttccgcga

SEQ ID NO: 41019 - DNA, 25 bp, Homo sapien
acatgttcgaaatttgaagactatt

SEQ ID NO: 41020 - DNA, 25 bp, Homo sapien
aatagtcttcaaatttcgaacatgt

SEQ ID NO: 41021 - DNA, 25 bp, Homo sapien
taagtcacacctaaggatccgccag

SEQ ID NO: 41022 - DNA, 25 bp, Homo sapien
ctggcggatccttaggtgtgactta

SEQ ID NO: 41023 - DNA, 25 bp, Homo sapien
atttaagaagaggatgtgtaagttc

SEQ ID NO: 41024 - DNA, 25 bp, Homo sapien
gaacttacacatcctcttcttaaat

SEQ ID NO: 41025 - DNA, 25 bp, Homo sapien
tttggggattctagtagtactgacc

SEQ ID NO: 41026 - DNA, 25 bp, Homo sapien
ggtcagtactactagaatccccaaa

SEQ ID NO: 41027 - DNA, 25 bp, Homo sapien
cttcctcttgacatctagaaaaaag

SEQ ID NO: 41028 - DNA, 25 bp, Homo sapien
cttttttctagatgtcaagaggaag

SEQ ID NO: 41029 - DNA, 25 bp, Homo sapien
tccgtgtggacaccattgcagtctt

SEQ ID NO: 41030 - DNA, 25 bp, Homo sapien
aagactgcaatggtgtccacacgga

SEQ ID NO: 41031 - DNA, 25 bp, Homo sapien
gagacgacgggtgtctcacccgacg

SEQ ID NO: 41032 - DNA, 25 bp, Homo sapien
cgtcgggtgagacacccgtcgtctc

SEQ ID NO: 41033 - DNA, 25 bp, Homo sapien
tcggggcctgccgtgagcgctcctc

SEQ ID NO: 41034 - DNA, 25 bp, Homo sapien
gaggagcgctcacggcaggccccga

SEQ ID NO: 41035 - DNA, 25 bp, Homo sapien
agactcaacggtcaagtcgaaacgg

SEQ ID NO: 41036 - DNA, 25 bp, Homo sapien
ccgtttcgacttgaccgttgagtct

SEQ ID NO: 41037 - DNA, 25 bp, Homo sapien
tgccgaagtgggacccgtgccgacg

SEQ ID NO: 41038 - DNA, 25 bp, Homo sapien
cgtcggcacgggtcccacttcggca

SEQ ID NO: 41039 - DNA, 25 bp, Homo sapien
aattatgaacttttcactagtttat

SEQ ID NO: 41040 - DNA, 25 bp, Homo sapien
ataaactagtgaaaagttcataatt

SEQ ID NO: 41041 - DNA, 25 bp, Homo sapien
gtaattatgaacttttcactagttt

SEQ ID NO: 41042 - DNA, 25 bp, Homo sapien
aaactagtgaaaagttcataattac

SEQ ID NO: 41043 - DNA, 25 bp, Homo sapien
gggcgtcgacaagccgcgggtggtc

SEQ ID NO: 41044 - DNA, 25 bp, Homo sapien
gaccacccgcggcttgtcgacgccc

SEQ ID NO: 41045 - DNA, 25 bp, Homo sapien
gagaaacgatcactctgtcgagcag

SEQ ID NO: 41046 - DNA, 25 bp, Homo sapien
ctgctcgacagagtgatcgtttctc

SEQ ID NO: 41047 - DNA, 25 bp, Homo sapien
cggtccgcctggacctgcctcgcag

SEQ ID NO: 41048 - DNA, 25 bp, Homo sapien
ctgcgaggcaggtccaggcggaccg

SEQ ID NO: 41049 - DNA, 25 bp, Homo sapien
acggacctaatagtacctagtctag

SEQ ID NO: 41050 - DNA, 25 bp, Homo sapien
ctagactaggtactattaggtccgt

SEQ ID NO: 41051 - DNA, 25 bp, Homo sapien
ccagacaaactttggactccctaag

SEQ ID NO: 41052 - DNA, 25 bp, Homo sapien
cttagggagtccaaagtttgtctgg

SEQ ID NO: 41053 - DNA, 25 bp, Homo sapien
aacaagaacttagtggtttgaggag

SEQ ID NO: 41054 - DNA, 25 bp, Homo sapien
ctcctcaaaccactaagttcttgtt

SEQ ID NO: 41055 - DNA, 25 bp, Homo sapien
cgacgaagagtgctccccgcgtcca

SEQ ID NO: 41056 - DNA, 25 bp, Homo sapien
tggacgcggggagcactcttcgtcg

SEQ ID NO: 41057 - DNA, 25 bp, Homo sapien
gcccgccacggcgtcgcggcttcgg

SEQ ID NO: 41058 - DNA, 25 bp, Homo sapien
ccgaagccgcgacgccgtggcgggc

SEQ ID NO: 41059 - DNA, 25 bp, Homo sapien
gggtcgtgggccgggcttccggcgc

SEQ ID NO: 41060 - DNA, 25 bp, Homo sapien
gcgccggaagcccggcccacgaccc

SEQ ID NO: 41061 - DNA, 25 bp, Homo sapien
aacaggtcccggacacgtgcttctc

SEQ ID NO: 41062 - DNA, 25 bp, Homo sapien
gagaagcacgtgtccgggacctgtt

SEQ ID NO: 41063 - DNA, 25 bp, Homo sapien
ctggaccgggagttaagacagacat

SEQ ID NO: 41064 - DNA, 25 bp, Homo sapien
atgtctgtcttaactcccggtccag

SEQ ID NO: 41065 - DNA, 25 bp, Homo sapien
ccacggggtatcgttgtgtaggaac

SEQ ID NO: 41066 - DNA, 25 bp, Homo sapien
gttcctacacaacgataccccgtgg

SEQ ID NO: 41067 - DNA, 25 bp, Homo sapien
ggcactccgactaccgtgcagacac

SEQ ID NO: 41068 - DNA, 25 bp, Homo sapien
gtgtctgcacggtagtcggagtgcc

SEQ ID NO: 41069 - DNA, 25 bp, Homo sapien
ataatcgaccttgcgacagacctgt

SEQ ID NO: 41070 - DNA, 25 bp, Homo sapien
acaggtctgtcgcaaggtcgattat

SEQ ID NO: 41071 - DNA, 25 bp, Homo sapien
tcctgagacgtgttatagttatgac

SEQ ID NO: 41072 - DNA, 25 bp, Homo sapien
gtcataactataacacgtctcagga

SEQ ID NO: 41073 - DNA, 25 bp, Homo sapien
ccctaatacagtgtttcaagtgaac

SEQ ID NO: 41074 - DNA, 25 bp, Homo sapien
gttcacttgaaacactgtattaggg

SEQ ID NO: 41075 - DNA, 25 bp, Homo sapien
gtcggacagtgcgacacttaccccc

SEQ ID NO: 41076 - DNA, 25 bp, Homo sapien
gggggtaagtgtcgcactgtccgac

SEQ ID NO: 41077 - DNA, 25 bp, Homo sapien
gattttcacaacgttccaaaggacg

SEQ ID NO: 41078 - DNA, 25 bp, Homo sapien
cgtcctttggaacgttgtgaaaatc

SEQ ID NO: 41079 - DNA, 25 bp, Homo sapien
ggagctgagccacggccggggaccg

SEQ ID NO: 41080 - DNA, 25 bp, Homo sapien
cggtccccggccgtggctcagctcc

SEQ ID NO: 41081 - DNA, 25 bp, Homo sapien
gacgggacctgccttacggctcgca

SEQ ID NO: 41082 - DNA, 25 bp, Homo sapien
tgcgagccgtaaggcaggtcccgtc

SEQ ID NO: 41083 - DNA, 25 bp, Homo sapien
ggaccgacgacccacgatgccatcc

SEQ ID NO: 41084 - DNA, 25 bp, Homo sapien
ggatggcatcgtgggtcgtcggtcc

SEQ ID NO: 41085 - DNA, 25 bp, Homo sapien
gtccttgcacttacagccgagaggt

SEQ ID NO: 41086 - DNA, 25 bp, Homo sapien
acctctcggctgtaagtgcaaggac

SEQ ID NO: 41087 - DNA, 25 bp, Homo sapien
aagtgataatattcgataactgtag

SEQ ID NO: 41088 - DNA, 25 bp, Homo sapien
ctacagttatcgaatattatcactt

SEQ ID NO: 41089 - DNA, 25 bp, Homo sapien
actaaagtgataatattcgataact

SEQ ID NO: 41090 - DNA, 25 bp, Homo sapien
agttatcgaatattatcactttagt

SEQ ID NO: 41091 - DNA, 25 bp, Homo sapien
agtttggagcgttccagttgacaac

SEQ ID NO: 41092 - DNA, 25 bp, Homo sapien
gttgtcaactggaacgctccaaact

SEQ ID NO: 41093 - DNA, 25 bp, Homo sapien
cacgacgagggctcagccgcgcgcc

SEQ ID NO: 41094 - DNA, 25 bp, Homo sapien
ggcgcgcggctgagccctcgtcgtg

SEQ ID NO: 41095 - DNA, 25 bp, Homo sapien
gcttcgcccaagtccgggcccggac

SEQ ID NO: 41096 - DNA, 25 bp, Homo sapien
gtccgggcccggacttgggcgaagc

SEQ ID NO: 41097 - DNA, 25 bp, Homo sapien
tgtccacccgatttggtcaataggt

SEQ ID NO: 41098 - DNA, 25 bp, Homo sapien
acctattgaccaaatcgggtggaca

SEQ ID NO: 41099 - DNA, 25 bp, Homo sapien
gtcttcggcgcccctcccggacggc

SEQ ID NO: 41100 - DNA, 25 bp, Homo sapien
gccgtccgggaggggcgccgaagac

SEQ ID NO: 41101 - DNA, 25 bp, Homo sapien
cggagcctgagacgcgccgagggcg

SEQ ID NO: 41102 - DNA, 25 bp, Homo sapien
cgccctcggcgcgtctcaggctccg

SEQ ID NO: 41103 - DNA, 25 bp, Homo sapien
gccggtagggccaccctcccgagcc

SEQ ID NO: 41104 - DNA, 25 bp, Homo sapien
ggctcgggagggtggccctaccggc

SEQ ID NO: 41105 - DNA, 25 bp, Homo sapien
attcgttcacctctgtgcgagtccg

SEQ ID NO: 41106 - DNA, 25 bp, Homo sapien
cggactcgcacagaggtgaacgaat

SEQ ID NO: 41107 - DNA, 25 bp, Homo sapien
catcaaggctggaccgacagaccct

SEQ ID NO: 41108 - DNA, 25 bp, Homo sapien
agggtctgtcggtccagccttgatg

SEQ ID NO: 41109 - DNA, 25 bp, Homo sapien
agtcgtgagttcctcacaacccggg

SEQ ID NO: 41110 - DNA, 25 bp, Homo sapien
cccgggttgtgaggaactcacgact

SEQ ID NO: 41111 - DNA, 25 bp, Homo sapien
taaaacgtcagattgaagagatcac

SEQ ID NO: 41112 - DNA, 25 bp, Homo sapien
gtgatctcttcaatctgacgtttta

SEQ ID NO: 41113 - DNA, 25 bp, Homo sapien
tctcggggtcccgtgcgctcaagag

SEQ ID NO: 41114 - DNA, 25 bp, Homo sapien
ctcttgagcgcacgggaccccgaga

SEQ ID NO: 41115 - DNA, 25 bp, Homo sapien
ttccagaggagcctagcggacctct

SEQ ID NO: 41116 - DNA, 25 bp, Homo sapien
agaggtccgctaggctcctctggaa

SEQ ID NO: 41117 - DNA, 25 bp, Homo sapien
aggacctaaggcctcacgtaagtgg

SEQ ID NO: 41118 - DNA, 25 bp, Homo sapien
ccacttacgtgaggccttaggtcct

SEQ ID NO: 41119 - DNA, 25 bp, Homo sapien
gagggacactaggtcacgtagagaa

SEQ ID NO: 41120 - DNA, 25 bp, Homo sapien
ttctctacgtgacctagtgtccctc

SEQ ID NO: 41121 - DNA, 25 bp, Homo sapien
tccgccgccagggagggcgacagcg

SEQ ID NO: 41122 - DNA, 25 bp, Homo sapien
cgctgtcgccctccctggcggcgga

SEQ ID NO: 41123 - DNA, 25 bp, Homo sapien
acctcgatgaacgtaggaatactct

SEQ ID NO: 41124 - DNA, 25 bp, Homo sapien
agagtattcctacgttcatcgaggt

SEQ ID NO: 41125 - DNA, 25 bp, Homo sapien
ggtgtacccaggcataagggaaggg

SEQ ID NO: 41126 - DNA, 25 bp, Homo sapien
cccttcccttatgcctgggtacacc

SEQ ID NO: 41127 - DNA, 25 bp, Homo sapien
tcccgatgtgttcacacaggaaaat

SEQ ID NO: 41128 - DNA, 25 bp, Homo sapien
attttcctgtgtgaacacatcggga

SEQ ID NO: 41129 - DNA, 25 bp, Homo sapien
tcgtgtcaactaaggtgaggattgt

SEQ ID NO: 41130 - DNA, 25 bp, Homo sapien
acaatcctcaccttagttgacacga

SEQ ID NO: 41131 - DNA, 25 bp, Homo sapien
aaggcgaaacgaaatcagtacaact

SEQ ID NO: 41132 - DNA, 25 bp, Homo sapien
agttgtactgatttcgtttcgcctt

SEQ ID NO: 41133 - DNA, 25 bp, Homo sapien
gaaaagtacctgagtggcgacgccc

SEQ ID NO: 41134 - DNA, 25 bp, Homo sapien
gggcgtcgccactcaggtacttttc

SEQ ID NO: 41135 - DNA, 25 bp, Homo sapien
gacgccctacccctccggcgacggc

SEQ ID NO: 41136 - DNA, 25 bp, Homo sapien
gccgtcgccggaggggtagggcgtc

SEQ ID NO: 41137 - DNA, 25 bp, Homo sapien
gccctacccctccggcgacggcggc

SEQ ID NO: 41138 - DNA, 25 bp, Homo sapien
gccgccgtcgccggaggggtagggc

SEQ ID NO: 41139 - DNA, 25 bp, Homo sapien
gatcgtgaggcgacccctcgagacc

SEQ ID NO: 41140 - DNA, 25 bp, Homo sapien
ggtctcgaggggtcgcctcacgatc

SEQ ID NO: 41141 - DNA, 25 bp, Homo sapien
taaagtaataaataaggtcgatgat

SEQ ID NO: 41142 - DNA, 25 bp, Homo sapien
atcatcgaccttatttattacttta

SEQ ID NO: 41143 - DNA, 25 bp, Homo sapien
ggacgacagtccaaaaagaaacctc

SEQ ID NO: 41144 - DNA, 25 bp, Homo sapien
gaggtttctttttggactgtcgtcc

SEQ ID NO: 41145 - DNA, 25 bp, Homo sapien
ggacttccagtcagaacaaagatgg

SEQ ID NO: 41146 - DNA, 25 bp, Homo sapien
ccatctttgttctgactggaagtcc

SEQ ID NO: 41147 - DNA, 25 bp, Homo sapien
cgggtgcagacacgtcctccggcgt

SEQ ID NO: 41148 - DNA, 25 bp, Homo sapien
acgccggaggacgtgtctgcacccg

SEQ ID NO: 41149 - DNA, 25 bp, Homo sapien
ggtggagctttcacctccaatgccg

SEQ ID NO: 41150 - DNA, 25 bp, Homo sapien
cggcattggaggtgaaagctccacc

SEQ ID NO: 41151 - DNA, 25 bp, Homo sapien
tcccgcgacaccccaacgggaggag

SEQ ID NO: 41152 - DNA, 25 bp, Homo sapien
ctcctcccgttggggtgtcgcggga

SEQ ID NO: 41153 - DNA, 25 bp, Homo sapien
gcccgagccctatttagaggttcga

SEQ ID NO: 41154 - DNA, 25 bp, Homo sapien
tcgaacctctaaatagggctcgggc

SEQ ID NO: 41155 - DNA, 25 bp, Homo sapien
agcgacttcgggtccctgcacgacg

SEQ ID NO: 41156 - DNA, 25 bp, Homo sapien
cgtcgtgcagggacccgaagtcgct

SEQ ID NO: 41157 - DNA, 25 bp, Homo sapien
ctacgaatttttgactgcataagtc

SEQ ID NO: 41158 - DNA, 25 bp, Homo sapien
gacttatgcagtcaaaaattcgtag

SEQ ID NO: 41159 - DNA, 25 bp, Homo sapien
gcgcggctcggcaaggtcggcggcc

SEQ ID NO: 41160 - DNA, 25 bp, Homo sapien
ggccgccgaccttgccgagccgcgc

SEQ ID NO: 41161 - DNA, 25 bp, Homo sapien
gtgttaggttggtgtctagacgtcg

SEQ ID NO: 41162 - DNA, 25 bp, Homo sapien
cgacgtctagacaccaacctaacac

SEQ ID NO: 41163 - DNA, 25 bp, Homo sapien
ttgtgcgacagggatctgagtaacg

SEQ ID NO: 41164 - DNA, 25 bp, Homo sapien
cgttactcagatccctgtcgcacaa

SEQ ID NO: 41165 - DNA, 25 bp, Homo sapien
aataaggaagtgaaagtaataccac

SEQ ID NO: 41166 - DNA, 25 bp, Homo sapien
gtggtattactttcacttccttatt

SEQ ID NO: 41167 - DNA, 25 bp, Homo sapien
cgtccaccccgcaaggcacctctcc

SEQ ID NO: 41168 - DNA, 25 bp, Homo sapien
ggagaggtgccttgcggggtggacg

SEQ ID NO: 41169 - DNA, 25 bp, Homo sapien
gtcccacgccggtgtagtggacacg

SEQ ID NO: 41170 - DNA, 25 bp, Homo sapien
cgtgtccactacaccggcgtgggac

SEQ ID NO: 41171 - DNA, 25 bp, Homo sapien
aaatagaagttaaactgtcattaaa

SEQ ID NO: 41172 - DNA, 25 bp, Homo sapien
tttaatgacagtttaacttctattt

SEQ ID NO: 41173 - DNA, 25 bp, Homo sapien
aaaatagaagttaaactgtcattaa

SEQ ID NO: 41174 - DNA, 25 bp, Homo sapien
ttaatgacagtttaacttctatttt

SEQ ID NO: 41175 - DNA, 25 bp, Homo sapien
gttcgtatcgtaccgacctcctacg

SEQ ID NO: 41176 - DNA, 25 bp, Homo sapien
cgtaggaggtcggtacgatacgaac

SEQ ID NO: 41177 - DNA, 25 bp, Homo sapien
atgacactatgtatttcatcaaatg

SEQ ID NO: 41178 - DNA, 25 bp, Homo sapien
catttgatgaaatacatagtgtcat

SEQ ID NO: 41179 - DNA, 25 bp, Homo sapien
gtctgacaataagtaaaagaggtac

SEQ ID NO: 41180 - DNA, 25 bp, Homo sapien
gtacctcttttacttattgtcagac

SEQ ID NO: 41181 - DNA, 25 bp, Homo sapien
cttgttttactctttcaactgtacc

SEQ ID NO: 41182 - DNA, 25 bp, Homo sapien
ggtacagttgaaagagtaaaacaag

SEQ ID NO: 41183 - DNA, 25 bp, Homo sapien
agccactcccgtcagcgagaaacga

SEQ ID NO: 41184 - DNA, 25 bp, Homo sapien
tcgtttctcgctgacgggagtggct

SEQ ID NO: 41185 - DNA, 25 bp, Homo sapien
gagttcgcgctacccggtcgactac

SEQ ID NO: 41186 - DNA, 25 bp, Homo sapien
gtagtcgaccgggtagcgcgaactc

SEQ ID NO: 41187 - DNA, 25 bp, Homo sapien
ctcggtggacgaagggcccgcgacg

SEQ ID NO: 41188 - DNA, 25 bp, Homo sapien
cgtcgcgggcccttcgtccaccgag

SEQ ID NO: 41189 - DNA, 25 bp, Homo sapien
gacctcggtggacgaagggcccgcg

SEQ ID NO: 41190 - DNA, 25 bp, Homo sapien
cgcgggcccttcgtccaccgaggtc

SEQ ID NO: 41191 - DNA, 25 bp, Homo sapien
agtacgtataaggaatacataattt

SEQ ID NO: 41192 - DNA, 25 bp, Homo sapien
aaattatgtattccttatacgtact

SEQ ID NO: 41193 - DNA, 25 bp, Homo sapien
gaagtactcaggtctaccactcggc

SEQ ID NO: 41194 - DNA, 25 bp, Homo sapien
gccgagtggtagacctgagtacttc

SEQ ID NO: 41195 - DNA, 25 bp, Homo sapien
aagtggttatacttgataaagtcta

SEQ ID NO: 41196 - DNA, 25 bp, Homo sapien
tagactttatcaagtataaccactt

SEQ ID NO: 41197 - DNA, 25 bp, Homo sapien
acagtgaccccgaaatgtcctgtcc

SEQ ID NO: 41198 - DNA, 25 bp, Homo sapien
ggacaggacatttcggggtcactgt

SEQ ID NO: 41199 - DNA, 25 bp, Homo sapien
ctcccgtaggctcggagaccgtcga

SEQ ID NO: 41200 - DNA, 25 bp, Homo sapien
tcgacggtctccgagcctacgggag

SEQ ID NO: 41201 - DNA, 25 bp, Homo sapien
acatttattctcgaaacgtattcgg

SEQ ID NO: 41202 - DNA, 25 bp, Homo sapien
ccgaatacgtttcgagaataaatgt

SEQ ID NO: 41203 - DNA, 25 bp, Homo sapien
gagaaccatagatggtccgggtcgt

SEQ ID NO: 41204 - DNA, 25 bp, Homo sapien
acgacccggaccatctatggttctc

SEQ ID NO: 41205 - DNA, 25 bp, Homo sapien
gtcgaagtcaacacctcccggaaga

SEQ ID NO: 41206 - DNA, 25 bp, Homo sapien
tcttccgggaggtgttgacttcgac

SEQ ID NO: 41207 - DNA, 25 bp, Homo sapien
taacgaaggcacactagactttccc

SEQ ID NO: 41208 - DNA, 25 bp, Homo sapien
gggaaagtctagtgtgccttcgtta

SEQ ID NO: 41209 - DNA, 25 bp, Homo sapien
aagagttttaataatgtcttgaacc

SEQ ID NO: 41210 - DNA, 25 bp, Homo sapien
ggttcaagacattattaaaactctt

SEQ ID NO: 41211 - DNA, 25 bp, Homo sapien
cgagccaggaagcacggcaggaggg

SEQ ID NO: 41212 - DNA, 25 bp, Homo sapien
ccctcctgccgtgcttcctggctcg

SEQ ID NO: 41213 - DNA, 25 bp, Homo sapien
ttacaaccactcacaaacttaaaat

SEQ ID NO: 41214 - DNA, 25 bp, Homo sapien
attttaagtttgtgagtggttgtaa

SEQ ID NO: 41215 - DNA, 25 bp, Homo sapien
gaacacctattggtaaagtactgat

SEQ ID NO: 41216 - DNA, 25 bp, Homo sapien
atcagtactttaccaataggtgttc

SEQ ID NO: 41217 - DNA, 25 bp, Homo sapien
aatgaagaaactagattacttaaaa

SEQ ID NO: 41218 - DNA, 25 bp, Homo sapien
ttttaagtaatctagtttcttcatt

SEQ ID NO: 41219 - DNA, 25 bp, Homo sapien
cgacgacgtgctttagaggttctac

SEQ ID NO: 41220 - DNA, 25 bp, Homo sapien
gtagaacctctaaagcacgtcgtcg

SEQ ID NO: 41221 - DNA, 25 bp, Homo sapien
acccgtcttcgccgcaaacacactc

SEQ ID NO: 41222 - DNA, 25 bp, Homo sapien
gagtgtgtttgcggcgaagacgggt

SEQ ID NO: 41223 - DNA, 25 bp, Homo sapien
tttcaaaactcgtatgggtctttaa

SEQ ID NO: 41224 - DNA, 25 bp, Homo sapien
ttaaagacccatacgagttttgaaa

SEQ ID NO: 41225 - DNA, 25 bp, Homo sapien
ggccggctatcgaaggtgggcaggg

SEQ ID NO: 41226 - DNA, 25 bp, Homo sapien
ccctgcccaccttcgatagccggcc

SEQ ID NO: 41227 - DNA, 25 bp, Homo sapien
agatttgactttagattttcgtggt

SEQ ID NO: 41228 - DNA, 25 bp, Homo sapien
accacgaaaatctaaagtcaaatct

SEQ ID NO: 41229 - DNA, 25 bp, Homo sapien
ttattcttatataatgacgactaca

SEQ ID NO: 41230 - DNA, 25 bp, Homo sapien
tgtagtcgtcattatataagaataa

SEQ ID NO: 41231 - DNA, 25 bp, Homo sapien
aatgacccgtccacaggacccgacc

SEQ ID NO: 41232 - DNA, 25 bp, Homo sapien
ggtcgggtcctgtggacgggtcatt

SEQ ID NO: 41233 - DNA, 25 bp, Homo sapien
gccgaggtagtcacagcagaacatg

SEQ ID NO: 41234 - DNA, 25 bp, Homo sapien
catgttctgctgtgactacctcggc

SEQ ID NO: 41235 - DNA, 25 bp, Homo sapien
gtcacacagggcccctcgcccccgg

SEQ ID NO: 41236 - DNA, 25 bp, Homo sapien
ccgggggcgaggggccctgtgtgac

SEQ ID NO: 41237 - DNA, 25 bp, Homo sapien
ggtcacacagggcccctcgcccccg

SEQ ID NO: 41238 - DNA, 25 bp, Homo sapien
cgggggcgaggggccctgtgtgacc

SEQ ID NO: 41239 - DNA, 25 bp, Homo sapien
catccggtacccaggtccagtcggt

SEQ ID NO: 41240 - DNA, 25 bp, Homo sapien
accgactggacctgggtaccggatg

SEQ ID NO: 41241 - DNA, 25 bp, Homo sapien
tttgttgatttactacctcgaccat

SEQ ID NO: 41242 - DNA, 25 bp, Homo sapien
atggtcgaggtagtaaatcaacaaa

SEQ ID NO: 41243 - DNA, 25 bp, Homo sapien
ggcgccccgtcgcagcccatggctc

SEQ ID NO: 41244 - DNA, 25 bp, Homo sapien
gagccatgggctgcgacggggcgcc

SEQ ID NO: 41245 - DNA, 25 bp, Homo sapien
cacgttctacatttatatgtccatt

SEQ ID NO: 41246 - DNA, 25 bp, Homo sapien
aatggacatataaatgtagaacgtg

SEQ ID NO: 41247 - DNA, 25 bp, Homo sapien
gagacgaccatagattgtaagaaat

SEQ ID NO: 41248 - DNA, 25 bp, Homo sapien
atttcttacaatctatggtcgtctc

SEQ ID NO: 41249 - DNA, 25 bp, Homo sapien
tcctatgtcagagtatctcgcgttg

SEQ ID NO: 41250 - DNA, 25 bp, Homo sapien
caacgcgagatactctgacatagga

SEQ ID NO: 41251 - DNA, 25 bp, Homo sapien
aagaaacaaacatgaacatcacgaa

SEQ ID NO: 41252 - DNA, 25 bp, Homo sapien
ttcgtgatgttcatgtttgtttctt

SEQ ID NO: 41253 - DNA, 25 bp, Homo sapien
atatcactacttgggtttttgtgga

SEQ ID NO: 41254 - DNA, 25 bp, Homo sapien
tccacaaaaacccaagtagtgatat

SEQ ID NO: 41255 - DNA, 25 bp, Homo sapien
gaacataaagggcataatagcggta

SEQ ID NO: 41256 - DNA, 25 bp, Homo sapien
taccgctattatgccctttatgttc

SEQ ID NO: 41257 - DNA, 25 bp, Homo sapien
tattattatcttcttgaactttagg

SEQ ID NO: 41258 - DNA, 25 bp, Homo sapien
cctaaagttcaagaagataataata

SEQ ID NO: 41259 - DNA, 25 bp, Homo sapien
gtattattatcttcttgaactttag

SEQ ID NO: 41260 - DNA, 25 bp, Homo sapien
ctaaagttcaagaagataataatac

SEQ ID NO: 41261 - DNA, 25 bp, Homo sapien
caagattcagcacgtaagaccaaac

SEQ ID NO: 41262 - DNA, 25 bp, Homo sapien
gtttggtcttacgtgctgaatcttg

SEQ ID NO: 41263 - DNA, 25 bp, Homo sapien
tattcagtgataaatacttcaaaag

SEQ ID NO: 41264 - DNA, 25 bp, Homo sapien
cttttgaagtatttatcactgaata

SEQ ID NO: 41265 - DNA, 25 bp, Homo sapien
aaacccgttgaacgtggtcgctagc

SEQ ID NO: 41266 - DNA, 25 bp, Homo sapien
gctagcgaccacgttcaacgggttt

SEQ ID NO: 41267 - DNA, 25 bp, Homo sapien
ggaccttcagtgagcccggtggcct

SEQ ID NO: 41268 - DNA, 25 bp, Homo sapien
aggccaccgggctcactgaaggtcc

SEQ ID NO: 41269 - DNA, 25 bp, Homo sapien
ctccacccgcttaagacactcctgg

SEQ ID NO: 41270 - DNA, 25 bp, Homo sapien
ccaggagtgtcttaagcgggtggag

SEQ ID NO: 41271 - DNA, 25 bp, Homo sapien
cgcaggaggagacccctaagaaatc

SEQ ID NO: 41272 - DNA, 25 bp, Homo sapien
gatttcttaggggtctcctcctgcg

SEQ ID NO: 41273 - DNA, 25 bp, Homo sapien
tgcggggcagatcggtggcccggtc

SEQ ID NO: 41274 - DNA, 25 bp, Homo sapien
gaccgggccaccgatctgccccgca

SEQ ID NO: 41275 - DNA, 25 bp, Homo sapien
atctctttgtatactattaaaacac

SEQ ID NO: 41276 - DNA, 25 bp, Homo sapien
gtgttttaatagtatacaaagagat

SEQ ID NO: 41277 - DNA, 25 bp, Homo sapien
cggtctaggggggtgcgtccgccgc

SEQ ID NO: 41278 - DNA, 25 bp, Homo sapien
gcggcggacgcacccccctagaccg

SEQ ID NO: 41279 - DNA, 25 bp, Homo sapien
accctcagtcgtctccgaccttcag

SEQ ID NO: 41280 - DNA, 25 bp, Homo sapien
ctgaaggtcggagacgactgagggt

SEQ ID NO: 41281 - DNA, 25 bp, Homo sapien
cctcctccgtcgtcggtcaacaggg

SEQ ID NO: 41282 - DNA, 25 bp, Homo sapien
ccctgttgaccgacgacggaggagg

SEQ ID NO: 41283 - DNA, 25 bp, Homo sapien
taacatgatcaatataataagagag

SEQ ID NO: 41284 - DNA, 25 bp, Homo sapien
ctctcttattatattgatcatgtta

SEQ ID NO: 41285 - DNA, 25 bp, Homo sapien
aaagaaatctagattgtatacatcc

SEQ ID NO: 41286 - DNA, 25 bp, Homo sapien
ggatgtatacaatctagatttcttt

SEQ ID NO: 41287 - DNA, 25 bp, Homo sapien
accaaggccgcaattgggtcgtcgg

SEQ ID NO: 41288 - DNA, 25 bp, Homo sapien
ccgacgacccaattgcggccttggt

SEQ ID NO: 41289 - DNA, 25 bp, Homo sapien
agccaagatttcctgggtcgagaag

SEQ ID NO: 41290 - DNA, 25 bp, Homo sapien
cttctcgacccaggaaatcttggct

SEQ ID NO: 41291 - DNA, 25 bp, Homo sapien
tcttcatctaacactccttccgaag

SEQ ID NO: 41292 - DNA, 25 bp, Homo sapien
cttcggaaggagtgttagatgaaga

SEQ ID NO: 41293 - DNA, 25 bp, Homo sapien
gagtctcaggcaccaacattttaaa

SEQ ID NO: 41294 - DNA, 25 bp, Homo sapien
tttaaaatgttggtgcctgagactc

SEQ ID NO: 41295 - DNA, 25 bp, Homo sapien
cctccaagatttaagtaggaatgtt

SEQ ID NO: 41296 - DNA, 25 bp, Homo sapien
aacattcctacttaaatcttggagg

SEQ ID NO: 41297 - DNA, 25 bp, Homo sapien
aaagtggtcctttcagttccttcta

SEQ ID NO: 41298 - DNA, 25 bp, Homo sapien
tagaaggaactgaaaggaccacttt

SEQ ID NO: 41299 - DNA, 25 bp, Homo sapien
gtgtgagggcttctatcgtttatac

SEQ ID NO: 41300 - DNA, 25 bp, Homo sapien
gtataaacgatagaagccctcacac

SEQ ID NO: 41301 - DNA, 25 bp, Homo sapien
ctaccatgggtgtttcgtgaactac

SEQ ID NO: 41302 - DNA, 25 bp, Homo sapien
gtagttcacgaaacacccatggtag

SEQ ID NO: 41303 - DNA, 25 bp, Homo sapien
cagggatctcgtcggcacgtcccgt

SEQ ID NO: 41304 - DNA, 25 bp, Homo sapien
acgggacgtgccgacgagatccctg

SEQ ID NO: 41305 - DNA, 25 bp, Homo sapien
agtaataattacattcataattctt

SEQ ID NO: 41306 - DNA, 25 bp, Homo sapien
aagaattatgaatgtaattattact

SEQ ID NO: 41307 - DNA, 25 bp, Homo sapien
gaagtaataattacattcataattc

SEQ ID NO: 41308 - DNA, 25 bp, Homo sapien
gaattatgaatgtaattattacttc

SEQ ID NO: 41309 - DNA, 25 bp, Homo sapien
atgtttcaagcgagatcgtagaatg

SEQ ID NO: 41310 - DNA, 25 bp, Homo sapien
cattctacgatctcgcttgaaacat

SEQ ID NO: 41311 - DNA, 25 bp, Homo sapien
aacgtatccgttagtgccacctccg

SEQ ID NO: 41312 - DNA, 25 bp, Homo sapien
cggaggtggcactaacggatacgtt

SEQ ID NO: 41313 - DNA, 25 bp, Homo sapien
agtccgagccgtccgagggacgacc

SEQ ID NO: 41314 - DNA, 25 bp, Homo sapien
ggtcgtccctcggacggctcggact

SEQ ID NO: 41315 - DNA, 25 bp, Homo sapien
atcactcttccgctcaggggaacga

SEQ ID NO: 41316 - DNA, 25 bp, Homo sapien
tcgttcccctgagcggaagagtgat

SEQ ID NO: 41317 - DNA, 25 bp, Homo sapien
gggtacccgagatccgaccaccaag

SEQ ID NO: 41318 - DNA, 25 bp, Homo sapien
cttggtggtcggatctcgggtaccc

SEQ ID NO: 41319 - DNA, 25 bp, Homo sapien
tgtcgacagcggctggtgcccctta

SEQ ID NO: 41320 - DNA, 25 bp, Homo sapien
taaggggcaccagccgctgtcgaca

SEQ ID NO: 41321 - DNA, 25 bp, Homo sapien
gccggaggcgcatccagaacgaccc

SEQ ID NO: 41322 - DNA, 25 bp, Homo sapien
gggtcgttctggatgcgcctccggc

SEQ ID NO: 41323 - DNA, 25 bp, Homo sapien
ggcccctcgcccgcggcgccgaaga

SEQ ID NO: 41324 - DNA, 25 bp, Homo sapien
tcttcggcgccgcgggcgaggggcc

SEQ ID NO: 41325 - DNA, 25 bp, Homo sapien
gaggcccctcgcccgcggcgccgaa

SEQ ID NO: 41326 - DNA, 25 bp, Homo sapien
ttcggcgccgcgggcgaggggcctc

SEQ ID NO: 41327 - DNA, 25 bp, Homo sapien
cccctcgcccgcggcgccgaagaac

SEQ ID NO: 41328 - DNA, 25 bp, Homo sapien
gttcttcggcgccgcgggcgagggg

SEQ ID NO: 41329 - DNA, 25 bp, Homo sapien
gcccctcgcccgcggcgccgaagaa

SEQ ID NO: 41330 - DNA, 25 bp, Homo sapien
ttcttcggcgccgcgggcgaggggc

SEQ ID NO: 41331 - DNA, 25 bp, Homo sapien
gcgactgtatcctctccgcggacga

SEQ ID NO: 41332 - DNA, 25 bp, Homo sapien
tcgtccgcggagaggatacagtcgc

SEQ ID NO: 41333 - DNA, 25 bp, Homo sapien
tgaagaagaaccattccttctgcat

SEQ ID NO: 41334 - DNA, 25 bp, Homo sapien
atgcagaaggaatggttcttcttca

SEQ ID NO: 41335 - DNA, 25 bp, Homo sapien
ggccccgggtcgttggaacgctctc

SEQ ID NO: 41336 - DNA, 25 bp, Homo sapien
gagagcgttccaacgacccggggcc

SEQ ID NO: 41337 - DNA, 25 bp, Homo sapien
aggttcatcaactcgtaatctgcag

SEQ ID NO: 41338 - DNA, 25 bp, Homo sapien
ctgcagattacgagttgatgaacct

SEQ ID NO: 41339 - DNA, 25 bp, Homo sapien
tgtggcggccggcccactcggggta

SEQ ID NO: 41340 - DNA, 25 bp, Homo sapien
taccccgagtgggccggccgccaca

SEQ ID NO: 41341 - DNA, 25 bp, Homo sapien
gactctgtggcggccggcccactcg

SEQ ID NO: 41342 - DNA, 25 bp, Homo sapien
cgagtgggccggccgccacagagtc

SEQ ID NO: 41343 - DNA, 25 bp, Homo sapien
cgctcctggagcctcattctcaaac

SEQ ID NO: 41344 - DNA, 25 bp, Homo sapien
gtttgagaatgaggctccaggagcg

SEQ ID NO: 41345 - DNA, 25 bp, Homo sapien
acctatcgccacaagtttagacgac

SEQ ID NO: 41346 - DNA, 25 bp, Homo sapien
gtcgtctaaacttgtggcgataggt

SEQ ID NO: 41347 - DNA, 25 bp, Homo sapien
actcgtgcccggcaccccgcggctc

SEQ ID NO: 41348 - DNA, 25 bp, Homo sapien
gagccgcggggtgccgggcacgagt

SEQ ID NO: 41349 - DNA, 25 bp, Homo sapien
gtgataatgtgaatatatgtctgtg

SEQ ID NO: 41350 - DNA, 25 bp, Homo sapien
cacagacatatattcacattatcac

SEQ ID NO: 41351 - DNA, 25 bp, Homo sapien
cagagtgtaagttcctccacgtcga

SEQ ID NO: 41352 - DNA, 25 bp, Homo sapien
tcgacgtggaggaacttacactctg

SEQ ID NO: 41353 - DNA, 25 bp, Homo sapien
gtacgtctttgatgttctcggtaac

SEQ ID NO: 41354 - DNA, 25 bp, Homo sapien
gttaccgagaacatcaaagacgtac

SEQ ID NO: 41355 - DNA, 25 bp, Homo sapien
gacaatggaccgtcgaatcgagtcc

SEQ ID NO: 41356 - DNA, 25 bp, Homo sapien
ggactcgattcgacggtccattgtc

SEQ ID NO: 41357 - DNA, 25 bp, Homo sapien
gttactttctcgcataaagaattgt

SEQ ID NO: 41358 - DNA, 25 bp, Homo sapien
acaattctttatgcgagaaagtaac

SEQ ID NO: 41359 - DNA, 25 bp, Homo sapien
tctacgtccgaacgttcgaaggtct

SEQ ID NO: 41360 - DNA, 25 bp, Homo sapien
agaccttcgaacgttcggacgtaga

SEQ ID NO: 41361 - DNA, 25 bp, Homo sapien
tgaagacaaaggcaaatgatataag

SEQ ID NO: 41362 - DNA, 25 bp, Homo sapien
cttatatcatttgcctttgtcttca

SEQ ID NO: 41363 - DNA, 25 bp, Homo sapien
gggcgaatatcacgtagggcaaggg

SEQ ID NO: 41364 - DNA, 25 bp, Homo sapien
cccttgccctacgtgatattcgccc

SEQ ID NO: 41365 - DNA, 25 bp, Homo sapien
acatgtcccgccgggacgactccgg

SEQ ID NO: 41366 - DNA, 25 bp, Homo sapien
ccggagtcgtcccggcgggacatgt

SEQ ID NO: 41367 - DNA, 25 bp, Homo sapien
tgtcccgccgggacgactccggccc

SEQ ID NO: 41368 - DNA, 25 bp, Homo sapien
gggccggagtcgtcccggcgggaca

SEQ ID NO: 41369 - DNA, 25 bp, Homo sapien
cgagtcactttaggcgcgtaattat

SEQ ID NO: 41370 - DNA, 25 bp, Homo sapien
ataattacgcgcctaaagtgactcg

SEQ ID NO: 41371 - DNA, 25 bp, Homo sapien
aagtagtcgtactccactggaaaag

SEQ ID NO: 41372 - DNA, 25 bp, Homo sapien
cttttccagtggagtacgactactt

SEQ ID NO: 41373 - DNA, 25 bp, Homo sapien
taaagacttcgtttaagatgtgtat

SEQ ID NO: 41374 - DNA, 25 bp, Homo sapien
atacacatcttaaacgaagtcttta

SEQ ID NO: 41375 - DNA, 25 bp, Homo sapien
gaacttcctcgtccgaccactcggg

SEQ ID NO: 41376 - DNA, 25 bp, Homo sapien
cccgagtggtcggacgaggaagttc

SEQ ID NO: 41377 - DNA, 25 bp, Homo sapien
gaaataggaatagaccacgaagaac

SEQ ID NO: 41378 - DNA, 25 bp, Homo sapien
gttcttcgtggtctattcctatttc

SEQ ID NO: 41379 - DNA, 25 bp, Homo sapien
gtttcaggtcttacttttgtagtag

SEQ ID NO: 41380 - DNA, 25 bp, Homo sapien
ctactacaaaagtaagacctgaaac

SEQ ID NO: 41381 - DNA, 25 bp, Homo sapien
ctataaagattttctaactagagga

SEQ ID NO: 41382 - DNA, 25 bp, Homo sapien
tcctctagttagaaaatctttatag

SEQ ID NO: 41383 - DNA, 25 bp, Homo sapien
ctcatttgaagtcggaccggcaagt

SEQ ID NO: 41384 - DNA, 25 bp, Homo sapien
acttgccggtccgacttcaaatgag

SEQ ID NO: 41385 - DNA, 25 bp, Homo sapien
cggtcctggtgcaggttttcggact

SEQ ID NO: 41386 - DNA, 25 bp, Homo sapien
agtccgaaaacctgcaccaggaccg

SEQ ID NO: 41387 - DNA, 25 bp, Homo sapien
ggagtcgacgccctctgtttcgtgc

SEQ ID NO: 41388 - DNA, 25 bp, Homo sapien
gcacgaaacagagggcgtcgactcc

SEQ ID NO: 41389 - DNA, 25 bp, Homo sapien
actaaataataccatattaagtgtc

SEQ ID NO: 41390 - DNA, 25 bp, Homo sapien
gacacttaatatggtattatttagt

SEQ ID NO: 41391 - DNA, 25 bp, Homo sapien
tctcttactaaataataccatatta

SEQ ID NO: 41392 - DNA, 25 bp, Homo sapien
taatatggtattatttagtaagaga

SEQ ID NO: 41393 - DNA, 25 bp, Homo sapien
ggtccttcggccgtcagggtgtggg

SEQ ID NO: 41394 - DNA, 25 bp, Homo sapien
cccacaccctgacggccgaaggacc

SEQ ID NO: 41395 - DNA, 25 bp, Homo sapien
ttcgtttatcttcgaacgtcaaaat

SEQ ID NO: 41396 - DNA, 25 bp, Homo sapien
attttgacgttcgaagataaacgaa

SEQ ID NO: 41397 - DNA, 25 bp, Homo sapien
ggggtcggaagcaccccgtctgcgg

SEQ ID NO: 41398 - DNA, 25 bp, Homo sapien
ccgcagacggggtgcttccgacccc

SEQ ID NO: 41399 - DNA, 25 bp, Homo sapien
aagatactattggagatcaacaagg

SEQ ID NO: 41400 - DNA, 25 bp, Homo sapien
ccttgttgatctccaatagtatctt

SEQ ID NO: 41401 - DNA, 25 bp, Homo sapien
cgtgtgttccgctgtacttatttgg

SEQ ID NO: 41402 - DNA, 25 bp, Homo sapien
ccaaataagtacagcggaacacacg

SEQ ID NO: 41403 - DNA, 25 bp, Homo sapien
gacattctgtaaactagtttcgaag

SEQ ID NO: 41404 - DNA, 25 bp, Homo sapien
cttcgaaactagtttacagaatgtc

SEQ ID NO: 41405 - DNA, 25 bp, Homo sapien
ttagtcgtgcactagtgcggtggcg

SEQ ID NO: 41406 - DNA, 25 bp, Homo sapien
cgccaccgcactagtgcacgactaa

SEQ ID NO: 41407 - DNA, 25 bp, Homo sapien
gtgtgggagtgaggacgcgtgcgtg

SEQ ID NO: 41408 - DNA, 25 bp, Homo sapien
cacgcacgcgtcctcactcccacac

SEQ ID NO: 41409 - DNA, 25 bp, Homo sapien
gtctccactctcctacggtatcggg

SEQ ID NO: 41410 - DNA, 25 bp, Homo sapien
cccgataccgtaggagagtggagac

SEQ ID NO: 41411 - DNA, 25 bp, Homo sapien
gccttgccgcccgagcctcgtgtgg

SEQ ID NO: 41412 - DNA, 25 bp, Homo sapien
ccacacgaggctcgggcggcaaggc

SEQ ID NO: 41413 - DNA, 25 bp, Homo sapien
gtgacccacggcctcatccttcgtg

SEQ ID NO: 41414 - DNA, 25 bp, Homo sapien
cacgaaggatgaggccgtgggtcac

SEQ ID NO: 41415 - DNA, 25 bp, Homo sapien
cccgtcgacccgagtgcggacggta

SEQ ID NO: 41416 - DNA, 25 bp, Homo sapien
taccgtccgcactcgggtcgacggg

SEQ ID NO: 41417 - DNA, 25 bp, Homo sapien
gccgcggcgccggacgggcctaacc

SEQ ID NO: 41418 - DNA, 25 bp, Homo sapien
ggttaggcccgtccggcgccgcggc

SEQ ID NO: 41419 - DNA, 25 bp, Homo sapien
gaaatacattactaccaaatttaac

SEQ ID NO: 41420 - DNA, 25 bp, Homo sapien
gttaaatttggtagtaatgtatttc

SEQ ID NO: 41421 - DNA, 25 bp, Homo sapien
actgtgaaatacattactaccaaat

SEQ ID NO: 41422 - DNA, 25 bp, Homo sapien
atttggtagtaatgtatttcacagt

SEQ ID NO: 41423 - DNA, 25 bp, Homo sapien
gactttcgattaaagaaacagtctg

SEQ ID NO: 41424 - DNA, 25 bp, Homo sapien
cagactgtttctttaatcgaaagtc

SEQ ID NO: 41425 - DNA, 25 bp, Homo sapien
atcctagtggcgaccgagagccgaa

SEQ ID NO: 41426 - DNA, 25 bp, Homo sapien
ttcggctctcggtcgccactaggat

SEQ ID NO: 41427 - DNA, 25 bp, Homo sapien
cgctccggacggatcgaccggcccg

SEQ ID NO: 41428 - DNA, 25 bp, Homo sapien
cgggccggtcgatccgtccggagcg

SEQ ID NO: 41429 - DNA, 25 bp, Homo sapien
ccgctccggacggatcgaccggccc

SEQ ID NO: 41430 - DNA, 25 bp, Homo sapien
gggccggtcgatccgtccggagcgg

SEQ ID NO: 41431 - DNA, 25 bp, Homo sapien
cccgctccggacggatcgaccggcc

SEQ ID NO: 41432 - DNA, 25 bp, Homo sapien
ggccggtcgatccgtccggagcggg

SEQ ID NO: 41433 - DNA, 25 bp, Homo sapien
acggcgcgggcggtcagcccttggc

SEQ ID NO: 41434 - DNA, 25 bp, Homo sapien
gccaagggctgaccgcccgcgccgt

SEQ ID NO: 41435 - DNA, 25 bp, Homo sapien
caccgcgtccgcgggacggcgcggg

SEQ ID NO: 41436 - DNA, 25 bp, Homo sapien
cccgcgccgtcccgcggacgcggtg

SEQ ID NO: 41437 - DNA, 25 bp, Homo sapien
gcccgggcgcagacgggttgtcggc

SEQ ID NO: 41438 - DNA, 25 bp, Homo sapien
gccgacaacccgtctgcgcccgggc

SEQ ID NO: 41439 - DNA, 25 bp, Homo sapien
ccgcccgggcgcagacgggttgtcg

SEQ ID NO: 41440 - DNA, 25 bp, Homo sapien
cgacaacccgtctgcgcccgggcgg

SEQ ID NO: 41441 - DNA, 25 bp, Homo sapien
acaatttaggttacatcaaaactaa

SEQ ID NO: 41442 - DNA, 25 bp, Homo sapien
ttagttttgatgtaacctaaattgt

SEQ ID NO: 41443 - DNA, 25 bp, Homo sapien
gggcggctcctcaagaaaccgagga

SEQ ID NO: 41444 - DNA, 25 bp, Homo sapien
tcctcggtttcttgaggagccgccc

SEQ ID NO: 41445 - DNA, 25 bp, Homo sapien
ggacctccaggaccgcctggggtgg

SEQ ID NO: 41446 - DNA, 25 bp, Homo sapien
ccaccccaggcggtcctggaggtcc

SEQ ID NO: 41447 - DNA, 25 bp, Homo sapien
aatcaggttcacgagaccgtagaac

SEQ ID NO: 41448 - DNA, 25 bp, Homo sapien
gttctacggtctcgtgaacctgatt

SEQ ID NO: 41449 - DNA, 25 bp, Homo sapien
acgtgtccgggcccctgaggtactc

SEQ ID NO: 41450 - DNA, 25 bp, Homo sapien
gagtacctcaggggcccggacacgt

SEQ ID NO: 41451 - DNA, 25 bp, Homo sapien
cgtcgtaaacagtaatcattgttag

SEQ ID NO: 41452 - DNA, 25 bp, Homo sapien
ctaacaatgattactgtttacgacg

SEQ ID NO: 41453 - DNA, 25 bp, Homo sapien
ggacttacctggtagaaacaggtct

SEQ ID NO: 41454 - DNA, 25 bp, Homo sapien
agacctgtttctaccaggtaagtcc

SEQ ID NO: 41455 - DNA, 25 bp, Homo sapien
ttacatcgttgttccggagaaagaa

SEQ ID NO: 41456 - DNA, 25 bp, Homo sapien
ttctttctccggaacaacgatgtaa

SEQ ID NO: 41457 - DNA, 25 bp, Homo sapien
cgtcctccgctcgatcgtcgacagg

SEQ ID NO: 41458 - DNA, 25 bp, Homo sapien
cctgtcgacgatcgagcggaggacg

SEQ ID NO: 41459 - DNA, 25 bp, Homo sapien
ttgcagaacgaagggaggttgccac

SEQ ID NO: 41460 - DNA, 25 bp, Homo sapien
gtggcaacctcccttcgttctgcaa

SEQ ID NO: 41461 - DNA, 25 bp, Homo sapien
ctcctccagcggacgggaacgtata

SEQ ID NO: 41462 - DNA, 25 bp, Homo sapien
tatacgttcccgtccgctggaggag

SEQ ID NO: 41463 - DNA, 25 bp, Homo sapien
aacacttgaaatcttgaccaggttt

SEQ ID NO: 41464 - DNA, 25 bp, Homo sapien
aaacctggtcaagatttcaagtgtt

SEQ ID NO: 41465 - DNA, 25 bp, Homo sapien
atccatattctcgactccttacttg

SEQ ID NO: 41466 - DNA, 25 bp, Homo sapien
caagtaaggagtcgagaatatggat

SEQ ID NO: 41467 - DNA, 25 bp, Homo sapien
gatccggcgtcgacggcagacacac

SEQ ID NO: 41468 - DNA, 25 bp, Homo sapien
gtgtgtctgccgtcgacgccggatc

SEQ ID NO: 41469 - DNA, 25 bp, Homo sapien
gacttgccttttcctcgttagaccc

SEQ ID NO: 41470 - DNA, 25 bp, Homo sapien
gggtctaacgaggaaaaggcaagtc

SEQ ID NO: 41471 - DNA, 25 bp, Homo sapien
tattagatggtttaatctattgact

SEQ ID NO: 41472 - DNA, 25 bp, Homo sapien
agtcaatagattaaaccatctaata

SEQ ID NO: 41473 - DNA, 25 bp, Homo sapien
actggagctttgtactccttctacg

SEQ ID NO: 41474 - DNA, 25 bp, Homo sapien
cgtagaaggagtacaaagctccagt

SEQ ID NO: 41475 - DNA, 25 bp, Homo sapien
attttcttccgttccgcacggtgtc

SEQ ID NO: 41476 - DNA, 25 bp, Homo sapien
gacaccgtgcggaacggaagaaaat

SEQ ID NO: 41477 - DNA, 25 bp, Homo sapien
cgggtctccttgtctaggaggtcct

SEQ ID NO: 41478 - DNA, 25 bp, Homo sapien
aggacctcctagacaaggagacccg

SEQ ID NO: 41479 - DNA, 25 bp, Homo sapien
catattgtctaaaatcatcggagaa

SEQ ID NO: 41480 - DNA, 25 bp, Homo sapien
ttctccgatgattttagacaatatg

SEQ ID NO: 41481 - DNA, 25 bp, Homo sapien
cgagcctgctaagggcgcctcccag

SEQ ID NO: 41482 - DNA, 25 bp, Homo sapien
ctgggaggcgcccttagcaggctcg

SEQ ID NO: 41483 - DNA, 25 bp, Homo sapien
gacatgactaagacgtgcaagtgtt

SEQ ID NO: 41484 - DNA, 25 bp, Homo sapien
aacacttgcacgtcttagtcatgtc

SEQ ID NO: 41485 - DNA, 25 bp, Homo sapien
ctccccctcctccatctcacaccgg

SEQ ID NO: 41486 - DNA, 25 bp, Homo sapien
ccggtgtgagatggaggagggggag

SEQ ID NO: 41487 - DNA, 25 bp, Homo sapien
cctccccctcctccatctcacaccg

SEQ ID NO: 41488 - DNA, 25 bp, Homo sapien
cggtgtgagatggaggagggggagg

SEQ ID NO: 41489 - DNA, 25 bp, Homo sapien
agaccctagcgggtgcccccgtcgc

SEQ ID NO: 41490 - DNA, 25 bp, Homo sapien
gcgacgggggcacccgctagggtct

SEQ ID NO: 41491 - DNA, 25 bp, Homo sapien
agtctcggaccaggaaattcgttcg

SEQ ID NO: 41492 - DNA, 25 bp, Homo sapien
cgaacgaatttcctggtccgagact

SEQ ID NO: 41493 - DNA, 25 bp, Homo sapien
agtaaccttaaatgttgatttatag

SEQ ID NO: 41494 - DNA, 25 bp, Homo sapien
ctataaatcaacatttaaggttact

SEQ ID NO: 41495 - DNA, 25 bp, Homo sapien
cgaaaatgttactcgaggtagaagt

SEQ ID NO: 41496 - DNA, 25 bp, Homo sapien
acttctacctcgagtaacattttcg

SEQ ID NO: 41497 - DNA, 25 bp, Homo sapien
cctgtcttccagagtcggaccacaa

SEQ ID NO: 41498 - DNA, 25 bp, Homo sapien
ttgtggtccgactctggaagacagg

SEQ ID NO: 41499 - DNA, 25 bp, Homo sapien
gttcctaaaagtgatagtaccctcg

SEQ ID NO: 41500 - DNA, 25 bp, Homo sapien
cgagggtactatcacttttaggaac

SEQ ID NO: 41501 - DNA, 25 bp, Homo sapien
aagcgactcggaattgcgggagcct

SEQ ID NO: 41502 - DNA, 25 bp, Homo sapien
aggctcccgcaattccgagtcgctt

SEQ ID NO: 41503 - DNA, 25 bp, Homo sapien
ggagtggactaggttcaccatcgag

SEQ ID NO: 41504 - DNA, 25 bp, Homo sapien
ctcgatggtgaacctagtccactcc

SEQ ID NO: 41505 - DNA, 25 bp, Homo sapien
gaagtaccatatttaattaaaaatg

SEQ ID NO: 41506 - DNA, 25 bp, Homo sapien
catttttaattaaatatggtacttc

SEQ ID NO: 41507 - DNA, 25 bp, Homo sapien
taggaagtaccatatttaattaaaa

SEQ ID NO: 41508 - DNA, 25 bp, Homo sapien
ttttaattaaatatggtacttccta

SEQ ID NO: 41509 - DNA, 25 bp, Homo sapien
aataggaagtaccatatttaattaa

SEQ ID NO: 41510 - DNA, 25 bp, Homo sapien
ttaattaaatatggtacttcctatt

SEQ ID NO: 41511 - DNA, 25 bp, Homo sapien
gtgacacccaagacgcttaagacgg

SEQ ID NO: 41512 - DNA, 25 bp, Homo sapien
ccgtcttaagcgtcttgggtgtcac

SEQ ID NO: 41513 - DNA, 25 bp, Homo sapien
tctgcccggccctgaccggcgccgc

SEQ ID NO: 41514 - DNA, 25 bp, Homo sapien
gcggcgccggtcagggccgggcaga

SEQ ID NO: 41515 - DNA, 25 bp, Homo sapien
tgcccggccctgaccggcgccgctc

SEQ ID NO: 41516 - DNA, 25 bp, Homo sapien
gagcggcgccggtcagggccgggca

SEQ ID NO: 41517 - DNA, 25 bp, Homo sapien
acgtccgtgtctcttaggtgcctgt

SEQ ID NO: 41518 - DNA, 25 bp, Homo sapien
acaggcacctaagagacacggacgt

SEQ ID NO: 41519 - DNA, 25 bp, Homo sapien
tcaaaaagtcacatacaatgtaact

SEQ ID NO: 41520 - DNA, 25 bp, Homo sapien
agttacattgtatgtgactttttga

SEQ ID NO: 41521 - DNA, 25 bp, Homo sapien
tctgggttctaaactacacgtttct

SEQ ID NO: 41522 - DNA, 25 bp, Homo sapien
agaaacgtgtagtttagaacccaga

SEQ ID NO: 41523 - DNA, 25 bp, Homo sapien
attaatttgcgactaattatcgtct

SEQ ID NO: 41524 - DNA, 25 bp, Homo sapien
agacgataattagtcgcaaattaat

SEQ ID NO: 41525 - DNA, 25 bp, Homo sapien
tgacggactccgacagacaccgaaa

SEQ ID NO: 41526 - DNA, 25 bp, Homo sapien
tttcggtgtctgtcggagtccgtca

SEQ ID NO: 41527 - DNA, 25 bp, Homo sapien
cagttttatttattgtagtgtcaaa

SEQ ID NO: 41528 - DNA, 25 bp, Homo sapien
tttgacactacaataaataaaactg

SEQ ID NO: 41529 - DNA, 25 bp, Homo sapien
aacagttttatttattgtagtgtca

SEQ ID NO: 41530 - DNA, 25 bp, Homo sapien
tgacactacaataaataaaactgtt

SEQ ID NO: 41531 - DNA, 25 bp, Homo sapien
atacagttcgatatattgttaaccc

SEQ ID NO: 41532 - DNA, 25 bp, Homo sapien
gggttaacaatatatcgaactgtat

SEQ ID NO: 41533 - DNA, 25 bp, Homo sapien
tttattgagtcataacaacacaaca

SEQ ID NO: 41534 - DNA, 25 bp, Homo sapien
tgttgtgttgttatgactcaataaa

SEQ ID NO: 41535 - DNA, 25 bp, Homo sapien
agtgtacgaacgtagacaagaggga

SEQ ID NO: 41536 - DNA, 25 bp, Homo sapien
tccctcttgtctacgttcgtacact

SEQ ID NO: 41537 - DNA, 25 bp, Homo sapien
gaaaccgaagtaccctactcagtgt

SEQ ID NO: 41538 - DNA, 25 bp, Homo sapien
acactgagtagggtacttcggtttc

SEQ ID NO: 41539 - DNA, 25 bp, Homo sapien
cagtagttcggggactcctgacagg

SEQ ID NO: 41540 - DNA, 25 bp, Homo sapien
cctgtcaggagtccccgaactactg

SEQ ID NO: 41541 - DNA, 25 bp, Homo sapien
gtcgagaggccagacgcaggacatc

SEQ ID NO: 41542 - DNA, 25 bp, Homo sapien
gatgtcctgcgtctggcctctcgac

SEQ ID NO: 41543 - DNA, 25 bp, Homo sapien
aacacgtcttcatatgtttcaacag

SEQ ID NO: 41544 - DNA, 25 bp, Homo sapien
ctgttgaaacatatgaagacgtgtt

SEQ ID NO: 41545 - DNA, 25 bp, Homo sapien
gaggccgcgaccccgcgcacgattc

SEQ ID NO: 41546 - DNA, 25 bp, Homo sapien
gaatcgtgcgcggggtcgcggcctc

SEQ ID NO: 41547 - DNA, 25 bp, Homo sapien
aatgagccgtaggacaacccgaagg

SEQ ID NO: 41548 - DNA, 25 bp, Homo sapien
ccttcgggttgtcctacggctcatt

SEQ ID NO: 41549 - DNA, 25 bp, Homo sapien
gagaaggggcgatgggtgactgggt

SEQ ID NO: 41550 - DNA, 25 bp, Homo sapien
acccagtcacccatcgccccttctc

SEQ ID NO: 41551 - DNA, 25 bp, Homo sapien
cgccggcctcgcccctagcccagac

SEQ ID NO: 41552 - DNA, 25 bp, Homo sapien
gtctgggctaggggcgaggccggcg

SEQ ID NO: 41553 - DNA, 25 bp, Homo sapien
gccgccggcctcgcccctagcccag

SEQ ID NO: 41554 - DNA, 25 bp, Homo sapien
ctgggctaggggcgaggccggcggc

SEQ ID NO: 41555 - DNA, 25 bp, Homo sapien
agagggtggctgagggcccgactgc

SEQ ID NO: 41556 - DNA, 25 bp, Homo sapien
gcagtcgggccctcagccaccctct

SEQ ID NO: 41557 - DNA, 25 bp, Homo sapien
gcccggcccgtgacgcgcgttcctg

SEQ ID NO: 41558 - DNA, 25 bp, Homo sapien
caggaacgcgcgtcacgggccgggc

SEQ ID NO: 41559 - DNA, 25 bp, Homo sapien
taaggatttattaacagaaagttct

SEQ ID NO: 41560 - DNA, 25 bp, Homo sapien
agaactttctgttaataaatcctta

SEQ ID NO: 41561 - DNA, 25 bp, Homo sapien
ccggtgcggagatctccgccccgga

SEQ ID NO: 41562 - DNA, 25 bp, Homo sapien
tccggggcggagatctccgcaccgg

SEQ ID NO: 41563 - DNA, 25 bp, Homo sapien
taaagagatatacctagaaaagtac

SEQ ID NO: 41564 - DNA, 25 bp, Homo sapien
gtacttttctaggtatatctcttta

SEQ ID NO: 41565 - DNA, 25 bp, Homo sapien
gcgtacgtcggaccgacaggcacct

SEQ ID NO: 41566 - DNA, 25 bp, Homo sapien
aggtgcctgtcggtccgacgtacgc

SEQ ID NO: 41567 - DNA, 25 bp, Homo sapien
atcagtaactacatctattattttt

SEQ ID NO: 41568 - DNA, 25 bp, Homo sapien
aaaaataatagatgtagttactgat

SEQ ID NO: 41569 - DNA, 25 bp, Homo sapien
aatcagtaactacatctattatttt

SEQ ID NO: 41570 - DNA, 25 bp, Homo sapien
aaaataatagatgtagttactgatt

SEQ ID NO: 41571 - DNA, 25 bp, Homo sapien
tcagtaactacatctattatttttt

SEQ ID NO: 41572 - DNA, 25 bp, Homo sapien
aaaaaataatagatgtagttactga

SEQ ID NO: 41573 - DNA, 25 bp, Homo sapien
tcaaccctcccaccccaagaacgta

SEQ ID NO: 41574 - DNA, 25 bp, Homo sapien
tacgttcttggggtgggagggttga

SEQ ID NO: 41575 - DNA, 25 bp, Homo sapien
aaaactctggtgtttcaggactcac

SEQ ID NO: 41576 - DNA, 25 bp, Homo sapien
gtgagtcctgaaacaccagagtttt

SEQ ID NO: 41577 - DNA, 25 bp, Homo sapien
tcgtaatattagtctttcagttata

SEQ ID NO: 41578 - DNA, 25 bp, Homo sapien
tataactgaaagactaatattacga

SEQ ID NO: 41579 - DNA, 25 bp, Homo sapien
gacgagagcctcccctcgtctgtca

SEQ ID NO: 41580 - DNA, 25 bp, Homo sapien
tgacagacgaggggaggctctcgtc

SEQ ID NO: 41581 - DNA, 25 bp, Homo sapien
taagattgtttcattctcaaaatgt

SEQ ID NO: 41582 - DNA, 25 bp, Homo sapien
acattttgagaatgaaacaatctta

SEQ ID NO: 41583 - DNA, 25 bp, Homo sapien
ttcctttgggcctgtcgaccggacc

SEQ ID NO: 41584 - DNA, 25 bp, Homo sapien
ggtccggtcgacaggcccaaaggaa

SEQ ID NO: 41585 - DNA, 25 bp, Homo sapien
ctgctgccctcccgccacgcgtccg

SEQ ID NO: 41586 - DNA, 25 bp, Homo sapien
cggacgcgtggcgggagggcagcag

SEQ ID NO: 41587 - DNA, 25 bp, Homo sapien
accctgctgccctcccgccacgcgt

SEQ ID NO: 41588 - DNA, 25 bp, Homo sapien
acgcgtggcgggagggcagcagggt

SEQ ID NO: 41589 - DNA, 25 bp, Homo sapien
ggtgtgcggaacagtatattgacgt

SEQ ID NO: 41590 - DNA, 25 bp, Homo sapien
acgtcaatatactgttccgcacacc

SEQ ID NO: 41591 - DNA, 25 bp, Homo sapien
gatccttgtaaccatagcccactct

SEQ ID NO: 41592 - DNA, 25 bp, Homo sapien
agagtgggctatggttacaaggatc

SEQ ID NO: 41593 - DNA, 25 bp, Homo sapien
gttatccgggcctctggtttcatcc

SEQ ID NO: 41594 - DNA, 25 bp, Homo sapien
ggatgaaaccagaggcccggataac

SEQ ID NO: 41595 - DNA, 25 bp, Homo sapien
tttatctgtgatttagtcttttact

SEQ ID NO: 41596 - DNA, 25 bp, Homo sapien
agtaaaagactaaatcacagataaa

SEQ ID NO: 41597 - DNA, 25 bp, Homo sapien
ttttatctgtgatttagtcttttac

SEQ ID NO: 41598 - DNA, 25 bp, Homo sapien
gtaaaagactaaatcacagataaaa

SEQ ID NO: 41599 - DNA, 25 bp, Homo sapien
ggtgacggcggaccaccgtcgtgcg

SEQ ID NO: 41600 - DNA, 25 bp, Homo sapien
cgcacgacggtggtccgccgtcacc

SEQ ID NO: 41601 - DNA, 25 bp, Homo sapien
ttgtcggccgtgaagtcgtgtcccc

SEQ ID NO: 41602 - DNA, 25 bp, Homo sapien
ggggacacgacttcacggccgacaa

SEQ ID NO: 41603 - DNA, 25 bp, Homo sapien
cagagcatctcgtgcagctgtatct

SEQ ID NO: 41604 - DNA, 25 bp, Homo sapien
agatacagctgcacgagatgctctg

SEQ ID NO: 41605 - DNA, 25 bp, Homo sapien
tcgtaacggctgcacgagactcaat

SEQ ID NO: 41606 - DNA, 25 bp, Homo sapien
attgagtctcgtgcagccgttacga

SEQ ID NO: 41607 - DNA, 25 bp, Homo sapien
aaagattacacttgtagttgtaaag

SEQ ID NO: 41608 - DNA, 25 bp, Homo sapien
ctttacaactacaagtgtaatcttt

SEQ ID NO: 41609 - DNA, 25 bp, Homo sapien
taaccactacttcttgtaaggttta

SEQ ID NO: 41610 - DNA, 25 bp, Homo sapien
taaaccttacaagaagtagtggtta

SEQ ID NO: 41611 - DNA, 25 bp, Homo sapien
gtccggaactcacgagaatctgtcg

SEQ ID NO: 41612 - DNA, 25 bp, Homo sapien
cgacagattctcgtgagttccggac

SEQ ID NO: 41613 - DNA, 25 bp, Homo sapien
actttcagattattaagacaaagaa

SEQ ID NO: 41614 - DNA, 25 bp, Homo sapien
ttctttgtcttaataatctgaaagt

SEQ ID NO: 41615 - DNA, 25 bp, Homo sapien
gtcgggggtcggggtctgtggtctg

SEQ ID NO: 41616 - DNA, 25 bp, Homo sapien
cagaccacagaccccgacccccgac

SEQ ID NO: 41617 - DNA, 25 bp, Homo sapien
agtgtggacgtggtagacgggaagt

SEQ ID NO: 41618 - DNA, 25 bp, Homo sapien
acttcccgtctaccacgtccacact

SEQ ID NO: 41619 - DNA, 25 bp, Homo sapien
gaacgcccatccgaggaggtacgtc

SEQ ID NO: 41620 - DNA, 25 bp, Homo sapien
gacgtacctcctcggatgggcgttc

SEQ ID NO: 41621 - DNA, 25 bp, Homo sapien
gacggtcctccggggctcatcgtcg

SEQ ID NO: 41622 - DNA, 25 bp, Homo sapien
cgacgatgagccccggaggaccgtc

SEQ ID NO: 41623 - DNA, 25 bp, Homo sapien
caacctctaggaaccaggactcact

SEQ ID NO: 41624 - DNA, 25 bp, Homo sapien
agtgagtcctggttcctagaggttg

SEQ ID NO: 41625 - DNA, 25 bp, Homo sapien
gggtggtctcctctatcccgggctc

SEQ ID NO: 41626 - DNA, 25 bp, Homo sapien
gagcccgggatagaggagaccaccc

SEQ ID NO: 41627 - DNA, 25 bp, Homo sapien
cccaccgtcacgccgcccgcccatt

SEQ ID NO: 41628 - DNA, 25 bp, Homo sapien
aatgggcgggcggcgtgacggtggg

SEQ ID NO: 41629 - DNA, 25 bp, Homo sapien
cttaggtaagtgtaacgaacagaaa

SEQ ID NO: 41630 - DNA, 25 bp, Homo sapien
tttctgttcgttacacttacctaag

SEQ ID NO: 41631 - DNA, 25 bp, Homo sapien
ctaaggcggacacagaggttggtgt

SEQ ID NO: 41632 - DNA, 25 bp, Homo sapien
acaccaacctctgtgtccgccttag

SEQ ID NO: 41633 - DNA, 25 bp, Homo sapien
gacaccatcggggtcctgtgggggt

SEQ ID NO: 41634 - DNA, 25 bp, Homo sapien
acccccacaggaccccgatggtgtc

SEQ ID NO: 41635 - DNA, 25 bp, Homo sapien
actaaactatgcaaacatgggattc

SEQ ID NO: 41636 - DNA, 25 bp, Homo sapien
gaatcccatgtttgcatagtttagt

SEQ ID NO: 41637 - DNA, 25 bp, Homo sapien
tttttacatacacatctaaagaaat

SEQ ID NO: 41638 - DNA, 25 bp, Homo sapien
atttctttagatgtgtatgtaaaaa

SEQ ID NO: 41639 - DNA, 25 bp, Homo sapien
gactacttacaaatgtaaacaacgt

SEQ ID NO: 41640 - DNA, 25 bp, Homo sapien
acgttgtttacatttgtaagtagtc

SEQ ID NO: 41641 - DNA, 25 bp, Homo sapien
ttcggacacaccatttcctttcgaa

SEQ ID NO: 41642 - DNA, 25 bp, Homo sapien
ttcgaaaggaaatggtgtgtccgaa

SEQ ID NO: 41643 - DNA, 25 bp, Homo sapien
ccgggcgcgaagatggaaacgtcaa

SEQ ID NO: 41644 - DNA, 25 bp, Homo sapien
ttgacgtttccatcttcgcgcccgg

SEQ ID NO: 41645 - DNA, 25 bp, Homo sapien
aattacttcgtcactaaatcgttta

SEQ ID NO: 41646 - DNA, 25 bp, Homo sapien
taaacgatttagtgacgaagtaatt

SEQ ID NO: 41647 - DNA, 25 bp, Homo sapien
caacctgacagagattgtgctaaag

SEQ ID NO: 41648 - DNA, 25 bp, Homo sapien
ctttagcacaatctctgtcaggttg

SEQ ID NO: 41649 - DNA, 25 bp, Homo sapien
tataaaaagacgtcggttgacatcg

SEQ ID NO: 41650 - DNA, 25 bp, Homo sapien
cgatgtcaaccgacgtctttttata

SEQ ID NO: 41651 - DNA, 25 bp, Homo sapien
tcgacggcacggacacgaccgcact

SEQ ID NO: 41652 - DNA, 25 bp, Homo sapien
agtgcggtcgtgtccgtgccgtcga

SEQ ID NO: 41653 - DNA, 25 bp, Homo sapien
accaggggtgccactgttccgatct

SEQ ID NO: 41654 - DNA, 25 bp, Homo sapien
agatcggaacagtggcacccctggt

SEQ ID NO: 41655 - DNA, 25 bp, Homo sapien
aaaccaacccagtgttccactgacc

SEQ ID NO: 41656 - DNA, 25 bp, Homo sapien
ggtcagtggaacactgggttggttt

SEQ ID NO: 41657 - DNA, 25 bp, Homo sapien
ctgtgctacgattgggtaaaaatgt

SEQ ID NO: 41658 - DNA, 25 bp, Homo sapien
acatttttacccaatcgtagcacag

SEQ ID NO: 41659 - DNA, 25 bp, Homo sapien
agtatcgaaacagggtctttaacac

SEQ ID NO: 41660 - DNA, 25 bp, Homo sapien
gtgttaaagaccctgtttcgatact

SEQ ID NO: 41661 - DNA, 25 bp, Homo sapien
tttcataggacgaataatcaagtag

SEQ ID NO: 41662 - DNA, 25 bp, Homo sapien
ctacttgattattcgtcctatgaaa

SEQ ID NO: 41663 - DNA, 25 bp, Homo sapien
gtaacattctgcacataaaaatgag

SEQ ID NO: 41664 - DNA, 25 bp, Homo sapien
ctcatttttatgtgcagaatgttac

SEQ ID NO: 41665 - DNA, 25 bp, Homo sapien
ttcgtcggtcaccagactcctcgag

SEQ ID NO: 41666 - DNA, 25 bp, Homo sapien
ctcgaggagtctggtgaccgacgaa

SEQ ID NO: 41667 - DNA, 25 bp, Homo sapien
ttcgtgtcaaacataaacctctagt

SEQ ID NO: 41668 - DNA, 25 bp, Homo sapien
actagaggtttatgtttgacacgaa

SEQ ID NO: 41669 - DNA, 25 bp, Homo sapien
atccaattagggtctcggggagacg

SEQ ID NO: 41670 - DNA, 25 bp, Homo sapien
cgtctccccgagaccctaattggat

SEQ ID NO: 41671 - DNA, 25 bp, Homo sapien
tacaataaacacagggttccaaact

SEQ ID NO: 41672 - DNA, 25 bp, Homo sapien
agtttggaaccctgtgtttattgta

SEQ ID NO: 41673 - DNA, 25 bp, Homo sapien
cttttgtaggaataataacaacagt

SEQ ID NO: 41674 - DNA, 25 bp, Homo sapien
actgttgttattattcctacaaaag

SEQ ID NO: 41675 - DNA, 25 bp, Homo sapien
ggggtcgacagcgacagacggtgaa

SEQ ID NO: 41676 - DNA, 25 bp, Homo sapien
ttcaccgtctgtcgctgtcgacccc

SEQ ID NO: 41677 - DNA, 25 bp, Homo sapien
gtgttgaaaagtaaataaacctatg

SEQ ID NO: 41678 - DNA, 25 bp, Homo sapien
cataggtttatttacttttcaacac

SEQ ID NO: 41679 - DNA, 25 bp, Homo sapien
gggacgtcgtccgcggctcggcggc

SEQ ID NO: 41680 - DNA, 25 bp, Homo sapien
gccgccgagccgcggacgacgtccc

SEQ ID NO: 41681 - DNA, 25 bp, Homo sapien
tacctgcccgtcatgcctggggtgt

SEQ ID NO: 41682 - DNA, 25 bp, Homo sapien
acaccccaggcatgacgggcaggta

SEQ ID NO: 41683 - DNA, 25 bp, Homo sapien
aggtctggtgccgtgtcggacgaag

SEQ ID NO: 41684 - DNA, 25 bp, Homo sapien
cttcgtccgacacggcaccagacct

SEQ ID NO: 41685 - DNA, 25 bp, Homo sapien
tcgtactcccggtgtaactgttcct

SEQ ID NO: 41686 - DNA, 25 bp, Homo sapien
aggaacagttacaccgggagtacga

SEQ ID NO: 41687 - DNA, 25 bp, Homo sapien
gacatgagaaaattgaaggatttgt

SEQ ID NO: 41688 - DNA, 25 bp, Homo sapien
acaaatccttcaattttctcatgtc

SEQ ID NO: 41689 - DNA, 25 bp, Homo sapien
tcagggacgctttcggtaaccgaag

SEQ ID NO: 41690 - DNA, 25 bp, Homo sapien
cttcggttaccgaaagcgtccctga

SEQ ID NO: 41691 - DNA, 25 bp, Homo sapien
cttgtcgccaaaggaattagctagg

SEQ ID NO: 41692 - DNA, 25 bp, Homo sapien
cctagctaattcctttggcgacaag

SEQ ID NO: 41693 - DNA, 25 bp, Homo sapien
tgatcacgggcgaccggtctgggcc

SEQ ID NO: 41694 - DNA, 25 bp, Homo sapien
ggcccagaccggtcgcccgtgatca

SEQ ID NO: 41695 - DNA, 25 bp, Homo sapien
aggcagactcggatctcggtcctcc

SEQ ID NO: 41696 - DNA, 25 bp, Homo sapien
ggaggaccgagatccgagtctgcct

SEQ ID NO: 41697 - DNA, 25 bp, Homo sapien
gtctacatagttattggctccttga

SEQ ID NO: 41698 - DNA, 25 bp, Homo sapien
tcaaggagccaataactatgtagac

SEQ ID NO: 41699 - DNA, 25 bp, Homo sapien
ttacacatgtgtattaggtattact

SEQ ID NO: 41700 - DNA, 25 bp, Homo sapien
agtaatacctaatacacatgtgtaa

SEQ ID NO: 41701 - DNA, 25 bp, Homo sapien
cccctcaaacgacatggcccggacg

SEQ ID NO: 41702 - DNA, 25 bp, Homo sapien
cgtccgggccatgtcgtttgagggg

SEQ ID NO: 41703 - DNA, 25 bp, Homo sapien
gtcgtcagacgacgagggcccccgg

SEQ ID NO: 41704 - DNA, 25 bp, Homo sapien
ccgggggccctcgtcgtctgacgac

SEQ ID NO: 41705 - DNA, 25 bp, Homo sapien
aaaacttgctgattgtatacatgct

SEQ ID NO: 41706 - DNA, 25 bp, Homo sapien
agcatgtatacaatcagcaagtttt

SEQ ID NO: 41707 - DNA, 25 bp, Homo sapien
cggacgtctgggaggtcgtgggtcc

SEQ ID NO: 41708 - DNA, 25 bp, Homo sapien
ggacccacgacctcccagacgtccg

SEQ ID NO: 41709 - DNA, 25 bp, Homo sapien
attttagtcttcatttttatgagtg

SEQ ID NO: 41710 - DNA, 25 bp, Homo sapien
cactcataaaaatgaagactaaaat

SEQ ID NO: 41711 - DNA, 25 bp, Homo sapien
cgtagacgaaacacaatttcgggta

SEQ ID NO: 41712 - DNA, 25 bp, Homo sapien
tacccgaaattgtgtttcgtctacg

SEQ ID NO: 41713 - DNA, 25 bp, Homo sapien
ttattttagtcttcatttttatgag

SEQ ID NO: 41714 - DNA, 25 bp, Homo sapien
ctcataaaaatgaagactaaaataa

SEQ ID NO: 41715 - DNA, 25 bp, Homo sapien
cctccgacggaggtcccattctcac

SEQ ID NO: 41716 - DNA, 25 bp, Homo sapien
gtgagaatgggacctccgtcggagg

SEQ ID NO: 41717 - DNA, 25 bp, Homo sapien
ttgttcaccgttctaaacgttcgag

SEQ ID NO: 41718 - DNA, 25 bp, Homo sapien
ctcgaacgtttagaacggtgaacaa

SEQ ID NO: 41719 - DNA, 25 bp, Homo sapien
gtacactcaggtgcccgccgtggtg

SEQ ID NO: 41720 - DNA, 25 bp, Homo sapien
caccacggcgggcacctgagtgtac

SEQ ID NO: 41721 - DNA, 25 bp, Homo sapien
aggagacaaactgtcacgcatgtct

SEQ ID NO: 41722 - DNA, 25 bp, Homo sapien
agacatgcgtgacagtttgtctcct

SEQ ID NO: 41723 - DNA, 25 bp, Homo sapien
agtttaaagttcatagagtcattca

SEQ ID NO: 41724 - DNA, 25 bp, Homo sapien
tgaatgactctatgaactttaaact

SEQ ID NO: 41725 - DNA, 25 bp, Homo sapien
aaggcccgtcttgcaacttcgatag

SEQ ID NO: 41726 - DNA, 25 bp, Homo sapien
ctatcgaagttgcaagacgggcctt

SEQ ID NO: 41727 - DNA, 25 bp, Homo sapien
caaatagtcaattattacttcttta

SEQ ID NO: 41728 - DNA, 25 bp, Homo sapien
taaagaagtaataattgactatttg

SEQ ID NO: 41729 - DNA, 25 bp, Homo sapien
atcaaatagtcaattattacttctt

SEQ ID NO: 41730 - DNA, 25 bp, Homo sapien
aagaagtaataattgactatttgat

SEQ ID NO: 41731 - DNA, 25 bp, Homo sapien
tatcaaatagtcaattattacttct

SEQ ID NO: 41732 - DNA, 25 bp, Homo sapien
agaagtaataattgactatttgata

SEQ ID NO: 41733 - DNA, 25 bp, Homo sapien
acaaaacaaatattagagacttata

SEQ ID NO: 41734 - DNA, 25 bp, Homo sapien
tataagtctctaatatttgttttgt

SEQ ID NO: 41735 - DNA, 25 bp, Homo sapien
acggaagtcccacggccagtttatc

SEQ ID NO: 41736 - DNA, 25 bp, Homo sapien
gataaactggccgtgggacttccgt

SEQ ID NO: 41737 - DNA, 25 bp, Homo sapien
agtgccgtataagggacgaccctcc

SEQ ID NO: 41738 - DNA, 25 bp, Homo sapien
ggagggtcgtcccttatacggcact

SEQ ID NO: 41739 - DNA, 25 bp, Homo sapien
taagactaagtctggatttgttctc

SEQ ID NO: 41740 - DNA, 25 bp, Homo sapien
gagaacaaatccagacttagtctta

SEQ ID NO: 41741 - DNA, 25 bp, Homo sapien
gacacaagggtgtttaccaggtata

SEQ ID NO: 41742 - DNA, 25 bp, Homo sapien
tatacctggtaaacacccttgtgtc

SEQ ID NO: 41743 - DNA, 25 bp, Homo sapien
gtttattaaaaagtcatcttattat

SEQ ID NO: 41744 - DNA, 25 bp, Homo sapien
ataataagatgactttttaataaac

SEQ ID NO: 41745 - DNA, 25 bp, Homo sapien
agtttattaaaaagtcatcttatta

SEQ ID NO: 41746 - DNA, 25 bp, Homo sapien
taataagatgactttttaataaact

SEQ ID NO: 41747 - DNA, 25 bp, Homo sapien
gactcttccgtcttcgccggccacg

SEQ ID NO: 41748 - DNA, 25 bp, Homo sapien
cgtggccggcgaagacggaagagtc

SEQ ID NO: 41749 - DNA, 25 bp, Homo sapien
tgacccttgggtcgccaacgaatcg

SEQ ID NO: 41750 - DNA, 25 bp, Homo sapien
cgattcgttggcgacccaagggtca

SEQ ID NO: 41751 - DNA, 25 bp, Homo sapien
tttcttcaaccccacatccttaggt

SEQ ID NO: 41752 - DNA, 25 bp, Homo sapien
acctaaggatgtggggttgaagaaa

SEQ ID NO: 41753 - DNA, 25 bp, Homo sapien
cgggtctcgggcctaggtggtcgcc

SEQ ID NO: 41754 - DNA, 25 bp, Homo sapien
ggcgaccacctaggcccgagacccg

SEQ ID NO: 41755 - DNA, 25 bp, Homo sapien
tatatgaacttgaaaacgagtttaa

SEQ ID NO: 41756 - DNA, 25 bp, Homo sapien
ttaaactcgttttcaagttcatata

SEQ ID NO: 41757 - DNA, 25 bp, Homo sapien
cggaagcctgcgagggccggcccgt

SEQ ID NO: 41758 - DNA, 25 bp, Homo sapien
acgggccggccctcgcaggcttccg

SEQ ID NO: 41759 - DNA, 25 bp, Homo sapien
cccacggcgtggaggcggaagcctg

SEQ ID NO: 41760 - DNA, 25 bp, Homo sapien
caggcttccgcctccacgccgtggg

SEQ ID NO: 41761 - DNA, 25 bp, Homo sapien
acctagactggcatacttgggacac

SEQ ID NO: 41762 - DNA, 25 bp, Homo sapien
gtgtcccaagtatgccagtctaggt

SEQ ID NO: 41763 - DNA, 25 bp, Homo sapien
ggccggagagccccctgggcacgtg

SEQ ID NO: 41764 - DNA, 25 bp, Homo sapien
cacgtgcccagggggctctccggcc

SEQ ID NO: 41765 - DNA, 25 bp, Homo sapien
taacaaggatatcgcttagaaacat

SEQ ID NO: 41766 - DNA, 25 bp, Homo sapien
atgtttctaagcgatatccttgtta

SEQ ID NO: 41767 - DNA, 25 bp, Homo sapien
aaacataatgacctaagacgtttag

SEQ ID NO: 41768 - DNA, 25 bp, Homo sapien
ctaaacgtcttaggtcattatgttt

SEQ ID NO: 41769 - DNA, 25 bp, Homo sapien
ttaggtgttacctccaggtaatagt

SEQ ID NO: 41770 - DNA, 25 bp, Homo sapien
actattacctggaggtaacacctaa

SEQ ID NO: 41771 - DNA, 25 bp, Homo sapien
cttctgtcgcccccggatagacggt

SEQ ID NO: 41772 - DNA, 25 bp, Homo sapien
accgtctatccgggggcgacagaag

SEQ ID NO: 41773 - DNA, 25 bp, Homo sapien
agtgcatataggagagaaaacttac

SEQ ID NO: 41774 - DNA, 25 bp, Homo sapien
gtaagttttctctcctatatgcact

SEQ ID NO: 41775 - DNA, 25 bp, Homo sapien
gctccctcgccacttcggccttctg

SEQ ID NO: 41776 - DNA, 25 bp, Homo sapien
cagaaggccgaagtggcgagggagc

SEQ ID NO: 41777 - DNA, 25 bp, Homo sapien
gacaaccgagcgtttggcaacccca

SEQ ID NO: 41778 - DNA, 25 bp, Homo sapien
tggggttgccaaacgctcggttgtc

SEQ ID NO: 41779 - DNA, 25 bp, Homo sapien
accgtccttcaatctcgaagggatg

SEQ ID NO: 41780 - DNA, 25 bp, Homo sapien
catcccttcgagattgaaggacggt

SEQ ID NO: 41781 - DNA, 25 bp, Homo sapien
cggagcacaggcaaaatacttgacg

SEQ ID NO: 41782 - DNA, 25 bp, Homo sapien
cgtcaagtattttgcctgtgctccg

SEQ ID NO: 41783 - DNA, 25 bp, Homo sapien
cccgtgaactgcgtccggacccgtc

SEQ ID NO: 41784 - DNA, 25 bp, Homo sapien
gacgggtccggacgcagttcacggg

SEQ ID NO: 41785 - DNA, 25 bp, Homo sapien
aaaggggtcgcaggtcacaacggcc

SEQ ID NO: 41786 - DNA, 25 bp, Homo sapien
ggccgttgtgacctgcgaccccttt

SEQ ID NO: 41787 - DNA, 25 bp, Homo sapien
tccgcccagaatcgacgatcgtgac

SEQ ID NO: 41788 - DNA, 25 bp, Homo sapien
gtcacgatcgtcgattctgggcgga

SEQ ID NO: 41789 - DNA, 25 bp, Homo sapien
ctccgcccagaatcgacgatcgtga

SEQ ID NO: 41790 - DNA, 25 bp, Homo sapien
tcacgatcgtcgattctgggcggag

SEQ ID NO: 41791 - DNA, 25 bp, Homo sapien
ccaccgtaggcgtgactctccaggg

SEQ ID NO: 41792 - DNA, 25 bp, Homo sapien
ccctggagagtcacgcctacggtgg

SEQ ID NO: 41793 - DNA, 25 bp, Homo sapien
ttcttcggacctccacgtcatcagt

SEQ ID NO: 41794 - DNA, 25 bp, Homo sapien
actgatgacgtggaggtccgaagaa

SEQ ID NO: 41795 - DNA, 25 bp, Homo sapien
cccggtggtccatccgtgcagcgtg

SEQ ID NO: 41796 - DNA, 25 bp, Homo sapien
cacgctgcacggatggaccaccggg

SEQ ID NO: 41797 - DNA, 25 bp, Homo sapien
cgtcacacccaacgaaacggtagga

SEQ ID NO: 41798 - DNA, 25 bp, Homo sapien
tcctaccgtttcgttgggtgtgacg

SEQ ID NO: 41799 - DNA, 25 bp, Homo sapien
gactcccgtcggctgcccacccgcg

SEQ ID NO: 41800 - DNA, 25 bp, Homo sapien
cgcgggtgggcagccgacgggagtc

SEQ ID NO: 41801 - DNA, 25 bp, Homo sapien
ggcggcgcgtcggtagaggaccggg

SEQ ID NO: 41802 - DNA, 25 bp, Homo sapien
cccggtcctctaccgacgcgccgcc

SEQ ID NO: 41803 - DNA, 25 bp, Homo sapien
tcgaactgacagacgaagcaaaacc

SEQ ID NO: 41804 - DNA, 25 bp, Homo sapien
ggttttgcttcgtctgtcagttcga

SEQ ID NO: 41805 - DNA, 25 bp, Homo sapien
tcagggacgaggtctagttccctcg

SEQ ID NO: 41806 - DNA, 25 bp, Homo sapien
cgagggaactagacctcgtccctga

SEQ ID NO: 41807 - DNA, 25 bp, Homo sapien
ttacgtaaacctcaggttcgggtca

SEQ ID NO: 41808 - DNA, 25 bp, Homo sapien
tgacccgaacctgaggtttacgtaa

SEQ ID NO: 41809 - DNA, 25 bp, Homo sapien
ctatatccaataatttgtagtgtaa

SEQ ID NO: 41810 - DNA, 25 bp, Homo sapien
ttacactacaaattattggatatag

SEQ ID NO: 41811 - DNA, 25 bp, Homo sapien
cgaaactagtatctcacctaaaagt

SEQ ID NO: 41812 - DNA, 25 bp, Homo sapien
acttttaggtgagatactagtttcg

SEQ ID NO: 41813 - DNA, 25 bp, Homo sapien
agtcggaacacttgaggtttagtcc

SEQ ID NO: 41814 - DNA, 25 bp, Homo sapien
ggactaaacctcaagtgttccgact

SEQ ID NO: 41815 - DNA, 25 bp, Homo sapien
ttgtagcttcaaagaagaagttact

SEQ ID NO: 41816 - DNA, 25 bp, Homo sapien
agtaacttcttctttgaagctacaa

SEQ ID NO: 41817 - DNA, 25 bp, Homo sapien
ggtcgaggcgcctgttccctagggt

SEQ ID NO: 41818 - DNA, 25 bp, Homo sapien
accctagggaacaggcgcctcgacc

SEQ ID NO: 41819 - DNA, 25 bp, Homo sapien
ctaccctctacgctccggtcgtaca

SEQ ID NO: 41820 - DNA, 25 bp, Homo sapien
tgtacgaccggagcgtagagggtag

SEQ ID NO: 41821 - DNA, 25 bp, Homo sapien
tatttctcaacatgataagttttat

SEQ ID NO: 41822 - DNA, 25 bp, Homo sapien
ataaaacttatcatgttgagaaata

SEQ ID NO: 41823 - DNA, 25 bp, Homo sapien
cttatttctcaacatgataagtttt

SEQ ID NO: 41824 - DNA, 25 bp, Homo sapien
aaaacttatcatgttgagaaataag

SEQ ID NO: 41825 - DNA, 25 bp, Homo sapien
gccctcgagcccgcgtccctgcgtg

SEQ ID NO: 41826 - DNA, 25 bp, Homo sapien
cacgcagggacgcgggctcgagggc

SEQ ID NO: 41827 - DNA, 25 bp, Homo sapien
cgccctcgagcccgcgtccctgcgt

SEQ ID NO: 41828 - DNA, 25 bp, Homo sapien
acgcagggacgcgggctcgagggcg

SEQ ID NO: 41829 - DNA, 25 bp, Homo sapien
gcgccctcgagcccgcgtccctgcg

SEQ ID NO: 41830 - DNA, 25 bp, Homo sapien
cgcagggacgcgggctcgagggcgc

SEQ ID NO: 41831 - DNA, 25 bp, Homo sapien
gcgcgccctcgagcccgcgtccctg

SEQ ID NO: 41832 - DNA, 25 bp, Homo sapien
cagggacgcgggctcgagggcgcgc

SEQ ID NO: 41833 - DNA, 25 bp, Homo sapien
ccccagtagggcgacttggcgtatc

SEQ ID NO: 41834 - DNA, 25 bp, Homo sapien
gatacgccaagtcgccctactgggg

SEQ ID NO: 41835 - DNA, 25 bp, Homo sapien
aagctgaccttactctgttattacg

SEQ ID NO: 41836 - DNA, 25 bp, Homo sapien
cgtaataacagagtaaggtcagctt

SEQ ID NO: 41837 - DNA, 25 bp, Homo sapien
tctcggtaccttgggtgtatgacgt

SEQ ID NO: 41838 - DNA, 25 bp, Homo sapien
acgtcatacacccaaggtaccgaga

SEQ ID NO: 41839 - DNA, 25 bp, Homo sapien
ggacggtcgtttacgccggactgac

SEQ ID NO: 41840 - DNA, 25 bp, Homo sapien
gtcagtccggcgtaaacgaccgtcc

SEQ ID NO: 41841 - DNA, 25 bp, Homo sapien
gaagattaaaaatgtcggcgacatg

SEQ ID NO: 41842 - DNA, 25 bp, Homo sapien
catgtcgccgacatttttaatcttc

SEQ ID NO: 41843 - DNA, 25 bp, Homo sapien
cggagtggaacgtccgcgacaggta

SEQ ID NO: 41844 - DNA, 25 bp, Homo sapien
tacctgtcgcggacgttccactccg

SEQ ID NO: 41845 - DNA, 25 bp, Homo sapien
aacagtaatcactattattgaaaca

SEQ ID NO: 41846 - DNA, 25 bp, Homo sapien
tgtttcaataatagtgattactgtt

SEQ ID NO: 41847 - DNA, 25 bp, Homo sapien
accgggactttgtcacgtgtcagat

SEQ ID NO: 41848 - DNA, 25 bp, Homo sapien
atctgacacgtgacaaagtcccggt

SEQ ID NO: 41849 - DNA, 25 bp, Homo sapien
gaaatattcacgtacctcttaaaag

SEQ ID NO: 41850 - DNA, 25 bp, Homo sapien
cttttaagaggtacgtgaatatttc

SEQ ID NO: 41851 - DNA, 25 bp, Homo sapien
gaactggaccttcccactcagtccg

SEQ ID NO: 41852 - DNA, 25 bp, Homo sapien
cggactgagtgggaaggtccagttc

SEQ ID NO: 41853 - DNA, 25 bp, Homo sapien
atccccaccccaccgaggtgctcct

SEQ ID NO: 41854 - DNA, 25 bp, Homo sapien
aggagcacctcggtggggtggggat

SEQ ID NO: 41855 - DNA, 25 bp, Homo sapien
acccctctgggacgcgcgcgccccg

SEQ ID NO: 41856 - DNA, 25 bp, Homo sapien
cggggcgcgcgcgtcccagaggggt

SEQ ID NO: 41857 - DNA, 25 bp, Homo sapien
cttgacccctctgggacgcgcgcgc

SEQ ID NO: 41858 - DNA, 25 bp, Homo sapien
gcgcgcgcgtcccagaggggtcaag

SEQ ID NO: 41859 - DNA, 25 bp, Homo sapien
gaggactccttgttacgtcggcgca

SEQ ID NO: 41860 - DNA, 25 bp, Homo sapien
tgcgccgacgtaacaaggagtcctc

SEQ ID NO: 41861 - DNA, 25 bp, Homo sapien
tgagtgtcagtttgtacttagttat

SEQ ID NO: 41862 - DNA, 25 bp, Homo sapien
ataactaagtacaaactgacactca

SEQ ID NO: 41863 - DNA, 25 bp, Homo sapien
tgagtagtcatagctcaaggaaaac

SEQ ID NO: 41864 - DNA, 25 bp, Homo sapien
gttttccttgagctatgactactca

SEQ ID NO: 41865 - DNA, 25 bp, Homo sapien
tcctagtaaaggaccaggagagtcg

SEQ ID NO: 41866 - DNA, 25 bp, Homo sapien
cgactctcctggtcctttactagga

SEQ ID NO: 41867 - DNA, 25 bp, Homo sapien
ccgacagcaaggatgaggctgccag

SEQ ID NO: 41868 - DNA, 25 bp, Homo sapien
ctggcagcctcatccttgctgtcgg

SEQ ID NO: 41869 - DNA, 25 bp, Homo sapien
atttgtactagcttttaagtgtgtc

SEQ ID NO: 41870 - DNA, 25 bp, Homo sapien
gacacacttaaaagctagtacaaat

SEQ ID NO: 41871 - DNA, 25 bp, Homo sapien
gactgccaggtgtcgcgcgtgtccc

SEQ ID NO: 41872 - DNA, 25 bp, Homo sapien
gggacacgcgcgacacctggcagtc

SEQ ID NO: 41873 - DNA, 25 bp, Homo sapien
ctggtactgccagggcaggtgccac

SEQ ID NO: 41874 - DNA, 25 bp, Homo sapien
gtggcacctgccctggcagtaccag

SEQ ID NO: 41875 - DNA, 25 bp, Homo sapien
gacaggtttccatgtacccctctga

SEQ ID NO: 41876 - DNA, 25 bp, Homo sapien
tcagaggggtacatggaaacctgtc

SEQ ID NO: 41877 - DNA, 25 bp, Homo sapien
ctgagggtcagttcaagagtgacaa

SEQ ID NO: 41878 - DNA, 25 bp, Homo sapien
ttgtcactcttgaactgaccctcag

SEQ ID NO: 41879 - DNA, 25 bp, Homo sapien
ccactccgtcacaggggtccgagtg

SEQ ID NO: 41880 - DNA, 25 bp, Homo sapien
cactcggacccctgtgacggagtgg

SEQ ID NO: 41881 - DNA, 25 bp, Homo sapien
gtggtcccttgggctccaggaccgg

SEQ ID NO: 41882 - DNA, 25 bp, Homo sapien
ccggtcctggagcccaagggaccac

SEQ ID NO: 41883 - DNA, 25 bp, Homo sapien
gtccgtggtcccttgggctccagga

SEQ ID NO: 41884 - DNA, 25 bp, Homo sapien
tcctggagcccaagggaccacggac

SEQ ID NO: 41885 - DNA, 25 bp, Homo sapien
ctcgggccgaccgaccaggtcaacg

SEQ ID NO: 41886 - DNA, 25 bp, Homo sapien
cgttgacctggtcggtcggcccgag

SEQ ID NO: 41887 - DNA, 25 bp, Homo sapien
tacttgaaacaaaaacaggatatgc

SEQ ID NO: 41888 - DNA, 25 bp, Homo sapien
gcatatcctgtttttgtttcaagta

SEQ ID NO: 41889 - DNA, 25 bp, Homo sapien
acattccatacgacgtgtcccgaag

SEQ ID NO: 41890 - DNA, 25 bp, Homo sapien
cttcgggacacgtcgtatggaatgt

SEQ ID NO: 41891 - DNA, 25 bp, Homo sapien
gagcgggcggcgcccttgggctctg

SEQ ID NO: 41892 - DNA, 25 bp, Homo sapien
cagagcccaagggcgccgcccgctc

SEQ ID NO: 41893 - DNA, 25 bp, Homo sapien
caaggagacccacgaaggcggaggg

SEQ ID NO: 41894 - DNA, 25 bp, Homo sapien
ccctccgccttcgtgggtctccttg

SEQ ID NO: 41895 - DNA, 25 bp, Homo sapien
ataacgaaggatatagtattatgaa

SEQ ID NO: 41896 - DNA, 25 bp, Homo sapien
ttcataatactatatccttcgttat

SEQ ID NO: 41897 - DNA, 25 bp, Homo sapien
gttattcttcaaacagataaagata

SEQ ID NO: 41898 - DNA, 25 bp, Homo sapien
tatctttatctgtttgaagaataac

SEQ ID NO: 41899 - DNA, 25 bp, Homo sapien
tgtggtcgacgactatttgacagag

SEQ ID NO: 41900 - DNA, 25 bp, Homo sapien
ctctgtcaaatagtcgtcgaccaca

SEQ ID NO: 41901 - DNA, 25 bp, Homo sapien
tcgagaccgcggagatggcttgagg

SEQ ID NO: 41902 - DNA, 25 bp, Homo sapien
cctcaagccatctccgcggtctcga

SEQ ID NO: 41903 - DNA, 25 bp, Homo sapien
agcattctggaggtgatacgacaat

SEQ ID NO: 41904 - DNA, 25 bp, Homo sapien
attgtcgtatcacctccagaatgct

SEQ ID NO: 41905 - DNA, 25 bp, Homo sapien
agtaacgttctgcttaaataggtgt

SEQ ID NO: 41906 - DNA, 25 bp, Homo sapien
acacctatttaagcagaacgttact

SEQ ID NO: 41907 - DNA, 25 bp, Homo sapien
aggcaactgcaggacagacttaggg

SEQ ID NO: 41908 - DNA, 25 bp, Homo sapien
ccctaagtctgtcctgcagttgcct

SEQ ID NO: 41909 - DNA, 25 bp, Homo sapien
gtccagacctgaacgagaacctccg

SEQ ID NO: 41910 - DNA, 25 bp, Homo sapien
cggaggttctcgttcaggtctggac

SEQ ID NO: 41911 - DNA, 25 bp, Homo sapien
gggtcccggtcattcctacgtacaa

SEQ ID NO: 41912 - DNA, 25 bp, Homo sapien
ttgtacgtaggaatgaccgggaccc

SEQ ID NO: 41913 - DNA, 25 bp, Homo sapien
ggacgacctcttcccggtggtcgga

SEQ ID NO: 41914 - DNA, 25 bp, Homo sapien
tccgaccaccgggaagaggtcgtcc

SEQ ID NO: 41915 - DNA, 25 bp, Homo sapien
tataaattataaaagacctcacgtt

SEQ ID NO: 41916 - DNA, 25 bp, Homo sapien
aacgtgaggtcttttataatttata

SEQ ID NO: 41917 - DNA, 25 bp, Homo sapien
acacattgccataagatttaaagat

SEQ ID NO: 41918 - DNA, 25 bp, Homo sapien
atctttaaatcttatggcaatgtgt

SEQ ID NO: 41919 - DNA, 25 bp, Homo sapien
tacacattgccataagatttaaaga

SEQ ID NO: 41920 - DNA, 25 bp, Homo sapien
tctttaaatcttatggcaatgtgta

SEQ ID NO: 41921 - DNA, 25 bp, Homo sapien
aagacaacgtccaacatatttcagt

SEQ ID NO: 41922 - DNA, 25 bp, Homo sapien
actgaaatatgttggacgttgtctt

SEQ ID NO: 41923 - DNA, 25 bp, Homo sapien
tgtccagtgacgattagggttgcac

SEQ ID NO: 41924 - DNA, 25 bp, Homo sapien
gtgcaaccctaatcgtcactggaca

SEQ ID NO: 41925 - DNA, 25 bp, Homo sapien
tcaaaaagactaaacttgtacatac

SEQ ID NO: 41926 - DNA, 25 bp, Homo sapien
gtatgtacaagtttagtctttttga

SEQ ID NO: 41927 - DNA, 25 bp, Homo sapien
gtccttgaacagtctcatcatttat

SEQ ID NO: 41928 - DNA, 25 bp, Homo sapien
ataaatgatgagactgttcaaggac

SEQ ID NO: 41929 - DNA, 25 bp, Homo sapien
cggcgacgaccctgcccgtcggtgt

SEQ ID NO: 41930 - DNA, 25 bp, Homo sapien
acaccgacgggcagggtcgtcgccg

SEQ ID NO: 41931 - DNA, 25 bp, Homo sapien
gtagatactagtgaggtcccctttc

SEQ ID NO: 41932 - DNA, 25 bp, Homo sapien
gaaaggggacctcactagtatctac

SEQ ID NO: 41933 - DNA, 25 bp, Homo sapien
aggacggaccgtacgccgtcgacag

SEQ ID NO: 41934 - DNA, 25 bp, Homo sapien
ctgtcgacggcgtacggtccgtcct

SEQ ID NO: 41935 - DNA, 25 bp, Homo sapien
ggaggccgagggtcccgacgaccgc

SEQ ID NO: 41936 - DNA, 25 bp, Homo sapien
gcggtcgtcgggaccctcggcctcc

SEQ ID NO: 41937 - DNA, 25 bp, Homo sapien
tagaatatgagtttaagtatgacct

SEQ ID NO: 41938 - DNA, 25 bp, Homo sapien
aggtcatacttaaactcatattcta

SEQ ID NO: 41939 - DNA, 25 bp, Homo sapien
actccttacccgtccagtgatttcg

SEQ ID NO: 41940 - DNA, 25 bp, Homo sapien
cgaaatcactggacgggtaaggagt

SEQ ID NO: 41941 - DNA, 25 bp, Homo sapien
caaatttatacgtaccaaatatcct

SEQ ID NO: 41942 - DNA, 25 bp, Homo sapien
aggatatttggtacgtataaatttg

SEQ ID NO: 41943 - DNA, 25 bp, Homo sapien
tagtatcaatacatactttaaactt

SEQ ID NO: 41944 - DNA, 25 bp, Homo sapien
aagtttaaagtatgtattgatacta

SEQ ID NO: 41945 - DNA, 25 bp, Homo sapien
taatcgtacaactacttcttatttt

SEQ ID NO: 41946 - DNA, 25 bp, Homo sapien
aaaataagaagtagttgtacgatta

SEQ ID NO: 41947 - DNA, 25 bp, Homo sapien
ttaatcgtacaactacttcttattt

SEQ ID NO: 41948 - DNA, 25 bp, Homo sapien
aaataagaagtagttgtacgattaa

SEQ ID NO: 41949 - DNA, 25 bp, Homo sapien
aagacataggacgagatagtgttaa

SEQ ID NO: 41950 - DNA, 25 bp, Homo sapien
ttaacactatctcgtcctatgtctt

SEQ ID NO: 41951 - DNA, 25 bp, Homo sapien
agacttggtcaagtaaaaataggta

SEQ ID NO: 41952 - DNA, 25 bp, Homo sapien
tacctatttttacttgaccaagtct

SEQ ID NO: 41953 - DNA, 25 bp, Homo sapien
cagtagtcaaggttgacggaatcat

SEQ ID NO: 41954 - DNA, 25 bp, Homo sapien
atgattccgtcaaccttgactactg

SEQ ID NO: 41955 - DNA, 25 bp, Homo sapien
agtatacaattggcgaagtaaactt

SEQ ID NO: 41956 - DNA, 25 bp, Homo sapien
aagtttacttcgccaattgtatact

SEQ ID NO: 41957 - DNA, 25 bp, Homo sapien
tcgtgcaactagtttccaagtaata

SEQ ID NO: 41958 - DNA, 25 bp, Homo sapien
tattacttggaaactagttgcacga

SEQ ID NO: 41959 - DNA, 25 bp, Homo sapien
aacccagattacagttggtggaccc

SEQ ID NO: 41960 - DNA, 25 bp, Homo sapien
gggtccaccaactgtaatctgggtt

SEQ ID NO: 41961 - DNA, 25 bp, Homo sapien
aagcctcctttcgtccgtctcgtgg

SEQ ID NO: 41962 - DNA, 25 bp, Homo sapien
ccacgagacggacgaaaggaggctt

SEQ ID NO: 41963 - DNA, 25 bp, Homo sapien
aacagaggtccggtcatgtaagttt

SEQ ID NO: 41964 - DNA, 25 bp, Homo sapien
aaacttacatgaccggacctctgtt

SEQ ID NO: 41965 - DNA, 25 bp, Homo sapien
atataaatcaatgtaatcagacccg

SEQ ID NO: 41966 - DNA, 25 bp, Homo sapien
cgggtctgattacattgatttatat

SEQ ID NO: 41967 - DNA, 25 bp, Homo sapien
gtcttactctcgagttcaccttggg

SEQ ID NO: 41968 - DNA, 25 bp, Homo sapien
cccaaggtgaactcgagagtaagac

SEQ ID NO: 41969 - DNA, 25 bp, Homo sapien
actatatgcacctgaaacttttaat

SEQ ID NO: 41970 - DNA, 25 bp, Homo sapien
attaaaagtttcaggtgcatatagt

SEQ ID NO: 41971 - DNA, 25 bp, Homo sapien
tcatcaacattggagtacgaaatca

SEQ ID NO: 41972 - DNA, 25 bp, Homo sapien
tgatttcgtactccaatgttgatga

SEQ ID NO: 41973 - DNA, 25 bp, Homo sapien
ccaaggtcagttcggcctgacaagt

SEQ ID NO: 41974 - DNA, 25 bp, Homo sapien
acttgtcaggccgaactgaccttgg

SEQ ID NO: 41975 - DNA, 25 bp, Homo sapien
gtcttctcgtataactcggaacccg

SEQ ID NO: 41976 - DNA, 25 bp, Homo sapien
cgggttccgagttatacgagaagac

SEQ ID NO: 41977 - DNA, 25 bp, Homo sapien
cactcaaagagattgaaagttacgt

SEQ ID NO: 41978 - DNA, 25 bp, Homo sapien
acgtaactttcaatctctttgagtg

SEQ ID NO: 41979 - DNA, 25 bp, Homo sapien
ggggaggagaccgagagtctgtgta

SEQ ID NO: 41980 - DNA, 25 bp, Homo sapien
tacacagactctcggtctcctcccc

SEQ ID NO: 41981 - DNA, 25 bp, Homo sapien
actagtagtataacagattatttgt

SEQ ID NO: 41982 - DNA, 25 bp, Homo sapien
acaaataatctgttatactactagt

SEQ ID NO: 41983 - DNA, 25 bp, Homo sapien
acgcaacctatttgtatgaccttat

SEQ ID NO: 41984 - DNA, 25 bp, Homo sapien
ataaggtcatacaaataggttgcgt

SEQ ID NO: 41985 - DNA, 25 bp, Homo sapien
gacttgaacatgaactcgatttact

SEQ ID NO: 41986 - DNA, 25 bp, Homo sapien
agtaaatcgagttcatgttcaagtc

SEQ ID NO: 41987 - DNA, 25 bp, Homo sapien
aagtagtttctgtataagaaatcac

SEQ ID NO: 41988 - DNA, 25 bp, Homo sapien
gtgatttcttatacagaaactactt

SEQ ID NO: 41989 - DNA, 25 bp, Homo sapien
gacgacagtactggcgtaagttgtg

SEQ ID NO: 41990 - DNA, 25 bp, Homo sapien
cacaacttacgccagtactgtcgtc

SEQ ID NO: 41991 - DNA, 25 bp, Homo sapien
gacccggcgtccactgaagacgacg

SEQ ID NO: 41992 - DNA, 25 bp, Homo sapien
cgtcgtcttcagtggacgccgggtc

SEQ ID NO: 41993 - DNA, 25 bp, Homo sapien
aaacaagaggcagaaagagtacgaa

SEQ ID NO: 41994 - DNA, 25 bp, Homo sapien
ttcgtactctttctgcctcttgttt

SEQ ID NO: 41995 - DNA, 25 bp, Homo sapien
gacacgaaaaggacaggcagagaac

SEQ ID NO: 41996 - DNA, 25 bp, Homo sapien
gttctctgcctgtccttttcgtgtc

SEQ ID NO: 41997 - DNA, 25 bp, Homo sapien
tcacacgattaaaggcttgtttacg

SEQ ID NO: 41998 - DNA, 25 bp, Homo sapien
cgtaaacaagcctttaatcgtgtga

SEQ ID NO: 41999 - DNA, 25 bp, Homo sapien
tctcgtccatcatgtaaacagaaat

SEQ ID NO: 42000 - DNA, 25 bp, Homo sapien
atttctgtttacatgatggacgaga

SEQ ID NO: 42001 - DNA, 25 bp, Homo sapien
acacgattagattagtccgggtggg

SEQ ID NO: 42002 - DNA, 25 bp, Homo sapien
cccacccggactaatctaatcgtgt

SEQ ID NO: 42003 - DNA, 25 bp, Homo sapien
tccttggaaggtttaagttcatagt

SEQ ID NO: 42004 - DNA, 25 bp, Homo sapien
actatgaacttaaaccttccaagga

SEQ ID NO: 42005 - DNA, 25 bp, Homo sapien
aggtcgtcccggttcgaggatatct

SEQ ID NO: 42006 - DNA, 25 bp, Homo sapien
agatatcctcgaaccgggacgacct

SEQ ID NO: 42007 - DNA, 25 bp, Homo sapien
attagaagttttaaagctgaataac

SEQ ID NO: 42008 - DNA, 25 bp, Homo sapien
gttattcagctttaaaacttctaat

SEQ ID NO: 42009 - DNA, 25 bp, Homo sapien
cggagacccaactactcccacgacc

SEQ ID NO: 42010 - DNA, 25 bp, Homo sapien
ggtcgtgggagtagttgggtctccg

SEQ ID NO: 42011 - DNA, 25 bp, Homo sapien
aacgacccatcctcaatcgttcatt

SEQ ID NO: 42012 - DNA, 25 bp, Homo sapien
aatgaacgattgaggatgggtcgtt

SEQ ID NO: 42013 - DNA, 25 bp, Homo sapien
acggaatcacggtacaagagagggt

SEQ ID NO: 42014 - DNA, 25 bp, Homo sapien
accctctcttgtaccgtgattccgt

SEQ ID NO: 42015 - DNA, 25 bp, Homo sapien
aactttggataacttatttagtgat

SEQ ID NO: 42016 - DNA, 25 bp, Homo sapien
atcactaaataagttatccaaagtt

SEQ ID NO: 42017 - DNA, 25 bp, Homo sapien
tccccttcgtgagccggctgcgaca

SEQ ID NO: 42018 - DNA, 25 bp, Homo sapien
tgtcgcagccggctcacgaagggga

SEQ ID NO: 42019 - DNA, 25 bp, Homo sapien
gatttccacgtgggtccccgaactc

SEQ ID NO: 42020 - DNA, 25 bp, Homo sapien
gagttcggggacccacgtggaaatc

SEQ ID NO: 42021 - DNA, 25 bp, Homo sapien
acggaacatagtcttaggtggacct

SEQ ID NO: 42022 - DNA, 25 bp, Homo sapien
aggtccacctaagactatgttccgt

SEQ ID NO: 42023 - DNA, 25 bp, Homo sapien
catgggtccccggtgcgggtcggtc

SEQ ID NO: 42024 - DNA, 25 bp, Homo sapien
gaccgacccgcaccggggacccatg

SEQ ID NO: 42025 - DNA, 25 bp, Homo sapien
gaccatgggtccccggtgcgggtcg

SEQ ID NO: 42026 - DNA, 25 bp, Homo sapien
cgacccgcaccggggacccatggtc

SEQ ID NO: 42027 - DNA, 25 bp, Homo sapien
ttgcgaaacggcgatcgacgcgact

SEQ ID NO: 42028 - DNA, 25 bp, Homo sapien
agtcgcgtcgatcgccgtttcgcaa

SEQ ID NO: 42029 - DNA, 25 bp, Homo sapien
gacgtgactcgtaggagtgccgggt

SEQ ID NO: 42030 - DNA, 25 bp, Homo sapien
acccggcactcctacgagtcacgtc

SEQ ID NO: 42031 - DNA, 25 bp, Homo sapien
gtggcgcgtcggaagggccgccggg

SEQ ID NO: 42032 - DNA, 25 bp, Homo sapien
cccggcggcccttccgacgcgccac

SEQ ID NO: 42033 - DNA, 25 bp, Homo sapien
tgtggcgcgtcggaagggccgccgg

SEQ ID NO: 42034 - DNA, 25 bp, Homo sapien
ccggcggcccttccgacgcgccaca

SEQ ID NO: 42035 - DNA, 25 bp, Homo sapien
gatttatctcgtgagaagtctacaa

SEQ ID NO: 42036 - DNA, 25 bp, Homo sapien
ttgtagacttctcacgagataaatc

SEQ ID NO: 42037 - DNA, 25 bp, Homo sapien
gaagtgtcacacctcgcttcggtcc

SEQ ID NO: 42038 - DNA, 25 bp, Homo sapien
ggaccgaagcgaggtgtgacacttc

SEQ ID NO: 42039 - DNA, 25 bp, Homo sapien
ggtctcggagacatgcgcgtctagt

SEQ ID NO: 42040 - DNA, 25 bp, Homo sapien
actagacgcgcatgtctccgagacc

SEQ ID NO: 42041 - DNA, 25 bp, Homo sapien
aatattagaaagttcttatacgaat

SEQ ID NO: 42042 - DNA, 25 bp, Homo sapien
attcgtataagaactttctaatatt

SEQ ID NO: 42043 - DNA, 25 bp, Homo sapien
cttgcgactaaattaaaccagggcg

SEQ ID NO: 42044 - DNA, 25 bp, Homo sapien
cgccctggtttaatttagtcgcaag

SEQ ID NO: 42045 - DNA, 25 bp, Homo sapien
gcactacttcaaatctcttttggat

SEQ ID NO: 42046 - DNA, 25 bp, Homo sapien
atccaaaagagatttgaagtagtgc

SEQ ID NO: 42047 - DNA, 25 bp, Homo sapien
aaggaaccagacagttctctcggac

SEQ ID NO: 42048 - DNA, 25 bp, Homo sapien
gtccgagagaactgtctggttcctt

SEQ ID NO: 42049 - DNA, 25 bp, Homo sapien
tcaaggtgtctactggtatgagtaa

SEQ ID NO: 42050 - DNA, 25 bp, Homo sapien
ttactcataccagtagacaccttga

SEQ ID NO: 42051 - DNA, 25 bp, Homo sapien
tgtgccgtccggtgctacaggttcc

SEQ ID NO: 42052 - DNA, 25 bp, Homo sapien
ggaacctgtagcaccggacggcaca

SEQ ID NO: 42053 - DNA, 25 bp, Homo sapien
atacattctttcctagatattacac

SEQ ID NO: 42054 - DNA, 25 bp, Homo sapien
gtgtaatatctaggaaagaatgtat

SEQ ID NO: 42055 - DNA, 25 bp, Homo sapien
tagcgagaccgccaacctccagccc

SEQ ID NO: 42056 - DNA, 25 bp, Homo sapien
gggctggaggttggcggtctcgcta

SEQ ID NO: 42057 - DNA, 25 bp, Homo sapien
ccacggaccgtaacccagatcgaga

SEQ ID NO: 42058 - DNA, 25 bp, Homo sapien
tctcgatctgggttacggtccgtgg

SEQ ID NO: 42059 - DNA, 25 bp, Homo sapien
tcgcacgtgtactgtggcggtgaac

SEQ ID NO: 42060 - DNA, 25 bp, Homo sapien
gttcaccgccacagtacacgtgcga

SEQ ID NO: 42061 - DNA, 25 bp, Homo sapien
atttgaaatgagaaatatcacttcg

SEQ ID NO: 42062 - DNA, 25 bp, Homo sapien
cgaagtgatatttctcatttcaaat

SEQ ID NO: 42063 - DNA, 25 bp, Homo sapien
ccgcccctcaactatgttccggaca

SEQ ID NO: 42064 - DNA, 25 bp, Homo sapien
tgtccggaacatagttgaggggcgg

SEQ ID NO: 42065 - DNA, 25 bp, Homo sapien
agagtaaacgtttggcatatataag

SEQ ID NO: 42066 - DNA, 25 bp, Homo sapien
cttatatatgccaaacgtttactct

SEQ ID NO: 42067 - DNA, 25 bp, Homo sapien
gggttgtttgtaggagagaaaattg

SEQ ID NO: 42068 - DNA, 25 bp, Homo sapien
caattttctctcctacaaacaaccc

SEQ ID NO: 42069 - DNA, 25 bp, Homo sapien
ttcaataccgtcactatctgagaaa

SEQ ID NO: 42070 - DNA, 25 bp, Homo sapien
tttctcagatagtgacggtattgaa

SEQ ID NO: 42071 - DNA, 25 bp, Homo sapien
cgtagggtcccgtccaagcatcccg

SEQ ID NO: 42072 - DNA, 25 bp, Homo sapien
cgggatgcttggacgggaccctacg

SEQ ID NO: 42073 - DNA, 25 bp, Homo sapien
agttaacctcgttaacactagacag

SEQ ID NO: 42074 - DNA, 25 bp, Homo sapien
ctgtctagtgttaacgaggttaact

SEQ ID NO: 42075 - DNA, 25 bp, Homo sapien
acacgtatcgcttttgatccaaaac

SEQ ID NO: 42076 - DNA, 25 bp, Homo sapien
gttttggatcaaaagcgatacgtgt

SEQ ID NO: 42077 - DNA, 25 bp, Homo sapien
cggtccggccggcggatcgtcgtcg

SEQ ID NO: 42078 - DNA, 25 bp, Homo sapien
cgacgacgatccgccggccggaccg

SEQ ID NO: 42079 - DNA, 25 bp, Homo sapien
aaagaccgagtgtatccaatagtcc

SEQ ID NO: 42080 - DNA, 25 bp, Homo sapien
ggactattggatacactcggtcttt

SEQ ID NO: 42081 - DNA, 25 bp, Homo sapien
aagtgtcagtctcattcaagatggc

SEQ ID NO: 42082 - DNA, 25 bp, Homo sapien
gccatcttgaatgagactgacactt

SEQ ID NO: 42083 - DNA, 25 bp, Homo sapien
taagatgcgactcccagagaggtct

SEQ ID NO: 42084 - DNA, 25 bp, Homo sapien
agacctctctgggagtcgcatctta

SEQ ID NO: 42085 - DNA, 25 bp, Homo sapien
ccagtagtcaacattaaaatatctt

SEQ ID NO: 42086 - DNA, 25 bp, Homo sapien
aagatattttaatgttgactactgg

SEQ ID NO: 42087 - DNA, 25 bp, Homo sapien
cacctatattcatcgtaagaaatac

SEQ ID NO: 42088 - DNA, 25 bp, Homo sapien
gtatttcttacgatgaatataggtg

SEQ ID NO: 42089 - DNA, 25 bp, Homo sapien
agttcaactacgaggtaaacgtgac

SEQ ID NO: 42090 - DNA, 25 bp, Homo sapien
gtcacgtttacctcgtagttgaact

SEQ ID NO: 42091 - DNA, 25 bp, Homo sapien
acacccctcccacctgcccggtgtg

SEQ ID NO: 42092 - DNA, 25 bp, Homo sapien
cacaccgggcaggtgggaggggtgt

SEQ ID NO: 42093 - DNA, 25 bp, Homo sapien
tggaaacctcagagagtttataaat

SEQ ID NO: 42094 - DNA, 25 bp, Homo sapien
atttataaactctctgaggtttcca

SEQ ID NO: 42095 - DNA, 25 bp, Homo sapien
ggtccacaggttccaacctacattg

SEQ ID NO: 42096 - DNA, 25 bp, Homo sapien
caatgtaggttggaacctgtggacc

SEQ ID NO: 42097 - DNA, 25 bp, Homo sapien
caaaggtgtccgcagggacgacgac

SEQ ID NO: 42098 - DNA, 25 bp, Homo sapien
gtcgtcgtccctgcggacacctttg

SEQ ID NO: 42099 - DNA, 25 bp, Homo sapien
gaaatacacctagtcgaaataagag

SEQ ID NO: 42100 - DNA, 25 bp, Homo sapien
ctcttatttcgactaggtgtatttc

SEQ ID NO: 42101 - DNA, 25 bp, Homo sapien
tcccgaactcccgatttcttccttc

SEQ ID NO: 42102 - DNA, 25 bp, Homo sapien
gaaggaagaaatcgggagttcggga

SEQ ID NO: 42103 - DNA, 25 bp, Homo sapien
acggtctggatctagacgggaaaag

SEQ ID NO: 42104 - DNA, 25 bp, Homo sapien
cttttcccgtctagatccagaccgt

SEQ ID NO: 42105 - DNA, 25 bp, Homo sapien
tcgtcgaccgacaacactgtgagat

SEQ ID NO: 42106 - DNA, 25 bp, Homo sapien
atctcacagtgttgtcggtcgacga

SEQ ID NO: 42107 - DNA, 25 bp, Homo sapien
ggccttacttattcgtccacgttcg

SEQ ID NO: 42108 - DNA, 25 bp, Homo sapien
cgaacgtggacgaataagtaaggcc

SEQ ID NO: 42109 - DNA, 25 bp, Homo sapien
cctctcccgtcccacttcaggaggt

SEQ ID NO: 42110 - DNA, 25 bp, Homo sapien
acctcctgaagtgggacgggagagg

SEQ ID NO: 42111 - DNA, 25 bp, Homo sapien
accccattcgttctcttcacttccg

SEQ ID NO: 42112 - DNA, 25 bp, Homo sapien
cggaagtgaagagaacgaatggggt

SEQ ID NO: 42113 - DNA, 25 bp, Homo sapien
agggtcgtgttcaccgtacgtctcc

SEQ ID NO: 42114 - DNA, 25 bp, Homo sapien
ggagacgtacggtgaacacgaccct

SEQ ID NO: 42115 - DNA, 25 bp, Homo sapien
tacacatcggataaggtccacatcg

SEQ ID NO: 42116 - DNA, 25 bp, Homo sapien
cgatgtggaccttatccgatgtgta

SEQ ID NO: 42117 - DNA, 25 bp, Homo sapien
tcctggtccagcgtggaagtcccaa

SEQ ID NO: 42118 - DNA, 25 bp, Homo sapien
ttgggacttccacgctggaccagga

SEQ ID NO: 42119 - DNA, 25 bp, Homo sapien
ccagtgacagggtagtccttacaaa

SEQ ID NO: 42120 - DNA, 25 bp, Homo sapien
tttgtaaggactaccctgtcactgg

SEQ ID NO: 42121 - DNA, 25 bp, Homo sapien
tcgacggtgagggtgtctgtaggtc

SEQ ID NO: 42122 - DNA, 25 bp, Homo sapien
gacctacagacaccctcaccgtcga

SEQ ID NO: 42123 - DNA, 25 bp, Homo sapien
tccgaccgaagtcattgtgacgaag

SEQ ID NO: 42124 - DNA, 25 bp, Homo sapien
cttcgtcacaatgacttcggtcgga

SEQ ID NO: 42125 - DNA, 25 bp, Homo sapien
tggtacggtaccattcaaccggctt

SEQ ID NO: 42126 - DNA, 25 bp, Homo sapien
aagccggttgaatggtaccgtacca

SEQ ID NO: 42127 - DNA, 25 bp, Homo sapien
ccttccagtcggacgtcgtcggagt

SEQ ID NO: 42128 - DNA, 25 bp, Homo sapien
actccgacgacgtccgactggaagg

SEQ ID NO: 42129 - DNA, 25 bp, Homo sapien
tgccggaaccagaacccggtctacg

SEQ ID NO: 42130 - DNA, 25 bp, Homo sapien
cgtagaccgggttctggttccggca

SEQ ID NO: 42131 - DNA, 25 bp, Homo sapien
cgaggcggccggagagtcactacag

SEQ ID NO: 42132 - DNA, 25 bp, Homo sapien
ctgtagtgactctccggccgcctcg

SEQ ID NO: 42133 - DNA, 25 bp, Homo sapien
taataatgtggtagtatctagggag

SEQ ID NO: 42134 - DNA, 25 bp, Homo sapien
ctccctagatactaccacattatta

SEQ ID NO: 42135 - DNA, 25 bp, Homo sapien
gtggctccagttctcactgctgtcg

SEQ ID NO: 42136 - DNA, 25 bp, Homo sapien
cgacagcagtgagaactggagccac

SEQ ID NO: 42137 - DNA, 25 bp, Homo sapien
gtgtaagaagttgggcaaaataacc

SEQ ID NO: 42138 - DNA, 25 bp, Homo sapien
ggttattttgcccaacttcttacac

SEQ ID NO: 42139 - DNA, 25 bp, Homo sapien
ggtcgccggggaccgtctgtagtat

SEQ ID NO: 42140 - DNA, 25 bp, Homo sapien
atactacagacggtccccggcgacc

SEQ ID NO: 42141 - DNA, 25 bp, Homo sapien
gccgcgtgcttcatctgggaggtat

SEQ ID NO: 42142 - DNA, 25 bp, Homo sapien
atacctcccagatgaagcacgcggc

SEQ ID NO: 42143 - DNA, 25 bp, Homo sapien
aatctcgtctgaactgcatgaccac

SEQ ID NO: 42144 - DNA, 25 bp, Homo sapien
gtggtcatgcagttcagacgagatt

SEQ ID NO: 42145 - DNA, 25 bp, Homo sapien
tcgttgccgtcctaactgaaagacc

SEQ ID NO: 42146 - DNA, 25 bp, Homo sapien
ggtctttcagttaggacggcaacga

SEQ ID NO: 42147 - DNA, 25 bp, Homo sapien
tccgggtcctgtttcgtcgccgaga

SEQ ID NO: 42148 - DNA, 25 bp, Homo sapien
tctcggcgacgaaacaggacccgga

SEQ ID NO: 42149 - DNA, 25 bp, Homo sapien
ccttttcaaagaagataacggtgtc

SEQ ID NO: 42150 - DNA, 25 bp, Homo sapien
gacaccgttatcttctttgaaaagg

SEQ ID NO: 42151 - DNA, 25 bp, Homo sapien
ggccccgatcacgtaccccagacga

SEQ ID NO: 42152 - DNA, 25 bp, Homo sapien
tcgtctggggtacgtgatcggggcc

SEQ ID NO: 42153 - DNA, 25 bp, Homo sapien
gactcggcacattcgccgggaccta

SEQ ID NO: 42154 - DNA, 25 bp, Homo sapien
taggtcccggcgaatgtgccgagtc

SEQ ID NO: 42155 - DNA, 25 bp, Homo sapien
aggcccacgccgacacccgtggacg

SEQ ID NO: 42156 - DNA, 25 bp, Homo sapien
cgtccacgggtgtcggcgtgggcct

SEQ ID NO: 42157 - DNA, 25 bp, Homo sapien
atcacggaaacagtccgtataaact

SEQ ID NO: 42158 - DNA, 25 bp, Homo sapien
agtttatacggactgtttccgtgat

SEQ ID NO: 42159 - DNA, 25 bp, Homo sapien
tctgataagccggtacgaaaacgtc

SEQ ID NO: 42160 - DNA, 25 bp, Homo sapien
gacgttttcgtaccggcttatcaga

SEQ ID NO: 42161 - DNA, 25 bp, Homo sapien
gaagttctgtgtacgggacatttct

SEQ ID NO: 42162 - DNA, 25 bp, Homo sapien
agaaatgtcccgtacacagaacttc

SEQ ID NO: 42163 - DNA, 25 bp, Homo sapien
aaaggtaatttaagttgagatagaa

SEQ ID NO: 42164 - DNA, 25 bp, Homo sapien
ttctatctcaacttaaattaccttt

SEQ ID NO: 42165 - DNA, 25 bp, Homo sapien
tcaagaagatactttaaaaactagt

SEQ ID NO: 42166 - DNA, 25 bp, Homo sapien
actagtttttaaagtatcttcttga

SEQ ID NO: 42167 - DNA, 25 bp, Homo sapien
gggactcgcaggagtccaccttcgt

SEQ ID NO: 42168 - DNA, 25 bp, Homo sapien
acgaaggtggactcctgcgagtccc

SEQ ID NO: 42169 - DNA, 25 bp, Homo sapien
ctaggtctagcacagaccttcataa

SEQ ID NO: 42170 - DNA, 25 bp, Homo sapien
ttatgaaggtctgtgctagacctag

SEQ ID NO: 42171 - DNA, 25 bp, Homo sapien
taggacagccgctaccacatcctgg

SEQ ID NO: 42172 - DNA, 25 bp, Homo sapien
ccaggatgtggtagcggctgtccta

SEQ ID NO: 42173 - DNA, 25 bp, Homo sapien
tgtcaacgtatttgttcaagttttg

SEQ ID NO: 42174 - DNA, 25 bp, Homo sapien
caaaacttgaacaaatacgttgaca

SEQ ID NO: 42175 - DNA, 25 bp, Homo sapien
gacaaaggtcagcacccacaccagt

SEQ ID NO: 42176 - DNA, 25 bp, Homo sapien
actggtgtgggtgctgacctttgtc

SEQ ID NO: 42177 - DNA, 25 bp, Homo sapien
accggggccgggcatgagggtcgtc

SEQ ID NO: 42178 - DNA, 25 bp, Homo sapien
gacgaccctcatgcccggccccggt

SEQ ID NO: 42179 - DNA, 25 bp, Homo sapien
ttaaaatctcgaacggagaacagga

SEQ ID NO: 42180 - DNA, 25 bp, Homo sapien
tcctgttctccgttcgagattttaa

SEQ ID NO: 42181 - DNA, 25 bp, Homo sapien
cgaccatggtttgaagggaattagt

SEQ ID NO: 42182 - DNA, 25 bp, Homo sapien
actaattcccttcaaaccatggtcg

SEQ ID NO: 42183 - DNA, 25 bp, Homo sapien
tagacctcgttagagtgtaagtgtc

SEQ ID NO: 42184 - DNA, 25 bp, Homo sapien
gacacttacactctaacgaggtcta

SEQ ID NO: 42185 - DNA, 25 bp, Homo sapien
attcagtaaagtcattggttttaga

SEQ ID NO: 42186 - DNA, 25 bp, Homo sapien
tctaaaaccaatgactttactgaat

SEQ ID NO: 42187 - DNA, 25 bp, Homo sapien
cgatagtgacaaacagaatttaact

SEQ ID NO: 42188 - DNA, 25 bp, Homo sapien
agttaaattctgtttgtcactatcg

SEQ ID NO: 42189 - DNA, 25 bp, Homo sapien
atttgtcaatagaagtgtcacgtcc

SEQ ID NO: 42190 - DNA, 25 bp, Homo sapien
ggacgtgacacttctattgacaaat

SEQ ID NO: 42191 - DNA, 25 bp, Homo sapien
aaattaggagtaatcgcctagacag

SEQ ID NO: 42192 - DNA, 25 bp, Homo sapien
ctgtctaggcgattactcctaattt

SEQ ID NO: 42193 - DNA, 25 bp, Homo sapien
cgcgcgagcaacgacggcggaaggg

SEQ ID NO: 42194 - DNA, 25 bp, Homo sapien
cccttccgccgtcgttgctcgcgcg

SEQ ID NO: 42195 - DNA, 25 bp, Homo sapien
cctgtctcgggcagcgcgcgagcaa

SEQ ID NO: 42196 - DNA, 25 bp, Homo sapien
ttgctcgcgcgctgcccgagacagg

SEQ ID NO: 42197 - DNA, 25 bp, Homo sapien
agtctgtaacttatgaaatgaattt

SEQ ID NO: 42198 - DNA, 25 bp, Homo sapien
aaattcatttcataagttacagact

SEQ ID NO: 42199 - DNA, 25 bp, Homo sapien
gataatcctgtgtacctcaccctaa

SEQ ID NO: 42200 - DNA, 25 bp, Homo sapien
ttagggtgaggtacacaggattatc

SEQ ID NO: 42201 - DNA, 25 bp, Homo sapien
cttagctcggaggtctacatgggag

SEQ ID NO: 42202 - DNA, 25 bp, Homo sapien
ctcccatgtagacctccgagctaag

SEQ ID NO: 42203 - DNA, 25 bp, Homo sapien
tgtcctaagcctacatctttgagtt

SEQ ID NO: 42204 - DNA, 25 bp, Homo sapien
aactcaaagatgtaggcttaggaca

SEQ ID NO: 42205 - DNA, 25 bp, Homo sapien
aaatgagagaacatgggtcccgagt

SEQ ID NO: 42206 - DNA, 25 bp, Homo sapien
actcgggacccatgttctctcattt

SEQ ID NO: 42207 - DNA, 25 bp, Homo sapien
gagcgacgcgtcctgccgcgggcgg

SEQ ID NO: 42208 - DNA, 25 bp, Homo sapien
ccgcccgcggcaggacgcgtcgctc

SEQ ID NO: 42209 - DNA, 25 bp, Homo sapien
tcctcctcgtgagagggacgaaccg

SEQ ID NO: 42210 - DNA, 25 bp, Homo sapien
cggttcgtccctctcacgaggagga

SEQ ID NO: 42211 - DNA, 25 bp, Homo sapien
caagagaaaatagaccataacaatc

SEQ ID NO: 42212 - DNA, 25 bp, Homo sapien
gattgttatggtctattttctcttg

SEQ ID NO: 42213 - DNA, 25 bp, Homo sapien
tcgataaaccttttgaaccaatcat

SEQ ID NO: 42214 - DNA, 25 bp, Homo sapien
atgattggttcaaaaggtttatcga

SEQ ID NO: 42215 - DNA, 25 bp, Homo sapien
ggccgatgcctctactctgcccgtg

SEQ ID NO: 42216 - DNA, 25 bp, Homo sapien
cacgggcagagtagaggcatcggcc

SEQ ID NO: 42217 - DNA, 25 bp, Homo sapien
gatcatctaggcgtaaacaaactaa

SEQ ID NO: 42218 - DNA, 25 bp, Homo sapien
ttagtttgtttacgcctagatgatc

SEQ ID NO: 42219 - DNA, 25 bp, Homo sapien
cccgtcgtctactggcagggggtcg

SEQ ID NO: 42220 - DNA, 25 bp, Homo sapien
cgaccccctgccagtagacgacggg

SEQ ID NO: 42221 - DNA, 25 bp, Homo sapien
tatctactcttgtgaagggctccag

SEQ ID NO: 42222 - DNA, 25 bp, Homo sapien
ctggagcccttcacaagagtagata

SEQ ID NO: 42223 - DNA, 25 bp, Homo sapien
gcgggcgcccccctaggagacgtcc

SEQ ID NO: 42224 - DNA, 25 bp, Homo sapien
ggacgtctcctaggggggcgcccgc

SEQ ID NO: 42225 - DNA, 25 bp, Homo sapien
tgacagatgtggttttattagtata

SEQ ID NO: 42226 - DNA, 25 bp, Homo sapien
tatactaataaaaccacatctgtca

SEQ ID NO: 42227 - DNA, 25 bp, Homo sapien
cctaccgcaagggagacgaattccg

SEQ ID NO: 42228 - DNA, 25 bp, Homo sapien
cggaattcgtctcccttgcggtagg

SEQ ID NO: 42229 - DNA, 25 bp, Homo sapien
aagagtacctttgcagtagtatttt

SEQ ID NO: 42230 - DNA, 25 bp, Homo sapien
aaaatactactgcaaaggtactctt

SEQ ID NO: 42231 - DNA, 25 bp, Homo sapien
actactactatttatagaagaagta

SEQ ID NO: 42232 - DNA, 25 bp, Homo sapien
tacttcttctataaatagtagtagt

SEQ ID NO: 42233 - DNA, 25 bp, Homo sapien
tactactactatttatagaagaagt

SEQ ID NO: 42234 - DNA, 25 bp, Homo sapien
acttcttctataaatagtagtagta

SEQ ID NO: 42235 - DNA, 25 bp, Homo sapien
tgagaactaattgtacaggcatcgt

SEQ ID NO: 42236 - DNA, 25 bp, Homo sapien
acgatgcctgtacaattagttctca

SEQ ID NO: 42237 - DNA, 25 bp, Homo sapien
gtccgagacccgacgggctcgggtg

SEQ ID NO: 42238 - DNA, 25 bp, Homo sapien
cacccgagcccgtcgggtctcggac

SEQ ID NO: 42239 - DNA, 25 bp, Homo sapien
tacaataatgcaaccagttgataat

SEQ ID NO: 42240 - DNA, 25 bp, Homo sapien
attatcaactggttgcattattgta

SEQ ID NO: 42241 - DNA, 25 bp, Homo sapien
tctacaagcaagactaccacaatat

SEQ ID NO: 42242 - DNA, 25 bp, Homo sapien
atattgtggtagtcttgcttgtaga

SEQ ID NO: 42243 - DNA, 25 bp, Homo sapien
ttatattcgttaaagattctcttat

SEQ ID NO: 42244 - DNA, 25 bp, Homo sapien
ataagagaatctttaacgaatataa

SEQ ID NO: 42245 - DNA, 25 bp, Homo sapien
actttatattcgttaaagattctct

SEQ ID NO: 42246 - DNA, 25 bp, Homo sapien
agagaatctttaacgaatataaagt

SEQ ID NO: 42247 - DNA, 25 bp, Homo sapien
tatattcgttaaagattctcttatt

SEQ ID NO: 42248 - DNA, 25 bp, Homo sapien
aataagagaatctttaacgaatata

SEQ ID NO: 42249 - DNA, 25 bp, Homo sapien
taaagattgactttgtatttgacta

SEQ ID NO: 42250 - DNA, 25 bp, Homo sapien
tagtcaaatacaaagtcaatcttta

SEQ ID NO: 42251 - DNA, 25 bp, Homo sapien
aggaatgcaaaaactacctatactt

SEQ ID NO: 42252 - DNA, 25 bp, Homo sapien
aagtataggtagtttttgcattcct

SEQ ID NO: 42253 - DNA, 25 bp, Homo sapien
tccgaggtcataggccaccggtcgg

SEQ ID NO: 42254 - DNA, 25 bp, Homo sapien
ccgaccggtggcctatgacctcgga

SEQ ID NO: 42255 - DNA, 25 bp, Homo sapien
ccatacgaccgtgtttaaggtacta

SEQ ID NO: 42256 - DNA, 25 bp, Homo sapien
tagtaccttaaacacggtcgtatgg

SEQ ID NO: 42257 - DNA, 25 bp, Homo sapien
ataactatttgctacactaacaagg

SEQ ID NO: 42258 - DNA, 25 bp, Homo sapien
ccttgttagtgtagcaaatagttat

SEQ ID NO: 42259 - DNA, 25 bp, Homo sapien
caggtcttcagcagatgcacgaaac

SEQ ID NO: 42260 - DNA, 25 bp, Homo sapien
gtttcgtgcatctgctgaagacctg

SEQ ID NO: 42261 - DNA, 25 bp, Homo sapien
ctggagactcaggagcaccagccgg

SEQ ID NO: 42262 - DNA, 25 bp, Homo sapien
ccggctggtgctcctgagtctccag

SEQ ID NO: 42263 - DNA, 25 bp, Homo sapien
cactatttaagaagtgactaatttg

SEQ ID NO: 42264 - DNA, 25 bp, Homo sapien
caaattagtcacttcttaaatagtg

SEQ ID NO: 42265 - DNA, 25 bp, Homo sapien
ttggagaagcaataaacgtcctttt

SEQ ID NO: 42266 - DNA, 25 bp, Homo sapien
aaaaggacgtttattgcttctccaa

SEQ ID NO: 42267 - DNA, 25 bp, Homo sapien
aacgtttctgattaatccaggagtc

SEQ ID NO: 42268 - DNA, 25 bp, Homo sapien
gactcctggattaatcagaaacgtt

SEQ ID NO: 42269 - DNA, 25 bp, Homo sapien
ggaccgccggcgatccgcgagaccg

SEQ ID NO: 42270 - DNA, 25 bp, Homo sapien
cggtctcgcggatcgccggcggtcc

SEQ ID NO: 42271 - DNA, 25 bp, Homo sapien
cgtcagggacccctccggccgcgcc

SEQ ID NO: 42272 - DNA, 25 bp, Homo sapien
ggcgcggccggaggggtccctgacg

SEQ ID NO: 42273 - DNA, 25 bp, Homo sapien
gttttataaacgatcaacgtcgaga

SEQ ID NO: 42274 - DNA, 25 bp, Homo sapien
tctcgacgttgatcgtttataaaac

SEQ ID NO: 42275 - DNA, 25 bp, Homo sapien
ttgtagttacggtgagggagtccag

SEQ ID NO: 42276 - DNA, 25 bp, Homo sapien
ctggactccctcaccgtaactacaa

SEQ ID NO: 42277 - DNA, 25 bp, Homo sapien
tccgtctatggacgcgggttcccgt

SEQ ID NO: 42278 - DNA, 25 bp, Homo sapien
acgggaacccgcgtccatagacgga

SEQ ID NO: 42279 - DNA, 25 bp, Homo sapien
ttatataacgacgagtagtttcacc

SEQ ID NO: 42280 - DNA, 25 bp, Homo sapien
ggtgaaactactcgtcgttatataa

SEQ ID NO: 42281 - DNA, 25 bp, Homo sapien
tcctcgggtcctgtgcctcgtccgg

SEQ ID NO: 42282 - DNA, 25 bp, Homo sapien
ccggacgaggcacaggacccgagga

SEQ ID NO: 42283 - DNA, 25 bp, Homo sapien
tttgtgactatgaaaacggagacgg

SEQ ID NO: 42284 - DNA, 25 bp, Homo sapien
ccgtctccgttttcatagtcacaaa

SEQ ID NO: 42285 - DNA, 25 bp, Homo sapien
acgaatatgaaacggaaatgtgaat

SEQ ID NO: 42286 - DNA, 25 bp, Homo sapien
attcacatttccgtttcatattcgt

SEQ ID NO: 42287 - DNA, 25 bp, Homo sapien
gaaagtatacatgtttaggattacc

SEQ ID NO: 42288 - DNA, 25 bp, Homo sapien
ggtaatcctaaacatgtatactttc

SEQ ID NO: 42289 - DNA, 25 bp, Homo sapien
actagttgtattagaactaatatcc

SEQ ID NO: 42290 - DNA, 25 bp, Homo sapien
ggatattagttctaatacaactagt

SEQ ID NO: 42291 - DNA, 25 bp, Homo sapien
gggtcgtcgtgcccgtggcaccaga

SEQ ID NO: 42292 - DNA, 25 bp, Homo sapien
tctggtgccacgggcacgacgaccc

SEQ ID NO: 42293 - DNA, 25 bp, Homo sapien
ggaagcggaggcgagtcgcccaggc

SEQ ID NO: 42294 - DNA, 25 bp, Homo sapien
gcctgggcgactcgcctccgcttcc

SEQ ID NO: 42295 - DNA, 25 bp, Homo sapien
taaatctcacacaaaaggtttataa

SEQ ID NO: 42296 - DNA, 25 bp, Homo sapien
ttataaaccttttgtgtgagattta

SEQ ID NO: 42297 - DNA, 25 bp, Homo sapien
gagtgtttatagtcaaaagttgtaa

SEQ ID NO: 42298 - DNA, 25 bp, Homo sapien
ttacaacttttgactataaacactc

SEQ ID NO: 42299 - DNA, 25 bp, Homo sapien
actccacctcacgaatcgtaggttt

SEQ ID NO: 42300 - DNA, 25 bp, Homo sapien
aaacctacgattcgtgaggtggagt

SEQ ID NO: 42301 - DNA, 25 bp, Homo sapien
acccgaccatgggtggggtgaacta

SEQ ID NO: 42302 - DNA, 25 bp, Homo sapien
tagttcaccccacccatggtcgggt

SEQ ID NO: 42303 - DNA, 25 bp, Homo sapien
acggtgtaggtgcacaggaccccac

SEQ ID NO: 42304 - DNA, 25 bp, Homo sapien
gtggggtcctgtgcacctacaccgt

SEQ ID NO: 42305 - DNA, 25 bp, Homo sapien
gaaaactgattttaggaaggtcacg

SEQ ID NO: 42306 - DNA, 25 bp, Homo sapien
cgtgaccttcctaaaatcagttttc

SEQ ID NO: 42307 - DNA, 25 bp, Homo sapien
cttgtaccaataagtcgcatcgaag

SEQ ID NO: 42308 - DNA, 25 bp, Homo sapien
cttcgatgcgacttattggtacaag

SEQ ID NO: 42309 - DNA, 25 bp, Homo sapien
atgttgaaactgaacccactcctag

SEQ ID NO: 42310 - DNA, 25 bp, Homo sapien
ctaggagtgggttcagtttcaacat

SEQ ID NO: 42311 - DNA, 25 bp, Homo sapien
aatctcagggtcattcttggtgagt

SEQ ID NO: 42312 - DNA, 25 bp, Homo sapien
actcaccaagaatgaccctgagatt

SEQ ID NO: 42313 - DNA, 25 bp, Homo sapien
ataaagaggtaacacaaattgaaga

SEQ ID NO: 42314 - DNA, 25 bp, Homo sapien
tcttcaatttgtgttacctctttat

SEQ ID NO: 42315 - DNA, 25 bp, Homo sapien
gatttatcggttaattttgtgtatg

SEQ ID NO: 42316 - DNA, 25 bp, Homo sapien
catacacaaaattaaccgataaatc

SEQ ID NO: 42317 - DNA, 25 bp, Homo sapien
acagggaagtctccacagagattag

SEQ ID NO: 42318 - DNA, 25 bp, Homo sapien
ctaatctctgtggagacttccctgt

SEQ ID NO: 42319 - DNA, 25 bp, Homo sapien
cggcctcggggggtgcgactgtaag

SEQ ID NO: 42320 - DNA, 25 bp, Homo sapien
cttacagtcgcaccccccgaggccg

SEQ ID NO: 42321 - DNA, 25 bp, Homo sapien
tccctaaactcctatcgtccgaaaa

SEQ ID NO: 42322 - DNA, 25 bp, Homo sapien
ttttcggacgataggagtttaggga

SEQ ID NO: 42323 - DNA, 25 bp, Homo sapien
agagtgtaacagtattacctttaag

SEQ ID NO: 42324 - DNA, 25 bp, Homo sapien
cttaaaggtaatactgttacactct

SEQ ID NO: 42325 - DNA, 25 bp, Homo sapien
ccccgtagaaggaggcaggtactca

SEQ ID NO: 42326 - DNA, 25 bp, Homo sapien
tgagtacctgcctccttctacgggg

SEQ ID NO: 42327 - DNA, 25 bp, Homo sapien
ccacgcaccttgtccggagtgctga

SEQ ID NO: 42328 - DNA, 25 bp, Homo sapien
tcagcactccggacaaggtgcgtgg

SEQ ID NO: 42329 - DNA, 25 bp, Homo sapien
ccccgtctctctgtctttttcaatg

SEQ ID NO: 42330 - DNA, 25 bp, Homo sapien
cattgaaaaagacagagagacgggg

SEQ ID NO: 42331 - DNA, 25 bp, Homo sapien
gtctcgcaggtgtggcggcgaaaaa

SEQ ID NO: 42332 - DNA, 25 bp, Homo sapien
tttttcgccgccacacctgcgagac

SEQ ID NO: 42333 - DNA, 25 bp, Homo sapien
agtcacaattatatcattattcgac

SEQ ID NO: 42334 - DNA, 25 bp, Homo sapien
gtcgaataatgatataattgtgact

SEQ ID NO: 42335 - DNA, 25 bp, Homo sapien
agtaagtcacaattatatcattatt

SEQ ID NO: 42336 - DNA, 25 bp, Homo sapien
aataatgatataattgtgacttact

SEQ ID NO: 42337 - DNA, 25 bp, Homo sapien
gaggttatacgctccagtgttcgac

SEQ ID NO: 42338 - DNA, 25 bp, Homo sapien
gtcgaacactggagcgtataacctc

SEQ ID NO: 42339 - DNA, 25 bp, Homo sapien
taaacctactcggactcccgaaatg

SEQ ID NO: 42340 - DNA, 25 bp, Homo sapien
catttcgggagtccgagtaggttta

SEQ ID NO: 42341 - DNA, 25 bp, Homo sapien
ttctacacagagacccgcttcccgg

SEQ ID NO: 42342 - DNA, 25 bp, Homo sapien
ccgggaagcgggtctctgtgtagaa

SEQ ID NO: 42343 - DNA, 25 bp, Homo sapien
gtccgtcctagttatagtacgtaac

SEQ ID NO: 42344 - DNA, 25 bp, Homo sapien
gttacgtactataactaggacggac

SEQ ID NO: 42345 - DNA, 25 bp, Homo sapien
ttcagctatacccaattgtgattac

SEQ ID NO: 42346 - DNA, 25 bp, Homo sapien
gtaatcacaattgggtatagctgaa

SEQ ID NO: 42347 - DNA, 25 bp, Homo sapien
aaacgtctccctccagggcgtggta

SEQ ID NO: 42348 - DNA, 25 bp, Homo sapien
taccacgccctggagggagacgttt

SEQ ID NO: 42349 - DNA, 25 bp, Homo sapien
attgacagaacgaaataaggatagg

SEQ ID NO: 42350 - DNA, 25 bp, Homo sapien
cctatccttatttcgttctgtcaat

SEQ ID NO: 42351 - DNA, 25 bp, Homo sapien
ggtcattagacccaggtgctcggcc

SEQ ID NO: 42352 - DNA, 25 bp, Homo sapien
ggccgagcacctgggtctaatgacc

SEQ ID NO: 42353 - DNA, 25 bp, Homo sapien
ataatcctacctttatttacaataa

SEQ ID NO: 42354 - DNA, 25 bp, Homo sapien
ttattgtaaataaaggtaggattat

SEQ ID NO: 42355 - DNA, 25 bp, Homo sapien
gataatcctacctttatttacaata

SEQ ID NO: 42356 - DNA, 25 bp, Homo sapien
tattgtaaataaaggtaggattatc

SEQ ID NO: 42357 - DNA, 25 bp, Homo sapien
gagaatctcgttaagaccactacga

SEQ ID NO: 42358 - DNA, 25 bp, Homo sapien
tcgtagtggtcttaacgagattctc

SEQ ID NO: 42359 - DNA, 25 bp, Homo sapien
gtcgcggtgtgacccggagccgaag

SEQ ID NO: 42360 - DNA, 25 bp, Homo sapien
cttcggctccgggtcacaccgcgac

SEQ ID NO: 42361 - DNA, 25 bp, Homo sapien
aagtcggagtcgcagacactcacac

SEQ ID NO: 42362 - DNA, 25 bp, Homo sapien
gtgtgagtgtctgcgactccgactt

SEQ ID NO: 42363 - DNA, 25 bp, Homo sapien
acccctgtagacacgtgggagaagg

SEQ ID NO: 42364 - DNA, 25 bp, Homo sapien
ccttctcccacgtgtctacaggggt

SEQ ID NO: 42365 - DNA, 25 bp, Homo sapien
agggactcgaccctgtcgagtctcg

SEQ ID NO: 42366 - DNA, 25 bp, Homo sapien
cgagactcgacagggtcgagtccct

SEQ ID NO: 42367 - DNA, 25 bp, Homo sapien
gccctacctcttccgccttccccat

SEQ ID NO: 42368 - DNA, 25 bp, Homo sapien
atggggaaggcggaagaggtagggc

SEQ ID NO: 42369 - DNA, 25 bp, Homo sapien
tcctgagtagtacctagcaccgtct

SEQ ID NO: 42370 - DNA, 25 bp, Homo sapien
agacggtgctaggtactactcagga

SEQ ID NO: 42371 - DNA, 25 bp, Homo sapien
gtgggaggggccaccccgacgtgag

SEQ ID NO: 42372 - DNA, 25 bp, Homo sapien
ctcacgtcggggtggcccctcccac

SEQ ID NO: 42373 - DNA, 25 bp, Homo sapien
ggtgggaggggccaccccgacgtga

SEQ ID NO: 42374 - DNA, 25 bp, Homo sapien
tcacgtcggggtggcccctcccacc

SEQ ID NO: 42375 - DNA, 25 bp, Homo sapien
gcgggcccttccctagacgtctagg

SEQ ID NO: 42376 - DNA, 25 bp, Homo sapien
cctagacgtctagggaagggcccgc

SEQ ID NO: 42377 - DNA, 25 bp, Homo sapien
ttgtgtgaaaaaccacggtgggtca

SEQ ID NO: 42378 - DNA, 25 bp, Homo sapien
tgacccaccgtggtttttcacacaa

SEQ ID NO: 42379 - DNA, 25 bp, Homo sapien
taaacatgaaccctgtaaaacagta

SEQ ID NO: 42380 - DNA, 25 bp, Homo sapien
tactgttttacagggttcatgttta

SEQ ID NO: 42381 - DNA, 25 bp, Homo sapien
aggactagggagactcctatactga

SEQ ID NO: 42382 - DNA, 25 bp, Homo sapien
tcagtataggagtctccctagtcct

SEQ ID NO: 42383 - DNA, 25 bp, Homo sapien
ctcaaccgtccttaagcccctgaac

SEQ ID NO: 42384 - DNA, 25 bp, Homo sapien
gttcaggggcttaaggacggttgag

SEQ ID NO: 42385 - DNA, 25 bp, Homo sapien
gtcaaaatactcttatgtcttttta

SEQ ID NO: 42386 - DNA, 25 bp, Homo sapien
taaaaagacataagagtattttgac

SEQ ID NO: 42387 - DNA, 25 bp, Homo sapien
gaacccgtctggactctttcggtaa

SEQ ID NO: 42388 - DNA, 25 bp, Homo sapien
ttaccgaaagagtccagacgggttc

SEQ ID NO: 42389 - DNA, 25 bp, Homo sapien
cgcgcgcccaccacgcgcccgtgtg

SEQ ID NO: 42390 - DNA, 25 bp, Homo sapien
cacacgggcgcgtggtgggcgcgcg

SEQ ID NO: 42391 - DNA, 25 bp, Homo sapien
ccgcgcgcccaccacgcgcccgtgt

SEQ ID NO: 42392 - DNA, 25 bp, Homo sapien
acacgggcgcgtggtgggcgcgcgg

SEQ ID NO: 42393 - DNA, 25 bp, Homo sapien
gcgcgcccaccacgcgcccgtgtgc

SEQ ID NO: 42394 - DNA, 25 bp, Homo sapien
gcacacgggcgcgtggtgggcgcgc

SEQ ID NO: 42395 - DNA, 25 bp, Homo sapien
gaccacgacgcctcctgttggtcaa

SEQ ID NO: 42396 - DNA, 25 bp, Homo sapien
ttgaccaacaggaggcgtcgtggtc

SEQ ID NO: 42397 - DNA, 25 bp, Homo sapien
ttgttcgggttcttatacaattaat

SEQ ID NO: 42398 - DNA, 25 bp, Homo sapien
attaattgtataagaacccgaacaa

SEQ ID NO: 42399 - DNA, 25 bp, Homo sapien
ctatacgtcgtcattcaacctttac

SEQ ID NO: 42400 - DNA, 25 bp, Homo sapien
gtaaaggttgaatgacgacgtatag

SEQ ID NO: 42401 - DNA, 25 bp, Homo sapien
tcccgtctacgaggcgtcgcgtgca

SEQ ID NO: 42402 - DNA, 25 bp, Homo sapien
tgcacgcgacgcctcgtagacggga

SEQ ID NO: 42403 - DNA, 25 bp, Homo sapien
gcgtcgaggaaattacctcgcatat

SEQ ID NO: 42404 - DNA, 25 bp, Homo sapien
atatgcgaggtaatttcctcgacgc

SEQ ID NO: 42405 - DNA, 25 bp, Homo sapien
ctcagtgttccaagaataaagacga

SEQ ID NO: 42406 - DNA, 25 bp, Homo sapien
tcgtctttattcttggaacactgag

SEQ ID NO: 42407 - DNA, 25 bp, Homo sapien
atccgccacgtagggcaagcgcgga

SEQ ID NO: 42408 - DNA, 25 bp, Homo sapien
tccgcgcttgccctacgtggcggat

SEQ ID NO: 42409 - DNA, 25 bp, Homo sapien
gtgagggcgccggtgcgcttccgca

SEQ ID NO: 42410 - DNA, 25 bp, Homo sapien
tgcggaagcgcaccggcgccctcac

SEQ ID NO: 42411 - DNA, 25 bp, Homo sapien
ggtgtgatcattcatccaccgttgt

SEQ ID NO: 42412 - DNA, 25 bp, Homo sapien
acaacggtggatgaatgatcacacc

SEQ ID NO: 42413 - DNA, 25 bp, Homo sapien
atttacttatagtttcatcatgaag

SEQ ID NO: 42414 - DNA, 25 bp, Homo sapien
cttcatgatgaaactataagtaaat

SEQ ID NO: 42415 - DNA, 25 bp, Homo sapien
gatttacttatagtttcatcatgaa

SEQ ID NO: 42416 - DNA, 25 bp, Homo sapien
ttcatgatgaaactataagtaaatc

SEQ ID NO: 42417 - DNA, 25 bp, Homo sapien
tctgattatttactccccaattgac

SEQ ID NO: 42418 - DNA, 25 bp, Homo sapien
gtcaattggggagtaaataatcaga

SEQ ID NO: 42419 - DNA, 25 bp, Homo sapien
tcgtcttacaccacagaccgttgag

SEQ ID NO: 42420 - DNA, 25 bp, Homo sapien
ctcaacggtctgtggtgtaagacga

SEQ ID NO: 42421 - DNA, 25 bp, Homo sapien
cgacctccgtaggagatcgttcggt

SEQ ID NO: 42422 - DNA, 25 bp, Homo sapien
accgaacgatctcctacggaggtcg

SEQ ID NO: 42423 - DNA, 25 bp, Homo sapien
gtcgtccagaccctacccctgacgg

SEQ ID NO: 42424 - DNA, 25 bp, Homo sapien
ccgtcaggggtagggtctggacgac

SEQ ID NO: 42425 - DNA, 25 bp, Homo sapien
acgagagccaggtccagtgactcgc

SEQ ID NO: 42426 - DNA, 25 bp, Homo sapien
gcgagtcactggacctggctctcgt

SEQ ID NO: 42427 - DNA, 25 bp, Homo sapien
gggcgtctcgcctcggactcactcc

SEQ ID NO: 42428 - DNA, 25 bp, Homo sapien
ggagtgagtccgaggcgagacgccc

SEQ ID NO: 42429 - DNA, 25 bp, Homo sapien
gaccgggcgtctcgcctcggactca

SEQ ID NO: 42430 - DNA, 25 bp, Homo sapien
tgagtccgaggcgagacgcccggtc

SEQ ID NO: 42431 - DNA, 25 bp, Homo sapien
tgacggcggaaggagtgcggccggg

SEQ ID NO: 42432 - DNA, 25 bp, Homo sapien
cccggccgcactccttccgccgtca

SEQ ID NO: 42433 - DNA, 25 bp, Homo sapien
tggtgtccgaggactcgaagggacc

SEQ ID NO: 42434 - DNA, 25 bp, Homo sapien
ggtcccttcgagtcctcggacacca

SEQ ID NO: 42435 - DNA, 25 bp, Homo sapien
cgtcaccctgggttgccttccggag

SEQ ID NO: 42436 - DNA, 25 bp, Homo sapien
ctccggaaggcaacccagggtgacg

SEQ ID NO: 42437 - DNA, 25 bp, Homo sapien
accgtccggcactctcacccacccc

SEQ ID NO: 42438 - DNA, 25 bp, Homo sapien
ggggtgggtgagagtgccggacggt

SEQ ID NO: 42439 - DNA, 25 bp, Homo sapien
cgactccgaggaagcacggaccccg

SEQ ID NO: 42440 - DNA, 25 bp, Homo sapien
cggggtccgtgcttcctcggagtcg

SEQ ID NO: 42441 - DNA, 25 bp, Homo sapien
cattaatgccgtcgccccgctcacc

SEQ ID NO: 42442 - DNA, 25 bp, Homo sapien
ggtgagcggggcgacggcattaatg

SEQ ID NO: 42443 - DNA, 25 bp, Homo sapien
tttaatagacacgtgtcctcttccg

SEQ ID NO: 42444 - DNA, 25 bp, Homo sapien
cggaagaggacacgtgtctattaaa

SEQ ID NO: 42445 - DNA, 25 bp, Homo sapien
gacgtcaggtcggcggtgtccgaaa

SEQ ID NO: 42446 - DNA, 25 bp, Homo sapien
tttcggacaccgccgacctgacgtc

SEQ ID NO: 42447 - DNA, 25 bp, Homo sapien
tttttatcggtagacatgagactat

SEQ ID NO: 42448 - DNA, 25 bp, Homo sapien
atagtctcatgtctaccgataaaaa

SEQ ID NO: 42449 - DNA, 25 bp, Homo sapien
taaacgaaaattactcaaggaagag

SEQ ID NO: 42450 - DNA, 25 bp, Homo sapien
ctcttccttgagtaattttcgttta

SEQ ID NO: 42451 - DNA, 25 bp, Homo sapien
taacaattacatattctctacatct

SEQ ID NO: 42452 - DNA, 25 bp, Homo sapien
agatgtagagaatatgtaattgtta

SEQ ID NO: 42453 - DNA, 25 bp, Homo sapien
cttcgccagtagtcacgacacacta

SEQ ID NO: 42454 - DNA, 25 bp, Homo sapien
tagtgtgtcgtgactactggcgaag

SEQ ID NO: 42455 - DNA, 25 bp, Homo sapien
ccgccctgtggtcactgaccgcgcg

SEQ ID NO: 42456 - DNA, 25 bp, Homo sapien
cgcgcggtcagtgaccacagggcgg

SEQ ID NO: 42457 - DNA, 25 bp, Homo sapien
ccctctgccgcataaaagggtgact

SEQ ID NO: 42458 - DNA, 25 bp, Homo sapien
agtcacccttttatgcggcagaggg

SEQ ID NO: 42459 - DNA, 25 bp, Homo sapien
acacaataatagatgttcgttttag

SEQ ID NO: 42460 - DNA, 25 bp, Homo sapien
ctaaaacgaacatctattattgtgt

SEQ ID NO: 42461 - DNA, 25 bp, Homo sapien
taaagcaacgatttgaattagaaag

SEQ ID NO: 42462 - DNA, 25 bp, Homo sapien
ctttctaattcaaatcgttgcttta

SEQ ID NO: 42463 - DNA, 25 bp, Homo sapien
ctctttccacgtgccctcgtcccgg

SEQ ID NO: 42464 - DNA, 25 bp, Homo sapien
ccgggacgagggcacgtggaaagag

SEQ ID NO: 42465 - DNA, 25 bp, Homo sapien
atgaagtcttaattctgaagtctaa

SEQ ID NO: 42466 - DNA, 25 bp, Homo sapien
ttagacttcagaattaagacttcat

SEQ ID NO: 42467 - DNA, 25 bp, Homo sapien
cggaggtcactcctaaggcacagtg

SEQ ID NO: 42468 - DNA, 25 bp, Homo sapien
cactgtgccttaggagtgacctccg

SEQ ID NO: 42469 - DNA, 25 bp, Homo sapien
acatgtttcattttgctgtaaactt

SEQ ID NO: 42470 - DNA, 25 bp, Homo sapien
aagtttacagcaaaatgaaacatgt

SEQ ID NO: 42471 - DNA, 25 bp, Homo sapien
ctaacaatattctctttagaataag

SEQ ID NO: 42472 - DNA, 25 bp, Homo sapien
cttattctaaagagaatattgttag

SEQ ID NO: 42473 - DNA, 25 bp, Homo sapien
gggacacgaagctagcaccttgaat

SEQ ID NO: 42474 - DNA, 25 bp, Homo sapien
attcaaggtgctagcttcgtgtccc

SEQ ID NO: 42475 - DNA, 25 bp, Homo sapien
tctctcccgtcgaccctcgtcgaag

SEQ ID NO: 42476 - DNA, 25 bp, Homo sapien
cttcgacgagggtcgacgggagaga

SEQ ID NO: 42477 - DNA, 25 bp, Homo sapien
tccgtgtaaaactcgaggtaaagat

SEQ ID NO: 42478 - DNA, 25 bp, Homo sapien
atctttacctcgagttttacacgga

SEQ ID NO: 42479 - DNA, 25 bp, Homo sapien
gatctgcgaggtgcggcggccggac

SEQ ID NO: 42480 - DNA, 25 bp, Homo sapien
gtccggccgccgcacctcgcagatc

SEQ ID NO: 42481 - DNA, 25 bp, Homo sapien
tacaggtattctcaaaaaggcttaa

SEQ ID NO: 42482 - DNA, 25 bp, Homo sapien
ttaagcctttttgagaatacctgta

SEQ ID NO: 42483 - DNA, 25 bp, Homo sapien
gacttctttgcaacttagtatttcc

SEQ ID NO: 42484 - DNA, 25 bp, Homo sapien
ggaaatactaagttgcaaagaagtc

SEQ ID NO: 42485 - DNA, 25 bp, Homo sapien
gttaatgacgttcagaaatattaaa

SEQ ID NO: 42486 - DNA, 25 bp, Homo sapien
tttaatatttctgaacgtcattaac

SEQ ID NO: 42487 - DNA, 25 bp, Homo sapien
gatcgtccgggaccgcccgccttcc

SEQ ID NO: 42488 - DNA, 25 bp, Homo sapien
ggaaggcgggcggtcccggacgatc

SEQ ID NO: 42489 - DNA, 25 bp, Homo sapien
gaacacttactaaatacttaacact

SEQ ID NO: 42490 - DNA, 25 bp, Homo sapien
agtgttaagtatttagtaagtgttc

SEQ ID NO: 42491 - DNA, 25 bp, Homo sapien
aagggggttcttcgcgcacccgctg

SEQ ID NO: 42492 - DNA, 25 bp, Homo sapien
cagcgggtgcgcgaagaaccccctt

SEQ ID NO: 42493 - DNA, 25 bp, Homo sapien
aaccttgtcaatagacatttatatt

SEQ ID NO: 42494 - DNA, 25 bp, Homo sapien
aatataaatgtctattgacaaggtt

SEQ ID NO: 42495 - DNA, 25 bp, Homo sapien
aatagaggactaaaatgacaaaagt

SEQ ID NO: 42496 - DNA, 25 bp, Homo sapien
acttttgtcattttagtcctctatt

SEQ ID NO: 42497 - DNA, 25 bp, Homo sapien
attgtgctacacactattcttacaa

SEQ ID NO: 42498 - DNA, 25 bp, Homo sapien
ttgtaagaatagtgtgtagcacaat

SEQ ID NO: 42499 - DNA, 25 bp, Homo sapien
ggtcccagtgccacgcgacgacgga

SEQ ID NO: 42500 - DNA, 25 bp, Homo sapien
tccgtcgtcgcgtggcactgggacc

SEQ ID NO: 42501 - DNA, 25 bp, Homo sapien
gacgcgtcagccacagaggcgcagc

SEQ ID NO: 42502 - DNA, 25 bp, Homo sapien
gctgcgcctctgtggctgacgcgtc

SEQ ID NO: 42503 - DNA, 25 bp, Homo sapien
ggcggcacctgggagtaatcgtacg

SEQ ID NO: 42504 - DNA, 25 bp, Homo sapien
cgtacgattactcccaggtgccgcc

SEQ ID NO: 42505 - DNA, 25 bp, Homo sapien
atacaaaatgtgagtacaatacatt

SEQ ID NO: 42506 - DNA, 25 bp, Homo sapien
aatgtattgtactcacattttgtat

SEQ ID NO: 42507 - DNA, 25 bp, Homo sapien
ggtccggactcttgtcccacaccgt

SEQ ID NO: 42508 - DNA, 25 bp, Homo sapien
acggtgtgggacaagagtccggacc

SEQ ID NO: 42509 - DNA, 25 bp, Homo sapien
cgattcccgtctgccttcggtccgg

SEQ ID NO: 42510 - DNA, 25 bp, Homo sapien
ccggaccgaaggcagacgggaatcg

SEQ ID NO: 42511 - DNA, 25 bp, Homo sapien
tgtgagccctgctccggcgccgagg

SEQ ID NO: 42512 - DNA, 25 bp, Homo sapien
cctcggcgccggagcagggctcaca

SEQ ID NO: 42513 - DNA, 25 bp, Homo sapien
ggtgctctacgagcgacgggagggc

SEQ ID NO: 42514 - DNA, 25 bp, Homo sapien
gccctcccgtcgctcgtagagcacc

SEQ ID NO: 42515 - DNA, 25 bp, Homo sapien
cggcggggagacttcacaaggccac

SEQ ID NO: 42516 - DNA, 25 bp, Homo sapien
gtggccttgtgaagtctccccgccg

SEQ ID NO: 42517 - DNA, 25 bp, Homo sapien
agttttaagactgaaagattcatgt

SEQ ID NO: 42518 - DNA, 25 bp, Homo sapien
acatgaatctttcagtcttaaaact

SEQ ID NO: 42519 - DNA, 25 bp, Homo sapien
acctcgactctctctgaccgctctc

SEQ ID NO: 42520 - DNA, 25 bp, Homo sapien
gagagcggtcagagagagtcgaggt

SEQ ID NO: 42521 - DNA, 25 bp, Homo sapien
tccctctctcccggcggttcaccgt

SEQ ID NO: 42522 - DNA, 25 bp, Homo sapien
acggtgaaccgccgggagagaggga

SEQ ID NO: 42523 - DNA, 25 bp, Homo sapien
tcaagtcccggcagtcgtctttaca

SEQ ID NO: 42524 - DNA, 25 bp, Homo sapien
tgtaaagacgactgccgggacttga

SEQ ID NO: 42525 - DNA, 25 bp, Homo sapien
aaagaagggcaaagagtcatgaacg

SEQ ID NO: 42526 - DNA, 25 bp, Homo sapien
cgttcatgactctttgcccttcttt

SEQ ID NO: 42527 - DNA, 25 bp, Homo sapien
ctcaggtgtggttcgaagatgaaac

SEQ ID NO: 42528 - DNA, 25 bp, Homo sapien
gtttcatcttcgaaccacacctgag

SEQ ID NO: 42529 - DNA, 25 bp, Homo sapien
gtctccagaccaacaatacgatagt

SEQ ID NO: 42530 - DNA, 25 bp, Homo sapien
actatcgtattgttggtctggagac

SEQ ID NO: 42531 - DNA, 25 bp, Homo sapien
aagtattttattctaaggttatgaa

SEQ ID NO: 42532 - DNA, 25 bp, Homo sapien
ttcataaccttagaataaaatactt

SEQ ID NO: 42533 - DNA, 25 bp, Homo sapien
ctctttcttcgttccgcggaggagg

SEQ ID NO: 42534 - DNA, 25 bp, Homo sapien
cctcctccgcggaacgaagaaagag

SEQ ID NO: 42535 - DNA, 25 bp, Homo sapien
cttacaacttcagtgtttatataaa

SEQ ID NO: 42536 - DNA, 25 bp, Homo sapien
tttatataaacactgaagttgtaag

SEQ ID NO: 42537 - DNA, 25 bp, Homo sapien
gtcggaatccacttgacacgaggag

SEQ ID NO: 42538 - DNA, 25 bp, Homo sapien
ctcctcgtgtcaagtggattccgac

SEQ ID NO: 42539 - DNA, 25 bp, Homo sapien
tcgattccataattaaactattaat

SEQ ID NO: 42540 - DNA, 25 bp, Homo sapien
attaatagtttaattatggaatcga

SEQ ID NO: 42541 - DNA, 25 bp, Homo sapien
ggtcccgcgccgtcgggcggtcctc

SEQ ID NO: 42542 - DNA, 25 bp, Homo sapien
gaggaccgcccgacggcgcgggacc

SEQ ID NO: 42543 - DNA, 25 bp, Homo sapien
caggtcccgcgccgtcgggcggtcc

SEQ ID NO: 42544 - DNA, 25 bp, Homo sapien
ggaccgcccgacggcgcgggacctg

SEQ ID NO: 42545 - DNA, 25 bp, Homo sapien
gcaggtcccgcgccgtcgggcggtc

SEQ ID NO: 42546 - DNA, 25 bp, Homo sapien
gaccgcccgacggcgcgggacctgc

SEQ ID NO: 42547 - DNA, 25 bp, Homo sapien
atgaggtttgaagatatggttctgt

SEQ ID NO: 42548 - DNA, 25 bp, Homo sapien
acagaaccatatcttcaaacctcat

SEQ ID NO: 42549 - DNA, 25 bp, Homo sapien
ggggtcgcggcactggtgtcgagac

SEQ ID NO: 42550 - DNA, 25 bp, Homo sapien
gtctcgacaccagtgccgcgacccc

SEQ ID NO: 42551 - DNA, 25 bp, Homo sapien
attttcattccagttattctttact

SEQ ID NO: 42552 - DNA, 25 bp, Homo sapien
agtaaagaataactggaatgaaaat

SEQ ID NO: 42553 - DNA, 25 bp, Homo sapien
agtagattaaatgagaacacattag

SEQ ID NO: 42554 - DNA, 25 bp, Homo sapien
ctaatgtgttctcatttaatctact

SEQ ID NO: 42555 - DNA, 25 bp, Homo sapien
caattacatgtctcaatataaatag

SEQ ID NO: 42556 - DNA, 25 bp, Homo sapien
ctatttatattgagacatgtaattg

SEQ ID NO: 42557 - DNA, 25 bp, Homo sapien
ggtggtggtacggcttcgacgctcc

SEQ ID NO: 42558 - DNA, 25 bp, Homo sapien
ggagcgtcgaagccgtaccaccacc

SEQ ID NO: 42559 - DNA, 25 bp, Homo sapien
gtaacttataagactatctaacatc

SEQ ID NO: 42560 - DNA, 25 bp, Homo sapien
gatgttagatagtcttataagttac

SEQ ID NO: 42561 - DNA, 25 bp, Homo sapien
tcgagtctctagacggtggtcggta

SEQ ID NO: 42562 - DNA, 25 bp, Homo sapien
taccgaccaccgtctagagactcga

SEQ ID NO: 42563 - DNA, 25 bp, Homo sapien
cacaaacacgtcaactaaagggaat

SEQ ID NO: 42564 - DNA, 25 bp, Homo sapien
attccctttagttgacgtgtttgtg

SEQ ID NO: 42565 - DNA, 25 bp, Homo sapien
ggcccgtcttcgcttggcctggggt

SEQ ID NO: 42566 - DNA, 25 bp, Homo sapien
accccaggccaagcgaagacgggcc

SEQ ID NO: 42567 - DNA, 25 bp, Homo sapien
gagaggggcatacctagactcccgt

SEQ ID NO: 42568 - DNA, 25 bp, Homo sapien
acgggagtctaggtatgcccctctc

SEQ ID NO: 42569 - DNA, 25 bp, Homo sapien
tcgaagtagggaggtggcagaggga

SEQ ID NO: 42570 - DNA, 25 bp, Homo sapien
tccctctgccacctccctacttcga

SEQ ID NO: 42571 - DNA, 25 bp, Homo sapien
gcacaaatactacgtctggtcaacc

SEQ ID NO: 42572 - DNA, 25 bp, Homo sapien
ggttgaccagacgtagtatttgtgc

SEQ ID NO: 42573 - DNA, 25 bp, Homo sapien
tcaacggtgtcggcggggcacacac

SEQ ID NO: 42574 - DNA, 25 bp, Homo sapien
gtgtgtgccccgccgacaccgttga

SEQ ID NO: 42575 - DNA, 25 bp, Homo sapien
ccgacccgtcatcgtcccgaccgtc

SEQ ID NO: 42576 - DNA, 25 bp, Homo sapien
gacggtcgggacgatgacgggtcgg

SEQ ID NO: 42577 - DNA, 25 bp, Homo sapien
gcctctctgccccgctgccggcgtc

SEQ ID NO: 42578 - DNA, 25 bp, Homo sapien
gacgccggcagcggggcagagaggc

SEQ ID NO: 42579 - DNA, 25 bp, Homo sapien
gggtgaggtgggcgtgtccactccc

SEQ ID NO: 42580 - DNA, 25 bp, Homo sapien
gggagtggacacgcccacctcaccc

SEQ ID NO: 42581 - DNA, 25 bp, Homo sapien
gggtaaggagcatctgtcggtcccc

SEQ ID NO: 42582 - DNA, 25 bp, Homo sapien
ggggaccgacagatgctccttaccc

SEQ ID NO: 42583 - DNA, 25 bp, Homo sapien
ttcatgagacaatgtaaggacaggt

SEQ ID NO: 42584 - DNA, 25 bp, Homo sapien
acctgtccttacattgtctcatgaa

SEQ ID NO: 42585 - DNA, 25 bp, Homo sapien
tcaccttttagtccaacatacgtag

SEQ ID NO: 42586 - DNA, 25 bp, Homo sapien
ctacgtatgttggactaaaaggtga

SEQ ID NO: 42587 - DNA, 25 bp, Homo sapien
gacttacacactgatatggtgtcct

SEQ ID NO: 42588 - DNA, 25 bp, Homo sapien
aggacaccatatcagtgtgtaagtc

SEQ ID NO: 42589 - DNA, 25 bp, Homo sapien
tatttatttatccagagaggactat

SEQ ID NO: 42590 - DNA, 25 bp, Homo sapien
atagtcctctctggataaataaata

SEQ ID NO: 42591 - DNA, 25 bp, Homo sapien
acgtatcaggtatctcgttcgtggt

SEQ ID NO: 42592 - DNA, 25 bp, Homo sapien
accacgaacgagatacctgatacgt

SEQ ID NO: 42593 - DNA, 25 bp, Homo sapien
tgaactgaccgaatcccttaggaaa

SEQ ID NO: 42594 - DNA, 25 bp, Homo sapien
tttcctaagggattcggtcagttca

SEQ ID NO: 42595 - DNA, 25 bp, Homo sapien
ccctttgacagatcgatggtgtcgg

SEQ ID NO: 42596 - DNA, 25 bp, Homo sapien
ccgacaccatcgatctgtcaaaggg

SEQ ID NO: 42597 - DNA, 25 bp, Homo sapien
gcccgagggcaataagggaactcag

SEQ ID NO: 42598 - DNA, 25 bp, Homo sapien
ctgagttcccttattgccctcgggc

SEQ ID NO: 42599 - DNA, 25 bp, Homo sapien
agggaacactcaggttaggtattag

SEQ ID NO: 42600 - DNA, 25 bp, Homo sapien
ctaatacctaacctgagtgttccct

SEQ ID NO: 42601 - DNA, 25 bp, Homo sapien
tagtctccgtttttgcacttgtcgt

SEQ ID NO: 42602 - DNA, 25 bp, Homo sapien
acgacaagtgcaaaaacggagacta

SEQ ID NO: 42603 - DNA, 25 bp, Homo sapien
ccacttcttcaaagaatattagtat

SEQ ID NO: 42604 - DNA, 25 bp, Homo sapien
atactaatattctttgaagaagtgg

SEQ ID NO: 42605 - DNA, 25 bp, Homo sapien
caagtaaagaaacctccagtaaaca

SEQ ID NO: 42606 - DNA, 25 bp, Homo sapien
tgtttactggaggtttctttacttg

SEQ ID NO: 42607 - DNA, 25 bp, Homo sapien
gattaaccccgccatgggctcgacg

SEQ ID NO: 42608 - DNA, 25 bp, Homo sapien
cgtcgagcccatggcggggttaatc

SEQ ID NO: 42609 - DNA, 25 bp, Homo sapien
tttcctataggtattctaaaataat

SEQ ID NO: 42610 - DNA, 25 bp, Homo sapien
attattttagaatacctataggaaa

SEQ ID NO: 42611 - DNA, 25 bp, Homo sapien
ggttcaaggtccagatctcagaggt

SEQ ID NO: 42612 - DNA, 25 bp, Homo sapien
acctctgagatctggaccttgaacc

SEQ ID NO: 42613 - DNA, 25 bp, Homo sapien
agccactgtggagccgtcggtgcat

SEQ ID NO: 42614 - DNA, 25 bp, Homo sapien
atgcaccgacggctccacagtggct

SEQ ID NO: 42615 - DNA, 25 bp, Homo sapien
acacttaagcgactaatctccgaaa

SEQ ID NO: 42616 - DNA, 25 bp, Homo sapien
tttcggagattagtcgcttaagtgt

SEQ ID NO: 42617 - DNA, 25 bp, Homo sapien
tcgagacggtgacctgtcctacccg

SEQ ID NO: 42618 - DNA, 25 bp, Homo sapien
cgggtaggacaggtcaccgtctcga

SEQ ID NO: 42619 - DNA, 25 bp, Homo sapien
ccgcgggcccgacgcgaggctgttc

SEQ ID NO: 42620 - DNA, 25 bp, Homo sapien
gaacagcctcgcgtcgggcccgcgg

SEQ ID NO: 42621 - DNA, 25 bp, Homo sapien
ggccgcgggcccgacgcgaggctgt

SEQ ID NO: 42622 - DNA, 25 bp, Homo sapien
acagcctcgcgtcgggcccgcggcc

SEQ ID NO: 42623 - DNA, 25 bp, Homo sapien
aacgtagtagttaatttagatcatt

SEQ ID NO: 42624 - DNA, 25 bp, Homo sapien
aatgatctaaattaactactacgtt

SEQ ID NO: 42625 - DNA, 25 bp, Homo sapien
tacgggctactttcccggcgaaggc

SEQ ID NO: 42626 - DNA, 25 bp, Homo sapien
gccttcgccgggaaagtagcccgta

SEQ ID NO: 42627 - DNA, 25 bp, Homo sapien
gtaaatttaggctttcgacacatgg

SEQ ID NO: 42628 - DNA, 25 bp, Homo sapien
ccatgtgtcgaaagcctaaatttac

SEQ ID NO: 42629 - DNA, 25 bp, Homo sapien
gggcctcacgcagggtaccggaggg

SEQ ID NO: 42630 - DNA, 25 bp, Homo sapien
ccctccggtaccctgcgtgaggccc

SEQ ID NO: 42631 - DNA, 25 bp, Homo sapien
cacttcggtgtttcgctcagccagg

SEQ ID NO: 42632 - DNA, 25 bp, Homo sapien
cctggctgagcgaaacaccgaagtg

SEQ ID NO: 42633 - DNA, 25 bp, Homo sapien
gggtgccgccgcgtgtgggtctcgc

SEQ ID NO: 42634 - DNA, 25 bp, Homo sapien
gcgagacccacacgcggcggcaccc

SEQ ID NO: 42635 - DNA, 25 bp, Homo sapien
ctttaaattccacagacacgaacat

SEQ ID NO: 42636 - DNA, 25 bp, Homo sapien
atgttcgtgtctgtggaatttaaag

SEQ ID NO: 42637 - DNA, 25 bp, Homo sapien
ggcgtagcgggccaagagtcaggag

SEQ ID NO: 42638 - DNA, 25 bp, Homo sapien
ctcctgactcttggcccgctacgcc

SEQ ID NO: 42639 - DNA, 25 bp, Homo sapien
tacaataactatagtgactgtttat

SEQ ID NO: 42640 - DNA, 25 bp, Homo sapien
ataaacagtcactatagttattgta

SEQ ID NO: 42641 - DNA, 25 bp, Homo sapien
ttttcaaacttcatctgtattaatc

SEQ ID NO: 42642 - DNA, 25 bp, Homo sapien
gattaatacagatgaagtttgaaaa

SEQ ID NO: 42643 - DNA, 25 bp, Homo sapien
attttcaaacttcatctgtattaat

SEQ ID NO: 42644 - DNA, 25 bp, Homo sapien
attaatacagatgaagtttgaaaat

SEQ ID NO: 42645 - DNA, 25 bp, Homo sapien
ttttaggacgtacggaaagtatgac

SEQ ID NO: 42646 - DNA, 25 bp, Homo sapien
gtcatactttccgtacgtcctaaaa

SEQ ID NO: 42647 - DNA, 25 bp, Homo sapien
gctgtatggtttccacaaaacctct

SEQ ID NO: 42648 - DNA, 25 bp, Homo sapien
agaggttttgtggaaaccatacagc

SEQ ID NO: 42649 - DNA, 25 bp, Homo sapien
gagacaaacgtctttttagtattag

SEQ ID NO: 42650 - DNA, 25 bp, Homo sapien
ctaatactaaaaagacgtttgtctc

SEQ ID NO: 42651 - DNA, 25 bp, Homo sapien
acgagaccacactttcggtaggaat

SEQ ID NO: 42652 - DNA, 25 bp, Homo sapien
attcctaccgaaagtgtggtctcgt

SEQ ID NO: 42653 - DNA, 25 bp, Homo sapien
gagtaatcatttgaggttcgattta

SEQ ID NO: 42654 - DNA, 25 bp, Homo sapien
taaatcgaacctcaaatgattactc

SEQ ID NO: 42655 - DNA, 25 bp, Homo sapien
gatgtcattttatttgtataaagta

SEQ ID NO: 42656 - DNA, 25 bp, Homo sapien
tactttatacaaataaaatgacatc

SEQ ID NO: 42657 - DNA, 25 bp, Homo sapien
cggtccgcgcgtctatttagtgcct

SEQ ID NO: 42658 - DNA, 25 bp, Homo sapien
aggcactaaatagacgcgcggaccg

SEQ ID NO: 42659 - DNA, 25 bp, Homo sapien
ggcctcagccacccaccggcgggag

SEQ ID NO: 42660 - DNA, 25 bp, Homo sapien
ctcccgccggtgggtggctgaggcc

SEQ ID NO: 42661 - DNA, 25 bp, Homo sapien
tatcaacatctgtaagtttatcagt

SEQ ID NO: 42662 - DNA, 25 bp, Homo sapien
actgataaacttacagatgttgata

SEQ ID NO: 42663 - DNA, 25 bp, Homo sapien
tagaaagagaaactttatgagttac

SEQ ID NO: 42664 - DNA, 25 bp, Homo sapien
gtaactcataaagtttctctttcta

SEQ ID NO: 42665 - DNA, 25 bp, Homo sapien
cgagacactaagacaatgaggttct

SEQ ID NO: 42666 - DNA, 25 bp, Homo sapien
agaacctcattgtcttagtgtctcg

SEQ ID NO: 42667 - DNA, 25 bp, Homo sapien
acggctatctcttaacataggaaat

SEQ ID NO: 42668 - DNA, 25 bp, Homo sapien
atttcctatgttaagagatagccgt

SEQ ID NO: 42669 - DNA, 25 bp, Homo sapien
gggtgctctctcctgggcgcctcca

SEQ ID NO: 42670 - DNA, 25 bp, Homo sapien
tggaggcgcccaggagagagcaccc

SEQ ID NO: 42671 - DNA, 25 bp, Homo sapien
actttttgtaactctcatgatgttg

SEQ ID NO: 42672 - DNA, 25 bp, Homo sapien
caacatcatgagagttacaaaaagt

SEQ ID NO: 42673 - DNA, 25 bp, Homo sapien
tttttgtaactctcatgatgttgtc

SEQ ID NO: 42674 - DNA, 25 bp, Homo sapien
gacaacatcatgagagttacaaaaa

SEQ ID NO: 42675 - DNA, 25 bp, Homo sapien
agtgaggcacccagaagcctatacc

SEQ ID NO: 42676 - DNA, 25 bp, Homo sapien
ggtataggcttctgggtgcctcact

SEQ ID NO: 42677 - DNA, 25 bp, Homo sapien
tcacacccaccggtcatccgtcggc

SEQ ID NO: 42678 - DNA, 25 bp, Homo sapien
gccgacggatgaccggtgggtgtga

SEQ ID NO: 42679 - DNA, 25 bp, Homo sapien
ctcttcacctccgcgccaccctcct

SEQ ID NO: 42680 - DNA, 25 bp, Homo sapien
aggagggtggcgcggaggtgaagag

SEQ ID NO: 42681 - DNA, 25 bp, Homo sapien
gactcttcacctccgcgccaccctc

SEQ ID NO: 42682 - DNA, 25 bp, Homo sapien
gagggtggcgcggaggtgaagagtc

SEQ ID NO: 42683 - DNA, 25 bp, Homo sapien
tgtttcatttcctacaaagttttat

SEQ ID NO: 42684 - DNA, 25 bp, Homo sapien
ataaaactttgtaggaaatgaaaca

SEQ ID NO: 42685 - DNA, 25 bp, Homo sapien
ctccgcggtcgaggcaggcgttttg

SEQ ID NO: 42686 - DNA, 25 bp, Homo sapien
caaaacgcctgcctcgaccgcggag

SEQ ID NO: 42687 - DNA, 25 bp, Homo sapien
acataaaacgtaagtgcattcgaag

SEQ ID NO: 42688 - DNA, 25 bp, Homo sapien
cttcgaatgcacttacgttttatgt

SEQ ID NO: 42689 - DNA, 25 bp, Homo sapien
gtgggacgaccgtccgagctaggtc

SEQ ID NO: 42690 - DNA, 25 bp, Homo sapien
gacctagctcggacggtcgtcccac

SEQ ID NO: 42691 - DNA, 25 bp, Homo sapien
aactcacggggtcaggggctcaggt

SEQ ID NO: 42692 - DNA, 25 bp, Homo sapien
acctgagcccctgaccccgtgagtt

SEQ ID NO: 42693 - DNA, 25 bp, Homo sapien
aattatagaaacactcttaagtgtg

SEQ ID NO: 42694 - DNA, 25 bp, Homo sapien
cacacttaagagtgtttctataatt

SEQ ID NO: 42695 - DNA, 25 bp, Homo sapien
aagactatactgtcagagattttag

SEQ ID NO: 42696 - DNA, 25 bp, Homo sapien
ctaaaatctctgacagtatagtctt

SEQ ID NO: 42697 - DNA, 25 bp, Homo sapien
cctgtgcacctcgtggtagaactct

SEQ ID NO: 42698 - DNA, 25 bp, Homo sapien
ccctcctgcaggagagcaaagttga

SEQ ID NO: 42699 - DNA, 25 bp, Homo sapien
atgaagttgtagttccacgaggact

SEQ ID NO: 42700 - DNA, 25 bp, Homo sapien
ttggggtcatgccgaacacccatga

SEQ ID NO: 42701 - DNA, 25 bp, Homo sapien
tgtctgtgttctggcggccccattc

SEQ ID NO: 42702 - DNA, 25 bp, Homo sapien
gcgtgaagctgcatgtgatgataat

SEQ ID NO: 42703 - DNA, 25 bp, Homo sapien
gatccgcagagtaaacctccccctc

SEQ ID NO: 42704 - DNA, 25 bp, Homo sapien
actctttggggttcgccagctgtag

SEQ ID NO: 42705 - DNA, 25 bp, Homo sapien
tcccaagatgggttgtcagccatga

SEQ ID NO: 42706 - DNA, 25 bp, Homo sapien
aactgctgaatgtcagcggcctgtc

SEQ ID NO: 42707 - DNA, 25 bp, Homo sapien
gtcaggcatacaggtcctcccgatc

SEQ ID NO: 42708 - DNA, 25 bp, Homo sapien
tcccaagatgggttgtcagccatga

SEQ ID NO: 42709 - DNA, 25 bp, Homo sapien
gcgtgaagctgcatgtgatgataat

SEQ ID NO: 42710 - DNA, 25 bp, Homo sapien
tgtctgtgttctggcggccccattc

SEQ ID NO: 42711 - DNA, 25 bp, Homo sapien
atgaagttgtagttccacgaggact

SEQ ID NO: 42712 - DNA, 25 bp, Homo sapien
ttggggtcatgccgaacacccatga

SEQ ID NO: 42713 - DNA, 25 bp, Homo sapien
actctttggggttcgccagctgtag

SEQ ID NO: 42714 - DNA, 25 bp, Homo sapien
cctgtgcacctcgtggtagaactct

SEQ ID NO: 42715 - DNA, 25 bp, Homo sapien
ccctcctgcaggagagcaaagttga

SEQ ID NO: 42716 - DNA, 25 bp, Homo sapien
gatccgcagagtaaacctccccctc

SEQ ID NO: 42717 - DNA, 25 bp, Homo sapien
gtcaggcatacaggtcctcccgatc

SEQ ID NO: 42718 - DNA, 25 bp, Homo sapien
aactgctgaatgtcagcggcctgtc

SEQ ID NO: 42719 - DNA, 25 bp, Homo sapien
tgtctgtgttctggcggccccattc

SEQ ID NO: 42720 - DNA, 25 bp, Homo sapien
gtcaggcatacaggtcctcccgatc

SEQ ID NO: 42721 - DNA, 25 bp, Homo sapien
aactgctgaatgtcagcggcctgtc

SEQ ID NO: 42722 - DNA, 25 bp, Homo sapien
atgaagttgtagttccacgaggact

SEQ ID NO: 42723 - DNA, 25 bp, Homo sapien
gatccgcagagtaaacctccccctc

SEQ ID NO: 42724 - DNA, 25 bp, Homo sapien
actctttggggttcgccagctgtag

SEQ ID NO: 42725 - DNA, 25 bp, Homo sapien
gcgtgaagctgcatgtgatgataat

SEQ ID NO: 42726 - DNA, 25 bp, Homo sapien
ccctcctgcaggagagcaaagttga

SEQ ID NO: 42727 - DNA, 25 bp, Homo sapien
cctgtgcacctcgtggtagaactct

SEQ ID NO: 42728 - DNA, 25 bp, Homo sapien
tcccaagatgggttgtcagccatga

SEQ ID NO: 42729 - DNA, 25 bp, Homo sapien
ttggggtcatgccgaacacccatga

SEQ ID NO: 42730 - DNA, 25 bp, Homo sapien
tcccaagatgggttgtcagccatga

SEQ ID NO: 42731 - DNA, 25 bp, Homo sapien
gcgtgaagctgcatgtgatgataat

SEQ ID NO: 42732 - DNA, 25 bp, Homo sapien
tgtctgtgttctggcggccccattc

SEQ ID NO: 42733 - DNA, 25 bp, Homo sapien
atgaagttgtagttccacgaggact

SEQ ID NO: 42734 - DNA, 25 bp, Homo sapien
ttggggtcatgccgaacacccatga

SEQ ID NO: 42735 - DNA, 25 bp, Homo sapien
actctttggggttcgccagctgtag

SEQ ID NO: 42736 - DNA, 25 bp, Homo sapien
cctgtgcacctcgtggtagaactct

SEQ ID NO: 42737 - DNA, 25 bp, Homo sapien
ccctcctgcaggagagcaaagttga

SEQ ID NO: 42738 - DNA, 25 bp, Homo sapien
gatccgcagagtaaacctccccctc

SEQ ID NO: 42739 - DNA, 25 bp, Homo sapien
gtcaggcatacaggtcctcccgatc

SEQ ID NO: 42740 - DNA, 25 bp, Homo sapien
aactgctgaatgtcagcggcctgtc

SEQ ID NO: 42741 - DNA, 25 bp, Homo sapien
tgtctgtgttctggcggccccattc

SEQ ID NO: 42742 - DNA, 25 bp, Homo sapien
ttggggtcatgccgaacacccatga

SEQ ID NO: 42743 - DNA, 25 bp, Homo sapien
atgaagttgtagttccacgaggact

SEQ ID NO: 42744 - DNA, 25 bp, Homo sapien
actctttggggttcgccagctgtag

SEQ ID NO: 42745 - DNA, 25 bp, Homo sapien
tcccaagatgggttgtcagccatga

SEQ ID NO: 42746 - DNA, 25 bp, Homo sapien
gtcaggcatacaggtcctcccgatc

SEQ ID NO: 42747 - DNA, 25 bp, Homo sapien
gatccgcagagtaaacctccccctc

SEQ ID NO: 42748 - DNA, 25 bp, Homo sapien
gcgtgaagctgcatgtgatgataat

SEQ ID NO: 42749 - DNA, 25 bp, Homo sapien
cctgtgcacctcgtggtagaactct

SEQ ID NO: 42750 - DNA, 25 bp, Homo sapien
ccctcctgcaggagagcaaagttga

SEQ ID NO: 42751 - DNA, 25 bp, Homo sapien
aactgctgaatgtcagcggcctgtc

SEQ ID NO: 42752 - DNA, 25 bp, Homo sapien
tcccaagatgggttgtcagccatga

SEQ ID NO: 42753 - DNA, 25 bp, Homo sapien
gcgtgaagctgcatgtgatgataat

SEQ ID NO: 42754 - DNA, 25 bp, Homo sapien
tgtctgtgttctggcggccccattc

SEQ ID NO: 42755 - DNA, 25 bp, Homo sapien
atgaagttgtagttccacgaggact

SEQ ID NO: 42756 - DNA, 25 bp, Homo sapien
ttggggtcatgccgaacacccatga

SEQ ID NO: 42757 - DNA, 25 bp, Homo sapien
actctttggggttcgccagctgtag

SEQ ID NO: 42758 - DNA, 25 bp, Homo sapien
cctgtgcacctcgtggtagaactct

SEQ ID NO: 42759 - DNA, 25 bp, Homo sapien
ccctcctgcaggagagcaaagttga

SEQ ID NO: 42760 - DNA, 25 bp, Homo sapien
gatccgcagagtaaacctccccctc

SEQ ID NO: 42761 - DNA, 25 bp, Homo sapien
gtcaggcatacaggtcctcccgatc

SEQ ID NO: 42762 - DNA, 25 bp, Homo sapien
aactgctgaatgtcagcggcctgtc

SEQ ID NO: 42763 - DNA, 25 bp, Homo sapien
tcccaagatgggttgtcagccatga

SEQ ID NO: 42764 - DNA, 25 bp, Homo sapien
gcgtgaagctgcatgtgatgataat

SEQ ID NO: 42765 - DNA, 25 bp, Homo sapien
tgtctgtgttctggcggccccattc

SEQ ID NO: 42766 - DNA, 25 bp, Homo sapien
atgaagttgtagttccacgaggact

SEQ ID NO: 42767 - DNA, 25 bp, Homo sapien
ttggggtcatgccgaacacccatga

SEQ ID NO: 42768 - DNA, 25 bp, Homo sapien
actctttggggttcgccagctgtag

SEQ ID NO: 42769 - DNA, 25 bp, Homo sapien
cctgtgcacctcgtggtagaactct

SEQ ID NO: 42770 - DNA, 25 bp, Homo sapien
ccctcctgcaggagagcaaagttga

SEQ ID NO: 42771 - DNA, 25 bp, Homo sapien
gatccgcagagtaaacctccccctc

SEQ ID NO: 42772 - DNA, 25 bp, Homo sapien
gtcaggcatacaggtcctcccgatc

SEQ ID NO: 42773 - DNA, 25 bp, Homo sapien
aactgctgaatgtcagcggcctgtc

SEQ ID NO: 42774 - DNA, 25 bp, Homo sapien
gtcaggcatacaggtcctcccgatc

SEQ ID NO: 42775 - DNA, 25 bp, Homo sapien
tcccaagatgggttgtcagccatga

SEQ ID NO: 42776 - DNA, 25 bp, Homo sapien
gatccgcagagtaaacctccccctc

SEQ ID NO: 42777 - DNA, 25 bp, Homo sapien
actctttggggttcgccagctgtag

SEQ ID NO: 42778 - DNA, 25 bp, Homo sapien
aactgctgaatgtcagcggcctgtc

SEQ ID NO: 42779 - DNA, 25 bp, Homo sapien
tgtctgtgttctggcggccccattc

SEQ ID NO: 42780 - DNA, 25 bp, Homo sapien
gcgtgaagctgcatgtgatgataat

SEQ ID NO: 42781 - DNA, 25 bp, Homo sapien
cctgtgcacctcgtggtagaactct

SEQ ID NO: 42782 - DNA, 25 bp, Homo sapien
ccctcctgcaggagagcaaagttga

SEQ ID NO: 42783 - DNA, 25 bp, Homo sapien
atgaagttgtagttccacgaggact

SEQ ID NO: 42784 - DNA, 25 bp, Homo sapien
ttggggtcatgccgaacacccatga

SEQ ID NO: 42785 - DNA, 25 bp, Homo sapien
tcccaagatgggttgtcagccatga

SEQ ID NO: 42786 - DNA, 25 bp, Homo sapien
gcgtgaagctgcatgtgatgataat

SEQ ID NO: 42787 - DNA, 25 bp, Homo sapien
tgtctgtgttctggcggccccattc

SEQ ID NO: 42788 - DNA, 25 bp, Homo sapien
atgaagttgtagttccacgaggact

SEQ ID NO: 42789 - DNA, 25 bp, Homo sapien
ttggggtcatgccgaacacccatga

SEQ ID NO: 42790 - DNA, 25 bp, Homo sapien
actctttggggttcgccagctgtag

SEQ ID NO: 42791 - DNA, 25 bp, Homo sapien
cctgtgcacctcgtggtagaactct

SEQ ID NO: 42792 - DNA, 25 bp, Homo sapien
ccctcctgcaggagagcaaagttga

SEQ ID NO: 42793 - DNA, 25 bp, Homo sapien
gatccgcagagtaaacctccccctc

SEQ ID NO: 42794 - DNA, 25 bp, Homo sapien
gtcaggcatacaggtcctcccgatc

SEQ ID NO: 42795 - DNA, 25 bp, Homo sapien
aactgctgaatgtcagcggcctgtc

SEQ ID NO: 42796 - DNA, 25 bp, Homo sapien
gcgtgaagctgcatgtgatgataat

SEQ ID NO: 42797 - DNA, 25 bp, Homo sapien
gtcaggcatacaggtcctcccgatc

SEQ ID NO: 42798 - DNA, 25 bp, Homo sapien
atgaagttgtagttccacgaggact

SEQ ID NO: 42799 - DNA, 25 bp, Homo sapien
tcccaagatgggttgtcagccatga

SEQ ID NO: 42800 - DNA, 25 bp, Homo sapien
cctgtgcacctcgtggtagaactct

SEQ ID NO: 42801 - DNA, 25 bp, Homo sapien
actctttggggttcgccagctgtag

SEQ ID NO: 42802 - DNA, 25 bp, Homo sapien
tgtctgtgttctggcggccccattc

SEQ ID NO: 42803 - DNA, 25 bp, Homo sapien
gatccgcagagtaaacctccccctc

SEQ ID NO: 42804 - DNA, 25 bp, Homo sapien
ttggggtcatgccgaacacccatga

SEQ ID NO: 42805 - DNA, 25 bp, Homo sapien
ccctcctgcaggagagcaaagttga

SEQ ID NO: 42806 - DNA, 25 bp, Homo sapien
aactgctgaatgtcagcggcctgtc

SEQ ID NO: 42807 - DNA, 25 bp, Homo sapien
tcccaagatgggttgtcagccatga

SEQ ID NO: 42808 - DNA, 25 bp, Homo sapien
gcgtgaagctgcatgtgatgataat

SEQ ID NO: 42809 - DNA, 25 bp, Homo sapien
tgtctgtgttctggcggccccattc

SEQ ID NO: 42810 - DNA, 25 bp, Homo sapien
atgaagttgtagttccacgaggact

SEQ ID NO: 42811 - DNA, 25 bp, Homo sapien
ttggggtcatgccgaacacccatga

SEQ ID NO: 42812 - DNA, 25 bp, Homo sapien
actctttggggttcgccagctgtag

SEQ ID NO: 42813 - DNA, 25 bp, Homo sapien
cctgtgcacctcgtggtagaactct

SEQ ID NO: 42814 - DNA, 25 bp, Homo sapien
ccctcctgcaggagagcaaagttga

SEQ ID NO: 42815 - DNA, 25 bp, Homo sapien
gatccgcagagtaaacctccccctc

SEQ ID NO: 42816 - DNA, 25 bp, Homo sapien
gtcaggcatacaggtcctcccgatc

SEQ ID NO: 42817 - DNA, 25 bp, Homo sapien
aactgctgaatgtcagcggcctgtc

SEQ ID NO: 42818 - DNA, 25 bp, Homo sapien
tcccaagatgggttgtcagccatga

SEQ ID NO: 42819 - DNA, 25 bp, Homo sapien
cctgtgcacctcgtggtagaactct

SEQ ID NO: 42820 - DNA, 25 bp, Homo sapien
ttggggtcatgccgaacacccatga

SEQ ID NO: 42821 - DNA, 25 bp, Homo sapien
gtcaggcatacaggtcctcccgatc

SEQ ID NO: 42822 - DNA, 25 bp, Homo sapien
gatccgcagagtaaacctccccctc

SEQ ID NO: 42823 - DNA, 25 bp, Homo sapien
atgaagttgtagttccacgaggact

SEQ ID NO: 42824 - DNA, 25 bp, Homo sapien
ccctcctgcaggagagcaaagttga

SEQ ID NO: 42825 - DNA, 25 bp, Homo sapien
actctttggggttcgccagctgtag

SEQ ID NO: 42826 - DNA, 25 bp, Homo sapien
gcgtgaagctgcatgtgatgataat

SEQ ID NO: 42827 - DNA, 25 bp, Homo sapien
tgtctgtgttctggcggccccattc

SEQ ID NO: 42828 - DNA, 25 bp, Homo sapien
aactgctgaatgtcagcggcctgtc

SEQ ID NO: 42829 - DNA, 25 bp, Homo sapien
tcccaagatgggttgtcagccatga

SEQ ID NO: 42830 - DNA, 25 bp, Homo sapien
gcgtgaagctgcatgtgatgataat

SEQ ID NO: 42831 - DNA, 25 bp, Homo sapien
tgtctgtgttctggcggccccattc

SEQ ID NO: 42832 - DNA, 25 bp, Homo sapien
atgaagttgtagttccacgaggact

SEQ ID NO: 42833 - DNA, 25 bp, Homo sapien
ttggggtcatgccgaacacccatga

SEQ ID NO: 42834 - DNA, 25 bp, Homo sapien
actctttggggttcgccagctgtag

SEQ ID NO: 42835 - DNA, 25 bp, Homo sapien
cctgtgcacctcgtggtagaactct

SEQ ID NO: 42836 - DNA, 25 bp, Homo sapien
ccctcctgcaggagagcaaagttga

SEQ ID NO: 42837 - DNA, 25 bp, Homo sapien
gatccgcagagtaaacctccccctc

SEQ ID NO: 42838 - DNA, 25 bp, Homo sapien
gtcaggcatacaggtcctcccgatc

SEQ ID NO: 42839 - DNA, 25 bp, Homo sapien
aactgctgaatgtcagcggcctgtc

SEQ ID NO: 42840 - DNA, 25 bp, Homo sapien
gtcaggcatacaggtcctcccgatc

SEQ ID NO: 42841 - DNA, 25 bp, Homo sapien
tgtctgtgttctggcggccccattc

SEQ ID NO: 42842 - DNA, 25 bp, Homo sapien
atgaagttgtagttccacgaggact

SEQ ID NO: 42843 - DNA, 25 bp, Homo sapien
aactgctgaatgtcagcggcctgtc

SEQ ID NO: 42844 - DNA, 25 bp, Homo sapien
tcccaagatgggttgtcagccatga

SEQ ID NO: 42845 - DNA, 25 bp, Homo sapien
gatccgcagagtaaacctccccctc

SEQ ID NO: 42846 - DNA, 25 bp, Homo sapien
cctgtgcacctcgtggtagaactct

SEQ ID NO: 42847 - DNA, 25 bp, Homo sapien
actctttggggttcgccagctgtag

SEQ ID NO: 42848 - DNA, 25 bp, Homo sapien
gcgtgaagctgcatgtgatgataat

SEQ ID NO: 42849 - DNA, 25 bp, Homo sapien
ttggggtcatgccgaacacccatga

SEQ ID NO: 42850 - DNA, 25 bp, Homo sapien
ccctcctgcaggagagcaaagttga

SEQ ID NO: 42851 - DNA, 25 bp, Homo sapien
tcccaagatgggttgtcagccatga

SEQ ID NO: 42852 - DNA, 25 bp, Homo sapien
gcgtgaagctgcatgtgatgataat

SEQ ID NO: 42853 - DNA, 25 bp, Homo sapien
tgtctgtgttctggcggccccattc

SEQ ID NO: 42854 - DNA, 25 bp, Homo sapien
atgaagttgtagttccacgaggact

SEQ ID NO: 42855 - DNA, 25 bp, Homo sapien
ttggggtcatgccgaacacccatga

SEQ ID NO: 42856 - DNA, 25 bp, Homo sapien
actctttggggttcgccagctgtag

SEQ ID NO: 42857 - DNA, 25 bp, Homo sapien
cctgtgcacctcgtggtagaactct

SEQ ID NO: 42858 - DNA, 25 bp, Homo sapien
ccctcctgcaggagagcaaagttga

SEQ ID NO: 42859 - DNA, 25 bp, Homo sapien
gatccgcagagtaaacctccccctc

SEQ ID NO: 42860 - DNA, 25 bp, Homo sapien
gtcaggcatacaggtcctcccgatc

SEQ ID NO: 42861 - DNA, 25 bp, Homo sapien
aactgctgaatgtcagcggcctgtc

SEQ ID NO: 42862 - DNA, 25 bp, Homo sapien
gtcaggcatacaggtcctcccgatc

SEQ ID NO: 42863 - DNA, 25 bp, Homo sapien
cctgtgcacctcgtggtagaactct

SEQ ID NO: 42864 - DNA, 25 bp, Homo sapien
gcgtgaagctgcatgtgatgataat

SEQ ID NO: 42865 - DNA, 25 bp, Homo sapien
actctttggggttcgccagctgtag

SEQ ID NO: 42866 - DNA, 25 bp, Homo sapien
ccctcctgcaggagagcaaagttga

SEQ ID NO: 42867 - DNA, 25 bp, Homo sapien
gatccgcagagtaaacctccccctc

SEQ ID NO: 42868 - DNA, 25 bp, Homo sapien
ttggggtcatgccgaacacccatga

SEQ ID NO: 42869 - DNA, 25 bp, Homo sapien
tgtctgtgttctggcggccccattc

SEQ ID NO: 42870 - DNA, 25 bp, Homo sapien
aactgctgaatgtcagcggcctgtc

SEQ ID NO: 42871 - DNA, 25 bp, Homo sapien
atgaagttgtagttccacgaggact

SEQ ID NO: 42872 - DNA, 25 bp, Homo sapien
tcccaagatgggttgtcagccatga

SEQ ID NO: 42873 - DNA, 25 bp, Homo sapien
atgaagttgtagttccacgaggact

SEQ ID NO: 42874 - DNA, 25 bp, Homo sapien
cctgtgcacctcgtggtagaactct

SEQ ID NO: 42875 - DNA, 25 bp, Homo sapien
ccctcctgcaggagagcaaagttga

SEQ ID NO: 42876 - DNA, 25 bp, Homo sapien
actctttggggttcgccagctgtag

SEQ ID NO: 42877 - DNA, 25 bp, Homo sapien
tcccaagatgggttgtcagccatga

SEQ ID NO: 42878 - DNA, 25 bp, Homo sapien
tgtctgtgttctggcggccccattc

SEQ ID NO: 42879 - DNA, 25 bp, Homo sapien
aactgctgaatgtcagcggcctgtc

SEQ ID NO: 42880 - DNA, 25 bp, Homo sapien
gtcaggcatacaggtcctcccgatc

SEQ ID NO: 42881 - DNA, 25 bp, Homo sapien
gcgtgaagctgcatgtgatgataat

SEQ ID NO: 42882 - DNA, 25 bp, Homo sapien
ttggggtcatgccgaacacccatga

SEQ ID NO: 42883 - DNA, 25 bp, Homo sapien
gatccgcagagtaaacctccccctc

SEQ ID NO: 42884 - DNA, 25 bp, Homo sapien
tcccaagatgggttgtcagccatga

SEQ ID NO: 42885 - DNA, 25 bp, Homo sapien
gcgtgaagctgcatgtgatgataat

SEQ ID NO: 42886 - DNA, 25 bp, Homo sapien
tgtctgtgttctggcggccccattc

SEQ ID NO: 42887 - DNA, 25 bp, Homo sapien
atgaagttgtagttccacgaggact

SEQ ID NO: 42888 - DNA, 25 bp, Homo sapien
ttggggtcatgccgaacacccatga

SEQ ID NO: 42889 - DNA, 25 bp, Homo sapien
actctttggggttcgccagctgtag

SEQ ID NO: 42890 - DNA, 25 bp, Homo sapien
cctgtgcacctcgtggtagaactct

SEQ ID NO: 42891 - DNA, 25 bp, Homo sapien
ccctcctgcaggagagcaaagttga

SEQ ID NO: 42892 - DNA, 25 bp, Homo sapien
gatccgcagagtaaacctccccctc

SEQ ID NO: 42893 - DNA, 25 bp, Homo sapien
gtcaggcatacaggtcctcccgatc

SEQ ID NO: 42894 - DNA, 25 bp, Homo sapien
aactgctgaatgtcagcggcctgtc

SEQ ID NO: 42895 - DNA, 25 bp, Homo sapien
tcccaagatgggttgtcagccatga

SEQ ID NO: 42896 - DNA, 25 bp, Homo sapien
aactgctgaatgtcagcggcctgtc

SEQ ID NO: 42897 - DNA, 25 bp, Homo sapien
actctttggggttcgccagctgtag

SEQ ID NO: 42898 - DNA, 25 bp, Homo sapien
gcgtgaagctgcatgtgatgataat

SEQ ID NO: 42899 - DNA, 25 bp, Homo sapien
ttggggtcatgccgaacacccatga

SEQ ID NO: 42900 - DNA, 25 bp, Homo sapien
gtcaggcatacaggtcctcccgatc

SEQ ID NO: 42901 - DNA, 25 bp, Homo sapien
cctgtgcacctcgtggtagaactct

SEQ ID NO: 42902 - DNA, 25 bp, Homo sapien
tgtctgtgttctggcggccccattc

SEQ ID NO: 42903 - DNA, 25 bp, Homo sapien
gatccgcagagtaaacctccccctc

SEQ ID NO: 42904 - DNA, 25 bp, Homo sapien
atgaagttgtagttccacgaggact

SEQ ID NO: 42905 - DNA, 25 bp, Homo sapien
ccctcctgcaggagagcaaagttga

SEQ ID NO: 42906 - DNA, 25 bp, Homo sapien
tcccaagatgggttgtcagccatga

SEQ ID NO: 42907 - DNA, 25 bp, Homo sapien
gcgtgaagctgcatgtgatgataat

SEQ ID NO: 42908 - DNA, 25 bp, Homo sapien
tgtctgtgttctggcggccccattc

SEQ ID NO: 42909 - DNA, 25 bp, Homo sapien
atgaagttgtagttccacgaggact

SEQ ID NO: 42910 - DNA, 25 bp, Homo sapien
ttggggtcatgccgaacacccatga

SEQ ID NO: 42911 - DNA, 25 bp, Homo sapien
actctttggggttcgccagctgtag

SEQ ID NO: 42912 - DNA, 25 bp, Homo sapien
cctgtgcacctcgtggtagaactct

SEQ ID NO: 42913 - DNA, 25 bp, Homo sapien
ccctcctgcaggagagcaaagttga

SEQ ID NO: 42914 - DNA, 25 bp, Homo sapien
gatccgcagagtaaacctccccctc

SEQ ID NO: 42915 - DNA, 25 bp, Homo sapien
gtcaggcatacaggtcctcccgatc

SEQ ID NO: 42916 - DNA, 25 bp, Homo sapien
aactgctgaatgtcagcggcctgtc

SEQ ID NO: 42917 - DNA, 25 bp, Homo sapien
tcccaagatgggttgtcagccatga

SEQ ID NO: 42918 - DNA, 25 bp, Homo sapien
ccctcctgcaggagagcaaagttga

SEQ ID NO: 42919 - DNA, 25 bp, Homo sapien
cctgtgcacctcgtggtagaactct

SEQ ID NO: 42920 - DNA, 25 bp, Homo sapien
atgaagttgtagttccacgaggact

SEQ ID NO: 42921 - DNA, 25 bp, Homo sapien
aactgctgaatgtcagcggcctgtc

SEQ ID NO: 42922 - DNA, 25 bp, Homo sapien
ttggggtcatgccgaacacccatga

SEQ ID NO: 42923 - DNA, 25 bp, Homo sapien
tgtctgtgttctggcggccccattc

SEQ ID NO: 42924 - DNA, 25 bp, Homo sapien
gcgtgaagctgcatgtgatgataat

SEQ ID NO: 42925 - DNA, 25 bp, Homo sapien
gatccgcagagtaaacctccccctc

SEQ ID NO: 42926 - DNA, 25 bp, Homo sapien
gtcaggcatacaggtcctcccgatc

SEQ ID NO: 42927 - DNA, 25 bp, Homo sapien
actctttggggttcgccagctgtag

SEQ ID NO: 42928 - DNA, 25 bp, Homo sapien
tcccaagatgggttgtcagccatga

SEQ ID NO: 42929 - DNA, 25 bp, Homo sapien
gcgtgaagctgcatgtgatgataat

SEQ ID NO: 42930 - DNA, 25 bp, Homo sapien
tgtctgtgttctggcggccccattc

SEQ ID NO: 42931 - DNA, 25 bp, Homo sapien
atgaagttgtagttccacgaggact

SEQ ID NO: 42932 - DNA, 25 bp, Homo sapien
ttggggtcatgccgaacacccatga

SEQ ID NO: 42933 - DNA, 25 bp, Homo sapien
actctttggggttcgccagctgtag

SEQ ID NO: 42934 - DNA, 25 bp, Homo sapien
cctgtgcacctcgtggtagaactct

SEQ ID NO: 42935 - DNA, 25 bp, Homo sapien
ccctcctgcaggagagcaaagttga

SEQ ID NO: 42936 - DNA, 25 bp, Homo sapien
gatccgcagagtaaacctccccctc

SEQ ID NO: 42937 - DNA, 25 bp, Homo sapien
gtcaggcatacaggtcctcccgatc

SEQ ID NO: 42938 - DNA, 25 bp, Homo sapien
aactgctgaatgtcagcggcctgtc

SEQ ID NO: 42939 - DNA, 25 bp, Homo sapien
gtcaggcatacaggtcctcccgatc

SEQ ID NO: 42940 - DNA, 25 bp, Homo sapien
ttggggtcatgccgaacacccatga

SEQ ID NO: 42941 - DNA, 25 bp, Homo sapien
aactgctgaatgtcagcggcctgtc

SEQ ID NO: 42942 - DNA, 25 bp, Homo sapien
cctgtgcacctcgtggtagaactct

SEQ ID NO: 42943 - DNA, 25 bp, Homo sapien
ccctcctgcaggagagcaaagttga

SEQ ID NO: 42944 - DNA, 25 bp, Homo sapien
atgaagttgtagttccacgaggact

SEQ ID NO: 42945 - DNA, 25 bp, Homo sapien
tcccaagatgggttgtcagccatga

SEQ ID NO: 42946 - DNA, 25 bp, Homo sapien
actctttggggttcgccagctgtag

SEQ ID NO: 42947 - DNA, 25 bp, Homo sapien
gcgtgaagctgcatgtgatgataat

SEQ ID NO: 42948 - DNA, 25 bp, Homo sapien
gatccgcagagtaaacctccccctc

SEQ ID NO: 42949 - DNA, 25 bp, Homo sapien
tgtctgtgttctggcggccccattc

SEQ ID NO: 42950 - DNA, 25 bp, Homo sapien
tcccaagatgggttgtcagccatga

SEQ ID NO: 42951 - DNA, 25 bp, Homo sapien
gcgtgaagctgcatgtgatgataat

SEQ ID NO: 42952 - DNA, 25 bp, Homo sapien
tgtctgtgttctggcggccccattc

SEQ ID NO: 42953 - DNA, 25 bp, Homo sapien
atgaagttgtagttccacgaggact

SEQ ID NO: 42954 - DNA, 25 bp, Homo sapien
ttggggtcatgccgaacacccatga

SEQ ID NO: 42955 - DNA, 25 bp, Homo sapien
actctttggggttcgccagctgtag

SEQ ID NO: 42956 - DNA, 25 bp, Homo sapien
cctgtgcacctcgtggtagaactct

SEQ ID NO: 42957 - DNA, 25 bp, Homo sapien
ccctcctgcaggagagcaaagttga

SEQ ID NO: 42958 - DNA, 25 bp, Homo sapien
gatccgcagagtaaacctccccctc

SEQ ID NO: 42959 - DNA, 25 bp, Homo sapien
gtcaggcatacaggtcctcccgatc

SEQ ID NO: 42960 - DNA, 25 bp, Homo sapien
aactgctgaatgtcagcggcctgtc

SEQ ID NO: 42961 - DNA, 25 bp, Homo sapien
gcgtgaagctgcatgtgatgataat

SEQ ID NO: 42962 - DNA, 25 bp, Homo sapien
actctttggggttcgccagctgtag

SEQ ID NO: 42963 - DNA, 25 bp, Homo sapien
ccctcctgcaggagagcaaagttga

SEQ ID NO: 42964 - DNA, 25 bp, Homo sapien
gtcaggcatacaggtcctcccgatc

SEQ ID NO: 42965 - DNA, 25 bp, Homo sapien
ttggggtcatgccgaacacccatga

SEQ ID NO: 42966 - DNA, 25 bp, Homo sapien
aactgctgaatgtcagcggcctgtc

SEQ ID NO: 42967 - DNA, 25 bp, Homo sapien
atgaagttgtagttccacgaggact

SEQ ID NO: 42968 - DNA, 25 bp, Homo sapien
cctgtgcacctcgtggtagaactct

SEQ ID NO: 42969 - DNA, 25 bp, Homo sapien
tcccaagatgggttgtcagccatga

SEQ ID NO: 42970 - DNA, 25 bp, Homo sapien
gatccgcagagtaaacctccccctc

SEQ ID NO: 42971 - DNA, 25 bp, Homo sapien
tgtctgtgttctggcggccccattc

SEQ ID NO: 42972 - DNA, 25 bp, Homo sapien
tcccaagatgggttgtcagccatga

SEQ ID NO: 42973 - DNA, 25 bp, Homo sapien
gcgtgaagctgcatgtgatgataat

SEQ ID NO: 42974 - DNA, 25 bp, Homo sapien
tgtctgtgttctggcggccccattc

SEQ ID NO: 42975 - DNA, 25 bp, Homo sapien
atgaagttgtagttccacgaggact

SEQ ID NO: 42976 - DNA, 25 bp, Homo sapien
ttggggtcatgccgaacacccatga

SEQ ID NO: 42977 - DNA, 25 bp, Homo sapien
actctttggggttcgccagctgtag

SEQ ID NO: 42978 - DNA, 25 bp, Homo sapien
cctgtgcacctcgtggtagaactct

SEQ ID NO: 42979 - DNA, 25 bp, Homo sapien
ccctcctgcaggagagcaaagttga

SEQ ID NO: 42980 - DNA, 25 bp, Homo sapien
gatccgcagagtaaacctccccctc

SEQ ID NO: 42981 - DNA, 25 bp, Homo sapien
gtcaggcatacaggtcctcccgatc

SEQ ID NO: 42982 - DNA, 25 bp, Homo sapien
aactgctgaatgtcagcggcctgtc

SEQ ID NO: 42983 - DNA, 25 bp, Homo sapien
gtcaggcatacaggtcctcccgatc

SEQ ID NO: 42984 - DNA, 25 bp, Homo sapien
ccctcctgcaggagagcaaagttga

SEQ ID NO: 42985 - DNA, 25 bp, Homo sapien
aactgctgaatgtcagcggcctgtc

SEQ ID NO: 42986 - DNA, 25 bp, Homo sapien
actctttggggttcgccagctgtag

SEQ ID NO: 42987 - DNA, 25 bp, Homo sapien
ttggggtcatgccgaacacccatga

SEQ ID NO: 42988 - DNA, 25 bp, Homo sapien
gatccgcagagtaaacctccccctc

SEQ ID NO: 42989 - DNA, 25 bp, Homo sapien
atgaagttgtagttccacgaggact

SEQ ID NO: 42990 - DNA, 25 bp, Homo sapien
tcccaagatgggttgtcagccatga

SEQ ID NO: 42991 - DNA, 25 bp, Homo sapien
tgtctgtgttctggcggccccattc

SEQ ID NO: 42992 - DNA, 25 bp, Homo sapien
gcgtgaagctgcatgtgatgataat

SEQ ID NO: 42993 - DNA, 25 bp, Homo sapien
cctgtgcacctcgtggtagaactct

SEQ ID NO: 42994 - DNA, 25 bp, Homo sapien
tcccaagatgggttgtcagccatga

SEQ ID NO: 42995 - DNA, 25 bp, Homo sapien
gcgtgaagctgcatgtgatgataat

SEQ ID NO: 42996 - DNA, 25 bp, Homo sapien
tgtctgtgttctggcggccccattc

SEQ ID NO: 42997 - DNA, 25 bp, Homo sapien
atgaagttgtagttccacgaggact

SEQ ID NO: 42998 - DNA, 25 bp, Homo sapien
ttggggtcatgccgaacacccatga

SEQ ID NO: 42999 - DNA, 25 bp, Homo sapien
actctttggggttcgccagctgtag

SEQ ID NO: 43000 - DNA, 25 bp, Homo sapien
cctgtgcacctcgtggtagaactct

SEQ ID NO: 43001 - DNA, 25 bp, Homo sapien
ccctcctgcaggagagcaaagttga

SEQ ID NO: 43002 - DNA, 25 bp, Homo sapien
gatccgcagagtaaacctccccctc

SEQ ID NO: 43003 - DNA, 25 bp, Homo sapien
gtcaggcatacaggtcctcccgatc

SEQ ID NO: 43004 - DNA, 25 bp, Homo sapien
aactgctgaatgtcagcggcctgtc

SEQ ID NO: 43005 - DNA, 25 bp, Homo sapien
tcccaagatgggttgtcagccatga

SEQ ID NO: 43006 - DNA, 25 bp, Homo sapien
gcgtgaagctgcatgtgatgataat

SEQ ID NO: 43007 - DNA, 25 bp, Homo sapien
tgtctgtgttctggcggccccattc

SEQ ID NO: 43008 - DNA, 25 bp, Homo sapien
atgaagttgtagttccacgaggact

SEQ ID NO: 43009 - DNA, 25 bp, Homo sapien
ttggggtcatgccgaacacccatga

SEQ ID NO: 43010 - DNA, 25 bp, Homo sapien
actctttggggttcgccagctgtag

SEQ ID NO: 43011 - DNA, 25 bp, Homo sapien
cctgtgcacctcgtggtagaactct

SEQ ID NO: 43012 - DNA, 25 bp, Homo sapien
ccctcctgcaggagagcaaagttga

SEQ ID NO: 43013 - DNA, 25 bp, Homo sapien
gatccgcagagtaaacctccccctc

SEQ ID NO: 43014 - DNA, 25 bp, Homo sapien
gtcaggcatacaggtcctcccgatc

SEQ ID NO: 43015 - DNA, 25 bp, Homo sapien
aactgctgaatgtcagcggcctgtc

SEQ ID NO: 43016 - DNA, 25 bp, Homo sapien
ttggggtcatgccgaacacccatga

SEQ ID NO: 43017 - DNA, 25 bp, Homo sapien
gatccgcagagtaaacctccccctc

SEQ ID NO: 43018 - DNA, 25 bp, Homo sapien
gtcaggcatacaggtcctcccgatc

SEQ ID NO: 43019 - DNA, 25 bp, Homo sapien
atgaagttgtagttccacgaggact

SEQ ID NO: 43020 - DNA, 25 bp, Homo sapien
cctgtgcacctcgtggtagaactct

SEQ ID NO: 43021 - DNA, 25 bp, Homo sapien
actctttggggttcgccagctgtag

SEQ ID NO: 43022 - DNA, 25 bp, Homo sapien
aactgctgaatgtcagcggcctgtc

SEQ ID NO: 43023 - DNA, 25 bp, Homo sapien
ccctcctgcaggagagcaaagttga

SEQ ID NO: 43024 - DNA, 25 bp, Homo sapien
gcgtgaagctgcatgtgatgataat

SEQ ID NO: 43025 - DNA, 25 bp, Homo sapien
tgtctgtgttctggcggccccattc

SEQ ID NO: 43026 - DNA, 25 bp, Homo sapien
tcccaagatgggttgtcagccatga

SEQ ID NO: 43027 - DNA, 25 bp, Homo sapien
gtcaggcatacaggtcctcccgatc

SEQ ID NO: 43028 - DNA, 25 bp, Homo sapien
actctttggggttcgccagctgtag

SEQ ID NO: 43029 - DNA, 25 bp, Homo sapien
aactgctgaatgtcagcggcctgtc

SEQ ID NO: 43030 - DNA, 25 bp, Homo sapien
cctgtgcacctcgtggtagaactct

SEQ ID NO: 43031 - DNA, 25 bp, Homo sapien
ccctcctgcaggagagcaaagttga

SEQ ID NO: 43032 - DNA, 25 bp, Homo sapien
gcgtgaagctgcatgtgatgataat

SEQ ID NO: 43033 - DNA, 25 bp, Homo sapien
gatccgcagagtaaacctccccctc

SEQ ID NO: 43034 - DNA, 25 bp, Homo sapien
tgtctgtgttctggcggccccattc

SEQ ID NO: 43035 - DNA, 25 bp, Homo sapien
ttggggtcatgccgaacacccatga

SEQ ID NO: 43036 - DNA, 25 bp, Homo sapien
atgaagttgtagttccacgaggact

SEQ ID NO: 43037 - DNA, 25 bp, Homo sapien
tcccaagatgggttgtcagccatga

SEQ ID NO: 43038 - DNA, 25 bp, Homo sapien
cctgtgcacctcgtggtagaactct

SEQ ID NO: 43039 - DNA, 25 bp, Homo sapien
gtcaggcatacaggtcctcccgatc

SEQ ID NO: 43040 - DNA, 25 bp, Homo sapien
aactgctgaatgtcagcggcctgtc

SEQ ID NO: 43041 - DNA, 25 bp, Homo sapien
actctttggggttcgccagctgtag

SEQ ID NO: 43042 - DNA, 25 bp, Homo sapien
ccctcctgcaggagagcaaagttga

SEQ ID NO: 43043 - DNA, 25 bp, Homo sapien
atgaagttgtagttccacgaggact

SEQ ID NO: 43044 - DNA, 25 bp, Homo sapien
gcgtgaagctgcatgtgatgataat

SEQ ID NO: 43045 - DNA, 25 bp, Homo sapien
tgtctgtgttctggcggccccattc

SEQ ID NO: 43046 - DNA, 25 bp, Homo sapien
ttggggtcatgccgaacacccatga

SEQ ID NO: 43047 - DNA, 25 bp, Homo sapien
tcccaagatgggttgtcagccatga

SEQ ID NO: 43048 - DNA, 25 bp, Homo sapien
gatccgcagagtaaacctccccctc

SEQ ID NO: 43049 - DNA, 25 bp, Homo sapien
gatccgcagagtaaacctccccctc

SEQ ID NO: 43050 - DNA, 25 bp, Homo sapien
gtcaggcatacaggtcctcccgatc

SEQ ID NO: 43051 - DNA, 25 bp, Homo sapien
actctttggggttcgccagctgtag

SEQ ID NO: 43052 - DNA, 25 bp, Homo sapien
cctgtgcacctcgtggtagaactct

SEQ ID NO: 43053 - DNA, 25 bp, Homo sapien
aactgctgaatgtcagcggcctgtc

SEQ ID NO: 43054 - DNA, 25 bp, Homo sapien
ccctcctgcaggagagcaaagttga

SEQ ID NO: 43055 - DNA, 25 bp, Homo sapien
gcgtgaagctgcatgtgatgataat

SEQ ID NO: 43056 - DNA, 25 bp, Homo sapien
tgtctgtgttctggcggccccattc

SEQ ID NO: 43057 - DNA, 25 bp, Homo sapien
ttggggtcatgccgaacacccatga

SEQ ID NO: 43058 - DNA, 25 bp, Homo sapien
tcccaagatgggttgtcagccatga

SEQ ID NO: 43059 - DNA, 25 bp, Homo sapien
atgaagttgtagttccacgaggact

SEQ ID NO: 43060 - DNA, 25 bp, Homo sapien
gatccgcagagtaaacctccccctc

SEQ ID NO: 43061 - DNA, 25 bp, Homo sapien
gtcaggcatacaggtcctcccgatc

SEQ ID NO: 43062 - DNA, 25 bp, Homo sapien
aactgctgaatgtcagcggcctgtc

SEQ ID NO: 43063 - DNA, 25 bp, Homo sapien
actctttggggttcgccagctgtag

SEQ ID NO: 43064 - DNA, 25 bp, Homo sapien
cctgtgcacctcgtggtagaactct

SEQ ID NO: 43065 - DNA, 25 bp, Homo sapien
ccctcctgcaggagagcaaagttga

SEQ ID NO: 43066 - DNA, 25 bp, Homo sapien
gcgtgaagctgcatgtgatgataat

SEQ ID NO: 43067 - DNA, 25 bp, Homo sapien
tgtctgtgttctggcggccccattc

SEQ ID NO: 43068 - DNA, 25 bp, Homo sapien
ttggggtcatgccgaacacccatga

SEQ ID NO: 43069 - DNA, 25 bp, Homo sapien
tcccaagatgggttgtcagccatga

SEQ ID NO: 43070 - DNA, 25 bp, Homo sapien
atgaagttgtagttccacgaggact

SEQ ID NO: 43071 - DNA, 25 bp, Homo sapien
atgaagttgtagttccacgaggact

SEQ ID NO: 43072 - DNA, 25 bp, Homo sapien
aactgctgaatgtcagcggcctgtc

SEQ ID NO: 43073 - DNA, 25 bp, Homo sapien
gatccgcagagtaaacctccccctc

SEQ ID NO: 43074 - DNA, 25 bp, Homo sapien
cctgtgcacctcgtggtagaactct

SEQ ID NO: 43075 - DNA, 25 bp, Homo sapien
actctttggggttcgccagctgtag

SEQ ID NO: 43076 - DNA, 25 bp, Homo sapien
ccctcctgcaggagagcaaagttga

SEQ ID NO: 43077 - DNA, 25 bp, Homo sapien
gcgtgaagctgcatgtgatgataat

SEQ ID NO: 43078 - DNA, 25 bp, Homo sapien
tgtctgtgttctggcggccccattc

SEQ ID NO: 43079 - DNA, 25 bp, Homo sapien
gtcaggcatacaggtcctcccgatc

SEQ ID NO: 43080 - DNA, 25 bp, Homo sapien
ttggggtcatgccgaacacccatga

SEQ ID NO: 43081 - DNA, 25 bp, Homo sapien
tcccaagatgggttgtcagccatga

SEQ ID NO: 43082 - DNA, 25 bp, Homo sapien
actctttggggttcgccagctgtag

SEQ ID NO: 43083 - DNA, 25 bp, Homo sapien
aactgctgaatgtcagcggcctgtc

SEQ ID NO: 43084 - DNA, 25 bp, Homo sapien
cctgtgcacctcgtggtagaactct

SEQ ID NO: 43085 - DNA, 25 bp, Homo sapien
ccctcctgcaggagagcaaagttga

SEQ ID NO: 43086 - DNA, 25 bp, Homo sapien
gcgtgaagctgcatgtgatgataat

SEQ ID NO: 43087 - DNA, 25 bp, Homo sapien
tgtctgtgttctggcggccccattc

SEQ ID NO: 43088 - DNA, 25 bp, Homo sapien
gtcaggcatacaggtcctcccgatc

SEQ ID NO: 43089 - DNA, 25 bp, Homo sapien
ttggggtcatgccgaacacccatga

SEQ ID NO: 43090 - DNA, 25 bp, Homo sapien
atgaagttgtagttccacgaggact

SEQ ID NO: 43091 - DNA, 25 bp, Homo sapien
tcccaagatgggttgtcagccatga

SEQ ID NO: 43092 - DNA, 25 bp, Homo sapien
gatccgcagagtaaacctccccctc

SEQ ID NO: 43093 - DNA, 25 bp, Homo sapien
atgaagttgtagttccacgaggact

SEQ ID NO: 43094 - DNA, 25 bp, Homo sapien
actctttggggttcgccagctgtag

SEQ ID NO: 43095 - DNA, 25 bp, Homo sapien
cctgtgcacctcgtggtagaactct

SEQ ID NO: 43096 - DNA, 25 bp, Homo sapien
aactgctgaatgtcagcggcctgtc

SEQ ID NO: 43097 - DNA, 25 bp, Homo sapien
ccctcctgcaggagagcaaagttga

SEQ ID NO: 43098 - DNA, 25 bp, Homo sapien
gatccgcagagtaaacctccccctc

SEQ ID NO: 43099 - DNA, 25 bp, Homo sapien
gcgtgaagctgcatgtgatgataat

SEQ ID NO: 43100 - DNA, 25 bp, Homo sapien
tgtctgtgttctggcggccccattc

SEQ ID NO: 43101 - DNA, 25 bp, Homo sapien
gtcaggcatacaggtcctcccgatc

SEQ ID NO: 43102 - DNA, 25 bp, Homo sapien
ttggggtcatgccgaacacccatga

SEQ ID NO: 43103 - DNA, 25 bp, Homo sapien
tcccaagatgggttgtcagccatga

SEQ ID NO: 43104 - DNA, 25 bp, Homo sapien
actctttggggttcgccagctgtag

SEQ ID NO: 43105 - DNA, 25 bp, Homo sapien
aactgctgaatgtcagcggcctgtc

SEQ ID NO: 43106 - DNA, 25 bp, Homo sapien
cctgtgcacctcgtggtagaactct

SEQ ID NO: 43107 - DNA, 25 bp, Homo sapien
ccctcctgcaggagagcaaagttga

SEQ ID NO: 43108 - DNA, 25 bp, Homo sapien
gatccgcagagtaaacctccccctc

SEQ ID NO: 43109 - DNA, 25 bp, Homo sapien
gcgtgaagctgcatgtgatgataat

SEQ ID NO: 43110 - DNA, 25 bp, Homo sapien
tgtctgtgttctggcggccccattc

SEQ ID NO: 43111 - DNA, 25 bp, Homo sapien
ttggggtcatgccgaacacccatga

SEQ ID NO: 43112 - DNA, 25 bp, Homo sapien
gtcaggcatacaggtcctcccgatc

SEQ ID NO: 43113 - DNA, 25 bp, Homo sapien
atgaagttgtagttccacgaggact

SEQ ID NO: 43114 - DNA, 25 bp, Homo sapien
tcccaagatgggttgtcagccatga

SEQ ID NO: 43115 - DNA, 25 bp, Homo sapien
actctttggggttcgccagctgtag

SEQ ID NO: 43116 - DNA, 25 bp, Homo sapien
ttggggtcatgccgaacacccatga

SEQ ID NO: 43117 - DNA, 25 bp, Homo sapien
gatccgcagagtaaacctccccctc

SEQ ID NO: 43118 - DNA, 25 bp, Homo sapien
tgtctgtgttctggcggccccattc

SEQ ID NO: 43119 - DNA, 25 bp, Homo sapien
ccctcctgcaggagagcaaagttga

SEQ ID NO: 43120 - DNA, 25 bp, Homo sapien
gtcaggcatacaggtcctcccgatc

SEQ ID NO: 43121 - DNA, 25 bp, Homo sapien
cctgtgcacctcgtggtagaactct

SEQ ID NO: 43122 - DNA, 25 bp, Homo sapien
atgaagttgtagttccacgaggact

SEQ ID NO: 43123 - DNA, 25 bp, Homo sapien
gcgtgaagctgcatgtgatgataat

SEQ ID NO: 43124 - DNA, 25 bp, Homo sapien
aactgctgaatgtcagcggcctgtc

SEQ ID NO: 43125 - DNA, 25 bp, Homo sapien
tcccaagatgggttgtcagccatga

SEQ ID NO: 43126 - DNA, 25 bp, Homo sapien
actctttggggttcgccagctgtag

SEQ ID NO: 43127 - DNA, 25 bp, Homo sapien
cctgtgcacctcgtggtagaactct

SEQ ID NO: 43128 - DNA, 25 bp, Homo sapien
gtcaggcatacaggtcctcccgatc

SEQ ID NO: 43129 - DNA, 25 bp, Homo sapien
aactgctgaatgtcagcggcctgtc

SEQ ID NO: 43130 - DNA, 25 bp, Homo sapien
atgaagttgtagttccacgaggact

SEQ ID NO: 43131 - DNA, 25 bp, Homo sapien
gatccgcagagtaaacctccccctc

SEQ ID NO: 43132 - DNA, 25 bp, Homo sapien
ccctcctgcaggagagcaaagttga

SEQ ID NO: 43133 - DNA, 25 bp, Homo sapien
gcgtgaagctgcatgtgatgataat

SEQ ID NO: 43134 - DNA, 25 bp, Homo sapien
tgtctgtgttctggcggccccattc

SEQ ID NO: 43135 - DNA, 25 bp, Homo sapien
ttggggtcatgccgaacacccatga

SEQ ID NO: 43136 - DNA, 25 bp, Homo sapien
tcccaagatgggttgtcagccatga

SEQ ID NO: 43137 - DNA, 25 bp, Homo sapien
tcccaagatgggttgtcagccatga

SEQ ID NO: 43138 - DNA, 25 bp, Homo sapien
gcgtgaagctgcatgtgatgataat

SEQ ID NO: 43139 - DNA, 25 bp, Homo sapien
tgtctgtgttctggcggccccattc

SEQ ID NO: 43140 - DNA, 25 bp, Homo sapien
atgaagttgtagttccacgaggact

SEQ ID NO: 43141 - DNA, 25 bp, Homo sapien
ttggggtcatgccgaacacccatga

SEQ ID NO: 43142 - DNA, 25 bp, Homo sapien
actctttggggttcgccagctgtag

SEQ ID NO: 43143 - DNA, 25 bp, Homo sapien
cctgtgcacctcgtggtagaactct

SEQ ID NO: 43144 - DNA, 25 bp, Homo sapien
ccctcctgcaggagagcaaagttga

SEQ ID NO: 43145 - DNA, 25 bp, Homo sapien
gatccgcagagtaaacctccccctc

SEQ ID NO: 43146 - DNA, 25 bp, Homo sapien
gtcaggcatacaggtcctcccgatc

SEQ ID NO: 43147 - DNA, 25 bp, Homo sapien
aactgctgaatgtcagcggcctgtc

SEQ ID NO: 43148 - DNA, 25 bp, Homo sapien
gagggggaggtttactctgcggatc

SEQ ID NO: 43149 - DNA, 25 bp, Homo sapien
attatcatcacatgcagcttcacgc

SEQ ID NO: 43150 - DNA, 25 bp, Homo sapien
tcatggctgacaacccatcttggga

SEQ ID NO: 43151 - DNA, 25 bp, Homo sapien
ctacagctggcgaaccccaaagagt

SEQ ID NO: 43152 - DNA, 25 bp, Homo sapien
gacaggccgctgacattcagcagtt

SEQ ID NO: 43153 - DNA, 25 bp, Homo sapien
agtcctcgtggaactacaacttcat

SEQ ID NO: 43154 - DNA, 25 bp, Homo sapien
tcatgggtgttcggcatgaccccaa

SEQ ID NO: 43155 - DNA, 25 bp, Homo sapien
agagttctaccacgaggtgcacagg

SEQ ID NO: 43156 - DNA, 25 bp, Homo sapien
gatcgggaggacctgtatgcctgac

SEQ ID NO: 43157 - DNA, 25 bp, Homo sapien
gaatggggccgccagaacacagaca

SEQ ID NO: 43158 - DNA, 25 bp, Homo sapien
tcaactttgctctcctgcaggaggg

SEQ ID NO: 43159 - DNA, 25 bp, Homo sapien
gtcaggcatacaggtcctcccgatc

SEQ ID NO: 43160 - DNA, 25 bp, Homo sapien
actctttggggttcgccagctgtag

SEQ ID NO: 43161 - DNA, 25 bp, Homo sapien
aactgctgaatgtcagcggcctgtc

SEQ ID NO: 43162 - DNA, 25 bp, Homo sapien
atgaagttgtagttccacgaggact

SEQ ID NO: 43163 - DNA, 25 bp, Homo sapien
cctgtgcacctcgtggtagaactct

SEQ ID NO: 43164 - DNA, 25 bp, Homo sapien
ccctcctgcaggagagcaaagttga

SEQ ID NO: 43165 - DNA, 25 bp, Homo sapien
gcgtgaagctgcatgtgatgataat

SEQ ID NO: 43166 - DNA, 25 bp, Homo sapien
tgtctgtgttctggcggccccattc

SEQ ID NO: 43167 - DNA, 25 bp, Homo sapien
ttggggtcatgccgaacacccatga

SEQ ID NO: 43168 - DNA, 25 bp, Homo sapien
gatccgcagagtaaacctccccctc

SEQ ID NO: 43169 - DNA, 25 bp, Homo sapien
tcccaagatgggttgtcagccatga

SEQ ID NO: 43170 - DNA, 25 bp, Homo sapien
tcccaagatgggttgtcagccatga

SEQ ID NO: 43171 - DNA, 25 bp, Homo sapien
gcgtgaagctgcatgtgatgataat

SEQ ID NO: 43172 - DNA, 25 bp, Homo sapien
atgaagttgtagttccacgaggact

SEQ ID NO: 43173 - DNA, 25 bp, Homo sapien
tgtctgtgttctggcggccccattc

SEQ ID NO: 43174 - DNA, 25 bp, Homo sapien
cctgtgcacctcgtggtagaactct

SEQ ID NO: 43175 - DNA, 25 bp, Homo sapien
ccctcctgcaggagagcaaagttga

SEQ ID NO: 43176 - DNA, 25 bp, Homo sapien
gtcaggcatacaggtcctcccgatc

SEQ ID NO: 43177 - DNA, 25 bp, Homo sapien
aactgctgaatgtcagcggcctgtc

SEQ ID NO: 43178 - DNA, 25 bp, Homo sapien
actctttggggttcgccagctgtag

SEQ ID NO: 43179 - DNA, 25 bp, Homo sapien
gatccgcagagtaaacctccccctc

SEQ ID NO: 43180 - DNA, 25 bp, Homo sapien
ttggggtcatgccgaacacccatga

SEQ ID NO: 43181 - DNA, 25 bp, Homo sapien
tcccaagatgggttgtcagccatga

SEQ ID NO: 43182 - DNA, 25 bp, Homo sapien
gcgtgaagctgcatgtgatgataat

SEQ ID NO: 43183 - DNA, 25 bp, Homo sapien
tgtctgtgttctggcggccccattc

SEQ ID NO: 43184 - DNA, 25 bp, Homo sapien
atgaagttgtagttccacgaggact

SEQ ID NO: 43185 - DNA, 25 bp, Homo sapien
ttggggtcatgccgaacacccatga

SEQ ID NO: 43186 - DNA, 25 bp, Homo sapien
actctttggggttcgccagctgtag

SEQ ID NO: 43187 - DNA, 25 bp, Homo sapien
cctgtgcacctcgtggtagaactct

SEQ ID NO: 43188 - DNA, 25 bp, Homo sapien
ccctcctgcaggagagcaaagttga

SEQ ID NO: 43189 - DNA, 25 bp, Homo sapien
gatccgcagagtaaacctccccctc

SEQ ID NO: 43190 - DNA, 25 bp, Homo sapien
gtcaggcatacaggtcctcccgatc

SEQ ID NO: 43191 - DNA, 25 bp, Homo sapien
aactgctgaatgtcagcggcctgtc

SEQ ID NO: 43192 - DNA, 25 bp, Homo sapien
aactgctgaatgtcagcggcctgtc

SEQ ID NO: 43193 - DNA, 25 bp, Homo sapien
tcccaagatgggttgtcagccatga

SEQ ID NO: 43194 - DNA, 25 bp, Homo sapien
tgtctgtgttctggcggccccattc

SEQ ID NO: 43195 - DNA, 25 bp, Homo sapien
atgaagttgtagttccacgaggact

SEQ ID NO: 43196 - DNA, 25 bp, Homo sapien
gcgtgaagctgcatgtgatgataat

SEQ ID NO: 43197 - DNA, 25 bp, Homo sapien
actctttggggttcgccagctgtag

SEQ ID NO: 43198 - DNA, 25 bp, Homo sapien
ccctcctgcaggagagcaaagttga

SEQ ID NO: 43199 - DNA, 25 bp, Homo sapien
ttggggtcatgccgaacacccatga

SEQ ID NO: 43200 - DNA, 25 bp, Homo sapien
cctgtgcacctcgtggtagaactct

SEQ ID NO: 43201 - DNA, 25 bp, Homo sapien
gatccgcagagtaaacctccccctc

SEQ ID NO: 43202 - DNA, 25 bp, Homo sapien
gtcaggcatacaggtcctcccgatc

SEQ ID NO: 43203 - DNA, 25 bp, Homo sapien
tcccaagatgggttgtcagccatga

SEQ ID NO: 43204 - DNA, 25 bp, Homo sapien
gcgtgaagctgcatgtgatgataat

SEQ ID NO: 43205 - DNA, 25 bp, Homo sapien
tgtctgtgttctggcggccccattc

SEQ ID NO: 43206 - DNA, 25 bp, Homo sapien
atgaagttgtagttccacgaggact

SEQ ID NO: 43207 - DNA, 25 bp, Homo sapien
ttggggtcatgccgaacacccatga

SEQ ID NO: 43208 - DNA, 25 bp, Homo sapien
actctttggggttcgccagctgtag

SEQ ID NO: 43209 - DNA, 25 bp, Homo sapien
cctgtgcacctcgtggtagaactct

SEQ ID NO: 43210 - DNA, 25 bp, Homo sapien
ccctcctgcaggagagcaaagttga

SEQ ID NO: 43211 - DNA, 25 bp, Homo sapien
gatccgcagagtaaacctccccctc

SEQ ID NO: 43212 - DNA, 25 bp, Homo sapien
gtcaggcatacaggtcctcccgatc

SEQ ID NO: 43213 - DNA, 25 bp, Homo sapien
aactgctgaatgtcagcggcctgtc

SEQ ID NO: 43214 - DNA, 25 bp, Homo sapien
ttggggtcatgccgaacacccatga

SEQ ID NO: 43215 - DNA, 25 bp, Homo sapien
actctttggggttcgccagctgtag

SEQ ID NO: 43216 - DNA, 25 bp, Homo sapien
gtcaggcatacaggtcctcccgatc

SEQ ID NO: 43217 - DNA, 25 bp, Homo sapien
ccctcctgcaggagagcaaagttga

SEQ ID NO: 43218 - DNA, 25 bp, Homo sapien
tcccaagatgggttgtcagccatga

SEQ ID NO: 43219 - DNA, 25 bp, Homo sapien
cctgtgcacctcgtggtagaactct

SEQ ID NO: 43220 - DNA, 25 bp, Homo sapien
atgaagttgtagttccacgaggact

SEQ ID NO: 43221 - DNA, 25 bp, Homo sapien
aactgctgaatgtcagcggcctgtc

SEQ ID NO: 43222 - DNA, 25 bp, Homo sapien
gatccgcagagtaaacctccccctc

SEQ ID NO: 43223 - DNA, 25 bp, Homo sapien
tgtctgtgttctggcggccccattc

SEQ ID NO: 43224 - DNA, 25 bp, Homo sapien
gcgtgaagctgcatgtgatgataat

SEQ ID NO: 43225 - DNA, 25 bp, Homo sapien
tcccaagatgggttgtcagccatga

SEQ ID NO: 43226 - DNA, 25 bp, Homo sapien
gcgtgaagctgcatgtgatgataat

SEQ ID NO: 43227 - DNA, 25 bp, Homo sapien
tgtctgtgttctggcggccccattc

SEQ ID NO: 43228 - DNA, 25 bp, Homo sapien
atgaagttgtagttccacgaggact

SEQ ID NO: 43229 - DNA, 25 bp, Homo sapien
ttggggtcatgccgaacacccatga

SEQ ID NO: 43230 - DNA, 25 bp, Homo sapien
actctttggggttcgccagctgtag

SEQ ID NO: 43231 - DNA, 25 bp, Homo sapien
cctgtgcacctcgtggtagaactct

SEQ ID NO: 43232 - DNA, 25 bp, Homo sapien
ccctcctgcaggagagcaaagttga

SEQ ID NO: 43233 - DNA, 25 bp, Homo sapien
gatccgcagagtaaacctccccctc

SEQ ID NO: 43234 - DNA, 25 bp, Homo sapien
gtcaggcatacaggtcctcccgatc

SEQ ID NO: 43235 - DNA, 25 bp, Homo sapien
aactgctgaatgtcagcggcctgtc

SEQ ID NO: 43236 - DNA, 25 bp, Homo sapien
tcccaagatgggttgtcagccatga

SEQ ID NO: 43237 - DNA, 25 bp, Homo sapien
gcgtgaagctgcatgtgatgataat

SEQ ID NO: 43238 - DNA, 25 bp, Homo sapien
tgtctgtgttctggcggccccattc

SEQ ID NO: 43239 - DNA, 25 bp, Homo sapien
atgaagttgtagttccacgaggact

SEQ ID NO: 43240 - DNA, 25 bp, Homo sapien
ttggggtcatgccgaacacccatga

SEQ ID NO: 43241 - DNA, 25 bp, Homo sapien
actctttggggttcgccagctgtag

SEQ ID NO: 43242 - DNA, 25 bp, Homo sapien
cctgtgcacctcgtggtagaactct

SEQ ID NO: 43243 - DNA, 25 bp, Homo sapien
ccctcctgcaggagagcaaagttga

SEQ ID NO: 43244 - DNA, 25 bp, Homo sapien
gatccgcagagtaaacctccccctc

SEQ ID NO: 43245 - DNA, 25 bp, Homo sapien
gtcaggcatacaggtcctcccgatc

SEQ ID NO: 43246 - DNA, 25 bp, Homo sapien
aactgctgaatgtcagcggcctgtc

SEQ ID NO: 43247 - DNA, 25 bp, Homo sapien
aactgctgaatgtcagcggcctgtc

SEQ ID NO: 43248 - DNA, 25 bp, Homo sapien
tcccaagatgggttgtcagccatga

SEQ ID NO: 43249 - DNA, 25 bp, Homo sapien
gcgtgaagctgcatgtgatgataat

SEQ ID NO: 43250 - DNA, 25 bp, Homo sapien
ttggggtcatgccgaacacccatga

SEQ ID NO: 43251 - DNA, 25 bp, Homo sapien
tgtctgtgttctggcggccccattc

SEQ ID NO: 43252 - DNA, 25 bp, Homo sapien
gatccgcagagtaaacctccccctc

SEQ ID NO: 43253 - DNA, 25 bp, Homo sapien
atgaagttgtagttccacgaggact

SEQ ID NO: 43254 - DNA, 25 bp, Homo sapien
ccctcctgcaggagagcaaagttga

SEQ ID NO: 43255 - DNA, 25 bp, Homo sapien
cctgtgcacctcgtggtagaactct

SEQ ID NO: 43256 - DNA, 25 bp, Homo sapien
gtcaggcatacaggtcctcccgatc

SEQ ID NO: 43257 - DNA, 25 bp, Homo sapien
actctttggggttcgccagctgtag

SEQ ID NO: 43258 - DNA, 25 bp, Homo sapien
tcccaagatgggttgtcagccatga

SEQ ID NO: 43259 - DNA, 25 bp, Homo sapien
gcgtgaagctgcatgtgatgataat

SEQ ID NO: 43260 - DNA, 25 bp, Homo sapien
tgtctgtgttctggcggccccattc

SEQ ID NO: 43261 - DNA, 25 bp, Homo sapien
atgaagttgtagttccacgaggact

SEQ ID NO: 43262 - DNA, 25 bp, Homo sapien
ttggggtcatgccgaacacccatga

SEQ ID NO: 43263 - DNA, 25 bp, Homo sapien
actctttggggttcgccagctgtag

SEQ ID NO: 43264 - DNA, 25 bp, Homo sapien
cctgtgcacctcgtggtagaactct

SEQ ID NO: 43265 - DNA, 25 bp, Homo sapien
ccctcctgcaggagagcaaagttga

SEQ ID NO: 43266 - DNA, 25 bp, Homo sapien
gatccgcagagtaaacctccccctc

SEQ ID NO: 43267 - DNA, 25 bp, Homo sapien
gtcaggcatacaggtcctcccgatc

SEQ ID NO: 43268 - DNA, 25 bp, Homo sapien
aactgctgaatgtcagcggcctgtc

SEQ ID NO: 43269 - DNA, 25 bp, Homo sapien
cctgtgcacctcgtggtagaactct

SEQ ID NO: 43270 - DNA, 25 bp, Homo sapien
ttggggtcatgccgaacacccatga

SEQ ID NO: 43271 - DNA, 25 bp, Homo sapien
aactgctgaatgtcagcggcctgtc

SEQ ID NO: 43272 - DNA, 25 bp, Homo sapien
gtcaggcatacaggtcctcccgatc

SEQ ID NO: 43273 - DNA, 25 bp, Homo sapien
gatccgcagagtaaacctccccctc

SEQ ID NO: 43274 - DNA, 25 bp, Homo sapien
tgtctgtgttctggcggccccattc

SEQ ID NO: 43275 - DNA, 25 bp, Homo sapien
ccctcctgcaggagagcaaagttga

SEQ ID NO: 43276 - DNA, 25 bp, Homo sapien
tcccaagatgggttgtcagccatga

SEQ ID NO: 43277 - DNA, 25 bp, Homo sapien
gcgtgaagctgcatgtgatgataat

SEQ ID NO: 43278 - DNA, 25 bp, Homo sapien
atgaagttgtagttccacgaggact

SEQ ID NO: 43279 - DNA, 25 bp, Homo sapien
actctttggggttcgccagctgtag

SEQ ID NO: 43280 - DNA, 25 bp, Homo sapien
tcccaagatgggttgtcagccatga

SEQ ID NO: 43281 - DNA, 25 bp, Homo sapien
gcgtgaagctgcatgtgatgataat

SEQ ID NO: 43282 - DNA, 25 bp, Homo sapien
tgtctgtgttctggcggccccattc

SEQ ID NO: 43283 - DNA, 25 bp, Homo sapien
atgaagttgtagttccacgaggact

SEQ ID NO: 43284 - DNA, 25 bp, Homo sapien
ttggggtcatgccgaacacccatga

SEQ ID NO: 43285 - DNA, 25 bp, Homo sapien
actctttggggttcgccagctgtag

SEQ ID NO: 43286 - DNA, 25 bp, Homo sapien
cctgtgcacctcgtggtagaactct

SEQ ID NO: 43287 - DNA, 25 bp, Homo sapien
ccctcctgcaggagagcaaagttga

SEQ ID NO: 43288 - DNA, 25 bp, Homo sapien
gatccgcagagtaaacctccccctc

SEQ ID NO: 43289 - DNA, 25 bp, Homo sapien
gtcaggcatacaggtcctcccgatc

SEQ ID NO: 43290 - DNA, 25 bp, Homo sapien
aactgctgaatgtcagcggcctgtc

SEQ ID NO: 43291 - DNA, 25 bp, Homo sapien
tcccaagatgggttgtcagccatga

SEQ ID NO: 43292 - DNA, 25 bp, Homo sapien
aactgctgaatgtcagcggcctgtc

SEQ ID NO: 43293 - DNA, 25 bp, Homo sapien
ttggggtcatgccgaacacccatga

SEQ ID NO: 43294 - DNA, 25 bp, Homo sapien
gatccgcagagtaaacctccccctc

SEQ ID NO: 43295 - DNA, 25 bp, Homo sapien
ccctcctgcaggagagcaaagttga

SEQ ID NO: 43296 - DNA, 25 bp, Homo sapien
cctgtgcacctcgtggtagaactct

SEQ ID NO: 43297 - DNA, 25 bp, Homo sapien
gtcaggcatacaggtcctcccgatc

SEQ ID NO: 43298 - DNA, 25 bp, Homo sapien
actctttggggttcgccagctgtag

SEQ ID NO: 43299 - DNA, 25 bp, Homo sapien
tgtctgtgttctggcggccccattc

SEQ ID NO: 43300 - DNA, 25 bp, Homo sapien
atgaagttgtagttccacgaggact

SEQ ID NO: 43301 - DNA, 25 bp, Homo sapien
gcgtgaagctgcatgtgatgataat

SEQ ID NO: 43302 - DNA, 25 bp, Homo sapien
tcccaagatgggttgtcagccatga

SEQ ID NO: 43303 - DNA, 25 bp, Homo sapien
gcgtgaagctgcatgtgatgataat

SEQ ID NO: 43304 - DNA, 25 bp, Homo sapien
tgtctgtgttctggcggccccattc

SEQ ID NO: 43305 - DNA, 25 bp, Homo sapien
atgaagttgtagttccacgaggact

SEQ ID NO: 43306 - DNA, 25 bp, Homo sapien
ttggggtcatgccgaacacccatga

SEQ ID NO: 43307 - DNA, 25 bp, Homo sapien
actctttggggttcgccagctgtag

SEQ ID NO: 43308 - DNA, 25 bp, Homo sapien
cctgtgcacctcgtggtagaactct

SEQ ID NO: 43309 - DNA, 25 bp, Homo sapien
ccctcctgcaggagagcaaagttga

SEQ ID NO: 43310 - DNA, 25 bp, Homo sapien
gatccgcagagtaaacctccccctc

SEQ ID NO: 43311 - DNA, 25 bp, Homo sapien
gtcaggcatacaggtcctcccgatc

SEQ ID NO: 43312 - DNA, 25 bp, Homo sapien
aactgctgaatgtcagcggcctgtc

SEQ ID NO: 43313 - DNA, 25 bp, Homo sapien
ccctcctgcaggagagcaaagttga

SEQ ID NO: 43314 - DNA, 25 bp, Homo sapien
ttggggtcatgccgaacacccatga

SEQ ID NO: 43315 - DNA, 25 bp, Homo sapien
cctgtgcacctcgtggtagaactct

SEQ ID NO: 43316 - DNA, 25 bp, Homo sapien
tcccaagatgggttgtcagccatga

SEQ ID NO: 43317 - DNA, 25 bp, Homo sapien
gtcaggcatacaggtcctcccgatc

SEQ ID NO: 43318 - DNA, 25 bp, Homo sapien
aactgctgaatgtcagcggcctgtc

SEQ ID NO: 43319 - DNA, 25 bp, Homo sapien
gcgtgaagctgcatgtgatgataat

SEQ ID NO: 43320 - DNA, 25 bp, Homo sapien
gatccgcagagtaaacctccccctc

SEQ ID NO: 43321 - DNA, 25 bp, Homo sapien
atgaagttgtagttccacgaggact

SEQ ID NO: 43322 - DNA, 25 bp, Homo sapien
tgtctgtgttctggcggccccattc

SEQ ID NO: 43323 - DNA, 25 bp, Homo sapien
actctttggggttcgccagctgtag

SEQ ID NO: 43324 - DNA, 25 bp, Homo sapien
tcccaagatgggttgtcagccatga

SEQ ID NO: 43325 - DNA, 25 bp, Homo sapien
gcgtgaagctgcatgtgatgataat

SEQ ID NO: 43326 - DNA, 25 bp, Homo sapien
tgtctgtgttctggcggccccattc

SEQ ID NO: 43327 - DNA, 25 bp, Homo sapien
atgaagttgtagttccacgaggact

SEQ ID NO: 43328 - DNA, 25 bp, Homo sapien
ttggggtcatgccgaacacccatga

SEQ ID NO: 43329 - DNA, 25 bp, Homo sapien
actctttggggttcgccagctgtag

SEQ ID NO: 43330 - DNA, 25 bp, Homo sapien
cctgtgcacctcgtggtagaactct

SEQ ID NO: 43331 - DNA, 25 bp, Homo sapien
ccctcctgcaggagagcaaagttga

SEQ ID NO: 43332 - DNA, 25 bp, Homo sapien
gatccgcagagtaaacctccccctc

SEQ ID NO: 43333 - DNA, 25 bp, Homo sapien
gtcaggcatacaggtcctcccgatc

SEQ ID NO: 43334 - DNA, 25 bp, Homo sapien
aactgctgaatgtcagcggcctgtc

SEQ ID NO: 43335 - DNA, 25 bp, Homo sapien
gtcaggcatacaggtcctcccgatc

SEQ ID NO: 43336 - DNA, 25 bp, Homo sapien
ttggggtcatgccgaacacccatga

SEQ ID NO: 43337 - DNA, 25 bp, Homo sapien
ccctcctgcaggagagcaaagttga

SEQ ID NO: 43338 - DNA, 25 bp, Homo sapien
gatccgcagagtaaacctccccctc

SEQ ID NO: 43339 - DNA, 25 bp, Homo sapien
gcgtgaagctgcatgtgatgataat

SEQ ID NO: 43340 - DNA, 25 bp, Homo sapien
tcccaagatgggttgtcagccatga

SEQ ID NO: 43341 - DNA, 25 bp, Homo sapien
atgaagttgtagttccacgaggact

SEQ ID NO: 43342 - DNA, 25 bp, Homo sapien
aactgctgaatgtcagcggcctgtc

SEQ ID NO: 43343 - DNA, 25 bp, Homo sapien
tgtctgtgttctggcggccccattc

SEQ ID NO: 43344 - DNA, 25 bp, Homo sapien
actctttggggttcgccagctgtag

SEQ ID NO: 43345 - DNA, 25 bp, Homo sapien
cctgtgcacctcgtggtagaactct

SEQ ID NO: 43346 - DNA, 25 bp, Homo sapien
tgtctgtgttctggcggccccattc

SEQ ID NO: 43347 - DNA, 25 bp, Homo sapien
gcgtgaagctgcatgtgatgataat

SEQ ID NO: 43348 - DNA, 25 bp, Homo sapien
ccctcctgcaggagagcaaagttga

SEQ ID NO: 43349 - DNA, 25 bp, Homo sapien
cctgtgcacctcgtggtagaactct

SEQ ID NO: 43350 - DNA, 25 bp, Homo sapien
tcccaagatgggttgtcagccatga

SEQ ID NO: 43351 - DNA, 25 bp, Homo sapien
gatccgcagagtaaacctccccctc

SEQ ID NO: 43352 - DNA, 25 bp, Homo sapien
ttggggtcatgccgaacacccatga

SEQ ID NO: 43353 - DNA, 25 bp, Homo sapien
atgaagttgtagttccacgaggact

SEQ ID NO: 43354 - DNA, 25 bp, Homo sapien
actctttggggttcgccagctgtag

SEQ ID NO: 43355 - DNA, 25 bp, Homo sapien
gtcaggcatacaggtcctcccgatc

SEQ ID NO: 43356 - DNA, 25 bp, Homo sapien
aactgctgaatgtcagcggcctgtc

SEQ ID NO: 43357 - DNA, 25 bp, Homo sapien
tcccaagatgggttgtcagccatga

SEQ ID NO: 43358 - DNA, 25 bp, Homo sapien
gcgtgaagctgcatgtgatgataat

SEQ ID NO: 43359 - DNA, 25 bp, Homo sapien
tgtctgtgttctggcggccccattc

SEQ ID NO: 43360 - DNA, 25 bp, Homo sapien
atgaagttgtagttccacgaggact

SEQ ID NO: 43361 - DNA, 25 bp, Homo sapien
ttggggtcatgccgaacacccatga

SEQ ID NO: 43362 - DNA, 25 bp, Homo sapien
actctttggggttcgccagctgtag

SEQ ID NO: 43363 - DNA, 25 bp, Homo sapien
cctgtgcacctcgtggtagaactct

SEQ ID NO: 43364 - DNA, 25 bp, Homo sapien
ccctcctgcaggagagcaaagttga

SEQ ID NO: 43365 - DNA, 25 bp, Homo sapien
gatccgcagagtaaacctccccctc

SEQ ID NO: 43366 - DNA, 25 bp, Homo sapien
gtcaggcatacaggtcctcccgatc

SEQ ID NO: 43367 - DNA, 25 bp, Homo sapien
aactgctgaatgtcagcggcctgtc

SEQ ID NO: 43368 - DNA, 25 bp, Homo sapien
ttggggtcatgccgaacacccatga

SEQ ID NO: 43369 - DNA, 25 bp, Homo sapien
atgaagttgtagttccacgaggact

SEQ ID NO: 43370 - DNA, 25 bp, Homo sapien
gtcaggcatacaggtcctcccgatc

SEQ ID NO: 43371 - DNA, 25 bp, Homo sapien
ccctcctgcaggagagcaaagttga

SEQ ID NO: 43372 - DNA, 25 bp, Homo sapien
gcgtgaagctgcatgtgatgataat

SEQ ID NO: 43373 - DNA, 25 bp, Homo sapien
actctttggggttcgccagctgtag

SEQ ID NO: 43374 - DNA, 25 bp, Homo sapien
cctgtgcacctcgtggtagaactct

SEQ ID NO: 43375 - DNA, 25 bp, Homo sapien
tgtctgtgttctggcggccccattc

SEQ ID NO: 43376 - DNA, 25 bp, Homo sapien
aactgctgaatgtcagcggcctgtc

SEQ ID NO: 43377 - DNA, 25 bp, Homo sapien
gatccgcagagtaaacctccccctc

SEQ ID NO: 43378 - DNA, 25 bp, Homo sapien
tcccaagatgggttgtcagccatga

SEQ ID NO: 43379 - DNA, 25 bp, Homo sapien
tcccaagatgggttgtcagccatga

SEQ ID NO: 43380 - DNA, 25 bp, Homo sapien
gcgtgaagctgcatgtgatgataat

SEQ ID NO: 43381 - DNA, 25 bp, Homo sapien
tgtctgtgttctggcggccccattc

SEQ ID NO: 43382 - DNA, 25 bp, Homo sapien
atgaagttgtagttccacgaggact

SEQ ID NO: 43383 - DNA, 25 bp, Homo sapien
ttggggtcatgccgaacacccatga

SEQ ID NO: 43384 - DNA, 25 bp, Homo sapien
actctttggggttcgccagctgtag

SEQ ID NO: 43385 - DNA, 25 bp, Homo sapien
cctgtgcacctcgtggtagaactct

SEQ ID NO: 43386 - DNA, 25 bp, Homo sapien
ccctcctgcaggagagcaaagttga

SEQ ID NO: 43387 - DNA, 25 bp, Homo sapien
gatccgcagagtaaacctccccctc

SEQ ID NO: 43388 - DNA, 25 bp, Homo sapien
gtcaggcatacaggtcctcccgatc

SEQ ID NO: 43389 - DNA, 25 bp, Homo sapien
aactgctgaatgtcagcggcctgtc

SEQ ID NO: 43390 - DNA, 25 bp, Homo sapien
tgtctgtgttctggcggccccattc

SEQ ID NO: 43391 - DNA, 25 bp, Homo sapien
gtcaggcatacaggtcctcccgatc

SEQ ID NO: 43392 - DNA, 25 bp, Homo sapien
actctttggggttcgccagctgtag

SEQ ID NO: 43393 - DNA, 25 bp, Homo sapien
ccctcctgcaggagagcaaagttga

SEQ ID NO: 43394 - DNA, 25 bp, Homo sapien
aactgctgaatgtcagcggcctgtc

SEQ ID NO: 43395 - DNA, 25 bp, Homo sapien
gatccgcagagtaaacctccccctc

SEQ ID NO: 43396 - DNA, 25 bp, Homo sapien
cctgtgcacctcgtggtagaactct

SEQ ID NO: 43397 - DNA, 25 bp, Homo sapien
gcgtgaagctgcatgtgatgataat

SEQ ID NO: 43398 - DNA, 25 bp, Homo sapien
atgaagttgtagttccacgaggact

SEQ ID NO: 43399 - DNA, 25 bp, Homo sapien
tcccaagatgggttgtcagccatga

SEQ ID NO: 43400 - DNA, 25 bp, Homo sapien
ttggggtcatgccgaacacccatga

SEQ ID NO: 43401 - DNA, 25 bp, Homo sapien
tcccaagatgggttgtcagccatga

SEQ ID NO: 43402 - DNA, 25 bp, Homo sapien
gcgtgaagctgcatgtgatgataat

SEQ ID NO: 43403 - DNA, 25 bp, Homo sapien
tgtctgtgttctggcggccccattc

SEQ ID NO: 43404 - DNA, 25 bp, Homo sapien
atgaagttgtagttccacgaggact

SEQ ID NO: 43405 - DNA, 25 bp, Homo sapien
ttggggtcatgccgaacacccatga

SEQ ID NO: 43406 - DNA, 25 bp, Homo sapien
actctttggggttcgccagctgtag

SEQ ID NO: 43407 - DNA, 25 bp, Homo sapien
cctgtgcacctcgtggtagaactct

SEQ ID NO: 43408 - DNA, 25 bp, Homo sapien
ccctcctgcaggagagcaaagttga

SEQ ID NO: 43409 - DNA, 25 bp, Homo sapien
gatccgcagagtaaacctccccctc

SEQ ID NO: 43410 - DNA, 25 bp, Homo sapien
gtcaggcatacaggtcctcccgatc

SEQ ID NO: 43411 - DNA, 25 bp, Homo sapien
aactgctgaatgtcagcggcctgtc

SEQ ID NO: 43412 - DNA, 25 bp, Homo sapien
gatccgcagagtaaacctccccctc

SEQ ID NO: 43413 - DNA, 25 bp, Homo sapien
actctttggggttcgccagctgtag

SEQ ID NO: 43414 - DNA, 25 bp, Homo sapien
ttggggtcatgccgaacacccatga

SEQ ID NO: 43415 - DNA, 25 bp, Homo sapien
gcgtgaagctgcatgtgatgataat

SEQ ID NO: 43416 - DNA, 25 bp, Homo sapien
gtcaggcatacaggtcctcccgatc

SEQ ID NO: 43417 - DNA, 25 bp, Homo sapien
cctgtgcacctcgtggtagaactct

SEQ ID NO: 43418 - DNA, 25 bp, Homo sapien
ccctcctgcaggagagcaaagttga

SEQ ID NO: 43419 - DNA, 25 bp, Homo sapien
aactgctgaatgtcagcggcctgtc

SEQ ID NO: 43420 - DNA, 25 bp, Homo sapien
tcccaagatgggttgtcagccatga

SEQ ID NO: 43421 - DNA, 25 bp, Homo sapien
tgtctgtgttctggcggccccattc

SEQ ID NO: 43422 - DNA, 25 bp, Homo sapien
atgaagttgtagttccacgaggact

SEQ ID NO: 43423 - DNA, 25 bp, Homo sapien
tcccaagatgggttgtcagccatga

SEQ ID NO: 43424 - DNA, 25 bp, Homo sapien
gcgtgaagctgcatgtgatgataat

SEQ ID NO: 43425 - DNA, 25 bp, Homo sapien
tgtctgtgttctggcggccccattc

SEQ ID NO: 43426 - DNA, 25 bp, Homo sapien
atgaagttgtagttccacgaggact

SEQ ID NO: 43427 - DNA, 25 bp, Homo sapien
ttggggtcatgccgaacacccatga

SEQ ID NO: 43428 - DNA, 25 bp, Homo sapien
actctttggggttcgccagctgtag

SEQ ID NO: 43429 - DNA, 25 bp, Homo sapien
cctgtgcacctcgtggtagaactct

SEQ ID NO: 43430 - DNA, 25 bp, Homo sapien
ccctcctgcaggagagcaaagttga

SEQ ID NO: 43431 - DNA, 25 bp, Homo sapien
gatccgcagagtaaacctccccctc

SEQ ID NO: 43432 - DNA, 25 bp, Homo sapien
gtcaggcatacaggtcctcccgatc

SEQ ID NO: 43433 - DNA, 25 bp, Homo sapien
aactgctgaatgtcagcggcctgtc

SEQ ID NO: 43434 - DNA, 25 bp, Homo sapien
actctttggggttcgccagctgtag

SEQ ID NO: 43435 - DNA, 25 bp, Homo sapien
gatccgcagagtaaacctccccctc

SEQ ID NO: 43436 - DNA, 25 bp, Homo sapien
tcccaagatgggttgtcagccatga

SEQ ID NO: 43437 - DNA, 25 bp, Homo sapien
cctgtgcacctcgtggtagaactct

SEQ ID NO: 43438 - DNA, 25 bp, Homo sapien
gtcaggcatacaggtcctcccgatc

SEQ ID NO: 43439 - DNA, 25 bp, Homo sapien
atgaagttgtagttccacgaggact

SEQ ID NO: 43440 - DNA, 25 bp, Homo sapien
aactgctgaatgtcagcggcctgtc

SEQ ID NO: 43441 - DNA, 25 bp, Homo sapien
tgtctgtgttctggcggccccattc

SEQ ID NO: 43442 - DNA, 25 bp, Homo sapien
ttggggtcatgccgaacacccatga

SEQ ID NO: 43443 - DNA, 25 bp, Homo sapien
gcgtgaagctgcatgtgatgataat

SEQ ID NO: 43444 - DNA, 25 bp, Homo sapien
ccctcctgcaggagagcaaagttga

SEQ ID NO: 43445 - DNA, 25 bp, Homo sapien
tcccaagatgggttgtcagccatga

SEQ ID NO: 43446 - DNA, 25 bp, Homo sapien
gcgtgaagctgcatgtgatgataat

SEQ ID NO: 43447 - DNA, 25 bp, Homo sapien
tgtctgtgttctggcggccccattc

SEQ ID NO: 43448 - DNA, 25 bp, Homo sapien
atgaagttgtagttccacgaggact

SEQ ID NO: 43449 - DNA, 25 bp, Homo sapien
ttggggtcatgccgaacacccatga

SEQ ID NO: 43450 - DNA, 25 bp, Homo sapien
actctttggggttcgccagctgtag

SEQ ID NO: 43451 - DNA, 25 bp, Homo sapien
cctgtgcacctcgtggtagaactct

SEQ ID NO: 43452 - DNA, 25 bp, Homo sapien
ccctcctgcaggagagcaaagttga

SEQ ID NO: 43453 - DNA, 25 bp, Homo sapien
gatccgcagagtaaacctccccctc

SEQ ID NO: 43454 - DNA, 25 bp, Homo sapien
gtcaggcatacaggtcctcccgatc

SEQ ID NO: 43455 - DNA, 25 bp, Homo sapien
aactgctgaatgtcagcggcctgtc

SEQ ID NO: 43456 - DNA, 25 bp, Homo sapien
gcgtgaagctgcatgtgatgataat

SEQ ID NO: 43457 - DNA, 25 bp, Homo sapien
tgtctgtgttctggcggccccattc

SEQ ID NO: 43458 - DNA, 25 bp, Homo sapien
cctgtgcacctcgtggtagaactct

SEQ ID NO: 43459 - DNA, 25 bp, Homo sapien
actctttggggttcgccagctgtag

SEQ ID NO: 43460 - DNA, 25 bp, Homo sapien
ttggggtcatgccgaacacccatga

SEQ ID NO: 43461 - DNA, 25 bp, Homo sapien
aactgctgaatgtcagcggcctgtc

SEQ ID NO: 43462 - DNA, 25 bp, Homo sapien
atgaagttgtagttccacgaggact

SEQ ID NO: 43463 - DNA, 25 bp, Homo sapien
gtcaggcatacaggtcctcccgatc

SEQ ID NO: 43464 - DNA, 25 bp, Homo sapien
gatccgcagagtaaacctccccctc

SEQ ID NO: 43465 - DNA, 25 bp, Homo sapien
ccctcctgcaggagagcaaagttga

SEQ ID NO: 43466 - DNA, 25 bp, Homo sapien
tcccaagatgggttgtcagccatga

SEQ ID NO: 43467 - DNA, 25 bp, Homo sapien
tcccaagatgggttgtcagccatga

SEQ ID NO: 43468 - DNA, 25 bp, Homo sapien
gcgtgaagctgcatgtgatgataat

SEQ ID NO: 43469 - DNA, 25 bp, Homo sapien
tgtctgtgttctggcggccccattc

SEQ ID NO: 43470 - DNA, 25 bp, Homo sapien
atgaagttgtagttccacgaggact

SEQ ID NO: 43471 - DNA, 25 bp, Homo sapien
ttggggtcatgccgaacacccatga

SEQ ID NO: 43472 - DNA, 25 bp, Homo sapien
actctttggggttcgccagctgtag

SEQ ID NO: 43473 - DNA, 25 bp, Homo sapien
cctgtgcacctcgtggtagaactct

SEQ ID NO: 43474 - DNA, 25 bp, Homo sapien
ccctcctgcaggagagcaaagttga

SEQ ID NO: 43475 - DNA, 25 bp, Homo sapien
gatccgcagagtaaacctccccctc

SEQ ID NO: 43476 - DNA, 25 bp, Homo sapien
gtcaggcatacaggtcctcccgatc

SEQ ID NO: 43477 - DNA, 25 bp, Homo sapien
aactgctgaatgtcagcggcctgtc

SEQ ID NO: 43478 - DNA, 25 bp, Homo sapien
tcccaagatgggttgtcagccatga

SEQ ID NO: 43479 - DNA, 25 bp, Homo sapien
gcgtgaagctgcatgtgatgataat

SEQ ID NO: 43480 - DNA, 25 bp, Homo sapien
tgtctgtgttctggcggccccattc

SEQ ID NO: 43481 - DNA, 25 bp, Homo sapien
atgaagttgtagttccacgaggact

SEQ ID NO: 43482 - DNA, 25 bp, Homo sapien
ttggggtcatgccgaacacccatga

SEQ ID NO: 43483 - DNA, 25 bp, Homo sapien
actctttggggttcgccagctgtag

SEQ ID NO: 43484 - DNA, 25 bp, Homo sapien
cctgtgcacctcgtggtagaactct

SEQ ID NO: 43485 - DNA, 25 bp, Homo sapien
ccctcctgcaggagagcaaagttga

SEQ ID NO: 43486 - DNA, 25 bp, Homo sapien
gatccgcagagtaaacctccccctc

SEQ ID NO: 43487 - DNA, 25 bp, Homo sapien
gtcaggcatacaggtcctcccgatc

SEQ ID NO: 43488 - DNA, 25 bp, Homo sapien
aactgctgaatgtcagcggcctgtc

SEQ ID NO: 43489 - DNA, 25 bp, Homo sapien
tcccaagatgggttgtcagccatga

SEQ ID NO: 43490 - DNA, 25 bp, Homo sapien
actctttggggttcgccagctgtag

SEQ ID NO: 43491 - DNA, 25 bp, Homo sapien
atgaagttgtagttccacgaggact

SEQ ID NO: 43492 - DNA, 25 bp, Homo sapien
ttggggtcatgccgaacacccatga

SEQ ID NO: 43493 - DNA, 25 bp, Homo sapien
tgtctgtgttctggcggccccattc

SEQ ID NO: 43494 - DNA, 25 bp, Homo sapien
cctgtgcacctcgtggtagaactct

SEQ ID NO: 43495 - DNA, 25 bp, Homo sapien
gcgtgaagctgcatgtgatgataat

SEQ ID NO: 43496 - DNA, 25 bp, Homo sapien
ccctcctgcaggagagcaaagttga

SEQ ID NO: 43497 - DNA, 25 bp, Homo sapien
gatccgcagagtaaacctccccctc

SEQ ID NO: 43498 - DNA, 25 bp, Homo sapien
aactgctgaatgtcagcggcctgtc

SEQ ID NO: 43499 - DNA, 25 bp, Homo sapien
gtcaggcatacaggtcctcccgatc

SEQ ID NO: 43500 - DNA, 25 bp, Homo sapien
tcccaagatgggttgtcagccatga

SEQ ID NO: 43501 - DNA, 25 bp, Homo sapien
gcgtgaagctgcatgtgatgataat

SEQ ID NO: 43502 - DNA, 25 bp, Homo sapien
tgtctgtgttctggcggccccattc

SEQ ID NO: 43503 - DNA, 25 bp, Homo sapien
atgaagttgtagttccacgaggact

SEQ ID NO: 43504 - DNA, 25 bp, Homo sapien
ttggggtcatgccgaacacccatga

SEQ ID NO: 43505 - DNA, 25 bp, Homo sapien
actctttggggttcgccagctgtag

SEQ ID NO: 43506 - DNA, 25 bp, Homo sapien
cctgtgcacctcgtggtagaactct

SEQ ID NO: 43507 - DNA, 25 bp, Homo sapien
ccctcctgcaggagagcaaagttga

SEQ ID NO: 43508 - DNA, 25 bp, Homo sapien
gatccgcagagtaaacctccccctc

SEQ ID NO: 43509 - DNA, 25 bp, Homo sapien
gtcaggcatacaggtcctcccgatc

SEQ ID NO: 43510 - DNA, 25 bp, Homo sapien
aactgctgaatgtcagcggcctgtc

SEQ ID NO: 43511 - DNA, 25 bp, Homo sapien
tgtctgtgttctggcggccccattc

SEQ ID NO: 43512 - DNA, 25 bp, Homo sapien
gcgtgaagctgcatgtgatgataat

SEQ ID NO: 43513 - DNA, 25 bp, Homo sapien
ccctcctgcaggagagcaaagttga

SEQ ID NO: 43514 - DNA, 25 bp, Homo sapien
tcccaagatgggttgtcagccatga

SEQ ID NO: 43515 - DNA, 25 bp, Homo sapien
ttggggtcatgccgaacacccatga

SEQ ID NO: 43516 - DNA, 25 bp, Homo sapien
gatccgcagagtaaacctccccctc

SEQ ID NO: 43517 - DNA, 25 bp, Homo sapien
cctgtgcacctcgtggtagaactct

SEQ ID NO: 43518 - DNA, 25 bp, Homo sapien
aactgctgaatgtcagcggcctgtc

SEQ ID NO: 43519 - DNA, 25 bp, Homo sapien
gtcaggcatacaggtcctcccgatc

SEQ ID NO: 43520 - DNA, 25 bp, Homo sapien
atgaagttgtagttccacgaggact

SEQ ID NO: 43521 - DNA, 25 bp, Homo sapien
actctttggggttcgccagctgtag

SEQ ID NO: 43522 - DNA, 25 bp, Homo sapien
tcccaagatgggttgtcagccatga

SEQ ID NO: 43523 - DNA, 25 bp, Homo sapien
gcgtgaagctgcatgtgatgataat

SEQ ID NO: 43524 - DNA, 25 bp, Homo sapien
tgtctgtgttctggcggccccattc

SEQ ID NO: 43525 - DNA, 25 bp, Homo sapien
atgaagttgtagttccacgaggact

SEQ ID NO: 43526 - DNA, 25 bp, Homo sapien
ttggggtcatgccgaacacccatga

SEQ ID NO: 43527 - DNA, 25 bp, Homo sapien
actctttggggttcgccagctgtag

SEQ ID NO: 43528 - DNA, 25 bp, Homo sapien
cctgtgcacctcgtggtagaactct

SEQ ID NO: 43529 - DNA, 25 bp, Homo sapien
ccctcctgcaggagagcaaagttga

SEQ ID NO: 43530 - DNA, 25 bp, Homo sapien
gatccgcagagtaaacctccccctc

SEQ ID NO: 43531 - DNA, 25 bp, Homo sapien
gtcaggcatacaggtcctcccgatc

SEQ ID NO: 43532 - DNA, 25 bp, Homo sapien
aactgctgaatgtcagcggcctgtc

SEQ ID NO: 43533 - DNA, 25 bp, Homo sapien
actctttggggttcgccagctgtag

SEQ ID NO: 43534 - DNA, 25 bp, Homo sapien
ccctcctgcaggagagcaaagttga

SEQ ID NO: 43535 - DNA, 25 bp, Homo sapien
aactgctgaatgtcagcggcctgtc

SEQ ID NO: 43536 - DNA, 25 bp, Homo sapien
gtcaggcatacaggtcctcccgatc

SEQ ID NO: 43537 - DNA, 25 bp, Homo sapien
cctgtgcacctcgtggtagaactct

SEQ ID NO: 43538 - DNA, 25 bp, Homo sapien
tgtctgtgttctggcggccccattc

SEQ ID NO: 43539 - DNA, 25 bp, Homo sapien
ttggggtcatgccgaacacccatga

SEQ ID NO: 43540 - DNA, 25 bp, Homo sapien
gatccgcagagtaaacctccccctc

SEQ ID NO: 43541 - DNA, 25 bp, Homo sapien
gcgtgaagctgcatgtgatgataat

SEQ ID NO: 43542 - DNA, 25 bp, Homo sapien
atgaagttgtagttccacgaggact

SEQ ID NO: 43543 - DNA, 25 bp, Homo sapien
tcccaagatgggttgtcagccatga

SEQ ID NO: 43544 - DNA, 25 bp, Homo sapien
tcccaagatgggttgtcagccatga

SEQ ID NO: 43545 - DNA, 25 bp, Homo sapien
gcgtgaagctgcatgtgatgataat

SEQ ID NO: 43546 - DNA, 25 bp, Homo sapien
tgtctgtgttctggcggccccattc

SEQ ID NO: 43547 - DNA, 25 bp, Homo sapien
atgaagttgtagttccacgaggact

SEQ ID NO: 43548 - DNA, 25 bp, Homo sapien
ttggggtcatgccgaacacccatga

SEQ ID NO: 43549 - DNA, 25 bp, Homo sapien
actctttggggttcgccagctgtag

SEQ ID NO: 43550 - DNA, 25 bp, Homo sapien
cctgtgcacctcgtggtagaactct

SEQ ID NO: 43551 - DNA, 25 bp, Homo sapien
ccctcctgcaggagagcaaagttga

SEQ ID NO: 43552 - DNA, 25 bp, Homo sapien
gatccgcagagtaaacctccccctc

SEQ ID NO: 43553 - DNA, 25 bp, Homo sapien
gtcaggcatacaggtcctcccgatc

SEQ ID NO: 43554 - DNA, 25 bp, Homo sapien
aactgctgaatgtcagcggcctgtc

SEQ ID NO: 43555 - DNA, 25 bp, Homo sapien
aactgctgaatgtcagcggcctgtc

SEQ ID NO: 43556 - DNA, 25 bp, Homo sapien
gtcaggcatacaggtcctcccgatc

SEQ ID NO: 43557 - DNA, 25 bp, Homo sapien
tgtctgtgttctggcggccccattc

SEQ ID NO: 43558 - DNA, 25 bp, Homo sapien
actctttggggttcgccagctgtag

SEQ ID NO: 43559 - DNA, 25 bp, Homo sapien
gatccgcagagtaaacctccccctc

SEQ ID NO: 43560 - DNA, 25 bp, Homo sapien
ccctcctgcaggagagcaaagttga

SEQ ID NO: 43561 - DNA, 25 bp, Homo sapien
atgaagttgtagttccacgaggact

SEQ ID NO: 43562 - DNA, 25 bp, Homo sapien
gcgtgaagctgcatgtgatgataat

SEQ ID NO: 43563 - DNA, 25 bp, Homo sapien
ttggggtcatgccgaacacccatga

SEQ ID NO: 43564 - DNA, 25 bp, Homo sapien
cctgtgcacctcgtggtagaactct

SEQ ID NO: 43565 - DNA, 25 bp, Homo sapien
tcccaagatgggttgtcagccatga

SEQ ID NO: 43566 - DNA, 25 bp, Homo sapien
tcccaagatgggttgtcagccatga

SEQ ID NO: 43567 - DNA, 25 bp, Homo sapien
gcgtgaagctgcatgtgatgataat

SEQ ID NO: 43568 - DNA, 25 bp, Homo sapien
tgtctgtgttctggcggccccattc

SEQ ID NO: 43569 - DNA, 25 bp, Homo sapien
atgaagttgtagttccacgaggact

SEQ ID NO: 43570 - DNA, 25 bp, Homo sapien
ttggggtcatgccgaacacccatga

SEQ ID NO: 43571 - DNA, 25 bp, Homo sapien
actctttggggttcgccagctgtag

SEQ ID NO: 43572 - DNA, 25 bp, Homo sapien
cctgtgcacctcgtggtagaactct

SEQ ID NO: 43573 - DNA, 25 bp, Homo sapien
ccctcctgcaggagagcaaagttga

SEQ ID NO: 43574 - DNA, 25 bp, Homo sapien
gatccgcagagtaaacctccccctc

SEQ ID NO: 43575 - DNA, 25 bp, Homo sapien
gtcaggcatacaggtcctcccgatc

SEQ ID NO: 43576 - DNA, 25 bp, Homo sapien
aactgctgaatgtcagcggcctgtc

SEQ ID NO: 43577 - DNA, 25 bp, Homo sapien
ttggggtcatgccgaacacccatga

SEQ ID NO: 43578 - DNA, 25 bp, Homo sapien
gcgtgaagctgcatgtgatgataat

SEQ ID NO: 43579 - DNA, 25 bp, Homo sapien
ccctcctgcaggagagcaaagttga

SEQ ID NO: 43580 - DNA, 25 bp, Homo sapien
tcccaagatgggttgtcagccatga

SEQ ID NO: 43581 - DNA, 25 bp, Homo sapien
tgtctgtgttctggcggccccattc

SEQ ID NO: 43582 - DNA, 25 bp, Homo sapien
cctgtgcacctcgtggtagaactct

SEQ ID NO: 43583 - DNA, 25 bp, Homo sapien
gtcaggcatacaggtcctcccgatc

SEQ ID NO: 43584 - DNA, 25 bp, Homo sapien
atgaagttgtagttccacgaggact

SEQ ID NO: 43585 - DNA, 25 bp, Homo sapien
actctttggggttcgccagctgtag

SEQ ID NO: 43586 - DNA, 25 bp, Homo sapien
gatccgcagagtaaacctccccctc

SEQ ID NO: 43587 - DNA, 25 bp, Homo sapien
aactgctgaatgtcagcggcctgtc

SEQ ID NO: 43588 - DNA, 25 bp, Homo sapien
gcgtgaagctgcatgtgatgataat

SEQ ID NO: 43589 - DNA, 25 bp, Homo sapien
atgaagttgtagttccacgaggact

SEQ ID NO: 43590 - DNA, 25 bp, Homo sapien
tcccaagatgggttgtcagccatga

SEQ ID NO: 43591 - DNA, 25 bp, Homo sapien
ccctcctgcaggagagcaaagttga

SEQ ID NO: 43592 - DNA, 25 bp, Homo sapien
gtcaggcatacaggtcctcccgatc

SEQ ID NO: 43593 - DNA, 25 bp, Homo sapien
tgtctgtgttctggcggccccattc

SEQ ID NO: 43594 - DNA, 25 bp, Homo sapien
ttggggtcatgccgaacacccatga

SEQ ID NO: 43595 - DNA, 25 bp, Homo sapien
aactgctgaatgtcagcggcctgtc

SEQ ID NO: 43596 - DNA, 25 bp, Homo sapien
cctgtgcacctcgtggtagaactct

SEQ ID NO: 43597 - DNA, 25 bp, Homo sapien
gatccgcagagtaaacctccccctc

SEQ ID NO: 43598 - DNA, 25 bp, Homo sapien
actctttggggttcgccagctgtag

SEQ ID NO: 43599 - DNA, 25 bp, Homo sapien
tcccaagatgggttgtcagccatga

SEQ ID NO: 43600 - DNA, 25 bp, Homo sapien
gcgtgaagctgcatgtgatgataat

SEQ ID NO: 43601 - DNA, 25 bp, Homo sapien
tgtctgtgttctggcggccccattc

SEQ ID NO: 43602 - DNA, 25 bp, Homo sapien
atgaagttgtagttccacgaggact

SEQ ID NO: 43603 - DNA, 25 bp, Homo sapien
ttggggtcatgccgaacacccatga

SEQ ID NO: 43604 - DNA, 25 bp, Homo sapien
actctttggggttcgccagctgtag

SEQ ID NO: 43605 - DNA, 25 bp, Homo sapien
cctgtgcacctcgtggtagaactct

SEQ ID NO: 43606 - DNA, 25 bp, Homo sapien
ccctcctgcaggagagcaaagttga

SEQ ID NO: 43607 - DNA, 25 bp, Homo sapien
gatccgcagagtaaacctccccctc

SEQ ID NO: 43608 - DNA, 25 bp, Homo sapien
gtcaggcatacaggtcctcccgatc

SEQ ID NO: 43609 - DNA, 25 bp, Homo sapien
aactgctgaatgtcagcggcctgtc

SEQ ID NO: 43610 - DNA, 25 bp, Homo sapien
cctgtgcacctcgtggtagaactct

SEQ ID NO: 43611 - DNA, 25 bp, Homo sapien
gtcaggcatacaggtcctcccgatc

SEQ ID NO: 43612 - DNA, 25 bp, Homo sapien
tcccaagatgggttgtcagccatga

SEQ ID NO: 43613 - DNA, 25 bp, Homo sapien
atgaagttgtagttccacgaggact

SEQ ID NO: 43614 - DNA, 25 bp, Homo sapien
ccctcctgcaggagagcaaagttga

SEQ ID NO: 43615 - DNA, 25 bp, Homo sapien
gcgtgaagctgcatgtgatgataat

SEQ ID NO: 43616 - DNA, 25 bp, Homo sapien
gatccgcagagtaaacctccccctc

SEQ ID NO: 43617 - DNA, 25 bp, Homo sapien
aactgctgaatgtcagcggcctgtc

SEQ ID NO: 43618 - DNA, 25 bp, Homo sapien
ttggggtcatgccgaacacccatga

SEQ ID NO: 43619 - DNA, 25 bp, Homo sapien
tgtctgtgttctggcggccccattc

SEQ ID NO: 43620 - DNA, 25 bp, Homo sapien
actctttggggttcgccagctgtag

SEQ ID NO: 43621 - DNA, 25 bp, Homo sapien
tcccaagatgggttgtcagccatga

SEQ ID NO: 43622 - DNA, 25 bp, Homo sapien
gcgtgaagctgcatgtgatgataat

SEQ ID NO: 43623 - DNA, 25 bp, Homo sapien
tgtctgtgttctggcggccccattc

SEQ ID NO: 43624 - DNA, 25 bp, Homo sapien
atgaagttgtagttccacgaggact

SEQ ID NO: 43625 - DNA, 25 bp, Homo sapien
ttggggtcatgccgaacacccatga

SEQ ID NO: 43626 - DNA, 25 bp, Homo sapien
actctttggggttcgccagctgtag

SEQ ID NO: 43627 - DNA, 25 bp, Homo sapien
cctgtgcacctcgtggtagaactct

SEQ ID NO: 43628 - DNA, 25 bp, Homo sapien
ccctcctgcaggagagcaaagttga

SEQ ID NO: 43629 - DNA, 25 bp, Homo sapien
gatccgcagagtaaacctccccctc

SEQ ID NO: 43630 - DNA, 25 bp, Homo sapien
gtcaggcatacaggtcctcccgatc

SEQ ID NO: 43631 - DNA, 25 bp, Homo sapien
aactgctgaatgtcagcggcctgtc

SEQ ID NO: 43632 - DNA, 25 bp, Homo sapien
tcccaagatgggttgtcagccatga

SEQ ID NO: 43633 - DNA, 25 bp, Homo sapien
cctgtgcacctcgtggtagaactct

SEQ ID NO: 43634 - DNA, 25 bp, Homo sapien
gatccgcagagtaaacctccccctc

SEQ ID NO: 43635 - DNA, 25 bp, Homo sapien
aactgctgaatgtcagcggcctgtc

SEQ ID NO: 43636 - DNA, 25 bp, Homo sapien
atgaagttgtagttccacgaggact

SEQ ID NO: 43637 - DNA, 25 bp, Homo sapien
ttggggtcatgccgaacacccatga

SEQ ID NO: 43638 - DNA, 25 bp, Homo sapien
gtcaggcatacaggtcctcccgatc

SEQ ID NO: 43639 - DNA, 25 bp, Homo sapien
gcgtgaagctgcatgtgatgataat

SEQ ID NO: 43640 - DNA, 25 bp, Homo sapien
actctttggggttcgccagctgtag

SEQ ID NO: 43641 - DNA, 25 bp, Homo sapien
tgtctgtgttctggcggccccattc

SEQ ID NO: 43642 - DNA, 25 bp, Homo sapien
ccctcctgcaggagagcaaagttga

SEQ ID NO: 43643 - DNA, 25 bp, Homo sapien
tcccaagatgggttgtcagccatga

SEQ ID NO: 43644 - DNA, 25 bp, Homo sapien
gcgtgaagctgcatgtgatgataat

SEQ ID NO: 43645 - DNA, 25 bp, Homo sapien
tgtctgtgttctggcggccccattc

SEQ ID NO: 43646 - DNA, 25 bp, Homo sapien
atgaagttgtagttccacgaggact

SEQ ID NO: 43647 - DNA, 25 bp, Homo sapien
ttggggtcatgccgaacacccatga

SEQ ID NO: 43648 - DNA, 25 bp, Homo sapien
actctttggggttcgccagctgtag

SEQ ID NO: 43649 - DNA, 25 bp, Homo sapien
cctgtgcacctcgtggtagaactct

SEQ ID NO: 43650 - DNA, 25 bp, Homo sapien
ccctcctgcaggagagcaaagttga

SEQ ID NO: 43651 - DNA, 25 bp, Homo sapien
gatccgcagagtaaacctccccctc

SEQ ID NO: 43652 - DNA, 25 bp, Homo sapien
gtcaggcatacaggtcctcccgatc

SEQ ID NO: 43653 - DNA, 25 bp, Homo sapien
aactgctgaatgtcagcggcctgtc

SEQ ID NO: 43654 - DNA, 25 bp, Homo sapien
gagcagaatatagacaaaggcactg

SEQ ID NO: 43655 - DNA, 25 bp, Homo sapien
ggaatacatagtcagctgcagccac

SEQ ID NO: 43656 - DNA, 25 bp, Homo sapien
ggcaaattgggccctggatgttgag

SEQ ID NO: 43657 - DNA, 25 bp, Homo sapien
tttgtcaagagatttgaaggcacgg

SEQ ID NO: 43658 - DNA, 25 bp, Homo sapien
taacaagtactgagagaacaaaagc

SEQ ID NO: 43659 - DNA, 25 bp, Homo sapien
gtctggggctccagttcaggaatac

SEQ ID NO: 43660 - DNA, 25 bp, Homo sapien
aggcagggcaaattgggccctggat

SEQ ID NO: 43661 - DNA, 25 bp, Homo sapien
ttgttagagtgtcctagagccaggg

SEQ ID NO: 43662 - DNA, 25 bp, Homo sapien
gccactcctggatgttcacctggat

SEQ ID NO: 43663 - DNA, 25 bp, Homo sapien
ggtgactcctatagcaaggcggtga

SEQ ID NO: 43664 - DNA, 25 bp, Homo sapien
tgggtaacaagtactgagagaacaa

SEQ ID NO: 43665 - DNA, 25 bp, Homo sapien
tttgtcaagagatttgaaggcacgg

SEQ ID NO: 43666 - DNA, 25 bp, Homo sapien
gccactcctggatgttcacctggat

SEQ ID NO: 43667 - DNA, 25 bp, Homo sapien
ggaatacatagtcagctgcagccac

SEQ ID NO: 43668 - DNA, 25 bp, Homo sapien
gtctggggctccagttcaggaatac

SEQ ID NO: 43669 - DNA, 25 bp, Homo sapien
ggtgactcctatagcaaggcggtga

SEQ ID NO: 43670 - DNA, 25 bp, Homo sapien
taacaagtactgagagaacaaaagc

SEQ ID NO: 43671 - DNA, 25 bp, Homo sapien
tgggtaacaagtactgagagaacaa

SEQ ID NO: 43672 - DNA, 25 bp, Homo sapien
ggcaaattgggccctggatgttgag

SEQ ID NO: 43673 - DNA, 25 bp, Homo sapien
aggcagggcaaattgggccctggat

SEQ ID NO: 43674 - DNA, 25 bp, Homo sapien
ttgttagagtgtcctagagccaggg

SEQ ID NO: 43675 - DNA, 25 bp, Homo sapien
gagcagaatatagacaaaggcactg

SEQ ID NO: 43676 - DNA, 25 bp, Homo sapien
tgggtaacaagtactgagagaacaa

SEQ ID NO: 43677 - DNA, 25 bp, Homo sapien
ggcaaattgggccctggatgttgag

SEQ ID NO: 43678 - DNA, 25 bp, Homo sapien
ttgttagagtgtcctagagccaggg

SEQ ID NO: 43679 - DNA, 25 bp, Homo sapien
gccactcctggatgttcacctggat

SEQ ID NO: 43680 - DNA, 25 bp, Homo sapien
aggcagggcaaattgggccctggat

SEQ ID NO: 43681 - DNA, 25 bp, Homo sapien
taacaagtactgagagaacaaaagc

SEQ ID NO: 43682 - DNA, 25 bp, Homo sapien
tttgtcaagagatttgaaggcacgg

SEQ ID NO: 43683 - DNA, 25 bp, Homo sapien
gtctggggctccagttcaggaatac

SEQ ID NO: 43684 - DNA, 25 bp, Homo sapien
gagcagaatatagacaaaggcactg

SEQ ID NO: 43685 - DNA, 25 bp, Homo sapien
ggaatacatagtcagctgcagccac

SEQ ID NO: 43686 - DNA, 25 bp, Homo sapien
ggtgactcctatagcaaggcggtga

SEQ ID NO: 43687 - DNA, 25 bp, Homo sapien
taacaagtactgagagaacaaaagc

SEQ ID NO: 43688 - DNA, 25 bp, Homo sapien
tgggtaacaagtactgagagaacaa

SEQ ID NO: 43689 - DNA, 25 bp, Homo sapien
ggcaaattgggccctggatgttgag

SEQ ID NO: 43690 - DNA, 25 bp, Homo sapien
aggcagggcaaattgggccctggat

SEQ ID NO: 43691 - DNA, 25 bp, Homo sapien
ttgttagagtgtcctagagccaggg

SEQ ID NO: 43692 - DNA, 25 bp, Homo sapien
gagcagaatatagacaaaggcactg

SEQ ID NO: 43693 - DNA, 25 bp, Homo sapien
tttgtcaagagatttgaaggcacgg

SEQ ID NO: 43694 - DNA, 25 bp, Homo sapien
gccactcctggatgttcacctggat

SEQ ID NO: 43695 - DNA, 25 bp, Homo sapien
ggaatacatagtcagctgcagccac

SEQ ID NO: 43696 - DNA, 25 bp, Homo sapien
gtctggggctccagttcaggaatac

SEQ ID NO: 43697 - DNA, 25 bp, Homo sapien
ggtgactcctatagcaaggcggtga

SEQ ID NO: 43698 - DNA, 25 bp, Homo sapien
aggcagggcaaattgggccctggat

SEQ ID NO: 43699 - DNA, 25 bp, Homo sapien
gtctggggctccagttcaggaatac

SEQ ID NO: 43700 - DNA, 25 bp, Homo sapien
tttgtcaagagatttgaaggcacgg

SEQ ID NO: 43701 - DNA, 25 bp, Homo sapien
taacaagtactgagagaacaaaagc

SEQ ID NO: 43702 - DNA, 25 bp, Homo sapien
gagcagaatatagacaaaggcactg

SEQ ID NO: 43703 - DNA, 25 bp, Homo sapien
ggaatacatagtcagctgcagccac

SEQ ID NO: 43704 - DNA, 25 bp, Homo sapien
ggcaaattgggccctggatgttgag

SEQ ID NO: 43705 - DNA, 25 bp, Homo sapien
ggtgactcctatagcaaggcggtga

SEQ ID NO: 43706 - DNA, 25 bp, Homo sapien
gccactcctggatgttcacctggat

SEQ ID NO: 43707 - DNA, 25 bp, Homo sapien
ttgttagagtgtcctagagccaggg

SEQ ID NO: 43708 - DNA, 25 bp, Homo sapien
tgggtaacaagtactgagagaacaa

SEQ ID NO: 43709 - DNA, 25 bp, Homo sapien
tttgtcaagagatttgaaggcacgg

SEQ ID NO: 43710 - DNA, 25 bp, Homo sapien
gccactcctggatgttcacctggat

SEQ ID NO: 43711 - DNA, 25 bp, Homo sapien
ggaatacatagtcagctgcagccac

SEQ ID NO: 43712 - DNA, 25 bp, Homo sapien
gtctggggctccagttcaggaatac

SEQ ID NO: 43713 - DNA, 25 bp, Homo sapien
ggtgactcctatagcaaggcggtga

SEQ ID NO: 43714 - DNA, 25 bp, Homo sapien
taacaagtactgagagaacaaaagc

SEQ ID NO: 43715 - DNA, 25 bp, Homo sapien
tgggtaacaagtactgagagaacaa

SEQ ID NO: 43716 - DNA, 25 bp, Homo sapien
ggcaaattgggccctggatgttgag

SEQ ID NO: 43717 - DNA, 25 bp, Homo sapien
aggcagggcaaattgggccctggat

SEQ ID NO: 43718 - DNA, 25 bp, Homo sapien
ttgttagagtgtcctagagccaggg

SEQ ID NO: 43719 - DNA, 25 bp, Homo sapien
gagcagaatatagacaaaggcactg

SEQ ID NO: 43720 - DNA, 25 bp, Homo sapien
tttgtcaagagatttgaaggcacgg

SEQ ID NO: 43721 - DNA, 25 bp, Homo sapien
gccactcctggatgttcacctggat

SEQ ID NO: 43722 - DNA, 25 bp, Homo sapien
ggaatacatagtcagctgcagccac

SEQ ID NO: 43723 - DNA, 25 bp, Homo sapien
gtctggggctccagttcaggaatac

SEQ ID NO: 43724 - DNA, 25 bp, Homo sapien
ggtgactcctatagcaaggcggtga

SEQ ID NO: 43725 - DNA, 25 bp, Homo sapien
taacaagtactgagagaacaaaagc

SEQ ID NO: 43726 - DNA, 25 bp, Homo sapien
tgggtaacaagtactgagagaacaa

SEQ ID NO: 43727 - DNA, 25 bp, Homo sapien
ggcaaattgggccctggatgttgag

SEQ ID NO: 43728 - DNA, 25 bp, Homo sapien
aggcagggcaaattgggccctggat

SEQ ID NO: 43729 - DNA, 25 bp, Homo sapien
ttgttagagtgtcctagagccaggg

SEQ ID NO: 43730 - DNA, 25 bp, Homo sapien
gagcagaatatagacaaaggcactg

SEQ ID NO: 43731 - DNA, 25 bp, Homo sapien
ggcaaattgggccctggatgttgag

SEQ ID NO: 43732 - DNA, 25 bp, Homo sapien
gtctggggctccagttcaggaatac

SEQ ID NO: 43733 - DNA, 25 bp, Homo sapien
ggaatacatagtcagctgcagccac

SEQ ID NO: 43734 - DNA, 25 bp, Homo sapien
aggcagggcaaattgggccctggat

SEQ ID NO: 43735 - DNA, 25 bp, Homo sapien
gagcagaatatagacaaaggcactg

SEQ ID NO: 43736 - DNA, 25 bp, Homo sapien
tttgtcaagagatttgaaggcacgg

SEQ ID NO: 43737 - DNA, 25 bp, Homo sapien
ggtgactcctatagcaaggcggtga

SEQ ID NO: 43738 - DNA, 25 bp, Homo sapien
taacaagtactgagagaacaaaagc

SEQ ID NO: 43739 - DNA, 25 bp, Homo sapien
tgggtaacaagtactgagagaacaa

SEQ ID NO: 43740 - DNA, 25 bp, Homo sapien
gccactcctggatgttcacctggat

SEQ ID NO: 43741 - DNA, 25 bp, Homo sapien
ttgttagagtgtcctagagccaggg

SEQ ID NO: 43742 - DNA, 25 bp, Homo sapien
tttgtcaagagatttgaaggcacgg

SEQ ID NO: 43743 - DNA, 25 bp, Homo sapien
gccactcctggatgttcacctggat

SEQ ID NO: 43744 - DNA, 25 bp, Homo sapien
ggaatacatagtcagctgcagccac

SEQ ID NO: 43745 - DNA, 25 bp, Homo sapien
gtctggggctccagttcaggaatac

SEQ ID NO: 43746 - DNA, 25 bp, Homo sapien
ggtgactcctatagcaaggcggtga

SEQ ID NO: 43747 - DNA, 25 bp, Homo sapien
taacaagtactgagagaacaaaagc

SEQ ID NO: 43748 - DNA, 25 bp, Homo sapien
tgggtaacaagtactgagagaacaa

SEQ ID NO: 43749 - DNA, 25 bp, Homo sapien
ggcaaattgggccctggatgttgag

SEQ ID NO: 43750 - DNA, 25 bp, Homo sapien
aggcagggcaaattgggccctggat

SEQ ID NO: 43751 - DNA, 25 bp, Homo sapien
ttgttagagtgtcctagagccaggg

SEQ ID NO: 43752 - DNA, 25 bp, Homo sapien
gagcagaatatagacaaaggcactg

SEQ ID NO: 43753 - DNA, 25 bp, Homo sapien
tgggtaacaagtactgagagaacaa

SEQ ID NO: 43754 - DNA, 25 bp, Homo sapien
ggtgactcctatagcaaggcggtga

SEQ ID NO: 43755 - DNA, 25 bp, Homo sapien
gtctggggctccagttcaggaatac

SEQ ID NO: 43756 - DNA, 25 bp, Homo sapien
gccactcctggatgttcacctggat

SEQ ID NO: 43757 - DNA, 25 bp, Homo sapien
tttgtcaagagatttgaaggcacgg

SEQ ID NO: 43758 - DNA, 25 bp, Homo sapien
taacaagtactgagagaacaaaagc

SEQ ID NO: 43759 - DNA, 25 bp, Homo sapien
ggaatacatagtcagctgcagccac

SEQ ID NO: 43760 - DNA, 25 bp, Homo sapien
ggcaaattgggccctggatgttgag

SEQ ID NO: 43761 - DNA, 25 bp, Homo sapien
aggcagggcaaattgggccctggat

SEQ ID NO: 43762 - DNA, 25 bp, Homo sapien
gagcagaatatagacaaaggcactg

SEQ ID NO: 43763 - DNA, 25 bp, Homo sapien
ttgttagagtgtcctagagccaggg

SEQ ID NO: 43764 - DNA, 25 bp, Homo sapien
tttgtcaagagatttgaaggcacgg

SEQ ID NO: 43765 - DNA, 25 bp, Homo sapien
gccactcctggatgttcacctggat

SEQ ID NO: 43766 - DNA, 25 bp, Homo sapien
ggaatacatagtcagctgcagccac

SEQ ID NO: 43767 - DNA, 25 bp, Homo sapien
gtctggggctccagttcaggaatac

SEQ ID NO: 43768 - DNA, 25 bp, Homo sapien
ggtgactcctatagcaaggcggtga

SEQ ID NO: 43769 - DNA, 25 bp, Homo sapien
taacaagtactgagagaacaaaagc

SEQ ID NO: 43770 - DNA, 25 bp, Homo sapien
tgggtaacaagtactgagagaacaa

SEQ ID NO: 43771 - DNA, 25 bp, Homo sapien
ggcaaattgggccctggatgttgag

SEQ ID NO: 43772 - DNA, 25 bp, Homo sapien
aggcagggcaaattgggccctggat

SEQ ID NO: 43773 - DNA, 25 bp, Homo sapien
ttgttagagtgtcctagagccaggg

SEQ ID NO: 43774 - DNA, 25 bp, Homo sapien
gagcagaatatagacaaaggcactg

SEQ ID NO: 43775 - DNA, 25 bp, Homo sapien
ggtgactcctatagcaaggcggtga

SEQ ID NO: 43776 - DNA, 25 bp, Homo sapien
ggaatacatagtcagctgcagccac

SEQ ID NO: 43777 - DNA, 25 bp, Homo sapien
tgggtaacaagtactgagagaacaa

SEQ ID NO: 43778 - DNA, 25 bp, Homo sapien
tttgtcaagagatttgaaggcacgg

SEQ ID NO: 43779 - DNA, 25 bp, Homo sapien
ggcaaattgggccctggatgttgag

SEQ ID NO: 43780 - DNA, 25 bp, Homo sapien
ttgttagagtgtcctagagccaggg

SEQ ID NO: 43781 - DNA, 25 bp, Homo sapien
gagcagaatatagacaaaggcactg

SEQ ID NO: 43782 - DNA, 25 bp, Homo sapien
gtctggggctccagttcaggaatac

SEQ ID NO: 43783 - DNA, 25 bp, Homo sapien
aggcagggcaaattgggccctggat

SEQ ID NO: 43784 - DNA, 25 bp, Homo sapien
taacaagtactgagagaacaaaagc

SEQ ID NO: 43785 - DNA, 25 bp, Homo sapien
gccactcctggatgttcacctggat

SEQ ID NO: 43786 - DNA, 25 bp, Homo sapien
tttgtcaagagatttgaaggcacgg

SEQ ID NO: 43787 - DNA, 25 bp, Homo sapien
gccactcctggatgttcacctggat

SEQ ID NO: 43788 - DNA, 25 bp, Homo sapien
ggaatacatagtcagctgcagccac

SEQ ID NO: 43789 - DNA, 25 bp, Homo sapien
gtctggggctccagttcaggaatac

SEQ ID NO: 43790 - DNA, 25 bp, Homo sapien
ggtgactcctatagcaaggcggtga

SEQ ID NO: 43791 - DNA, 25 bp, Homo sapien
taacaagtactgagagaacaaaagc

SEQ ID NO: 43792 - DNA, 25 bp, Homo sapien
tgggtaacaagtactgagagaacaa

SEQ ID NO: 43793 - DNA, 25 bp, Homo sapien
ggcaaattgggccctggatgttgag

SEQ ID NO: 43794 - DNA, 25 bp, Homo sapien
aggcagggcaaattgggccctggat

SEQ ID NO: 43795 - DNA, 25 bp, Homo sapien
ttgttagagtgtcctagagccaggg

SEQ ID NO: 43796 - DNA, 25 bp, Homo sapien
gagcagaatatagacaaaggcactg

SEQ ID NO: 43797 - DNA, 25 bp, Homo sapien
ggaatacatagtcagctgcagccac

SEQ ID NO: 43798 - DNA, 25 bp, Homo sapien
gccactcctggatgttcacctggat

SEQ ID NO: 43799 - DNA, 25 bp, Homo sapien
tgggtaacaagtactgagagaacaa

SEQ ID NO: 43800 - DNA, 25 bp, Homo sapien
ggtgactcctatagcaaggcggtga

SEQ ID NO: 43801 - DNA, 25 bp, Homo sapien
ggcaaattgggccctggatgttgag

SEQ ID NO: 43802 - DNA, 25 bp, Homo sapien
aggcagggcaaattgggccctggat

SEQ ID NO: 43803 - DNA, 25 bp, Homo sapien
gagcagaatatagacaaaggcactg

SEQ ID NO: 43804 - DNA, 25 bp, Homo sapien
taacaagtactgagagaacaaaagc

SEQ ID NO: 43805 - DNA, 25 bp, Homo sapien
ttgttagagtgtcctagagccaggg

SEQ ID NO: 43806 - DNA, 25 bp, Homo sapien
tttgtcaagagatttgaaggcacgg

SEQ ID NO: 43807 - DNA, 25 bp, Homo sapien
gtctggggctccagttcaggaatac

SEQ ID NO: 43808 - DNA, 25 bp, Homo sapien
tttgtcaagagatttgaaggcacgg

SEQ ID NO: 43809 - DNA, 25 bp, Homo sapien
gccactcctggatgttcacctggat

SEQ ID NO: 43810 - DNA, 25 bp, Homo sapien
ggaatacatagtcagctgcagccac

SEQ ID NO: 43811 - DNA, 25 bp, Homo sapien
gtctggggctccagttcaggaatac

SEQ ID NO: 43812 - DNA, 25 bp, Homo sapien
ggtgactcctatagcaaggcggtga

SEQ ID NO: 43813 - DNA, 25 bp, Homo sapien
taacaagtactgagagaacaaaagc

SEQ ID NO: 43814 - DNA, 25 bp, Homo sapien
tgggtaacaagtactgagagaacaa

SEQ ID NO: 43815 - DNA, 25 bp, Homo sapien
ggcaaattgggccctggatgttgag

SEQ ID NO: 43816 - DNA, 25 bp, Homo sapien
aggcagggcaaattgggccctggat

SEQ ID NO: 43817 - DNA, 25 bp, Homo sapien
ttgttagagtgtcctagagccaggg

SEQ ID NO: 43818 - DNA, 25 bp, Homo sapien
gagcagaatatagacaaaggcactg

SEQ ID NO: 43819 - DNA, 25 bp, Homo sapien
ggaatacatagtcagctgcagccac

SEQ ID NO: 43820 - DNA, 25 bp, Homo sapien
tttgtcaagagatttgaaggcacgg

SEQ ID NO: 43821 - DNA, 25 bp, Homo sapien
ggtgactcctatagcaaggcggtga

SEQ ID NO: 43822 - DNA, 25 bp, Homo sapien
gtctggggctccagttcaggaatac

SEQ ID NO: 43823 - DNA, 25 bp, Homo sapien
taacaagtactgagagaacaaaagc

SEQ ID NO: 43824 - DNA, 25 bp, Homo sapien
ttgttagagtgtcctagagccaggg

SEQ ID NO: 43825 - DNA, 25 bp, Homo sapien
gagcagaatatagacaaaggcactg

SEQ ID NO: 43826 - DNA, 25 bp, Homo sapien
aggcagggcaaattgggccctggat

SEQ ID NO: 43827 - DNA, 25 bp, Homo sapien
tgggtaacaagtactgagagaacaa

SEQ ID NO: 43828 - DNA, 25 bp, Homo sapien
ggcaaattgggccctggatgttgag

SEQ ID NO: 43829 - DNA, 25 bp, Homo sapien
gccactcctggatgttcacctggat

SEQ ID NO: 43830 - DNA, 25 bp, Homo sapien
gtctggggctccagttcaggaatac

SEQ ID NO: 43831 - DNA, 25 bp, Homo sapien
gccactcctggatgttcacctggat

SEQ ID NO: 43832 - DNA, 25 bp, Homo sapien
tttgtcaagagatttgaaggcacgg

SEQ ID NO: 43833 - DNA, 25 bp, Homo sapien
ttgttagagtgtcctagagccaggg

SEQ ID NO: 43834 - DNA, 25 bp, Homo sapien
ggaatacatagtcagctgcagccac

SEQ ID NO: 43835 - DNA, 25 bp, Homo sapien
tgggtaacaagtactgagagaacaa

SEQ ID NO: 43836 - DNA, 25 bp, Homo sapien
ggtgactcctatagcaaggcggtga

SEQ ID NO: 43837 - DNA, 25 bp, Homo sapien
aggcagggcaaattgggccctggat

SEQ ID NO: 43838 - DNA, 25 bp, Homo sapien
taacaagtactgagagaacaaaagc

SEQ ID NO: 43839 - DNA, 25 bp, Homo sapien
gagcagaatatagacaaaggcactg

SEQ ID NO: 43840 - DNA, 25 bp, Homo sapien
ggcaaattgggccctggatgttgag

SEQ ID NO: 43841 - DNA, 25 bp, Homo sapien
tttgtcaagagatttgaaggcacgg

SEQ ID NO: 43842 - DNA, 25 bp, Homo sapien
gccactcctggatgttcacctggat

SEQ ID NO: 43843 - DNA, 25 bp, Homo sapien
ggaatacatagtcagctgcagccac

SEQ ID NO: 43844 - DNA, 25 bp, Homo sapien
gtctggggctccagttcaggaatac

SEQ ID NO: 43845 - DNA, 25 bp, Homo sapien
ggtgactcctatagcaaggcggtga

SEQ ID NO: 43846 - DNA, 25 bp, Homo sapien
taacaagtactgagagaacaaaagc

SEQ ID NO: 43847 - DNA, 25 bp, Homo sapien
tgggtaacaagtactgagagaacaa

SEQ ID NO: 43848 - DNA, 25 bp, Homo sapien
ggcaaattgggccctggatgttgag

SEQ ID NO: 43849 - DNA, 25 bp, Homo sapien
aggcagggcaaattgggccctggat

SEQ ID NO: 43850 - DNA, 25 bp, Homo sapien
ttgttagagtgtcctagagccaggg

SEQ ID NO: 43851 - DNA, 25 bp, Homo sapien
gagcagaatatagacaaaggcactg

SEQ ID NO: 43852 - DNA, 25 bp, Homo sapien
gtctggggctccagttcaggaatac

SEQ ID NO: 43853 - DNA, 25 bp, Homo sapien
aggcagggcaaattgggccctggat

SEQ ID NO: 43854 - DNA, 25 bp, Homo sapien
tttgtcaagagatttgaaggcacgg

SEQ ID NO: 43855 - DNA, 25 bp, Homo sapien
taacaagtactgagagaacaaaagc

SEQ ID NO: 43856 - DNA, 25 bp, Homo sapien
gccactcctggatgttcacctggat

SEQ ID NO: 43857 - DNA, 25 bp, Homo sapien
ggcaaattgggccctggatgttgag

SEQ ID NO: 43858 - DNA, 25 bp, Homo sapien
gagcagaatatagacaaaggcactg

SEQ ID NO: 43859 - DNA, 25 bp, Homo sapien
ggaatacatagtcagctgcagccac

SEQ ID NO: 43860 - DNA, 25 bp, Homo sapien
ttgttagagtgtcctagagccaggg

SEQ ID NO: 43861 - DNA, 25 bp, Homo sapien
ggtgactcctatagcaaggcggtga

SEQ ID NO: 43862 - DNA, 25 bp, Homo sapien
tgggtaacaagtactgagagaacaa

SEQ ID NO: 43863 - DNA, 25 bp, Homo sapien
tttgtcaagagatttgaaggcacgg

SEQ ID NO: 43864 - DNA, 25 bp, Homo sapien
gccactcctggatgttcacctggat

SEQ ID NO: 43865 - DNA, 25 bp, Homo sapien
ggaatacatagtcagctgcagccac

SEQ ID NO: 43866 - DNA, 25 bp, Homo sapien
gtctggggctccagttcaggaatac

SEQ ID NO: 43867 - DNA, 25 bp, Homo sapien
ggtgactcctatagcaaggcggtga

SEQ ID NO: 43868 - DNA, 25 bp, Homo sapien
taacaagtactgagagaacaaaagc

SEQ ID NO: 43869 - DNA, 25 bp, Homo sapien
tgggtaacaagtactgagagaacaa

SEQ ID NO: 43870 - DNA, 25 bp, Homo sapien
ggcaaattgggccctggatgttgag

SEQ ID NO: 43871 - DNA, 25 bp, Homo sapien
aggcagggcaaattgggccctggat

SEQ ID NO: 43872 - DNA, 25 bp, Homo sapien
ttgttagagtgtcctagagccaggg

SEQ ID NO: 43873 - DNA, 25 bp, Homo sapien
gagcagaatatagacaaaggcactg

SEQ ID NO: 43874 - DNA, 25 bp, Homo sapien
gtctggggctccagttcaggaatac

SEQ ID NO: 43875 - DNA, 25 bp, Homo sapien
ggaatacatagtcagctgcagccac

SEQ ID NO: 43876 - DNA, 25 bp, Homo sapien
ggcaaattgggccctggatgttgag

SEQ ID NO: 43877 - DNA, 25 bp, Homo sapien
ggtgactcctatagcaaggcggtga

SEQ ID NO: 43878 - DNA, 25 bp, Homo sapien
gagcagaatatagacaaaggcactg

SEQ ID NO: 43879 - DNA, 25 bp, Homo sapien
aggcagggcaaattgggccctggat

SEQ ID NO: 43880 - DNA, 25 bp, Homo sapien
gccactcctggatgttcacctggat

SEQ ID NO: 43881 - DNA, 25 bp, Homo sapien
tgggtaacaagtactgagagaacaa

SEQ ID NO: 43882 - DNA, 25 bp, Homo sapien
ttgttagagtgtcctagagccaggg

SEQ ID NO: 43883 - DNA, 25 bp, Homo sapien
taacaagtactgagagaacaaaagc

SEQ ID NO: 43884 - DNA, 25 bp, Homo sapien
tttgtcaagagatttgaaggcacgg

SEQ ID NO: 43885 - DNA, 25 bp, Homo sapien
tttgtcaagagatttgaaggcacgg

SEQ ID NO: 43886 - DNA, 25 bp, Homo sapien
gccactcctggatgttcacctggat

SEQ ID NO: 43887 - DNA, 25 bp, Homo sapien
ggaatacatagtcagctgcagccac

SEQ ID NO: 43888 - DNA, 25 bp, Homo sapien
gtctggggctccagttcaggaatac

SEQ ID NO: 43889 - DNA, 25 bp, Homo sapien
ggtgactcctatagcaaggcggtga

SEQ ID NO: 43890 - DNA, 25 bp, Homo sapien
taacaagtactgagagaacaaaagc

SEQ ID NO: 43891 - DNA, 25 bp, Homo sapien
tgggtaacaagtactgagagaacaa

SEQ ID NO: 43892 - DNA, 25 bp, Homo sapien
ggcaaattgggccctggatgttgag

SEQ ID NO: 43893 - DNA, 25 bp, Homo sapien
aggcagggcaaattgggccctggat

SEQ ID NO: 43894 - DNA, 25 bp, Homo sapien
ttgttagagtgtcctagagccaggg

SEQ ID NO: 43895 - DNA, 25 bp, Homo sapien
gagcagaatatagacaaaggcactg

SEQ ID NO: 43896 - DNA, 25 bp, Homo sapien
aggcagggcaaattgggccctggat

SEQ ID NO: 43897 - DNA, 25 bp, Homo sapien
ggcaaattgggccctggatgttgag

SEQ ID NO: 43898 - DNA, 25 bp, Homo sapien
ggaatacatagtcagctgcagccac

SEQ ID NO: 43899 - DNA, 25 bp, Homo sapien
taacaagtactgagagaacaaaagc

SEQ ID NO: 43900 - DNA, 25 bp, Homo sapien
gccactcctggatgttcacctggat

SEQ ID NO: 43901 - DNA, 25 bp, Homo sapien
gagcagaatatagacaaaggcactg

SEQ ID NO: 43902 - DNA, 25 bp, Homo sapien
ttgttagagtgtcctagagccaggg

SEQ ID NO: 43903 - DNA, 25 bp, Homo sapien
gtctggggctccagttcaggaatac

SEQ ID NO: 43904 - DNA, 25 bp, Homo sapien
ggtgactcctatagcaaggcggtga

SEQ ID NO: 43905 - DNA, 25 bp, Homo sapien
tttgtcaagagatttgaaggcacgg

SEQ ID NO: 43906 - DNA, 25 bp, Homo sapien
tgggtaacaagtactgagagaacaa

SEQ ID NO: 43907 - DNA, 25 bp, Homo sapien
tttgtcaagagatttgaaggcacgg

SEQ ID NO: 43908 - DNA, 25 bp, Homo sapien
gccactcctggatgttcacctggat

SEQ ID NO: 43909 - DNA, 25 bp, Homo sapien
ggaatacatagtcagctgcagccac

SEQ ID NO: 43910 - DNA, 25 bp, Homo sapien
gtctggggctccagttcaggaatac

SEQ ID NO: 43911 - DNA, 25 bp, Homo sapien
ggtgactcctatagcaaggcggtga

SEQ ID NO: 43912 - DNA, 25 bp, Homo sapien
taacaagtactgagagaacaaaagc

SEQ ID NO: 43913 - DNA, 25 bp, Homo sapien
tgggtaacaagtactgagagaacaa

SEQ ID NO: 43914 - DNA, 25 bp, Homo sapien
ggcaaattgggccctggatgttgag

SEQ ID NO: 43915 - DNA, 25 bp, Homo sapien
aggcagggcaaattgggccctggat

SEQ ID NO: 43916 - DNA, 25 bp, Homo sapien
ttgttagagtgtcctagagccaggg

SEQ ID NO: 43917 - DNA, 25 bp, Homo sapien
gagcagaatatagacaaaggcactg

SEQ ID NO: 43918 - DNA, 25 bp, Homo sapien
tgggtaacaagtactgagagaacaa

SEQ ID NO: 43919 - DNA, 25 bp, Homo sapien
taacaagtactgagagaacaaaagc

SEQ ID NO: 43920 - DNA, 25 bp, Homo sapien
tttgtcaagagatttgaaggcacgg

SEQ ID NO: 43921 - DNA, 25 bp, Homo sapien
gccactcctggatgttcacctggat

SEQ ID NO: 43922 - DNA, 25 bp, Homo sapien
aggcagggcaaattgggccctggat

SEQ ID NO: 43923 - DNA, 25 bp, Homo sapien
gagcagaatatagacaaaggcactg

SEQ ID NO: 43924 - DNA, 25 bp, Homo sapien
ggtgactcctatagcaaggcggtga

SEQ ID NO: 43925 - DNA, 25 bp, Homo sapien
ggcaaattgggccctggatgttgag

SEQ ID NO: 43926 - DNA, 25 bp, Homo sapien
ggaatacatagtcagctgcagccac

SEQ ID NO: 43927 - DNA, 25 bp, Homo sapien
gtctggggctccagttcaggaatac

SEQ ID NO: 43928 - DNA, 25 bp, Homo sapien
ttgttagagtgtcctagagccaggg

SEQ ID NO: 43929 - DNA, 25 bp, Homo sapien
tttgtcaagagatttgaaggcacgg

SEQ ID NO: 43930 - DNA, 25 bp, Homo sapien
gccactcctggatgttcacctggat

SEQ ID NO: 43931 - DNA, 25 bp, Homo sapien
ggaatacatagtcagctgcagccac

SEQ ID NO: 43932 - DNA, 25 bp, Homo sapien
gtctggggctccagttcaggaatac

SEQ ID NO: 43933 - DNA, 25 bp, Homo sapien
ggtgactcctatagcaaggcggtga

SEQ ID NO: 43934 - DNA, 25 bp, Homo sapien
taacaagtactgagagaacaaaagc

SEQ ID NO: 43935 - DNA, 25 bp, Homo sapien
tgggtaacaagtactgagagaacaa

SEQ ID NO: 43936 - DNA, 25 bp, Homo sapien
ggcaaattgggccctggatgttgag

SEQ ID NO: 43937 - DNA, 25 bp, Homo sapien
aggcagggcaaattgggccctggat

SEQ ID NO: 43938 - DNA, 25 bp, Homo sapien
ttgttagagtgtcctagagccaggg

SEQ ID NO: 43939 - DNA, 25 bp, Homo sapien
gagcagaatatagacaaaggcactg

SEQ ID NO: 43940 - DNA, 25 bp, Homo sapien
ggcaaattgggccctggatgttgag

SEQ ID NO: 43941 - DNA, 25 bp, Homo sapien
gccactcctggatgttcacctggat

SEQ ID NO: 43942 - DNA, 25 bp, Homo sapien
tttgtcaagagatttgaaggcacgg

SEQ ID NO: 43943 - DNA, 25 bp, Homo sapien
ggaatacatagtcagctgcagccac

SEQ ID NO: 43944 - DNA, 25 bp, Homo sapien
aggcagggcaaattgggccctggat

SEQ ID NO: 43945 - DNA, 25 bp, Homo sapien
tgggtaacaagtactgagagaacaa

SEQ ID NO: 43946 - DNA, 25 bp, Homo sapien
ggtgactcctatagcaaggcggtga

SEQ ID NO: 43947 - DNA, 25 bp, Homo sapien
ttgttagagtgtcctagagccaggg

SEQ ID NO: 43948 - DNA, 25 bp, Homo sapien
gtctggggctccagttcaggaatac

SEQ ID NO: 43949 - DNA, 25 bp, Homo sapien
gagcagaatatagacaaaggcactg

SEQ ID NO: 43950 - DNA, 25 bp, Homo sapien
taacaagtactgagagaacaaaagc

SEQ ID NO: 43951 - DNA, 25 bp, Homo sapien
tttgtcaagagatttgaaggcacgg

SEQ ID NO: 43952 - DNA, 25 bp, Homo sapien
gccactcctggatgttcacctggat

SEQ ID NO: 43953 - DNA, 25 bp, Homo sapien
ggaatacatagtcagctgcagccac

SEQ ID NO: 43954 - DNA, 25 bp, Homo sapien
gtctggggctccagttcaggaatac

SEQ ID NO: 43955 - DNA, 25 bp, Homo sapien
ggtgactcctatagcaaggcggtga

SEQ ID NO: 43956 - DNA, 25 bp, Homo sapien
taacaagtactgagagaacaaaagc

SEQ ID NO: 43957 - DNA, 25 bp, Homo sapien
tgggtaacaagtactgagagaacaa

SEQ ID NO: 43958 - DNA, 25 bp, Homo sapien
ggcaaattgggccctggatgttgag

SEQ ID NO: 43959 - DNA, 25 bp, Homo sapien
aggcagggcaaattgggccctggat

SEQ ID NO: 43960 - DNA, 25 bp, Homo sapien
ttgttagagtgtcctagagccaggg

SEQ ID NO: 43961 - DNA, 25 bp, Homo sapien
gagcagaatatagacaaaggcactg

SEQ ID NO: 43962 - DNA, 25 bp, Homo sapien
tttgtcaagagatttgaaggcacgg

SEQ ID NO: 43963 - DNA, 25 bp, Homo sapien
gccactcctggatgttcacctggat

SEQ ID NO: 43964 - DNA, 25 bp, Homo sapien
ggaatacatagtcagctgcagccac

SEQ ID NO: 43965 - DNA, 25 bp, Homo sapien
gtctggggctccagttcaggaatac

SEQ ID NO: 43966 - DNA, 25 bp, Homo sapien
ggtgactcctatagcaaggcggtga

SEQ ID NO: 43967 - DNA, 25 bp, Homo sapien
taacaagtactgagagaacaaaagc

SEQ ID NO: 43968 - DNA, 25 bp, Homo sapien
tgggtaacaagtactgagagaacaa

SEQ ID NO: 43969 - DNA, 25 bp, Homo sapien
ggcaaattgggccctggatgttgag

SEQ ID NO: 43970 - DNA, 25 bp, Homo sapien
aggcagggcaaattgggccctggat

SEQ ID NO: 43971 - DNA, 25 bp, Homo sapien
ttgttagagtgtcctagagccaggg

SEQ ID NO: 43972 - DNA, 25 bp, Homo sapien
gagcagaatatagacaaaggcactg

SEQ ID NO: 43973 - DNA, 25 bp, Homo sapien
gtctggggctccagttcaggaatac

SEQ ID NO: 43974 - DNA, 25 bp, Homo sapien
gccactcctggatgttcacctggat

SEQ ID NO: 43975 - DNA, 25 bp, Homo sapien
tgggtaacaagtactgagagaacaa

SEQ ID NO: 43976 - DNA, 25 bp, Homo sapien
ggcaaattgggccctggatgttgag

SEQ ID NO: 43977 - DNA, 25 bp, Homo sapien
ggaatacatagtcagctgcagccac

SEQ ID NO: 43978 - DNA, 25 bp, Homo sapien
aggcagggcaaattgggccctggat

SEQ ID NO: 43979 - DNA, 25 bp, Homo sapien
ttgttagagtgtcctagagccaggg

SEQ ID NO: 43980 - DNA, 25 bp, Homo sapien
tttgtcaagagatttgaaggcacgg

SEQ ID NO: 43981 - DNA, 25 bp, Homo sapien
gagcagaatatagacaaaggcactg

SEQ ID NO: 43982 - DNA, 25 bp, Homo sapien
ggtgactcctatagcaaggcggtga

SEQ ID NO: 43983 - DNA, 25 bp, Homo sapien
taacaagtactgagagaacaaaagc

SEQ ID NO: 43984 - DNA, 25 bp, Homo sapien
tgggtaacaagtactgagagaacaa

SEQ ID NO: 43985 - DNA, 25 bp, Homo sapien
gtctggggctccagttcaggaatac

SEQ ID NO: 43986 - DNA, 25 bp, Homo sapien
gccactcctggatgttcacctggat

SEQ ID NO: 43987 - DNA, 25 bp, Homo sapien
ggcaaattgggccctggatgttgag

SEQ ID NO: 43988 - DNA, 25 bp, Homo sapien
ttgttagagtgtcctagagccaggg

SEQ ID NO: 43989 - DNA, 25 bp, Homo sapien
ggaatacatagtcagctgcagccac

SEQ ID NO: 43990 - DNA, 25 bp, Homo sapien
aggcagggcaaattgggccctggat

SEQ ID NO: 43991 - DNA, 25 bp, Homo sapien
tttgtcaagagatttgaaggcacgg

SEQ ID NO: 43992 - DNA, 25 bp, Homo sapien
gagcagaatatagacaaaggcactg

SEQ ID NO: 43993 - DNA, 25 bp, Homo sapien
ggtgactcctatagcaaggcggtga

SEQ ID NO: 43994 - DNA, 25 bp, Homo sapien
taacaagtactgagagaacaaaagc

SEQ ID NO: 43995 - DNA, 25 bp, Homo sapien
gtctggggctccagttcaggaatac

SEQ ID NO: 43996 - DNA, 25 bp, Homo sapien
tgggtaacaagtactgagagaacaa

SEQ ID NO: 43997 - DNA, 25 bp, Homo sapien
gccactcctggatgttcacctggat

SEQ ID NO: 43998 - DNA, 25 bp, Homo sapien
ggcaaattgggccctggatgttgag

SEQ ID NO: 43999 - DNA, 25 bp, Homo sapien
ggaatacatagtcagctgcagccac

SEQ ID NO: 44000 - DNA, 25 bp, Homo sapien
ttgttagagtgtcctagagccaggg

SEQ ID NO: 44001 - DNA, 25 bp, Homo sapien
aggcagggcaaattgggccctggat

SEQ ID NO: 44002 - DNA, 25 bp, Homo sapien
tttgtcaagagatttgaaggcacgg

SEQ ID NO: 44003 - DNA, 25 bp, Homo sapien
gagcagaatatagacaaaggcactg

SEQ ID NO: 44004 - DNA, 25 bp, Homo sapien
ggtgactcctatagcaaggcggtga

SEQ ID NO: 44005 - DNA, 25 bp, Homo sapien
taacaagtactgagagaacaaaagc

SEQ ID NO: 44006 - DNA, 25 bp, Homo sapien
ttgttagagtgtcctagagccaggg

SEQ ID NO: 44007 - DNA, 25 bp, Homo sapien
gtctggggctccagttcaggaatac

SEQ ID NO: 44008 - DNA, 25 bp, Homo sapien
tgggtaacaagtactgagagaacaa

SEQ ID NO: 44009 - DNA, 25 bp, Homo sapien
gccactcctggatgttcacctggat

SEQ ID NO: 44010 - DNA, 25 bp, Homo sapien
ggcaaattgggccctggatgttgag

SEQ ID NO: 44011 - DNA, 25 bp, Homo sapien
ggaatacatagtcagctgcagccac

SEQ ID NO: 44012 - DNA, 25 bp, Homo sapien
aggcagggcaaattgggccctggat

SEQ ID NO: 44013 - DNA, 25 bp, Homo sapien
tttgtcaagagatttgaaggcacgg

SEQ ID NO: 44014 - DNA, 25 bp, Homo sapien
gagcagaatatagacaaaggcactg

SEQ ID NO: 44015 - DNA, 25 bp, Homo sapien
ggtgactcctatagcaaggcggtga

SEQ ID NO: 44016 - DNA, 25 bp, Homo sapien
taacaagtactgagagaacaaaagc

SEQ ID NO: 44017 - DNA, 25 bp, Homo sapien
ttgttagagtgtcctagagccaggg

SEQ ID NO: 44018 - DNA, 25 bp, Homo sapien
gtctggggctccagttcaggaatac

SEQ ID NO: 44019 - DNA, 25 bp, Homo sapien
gccactcctggatgttcacctggat

SEQ ID NO: 44020 - DNA, 25 bp, Homo sapien
tgggtaacaagtactgagagaacaa

SEQ ID NO: 44021 - DNA, 25 bp, Homo sapien
ggcaaattgggccctggatgttgag

SEQ ID NO: 44022 - DNA, 25 bp, Homo sapien
ggaatacatagtcagctgcagccac

SEQ ID NO: 44023 - DNA, 25 bp, Homo sapien
aggcagggcaaattgggccctggat

SEQ ID NO: 44024 - DNA, 25 bp, Homo sapien
tttgtcaagagatttgaaggcacgg

SEQ ID NO: 44025 - DNA, 25 bp, Homo sapien
gagcagaatatagacaaaggcactg

SEQ ID NO: 44026 - DNA, 25 bp, Homo sapien
ggtgactcctatagcaaggcggtga

SEQ ID NO: 44027 - DNA, 25 bp, Homo sapien
taacaagtactgagagaacaaaagc

SEQ ID NO: 44028 - DNA, 25 bp, Homo sapien
gtctggggctccagttcaggaatac

SEQ ID NO: 44029 - DNA, 25 bp, Homo sapien
tgggtaacaagtactgagagaacaa

SEQ ID NO: 44030 - DNA, 25 bp, Homo sapien
gccactcctggatgttcacctggat

SEQ ID NO: 44031 - DNA, 25 bp, Homo sapien
ggcaaattgggccctggatgttgag

SEQ ID NO: 44032 - DNA, 25 bp, Homo sapien
aggcagggcaaattgggccctggat

SEQ ID NO: 44033 - DNA, 25 bp, Homo sapien
ggaatacatagtcagctgcagccac

SEQ ID NO: 44034 - DNA, 25 bp, Homo sapien
tttgtcaagagatttgaaggcacgg

SEQ ID NO: 44035 - DNA, 25 bp, Homo sapien
gagcagaatatagacaaaggcactg

SEQ ID NO: 44036 - DNA, 25 bp, Homo sapien
ggtgactcctatagcaaggcggtga

SEQ ID NO: 44037 - DNA, 25 bp, Homo sapien
taacaagtactgagagaacaaaagc

SEQ ID NO: 44038 - DNA, 25 bp, Homo sapien
ttgttagagtgtcctagagccaggg

SEQ ID NO: 44039 - DNA, 25 bp, Homo sapien
tgggtaacaagtactgagagaacaa

SEQ ID NO: 44040 - DNA, 25 bp, Homo sapien
gtctggggctccagttcaggaatac

SEQ ID NO: 44041 - DNA, 25 bp, Homo sapien
ttgttagagtgtcctagagccaggg

SEQ ID NO: 44042 - DNA, 25 bp, Homo sapien
gccactcctggatgttcacctggat

SEQ ID NO: 44043 - DNA, 25 bp, Homo sapien
ggcaaattgggccctggatgttgag

SEQ ID NO: 44044 - DNA, 25 bp, Homo sapien
ggaatacatagtcagctgcagccac

SEQ ID NO: 44045 - DNA, 25 bp, Homo sapien
aggcagggcaaattgggccctggat

SEQ ID NO: 44046 - DNA, 25 bp, Homo sapien
tttgtcaagagatttgaaggcacgg

SEQ ID NO: 44047 - DNA, 25 bp, Homo sapien
gagcagaatatagacaaaggcactg

SEQ ID NO: 44048 - DNA, 25 bp, Homo sapien
ggtgactcctatagcaaggcggtga

SEQ ID NO: 44049 - DNA, 25 bp, Homo sapien
taacaagtactgagagaacaaaagc

SEQ ID NO: 44050 - DNA, 25 bp, Homo sapien
gtctggggctccagttcaggaatac

SEQ ID NO: 44051 - DNA, 25 bp, Homo sapien
gccactcctggatgttcacctggat

SEQ ID NO: 44052 - DNA, 25 bp, Homo sapien
tgggtaacaagtactgagagaacaa

SEQ ID NO: 44053 - DNA, 25 bp, Homo sapien
ttgttagagtgtcctagagccaggg

SEQ ID NO: 44054 - DNA, 25 bp, Homo sapien
ggcaaattgggccctggatgttgag

SEQ ID NO: 44055 - DNA, 25 bp, Homo sapien
aggcagggcaaattgggccctggat

SEQ ID NO: 44056 - DNA, 25 bp, Homo sapien
ggaatacatagtcagctgcagccac

SEQ ID NO: 44057 - DNA, 25 bp, Homo sapien
tttgtcaagagatttgaaggcacgg

SEQ ID NO: 44058 - DNA, 25 bp, Homo sapien
gagcagaatatagacaaaggcactg

SEQ ID NO: 44059 - DNA, 25 bp, Homo sapien
ggtgactcctatagcaaggcggtga

SEQ ID NO: 44060 - DNA, 25 bp, Homo sapien
taacaagtactgagagaacaaaagc

SEQ ID NO: 44061 - DNA, 25 bp, Homo sapien
ttgttagagtgtcctagagccaggg

SEQ ID NO: 44062 - DNA, 25 bp, Homo sapien
gtctggggctccagttcaggaatac

SEQ ID NO: 44063 - DNA, 25 bp, Homo sapien
tgggtaacaagtactgagagaacaa

SEQ ID NO: 44064 - DNA, 25 bp, Homo sapien
gccactcctggatgttcacctggat

SEQ ID NO: 44065 - DNA, 25 bp, Homo sapien
ggcaaattgggccctggatgttgag

SEQ ID NO: 44066 - DNA, 25 bp, Homo sapien
ggaatacatagtcagctgcagccac

SEQ ID NO: 44067 - DNA, 25 bp, Homo sapien
aggcagggcaaattgggccctggat

SEQ ID NO: 44068 - DNA, 25 bp, Homo sapien
tttgtcaagagatttgaaggcacgg

SEQ ID NO: 44069 - DNA, 25 bp, Homo sapien
gagcagaatatagacaaaggcactg

SEQ ID NO: 44070 - DNA, 25 bp, Homo sapien
ggtgactcctatagcaaggcggtga

SEQ ID NO: 44071 - DNA, 25 bp, Homo sapien
taacaagtactgagagaacaaaagc

SEQ ID NO: 44072 - DNA, 25 bp, Homo sapien
gagcagaatatagacaaaggcactg

SEQ ID NO: 44073 - DNA, 25 bp, Homo sapien
ttgttagagtgtcctagagccaggg

SEQ ID NO: 44074 - DNA, 25 bp, Homo sapien
gccactcctggatgttcacctggat

SEQ ID NO: 44075 - DNA, 25 bp, Homo sapien
ggcaaattgggccctggatgttgag

SEQ ID NO: 44076 - DNA, 25 bp, Homo sapien
aggcagggcaaattgggccctggat

SEQ ID NO: 44077 - DNA, 25 bp, Homo sapien
ggtgactcctatagcaaggcggtga

SEQ ID NO: 44078 - DNA, 25 bp, Homo sapien
gtctggggctccagttcaggaatac

SEQ ID NO: 44079 - DNA, 25 bp, Homo sapien
tgggtaacaagtactgagagaacaa

SEQ ID NO: 44080 - DNA, 25 bp, Homo sapien
taacaagtactgagagaacaaaagc

SEQ ID NO: 44081 - DNA, 25 bp, Homo sapien
tttgtcaagagatttgaaggcacgg

SEQ ID NO: 44082 - DNA, 25 bp, Homo sapien
ggaatacatagtcagctgcagccac

SEQ ID NO: 44083 - DNA, 25 bp, Homo sapien
gtctggggctccagttcaggaatac

SEQ ID NO: 44084 - DNA, 25 bp, Homo sapien
tgggtaacaagtactgagagaacaa

SEQ ID NO: 44085 - DNA, 25 bp, Homo sapien
gccactcctggatgttcacctggat

SEQ ID NO: 44086 - DNA, 25 bp, Homo sapien
ttgttagagtgtcctagagccaggg

SEQ ID NO: 44087 - DNA, 25 bp, Homo sapien
ggcaaattgggccctggatgttgag

SEQ ID NO: 44088 - DNA, 25 bp, Homo sapien
ggaatacatagtcagctgcagccac

SEQ ID NO: 44089 - DNA, 25 bp, Homo sapien
aggcagggcaaattgggccctggat

SEQ ID NO: 44090 - DNA, 25 bp, Homo sapien
tttgtcaagagatttgaaggcacgg

SEQ ID NO: 44091 - DNA, 25 bp, Homo sapien
gagcagaatatagacaaaggcactg

SEQ ID NO: 44092 - DNA, 25 bp, Homo sapien
ggtgactcctatagcaaggcggtga

SEQ ID NO: 44093 - DNA, 25 bp, Homo sapien
taacaagtactgagagaacaaaagc

SEQ ID NO: 44094 - DNA, 25 bp, Homo sapien
tttgtcaagagatttgaaggcacgg

SEQ ID NO: 44095 - DNA, 25 bp, Homo sapien
gccactcctggatgttcacctggat

SEQ ID NO: 44096 - DNA, 25 bp, Homo sapien
ggaatacatagtcagctgcagccac

SEQ ID NO: 44097 - DNA, 25 bp, Homo sapien
gtctggggctccagttcaggaatac

SEQ ID NO: 44098 - DNA, 25 bp, Homo sapien
ggtgactcctatagcaaggcggtga

SEQ ID NO: 44099 - DNA, 25 bp, Homo sapien
taacaagtactgagagaacaaaagc

SEQ ID NO: 44100 - DNA, 25 bp, Homo sapien
tgggtaacaagtactgagagaacaa

SEQ ID NO: 44101 - DNA, 25 bp, Homo sapien
ggcaaattgggccctggatgttgag

SEQ ID NO: 44102 - DNA, 25 bp, Homo sapien
aggcagggcaaattgggccctggat

SEQ ID NO: 44103 - DNA, 25 bp, Homo sapien
ttgttagagtgtcctagagccaggg

SEQ ID NO: 44104 - DNA, 25 bp, Homo sapien
gagcagaatatagacaaaggcactg

SEQ ID NO: 44105 - DNA, 25 bp, Homo sapien
ctcaacatccagggcccaatttgcc

SEQ ID NO: 44106 - DNA, 25 bp, Homo sapien
gtattcctgaactggagccccagac

SEQ ID NO: 44107 - DNA, 25 bp, Homo sapien
cagtgcctttgtctatattctgctc

SEQ ID NO: 44108 - DNA, 25 bp, Homo sapien
gtggctgcagctgactatgtattcc

SEQ ID NO: 44109 - DNA, 25 bp, Homo sapien
ttgttctctcagtacttgttaccca

SEQ ID NO: 44110 - DNA, 25 bp, Homo sapien
ccgtgccttcaaatctcttgacaaa

SEQ ID NO: 44111 - DNA, 25 bp, Homo sapien
ccctggctctaggacactctaacaa

SEQ ID NO: 44112 - DNA, 25 bp, Homo sapien
atccaggtgaacatccaggagtggc

SEQ ID NO: 44113 - DNA, 25 bp, Homo sapien
atccagggcccaatttgccctgcct

SEQ ID NO: 44114 - DNA, 25 bp, Homo sapien
gcttttgttctctcagtacttgtta

SEQ ID NO: 44115 - DNA, 25 bp, Homo sapien
tcaccgccttgctataggagtcacc

SEQ ID NO: 44116 - DNA, 25 bp, Homo sapien
gtctggggctccagttcaggaatac

SEQ ID NO: 44117 - DNA, 25 bp, Homo sapien
tgggtaacaagtactgagagaacaa

SEQ ID NO: 44118 - DNA, 25 bp, Homo sapien
gccactcctggatgttcacctggat

SEQ ID NO: 44119 - DNA, 25 bp, Homo sapien
ggcaaattgggccctggatgttgag

SEQ ID NO: 44120 - DNA, 25 bp, Homo sapien
ttgttagagtgtcctagagccaggg

SEQ ID NO: 44121 - DNA, 25 bp, Homo sapien
ggaatacatagtcagctgcagccac

SEQ ID NO: 44122 - DNA, 25 bp, Homo sapien
aggcagggcaaattgggccctggat

SEQ ID NO: 44123 - DNA, 25 bp, Homo sapien
tttgtcaagagatttgaaggcacgg

SEQ ID NO: 44124 - DNA, 25 bp, Homo sapien
gagcagaatatagacaaaggcactg

SEQ ID NO: 44125 - DNA, 25 bp, Homo sapien
ggtgactcctatagcaaggcggtga

SEQ ID NO: 44126 - DNA, 25 bp, Homo sapien
taacaagtactgagagaacaaaagc

SEQ ID NO: 44127 - DNA, 25 bp, Homo sapien
aggcagggcaaattgggccctggat

SEQ ID NO: 44128 - DNA, 25 bp, Homo sapien
gagcagaatatagacaaaggcactg

SEQ ID NO: 44129 - DNA, 25 bp, Homo sapien
gtctggggctccagttcaggaatac

SEQ ID NO: 44130 - DNA, 25 bp, Homo sapien
taacaagtactgagagaacaaaagc

SEQ ID NO: 44131 - DNA, 25 bp, Homo sapien
gccactcctggatgttcacctggat

SEQ ID NO: 44132 - DNA, 25 bp, Homo sapien
ggcaaattgggccctggatgttgag

SEQ ID NO: 44133 - DNA, 25 bp, Homo sapien
tgggtaacaagtactgagagaacaa

SEQ ID NO: 44134 - DNA, 25 bp, Homo sapien
ggaatacatagtcagctgcagccac

SEQ ID NO: 44135 - DNA, 25 bp, Homo sapien
ttgttagagtgtcctagagccaggg

SEQ ID NO: 44136 - DNA, 25 bp, Homo sapien
ggtgactcctatagcaaggcggtga

SEQ ID NO: 44137 - DNA, 25 bp, Homo sapien
tttgtcaagagatttgaaggcacgg

SEQ ID NO: 44138 - DNA, 25 bp, Homo sapien
tttgtcaagagatttgaaggcacgg

SEQ ID NO: 44139 - DNA, 25 bp, Homo sapien
gccactcctggatgttcacctggat

SEQ ID NO: 44140 - DNA, 25 bp, Homo sapien
ggaatacatagtcagctgcagccac

SEQ ID NO: 44141 - DNA, 25 bp, Homo sapien
gtctggggctccagttcaggaatac

SEQ ID NO: 44142 - DNA, 25 bp, Homo sapien
ggtgactcctatagcaaggcggtga

SEQ ID NO: 44143 - DNA, 25 bp, Homo sapien
taacaagtactgagagaacaaaagc

SEQ ID NO: 44144 - DNA, 25 bp, Homo sapien
tgggtaacaagtactgagagaacaa

SEQ ID NO: 44145 - DNA, 25 bp, Homo sapien
ggcaaattgggccctggatgttgag

SEQ ID NO: 44146 - DNA, 25 bp, Homo sapien
aggcagggcaaattgggccctggat

SEQ ID NO: 44147 - DNA, 25 bp, Homo sapien
ttgttagagtgtcctagagccaggg

SEQ ID NO: 44148 - DNA, 25 bp, Homo sapien
gagcagaatatagacaaaggcactg

SEQ ID NO: 44149 - DNA, 25 bp, Homo sapien
tttgtcaagagatttgaaggcacgg

SEQ ID NO: 44150 - DNA, 25 bp, Homo sapien
gagcagaatatagacaaaggcactg

SEQ ID NO: 44151 - DNA, 25 bp, Homo sapien
aggcagggcaaattgggccctggat

SEQ ID NO: 44152 - DNA, 25 bp, Homo sapien
ggaatacatagtcagctgcagccac

SEQ ID NO: 44153 - DNA, 25 bp, Homo sapien
gccactcctggatgttcacctggat

SEQ ID NO: 44154 - DNA, 25 bp, Homo sapien
tgggtaacaagtactgagagaacaa

SEQ ID NO: 44155 - DNA, 25 bp, Homo sapien
taacaagtactgagagaacaaaagc

SEQ ID NO: 44156 - DNA, 25 bp, Homo sapien
ttgttagagtgtcctagagccaggg

SEQ ID NO: 44157 - DNA, 25 bp, Homo sapien
ggtgactcctatagcaaggcggtga

SEQ ID NO: 44158 - DNA, 25 bp, Homo sapien
gtctggggctccagttcaggaatac

SEQ ID NO: 44159 - DNA, 25 bp, Homo sapien
ggcaaattgggccctggatgttgag

SEQ ID NO: 44160 - DNA, 25 bp, Homo sapien
tttgtcaagagatttgaaggcacgg

SEQ ID NO: 44161 - DNA, 25 bp, Homo sapien
gccactcctggatgttcacctggat

SEQ ID NO: 44162 - DNA, 25 bp, Homo sapien
ggaatacatagtcagctgcagccac

SEQ ID NO: 44163 - DNA, 25 bp, Homo sapien
gtctggggctccagttcaggaatac

SEQ ID NO: 44164 - DNA, 25 bp, Homo sapien
ggtgactcctatagcaaggcggtga

SEQ ID NO: 44165 - DNA, 25 bp, Homo sapien
taacaagtactgagagaacaaaagc

SEQ ID NO: 44166 - DNA, 25 bp, Homo sapien
tgggtaacaagtactgagagaacaa

SEQ ID NO: 44167 - DNA, 25 bp, Homo sapien
ggcaaattgggccctggatgttgag

SEQ ID NO: 44168 - DNA, 25 bp, Homo sapien
aggcagggcaaattgggccctggat

SEQ ID NO: 44169 - DNA, 25 bp, Homo sapien
ttgttagagtgtcctagagccaggg

SEQ ID NO: 44170 - DNA, 25 bp, Homo sapien
gagcagaatatagacaaaggcactg

SEQ ID NO: 44171 - DNA, 25 bp, Homo sapien
tgggtaacaagtactgagagaacaa

SEQ ID NO: 44172 - DNA, 25 bp, Homo sapien
aggcagggcaaattgggccctggat

SEQ ID NO: 44173 - DNA, 25 bp, Homo sapien
taacaagtactgagagaacaaaagc

SEQ ID NO: 44174 - DNA, 25 bp, Homo sapien
ggcaaattgggccctggatgttgag

SEQ ID NO: 44175 - DNA, 25 bp, Homo sapien
ggtgactcctatagcaaggcggtga

SEQ ID NO: 44176 - DNA, 25 bp, Homo sapien
ggaatacatagtcagctgcagccac

SEQ ID NO: 44177 - DNA, 25 bp, Homo sapien
gtctggggctccagttcaggaatac

SEQ ID NO: 44178 - DNA, 25 bp, Homo sapien
gagcagaatatagacaaaggcactg

SEQ ID NO: 44179 - DNA, 25 bp, Homo sapien
ttgttagagtgtcctagagccaggg

SEQ ID NO: 44180 - DNA, 25 bp, Homo sapien
tttgtcaagagatttgaaggcacgg

SEQ ID NO: 44181 - DNA, 25 bp, Homo sapien
gccactcctggatgttcacctggat

SEQ ID NO: 44182 - DNA, 25 bp, Homo sapien
taacaagtactgagagaacaaaagc

SEQ ID NO: 44183 - DNA, 25 bp, Homo sapien
tgggtaacaagtactgagagaacaa

SEQ ID NO: 44184 - DNA, 25 bp, Homo sapien
ggcaaattgggccctggatgttgag

SEQ ID NO: 44185 - DNA, 25 bp, Homo sapien
aggcagggcaaattgggccctggat

SEQ ID NO: 44186 - DNA, 25 bp, Homo sapien
ttgttagagtgtcctagagccaggg

SEQ ID NO: 44187 - DNA, 25 bp, Homo sapien
gagcagaatatagacaaaggcactg

SEQ ID NO: 44188 - DNA, 25 bp, Homo sapien
tttgtcaagagatttgaaggcacgg

SEQ ID NO: 44189 - DNA, 25 bp, Homo sapien
gccactcctggatgttcacctggat

SEQ ID NO: 44190 - DNA, 25 bp, Homo sapien
ggaatacatagtcagctgcagccac

SEQ ID NO: 44191 - DNA, 25 bp, Homo sapien
gtctggggctccagttcaggaatac

SEQ ID NO: 44192 - DNA, 25 bp, Homo sapien
ggtgactcctatagcaaggcggtga

SEQ ID NO: 44193 - DNA, 25 bp, Homo sapien
tttgtcaagagatttgaaggcacgg

SEQ ID NO: 44194 - DNA, 25 bp, Homo sapien
gccactcctggatgttcacctggat

SEQ ID NO: 44195 - DNA, 25 bp, Homo sapien
ggaatacatagtcagctgcagccac

SEQ ID NO: 44196 - DNA, 25 bp, Homo sapien
gtctggggctccagttcaggaatac

SEQ ID NO: 44197 - DNA, 25 bp, Homo sapien
ggtgactcctatagcaaggcggtga

SEQ ID NO: 44198 - DNA, 25 bp, Homo sapien
taacaagtactgagagaacaaaagc

SEQ ID NO: 44199 - DNA, 25 bp, Homo sapien
tgggtaacaagtactgagagaacaa

SEQ ID NO: 44200 - DNA, 25 bp, Homo sapien
ggcaaattgggccctggatgttgag

SEQ ID NO: 44201 - DNA, 25 bp, Homo sapien
aggcagggcaaattgggccctggat

SEQ ID NO: 44202 - DNA, 25 bp, Homo sapien
ttgttagagtgtcctagagccaggg

SEQ ID NO: 44203 - DNA, 25 bp, Homo sapien
gagcagaatatagacaaaggcactg

SEQ ID NO: 44204 - DNA, 25 bp, Homo sapien
gagcagaatatagacaaaggcactg

SEQ ID NO: 44205 - DNA, 25 bp, Homo sapien
aggcagggcaaattgggccctggat

SEQ ID NO: 44206 - DNA, 25 bp, Homo sapien
gtctggggctccagttcaggaatac

SEQ ID NO: 44207 - DNA, 25 bp, Homo sapien
ggcaaattgggccctggatgttgag

SEQ ID NO: 44208 - DNA, 25 bp, Homo sapien
tttgtcaagagatttgaaggcacgg

SEQ ID NO: 44209 - DNA, 25 bp, Homo sapien
ttgttagagtgtcctagagccaggg

SEQ ID NO: 44210 - DNA, 25 bp, Homo sapien
ggtgactcctatagcaaggcggtga

SEQ ID NO: 44211 - DNA, 25 bp, Homo sapien
gccactcctggatgttcacctggat

SEQ ID NO: 44212 - DNA, 25 bp, Homo sapien
taacaagtactgagagaacaaaagc

SEQ ID NO: 44213 - DNA, 25 bp, Homo sapien
tgggtaacaagtactgagagaacaa

SEQ ID NO: 44214 - DNA, 25 bp, Homo sapien
ggaatacatagtcagctgcagccac

SEQ ID NO: 44215 - DNA, 25 bp, Homo sapien
tttgtcaagagatttgaaggcacgg

SEQ ID NO: 44216 - DNA, 25 bp, Homo sapien
gccactcctggatgttcacctggat

SEQ ID NO: 44217 - DNA, 25 bp, Homo sapien
ggaatacatagtcagctgcagccac

SEQ ID NO: 44218 - DNA, 25 bp, Homo sapien
gtctggggctccagttcaggaatac

SEQ ID NO: 44219 - DNA, 25 bp, Homo sapien
ggtgactcctatagcaaggcggtga

SEQ ID NO: 44220 - DNA, 25 bp, Homo sapien
taacaagtactgagagaacaaaagc

SEQ ID NO: 44221 - DNA, 25 bp, Homo sapien
tgggtaacaagtactgagagaacaa

SEQ ID NO: 44222 - DNA, 25 bp, Homo sapien
ggcaaattgggccctggatgttgag

SEQ ID NO: 44223 - DNA, 25 bp, Homo sapien
aggcagggcaaattgggccctggat

SEQ ID NO: 44224 - DNA, 25 bp, Homo sapien
ttgttagagtgtcctagagccaggg

SEQ ID NO: 44225 - DNA, 25 bp, Homo sapien
gagcagaatatagacaaaggcactg

SEQ ID NO: 44226 - DNA, 25 bp, Homo sapien
ggaatacatagtcagctgcagccac

SEQ ID NO: 44227 - DNA, 25 bp, Homo sapien
gagcagaatatagacaaaggcactg

SEQ ID NO: 44228 - DNA, 25 bp, Homo sapien
tgggtaacaagtactgagagaacaa

SEQ ID NO: 44229 - DNA, 25 bp, Homo sapien
tttgtcaagagatttgaaggcacgg

SEQ ID NO: 44230 - DNA, 25 bp, Homo sapien
gccactcctggatgttcacctggat

SEQ ID NO: 44231 - DNA, 25 bp, Homo sapien
gtctggggctccagttcaggaatac

SEQ ID NO: 44232 - DNA, 25 bp, Homo sapien
ttgttagagtgtcctagagccaggg

SEQ ID NO: 44233 - DNA, 25 bp, Homo sapien
taacaagtactgagagaacaaaagc

SEQ ID NO: 44234 - DNA, 25 bp, Homo sapien
aggcagggcaaattgggccctggat

SEQ ID NO: 44235 - DNA, 25 bp, Homo sapien
ggcaaattgggccctggatgttgag

SEQ ID NO: 44236 - DNA, 25 bp, Homo sapien
ggtgactcctatagcaaggcggtga

SEQ ID NO: 44237 - DNA, 25 bp, Homo sapien
tttgtcaagagatttgaaggcacgg

SEQ ID NO: 44238 - DNA, 25 bp, Homo sapien
gccactcctggatgttcacctggat

SEQ ID NO: 44239 - DNA, 25 bp, Homo sapien
ggaatacatagtcagctgcagccac

SEQ ID NO: 44240 - DNA, 25 bp, Homo sapien
gtctggggctccagttcaggaatac

SEQ ID NO: 44241 - DNA, 25 bp, Homo sapien
ggtgactcctatagcaaggcggtga

SEQ ID NO: 44242 - DNA, 25 bp, Homo sapien
taacaagtactgagagaacaaaagc

SEQ ID NO: 44243 - DNA, 25 bp, Homo sapien
tgggtaacaagtactgagagaacaa

SEQ ID NO: 44244 - DNA, 25 bp, Homo sapien
ggcaaattgggccctggatgttgag

SEQ ID NO: 44245 - DNA, 25 bp, Homo sapien
aggcagggcaaattgggccctggat

SEQ ID NO: 44246 - DNA, 25 bp, Homo sapien
ttgttagagtgtcctagagccaggg

SEQ ID NO: 44247 - DNA, 25 bp, Homo sapien
gagcagaatatagacaaaggcactg

SEQ ID NO: 44248 - DNA, 25 bp, Homo sapien
ggcaaattgggccctggatgttgag

SEQ ID NO: 44249 - DNA, 25 bp, Homo sapien
ttgttagagtgtcctagagccaggg

SEQ ID NO: 44250 - DNA, 25 bp, Homo sapien
gccactcctggatgttcacctggat

SEQ ID NO: 44251 - DNA, 25 bp, Homo sapien
gtctggggctccagttcaggaatac

SEQ ID NO: 44252 - DNA, 25 bp, Homo sapien
ggaatacatagtcagctgcagccac

SEQ ID NO: 44253 - DNA, 25 bp, Homo sapien
ggtgactcctatagcaaggcggtga

SEQ ID NO: 44254 - DNA, 25 bp, Homo sapien
gagcagaatatagacaaaggcactg

SEQ ID NO: 44255 - DNA, 25 bp, Homo sapien
tttgtcaagagatttgaaggcacgg

SEQ ID NO: 44256 - DNA, 25 bp, Homo sapien
taacaagtactgagagaacaaaagc

SEQ ID NO: 44257 - DNA, 25 bp, Homo sapien
tgggtaacaagtactgagagaacaa

SEQ ID NO: 44258 - DNA, 25 bp, Homo sapien
aggcagggcaaattgggccctggat

SEQ ID NO: 44259 - DNA, 25 bp, Homo sapien
tttgtcaagagatttgaaggcacgg

SEQ ID NO: 44260 - DNA, 25 bp, Homo sapien
gccactcctggatgttcacctggat

SEQ ID NO: 44261 - DNA, 25 bp, Homo sapien
ggaatacatagtcagctgcagccac

SEQ ID NO: 44262 - DNA, 25 bp, Homo sapien
gtctggggctccagttcaggaatac

SEQ ID NO: 44263 - DNA, 25 bp, Homo sapien
ggtgactcctatagcaaggcggtga

SEQ ID NO: 44264 - DNA, 25 bp, Homo sapien
taacaagtactgagagaacaaaagc

SEQ ID NO: 44265 - DNA, 25 bp, Homo sapien
tgggtaacaagtactgagagaacaa

SEQ ID NO: 44266 - DNA, 25 bp, Homo sapien
ggcaaattgggccctggatgttgag

SEQ ID NO: 44267 - DNA, 25 bp, Homo sapien
aggcagggcaaattgggccctggat

SEQ ID NO: 44268 - DNA, 25 bp, Homo sapien
ttgttagagtgtcctagagccaggg

SEQ ID NO: 44269 - DNA, 25 bp, Homo sapien
gagcagaatatagacaaaggcactg

SEQ ID NO: 44270 - DNA, 25 bp, Homo sapien
tgggtaacaagtactgagagaacaa

SEQ ID NO: 44271 - DNA, 25 bp, Homo sapien
gccactcctggatgttcacctggat

SEQ ID NO: 44272 - DNA, 25 bp, Homo sapien
ggtgactcctatagcaaggcggtga

SEQ ID NO: 44273 - DNA, 25 bp, Homo sapien
gagcagaatatagacaaaggcactg

SEQ ID NO: 44274 - DNA, 25 bp, Homo sapien
ggaatacatagtcagctgcagccac

SEQ ID NO: 44275 - DNA, 25 bp, Homo sapien
ggcaaattgggccctggatgttgag

SEQ ID NO: 44276 - DNA, 25 bp, Homo sapien
aggcagggcaaattgggccctggat

SEQ ID NO: 44277 - DNA, 25 bp, Homo sapien
gtctggggctccagttcaggaatac

SEQ ID NO: 44278 - DNA, 25 bp, Homo sapien
ttgttagagtgtcctagagccaggg

SEQ ID NO: 44279 - DNA, 25 bp, Homo sapien
tttgtcaagagatttgaaggcacgg

SEQ ID NO: 44280 - DNA, 25 bp, Homo sapien
taacaagtactgagagaacaaaagc

SEQ ID NO: 44281 - DNA, 25 bp, Homo sapien
tttgtcaagagatttgaaggcacgg

SEQ ID NO: 44282 - DNA, 25 bp, Homo sapien
gccactcctggatgttcacctggat

SEQ ID NO: 44283 - DNA, 25 bp, Homo sapien
ggaatacatagtcagctgcagccac

SEQ ID NO: 44284 - DNA, 25 bp, Homo sapien
gtctggggctccagttcaggaatac

SEQ ID NO: 44285 - DNA, 25 bp, Homo sapien
ggtgactcctatagcaaggcggtga

SEQ ID NO: 44286 - DNA, 25 bp, Homo sapien
taacaagtactgagagaacaaaagc

SEQ ID NO: 44287 - DNA, 25 bp, Homo sapien
tgggtaacaagtactgagagaacaa

SEQ ID NO: 44288 - DNA, 25 bp, Homo sapien
ggcaaattgggccctggatgttgag

SEQ ID NO: 44289 - DNA, 25 bp, Homo sapien
aggcagggcaaattgggccctggat

SEQ ID NO: 44290 - DNA, 25 bp, Homo sapien
ttgttagagtgtcctagagccaggg

SEQ ID NO: 44291 - DNA, 25 bp, Homo sapien
gagcagaatatagacaaaggcactg

SEQ ID NO: 44292 - DNA, 25 bp, Homo sapien
ggaatacatagtcagctgcagccac

SEQ ID NO: 44293 - DNA, 25 bp, Homo sapien
ggcaaattgggccctggatgttgag

SEQ ID NO: 44294 - DNA, 25 bp, Homo sapien
aggcagggcaaattgggccctggat

SEQ ID NO: 44295 - DNA, 25 bp, Homo sapien
gagcagaatatagacaaaggcactg

SEQ ID NO: 44296 - DNA, 25 bp, Homo sapien
ttgttagagtgtcctagagccaggg

SEQ ID NO: 44297 - DNA, 25 bp, Homo sapien
ggtgactcctatagcaaggcggtga

SEQ ID NO: 44298 - DNA, 25 bp, Homo sapien
taacaagtactgagagaacaaaagc

SEQ ID NO: 44299 - DNA, 25 bp, Homo sapien
tttgtcaagagatttgaaggcacgg

SEQ ID NO: 44300 - DNA, 25 bp, Homo sapien
tgggtaacaagtactgagagaacaa

SEQ ID NO: 44301 - DNA, 25 bp, Homo sapien
gccactcctggatgttcacctggat

SEQ ID NO: 44302 - DNA, 25 bp, Homo sapien
gtctggggctccagttcaggaatac

SEQ ID NO: 44303 - DNA, 25 bp, Homo sapien
ggcaaattgggccctggatgttgag

SEQ ID NO: 44304 - DNA, 25 bp, Homo sapien
gagcagaatatagacaaaggcactg

SEQ ID NO: 44305 - DNA, 25 bp, Homo sapien
aggcagggcaaattgggccctggat

SEQ ID NO: 44306 - DNA, 25 bp, Homo sapien
tttgtcaagagatttgaaggcacgg

SEQ ID NO: 44307 - DNA, 25 bp, Homo sapien
ggtgactcctatagcaaggcggtga

SEQ ID NO: 44308 - DNA, 25 bp, Homo sapien
tgggtaacaagtactgagagaacaa

SEQ ID NO: 44309 - DNA, 25 bp, Homo sapien
ggaatacatagtcagctgcagccac

SEQ ID NO: 44310 - DNA, 25 bp, Homo sapien
gccactcctggatgttcacctggat

SEQ ID NO: 44311 - DNA, 25 bp, Homo sapien
taacaagtactgagagaacaaaagc

SEQ ID NO: 44312 - DNA, 25 bp, Homo sapien
gtctggggctccagttcaggaatac

SEQ ID NO: 44313 - DNA, 25 bp, Homo sapien
ttgttagagtgtcctagagccaggg

SEQ ID NO: 44314 - DNA, 25 bp, Homo sapien
tttgtcaagagatttgaaggcacgg

SEQ ID NO: 44315 - DNA, 25 bp, Homo sapien
gccactcctggatgttcacctggat

SEQ ID NO: 44316 - DNA, 25 bp, Homo sapien
ggaatacatagtcagctgcagccac

SEQ ID NO: 44317 - DNA, 25 bp, Homo sapien
gtctggggctccagttcaggaatac

SEQ ID NO: 44318 - DNA, 25 bp, Homo sapien
ggtgactcctatagcaaggcggtga

SEQ ID NO: 44319 - DNA, 25 bp, Homo sapien
taacaagtactgagagaacaaaagc

SEQ ID NO: 44320 - DNA, 25 bp, Homo sapien
tgggtaacaagtactgagagaacaa

SEQ ID NO: 44321 - DNA, 25 bp, Homo sapien
ggcaaattgggccctggatgttgag

SEQ ID NO: 44322 - DNA, 25 bp, Homo sapien
aggcagggcaaattgggccctggat

SEQ ID NO: 44323 - DNA, 25 bp, Homo sapien
ttgttagagtgtcctagagccaggg

SEQ ID NO: 44324 - DNA, 25 bp, Homo sapien
gagcagaatatagacaaaggcactg

SEQ ID NO: 44325 - DNA, 25 bp, Homo sapien
ttgttagagtgtcctagagccaggg

SEQ ID NO: 44326 - DNA, 25 bp, Homo sapien
ggaatacatagtcagctgcagccac

SEQ ID NO: 44327 - DNA, 25 bp, Homo sapien
taacaagtactgagagaacaaaagc

SEQ ID NO: 44328 - DNA, 25 bp, Homo sapien
tttgtcaagagatttgaaggcacgg

SEQ ID NO: 44329 - DNA, 25 bp, Homo sapien
ggtgactcctatagcaaggcggtga

SEQ ID NO: 44330 - DNA, 25 bp, Homo sapien
ggcaaattgggccctggatgttgag

SEQ ID NO: 44331 - DNA, 25 bp, Homo sapien
gtctggggctccagttcaggaatac

SEQ ID NO: 44332 - DNA, 25 bp, Homo sapien
aggcagggcaaattgggccctggat

SEQ ID NO: 44333 - DNA, 25 bp, Homo sapien
gccactcctggatgttcacctggat

SEQ ID NO: 44334 - DNA, 25 bp, Homo sapien
tgggtaacaagtactgagagaacaa

SEQ ID NO: 44335 - DNA, 25 bp, Homo sapien
gagcagaatatagacaaaggcactg

SEQ ID NO: 44336 - DNA, 25 bp, Homo sapien
taacaagtactgagagaacaaaagc

SEQ ID NO: 44337 - DNA, 25 bp, Homo sapien
tgggtaacaagtactgagagaacaa

SEQ ID NO: 44338 - DNA, 25 bp, Homo sapien
ggcaaattgggccctggatgttgag

SEQ ID NO: 44339 - DNA, 25 bp, Homo sapien
aggcagggcaaattgggccctggat

SEQ ID NO: 44340 - DNA, 25 bp, Homo sapien
ttgttagagtgtcctagagccaggg

SEQ ID NO: 44341 - DNA, 25 bp, Homo sapien
gagcagaatatagacaaaggcactg

SEQ ID NO: 44342 - DNA, 25 bp, Homo sapien
tttgtcaagagatttgaaggcacgg

SEQ ID NO: 44343 - DNA, 25 bp, Homo sapien
gccactcctggatgttcacctggat

SEQ ID NO: 44344 - DNA, 25 bp, Homo sapien
ggaatacatagtcagctgcagccac

SEQ ID NO: 44345 - DNA, 25 bp, Homo sapien
gtctggggctccagttcaggaatac

SEQ ID NO: 44346 - DNA, 25 bp, Homo sapien
ggtgactcctatagcaaggcggtga

SEQ ID NO: 44347 - DNA, 25 bp, Homo sapien
ttgttagagtgtcctagagccaggg

SEQ ID NO: 44348 - DNA, 25 bp, Homo sapien
ggtgactcctatagcaaggcggtga

SEQ ID NO: 44349 - DNA, 25 bp, Homo sapien
aggcagggcaaattgggccctggat

SEQ ID NO: 44350 - DNA, 25 bp, Homo sapien
gtctggggctccagttcaggaatac

SEQ ID NO: 44351 - DNA, 25 bp, Homo sapien
gccactcctggatgttcacctggat

SEQ ID NO: 44352 - DNA, 25 bp, Homo sapien
ggcaaattgggccctggatgttgag

SEQ ID NO: 44353 - DNA, 25 bp, Homo sapien
gagcagaatatagacaaaggcactg

SEQ ID NO: 44354 - DNA, 25 bp, Homo sapien
ggaatacatagtcagctgcagccac

SEQ ID NO: 44355 - DNA, 25 bp, Homo sapien
taacaagtactgagagaacaaaagc

SEQ ID NO: 44356 - DNA, 25 bp, Homo sapien
tgggtaacaagtactgagagaacaa

SEQ ID NO: 44357 - DNA, 25 bp, Homo sapien
tttgtcaagagatttgaaggcacgg

SEQ ID NO: 44358 - DNA, 25 bp, Homo sapien
tttgtcaagagatttgaaggcacgg

SEQ ID NO: 44359 - DNA, 25 bp, Homo sapien
gccactcctggatgttcacctggat

SEQ ID NO: 44360 - DNA, 25 bp, Homo sapien
ggaatacatagtcagctgcagccac

SEQ ID NO: 44361 - DNA, 25 bp, Homo sapien
gtctggggctccagttcaggaatac

SEQ ID NO: 44362 - DNA, 25 bp, Homo sapien
ggtgactcctatagcaaggcggtga

SEQ ID NO: 44363 - DNA, 25 bp, Homo sapien
taacaagtactgagagaacaaaagc

SEQ ID NO: 44364 - DNA, 25 bp, Homo sapien
tgggtaacaagtactgagagaacaa

SEQ ID NO: 44365 - DNA, 25 bp, Homo sapien
ggcaaattgggccctggatgttgag

SEQ ID NO: 44366 - DNA, 25 bp, Homo sapien
aggcagggcaaattgggccctggat

SEQ ID NO: 44367 - DNA, 25 bp, Homo sapien
ttgttagagtgtcctagagccaggg

SEQ ID NO: 44368 - DNA, 25 bp, Homo sapien
gagcagaatatagacaaaggcactg

SEQ ID NO: 44369 - DNA, 25 bp, Homo sapien
aggcagggcaaattgggccctggat

SEQ ID NO: 44370 - DNA, 25 bp, Homo sapien
ggtgactcctatagcaaggcggtga

SEQ ID NO: 44371 - DNA, 25 bp, Homo sapien
gccactcctggatgttcacctggat

SEQ ID NO: 44372 - DNA, 25 bp, Homo sapien
tttgtcaagagatttgaaggcacgg

SEQ ID NO: 44373 - DNA, 25 bp, Homo sapien
tgggtaacaagtactgagagaacaa

SEQ ID NO: 44374 - DNA, 25 bp, Homo sapien
ggaatacatagtcagctgcagccac

SEQ ID NO: 44375 - DNA, 25 bp, Homo sapien
gtctggggctccagttcaggaatac

SEQ ID NO: 44376 - DNA, 25 bp, Homo sapien
ggcaaattgggccctggatgttgag

SEQ ID NO: 44377 - DNA, 25 bp, Homo sapien
gagcagaatatagacaaaggcactg

SEQ ID NO: 44378 - DNA, 25 bp, Homo sapien
ttgttagagtgtcctagagccaggg

SEQ ID NO: 44379 - DNA, 25 bp, Homo sapien
taacaagtactgagagaacaaaagc

SEQ ID NO: 44380 - DNA, 25 bp, Homo sapien
tttgtcaagagatttgaaggcacgg

SEQ ID NO: 44381 - DNA, 25 bp, Homo sapien
gccactcctggatgttcacctggat

SEQ ID NO: 44382 - DNA, 25 bp, Homo sapien
ggaatacatagtcagctgcagccac

SEQ ID NO: 44383 - DNA, 25 bp, Homo sapien
gtctggggctccagttcaggaatac

SEQ ID NO: 44384 - DNA, 25 bp, Homo sapien
ggtgactcctatagcaaggcggtga

SEQ ID NO: 44385 - DNA, 25 bp, Homo sapien
taacaagtactgagagaacaaaagc

SEQ ID NO: 44386 - DNA, 25 bp, Homo sapien
tgggtaacaagtactgagagaacaa

SEQ ID NO: 44387 - DNA, 25 bp, Homo sapien
ggcaaattgggccctggatgttgag

SEQ ID NO: 44388 - DNA, 25 bp, Homo sapien
aggcagggcaaattgggccctggat

SEQ ID NO: 44389 - DNA, 25 bp, Homo sapien
ttgttagagtgtcctagagccaggg

SEQ ID NO: 44390 - DNA, 25 bp, Homo sapien
gagcagaatatagacaaaggcactg

SEQ ID NO: 44391 - DNA, 25 bp, Homo sapien
gccactcctggatgttcacctggat

SEQ ID NO: 44392 - DNA, 25 bp, Homo sapien
ggtgactcctatagcaaggcggtga

SEQ ID NO: 44393 - DNA, 25 bp, Homo sapien
gtctggggctccagttcaggaatac

SEQ ID NO: 44394 - DNA, 25 bp, Homo sapien
tttgtcaagagatttgaaggcacgg

SEQ ID NO: 44395 - DNA, 25 bp, Homo sapien
tgggtaacaagtactgagagaacaa

SEQ ID NO: 44396 - DNA, 25 bp, Homo sapien
taacaagtactgagagaacaaaagc

SEQ ID NO: 44397 - DNA, 25 bp, Homo sapien
aggcagggcaaattgggccctggat

SEQ ID NO: 44398 - DNA, 25 bp, Homo sapien
gagcagaatatagacaaaggcactg

SEQ ID NO: 44399 - DNA, 25 bp, Homo sapien
ggaatacatagtcagctgcagccac

SEQ ID NO: 44400 - DNA, 25 bp, Homo sapien
ttgttagagtgtcctagagccaggg

SEQ ID NO: 44401 - DNA, 25 bp, Homo sapien
ggcaaattgggccctggatgttgag

SEQ ID NO: 44402 - DNA, 25 bp, Homo sapien
tttgtcaagagatttgaaggcacgg

SEQ ID NO: 44403 - DNA, 25 bp, Homo sapien
gccactcctggatgttcacctggat

SEQ ID NO: 44404 - DNA, 25 bp, Homo sapien
ggaatacatagtcagctgcagccac

SEQ ID NO: 44405 - DNA, 25 bp, Homo sapien
gtctggggctccagttcaggaatac

SEQ ID NO: 44406 - DNA, 25 bp, Homo sapien
ggtgactcctatagcaaggcggtga

SEQ ID NO: 44407 - DNA, 25 bp, Homo sapien
taacaagtactgagagaacaaaagc

SEQ ID NO: 44408 - DNA, 25 bp, Homo sapien
tgggtaacaagtactgagagaacaa

SEQ ID NO: 44409 - DNA, 25 bp, Homo sapien
ggcaaattgggccctggatgttgag

SEQ ID NO: 44410 - DNA, 25 bp, Homo sapien
aggcagggcaaattgggccctggat

SEQ ID NO: 44411 - DNA, 25 bp, Homo sapien
ttgttagagtgtcctagagccaggg

SEQ ID NO: 44412 - DNA, 25 bp, Homo sapien
gagcagaatatagacaaaggcactg

SEQ ID NO: 44413 - DNA, 25 bp, Homo sapien
tgggtaacaagtactgagagaacaa

SEQ ID NO: 44414 - DNA, 25 bp, Homo sapien
gagcagaatatagacaaaggcactg

SEQ ID NO: 44415 - DNA, 25 bp, Homo sapien
ggaatacatagtcagctgcagccac

SEQ ID NO: 44416 - DNA, 25 bp, Homo sapien
taacaagtactgagagaacaaaagc

SEQ ID NO: 44417 - DNA, 25 bp, Homo sapien
tttgtcaagagatttgaaggcacgg

SEQ ID NO: 44418 - DNA, 25 bp, Homo sapien
gccactcctggatgttcacctggat

SEQ ID NO: 44419 - DNA, 25 bp, Homo sapien
ttgttagagtgtcctagagccaggg

SEQ ID NO: 44420 - DNA, 25 bp, Homo sapien
ggtgactcctatagcaaggcggtga

SEQ ID NO: 44421 - DNA, 25 bp, Homo sapien
ggcaaattgggccctggatgttgag

SEQ ID NO: 44422 - DNA, 25 bp, Homo sapien
aggcagggcaaattgggccctggat

SEQ ID NO: 44423 - DNA, 25 bp, Homo sapien
gtctggggctccagttcaggaatac

SEQ ID NO: 44424 - DNA, 25 bp, Homo sapien
tttgtcaagagatttgaaggcacgg

SEQ ID NO: 44425 - DNA, 25 bp, Homo sapien
gccactcctggatgttcacctggat

SEQ ID NO: 44426 - DNA, 25 bp, Homo sapien
ggaatacatagtcagctgcagccac

SEQ ID NO: 44427 - DNA, 25 bp, Homo sapien
gtctggggctccagttcaggaatac

SEQ ID NO: 44428 - DNA, 25 bp, Homo sapien
ggtgactcctatagcaaggcggtga

SEQ ID NO: 44429 - DNA, 25 bp, Homo sapien
taacaagtactgagagaacaaaagc

SEQ ID NO: 44430 - DNA, 25 bp, Homo sapien
tgggtaacaagtactgagagaacaa

SEQ ID NO: 44431 - DNA, 25 bp, Homo sapien
ggcaaattgggccctggatgttgag

SEQ ID NO: 44432 - DNA, 25 bp, Homo sapien
aggcagggcaaattgggccctggat

SEQ ID NO: 44433 - DNA, 25 bp, Homo sapien
ttgttagagtgtcctagagccaggg

SEQ ID NO: 44434 - DNA, 25 bp, Homo sapien
gagcagaatatagacaaaggcactg

SEQ ID NO: 44435 - DNA, 25 bp, Homo sapien
tttgtcaagagatttgaaggcacgg

SEQ ID NO: 44436 - DNA, 25 bp, Homo sapien
gccactcctggatgttcacctggat

SEQ ID NO: 44437 - DNA, 25 bp, Homo sapien
ggaatacatagtcagctgcagccac

SEQ ID NO: 44438 - DNA, 25 bp, Homo sapien
gtctggggctccagttcaggaatac

SEQ ID NO: 44439 - DNA, 25 bp, Homo sapien
ggtgactcctatagcaaggcggtga

SEQ ID NO: 44440 - DNA, 25 bp, Homo sapien
taacaagtactgagagaacaaaagc

SEQ ID NO: 44441 - DNA, 25 bp, Homo sapien
tgggtaacaagtactgagagaacaa

SEQ ID NO: 44442 - DNA, 25 bp, Homo sapien
ggcaaattgggccctggatgttgag

SEQ ID NO: 44443 - DNA, 25 bp, Homo sapien
aggcagggcaaattgggccctggat

SEQ ID NO: 44444 - DNA, 25 bp, Homo sapien
ttgttagagtgtcctagagccaggg

SEQ ID NO: 44445 - DNA, 25 bp, Homo sapien
gagcagaatatagacaaaggcactg

SEQ ID NO: 44446 - DNA, 25 bp, Homo sapien
tttgtcaagagatttgaaggcacgg

SEQ ID NO: 44447 - DNA, 25 bp, Homo sapien
ttgttagagtgtcctagagccaggg

SEQ ID NO: 44448 - DNA, 25 bp, Homo sapien
gagcagaatatagacaaaggcactg

SEQ ID NO: 44449 - DNA, 25 bp, Homo sapien
tgggtaacaagtactgagagaacaa

SEQ ID NO: 44450 - DNA, 25 bp, Homo sapien
gccactcctggatgttcacctggat

SEQ ID NO: 44451 - DNA, 25 bp, Homo sapien
ggcaaattgggccctggatgttgag

SEQ ID NO: 44452 - DNA, 25 bp, Homo sapien
gtctggggctccagttcaggaatac

SEQ ID NO: 44453 - DNA, 25 bp, Homo sapien
taacaagtactgagagaacaaaagc

SEQ ID NO: 44454 - DNA, 25 bp, Homo sapien
aggcagggcaaattgggccctggat

SEQ ID NO: 44455 - DNA, 25 bp, Homo sapien
ggaatacatagtcagctgcagccac

SEQ ID NO: 44456 - DNA, 25 bp, Homo sapien
ggtgactcctatagcaaggcggtga

SEQ ID NO: 44457 - DNA, 25 bp, Homo sapien
tttgtcaagagatttgaaggcacgg

SEQ ID NO: 44458 - DNA, 25 bp, Homo sapien
gccactcctggatgttcacctggat

SEQ ID NO: 44459 - DNA, 25 bp, Homo sapien
ggaatacatagtcagctgcagccac

SEQ ID NO: 44460 - DNA, 25 bp, Homo sapien
gtctggggctccagttcaggaatac

SEQ ID NO: 44461 - DNA, 25 bp, Homo sapien
ggtgactcctatagcaaggcggtga

SEQ ID NO: 44462 - DNA, 25 bp, Homo sapien
taacaagtactgagagaacaaaagc

SEQ ID NO: 44463 - DNA, 25 bp, Homo sapien
tgggtaacaagtactgagagaacaa

SEQ ID NO: 44464 - DNA, 25 bp, Homo sapien
ggcaaattgggccctggatgttgag

SEQ ID NO: 44465 - DNA, 25 bp, Homo sapien
aggcagggcaaattgggccctggat

SEQ ID NO: 44466 - DNA, 25 bp, Homo sapien
ttgttagagtgtcctagagccaggg

SEQ ID NO: 44467 - DNA, 25 bp, Homo sapien
gagcagaatatagacaaaggcactg

SEQ ID NO: 44468 - DNA, 25 bp, Homo sapien
ggcaaattgggccctggatgttgag

SEQ ID NO: 44469 - DNA, 25 bp, Homo sapien
aggcagggcaaattgggccctggat

SEQ ID NO: 44470 - DNA, 25 bp, Homo sapien
ttgttagagtgtcctagagccaggg

SEQ ID NO: 44471 - DNA, 25 bp, Homo sapien
tttgtcaagagatttgaaggcacgg

SEQ ID NO: 44472 - DNA, 25 bp, Homo sapien
gagcagaatatagacaaaggcactg

SEQ ID NO: 44473 - DNA, 25 bp, Homo sapien
tgggtaacaagtactgagagaacaa

SEQ ID NO: 44474 - DNA, 25 bp, Homo sapien
taacaagtactgagagaacaaaagc

SEQ ID NO: 44475 - DNA, 25 bp, Homo sapien
ggtgactcctatagcaaggcggtga

SEQ ID NO: 44476 - DNA, 25 bp, Homo sapien
ggaatacatagtcagctgcagccac

SEQ ID NO: 44477 - DNA, 25 bp, Homo sapien
gtctggggctccagttcaggaatac

SEQ ID NO: 44478 - DNA, 25 bp, Homo sapien
gccactcctggatgttcacctggat

SEQ ID NO: 44479 - DNA, 25 bp, Homo sapien
tttgtcaagagatttgaaggcacgg

SEQ ID NO: 44480 - DNA, 25 bp, Homo sapien
gccactcctggatgttcacctggat

SEQ ID NO: 44481 - DNA, 25 bp, Homo sapien
ggaatacatagtcagctgcagccac

SEQ ID NO: 44482 - DNA, 25 bp, Homo sapien
gtctggggctccagttcaggaatac

SEQ ID NO: 44483 - DNA, 25 bp, Homo sapien
ggtgactcctatagcaaggcggtga

SEQ ID NO: 44484 - DNA, 25 bp, Homo sapien
taacaagtactgagagaacaaaagc

SEQ ID NO: 44485 - DNA, 25 bp, Homo sapien
tgggtaacaagtactgagagaacaa

SEQ ID NO: 44486 - DNA, 25 bp, Homo sapien
ggcaaattgggccctggatgttgag

SEQ ID NO: 44487 - DNA, 25 bp, Homo sapien
aggcagggcaaattgggccctggat

SEQ ID NO: 44488 - DNA, 25 bp, Homo sapien
ttgttagagtgtcctagagccaggg

SEQ ID NO: 44489 - DNA, 25 bp, Homo sapien
gagcagaatatagacaaaggcactg

SEQ ID NO: 44490 - DNA, 25 bp, Homo sapien
taacaagtactgagagaacaaaagc

SEQ ID NO: 44491 - DNA, 25 bp, Homo sapien
ggaatacatagtcagctgcagccac

SEQ ID NO: 44492 - DNA, 25 bp, Homo sapien
tgggtaacaagtactgagagaacaa

SEQ ID NO: 44493 - DNA, 25 bp, Homo sapien
ttgttagagtgtcctagagccaggg

SEQ ID NO: 44494 - DNA, 25 bp, Homo sapien
aggcagggcaaattgggccctggat

SEQ ID NO: 44495 - DNA, 25 bp, Homo sapien
tttgtcaagagatttgaaggcacgg

SEQ ID NO: 44496 - DNA, 25 bp, Homo sapien
gtctggggctccagttcaggaatac

SEQ ID NO: 44497 - DNA, 25 bp, Homo sapien
ggtgactcctatagcaaggcggtga

SEQ ID NO: 44498 - DNA, 25 bp, Homo sapien
ggcaaattgggccctggatgttgag

SEQ ID NO: 44499 - DNA, 25 bp, Homo sapien
gagcagaatatagacaaaggcactg

SEQ ID NO: 44500 - DNA, 25 bp, Homo sapien
gccactcctggatgttcacctggat

SEQ ID NO: 44501 - DNA, 25 bp, Homo sapien
tttgtcaagagatttgaaggcacgg

SEQ ID NO: 44502 - DNA, 25 bp, Homo sapien
gccactcctggatgttcacctggat

SEQ ID NO: 44503 - DNA, 25 bp, Homo sapien
ggaatacatagtcagctgcagccac

SEQ ID NO: 44504 - DNA, 25 bp, Homo sapien
gtctggggctccagttcaggaatac

SEQ ID NO: 44505 - DNA, 25 bp, Homo sapien
ggtgactcctatagcaaggcggtga

SEQ ID NO: 44506 - DNA, 25 bp, Homo sapien
taacaagtactgagagaacaaaagc

SEQ ID NO: 44507 - DNA, 25 bp, Homo sapien
tgggtaacaagtactgagagaacaa

SEQ ID NO: 44508 - DNA, 25 bp, Homo sapien
ggcaaattgggccctggatgttgag

SEQ ID NO: 44509 - DNA, 25 bp, Homo sapien
aggcagggcaaattgggccctggat

SEQ ID NO: 44510 - DNA, 25 bp, Homo sapien
ttgttagagtgtcctagagccaggg

SEQ ID NO: 44511 - DNA, 25 bp, Homo sapien
gagcagaatatagacaaaggcactg

SEQ ID NO: 44512 - DNA, 25 bp, Homo sapien
tttgtcaagagatttgaaggcacgg

SEQ ID NO: 44513 - DNA, 25 bp, Homo sapien
aggcagggcaaattgggccctggat

SEQ ID NO: 44514 - DNA, 25 bp, Homo sapien
ggtgactcctatagcaaggcggtga

SEQ ID NO: 44515 - DNA, 25 bp, Homo sapien
ttgttagagtgtcctagagccaggg

SEQ ID NO: 44516 - DNA, 25 bp, Homo sapien
gagcagaatatagacaaaggcactg

SEQ ID NO: 44517 - DNA, 25 bp, Homo sapien
ggaatacatagtcagctgcagccac

SEQ ID NO: 44518 - DNA, 25 bp, Homo sapien
taacaagtactgagagaacaaaagc

SEQ ID NO: 44519 - DNA, 25 bp, Homo sapien
ggcaaattgggccctggatgttgag

SEQ ID NO: 44520 - DNA, 25 bp, Homo sapien
tgggtaacaagtactgagagaacaa

SEQ ID NO: 44521 - DNA, 25 bp, Homo sapien
gtctggggctccagttcaggaatac

SEQ ID NO: 44522 - DNA, 25 bp, Homo sapien
gccactcctggatgttcacctggat

SEQ ID NO: 44523 - DNA, 25 bp, Homo sapien
tttgtcaagagatttgaaggcacgg

SEQ ID NO: 44524 - DNA, 25 bp, Homo sapien
gccactcctggatgttcacctggat

SEQ ID NO: 44525 - DNA, 25 bp, Homo sapien
ggaatacatagtcagctgcagccac

SEQ ID NO: 44526 - DNA, 25 bp, Homo sapien
gtctggggctccagttcaggaatac

SEQ ID NO: 44527 - DNA, 25 bp, Homo sapien
ggtgactcctatagcaaggcggtga

SEQ ID NO: 44528 - DNA, 25 bp, Homo sapien
taacaagtactgagagaacaaaagc

SEQ ID NO: 44529 - DNA, 25 bp, Homo sapien
tgggtaacaagtactgagagaacaa

SEQ ID NO: 44530 - DNA, 25 bp, Homo sapien
ggcaaattgggccctggatgttgag

SEQ ID NO: 44531 - DNA, 25 bp, Homo sapien
aggcagggcaaattgggccctggat

SEQ ID NO: 44532 - DNA, 25 bp, Homo sapien
ttgttagagtgtcctagagccaggg

SEQ ID NO: 44533 - DNA, 25 bp, Homo sapien
gagcagaatatagacaaaggcactg

SEQ ID NO: 44534 - DNA, 25 bp, Homo sapien
ggaatacatagtcagctgcagccac

SEQ ID NO: 44535 - DNA, 25 bp, Homo sapien
gtctggggctccagttcaggaatac

SEQ ID NO: 44536 - DNA, 25 bp, Homo sapien
ttgttagagtgtcctagagccaggg

SEQ ID NO: 44537 - DNA, 25 bp, Homo sapien
tgggtaacaagtactgagagaacaa

SEQ ID NO: 44538 - DNA, 25 bp, Homo sapien
ggtgactcctatagcaaggcggtga

SEQ ID NO: 44539 - DNA, 25 bp, Homo sapien
tttgtcaagagatttgaaggcacgg

SEQ ID NO: 44540 - DNA, 25 bp, Homo sapien
ggcaaattgggccctggatgttgag

SEQ ID NO: 44541 - DNA, 25 bp, Homo sapien
gagcagaatatagacaaaggcactg

SEQ ID NO: 44542 - DNA, 25 bp, Homo sapien
aggcagggcaaattgggccctggat

SEQ ID NO: 44543 - DNA, 25 bp, Homo sapien
gccactcctggatgttcacctggat

SEQ ID NO: 44544 - DNA, 25 bp, Homo sapien
taacaagtactgagagaacaaaagc

SEQ ID NO: 44545 - DNA, 25 bp, Homo sapien
aggcagggcaaattgggccctggat

SEQ ID NO: 44546 - DNA, 25 bp, Homo sapien
gccactcctggatgttcacctggat

SEQ ID NO: 44547 - DNA, 25 bp, Homo sapien
taacaagtactgagagaacaaaagc

SEQ ID NO: 44548 - DNA, 25 bp, Homo sapien
gagcagaatatagacaaaggcactg

SEQ ID NO: 44549 - DNA, 25 bp, Homo sapien
ggtgactcctatagcaaggcggtga

SEQ ID NO: 44550 - DNA, 25 bp, Homo sapien
ttgttagagtgtcctagagccaggg

SEQ ID NO: 44551 - DNA, 25 bp, Homo sapien
ggaatacatagtcagctgcagccac

SEQ ID NO: 44552 - DNA, 25 bp, Homo sapien
tgggtaacaagtactgagagaacaa

SEQ ID NO: 44553 - DNA, 25 bp, Homo sapien
tttgtcaagagatttgaaggcacgg

SEQ ID NO: 44554 - DNA, 25 bp, Homo sapien
ggcaaattgggccctggatgttgag

SEQ ID NO: 44555 - DNA, 25 bp, Homo sapien
gtctggggctccagttcaggaatac

SEQ ID NO: 44556 - DNA, 25 bp, Homo sapien
tttgtcaagagatttgaaggcacgg

SEQ ID NO: 44557 - DNA, 25 bp, Homo sapien
gccactcctggatgttcacctggat

SEQ ID NO: 44558 - DNA, 25 bp, Homo sapien
ggaatacatagtcagctgcagccac

SEQ ID NO: 44559 - DNA, 25 bp, Homo sapien
gtctggggctccagttcaggaatac

SEQ ID NO: 44560 - DNA, 25 bp, Homo sapien
ggtgactcctatagcaaggcggtga

SEQ ID NO: 44561 - DNA, 25 bp, Homo sapien
taacaagtactgagagaacaaaagc

SEQ ID NO: 44562 - DNA, 25 bp, Homo sapien
tgggtaacaagtactgagagaacaa

SEQ ID NO: 44563 - DNA, 25 bp, Homo sapien
ggcaaattgggccctggatgttgag

SEQ ID NO: 44564 - DNA, 25 bp, Homo sapien
aggcagggcaaattgggccctggat

SEQ ID NO: 44565 - DNA, 25 bp, Homo sapien
ttgttagagtgtcctagagccaggg

SEQ ID NO: 44566 - DNA, 25 bp, Homo sapien
gagcagaatatagacaaaggcactg

SEQ ID NO: 44567 - DNA, 25 bp, Homo sapien
gccactcctggatgttcacctggat

SEQ ID NO: 44568 - DNA, 25 bp, Homo sapien
tgggtaacaagtactgagagaacaa

SEQ ID NO: 44569 - DNA, 25 bp, Homo sapien
taacaagtactgagagaacaaaagc

SEQ ID NO: 44570 - DNA, 25 bp, Homo sapien
tttgtcaagagatttgaaggcacgg

SEQ ID NO: 44571 - DNA, 25 bp, Homo sapien
ttgttagagtgtcctagagccaggg

SEQ ID NO: 44572 - DNA, 25 bp, Homo sapien
gtctggggctccagttcaggaatac

SEQ ID NO: 44573 - DNA, 25 bp, Homo sapien
ggaatacatagtcagctgcagccac

SEQ ID NO: 44574 - DNA, 25 bp, Homo sapien
aggcagggcaaattgggccctggat

SEQ ID NO: 44575 - DNA, 25 bp, Homo sapien
ggcaaattgggccctggatgttgag

SEQ ID NO: 44576 - DNA, 25 bp, Homo sapien
ggtgactcctatagcaaggcggtga

SEQ ID NO: 44577 - DNA, 25 bp, Homo sapien
gagcagaatatagacaaaggcactg

SEQ ID NO: 44578 - DNA, 25 bp, Homo sapien
tttgtcaagagatttgaaggcacgg

SEQ ID NO: 44579 - DNA, 25 bp, Homo sapien
gccactcctggatgttcacctggat

SEQ ID NO: 44580 - DNA, 25 bp, Homo sapien
ggaatacatagtcagctgcagccac

SEQ ID NO: 44581 - DNA, 25 bp, Homo sapien
gtctggggctccagttcaggaatac

SEQ ID NO: 44582 - DNA, 25 bp, Homo sapien
ggtgactcctatagcaaggcggtga

SEQ ID NO: 44583 - DNA, 25 bp, Homo sapien
taacaagtactgagagaacaaaagc

SEQ ID NO: 44584 - DNA, 25 bp, Homo sapien
tgggtaacaagtactgagagaacaa

SEQ ID NO: 44585 - DNA, 25 bp, Homo sapien
ggcaaattgggccctggatgttgag

SEQ ID NO: 44586 - DNA, 25 bp, Homo sapien
aggcagggcaaattgggccctggat

SEQ ID NO: 44587 - DNA, 25 bp, Homo sapien
ttgttagagtgtcctagagccaggg

SEQ ID NO: 44588 - DNA, 25 bp, Homo sapien
gagcagaatatagacaaaggcactg

SEQ ID NO: 44589 - DNA, 25 bp, Homo sapien
ggcaaattgggccctggatgttgag

SEQ ID NO: 44590 - DNA, 25 bp, Homo sapien
gtctggggctccagttcaggaatac

SEQ ID NO: 44591 - DNA, 25 bp, Homo sapien
tttgtcaagagatttgaaggcacgg

SEQ ID NO: 44592 - DNA, 25 bp, Homo sapien
ggtgactcctatagcaaggcggtga

SEQ ID NO: 44593 - DNA, 25 bp, Homo sapien
gccactcctggatgttcacctggat

SEQ ID NO: 44594 - DNA, 25 bp, Homo sapien
tgggtaacaagtactgagagaacaa

SEQ ID NO: 44595 - DNA, 25 bp, Homo sapien
gagcagaatatagacaaaggcactg

SEQ ID NO: 44596 - DNA, 25 bp, Homo sapien
aggcagggcaaattgggccctggat

SEQ ID NO: 44597 - DNA, 25 bp, Homo sapien
ttgttagagtgtcctagagccaggg

SEQ ID NO: 44598 - DNA, 25 bp, Homo sapien
taacaagtactgagagaacaaaagc

SEQ ID NO: 44599 - DNA, 25 bp, Homo sapien
ggaatacatagtcagctgcagccac

SEQ ID NO: 44600 - DNA, 25 bp, Homo sapien
tttgtcaagagatttgaaggcacgg

SEQ ID NO: 44601 - DNA, 25 bp, Homo sapien
gccactcctggatgttcacctggat

SEQ ID NO: 44602 - DNA, 25 bp, Homo sapien
ggaatacatagtcagctgcagccac

SEQ ID NO: 44603 - DNA, 25 bp, Homo sapien
gtctggggctccagttcaggaatac

SEQ ID NO: 44604 - DNA, 25 bp, Homo sapien
ggtgactcctatagcaaggcggtga

SEQ ID NO: 44605 - DNA, 25 bp, Homo sapien
taacaagtactgagagaacaaaagc

SEQ ID NO: 44606 - DNA, 25 bp, Homo sapien
tgggtaacaagtactgagagaacaa

SEQ ID NO: 44607 - DNA, 25 bp, Homo sapien
ggcaaattgggccctggatgttgag

SEQ ID NO: 44608 - DNA, 25 bp, Homo sapien
aggcagggcaaattgggccctggat

SEQ ID NO: 44609 - DNA, 25 bp, Homo sapien
ttgttagagtgtcctagagccaggg

SEQ ID NO: 44610 - DNA, 25 bp, Homo sapien
gagcagaatatagacaaaggcactg

SEQ ID NO: 44611 - DNA, 25 bp, Homo sapien
gcctgtcactttggcgacgcgcagc

SEQ ID NO: 44612 - DNA, 25 bp, Homo sapien
gactcggatcttagagagcttggag

SEQ ID NO: 44613 - DNA, 25 bp, Homo sapien
gagtctggttaataactgtgagaac

SEQ ID NO: 44614 - DNA, 25 bp, Homo sapien
cttcttcccgcgaagatctcgagcc

SEQ ID NO: 44615 - DNA, 25 bp, Homo sapien
taataactgtgagaacacgggcaat

SEQ ID NO: 44616 - DNA, 25 bp, Homo sapien
ggttaataactgtgagaacacgggc

SEQ ID NO: 44617 - DNA, 25 bp, Homo sapien
tgatcttggccattgctgcacaagc

SEQ ID NO: 44618 - DNA, 25 bp, Homo sapien
tcccgcgaagatctcgagccttgat

SEQ ID NO: 44619 - DNA, 25 bp, Homo sapien
tttctttctgagtctggttaataac

SEQ ID NO: 44620 - DNA, 25 bp, Homo sapien
tcttggccattgctgcacaagccgc

SEQ ID NO: 44621 - DNA, 25 bp, Homo sapien
accgcctgtcactttggcgacgcgc

SEQ ID NO: 44622 - DNA, 25 bp, Homo sapien
tcttggccattgctgcacaagccgc

SEQ ID NO: 44623 - DNA, 25 bp, Homo sapien
tgatcttggccattgctgcacaagc

SEQ ID NO: 44624 - DNA, 25 bp, Homo sapien
tcccgcgaagatctcgagccttgat

SEQ ID NO: 44625 - DNA, 25 bp, Homo sapien
cttcttcccgcgaagatctcgagcc

SEQ ID NO: 44626 - DNA, 25 bp, Homo sapien
gcctgtcactttggcgacgcgcagc

SEQ ID NO: 44627 - DNA, 25 bp, Homo sapien
accgcctgtcactttggcgacgcgc

SEQ ID NO: 44628 - DNA, 25 bp, Homo sapien
gactcggatcttagagagcttggag

SEQ ID NO: 44629 - DNA, 25 bp, Homo sapien
taataactgtgagaacacgggcaat

SEQ ID NO: 44630 - DNA, 25 bp, Homo sapien
ggttaataactgtgagaacacgggc

SEQ ID NO: 44631 - DNA, 25 bp, Homo sapien
gagtctggttaataactgtgagaac

SEQ ID NO: 44632 - DNA, 25 bp, Homo sapien
tttctttctgagtctggttaataac

SEQ ID NO: 44633 - DNA, 25 bp, Homo sapien
ggttaataactgtgagaacacgggc

SEQ ID NO: 44634 - DNA, 25 bp, Homo sapien
tttctttctgagtctggttaataac

SEQ ID NO: 44635 - DNA, 25 bp, Homo sapien
gcctgtcactttggcgacgcgcagc

SEQ ID NO: 44636 - DNA, 25 bp, Homo sapien
gactcggatcttagagagcttggag

SEQ ID NO: 44637 - DNA, 25 bp, Homo sapien
taataactgtgagaacacgggcaat

SEQ ID NO: 44638 - DNA, 25 bp, Homo sapien
tgatcttggccattgctgcacaagc

SEQ ID NO: 44639 - DNA, 25 bp, Homo sapien
tcttggccattgctgcacaagccgc

SEQ ID NO: 44640 - DNA, 25 bp, Homo sapien
gagtctggttaataactgtgagaac

SEQ ID NO: 44641 - DNA, 25 bp, Homo sapien
cttcttcccgcgaagatctcgagcc

SEQ ID NO: 44642 - DNA, 25 bp, Homo sapien
accgcctgtcactttggcgacgcgc

SEQ ID NO: 44643 - DNA, 25 bp, Homo sapien
tcccgcgaagatctcgagccttgat

SEQ ID NO: 44644 - DNA, 25 bp, Homo sapien
tcttggccattgctgcacaagccgc

SEQ ID NO: 44645 - DNA, 25 bp, Homo sapien
tgatcttggccattgctgcacaagc

SEQ ID NO: 44646 - DNA, 25 bp, Homo sapien
tcccgcgaagatctcgagccttgat

SEQ ID NO: 44647 - DNA, 25 bp, Homo sapien
cttcttcccgcgaagatctcgagcc

SEQ ID NO: 44648 - DNA, 25 bp, Homo sapien
gcctgtcactttggcgacgcgcagc

SEQ ID NO: 44649 - DNA, 25 bp, Homo sapien
accgcctgtcactttggcgacgcgc

SEQ ID NO: 44650 - DNA, 25 bp, Homo sapien
gactcggatcttagagagcttggag

SEQ ID NO: 44651 - DNA, 25 bp, Homo sapien
taataactgtgagaacacgggcaat

SEQ ID NO: 44652 - DNA, 25 bp, Homo sapien
ggttaataactgtgagaacacgggc

SEQ ID NO: 44653 - DNA, 25 bp, Homo sapien
gagtctggttaataactgtgagaac

SEQ ID NO: 44654 - DNA, 25 bp, Homo sapien
tttctttctgagtctggttaataac

SEQ ID NO: 44655 - DNA, 25 bp, Homo sapien
accgcctgtcactttggcgacgcgc

SEQ ID NO: 44656 - DNA, 25 bp, Homo sapien
tcttggccattgctgcacaagccgc

SEQ ID NO: 44657 - DNA, 25 bp, Homo sapien
cttcttcccgcgaagatctcgagcc

SEQ ID NO: 44658 - DNA, 25 bp, Homo sapien
taataactgtgagaacacgggcaat

SEQ ID NO: 44659 - DNA, 25 bp, Homo sapien
gagtctggttaataactgtgagaac

SEQ ID NO: 44660 - DNA, 25 bp, Homo sapien
tttctttctgagtctggttaataac

SEQ ID NO: 44661 - DNA, 25 bp, Homo sapien
tgatcttggccattgctgcacaagc

SEQ ID NO: 44662 - DNA, 25 bp, Homo sapien
tcccgcgaagatctcgagccttgat

SEQ ID NO: 44663 - DNA, 25 bp, Homo sapien
gcctgtcactttggcgacgcgcagc

SEQ ID NO: 44664 - DNA, 25 bp, Homo sapien
gactcggatcttagagagcttggag

SEQ ID NO: 44665 - DNA, 25 bp, Homo sapien
ggttaataactgtgagaacacgggc

SEQ ID NO: 44666 - DNA, 25 bp, Homo sapien
tcttggccattgctgcacaagccgc

SEQ ID NO: 44667 - DNA, 25 bp, Homo sapien
tgatcttggccattgctgcacaagc

SEQ ID NO: 44668 - DNA, 25 bp, Homo sapien
tcccgcgaagatctcgagccttgat

SEQ ID NO: 44669 - DNA, 25 bp, Homo sapien
cttcttcccgcgaagatctcgagcc

SEQ ID NO: 44670 - DNA, 25 bp, Homo sapien
gcctgtcactttggcgacgcgcagc

SEQ ID NO: 44671 - DNA, 25 bp, Homo sapien
accgcctgtcactttggcgacgcgc

SEQ ID NO: 44672 - DNA, 25 bp, Homo sapien
gactcggatcttagagagcttggag

SEQ ID NO: 44673 - DNA, 25 bp, Homo sapien
taataactgtgagaacacgggcaat

SEQ ID NO: 44674 - DNA, 25 bp, Homo sapien
ggttaataactgtgagaacacgggc

SEQ ID NO: 44675 - DNA, 25 bp, Homo sapien
gagtctggttaataactgtgagaac

SEQ ID NO: 44676 - DNA, 25 bp, Homo sapien
tttctttctgagtctggttaataac

SEQ ID NO: 44677 - DNA, 25 bp, Homo sapien
tcttggccattgctgcacaagccgc

SEQ ID NO: 44678 - DNA, 25 bp, Homo sapien
tgatcttggccattgctgcacaagc

SEQ ID NO: 44679 - DNA, 25 bp, Homo sapien
tcccgcgaagatctcgagccttgat

SEQ ID NO: 44680 - DNA, 25 bp, Homo sapien
cttcttcccgcgaagatctcgagcc

SEQ ID NO: 44681 - DNA, 25 bp, Homo sapien
gcctgtcactttggcgacgcgcagc

SEQ ID NO: 44682 - DNA, 25 bp, Homo sapien
accgcctgtcactttggcgacgcgc

SEQ ID NO: 44683 - DNA, 25 bp, Homo sapien
gactcggatcttagagagcttggag

SEQ ID NO: 44684 - DNA, 25 bp, Homo sapien
taataactgtgagaacacgggcaat

SEQ ID NO: 44685 - DNA, 25 bp, Homo sapien
ggttaataactgtgagaacacgggc

SEQ ID NO: 44686 - DNA, 25 bp, Homo sapien
gagtctggttaataactgtgagaac

SEQ ID NO: 44687 - DNA, 25 bp, Homo sapien
tttctttctgagtctggttaataac

SEQ ID NO: 44688 - DNA, 25 bp, Homo sapien
gcctgtcactttggcgacgcgcagc

SEQ ID NO: 44689 - DNA, 25 bp, Homo sapien
gagtctggttaataactgtgagaac

SEQ ID NO: 44690 - DNA, 25 bp, Homo sapien
tttctttctgagtctggttaataac

SEQ ID NO: 44691 - DNA, 25 bp, Homo sapien
taataactgtgagaacacgggcaat

SEQ ID NO: 44692 - DNA, 25 bp, Homo sapien
ggttaataactgtgagaacacgggc

SEQ ID NO: 44693 - DNA, 25 bp, Homo sapien
tcccgcgaagatctcgagccttgat

SEQ ID NO: 44694 - DNA, 25 bp, Homo sapien
cttcttcccgcgaagatctcgagcc

SEQ ID NO: 44695 - DNA, 25 bp, Homo sapien
gactcggatcttagagagcttggag

SEQ ID NO: 44696 - DNA, 25 bp, Homo sapien
tcttggccattgctgcacaagccgc

SEQ ID NO: 44697 - DNA, 25 bp, Homo sapien
accgcctgtcactttggcgacgcgc

SEQ ID NO: 44698 - DNA, 25 bp, Homo sapien
tgatcttggccattgctgcacaagc

SEQ ID NO: 44699 - DNA, 25 bp, Homo sapien
tcttggccattgctgcacaagccgc

SEQ ID NO: 44700 - DNA, 25 bp, Homo sapien
tgatcttggccattgctgcacaagc

SEQ ID NO: 44701 - DNA, 25 bp, Homo sapien
tcccgcgaagatctcgagccttgat

SEQ ID NO: 44702 - DNA, 25 bp, Homo sapien
cttcttcccgcgaagatctcgagcc

SEQ ID NO: 44703 - DNA, 25 bp, Homo sapien
gcctgtcactttggcgacgcgcagc

SEQ ID NO: 44704 - DNA, 25 bp, Homo sapien
accgcctgtcactttggcgacgcgc

SEQ ID NO: 44705 - DNA, 25 bp, Homo sapien
gactcggatcttagagagcttggag

SEQ ID NO: 44706 - DNA, 25 bp, Homo sapien
taataactgtgagaacacgggcaat

SEQ ID NO: 44707 - DNA, 25 bp, Homo sapien
ggttaataactgtgagaacacgggc

SEQ ID NO: 44708 - DNA, 25 bp, Homo sapien
gagtctggttaataactgtgagaac

SEQ ID NO: 44709 - DNA, 25 bp, Homo sapien
tttctttctgagtctggttaataac

SEQ ID NO: 44710 - DNA, 25 bp, Homo sapien
gcctgtcactttggcgacgcgcagc

SEQ ID NO: 44711 - DNA, 25 bp, Homo sapien
accgcctgtcactttggcgacgcgc

SEQ ID NO: 44712 - DNA, 25 bp, Homo sapien
tgatcttggccattgctgcacaagc

SEQ ID NO: 44713 - DNA, 25 bp, Homo sapien
tttctttctgagtctggttaataac

SEQ ID NO: 44714 - DNA, 25 bp, Homo sapien
taataactgtgagaacacgggcaat

SEQ ID NO: 44715 - DNA, 25 bp, Homo sapien
ggttaataactgtgagaacacgggc

SEQ ID NO: 44716 - DNA, 25 bp, Homo sapien
tcttggccattgctgcacaagccgc

SEQ ID NO: 44717 - DNA, 25 bp, Homo sapien
gactcggatcttagagagcttggag

SEQ ID NO: 44718 - DNA, 25 bp, Homo sapien
cttcttcccgcgaagatctcgagcc

SEQ ID NO: 44719 - DNA, 25 bp, Homo sapien
tcccgcgaagatctcgagccttgat

SEQ ID NO: 44720 - DNA, 25 bp, Homo sapien
gagtctggttaataactgtgagaac

SEQ ID NO: 44721 - DNA, 25 bp, Homo sapien
tcttggccattgctgcacaagccgc

SEQ ID NO: 44722 - DNA, 25 bp, Homo sapien
tgatcttggccattgctgcacaagc

SEQ ID NO: 44723 - DNA, 25 bp, Homo sapien
tcccgcgaagatctcgagccttgat

SEQ ID NO: 44724 - DNA, 25 bp, Homo sapien
cttcttcccgcgaagatctcgagcc

SEQ ID NO: 44725 - DNA, 25 bp, Homo sapien
gcctgtcactttggcgacgcgcagc

SEQ ID NO: 44726 - DNA, 25 bp, Homo sapien
accgcctgtcactttggcgacgcgc

SEQ ID NO: 44727 - DNA, 25 bp, Homo sapien
gactcggatcttagagagcttggag

SEQ ID NO: 44728 - DNA, 25 bp, Homo sapien
taataactgtgagaacacgggcaat

SEQ ID NO: 44729 - DNA, 25 bp, Homo sapien
ggttaataactgtgagaacacgggc

SEQ ID NO: 44730 - DNA, 25 bp, Homo sapien
gagtctggttaataactgtgagaac

SEQ ID NO: 44731 - DNA, 25 bp, Homo sapien
tttctttctgagtctggttaataac

SEQ ID NO: 44732 - DNA, 25 bp, Homo sapien
cttcttcccgcgaagatctcgagcc

SEQ ID NO: 44733 - DNA, 25 bp, Homo sapien
gactcggatcttagagagcttggag

SEQ ID NO: 44734 - DNA, 25 bp, Homo sapien
tcttggccattgctgcacaagccgc

SEQ ID NO: 44735 - DNA, 25 bp, Homo sapien
tgatcttggccattgctgcacaagc

SEQ ID NO: 44736 - DNA, 25 bp, Homo sapien
ggttaataactgtgagaacacgggc

SEQ ID NO: 44737 - DNA, 25 bp, Homo sapien
tttctttctgagtctggttaataac

SEQ ID NO: 44738 - DNA, 25 bp, Homo sapien
tcccgcgaagatctcgagccttgat

SEQ ID NO: 44739 - DNA, 25 bp, Homo sapien
gagtctggttaataactgtgagaac

SEQ ID NO: 44740 - DNA, 25 bp, Homo sapien
taataactgtgagaacacgggcaat

SEQ ID NO: 44741 - DNA, 25 bp, Homo sapien
gcctgtcactttggcgacgcgcagc

SEQ ID NO: 44742 - DNA, 25 bp, Homo sapien
accgcctgtcactttggcgacgcgc

SEQ ID NO: 44743 - DNA, 25 bp, Homo sapien
tcttggccattgctgcacaagccgc

SEQ ID NO: 44744 - DNA, 25 bp, Homo sapien
tgatcttggccattgctgcacaagc

SEQ ID NO: 44745 - DNA, 25 bp, Homo sapien
tcccgcgaagatctcgagccttgat

SEQ ID NO: 44746 - DNA, 25 bp, Homo sapien
cttcttcccgcgaagatctcgagcc

SEQ ID NO: 44747 - DNA, 25 bp, Homo sapien
gcctgtcactttggcgacgcgcagc

SEQ ID NO: 44748 - DNA, 25 bp, Homo sapien
accgcctgtcactttggcgacgcgc

SEQ ID NO: 44749 - DNA, 25 bp, Homo sapien
gactcggatcttagagagcttggag

SEQ ID NO: 44750 - DNA, 25 bp, Homo sapien
taataactgtgagaacacgggcaat

SEQ ID NO: 44751 - DNA, 25 bp, Homo sapien
ggttaataactgtgagaacacgggc

SEQ ID NO: 44752 - DNA, 25 bp, Homo sapien
gagtctggttaataactgtgagaac

SEQ ID NO: 44753 - DNA, 25 bp, Homo sapien
tttctttctgagtctggttaataac

SEQ ID NO: 44754 - DNA, 25 bp, Homo sapien
taataactgtgagaacacgggcaat

SEQ ID NO: 44755 - DNA, 25 bp, Homo sapien
tcttggccattgctgcacaagccgc

SEQ ID NO: 44756 - DNA, 25 bp, Homo sapien
gcctgtcactttggcgacgcgcagc

SEQ ID NO: 44757 - DNA, 25 bp, Homo sapien
cttcttcccgcgaagatctcgagcc

SEQ ID NO: 44758 - DNA, 25 bp, Homo sapien
tttctttctgagtctggttaataac

SEQ ID NO: 44759 - DNA, 25 bp, Homo sapien
tcccgcgaagatctcgagccttgat

SEQ ID NO: 44760 - DNA, 25 bp, Homo sapien
accgcctgtcactttggcgacgcgc

SEQ ID NO: 44761 - DNA, 25 bp, Homo sapien
ggttaataactgtgagaacacgggc

SEQ ID NO: 44762 - DNA, 25 bp, Homo sapien
gagtctggttaataactgtgagaac

SEQ ID NO: 44763 - DNA, 25 bp, Homo sapien
gactcggatcttagagagcttggag

SEQ ID NO: 44764 - DNA, 25 bp, Homo sapien
tgatcttggccattgctgcacaagc

SEQ ID NO: 44765 - DNA, 25 bp, Homo sapien
tcttggccattgctgcacaagccgc

SEQ ID NO: 44766 - DNA, 25 bp, Homo sapien
tgatcttggccattgctgcacaagc

SEQ ID NO: 44767 - DNA, 25 bp, Homo sapien
tcccgcgaagatctcgagccttgat

SEQ ID NO: 44768 - DNA, 25 bp, Homo sapien
cttcttcccgcgaagatctcgagcc

SEQ ID NO: 44769 - DNA, 25 bp, Homo sapien
gcctgtcactttggcgacgcgcagc

SEQ ID NO: 44770 - DNA, 25 bp, Homo sapien
accgcctgtcactttggcgacgcgc

SEQ ID NO: 44771 - DNA, 25 bp, Homo sapien
gactcggatcttagagagcttggag

SEQ ID NO: 44772 - DNA, 25 bp, Homo sapien
taataactgtgagaacacgggcaat

SEQ ID NO: 44773 - DNA, 25 bp, Homo sapien
ggttaataactgtgagaacacgggc

SEQ ID NO: 44774 - DNA, 25 bp, Homo sapien
gagtctggttaataactgtgagaac

SEQ ID NO: 44775 - DNA, 25 bp, Homo sapien
tttctttctgagtctggttaataac

SEQ ID NO: 44776 - DNA, 25 bp, Homo sapien
tgatcttggccattgctgcacaagc

SEQ ID NO: 44777 - DNA, 25 bp, Homo sapien
tcttggccattgctgcacaagccgc

SEQ ID NO: 44778 - DNA, 25 bp, Homo sapien
gagtctggttaataactgtgagaac

SEQ ID NO: 44779 - DNA, 25 bp, Homo sapien
cttcttcccgcgaagatctcgagcc

SEQ ID NO: 44780 - DNA, 25 bp, Homo sapien
gcctgtcactttggcgacgcgcagc

SEQ ID NO: 44781 - DNA, 25 bp, Homo sapien
ggttaataactgtgagaacacgggc

SEQ ID NO: 44782 - DNA, 25 bp, Homo sapien
tttctttctgagtctggttaataac

SEQ ID NO: 44783 - DNA, 25 bp, Homo sapien
gactcggatcttagagagcttggag

SEQ ID NO: 44784 - DNA, 25 bp, Homo sapien
accgcctgtcactttggcgacgcgc

SEQ ID NO: 44785 - DNA, 25 bp, Homo sapien
taataactgtgagaacacgggcaat

SEQ ID NO: 44786 - DNA, 25 bp, Homo sapien
tcccgcgaagatctcgagccttgat

SEQ ID NO: 44787 - DNA, 25 bp, Homo sapien
tgatcttggccattgctgcacaagc

SEQ ID NO: 44788 - DNA, 25 bp, Homo sapien
gactcggatcttagagagcttggag

SEQ ID NO: 44789 - DNA, 25 bp, Homo sapien
tcccgcgaagatctcgagccttgat

SEQ ID NO: 44790 - DNA, 25 bp, Homo sapien
accgcctgtcactttggcgacgcgc

SEQ ID NO: 44791 - DNA, 25 bp, Homo sapien
gagtctggttaataactgtgagaac

SEQ ID NO: 44792 - DNA, 25 bp, Homo sapien
gcctgtcactttggcgacgcgcagc

SEQ ID NO: 44793 - DNA, 25 bp, Homo sapien
cttcttcccgcgaagatctcgagcc

SEQ ID NO: 44794 - DNA, 25 bp, Homo sapien
ggttaataactgtgagaacacgggc

SEQ ID NO: 44795 - DNA, 25 bp, Homo sapien
tcttggccattgctgcacaagccgc

SEQ ID NO: 44796 - DNA, 25 bp, Homo sapien
taataactgtgagaacacgggcaat

SEQ ID NO: 44797 - DNA, 25 bp, Homo sapien
tttctttctgagtctggttaataac

SEQ ID NO: 44798 - DNA, 25 bp, Homo sapien
tcttggccattgctgcacaagccgc

SEQ ID NO: 44799 - DNA, 25 bp, Homo sapien
tgatcttggccattgctgcacaagc

SEQ ID NO: 44800 - DNA, 25 bp, Homo sapien
tcccgcgaagatctcgagccttgat

SEQ ID NO: 44801 - DNA, 25 bp, Homo sapien
cttcttcccgcgaagatctcgagcc

SEQ ID NO: 44802 - DNA, 25 bp, Homo sapien
gcctgtcactttggcgacgcgcagc

SEQ ID NO: 44803 - DNA, 25 bp, Homo sapien
accgcctgtcactttggcgacgcgc

SEQ ID NO: 44804 - DNA, 25 bp, Homo sapien
gactcggatcttagagagcttggag

SEQ ID NO: 44805 - DNA, 25 bp, Homo sapien
taataactgtgagaacacgggcaat

SEQ ID NO: 44806 - DNA, 25 bp, Homo sapien
ggttaataactgtgagaacacgggc

SEQ ID NO: 44807 - DNA, 25 bp, Homo sapien
gagtctggttaataactgtgagaac

SEQ ID NO: 44808 - DNA, 25 bp, Homo sapien
tttctttctgagtctggttaataac

SEQ ID NO: 44809 - DNA, 25 bp, Homo sapien
tttctttctgagtctggttaataac

SEQ ID NO: 44810 - DNA, 25 bp, Homo sapien
ggttaataactgtgagaacacgggc

SEQ ID NO: 44811 - DNA, 25 bp, Homo sapien
tgatcttggccattgctgcacaagc

SEQ ID NO: 44812 - DNA, 25 bp, Homo sapien
tcttggccattgctgcacaagccgc

SEQ ID NO: 44813 - DNA, 25 bp, Homo sapien
taataactgtgagaacacgggcaat

SEQ ID NO: 44814 - DNA, 25 bp, Homo sapien
gactcggatcttagagagcttggag

SEQ ID NO: 44815 - DNA, 25 bp, Homo sapien
cttcttcccgcgaagatctcgagcc

SEQ ID NO: 44816 - DNA, 25 bp, Homo sapien
gagtctggttaataactgtgagaac

SEQ ID NO: 44817 - DNA, 25 bp, Homo sapien
tcccgcgaagatctcgagccttgat

SEQ ID NO: 44818 - DNA, 25 bp, Homo sapien
gcctgtcactttggcgacgcgcagc

SEQ ID NO: 44819 - DNA, 25 bp, Homo sapien
accgcctgtcactttggcgacgcgc

SEQ ID NO: 44820 - DNA, 25 bp, Homo sapien
tcttggccattgctgcacaagccgc

SEQ ID NO: 44821 - DNA, 25 bp, Homo sapien
tgatcttggccattgctgcacaagc

SEQ ID NO: 44822 - DNA, 25 bp, Homo sapien
tcccgcgaagatctcgagccttgat

SEQ ID NO: 44823 - DNA, 25 bp, Homo sapien
cttcttcccgcgaagatctcgagcc

SEQ ID NO: 44824 - DNA, 25 bp, Homo sapien
gcctgtcactttggcgacgcgcagc

SEQ ID NO: 44825 - DNA, 25 bp, Homo sapien
accgcctgtcactttggcgacgcgc

SEQ ID NO: 44826 - DNA, 25 bp, Homo sapien
gactcggatcttagagagcttggag

SEQ ID NO: 44827 - DNA, 25 bp, Homo sapien
taataactgtgagaacacgggcaat

SEQ ID NO: 44828 - DNA, 25 bp, Homo sapien
ggttaataactgtgagaacacgggc

SEQ ID NO: 44829 - DNA, 25 bp, Homo sapien
gagtctggttaataactgtgagaac

SEQ ID NO: 44830 - DNA, 25 bp, Homo sapien
tttctttctgagtctggttaataac

SEQ ID NO: 44831 - DNA, 25 bp, Homo sapien
gactcggatcttagagagcttggag

SEQ ID NO: 44832 - DNA, 25 bp, Homo sapien
gagtctggttaataactgtgagaac

SEQ ID NO: 44833 - DNA, 25 bp, Homo sapien
tcccgcgaagatctcgagccttgat

SEQ ID NO: 44834 - DNA, 25 bp, Homo sapien
ggttaataactgtgagaacacgggc

SEQ ID NO: 44835 - DNA, 25 bp, Homo sapien
tcttggccattgctgcacaagccgc

SEQ ID NO: 44836 - DNA, 25 bp, Homo sapien
cttcttcccgcgaagatctcgagcc

SEQ ID NO: 44837 - DNA, 25 bp, Homo sapien
gcctgtcactttggcgacgcgcagc

SEQ ID NO: 44838 - DNA, 25 bp, Homo sapien
taataactgtgagaacacgggcaat

SEQ ID NO: 44839 - DNA, 25 bp, Homo sapien
accgcctgtcactttggcgacgcgc

SEQ ID NO: 44840 - DNA, 25 bp, Homo sapien
tttctttctgagtctggttaataac

SEQ ID NO: 44841 - DNA, 25 bp, Homo sapien
tgatcttggccattgctgcacaagc

SEQ ID NO: 44842 - DNA, 25 bp, Homo sapien
tcttggccattgctgcacaagccgc

SEQ ID NO: 44843 - DNA, 25 bp, Homo sapien
tgatcttggccattgctgcacaagc

SEQ ID NO: 44844 - DNA, 25 bp, Homo sapien
tcccgcgaagatctcgagccttgat

SEQ ID NO: 44845 - DNA, 25 bp, Homo sapien
cttcttcccgcgaagatctcgagcc

SEQ ID NO: 44846 - DNA, 25 bp, Homo sapien
gcctgtcactttggcgacgcgcagc

SEQ ID NO: 44847 - DNA, 25 bp, Homo sapien
accgcctgtcactttggcgacgcgc

SEQ ID NO: 44848 - DNA, 25 bp, Homo sapien
gactcggatcttagagagcttggag

SEQ ID NO: 44849 - DNA, 25 bp, Homo sapien
taataactgtgagaacacgggcaat

SEQ ID NO: 44850 - DNA, 25 bp, Homo sapien
ggttaataactgtgagaacacgggc

SEQ ID NO: 44851 - DNA, 25 bp, Homo sapien
gagtctggttaataactgtgagaac

SEQ ID NO: 44852 - DNA, 25 bp, Homo sapien
tttctttctgagtctggttaataac

SEQ ID NO: 44853 - DNA, 25 bp, Homo sapien
tcccgcgaagatctcgagccttgat

SEQ ID NO: 44854 - DNA, 25 bp, Homo sapien
gagtctggttaataactgtgagaac

SEQ ID NO: 44855 - DNA, 25 bp, Homo sapien
taataactgtgagaacacgggcaat

SEQ ID NO: 44856 - DNA, 25 bp, Homo sapien
tcttggccattgctgcacaagccgc

SEQ ID NO: 44857 - DNA, 25 bp, Homo sapien
accgcctgtcactttggcgacgcgc

SEQ ID NO: 44858 - DNA, 25 bp, Homo sapien
tgatcttggccattgctgcacaagc

SEQ ID NO: 44859 - DNA, 25 bp, Homo sapien
gcctgtcactttggcgacgcgcagc

SEQ ID NO: 44860 - DNA, 25 bp, Homo sapien
ggttaataactgtgagaacacgggc

SEQ ID NO: 44861 - DNA, 25 bp, Homo sapien
gactcggatcttagagagcttggag

SEQ ID NO: 44862 - DNA, 25 bp, Homo sapien
cttcttcccgcgaagatctcgagcc

SEQ ID NO: 44863 - DNA, 25 bp, Homo sapien
tttctttctgagtctggttaataac

SEQ ID NO: 44864 - DNA, 25 bp, Homo sapien
tcttggccattgctgcacaagccgc

SEQ ID NO: 44865 - DNA, 25 bp, Homo sapien
tgatcttggccattgctgcacaagc

SEQ ID NO: 44866 - DNA, 25 bp, Homo sapien
tcccgcgaagatctcgagccttgat

SEQ ID NO: 44867 - DNA, 25 bp, Homo sapien
cttcttcccgcgaagatctcgagcc

SEQ ID NO: 44868 - DNA, 25 bp, Homo sapien
gcctgtcactttggcgacgcgcagc

SEQ ID NO: 44869 - DNA, 25 bp, Homo sapien
accgcctgtcactttggcgacgcgc

SEQ ID NO: 44870 - DNA, 25 bp, Homo sapien
gactcggatcttagagagcttggag

SEQ ID NO: 44871 - DNA, 25 bp, Homo sapien
taataactgtgagaacacgggcaat

SEQ ID NO: 44872 - DNA, 25 bp, Homo sapien
ggttaataactgtgagaacacgggc

SEQ ID NO: 44873 - DNA, 25 bp, Homo sapien
gagtctggttaataactgtgagaac

SEQ ID NO: 44874 - DNA, 25 bp, Homo sapien
tttctttctgagtctggttaataac

SEQ ID NO: 44875 - DNA, 25 bp, Homo sapien
ggttaataactgtgagaacacgggc

SEQ ID NO: 44876 - DNA, 25 bp, Homo sapien
tcttggccattgctgcacaagccgc

SEQ ID NO: 44877 - DNA, 25 bp, Homo sapien
accgcctgtcactttggcgacgcgc

SEQ ID NO: 44878 - DNA, 25 bp, Homo sapien
tgatcttggccattgctgcacaagc

SEQ ID NO: 44879 - DNA, 25 bp, Homo sapien
gcctgtcactttggcgacgcgcagc

SEQ ID NO: 44880 - DNA, 25 bp, Homo sapien
gagtctggttaataactgtgagaac

SEQ ID NO: 44881 - DNA, 25 bp, Homo sapien
cttcttcccgcgaagatctcgagcc

SEQ ID NO: 44882 - DNA, 25 bp, Homo sapien
taataactgtgagaacacgggcaat

SEQ ID NO: 44883 - DNA, 25 bp, Homo sapien
tttctttctgagtctggttaataac

SEQ ID NO: 44884 - DNA, 25 bp, Homo sapien
tcccgcgaagatctcgagccttgat

SEQ ID NO: 44885 - DNA, 25 bp, Homo sapien
gactcggatcttagagagcttggag

SEQ ID NO: 44886 - DNA, 25 bp, Homo sapien
tcttggccattgctgcacaagccgc

SEQ ID NO: 44887 - DNA, 25 bp, Homo sapien
tgatcttggccattgctgcacaagc

SEQ ID NO: 44888 - DNA, 25 bp, Homo sapien
tcccgcgaagatctcgagccttgat

SEQ ID NO: 44889 - DNA, 25 bp, Homo sapien
cttcttcccgcgaagatctcgagcc

SEQ ID NO: 44890 - DNA, 25 bp, Homo sapien
gcctgtcactttggcgacgcgcagc

SEQ ID NO: 44891 - DNA, 25 bp, Homo sapien
accgcctgtcactttggcgacgcgc

SEQ ID NO: 44892 - DNA, 25 bp, Homo sapien
gactcggatcttagagagcttggag

SEQ ID NO: 44893 - DNA, 25 bp, Homo sapien
taataactgtgagaacacgggcaat

SEQ ID NO: 44894 - DNA, 25 bp, Homo sapien
ggttaataactgtgagaacacgggc

SEQ ID NO: 44895 - DNA, 25 bp, Homo sapien
gagtctggttaataactgtgagaac

SEQ ID NO: 44896 - DNA, 25 bp, Homo sapien
tttctttctgagtctggttaataac

SEQ ID NO: 44897 - DNA, 25 bp, Homo sapien
tcccgcgaagatctcgagccttgat

SEQ ID NO: 44898 - DNA, 25 bp, Homo sapien
accgcctgtcactttggcgacgcgc

SEQ ID NO: 44899 - DNA, 25 bp, Homo sapien
gcctgtcactttggcgacgcgcagc

SEQ ID NO: 44900 - DNA, 25 bp, Homo sapien
cttcttcccgcgaagatctcgagcc

SEQ ID NO: 44901 - DNA, 25 bp, Homo sapien
ggttaataactgtgagaacacgggc

SEQ ID NO: 44902 - DNA, 25 bp, Homo sapien
tcttggccattgctgcacaagccgc

SEQ ID NO: 44903 - DNA, 25 bp, Homo sapien
taataactgtgagaacacgggcaat

SEQ ID NO: 44904 - DNA, 25 bp, Homo sapien
tgatcttggccattgctgcacaagc

SEQ ID NO: 44905 - DNA, 25 bp, Homo sapien
tttctttctgagtctggttaataac

SEQ ID NO: 44906 - DNA, 25 bp, Homo sapien
gactcggatcttagagagcttggag

SEQ ID NO: 44907 - DNA, 25 bp, Homo sapien
gagtctggttaataactgtgagaac

SEQ ID NO: 44908 - DNA, 25 bp, Homo sapien
tcttggccattgctgcacaagccgc

SEQ ID NO: 44909 - DNA, 25 bp, Homo sapien
tgatcttggccattgctgcacaagc

SEQ ID NO: 44910 - DNA, 25 bp, Homo sapien
tcccgcgaagatctcgagccttgat

SEQ ID NO: 44911 - DNA, 25 bp, Homo sapien
cttcttcccgcgaagatctcgagcc

SEQ ID NO: 44912 - DNA, 25 bp, Homo sapien
gcctgtcactttggcgacgcgcagc

SEQ ID NO: 44913 - DNA, 25 bp, Homo sapien
accgcctgtcactttggcgacgcgc

SEQ ID NO: 44914 - DNA, 25 bp, Homo sapien
gactcggatcttagagagcttggag

SEQ ID NO: 44915 - DNA, 25 bp, Homo sapien
taataactgtgagaacacgggcaat

SEQ ID NO: 44916 - DNA, 25 bp, Homo sapien
ggttaataactgtgagaacacgggc

SEQ ID NO: 44917 - DNA, 25 bp, Homo sapien
gagtctggttaataactgtgagaac

SEQ ID NO: 44918 - DNA, 25 bp, Homo sapien
tttctttctgagtctggttaataac

SEQ ID NO: 44919 - DNA, 25 bp, Homo sapien
tcttggccattgctgcacaagccgc

SEQ ID NO: 44920 - DNA, 25 bp, Homo sapien
tgatcttggccattgctgcacaagc

SEQ ID NO: 44921 - DNA, 25 bp, Homo sapien
tcccgcgaagatctcgagccttgat

SEQ ID NO: 44922 - DNA, 25 bp, Homo sapien
cttcttcccgcgaagatctcgagcc

SEQ ID NO: 44923 - DNA, 25 bp, Homo sapien
gcctgtcactttggcgacgcgcagc

SEQ ID NO: 44924 - DNA, 25 bp, Homo sapien
accgcctgtcactttggcgacgcgc

SEQ ID NO: 44925 - DNA, 25 bp, Homo sapien
gactcggatcttagagagcttggag

SEQ ID NO: 44926 - DNA, 25 bp, Homo sapien
taataactgtgagaacacgggcaat

SEQ ID NO: 44927 - DNA, 25 bp, Homo sapien
ggttaataactgtgagaacacgggc

SEQ ID NO: 44928 - DNA, 25 bp, Homo sapien
gagtctggttaataactgtgagaac

SEQ ID NO: 44929 - DNA, 25 bp, Homo sapien
tttctttctgagtctggttaataac

SEQ ID NO: 44930 - DNA, 25 bp, Homo sapien
tgatcttggccattgctgcacaagc

SEQ ID NO: 44931 - DNA, 25 bp, Homo sapien
ggttaataactgtgagaacacgggc

SEQ ID NO: 44932 - DNA, 25 bp, Homo sapien
cttcttcccgcgaagatctcgagcc

SEQ ID NO: 44933 - DNA, 25 bp, Homo sapien
tcttggccattgctgcacaagccgc

SEQ ID NO: 44934 - DNA, 25 bp, Homo sapien
gactcggatcttagagagcttggag

SEQ ID NO: 44935 - DNA, 25 bp, Homo sapien
tcccgcgaagatctcgagccttgat

SEQ ID NO: 44936 - DNA, 25 bp, Homo sapien
accgcctgtcactttggcgacgcgc

SEQ ID NO: 44937 - DNA, 25 bp, Homo sapien
taataactgtgagaacacgggcaat

SEQ ID NO: 44938 - DNA, 25 bp, Homo sapien
gagtctggttaataactgtgagaac

SEQ ID NO: 44939 - DNA, 25 bp, Homo sapien
gcctgtcactttggcgacgcgcagc

SEQ ID NO: 44940 - DNA, 25 bp, Homo sapien
tttctttctgagtctggttaataac

SEQ ID NO: 44941 - DNA, 25 bp, Homo sapien
tgatcttggccattgctgcacaagc

SEQ ID NO: 44942 - DNA, 25 bp, Homo sapien
ggttaataactgtgagaacacgggc

SEQ ID NO: 44943 - DNA, 25 bp, Homo sapien
cttcttcccgcgaagatctcgagcc

SEQ ID NO: 44944 - DNA, 25 bp, Homo sapien
tcttggccattgctgcacaagccgc

SEQ ID NO: 44945 - DNA, 25 bp, Homo sapien
gactcggatcttagagagcttggag

SEQ ID NO: 44946 - DNA, 25 bp, Homo sapien
tcccgcgaagatctcgagccttgat

SEQ ID NO: 44947 - DNA, 25 bp, Homo sapien
accgcctgtcactttggcgacgcgc

SEQ ID NO: 44948 - DNA, 25 bp, Homo sapien
taataactgtgagaacacgggcaat

SEQ ID NO: 44949 - DNA, 25 bp, Homo sapien
gagtctggttaataactgtgagaac

SEQ ID NO: 44950 - DNA, 25 bp, Homo sapien
gcctgtcactttggcgacgcgcagc

SEQ ID NO: 44951 - DNA, 25 bp, Homo sapien
tttctttctgagtctggttaataac

SEQ ID NO: 44952 - DNA, 25 bp, Homo sapien
ggttaataactgtgagaacacgggc

SEQ ID NO: 44953 - DNA, 25 bp, Homo sapien
cttcttcccgcgaagatctcgagcc

SEQ ID NO: 44954 - DNA, 25 bp, Homo sapien
gactcggatcttagagagcttggag

SEQ ID NO: 44955 - DNA, 25 bp, Homo sapien
tcttggccattgctgcacaagccgc

SEQ ID NO: 44956 - DNA, 25 bp, Homo sapien
accgcctgtcactttggcgacgcgc

SEQ ID NO: 44957 - DNA, 25 bp, Homo sapien
tcccgcgaagatctcgagccttgat

SEQ ID NO: 44958 - DNA, 25 bp, Homo sapien
taataactgtgagaacacgggcaat

SEQ ID NO: 44959 - DNA, 25 bp, Homo sapien
gagtctggttaataactgtgagaac

SEQ ID NO: 44960 - DNA, 25 bp, Homo sapien
gcctgtcactttggcgacgcgcagc

SEQ ID NO: 44961 - DNA, 25 bp, Homo sapien
tttctttctgagtctggttaataac

SEQ ID NO: 44962 - DNA, 25 bp, Homo sapien
tgatcttggccattgctgcacaagc

SEQ ID NO: 44963 - DNA, 25 bp, Homo sapien
tgatcttggccattgctgcacaagc

SEQ ID NO: 44964 - DNA, 25 bp, Homo sapien
ggttaataactgtgagaacacgggc

SEQ ID NO: 44965 - DNA, 25 bp, Homo sapien
cttcttcccgcgaagatctcgagcc

SEQ ID NO: 44966 - DNA, 25 bp, Homo sapien
tcttggccattgctgcacaagccgc

SEQ ID NO: 44967 - DNA, 25 bp, Homo sapien
gactcggatcttagagagcttggag

SEQ ID NO: 44968 - DNA, 25 bp, Homo sapien
tcccgcgaagatctcgagccttgat

SEQ ID NO: 44969 - DNA, 25 bp, Homo sapien
accgcctgtcactttggcgacgcgc

SEQ ID NO: 44970 - DNA, 25 bp, Homo sapien
taataactgtgagaacacgggcaat

SEQ ID NO: 44971 - DNA, 25 bp, Homo sapien
gagtctggttaataactgtgagaac

SEQ ID NO: 44972 - DNA, 25 bp, Homo sapien
gcctgtcactttggcgacgcgcagc

SEQ ID NO: 44973 - DNA, 25 bp, Homo sapien
tttctttctgagtctggttaataac

SEQ ID NO: 44974 - DNA, 25 bp, Homo sapien
ggttaataactgtgagaacacgggc

SEQ ID NO: 44975 - DNA, 25 bp, Homo sapien
cttcttcccgcgaagatctcgagcc

SEQ ID NO: 44976 - DNA, 25 bp, Homo sapien
gactcggatcttagagagcttggag

SEQ ID NO: 44977 - DNA, 25 bp, Homo sapien
tcccgcgaagatctcgagccttgat

SEQ ID NO: 44978 - DNA, 25 bp, Homo sapien
tcttggccattgctgcacaagccgc

SEQ ID NO: 44979 - DNA, 25 bp, Homo sapien
accgcctgtcactttggcgacgcgc

SEQ ID NO: 44980 - DNA, 25 bp, Homo sapien
taataactgtgagaacacgggcaat

SEQ ID NO: 44981 - DNA, 25 bp, Homo sapien
gagtctggttaataactgtgagaac

SEQ ID NO: 44982 - DNA, 25 bp, Homo sapien
gcctgtcactttggcgacgcgcagc

SEQ ID NO: 44983 - DNA, 25 bp, Homo sapien
tttctttctgagtctggttaataac

SEQ ID NO: 44984 - DNA, 25 bp, Homo sapien
tgatcttggccattgctgcacaagc

SEQ ID NO: 44985 - DNA, 25 bp, Homo sapien
tgatcttggccattgctgcacaagc

SEQ ID NO: 44986 - DNA, 25 bp, Homo sapien
ggttaataactgtgagaacacgggc

SEQ ID NO: 44987 - DNA, 25 bp, Homo sapien
cttcttcccgcgaagatctcgagcc

SEQ ID NO: 44988 - DNA, 25 bp, Homo sapien
gactcggatcttagagagcttggag

SEQ ID NO: 44989 - DNA, 25 bp, Homo sapien
tcccgcgaagatctcgagccttgat

SEQ ID NO: 44990 - DNA, 25 bp, Homo sapien
tcttggccattgctgcacaagccgc

SEQ ID NO: 44991 - DNA, 25 bp, Homo sapien
accgcctgtcactttggcgacgcgc

SEQ ID NO: 44992 - DNA, 25 bp, Homo sapien
taataactgtgagaacacgggcaat

SEQ ID NO: 44993 - DNA, 25 bp, Homo sapien
gagtctggttaataactgtgagaac

SEQ ID NO: 44994 - DNA, 25 bp, Homo sapien
gcctgtcactttggcgacgcgcagc

SEQ ID NO: 44995 - DNA, 25 bp, Homo sapien
tttctttctgagtctggttaataac

SEQ ID NO: 44996 - DNA, 25 bp, Homo sapien
tgatcttggccattgctgcacaagc

SEQ ID NO: 44997 - DNA, 25 bp, Homo sapien
ggttaataactgtgagaacacgggc

SEQ ID NO: 44998 - DNA, 25 bp, Homo sapien
cttcttcccgcgaagatctcgagcc

SEQ ID NO: 44999 - DNA, 25 bp, Homo sapien
tcttggccattgctgcacaagccgc

SEQ ID NO: 45000 - DNA, 25 bp, Homo sapien
gactcggatcttagagagcttggag

SEQ ID NO: 45001 - DNA, 25 bp, Homo sapien
tcccgcgaagatctcgagccttgat

SEQ ID NO: 45002 - DNA, 25 bp, Homo sapien
accgcctgtcactttggcgacgcgc

SEQ ID NO: 45003 - DNA, 25 bp, Homo sapien
taataactgtgagaacacgggcaat

SEQ ID NO: 45004 - DNA, 25 bp, Homo sapien
gagtctggttaataactgtgagaac

SEQ ID NO: 45005 - DNA, 25 bp, Homo sapien
gcctgtcactttggcgacgcgcagc

SEQ ID NO: 45006 - DNA, 25 bp, Homo sapien
tttctttctgagtctggttaataac

SEQ ID NO: 45007 - DNA, 25 bp, Homo sapien
tgatcttggccattgctgcacaagc

SEQ ID NO: 45008 - DNA, 25 bp, Homo sapien
ggttaataactgtgagaacacgggc

SEQ ID NO: 45009 - DNA, 25 bp, Homo sapien
cttcttcccgcgaagatctcgagcc

SEQ ID NO: 45010 - DNA, 25 bp, Homo sapien
tcttggccattgctgcacaagccgc

SEQ ID NO: 45011 - DNA, 25 bp, Homo sapien
gactcggatcttagagagcttggag

SEQ ID NO: 45012 - DNA, 25 bp, Homo sapien
accgcctgtcactttggcgacgcgc

SEQ ID NO: 45013 - DNA, 25 bp, Homo sapien
tcccgcgaagatctcgagccttgat

SEQ ID NO: 45014 - DNA, 25 bp, Homo sapien
taataactgtgagaacacgggcaat

SEQ ID NO: 45015 - DNA, 25 bp, Homo sapien
gagtctggttaataactgtgagaac

SEQ ID NO: 45016 - DNA, 25 bp, Homo sapien
gcctgtcactttggcgacgcgcagc

SEQ ID NO: 45017 - DNA, 25 bp, Homo sapien
tttctttctgagtctggttaataac

SEQ ID NO: 45018 - DNA, 25 bp, Homo sapien
ggttaataactgtgagaacacgggc

SEQ ID NO: 45019 - DNA, 25 bp, Homo sapien
cttcttcccgcgaagatctcgagcc

SEQ ID NO: 45020 - DNA, 25 bp, Homo sapien
tcttggccattgctgcacaagccgc

SEQ ID NO: 45021 - DNA, 25 bp, Homo sapien
tcccgcgaagatctcgagccttgat

SEQ ID NO: 45022 - DNA, 25 bp, Homo sapien
gactcggatcttagagagcttggag

SEQ ID NO: 45023 - DNA, 25 bp, Homo sapien
accgcctgtcactttggcgacgcgc

SEQ ID NO: 45024 - DNA, 25 bp, Homo sapien
taataactgtgagaacacgggcaat

SEQ ID NO: 45025 - DNA, 25 bp, Homo sapien
gagtctggttaataactgtgagaac

SEQ ID NO: 45026 - DNA, 25 bp, Homo sapien
gcctgtcactttggcgacgcgcagc

SEQ ID NO: 45027 - DNA, 25 bp, Homo sapien
tttctttctgagtctggttaataac

SEQ ID NO: 45028 - DNA, 25 bp, Homo sapien
tgatcttggccattgctgcacaagc

SEQ ID NO: 45029 - DNA, 25 bp, Homo sapien
taataactgtgagaacacgggcaat

SEQ ID NO: 45030 - DNA, 25 bp, Homo sapien
tgatcttggccattgctgcacaagc

SEQ ID NO: 45031 - DNA, 25 bp, Homo sapien
gactcggatcttagagagcttggag

SEQ ID NO: 45032 - DNA, 25 bp, Homo sapien
tcttggccattgctgcacaagccgc

SEQ ID NO: 45033 - DNA, 25 bp, Homo sapien
tcccgcgaagatctcgagccttgat

SEQ ID NO: 45034 - DNA, 25 bp, Homo sapien
cttcttcccgcgaagatctcgagcc

SEQ ID NO: 45035 - DNA, 25 bp, Homo sapien
tttctttctgagtctggttaataac

SEQ ID NO: 45036 - DNA, 25 bp, Homo sapien
gagtctggttaataactgtgagaac

SEQ ID NO: 45037 - DNA, 25 bp, Homo sapien
gcctgtcactttggcgacgcgcagc

SEQ ID NO: 45038 - DNA, 25 bp, Homo sapien
ggttaataactgtgagaacacgggc

SEQ ID NO: 45039 - DNA, 25 bp, Homo sapien
accgcctgtcactttggcgacgcgc

SEQ ID NO: 45040 - DNA, 25 bp, Homo sapien
tgatcttggccattgctgcacaagc

SEQ ID NO: 45041 - DNA, 25 bp, Homo sapien
ggttaataactgtgagaacacgggc

SEQ ID NO: 45042 - DNA, 25 bp, Homo sapien
cttcttcccgcgaagatctcgagcc

SEQ ID NO: 45043 - DNA, 25 bp, Homo sapien
tcttggccattgctgcacaagccgc

SEQ ID NO: 45044 - DNA, 25 bp, Homo sapien
tcccgcgaagatctcgagccttgat

SEQ ID NO: 45045 - DNA, 25 bp, Homo sapien
gactcggatcttagagagcttggag

SEQ ID NO: 45046 - DNA, 25 bp, Homo sapien
accgcctgtcactttggcgacgcgc

SEQ ID NO: 45047 - DNA, 25 bp, Homo sapien
taataactgtgagaacacgggcaat

SEQ ID NO: 45048 - DNA, 25 bp, Homo sapien
gagtctggttaataactgtgagaac

SEQ ID NO: 45049 - DNA, 25 bp, Homo sapien
gcctgtcactttggcgacgcgcagc

SEQ ID NO: 45050 - DNA, 25 bp, Homo sapien
tttctttctgagtctggttaataac

SEQ ID NO: 45051 - DNA, 25 bp, Homo sapien
tcttggccattgctgcacaagccgc

SEQ ID NO: 45052 - DNA, 25 bp, Homo sapien
tgatcttggccattgctgcacaagc

SEQ ID NO: 45053 - DNA, 25 bp, Homo sapien
tcccgcgaagatctcgagccttgat

SEQ ID NO: 45054 - DNA, 25 bp, Homo sapien
cttcttcccgcgaagatctcgagcc

SEQ ID NO: 45055 - DNA, 25 bp, Homo sapien
gcctgtcactttggcgacgcgcagc

SEQ ID NO: 45056 - DNA, 25 bp, Homo sapien
accgcctgtcactttggcgacgcgc

SEQ ID NO: 45057 - DNA, 25 bp, Homo sapien
gactcggatcttagagagcttggag

SEQ ID NO: 45058 - DNA, 25 bp, Homo sapien
taataactgtgagaacacgggcaat

SEQ ID NO: 45059 - DNA, 25 bp, Homo sapien
ggttaataactgtgagaacacgggc

SEQ ID NO: 45060 - DNA, 25 bp, Homo sapien
gagtctggttaataactgtgagaac

SEQ ID NO: 45061 - DNA, 25 bp, Homo sapien
tttctttctgagtctggttaataac

SEQ ID NO: 45062 - DNA, 25 bp, Homo sapien
attgcccgtgttctcacagttatta

SEQ ID NO: 45063 - DNA, 25 bp, Homo sapien
gcccgtgttctcacagttattaacc

SEQ ID NO: 45064 - DNA, 25 bp, Homo sapien
gcgcgtcgccaaagtgacaggcggt

SEQ ID NO: 45065 - DNA, 25 bp, Homo sapien
atcaaggctcgagatcttcgcggga

SEQ ID NO: 45066 - DNA, 25 bp, Homo sapien
gcttgtgcagcaatggccaagatca

SEQ ID NO: 45067 - DNA, 25 bp, Homo sapien
gctgcgcgtcgccaaagtgacaggc

SEQ ID NO: 45068 - DNA, 25 bp, Homo sapien
ggctcgagatcttcgcgggaagaag

SEQ ID NO: 45069 - DNA, 25 bp, Homo sapien
gttattaaccagactcagaaagaaa

SEQ ID NO: 45070 - DNA, 25 bp, Homo sapien
gttctcacagttattaaccagactc

SEQ ID NO: 45071 - DNA, 25 bp, Homo sapien
gcggcttgtgcagcaatggccaaga

SEQ ID NO: 45072 - DNA, 25 bp, Homo sapien
ctccaagctctctaagatccgagtc

SEQ ID NO: 45073 - DNA, 25 bp, Homo sapien
ggttaataactgtgagaacacgggc

SEQ ID NO: 45074 - DNA, 25 bp, Homo sapien
cttcttcccgcgaagatctcgagcc

SEQ ID NO: 45075 - DNA, 25 bp, Homo sapien
gactcggatcttagagagcttggag

SEQ ID NO: 45076 - DNA, 25 bp, Homo sapien
tcttggccattgctgcacaagccgc

SEQ ID NO: 45077 - DNA, 25 bp, Homo sapien
accgcctgtcactttggcgacgcgc

SEQ ID NO: 45078 - DNA, 25 bp, Homo sapien
tcccgcgaagatctcgagccttgat

SEQ ID NO: 45079 - DNA, 25 bp, Homo sapien
taataactgtgagaacacgggcaat

SEQ ID NO: 45080 - DNA, 25 bp, Homo sapien
gagtctggttaataactgtgagaac

SEQ ID NO: 45081 - DNA, 25 bp, Homo sapien
gcctgtcactttggcgacgcgcagc

SEQ ID NO: 45082 - DNA, 25 bp, Homo sapien
tttctttctgagtctggttaataac

SEQ ID NO: 45083 - DNA, 25 bp, Homo sapien
tgatcttggccattgctgcacaagc

SEQ ID NO: 45084 - DNA, 25 bp, Homo sapien
tgatcttggccattgctgcacaagc

SEQ ID NO: 45085 - DNA, 25 bp, Homo sapien
taataactgtgagaacacgggcaat

SEQ ID NO: 45086 - DNA, 25 bp, Homo sapien
cttcttcccgcgaagatctcgagcc

SEQ ID NO: 45087 - DNA, 25 bp, Homo sapien
gagtctggttaataactgtgagaac

SEQ ID NO: 45088 - DNA, 25 bp, Homo sapien
gactcggatcttagagagcttggag

SEQ ID NO: 45089 - DNA, 25 bp, Homo sapien
gcctgtcactttggcgacgcgcagc

SEQ ID NO: 45090 - DNA, 25 bp, Homo sapien
tcccgcgaagatctcgagccttgat

SEQ ID NO: 45091 - DNA, 25 bp, Homo sapien
ggttaataactgtgagaacacgggc

SEQ ID NO: 45092 - DNA, 25 bp, Homo sapien
tttctttctgagtctggttaataac

SEQ ID NO: 45093 - DNA, 25 bp, Homo sapien
accgcctgtcactttggcgacgcgc

SEQ ID NO: 45094 - DNA, 25 bp, Homo sapien
tcttggccattgctgcacaagccgc

SEQ ID NO: 45095 - DNA, 25 bp, Homo sapien
tcttggccattgctgcacaagccgc

SEQ ID NO: 45096 - DNA, 25 bp, Homo sapien
tgatcttggccattgctgcacaagc

SEQ ID NO: 45097 - DNA, 25 bp, Homo sapien
tcccgcgaagatctcgagccttgat

SEQ ID NO: 45098 - DNA, 25 bp, Homo sapien
cttcttcccgcgaagatctcgagcc

SEQ ID NO: 45099 - DNA, 25 bp, Homo sapien
gcctgtcactttggcgacgcgcagc

SEQ ID NO: 45100 - DNA, 25 bp, Homo sapien
accgcctgtcactttggcgacgcgc

SEQ ID NO: 45101 - DNA, 25 bp, Homo sapien
gactcggatcttagagagcttggag

SEQ ID NO: 45102 - DNA, 25 bp, Homo sapien
taataactgtgagaacacgggcaat

SEQ ID NO: 45103 - DNA, 25 bp, Homo sapien
ggttaataactgtgagaacacgggc

SEQ ID NO: 45104 - DNA, 25 bp, Homo sapien
gagtctggttaataactgtgagaac

SEQ ID NO: 45105 - DNA, 25 bp, Homo sapien
tttctttctgagtctggttaataac

SEQ ID NO: 45106 - DNA, 25 bp, Homo sapien
cttcttcccgcgaagatctcgagcc

SEQ ID NO: 45107 - DNA, 25 bp, Homo sapien
taataactgtgagaacacgggcaat

SEQ ID NO: 45108 - DNA, 25 bp, Homo sapien
gcctgtcactttggcgacgcgcagc

SEQ ID NO: 45109 - DNA, 25 bp, Homo sapien
tttctttctgagtctggttaataac

SEQ ID NO: 45110 - DNA, 25 bp, Homo sapien
tcccgcgaagatctcgagccttgat

SEQ ID NO: 45111 - DNA, 25 bp, Homo sapien
gactcggatcttagagagcttggag

SEQ ID NO: 45112 - DNA, 25 bp, Homo sapien
ggttaataactgtgagaacacgggc

SEQ ID NO: 45113 - DNA, 25 bp, Homo sapien
tgatcttggccattgctgcacaagc

SEQ ID NO: 45114 - DNA, 25 bp, Homo sapien
accgcctgtcactttggcgacgcgc

SEQ ID NO: 45115 - DNA, 25 bp, Homo sapien
tcttggccattgctgcacaagccgc

SEQ ID NO: 45116 - DNA, 25 bp, Homo sapien
gagtctggttaataactgtgagaac

SEQ ID NO: 45117 - DNA, 25 bp, Homo sapien
tcttggccattgctgcacaagccgc

SEQ ID NO: 45118 - DNA, 25 bp, Homo sapien
tgatcttggccattgctgcacaagc

SEQ ID NO: 45119 - DNA, 25 bp, Homo sapien
tcccgcgaagatctcgagccttgat

SEQ ID NO: 45120 - DNA, 25 bp, Homo sapien
cttcttcccgcgaagatctcgagcc

SEQ ID NO: 45121 - DNA, 25 bp, Homo sapien
gcctgtcactttggcgacgcgcagc

SEQ ID NO: 45122 - DNA, 25 bp, Homo sapien
accgcctgtcactttggcgacgcgc

SEQ ID NO: 45123 - DNA, 25 bp, Homo sapien
gactcggatcttagagagcttggag

SEQ ID NO: 45124 - DNA, 25 bp, Homo sapien
taataactgtgagaacacgggcaat

SEQ ID NO: 45125 - DNA, 25 bp, Homo sapien
ggttaataactgtgagaacacgggc

SEQ ID NO: 45126 - DNA, 25 bp, Homo sapien
gagtctggttaataactgtgagaac

SEQ ID NO: 45127 - DNA, 25 bp, Homo sapien
tttctttctgagtctggttaataac

SEQ ID NO: 45128 - DNA, 25 bp, Homo sapien
tttctttctgagtctggttaataac

SEQ ID NO: 45129 - DNA, 25 bp, Homo sapien
accgcctgtcactttggcgacgcgc

SEQ ID NO: 45130 - DNA, 25 bp, Homo sapien
gagtctggttaataactgtgagaac

SEQ ID NO: 45131 - DNA, 25 bp, Homo sapien
gactcggatcttagagagcttggag

SEQ ID NO: 45132 - DNA, 25 bp, Homo sapien
cttcttcccgcgaagatctcgagcc

SEQ ID NO: 45133 - DNA, 25 bp, Homo sapien
tgatcttggccattgctgcacaagc

SEQ ID NO: 45134 - DNA, 25 bp, Homo sapien
gcctgtcactttggcgacgcgcagc

SEQ ID NO: 45135 - DNA, 25 bp, Homo sapien
tcttggccattgctgcacaagccgc

SEQ ID NO: 45136 - DNA, 25 bp, Homo sapien
taataactgtgagaacacgggcaat

SEQ ID NO: 45137 - DNA, 25 bp, Homo sapien
tcccgcgaagatctcgagccttgat

SEQ ID NO: 45138 - DNA, 25 bp, Homo sapien
ggttaataactgtgagaacacgggc

SEQ ID NO: 45139 - DNA, 25 bp, Homo sapien
tcttggccattgctgcacaagccgc

SEQ ID NO: 45140 - DNA, 25 bp, Homo sapien
tgatcttggccattgctgcacaagc

SEQ ID NO: 45141 - DNA, 25 bp, Homo sapien
tcccgcgaagatctcgagccttgat

SEQ ID NO: 45142 - DNA, 25 bp, Homo sapien
cttcttcccgcgaagatctcgagcc

SEQ ID NO: 45143 - DNA, 25 bp, Homo sapien
gcctgtcactttggcgacgcgcagc

SEQ ID NO: 45144 - DNA, 25 bp, Homo sapien
accgcctgtcactttggcgacgcgc

SEQ ID NO: 45145 - DNA, 25 bp, Homo sapien
gactcggatcttagagagcttggag

SEQ ID NO: 45146 - DNA, 25 bp, Homo sapien
taataactgtgagaacacgggcaat

SEQ ID NO: 45147 - DNA, 25 bp, Homo sapien
ggttaataactgtgagaacacgggc

SEQ ID NO: 45148 - DNA, 25 bp, Homo sapien
gagtctggttaataactgtgagaac

SEQ ID NO: 45149 - DNA, 25 bp, Homo sapien
tttctttctgagtctggttaataac

SEQ ID NO: 45150 - DNA, 25 bp, Homo sapien
tcttggccattgctgcacaagccgc

SEQ ID NO: 45151 - DNA, 25 bp, Homo sapien
tgatcttggccattgctgcacaagc

SEQ ID NO: 45152 - DNA, 25 bp, Homo sapien
tcccgcgaagatctcgagccttgat

SEQ ID NO: 45153 - DNA, 25 bp, Homo sapien
cttcttcccgcgaagatctcgagcc

SEQ ID NO: 45154 - DNA, 25 bp, Homo sapien
gcctgtcactttggcgacgcgcagc

SEQ ID NO: 45155 - DNA, 25 bp, Homo sapien
accgcctgtcactttggcgacgcgc

SEQ ID NO: 45156 - DNA, 25 bp, Homo sapien
gactcggatcttagagagcttggag

SEQ ID NO: 45157 - DNA, 25 bp, Homo sapien
taataactgtgagaacacgggcaat

SEQ ID NO: 45158 - DNA, 25 bp, Homo sapien
ggttaataactgtgagaacacgggc

SEQ ID NO: 45159 - DNA, 25 bp, Homo sapien
gagtctggttaataactgtgagaac

SEQ ID NO: 45160 - DNA, 25 bp, Homo sapien
tttctttctgagtctggttaataac

SEQ ID NO: 45161 - DNA, 25 bp, Homo sapien
tcccgcgaagatctcgagccttgat

SEQ ID NO: 45162 - DNA, 25 bp, Homo sapien
ggttaataactgtgagaacacgggc

SEQ ID NO: 45163 - DNA, 25 bp, Homo sapien
tcttggccattgctgcacaagccgc

SEQ ID NO: 45164 - DNA, 25 bp, Homo sapien
gcctgtcactttggcgacgcgcagc

SEQ ID NO: 45165 - DNA, 25 bp, Homo sapien
gactcggatcttagagagcttggag

SEQ ID NO: 45166 - DNA, 25 bp, Homo sapien
cttcttcccgcgaagatctcgagcc

SEQ ID NO: 45167 - DNA, 25 bp, Homo sapien
tgatcttggccattgctgcacaagc

SEQ ID NO: 45168 - DNA, 25 bp, Homo sapien
taataactgtgagaacacgggcaat

SEQ ID NO: 45169 - DNA, 25 bp, Homo sapien
gagtctggttaataactgtgagaac

SEQ ID NO: 45170 - DNA, 25 bp, Homo sapien
tttctttctgagtctggttaataac

SEQ ID NO: 45171 - DNA, 25 bp, Homo sapien
accgcctgtcactttggcgacgcgc

SEQ ID NO: 45172 - DNA, 25 bp, Homo sapien
tcttggccattgctgcacaagccgc

SEQ ID NO: 45173 - DNA, 25 bp, Homo sapien
tgatcttggccattgctgcacaagc

SEQ ID NO: 45174 - DNA, 25 bp, Homo sapien
tcccgcgaagatctcgagccttgat

SEQ ID NO: 45175 - DNA, 25 bp, Homo sapien
cttcttcccgcgaagatctcgagcc

SEQ ID NO: 45176 - DNA, 25 bp, Homo sapien
gcctgtcactttggcgacgcgcagc

SEQ ID NO: 45177 - DNA, 25 bp, Homo sapien
accgcctgtcactttggcgacgcgc

SEQ ID NO: 45178 - DNA, 25 bp, Homo sapien
gactcggatcttagagagcttggag

SEQ ID NO: 45179 - DNA, 25 bp, Homo sapien
taataactgtgagaacacgggcaat

SEQ ID NO: 45180 - DNA, 25 bp, Homo sapien
ggttaataactgtgagaacacgggc

SEQ ID NO: 45181 - DNA, 25 bp, Homo sapien
gagtctggttaataactgtgagaac

SEQ ID NO: 45182 - DNA, 25 bp, Homo sapien
tttctttctgagtctggttaataac

SEQ ID NO: 45183 - DNA, 25 bp, Homo sapien
taataactgtgagaacacgggcaat

SEQ ID NO: 45184 - DNA, 25 bp, Homo sapien
ggttaataactgtgagaacacgggc

SEQ ID NO: 45185 - DNA, 25 bp, Homo sapien
tcccgcgaagatctcgagccttgat

SEQ ID NO: 45186 - DNA, 25 bp, Homo sapien
cttcttcccgcgaagatctcgagcc

SEQ ID NO: 45187 - DNA, 25 bp, Homo sapien
gactcggatcttagagagcttggag

SEQ ID NO: 45188 - DNA, 25 bp, Homo sapien
tcttggccattgctgcacaagccgc

SEQ ID NO: 45189 - DNA, 25 bp, Homo sapien
gcctgtcactttggcgacgcgcagc

SEQ ID NO: 45190 - DNA, 25 bp, Homo sapien
accgcctgtcactttggcgacgcgc

SEQ ID NO: 45191 - DNA, 25 bp, Homo sapien
gagtctggttaataactgtgagaac

SEQ ID NO: 45192 - DNA, 25 bp, Homo sapien
tttctttctgagtctggttaataac

SEQ ID NO: 45193 - DNA, 25 bp, Homo sapien
tgatcttggccattgctgcacaagc

SEQ ID NO: 45194 - DNA, 25 bp, Homo sapien
tcttggccattgctgcacaagccgc

SEQ ID NO: 45195 - DNA, 25 bp, Homo sapien
tgatcttggccattgctgcacaagc

SEQ ID NO: 45196 - DNA, 25 bp, Homo sapien
tcccgcgaagatctcgagccttgat

SEQ ID NO: 45197 - DNA, 25 bp, Homo sapien
cttcttcccgcgaagatctcgagcc

SEQ ID NO: 45198 - DNA, 25 bp, Homo sapien
gcctgtcactttggcgacgcgcagc

SEQ ID NO: 45199 - DNA, 25 bp, Homo sapien
accgcctgtcactttggcgacgcgc

SEQ ID NO: 45200 - DNA, 25 bp, Homo sapien
gactcggatcttagagagcttggag

SEQ ID NO: 45201 - DNA, 25 bp, Homo sapien
taataactgtgagaacacgggcaat

SEQ ID NO: 45202 - DNA, 25 bp, Homo sapien
ggttaataactgtgagaacacgggc

SEQ ID NO: 45203 - DNA, 25 bp, Homo sapien
gagtctggttaataactgtgagaac

SEQ ID NO: 45204 - DNA, 25 bp, Homo sapien
tttctttctgagtctggttaataac

SEQ ID NO: 45205 - DNA, 25 bp, Homo sapien
tttctttctgagtctggttaataac

SEQ ID NO: 45206 - DNA, 25 bp, Homo sapien
tgatcttggccattgctgcacaagc

SEQ ID NO: 45207 - DNA, 25 bp, Homo sapien
gcctgtcactttggcgacgcgcagc

SEQ ID NO: 45208 - DNA, 25 bp, Homo sapien
accgcctgtcactttggcgacgcgc

SEQ ID NO: 45209 - DNA, 25 bp, Homo sapien
gagtctggttaataactgtgagaac

SEQ ID NO: 45210 - DNA, 25 bp, Homo sapien
taataactgtgagaacacgggcaat

SEQ ID NO: 45211 - DNA, 25 bp, Homo sapien
gactcggatcttagagagcttggag

SEQ ID NO: 45212 - DNA, 25 bp, Homo sapien
ggttaataactgtgagaacacgggc

SEQ ID NO: 45213 - DNA, 25 bp, Homo sapien
tcttggccattgctgcacaagccgc

SEQ ID NO: 45214 - DNA, 25 bp, Homo sapien
tcccgcgaagatctcgagccttgat

SEQ ID NO: 45215 - DNA, 25 bp, Homo sapien
cttcttcccgcgaagatctcgagcc

SEQ ID NO: 45216 - DNA, 25 bp, Homo sapien
tcttggccattgctgcacaagccgc

SEQ ID NO: 45217 - DNA, 25 bp, Homo sapien
tgatcttggccattgctgcacaagc

SEQ ID NO: 45218 - DNA, 25 bp, Homo sapien
tcccgcgaagatctcgagccttgat

SEQ ID NO: 45219 - DNA, 25 bp, Homo sapien
cttcttcccgcgaagatctcgagcc

SEQ ID NO: 45220 - DNA, 25 bp, Homo sapien
gcctgtcactttggcgacgcgcagc

SEQ ID NO: 45221 - DNA, 25 bp, Homo sapien
accgcctgtcactttggcgacgcgc

SEQ ID NO: 45222 - DNA, 25 bp, Homo sapien
gactcggatcttagagagcttggag

SEQ ID NO: 45223 - DNA, 25 bp, Homo sapien
taataactgtgagaacacgggcaat

SEQ ID NO: 45224 - DNA, 25 bp, Homo sapien
ggttaataactgtgagaacacgggc

SEQ ID NO: 45225 - DNA, 25 bp, Homo sapien
gagtctggttaataactgtgagaac

SEQ ID NO: 45226 - DNA, 25 bp, Homo sapien
tttctttctgagtctggttaataac

SEQ ID NO: 45227 - DNA, 25 bp, Homo sapien
tttctttctgagtctggttaataac

SEQ ID NO: 45228 - DNA, 25 bp, Homo sapien
cttcttcccgcgaagatctcgagcc

SEQ ID NO: 45229 - DNA, 25 bp, Homo sapien
gactcggatcttagagagcttggag

SEQ ID NO: 45230 - DNA, 25 bp, Homo sapien
accgcctgtcactttggcgacgcgc

SEQ ID NO: 45231 - DNA, 25 bp, Homo sapien
gagtctggttaataactgtgagaac

SEQ ID NO: 45232 - DNA, 25 bp, Homo sapien
tcccgcgaagatctcgagccttgat

SEQ ID NO: 45233 - DNA, 25 bp, Homo sapien
gcctgtcactttggcgacgcgcagc

SEQ ID NO: 45234 - DNA, 25 bp, Homo sapien
tgatcttggccattgctgcacaagc

SEQ ID NO: 45235 - DNA, 25 bp, Homo sapien
tcttggccattgctgcacaagccgc

SEQ ID NO: 45236 - DNA, 25 bp, Homo sapien
ggttaataactgtgagaacacgggc

SEQ ID NO: 45237 - DNA, 25 bp, Homo sapien
taataactgtgagaacacgggcaat

SEQ ID NO: 45238 - DNA, 25 bp, Homo sapien
tcttggccattgctgcacaagccgc

SEQ ID NO: 45239 - DNA, 25 bp, Homo sapien
tgatcttggccattgctgcacaagc

SEQ ID NO: 45240 - DNA, 25 bp, Homo sapien
tcccgcgaagatctcgagccttgat

SEQ ID NO: 45241 - DNA, 25 bp, Homo sapien
cttcttcccgcgaagatctcgagcc

SEQ ID NO: 45242 - DNA, 25 bp, Homo sapien
gcctgtcactttggcgacgcgcagc

SEQ ID NO: 45243 - DNA, 25 bp, Homo sapien
accgcctgtcactttggcgacgcgc

SEQ ID NO: 45244 - DNA, 25 bp, Homo sapien
gactcggatcttagagagcttggag

SEQ ID NO: 45245 - DNA, 25 bp, Homo sapien
taataactgtgagaacacgggcaat

SEQ ID NO: 45246 - DNA, 25 bp, Homo sapien
ggttaataactgtgagaacacgggc

SEQ ID NO: 45247 - DNA, 25 bp, Homo sapien
gagtctggttaataactgtgagaac

SEQ ID NO: 45248 - DNA, 25 bp, Homo sapien
tttctttctgagtctggttaataac

SEQ ID NO: 45249 - DNA, 25 bp, Homo sapien
gcctgtcactttggcgacgcgcagc

SEQ ID NO: 45250 - DNA, 25 bp, Homo sapien
cttcttcccgcgaagatctcgagcc

SEQ ID NO: 45251 - DNA, 25 bp, Homo sapien
taataactgtgagaacacgggcaat

SEQ ID NO: 45252 - DNA, 25 bp, Homo sapien
gagtctggttaataactgtgagaac

SEQ ID NO: 45253 - DNA, 25 bp, Homo sapien
tgatcttggccattgctgcacaagc

SEQ ID NO: 45254 - DNA, 25 bp, Homo sapien
accgcctgtcactttggcgacgcgc

SEQ ID NO: 45255 - DNA, 25 bp, Homo sapien
tcccgcgaagatctcgagccttgat

SEQ ID NO: 45256 - DNA, 25 bp, Homo sapien
ggttaataactgtgagaacacgggc

SEQ ID NO: 45257 - DNA, 25 bp, Homo sapien
gactcggatcttagagagcttggag

SEQ ID NO: 45258 - DNA, 25 bp, Homo sapien
tcttggccattgctgcacaagccgc

SEQ ID NO: 45259 - DNA, 25 bp, Homo sapien
tttctttctgagtctggttaataac

SEQ ID NO: 45260 - DNA, 25 bp, Homo sapien
gagtctggttaataactgtgagaac

SEQ ID NO: 45261 - DNA, 25 bp, Homo sapien
tttctttctgagtctggttaataac

SEQ ID NO: 45262 - DNA, 25 bp, Homo sapien
gcctgtcactttggcgacgcgcagc

SEQ ID NO: 45263 - DNA, 25 bp, Homo sapien
cttcttcccgcgaagatctcgagcc

SEQ ID NO: 45264 - DNA, 25 bp, Homo sapien
tcttggccattgctgcacaagccgc

SEQ ID NO: 45265 - DNA, 25 bp, Homo sapien
accgcctgtcactttggcgacgcgc

SEQ ID NO: 45266 - DNA, 25 bp, Homo sapien
gactcggatcttagagagcttggag

SEQ ID NO: 45267 - DNA, 25 bp, Homo sapien
tcccgcgaagatctcgagccttgat

SEQ ID NO: 45268 - DNA, 25 bp, Homo sapien
ggttaataactgtgagaacacgggc

SEQ ID NO: 45269 - DNA, 25 bp, Homo sapien
tgatcttggccattgctgcacaagc

SEQ ID NO: 45270 - DNA, 25 bp, Homo sapien
taataactgtgagaacacgggcaat

SEQ ID NO: 45271 - DNA, 25 bp, Homo sapien
tcttggccattgctgcacaagccgc

SEQ ID NO: 45272 - DNA, 25 bp, Homo sapien
tgatcttggccattgctgcacaagc

SEQ ID NO: 45273 - DNA, 25 bp, Homo sapien
tcccgcgaagatctcgagccttgat

SEQ ID NO: 45274 - DNA, 25 bp, Homo sapien
cttcttcccgcgaagatctcgagcc

SEQ ID NO: 45275 - DNA, 25 bp, Homo sapien
gcctgtcactttggcgacgcgcagc

SEQ ID NO: 45276 - DNA, 25 bp, Homo sapien
accgcctgtcactttggcgacgcgc

SEQ ID NO: 45277 - DNA, 25 bp, Homo sapien
gactcggatcttagagagcttggag

SEQ ID NO: 45278 - DNA, 25 bp, Homo sapien
taataactgtgagaacacgggcaat

SEQ ID NO: 45279 - DNA, 25 bp, Homo sapien
ggttaataactgtgagaacacgggc

SEQ ID NO: 45280 - DNA, 25 bp, Homo sapien
gagtctggttaataactgtgagaac

SEQ ID NO: 45281 - DNA, 25 bp, Homo sapien
tttctttctgagtctggttaataac

SEQ ID NO: 45282 - DNA, 25 bp, Homo sapien
cttcttcccgcgaagatctcgagcc

SEQ ID NO: 45283 - DNA, 25 bp, Homo sapien
tgatcttggccattgctgcacaagc

SEQ ID NO: 45284 - DNA, 25 bp, Homo sapien
tcccgcgaagatctcgagccttgat

SEQ ID NO: 45285 - DNA, 25 bp, Homo sapien
tttctttctgagtctggttaataac

SEQ ID NO: 45286 - DNA, 25 bp, Homo sapien
gagtctggttaataactgtgagaac

SEQ ID NO: 45287 - DNA, 25 bp, Homo sapien
tcttggccattgctgcacaagccgc

SEQ ID NO: 45288 - DNA, 25 bp, Homo sapien
taataactgtgagaacacgggcaat

SEQ ID NO: 45289 - DNA, 25 bp, Homo sapien
gcctgtcactttggcgacgcgcagc

SEQ ID NO: 45290 - DNA, 25 bp, Homo sapien
gactcggatcttagagagcttggag

SEQ ID NO: 45291 - DNA, 25 bp, Homo sapien
accgcctgtcactttggcgacgcgc

SEQ ID NO: 45292 - DNA, 25 bp, Homo sapien
ggttaataactgtgagaacacgggc

SEQ ID NO: 45293 - DNA, 25 bp, Homo sapien
tcttggccattgctgcacaagccgc

SEQ ID NO: 45294 - DNA, 25 bp, Homo sapien
tgatcttggccattgctgcacaagc

SEQ ID NO: 45295 - DNA, 25 bp, Homo sapien
tcccgcgaagatctcgagccttgat

SEQ ID NO: 45296 - DNA, 25 bp, Homo sapien
cttcttcccgcgaagatctcgagcc

SEQ ID NO: 45297 - DNA, 25 bp, Homo sapien
gcctgtcactttggcgacgcgcagc

SEQ ID NO: 45298 - DNA, 25 bp, Homo sapien
accgcctgtcactttggcgacgcgc

SEQ ID NO: 45299 - DNA, 25 bp, Homo sapien
gactcggatcttagagagcttggag

SEQ ID NO: 45300 - DNA, 25 bp, Homo sapien
taataactgtgagaacacgggcaat

SEQ ID NO: 45301 - DNA, 25 bp, Homo sapien
ggttaataactgtgagaacacgggc

SEQ ID NO: 45302 - DNA, 25 bp, Homo sapien
gagtctggttaataactgtgagaac

SEQ ID NO: 45303 - DNA, 25 bp, Homo sapien
tttctttctgagtctggttaataac

SEQ ID NO: 45304 - DNA, 25 bp, Homo sapien
taataactgtgagaacacgggcaat

SEQ ID NO: 45305 - DNA, 25 bp, Homo sapien
cttcttcccgcgaagatctcgagcc

SEQ ID NO: 45306 - DNA, 25 bp, Homo sapien
gagtctggttaataactgtgagaac

SEQ ID NO: 45307 - DNA, 25 bp, Homo sapien
gactcggatcttagagagcttggag

SEQ ID NO: 45308 - DNA, 25 bp, Homo sapien
tcccgcgaagatctcgagccttgat

SEQ ID NO: 45309 - DNA, 25 bp, Homo sapien
tttctttctgagtctggttaataac

SEQ ID NO: 45310 - DNA, 25 bp, Homo sapien
gcctgtcactttggcgacgcgcagc

SEQ ID NO: 45311 - DNA, 25 bp, Homo sapien
ggttaataactgtgagaacacgggc

SEQ ID NO: 45312 - DNA, 25 bp, Homo sapien
tgatcttggccattgctgcacaagc

SEQ ID NO: 45313 - DNA, 25 bp, Homo sapien
tcttggccattgctgcacaagccgc

SEQ ID NO: 45314 - DNA, 25 bp, Homo sapien
accgcctgtcactttggcgacgcgc

SEQ ID NO: 45315 - DNA, 25 bp, Homo sapien
tcttggccattgctgcacaagccgc

SEQ ID NO: 45316 - DNA, 25 bp, Homo sapien
tgatcttggccattgctgcacaagc

SEQ ID NO: 45317 - DNA, 25 bp, Homo sapien
tcccgcgaagatctcgagccttgat

SEQ ID NO: 45318 - DNA, 25 bp, Homo sapien
cttcttcccgcgaagatctcgagcc

SEQ ID NO: 45319 - DNA, 25 bp, Homo sapien
gcctgtcactttggcgacgcgcagc

SEQ ID NO: 45320 - DNA, 25 bp, Homo sapien
accgcctgtcactttggcgacgcgc

SEQ ID NO: 45321 - DNA, 25 bp, Homo sapien
gactcggatcttagagagcttggag

SEQ ID NO: 45322 - DNA, 25 bp, Homo sapien
taataactgtgagaacacgggcaat

SEQ ID NO: 45323 - DNA, 25 bp, Homo sapien
ggttaataactgtgagaacacgggc

SEQ ID NO: 45324 - DNA, 25 bp, Homo sapien
gagtctggttaataactgtgagaac

SEQ ID NO: 45325 - DNA, 25 bp, Homo sapien
tttctttctgagtctggttaataac

SEQ ID NO: 45326 - DNA, 25 bp, Homo sapien
tgatcttggccattgctgcacaagc

SEQ ID NO: 45327 - DNA, 25 bp, Homo sapien
tcccgcgaagatctcgagccttgat

SEQ ID NO: 45328 - DNA, 25 bp, Homo sapien
accgcctgtcactttggcgacgcgc

SEQ ID NO: 45329 - DNA, 25 bp, Homo sapien
gactcggatcttagagagcttggag

SEQ ID NO: 45330 - DNA, 25 bp, Homo sapien
tttctttctgagtctggttaataac

SEQ ID NO: 45331 - DNA, 25 bp, Homo sapien
gcctgtcactttggcgacgcgcagc

SEQ ID NO: 45332 - DNA, 25 bp, Homo sapien
taataactgtgagaacacgggcaat

SEQ ID NO: 45333 - DNA, 25 bp, Homo sapien
ggttaataactgtgagaacacgggc

SEQ ID NO: 45334 - DNA, 25 bp, Homo sapien
tcttggccattgctgcacaagccgc

SEQ ID NO: 45335 - DNA, 25 bp, Homo sapien
cttcttcccgcgaagatctcgagcc

SEQ ID NO: 45336 - DNA, 25 bp, Homo sapien
gagtctggttaataactgtgagaac

SEQ ID NO: 45337 - DNA, 25 bp, Homo sapien
tcttggccattgctgcacaagccgc

SEQ ID NO: 45338 - DNA, 25 bp, Homo sapien
tgatcttggccattgctgcacaagc

SEQ ID NO: 45339 - DNA, 25 bp, Homo sapien
tcccgcgaagatctcgagccttgat

SEQ ID NO: 45340 - DNA, 25 bp, Homo sapien
cttcttcccgcgaagatctcgagcc

SEQ ID NO: 45341 - DNA, 25 bp, Homo sapien
gcctgtcactttggcgacgcgcagc

SEQ ID NO: 45342 - DNA, 25 bp, Homo sapien
accgcctgtcactttggcgacgcgc

SEQ ID NO: 45343 - DNA, 25 bp, Homo sapien
gactcggatcttagagagcttggag

SEQ ID NO: 45344 - DNA, 25 bp, Homo sapien
taataactgtgagaacacgggcaat

SEQ ID NO: 45345 - DNA, 25 bp, Homo sapien
ggttaataactgtgagaacacgggc

SEQ ID NO: 45346 - DNA, 25 bp, Homo sapien
gagtctggttaataactgtgagaac

SEQ ID NO: 45347 - DNA, 25 bp, Homo sapien
tttctttctgagtctggttaataac

SEQ ID NO: 45348 - DNA, 25 bp, Homo sapien
gactcggatcttagagagcttggag

SEQ ID NO: 45349 - DNA, 25 bp, Homo sapien
accgcctgtcactttggcgacgcgc

SEQ ID NO: 45350 - DNA, 25 bp, Homo sapien
tgatcttggccattgctgcacaagc

SEQ ID NO: 45351 - DNA, 25 bp, Homo sapien
cttcttcccgcgaagatctcgagcc

SEQ ID NO: 45352 - DNA, 25 bp, Homo sapien
ggttaataactgtgagaacacgggc

SEQ ID NO: 45353 - DNA, 25 bp, Homo sapien
tttctttctgagtctggttaataac

SEQ ID NO: 45354 - DNA, 25 bp, Homo sapien
gagtctggttaataactgtgagaac

SEQ ID NO: 45355 - DNA, 25 bp, Homo sapien
gcctgtcactttggcgacgcgcagc

SEQ ID NO: 45356 - DNA, 25 bp, Homo sapien
tcccgcgaagatctcgagccttgat

SEQ ID NO: 45357 - DNA, 25 bp, Homo sapien
taataactgtgagaacacgggcaat

SEQ ID NO: 45358 - DNA, 25 bp, Homo sapien
tcttggccattgctgcacaagccgc

SEQ ID NO: 45359 - DNA, 25 bp, Homo sapien
tcttggccattgctgcacaagccgc

SEQ ID NO: 45360 - DNA, 25 bp, Homo sapien
tgatcttggccattgctgcacaagc

SEQ ID NO: 45361 - DNA, 25 bp, Homo sapien
tcccgcgaagatctcgagccttgat

SEQ ID NO: 45362 - DNA, 25 bp, Homo sapien
cttcttcccgcgaagatctcgagcc

SEQ ID NO: 45363 - DNA, 25 bp, Homo sapien
gcctgtcactttggcgacgcgcagc

SEQ ID NO: 45364 - DNA, 25 bp, Homo sapien
accgcctgtcactttggcgacgcgc

SEQ ID NO: 45365 - DNA, 25 bp, Homo sapien
gactcggatcttagagagcttggag

SEQ ID NO: 45366 - DNA, 25 bp, Homo sapien
taataactgtgagaacacgggcaat

SEQ ID NO: 45367 - DNA, 25 bp, Homo sapien
ggttaataactgtgagaacacgggc

SEQ ID NO: 45368 - DNA, 25 bp, Homo sapien
gagtctggttaataactgtgagaac

SEQ ID NO: 45369 - DNA, 25 bp, Homo sapien
tttctttctgagtctggttaataac

SEQ ID NO: 45370 - DNA, 25 bp, Homo sapien
tcccgcgaagatctcgagccttgat

SEQ ID NO: 45371 - DNA, 25 bp, Homo sapien
gagtctggttaataactgtgagaac

SEQ ID NO: 45372 - DNA, 25 bp, Homo sapien
tcttggccattgctgcacaagccgc

SEQ ID NO: 45373 - DNA, 25 bp, Homo sapien
accgcctgtcactttggcgacgcgc

SEQ ID NO: 45374 - DNA, 25 bp, Homo sapien
gcctgtcactttggcgacgcgcagc

SEQ ID NO: 45375 - DNA, 25 bp, Homo sapien
ggttaataactgtgagaacacgggc

SEQ ID NO: 45376 - DNA, 25 bp, Homo sapien
tttctttctgagtctggttaataac

SEQ ID NO: 45377 - DNA, 25 bp, Homo sapien
cttcttcccgcgaagatctcgagcc

SEQ ID NO: 45378 - DNA, 25 bp, Homo sapien
taataactgtgagaacacgggcaat

SEQ ID NO: 45379 - DNA, 25 bp, Homo sapien
tgatcttggccattgctgcacaagc

SEQ ID NO: 45380 - DNA, 25 bp, Homo sapien
gactcggatcttagagagcttggag

SEQ ID NO: 45381 - DNA, 25 bp, Homo sapien
tcttggccattgctgcacaagccgc

SEQ ID NO: 45382 - DNA, 25 bp, Homo sapien
tgatcttggccattgctgcacaagc

SEQ ID NO: 45383 - DNA, 25 bp, Homo sapien
tcccgcgaagatctcgagccttgat

SEQ ID NO: 45384 - DNA, 25 bp, Homo sapien
cttcttcccgcgaagatctcgagcc

SEQ ID NO: 45385 - DNA, 25 bp, Homo sapien
gcctgtcactttggcgacgcgcagc

SEQ ID NO: 45386 - DNA, 25 bp, Homo sapien
accgcctgtcactttggcgacgcgc

SEQ ID NO: 45387 - DNA, 25 bp, Homo sapien
gactcggatcttagagagcttggag

SEQ ID NO: 45388 - DNA, 25 bp, Homo sapien
taataactgtgagaacacgggcaat

SEQ ID NO: 45389 - DNA, 25 bp, Homo sapien
ggttaataactgtgagaacacgggc

SEQ ID NO: 45390 - DNA, 25 bp, Homo sapien
gagtctggttaataactgtgagaac

SEQ ID NO: 45391 - DNA, 25 bp, Homo sapien
tttctttctgagtctggttaataac

SEQ ID NO: 45392 - DNA, 25 bp, Homo sapien
tcttggccattgctgcacaagccgc

SEQ ID NO: 45393 - DNA, 25 bp, Homo sapien
tgatcttggccattgctgcacaagc

SEQ ID NO: 45394 - DNA, 25 bp, Homo sapien
tcccgcgaagatctcgagccttgat

SEQ ID NO: 45395 - DNA, 25 bp, Homo sapien
cttcttcccgcgaagatctcgagcc

SEQ ID NO: 45396 - DNA, 25 bp, Homo sapien
gcctgtcactttggcgacgcgcagc

SEQ ID NO: 45397 - DNA, 25 bp, Homo sapien
accgcctgtcactttggcgacgcgc

SEQ ID NO: 45398 - DNA, 25 bp, Homo sapien
gactcggatcttagagagcttggag

SEQ ID NO: 45399 - DNA, 25 bp, Homo sapien
taataactgtgagaacacgggcaat

SEQ ID NO: 45400 - DNA, 25 bp, Homo sapien
ggttaataactgtgagaacacgggc

SEQ ID NO: 45401 - DNA, 25 bp, Homo sapien
gagtctggttaataactgtgagaac

SEQ ID NO: 45402 - DNA, 25 bp, Homo sapien
tttctttctgagtctggttaataac

SEQ ID NO: 45403 - DNA, 25 bp, Homo sapien
ggttaataactgtgagaacacgggc

SEQ ID NO: 45404 - DNA, 25 bp, Homo sapien
tgatcttggccattgctgcacaagc

SEQ ID NO: 45405 - DNA, 25 bp, Homo sapien
gactcggatcttagagagcttggag

SEQ ID NO: 45406 - DNA, 25 bp, Homo sapien
tcccgcgaagatctcgagccttgat

SEQ ID NO: 45407 - DNA, 25 bp, Homo sapien
taataactgtgagaacacgggcaat

SEQ ID NO: 45408 - DNA, 25 bp, Homo sapien
tttctttctgagtctggttaataac

SEQ ID NO: 45409 - DNA, 25 bp, Homo sapien
tcttggccattgctgcacaagccgc

SEQ ID NO: 45410 - DNA, 25 bp, Homo sapien
accgcctgtcactttggcgacgcgc

SEQ ID NO: 45411 - DNA, 25 bp, Homo sapien
gagtctggttaataactgtgagaac

SEQ ID NO: 45412 - DNA, 25 bp, Homo sapien
cttcttcccgcgaagatctcgagcc

SEQ ID NO: 45413 - DNA, 25 bp, Homo sapien
gcctgtcactttggcgacgcgcagc

SEQ ID NO: 45414 - DNA, 25 bp, Homo sapien
tcttggccattgctgcacaagccgc

SEQ ID NO: 45415 - DNA, 25 bp, Homo sapien
tgatcttggccattgctgcacaagc

SEQ ID NO: 45416 - DNA, 25 bp, Homo sapien
tcccgcgaagatctcgagccttgat

SEQ ID NO: 45417 - DNA, 25 bp, Homo sapien
cttcttcccgcgaagatctcgagcc

SEQ ID NO: 45418 - DNA, 25 bp, Homo sapien
gcctgtcactttggcgacgcgcagc

SEQ ID NO: 45419 - DNA, 25 bp, Homo sapien
accgcctgtcactttggcgacgcgc

SEQ ID NO: 45420 - DNA, 25 bp, Homo sapien
gactcggatcttagagagcttggag

SEQ ID NO: 45421 - DNA, 25 bp, Homo sapien
taataactgtgagaacacgggcaat

SEQ ID NO: 45422 - DNA, 25 bp, Homo sapien
ggttaataactgtgagaacacgggc

SEQ ID NO: 45423 - DNA, 25 bp, Homo sapien
gagtctggttaataactgtgagaac

SEQ ID NO: 45424 - DNA, 25 bp, Homo sapien
tttctttctgagtctggttaataac

SEQ ID NO: 45425 - DNA, 25 bp, Homo sapien
gagtctggttaataactgtgagaac

SEQ ID NO: 45426 - DNA, 25 bp, Homo sapien
gactcggatcttagagagcttggag

SEQ ID NO: 45427 - DNA, 25 bp, Homo sapien
tttctttctgagtctggttaataac

SEQ ID NO: 45428 - DNA, 25 bp, Homo sapien
tcttggccattgctgcacaagccgc

SEQ ID NO: 45429 - DNA, 25 bp, Homo sapien
accgcctgtcactttggcgacgcgc

SEQ ID NO: 45430 - DNA, 25 bp, Homo sapien
cttcttcccgcgaagatctcgagcc

SEQ ID NO: 45431 - DNA, 25 bp, Homo sapien
ggttaataactgtgagaacacgggc

SEQ ID NO: 45432 - DNA, 25 bp, Homo sapien
gcctgtcactttggcgacgcgcagc

SEQ ID NO: 45433 - DNA, 25 bp, Homo sapien
tcccgcgaagatctcgagccttgat

SEQ ID NO: 45434 - DNA, 25 bp, Homo sapien
tgatcttggccattgctgcacaagc

SEQ ID NO: 45435 - DNA, 25 bp, Homo sapien
taataactgtgagaacacgggcaat

SEQ ID NO: 45436 - DNA, 25 bp, Homo sapien
tcttggccattgctgcacaagccgc

SEQ ID NO: 45437 - DNA, 25 bp, Homo sapien
tgatcttggccattgctgcacaagc

SEQ ID NO: 45438 - DNA, 25 bp, Homo sapien
tcccgcgaagatctcgagccttgat

SEQ ID NO: 45439 - DNA, 25 bp, Homo sapien
cttcttcccgcgaagatctcgagcc

SEQ ID NO: 45440 - DNA, 25 bp, Homo sapien
gcctgtcactttggcgacgcgcagc

SEQ ID NO: 45441 - DNA, 25 bp, Homo sapien
accgcctgtcactttggcgacgcgc

SEQ ID NO: 45442 - DNA, 25 bp, Homo sapien
gactcggatcttagagagcttggag

SEQ ID NO: 45443 - DNA, 25 bp, Homo sapien
taataactgtgagaacacgggcaat

SEQ ID NO: 45444 - DNA, 25 bp, Homo sapien
ggttaataactgtgagaacacgggc

SEQ ID NO: 45445 - DNA, 25 bp, Homo sapien
gagtctggttaataactgtgagaac

SEQ ID NO: 45446 - DNA, 25 bp, Homo sapien
tttctttctgagtctggttaataac

SEQ ID NO: 45447 - DNA, 25 bp, Homo sapien
ggttaataactgtgagaacacgggc

SEQ ID NO: 45448 - DNA, 25 bp, Homo sapien
tcttggccattgctgcacaagccgc

SEQ ID NO: 45449 - DNA, 25 bp, Homo sapien
tttctttctgagtctggttaataac

SEQ ID NO: 45450 - DNA, 25 bp, Homo sapien
gactcggatcttagagagcttggag

SEQ ID NO: 45451 - DNA, 25 bp, Homo sapien
gagtctggttaataactgtgagaac

SEQ ID NO: 45452 - DNA, 25 bp, Homo sapien
cttcttcccgcgaagatctcgagcc

SEQ ID NO: 45453 - DNA, 25 bp, Homo sapien
gcctgtcactttggcgacgcgcagc

SEQ ID NO: 45454 - DNA, 25 bp, Homo sapien
tcccgcgaagatctcgagccttgat

SEQ ID NO: 45455 - DNA, 25 bp, Homo sapien
taataactgtgagaacacgggcaat

SEQ ID NO: 45456 - DNA, 25 bp, Homo sapien
tgatcttggccattgctgcacaagc

SEQ ID NO: 45457 - DNA, 25 bp, Homo sapien
accgcctgtcactttggcgacgcgc

SEQ ID NO: 45458 - DNA, 25 bp, Homo sapien
tcttggccattgctgcacaagccgc

SEQ ID NO: 45459 - DNA, 25 bp, Homo sapien
tgatcttggccattgctgcacaagc

SEQ ID NO: 45460 - DNA, 25 bp, Homo sapien
tcccgcgaagatctcgagccttgat

SEQ ID NO: 45461 - DNA, 25 bp, Homo sapien
cttcttcccgcgaagatctcgagcc

SEQ ID NO: 45462 - DNA, 25 bp, Homo sapien
gcctgtcactttggcgacgcgcagc

SEQ ID NO: 45463 - DNA, 25 bp, Homo sapien
accgcctgtcactttggcgacgcgc

SEQ ID NO: 45464 - DNA, 25 bp, Homo sapien
gactcggatcttagagagcttggag

SEQ ID NO: 45465 - DNA, 25 bp, Homo sapien
taataactgtgagaacacgggcaat

SEQ ID NO: 45466 - DNA, 25 bp, Homo sapien
ggttaataactgtgagaacacgggc

SEQ ID NO: 45467 - DNA, 25 bp, Homo sapien
gagtctggttaataactgtgagaac

SEQ ID NO: 45468 - DNA, 25 bp, Homo sapien
tttctttctgagtctggttaataac

SEQ ID NO: 45469 - DNA, 25 bp, Homo sapien
tcttggccattgctgcacaagccgc

SEQ ID NO: 45470 - DNA, 25 bp, Homo sapien
taataactgtgagaacacgggcaat

SEQ ID NO: 45471 - DNA, 25 bp, Homo sapien
ggttaataactgtgagaacacgggc

SEQ ID NO: 45472 - DNA, 25 bp, Homo sapien
tttctttctgagtctggttaataac

SEQ ID NO: 45473 - DNA, 25 bp, Homo sapien
gcctgtcactttggcgacgcgcagc

SEQ ID NO: 45474 - DNA, 25 bp, Homo sapien
cttcttcccgcgaagatctcgagcc

SEQ ID NO: 45475 - DNA, 25 bp, Homo sapien
tgatcttggccattgctgcacaagc

SEQ ID NO: 45476 - DNA, 25 bp, Homo sapien
gagtctggttaataactgtgagaac

SEQ ID NO: 45477 - DNA, 25 bp, Homo sapien
accgcctgtcactttggcgacgcgc

SEQ ID NO: 45478 - DNA, 25 bp, Homo sapien
tcccgcgaagatctcgagccttgat

SEQ ID NO: 45479 - DNA, 25 bp, Homo sapien
gactcggatcttagagagcttggag

SEQ ID NO: 45480 - DNA, 25 bp, Homo sapien
tcttggccattgctgcacaagccgc

SEQ ID NO: 45481 - DNA, 25 bp, Homo sapien
tgatcttggccattgctgcacaagc

SEQ ID NO: 45482 - DNA, 25 bp, Homo sapien
tcccgcgaagatctcgagccttgat

SEQ ID NO: 45483 - DNA, 25 bp, Homo sapien
cttcttcccgcgaagatctcgagcc

SEQ ID NO: 45484 - DNA, 25 bp, Homo sapien
gcctgtcactttggcgacgcgcagc

SEQ ID NO: 45485 - DNA, 25 bp, Homo sapien
accgcctgtcactttggcgacgcgc

SEQ ID NO: 45486 - DNA, 25 bp, Homo sapien
gactcggatcttagagagcttggag

SEQ ID NO: 45487 - DNA, 25 bp, Homo sapien
taataactgtgagaacacgggcaat

SEQ ID NO: 45488 - DNA, 25 bp, Homo sapien
ggttaataactgtgagaacacgggc

SEQ ID NO: 45489 - DNA, 25 bp, Homo sapien
gagtctggttaataactgtgagaac

SEQ ID NO: 45490 - DNA, 25 bp, Homo sapien
tttctttctgagtctggttaataac

SEQ ID NO: 45491 - DNA, 25 bp, Homo sapien
tcttggccattgctgcacaagccgc

SEQ ID NO: 45492 - DNA, 25 bp, Homo sapien
gactcggatcttagagagcttggag

SEQ ID NO: 45493 - DNA, 25 bp, Homo sapien
ggttaataactgtgagaacacgggc

SEQ ID NO: 45494 - DNA, 25 bp, Homo sapien
gcctgtcactttggcgacgcgcagc

SEQ ID NO: 45495 - DNA, 25 bp, Homo sapien
tttctttctgagtctggttaataac

SEQ ID NO: 45496 - DNA, 25 bp, Homo sapien
tgatcttggccattgctgcacaagc

SEQ ID NO: 45497 - DNA, 25 bp, Homo sapien
accgcctgtcactttggcgacgcgc

SEQ ID NO: 45498 - DNA, 25 bp, Homo sapien
tcccgcgaagatctcgagccttgat

SEQ ID NO: 45499 - DNA, 25 bp, Homo sapien
taataactgtgagaacacgggcaat

SEQ ID NO: 45500 - DNA, 25 bp, Homo sapien
gagtctggttaataactgtgagaac

SEQ ID NO: 45501 - DNA, 25 bp, Homo sapien
cttcttcccgcgaagatctcgagcc

SEQ ID NO: 45502 - DNA, 25 bp, Homo sapien
tcccgcgaagatctcgagccttgat

SEQ ID NO: 45503 - DNA, 25 bp, Homo sapien
tttctttctgagtctggttaataac

SEQ ID NO: 45504 - DNA, 25 bp, Homo sapien
ggttaataactgtgagaacacgggc

SEQ ID NO: 45505 - DNA, 25 bp, Homo sapien
gcctgtcactttggcgacgcgcagc

SEQ ID NO: 45506 - DNA, 25 bp, Homo sapien
tcttggccattgctgcacaagccgc

SEQ ID NO: 45507 - DNA, 25 bp, Homo sapien
gactcggatcttagagagcttggag

SEQ ID NO: 45508 - DNA, 25 bp, Homo sapien
cttcttcccgcgaagatctcgagcc

SEQ ID NO: 45509 - DNA, 25 bp, Homo sapien
taataactgtgagaacacgggcaat

SEQ ID NO: 45510 - DNA, 25 bp, Homo sapien
gagtctggttaataactgtgagaac

SEQ ID NO: 45511 - DNA, 25 bp, Homo sapien
accgcctgtcactttggcgacgcgc

SEQ ID NO: 45512 - DNA, 25 bp, Homo sapien
tgatcttggccattgctgcacaagc

SEQ ID NO: 45513 - DNA, 25 bp, Homo sapien
tcttggccattgctgcacaagccgc

SEQ ID NO: 45514 - DNA, 25 bp, Homo sapien
tgatcttggccattgctgcacaagc

SEQ ID NO: 45515 - DNA, 25 bp, Homo sapien
tcccgcgaagatctcgagccttgat

SEQ ID NO: 45516 - DNA, 25 bp, Homo sapien
cttcttcccgcgaagatctcgagcc

SEQ ID NO: 45517 - DNA, 25 bp, Homo sapien
gcctgtcactttggcgacgcgcagc

SEQ ID NO: 45518 - DNA, 25 bp, Homo sapien
accgcctgtcactttggcgacgcgc

SEQ ID NO: 45519 - DNA, 25 bp, Homo sapien
gactcggatcttagagagcttggag

SEQ ID NO: 45520 - DNA, 25 bp, Homo sapien
taataactgtgagaacacgggcaat

SEQ ID NO: 45521 - DNA, 25 bp, Homo sapien
ggttaataactgtgagaacacgggc

SEQ ID NO: 45522 - DNA, 25 bp, Homo sapien
gagtctggttaataactgtgagaac

SEQ ID NO: 45523 - DNA, 25 bp, Homo sapien
tttctttctgagtctggttaataac

SEQ ID NO: 45524 - DNA, 25 bp, Homo sapien
tttctttctgagtctggttaataac

SEQ ID NO: 45525 - DNA, 25 bp, Homo sapien
tcttggccattgctgcacaagccgc

SEQ ID NO: 45526 - DNA, 25 bp, Homo sapien
accgcctgtcactttggcgacgcgc

SEQ ID NO: 45527 - DNA, 25 bp, Homo sapien
tgatcttggccattgctgcacaagc

SEQ ID NO: 45528 - DNA, 25 bp, Homo sapien
cttcttcccgcgaagatctcgagcc

SEQ ID NO: 45529 - DNA, 25 bp, Homo sapien
taataactgtgagaacacgggcaat

SEQ ID NO: 45530 - DNA, 25 bp, Homo sapien
gagtctggttaataactgtgagaac

SEQ ID NO: 45531 - DNA, 25 bp, Homo sapien
gcctgtcactttggcgacgcgcagc

SEQ ID NO: 45532 - DNA, 25 bp, Homo sapien
tcccgcgaagatctcgagccttgat

SEQ ID NO: 45533 - DNA, 25 bp, Homo sapien
ggttaataactgtgagaacacgggc

SEQ ID NO: 45534 - DNA, 25 bp, Homo sapien
gactcggatcttagagagcttggag

SEQ ID NO: 45535 - DNA, 25 bp, Homo sapien
tcttggccattgctgcacaagccgc

SEQ ID NO: 45536 - DNA, 25 bp, Homo sapien
tgatcttggccattgctgcacaagc

SEQ ID NO: 45537 - DNA, 25 bp, Homo sapien
tcccgcgaagatctcgagccttgat

SEQ ID NO: 45538 - DNA, 25 bp, Homo sapien
cttcttcccgcgaagatctcgagcc

SEQ ID NO: 45539 - DNA, 25 bp, Homo sapien
gcctgtcactttggcgacgcgcagc

SEQ ID NO: 45540 - DNA, 25 bp, Homo sapien
accgcctgtcactttggcgacgcgc

SEQ ID NO: 45541 - DNA, 25 bp, Homo sapien
gactcggatcttagagagcttggag

SEQ ID NO: 45542 - DNA, 25 bp, Homo sapien
taataactgtgagaacacgggcaat

SEQ ID NO: 45543 - DNA, 25 bp, Homo sapien
ggttaataactgtgagaacacgggc

SEQ ID NO: 45544 - DNA, 25 bp, Homo sapien
gagtctggttaataactgtgagaac

SEQ ID NO: 45545 - DNA, 25 bp, Homo sapien
tttctttctgagtctggttaataac

SEQ ID NO: 45546 - DNA, 25 bp, Homo sapien
cttcttcccgcgaagatctcgagcc

SEQ ID NO: 45547 - DNA, 25 bp, Homo sapien
accgcctgtcactttggcgacgcgc

SEQ ID NO: 45548 - DNA, 25 bp, Homo sapien
gcctgtcactttggcgacgcgcagc

SEQ ID NO: 45549 - DNA, 25 bp, Homo sapien
tcccgcgaagatctcgagccttgat

SEQ ID NO: 45550 - DNA, 25 bp, Homo sapien
tcttggccattgctgcacaagccgc

SEQ ID NO: 45551 - DNA, 25 bp, Homo sapien
taataactgtgagaacacgggcaat

SEQ ID NO: 45552 - DNA, 25 bp, Homo sapien
gactcggatcttagagagcttggag

SEQ ID NO: 45553 - DNA, 25 bp, Homo sapien
tgatcttggccattgctgcacaagc

SEQ ID NO: 45554 - DNA, 25 bp, Homo sapien
tttctttctgagtctggttaataac

SEQ ID NO: 45555 - DNA, 25 bp, Homo sapien
ggttaataactgtgagaacacgggc

SEQ ID NO: 45556 - DNA, 25 bp, Homo sapien
gagtctggttaataactgtgagaac

SEQ ID NO: 45557 - DNA, 25 bp, Homo sapien
tcttggccattgctgcacaagccgc

SEQ ID NO: 45558 - DNA, 25 bp, Homo sapien
tgatcttggccattgctgcacaagc

SEQ ID NO: 45559 - DNA, 25 bp, Homo sapien
tcccgcgaagatctcgagccttgat

SEQ ID NO: 45560 - DNA, 25 bp, Homo sapien
cttcttcccgcgaagatctcgagcc

SEQ ID NO: 45561 - DNA, 25 bp, Homo sapien
gcctgtcactttggcgacgcgcagc

SEQ ID NO: 45562 - DNA, 25 bp, Homo sapien
accgcctgtcactttggcgacgcgc

SEQ ID NO: 45563 - DNA, 25 bp, Homo sapien
gactcggatcttagagagcttggag

SEQ ID NO: 45564 - DNA, 25 bp, Homo sapien
taataactgtgagaacacgggcaat

SEQ ID NO: 45565 - DNA, 25 bp, Homo sapien
ggttaataactgtgagaacacgggc

SEQ ID NO: 45566 - DNA, 25 bp, Homo sapien
gagtctggttaataactgtgagaac

SEQ ID NO: 45567 - DNA, 25 bp, Homo sapien
tttctttctgagtctggttaataac

SEQ ID NO: 45568 - DNA, 25 bp, Homo sapien
cacgcccacagtcttgcggtgaatc

SEQ ID NO: 45569 - DNA, 25 bp, Homo sapien
ttccgctggccggatctccgcttaa

SEQ ID NO: 45570 - DNA, 25 bp, Homo sapien
ggtgaatcagtccgttgtagcggaa

SEQ ID NO: 45571 - DNA, 25 bp, Homo sapien
cctgcggatggctgccatgcgcagg

SEQ ID NO: 45572 - DNA, 25 bp, Homo sapien
tccgcttaatgaccaccacgacacc

SEQ ID NO: 45573 - DNA, 25 bp, Homo sapien
aggaattgcgggccttcaagttatt

SEQ ID NO: 45574 - DNA, 25 bp, Homo sapien
cagtccgttgtagcggaaggaattg

SEQ ID NO: 45575 - DNA, 25 bp, Homo sapien
gccggatctccgcttaatgaccacc

SEQ ID NO: 45576 - DNA, 25 bp, Homo sapien
tgccggctccacgcccacagtcttg

SEQ ID NO: 45577 - DNA, 25 bp, Homo sapien
caccacgacacctttgccgtcggct

SEQ ID NO: 45578 - DNA, 25 bp, Homo sapien
gagcagttccgcacgaccatccatt

SEQ ID NO: 45579 - DNA, 25 bp, Homo sapien
tccgcttaatgaccaccacgacacc

SEQ ID NO: 45580 - DNA, 25 bp, Homo sapien
gccggatctccgcttaatgaccacc

SEQ ID NO: 45581 - DNA, 25 bp, Homo sapien
ttccgctggccggatctccgcttaa

SEQ ID NO: 45582 - DNA, 25 bp, Homo sapien
cctgcggatggctgccatgcgcagg

SEQ ID NO: 45583 - DNA, 25 bp, Homo sapien
gagcagttccgcacgaccatccatt

SEQ ID NO: 45584 - DNA, 25 bp, Homo sapien
aggaattgcgggccttcaagttatt

SEQ ID NO: 45585 - DNA, 25 bp, Homo sapien
cagtccgttgtagcggaaggaattg

SEQ ID NO: 45586 - DNA, 25 bp, Homo sapien
ggtgaatcagtccgttgtagcggaa

SEQ ID NO: 45587 - DNA, 25 bp, Homo sapien
cacgcccacagtcttgcggtgaatc

SEQ ID NO: 45588 - DNA, 25 bp, Homo sapien
tgccggctccacgcccacagtcttg

SEQ ID NO: 45589 - DNA, 25 bp, Homo sapien
caccacgacacctttgccgtcggct

SEQ ID NO: 45590 - DNA, 25 bp, Homo sapien
gccggatctccgcttaatgaccacc

SEQ ID NO: 45591 - DNA, 25 bp, Homo sapien
gagcagttccgcacgaccatccatt

SEQ ID NO: 45592 - DNA, 25 bp, Homo sapien
tccgcttaatgaccaccacgacacc

SEQ ID NO: 45593 - DNA, 25 bp, Homo sapien
tgccggctccacgcccacagtcttg

SEQ ID NO: 45594 - DNA, 25 bp, Homo sapien
cacgcccacagtcttgcggtgaatc

SEQ ID NO: 45595 - DNA, 25 bp, Homo sapien
cagtccgttgtagcggaaggaattg

SEQ ID NO: 45596 - DNA, 25 bp, Homo sapien
aggaattgcgggccttcaagttatt

SEQ ID NO: 45597 - DNA, 25 bp, Homo sapien
caccacgacacctttgccgtcggct

SEQ ID NO: 45598 - DNA, 25 bp, Homo sapien
cctgcggatggctgccatgcgcagg

SEQ ID NO: 45599 - DNA, 25 bp, Homo sapien
ttccgctggccggatctccgcttaa

SEQ ID NO: 45600 - DNA, 25 bp, Homo sapien
ggtgaatcagtccgttgtagcggaa

SEQ ID NO: 45601 - DNA, 25 bp, Homo sapien
gagcagttccgcacgaccatccatt

SEQ ID NO: 45602 - DNA, 25 bp, Homo sapien
aggaattgcgggccttcaagttatt

SEQ ID NO: 45603 - DNA, 25 bp, Homo sapien
cagtccgttgtagcggaaggaattg

SEQ ID NO: 45604 - DNA, 25 bp, Homo sapien
ggtgaatcagtccgttgtagcggaa

SEQ ID NO: 45605 - DNA, 25 bp, Homo sapien
cacgcccacagtcttgcggtgaatc

SEQ ID NO: 45606 - DNA, 25 bp, Homo sapien
tgccggctccacgcccacagtcttg

SEQ ID NO: 45607 - DNA, 25 bp, Homo sapien
caccacgacacctttgccgtcggct

SEQ ID NO: 45608 - DNA, 25 bp, Homo sapien
tccgcttaatgaccaccacgacacc

SEQ ID NO: 45609 - DNA, 25 bp, Homo sapien
gccggatctccgcttaatgaccacc

SEQ ID NO: 45610 - DNA, 25 bp, Homo sapien
ttccgctggccggatctccgcttaa

SEQ ID NO: 45611 - DNA, 25 bp, Homo sapien
cctgcggatggctgccatgcgcagg

SEQ ID NO: 45612 - DNA, 25 bp, Homo sapien
caccacgacacctttgccgtcggct

SEQ ID NO: 45613 - DNA, 25 bp, Homo sapien
cacgcccacagtcttgcggtgaatc

SEQ ID NO: 45614 - DNA, 25 bp, Homo sapien
tgccggctccacgcccacagtcttg

SEQ ID NO: 45615 - DNA, 25 bp, Homo sapien
ttccgctggccggatctccgcttaa

SEQ ID NO: 45616 - DNA, 25 bp, Homo sapien
tccgcttaatgaccaccacgacacc

SEQ ID NO: 45617 - DNA, 25 bp, Homo sapien
ggtgaatcagtccgttgtagcggaa

SEQ ID NO: 45618 - DNA, 25 bp, Homo sapien
gagcagttccgcacgaccatccatt

SEQ ID NO: 45619 - DNA, 25 bp, Homo sapien
cctgcggatggctgccatgcgcagg

SEQ ID NO: 45620 - DNA, 25 bp, Homo sapien
gccggatctccgcttaatgaccacc

SEQ ID NO: 45621 - DNA, 25 bp, Homo sapien
cagtccgttgtagcggaaggaattg

SEQ ID NO: 45622 - DNA, 25 bp, Homo sapien
aggaattgcgggccttcaagttatt

SEQ ID NO: 45623 - DNA, 25 bp, Homo sapien
tccgcttaatgaccaccacgacacc

SEQ ID NO: 45624 - DNA, 25 bp, Homo sapien
gccggatctccgcttaatgaccacc

SEQ ID NO: 45625 - DNA, 25 bp, Homo sapien
ttccgctggccggatctccgcttaa

SEQ ID NO: 45626 - DNA, 25 bp, Homo sapien
cctgcggatggctgccatgcgcagg

SEQ ID NO: 45627 - DNA, 25 bp, Homo sapien
gagcagttccgcacgaccatccatt

SEQ ID NO: 45628 - DNA, 25 bp, Homo sapien
aggaattgcgggccttcaagttatt

SEQ ID NO: 45629 - DNA, 25 bp, Homo sapien
cagtccgttgtagcggaaggaattg

SEQ ID NO: 45630 - DNA, 25 bp, Homo sapien
ggtgaatcagtccgttgtagcggaa

SEQ ID NO: 45631 - DNA, 25 bp, Homo sapien
cacgcccacagtcttgcggtgaatc

SEQ ID NO: 45632 - DNA, 25 bp, Homo sapien
tgccggctccacgcccacagtcttg

SEQ ID NO: 45633 - DNA, 25 bp, Homo sapien
caccacgacacctttgccgtcggct

SEQ ID NO: 45634 - DNA, 25 bp, Homo sapien
tccgcttaatgaccaccacgacacc

SEQ ID NO: 45635 - DNA, 25 bp, Homo sapien
gccggatctccgcttaatgaccacc

SEQ ID NO: 45636 - DNA, 25 bp, Homo sapien
ttccgctggccggatctccgcttaa

SEQ ID NO: 45637 - DNA, 25 bp, Homo sapien
cctgcggatggctgccatgcgcagg

SEQ ID NO: 45638 - DNA, 25 bp, Homo sapien
gagcagttccgcacgaccatccatt

SEQ ID NO: 45639 - DNA, 25 bp, Homo sapien
aggaattgcgggccttcaagttatt

SEQ ID NO: 45640 - DNA, 25 bp, Homo sapien
cagtccgttgtagcggaaggaattg

SEQ ID NO: 45641 - DNA, 25 bp, Homo sapien
ggtgaatcagtccgttgtagcggaa

SEQ ID NO: 45642 - DNA, 25 bp, Homo sapien
cacgcccacagtcttgcggtgaatc

SEQ ID NO: 45643 - DNA, 25 bp, Homo sapien
tgccggctccacgcccacagtcttg

SEQ ID NO: 45644 - DNA, 25 bp, Homo sapien
caccacgacacctttgccgtcggct

SEQ ID NO: 45645 - DNA, 25 bp, Homo sapien
cagtccgttgtagcggaaggaattg

SEQ ID NO: 45646 - DNA, 25 bp, Homo sapien
gagcagttccgcacgaccatccatt

SEQ ID NO: 45647 - DNA, 25 bp, Homo sapien
tgccggctccacgcccacagtcttg

SEQ ID NO: 45648 - DNA, 25 bp, Homo sapien
tccgcttaatgaccaccacgacacc

SEQ ID NO: 45649 - DNA, 25 bp, Homo sapien
ttccgctggccggatctccgcttaa

SEQ ID NO: 45650 - DNA, 25 bp, Homo sapien
cctgcggatggctgccatgcgcagg

SEQ ID NO: 45651 - DNA, 25 bp, Homo sapien
caccacgacacctttgccgtcggct

SEQ ID NO: 45652 - DNA, 25 bp, Homo sapien
ggtgaatcagtccgttgtagcggaa

SEQ ID NO: 45653 - DNA, 25 bp, Homo sapien
gccggatctccgcttaatgaccacc

SEQ ID NO: 45654 - DNA, 25 bp, Homo sapien
cacgcccacagtcttgcggtgaatc

SEQ ID NO: 45655 - DNA, 25 bp, Homo sapien
aggaattgcgggccttcaagttatt

SEQ ID NO: 45656 - DNA, 25 bp, Homo sapien
tccgcttaatgaccaccacgacacc

SEQ ID NO: 45657 - DNA, 25 bp, Homo sapien
gccggatctccgcttaatgaccacc

SEQ ID NO: 45658 - DNA, 25 bp, Homo sapien
ttccgctggccggatctccgcttaa

SEQ ID NO: 45659 - DNA, 25 bp, Homo sapien
cctgcggatggctgccatgcgcagg

SEQ ID NO: 45660 - DNA, 25 bp, Homo sapien
gagcagttccgcacgaccatccatt

SEQ ID NO: 45661 - DNA, 25 bp, Homo sapien
aggaattgcgggccttcaagttatt

SEQ ID NO: 45662 - DNA, 25 bp, Homo sapien
cagtccgttgtagcggaaggaattg

SEQ ID NO: 45663 - DNA, 25 bp, Homo sapien
ggtgaatcagtccgttgtagcggaa

SEQ ID NO: 45664 - DNA, 25 bp, Homo sapien
cacgcccacagtcttgcggtgaatc

SEQ ID NO: 45665 - DNA, 25 bp, Homo sapien
tgccggctccacgcccacagtcttg

SEQ ID NO: 45666 - DNA, 25 bp, Homo sapien
caccacgacacctttgccgtcggct

SEQ ID NO: 45667 - DNA, 25 bp, Homo sapien
cctgcggatggctgccatgcgcagg

SEQ ID NO: 45668 - DNA, 25 bp, Homo sapien
ggtgaatcagtccgttgtagcggaa

SEQ ID NO: 45669 - DNA, 25 bp, Homo sapien
cagtccgttgtagcggaaggaattg

SEQ ID NO: 45670 - DNA, 25 bp, Homo sapien
cacgcccacagtcttgcggtgaatc

SEQ ID NO: 45671 - DNA, 25 bp, Homo sapien
tgccggctccacgcccacagtcttg

SEQ ID NO: 45672 - DNA, 25 bp, Homo sapien
ttccgctggccggatctccgcttaa

SEQ ID NO: 45673 - DNA, 25 bp, Homo sapien
gagcagttccgcacgaccatccatt

SEQ ID NO: 45674 - DNA, 25 bp, Homo sapien
caccacgacacctttgccgtcggct

SEQ ID NO: 45675 - DNA, 25 bp, Homo sapien
tccgcttaatgaccaccacgacacc

SEQ ID NO: 45676 - DNA, 25 bp, Homo sapien
aggaattgcgggccttcaagttatt

SEQ ID NO: 45677 - DNA, 25 bp, Homo sapien
gccggatctccgcttaatgaccacc

SEQ ID NO: 45678 - DNA, 25 bp, Homo sapien
tccgcttaatgaccaccacgacacc

SEQ ID NO: 45679 - DNA, 25 bp, Homo sapien
gccggatctccgcttaatgaccacc

SEQ ID NO: 45680 - DNA, 25 bp, Homo sapien
ttccgctggccggatctccgcttaa

SEQ ID NO: 45681 - DNA, 25 bp, Homo sapien
cctgcggatggctgccatgcgcagg

SEQ ID NO: 45682 - DNA, 25 bp, Homo sapien
gagcagttccgcacgaccatccatt

SEQ ID NO: 45683 - DNA, 25 bp, Homo sapien
aggaattgcgggccttcaagttatt

SEQ ID NO: 45684 - DNA, 25 bp, Homo sapien
cagtccgttgtagcggaaggaattg

SEQ ID NO: 45685 - DNA, 25 bp, Homo sapien
ggtgaatcagtccgttgtagcggaa

SEQ ID NO: 45686 - DNA, 25 bp, Homo sapien
cacgcccacagtcttgcggtgaatc

SEQ ID NO: 45687 - DNA, 25 bp, Homo sapien
tgccggctccacgcccacagtcttg

SEQ ID NO: 45688 - DNA, 25 bp, Homo sapien
caccacgacacctttgccgtcggct

SEQ ID NO: 45689 - DNA, 25 bp, Homo sapien
aggaattgcgggccttcaagttatt

SEQ ID NO: 45690 - DNA, 25 bp, Homo sapien
tgccggctccacgcccacagtcttg

SEQ ID NO: 45691 - DNA, 25 bp, Homo sapien
cacgcccacagtcttgcggtgaatc

SEQ ID NO: 45692 - DNA, 25 bp, Homo sapien
cagtccgttgtagcggaaggaattg

SEQ ID NO: 45693 - DNA, 25 bp, Homo sapien
cctgcggatggctgccatgcgcagg

SEQ ID NO: 45694 - DNA, 25 bp, Homo sapien
tccgcttaatgaccaccacgacacc

SEQ ID NO: 45695 - DNA, 25 bp, Homo sapien
ttccgctggccggatctccgcttaa

SEQ ID NO: 45696 - DNA, 25 bp, Homo sapien
caccacgacacctttgccgtcggct

SEQ ID NO: 45697 - DNA, 25 bp, Homo sapien
gagcagttccgcacgaccatccatt

SEQ ID NO: 45698 - DNA, 25 bp, Homo sapien
gccggatctccgcttaatgaccacc

SEQ ID NO: 45699 - DNA, 25 bp, Homo sapien
ggtgaatcagtccgttgtagcggaa

SEQ ID NO: 45700 - DNA, 25 bp, Homo sapien
tccgcttaatgaccaccacgacacc

SEQ ID NO: 45701 - DNA, 25 bp, Homo sapien
gccggatctccgcttaatgaccacc

SEQ ID NO: 45702 - DNA, 25 bp, Homo sapien
ttccgctggccggatctccgcttaa

SEQ ID NO: 45703 - DNA, 25 bp, Homo sapien
cctgcggatggctgccatgcgcagg

SEQ ID NO: 45704 - DNA, 25 bp, Homo sapien
gagcagttccgcacgaccatccatt

SEQ ID NO: 45705 - DNA, 25 bp, Homo sapien
aggaattgcgggccttcaagttatt

SEQ ID NO: 45706 - DNA, 25 bp, Homo sapien
cagtccgttgtagcggaaggaattg

SEQ ID NO: 45707 - DNA, 25 bp, Homo sapien
ggtgaatcagtccgttgtagcggaa

SEQ ID NO: 45708 - DNA, 25 bp, Homo sapien
cacgcccacagtcttgcggtgaatc

SEQ ID NO: 45709 - DNA, 25 bp, Homo sapien
tgccggctccacgcccacagtcttg

SEQ ID NO: 45710 - DNA, 25 bp, Homo sapien
caccacgacacctttgccgtcggct

SEQ ID NO: 45711 - DNA, 25 bp, Homo sapien
tccgcttaatgaccaccacgacacc

SEQ ID NO: 45712 - DNA, 25 bp, Homo sapien
ttccgctggccggatctccgcttaa

SEQ ID NO: 45713 - DNA, 25 bp, Homo sapien
ggtgaatcagtccgttgtagcggaa

SEQ ID NO: 45714 - DNA, 25 bp, Homo sapien
aggaattgcgggccttcaagttatt

SEQ ID NO: 45715 - DNA, 25 bp, Homo sapien
caccacgacacctttgccgtcggct

SEQ ID NO: 45716 - DNA, 25 bp, Homo sapien
cacgcccacagtcttgcggtgaatc

SEQ ID NO: 45717 - DNA, 25 bp, Homo sapien
tgccggctccacgcccacagtcttg

SEQ ID NO: 45718 - DNA, 25 bp, Homo sapien
cagtccgttgtagcggaaggaattg

SEQ ID NO: 45719 - DNA, 25 bp, Homo sapien
gagcagttccgcacgaccatccatt

SEQ ID NO: 45720 - DNA, 25 bp, Homo sapien
cctgcggatggctgccatgcgcagg

SEQ ID NO: 45721 - DNA, 25 bp, Homo sapien
gccggatctccgcttaatgaccacc

SEQ ID NO: 45722 - DNA, 25 bp, Homo sapien
tccgcttaatgaccaccacgacacc

SEQ ID NO: 45723 - DNA, 25 bp, Homo sapien
gccggatctccgcttaatgaccacc

SEQ ID NO: 45724 - DNA, 25 bp, Homo sapien
ttccgctggccggatctccgcttaa

SEQ ID NO: 45725 - DNA, 25 bp, Homo sapien
cctgcggatggctgccatgcgcagg

SEQ ID NO: 45726 - DNA, 25 bp, Homo sapien
gagcagttccgcacgaccatccatt

SEQ ID NO: 45727 - DNA, 25 bp, Homo sapien
aggaattgcgggccttcaagttatt

SEQ ID NO: 45728 - DNA, 25 bp, Homo sapien
cagtccgttgtagcggaaggaattg

SEQ ID NO: 45729 - DNA, 25 bp, Homo sapien
ggtgaatcagtccgttgtagcggaa

SEQ ID NO: 45730 - DNA, 25 bp, Homo sapien
cacgcccacagtcttgcggtgaatc

SEQ ID NO: 45731 - DNA, 25 bp, Homo sapien
tgccggctccacgcccacagtcttg

SEQ ID NO: 45732 - DNA, 25 bp, Homo sapien
caccacgacacctttgccgtcggct

SEQ ID NO: 45733 - DNA, 25 bp, Homo sapien
tccgcttaatgaccaccacgacacc

SEQ ID NO: 45734 - DNA, 25 bp, Homo sapien
cctgcggatggctgccatgcgcagg

SEQ ID NO: 45735 - DNA, 25 bp, Homo sapien
tgccggctccacgcccacagtcttg

SEQ ID NO: 45736 - DNA, 25 bp, Homo sapien
cagtccgttgtagcggaaggaattg

SEQ ID NO: 45737 - DNA, 25 bp, Homo sapien
ggtgaatcagtccgttgtagcggaa

SEQ ID NO: 45738 - DNA, 25 bp, Homo sapien
aggaattgcgggccttcaagttatt

SEQ ID NO: 45739 - DNA, 25 bp, Homo sapien
cacgcccacagtcttgcggtgaatc

SEQ ID NO: 45740 - DNA, 25 bp, Homo sapien
gagcagttccgcacgaccatccatt

SEQ ID NO: 45741 - DNA, 25 bp, Homo sapien
ttccgctggccggatctccgcttaa

SEQ ID NO: 45742 - DNA, 25 bp, Homo sapien
gccggatctccgcttaatgaccacc

SEQ ID NO: 45743 - DNA, 25 bp, Homo sapien
caccacgacacctttgccgtcggct

SEQ ID NO: 45744 - DNA, 25 bp, Homo sapien
gagcagttccgcacgaccatccatt

SEQ ID NO: 45745 - DNA, 25 bp, Homo sapien
cacgcccacagtcttgcggtgaatc

SEQ ID NO: 45746 - DNA, 25 bp, Homo sapien
ggtgaatcagtccgttgtagcggaa

SEQ ID NO: 45747 - DNA, 25 bp, Homo sapien
caccacgacacctttgccgtcggct

SEQ ID NO: 45748 - DNA, 25 bp, Homo sapien
tccgcttaatgaccaccacgacacc

SEQ ID NO: 45749 - DNA, 25 bp, Homo sapien
aggaattgcgggccttcaagttatt

SEQ ID NO: 45750 - DNA, 25 bp, Homo sapien
tgccggctccacgcccacagtcttg

SEQ ID NO: 45751 - DNA, 25 bp, Homo sapien
cagtccgttgtagcggaaggaattg

SEQ ID NO: 45752 - DNA, 25 bp, Homo sapien
cctgcggatggctgccatgcgcagg

SEQ ID NO: 45753 - DNA, 25 bp, Homo sapien
gccggatctccgcttaatgaccacc

SEQ ID NO: 45754 - DNA, 25 bp, Homo sapien
ttccgctggccggatctccgcttaa

SEQ ID NO: 45755 - DNA, 25 bp, Homo sapien
tccgcttaatgaccaccacgacacc

SEQ ID NO: 45756 - DNA, 25 bp, Homo sapien
gccggatctccgcttaatgaccacc

SEQ ID NO: 45757 - DNA, 25 bp, Homo sapien
ttccgctggccggatctccgcttaa

SEQ ID NO: 45758 - DNA, 25 bp, Homo sapien
cctgcggatggctgccatgcgcagg

SEQ ID NO: 45759 - DNA, 25 bp, Homo sapien
gagcagttccgcacgaccatccatt

SEQ ID NO: 45760 - DNA, 25 bp, Homo sapien
aggaattgcgggccttcaagttatt

SEQ ID NO: 45761 - DNA, 25 bp, Homo sapien
cagtccgttgtagcggaaggaattg

SEQ ID NO: 45762 - DNA, 25 bp, Homo sapien
ggtgaatcagtccgttgtagcggaa

SEQ ID NO: 45763 - DNA, 25 bp, Homo sapien
cacgcccacagtcttgcggtgaatc

SEQ ID NO: 45764 - DNA, 25 bp, Homo sapien
tgccggctccacgcccacagtcttg

SEQ ID NO: 45765 - DNA, 25 bp, Homo sapien
caccacgacacctttgccgtcggct

SEQ ID NO: 45766 - DNA, 25 bp, Homo sapien
gccggatctccgcttaatgaccacc

SEQ ID NO: 45767 - DNA, 25 bp, Homo sapien
gagcagttccgcacgaccatccatt

SEQ ID NO: 45768 - DNA, 25 bp, Homo sapien
cacgcccacagtcttgcggtgaatc

SEQ ID NO: 45769 - DNA, 25 bp, Homo sapien
aggaattgcgggccttcaagttatt

SEQ ID NO: 45770 - DNA, 25 bp, Homo sapien
ggtgaatcagtccgttgtagcggaa

SEQ ID NO: 45771 - DNA, 25 bp, Homo sapien
cctgcggatggctgccatgcgcagg

SEQ ID NO: 45772 - DNA, 25 bp, Homo sapien
ttccgctggccggatctccgcttaa

SEQ ID NO: 45773 - DNA, 25 bp, Homo sapien
caccacgacacctttgccgtcggct

SEQ ID NO: 45774 - DNA, 25 bp, Homo sapien
tgccggctccacgcccacagtcttg

SEQ ID NO: 45775 - DNA, 25 bp, Homo sapien
tccgcttaatgaccaccacgacacc

SEQ ID NO: 45776 - DNA, 25 bp, Homo sapien
cagtccgttgtagcggaaggaattg

SEQ ID NO: 45777 - DNA, 25 bp, Homo sapien
tccgcttaatgaccaccacgacacc

SEQ ID NO: 45778 - DNA, 25 bp, Homo sapien
gccggatctccgcttaatgaccacc

SEQ ID NO: 45779 - DNA, 25 bp, Homo sapien
ttccgctggccggatctccgcttaa

SEQ ID NO: 45780 - DNA, 25 bp, Homo sapien
cctgcggatggctgccatgcgcagg

SEQ ID NO: 45781 - DNA, 25 bp, Homo sapien
gagcagttccgcacgaccatccatt

SEQ ID NO: 45782 - DNA, 25 bp, Homo sapien
aggaattgcgggccttcaagttatt

SEQ ID NO: 45783 - DNA, 25 bp, Homo sapien
cagtccgttgtagcggaaggaattg

SEQ ID NO: 45784 - DNA, 25 bp, Homo sapien
ggtgaatcagtccgttgtagcggaa

SEQ ID NO: 45785 - DNA, 25 bp, Homo sapien
cacgcccacagtcttgcggtgaatc

SEQ ID NO: 45786 - DNA, 25 bp, Homo sapien
tgccggctccacgcccacagtcttg

SEQ ID NO: 45787 - DNA, 25 bp, Homo sapien
caccacgacacctttgccgtcggct

SEQ ID NO: 45788 - DNA, 25 bp, Homo sapien
gagcagttccgcacgaccatccatt

SEQ ID NO: 45789 - DNA, 25 bp, Homo sapien
cacgcccacagtcttgcggtgaatc

SEQ ID NO: 45790 - DNA, 25 bp, Homo sapien
cctgcggatggctgccatgcgcagg

SEQ ID NO: 45791 - DNA, 25 bp, Homo sapien
gccggatctccgcttaatgaccacc

SEQ ID NO: 45792 - DNA, 25 bp, Homo sapien
tccgcttaatgaccaccacgacacc

SEQ ID NO: 45793 - DNA, 25 bp, Homo sapien
caccacgacacctttgccgtcggct

SEQ ID NO: 45794 - DNA, 25 bp, Homo sapien
aggaattgcgggccttcaagttatt

SEQ ID NO: 45795 - DNA, 25 bp, Homo sapien
cagtccgttgtagcggaaggaattg

SEQ ID NO: 45796 - DNA, 25 bp, Homo sapien
ggtgaatcagtccgttgtagcggaa

SEQ ID NO: 45797 - DNA, 25 bp, Homo sapien
ttccgctggccggatctccgcttaa

SEQ ID NO: 45798 - DNA, 25 bp, Homo sapien
tgccggctccacgcccacagtcttg

SEQ ID NO: 45799 - DNA, 25 bp, Homo sapien
tccgcttaatgaccaccacgacacc

SEQ ID NO: 45800 - DNA, 25 bp, Homo sapien
gccggatctccgcttaatgaccacc

SEQ ID NO: 45801 - DNA, 25 bp, Homo sapien
ttccgctggccggatctccgcttaa

SEQ ID NO: 45802 - DNA, 25 bp, Homo sapien
cctgcggatggctgccatgcgcagg

SEQ ID NO: 45803 - DNA, 25 bp, Homo sapien
gagcagttccgcacgaccatccatt

SEQ ID NO: 45804 - DNA, 25 bp, Homo sapien
aggaattgcgggccttcaagttatt

SEQ ID NO: 45805 - DNA, 25 bp, Homo sapien
cagtccgttgtagcggaaggaattg

SEQ ID NO: 45806 - DNA, 25 bp, Homo sapien
ggtgaatcagtccgttgtagcggaa

SEQ ID NO: 45807 - DNA, 25 bp, Homo sapien
cacgcccacagtcttgcggtgaatc

SEQ ID NO: 45808 - DNA, 25 bp, Homo sapien
tgccggctccacgcccacagtcttg

SEQ ID NO: 45809 - DNA, 25 bp, Homo sapien
caccacgacacctttgccgtcggct

SEQ ID NO: 45810 - DNA, 25 bp, Homo sapien
cacgcccacagtcttgcggtgaatc

SEQ ID NO: 45811 - DNA, 25 bp, Homo sapien
cctgcggatggctgccatgcgcagg

SEQ ID NO: 45812 - DNA, 25 bp, Homo sapien
tccgcttaatgaccaccacgacacc

SEQ ID NO: 45813 - DNA, 25 bp, Homo sapien
tgccggctccacgcccacagtcttg

SEQ ID NO: 45814 - DNA, 25 bp, Homo sapien
aggaattgcgggccttcaagttatt

SEQ ID NO: 45815 - DNA, 25 bp, Homo sapien
gccggatctccgcttaatgaccacc

SEQ ID NO: 45816 - DNA, 25 bp, Homo sapien
cagtccgttgtagcggaaggaattg

SEQ ID NO: 45817 - DNA, 25 bp, Homo sapien
gagcagttccgcacgaccatccatt

SEQ ID NO: 45818 - DNA, 25 bp, Homo sapien
ggtgaatcagtccgttgtagcggaa

SEQ ID NO: 45819 - DNA, 25 bp, Homo sapien
ttccgctggccggatctccgcttaa

SEQ ID NO: 45820 - DNA, 25 bp, Homo sapien
caccacgacacctttgccgtcggct

SEQ ID NO: 45821 - DNA, 25 bp, Homo sapien
tccgcttaatgaccaccacgacacc

SEQ ID NO: 45822 - DNA, 25 bp, Homo sapien
gccggatctccgcttaatgaccacc

SEQ ID NO: 45823 - DNA, 25 bp, Homo sapien
ttccgctggccggatctccgcttaa

SEQ ID NO: 45824 - DNA, 25 bp, Homo sapien
cctgcggatggctgccatgcgcagg

SEQ ID NO: 45825 - DNA, 25 bp, Homo sapien
gagcagttccgcacgaccatccatt

SEQ ID NO: 45826 - DNA, 25 bp, Homo sapien
aggaattgcgggccttcaagttatt

SEQ ID NO: 45827 - DNA, 25 bp, Homo sapien
cagtccgttgtagcggaaggaattg

SEQ ID NO: 45828 - DNA, 25 bp, Homo sapien
ggtgaatcagtccgttgtagcggaa

SEQ ID NO: 45829 - DNA, 25 bp, Homo sapien
cacgcccacagtcttgcggtgaatc

SEQ ID NO: 45830 - DNA, 25 bp, Homo sapien
tgccggctccacgcccacagtcttg

SEQ ID NO: 45831 - DNA, 25 bp, Homo sapien
caccacgacacctttgccgtcggct

SEQ ID NO: 45832 - DNA, 25 bp, Homo sapien
cctgcggatggctgccatgcgcagg

SEQ ID NO: 45833 - DNA, 25 bp, Homo sapien
gagcagttccgcacgaccatccatt

SEQ ID NO: 45834 - DNA, 25 bp, Homo sapien
cagtccgttgtagcggaaggaattg

SEQ ID NO: 45835 - DNA, 25 bp, Homo sapien
tccgcttaatgaccaccacgacacc

SEQ ID NO: 45836 - DNA, 25 bp, Homo sapien
aggaattgcgggccttcaagttatt

SEQ ID NO: 45837 - DNA, 25 bp, Homo sapien
gccggatctccgcttaatgaccacc

SEQ ID NO: 45838 - DNA, 25 bp, Homo sapien
cacgcccacagtcttgcggtgaatc

SEQ ID NO: 45839 - DNA, 25 bp, Homo sapien
ggtgaatcagtccgttgtagcggaa

SEQ ID NO: 45840 - DNA, 25 bp, Homo sapien
ttccgctggccggatctccgcttaa

SEQ ID NO: 45841 - DNA, 25 bp, Homo sapien
tgccggctccacgcccacagtcttg

SEQ ID NO: 45842 - DNA, 25 bp, Homo sapien
caccacgacacctttgccgtcggct

SEQ ID NO: 45843 - DNA, 25 bp, Homo sapien
tccgcttaatgaccaccacgacacc

SEQ ID NO: 45844 - DNA, 25 bp, Homo sapien
gccggatctccgcttaatgaccacc

SEQ ID NO: 45845 - DNA, 25 bp, Homo sapien
ttccgctggccggatctccgcttaa

SEQ ID NO: 45846 - DNA, 25 bp, Homo sapien
cctgcggatggctgccatgcgcagg

SEQ ID NO: 45847 - DNA, 25 bp, Homo sapien
gagcagttccgcacgaccatccatt

SEQ ID NO: 45848 - DNA, 25 bp, Homo sapien
aggaattgcgggccttcaagttatt

SEQ ID NO: 45849 - DNA, 25 bp, Homo sapien
cagtccgttgtagcggaaggaattg

SEQ ID NO: 45850 - DNA, 25 bp, Homo sapien
ggtgaatcagtccgttgtagcggaa

SEQ ID NO: 45851 - DNA, 25 bp, Homo sapien
cacgcccacagtcttgcggtgaatc

SEQ ID NO: 45852 - DNA, 25 bp, Homo sapien
tgccggctccacgcccacagtcttg

SEQ ID NO: 45853 - DNA, 25 bp, Homo sapien
caccacgacacctttgccgtcggct

SEQ ID NO: 45854 - DNA, 25 bp, Homo sapien
cacgcccacagtcttgcggtgaatc

SEQ ID NO: 45855 - DNA, 25 bp, Homo sapien
caccacgacacctttgccgtcggct

SEQ ID NO: 45856 - DNA, 25 bp, Homo sapien
tccgcttaatgaccaccacgacacc

SEQ ID NO: 45857 - DNA, 25 bp, Homo sapien
tgccggctccacgcccacagtcttg

SEQ ID NO: 45858 - DNA, 25 bp, Homo sapien
cctgcggatggctgccatgcgcagg

SEQ ID NO: 45859 - DNA, 25 bp, Homo sapien
gagcagttccgcacgaccatccatt

SEQ ID NO: 45860 - DNA, 25 bp, Homo sapien
cagtccgttgtagcggaaggaattg

SEQ ID NO: 45861 - DNA, 25 bp, Homo sapien
ggtgaatcagtccgttgtagcggaa

SEQ ID NO: 45862 - DNA, 25 bp, Homo sapien
aggaattgcgggccttcaagttatt

SEQ ID NO: 45863 - DNA, 25 bp, Homo sapien
gccggatctccgcttaatgaccacc

SEQ ID NO: 45864 - DNA, 25 bp, Homo sapien
ttccgctggccggatctccgcttaa

SEQ ID NO: 45865 - DNA, 25 bp, Homo sapien
tccgcttaatgaccaccacgacacc

SEQ ID NO: 45866 - DNA, 25 bp, Homo sapien
gccggatctccgcttaatgaccacc

SEQ ID NO: 45867 - DNA, 25 bp, Homo sapien
ttccgctggccggatctccgcttaa

SEQ ID NO: 45868 - DNA, 25 bp, Homo sapien
cctgcggatggctgccatgcgcagg

SEQ ID NO: 45869 - DNA, 25 bp, Homo sapien
gagcagttccgcacgaccatccatt

SEQ ID NO: 45870 - DNA, 25 bp, Homo sapien
aggaattgcgggccttcaagttatt

SEQ ID NO: 45871 - DNA, 25 bp, Homo sapien
cagtccgttgtagcggaaggaattg

SEQ ID NO: 45872 - DNA, 25 bp, Homo sapien
ggtgaatcagtccgttgtagcggaa

SEQ ID NO: 45873 - DNA, 25 bp, Homo sapien
cacgcccacagtcttgcggtgaatc

SEQ ID NO: 45874 - DNA, 25 bp, Homo sapien
tgccggctccacgcccacagtcttg

SEQ ID NO: 45875 - DNA, 25 bp, Homo sapien
caccacgacacctttgccgtcggct

SEQ ID NO: 45876 - DNA, 25 bp, Homo sapien
tccgcttaatgaccaccacgacacc

SEQ ID NO: 45877 - DNA, 25 bp, Homo sapien
gccggatctccgcttaatgaccacc

SEQ ID NO: 45878 - DNA, 25 bp, Homo sapien
ttccgctggccggatctccgcttaa

SEQ ID NO: 45879 - DNA, 25 bp, Homo sapien
cctgcggatggctgccatgcgcagg

SEQ ID NO: 45880 - DNA, 25 bp, Homo sapien
gagcagttccgcacgaccatccatt

SEQ ID NO: 45881 - DNA, 25 bp, Homo sapien
aggaattgcgggccttcaagttatt

SEQ ID NO: 45882 - DNA, 25 bp, Homo sapien
cagtccgttgtagcggaaggaattg

SEQ ID NO: 45883 - DNA, 25 bp, Homo sapien
ggtgaatcagtccgttgtagcggaa

SEQ ID NO: 45884 - DNA, 25 bp, Homo sapien
cacgcccacagtcttgcggtgaatc

SEQ ID NO: 45885 - DNA, 25 bp, Homo sapien
tgccggctccacgcccacagtcttg

SEQ ID NO: 45886 - DNA, 25 bp, Homo sapien
caccacgacacctttgccgtcggct

SEQ ID NO: 45887 - DNA, 25 bp, Homo sapien
tccgcttaatgaccaccacgacacc

SEQ ID NO: 45888 - DNA, 25 bp, Homo sapien
cctgcggatggctgccatgcgcagg

SEQ ID NO: 45889 - DNA, 25 bp, Homo sapien
tgccggctccacgcccacagtcttg

SEQ ID NO: 45890 - DNA, 25 bp, Homo sapien
caccacgacacctttgccgtcggct

SEQ ID NO: 45891 - DNA, 25 bp, Homo sapien
ttccgctggccggatctccgcttaa

SEQ ID NO: 45892 - DNA, 25 bp, Homo sapien
gagcagttccgcacgaccatccatt

SEQ ID NO: 45893 - DNA, 25 bp, Homo sapien
ggtgaatcagtccgttgtagcggaa

SEQ ID NO: 45894 - DNA, 25 bp, Homo sapien
cacgcccacagtcttgcggtgaatc

SEQ ID NO: 45895 - DNA, 25 bp, Homo sapien
gccggatctccgcttaatgaccacc

SEQ ID NO: 45896 - DNA, 25 bp, Homo sapien
cagtccgttgtagcggaaggaattg

SEQ ID NO: 45897 - DNA, 25 bp, Homo sapien
aggaattgcgggccttcaagttatt

SEQ ID NO: 45898 - DNA, 25 bp, Homo sapien
cctgcggatggctgccatgcgcagg

SEQ ID NO: 45899 - DNA, 25 bp, Homo sapien
tgccggctccacgcccacagtcttg

SEQ ID NO: 45900 - DNA, 25 bp, Homo sapien
caccacgacacctttgccgtcggct

SEQ ID NO: 45901 - DNA, 25 bp, Homo sapien
ttccgctggccggatctccgcttaa

SEQ ID NO: 45902 - DNA, 25 bp, Homo sapien
tccgcttaatgaccaccacgacacc

SEQ ID NO: 45903 - DNA, 25 bp, Homo sapien
gagcagttccgcacgaccatccatt

SEQ ID NO: 45904 - DNA, 25 bp, Homo sapien
ggtgaatcagtccgttgtagcggaa

SEQ ID NO: 45905 - DNA, 25 bp, Homo sapien
gccggatctccgcttaatgaccacc

SEQ ID NO: 45906 - DNA, 25 bp, Homo sapien
cacgcccacagtcttgcggtgaatc

SEQ ID NO: 45907 - DNA, 25 bp, Homo sapien
aggaattgcgggccttcaagttatt

SEQ ID NO: 45908 - DNA, 25 bp, Homo sapien
cagtccgttgtagcggaaggaattg

SEQ ID NO: 45909 - DNA, 25 bp, Homo sapien
cctgcggatggctgccatgcgcagg

SEQ ID NO: 45910 - DNA, 25 bp, Homo sapien
tgccggctccacgcccacagtcttg

SEQ ID NO: 45911 - DNA, 25 bp, Homo sapien
tccgcttaatgaccaccacgacacc

SEQ ID NO: 45912 - DNA, 25 bp, Homo sapien
caccacgacacctttgccgtcggct

SEQ ID NO: 45913 - DNA, 25 bp, Homo sapien
ttccgctggccggatctccgcttaa

SEQ ID NO: 45914 - DNA, 25 bp, Homo sapien
gagcagttccgcacgaccatccatt

SEQ ID NO: 45915 - DNA, 25 bp, Homo sapien
ggtgaatcagtccgttgtagcggaa

SEQ ID NO: 45916 - DNA, 25 bp, Homo sapien
gccggatctccgcttaatgaccacc

SEQ ID NO: 45917 - DNA, 25 bp, Homo sapien
cacgcccacagtcttgcggtgaatc

SEQ ID NO: 45918 - DNA, 25 bp, Homo sapien
aggaattgcgggccttcaagttatt

SEQ ID NO: 45919 - DNA, 25 bp, Homo sapien
cagtccgttgtagcggaaggaattg

SEQ ID NO: 45920 - DNA, 25 bp, Homo sapien
cctgcggatggctgccatgcgcagg

SEQ ID NO: 45921 - DNA, 25 bp, Homo sapien
tgccggctccacgcccacagtcttg

SEQ ID NO: 45922 - DNA, 25 bp, Homo sapien
tccgcttaatgaccaccacgacacc

SEQ ID NO: 45923 - DNA, 25 bp, Homo sapien
caccacgacacctttgccgtcggct

SEQ ID NO: 45924 - DNA, 25 bp, Homo sapien
ttccgctggccggatctccgcttaa

SEQ ID NO: 45925 - DNA, 25 bp, Homo sapien
gagcagttccgcacgaccatccatt

SEQ ID NO: 45926 - DNA, 25 bp, Homo sapien
ggtgaatcagtccgttgtagcggaa

SEQ ID NO: 45927 - DNA, 25 bp, Homo sapien
gccggatctccgcttaatgaccacc

SEQ ID NO: 45928 - DNA, 25 bp, Homo sapien
cacgcccacagtcttgcggtgaatc

SEQ ID NO: 45929 - DNA, 25 bp, Homo sapien
aggaattgcgggccttcaagttatt

SEQ ID NO: 45930 - DNA, 25 bp, Homo sapien
cagtccgttgtagcggaaggaattg

SEQ ID NO: 45931 - DNA, 25 bp, Homo sapien
cctgcggatggctgccatgcgcagg

SEQ ID NO: 45932 - DNA, 25 bp, Homo sapien
tgccggctccacgcccacagtcttg

SEQ ID NO: 45933 - DNA, 25 bp, Homo sapien
tccgcttaatgaccaccacgacacc

SEQ ID NO: 45934 - DNA, 25 bp, Homo sapien
caccacgacacctttgccgtcggct

SEQ ID NO: 45935 - DNA, 25 bp, Homo sapien
ttccgctggccggatctccgcttaa

SEQ ID NO: 45936 - DNA, 25 bp, Homo sapien
gagcagttccgcacgaccatccatt

SEQ ID NO: 45937 - DNA, 25 bp, Homo sapien
cacgcccacagtcttgcggtgaatc

SEQ ID NO: 45938 - DNA, 25 bp, Homo sapien
aggaattgcgggccttcaagttatt

SEQ ID NO: 45939 - DNA, 25 bp, Homo sapien
ggtgaatcagtccgttgtagcggaa

SEQ ID NO: 45940 - DNA, 25 bp, Homo sapien
gccggatctccgcttaatgaccacc

SEQ ID NO: 45941 - DNA, 25 bp, Homo sapien
cagtccgttgtagcggaaggaattg

SEQ ID NO: 45942 - DNA, 25 bp, Homo sapien
tccgcttaatgaccaccacgacacc

SEQ ID NO: 45943 - DNA, 25 bp, Homo sapien
cctgcggatggctgccatgcgcagg

SEQ ID NO: 45944 - DNA, 25 bp, Homo sapien
tgccggctccacgcccacagtcttg

SEQ ID NO: 45945 - DNA, 25 bp, Homo sapien
caccacgacacctttgccgtcggct

SEQ ID NO: 45946 - DNA, 25 bp, Homo sapien
ggtgaatcagtccgttgtagcggaa

SEQ ID NO: 45947 - DNA, 25 bp, Homo sapien
ttccgctggccggatctccgcttaa

SEQ ID NO: 45948 - DNA, 25 bp, Homo sapien
gagcagttccgcacgaccatccatt

SEQ ID NO: 45949 - DNA, 25 bp, Homo sapien
gccggatctccgcttaatgaccacc

SEQ ID NO: 45950 - DNA, 25 bp, Homo sapien
aggaattgcgggccttcaagttatt

SEQ ID NO: 45951 - DNA, 25 bp, Homo sapien
cacgcccacagtcttgcggtgaatc

SEQ ID NO: 45952 - DNA, 25 bp, Homo sapien
cagtccgttgtagcggaaggaattg

SEQ ID NO: 45953 - DNA, 25 bp, Homo sapien
aggaattgcgggccttcaagttatt

SEQ ID NO: 45954 - DNA, 25 bp, Homo sapien
tccgcttaatgaccaccacgacacc

SEQ ID NO: 45955 - DNA, 25 bp, Homo sapien
cctgcggatggctgccatgcgcagg

SEQ ID NO: 45956 - DNA, 25 bp, Homo sapien
tgccggctccacgcccacagtcttg

SEQ ID NO: 45957 - DNA, 25 bp, Homo sapien
caccacgacacctttgccgtcggct

SEQ ID NO: 45958 - DNA, 25 bp, Homo sapien
ggtgaatcagtccgttgtagcggaa

SEQ ID NO: 45959 - DNA, 25 bp, Homo sapien
ttccgctggccggatctccgcttaa

SEQ ID NO: 45960 - DNA, 25 bp, Homo sapien
gagcagttccgcacgaccatccatt

SEQ ID NO: 45961 - DNA, 25 bp, Homo sapien
gccggatctccgcttaatgaccacc

SEQ ID NO: 45962 - DNA, 25 bp, Homo sapien
cacgcccacagtcttgcggtgaatc

SEQ ID NO: 45963 - DNA, 25 bp, Homo sapien
cagtccgttgtagcggaaggaattg

SEQ ID NO: 45964 - DNA, 25 bp, Homo sapien
cctgcggatggctgccatgcgcagg

SEQ ID NO: 45965 - DNA, 25 bp, Homo sapien
tgccggctccacgcccacagtcttg

SEQ ID NO: 45966 - DNA, 25 bp, Homo sapien
caccacgacacctttgccgtcggct

SEQ ID NO: 45967 - DNA, 25 bp, Homo sapien
ttccgctggccggatctccgcttaa

SEQ ID NO: 45968 - DNA, 25 bp, Homo sapien
ggtgaatcagtccgttgtagcggaa

SEQ ID NO: 45969 - DNA, 25 bp, Homo sapien
gagcagttccgcacgaccatccatt

SEQ ID NO: 45970 - DNA, 25 bp, Homo sapien
aggaattgcgggccttcaagttatt

SEQ ID NO: 45971 - DNA, 25 bp, Homo sapien
cacgcccacagtcttgcggtgaatc

SEQ ID NO: 45972 - DNA, 25 bp, Homo sapien
gccggatctccgcttaatgaccacc

SEQ ID NO: 45973 - DNA, 25 bp, Homo sapien
tccgcttaatgaccaccacgacacc

SEQ ID NO: 45974 - DNA, 25 bp, Homo sapien
cagtccgttgtagcggaaggaattg

SEQ ID NO: 45975 - DNA, 25 bp, Homo sapien
tccgcttaatgaccaccacgacacc

SEQ ID NO: 45976 - DNA, 25 bp, Homo sapien
cctgcggatggctgccatgcgcagg

SEQ ID NO: 45977 - DNA, 25 bp, Homo sapien
tgccggctccacgcccacagtcttg

SEQ ID NO: 45978 - DNA, 25 bp, Homo sapien
aggaattgcgggccttcaagttatt

SEQ ID NO: 45979 - DNA, 25 bp, Homo sapien
caccacgacacctttgccgtcggct

SEQ ID NO: 45980 - DNA, 25 bp, Homo sapien
ttccgctggccggatctccgcttaa

SEQ ID NO: 45981 - DNA, 25 bp, Homo sapien
ggtgaatcagtccgttgtagcggaa

SEQ ID NO: 45982 - DNA, 25 bp, Homo sapien
gagcagttccgcacgaccatccatt

SEQ ID NO: 45983 - DNA, 25 bp, Homo sapien
cacgcccacagtcttgcggtgaatc

SEQ ID NO: 45984 - DNA, 25 bp, Homo sapien
gccggatctccgcttaatgaccacc

SEQ ID NO: 45985 - DNA, 25 bp, Homo sapien
cagtccgttgtagcggaaggaattg

SEQ ID NO: 45986 - DNA, 25 bp, Homo sapien
gagcagttccgcacgaccatccatt

SEQ ID NO: 45987 - DNA, 25 bp, Homo sapien
tgccggctccacgcccacagtcttg

SEQ ID NO: 45988 - DNA, 25 bp, Homo sapien
ggtgaatcagtccgttgtagcggaa

SEQ ID NO: 45989 - DNA, 25 bp, Homo sapien
ttccgctggccggatctccgcttaa

SEQ ID NO: 45990 - DNA, 25 bp, Homo sapien
caccacgacacctttgccgtcggct

SEQ ID NO: 45991 - DNA, 25 bp, Homo sapien
cagtccgttgtagcggaaggaattg

SEQ ID NO: 45992 - DNA, 25 bp, Homo sapien
cacgcccacagtcttgcggtgaatc

SEQ ID NO: 45993 - DNA, 25 bp, Homo sapien
tccgcttaatgaccaccacgacacc

SEQ ID NO: 45994 - DNA, 25 bp, Homo sapien
gccggatctccgcttaatgaccacc

SEQ ID NO: 45995 - DNA, 25 bp, Homo sapien
aggaattgcgggccttcaagttatt

SEQ ID NO: 45996 - DNA, 25 bp, Homo sapien
cctgcggatggctgccatgcgcagg

SEQ ID NO: 45997 - DNA, 25 bp, Homo sapien
cctgcggatggctgccatgcgcagg

SEQ ID NO: 45998 - DNA, 25 bp, Homo sapien
tgccggctccacgcccacagtcttg

SEQ ID NO: 45999 - DNA, 25 bp, Homo sapien
caccacgacacctttgccgtcggct

SEQ ID NO: 46000 - DNA, 25 bp, Homo sapien
tccgcttaatgaccaccacgacacc

SEQ ID NO: 46001 - DNA, 25 bp, Homo sapien
ttccgctggccggatctccgcttaa

SEQ ID NO: 46002 - DNA, 25 bp, Homo sapien
gagcagttccgcacgaccatccatt

SEQ ID NO: 46003 - DNA, 25 bp, Homo sapien
ggtgaatcagtccgttgtagcggaa

SEQ ID NO: 46004 - DNA, 25 bp, Homo sapien
gccggatctccgcttaatgaccacc

SEQ ID NO: 46005 - DNA, 25 bp, Homo sapien
cacgcccacagtcttgcggtgaatc

SEQ ID NO: 46006 - DNA, 25 bp, Homo sapien
cagtccgttgtagcggaaggaattg

SEQ ID NO: 46007 - DNA, 25 bp, Homo sapien
aggaattgcgggccttcaagttatt

SEQ ID NO: 46008 - DNA, 25 bp, Homo sapien
tccgcttaatgaccaccacgacacc

SEQ ID NO: 46009 - DNA, 25 bp, Homo sapien
gccggatctccgcttaatgaccacc

SEQ ID NO: 46010 - DNA, 25 bp, Homo sapien
ttccgctggccggatctccgcttaa

SEQ ID NO: 46011 - DNA, 25 bp, Homo sapien
cctgcggatggctgccatgcgcagg

SEQ ID NO: 46012 - DNA, 25 bp, Homo sapien
gagcagttccgcacgaccatccatt

SEQ ID NO: 46013 - DNA, 25 bp, Homo sapien
aggaattgcgggccttcaagttatt

SEQ ID NO: 46014 - DNA, 25 bp, Homo sapien
cagtccgttgtagcggaaggaattg

SEQ ID NO: 46015 - DNA, 25 bp, Homo sapien
ggtgaatcagtccgttgtagcggaa

SEQ ID NO: 46016 - DNA, 25 bp, Homo sapien
cacgcccacagtcttgcggtgaatc

SEQ ID NO: 46017 - DNA, 25 bp, Homo sapien
tgccggctccacgcccacagtcttg

SEQ ID NO: 46018 - DNA, 25 bp, Homo sapien
caccacgacacctttgccgtcggct

SEQ ID NO: 46019 - DNA, 25 bp, Homo sapien
gattcaccgcaagactgtgggcgtg

SEQ ID NO: 46020 - DNA, 25 bp, Homo sapien
cctgcgcatggcagccatccgcagg

SEQ ID NO: 46021 - DNA, 25 bp, Homo sapien
caagactgtgggcgtggagccggca

SEQ ID NO: 46022 - DNA, 25 bp, Homo sapien
ttccgctacaacggactgattcacc

SEQ ID NO: 46023 - DNA, 25 bp, Homo sapien
aataacttgaaggcccgcaattcct

SEQ ID NO: 46024 - DNA, 25 bp, Homo sapien
ttaagcggagatccggccagcggaa

SEQ ID NO: 46025 - DNA, 25 bp, Homo sapien
caattccttccgctacaacggactg

SEQ ID NO: 46026 - DNA, 25 bp, Homo sapien
agccgacggcaaaggtgtcgtggtg

SEQ ID NO: 46027 - DNA, 25 bp, Homo sapien
ggtggtcattaagcggagatccggc

SEQ ID NO: 46028 - DNA, 25 bp, Homo sapien
ggtgtcgtggtggtcattaagcgga

SEQ ID NO: 46029 - DNA, 25 bp, Homo sapien
aatggatggtcgtgcggaactgctc

SEQ ID NO: 46030 - DNA, 25 bp, Homo sapien
cctgcggatggctgccatgcgcagg

SEQ ID NO: 46031 - DNA, 25 bp, Homo sapien
tgccggctccacgcccacagtcttg

SEQ ID NO: 46032 - DNA, 25 bp, Homo sapien
tccgcttaatgaccaccacgacacc

SEQ ID NO: 46033 - DNA, 25 bp, Homo sapien
caccacgacacctttgccgtcggct

SEQ ID NO: 46034 - DNA, 25 bp, Homo sapien
ttccgctggccggatctccgcttaa

SEQ ID NO: 46035 - DNA, 25 bp, Homo sapien
gagcagttccgcacgaccatccatt

SEQ ID NO: 46036 - DNA, 25 bp, Homo sapien
ggtgaatcagtccgttgtagcggaa

SEQ ID NO: 46037 - DNA, 25 bp, Homo sapien
gccggatctccgcttaatgaccacc

SEQ ID NO: 46038 - DNA, 25 bp, Homo sapien
cacgcccacagtcttgcggtgaatc

SEQ ID NO: 46039 - DNA, 25 bp, Homo sapien
aggaattgcgggccttcaagttatt

SEQ ID NO: 46040 - DNA, 25 bp, Homo sapien
cagtccgttgtagcggaaggaattg

SEQ ID NO: 46041 - DNA, 25 bp, Homo sapien
cacgcccacagtcttgcggtgaatc

SEQ ID NO: 46042 - DNA, 25 bp, Homo sapien
gccggatctccgcttaatgaccacc

SEQ ID NO: 46043 - DNA, 25 bp, Homo sapien
cctgcggatggctgccatgcgcagg

SEQ ID NO: 46044 - DNA, 25 bp, Homo sapien
tgccggctccacgcccacagtcttg

SEQ ID NO: 46045 - DNA, 25 bp, Homo sapien
caccacgacacctttgccgtcggct

SEQ ID NO: 46046 - DNA, 25 bp, Homo sapien
ggtgaatcagtccgttgtagcggaa

SEQ ID NO: 46047 - DNA, 25 bp, Homo sapien
gagcagttccgcacgaccatccatt

SEQ ID NO: 46048 - DNA, 25 bp, Homo sapien
tccgcttaatgaccaccacgacacc

SEQ ID NO: 46049 - DNA, 25 bp, Homo sapien
ttccgctggccggatctccgcttaa

SEQ ID NO: 46050 - DNA, 25 bp, Homo sapien
aggaattgcgggccttcaagttatt

SEQ ID NO: 46051 - DNA, 25 bp, Homo sapien
cagtccgttgtagcggaaggaattg

SEQ ID NO: 46052 - DNA, 25 bp, Homo sapien
tccgcttaatgaccaccacgacacc

SEQ ID NO: 46053 - DNA, 25 bp, Homo sapien
gccggatctccgcttaatgaccacc

SEQ ID NO: 46054 - DNA, 25 bp, Homo sapien
ttccgctggccggatctccgcttaa

SEQ ID NO: 46055 - DNA, 25 bp, Homo sapien
cctgcggatggctgccatgcgcagg

SEQ ID NO: 46056 - DNA, 25 bp, Homo sapien
gagcagttccgcacgaccatccatt

SEQ ID NO: 46057 - DNA, 25 bp, Homo sapien
aggaattgcgggccttcaagttatt

SEQ ID NO: 46058 - DNA, 25 bp, Homo sapien
cagtccgttgtagcggaaggaattg

SEQ ID NO: 46059 - DNA, 25 bp, Homo sapien
ggtgaatcagtccgttgtagcggaa

SEQ ID NO: 46060 - DNA, 25 bp, Homo sapien
cacgcccacagtcttgcggtgaatc

SEQ ID NO: 46061 - DNA, 25 bp, Homo sapien
tgccggctccacgcccacagtcttg

SEQ ID NO: 46062 - DNA, 25 bp, Homo sapien
caccacgacacctttgccgtcggct

SEQ ID NO: 46063 - DNA, 25 bp, Homo sapien
cacgcccacagtcttgcggtgaatc

SEQ ID NO: 46064 - DNA, 25 bp, Homo sapien
tccgcttaatgaccaccacgacacc

SEQ ID NO: 46065 - DNA, 25 bp, Homo sapien
caccacgacacctttgccgtcggct

SEQ ID NO: 46066 - DNA, 25 bp, Homo sapien
ggtgaatcagtccgttgtagcggaa

SEQ ID NO: 46067 - DNA, 25 bp, Homo sapien
ttccgctggccggatctccgcttaa

SEQ ID NO: 46068 - DNA, 25 bp, Homo sapien
cagtccgttgtagcggaaggaattg

SEQ ID NO: 46069 - DNA, 25 bp, Homo sapien
gagcagttccgcacgaccatccatt

SEQ ID NO: 46070 - DNA, 25 bp, Homo sapien
tgccggctccacgcccacagtcttg

SEQ ID NO: 46071 - DNA, 25 bp, Homo sapien
cctgcggatggctgccatgcgcagg

SEQ ID NO: 46072 - DNA, 25 bp, Homo sapien
aggaattgcgggccttcaagttatt

SEQ ID NO: 46073 - DNA, 25 bp, Homo sapien
gccggatctccgcttaatgaccacc

SEQ ID NO: 46074 - DNA, 25 bp, Homo sapien
tccgcttaatgaccaccacgacacc

SEQ ID NO: 46075 - DNA, 25 bp, Homo sapien
gccggatctccgcttaatgaccacc

SEQ ID NO: 46076 - DNA, 25 bp, Homo sapien
ttccgctggccggatctccgcttaa

SEQ ID NO: 46077 - DNA, 25 bp, Homo sapien
cctgcggatggctgccatgcgcagg

SEQ ID NO: 46078 - DNA, 25 bp, Homo sapien
gagcagttccgcacgaccatccatt

SEQ ID NO: 46079 - DNA, 25 bp, Homo sapien
aggaattgcgggccttcaagttatt

SEQ ID NO: 46080 - DNA, 25 bp, Homo sapien
cagtccgttgtagcggaaggaattg

SEQ ID NO: 46081 - DNA, 25 bp, Homo sapien
ggtgaatcagtccgttgtagcggaa

SEQ ID NO: 46082 - DNA, 25 bp, Homo sapien
cacgcccacagtcttgcggtgaatc

SEQ ID NO: 46083 - DNA, 25 bp, Homo sapien
tgccggctccacgcccacagtcttg

SEQ ID NO: 46084 - DNA, 25 bp, Homo sapien
caccacgacacctttgccgtcggct

SEQ ID NO: 46085 - DNA, 25 bp, Homo sapien
tgccggctccacgcccacagtcttg

SEQ ID NO: 46086 - DNA, 25 bp, Homo sapien
gagcagttccgcacgaccatccatt

SEQ ID NO: 46087 - DNA, 25 bp, Homo sapien
cctgcggatggctgccatgcgcagg

SEQ ID NO: 46088 - DNA, 25 bp, Homo sapien
tccgcttaatgaccaccacgacacc

SEQ ID NO: 46089 - DNA, 25 bp, Homo sapien
ttccgctggccggatctccgcttaa

SEQ ID NO: 46090 - DNA, 25 bp, Homo sapien
ggtgaatcagtccgttgtagcggaa

SEQ ID NO: 46091 - DNA, 25 bp, Homo sapien
caccacgacacctttgccgtcggct

SEQ ID NO: 46092 - DNA, 25 bp, Homo sapien
cacgcccacagtcttgcggtgaatc

SEQ ID NO: 46093 - DNA, 25 bp, Homo sapien
gccggatctccgcttaatgaccacc

SEQ ID NO: 46094 - DNA, 25 bp, Homo sapien
cagtccgttgtagcggaaggaattg

SEQ ID NO: 46095 - DNA, 25 bp, Homo sapien
aggaattgcgggccttcaagttatt

SEQ ID NO: 46096 - DNA, 25 bp, Homo sapien
gagcagttccgcacgaccatccatt

SEQ ID NO: 46097 - DNA, 25 bp, Homo sapien
aggaattgcgggccttcaagttatt

SEQ ID NO: 46098 - DNA, 25 bp, Homo sapien
cagtccgttgtagcggaaggaattg

SEQ ID NO: 46099 - DNA, 25 bp, Homo sapien
ggtgaatcagtccgttgtagcggaa

SEQ ID NO: 46100 - DNA, 25 bp, Homo sapien
cacgcccacagtcttgcggtgaatc

SEQ ID NO: 46101 - DNA, 25 bp, Homo sapien
tgccggctccacgcccacagtcttg

SEQ ID NO: 46102 - DNA, 25 bp, Homo sapien
caccacgacacctttgccgtcggct

SEQ ID NO: 46103 - DNA, 25 bp, Homo sapien
tccgcttaatgaccaccacgacacc

SEQ ID NO: 46104 - DNA, 25 bp, Homo sapien
gccggatctccgcttaatgaccacc

SEQ ID NO: 46105 - DNA, 25 bp, Homo sapien
ttccgctggccggatctccgcttaa

SEQ ID NO: 46106 - DNA, 25 bp, Homo sapien
cctgcggatggctgccatgcgcagg

SEQ ID NO: 46107 - DNA, 25 bp, Homo sapien
tccgcttaatgaccaccacgacacc

SEQ ID NO: 46108 - DNA, 25 bp, Homo sapien
gccggatctccgcttaatgaccacc

SEQ ID NO: 46109 - DNA, 25 bp, Homo sapien
ttccgctggccggatctccgcttaa

SEQ ID NO: 46110 - DNA, 25 bp, Homo sapien
cctgcggatggctgccatgcgcagg

SEQ ID NO: 46111 - DNA, 25 bp, Homo sapien
gagcagttccgcacgaccatccatt

SEQ ID NO: 46112 - DNA, 25 bp, Homo sapien
aggaattgcgggccttcaagttatt

SEQ ID NO: 46113 - DNA, 25 bp, Homo sapien
cagtccgttgtagcggaaggaattg

SEQ ID NO: 46114 - DNA, 25 bp, Homo sapien
ggtgaatcagtccgttgtagcggaa

SEQ ID NO: 46115 - DNA, 25 bp, Homo sapien
cacgcccacagtcttgcggtgaatc

SEQ ID NO: 46116 - DNA, 25 bp, Homo sapien
tgccggctccacgcccacagtcttg

SEQ ID NO: 46117 - DNA, 25 bp, Homo sapien
caccacgacacctttgccgtcggct

SEQ ID NO: 46118 - DNA, 25 bp, Homo sapien
tccgcttaatgaccaccacgacacc

SEQ ID NO: 46119 - DNA, 25 bp, Homo sapien
gccggatctccgcttaatgaccacc

SEQ ID NO: 46120 - DNA, 25 bp, Homo sapien
gagcagttccgcacgaccatccatt

SEQ ID NO: 46121 - DNA, 25 bp, Homo sapien
cagtccgttgtagcggaaggaattg

SEQ ID NO: 46122 - DNA, 25 bp, Homo sapien
cctgcggatggctgccatgcgcagg

SEQ ID NO: 46123 - DNA, 25 bp, Homo sapien
cacgcccacagtcttgcggtgaatc

SEQ ID NO: 46124 - DNA, 25 bp, Homo sapien
tgccggctccacgcccacagtcttg

SEQ ID NO: 46125 - DNA, 25 bp, Homo sapien
caccacgacacctttgccgtcggct

SEQ ID NO: 46126 - DNA, 25 bp, Homo sapien
aggaattgcgggccttcaagttatt

SEQ ID NO: 46127 - DNA, 25 bp, Homo sapien
ggtgaatcagtccgttgtagcggaa

SEQ ID NO: 46128 - DNA, 25 bp, Homo sapien
ttccgctggccggatctccgcttaa

SEQ ID NO: 46129 - DNA, 25 bp, Homo sapien
tccgcttaatgaccaccacgacacc

SEQ ID NO: 46130 - DNA, 25 bp, Homo sapien
gccggatctccgcttaatgaccacc

SEQ ID NO: 46131 - DNA, 25 bp, Homo sapien
ttccgctggccggatctccgcttaa

SEQ ID NO: 46132 - DNA, 25 bp, Homo sapien
cctgcggatggctgccatgcgcagg

SEQ ID NO: 46133 - DNA, 25 bp, Homo sapien
gagcagttccgcacgaccatccatt

SEQ ID NO: 46134 - DNA, 25 bp, Homo sapien
aggaattgcgggccttcaagttatt

SEQ ID NO: 46135 - DNA, 25 bp, Homo sapien
cagtccgttgtagcggaaggaattg

SEQ ID NO: 46136 - DNA, 25 bp, Homo sapien
ggtgaatcagtccgttgtagcggaa

SEQ ID NO: 46137 - DNA, 25 bp, Homo sapien
cacgcccacagtcttgcggtgaatc

SEQ ID NO: 46138 - DNA, 25 bp, Homo sapien
tgccggctccacgcccacagtcttg

SEQ ID NO: 46139 - DNA, 25 bp, Homo sapien
caccacgacacctttgccgtcggct

SEQ ID NO: 46140 - DNA, 25 bp, Homo sapien
ttccgctggccggatctccgcttaa

SEQ ID NO: 46141 - DNA, 25 bp, Homo sapien
cacgcccacagtcttgcggtgaatc

SEQ ID NO: 46142 - DNA, 25 bp, Homo sapien
cctgcggatggctgccatgcgcagg

SEQ ID NO: 46143 - DNA, 25 bp, Homo sapien
cagtccgttgtagcggaaggaattg

SEQ ID NO: 46144 - DNA, 25 bp, Homo sapien
caccacgacacctttgccgtcggct

SEQ ID NO: 46145 - DNA, 25 bp, Homo sapien
tccgcttaatgaccaccacgacacc

SEQ ID NO: 46146 - DNA, 25 bp, Homo sapien
gccggatctccgcttaatgaccacc

SEQ ID NO: 46147 - DNA, 25 bp, Homo sapien
ggtgaatcagtccgttgtagcggaa

SEQ ID NO: 46148 - DNA, 25 bp, Homo sapien
tgccggctccacgcccacagtcttg

SEQ ID NO: 46149 - DNA, 25 bp, Homo sapien
aggaattgcgggccttcaagttatt

SEQ ID NO: 46150 - DNA, 25 bp, Homo sapien
gagcagttccgcacgaccatccatt

SEQ ID NO: 46151 - DNA, 25 bp, Homo sapien
tccgcttaatgaccaccacgacacc

SEQ ID NO: 46152 - DNA, 25 bp, Homo sapien
gccggatctccgcttaatgaccacc

SEQ ID NO: 46153 - DNA, 25 bp, Homo sapien
ttccgctggccggatctccgcttaa

SEQ ID NO: 46154 - DNA, 25 bp, Homo sapien
cctgcggatggctgccatgcgcagg

SEQ ID NO: 46155 - DNA, 25 bp, Homo sapien
gagcagttccgcacgaccatccatt

SEQ ID NO: 46156 - DNA, 25 bp, Homo sapien
aggaattgcgggccttcaagttatt

SEQ ID NO: 46157 - DNA, 25 bp, Homo sapien
cagtccgttgtagcggaaggaattg

SEQ ID NO: 46158 - DNA, 25 bp, Homo sapien
ggtgaatcagtccgttgtagcggaa

SEQ ID NO: 46159 - DNA, 25 bp, Homo sapien
cacgcccacagtcttgcggtgaatc

SEQ ID NO: 46160 - DNA, 25 bp, Homo sapien
tgccggctccacgcccacagtcttg

SEQ ID NO: 46161 - DNA, 25 bp, Homo sapien
caccacgacacctttgccgtcggct

SEQ ID NO: 46162 - DNA, 25 bp, Homo sapien
ttccgctggccggatctccgcttaa

SEQ ID NO: 46163 - DNA, 25 bp, Homo sapien
aggaattgcgggccttcaagttatt

SEQ ID NO: 46164 - DNA, 25 bp, Homo sapien
cacgcccacagtcttgcggtgaatc

SEQ ID NO: 46165 - DNA, 25 bp, Homo sapien
tccgcttaatgaccaccacgacacc

SEQ ID NO: 46166 - DNA, 25 bp, Homo sapien
cctgcggatggctgccatgcgcagg

SEQ ID NO: 46167 - DNA, 25 bp, Homo sapien
cagtccgttgtagcggaaggaattg

SEQ ID NO: 46168 - DNA, 25 bp, Homo sapien
caccacgacacctttgccgtcggct

SEQ ID NO: 46169 - DNA, 25 bp, Homo sapien
ggtgaatcagtccgttgtagcggaa

SEQ ID NO: 46170 - DNA, 25 bp, Homo sapien
gagcagttccgcacgaccatccatt

SEQ ID NO: 46171 - DNA, 25 bp, Homo sapien
gccggatctccgcttaatgaccacc

SEQ ID NO: 46172 - DNA, 25 bp, Homo sapien
tgccggctccacgcccacagtcttg

SEQ ID NO: 46173 - DNA, 25 bp, Homo sapien
tccgcttaatgaccaccacgacacc

SEQ ID NO: 46174 - DNA, 25 bp, Homo sapien
gccggatctccgcttaatgaccacc

SEQ ID NO: 46175 - DNA, 25 bp, Homo sapien
ttccgctggccggatctccgcttaa

SEQ ID NO: 46176 - DNA, 25 bp, Homo sapien
cctgcggatggctgccatgcgcagg

SEQ ID NO: 46177 - DNA, 25 bp, Homo sapien
gagcagttccgcacgaccatccatt

SEQ ID NO: 46178 - DNA, 25 bp, Homo sapien
aggaattgcgggccttcaagttatt

SEQ ID NO: 46179 - DNA, 25 bp, Homo sapien
cagtccgttgtagcggaaggaattg

SEQ ID NO: 46180 - DNA, 25 bp, Homo sapien
ggtgaatcagtccgttgtagcggaa

SEQ ID NO: 46181 - DNA, 25 bp, Homo sapien
cacgcccacagtcttgcggtgaatc

SEQ ID NO: 46182 - DNA, 25 bp, Homo sapien
tgccggctccacgcccacagtcttg

SEQ ID NO: 46183 - DNA, 25 bp, Homo sapien
caccacgacacctttgccgtcggct

SEQ ID NO: 46184 - DNA, 25 bp, Homo sapien
tccgcttaatgaccaccacgacacc

SEQ ID NO: 46185 - DNA, 25 bp, Homo sapien
cagtccgttgtagcggaaggaattg

SEQ ID NO: 46186 - DNA, 25 bp, Homo sapien
ggtgaatcagtccgttgtagcggaa

SEQ ID NO: 46187 - DNA, 25 bp, Homo sapien
gccggatctccgcttaatgaccacc

SEQ ID NO: 46188 - DNA, 25 bp, Homo sapien
tgccggctccacgcccacagtcttg

SEQ ID NO: 46189 - DNA, 25 bp, Homo sapien
aggaattgcgggccttcaagttatt

SEQ ID NO: 46190 - DNA, 25 bp, Homo sapien
cctgcggatggctgccatgcgcagg

SEQ ID NO: 46191 - DNA, 25 bp, Homo sapien
cacgcccacagtcttgcggtgaatc

SEQ ID NO: 46192 - DNA, 25 bp, Homo sapien
ttccgctggccggatctccgcttaa

SEQ ID NO: 46193 - DNA, 25 bp, Homo sapien
caccacgacacctttgccgtcggct

SEQ ID NO: 46194 - DNA, 25 bp, Homo sapien
gagcagttccgcacgaccatccatt

SEQ ID NO: 46195 - DNA, 25 bp, Homo sapien
tccgcttaatgaccaccacgacacc

SEQ ID NO: 46196 - DNA, 25 bp, Homo sapien
gccggatctccgcttaatgaccacc

SEQ ID NO: 46197 - DNA, 25 bp, Homo sapien
ttccgctggccggatctccgcttaa

SEQ ID NO: 46198 - DNA, 25 bp, Homo sapien
cctgcggatggctgccatgcgcagg

SEQ ID NO: 46199 - DNA, 25 bp, Homo sapien
gagcagttccgcacgaccatccatt

SEQ ID NO: 46200 - DNA, 25 bp, Homo sapien
aggaattgcgggccttcaagttatt

SEQ ID NO: 46201 - DNA, 25 bp, Homo sapien
cagtccgttgtagcggaaggaattg

SEQ ID NO: 46202 - DNA, 25 bp, Homo sapien
ggtgaatcagtccgttgtagcggaa

SEQ ID NO: 46203 - DNA, 25 bp, Homo sapien
cacgcccacagtcttgcggtgaatc

SEQ ID NO: 46204 - DNA, 25 bp, Homo sapien
tgccggctccacgcccacagtcttg

SEQ ID NO: 46205 - DNA, 25 bp, Homo sapien
caccacgacacctttgccgtcggct

SEQ ID NO: 46206 - DNA, 25 bp, Homo sapien
cctgcggatggctgccatgcgcagg

SEQ ID NO: 46207 - DNA, 25 bp, Homo sapien
tccgcttaatgaccaccacgacacc

SEQ ID NO: 46208 - DNA, 25 bp, Homo sapien
ttccgctggccggatctccgcttaa

SEQ ID NO: 46209 - DNA, 25 bp, Homo sapien
aggaattgcgggccttcaagttatt

SEQ ID NO: 46210 - DNA, 25 bp, Homo sapien
gccggatctccgcttaatgaccacc

SEQ ID NO: 46211 - DNA, 25 bp, Homo sapien
ggtgaatcagtccgttgtagcggaa

SEQ ID NO: 46212 - DNA, 25 bp, Homo sapien
caccacgacacctttgccgtcggct

SEQ ID NO: 46213 - DNA, 25 bp, Homo sapien
cagtccgttgtagcggaaggaattg

SEQ ID NO: 46214 - DNA, 25 bp, Homo sapien
cacgcccacagtcttgcggtgaatc

SEQ ID NO: 46215 - DNA, 25 bp, Homo sapien
gagcagttccgcacgaccatccatt

SEQ ID NO: 46216 - DNA, 25 bp, Homo sapien
tgccggctccacgcccacagtcttg

SEQ ID NO: 46217 - DNA, 25 bp, Homo sapien
gagcagttccgcacgaccatccatt

SEQ ID NO: 46218 - DNA, 25 bp, Homo sapien
ggtgaatcagtccgttgtagcggaa

SEQ ID NO: 46219 - DNA, 25 bp, Homo sapien
cctgcggatggctgccatgcgcagg

SEQ ID NO: 46220 - DNA, 25 bp, Homo sapien
tccgcttaatgaccaccacgacacc

SEQ ID NO: 46221 - DNA, 25 bp, Homo sapien
caccacgacacctttgccgtcggct

SEQ ID NO: 46222 - DNA, 25 bp, Homo sapien
tgccggctccacgcccacagtcttg

SEQ ID NO: 46223 - DNA, 25 bp, Homo sapien
cacgcccacagtcttgcggtgaatc

SEQ ID NO: 46224 - DNA, 25 bp, Homo sapien
cagtccgttgtagcggaaggaattg

SEQ ID NO: 46225 - DNA, 25 bp, Homo sapien
gccggatctccgcttaatgaccacc

SEQ ID NO: 46226 - DNA, 25 bp, Homo sapien
aggaattgcgggccttcaagttatt

SEQ ID NO: 46227 - DNA, 25 bp, Homo sapien
ttccgctggccggatctccgcttaa

SEQ ID NO: 46228 - DNA, 25 bp, Homo sapien
tccgcttaatgaccaccacgacacc

SEQ ID NO: 46229 - DNA, 25 bp, Homo sapien
gccggatctccgcttaatgaccacc

SEQ ID NO: 46230 - DNA, 25 bp, Homo sapien
ttccgctggccggatctccgcttaa

SEQ ID NO: 46231 - DNA, 25 bp, Homo sapien
cctgcggatggctgccatgcgcagg

SEQ ID NO: 46232 - DNA, 25 bp, Homo sapien
gagcagttccgcacgaccatccatt

SEQ ID NO: 46233 - DNA, 25 bp, Homo sapien
aggaattgcgggccttcaagttatt

SEQ ID NO: 46234 - DNA, 25 bp, Homo sapien
cagtccgttgtagcggaaggaattg

SEQ ID NO: 46235 - DNA, 25 bp, Homo sapien
ggtgaatcagtccgttgtagcggaa

SEQ ID NO: 46236 - DNA, 25 bp, Homo sapien
cacgcccacagtcttgcggtgaatc

SEQ ID NO: 46237 - DNA, 25 bp, Homo sapien
tgccggctccacgcccacagtcttg

SEQ ID NO: 46238 - DNA, 25 bp, Homo sapien
caccacgacacctttgccgtcggct

SEQ ID NO: 46239 - DNA, 25 bp, Homo sapien
caccacgacacctttgccgtcggct

SEQ ID NO: 46240 - DNA, 25 bp, Homo sapien
tccgcttaatgaccaccacgacacc

SEQ ID NO: 46241 - DNA, 25 bp, Homo sapien
ttccgctggccggatctccgcttaa

SEQ ID NO: 46242 - DNA, 25 bp, Homo sapien
tgccggctccacgcccacagtcttg

SEQ ID NO: 46243 - DNA, 25 bp, Homo sapien
aggaattgcgggccttcaagttatt

SEQ ID NO: 46244 - DNA, 25 bp, Homo sapien
cacgcccacagtcttgcggtgaatc

SEQ ID NO: 46245 - DNA, 25 bp, Homo sapien
cagtccgttgtagcggaaggaattg

SEQ ID NO: 46246 - DNA, 25 bp, Homo sapien
gagcagttccgcacgaccatccatt

SEQ ID NO: 46247 - DNA, 25 bp, Homo sapien
cctgcggatggctgccatgcgcagg

SEQ ID NO: 46248 - DNA, 25 bp, Homo sapien
ggtgaatcagtccgttgtagcggaa

SEQ ID NO: 46249 - DNA, 25 bp, Homo sapien
gccggatctccgcttaatgaccacc

SEQ ID NO: 46250 - DNA, 25 bp, Homo sapien
gagcagttccgcacgaccatccatt

SEQ ID NO: 46251 - DNA, 25 bp, Homo sapien
aggaattgcgggccttcaagttatt

SEQ ID NO: 46252 - DNA, 25 bp, Homo sapien
cagtccgttgtagcggaaggaattg

SEQ ID NO: 46253 - DNA, 25 bp, Homo sapien
ggtgaatcagtccgttgtagcggaa

SEQ ID NO: 46254 - DNA, 25 bp, Homo sapien
cacgcccacagtcttgcggtgaatc

SEQ ID NO: 46255 - DNA, 25 bp, Homo sapien
tgccggctccacgcccacagtcttg

SEQ ID NO: 46256 - DNA, 25 bp, Homo sapien
caccacgacacctttgccgtcggct

SEQ ID NO: 46257 - DNA, 25 bp, Homo sapien
tccgcttaatgaccaccacgacacc

SEQ ID NO: 46258 - DNA, 25 bp, Homo sapien
gccggatctccgcttaatgaccacc

SEQ ID NO: 46259 - DNA, 25 bp, Homo sapien
ttccgctggccggatctccgcttaa

SEQ ID NO: 46260 - DNA, 25 bp, Homo sapien
cctgcggatggctgccatgcgcagg

SEQ ID NO: 46261 - DNA, 25 bp, Homo sapien
aggaattgcgggccttcaagttatt

SEQ ID NO: 46262 - DNA, 25 bp, Homo sapien
tccgcttaatgaccaccacgacacc

SEQ ID NO: 46263 - DNA, 25 bp, Homo sapien
cacgcccacagtcttgcggtgaatc

SEQ ID NO: 46264 - DNA, 25 bp, Homo sapien
cagtccgttgtagcggaaggaattg

SEQ ID NO: 46265 - DNA, 25 bp, Homo sapien
gagcagttccgcacgaccatccatt

SEQ ID NO: 46266 - DNA, 25 bp, Homo sapien
tgccggctccacgcccacagtcttg

SEQ ID NO: 46267 - DNA, 25 bp, Homo sapien
cctgcggatggctgccatgcgcagg

SEQ ID NO: 46268 - DNA, 25 bp, Homo sapien
ttccgctggccggatctccgcttaa

SEQ ID NO: 46269 - DNA, 25 bp, Homo sapien
ggtgaatcagtccgttgtagcggaa

SEQ ID NO: 46270 - DNA, 25 bp, Homo sapien
caccacgacacctttgccgtcggct

SEQ ID NO: 46271 - DNA, 25 bp, Homo sapien
gccggatctccgcttaatgaccacc

SEQ ID NO: 46272 - DNA, 25 bp, Homo sapien
tccgcttaatgaccaccacgacacc

SEQ ID NO: 46273 - DNA, 25 bp, Homo sapien
gccggatctccgcttaatgaccacc

SEQ ID NO: 46274 - DNA, 25 bp, Homo sapien
ttccgctggccggatctccgcttaa

SEQ ID NO: 46275 - DNA, 25 bp, Homo sapien
cctgcggatggctgccatgcgcagg

SEQ ID NO: 46276 - DNA, 25 bp, Homo sapien
gagcagttccgcacgaccatccatt

SEQ ID NO: 46277 - DNA, 25 bp, Homo sapien
aggaattgcgggccttcaagttatt

SEQ ID NO: 46278 - DNA, 25 bp, Homo sapien
cagtccgttgtagcggaaggaattg

SEQ ID NO: 46279 - DNA, 25 bp, Homo sapien
ggtgaatcagtccgttgtagcggaa

SEQ ID NO: 46280 - DNA, 25 bp, Homo sapien
cacgcccacagtcttgcggtgaatc

SEQ ID NO: 46281 - DNA, 25 bp, Homo sapien
tgccggctccacgcccacagtcttg

SEQ ID NO: 46282 - DNA, 25 bp, Homo sapien
caccacgacacctttgccgtcggct

SEQ ID NO: 46283 - DNA, 25 bp, Homo sapien
cctgcggatggctgccatgcgcagg

SEQ ID NO: 46284 - DNA, 25 bp, Homo sapien
cacgcccacagtcttgcggtgaatc

SEQ ID NO: 46285 - DNA, 25 bp, Homo sapien
gagcagttccgcacgaccatccatt

SEQ ID NO: 46286 - DNA, 25 bp, Homo sapien
caccacgacacctttgccgtcggct

SEQ ID NO: 46287 - DNA, 25 bp, Homo sapien
tgccggctccacgcccacagtcttg

SEQ ID NO: 46288 - DNA, 25 bp, Homo sapien
tccgcttaatgaccaccacgacacc

SEQ ID NO: 46289 - DNA, 25 bp, Homo sapien
cagtccgttgtagcggaaggaattg

SEQ ID NO: 46290 - DNA, 25 bp, Homo sapien
ttccgctggccggatctccgcttaa

SEQ ID NO: 46291 - DNA, 25 bp, Homo sapien
aggaattgcgggccttcaagttatt

SEQ ID NO: 46292 - DNA, 25 bp, Homo sapien
ggtgaatcagtccgttgtagcggaa

SEQ ID NO: 46293 - DNA, 25 bp, Homo sapien
gccggatctccgcttaatgaccacc

SEQ ID NO: 46294 - DNA, 25 bp, Homo sapien
tccgcttaatgaccaccacgacacc

SEQ ID NO: 46295 - DNA, 25 bp, Homo sapien
gccggatctccgcttaatgaccacc

SEQ ID NO: 46296 - DNA, 25 bp, Homo sapien
ttccgctggccggatctccgcttaa

SEQ ID NO: 46297 - DNA, 25 bp, Homo sapien
cctgcggatggctgccatgcgcagg

SEQ ID NO: 46298 - DNA, 25 bp, Homo sapien
gagcagttccgcacgaccatccatt

SEQ ID NO: 46299 - DNA, 25 bp, Homo sapien
aggaattgcgggccttcaagttatt

SEQ ID NO: 46300 - DNA, 25 bp, Homo sapien
cagtccgttgtagcggaaggaattg

SEQ ID NO: 46301 - DNA, 25 bp, Homo sapien
ggtgaatcagtccgttgtagcggaa

SEQ ID NO: 46302 - DNA, 25 bp, Homo sapien
cacgcccacagtcttgcggtgaatc

SEQ ID NO: 46303 - DNA, 25 bp, Homo sapien
tgccggctccacgcccacagtcttg

SEQ ID NO: 46304 - DNA, 25 bp, Homo sapien
caccacgacacctttgccgtcggct

SEQ ID NO: 46305 - DNA, 25 bp, Homo sapien
gagcagttccgcacgaccatccatt

SEQ ID NO: 46306 - DNA, 25 bp, Homo sapien
aggaattgcgggccttcaagttatt

SEQ ID NO: 46307 - DNA, 25 bp, Homo sapien
cagtccgttgtagcggaaggaattg

SEQ ID NO: 46308 - DNA, 25 bp, Homo sapien
ttccgctggccggatctccgcttaa

SEQ ID NO: 46309 - DNA, 25 bp, Homo sapien
tgccggctccacgcccacagtcttg

SEQ ID NO: 46310 - DNA, 25 bp, Homo sapien
caccacgacacctttgccgtcggct

SEQ ID NO: 46311 - DNA, 25 bp, Homo sapien
cctgcggatggctgccatgcgcagg

SEQ ID NO: 46312 - DNA, 25 bp, Homo sapien
cacgcccacagtcttgcggtgaatc

SEQ ID NO: 46313 - DNA, 25 bp, Homo sapien
gccggatctccgcttaatgaccacc

SEQ ID NO: 46314 - DNA, 25 bp, Homo sapien
tccgcttaatgaccaccacgacacc

SEQ ID NO: 46315 - DNA, 25 bp, Homo sapien
ggtgaatcagtccgttgtagcggaa

SEQ ID NO: 46316 - DNA, 25 bp, Homo sapien
tccgcttaatgaccaccacgacacc

SEQ ID NO: 46317 - DNA, 25 bp, Homo sapien
gccggatctccgcttaatgaccacc

SEQ ID NO: 46318 - DNA, 25 bp, Homo sapien
ttccgctggccggatctccgcttaa

SEQ ID NO: 46319 - DNA, 25 bp, Homo sapien
cctgcggatggctgccatgcgcagg

SEQ ID NO: 46320 - DNA, 25 bp, Homo sapien
gagcagttccgcacgaccatccatt

SEQ ID NO: 46321 - DNA, 25 bp, Homo sapien
aggaattgcgggccttcaagttatt

SEQ ID NO: 46322 - DNA, 25 bp, Homo sapien
cagtccgttgtagcggaaggaattg

SEQ ID NO: 46323 - DNA, 25 bp, Homo sapien
ggtgaatcagtccgttgtagcggaa

SEQ ID NO: 46324 - DNA, 25 bp, Homo sapien
cacgcccacagtcttgcggtgaatc

SEQ ID NO: 46325 - DNA, 25 bp, Homo sapien
tgccggctccacgcccacagtcttg

SEQ ID NO: 46326 - DNA, 25 bp, Homo sapien
caccacgacacctttgccgtcggct

SEQ ID NO: 46327 - DNA, 25 bp, Homo sapien
cacgcccacagtcttgcggtgaatc

SEQ ID NO: 46328 - DNA, 25 bp, Homo sapien
aggaattgcgggccttcaagttatt

SEQ ID NO: 46329 - DNA, 25 bp, Homo sapien
gagcagttccgcacgaccatccatt

SEQ ID NO: 46330 - DNA, 25 bp, Homo sapien
tgccggctccacgcccacagtcttg

SEQ ID NO: 46331 - DNA, 25 bp, Homo sapien
tccgcttaatgaccaccacgacacc

SEQ ID NO: 46332 - DNA, 25 bp, Homo sapien
ggtgaatcagtccgttgtagcggaa

SEQ ID NO: 46333 - DNA, 25 bp, Homo sapien
gccggatctccgcttaatgaccacc

SEQ ID NO: 46334 - DNA, 25 bp, Homo sapien
cagtccgttgtagcggaaggaattg

SEQ ID NO: 46335 - DNA, 25 bp, Homo sapien
cctgcggatggctgccatgcgcagg

SEQ ID NO: 46336 - DNA, 25 bp, Homo sapien
ttccgctggccggatctccgcttaa

SEQ ID NO: 46337 - DNA, 25 bp, Homo sapien
caccacgacacctttgccgtcggct

SEQ ID NO: 46338 - DNA, 25 bp, Homo sapien
tccgcttaatgaccaccacgacacc

SEQ ID NO: 46339 - DNA, 25 bp, Homo sapien
gccggatctccgcttaatgaccacc

SEQ ID NO: 46340 - DNA, 25 bp, Homo sapien
ttccgctggccggatctccgcttaa

SEQ ID NO: 46341 - DNA, 25 bp, Homo sapien
cctgcggatggctgccatgcgcagg

SEQ ID NO: 46342 - DNA, 25 bp, Homo sapien
gagcagttccgcacgaccatccatt

SEQ ID NO: 46343 - DNA, 25 bp, Homo sapien
aggaattgcgggccttcaagttatt

SEQ ID NO: 46344 - DNA, 25 bp, Homo sapien
cagtccgttgtagcggaaggaattg

SEQ ID NO: 46345 - DNA, 25 bp, Homo sapien
ggtgaatcagtccgttgtagcggaa

SEQ ID NO: 46346 - DNA, 25 bp, Homo sapien
cacgcccacagtcttgcggtgaatc

SEQ ID NO: 46347 - DNA, 25 bp, Homo sapien
tgccggctccacgcccacagtcttg

SEQ ID NO: 46348 - DNA, 25 bp, Homo sapien
caccacgacacctttgccgtcggct

SEQ ID NO: 46349 - DNA, 25 bp, Homo sapien
tccgcttaatgaccaccacgacacc

SEQ ID NO: 46350 - DNA, 25 bp, Homo sapien
gccggatctccgcttaatgaccacc

SEQ ID NO: 46351 - DNA, 25 bp, Homo sapien
ttccgctggccggatctccgcttaa

SEQ ID NO: 46352 - DNA, 25 bp, Homo sapien
cctgcggatggctgccatgcgcagg

SEQ ID NO: 46353 - DNA, 25 bp, Homo sapien
gagcagttccgcacgaccatccatt

SEQ ID NO: 46354 - DNA, 25 bp, Homo sapien
aggaattgcgggccttcaagttatt

SEQ ID NO: 46355 - DNA, 25 bp, Homo sapien
cagtccgttgtagcggaaggaattg

SEQ ID NO: 46356 - DNA, 25 bp, Homo sapien
ggtgaatcagtccgttgtagcggaa

SEQ ID NO: 46357 - DNA, 25 bp, Homo sapien
cacgcccacagtcttgcggtgaatc

SEQ ID NO: 46358 - DNA, 25 bp, Homo sapien
tgccggctccacgcccacagtcttg

SEQ ID NO: 46359 - DNA, 25 bp, Homo sapien
caccacgacacctttgccgtcggct

SEQ ID NO: 46360 - DNA, 25 bp, Homo sapien
tgccggctccacgcccacagtcttg

SEQ ID NO: 46361 - DNA, 25 bp, Homo sapien
ggtgaatcagtccgttgtagcggaa

SEQ ID NO: 46362 - DNA, 25 bp, Homo sapien
tccgcttaatgaccaccacgacacc

SEQ ID NO: 46363 - DNA, 25 bp, Homo sapien
gagcagttccgcacgaccatccatt

SEQ ID NO: 46364 - DNA, 25 bp, Homo sapien
ttccgctggccggatctccgcttaa

SEQ ID NO: 46365 - DNA, 25 bp, Homo sapien
aggaattgcgggccttcaagttatt

SEQ ID NO: 46366 - DNA, 25 bp, Homo sapien
caccacgacacctttgccgtcggct

SEQ ID NO: 46367 - DNA, 25 bp, Homo sapien
gccggatctccgcttaatgaccacc

SEQ ID NO: 46368 - DNA, 25 bp, Homo sapien
cagtccgttgtagcggaaggaattg

SEQ ID NO: 46369 - DNA, 25 bp, Homo sapien
cctgcggatggctgccatgcgcagg

SEQ ID NO: 46370 - DNA, 25 bp, Homo sapien
cacgcccacagtcttgcggtgaatc

SEQ ID NO: 46371 - DNA, 25 bp, Homo sapien
tccgcttaatgaccaccacgacacc

SEQ ID NO: 46372 - DNA, 25 bp, Homo sapien
gccggatctccgcttaatgaccacc

SEQ ID NO: 46373 - DNA, 25 bp, Homo sapien
ttccgctggccggatctccgcttaa

SEQ ID NO: 46374 - DNA, 25 bp, Homo sapien
cctgcggatggctgccatgcgcagg

SEQ ID NO: 46375 - DNA, 25 bp, Homo sapien
gagcagttccgcacgaccatccatt

SEQ ID NO: 46376 - DNA, 25 bp, Homo sapien
aggaattgcgggccttcaagttatt

SEQ ID NO: 46377 - DNA, 25 bp, Homo sapien
cagtccgttgtagcggaaggaattg

SEQ ID NO: 46378 - DNA, 25 bp, Homo sapien
ggtgaatcagtccgttgtagcggaa

SEQ ID NO: 46379 - DNA, 25 bp, Homo sapien
cacgcccacagtcttgcggtgaatc

SEQ ID NO: 46380 - DNA, 25 bp, Homo sapien
tgccggctccacgcccacagtcttg

SEQ ID NO: 46381 - DNA, 25 bp, Homo sapien
caccacgacacctttgccgtcggct

SEQ ID NO: 46382 - DNA, 25 bp, Homo sapien
gccggatctccgcttaatgaccacc

SEQ ID NO: 46383 - DNA, 25 bp, Homo sapien
tgccggctccacgcccacagtcttg

SEQ ID NO: 46384 - DNA, 25 bp, Homo sapien
cacgcccacagtcttgcggtgaatc

SEQ ID NO: 46385 - DNA, 25 bp, Homo sapien
caccacgacacctttgccgtcggct

SEQ ID NO: 46386 - DNA, 25 bp, Homo sapien
ttccgctggccggatctccgcttaa

SEQ ID NO: 46387 - DNA, 25 bp, Homo sapien
cagtccgttgtagcggaaggaattg

SEQ ID NO: 46388 - DNA, 25 bp, Homo sapien
aggaattgcgggccttcaagttatt

SEQ ID NO: 46389 - DNA, 25 bp, Homo sapien
ggtgaatcagtccgttgtagcggaa

SEQ ID NO: 46390 - DNA, 25 bp, Homo sapien
cctgcggatggctgccatgcgcagg

SEQ ID NO: 46391 - DNA, 25 bp, Homo sapien
gagcagttccgcacgaccatccatt

SEQ ID NO: 46392 - DNA, 25 bp, Homo sapien
tccgcttaatgaccaccacgacacc

SEQ ID NO: 46393 - DNA, 25 bp, Homo sapien
tccgcttaatgaccaccacgacacc

SEQ ID NO: 46394 - DNA, 25 bp, Homo sapien
gccggatctccgcttaatgaccacc

SEQ ID NO: 46395 - DNA, 25 bp, Homo sapien
ttccgctggccggatctccgcttaa

SEQ ID NO: 46396 - DNA, 25 bp, Homo sapien
cctgcggatggctgccatgcgcagg

SEQ ID NO: 46397 - DNA, 25 bp, Homo sapien
gagcagttccgcacgaccatccatt

SEQ ID NO: 46398 - DNA, 25 bp, Homo sapien
aggaattgcgggccttcaagttatt

SEQ ID NO: 46399 - DNA, 25 bp, Homo sapien
cagtccgttgtagcggaaggaattg

SEQ ID NO: 46400 - DNA, 25 bp, Homo sapien
ggtgaatcagtccgttgtagcggaa

SEQ ID NO: 46401 - DNA, 25 bp, Homo sapien
cacgcccacagtcttgcggtgaatc

SEQ ID NO: 46402 - DNA, 25 bp, Homo sapien
tgccggctccacgcccacagtcttg

SEQ ID NO: 46403 - DNA, 25 bp, Homo sapien
caccacgacacctttgccgtcggct

SEQ ID NO: 46404 - DNA, 25 bp, Homo sapien
tccgcttaatgaccaccacgacacc

SEQ ID NO: 46405 - DNA, 25 bp, Homo sapien
caccacgacacctttgccgtcggct

SEQ ID NO: 46406 - DNA, 25 bp, Homo sapien
aggaattgcgggccttcaagttatt

SEQ ID NO: 46407 - DNA, 25 bp, Homo sapien
tgccggctccacgcccacagtcttg

SEQ ID NO: 46408 - DNA, 25 bp, Homo sapien
cctgcggatggctgccatgcgcagg

SEQ ID NO: 46409 - DNA, 25 bp, Homo sapien
ttccgctggccggatctccgcttaa

SEQ ID NO: 46410 - DNA, 25 bp, Homo sapien
gagcagttccgcacgaccatccatt

SEQ ID NO: 46411 - DNA, 25 bp, Homo sapien
cacgcccacagtcttgcggtgaatc

SEQ ID NO: 46412 - DNA, 25 bp, Homo sapien
cagtccgttgtagcggaaggaattg

SEQ ID NO: 46413 - DNA, 25 bp, Homo sapien
ggtgaatcagtccgttgtagcggaa

SEQ ID NO: 46414 - DNA, 25 bp, Homo sapien
gccggatctccgcttaatgaccacc

SEQ ID NO: 46415 - DNA, 25 bp, Homo sapien
tccgcttaatgaccaccacgacacc

SEQ ID NO: 46416 - DNA, 25 bp, Homo sapien
gccggatctccgcttaatgaccacc

SEQ ID NO: 46417 - DNA, 25 bp, Homo sapien
ttccgctggccggatctccgcttaa

SEQ ID NO: 46418 - DNA, 25 bp, Homo sapien
cctgcggatggctgccatgcgcagg

SEQ ID NO: 46419 - DNA, 25 bp, Homo sapien
gagcagttccgcacgaccatccatt

SEQ ID NO: 46420 - DNA, 25 bp, Homo sapien
aggaattgcgggccttcaagttatt

SEQ ID NO: 46421 - DNA, 25 bp, Homo sapien
cagtccgttgtagcggaaggaattg

SEQ ID NO: 46422 - DNA, 25 bp, Homo sapien
ggtgaatcagtccgttgtagcggaa

SEQ ID NO: 46423 - DNA, 25 bp, Homo sapien
cacgcccacagtcttgcggtgaatc

SEQ ID NO: 46424 - DNA, 25 bp, Homo sapien
tgccggctccacgcccacagtcttg

SEQ ID NO: 46425 - DNA, 25 bp, Homo sapien
caccacgacacctttgccgtcggct

SEQ ID NO: 46426 - DNA, 25 bp, Homo sapien
tgccggctccacgcccacagtcttg

SEQ ID NO: 46427 - DNA, 25 bp, Homo sapien
gagcagttccgcacgaccatccatt

SEQ ID NO: 46428 - DNA, 25 bp, Homo sapien
aggaattgcgggccttcaagttatt

SEQ ID NO: 46429 - DNA, 25 bp, Homo sapien
tccgcttaatgaccaccacgacacc

SEQ ID NO: 46430 - DNA, 25 bp, Homo sapien
caccacgacacctttgccgtcggct

SEQ ID NO: 46431 - DNA, 25 bp, Homo sapien
cacgcccacagtcttgcggtgaatc

SEQ ID NO: 46432 - DNA, 25 bp, Homo sapien
ggtgaatcagtccgttgtagcggaa

SEQ ID NO: 46433 - DNA, 25 bp, Homo sapien
ttccgctggccggatctccgcttaa

SEQ ID NO: 46434 - DNA, 25 bp, Homo sapien
cctgcggatggctgccatgcgcagg

SEQ ID NO: 46435 - DNA, 25 bp, Homo sapien
cagtccgttgtagcggaaggaattg

SEQ ID NO: 46436 - DNA, 25 bp, Homo sapien
gccggatctccgcttaatgaccacc

SEQ ID NO: 46437 - DNA, 25 bp, Homo sapien
tccgcttaatgaccaccacgacacc

SEQ ID NO: 46438 - DNA, 25 bp, Homo sapien
gccggatctccgcttaatgaccacc

SEQ ID NO: 46439 - DNA, 25 bp, Homo sapien
ttccgctggccggatctccgcttaa

SEQ ID NO: 46440 - DNA, 25 bp, Homo sapien
cctgcggatggctgccatgcgcagg

SEQ ID NO: 46441 - DNA, 25 bp, Homo sapien
gagcagttccgcacgaccatccatt

SEQ ID NO: 46442 - DNA, 25 bp, Homo sapien
aggaattgcgggccttcaagttatt

SEQ ID NO: 46443 - DNA, 25 bp, Homo sapien
cagtccgttgtagcggaaggaattg

SEQ ID NO: 46444 - DNA, 25 bp, Homo sapien
ggtgaatcagtccgttgtagcggaa

SEQ ID NO: 46445 - DNA, 25 bp, Homo sapien
cacgcccacagtcttgcggtgaatc

SEQ ID NO: 46446 - DNA, 25 bp, Homo sapien
tgccggctccacgcccacagtcttg

SEQ ID NO: 46447 - DNA, 25 bp, Homo sapien
caccacgacacctttgccgtcggct

SEQ ID NO: 46448 - DNA, 25 bp, Homo sapien
cagtccgttgtagcggaaggaattg

SEQ ID NO: 46449 - DNA, 25 bp, Homo sapien
cacgcccacagtcttgcggtgaatc

SEQ ID NO: 46450 - DNA, 25 bp, Homo sapien
ttccgctggccggatctccgcttaa

SEQ ID NO: 46451 - DNA, 25 bp, Homo sapien
cctgcggatggctgccatgcgcagg

SEQ ID NO: 46452 - DNA, 25 bp, Homo sapien
caccacgacacctttgccgtcggct

SEQ ID NO: 46453 - DNA, 25 bp, Homo sapien
ggtgaatcagtccgttgtagcggaa

SEQ ID NO: 46454 - DNA, 25 bp, Homo sapien
gccggatctccgcttaatgaccacc

SEQ ID NO: 46455 - DNA, 25 bp, Homo sapien
tccgcttaatgaccaccacgacacc

SEQ ID NO: 46456 - DNA, 25 bp, Homo sapien
aggaattgcgggccttcaagttatt

SEQ ID NO: 46457 - DNA, 25 bp, Homo sapien
tgccggctccacgcccacagtcttg

SEQ ID NO: 46458 - DNA, 25 bp, Homo sapien
gagcagttccgcacgaccatccatt

SEQ ID NO: 46459 - DNA, 25 bp, Homo sapien
cagtccgttgtagcggaaggaattg

SEQ ID NO: 46460 - DNA, 25 bp, Homo sapien
cacgcccacagtcttgcggtgaatc

SEQ ID NO: 46461 - DNA, 25 bp, Homo sapien
caccacgacacctttgccgtcggct

SEQ ID NO: 46462 - DNA, 25 bp, Homo sapien
tccgcttaatgaccaccacgacacc

SEQ ID NO: 46463 - DNA, 25 bp, Homo sapien
gccggatctccgcttaatgaccacc

SEQ ID NO: 46464 - DNA, 25 bp, Homo sapien
tgccggctccacgcccacagtcttg

SEQ ID NO: 46465 - DNA, 25 bp, Homo sapien
ttccgctggccggatctccgcttaa

SEQ ID NO: 46466 - DNA, 25 bp, Homo sapien
ggtgaatcagtccgttgtagcggaa

SEQ ID NO: 46467 - DNA, 25 bp, Homo sapien
cctgcggatggctgccatgcgcagg

SEQ ID NO: 46468 - DNA, 25 bp, Homo sapien
aggaattgcgggccttcaagttatt

SEQ ID NO: 46469 - DNA, 25 bp, Homo sapien
gagcagttccgcacgaccatccatt

SEQ ID NO: 46470 - DNA, 25 bp, Homo sapien
tccgcttaatgaccaccacgacacc

SEQ ID NO: 46471 - DNA, 25 bp, Homo sapien
gccggatctccgcttaatgaccacc

SEQ ID NO: 46472 - DNA, 25 bp, Homo sapien
ttccgctggccggatctccgcttaa

SEQ ID NO: 46473 - DNA, 25 bp, Homo sapien
cctgcggatggctgccatgcgcagg

SEQ ID NO: 46474 - DNA, 25 bp, Homo sapien
gagcagttccgcacgaccatccatt

SEQ ID NO: 46475 - DNA, 25 bp, Homo sapien
aggaattgcgggccttcaagttatt

SEQ ID NO: 46476 - DNA, 25 bp, Homo sapien
cagtccgttgtagcggaaggaattg

SEQ ID NO: 46477 - DNA, 25 bp, Homo sapien
ggtgaatcagtccgttgtagcggaa

SEQ ID NO: 46478 - DNA, 25 bp, Homo sapien
cacgcccacagtcttgcggtgaatc

SEQ ID NO: 46479 - DNA, 25 bp, Homo sapien
tgccggctccacgcccacagtcttg

SEQ ID NO: 46480 - DNA, 25 bp, Homo sapien
caccacgacacctttgccgtcggct

SEQ ID NO: 46481 - DNA, 25 bp, Homo sapien
gagcagttccgcacgaccatccatt

SEQ ID NO: 46482 - DNA, 25 bp, Homo sapien
cacgcccacagtcttgcggtgaatc

SEQ ID NO: 46483 - DNA, 25 bp, Homo sapien
tgccggctccacgcccacagtcttg

SEQ ID NO: 46484 - DNA, 25 bp, Homo sapien
ggtgaatcagtccgttgtagcggaa

SEQ ID NO: 46485 - DNA, 25 bp, Homo sapien
cctgcggatggctgccatgcgcagg

SEQ ID NO: 46486 - DNA, 25 bp, Homo sapien
aggaattgcgggccttcaagttatt

SEQ ID NO: 46487 - DNA, 25 bp, Homo sapien
tccgcttaatgaccaccacgacacc

SEQ ID NO: 46488 - DNA, 25 bp, Homo sapien
cagtccgttgtagcggaaggaattg

SEQ ID NO: 46489 - DNA, 25 bp, Homo sapien
gccggatctccgcttaatgaccacc

SEQ ID NO: 46490 - DNA, 25 bp, Homo sapien
caccacgacacctttgccgtcggct

SEQ ID NO: 46491 - DNA, 25 bp, Homo sapien
ttccgctggccggatctccgcttaa

SEQ ID NO: 46492 - DNA, 25 bp, Homo sapien
tccgcttaatgaccaccacgacacc

SEQ ID NO: 46493 - DNA, 25 bp, Homo sapien
gccggatctccgcttaatgaccacc

SEQ ID NO: 46494 - DNA, 25 bp, Homo sapien
ttccgctggccggatctccgcttaa

SEQ ID NO: 46495 - DNA, 25 bp, Homo sapien
cctgcggatggctgccatgcgcagg

SEQ ID NO: 46496 - DNA, 25 bp, Homo sapien
gagcagttccgcacgaccatccatt

SEQ ID NO: 46497 - DNA, 25 bp, Homo sapien
aggaattgcgggccttcaagttatt

SEQ ID NO: 46498 - DNA, 25 bp, Homo sapien
cagtccgttgtagcggaaggaattg

SEQ ID NO: 46499 - DNA, 25 bp, Homo sapien
ggtgaatcagtccgttgtagcggaa

SEQ ID NO: 46500 - DNA, 25 bp, Homo sapien
cacgcccacagtcttgcggtgaatc

SEQ ID NO: 46501 - DNA, 25 bp, Homo sapien
tgccggctccacgcccacagtcttg

SEQ ID NO: 46502 - DNA, 25 bp, Homo sapien
caccacgacacctttgccgtcggct

SEQ ID NO: 46503 - DNA, 25 bp, Homo sapien
cacgcccacagtcttgcggtgaatc

SEQ ID NO: 46504 - DNA, 25 bp, Homo sapien
ttccgctggccggatctccgcttaa

SEQ ID NO: 46505 - DNA, 25 bp, Homo sapien
aggaattgcgggccttcaagttatt

SEQ ID NO: 46506 - DNA, 25 bp, Homo sapien
cctgcggatggctgccatgcgcagg

SEQ ID NO: 46507 - DNA, 25 bp, Homo sapien
tccgcttaatgaccaccacgacacc

SEQ ID NO: 46508 - DNA, 25 bp, Homo sapien
tgccggctccacgcccacagtcttg

SEQ ID NO: 46509 - DNA, 25 bp, Homo sapien
ggtgaatcagtccgttgtagcggaa

SEQ ID NO: 46510 - DNA, 25 bp, Homo sapien
caccacgacacctttgccgtcggct

SEQ ID NO: 46511 - DNA, 25 bp, Homo sapien
gccggatctccgcttaatgaccacc

SEQ ID NO: 46512 - DNA, 25 bp, Homo sapien
cagtccgttgtagcggaaggaattg

SEQ ID NO: 46513 - DNA, 25 bp, Homo sapien
gagcagttccgcacgaccatccatt

SEQ ID NO: 46514 - DNA, 25 bp, Homo sapien
tccgcttaatgaccaccacgacacc

SEQ ID NO: 46515 - DNA, 25 bp, Homo sapien
gccggatctccgcttaatgaccacc

SEQ ID NO: 46516 - DNA, 25 bp, Homo sapien
ttccgctggccggatctccgcttaa

SEQ ID NO: 46517 - DNA, 25 bp, Homo sapien
cctgcggatggctgccatgcgcagg

SEQ ID NO: 46518 - DNA, 25 bp, Homo sapien
gagcagttccgcacgaccatccatt

SEQ ID NO: 46519 - DNA, 25 bp, Homo sapien
aggaattgcgggccttcaagttatt

SEQ ID NO: 46520 - DNA, 25 bp, Homo sapien
cagtccgttgtagcggaaggaattg

SEQ ID NO: 46521 - DNA, 25 bp, Homo sapien
ggtgaatcagtccgttgtagcggaa

SEQ ID NO: 46522 - DNA, 25 bp, Homo sapien
cacgcccacagtcttgcggtgaatc

SEQ ID NO: 46523 - DNA, 25 bp, Homo sapien
tgccggctccacgcccacagtcttg

SEQ ID NO: 46524 - DNA, 25 bp, Homo sapien
caccacgacacctttgccgtcggct

SEQ ID NO: 46525 - DNA, 25 bp, Homo sapien
tctgcttgagaacttatgatgtaat

SEQ ID NO: 46526 - DNA, 25 bp, Homo sapien
agaggtagaaatacaggcaatatac

SEQ ID NO: 46527 - DNA, 25 bp, Homo sapien
gaaggtccttgcaatagactgcctc

SEQ ID NO: 46528 - DNA, 25 bp, Homo sapien
aaacagcctatgataactggcagca

SEQ ID NO: 46529 - DNA, 25 bp, Homo sapien
ggcagcaaagaaggtccttgcaata

SEQ ID NO: 46530 - DNA, 25 bp, Homo sapien
taaaatctagcacataaagcccatt

SEQ ID NO: 46531 - DNA, 25 bp, Homo sapien
aaagcccattactagaggtagaaat

SEQ ID NO: 46532 - DNA, 25 bp, Homo sapien
gtgcacttgcccaggctcaaggata

SEQ ID NO: 46533 - DNA, 25 bp, Homo sapien
ttttgtgcaagtaaaccatgtttct

SEQ ID NO: 46534 - DNA, 25 bp, Homo sapien
acttcaagggcattaacgatctctc

SEQ ID NO: 46535 - DNA, 25 bp, Homo sapien
caagtattactgagcaaagtgcatt

SEQ ID NO: 46536 - DNA, 25 bp, Homo sapien
tctgcttgagaacttatgatgtaat

SEQ ID NO: 46537 - DNA, 25 bp, Homo sapien
gaaggtccttgcaatagactgcctc

SEQ ID NO: 46538 - DNA, 25 bp, Homo sapien
ggcagcaaagaaggtccttgcaata

SEQ ID NO: 46539 - DNA, 25 bp, Homo sapien
aaacagcctatgataactggcagca

SEQ ID NO: 46540 - DNA, 25 bp, Homo sapien
caagtattactgagcaaagtgcatt

SEQ ID NO: 46541 - DNA, 25 bp, Homo sapien
agaggtagaaatacaggcaatatac

SEQ ID NO: 46542 - DNA, 25 bp, Homo sapien
aaagcccattactagaggtagaaat

SEQ ID NO: 46543 - DNA, 25 bp, Homo sapien
taaaatctagcacataaagcccatt

SEQ ID NO: 46544 - DNA, 25 bp, Homo sapien
gtgcacttgcccaggctcaaggata

SEQ ID NO: 46545 - DNA, 25 bp, Homo sapien
ttttgtgcaagtaaaccatgtttct

SEQ ID NO: 46546 - DNA, 25 bp, Homo sapien
acttcaagggcattaacgatctctc

SEQ ID NO: 46547 - DNA, 25 bp, Homo sapien
aaacagcctatgataactggcagca

SEQ ID NO: 46548 - DNA, 25 bp, Homo sapien
agaggtagaaatacaggcaatatac

SEQ ID NO: 46549 - DNA, 25 bp, Homo sapien
gaaggtccttgcaatagactgcctc

SEQ ID NO: 46550 - DNA, 25 bp, Homo sapien
taaaatctagcacataaagcccatt

SEQ ID NO: 46551 - DNA, 25 bp, Homo sapien
acttcaagggcattaacgatctctc

SEQ ID NO: 46552 - DNA, 25 bp, Homo sapien
ttttgtgcaagtaaaccatgtttct

SEQ ID NO: 46553 - DNA, 25 bp, Homo sapien
gtgcacttgcccaggctcaaggata

SEQ ID NO: 46554 - DNA, 25 bp, Homo sapien
caagtattactgagcaaagtgcatt

SEQ ID NO: 46555 - DNA, 25 bp, Homo sapien
aaagcccattactagaggtagaaat

SEQ ID NO: 46556 - DNA, 25 bp, Homo sapien
tctgcttgagaacttatgatgtaat

SEQ ID NO: 46557 - DNA, 25 bp, Homo sapien
ggcagcaaagaaggtccttgcaata

SEQ ID NO: 46558 - DNA, 25 bp, Homo sapien
tctgcttgagaacttatgatgtaat

SEQ ID NO: 46559 - DNA, 25 bp, Homo sapien
gaaggtccttgcaatagactgcctc

SEQ ID NO: 46560 - DNA, 25 bp, Homo sapien
ggcagcaaagaaggtccttgcaata

SEQ ID NO: 46561 - DNA, 25 bp, Homo sapien
aaacagcctatgataactggcagca

SEQ ID NO: 46562 - DNA, 25 bp, Homo sapien
caagtattactgagcaaagtgcatt

SEQ ID NO: 46563 - DNA, 25 bp, Homo sapien
agaggtagaaatacaggcaatatac

SEQ ID NO: 46564 - DNA, 25 bp, Homo sapien
aaagcccattactagaggtagaaat

SEQ ID NO: 46565 - DNA, 25 bp, Homo sapien
taaaatctagcacataaagcccatt

SEQ ID NO: 46566 - DNA, 25 bp, Homo sapien
gtgcacttgcccaggctcaaggata

SEQ ID NO: 46567 - DNA, 25 bp, Homo sapien
ttttgtgcaagtaaaccatgtttct

SEQ ID NO: 46568 - DNA, 25 bp, Homo sapien
acttcaagggcattaacgatctctc

SEQ ID NO: 46569 - DNA, 25 bp, Homo sapien
tctgcttgagaacttatgatgtaat

SEQ ID NO: 46570 - DNA, 25 bp, Homo sapien
ggcagcaaagaaggtccttgcaata

SEQ ID NO: 46571 - DNA, 25 bp, Homo sapien
taaaatctagcacataaagcccatt

SEQ ID NO: 46572 - DNA, 25 bp, Homo sapien
aaacagcctatgataactggcagca

SEQ ID NO: 46573 - DNA, 25 bp, Homo sapien
agaggtagaaatacaggcaatatac

SEQ ID NO: 46574 - DNA, 25 bp, Homo sapien
gtgcacttgcccaggctcaaggata

SEQ ID NO: 46575 - DNA, 25 bp, Homo sapien
ttttgtgcaagtaaaccatgtttct

SEQ ID NO: 46576 - DNA, 25 bp, Homo sapien
gaaggtccttgcaatagactgcctc

SEQ ID NO: 46577 - DNA, 25 bp, Homo sapien
acttcaagggcattaacgatctctc

SEQ ID NO: 46578 - DNA, 25 bp, Homo sapien
caagtattactgagcaaagtgcatt

SEQ ID NO: 46579 - DNA, 25 bp, Homo sapien
aaagcccattactagaggtagaaat

SEQ ID NO: 46580 - DNA, 25 bp, Homo sapien
tctgcttgagaacttatgatgtaat

SEQ ID NO: 46581 - DNA, 25 bp, Homo sapien
gaaggtccttgcaatagactgcctc

SEQ ID NO: 46582 - DNA, 25 bp, Homo sapien
ggcagcaaagaaggtccttgcaata

SEQ ID NO: 46583 - DNA, 25 bp, Homo sapien
aaacagcctatgataactggcagca

SEQ ID NO: 46584 - DNA, 25 bp, Homo sapien
caagtattactgagcaaagtgcatt

SEQ ID NO: 46585 - DNA, 25 bp, Homo sapien
agaggtagaaatacaggcaatatac

SEQ ID NO: 46586 - DNA, 25 bp, Homo sapien
aaagcccattactagaggtagaaat

SEQ ID NO: 46587 - DNA, 25 bp, Homo sapien
taaaatctagcacataaagcccatt

SEQ ID NO: 46588 - DNA, 25 bp, Homo sapien
gtgcacttgcccaggctcaaggata

SEQ ID NO: 46589 - DNA, 25 bp, Homo sapien
ttttgtgcaagtaaaccatgtttct

SEQ ID NO: 46590 - DNA, 25 bp, Homo sapien
acttcaagggcattaacgatctctc

SEQ ID NO: 46591 - DNA, 25 bp, Homo sapien
tctgcttgagaacttatgatgtaat

SEQ ID NO: 46592 - DNA, 25 bp, Homo sapien
gaaggtccttgcaatagactgcctc

SEQ ID NO: 46593 - DNA, 25 bp, Homo sapien
ggcagcaaagaaggtccttgcaata

SEQ ID NO: 46594 - DNA, 25 bp, Homo sapien
aaacagcctatgataactggcagca

SEQ ID NO: 46595 - DNA, 25 bp, Homo sapien
caagtattactgagcaaagtgcatt

SEQ ID NO: 46596 - DNA, 25 bp, Homo sapien
agaggtagaaatacaggcaatatac

SEQ ID NO: 46597 - DNA, 25 bp, Homo sapien
aaagcccattactagaggtagaaat

SEQ ID NO: 46598 - DNA, 25 bp, Homo sapien
taaaatctagcacataaagcccatt

SEQ ID NO: 46599 - DNA, 25 bp, Homo sapien
gtgcacttgcccaggctcaaggata

SEQ ID NO: 46600 - DNA, 25 bp, Homo sapien
ttttgtgcaagtaaaccatgtttct

SEQ ID NO: 46601 - DNA, 25 bp, Homo sapien
acttcaagggcattaacgatctctc

SEQ ID NO: 46602 - DNA, 25 bp, Homo sapien
aaacagcctatgataactggcagca

SEQ ID NO: 46603 - DNA, 25 bp, Homo sapien
gtgcacttgcccaggctcaaggata

SEQ ID NO: 46604 - DNA, 25 bp, Homo sapien
tctgcttgagaacttatgatgtaat

SEQ ID NO: 46605 - DNA, 25 bp, Homo sapien
caagtattactgagcaaagtgcatt

SEQ ID NO: 46606 - DNA, 25 bp, Homo sapien
agaggtagaaatacaggcaatatac

SEQ ID NO: 46607 - DNA, 25 bp, Homo sapien
aaagcccattactagaggtagaaat

SEQ ID NO: 46608 - DNA, 25 bp, Homo sapien
taaaatctagcacataaagcccatt

SEQ ID NO: 46609 - DNA, 25 bp, Homo sapien
gaaggtccttgcaatagactgcctc

SEQ ID NO: 46610 - DNA, 25 bp, Homo sapien
ttttgtgcaagtaaaccatgtttct

SEQ ID NO: 46611 - DNA, 25 bp, Homo sapien
ggcagcaaagaaggtccttgcaata

SEQ ID NO: 46612 - DNA, 25 bp, Homo sapien
acttcaagggcattaacgatctctc

SEQ ID NO: 46613 - DNA, 25 bp, Homo sapien
tctgcttgagaacttatgatgtaat

SEQ ID NO: 46614 - DNA, 25 bp, Homo sapien
gaaggtccttgcaatagactgcctc

SEQ ID NO: 46615 - DNA, 25 bp, Homo sapien
ggcagcaaagaaggtccttgcaata

SEQ ID NO: 46616 - DNA, 25 bp, Homo sapien
aaacagcctatgataactggcagca

SEQ ID NO: 46617 - DNA, 25 bp, Homo sapien
caagtattactgagcaaagtgcatt

SEQ ID NO: 46618 - DNA, 25 bp, Homo sapien
agaggtagaaatacaggcaatatac

SEQ ID NO: 46619 - DNA, 25 bp, Homo sapien
aaagcccattactagaggtagaaat

SEQ ID NO: 46620 - DNA, 25 bp, Homo sapien
taaaatctagcacataaagcccatt

SEQ ID NO: 46621 - DNA, 25 bp, Homo sapien
gtgcacttgcccaggctcaaggata

SEQ ID NO: 46622 - DNA, 25 bp, Homo sapien
ttttgtgcaagtaaaccatgtttct

SEQ ID NO: 46623 - DNA, 25 bp, Homo sapien
acttcaagggcattaacgatctctc

SEQ ID NO: 46624 - DNA, 25 bp, Homo sapien
acttcaagggcattaacgatctctc

SEQ ID NO: 46625 - DNA, 25 bp, Homo sapien
tctgcttgagaacttatgatgtaat

SEQ ID NO: 46626 - DNA, 25 bp, Homo sapien
ggcagcaaagaaggtccttgcaata

SEQ ID NO: 46627 - DNA, 25 bp, Homo sapien
gtgcacttgcccaggctcaaggata

SEQ ID NO: 46628 - DNA, 25 bp, Homo sapien
taaaatctagcacataaagcccatt

SEQ ID NO: 46629 - DNA, 25 bp, Homo sapien
ttttgtgcaagtaaaccatgtttct

SEQ ID NO: 46630 - DNA, 25 bp, Homo sapien
aaacagcctatgataactggcagca

SEQ ID NO: 46631 - DNA, 25 bp, Homo sapien
aaagcccattactagaggtagaaat

SEQ ID NO: 46632 - DNA, 25 bp, Homo sapien
agaggtagaaatacaggcaatatac

SEQ ID NO: 46633 - DNA, 25 bp, Homo sapien
gaaggtccttgcaatagactgcctc

SEQ ID NO: 46634 - DNA, 25 bp, Homo sapien
caagtattactgagcaaagtgcatt

SEQ ID NO: 46635 - DNA, 25 bp, Homo sapien
tctgcttgagaacttatgatgtaat

SEQ ID NO: 46636 - DNA, 25 bp, Homo sapien
gaaggtccttgcaatagactgcctc

SEQ ID NO: 46637 - DNA, 25 bp, Homo sapien
ggcagcaaagaaggtccttgcaata

SEQ ID NO: 46638 - DNA, 25 bp, Homo sapien
aaacagcctatgataactggcagca

SEQ ID NO: 46639 - DNA, 25 bp, Homo sapien
caagtattactgagcaaagtgcatt

SEQ ID NO: 46640 - DNA, 25 bp, Homo sapien
agaggtagaaatacaggcaatatac

SEQ ID NO: 46641 - DNA, 25 bp, Homo sapien
aaagcccattactagaggtagaaat

SEQ ID NO: 46642 - DNA, 25 bp, Homo sapien
taaaatctagcacataaagcccatt

SEQ ID NO: 46643 - DNA, 25 bp, Homo sapien
gtgcacttgcccaggctcaaggata

SEQ ID NO: 46644 - DNA, 25 bp, Homo sapien
ttttgtgcaagtaaaccatgtttct

SEQ ID NO: 46645 - DNA, 25 bp, Homo sapien
acttcaagggcattaacgatctctc

SEQ ID NO: 46646 - DNA, 25 bp, Homo sapien
ggcagcaaagaaggtccttgcaata

SEQ ID NO: 46647 - DNA, 25 bp, Homo sapien
gaaggtccttgcaatagactgcctc

SEQ ID NO: 46648 - DNA, 25 bp, Homo sapien
caagtattactgagcaaagtgcatt

SEQ ID NO: 46649 - DNA, 25 bp, Homo sapien
ttttgtgcaagtaaaccatgtttct

SEQ ID NO: 46650 - DNA, 25 bp, Homo sapien
gtgcacttgcccaggctcaaggata

SEQ ID NO: 46651 - DNA, 25 bp, Homo sapien
tctgcttgagaacttatgatgtaat

SEQ ID NO: 46652 - DNA, 25 bp, Homo sapien
acttcaagggcattaacgatctctc

SEQ ID NO: 46653 - DNA, 25 bp, Homo sapien
aaagcccattactagaggtagaaat

SEQ ID NO: 46654 - DNA, 25 bp, Homo sapien
aaacagcctatgataactggcagca

SEQ ID NO: 46655 - DNA, 25 bp, Homo sapien
taaaatctagcacataaagcccatt

SEQ ID NO: 46656 - DNA, 25 bp, Homo sapien
agaggtagaaatacaggcaatatac

SEQ ID NO: 46657 - DNA, 25 bp, Homo sapien
tctgcttgagaacttatgatgtaat

SEQ ID NO: 46658 - DNA, 25 bp, Homo sapien
gaaggtccttgcaatagactgcctc

SEQ ID NO: 46659 - DNA, 25 bp, Homo sapien
ggcagcaaagaaggtccttgcaata

SEQ ID NO: 46660 - DNA, 25 bp, Homo sapien
aaacagcctatgataactggcagca

SEQ ID NO: 46661 - DNA, 25 bp, Homo sapien
caagtattactgagcaaagtgcatt

SEQ ID NO: 46662 - DNA, 25 bp, Homo sapien
agaggtagaaatacaggcaatatac

SEQ ID NO: 46663 - DNA, 25 bp, Homo sapien
aaagcccattactagaggtagaaat

SEQ ID NO: 46664 - DNA, 25 bp, Homo sapien
taaaatctagcacataaagcccatt

SEQ ID NO: 46665 - DNA, 25 bp, Homo sapien
gtgcacttgcccaggctcaaggata

SEQ ID NO: 46666 - DNA, 25 bp, Homo sapien
ttttgtgcaagtaaaccatgtttct

SEQ ID NO: 46667 - DNA, 25 bp, Homo sapien
acttcaagggcattaacgatctctc

SEQ ID NO: 46668 - DNA, 25 bp, Homo sapien
gtgcacttgcccaggctcaaggata

SEQ ID NO: 46669 - DNA, 25 bp, Homo sapien
aaagcccattactagaggtagaaat

SEQ ID NO: 46670 - DNA, 25 bp, Homo sapien
gaaggtccttgcaatagactgcctc

SEQ ID NO: 46671 - DNA, 25 bp, Homo sapien
ttttgtgcaagtaaaccatgtttct

SEQ ID NO: 46672 - DNA, 25 bp, Homo sapien
acttcaagggcattaacgatctctc

SEQ ID NO: 46673 - DNA, 25 bp, Homo sapien
caagtattactgagcaaagtgcatt

SEQ ID NO: 46674 - DNA, 25 bp, Homo sapien
taaaatctagcacataaagcccatt

SEQ ID NO: 46675 - DNA, 25 bp, Homo sapien
aaacagcctatgataactggcagca

SEQ ID NO: 46676 - DNA, 25 bp, Homo sapien
agaggtagaaatacaggcaatatac

SEQ ID NO: 46677 - DNA, 25 bp, Homo sapien
ggcagcaaagaaggtccttgcaata

SEQ ID NO: 46678 - DNA, 25 bp, Homo sapien
tctgcttgagaacttatgatgtaat

SEQ ID NO: 46679 - DNA, 25 bp, Homo sapien
tctgcttgagaacttatgatgtaat

SEQ ID NO: 46680 - DNA, 25 bp, Homo sapien
gaaggtccttgcaatagactgcctc

SEQ ID NO: 46681 - DNA, 25 bp, Homo sapien
ggcagcaaagaaggtccttgcaata

SEQ ID NO: 46682 - DNA, 25 bp, Homo sapien
aaacagcctatgataactggcagca

SEQ ID NO: 46683 - DNA, 25 bp, Homo sapien
caagtattactgagcaaagtgcatt

SEQ ID NO: 46684 - DNA, 25 bp, Homo sapien
agaggtagaaatacaggcaatatac

SEQ ID NO: 46685 - DNA, 25 bp, Homo sapien
aaagcccattactagaggtagaaat

SEQ ID NO: 46686 - DNA, 25 bp, Homo sapien
taaaatctagcacataaagcccatt

SEQ ID NO: 46687 - DNA, 25 bp, Homo sapien
gtgcacttgcccaggctcaaggata

SEQ ID NO: 46688 - DNA, 25 bp, Homo sapien
ttttgtgcaagtaaaccatgtttct

SEQ ID NO: 46689 - DNA, 25 bp, Homo sapien
acttcaagggcattaacgatctctc

SEQ ID NO: 46690 - DNA, 25 bp, Homo sapien
aaagcccattactagaggtagaaat

SEQ ID NO: 46691 - DNA, 25 bp, Homo sapien
acttcaagggcattaacgatctctc

SEQ ID NO: 46692 - DNA, 25 bp, Homo sapien
gtgcacttgcccaggctcaaggata

SEQ ID NO: 46693 - DNA, 25 bp, Homo sapien
caagtattactgagcaaagtgcatt

SEQ ID NO: 46694 - DNA, 25 bp, Homo sapien
tctgcttgagaacttatgatgtaat

SEQ ID NO: 46695 - DNA, 25 bp, Homo sapien
taaaatctagcacataaagcccatt

SEQ ID NO: 46696 - DNA, 25 bp, Homo sapien
ggcagcaaagaaggtccttgcaata

SEQ ID NO: 46697 - DNA, 25 bp, Homo sapien
gaaggtccttgcaatagactgcctc

SEQ ID NO: 46698 - DNA, 25 bp, Homo sapien
aaacagcctatgataactggcagca

SEQ ID NO: 46699 - DNA, 25 bp, Homo sapien
ttttgtgcaagtaaaccatgtttct

SEQ ID NO: 46700 - DNA, 25 bp, Homo sapien
agaggtagaaatacaggcaatatac

SEQ ID NO: 46701 - DNA, 25 bp, Homo sapien
ttttgtgcaagtaaaccatgtttct

SEQ ID NO: 46702 - DNA, 25 bp, Homo sapien
gtgcacttgcccaggctcaaggata

SEQ ID NO: 46703 - DNA, 25 bp, Homo sapien
acttcaagggcattaacgatctctc

SEQ ID NO: 46704 - DNA, 25 bp, Homo sapien
caagtattactgagcaaagtgcatt

SEQ ID NO: 46705 - DNA, 25 bp, Homo sapien
taaaatctagcacataaagcccatt

SEQ ID NO: 46706 - DNA, 25 bp, Homo sapien
tctgcttgagaacttatgatgtaat

SEQ ID NO: 46707 - DNA, 25 bp, Homo sapien
agaggtagaaatacaggcaatatac

SEQ ID NO: 46708 - DNA, 25 bp, Homo sapien
gaaggtccttgcaatagactgcctc

SEQ ID NO: 46709 - DNA, 25 bp, Homo sapien
aaagcccattactagaggtagaaat

SEQ ID NO: 46710 - DNA, 25 bp, Homo sapien
ggcagcaaagaaggtccttgcaata

SEQ ID NO: 46711 - DNA, 25 bp, Homo sapien
aaacagcctatgataactggcagca

SEQ ID NO: 46712 - DNA, 25 bp, Homo sapien
tctgcttgagaacttatgatgtaat

SEQ ID NO: 46713 - DNA, 25 bp, Homo sapien
gaaggtccttgcaatagactgcctc

SEQ ID NO: 46714 - DNA, 25 bp, Homo sapien
ggcagcaaagaaggtccttgcaata

SEQ ID NO: 46715 - DNA, 25 bp, Homo sapien
aaacagcctatgataactggcagca

SEQ ID NO: 46716 - DNA, 25 bp, Homo sapien
caagtattactgagcaaagtgcatt

SEQ ID NO: 46717 - DNA, 25 bp, Homo sapien
agaggtagaaatacaggcaatatac

SEQ ID NO: 46718 - DNA, 25 bp, Homo sapien
aaagcccattactagaggtagaaat

SEQ ID NO: 46719 - DNA, 25 bp, Homo sapien
taaaatctagcacataaagcccatt

SEQ ID NO: 46720 - DNA, 25 bp, Homo sapien
gtgcacttgcccaggctcaaggata

SEQ ID NO: 46721 - DNA, 25 bp, Homo sapien
ttttgtgcaagtaaaccatgtttct

SEQ ID NO: 46722 - DNA, 25 bp, Homo sapien
acttcaagggcattaacgatctctc

SEQ ID NO: 46723 - DNA, 25 bp, Homo sapien
gaaggtccttgcaatagactgcctc

SEQ ID NO: 46724 - DNA, 25 bp, Homo sapien
taaaatctagcacataaagcccatt

SEQ ID NO: 46725 - DNA, 25 bp, Homo sapien
tctgcttgagaacttatgatgtaat

SEQ ID NO: 46726 - DNA, 25 bp, Homo sapien
ttttgtgcaagtaaaccatgtttct

SEQ ID NO: 46727 - DNA, 25 bp, Homo sapien
gtgcacttgcccaggctcaaggata

SEQ ID NO: 46728 - DNA, 25 bp, Homo sapien
caagtattactgagcaaagtgcatt

SEQ ID NO: 46729 - DNA, 25 bp, Homo sapien
aaacagcctatgataactggcagca

SEQ ID NO: 46730 - DNA, 25 bp, Homo sapien
aaagcccattactagaggtagaaat

SEQ ID NO: 46731 - DNA, 25 bp, Homo sapien
agaggtagaaatacaggcaatatac

SEQ ID NO: 46732 - DNA, 25 bp, Homo sapien
ggcagcaaagaaggtccttgcaata

SEQ ID NO: 46733 - DNA, 25 bp, Homo sapien
acttcaagggcattaacgatctctc

SEQ ID NO: 46734 - DNA, 25 bp, Homo sapien
tctgcttgagaacttatgatgtaat

SEQ ID NO: 46735 - DNA, 25 bp, Homo sapien
gaaggtccttgcaatagactgcctc

SEQ ID NO: 46736 - DNA, 25 bp, Homo sapien
ggcagcaaagaaggtccttgcaata

SEQ ID NO: 46737 - DNA, 25 bp, Homo sapien
aaacagcctatgataactggcagca

SEQ ID NO: 46738 - DNA, 25 bp, Homo sapien
caagtattactgagcaaagtgcatt

SEQ ID NO: 46739 - DNA, 25 bp, Homo sapien
agaggtagaaatacaggcaatatac

SEQ ID NO: 46740 - DNA, 25 bp, Homo sapien
aaagcccattactagaggtagaaat

SEQ ID NO: 46741 - DNA, 25 bp, Homo sapien
taaaatctagcacataaagcccatt

SEQ ID NO: 46742 - DNA, 25 bp, Homo sapien
gtgcacttgcccaggctcaaggata

SEQ ID NO: 46743 - DNA, 25 bp, Homo sapien
ttttgtgcaagtaaaccatgtttct

SEQ ID NO: 46744 - DNA, 25 bp, Homo sapien
acttcaagggcattaacgatctctc

SEQ ID NO: 46745 - DNA, 25 bp, Homo sapien
tctgcttgagaacttatgatgtaat

SEQ ID NO: 46746 - DNA, 25 bp, Homo sapien
agaggtagaaatacaggcaatatac

SEQ ID NO: 46747 - DNA, 25 bp, Homo sapien
taaaatctagcacataaagcccatt

SEQ ID NO: 46748 - DNA, 25 bp, Homo sapien
caagtattactgagcaaagtgcatt

SEQ ID NO: 46749 - DNA, 25 bp, Homo sapien
aaagcccattactagaggtagaaat

SEQ ID NO: 46750 - DNA, 25 bp, Homo sapien
aaacagcctatgataactggcagca

SEQ ID NO: 46751 - DNA, 25 bp, Homo sapien
ggcagcaaagaaggtccttgcaata

SEQ ID NO: 46752 - DNA, 25 bp, Homo sapien
acttcaagggcattaacgatctctc

SEQ ID NO: 46753 - DNA, 25 bp, Homo sapien
gtgcacttgcccaggctcaaggata

SEQ ID NO: 46754 - DNA, 25 bp, Homo sapien
ttttgtgcaagtaaaccatgtttct

SEQ ID NO: 46755 - DNA, 25 bp, Homo sapien
gaaggtccttgcaatagactgcctc

SEQ ID NO: 46756 - DNA, 25 bp, Homo sapien
tctgcttgagaacttatgatgtaat

SEQ ID NO: 46757 - DNA, 25 bp, Homo sapien
gaaggtccttgcaatagactgcctc

SEQ ID NO: 46758 - DNA, 25 bp, Homo sapien
ggcagcaaagaaggtccttgcaata

SEQ ID NO: 46759 - DNA, 25 bp, Homo sapien
aaacagcctatgataactggcagca

SEQ ID NO: 46760 - DNA, 25 bp, Homo sapien
caagtattactgagcaaagtgcatt

SEQ ID NO: 46761 - DNA, 25 bp, Homo sapien
agaggtagaaatacaggcaatatac

SEQ ID NO: 46762 - DNA, 25 bp, Homo sapien
aaagcccattactagaggtagaaat

SEQ ID NO: 46763 - DNA, 25 bp, Homo sapien
taaaatctagcacataaagcccatt

SEQ ID NO: 46764 - DNA, 25 bp, Homo sapien
gtgcacttgcccaggctcaaggata

SEQ ID NO: 46765 - DNA, 25 bp, Homo sapien
ttttgtgcaagtaaaccatgtttct

SEQ ID NO: 46766 - DNA, 25 bp, Homo sapien
acttcaagggcattaacgatctctc

SEQ ID NO: 46767 - DNA, 25 bp, Homo sapien
aaacagcctatgataactggcagca

SEQ ID NO: 46768 - DNA, 25 bp, Homo sapien
ttttgtgcaagtaaaccatgtttct

SEQ ID NO: 46769 - DNA, 25 bp, Homo sapien
caagtattactgagcaaagtgcatt

SEQ ID NO: 46770 - DNA, 25 bp, Homo sapien
aaagcccattactagaggtagaaat

SEQ ID NO: 46771 - DNA, 25 bp, Homo sapien
tctgcttgagaacttatgatgtaat

SEQ ID NO: 46772 - DNA, 25 bp, Homo sapien
gaaggtccttgcaatagactgcctc

SEQ ID NO: 46773 - DNA, 25 bp, Homo sapien
acttcaagggcattaacgatctctc

SEQ ID NO: 46774 - DNA, 25 bp, Homo sapien
taaaatctagcacataaagcccatt

SEQ ID NO: 46775 - DNA, 25 bp, Homo sapien
agaggtagaaatacaggcaatatac

SEQ ID NO: 46776 - DNA, 25 bp, Homo sapien
ggcagcaaagaaggtccttgcaata

SEQ ID NO: 46777 - DNA, 25 bp, Homo sapien
gtgcacttgcccaggctcaaggata

SEQ ID NO: 46778 - DNA, 25 bp, Homo sapien
tctgcttgagaacttatgatgtaat

SEQ ID NO: 46779 - DNA, 25 bp, Homo sapien
gaaggtccttgcaatagactgcctc

SEQ ID NO: 46780 - DNA, 25 bp, Homo sapien
ggcagcaaagaaggtccttgcaata

SEQ ID NO: 46781 - DNA, 25 bp, Homo sapien
aaacagcctatgataactggcagca

SEQ ID NO: 46782 - DNA, 25 bp, Homo sapien
caagtattactgagcaaagtgcatt

SEQ ID NO: 46783 - DNA, 25 bp, Homo sapien
agaggtagaaatacaggcaatatac

SEQ ID NO: 46784 - DNA, 25 bp, Homo sapien
aaagcccattactagaggtagaaat

SEQ ID NO: 46785 - DNA, 25 bp, Homo sapien
taaaatctagcacataaagcccatt

SEQ ID NO: 46786 - DNA, 25 bp, Homo sapien
gtgcacttgcccaggctcaaggata

SEQ ID NO: 46787 - DNA, 25 bp, Homo sapien
ttttgtgcaagtaaaccatgtttct

SEQ ID NO: 46788 - DNA, 25 bp, Homo sapien
acttcaagggcattaacgatctctc

SEQ ID NO: 46789 - DNA, 25 bp, Homo sapien
agaggtagaaatacaggcaatatac

SEQ ID NO: 46790 - DNA, 25 bp, Homo sapien
ggcagcaaagaaggtccttgcaata

SEQ ID NO: 46791 - DNA, 25 bp, Homo sapien
gtgcacttgcccaggctcaaggata

SEQ ID NO: 46792 - DNA, 25 bp, Homo sapien
tctgcttgagaacttatgatgtaat

SEQ ID NO: 46793 - DNA, 25 bp, Homo sapien
caagtattactgagcaaagtgcatt

SEQ ID NO: 46794 - DNA, 25 bp, Homo sapien
acttcaagggcattaacgatctctc

SEQ ID NO: 46795 - DNA, 25 bp, Homo sapien
aaagcccattactagaggtagaaat

SEQ ID NO: 46796 - DNA, 25 bp, Homo sapien
aaacagcctatgataactggcagca

SEQ ID NO: 46797 - DNA, 25 bp, Homo sapien
ttttgtgcaagtaaaccatgtttct

SEQ ID NO: 46798 - DNA, 25 bp, Homo sapien
gaaggtccttgcaatagactgcctc

SEQ ID NO: 46799 - DNA, 25 bp, Homo sapien
taaaatctagcacataaagcccatt

SEQ ID NO: 46800 - DNA, 25 bp, Homo sapien
tctgcttgagaacttatgatgtaat

SEQ ID NO: 46801 - DNA, 25 bp, Homo sapien
gaaggtccttgcaatagactgcctc

SEQ ID NO: 46802 - DNA, 25 bp, Homo sapien
ggcagcaaagaaggtccttgcaata

SEQ ID NO: 46803 - DNA, 25 bp, Homo sapien
aaacagcctatgataactggcagca

SEQ ID NO: 46804 - DNA, 25 bp, Homo sapien
caagtattactgagcaaagtgcatt

SEQ ID NO: 46805 - DNA, 25 bp, Homo sapien
agaggtagaaatacaggcaatatac

SEQ ID NO: 46806 - DNA, 25 bp, Homo sapien
aaagcccattactagaggtagaaat

SEQ ID NO: 46807 - DNA, 25 bp, Homo sapien
taaaatctagcacataaagcccatt

SEQ ID NO: 46808 - DNA, 25 bp, Homo sapien
gtgcacttgcccaggctcaaggata

SEQ ID NO: 46809 - DNA, 25 bp, Homo sapien
ttttgtgcaagtaaaccatgtttct

SEQ ID NO: 46810 - DNA, 25 bp, Homo sapien
acttcaagggcattaacgatctctc

SEQ ID NO: 46811 - DNA, 25 bp, Homo sapien
agaggtagaaatacaggcaatatac

SEQ ID NO: 46812 - DNA, 25 bp, Homo sapien
aaacagcctatgataactggcagca

SEQ ID NO: 46813 - DNA, 25 bp, Homo sapien
ggcagcaaagaaggtccttgcaata

SEQ ID NO: 46814 - DNA, 25 bp, Homo sapien
taaaatctagcacataaagcccatt

SEQ ID NO: 46815 - DNA, 25 bp, Homo sapien
tctgcttgagaacttatgatgtaat

SEQ ID NO: 46816 - DNA, 25 bp, Homo sapien
aaagcccattactagaggtagaaat

SEQ ID NO: 46817 - DNA, 25 bp, Homo sapien
acttcaagggcattaacgatctctc

SEQ ID NO: 46818 - DNA, 25 bp, Homo sapien
gaaggtccttgcaatagactgcctc

SEQ ID NO: 46819 - DNA, 25 bp, Homo sapien
caagtattactgagcaaagtgcatt

SEQ ID NO: 46820 - DNA, 25 bp, Homo sapien
gtgcacttgcccaggctcaaggata

SEQ ID NO: 46821 - DNA, 25 bp, Homo sapien
ttttgtgcaagtaaaccatgtttct

SEQ ID NO: 46822 - DNA, 25 bp, Homo sapien
tctgcttgagaacttatgatgtaat

SEQ ID NO: 46823 - DNA, 25 bp, Homo sapien
gaaggtccttgcaatagactgcctc

SEQ ID NO: 46824 - DNA, 25 bp, Homo sapien
ggcagcaaagaaggtccttgcaata

SEQ ID NO: 46825 - DNA, 25 bp, Homo sapien
aaacagcctatgataactggcagca

SEQ ID NO: 46826 - DNA, 25 bp, Homo sapien
caagtattactgagcaaagtgcatt

SEQ ID NO: 46827 - DNA, 25 bp, Homo sapien
agaggtagaaatacaggcaatatac

SEQ ID NO: 46828 - DNA, 25 bp, Homo sapien
aaagcccattactagaggtagaaat

SEQ ID NO: 46829 - DNA, 25 bp, Homo sapien
taaaatctagcacataaagcccatt

SEQ ID NO: 46830 - DNA, 25 bp, Homo sapien
gtgcacttgcccaggctcaaggata

SEQ ID NO: 46831 - DNA, 25 bp, Homo sapien
ttttgtgcaagtaaaccatgtttct

SEQ ID NO: 46832 - DNA, 25 bp, Homo sapien
acttcaagggcattaacgatctctc

SEQ ID NO: 46833 - DNA, 25 bp, Homo sapien
tctgcttgagaacttatgatgtaat

SEQ ID NO: 46834 - DNA, 25 bp, Homo sapien
gaaggtccttgcaatagactgcctc

SEQ ID NO: 46835 - DNA, 25 bp, Homo sapien
ggcagcaaagaaggtccttgcaata

SEQ ID NO: 46836 - DNA, 25 bp, Homo sapien
aaacagcctatgataactggcagca

SEQ ID NO: 46837 - DNA, 25 bp, Homo sapien
caagtattactgagcaaagtgcatt

SEQ ID NO: 46838 - DNA, 25 bp, Homo sapien
agaggtagaaatacaggcaatatac

SEQ ID NO: 46839 - DNA, 25 bp, Homo sapien
aaagcccattactagaggtagaaat

SEQ ID NO: 46840 - DNA, 25 bp, Homo sapien
taaaatctagcacataaagcccatt

SEQ ID NO: 46841 - DNA, 25 bp, Homo sapien
gtgcacttgcccaggctcaaggata

SEQ ID NO: 46842 - DNA, 25 bp, Homo sapien
ttttgtgcaagtaaaccatgtttct

SEQ ID NO: 46843 - DNA, 25 bp, Homo sapien
acttcaagggcattaacgatctctc

SEQ ID NO: 46844 - DNA, 25 bp, Homo sapien
ggcagcaaagaaggtccttgcaata

SEQ ID NO: 46845 - DNA, 25 bp, Homo sapien
aaacagcctatgataactggcagca

SEQ ID NO: 46846 - DNA, 25 bp, Homo sapien
taaaatctagcacataaagcccatt

SEQ ID NO: 46847 - DNA, 25 bp, Homo sapien
caagtattactgagcaaagtgcatt

SEQ ID NO: 46848 - DNA, 25 bp, Homo sapien
gaaggtccttgcaatagactgcctc

SEQ ID NO: 46849 - DNA, 25 bp, Homo sapien
acttcaagggcattaacgatctctc

SEQ ID NO: 46850 - DNA, 25 bp, Homo sapien
ttttgtgcaagtaaaccatgtttct

SEQ ID NO: 46851 - DNA, 25 bp, Homo sapien
agaggtagaaatacaggcaatatac

SEQ ID NO: 46852 - DNA, 25 bp, Homo sapien
gtgcacttgcccaggctcaaggata

SEQ ID NO: 46853 - DNA, 25 bp, Homo sapien
aaagcccattactagaggtagaaat

SEQ ID NO: 46854 - DNA, 25 bp, Homo sapien
tctgcttgagaacttatgatgtaat

SEQ ID NO: 46855 - DNA, 25 bp, Homo sapien
ggcagcaaagaaggtccttgcaata

SEQ ID NO: 46856 - DNA, 25 bp, Homo sapien
aaacagcctatgataactggcagca

SEQ ID NO: 46857 - DNA, 25 bp, Homo sapien
taaaatctagcacataaagcccatt

SEQ ID NO: 46858 - DNA, 25 bp, Homo sapien
caagtattactgagcaaagtgcatt

SEQ ID NO: 46859 - DNA, 25 bp, Homo sapien
gaaggtccttgcaatagactgcctc

SEQ ID NO: 46860 - DNA, 25 bp, Homo sapien
acttcaagggcattaacgatctctc

SEQ ID NO: 46861 - DNA, 25 bp, Homo sapien
ttttgtgcaagtaaaccatgtttct

SEQ ID NO: 46862 - DNA, 25 bp, Homo sapien
agaggtagaaatacaggcaatatac

SEQ ID NO: 46863 - DNA, 25 bp, Homo sapien
gtgcacttgcccaggctcaaggata

SEQ ID NO: 46864 - DNA, 25 bp, Homo sapien
aaagcccattactagaggtagaaat

SEQ ID NO: 46865 - DNA, 25 bp, Homo sapien
tctgcttgagaacttatgatgtaat

SEQ ID NO: 46866 - DNA, 25 bp, Homo sapien
ggcagcaaagaaggtccttgcaata

SEQ ID NO: 46867 - DNA, 25 bp, Homo sapien
aaacagcctatgataactggcagca

SEQ ID NO: 46868 - DNA, 25 bp, Homo sapien
taaaatctagcacataaagcccatt

SEQ ID NO: 46869 - DNA, 25 bp, Homo sapien
caagtattactgagcaaagtgcatt

SEQ ID NO: 46870 - DNA, 25 bp, Homo sapien
gaaggtccttgcaatagactgcctc

SEQ ID NO: 46871 - DNA, 25 bp, Homo sapien
ttttgtgcaagtaaaccatgtttct

SEQ ID NO: 46872 - DNA, 25 bp, Homo sapien
acttcaagggcattaacgatctctc

SEQ ID NO: 46873 - DNA, 25 bp, Homo sapien
agaggtagaaatacaggcaatatac

SEQ ID NO: 46874 - DNA, 25 bp, Homo sapien
aaagcccattactagaggtagaaat

SEQ ID NO: 46875 - DNA, 25 bp, Homo sapien
gtgcacttgcccaggctcaaggata

SEQ ID NO: 46876 - DNA, 25 bp, Homo sapien
tctgcttgagaacttatgatgtaat

SEQ ID NO: 46877 - DNA, 25 bp, Homo sapien
ggcagcaaagaaggtccttgcaata

SEQ ID NO: 46878 - DNA, 25 bp, Homo sapien
aaacagcctatgataactggcagca

SEQ ID NO: 46879 - DNA, 25 bp, Homo sapien
taaaatctagcacataaagcccatt

SEQ ID NO: 46880 - DNA, 25 bp, Homo sapien
caagtattactgagcaaagtgcatt

SEQ ID NO: 46881 - DNA, 25 bp, Homo sapien
gaaggtccttgcaatagactgcctc

SEQ ID NO: 46882 - DNA, 25 bp, Homo sapien
acttcaagggcattaacgatctctc

SEQ ID NO: 46883 - DNA, 25 bp, Homo sapien
agaggtagaaatacaggcaatatac

SEQ ID NO: 46884 - DNA, 25 bp, Homo sapien
ttttgtgcaagtaaaccatgtttct

SEQ ID NO: 46885 - DNA, 25 bp, Homo sapien
aaagcccattactagaggtagaaat

SEQ ID NO: 46886 - DNA, 25 bp, Homo sapien
gtgcacttgcccaggctcaaggata

SEQ ID NO: 46887 - DNA, 25 bp, Homo sapien
tctgcttgagaacttatgatgtaat

SEQ ID NO: 46888 - DNA, 25 bp, Homo sapien
ggcagcaaagaaggtccttgcaata

SEQ ID NO: 46889 - DNA, 25 bp, Homo sapien
aaacagcctatgataactggcagca

SEQ ID NO: 46890 - DNA, 25 bp, Homo sapien
taaaatctagcacataaagcccatt

SEQ ID NO: 46891 - DNA, 25 bp, Homo sapien
caagtattactgagcaaagtgcatt

SEQ ID NO: 46892 - DNA, 25 bp, Homo sapien
gaaggtccttgcaatagactgcctc

SEQ ID NO: 46893 - DNA, 25 bp, Homo sapien
ttttgtgcaagtaaaccatgtttct

SEQ ID NO: 46894 - DNA, 25 bp, Homo sapien
acttcaagggcattaacgatctctc

SEQ ID NO: 46895 - DNA, 25 bp, Homo sapien
agaggtagaaatacaggcaatatac

SEQ ID NO: 46896 - DNA, 25 bp, Homo sapien
aaagcccattactagaggtagaaat

SEQ ID NO: 46897 - DNA, 25 bp, Homo sapien
gtgcacttgcccaggctcaaggata

SEQ ID NO: 46898 - DNA, 25 bp, Homo sapien
tctgcttgagaacttatgatgtaat

SEQ ID NO: 46899 - DNA, 25 bp, Homo sapien
ggcagcaaagaaggtccttgcaata

SEQ ID NO: 46900 - DNA, 25 bp, Homo sapien
aaacagcctatgataactggcagca

SEQ ID NO: 46901 - DNA, 25 bp, Homo sapien
taaaatctagcacataaagcccatt

SEQ ID NO: 46902 - DNA, 25 bp, Homo sapien
caagtattactgagcaaagtgcatt

SEQ ID NO: 46903 - DNA, 25 bp, Homo sapien
gaaggtccttgcaatagactgcctc

SEQ ID NO: 46904 - DNA, 25 bp, Homo sapien
acttcaagggcattaacgatctctc

SEQ ID NO: 46905 - DNA, 25 bp, Homo sapien
ttttgtgcaagtaaaccatgtttct

SEQ ID NO: 46906 - DNA, 25 bp, Homo sapien
agaggtagaaatacaggcaatatac

SEQ ID NO: 46907 - DNA, 25 bp, Homo sapien
gtgcacttgcccaggctcaaggata

SEQ ID NO: 46908 - DNA, 25 bp, Homo sapien
aaagcccattactagaggtagaaat

SEQ ID NO: 46909 - DNA, 25 bp, Homo sapien
tctgcttgagaacttatgatgtaat

SEQ ID NO: 46910 - DNA, 25 bp, Homo sapien
ggcagcaaagaaggtccttgcaata

SEQ ID NO: 46911 - DNA, 25 bp, Homo sapien
aaacagcctatgataactggcagca

SEQ ID NO: 46912 - DNA, 25 bp, Homo sapien
taaaatctagcacataaagcccatt

SEQ ID NO: 46913 - DNA, 25 bp, Homo sapien
caagtattactgagcaaagtgcatt

SEQ ID NO: 46914 - DNA, 25 bp, Homo sapien
gaaggtccttgcaatagactgcctc

SEQ ID NO: 46915 - DNA, 25 bp, Homo sapien
acttcaagggcattaacgatctctc

SEQ ID NO: 46916 - DNA, 25 bp, Homo sapien
ttttgtgcaagtaaaccatgtttct

SEQ ID NO: 46917 - DNA, 25 bp, Homo sapien
agaggtagaaatacaggcaatatac

SEQ ID NO: 46918 - DNA, 25 bp, Homo sapien
gtgcacttgcccaggctcaaggata

SEQ ID NO: 46919 - DNA, 25 bp, Homo sapien
aaagcccattactagaggtagaaat

SEQ ID NO: 46920 - DNA, 25 bp, Homo sapien
tctgcttgagaacttatgatgtaat

SEQ ID NO: 46921 - DNA, 25 bp, Homo sapien
ggcagcaaagaaggtccttgcaata

SEQ ID NO: 46922 - DNA, 25 bp, Homo sapien
aaacagcctatgataactggcagca

SEQ ID NO: 46923 - DNA, 25 bp, Homo sapien
taaaatctagcacataaagcccatt

SEQ ID NO: 46924 - DNA, 25 bp, Homo sapien
caagtattactgagcaaagtgcatt

SEQ ID NO: 46925 - DNA, 25 bp, Homo sapien
ttttgtgcaagtaaaccatgtttct

SEQ ID NO: 46926 - DNA, 25 bp, Homo sapien
gaaggtccttgcaatagactgcctc

SEQ ID NO: 46927 - DNA, 25 bp, Homo sapien
acttcaagggcattaacgatctctc

SEQ ID NO: 46928 - DNA, 25 bp, Homo sapien
agaggtagaaatacaggcaatatac

SEQ ID NO: 46929 - DNA, 25 bp, Homo sapien
gtgcacttgcccaggctcaaggata

SEQ ID NO: 46930 - DNA, 25 bp, Homo sapien
aaagcccattactagaggtagaaat

SEQ ID NO: 46931 - DNA, 25 bp, Homo sapien
tctgcttgagaacttatgatgtaat

SEQ ID NO: 46932 - DNA, 25 bp, Homo sapien
ggcagcaaagaaggtccttgcaata

SEQ ID NO: 46933 - DNA, 25 bp, Homo sapien
aaacagcctatgataactggcagca

SEQ ID NO: 46934 - DNA, 25 bp, Homo sapien
taaaatctagcacataaagcccatt

SEQ ID NO: 46935 - DNA, 25 bp, Homo sapien
caagtattactgagcaaagtgcatt

SEQ ID NO: 46936 - DNA, 25 bp, Homo sapien
gaaggtccttgcaatagactgcctc

SEQ ID NO: 46937 - DNA, 25 bp, Homo sapien
ttttgtgcaagtaaaccatgtttct

SEQ ID NO: 46938 - DNA, 25 bp, Homo sapien
acttcaagggcattaacgatctctc

SEQ ID NO: 46939 - DNA, 25 bp, Homo sapien
agaggtagaaatacaggcaatatac

SEQ ID NO: 46940 - DNA, 25 bp, Homo sapien
gtgcacttgcccaggctcaaggata

SEQ ID NO: 46941 - DNA, 25 bp, Homo sapien
aaagcccattactagaggtagaaat

SEQ ID NO: 46942 - DNA, 25 bp, Homo sapien
tctgcttgagaacttatgatgtaat

SEQ ID NO: 46943 - DNA, 25 bp, Homo sapien
tctgcttgagaacttatgatgtaat

SEQ ID NO: 46944 - DNA, 25 bp, Homo sapien
aaagcccattactagaggtagaaat

SEQ ID NO: 46945 - DNA, 25 bp, Homo sapien
ggcagcaaagaaggtccttgcaata

SEQ ID NO: 46946 - DNA, 25 bp, Homo sapien
acttcaagggcattaacgatctctc

SEQ ID NO: 46947 - DNA, 25 bp, Homo sapien
gaaggtccttgcaatagactgcctc

SEQ ID NO: 46948 - DNA, 25 bp, Homo sapien
taaaatctagcacataaagcccatt

SEQ ID NO: 46949 - DNA, 25 bp, Homo sapien
aaacagcctatgataactggcagca

SEQ ID NO: 46950 - DNA, 25 bp, Homo sapien
gtgcacttgcccaggctcaaggata

SEQ ID NO: 46951 - DNA, 25 bp, Homo sapien
caagtattactgagcaaagtgcatt

SEQ ID NO: 46952 - DNA, 25 bp, Homo sapien
agaggtagaaatacaggcaatatac

SEQ ID NO: 46953 - DNA, 25 bp, Homo sapien
ttttgtgcaagtaaaccatgtttct

SEQ ID NO: 46954 - DNA, 25 bp, Homo sapien
ggcagcaaagaaggtccttgcaata

SEQ ID NO: 46955 - DNA, 25 bp, Homo sapien
acttcaagggcattaacgatctctc

SEQ ID NO: 46956 - DNA, 25 bp, Homo sapien
aaacagcctatgataactggcagca

SEQ ID NO: 46957 - DNA, 25 bp, Homo sapien
taaaatctagcacataaagcccatt

SEQ ID NO: 46958 - DNA, 25 bp, Homo sapien
caagtattactgagcaaagtgcatt

SEQ ID NO: 46959 - DNA, 25 bp, Homo sapien
gaaggtccttgcaatagactgcctc

SEQ ID NO: 46960 - DNA, 25 bp, Homo sapien
ttttgtgcaagtaaaccatgtttct

SEQ ID NO: 46961 - DNA, 25 bp, Homo sapien
agaggtagaaatacaggcaatatac

SEQ ID NO: 46962 - DNA, 25 bp, Homo sapien
gtgcacttgcccaggctcaaggata

SEQ ID NO: 46963 - DNA, 25 bp, Homo sapien
aaagcccattactagaggtagaaat

SEQ ID NO: 46964 - DNA, 25 bp, Homo sapien
tctgcttgagaacttatgatgtaat

SEQ ID NO: 46965 - DNA, 25 bp, Homo sapien
tctgcttgagaacttatgatgtaat

SEQ ID NO: 46966 - DNA, 25 bp, Homo sapien
gaaggtccttgcaatagactgcctc

SEQ ID NO: 46967 - DNA, 25 bp, Homo sapien
ggcagcaaagaaggtccttgcaata

SEQ ID NO: 46968 - DNA, 25 bp, Homo sapien
aaacagcctatgataactggcagca

SEQ ID NO: 46969 - DNA, 25 bp, Homo sapien
caagtattactgagcaaagtgcatt

SEQ ID NO: 46970 - DNA, 25 bp, Homo sapien
agaggtagaaatacaggcaatatac

SEQ ID NO: 46971 - DNA, 25 bp, Homo sapien
aaagcccattactagaggtagaaat

SEQ ID NO: 46972 - DNA, 25 bp, Homo sapien
taaaatctagcacataaagcccatt

SEQ ID NO: 46973 - DNA, 25 bp, Homo sapien
gtgcacttgcccaggctcaaggata

SEQ ID NO: 46974 - DNA, 25 bp, Homo sapien
ttttgtgcaagtaaaccatgtttct

SEQ ID NO: 46975 - DNA, 25 bp, Homo sapien
acttcaagggcattaacgatctctc

SEQ ID NO: 46976 - DNA, 25 bp, Homo sapien
tatccttgagcctgggcaagtgcac

SEQ ID NO: 46977 - DNA, 25 bp, Homo sapien
attacatcataagttctcaagcaga

SEQ ID NO: 46978 - DNA, 25 bp, Homo sapien
gagagatcgttaatgcccttgaagt

SEQ ID NO: 46979 - DNA, 25 bp, Homo sapien
agaaacatggtttacttgcacaaaa

SEQ ID NO: 46980 - DNA, 25 bp, Homo sapien
tattgcaaggaccttctttgctgcc

SEQ ID NO: 46981 - DNA, 25 bp, Homo sapien
atttctacctctagtaatgggcttt

SEQ ID NO: 46982 - DNA, 25 bp, Homo sapien
gtatattgcctgtatttctacctct

SEQ ID NO: 46983 - DNA, 25 bp, Homo sapien
tgctgccagttatcataggctgttt

SEQ ID NO: 46984 - DNA, 25 bp, Homo sapien
gaggcagtctattgcaaggaccttc

SEQ ID NO: 46985 - DNA, 25 bp, Homo sapien
aatgcactttgctcagtaatacttg

SEQ ID NO: 46986 - DNA, 25 bp, Homo sapien
aatgggctttatgtgctagatttta

SEQ ID NO: 46987 - DNA, 25 bp, Homo sapien
ggcagcaaagaaggtccttgcaata

SEQ ID NO: 46988 - DNA, 25 bp, Homo sapien
aaacagcctatgataactggcagca

SEQ ID NO: 46989 - DNA, 25 bp, Homo sapien
taaaatctagcacataaagcccatt

SEQ ID NO: 46990 - DNA, 25 bp, Homo sapien
caagtattactgagcaaagtgcatt

SEQ ID NO: 46991 - DNA, 25 bp, Homo sapien
gaaggtccttgcaatagactgcctc

SEQ ID NO: 46992 - DNA, 25 bp, Homo sapien
ttttgtgcaagtaaaccatgtttct

SEQ ID NO: 46993 - DNA, 25 bp, Homo sapien
acttcaagggcattaacgatctctc

SEQ ID NO: 46994 - DNA, 25 bp, Homo sapien
agaggtagaaatacaggcaatatac

SEQ ID NO: 46995 - DNA, 25 bp, Homo sapien
gtgcacttgcccaggctcaaggata

SEQ ID NO: 46996 - DNA, 25 bp, Homo sapien
tctgcttgagaacttatgatgtaat

SEQ ID NO: 46997 - DNA, 25 bp, Homo sapien
aaagcccattactagaggtagaaat

SEQ ID NO: 46998 - DNA, 25 bp, Homo sapien
aaagcccattactagaggtagaaat

SEQ ID NO: 46999 - DNA, 25 bp, Homo sapien
gtgcacttgcccaggctcaaggata

SEQ ID NO: 47000 - DNA, 25 bp, Homo sapien
ggcagcaaagaaggtccttgcaata

SEQ ID NO: 47001 - DNA, 25 bp, Homo sapien
taaaatctagcacataaagcccatt

SEQ ID NO: 47002 - DNA, 25 bp, Homo sapien
gaaggtccttgcaatagactgcctc

SEQ ID NO: 47003 - DNA, 25 bp, Homo sapien
ttttgtgcaagtaaaccatgtttct

SEQ ID NO: 47004 - DNA, 25 bp, Homo sapien
agaggtagaaatacaggcaatatac

SEQ ID NO: 47005 - DNA, 25 bp, Homo sapien
acttcaagggcattaacgatctctc

SEQ ID NO: 47006 - DNA, 25 bp, Homo sapien
caagtattactgagcaaagtgcatt

SEQ ID NO: 47007 - DNA, 25 bp, Homo sapien
aaacagcctatgataactggcagca

SEQ ID NO: 47008 - DNA, 25 bp, Homo sapien
tctgcttgagaacttatgatgtaat

SEQ ID NO: 47009 - DNA, 25 bp, Homo sapien
tctgcttgagaacttatgatgtaat

SEQ ID NO: 47010 - DNA, 25 bp, Homo sapien
gaaggtccttgcaatagactgcctc

SEQ ID NO: 47011 - DNA, 25 bp, Homo sapien
ggcagcaaagaaggtccttgcaata

SEQ ID NO: 47012 - DNA, 25 bp, Homo sapien
aaacagcctatgataactggcagca

SEQ ID NO: 47013 - DNA, 25 bp, Homo sapien
caagtattactgagcaaagtgcatt

SEQ ID NO: 47014 - DNA, 25 bp, Homo sapien
agaggtagaaatacaggcaatatac

SEQ ID NO: 47015 - DNA, 25 bp, Homo sapien
aaagcccattactagaggtagaaat

SEQ ID NO: 47016 - DNA, 25 bp, Homo sapien
taaaatctagcacataaagcccatt

SEQ ID NO: 47017 - DNA, 25 bp, Homo sapien
gtgcacttgcccaggctcaaggata

SEQ ID NO: 47018 - DNA, 25 bp, Homo sapien
ttttgtgcaagtaaaccatgtttct

SEQ ID NO: 47019 - DNA, 25 bp, Homo sapien
acttcaagggcattaacgatctctc

SEQ ID NO: 47020 - DNA, 25 bp, Homo sapien
caagtattactgagcaaagtgcatt

SEQ ID NO: 47021 - DNA, 25 bp, Homo sapien
aaagcccattactagaggtagaaat

SEQ ID NO: 47022 - DNA, 25 bp, Homo sapien
tctgcttgagaacttatgatgtaat

SEQ ID NO: 47023 - DNA, 25 bp, Homo sapien
gtgcacttgcccaggctcaaggata

SEQ ID NO: 47024 - DNA, 25 bp, Homo sapien
gaaggtccttgcaatagactgcctc

SEQ ID NO: 47025 - DNA, 25 bp, Homo sapien
agaggtagaaatacaggcaatatac

SEQ ID NO: 47026 - DNA, 25 bp, Homo sapien
aaacagcctatgataactggcagca

SEQ ID NO: 47027 - DNA, 25 bp, Homo sapien
taaaatctagcacataaagcccatt

SEQ ID NO: 47028 - DNA, 25 bp, Homo sapien
ttttgtgcaagtaaaccatgtttct

SEQ ID NO: 47029 - DNA, 25 bp, Homo sapien
ggcagcaaagaaggtccttgcaata

SEQ ID NO: 47030 - DNA, 25 bp, Homo sapien
acttcaagggcattaacgatctctc

SEQ ID NO: 47031 - DNA, 25 bp, Homo sapien
tctgcttgagaacttatgatgtaat

SEQ ID NO: 47032 - DNA, 25 bp, Homo sapien
gaaggtccttgcaatagactgcctc

SEQ ID NO: 47033 - DNA, 25 bp, Homo sapien
ggcagcaaagaaggtccttgcaata

SEQ ID NO: 47034 - DNA, 25 bp, Homo sapien
aaacagcctatgataactggcagca

SEQ ID NO: 47035 - DNA, 25 bp, Homo sapien
caagtattactgagcaaagtgcatt

SEQ ID NO: 47036 - DNA, 25 bp, Homo sapien
agaggtagaaatacaggcaatatac

SEQ ID NO: 47037 - DNA, 25 bp, Homo sapien
aaagcccattactagaggtagaaat

SEQ ID NO: 47038 - DNA, 25 bp, Homo sapien
taaaatctagcacataaagcccatt

SEQ ID NO: 47039 - DNA, 25 bp, Homo sapien
gtgcacttgcccaggctcaaggata

SEQ ID NO: 47040 - DNA, 25 bp, Homo sapien
ttttgtgcaagtaaaccatgtttct

SEQ ID NO: 47041 - DNA, 25 bp, Homo sapien
acttcaagggcattaacgatctctc

SEQ ID NO: 47042 - DNA, 25 bp, Homo sapien
ggcagcaaagaaggtccttgcaata

SEQ ID NO: 47043 - DNA, 25 bp, Homo sapien
acttcaagggcattaacgatctctc

SEQ ID NO: 47044 - DNA, 25 bp, Homo sapien
aaagcccattactagaggtagaaat

SEQ ID NO: 47045 - DNA, 25 bp, Homo sapien
gaaggtccttgcaatagactgcctc

SEQ ID NO: 47046 - DNA, 25 bp, Homo sapien
taaaatctagcacataaagcccatt

SEQ ID NO: 47047 - DNA, 25 bp, Homo sapien
tctgcttgagaacttatgatgtaat

SEQ ID NO: 47048 - DNA, 25 bp, Homo sapien
agaggtagaaatacaggcaatatac

SEQ ID NO: 47049 - DNA, 25 bp, Homo sapien
gtgcacttgcccaggctcaaggata

SEQ ID NO: 47050 - DNA, 25 bp, Homo sapien
aaacagcctatgataactggcagca

SEQ ID NO: 47051 - DNA, 25 bp, Homo sapien
caagtattactgagcaaagtgcatt

SEQ ID NO: 47052 - DNA, 25 bp, Homo sapien
ttttgtgcaagtaaaccatgtttct

SEQ ID NO: 47053 - DNA, 25 bp, Homo sapien
tctgcttgagaacttatgatgtaat

SEQ ID NO: 47054 - DNA, 25 bp, Homo sapien
gaaggtccttgcaatagactgcctc

SEQ ID NO: 47055 - DNA, 25 bp, Homo sapien
ggcagcaaagaaggtccttgcaata

SEQ ID NO: 47056 - DNA, 25 bp, Homo sapien
aaacagcctatgataactggcagca

SEQ ID NO: 47057 - DNA, 25 bp, Homo sapien
caagtattactgagcaaagtgcatt

SEQ ID NO: 47058 - DNA, 25 bp, Homo sapien
agaggtagaaatacaggcaatatac

SEQ ID NO: 47059 - DNA, 25 bp, Homo sapien
aaagcccattactagaggtagaaat

SEQ ID NO: 47060 - DNA, 25 bp, Homo sapien
taaaatctagcacataaagcccatt

SEQ ID NO: 47061 - DNA, 25 bp, Homo sapien
gtgcacttgcccaggctcaaggata

SEQ ID NO: 47062 - DNA, 25 bp, Homo sapien
ttttgtgcaagtaaaccatgtttct

SEQ ID NO: 47063 - DNA, 25 bp, Homo sapien
acttcaagggcattaacgatctctc

SEQ ID NO: 47064 - DNA, 25 bp, Homo sapien
tctgcttgagaacttatgatgtaat

SEQ ID NO: 47065 - DNA, 25 bp, Homo sapien
gaaggtccttgcaatagactgcctc

SEQ ID NO: 47066 - DNA, 25 bp, Homo sapien
ggcagcaaagaaggtccttgcaata

SEQ ID NO: 47067 - DNA, 25 bp, Homo sapien
aaacagcctatgataactggcagca

SEQ ID NO: 47068 - DNA, 25 bp, Homo sapien
caagtattactgagcaaagtgcatt

SEQ ID NO: 47069 - DNA, 25 bp, Homo sapien
agaggtagaaatacaggcaatatac

SEQ ID NO: 47070 - DNA, 25 bp, Homo sapien
aaagcccattactagaggtagaaat

SEQ ID NO: 47071 - DNA, 25 bp, Homo sapien
taaaatctagcacataaagcccatt

SEQ ID NO: 47072 - DNA, 25 bp, Homo sapien
gtgcacttgcccaggctcaaggata

SEQ ID NO: 47073 - DNA, 25 bp, Homo sapien
ttttgtgcaagtaaaccatgtttct

SEQ ID NO: 47074 - DNA, 25 bp, Homo sapien
acttcaagggcattaacgatctctc

SEQ ID NO: 47075 - DNA, 25 bp, Homo sapien
aaagcccattactagaggtagaaat

SEQ ID NO: 47076 - DNA, 25 bp, Homo sapien
tctgcttgagaacttatgatgtaat

SEQ ID NO: 47077 - DNA, 25 bp, Homo sapien
gaaggtccttgcaatagactgcctc

SEQ ID NO: 47078 - DNA, 25 bp, Homo sapien
caagtattactgagcaaagtgcatt

SEQ ID NO: 47079 - DNA, 25 bp, Homo sapien
acttcaagggcattaacgatctctc

SEQ ID NO: 47080 - DNA, 25 bp, Homo sapien
gtgcacttgcccaggctcaaggata

SEQ ID NO: 47081 - DNA, 25 bp, Homo sapien
agaggtagaaatacaggcaatatac

SEQ ID NO: 47082 - DNA, 25 bp, Homo sapien
ggcagcaaagaaggtccttgcaata

SEQ ID NO: 47083 - DNA, 25 bp, Homo sapien
taaaatctagcacataaagcccatt

SEQ ID NO: 47084 - DNA, 25 bp, Homo sapien
aaacagcctatgataactggcagca

SEQ ID NO: 47085 - DNA, 25 bp, Homo sapien
ttttgtgcaagtaaaccatgtttct

SEQ ID NO: 47086 - DNA, 25 bp, Homo sapien
tctgcttgagaacttatgatgtaat

SEQ ID NO: 47087 - DNA, 25 bp, Homo sapien
gaaggtccttgcaatagactgcctc

SEQ ID NO: 47088 - DNA, 25 bp, Homo sapien
ggcagcaaagaaggtccttgcaata

SEQ ID NO: 47089 - DNA, 25 bp, Homo sapien
aaacagcctatgataactggcagca

SEQ ID NO: 47090 - DNA, 25 bp, Homo sapien
caagtattactgagcaaagtgcatt

SEQ ID NO: 47091 - DNA, 25 bp, Homo sapien
agaggtagaaatacaggcaatatac

SEQ ID NO: 47092 - DNA, 25 bp, Homo sapien
aaagcccattactagaggtagaaat

SEQ ID NO: 47093 - DNA, 25 bp, Homo sapien
taaaatctagcacataaagcccatt

SEQ ID NO: 47094 - DNA, 25 bp, Homo sapien
gtgcacttgcccaggctcaaggata

SEQ ID NO: 47095 - DNA, 25 bp, Homo sapien
ttttgtgcaagtaaaccatgtttct

SEQ ID NO: 47096 - DNA, 25 bp, Homo sapien
acttcaagggcattaacgatctctc

SEQ ID NO: 47097 - DNA, 25 bp, Homo sapien
agaggtagaaatacaggcaatatac

SEQ ID NO: 47098 - DNA, 25 bp, Homo sapien
caagtattactgagcaaagtgcatt

SEQ ID NO: 47099 - DNA, 25 bp, Homo sapien
aaacagcctatgataactggcagca

SEQ ID NO: 47100 - DNA, 25 bp, Homo sapien
gtgcacttgcccaggctcaaggata

SEQ ID NO: 47101 - DNA, 25 bp, Homo sapien
ggcagcaaagaaggtccttgcaata

SEQ ID NO: 47102 - DNA, 25 bp, Homo sapien
gaaggtccttgcaatagactgcctc

SEQ ID NO: 47103 - DNA, 25 bp, Homo sapien
tctgcttgagaacttatgatgtaat

SEQ ID NO: 47104 - DNA, 25 bp, Homo sapien
ttttgtgcaagtaaaccatgtttct

SEQ ID NO: 47105 - DNA, 25 bp, Homo sapien
taaaatctagcacataaagcccatt

SEQ ID NO: 47106 - DNA, 25 bp, Homo sapien
aaagcccattactagaggtagaaat

SEQ ID NO: 47107 - DNA, 25 bp, Homo sapien
acttcaagggcattaacgatctctc

SEQ ID NO: 47108 - DNA, 25 bp, Homo sapien
tctgcttgagaacttatgatgtaat

SEQ ID NO: 47109 - DNA, 25 bp, Homo sapien
gaaggtccttgcaatagactgcctc

SEQ ID NO: 47110 - DNA, 25 bp, Homo sapien
ggcagcaaagaaggtccttgcaata

SEQ ID NO: 47111 - DNA, 25 bp, Homo sapien
aaacagcctatgataactggcagca

SEQ ID NO: 47112 - DNA, 25 bp, Homo sapien
caagtattactgagcaaagtgcatt

SEQ ID NO: 47113 - DNA, 25 bp, Homo sapien
agaggtagaaatacaggcaatatac

SEQ ID NO: 47114 - DNA, 25 bp, Homo sapien
aaagcccattactagaggtagaaat

SEQ ID NO: 47115 - DNA, 25 bp, Homo sapien
taaaatctagcacataaagcccatt

SEQ ID NO: 47116 - DNA, 25 bp, Homo sapien
gtgcacttgcccaggctcaaggata

SEQ ID NO: 47117 - DNA, 25 bp, Homo sapien
ttttgtgcaagtaaaccatgtttct

SEQ ID NO: 47118 - DNA, 25 bp, Homo sapien
acttcaagggcattaacgatctctc

SEQ ID NO: 47119 - DNA, 25 bp, Homo sapien
caagtattactgagcaaagtgcatt

SEQ ID NO: 47120 - DNA, 25 bp, Homo sapien
acttcaagggcattaacgatctctc

SEQ ID NO: 47121 - DNA, 25 bp, Homo sapien
aaagcccattactagaggtagaaat

SEQ ID NO: 47122 - DNA, 25 bp, Homo sapien
ttttgtgcaagtaaaccatgtttct

SEQ ID NO: 47123 - DNA, 25 bp, Homo sapien
gaaggtccttgcaatagactgcctc

SEQ ID NO: 47124 - DNA, 25 bp, Homo sapien
gtgcacttgcccaggctcaaggata

SEQ ID NO: 47125 - DNA, 25 bp, Homo sapien
ggcagcaaagaaggtccttgcaata

SEQ ID NO: 47126 - DNA, 25 bp, Homo sapien
tctgcttgagaacttatgatgtaat

SEQ ID NO: 47127 - DNA, 25 bp, Homo sapien
agaggtagaaatacaggcaatatac

SEQ ID NO: 47128 - DNA, 25 bp, Homo sapien
aaacagcctatgataactggcagca

SEQ ID NO: 47129 - DNA, 25 bp, Homo sapien
taaaatctagcacataaagcccatt

SEQ ID NO: 47130 - DNA, 25 bp, Homo sapien
tctgcttgagaacttatgatgtaat

SEQ ID NO: 47131 - DNA, 25 bp, Homo sapien
gaaggtccttgcaatagactgcctc

SEQ ID NO: 47132 - DNA, 25 bp, Homo sapien
ggcagcaaagaaggtccttgcaata

SEQ ID NO: 47133 - DNA, 25 bp, Homo sapien
aaacagcctatgataactggcagca

SEQ ID NO: 47134 - DNA, 25 bp, Homo sapien
caagtattactgagcaaagtgcatt

SEQ ID NO: 47135 - DNA, 25 bp, Homo sapien
agaggtagaaatacaggcaatatac

SEQ ID NO: 47136 - DNA, 25 bp, Homo sapien
aaagcccattactagaggtagaaat

SEQ ID NO: 47137 - DNA, 25 bp, Homo sapien
taaaatctagcacataaagcccatt

SEQ ID NO: 47138 - DNA, 25 bp, Homo sapien
gtgcacttgcccaggctcaaggata

SEQ ID NO: 47139 - DNA, 25 bp, Homo sapien
ttttgtgcaagtaaaccatgtttct

SEQ ID NO: 47140 - DNA, 25 bp, Homo sapien
acttcaagggcattaacgatctctc

SEQ ID NO: 47141 - DNA, 25 bp, Homo sapien
taaaatctagcacataaagcccatt

SEQ ID NO: 47142 - DNA, 25 bp, Homo sapien
ttttgtgcaagtaaaccatgtttct

SEQ ID NO: 47143 - DNA, 25 bp, Homo sapien
ggcagcaaagaaggtccttgcaata

SEQ ID NO: 47144 - DNA, 25 bp, Homo sapien
aaacagcctatgataactggcagca

SEQ ID NO: 47145 - DNA, 25 bp, Homo sapien
gtgcacttgcccaggctcaaggata

SEQ ID NO: 47146 - DNA, 25 bp, Homo sapien
tctgcttgagaacttatgatgtaat

SEQ ID NO: 47147 - DNA, 25 bp, Homo sapien
aaagcccattactagaggtagaaat

SEQ ID NO: 47148 - DNA, 25 bp, Homo sapien
gaaggtccttgcaatagactgcctc

SEQ ID NO: 47149 - DNA, 25 bp, Homo sapien
agaggtagaaatacaggcaatatac

SEQ ID NO: 47150 - DNA, 25 bp, Homo sapien
caagtattactgagcaaagtgcatt

SEQ ID NO: 47151 - DNA, 25 bp, Homo sapien
acttcaagggcattaacgatctctc

SEQ ID NO: 47152 - DNA, 25 bp, Homo sapien
tctgcttgagaacttatgatgtaat

SEQ ID NO: 47153 - DNA, 25 bp, Homo sapien
gaaggtccttgcaatagactgcctc

SEQ ID NO: 47154 - DNA, 25 bp, Homo sapien
ggcagcaaagaaggtccttgcaata

SEQ ID NO: 47155 - DNA, 25 bp, Homo sapien
aaacagcctatgataactggcagca

SEQ ID NO: 47156 - DNA, 25 bp, Homo sapien
caagtattactgagcaaagtgcatt

SEQ ID NO: 47157 - DNA, 25 bp, Homo sapien
agaggtagaaatacaggcaatatac

SEQ ID NO: 47158 - DNA, 25 bp, Homo sapien
aaagcccattactagaggtagaaat

SEQ ID NO: 47159 - DNA, 25 bp, Homo sapien
taaaatctagcacataaagcccatt

SEQ ID NO: 47160 - DNA, 25 bp, Homo sapien
gtgcacttgcccaggctcaaggata

SEQ ID NO: 47161 - DNA, 25 bp, Homo sapien
ttttgtgcaagtaaaccatgtttct

SEQ ID NO: 47162 - DNA, 25 bp, Homo sapien
acttcaagggcattaacgatctctc

SEQ ID NO: 47163 - DNA, 25 bp, Homo sapien
agaggtagaaatacaggcaatatac

SEQ ID NO: 47164 - DNA, 25 bp, Homo sapien
aaacagcctatgataactggcagca

SEQ ID NO: 47165 - DNA, 25 bp, Homo sapien
acttcaagggcattaacgatctctc

SEQ ID NO: 47166 - DNA, 25 bp, Homo sapien
ttttgtgcaagtaaaccatgtttct

SEQ ID NO: 47167 - DNA, 25 bp, Homo sapien
ggcagcaaagaaggtccttgcaata

SEQ ID NO: 47168 - DNA, 25 bp, Homo sapien
tctgcttgagaacttatgatgtaat

SEQ ID NO: 47169 - DNA, 25 bp, Homo sapien
aaagcccattactagaggtagaaat

SEQ ID NO: 47170 - DNA, 25 bp, Homo sapien
gaaggtccttgcaatagactgcctc

SEQ ID NO: 47171 - DNA, 25 bp, Homo sapien
gtgcacttgcccaggctcaaggata

SEQ ID NO: 47172 - DNA, 25 bp, Homo sapien
caagtattactgagcaaagtgcatt

SEQ ID NO: 47173 - DNA, 25 bp, Homo sapien
taaaatctagcacataaagcccatt

SEQ ID NO: 47174 - DNA, 25 bp, Homo sapien
aaacagcctatgataactggcagca

SEQ ID NO: 47175 - DNA, 25 bp, Homo sapien
tctgcttgagaacttatgatgtaat

SEQ ID NO: 47176 - DNA, 25 bp, Homo sapien
caagtattactgagcaaagtgcatt

SEQ ID NO: 47177 - DNA, 25 bp, Homo sapien
ggcagcaaagaaggtccttgcaata

SEQ ID NO: 47178 - DNA, 25 bp, Homo sapien
gaaggtccttgcaatagactgcctc

SEQ ID NO: 47179 - DNA, 25 bp, Homo sapien
ttttgtgcaagtaaaccatgtttct

SEQ ID NO: 47180 - DNA, 25 bp, Homo sapien
taaaatctagcacataaagcccatt

SEQ ID NO: 47181 - DNA, 25 bp, Homo sapien
acttcaagggcattaacgatctctc

SEQ ID NO: 47182 - DNA, 25 bp, Homo sapien
gtgcacttgcccaggctcaaggata

SEQ ID NO: 47183 - DNA, 25 bp, Homo sapien
aaagcccattactagaggtagaaat

SEQ ID NO: 47184 - DNA, 25 bp, Homo sapien
agaggtagaaatacaggcaatatac

SEQ ID NO: 47185 - DNA, 25 bp, Homo sapien
tctgcttgagaacttatgatgtaat

SEQ ID NO: 47186 - DNA, 25 bp, Homo sapien
gaaggtccttgcaatagactgcctc

SEQ ID NO: 47187 - DNA, 25 bp, Homo sapien
ggcagcaaagaaggtccttgcaata

SEQ ID NO: 47188 - DNA, 25 bp, Homo sapien
aaacagcctatgataactggcagca

SEQ ID NO: 47189 - DNA, 25 bp, Homo sapien
caagtattactgagcaaagtgcatt

SEQ ID NO: 47190 - DNA, 25 bp, Homo sapien
agaggtagaaatacaggcaatatac

SEQ ID NO: 47191 - DNA, 25 bp, Homo sapien
aaagcccattactagaggtagaaat

SEQ ID NO: 47192 - DNA, 25 bp, Homo sapien
taaaatctagcacataaagcccatt

SEQ ID NO: 47193 - DNA, 25 bp, Homo sapien
gtgcacttgcccaggctcaaggata

SEQ ID NO: 47194 - DNA, 25 bp, Homo sapien
ttttgtgcaagtaaaccatgtttct

SEQ ID NO: 47195 - DNA, 25 bp, Homo sapien
acttcaagggcattaacgatctctc

SEQ ID NO: 47196 - DNA, 25 bp, Homo sapien
aaagcccattactagaggtagaaat

SEQ ID NO: 47197 - DNA, 25 bp, Homo sapien
taaaatctagcacataaagcccatt

SEQ ID NO: 47198 - DNA, 25 bp, Homo sapien
acttcaagggcattaacgatctctc

SEQ ID NO: 47199 - DNA, 25 bp, Homo sapien
ggcagcaaagaaggtccttgcaata

SEQ ID NO: 47200 - DNA, 25 bp, Homo sapien
caagtattactgagcaaagtgcatt

SEQ ID NO: 47201 - DNA, 25 bp, Homo sapien
gtgcacttgcccaggctcaaggata

SEQ ID NO: 47202 - DNA, 25 bp, Homo sapien
gaaggtccttgcaatagactgcctc

SEQ ID NO: 47203 - DNA, 25 bp, Homo sapien
agaggtagaaatacaggcaatatac

SEQ ID NO: 47204 - DNA, 25 bp, Homo sapien
tctgcttgagaacttatgatgtaat

SEQ ID NO: 47205 - DNA, 25 bp, Homo sapien
ttttgtgcaagtaaaccatgtttct

SEQ ID NO: 47206 - DNA, 25 bp, Homo sapien
aaacagcctatgataactggcagca

SEQ ID NO: 47207 - DNA, 25 bp, Homo sapien
tctgcttgagaacttatgatgtaat

SEQ ID NO: 47208 - DNA, 25 bp, Homo sapien
gaaggtccttgcaatagactgcctc

SEQ ID NO: 47209 - DNA, 25 bp, Homo sapien
ggcagcaaagaaggtccttgcaata

SEQ ID NO: 47210 - DNA, 25 bp, Homo sapien
aaacagcctatgataactggcagca

SEQ ID NO: 47211 - DNA, 25 bp, Homo sapien
caagtattactgagcaaagtgcatt

SEQ ID NO: 47212 - DNA, 25 bp, Homo sapien
agaggtagaaatacaggcaatatac

SEQ ID NO: 47213 - DNA, 25 bp, Homo sapien
aaagcccattactagaggtagaaat

SEQ ID NO: 47214 - DNA, 25 bp, Homo sapien
taaaatctagcacataaagcccatt

SEQ ID NO: 47215 - DNA, 25 bp, Homo sapien
gtgcacttgcccaggctcaaggata

SEQ ID NO: 47216 - DNA, 25 bp, Homo sapien
ttttgtgcaagtaaaccatgtttct

SEQ ID NO: 47217 - DNA, 25 bp, Homo sapien
acttcaagggcattaacgatctctc

SEQ ID NO: 47218 - DNA, 25 bp, Homo sapien
ggcagcaaagaaggtccttgcaata

SEQ ID NO: 47219 - DNA, 25 bp, Homo sapien
tctgcttgagaacttatgatgtaat

SEQ ID NO: 47220 - DNA, 25 bp, Homo sapien
gtgcacttgcccaggctcaaggata

SEQ ID NO: 47221 - DNA, 25 bp, Homo sapien
aaacagcctatgataactggcagca

SEQ ID NO: 47222 - DNA, 25 bp, Homo sapien
acttcaagggcattaacgatctctc

SEQ ID NO: 47223 - DNA, 25 bp, Homo sapien
caagtattactgagcaaagtgcatt

SEQ ID NO: 47224 - DNA, 25 bp, Homo sapien
gaaggtccttgcaatagactgcctc

SEQ ID NO: 47225 - DNA, 25 bp, Homo sapien
ttttgtgcaagtaaaccatgtttct

SEQ ID NO: 47226 - DNA, 25 bp, Homo sapien
taaaatctagcacataaagcccatt

SEQ ID NO: 47227 - DNA, 25 bp, Homo sapien
aaagcccattactagaggtagaaat

SEQ ID NO: 47228 - DNA, 25 bp, Homo sapien
agaggtagaaatacaggcaatatac

SEQ ID NO: 47229 - DNA, 25 bp, Homo sapien
tctgcttgagaacttatgatgtaat

SEQ ID NO: 47230 - DNA, 25 bp, Homo sapien
gaaggtccttgcaatagactgcctc

SEQ ID NO: 47231 - DNA, 25 bp, Homo sapien
ggcagcaaagaaggtccttgcaata

SEQ ID NO: 47232 - DNA, 25 bp, Homo sapien
aaacagcctatgataactggcagca

SEQ ID NO: 47233 - DNA, 25 bp, Homo sapien
caagtattactgagcaaagtgcatt

SEQ ID NO: 47234 - DNA, 25 bp, Homo sapien
agaggtagaaatacaggcaatatac

SEQ ID NO: 47235 - DNA, 25 bp, Homo sapien
aaagcccattactagaggtagaaat

SEQ ID NO: 47236 - DNA, 25 bp, Homo sapien
taaaatctagcacataaagcccatt

SEQ ID NO: 47237 - DNA, 25 bp, Homo sapien
gtgcacttgcccaggctcaaggata

SEQ ID NO: 47238 - DNA, 25 bp, Homo sapien
ttttgtgcaagtaaaccatgtttct

SEQ ID NO: 47239 - DNA, 25 bp, Homo sapien
acttcaagggcattaacgatctctc

SEQ ID NO: 47240 - DNA, 25 bp, Homo sapien
tctgcttgagaacttatgatgtaat

SEQ ID NO: 47241 - DNA, 25 bp, Homo sapien
ttttgtgcaagtaaaccatgtttct

SEQ ID NO: 47242 - DNA, 25 bp, Homo sapien
acttcaagggcattaacgatctctc

SEQ ID NO: 47243 - DNA, 25 bp, Homo sapien
aaacagcctatgataactggcagca

SEQ ID NO: 47244 - DNA, 25 bp, Homo sapien
agaggtagaaatacaggcaatatac

SEQ ID NO: 47245 - DNA, 25 bp, Homo sapien
taaaatctagcacataaagcccatt

SEQ ID NO: 47246 - DNA, 25 bp, Homo sapien
caagtattactgagcaaagtgcatt

SEQ ID NO: 47247 - DNA, 25 bp, Homo sapien
gaaggtccttgcaatagactgcctc

SEQ ID NO: 47248 - DNA, 25 bp, Homo sapien
aaagcccattactagaggtagaaat

SEQ ID NO: 47249 - DNA, 25 bp, Homo sapien
gtgcacttgcccaggctcaaggata

SEQ ID NO: 47250 - DNA, 25 bp, Homo sapien
ggcagcaaagaaggtccttgcaata

SEQ ID NO: 47251 - DNA, 25 bp, Homo sapien
tctgcttgagaacttatgatgtaat

SEQ ID NO: 47252 - DNA, 25 bp, Homo sapien
gaaggtccttgcaatagactgcctc

SEQ ID NO: 47253 - DNA, 25 bp, Homo sapien
ggcagcaaagaaggtccttgcaata

SEQ ID NO: 47254 - DNA, 25 bp, Homo sapien
aaacagcctatgataactggcagca

SEQ ID NO: 47255 - DNA, 25 bp, Homo sapien
caagtattactgagcaaagtgcatt

SEQ ID NO: 47256 - DNA, 25 bp, Homo sapien
agaggtagaaatacaggcaatatac

SEQ ID NO: 47257 - DNA, 25 bp, Homo sapien
aaagcccattactagaggtagaaat

SEQ ID NO: 47258 - DNA, 25 bp, Homo sapien
taaaatctagcacataaagcccatt

SEQ ID NO: 47259 - DNA, 25 bp, Homo sapien
gtgcacttgcccaggctcaaggata

SEQ ID NO: 47260 - DNA, 25 bp, Homo sapien
ttttgtgcaagtaaaccatgtttct

SEQ ID NO: 47261 - DNA, 25 bp, Homo sapien
acttcaagggcattaacgatctctc

SEQ ID NO: 47262 - DNA, 25 bp, Homo sapien
gaaggtccttgcaatagactgcctc

SEQ ID NO: 47263 - DNA, 25 bp, Homo sapien
ggcagcaaagaaggtccttgcaata

SEQ ID NO: 47264 - DNA, 25 bp, Homo sapien
aaacagcctatgataactggcagca

SEQ ID NO: 47265 - DNA, 25 bp, Homo sapien
agaggtagaaatacaggcaatatac

SEQ ID NO: 47266 - DNA, 25 bp, Homo sapien
gtgcacttgcccaggctcaaggata

SEQ ID NO: 47267 - DNA, 25 bp, Homo sapien
caagtattactgagcaaagtgcatt

SEQ ID NO: 47268 - DNA, 25 bp, Homo sapien
tctgcttgagaacttatgatgtaat

SEQ ID NO: 47269 - DNA, 25 bp, Homo sapien
taaaatctagcacataaagcccatt

SEQ ID NO: 47270 - DNA, 25 bp, Homo sapien
acttcaagggcattaacgatctctc

SEQ ID NO: 47271 - DNA, 25 bp, Homo sapien
ttttgtgcaagtaaaccatgtttct

SEQ ID NO: 47272 - DNA, 25 bp, Homo sapien
aaagcccattactagaggtagaaat

SEQ ID NO: 47273 - DNA, 25 bp, Homo sapien
tctgcttgagaacttatgatgtaat

SEQ ID NO: 47274 - DNA, 25 bp, Homo sapien
gaaggtccttgcaatagactgcctc

SEQ ID NO: 47275 - DNA, 25 bp, Homo sapien
ggcagcaaagaaggtccttgcaata

SEQ ID NO: 47276 - DNA, 25 bp, Homo sapien
aaacagcctatgataactggcagca

SEQ ID NO: 47277 - DNA, 25 bp, Homo sapien
caagtattactgagcaaagtgcatt

SEQ ID NO: 47278 - DNA, 25 bp, Homo sapien
agaggtagaaatacaggcaatatac

SEQ ID NO: 47279 - DNA, 25 bp, Homo sapien
aaagcccattactagaggtagaaat

SEQ ID NO: 47280 - DNA, 25 bp, Homo sapien
taaaatctagcacataaagcccatt

SEQ ID NO: 47281 - DNA, 25 bp, Homo sapien
gtgcacttgcccaggctcaaggata

SEQ ID NO: 47282 - DNA, 25 bp, Homo sapien
ttttgtgcaagtaaaccatgtttct

SEQ ID NO: 47283 - DNA, 25 bp, Homo sapien
acttcaagggcattaacgatctctc

SEQ ID NO: 47284 - DNA, 25 bp, Homo sapien
agaggtagaaatacaggcaatatac

SEQ ID NO: 47285 - DNA, 25 bp, Homo sapien
taaaatctagcacataaagcccatt

SEQ ID NO: 47286 - DNA, 25 bp, Homo sapien
ggcagcaaagaaggtccttgcaata

SEQ ID NO: 47287 - DNA, 25 bp, Homo sapien
caagtattactgagcaaagtgcatt

SEQ ID NO: 47288 - DNA, 25 bp, Homo sapien
gaaggtccttgcaatagactgcctc

SEQ ID NO: 47289 - DNA, 25 bp, Homo sapien
tctgcttgagaacttatgatgtaat

SEQ ID NO: 47290 - DNA, 25 bp, Homo sapien
acttcaagggcattaacgatctctc

SEQ ID NO: 47291 - DNA, 25 bp, Homo sapien
ttttgtgcaagtaaaccatgtttct

SEQ ID NO: 47292 - DNA, 25 bp, Homo sapien
gtgcacttgcccaggctcaaggata

SEQ ID NO: 47293 - DNA, 25 bp, Homo sapien
aaagcccattactagaggtagaaat

SEQ ID NO: 47294 - DNA, 25 bp, Homo sapien
aaacagcctatgataactggcagca

SEQ ID NO: 47295 - DNA, 25 bp, Homo sapien
tctgcttgagaacttatgatgtaat

SEQ ID NO: 47296 - DNA, 25 bp, Homo sapien
gaaggtccttgcaatagactgcctc

SEQ ID NO: 47297 - DNA, 25 bp, Homo sapien
ggcagcaaagaaggtccttgcaata

SEQ ID NO: 47298 - DNA, 25 bp, Homo sapien
aaacagcctatgataactggcagca

SEQ ID NO: 47299 - DNA, 25 bp, Homo sapien
caagtattactgagcaaagtgcatt

SEQ ID NO: 47300 - DNA, 25 bp, Homo sapien
agaggtagaaatacaggcaatatac

SEQ ID NO: 47301 - DNA, 25 bp, Homo sapien
aaagcccattactagaggtagaaat

SEQ ID NO: 47302 - DNA, 25 bp, Homo sapien
taaaatctagcacataaagcccatt

SEQ ID NO: 47303 - DNA, 25 bp, Homo sapien
gtgcacttgcccaggctcaaggata

SEQ ID NO: 47304 - DNA, 25 bp, Homo sapien
ttttgtgcaagtaaaccatgtttct

SEQ ID NO: 47305 - DNA, 25 bp, Homo sapien
acttcaagggcattaacgatctctc

SEQ ID NO: 47306 - DNA, 25 bp, Homo sapien
tctgcttgagaacttatgatgtaat

SEQ ID NO: 47307 - DNA, 25 bp, Homo sapien
gaaggtccttgcaatagactgcctc

SEQ ID NO: 47308 - DNA, 25 bp, Homo sapien
ggcagcaaagaaggtccttgcaata

SEQ ID NO: 47309 - DNA, 25 bp, Homo sapien
aaacagcctatgataactggcagca

SEQ ID NO: 47310 - DNA, 25 bp, Homo sapien
caagtattactgagcaaagtgcatt

SEQ ID NO: 47311 - DNA, 25 bp, Homo sapien
agaggtagaaatacaggcaatatac

SEQ ID NO: 47312 - DNA, 25 bp, Homo sapien
aaagcccattactagaggtagaaat

SEQ ID NO: 47313 - DNA, 25 bp, Homo sapien
taaaatctagcacataaagcccatt

SEQ ID NO: 47314 - DNA, 25 bp, Homo sapien
gtgcacttgcccaggctcaaggata

SEQ ID NO: 47315 - DNA, 25 bp, Homo sapien
ttttgtgcaagtaaaccatgtttct

SEQ ID NO: 47316 - DNA, 25 bp, Homo sapien
acttcaagggcattaacgatctctc

SEQ ID NO: 47317 - DNA, 25 bp, Homo sapien
aaagcccattactagaggtagaaat

SEQ ID NO: 47318 - DNA, 25 bp, Homo sapien
gtgcacttgcccaggctcaaggata

SEQ ID NO: 47319 - DNA, 25 bp, Homo sapien
tctgcttgagaacttatgatgtaat

SEQ ID NO: 47320 - DNA, 25 bp, Homo sapien
ttttgtgcaagtaaaccatgtttct

SEQ ID NO: 47321 - DNA, 25 bp, Homo sapien
ggcagcaaagaaggtccttgcaata

SEQ ID NO: 47322 - DNA, 25 bp, Homo sapien
gaaggtccttgcaatagactgcctc

SEQ ID NO: 47323 - DNA, 25 bp, Homo sapien
acttcaagggcattaacgatctctc

SEQ ID NO: 47324 - DNA, 25 bp, Homo sapien
taaaatctagcacataaagcccatt

SEQ ID NO: 47325 - DNA, 25 bp, Homo sapien
caagtattactgagcaaagtgcatt

SEQ ID NO: 47326 - DNA, 25 bp, Homo sapien
aaacagcctatgataactggcagca

SEQ ID NO: 47327 - DNA, 25 bp, Homo sapien
agaggtagaaatacaggcaatatac

SEQ ID NO: 47328 - DNA, 25 bp, Homo sapien
tctgcttgagaacttatgatgtaat

SEQ ID NO: 47329 - DNA, 25 bp, Homo sapien
gaaggtccttgcaatagactgcctc

SEQ ID NO: 47330 - DNA, 25 bp, Homo sapien
ggcagcaaagaaggtccttgcaata

SEQ ID NO: 47331 - DNA, 25 bp, Homo sapien
aaacagcctatgataactggcagca

SEQ ID NO: 47332 - DNA, 25 bp, Homo sapien
caagtattactgagcaaagtgcatt

SEQ ID NO: 47333 - DNA, 25 bp, Homo sapien
agaggtagaaatacaggcaatatac

SEQ ID NO: 47334 - DNA, 25 bp, Homo sapien
aaagcccattactagaggtagaaat

SEQ ID NO: 47335 - DNA, 25 bp, Homo sapien
taaaatctagcacataaagcccatt

SEQ ID NO: 47336 - DNA, 25 bp, Homo sapien
gtgcacttgcccaggctcaaggata

SEQ ID NO: 47337 - DNA, 25 bp, Homo sapien
ttttgtgcaagtaaaccatgtttct

SEQ ID NO: 47338 - DNA, 25 bp, Homo sapien
acttcaagggcattaacgatctctc

SEQ ID NO: 47339 - DNA, 25 bp, Homo sapien
acttcaagggcattaacgatctctc

SEQ ID NO: 47340 - DNA, 25 bp, Homo sapien
caagtattactgagcaaagtgcatt

SEQ ID NO: 47341 - DNA, 25 bp, Homo sapien
tctgcttgagaacttatgatgtaat

SEQ ID NO: 47342 - DNA, 25 bp, Homo sapien
ttttgtgcaagtaaaccatgtttct

SEQ ID NO: 47343 - DNA, 25 bp, Homo sapien
agaggtagaaatacaggcaatatac

SEQ ID NO: 47344 - DNA, 25 bp, Homo sapien
gaaggtccttgcaatagactgcctc

SEQ ID NO: 47345 - DNA, 25 bp, Homo sapien
aaacagcctatgataactggcagca

SEQ ID NO: 47346 - DNA, 25 bp, Homo sapien
gtgcacttgcccaggctcaaggata

SEQ ID NO: 47347 - DNA, 25 bp, Homo sapien
taaaatctagcacataaagcccatt

SEQ ID NO: 47348 - DNA, 25 bp, Homo sapien
aaagcccattactagaggtagaaat

SEQ ID NO: 47349 - DNA, 25 bp, Homo sapien
ggcagcaaagaaggtccttgcaata

SEQ ID NO: 47350 - DNA, 25 bp, Homo sapien
tctgcttgagaacttatgatgtaat

SEQ ID NO: 47351 - DNA, 25 bp, Homo sapien
gaaggtccttgcaatagactgcctc

SEQ ID NO: 47352 - DNA, 25 bp, Homo sapien
ggcagcaaagaaggtccttgcaata

SEQ ID NO: 47353 - DNA, 25 bp, Homo sapien
aaacagcctatgataactggcagca

SEQ ID NO: 47354 - DNA, 25 bp, Homo sapien
caagtattactgagcaaagtgcatt

SEQ ID NO: 47355 - DNA, 25 bp, Homo sapien
agaggtagaaatacaggcaatatac

SEQ ID NO: 47356 - DNA, 25 bp, Homo sapien
aaagcccattactagaggtagaaat

SEQ ID NO: 47357 - DNA, 25 bp, Homo sapien
taaaatctagcacataaagcccatt

SEQ ID NO: 47358 - DNA, 25 bp, Homo sapien
gtgcacttgcccaggctcaaggata

SEQ ID NO: 47359 - DNA, 25 bp, Homo sapien
ttttgtgcaagtaaaccatgtttct

SEQ ID NO: 47360 - DNA, 25 bp, Homo sapien
acttcaagggcattaacgatctctc

SEQ ID NO: 47361 - DNA, 25 bp, Homo sapien
ggcagcaaagaaggtccttgcaata

SEQ ID NO: 47362 - DNA, 25 bp, Homo sapien
tctgcttgagaacttatgatgtaat

SEQ ID NO: 47363 - DNA, 25 bp, Homo sapien
ttttgtgcaagtaaaccatgtttct

SEQ ID NO: 47364 - DNA, 25 bp, Homo sapien
aaacagcctatgataactggcagca

SEQ ID NO: 47365 - DNA, 25 bp, Homo sapien
agaggtagaaatacaggcaatatac

SEQ ID NO: 47366 - DNA, 25 bp, Homo sapien
aaagcccattactagaggtagaaat

SEQ ID NO: 47367 - DNA, 25 bp, Homo sapien
acttcaagggcattaacgatctctc

SEQ ID NO: 47368 - DNA, 25 bp, Homo sapien
gtgcacttgcccaggctcaaggata

SEQ ID NO: 47369 - DNA, 25 bp, Homo sapien
taaaatctagcacataaagcccatt

SEQ ID NO: 47370 - DNA, 25 bp, Homo sapien
gaaggtccttgcaatagactgcctc

SEQ ID NO: 47371 - DNA, 25 bp, Homo sapien
caagtattactgagcaaagtgcatt

SEQ ID NO: 47372 - DNA, 25 bp, Homo sapien
tctgcttgagaacttatgatgtaat

SEQ ID NO: 47373 - DNA, 25 bp, Homo sapien
gaaggtccttgcaatagactgcctc

SEQ ID NO: 47374 - DNA, 25 bp, Homo sapien
ggcagcaaagaaggtccttgcaata

SEQ ID NO: 47375 - DNA, 25 bp, Homo sapien
aaacagcctatgataactggcagca

SEQ ID NO: 47376 - DNA, 25 bp, Homo sapien
caagtattactgagcaaagtgcatt

SEQ ID NO: 47377 - DNA, 25 bp, Homo sapien
agaggtagaaatacaggcaatatac

SEQ ID NO: 47378 - DNA, 25 bp, Homo sapien
aaagcccattactagaggtagaaat

SEQ ID NO: 47379 - DNA, 25 bp, Homo sapien
taaaatctagcacataaagcccatt

SEQ ID NO: 47380 - DNA, 25 bp, Homo sapien
gtgcacttgcccaggctcaaggata

SEQ ID NO: 47381 - DNA, 25 bp, Homo sapien
ttttgtgcaagtaaaccatgtttct

SEQ ID NO: 47382 - DNA, 25 bp, Homo sapien
acttcaagggcattaacgatctctc

SEQ ID NO: 47383 - DNA, 25 bp, Homo sapien
tctgcttgagaacttatgatgtaat

SEQ ID NO: 47384 - DNA, 25 bp, Homo sapien
aaacagcctatgataactggcagca

SEQ ID NO: 47385 - DNA, 25 bp, Homo sapien
gtgcacttgcccaggctcaaggata

SEQ ID NO: 47386 - DNA, 25 bp, Homo sapien
agaggtagaaatacaggcaatatac

SEQ ID NO: 47387 - DNA, 25 bp, Homo sapien
gaaggtccttgcaatagactgcctc

SEQ ID NO: 47388 - DNA, 25 bp, Homo sapien
ggcagcaaagaaggtccttgcaata

SEQ ID NO: 47389 - DNA, 25 bp, Homo sapien
taaaatctagcacataaagcccatt

SEQ ID NO: 47390 - DNA, 25 bp, Homo sapien
ttttgtgcaagtaaaccatgtttct

SEQ ID NO: 47391 - DNA, 25 bp, Homo sapien
acttcaagggcattaacgatctctc

SEQ ID NO: 47392 - DNA, 25 bp, Homo sapien
caagtattactgagcaaagtgcatt

SEQ ID NO: 47393 - DNA, 25 bp, Homo sapien
aaagcccattactagaggtagaaat

SEQ ID NO: 47394 - DNA, 25 bp, Homo sapien
tctgcttgagaacttatgatgtaat

SEQ ID NO: 47395 - DNA, 25 bp, Homo sapien
gaaggtccttgcaatagactgcctc

SEQ ID NO: 47396 - DNA, 25 bp, Homo sapien
ggcagcaaagaaggtccttgcaata

SEQ ID NO: 47397 - DNA, 25 bp, Homo sapien
aaacagcctatgataactggcagca

SEQ ID NO: 47398 - DNA, 25 bp, Homo sapien
caagtattactgagcaaagtgcatt

SEQ ID NO: 47399 - DNA, 25 bp, Homo sapien
agaggtagaaatacaggcaatatac

SEQ ID NO: 47400 - DNA, 25 bp, Homo sapien
aaagcccattactagaggtagaaat

SEQ ID NO: 47401 - DNA, 25 bp, Homo sapien
taaaatctagcacataaagcccatt

SEQ ID NO: 47402 - DNA, 25 bp, Homo sapien
gtgcacttgcccaggctcaaggata

SEQ ID NO: 47403 - DNA, 25 bp, Homo sapien
ttttgtgcaagtaaaccatgtttct

SEQ ID NO: 47404 - DNA, 25 bp, Homo sapien
acttcaagggcattaacgatctctc

SEQ ID NO: 47405 - DNA, 25 bp, Homo sapien
tctgcttgagaacttatgatgtaat

SEQ ID NO: 47406 - DNA, 25 bp, Homo sapien
ttttgtgcaagtaaaccatgtttct

SEQ ID NO: 47407 - DNA, 25 bp, Homo sapien
gaaggtccttgcaatagactgcctc

SEQ ID NO: 47408 - DNA, 25 bp, Homo sapien
taaaatctagcacataaagcccatt

SEQ ID NO: 47409 - DNA, 25 bp, Homo sapien
gtgcacttgcccaggctcaaggata

SEQ ID NO: 47410 - DNA, 25 bp, Homo sapien
ggcagcaaagaaggtccttgcaata

SEQ ID NO: 47411 - DNA, 25 bp, Homo sapien
acttcaagggcattaacgatctctc

SEQ ID NO: 47412 - DNA, 25 bp, Homo sapien
aaacagcctatgataactggcagca

SEQ ID NO: 47413 - DNA, 25 bp, Homo sapien
caagtattactgagcaaagtgcatt

SEQ ID NO: 47414 - DNA, 25 bp, Homo sapien
aaagcccattactagaggtagaaat

SEQ ID NO: 47415 - DNA, 25 bp, Homo sapien
agaggtagaaatacaggcaatatac

SEQ ID NO: 47416 - DNA, 25 bp, Homo sapien
ttttgtgcaagtaaaccatgtttct

SEQ ID NO: 47417 - DNA, 25 bp, Homo sapien
tctgcttgagaacttatgatgtaat

SEQ ID NO: 47418 - DNA, 25 bp, Homo sapien
aaagcccattactagaggtagaaat

SEQ ID NO: 47419 - DNA, 25 bp, Homo sapien
caagtattactgagcaaagtgcatt

SEQ ID NO: 47420 - DNA, 25 bp, Homo sapien
agaggtagaaatacaggcaatatac

SEQ ID NO: 47421 - DNA, 25 bp, Homo sapien
taaaatctagcacataaagcccatt

SEQ ID NO: 47422 - DNA, 25 bp, Homo sapien
gtgcacttgcccaggctcaaggata

SEQ ID NO: 47423 - DNA, 25 bp, Homo sapien
gaaggtccttgcaatagactgcctc

SEQ ID NO: 47424 - DNA, 25 bp, Homo sapien
aaacagcctatgataactggcagca

SEQ ID NO: 47425 - DNA, 25 bp, Homo sapien
ggcagcaaagaaggtccttgcaata

SEQ ID NO: 47426 - DNA, 25 bp, Homo sapien
acttcaagggcattaacgatctctc

SEQ ID NO: 47427 - DNA, 25 bp, Homo sapien
tctgcttgagaacttatgatgtaat

SEQ ID NO: 47428 - DNA, 25 bp, Homo sapien
gaaggtccttgcaatagactgcctc

SEQ ID NO: 47429 - DNA, 25 bp, Homo sapien
ggcagcaaagaaggtccttgcaata

SEQ ID NO: 47430 - DNA, 25 bp, Homo sapien
aaacagcctatgataactggcagca

SEQ ID NO: 47431 - DNA, 25 bp, Homo sapien
caagtattactgagcaaagtgcatt

SEQ ID NO: 47432 - DNA, 25 bp, Homo sapien
agaggtagaaatacaggcaatatac

SEQ ID NO: 47433 - DNA, 25 bp, Homo sapien
aaagcccattactagaggtagaaat

SEQ ID NO: 47434 - DNA, 25 bp, Homo sapien
taaaatctagcacataaagcccatt

SEQ ID NO: 47435 - DNA, 25 bp, Homo sapien
gtgcacttgcccaggctcaaggata

SEQ ID NO: 47436 - DNA, 25 bp, Homo sapien
ttttgtgcaagtaaaccatgtttct

SEQ ID NO: 47437 - DNA, 25 bp, Homo sapien
acttcaagggcattaacgatctctc

SEQ ID NO: 47438 - DNA, 25 bp, Homo sapien
gtgcacttgcccaggctcaaggata

SEQ ID NO: 47439 - DNA, 25 bp, Homo sapien
tctgcttgagaacttatgatgtaat

SEQ ID NO: 47440 - DNA, 25 bp, Homo sapien
caagtattactgagcaaagtgcatt

SEQ ID NO: 47441 - DNA, 25 bp, Homo sapien
taaaatctagcacataaagcccatt

SEQ ID NO: 47442 - DNA, 25 bp, Homo sapien
aaagcccattactagaggtagaaat

SEQ ID NO: 47443 - DNA, 25 bp, Homo sapien
agaggtagaaatacaggcaatatac

SEQ ID NO: 47444 - DNA, 25 bp, Homo sapien
gaaggtccttgcaatagactgcctc

SEQ ID NO: 47445 - DNA, 25 bp, Homo sapien
ttttgtgcaagtaaaccatgtttct

SEQ ID NO: 47446 - DNA, 25 bp, Homo sapien
ggcagcaaagaaggtccttgcaata

SEQ ID NO: 47447 - DNA, 25 bp, Homo sapien
acttcaagggcattaacgatctctc

SEQ ID NO: 47448 - DNA, 25 bp, Homo sapien
aaacagcctatgataactggcagca

SEQ ID NO: 47449 - DNA, 25 bp, Homo sapien
tctgcttgagaacttatgatgtaat

SEQ ID NO: 47450 - DNA, 25 bp, Homo sapien
gaaggtccttgcaatagactgcctc

SEQ ID NO: 47451 - DNA, 25 bp, Homo sapien
ggcagcaaagaaggtccttgcaata

SEQ ID NO: 47452 - DNA, 25 bp, Homo sapien
aaacagcctatgataactggcagca

SEQ ID NO: 47453 - DNA, 25 bp, Homo sapien
caagtattactgagcaaagtgcatt

SEQ ID NO: 47454 - DNA, 25 bp, Homo sapien
agaggtagaaatacaggcaatatac

SEQ ID NO: 47455 - DNA, 25 bp, Homo sapien
aaagcccattactagaggtagaaat

SEQ ID NO: 47456 - DNA, 25 bp, Homo sapien
taaaatctagcacataaagcccatt

SEQ ID NO: 47457 - DNA, 25 bp, Homo sapien
gtgcacttgcccaggctcaaggata

SEQ ID NO: 47458 - DNA, 25 bp, Homo sapien
ttttgtgcaagtaaaccatgtttct

SEQ ID NO: 47459 - DNA, 25 bp, Homo sapien
acttcaagggcattaacgatctctc

SEQ ID NO: 47460 - DNA, 25 bp, Homo sapien
gtgcacttgcccaggctcaaggata

SEQ ID NO: 47461 - DNA, 25 bp, Homo sapien
gaaggtccttgcaatagactgcctc

SEQ ID NO: 47462 - DNA, 25 bp, Homo sapien
tctgcttgagaacttatgatgtaat

SEQ ID NO: 47463 - DNA, 25 bp, Homo sapien
ttttgtgcaagtaaaccatgtttct

SEQ ID NO: 47464 - DNA, 25 bp, Homo sapien
taaaatctagcacataaagcccatt

SEQ ID NO: 47465 - DNA, 25 bp, Homo sapien
aaacagcctatgataactggcagca

SEQ ID NO: 47466 - DNA, 25 bp, Homo sapien
acttcaagggcattaacgatctctc

SEQ ID NO: 47467 - DNA, 25 bp, Homo sapien
agaggtagaaatacaggcaatatac

SEQ ID NO: 47468 - DNA, 25 bp, Homo sapien
aaagcccattactagaggtagaaat

SEQ ID NO: 47469 - DNA, 25 bp, Homo sapien
caagtattactgagcaaagtgcatt

SEQ ID NO: 47470 - DNA, 25 bp, Homo sapien
ggcagcaaagaaggtccttgcaata

SEQ ID NO: 47471 - DNA, 25 bp, Homo sapien
tctgcttgagaacttatgatgtaat

SEQ ID NO: 47472 - DNA, 25 bp, Homo sapien
gaaggtccttgcaatagactgcctc

SEQ ID NO: 47473 - DNA, 25 bp, Homo sapien
ggcagcaaagaaggtccttgcaata

SEQ ID NO: 47474 - DNA, 25 bp, Homo sapien
aaacagcctatgataactggcagca

SEQ ID NO: 47475 - DNA, 25 bp, Homo sapien
caagtattactgagcaaagtgcatt

SEQ ID NO: 47476 - DNA, 25 bp, Homo sapien
agaggtagaaatacaggcaatatac

SEQ ID NO: 47477 - DNA, 25 bp, Homo sapien
aaagcccattactagaggtagaaat

SEQ ID NO: 47478 - DNA, 25 bp, Homo sapien
taaaatctagcacataaagcccatt

SEQ ID NO: 47479 - DNA, 25 bp, Homo sapien
gtgcacttgcccaggctcaaggata

SEQ ID NO: 47480 - DNA, 25 bp, Homo sapien
ttttgtgcaagtaaaccatgtttct

SEQ ID NO: 47481 - DNA, 25 bp, Homo sapien
acttcaagggcattaacgatctctc

SEQ ID NO: 47482 - DNA, 25 bp, Homo sapien
tgaggagtctttcacgtggtaccga

SEQ ID NO: 47483 - DNA, 25 bp, Homo sapien
ggtccttgaggatgaggtatttgcc

SEQ ID NO: 47484 - DNA, 25 bp, Homo sapien
atgcagatgtcaatgacgcagcgta

SEQ ID NO: 47485 - DNA, 25 bp, Homo sapien
agcccctcgctgagagtccagcttc

SEQ ID NO: 47486 - DNA, 25 bp, Homo sapien
gtaccgagacacataaccaagcttg

SEQ ID NO: 47487 - DNA, 25 bp, Homo sapien
cgccagtcaacgccattacagtgcc

SEQ ID NO: 47488 - DNA, 25 bp, Homo sapien
ttgaggtactcagatccagccagca

SEQ ID NO: 47489 - DNA, 25 bp, Homo sapien
agagagcaagttagacacacattcc

SEQ ID NO: 47490 - DNA, 25 bp, Homo sapien
aggttgatctggctggcaaactcat

SEQ ID NO: 47491 - DNA, 25 bp, Homo sapien
gtagacacggatgacctgcttgttg

SEQ ID NO: 47492 - DNA, 25 bp, Homo sapien
ccaccgggccaacttgtagctgttg

SEQ ID NO: 47493 - DNA, 25 bp, Homo sapien
cgccagtcaacgccattacagtgcc

SEQ ID NO: 47494 - DNA, 25 bp, Homo sapien
agcccctcgctgagagtccagcttc

SEQ ID NO: 47495 - DNA, 25 bp, Homo sapien
ccaccgggccaacttgtagctgttg

SEQ ID NO: 47496 - DNA, 25 bp, Homo sapien
ttgaggtactcagatccagccagca

SEQ ID NO: 47497 - DNA, 25 bp, Homo sapien
gtaccgagacacataaccaagcttg

SEQ ID NO: 47498 - DNA, 25 bp, Homo sapien
tgaggagtctttcacgtggtaccga

SEQ ID NO: 47499 - DNA, 25 bp, Homo sapien
aggttgatctggctggcaaactcat

SEQ ID NO: 47500 - DNA, 25 bp, Homo sapien
atgcagatgtcaatgacgcagcgta

SEQ ID NO: 47501 - DNA, 25 bp, Homo sapien
ggtccttgaggatgaggtatttgcc

SEQ ID NO: 47502 - DNA, 25 bp, Homo sapien
gtagacacggatgacctgcttgttg

SEQ ID NO: 47503 - DNA, 25 bp, Homo sapien
agagagcaagttagacacacattcc

SEQ ID NO: 47504 - DNA, 25 bp, Homo sapien
ttgaggtactcagatccagccagca

SEQ ID NO: 47505 - DNA, 25 bp, Homo sapien
aggttgatctggctggcaaactcat

SEQ ID NO: 47506 - DNA, 25 bp, Homo sapien
agagagcaagttagacacacattcc

SEQ ID NO: 47507 - DNA, 25 bp, Homo sapien
atgcagatgtcaatgacgcagcgta

SEQ ID NO: 47508 - DNA, 25 bp, Homo sapien
tgaggagtctttcacgtggtaccga

SEQ ID NO: 47509 - DNA, 25 bp, Homo sapien
ccaccgggccaacttgtagctgttg

SEQ ID NO: 47510 - DNA, 25 bp, Homo sapien
ggtccttgaggatgaggtatttgcc

SEQ ID NO: 47511 - DNA, 25 bp, Homo sapien
gtaccgagacacataaccaagcttg

SEQ ID NO: 47512 - DNA, 25 bp, Homo sapien
gtagacacggatgacctgcttgttg

SEQ ID NO: 47513 - DNA, 25 bp, Homo sapien
cgccagtcaacgccattacagtgcc

SEQ ID NO: 47514 - DNA, 25 bp, Homo sapien
agcccctcgctgagagtccagcttc

SEQ ID NO: 47515 - DNA, 25 bp, Homo sapien
agcccctcgctgagagtccagcttc

SEQ ID NO: 47516 - DNA, 25 bp, Homo sapien
ccaccgggccaacttgtagctgttg

SEQ ID NO: 47517 - DNA, 25 bp, Homo sapien
ttgaggtactcagatccagccagca

SEQ ID NO: 47518 - DNA, 25 bp, Homo sapien
gtaccgagacacataaccaagcttg

SEQ ID NO: 47519 - DNA, 25 bp, Homo sapien
tgaggagtctttcacgtggtaccga

SEQ ID NO: 47520 - DNA, 25 bp, Homo sapien
aggttgatctggctggcaaactcat

SEQ ID NO: 47521 - DNA, 25 bp, Homo sapien
atgcagatgtcaatgacgcagcgta

SEQ ID NO: 47522 - DNA, 25 bp, Homo sapien
ggtccttgaggatgaggtatttgcc

SEQ ID NO: 47523 - DNA, 25 bp, Homo sapien
gtagacacggatgacctgcttgttg

SEQ ID NO: 47524 - DNA, 25 bp, Homo sapien
agagagcaagttagacacacattcc

SEQ ID NO: 47525 - DNA, 25 bp, Homo sapien
cgccagtcaacgccattacagtgcc

SEQ ID NO: 47526 - DNA, 25 bp, Homo sapien
ttgaggtactcagatccagccagca

SEQ ID NO: 47527 - DNA, 25 bp, Homo sapien
ggtccttgaggatgaggtatttgcc

SEQ ID NO: 47528 - DNA, 25 bp, Homo sapien
tgaggagtctttcacgtggtaccga

SEQ ID NO: 47529 - DNA, 25 bp, Homo sapien
gtagacacggatgacctgcttgttg

SEQ ID NO: 47530 - DNA, 25 bp, Homo sapien
atgcagatgtcaatgacgcagcgta

SEQ ID NO: 47531 - DNA, 25 bp, Homo sapien
aggttgatctggctggcaaactcat

SEQ ID NO: 47532 - DNA, 25 bp, Homo sapien
agcccctcgctgagagtccagcttc

SEQ ID NO: 47533 - DNA, 25 bp, Homo sapien
cgccagtcaacgccattacagtgcc

SEQ ID NO: 47534 - DNA, 25 bp, Homo sapien
ccaccgggccaacttgtagctgttg

SEQ ID NO: 47535 - DNA, 25 bp, Homo sapien
agagagcaagttagacacacattcc

SEQ ID NO: 47536 - DNA, 25 bp, Homo sapien
gtaccgagacacataaccaagcttg

SEQ ID NO: 47537 - DNA, 25 bp, Homo sapien
cgccagtcaacgccattacagtgcc

SEQ ID NO: 47538 - DNA, 25 bp, Homo sapien
agcccctcgctgagagtccagcttc

SEQ ID NO: 47539 - DNA, 25 bp, Homo sapien
ccaccgggccaacttgtagctgttg

SEQ ID NO: 47540 - DNA, 25 bp, Homo sapien
ttgaggtactcagatccagccagca

SEQ ID NO: 47541 - DNA, 25 bp, Homo sapien
gtaccgagacacataaccaagcttg

SEQ ID NO: 47542 - DNA, 25 bp, Homo sapien
tgaggagtctttcacgtggtaccga

SEQ ID NO: 47543 - DNA, 25 bp, Homo sapien
aggttgatctggctggcaaactcat

SEQ ID NO: 47544 - DNA, 25 bp, Homo sapien
atgcagatgtcaatgacgcagcgta

SEQ ID NO: 47545 - DNA, 25 bp, Homo sapien
ggtccttgaggatgaggtatttgcc

SEQ ID NO: 47546 - DNA, 25 bp, Homo sapien
gtagacacggatgacctgcttgttg

SEQ ID NO: 47547 - DNA, 25 bp, Homo sapien
agagagcaagttagacacacattcc

SEQ ID NO: 47548 - DNA, 25 bp, Homo sapien
cgccagtcaacgccattacagtgcc

SEQ ID NO: 47549 - DNA, 25 bp, Homo sapien
agcccctcgctgagagtccagcttc

SEQ ID NO: 47550 - DNA, 25 bp, Homo sapien
ccaccgggccaacttgtagctgttg

SEQ ID NO: 47551 - DNA, 25 bp, Homo sapien
ttgaggtactcagatccagccagca

SEQ ID NO: 47552 - DNA, 25 bp, Homo sapien
gtaccgagacacataaccaagcttg

SEQ ID NO: 47553 - DNA, 25 bp, Homo sapien
tgaggagtctttcacgtggtaccga

SEQ ID NO: 47554 - DNA, 25 bp, Homo sapien
aggttgatctggctggcaaactcat

SEQ ID NO: 47555 - DNA, 25 bp, Homo sapien
atgcagatgtcaatgacgcagcgta

SEQ ID NO: 47556 - DNA, 25 bp, Homo sapien
ggtccttgaggatgaggtatttgcc

SEQ ID NO: 47557 - DNA, 25 bp, Homo sapien
gtagacacggatgacctgcttgttg

SEQ ID NO: 47558 - DNA, 25 bp, Homo sapien
agagagcaagttagacacacattcc

SEQ ID NO: 47559 - DNA, 25 bp, Homo sapien
gtagacacggatgacctgcttgttg

SEQ ID NO: 47560 - DNA, 25 bp, Homo sapien
gtaccgagacacataaccaagcttg

SEQ ID NO: 47561 - DNA, 25 bp, Homo sapien
ttgaggtactcagatccagccagca

SEQ ID NO: 47562 - DNA, 25 bp, Homo sapien
cgccagtcaacgccattacagtgcc

SEQ ID NO: 47563 - DNA, 25 bp, Homo sapien
ggtccttgaggatgaggtatttgcc

SEQ ID NO: 47564 - DNA, 25 bp, Homo sapien
atgcagatgtcaatgacgcagcgta

SEQ ID NO: 47565 - DNA, 25 bp, Homo sapien
aggttgatctggctggcaaactcat

SEQ ID NO: 47566 - DNA, 25 bp, Homo sapien
tgaggagtctttcacgtggtaccga

SEQ ID NO: 47567 - DNA, 25 bp, Homo sapien
agagagcaagttagacacacattcc

SEQ ID NO: 47568 - DNA, 25 bp, Homo sapien
agcccctcgctgagagtccagcttc

SEQ ID NO: 47569 - DNA, 25 bp, Homo sapien
ccaccgggccaacttgtagctgttg

SEQ ID NO: 47570 - DNA, 25 bp, Homo sapien
cgccagtcaacgccattacagtgcc

SEQ ID NO: 47571 - DNA, 25 bp, Homo sapien
agcccctcgctgagagtccagcttc

SEQ ID NO: 47572 - DNA, 25 bp, Homo sapien
ccaccgggccaacttgtagctgttg

SEQ ID NO: 47573 - DNA, 25 bp, Homo sapien
ttgaggtactcagatccagccagca

SEQ ID NO: 47574 - DNA, 25 bp, Homo sapien
gtaccgagacacataaccaagcttg

SEQ ID NO: 47575 - DNA, 25 bp, Homo sapien
tgaggagtctttcacgtggtaccga

SEQ ID NO: 47576 - DNA, 25 bp, Homo sapien
aggttgatctggctggcaaactcat

SEQ ID NO: 47577 - DNA, 25 bp, Homo sapien
atgcagatgtcaatgacgcagcgta

SEQ ID NO: 47578 - DNA, 25 bp, Homo sapien
ggtccttgaggatgaggtatttgcc

SEQ ID NO: 47579 - DNA, 25 bp, Homo sapien
gtagacacggatgacctgcttgttg

SEQ ID NO: 47580 - DNA, 25 bp, Homo sapien
agagagcaagttagacacacattcc

SEQ ID NO: 47581 - DNA, 25 bp, Homo sapien
atgcagatgtcaatgacgcagcgta

SEQ ID NO: 47582 - DNA, 25 bp, Homo sapien
agcccctcgctgagagtccagcttc

SEQ ID NO: 47583 - DNA, 25 bp, Homo sapien
ggtccttgaggatgaggtatttgcc

SEQ ID NO: 47584 - DNA, 25 bp, Homo sapien
ttgaggtactcagatccagccagca

SEQ ID NO: 47585 - DNA, 25 bp, Homo sapien
gtaccgagacacataaccaagcttg

SEQ ID NO: 47586 - DNA, 25 bp, Homo sapien
gtagacacggatgacctgcttgttg

SEQ ID NO: 47587 - DNA, 25 bp, Homo sapien
aggttgatctggctggcaaactcat

SEQ ID NO: 47588 - DNA, 25 bp, Homo sapien
ccaccgggccaacttgtagctgttg

SEQ ID NO: 47589 - DNA, 25 bp, Homo sapien
cgccagtcaacgccattacagtgcc

SEQ ID NO: 47590 - DNA, 25 bp, Homo sapien
agagagcaagttagacacacattcc

SEQ ID NO: 47591 - DNA, 25 bp, Homo sapien
tgaggagtctttcacgtggtaccga

SEQ ID NO: 47592 - DNA, 25 bp, Homo sapien
cgccagtcaacgccattacagtgcc

SEQ ID NO: 47593 - DNA, 25 bp, Homo sapien
agcccctcgctgagagtccagcttc

SEQ ID NO: 47594 - DNA, 25 bp, Homo sapien
ccaccgggccaacttgtagctgttg

SEQ ID NO: 47595 - DNA, 25 bp, Homo sapien
ttgaggtactcagatccagccagca

SEQ ID NO: 47596 - DNA, 25 bp, Homo sapien
gtaccgagacacataaccaagcttg

SEQ ID NO: 47597 - DNA, 25 bp, Homo sapien
tgaggagtctttcacgtggtaccga

SEQ ID NO: 47598 - DNA, 25 bp, Homo sapien
aggttgatctggctggcaaactcat

SEQ ID NO: 47599 - DNA, 25 bp, Homo sapien
atgcagatgtcaatgacgcagcgta

SEQ ID NO: 47600 - DNA, 25 bp, Homo sapien
ggtccttgaggatgaggtatttgcc

SEQ ID NO: 47601 - DNA, 25 bp, Homo sapien
gtagacacggatgacctgcttgttg

SEQ ID NO: 47602 - DNA, 25 bp, Homo sapien
agagagcaagttagacacacattcc

SEQ ID NO: 47603 - DNA, 25 bp, Homo sapien
ttgaggtactcagatccagccagca

SEQ ID NO: 47604 - DNA, 25 bp, Homo sapien
gtaccgagacacataaccaagcttg

SEQ ID NO: 47605 - DNA, 25 bp, Homo sapien
gtagacacggatgacctgcttgttg

SEQ ID NO: 47606 - DNA, 25 bp, Homo sapien
agagagcaagttagacacacattcc

SEQ ID NO: 47607 - DNA, 25 bp, Homo sapien
tgaggagtctttcacgtggtaccga

SEQ ID NO: 47608 - DNA, 25 bp, Homo sapien
ggtccttgaggatgaggtatttgcc

SEQ ID NO: 47609 - DNA, 25 bp, Homo sapien
aggttgatctggctggcaaactcat

SEQ ID NO: 47610 - DNA, 25 bp, Homo sapien
atgcagatgtcaatgacgcagcgta

SEQ ID NO: 47611 - DNA, 25 bp, Homo sapien
cgccagtcaacgccattacagtgcc

SEQ ID NO: 47612 - DNA, 25 bp, Homo sapien
agcccctcgctgagagtccagcttc

SEQ ID NO: 47613 - DNA, 25 bp, Homo sapien
ccaccgggccaacttgtagctgttg

SEQ ID NO: 47614 - DNA, 25 bp, Homo sapien
cgccagtcaacgccattacagtgcc

SEQ ID NO: 47615 - DNA, 25 bp, Homo sapien
agcccctcgctgagagtccagcttc

SEQ ID NO: 47616 - DNA, 25 bp, Homo sapien
ccaccgggccaacttgtagctgttg

SEQ ID NO: 47617 - DNA, 25 bp, Homo sapien
ttgaggtactcagatccagccagca

SEQ ID NO: 47618 - DNA, 25 bp, Homo sapien
gtaccgagacacataaccaagcttg

SEQ ID NO: 47619 - DNA, 25 bp, Homo sapien
tgaggagtctttcacgtggtaccga

SEQ ID NO: 47620 - DNA, 25 bp, Homo sapien
aggttgatctggctggcaaactcat

SEQ ID NO: 47621 - DNA, 25 bp, Homo sapien
atgcagatgtcaatgacgcagcgta

SEQ ID NO: 47622 - DNA, 25 bp, Homo sapien
ggtccttgaggatgaggtatttgcc

SEQ ID NO: 47623 - DNA, 25 bp, Homo sapien
gtagacacggatgacctgcttgttg

SEQ ID NO: 47624 - DNA, 25 bp, Homo sapien
agagagcaagttagacacacattcc

SEQ ID NO: 47625 - DNA, 25 bp, Homo sapien
ttgaggtactcagatccagccagca

SEQ ID NO: 47626 - DNA, 25 bp, Homo sapien
gtaccgagacacataaccaagcttg

SEQ ID NO: 47627 - DNA, 25 bp, Homo sapien
ggtccttgaggatgaggtatttgcc

SEQ ID NO: 47628 - DNA, 25 bp, Homo sapien
tgaggagtctttcacgtggtaccga

SEQ ID NO: 47629 - DNA, 25 bp, Homo sapien
agcccctcgctgagagtccagcttc

SEQ ID NO: 47630 - DNA, 25 bp, Homo sapien
atgcagatgtcaatgacgcagcgta

SEQ ID NO: 47631 - DNA, 25 bp, Homo sapien
agagagcaagttagacacacattcc

SEQ ID NO: 47632 - DNA, 25 bp, Homo sapien
cgccagtcaacgccattacagtgcc

SEQ ID NO: 47633 - DNA, 25 bp, Homo sapien
ccaccgggccaacttgtagctgttg

SEQ ID NO: 47634 - DNA, 25 bp, Homo sapien
aggttgatctggctggcaaactcat

SEQ ID NO: 47635 - DNA, 25 bp, Homo sapien
gtagacacggatgacctgcttgttg

SEQ ID NO: 47636 - DNA, 25 bp, Homo sapien
cgccagtcaacgccattacagtgcc

SEQ ID NO: 47637 - DNA, 25 bp, Homo sapien
agcccctcgctgagagtccagcttc

SEQ ID NO: 47638 - DNA, 25 bp, Homo sapien
ccaccgggccaacttgtagctgttg

SEQ ID NO: 47639 - DNA, 25 bp, Homo sapien
ttgaggtactcagatccagccagca

SEQ ID NO: 47640 - DNA, 25 bp, Homo sapien
gtaccgagacacataaccaagcttg

SEQ ID NO: 47641 - DNA, 25 bp, Homo sapien
tgaggagtctttcacgtggtaccga

SEQ ID NO: 47642 - DNA, 25 bp, Homo sapien
aggttgatctggctggcaaactcat

SEQ ID NO: 47643 - DNA, 25 bp, Homo sapien
atgcagatgtcaatgacgcagcgta

SEQ ID NO: 47644 - DNA, 25 bp, Homo sapien
ggtccttgaggatgaggtatttgcc

SEQ ID NO: 47645 - DNA, 25 bp, Homo sapien
gtagacacggatgacctgcttgttg

SEQ ID NO: 47646 - DNA, 25 bp, Homo sapien
agagagcaagttagacacacattcc

SEQ ID NO: 47647 - DNA, 25 bp, Homo sapien
cgccagtcaacgccattacagtgcc

SEQ ID NO: 47648 - DNA, 25 bp, Homo sapien
atgcagatgtcaatgacgcagcgta

SEQ ID NO: 47649 - DNA, 25 bp, Homo sapien
ttgaggtactcagatccagccagca

SEQ ID NO: 47650 - DNA, 25 bp, Homo sapien
agcccctcgctgagagtccagcttc

SEQ ID NO: 47651 - DNA, 25 bp, Homo sapien
tgaggagtctttcacgtggtaccga

SEQ ID NO: 47652 - DNA, 25 bp, Homo sapien
ggtccttgaggatgaggtatttgcc

SEQ ID NO: 47653 - DNA, 25 bp, Homo sapien
aggttgatctggctggcaaactcat

SEQ ID NO: 47654 - DNA, 25 bp, Homo sapien
ccaccgggccaacttgtagctgttg

SEQ ID NO: 47655 - DNA, 25 bp, Homo sapien
gtaccgagacacataaccaagcttg

SEQ ID NO: 47656 - DNA, 25 bp, Homo sapien
agagagcaagttagacacacattcc

SEQ ID NO: 47657 - DNA, 25 bp, Homo sapien
gtagacacggatgacctgcttgttg

SEQ ID NO: 47658 - DNA, 25 bp, Homo sapien
gtagacacggatgacctgcttgttg

SEQ ID NO: 47659 - DNA, 25 bp, Homo sapien
ttgaggtactcagatccagccagca

SEQ ID NO: 47660 - DNA, 25 bp, Homo sapien
ggtccttgaggatgaggtatttgcc

SEQ ID NO: 47661 - DNA, 25 bp, Homo sapien
atgcagatgtcaatgacgcagcgta

SEQ ID NO: 47662 - DNA, 25 bp, Homo sapien
tgaggagtctttcacgtggtaccga

SEQ ID NO: 47663 - DNA, 25 bp, Homo sapien
agagagcaagttagacacacattcc

SEQ ID NO: 47664 - DNA, 25 bp, Homo sapien
cgccagtcaacgccattacagtgcc

SEQ ID NO: 47665 - DNA, 25 bp, Homo sapien
gtaccgagacacataaccaagcttg

SEQ ID NO: 47666 - DNA, 25 bp, Homo sapien
agcccctcgctgagagtccagcttc

SEQ ID NO: 47667 - DNA, 25 bp, Homo sapien
aggttgatctggctggcaaactcat

SEQ ID NO: 47668 - DNA, 25 bp, Homo sapien
ccaccgggccaacttgtagctgttg

SEQ ID NO: 47669 - DNA, 25 bp, Homo sapien
cgccagtcaacgccattacagtgcc

SEQ ID NO: 47670 - DNA, 25 bp, Homo sapien
agcccctcgctgagagtccagcttc

SEQ ID NO: 47671 - DNA, 25 bp, Homo sapien
ccaccgggccaacttgtagctgttg

SEQ ID NO: 47672 - DNA, 25 bp, Homo sapien
ttgaggtactcagatccagccagca

SEQ ID NO: 47673 - DNA, 25 bp, Homo sapien
gtaccgagacacataaccaagcttg

SEQ ID NO: 47674 - DNA, 25 bp, Homo sapien
tgaggagtctttcacgtggtaccga

SEQ ID NO: 47675 - DNA, 25 bp, Homo sapien
aggttgatctggctggcaaactcat

SEQ ID NO: 47676 - DNA, 25 bp, Homo sapien
atgcagatgtcaatgacgcagcgta

SEQ ID NO: 47677 - DNA, 25 bp, Homo sapien
ggtccttgaggatgaggtatttgcc

SEQ ID NO: 47678 - DNA, 25 bp, Homo sapien
gtagacacggatgacctgcttgttg

SEQ ID NO: 47679 - DNA, 25 bp, Homo sapien
agagagcaagttagacacacattcc

SEQ ID NO: 47680 - DNA, 25 bp, Homo sapien
gtagacacggatgacctgcttgttg

SEQ ID NO: 47681 - DNA, 25 bp, Homo sapien
ggtccttgaggatgaggtatttgcc

SEQ ID NO: 47682 - DNA, 25 bp, Homo sapien
ttgaggtactcagatccagccagca

SEQ ID NO: 47683 - DNA, 25 bp, Homo sapien
cgccagtcaacgccattacagtgcc

SEQ ID NO: 47684 - DNA, 25 bp, Homo sapien
tgaggagtctttcacgtggtaccga

SEQ ID NO: 47685 - DNA, 25 bp, Homo sapien
atgcagatgtcaatgacgcagcgta

SEQ ID NO: 47686 - DNA, 25 bp, Homo sapien
aggttgatctggctggcaaactcat

SEQ ID NO: 47687 - DNA, 25 bp, Homo sapien
agagagcaagttagacacacattcc

SEQ ID NO: 47688 - DNA, 25 bp, Homo sapien
ccaccgggccaacttgtagctgttg

SEQ ID NO: 47689 - DNA, 25 bp, Homo sapien
agcccctcgctgagagtccagcttc

SEQ ID NO: 47690 - DNA, 25 bp, Homo sapien
gtaccgagacacataaccaagcttg

SEQ ID NO: 47691 - DNA, 25 bp, Homo sapien
cgccagtcaacgccattacagtgcc

SEQ ID NO: 47692 - DNA, 25 bp, Homo sapien
agcccctcgctgagagtccagcttc

SEQ ID NO: 47693 - DNA, 25 bp, Homo sapien
ccaccgggccaacttgtagctgttg

SEQ ID NO: 47694 - DNA, 25 bp, Homo sapien
ttgaggtactcagatccagccagca

SEQ ID NO: 47695 - DNA, 25 bp, Homo sapien
gtaccgagacacataaccaagcttg

SEQ ID NO: 47696 - DNA, 25 bp, Homo sapien
tgaggagtctttcacgtggtaccga

SEQ ID NO: 47697 - DNA, 25 bp, Homo sapien
aggttgatctggctggcaaactcat

SEQ ID NO: 47698 - DNA, 25 bp, Homo sapien
atgcagatgtcaatgacgcagcgta

SEQ ID NO: 47699 - DNA, 25 bp, Homo sapien
ggtccttgaggatgaggtatttgcc

SEQ ID NO: 47700 - DNA, 25 bp, Homo sapien
gtagacacggatgacctgcttgttg

SEQ ID NO: 47701 - DNA, 25 bp, Homo sapien
agagagcaagttagacacacattcc

SEQ ID NO: 47702 - DNA, 25 bp, Homo sapien
agagagcaagttagacacacattcc

SEQ ID NO: 47703 - DNA, 25 bp, Homo sapien
gtaccgagacacataaccaagcttg

SEQ ID NO: 47704 - DNA, 25 bp, Homo sapien
cgccagtcaacgccattacagtgcc

SEQ ID NO: 47705 - DNA, 25 bp, Homo sapien
ttgaggtactcagatccagccagca

SEQ ID NO: 47706 - DNA, 25 bp, Homo sapien
aggttgatctggctggcaaactcat

SEQ ID NO: 47707 - DNA, 25 bp, Homo sapien
ccaccgggccaacttgtagctgttg

SEQ ID NO: 47708 - DNA, 25 bp, Homo sapien
ggtccttgaggatgaggtatttgcc

SEQ ID NO: 47709 - DNA, 25 bp, Homo sapien
agcccctcgctgagagtccagcttc

SEQ ID NO: 47710 - DNA, 25 bp, Homo sapien
gtagacacggatgacctgcttgttg

SEQ ID NO: 47711 - DNA, 25 bp, Homo sapien
atgcagatgtcaatgacgcagcgta

SEQ ID NO: 47712 - DNA, 25 bp, Homo sapien
tgaggagtctttcacgtggtaccga

SEQ ID NO: 47713 - DNA, 25 bp, Homo sapien
cgccagtcaacgccattacagtgcc

SEQ ID NO: 47714 - DNA, 25 bp, Homo sapien
agcccctcgctgagagtccagcttc

SEQ ID NO: 47715 - DNA, 25 bp, Homo sapien
ccaccgggccaacttgtagctgttg

SEQ ID NO: 47716 - DNA, 25 bp, Homo sapien
ttgaggtactcagatccagccagca

SEQ ID NO: 47717 - DNA, 25 bp, Homo sapien
gtaccgagacacataaccaagcttg

SEQ ID NO: 47718 - DNA, 25 bp, Homo sapien
tgaggagtctttcacgtggtaccga

SEQ ID NO: 47719 - DNA, 25 bp, Homo sapien
aggttgatctggctggcaaactcat

SEQ ID NO: 47720 - DNA, 25 bp, Homo sapien
atgcagatgtcaatgacgcagcgta

SEQ ID NO: 47721 - DNA, 25 bp, Homo sapien
ggtccttgaggatgaggtatttgcc

SEQ ID NO: 47722 - DNA, 25 bp, Homo sapien
gtagacacggatgacctgcttgttg

SEQ ID NO: 47723 - DNA, 25 bp, Homo sapien
agagagcaagttagacacacattcc

SEQ ID NO: 47724 - DNA, 25 bp, Homo sapien
aggttgatctggctggcaaactcat

SEQ ID NO: 47725 - DNA, 25 bp, Homo sapien
agagagcaagttagacacacattcc

SEQ ID NO: 47726 - DNA, 25 bp, Homo sapien
tgaggagtctttcacgtggtaccga

SEQ ID NO: 47727 - DNA, 25 bp, Homo sapien
gtagacacggatgacctgcttgttg

SEQ ID NO: 47728 - DNA, 25 bp, Homo sapien
gtaccgagacacataaccaagcttg

SEQ ID NO: 47729 - DNA, 25 bp, Homo sapien
agcccctcgctgagagtccagcttc

SEQ ID NO: 47730 - DNA, 25 bp, Homo sapien
ttgaggtactcagatccagccagca

SEQ ID NO: 47731 - DNA, 25 bp, Homo sapien
cgccagtcaacgccattacagtgcc

SEQ ID NO: 47732 - DNA, 25 bp, Homo sapien
ggtccttgaggatgaggtatttgcc

SEQ ID NO: 47733 - DNA, 25 bp, Homo sapien
ccaccgggccaacttgtagctgttg

SEQ ID NO: 47734 - DNA, 25 bp, Homo sapien
atgcagatgtcaatgacgcagcgta

SEQ ID NO: 47735 - DNA, 25 bp, Homo sapien
cgccagtcaacgccattacagtgcc

SEQ ID NO: 47736 - DNA, 25 bp, Homo sapien
agcccctcgctgagagtccagcttc

SEQ ID NO: 47737 - DNA, 25 bp, Homo sapien
ccaccgggccaacttgtagctgttg

SEQ ID NO: 47738 - DNA, 25 bp, Homo sapien
ttgaggtactcagatccagccagca

SEQ ID NO: 47739 - DNA, 25 bp, Homo sapien
gtaccgagacacataaccaagcttg

SEQ ID NO: 47740 - DNA, 25 bp, Homo sapien
tgaggagtctttcacgtggtaccga

SEQ ID NO: 47741 - DNA, 25 bp, Homo sapien
aggttgatctggctggcaaactcat

SEQ ID NO: 47742 - DNA, 25 bp, Homo sapien
atgcagatgtcaatgacgcagcgta

SEQ ID NO: 47743 - DNA, 25 bp, Homo sapien
ggtccttgaggatgaggtatttgcc

SEQ ID NO: 47744 - DNA, 25 bp, Homo sapien
gtagacacggatgacctgcttgttg

SEQ ID NO: 47745 - DNA, 25 bp, Homo sapien
agagagcaagttagacacacattcc

SEQ ID NO: 47746 - DNA, 25 bp, Homo sapien
agagagcaagttagacacacattcc

SEQ ID NO: 47747 - DNA, 25 bp, Homo sapien
aggttgatctggctggcaaactcat

SEQ ID NO: 47748 - DNA, 25 bp, Homo sapien
atgcagatgtcaatgacgcagcgta

SEQ ID NO: 47749 - DNA, 25 bp, Homo sapien
agcccctcgctgagagtccagcttc

SEQ ID NO: 47750 - DNA, 25 bp, Homo sapien
ttgaggtactcagatccagccagca

SEQ ID NO: 47751 - DNA, 25 bp, Homo sapien
tgaggagtctttcacgtggtaccga

SEQ ID NO: 47752 - DNA, 25 bp, Homo sapien
gtagacacggatgacctgcttgttg

SEQ ID NO: 47753 - DNA, 25 bp, Homo sapien
ccaccgggccaacttgtagctgttg

SEQ ID NO: 47754 - DNA, 25 bp, Homo sapien
gtaccgagacacataaccaagcttg

SEQ ID NO: 47755 - DNA, 25 bp, Homo sapien
cgccagtcaacgccattacagtgcc

SEQ ID NO: 47756 - DNA, 25 bp, Homo sapien
ggtccttgaggatgaggtatttgcc

SEQ ID NO: 47757 - DNA, 25 bp, Homo sapien
cgccagtcaacgccattacagtgcc

SEQ ID NO: 47758 - DNA, 25 bp, Homo sapien
agcccctcgctgagagtccagcttc

SEQ ID NO: 47759 - DNA, 25 bp, Homo sapien
ccaccgggccaacttgtagctgttg

SEQ ID NO: 47760 - DNA, 25 bp, Homo sapien
ttgaggtactcagatccagccagca

SEQ ID NO: 47761 - DNA, 25 bp, Homo sapien
gtaccgagacacataaccaagcttg

SEQ ID NO: 47762 - DNA, 25 bp, Homo sapien
tgaggagtctttcacgtggtaccga

SEQ ID NO: 47763 - DNA, 25 bp, Homo sapien
aggttgatctggctggcaaactcat

SEQ ID NO: 47764 - DNA, 25 bp, Homo sapien
atgcagatgtcaatgacgcagcgta

SEQ ID NO: 47765 - DNA, 25 bp, Homo sapien
ggtccttgaggatgaggtatttgcc

SEQ ID NO: 47766 - DNA, 25 bp, Homo sapien
gtagacacggatgacctgcttgttg

SEQ ID NO: 47767 - DNA, 25 bp, Homo sapien
agagagcaagttagacacacattcc

SEQ ID NO: 47768 - DNA, 25 bp, Homo sapien
ggtccttgaggatgaggtatttgcc

SEQ ID NO: 47769 - DNA, 25 bp, Homo sapien
agagagcaagttagacacacattcc

SEQ ID NO: 47770 - DNA, 25 bp, Homo sapien
atgcagatgtcaatgacgcagcgta

SEQ ID NO: 47771 - DNA, 25 bp, Homo sapien
aggttgatctggctggcaaactcat

SEQ ID NO: 47772 - DNA, 25 bp, Homo sapien
gtagacacggatgacctgcttgttg

SEQ ID NO: 47773 - DNA, 25 bp, Homo sapien
ttgaggtactcagatccagccagca

SEQ ID NO: 47774 - DNA, 25 bp, Homo sapien
tgaggagtctttcacgtggtaccga

SEQ ID NO: 47775 - DNA, 25 bp, Homo sapien
ccaccgggccaacttgtagctgttg

SEQ ID NO: 47776 - DNA, 25 bp, Homo sapien
agcccctcgctgagagtccagcttc

SEQ ID NO: 47777 - DNA, 25 bp, Homo sapien
gtaccgagacacataaccaagcttg

SEQ ID NO: 47778 - DNA, 25 bp, Homo sapien
cgccagtcaacgccattacagtgcc

SEQ ID NO: 47779 - DNA, 25 bp, Homo sapien
cgccagtcaacgccattacagtgcc

SEQ ID NO: 47780 - DNA, 25 bp, Homo sapien
agcccctcgctgagagtccagcttc

SEQ ID NO: 47781 - DNA, 25 bp, Homo sapien
ccaccgggccaacttgtagctgttg

SEQ ID NO: 47782 - DNA, 25 bp, Homo sapien
ttgaggtactcagatccagccagca

SEQ ID NO: 47783 - DNA, 25 bp, Homo sapien
gtaccgagacacataaccaagcttg

SEQ ID NO: 47784 - DNA, 25 bp, Homo sapien
tgaggagtctttcacgtggtaccga

SEQ ID NO: 47785 - DNA, 25 bp, Homo sapien
aggttgatctggctggcaaactcat

SEQ ID NO: 47786 - DNA, 25 bp, Homo sapien
atgcagatgtcaatgacgcagcgta

SEQ ID NO: 47787 - DNA, 25 bp, Homo sapien
ggtccttgaggatgaggtatttgcc

SEQ ID NO: 47788 - DNA, 25 bp, Homo sapien
gtagacacggatgacctgcttgttg

SEQ ID NO: 47789 - DNA, 25 bp, Homo sapien
agagagcaagttagacacacattcc

SEQ ID NO: 47790 - DNA, 25 bp, Homo sapien
cgccagtcaacgccattacagtgcc

SEQ ID NO: 47791 - DNA, 25 bp, Homo sapien
agcccctcgctgagagtccagcttc

SEQ ID NO: 47792 - DNA, 25 bp, Homo sapien
ccaccgggccaacttgtagctgttg

SEQ ID NO: 47793 - DNA, 25 bp, Homo sapien
ttgaggtactcagatccagccagca

SEQ ID NO: 47794 - DNA, 25 bp, Homo sapien
gtaccgagacacataaccaagcttg

SEQ ID NO: 47795 - DNA, 25 bp, Homo sapien
tgaggagtctttcacgtggtaccga

SEQ ID NO: 47796 - DNA, 25 bp, Homo sapien
aggttgatctggctggcaaactcat

SEQ ID NO: 47797 - DNA, 25 bp, Homo sapien
atgcagatgtcaatgacgcagcgta

SEQ ID NO: 47798 - DNA, 25 bp, Homo sapien
ggtccttgaggatgaggtatttgcc

SEQ ID NO: 47799 - DNA, 25 bp, Homo sapien
gtagacacggatgacctgcttgttg

SEQ ID NO: 47800 - DNA, 25 bp, Homo sapien
agagagcaagttagacacacattcc

SEQ ID NO: 47801 - DNA, 25 bp, Homo sapien
gtaccgagacacataaccaagcttg

SEQ ID NO: 47802 - DNA, 25 bp, Homo sapien
gtagacacggatgacctgcttgttg

SEQ ID NO: 47803 - DNA, 25 bp, Homo sapien
agagagcaagttagacacacattcc

SEQ ID NO: 47804 - DNA, 25 bp, Homo sapien
atgcagatgtcaatgacgcagcgta

SEQ ID NO: 47805 - DNA, 25 bp, Homo sapien
agcccctcgctgagagtccagcttc

SEQ ID NO: 47806 - DNA, 25 bp, Homo sapien
ccaccgggccaacttgtagctgttg

SEQ ID NO: 47807 - DNA, 25 bp, Homo sapien
aggttgatctggctggcaaactcat

SEQ ID NO: 47808 - DNA, 25 bp, Homo sapien
ggtccttgaggatgaggtatttgcc

SEQ ID NO: 47809 - DNA, 25 bp, Homo sapien
cgccagtcaacgccattacagtgcc

SEQ ID NO: 47810 - DNA, 25 bp, Homo sapien
ttgaggtactcagatccagccagca

SEQ ID NO: 47811 - DNA, 25 bp, Homo sapien
tgaggagtctttcacgtggtaccga

SEQ ID NO: 47812 - DNA, 25 bp, Homo sapien
gtaccgagacacataaccaagcttg

SEQ ID NO: 47813 - DNA, 25 bp, Homo sapien
gtagacacggatgacctgcttgttg

SEQ ID NO: 47814 - DNA, 25 bp, Homo sapien
agagagcaagttagacacacattcc

SEQ ID NO: 47815 - DNA, 25 bp, Homo sapien
atgcagatgtcaatgacgcagcgta

SEQ ID NO: 47816 - DNA, 25 bp, Homo sapien
agcccctcgctgagagtccagcttc

SEQ ID NO: 47817 - DNA, 25 bp, Homo sapien
ccaccgggccaacttgtagctgttg

SEQ ID NO: 47818 - DNA, 25 bp, Homo sapien
aggttgatctggctggcaaactcat

SEQ ID NO: 47819 - DNA, 25 bp, Homo sapien
ggtccttgaggatgaggtatttgcc

SEQ ID NO: 47820 - DNA, 25 bp, Homo sapien
cgccagtcaacgccattacagtgcc

SEQ ID NO: 47821 - DNA, 25 bp, Homo sapien
tgaggagtctttcacgtggtaccga

SEQ ID NO: 47822 - DNA, 25 bp, Homo sapien
ttgaggtactcagatccagccagca

SEQ ID NO: 47823 - DNA, 25 bp, Homo sapien
gtaccgagacacataaccaagcttg

SEQ ID NO: 47824 - DNA, 25 bp, Homo sapien
gtagacacggatgacctgcttgttg

SEQ ID NO: 47825 - DNA, 25 bp, Homo sapien
agagagcaagttagacacacattcc

SEQ ID NO: 47826 - DNA, 25 bp, Homo sapien
atgcagatgtcaatgacgcagcgta

SEQ ID NO: 47827 - DNA, 25 bp, Homo sapien
ccaccgggccaacttgtagctgttg

SEQ ID NO: 47828 - DNA, 25 bp, Homo sapien
agcccctcgctgagagtccagcttc

SEQ ID NO: 47829 - DNA, 25 bp, Homo sapien
aggttgatctggctggcaaactcat

SEQ ID NO: 47830 - DNA, 25 bp, Homo sapien
ggtccttgaggatgaggtatttgcc

SEQ ID NO: 47831 - DNA, 25 bp, Homo sapien
cgccagtcaacgccattacagtgcc

SEQ ID NO: 47832 - DNA, 25 bp, Homo sapien
ttgaggtactcagatccagccagca

SEQ ID NO: 47833 - DNA, 25 bp, Homo sapien
tgaggagtctttcacgtggtaccga

SEQ ID NO: 47834 - DNA, 25 bp, Homo sapien
gtaccgagacacataaccaagcttg

SEQ ID NO: 47835 - DNA, 25 bp, Homo sapien
gtagacacggatgacctgcttgttg

SEQ ID NO: 47836 - DNA, 25 bp, Homo sapien
atgcagatgtcaatgacgcagcgta

SEQ ID NO: 47837 - DNA, 25 bp, Homo sapien
agagagcaagttagacacacattcc

SEQ ID NO: 47838 - DNA, 25 bp, Homo sapien
agcccctcgctgagagtccagcttc

SEQ ID NO: 47839 - DNA, 25 bp, Homo sapien
ccaccgggccaacttgtagctgttg

SEQ ID NO: 47840 - DNA, 25 bp, Homo sapien
aggttgatctggctggcaaactcat

SEQ ID NO: 47841 - DNA, 25 bp, Homo sapien
ggtccttgaggatgaggtatttgcc

SEQ ID NO: 47842 - DNA, 25 bp, Homo sapien
cgccagtcaacgccattacagtgcc

SEQ ID NO: 47843 - DNA, 25 bp, Homo sapien
tgaggagtctttcacgtggtaccga

SEQ ID NO: 47844 - DNA, 25 bp, Homo sapien
ttgaggtactcagatccagccagca

SEQ ID NO: 47845 - DNA, 25 bp, Homo sapien
gtaccgagacacataaccaagcttg

SEQ ID NO: 47846 - DNA, 25 bp, Homo sapien
gtagacacggatgacctgcttgttg

SEQ ID NO: 47847 - DNA, 25 bp, Homo sapien
agagagcaagttagacacacattcc

SEQ ID NO: 47848 - DNA, 25 bp, Homo sapien
atgcagatgtcaatgacgcagcgta

SEQ ID NO: 47849 - DNA, 25 bp, Homo sapien
agcccctcgctgagagtccagcttc

SEQ ID NO: 47850 - DNA, 25 bp, Homo sapien
ccaccgggccaacttgtagctgttg

SEQ ID NO: 47851 - DNA, 25 bp, Homo sapien
aggttgatctggctggcaaactcat

SEQ ID NO: 47852 - DNA, 25 bp, Homo sapien
ggtccttgaggatgaggtatttgcc

SEQ ID NO: 47853 - DNA, 25 bp, Homo sapien
cgccagtcaacgccattacagtgcc

SEQ ID NO: 47854 - DNA, 25 bp, Homo sapien
ttgaggtactcagatccagccagca

SEQ ID NO: 47855 - DNA, 25 bp, Homo sapien
tgaggagtctttcacgtggtaccga

SEQ ID NO: 47856 - DNA, 25 bp, Homo sapien
gtaccgagacacataaccaagcttg

SEQ ID NO: 47857 - DNA, 25 bp, Homo sapien
gtagacacggatgacctgcttgttg

SEQ ID NO: 47858 - DNA, 25 bp, Homo sapien
atgcagatgtcaatgacgcagcgta

SEQ ID NO: 47859 - DNA, 25 bp, Homo sapien
agagagcaagttagacacacattcc

SEQ ID NO: 47860 - DNA, 25 bp, Homo sapien
ccaccgggccaacttgtagctgttg

SEQ ID NO: 47861 - DNA, 25 bp, Homo sapien
agcccctcgctgagagtccagcttc

SEQ ID NO: 47862 - DNA, 25 bp, Homo sapien
aggttgatctggctggcaaactcat

SEQ ID NO: 47863 - DNA, 25 bp, Homo sapien
ggtccttgaggatgaggtatttgcc

SEQ ID NO: 47864 - DNA, 25 bp, Homo sapien
cgccagtcaacgccattacagtgcc

SEQ ID NO: 47865 - DNA, 25 bp, Homo sapien
tgaggagtctttcacgtggtaccga

SEQ ID NO: 47866 - DNA, 25 bp, Homo sapien
ttgaggtactcagatccagccagca

SEQ ID NO: 47867 - DNA, 25 bp, Homo sapien
gtagacacggatgacctgcttgttg

SEQ ID NO: 47868 - DNA, 25 bp, Homo sapien
gtaccgagacacataaccaagcttg

SEQ ID NO: 47869 - DNA, 25 bp, Homo sapien
agagagcaagttagacacacattcc

SEQ ID NO: 47870 - DNA, 25 bp, Homo sapien
atgcagatgtcaatgacgcagcgta

SEQ ID NO: 47871 - DNA, 25 bp, Homo sapien
ccaccgggccaacttgtagctgttg

SEQ ID NO: 47872 - DNA, 25 bp, Homo sapien
agcccctcgctgagagtccagcttc

SEQ ID NO: 47873 - DNA, 25 bp, Homo sapien
aggttgatctggctggcaaactcat

SEQ ID NO: 47874 - DNA, 25 bp, Homo sapien
ggtccttgaggatgaggtatttgcc

SEQ ID NO: 47875 - DNA, 25 bp, Homo sapien
cgccagtcaacgccattacagtgcc

SEQ ID NO: 47876 - DNA, 25 bp, Homo sapien
tgaggagtctttcacgtggtaccga

SEQ ID NO: 47877 - DNA, 25 bp, Homo sapien
ttgaggtactcagatccagccagca

SEQ ID NO: 47878 - DNA, 25 bp, Homo sapien
gtaccgagacacataaccaagcttg

SEQ ID NO: 47879 - DNA, 25 bp, Homo sapien
gtagacacggatgacctgcttgttg

SEQ ID NO: 47880 - DNA, 25 bp, Homo sapien
agagagcaagttagacacacattcc

SEQ ID NO: 47881 - DNA, 25 bp, Homo sapien
atgcagatgtcaatgacgcagcgta

SEQ ID NO: 47882 - DNA, 25 bp, Homo sapien
agcccctcgctgagagtccagcttc

SEQ ID NO: 47883 - DNA, 25 bp, Homo sapien
ccaccgggccaacttgtagctgttg

SEQ ID NO: 47884 - DNA, 25 bp, Homo sapien
aggttgatctggctggcaaactcat

SEQ ID NO: 47885 - DNA, 25 bp, Homo sapien
ggtccttgaggatgaggtatttgcc

SEQ ID NO: 47886 - DNA, 25 bp, Homo sapien
cgccagtcaacgccattacagtgcc

SEQ ID NO: 47887 - DNA, 25 bp, Homo sapien
tgaggagtctttcacgtggtaccga

SEQ ID NO: 47888 - DNA, 25 bp, Homo sapien
ttgaggtactcagatccagccagca

SEQ ID NO: 47889 - DNA, 25 bp, Homo sapien
gtagacacggatgacctgcttgttg

SEQ ID NO: 47890 - DNA, 25 bp, Homo sapien
gtaccgagacacataaccaagcttg

SEQ ID NO: 47891 - DNA, 25 bp, Homo sapien
agagagcaagttagacacacattcc

SEQ ID NO: 47892 - DNA, 25 bp, Homo sapien
atgcagatgtcaatgacgcagcgta

SEQ ID NO: 47893 - DNA, 25 bp, Homo sapien
ccaccgggccaacttgtagctgttg

SEQ ID NO: 47894 - DNA, 25 bp, Homo sapien
agcccctcgctgagagtccagcttc

SEQ ID NO: 47895 - DNA, 25 bp, Homo sapien
aggttgatctggctggcaaactcat

SEQ ID NO: 47896 - DNA, 25 bp, Homo sapien
ggtccttgaggatgaggtatttgcc

SEQ ID NO: 47897 - DNA, 25 bp, Homo sapien
cgccagtcaacgccattacagtgcc

SEQ ID NO: 47898 - DNA, 25 bp, Homo sapien
ttgaggtactcagatccagccagca

SEQ ID NO: 47899 - DNA, 25 bp, Homo sapien
tgaggagtctttcacgtggtaccga

SEQ ID NO: 47900 - DNA, 25 bp, Homo sapien
gtaccgagacacataaccaagcttg

SEQ ID NO: 47901 - DNA, 25 bp, Homo sapien
ttgaggtactcagatccagccagca

SEQ ID NO: 47902 - DNA, 25 bp, Homo sapien
atgcagatgtcaatgacgcagcgta

SEQ ID NO: 47903 - DNA, 25 bp, Homo sapien
ccaccgggccaacttgtagctgttg

SEQ ID NO: 47904 - DNA, 25 bp, Homo sapien
agagagcaagttagacacacattcc

SEQ ID NO: 47905 - DNA, 25 bp, Homo sapien
gtagacacggatgacctgcttgttg

SEQ ID NO: 47906 - DNA, 25 bp, Homo sapien
tgaggagtctttcacgtggtaccga

SEQ ID NO: 47907 - DNA, 25 bp, Homo sapien
cgccagtcaacgccattacagtgcc

SEQ ID NO: 47908 - DNA, 25 bp, Homo sapien
ggtccttgaggatgaggtatttgcc

SEQ ID NO: 47909 - DNA, 25 bp, Homo sapien
aggttgatctggctggcaaactcat

SEQ ID NO: 47910 - DNA, 25 bp, Homo sapien
agcccctcgctgagagtccagcttc

SEQ ID NO: 47911 - DNA, 25 bp, Homo sapien
gtaccgagacacataaccaagcttg

SEQ ID NO: 47912 - DNA, 25 bp, Homo sapien
gtagacacggatgacctgcttgttg

SEQ ID NO: 47913 - DNA, 25 bp, Homo sapien
agagagcaagttagacacacattcc

SEQ ID NO: 47914 - DNA, 25 bp, Homo sapien
atgcagatgtcaatgacgcagcgta

SEQ ID NO: 47915 - DNA, 25 bp, Homo sapien
agcccctcgctgagagtccagcttc

SEQ ID NO: 47916 - DNA, 25 bp, Homo sapien
ccaccgggccaacttgtagctgttg

SEQ ID NO: 47917 - DNA, 25 bp, Homo sapien
aggttgatctggctggcaaactcat

SEQ ID NO: 47918 - DNA, 25 bp, Homo sapien
ggtccttgaggatgaggtatttgcc

SEQ ID NO: 47919 - DNA, 25 bp, Homo sapien
cgccagtcaacgccattacagtgcc

SEQ ID NO: 47920 - DNA, 25 bp, Homo sapien
tgaggagtctttcacgtggtaccga

SEQ ID NO: 47921 - DNA, 25 bp, Homo sapien
ttgaggtactcagatccagccagca

SEQ ID NO: 47922 - DNA, 25 bp, Homo sapien
cgccagtcaacgccattacagtgcc

SEQ ID NO: 47923 - DNA, 25 bp, Homo sapien
agcccctcgctgagagtccagcttc

SEQ ID NO: 47924 - DNA, 25 bp, Homo sapien
ccaccgggccaacttgtagctgttg

SEQ ID NO: 47925 - DNA, 25 bp, Homo sapien
ttgaggtactcagatccagccagca

SEQ ID NO: 47926 - DNA, 25 bp, Homo sapien
gtaccgagacacataaccaagcttg

SEQ ID NO: 47927 - DNA, 25 bp, Homo sapien
tgaggagtctttcacgtggtaccga

SEQ ID NO: 47928 - DNA, 25 bp, Homo sapien
aggttgatctggctggcaaactcat

SEQ ID NO: 47929 - DNA, 25 bp, Homo sapien
atgcagatgtcaatgacgcagcgta

SEQ ID NO: 47930 - DNA, 25 bp, Homo sapien
ggtccttgaggatgaggtatttgcc

SEQ ID NO: 47931 - DNA, 25 bp, Homo sapien
gtagacacggatgacctgcttgttg

SEQ ID NO: 47932 - DNA, 25 bp, Homo sapien
agagagcaagttagacacacattcc

SEQ ID NO: 47933 - DNA, 25 bp, Homo sapien
caacagctacaagttggcccggtgg

SEQ ID NO: 47934 - DNA, 25 bp, Homo sapien
caacaagcaggtcatccgtgtctac

SEQ ID NO: 47935 - DNA, 25 bp, Homo sapien
ggcaaatacctcatcctcaaggacc

SEQ ID NO: 47936 - DNA, 25 bp, Homo sapien
gaagctggactctcagcgaggggct

SEQ ID NO: 47937 - DNA, 25 bp, Homo sapien
tgctggctggatctgagtacctcaa

SEQ ID NO: 47938 - DNA, 25 bp, Homo sapien
ggcactgtaatggcgttgactggcg

SEQ ID NO: 47939 - DNA, 25 bp, Homo sapien
caagcttggttatgtgtctcggtac

SEQ ID NO: 47940 - DNA, 25 bp, Homo sapien
tacgctgcgtcattgacatctgcat

SEQ ID NO: 47941 - DNA, 25 bp, Homo sapien
atgagtttgccagccagatcaacct

SEQ ID NO: 47942 - DNA, 25 bp, Homo sapien
ggaatgtgtgtctaacttgctctct

SEQ ID NO: 47943 - DNA, 25 bp, Homo sapien
tcggtaccacgtgaaagactcctca

SEQ ID NO: 47944 - DNA, 25 bp, Homo sapien
gtagacacggatgacctgcttgttg

SEQ ID NO: 47945 - DNA, 25 bp, Homo sapien
gtaccgagacacataaccaagcttg

SEQ ID NO: 47946 - DNA, 25 bp, Homo sapien
agagagcaagttagacacacattcc

SEQ ID NO: 47947 - DNA, 25 bp, Homo sapien
atgcagatgtcaatgacgcagcgta

SEQ ID NO: 47948 - DNA, 25 bp, Homo sapien
ccaccgggccaacttgtagctgttg

SEQ ID NO: 47949 - DNA, 25 bp, Homo sapien
agcccctcgctgagagtccagcttc

SEQ ID NO: 47950 - DNA, 25 bp, Homo sapien
aggttgatctggctggcaaactcat

SEQ ID NO: 47951 - DNA, 25 bp, Homo sapien
ggtccttgaggatgaggtatttgcc

SEQ ID NO: 47952 - DNA, 25 bp, Homo sapien
cgccagtcaacgccattacagtgcc

SEQ ID NO: 47953 - DNA, 25 bp, Homo sapien
ttgaggtactcagatccagccagca

SEQ ID NO: 47954 - DNA, 25 bp, Homo sapien
tgaggagtctttcacgtggtaccga

SEQ ID NO: 47955 - DNA, 25 bp, Homo sapien
ccaccgggccaacttgtagctgttg

SEQ ID NO: 47956 - DNA, 25 bp, Homo sapien
agcccctcgctgagagtccagcttc

SEQ ID NO: 47957 - DNA, 25 bp, Homo sapien
ggtccttgaggatgaggtatttgcc

SEQ ID NO: 47958 - DNA, 25 bp, Homo sapien
atgcagatgtcaatgacgcagcgta

SEQ ID NO: 47959 - DNA, 25 bp, Homo sapien
gtaccgagacacataaccaagcttg

SEQ ID NO: 47960 - DNA, 25 bp, Homo sapien
agagagcaagttagacacacattcc

SEQ ID NO: 47961 - DNA, 25 bp, Homo sapien
cgccagtcaacgccattacagtgcc

SEQ ID NO: 47962 - DNA, 25 bp, Homo sapien
aggttgatctggctggcaaactcat

SEQ ID NO: 47963 - DNA, 25 bp, Homo sapien
gtagacacggatgacctgcttgttg

SEQ ID NO: 47964 - DNA, 25 bp, Homo sapien
ttgaggtactcagatccagccagca

SEQ ID NO: 47965 - DNA, 25 bp, Homo sapien
tgaggagtctttcacgtggtaccga

SEQ ID NO: 47966 - DNA, 25 bp, Homo sapien
cgccagtcaacgccattacagtgcc

SEQ ID NO: 47967 - DNA, 25 bp, Homo sapien
agcccctcgctgagagtccagcttc

SEQ ID NO: 47968 - DNA, 25 bp, Homo sapien
ccaccgggccaacttgtagctgttg

SEQ ID NO: 47969 - DNA, 25 bp, Homo sapien
ttgaggtactcagatccagccagca

SEQ ID NO: 47970 - DNA, 25 bp, Homo sapien
gtaccgagacacataaccaagcttg

SEQ ID NO: 47971 - DNA, 25 bp, Homo sapien
tgaggagtctttcacgtggtaccga

SEQ ID NO: 47972 - DNA, 25 bp, Homo sapien
aggttgatctggctggcaaactcat

SEQ ID NO: 47973 - DNA, 25 bp, Homo sapien
atgcagatgtcaatgacgcagcgta

SEQ ID NO: 47974 - DNA, 25 bp, Homo sapien
ggtccttgaggatgaggtatttgcc

SEQ ID NO: 47975 - DNA, 25 bp, Homo sapien
gtagacacggatgacctgcttgttg

SEQ ID NO: 47976 - DNA, 25 bp, Homo sapien
agagagcaagttagacacacattcc

SEQ ID NO: 47977 - DNA, 25 bp, Homo sapien
ccaccgggccaacttgtagctgttg

SEQ ID NO: 47978 - DNA, 25 bp, Homo sapien
ttgaggtactcagatccagccagca

SEQ ID NO: 47979 - DNA, 25 bp, Homo sapien
gtagacacggatgacctgcttgttg

SEQ ID NO: 47980 - DNA, 25 bp, Homo sapien
gtaccgagacacataaccaagcttg

SEQ ID NO: 47981 - DNA, 25 bp, Homo sapien
agcccctcgctgagagtccagcttc

SEQ ID NO: 47982 - DNA, 25 bp, Homo sapien
agagagcaagttagacacacattcc

SEQ ID NO: 47983 - DNA, 25 bp, Homo sapien
cgccagtcaacgccattacagtgcc

SEQ ID NO: 47984 - DNA, 25 bp, Homo sapien
atgcagatgtcaatgacgcagcgta

SEQ ID NO: 47985 - DNA, 25 bp, Homo sapien
tgaggagtctttcacgtggtaccga

SEQ ID NO: 47986 - DNA, 25 bp, Homo sapien
ggtccttgaggatgaggtatttgcc

SEQ ID NO: 47987 - DNA, 25 bp, Homo sapien
aggttgatctggctggcaaactcat

SEQ ID NO: 47988 - DNA, 25 bp, Homo sapien
cgccagtcaacgccattacagtgcc

SEQ ID NO: 47989 - DNA, 25 bp, Homo sapien
agcccctcgctgagagtccagcttc

SEQ ID NO: 47990 - DNA, 25 bp, Homo sapien
ccaccgggccaacttgtagctgttg

SEQ ID NO: 47991 - DNA, 25 bp, Homo sapien
ttgaggtactcagatccagccagca

SEQ ID NO: 47992 - DNA, 25 bp, Homo sapien
gtaccgagacacataaccaagcttg

SEQ ID NO: 47993 - DNA, 25 bp, Homo sapien
tgaggagtctttcacgtggtaccga

SEQ ID NO: 47994 - DNA, 25 bp, Homo sapien
aggttgatctggctggcaaactcat

SEQ ID NO: 47995 - DNA, 25 bp, Homo sapien
atgcagatgtcaatgacgcagcgta

SEQ ID NO: 47996 - DNA, 25 bp, Homo sapien
ggtccttgaggatgaggtatttgcc

SEQ ID NO: 47997 - DNA, 25 bp, Homo sapien
gtagacacggatgacctgcttgttg

SEQ ID NO: 47998 - DNA, 25 bp, Homo sapien
agagagcaagttagacacacattcc

SEQ ID NO: 47999 - DNA, 25 bp, Homo sapien
gtaccgagacacataaccaagcttg

SEQ ID NO: 48000 - DNA, 25 bp, Homo sapien
gtagacacggatgacctgcttgttg

SEQ ID NO: 48001 - DNA, 25 bp, Homo sapien
cgccagtcaacgccattacagtgcc

SEQ ID NO: 48002 - DNA, 25 bp, Homo sapien
agcccctcgctgagagtccagcttc

SEQ ID NO: 48003 - DNA, 25 bp, Homo sapien
agagagcaagttagacacacattcc

SEQ ID NO: 48004 - DNA, 25 bp, Homo sapien
aggttgatctggctggcaaactcat

SEQ ID NO: 48005 - DNA, 25 bp, Homo sapien
atgcagatgtcaatgacgcagcgta

SEQ ID NO: 48006 - DNA, 25 bp, Homo sapien
ttgaggtactcagatccagccagca

SEQ ID NO: 48007 - DNA, 25 bp, Homo sapien
ccaccgggccaacttgtagctgttg

SEQ ID NO: 48008 - DNA, 25 bp, Homo sapien
ggtccttgaggatgaggtatttgcc

SEQ ID NO: 48009 - DNA, 25 bp, Homo sapien
tgaggagtctttcacgtggtaccga

SEQ ID NO: 48010 - DNA, 25 bp, Homo sapien
agcccctcgctgagagtccagcttc

SEQ ID NO: 48011 - DNA, 25 bp, Homo sapien
ccaccgggccaacttgtagctgttg

SEQ ID NO: 48012 - DNA, 25 bp, Homo sapien
ttgaggtactcagatccagccagca

SEQ ID NO: 48013 - DNA, 25 bp, Homo sapien
gtaccgagacacataaccaagcttg

SEQ ID NO: 48014 - DNA, 25 bp, Homo sapien
tgaggagtctttcacgtggtaccga

SEQ ID NO: 48015 - DNA, 25 bp, Homo sapien
aggttgatctggctggcaaactcat

SEQ ID NO: 48016 - DNA, 25 bp, Homo sapien
atgcagatgtcaatgacgcagcgta

SEQ ID NO: 48017 - DNA, 25 bp, Homo sapien
ggtccttgaggatgaggtatttgcc

SEQ ID NO: 48018 - DNA, 25 bp, Homo sapien
gtagacacggatgacctgcttgttg

SEQ ID NO: 48019 - DNA, 25 bp, Homo sapien
agagagcaagttagacacacattcc

SEQ ID NO: 48020 - DNA, 25 bp, Homo sapien
cgccagtcaacgccattacagtgcc

SEQ ID NO: 48021 - DNA, 25 bp, Homo sapien
cgccagtcaacgccattacagtgcc

SEQ ID NO: 48022 - DNA, 25 bp, Homo sapien
agcccctcgctgagagtccagcttc

SEQ ID NO: 48023 - DNA, 25 bp, Homo sapien
ccaccgggccaacttgtagctgttg

SEQ ID NO: 48024 - DNA, 25 bp, Homo sapien
ttgaggtactcagatccagccagca

SEQ ID NO: 48025 - DNA, 25 bp, Homo sapien
gtaccgagacacataaccaagcttg

SEQ ID NO: 48026 - DNA, 25 bp, Homo sapien
tgaggagtctttcacgtggtaccga

SEQ ID NO: 48027 - DNA, 25 bp, Homo sapien
aggttgatctggctggcaaactcat

SEQ ID NO: 48028 - DNA, 25 bp, Homo sapien
atgcagatgtcaatgacgcagcgta

SEQ ID NO: 48029 - DNA, 25 bp, Homo sapien
ggtccttgaggatgaggtatttgcc

SEQ ID NO: 48030 - DNA, 25 bp, Homo sapien
gtagacacggatgacctgcttgttg

SEQ ID NO: 48031 - DNA, 25 bp, Homo sapien
agagagcaagttagacacacattcc

SEQ ID NO: 48032 - DNA, 25 bp, Homo sapien
gtaccgagacacataaccaagcttg

SEQ ID NO: 48033 - DNA, 25 bp, Homo sapien
ttgaggtactcagatccagccagca

SEQ ID NO: 48034 - DNA, 25 bp, Homo sapien
tgaggagtctttcacgtggtaccga

SEQ ID NO: 48035 - DNA, 25 bp, Homo sapien
atgcagatgtcaatgacgcagcgta

SEQ ID NO: 48036 - DNA, 25 bp, Homo sapien
ggtccttgaggatgaggtatttgcc

SEQ ID NO: 48037 - DNA, 25 bp, Homo sapien
gtagacacggatgacctgcttgttg

SEQ ID NO: 48038 - DNA, 25 bp, Homo sapien
cgccagtcaacgccattacagtgcc

SEQ ID NO: 48039 - DNA, 25 bp, Homo sapien
agagagcaagttagacacacattcc

SEQ ID NO: 48040 - DNA, 25 bp, Homo sapien
agcccctcgctgagagtccagcttc

SEQ ID NO: 48041 - DNA, 25 bp, Homo sapien
aggttgatctggctggcaaactcat

SEQ ID NO: 48042 - DNA, 25 bp, Homo sapien
ccaccgggccaacttgtagctgttg

SEQ ID NO: 48043 - DNA, 25 bp, Homo sapien
cgccagtcaacgccattacagtgcc

SEQ ID NO: 48044 - DNA, 25 bp, Homo sapien
agcccctcgctgagagtccagcttc

SEQ ID NO: 48045 - DNA, 25 bp, Homo sapien
ccaccgggccaacttgtagctgttg

SEQ ID NO: 48046 - DNA, 25 bp, Homo sapien
ttgaggtactcagatccagccagca

SEQ ID NO: 48047 - DNA, 25 bp, Homo sapien
gtaccgagacacataaccaagcttg

SEQ ID NO: 48048 - DNA, 25 bp, Homo sapien
tgaggagtctttcacgtggtaccga

SEQ ID NO: 48049 - DNA, 25 bp, Homo sapien
aggttgatctggctggcaaactcat

SEQ ID NO: 48050 - DNA, 25 bp, Homo sapien
atgcagatgtcaatgacgcagcgta

SEQ ID NO: 48051 - DNA, 25 bp, Homo sapien
ggtccttgaggatgaggtatttgcc

SEQ ID NO: 48052 - DNA, 25 bp, Homo sapien
gtagacacggatgacctgcttgttg

SEQ ID NO: 48053 - DNA, 25 bp, Homo sapien
agagagcaagttagacacacattcc

SEQ ID NO: 48054 - DNA, 25 bp, Homo sapien
agcccctcgctgagagtccagcttc

SEQ ID NO: 48055 - DNA, 25 bp, Homo sapien
atgcagatgtcaatgacgcagcgta

SEQ ID NO: 48056 - DNA, 25 bp, Homo sapien
ttgaggtactcagatccagccagca

SEQ ID NO: 48057 - DNA, 25 bp, Homo sapien
aggttgatctggctggcaaactcat

SEQ ID NO: 48058 - DNA, 25 bp, Homo sapien
tgaggagtctttcacgtggtaccga

SEQ ID NO: 48059 - DNA, 25 bp, Homo sapien
gtaccgagacacataaccaagcttg

SEQ ID NO: 48060 - DNA, 25 bp, Homo sapien
ggtccttgaggatgaggtatttgcc

SEQ ID NO: 48061 - DNA, 25 bp, Homo sapien
gtagacacggatgacctgcttgttg

SEQ ID NO: 48062 - DNA, 25 bp, Homo sapien
ccaccgggccaacttgtagctgttg

SEQ ID NO: 48063 - DNA, 25 bp, Homo sapien
agagagcaagttagacacacattcc

SEQ ID NO: 48064 - DNA, 25 bp, Homo sapien
cgccagtcaacgccattacagtgcc

SEQ ID NO: 48065 - DNA, 25 bp, Homo sapien
cgccagtcaacgccattacagtgcc

SEQ ID NO: 48066 - DNA, 25 bp, Homo sapien
agcccctcgctgagagtccagcttc

SEQ ID NO: 48067 - DNA, 25 bp, Homo sapien
ccaccgggccaacttgtagctgttg

SEQ ID NO: 48068 - DNA, 25 bp, Homo sapien
ttgaggtactcagatccagccagca

SEQ ID NO: 48069 - DNA, 25 bp, Homo sapien
gtaccgagacacataaccaagcttg

SEQ ID NO: 48070 - DNA, 25 bp, Homo sapien
tgaggagtctttcacgtggtaccga

SEQ ID NO: 48071 - DNA, 25 bp, Homo sapien
aggttgatctggctggcaaactcat

SEQ ID NO: 48072 - DNA, 25 bp, Homo sapien
atgcagatgtcaatgacgcagcgta

SEQ ID NO: 48073 - DNA, 25 bp, Homo sapien
ggtccttgaggatgaggtatttgcc

SEQ ID NO: 48074 - DNA, 25 bp, Homo sapien
gtagacacggatgacctgcttgttg

SEQ ID NO: 48075 - DNA, 25 bp, Homo sapien
agagagcaagttagacacacattcc

SEQ ID NO: 48076 - DNA, 25 bp, Homo sapien
ttgaggtactcagatccagccagca

SEQ ID NO: 48077 - DNA, 25 bp, Homo sapien
gtaccgagacacataaccaagcttg

SEQ ID NO: 48078 - DNA, 25 bp, Homo sapien
agagagcaagttagacacacattcc

SEQ ID NO: 48079 - DNA, 25 bp, Homo sapien
cgccagtcaacgccattacagtgcc

SEQ ID NO: 48080 - DNA, 25 bp, Homo sapien
ccaccgggccaacttgtagctgttg

SEQ ID NO: 48081 - DNA, 25 bp, Homo sapien
gtagacacggatgacctgcttgttg

SEQ ID NO: 48082 - DNA, 25 bp, Homo sapien
agcccctcgctgagagtccagcttc

SEQ ID NO: 48083 - DNA, 25 bp, Homo sapien
atgcagatgtcaatgacgcagcgta

SEQ ID NO: 48084 - DNA, 25 bp, Homo sapien
aggttgatctggctggcaaactcat

SEQ ID NO: 48085 - DNA, 25 bp, Homo sapien
ggtccttgaggatgaggtatttgcc

SEQ ID NO: 48086 - DNA, 25 bp, Homo sapien
tgaggagtctttcacgtggtaccga

SEQ ID NO: 48087 - DNA, 25 bp, Homo sapien
cgccagtcaacgccattacagtgcc

SEQ ID NO: 48088 - DNA, 25 bp, Homo sapien
agcccctcgctgagagtccagcttc

SEQ ID NO: 48089 - DNA, 25 bp, Homo sapien
ccaccgggccaacttgtagctgttg

SEQ ID NO: 48090 - DNA, 25 bp, Homo sapien
ttgaggtactcagatccagccagca

SEQ ID NO: 48091 - DNA, 25 bp, Homo sapien
gtaccgagacacataaccaagcttg

SEQ ID NO: 48092 - DNA, 25 bp, Homo sapien
tgaggagtctttcacgtggtaccga

SEQ ID NO: 48093 - DNA, 25 bp, Homo sapien
aggttgatctggctggcaaactcat

SEQ ID NO: 48094 - DNA, 25 bp, Homo sapien
atgcagatgtcaatgacgcagcgta

SEQ ID NO: 48095 - DNA, 25 bp, Homo sapien
ggtccttgaggatgaggtatttgcc

SEQ ID NO: 48096 - DNA, 25 bp, Homo sapien
gtagacacggatgacctgcttgttg

SEQ ID NO: 48097 - DNA, 25 bp, Homo sapien
agagagcaagttagacacacattcc

SEQ ID NO: 48098 - DNA, 25 bp, Homo sapien
ccaccgggccaacttgtagctgttg

SEQ ID NO: 48099 - DNA, 25 bp, Homo sapien
gtaccgagacacataaccaagcttg

SEQ ID NO: 48100 - DNA, 25 bp, Homo sapien
cgccagtcaacgccattacagtgcc

SEQ ID NO: 48101 - DNA, 25 bp, Homo sapien
gtagacacggatgacctgcttgttg

SEQ ID NO: 48102 - DNA, 25 bp, Homo sapien
tgaggagtctttcacgtggtaccga

SEQ ID NO: 48103 - DNA, 25 bp, Homo sapien
ttgaggtactcagatccagccagca

SEQ ID NO: 48104 - DNA, 25 bp, Homo sapien
aggttgatctggctggcaaactcat

SEQ ID NO: 48105 - DNA, 25 bp, Homo sapien
agagagcaagttagacacacattcc

SEQ ID NO: 48106 - DNA, 25 bp, Homo sapien
agcccctcgctgagagtccagcttc

SEQ ID NO: 48107 - DNA, 25 bp, Homo sapien
atgcagatgtcaatgacgcagcgta

SEQ ID NO: 48108 - DNA, 25 bp, Homo sapien
ggtccttgaggatgaggtatttgcc

SEQ ID NO: 48109 - DNA, 25 bp, Homo sapien
cgccagtcaacgccattacagtgcc

SEQ ID NO: 48110 - DNA, 25 bp, Homo sapien
agcccctcgctgagagtccagcttc

SEQ ID NO: 48111 - DNA, 25 bp, Homo sapien
ccaccgggccaacttgtagctgttg

SEQ ID NO: 48112 - DNA, 25 bp, Homo sapien
ttgaggtactcagatccagccagca

SEQ ID NO: 48113 - DNA, 25 bp, Homo sapien
gtaccgagacacataaccaagcttg

SEQ ID NO: 48114 - DNA, 25 bp, Homo sapien
tgaggagtctttcacgtggtaccga

SEQ ID NO: 48115 - DNA, 25 bp, Homo sapien
aggttgatctggctggcaaactcat

SEQ ID NO: 48116 - DNA, 25 bp, Homo sapien
atgcagatgtcaatgacgcagcgta

SEQ ID NO: 48117 - DNA, 25 bp, Homo sapien
ggtccttgaggatgaggtatttgcc

SEQ ID NO: 48118 - DNA, 25 bp, Homo sapien
gtagacacggatgacctgcttgttg

SEQ ID NO: 48119 - DNA, 25 bp, Homo sapien
agagagcaagttagacacacattcc

SEQ ID NO: 48120 - DNA, 25 bp, Homo sapien
aggttgatctggctggcaaactcat

SEQ ID NO: 48121 - DNA, 25 bp, Homo sapien
gtagacacggatgacctgcttgttg

SEQ ID NO: 48122 - DNA, 25 bp, Homo sapien
ttgaggtactcagatccagccagca

SEQ ID NO: 48123 - DNA, 25 bp, Homo sapien
gtaccgagacacataaccaagcttg

SEQ ID NO: 48124 - DNA, 25 bp, Homo sapien
ggtccttgaggatgaggtatttgcc

SEQ ID NO: 48125 - DNA, 25 bp, Homo sapien
agcccctcgctgagagtccagcttc

SEQ ID NO: 48126 - DNA, 25 bp, Homo sapien
cgccagtcaacgccattacagtgcc

SEQ ID NO: 48127 - DNA, 25 bp, Homo sapien
tgaggagtctttcacgtggtaccga

SEQ ID NO: 48128 - DNA, 25 bp, Homo sapien
ccaccgggccaacttgtagctgttg

SEQ ID NO: 48129 - DNA, 25 bp, Homo sapien
atgcagatgtcaatgacgcagcgta

SEQ ID NO: 48130 - DNA, 25 bp, Homo sapien
agagagcaagttagacacacattcc

SEQ ID NO: 48131 - DNA, 25 bp, Homo sapien
agcccctcgctgagagtccagcttc

SEQ ID NO: 48132 - DNA, 25 bp, Homo sapien
atgcagatgtcaatgacgcagcgta

SEQ ID NO: 48133 - DNA, 25 bp, Homo sapien
ggtccttgaggatgaggtatttgcc

SEQ ID NO: 48134 - DNA, 25 bp, Homo sapien
ttgaggtactcagatccagccagca

SEQ ID NO: 48135 - DNA, 25 bp, Homo sapien
gtagacacggatgacctgcttgttg

SEQ ID NO: 48136 - DNA, 25 bp, Homo sapien
ccaccgggccaacttgtagctgttg

SEQ ID NO: 48137 - DNA, 25 bp, Homo sapien
gtaccgagacacataaccaagcttg

SEQ ID NO: 48138 - DNA, 25 bp, Homo sapien
tgaggagtctttcacgtggtaccga

SEQ ID NO: 48139 - DNA, 25 bp, Homo sapien
cgccagtcaacgccattacagtgcc

SEQ ID NO: 48140 - DNA, 25 bp, Homo sapien
aggttgatctggctggcaaactcat

SEQ ID NO: 48141 - DNA, 25 bp, Homo sapien
agagagcaagttagacacacattcc

SEQ ID NO: 48142 - DNA, 25 bp, Homo sapien
cgccagtcaacgccattacagtgcc

SEQ ID NO: 48143 - DNA, 25 bp, Homo sapien
agcccctcgctgagagtccagcttc

SEQ ID NO: 48144 - DNA, 25 bp, Homo sapien
ccaccgggccaacttgtagctgttg

SEQ ID NO: 48145 - DNA, 25 bp, Homo sapien
ttgaggtactcagatccagccagca

SEQ ID NO: 48146 - DNA, 25 bp, Homo sapien
gtaccgagacacataaccaagcttg

SEQ ID NO: 48147 - DNA, 25 bp, Homo sapien
tgaggagtctttcacgtggtaccga

SEQ ID NO: 48148 - DNA, 25 bp, Homo sapien
aggttgatctggctggcaaactcat

SEQ ID NO: 48149 - DNA, 25 bp, Homo sapien
atgcagatgtcaatgacgcagcgta

SEQ ID NO: 48150 - DNA, 25 bp, Homo sapien
ggtccttgaggatgaggtatttgcc

SEQ ID NO: 48151 - DNA, 25 bp, Homo sapien
gtagacacggatgacctgcttgttg

SEQ ID NO: 48152 - DNA, 25 bp, Homo sapien
agagagcaagttagacacacattcc

SEQ ID NO: 48153 - DNA, 25 bp, Homo sapien
agcccctcgctgagagtccagcttc

SEQ ID NO: 48154 - DNA, 25 bp, Homo sapien
atgcagatgtcaatgacgcagcgta

SEQ ID NO: 48155 - DNA, 25 bp, Homo sapien
ggtccttgaggatgaggtatttgcc

SEQ ID NO: 48156 - DNA, 25 bp, Homo sapien
ttgaggtactcagatccagccagca

SEQ ID NO: 48157 - DNA, 25 bp, Homo sapien
tgaggagtctttcacgtggtaccga

SEQ ID NO: 48158 - DNA, 25 bp, Homo sapien
gtaccgagacacataaccaagcttg

SEQ ID NO: 48159 - DNA, 25 bp, Homo sapien
agagagcaagttagacacacattcc

SEQ ID NO: 48160 - DNA, 25 bp, Homo sapien
cgccagtcaacgccattacagtgcc

SEQ ID NO: 48161 - DNA, 25 bp, Homo sapien
aggttgatctggctggcaaactcat

SEQ ID NO: 48162 - DNA, 25 bp, Homo sapien
gtagacacggatgacctgcttgttg

SEQ ID NO: 48163 - DNA, 25 bp, Homo sapien
ccaccgggccaacttgtagctgttg

SEQ ID NO: 48164 - DNA, 25 bp, Homo sapien
agcccctcgctgagagtccagcttc

SEQ ID NO: 48165 - DNA, 25 bp, Homo sapien
ccaccgggccaacttgtagctgttg

SEQ ID NO: 48166 - DNA, 25 bp, Homo sapien
ttgaggtactcagatccagccagca

SEQ ID NO: 48167 - DNA, 25 bp, Homo sapien
gtaccgagacacataaccaagcttg

SEQ ID NO: 48168 - DNA, 25 bp, Homo sapien
tgaggagtctttcacgtggtaccga

SEQ ID NO: 48169 - DNA, 25 bp, Homo sapien
aggttgatctggctggcaaactcat

SEQ ID NO: 48170 - DNA, 25 bp, Homo sapien
atgcagatgtcaatgacgcagcgta

SEQ ID NO: 48171 - DNA, 25 bp, Homo sapien
ggtccttgaggatgaggtatttgcc

SEQ ID NO: 48172 - DNA, 25 bp, Homo sapien
gtagacacggatgacctgcttgttg

SEQ ID NO: 48173 - DNA, 25 bp, Homo sapien
agagagcaagttagacacacattcc

SEQ ID NO: 48174 - DNA, 25 bp, Homo sapien
cgccagtcaacgccattacagtgcc

SEQ ID NO: 48175 - DNA, 25 bp, Homo sapien
agcccctcgctgagagtccagcttc

SEQ ID NO: 48176 - DNA, 25 bp, Homo sapien
atgcagatgtcaatgacgcagcgta

SEQ ID NO: 48177 - DNA, 25 bp, Homo sapien
ttgaggtactcagatccagccagca

SEQ ID NO: 48178 - DNA, 25 bp, Homo sapien
tgaggagtctttcacgtggtaccga

SEQ ID NO: 48179 - DNA, 25 bp, Homo sapien
gtaccgagacacataaccaagcttg

SEQ ID NO: 48180 - DNA, 25 bp, Homo sapien
gtagacacggatgacctgcttgttg

SEQ ID NO: 48181 - DNA, 25 bp, Homo sapien
agagagcaagttagacacacattcc

SEQ ID NO: 48182 - DNA, 25 bp, Homo sapien
ccaccgggccaacttgtagctgttg

SEQ ID NO: 48183 - DNA, 25 bp, Homo sapien
aggttgatctggctggcaaactcat

SEQ ID NO: 48184 - DNA, 25 bp, Homo sapien
ggtccttgaggatgaggtatttgcc

SEQ ID NO: 48185 - DNA, 25 bp, Homo sapien
cgccagtcaacgccattacagtgcc

SEQ ID NO: 48186 - DNA, 25 bp, Homo sapien
cgccagtcaacgccattacagtgcc

SEQ ID NO: 48187 - DNA, 25 bp, Homo sapien
agcccctcgctgagagtccagcttc

SEQ ID NO: 48188 - DNA, 25 bp, Homo sapien
ccaccgggccaacttgtagctgttg

SEQ ID NO: 48189 - DNA, 25 bp, Homo sapien
ttgaggtactcagatccagccagca

SEQ ID NO: 48190 - DNA, 25 bp, Homo sapien
gtaccgagacacataaccaagcttg

SEQ ID NO: 48191 - DNA, 25 bp, Homo sapien
tgaggagtctttcacgtggtaccga

SEQ ID NO: 48192 - DNA, 25 bp, Homo sapien
aggttgatctggctggcaaactcat

SEQ ID NO: 48193 - DNA, 25 bp, Homo sapien
atgcagatgtcaatgacgcagcgta

SEQ ID NO: 48194 - DNA, 25 bp, Homo sapien
ggtccttgaggatgaggtatttgcc

SEQ ID NO: 48195 - DNA, 25 bp, Homo sapien
gtagacacggatgacctgcttgttg

SEQ ID NO: 48196 - DNA, 25 bp, Homo sapien
agagagcaagttagacacacattcc

SEQ ID NO: 48197 - DNA, 25 bp, Homo sapien
gtaccgagacacataaccaagcttg

SEQ ID NO: 48198 - DNA, 25 bp, Homo sapien
agagagcaagttagacacacattcc

SEQ ID NO: 48199 - DNA, 25 bp, Homo sapien
agcccctcgctgagagtccagcttc

SEQ ID NO: 48200 - DNA, 25 bp, Homo sapien
aggttgatctggctggcaaactcat

SEQ ID NO: 48201 - DNA, 25 bp, Homo sapien
gtagacacggatgacctgcttgttg

SEQ ID NO: 48202 - DNA, 25 bp, Homo sapien
atgcagatgtcaatgacgcagcgta

SEQ ID NO: 48203 - DNA, 25 bp, Homo sapien
ttgaggtactcagatccagccagca

SEQ ID NO: 48204 - DNA, 25 bp, Homo sapien
ccaccgggccaacttgtagctgttg

SEQ ID NO: 48205 - DNA, 25 bp, Homo sapien
cgccagtcaacgccattacagtgcc

SEQ ID NO: 48206 - DNA, 25 bp, Homo sapien
ggtccttgaggatgaggtatttgcc

SEQ ID NO: 48207 - DNA, 25 bp, Homo sapien
tgaggagtctttcacgtggtaccga

SEQ ID NO: 48208 - DNA, 25 bp, Homo sapien
cgccagtcaacgccattacagtgcc

SEQ ID NO: 48209 - DNA, 25 bp, Homo sapien
agcccctcgctgagagtccagcttc

SEQ ID NO: 48210 - DNA, 25 bp, Homo sapien
ccaccgggccaacttgtagctgttg

SEQ ID NO: 48211 - DNA, 25 bp, Homo sapien
ttgaggtactcagatccagccagca

SEQ ID NO: 48212 - DNA, 25 bp, Homo sapien
gtaccgagacacataaccaagcttg

SEQ ID NO: 48213 - DNA, 25 bp, Homo sapien
tgaggagtctttcacgtggtaccga

SEQ ID NO: 48214 - DNA, 25 bp, Homo sapien
aggttgatctggctggcaaactcat

SEQ ID NO: 48215 - DNA, 25 bp, Homo sapien
atgcagatgtcaatgacgcagcgta

SEQ ID NO: 48216 - DNA, 25 bp, Homo sapien
ggtccttgaggatgaggtatttgcc

SEQ ID NO: 48217 - DNA, 25 bp, Homo sapien
gtagacacggatgacctgcttgttg

SEQ ID NO: 48218 - DNA, 25 bp, Homo sapien
agagagcaagttagacacacattcc

SEQ ID NO: 48219 - DNA, 25 bp, Homo sapien
cgccagtcaacgccattacagtgcc

SEQ ID NO: 48220 - DNA, 25 bp, Homo sapien
gtaccgagacacataaccaagcttg

SEQ ID NO: 48221 - DNA, 25 bp, Homo sapien
agagagcaagttagacacacattcc

SEQ ID NO: 48222 - DNA, 25 bp, Homo sapien
ccaccgggccaacttgtagctgttg

SEQ ID NO: 48223 - DNA, 25 bp, Homo sapien
gtagacacggatgacctgcttgttg

SEQ ID NO: 48224 - DNA, 25 bp, Homo sapien
atgcagatgtcaatgacgcagcgta

SEQ ID NO: 48225 - DNA, 25 bp, Homo sapien
ggtccttgaggatgaggtatttgcc

SEQ ID NO: 48226 - DNA, 25 bp, Homo sapien
aggttgatctggctggcaaactcat

SEQ ID NO: 48227 - DNA, 25 bp, Homo sapien
agcccctcgctgagagtccagcttc

SEQ ID NO: 48228 - DNA, 25 bp, Homo sapien
ttgaggtactcagatccagccagca

SEQ ID NO: 48229 - DNA, 25 bp, Homo sapien
tgaggagtctttcacgtggtaccga

SEQ ID NO: 48230 - DNA, 25 bp, Homo sapien
cgccagtcaacgccattacagtgcc

SEQ ID NO: 48231 - DNA, 25 bp, Homo sapien
agcccctcgctgagagtccagcttc

SEQ ID NO: 48232 - DNA, 25 bp, Homo sapien
ccaccgggccaacttgtagctgttg

SEQ ID NO: 48233 - DNA, 25 bp, Homo sapien
ttgaggtactcagatccagccagca

SEQ ID NO: 48234 - DNA, 25 bp, Homo sapien
gtaccgagacacataaccaagcttg

SEQ ID NO: 48235 - DNA, 25 bp, Homo sapien
tgaggagtctttcacgtggtaccga

SEQ ID NO: 48236 - DNA, 25 bp, Homo sapien
aggttgatctggctggcaaactcat

SEQ ID NO: 48237 - DNA, 25 bp, Homo sapien
atgcagatgtcaatgacgcagcgta

SEQ ID NO: 48238 - DNA, 25 bp, Homo sapien
ggtccttgaggatgaggtatttgcc

SEQ ID NO: 48239 - DNA, 25 bp, Homo sapien
gtagacacggatgacctgcttgttg

SEQ ID NO: 48240 - DNA, 25 bp, Homo sapien
agagagcaagttagacacacattcc

SEQ ID NO: 48241 - DNA, 25 bp, Homo sapien
tgaggagtctttcacgtggtaccga

SEQ ID NO: 48242 - DNA, 25 bp, Homo sapien
gtaccgagacacataaccaagcttg

SEQ ID NO: 48243 - DNA, 25 bp, Homo sapien
ggtccttgaggatgaggtatttgcc

SEQ ID NO: 48244 - DNA, 25 bp, Homo sapien
agagagcaagttagacacacattcc

SEQ ID NO: 48245 - DNA, 25 bp, Homo sapien
cgccagtcaacgccattacagtgcc

SEQ ID NO: 48246 - DNA, 25 bp, Homo sapien
agcccctcgctgagagtccagcttc

SEQ ID NO: 48247 - DNA, 25 bp, Homo sapien
atgcagatgtcaatgacgcagcgta

SEQ ID NO: 48248 - DNA, 25 bp, Homo sapien
aggttgatctggctggcaaactcat

SEQ ID NO: 48249 - DNA, 25 bp, Homo sapien
ccaccgggccaacttgtagctgttg

SEQ ID NO: 48250 - DNA, 25 bp, Homo sapien
gtagacacggatgacctgcttgttg

SEQ ID NO: 48251 - DNA, 25 bp, Homo sapien
ttgaggtactcagatccagccagca

SEQ ID NO: 48252 - DNA, 25 bp, Homo sapien
cgccagtcaacgccattacagtgcc

SEQ ID NO: 48253 - DNA, 25 bp, Homo sapien
agcccctcgctgagagtccagcttc

SEQ ID NO: 48254 - DNA, 25 bp, Homo sapien
ccaccgggccaacttgtagctgttg

SEQ ID NO: 48255 - DNA, 25 bp, Homo sapien
ttgaggtactcagatccagccagca

SEQ ID NO: 48256 - DNA, 25 bp, Homo sapien
gtaccgagacacataaccaagcttg

SEQ ID NO: 48257 - DNA, 25 bp, Homo sapien
tgaggagtctttcacgtggtaccga

SEQ ID NO: 48258 - DNA, 25 bp, Homo sapien
aggttgatctggctggcaaactcat

SEQ ID NO: 48259 - DNA, 25 bp, Homo sapien
atgcagatgtcaatgacgcagcgta

SEQ ID NO: 48260 - DNA, 25 bp, Homo sapien
ggtccttgaggatgaggtatttgcc

SEQ ID NO: 48261 - DNA, 25 bp, Homo sapien
gtagacacggatgacctgcttgttg

SEQ ID NO: 48262 - DNA, 25 bp, Homo sapien
agagagcaagttagacacacattcc

SEQ ID NO: 48263 - DNA, 25 bp, Homo sapien
cgccagtcaacgccattacagtgcc

SEQ ID NO: 48264 - DNA, 25 bp, Homo sapien
agcccctcgctgagagtccagcttc

SEQ ID NO: 48265 - DNA, 25 bp, Homo sapien
ccaccgggccaacttgtagctgttg

SEQ ID NO: 48266 - DNA, 25 bp, Homo sapien
ttgaggtactcagatccagccagca

SEQ ID NO: 48267 - DNA, 25 bp, Homo sapien
gtaccgagacacataaccaagcttg

SEQ ID NO: 48268 - DNA, 25 bp, Homo sapien
tgaggagtctttcacgtggtaccga

SEQ ID NO: 48269 - DNA, 25 bp, Homo sapien
aggttgatctggctggcaaactcat

SEQ ID NO: 48270 - DNA, 25 bp, Homo sapien
atgcagatgtcaatgacgcagcgta

SEQ ID NO: 48271 - DNA, 25 bp, Homo sapien
ggtccttgaggatgaggtatttgcc

SEQ ID NO: 48272 - DNA, 25 bp, Homo sapien
gtagacacggatgacctgcttgttg

SEQ ID NO: 48273 - DNA, 25 bp, Homo sapien
agagagcaagttagacacacattcc

SEQ ID NO: 48274 - DNA, 25 bp, Homo sapien
gtaccgagacacataaccaagcttg

SEQ ID NO: 48275 - DNA, 25 bp, Homo sapien
atgcagatgtcaatgacgcagcgta

SEQ ID NO: 48276 - DNA, 25 bp, Homo sapien
gtagacacggatgacctgcttgttg

SEQ ID NO: 48277 - DNA, 25 bp, Homo sapien
aggttgatctggctggcaaactcat

SEQ ID NO: 48278 - DNA, 25 bp, Homo sapien
agcccctcgctgagagtccagcttc

SEQ ID NO: 48279 - DNA, 25 bp, Homo sapien
cgccagtcaacgccattacagtgcc

SEQ ID NO: 48280 - DNA, 25 bp, Homo sapien
ccaccgggccaacttgtagctgttg

SEQ ID NO: 48281 - DNA, 25 bp, Homo sapien
ggtccttgaggatgaggtatttgcc

SEQ ID NO: 48282 - DNA, 25 bp, Homo sapien
ttgaggtactcagatccagccagca

SEQ ID NO: 48283 - DNA, 25 bp, Homo sapien
agagagcaagttagacacacattcc

SEQ ID NO: 48284 - DNA, 25 bp, Homo sapien
tgaggagtctttcacgtggtaccga

SEQ ID NO: 48285 - DNA, 25 bp, Homo sapien
cgccagtcaacgccattacagtgcc

SEQ ID NO: 48286 - DNA, 25 bp, Homo sapien
agcccctcgctgagagtccagcttc

SEQ ID NO: 48287 - DNA, 25 bp, Homo sapien
ccaccgggccaacttgtagctgttg

SEQ ID NO: 48288 - DNA, 25 bp, Homo sapien
ttgaggtactcagatccagccagca

SEQ ID NO: 48289 - DNA, 25 bp, Homo sapien
gtaccgagacacataaccaagcttg

SEQ ID NO: 48290 - DNA, 25 bp, Homo sapien
tgaggagtctttcacgtggtaccga

SEQ ID NO: 48291 - DNA, 25 bp, Homo sapien
aggttgatctggctggcaaactcat

SEQ ID NO: 48292 - DNA, 25 bp, Homo sapien
atgcagatgtcaatgacgcagcgta

SEQ ID NO: 48293 - DNA, 25 bp, Homo sapien
ggtccttgaggatgaggtatttgcc

SEQ ID NO: 48294 - DNA, 25 bp, Homo sapien
gtagacacggatgacctgcttgttg

SEQ ID NO: 48295 - DNA, 25 bp, Homo sapien
agagagcaagttagacacacattcc

SEQ ID NO: 48296 - DNA, 25 bp, Homo sapien
atgcagatgtcaatgacgcagcgta

SEQ ID NO: 48297 - DNA, 25 bp, Homo sapien
ttgaggtactcagatccagccagca

SEQ ID NO: 48298 - DNA, 25 bp, Homo sapien
gtagacacggatgacctgcttgttg

SEQ ID NO: 48299 - DNA, 25 bp, Homo sapien
aggttgatctggctggcaaactcat

SEQ ID NO: 48300 - DNA, 25 bp, Homo sapien
agcccctcgctgagagtccagcttc

SEQ ID NO: 48301 - DNA, 25 bp, Homo sapien
ccaccgggccaacttgtagctgttg

SEQ ID NO: 48302 - DNA, 25 bp, Homo sapien
tgaggagtctttcacgtggtaccga

SEQ ID NO: 48303 - DNA, 25 bp, Homo sapien
gtaccgagacacataaccaagcttg

SEQ ID NO: 48304 - DNA, 25 bp, Homo sapien
ggtccttgaggatgaggtatttgcc

SEQ ID NO: 48305 - DNA, 25 bp, Homo sapien
cgccagtcaacgccattacagtgcc

SEQ ID NO: 48306 - DNA, 25 bp, Homo sapien
agagagcaagttagacacacattcc

SEQ ID NO: 48307 - DNA, 25 bp, Homo sapien
cgccagtcaacgccattacagtgcc

SEQ ID NO: 48308 - DNA, 25 bp, Homo sapien
agcccctcgctgagagtccagcttc

SEQ ID NO: 48309 - DNA, 25 bp, Homo sapien
ccaccgggccaacttgtagctgttg

SEQ ID NO: 48310 - DNA, 25 bp, Homo sapien
ttgaggtactcagatccagccagca

SEQ ID NO: 48311 - DNA, 25 bp, Homo sapien
gtaccgagacacataaccaagcttg

SEQ ID NO: 48312 - DNA, 25 bp, Homo sapien
tgaggagtctttcacgtggtaccga

SEQ ID NO: 48313 - DNA, 25 bp, Homo sapien
aggttgatctggctggcaaactcat

SEQ ID NO: 48314 - DNA, 25 bp, Homo sapien
atgcagatgtcaatgacgcagcgta

SEQ ID NO: 48315 - DNA, 25 bp, Homo sapien
ggtccttgaggatgaggtatttgcc

SEQ ID NO: 48316 - DNA, 25 bp, Homo sapien
gtagacacggatgacctgcttgttg

SEQ ID NO: 48317 - DNA, 25 bp, Homo sapien
agagagcaagttagacacacattcc

SEQ ID NO: 48318 - DNA, 25 bp, Homo sapien
ttgaggtactcagatccagccagca

SEQ ID NO: 48319 - DNA, 25 bp, Homo sapien
ggtccttgaggatgaggtatttgcc

SEQ ID NO: 48320 - DNA, 25 bp, Homo sapien
gtagacacggatgacctgcttgttg

SEQ ID NO: 48321 - DNA, 25 bp, Homo sapien
aggttgatctggctggcaaactcat

SEQ ID NO: 48322 - DNA, 25 bp, Homo sapien
cgccagtcaacgccattacagtgcc

SEQ ID NO: 48323 - DNA, 25 bp, Homo sapien
gtaccgagacacataaccaagcttg

SEQ ID NO: 48324 - DNA, 25 bp, Homo sapien
agagagcaagttagacacacattcc

SEQ ID NO: 48325 - DNA, 25 bp, Homo sapien
tgaggagtctttcacgtggtaccga

SEQ ID NO: 48326 - DNA, 25 bp, Homo sapien
ccaccgggccaacttgtagctgttg

SEQ ID NO: 48327 - DNA, 25 bp, Homo sapien
atgcagatgtcaatgacgcagcgta

SEQ ID NO: 48328 - DNA, 25 bp, Homo sapien
agcccctcgctgagagtccagcttc

SEQ ID NO: 48329 - DNA, 25 bp, Homo sapien
cgccagtcaacgccattacagtgcc

SEQ ID NO: 48330 - DNA, 25 bp, Homo sapien
agcccctcgctgagagtccagcttc

SEQ ID NO: 48331 - DNA, 25 bp, Homo sapien
ccaccgggccaacttgtagctgttg

SEQ ID NO: 48332 - DNA, 25 bp, Homo sapien
ttgaggtactcagatccagccagca

SEQ ID NO: 48333 - DNA, 25 bp, Homo sapien
gtaccgagacacataaccaagcttg

SEQ ID NO: 48334 - DNA, 25 bp, Homo sapien
tgaggagtctttcacgtggtaccga

SEQ ID NO: 48335 - DNA, 25 bp, Homo sapien
aggttgatctggctggcaaactcat

SEQ ID NO: 48336 - DNA, 25 bp, Homo sapien
atgcagatgtcaatgacgcagcgta

SEQ ID NO: 48337 - DNA, 25 bp, Homo sapien
ggtccttgaggatgaggtatttgcc

SEQ ID NO: 48338 - DNA, 25 bp, Homo sapien
gtagacacggatgacctgcttgttg

SEQ ID NO: 48339 - DNA, 25 bp, Homo sapien
agagagcaagttagacacacattcc

SEQ ID NO: 48340 - DNA, 25 bp, Homo sapien
agcccctcgctgagagtccagcttc

SEQ ID NO: 48341 - DNA, 25 bp, Homo sapien
ggtccttgaggatgaggtatttgcc

SEQ ID NO: 48342 - DNA, 25 bp, Homo sapien
aggttgatctggctggcaaactcat

SEQ ID NO: 48343 - DNA, 25 bp, Homo sapien
atgcagatgtcaatgacgcagcgta

SEQ ID NO: 48344 - DNA, 25 bp, Homo sapien
ccaccgggccaacttgtagctgttg

SEQ ID NO: 48345 - DNA, 25 bp, Homo sapien
cgccagtcaacgccattacagtgcc

SEQ ID NO: 48346 - DNA, 25 bp, Homo sapien
gtagacacggatgacctgcttgttg

SEQ ID NO: 48347 - DNA, 25 bp, Homo sapien
tgaggagtctttcacgtggtaccga

SEQ ID NO: 48348 - DNA, 25 bp, Homo sapien
agagagcaagttagacacacattcc

SEQ ID NO: 48349 - DNA, 25 bp, Homo sapien
gtaccgagacacataaccaagcttg

SEQ ID NO: 48350 - DNA, 25 bp, Homo sapien
ttgaggtactcagatccagccagca

SEQ ID NO: 48351 - DNA, 25 bp, Homo sapien
cgccagtcaacgccattacagtgcc

SEQ ID NO: 48352 - DNA, 25 bp, Homo sapien
agcccctcgctgagagtccagcttc

SEQ ID NO: 48353 - DNA, 25 bp, Homo sapien
ccaccgggccaacttgtagctgttg

SEQ ID NO: 48354 - DNA, 25 bp, Homo sapien
ttgaggtactcagatccagccagca

SEQ ID NO: 48355 - DNA, 25 bp, Homo sapien
gtaccgagacacataaccaagcttg

SEQ ID NO: 48356 - DNA, 25 bp, Homo sapien
tgaggagtctttcacgtggtaccga

SEQ ID NO: 48357 - DNA, 25 bp, Homo sapien
aggttgatctggctggcaaactcat

SEQ ID NO: 48358 - DNA, 25 bp, Homo sapien
atgcagatgtcaatgacgcagcgta

SEQ ID NO: 48359 - DNA, 25 bp, Homo sapien
ggtccttgaggatgaggtatttgcc

SEQ ID NO: 48360 - DNA, 25 bp, Homo sapien
gtagacacggatgacctgcttgttg

SEQ ID NO: 48361 - DNA, 25 bp, Homo sapien
agagagcaagttagacacacattcc

SEQ ID NO: 48362 - DNA, 25 bp, Homo sapien
ttgaggtactcagatccagccagca

SEQ ID NO: 48363 - DNA, 25 bp, Homo sapien
cgccagtcaacgccattacagtgcc

SEQ ID NO: 48364 - DNA, 25 bp, Homo sapien
ccaccgggccaacttgtagctgttg

SEQ ID NO: 48365 - DNA, 25 bp, Homo sapien
agcccctcgctgagagtccagcttc

SEQ ID NO: 48366 - DNA, 25 bp, Homo sapien
aggttgatctggctggcaaactcat

SEQ ID NO: 48367 - DNA, 25 bp, Homo sapien
agagagcaagttagacacacattcc

SEQ ID NO: 48368 - DNA, 25 bp, Homo sapien
ggtccttgaggatgaggtatttgcc

SEQ ID NO: 48369 - DNA, 25 bp, Homo sapien
gtagacacggatgacctgcttgttg

SEQ ID NO: 48370 - DNA, 25 bp, Homo sapien
atgcagatgtcaatgacgcagcgta

SEQ ID NO: 48371 - DNA, 25 bp, Homo sapien
gtaccgagacacataaccaagcttg

SEQ ID NO: 48372 - DNA, 25 bp, Homo sapien
tgaggagtctttcacgtggtaccga

SEQ ID NO: 48373 - DNA, 25 bp, Homo sapien
ccaccgggccaacttgtagctgttg

SEQ ID NO: 48374 - DNA, 25 bp, Homo sapien
aggttgatctggctggcaaactcat

SEQ ID NO: 48375 - DNA, 25 bp, Homo sapien
cgccagtcaacgccattacagtgcc

SEQ ID NO: 48376 - DNA, 25 bp, Homo sapien
ttgaggtactcagatccagccagca

SEQ ID NO: 48377 - DNA, 25 bp, Homo sapien
tgaggagtctttcacgtggtaccga

SEQ ID NO: 48378 - DNA, 25 bp, Homo sapien
agagagcaagttagacacacattcc

SEQ ID NO: 48379 - DNA, 25 bp, Homo sapien
gtagacacggatgacctgcttgttg

SEQ ID NO: 48380 - DNA, 25 bp, Homo sapien
agcccctcgctgagagtccagcttc

SEQ ID NO: 48381 - DNA, 25 bp, Homo sapien
gtaccgagacacataaccaagcttg

SEQ ID NO: 48382 - DNA, 25 bp, Homo sapien
atgcagatgtcaatgacgcagcgta

SEQ ID NO: 48383 - DNA, 25 bp, Homo sapien
ggtccttgaggatgaggtatttgcc

SEQ ID NO: 48384 - DNA, 25 bp, Homo sapien
cgccagtcaacgccattacagtgcc

SEQ ID NO: 48385 - DNA, 25 bp, Homo sapien
agcccctcgctgagagtccagcttc

SEQ ID NO: 48386 - DNA, 25 bp, Homo sapien
ccaccgggccaacttgtagctgttg

SEQ ID NO: 48387 - DNA, 25 bp, Homo sapien
ttgaggtactcagatccagccagca

SEQ ID NO: 48388 - DNA, 25 bp, Homo sapien
gtaccgagacacataaccaagcttg

SEQ ID NO: 48389 - DNA, 25 bp, Homo sapien
tgaggagtctttcacgtggtaccga

SEQ ID NO: 48390 - DNA, 25 bp, Homo sapien
aggttgatctggctggcaaactcat

SEQ ID NO: 48391 - DNA, 25 bp, Homo sapien
atgcagatgtcaatgacgcagcgta

SEQ ID NO: 48392 - DNA, 25 bp, Homo sapien
ggtccttgaggatgaggtatttgcc

SEQ ID NO: 48393 - DNA, 25 bp, Homo sapien
gtagacacggatgacctgcttgttg

SEQ ID NO: 48394 - DNA, 25 bp, Homo sapien
agagagcaagttagacacacattcc

SEQ ID NO: 48395 - DNA, 25 bp, Homo sapien
cgccagtcaacgccattacagtgcc

SEQ ID NO: 48396 - DNA, 25 bp, Homo sapien
ttgaggtactcagatccagccagca

SEQ ID NO: 48397 - DNA, 25 bp, Homo sapien
ccaccgggccaacttgtagctgttg

SEQ ID NO: 48398 - DNA, 25 bp, Homo sapien
ggtccttgaggatgaggtatttgcc

SEQ ID NO: 48399 - DNA, 25 bp, Homo sapien
atgcagatgtcaatgacgcagcgta

SEQ ID NO: 48400 - DNA, 25 bp, Homo sapien
gtaccgagacacataaccaagcttg

SEQ ID NO: 48401 - DNA, 25 bp, Homo sapien
gtagacacggatgacctgcttgttg

SEQ ID NO: 48402 - DNA, 25 bp, Homo sapien
agcccctcgctgagagtccagcttc

SEQ ID NO: 48403 - DNA, 25 bp, Homo sapien
tgaggagtctttcacgtggtaccga

SEQ ID NO: 48404 - DNA, 25 bp, Homo sapien
aggttgatctggctggcaaactcat

SEQ ID NO: 48405 - DNA, 25 bp, Homo sapien
agagagcaagttagacacacattcc

SEQ ID NO: 48406 - DNA, 25 bp, Homo sapien
cgccagtcaacgccattacagtgcc

SEQ ID NO: 48407 - DNA, 25 bp, Homo sapien
agcccctcgctgagagtccagcttc

SEQ ID NO: 48408 - DNA, 25 bp, Homo sapien
ccaccgggccaacttgtagctgttg

SEQ ID NO: 48409 - DNA, 25 bp, Homo sapien
ttgaggtactcagatccagccagca

SEQ ID NO: 48410 - DNA, 25 bp, Homo sapien
gtaccgagacacataaccaagcttg

SEQ ID NO: 48411 - DNA, 25 bp, Homo sapien
tgaggagtctttcacgtggtaccga

SEQ ID NO: 48412 - DNA, 25 bp, Homo sapien
aggttgatctggctggcaaactcat

SEQ ID NO: 48413 - DNA, 25 bp, Homo sapien
atgcagatgtcaatgacgcagcgta

SEQ ID NO: 48414 - DNA, 25 bp, Homo sapien
ggtccttgaggatgaggtatttgcc

SEQ ID NO: 48415 - DNA, 25 bp, Homo sapien
gtagacacggatgacctgcttgttg

SEQ ID NO: 48416 - DNA, 25 bp, Homo sapien
agagagcaagttagacacacattcc

SEQ ID NO: 48417 - DNA, 25 bp, Homo sapien
ggtccttgaggatgaggtatttgcc

SEQ ID NO: 48418 - DNA, 25 bp, Homo sapien
agagagcaagttagacacacattcc

SEQ ID NO: 48419 - DNA, 25 bp, Homo sapien
tgaggagtctttcacgtggtaccga

SEQ ID NO: 48420 - DNA, 25 bp, Homo sapien
ccaccgggccaacttgtagctgttg

SEQ ID NO: 48421 - DNA, 25 bp, Homo sapien
gtagacacggatgacctgcttgttg

SEQ ID NO: 48422 - DNA, 25 bp, Homo sapien
gtaccgagacacataaccaagcttg

SEQ ID NO: 48423 - DNA, 25 bp, Homo sapien
aggttgatctggctggcaaactcat

SEQ ID NO: 48424 - DNA, 25 bp, Homo sapien
atgcagatgtcaatgacgcagcgta

SEQ ID NO: 48425 - DNA, 25 bp, Homo sapien
ttgaggtactcagatccagccagca

SEQ ID NO: 48426 - DNA, 25 bp, Homo sapien
agcccctcgctgagagtccagcttc

SEQ ID NO: 48427 - DNA, 25 bp, Homo sapien
cgccagtcaacgccattacagtgcc

SEQ ID NO: 48428 - DNA, 25 bp, Homo sapien
cgccagtcaacgccattacagtgcc

SEQ ID NO: 48429 - DNA, 25 bp, Homo sapien
agcccctcgctgagagtccagcttc

SEQ ID NO: 48430 - DNA, 25 bp, Homo sapien
ccaccgggccaacttgtagctgttg

SEQ ID NO: 48431 - DNA, 25 bp, Homo sapien
ttgaggtactcagatccagccagca

SEQ ID NO: 48432 - DNA, 25 bp, Homo sapien
gtaccgagacacataaccaagcttg

SEQ ID NO: 48433 - DNA, 25 bp, Homo sapien
tgaggagtctttcacgtggtaccga

SEQ ID NO: 48434 - DNA, 25 bp, Homo sapien
aggttgatctggctggcaaactcat

SEQ ID NO: 48435 - DNA, 25 bp, Homo sapien
atgcagatgtcaatgacgcagcgta

SEQ ID NO: 48436 - DNA, 25 bp, Homo sapien
ggtccttgaggatgaggtatttgcc

SEQ ID NO: 48437 - DNA, 25 bp, Homo sapien
gtagacacggatgacctgcttgttg

SEQ ID NO: 48438 - DNA, 25 bp, Homo sapien
agagagcaagttagacacacattcc

SEQ ID NO: 48439 - DNA, 25 bp, Homo sapien
aattgcaagcgcaaactcgaagctg

SEQ ID NO: 48440 - DNA, 25 bp, Homo sapien
gtctttaagaacaagtggagccttc

SEQ ID NO: 48441 - DNA, 25 bp, Homo sapien
taaggacagcgacttctgaacacat

SEQ ID NO: 48442 - DNA, 25 bp, Homo sapien
cgaacacagtgagaatggattccta

SEQ ID NO: 48443 - DNA, 25 bp, Homo sapien
gattctcagagtaggtgtaatgacc

SEQ ID NO: 48444 - DNA, 25 bp, Homo sapien
ctaagtgatcgtcgcagttcgctgc

SEQ ID NO: 48445 - DNA, 25 bp, Homo sapien
gacacaatttgtaggctgagaaatc

SEQ ID NO: 48446 - DNA, 25 bp, Homo sapien
caaggcttagaaatgtatagacaca

SEQ ID NO: 48447 - DNA, 25 bp, Homo sapien
gtggagccttcacttgagccgccac

SEQ ID NO: 48448 - DNA, 25 bp, Homo sapien
gcccccggcttgtaagaatcaggcc

SEQ ID NO: 48449 - DNA, 25 bp, Homo sapien
gcaagagggtgtgttgtaactttac

SEQ ID NO: 48450 - DNA, 25 bp, Homo sapien
gcaagagggtgtgttgtaactttac

SEQ ID NO: 48451 - DNA, 25 bp, Homo sapien
gattctcagagtaggtgtaatgacc

SEQ ID NO: 48452 - DNA, 25 bp, Homo sapien
gcccccggcttgtaagaatcaggcc

SEQ ID NO: 48453 - DNA, 25 bp, Homo sapien
aattgcaagcgcaaactcgaagctg

SEQ ID NO: 48454 - DNA, 25 bp, Homo sapien
gtggagccttcacttgagccgccac

SEQ ID NO: 48455 - DNA, 25 bp, Homo sapien
gtctttaagaacaagtggagccttc

SEQ ID NO: 48456 - DNA, 25 bp, Homo sapien
ctaagtgatcgtcgcagttcgctgc

SEQ ID NO: 48457 - DNA, 25 bp, Homo sapien
cgaacacagtgagaatggattccta

SEQ ID NO: 48458 - DNA, 25 bp, Homo sapien
taaggacagcgacttctgaacacat

SEQ ID NO: 48459 - DNA, 25 bp, Homo sapien
gacacaatttgtaggctgagaaatc

SEQ ID NO: 48460 - DNA, 25 bp, Homo sapien
caaggcttagaaatgtatagacaca

SEQ ID NO: 48461 - DNA, 25 bp, Homo sapien
gattctcagagtaggtgtaatgacc

SEQ ID NO: 48462 - DNA, 25 bp, Homo sapien
taaggacagcgacttctgaacacat

SEQ ID NO: 48463 - DNA, 25 bp, Homo sapien
aattgcaagcgcaaactcgaagctg

SEQ ID NO: 48464 - DNA, 25 bp, Homo sapien
gcaagagggtgtgttgtaactttac

SEQ ID NO: 48465 - DNA, 25 bp, Homo sapien
gtggagccttcacttgagccgccac

SEQ ID NO: 48466 - DNA, 25 bp, Homo sapien
gacacaatttgtaggctgagaaatc

SEQ ID NO: 48467 - DNA, 25 bp, Homo sapien
gtctttaagaacaagtggagccttc

SEQ ID NO: 48468 - DNA, 25 bp, Homo sapien
ctaagtgatcgtcgcagttcgctgc

SEQ ID NO: 48469 - DNA, 25 bp, Homo sapien
caaggcttagaaatgtatagacaca

SEQ ID NO: 48470 - DNA, 25 bp, Homo sapien
cgaacacagtgagaatggattccta

SEQ ID NO: 48471 - DNA, 25 bp, Homo sapien
gcccccggcttgtaagaatcaggcc

SEQ ID NO: 48472 - DNA, 25 bp, Homo sapien
gcaagagggtgtgttgtaactttac

SEQ ID NO: 48473 - DNA, 25 bp, Homo sapien
gattctcagagtaggtgtaatgacc

SEQ ID NO: 48474 - DNA, 25 bp, Homo sapien
gcccccggcttgtaagaatcaggcc

SEQ ID NO: 48475 - DNA, 25 bp, Homo sapien
aattgcaagcgcaaactcgaagctg

SEQ ID NO: 48476 - DNA, 25 bp, Homo sapien
gtggagccttcacttgagccgccac

SEQ ID NO: 48477 - DNA, 25 bp, Homo sapien
gtctttaagaacaagtggagccttc

SEQ ID NO: 48478 - DNA, 25 bp, Homo sapien
ctaagtgatcgtcgcagttcgctgc

SEQ ID NO: 48479 - DNA, 25 bp, Homo sapien
cgaacacagtgagaatggattccta

SEQ ID NO: 48480 - DNA, 25 bp, Homo sapien
taaggacagcgacttctgaacacat

SEQ ID NO: 48481 - DNA, 25 bp, Homo sapien
gacacaatttgtaggctgagaaatc

SEQ ID NO: 48482 - DNA, 25 bp, Homo sapien
caaggcttagaaatgtatagacaca

SEQ ID NO: 48483 - DNA, 25 bp, Homo sapien
gtggagccttcacttgagccgccac

SEQ ID NO: 48484 - DNA, 25 bp, Homo sapien
gacacaatttgtaggctgagaaatc

SEQ ID NO: 48485 - DNA, 25 bp, Homo sapien
gtctttaagaacaagtggagccttc

SEQ ID NO: 48486 - DNA, 25 bp, Homo sapien
gcaagagggtgtgttgtaactttac

SEQ ID NO: 48487 - DNA, 25 bp, Homo sapien
gcccccggcttgtaagaatcaggcc

SEQ ID NO: 48488 - DNA, 25 bp, Homo sapien
cgaacacagtgagaatggattccta

SEQ ID NO: 48489 - DNA, 25 bp, Homo sapien
gattctcagagtaggtgtaatgacc

SEQ ID NO: 48490 - DNA, 25 bp, Homo sapien
aattgcaagcgcaaactcgaagctg

SEQ ID NO: 48491 - DNA, 25 bp, Homo sapien
ctaagtgatcgtcgcagttcgctgc

SEQ ID NO: 48492 - DNA, 25 bp, Homo sapien
caaggcttagaaatgtatagacaca

SEQ ID NO: 48493 - DNA, 25 bp, Homo sapien
taaggacagcgacttctgaacacat

SEQ ID NO: 48494 - DNA, 25 bp, Homo sapien
gcaagagggtgtgttgtaactttac

SEQ ID NO: 48495 - DNA, 25 bp, Homo sapien
gattctcagagtaggtgtaatgacc

SEQ ID NO: 48496 - DNA, 25 bp, Homo sapien
gcccccggcttgtaagaatcaggcc

SEQ ID NO: 48497 - DNA, 25 bp, Homo sapien
aattgcaagcgcaaactcgaagctg

SEQ ID NO: 48498 - DNA, 25 bp, Homo sapien
gtggagccttcacttgagccgccac

SEQ ID NO: 48499 - DNA, 25 bp, Homo sapien
gtctttaagaacaagtggagccttc

SEQ ID NO: 48500 - DNA, 25 bp, Homo sapien
ctaagtgatcgtcgcagttcgctgc

SEQ ID NO: 48501 - DNA, 25 bp, Homo sapien
cgaacacagtgagaatggattccta

SEQ ID NO: 48502 - DNA, 25 bp, Homo sapien
taaggacagcgacttctgaacacat

SEQ ID NO: 48503 - DNA, 25 bp, Homo sapien
gacacaatttgtaggctgagaaatc

SEQ ID NO: 48504 - DNA, 25 bp, Homo sapien
caaggcttagaaatgtatagacaca

SEQ ID NO: 48505 - DNA, 25 bp, Homo sapien
gcaagagggtgtgttgtaactttac

SEQ ID NO: 48506 - DNA, 25 bp, Homo sapien
gattctcagagtaggtgtaatgacc

SEQ ID NO: 48507 - DNA, 25 bp, Homo sapien
gcccccggcttgtaagaatcaggcc

SEQ ID NO: 48508 - DNA, 25 bp, Homo sapien
aattgcaagcgcaaactcgaagctg

SEQ ID NO: 48509 - DNA, 25 bp, Homo sapien
gtggagccttcacttgagccgccac

SEQ ID NO: 48510 - DNA, 25 bp, Homo sapien
gtctttaagaacaagtggagccttc

SEQ ID NO: 48511 - DNA, 25 bp, Homo sapien
ctaagtgatcgtcgcagttcgctgc

SEQ ID NO: 48512 - DNA, 25 bp, Homo sapien
cgaacacagtgagaatggattccta

SEQ ID NO: 48513 - DNA, 25 bp, Homo sapien
taaggacagcgacttctgaacacat

SEQ ID NO: 48514 - DNA, 25 bp, Homo sapien
gacacaatttgtaggctgagaaatc

SEQ ID NO: 48515 - DNA, 25 bp, Homo sapien
caaggcttagaaatgtatagacaca

SEQ ID NO: 48516 - DNA, 25 bp, Homo sapien
taaggacagcgacttctgaacacat

SEQ ID NO: 48517 - DNA, 25 bp, Homo sapien
ctaagtgatcgtcgcagttcgctgc

SEQ ID NO: 48518 - DNA, 25 bp, Homo sapien
caaggcttagaaatgtatagacaca

SEQ ID NO: 48519 - DNA, 25 bp, Homo sapien
gcccccggcttgtaagaatcaggcc

SEQ ID NO: 48520 - DNA, 25 bp, Homo sapien
gacacaatttgtaggctgagaaatc

SEQ ID NO: 48521 - DNA, 25 bp, Homo sapien
gtctttaagaacaagtggagccttc

SEQ ID NO: 48522 - DNA, 25 bp, Homo sapien
cgaacacagtgagaatggattccta

SEQ ID NO: 48523 - DNA, 25 bp, Homo sapien
gattctcagagtaggtgtaatgacc

SEQ ID NO: 48524 - DNA, 25 bp, Homo sapien
gcaagagggtgtgttgtaactttac

SEQ ID NO: 48525 - DNA, 25 bp, Homo sapien
aattgcaagcgcaaactcgaagctg

SEQ ID NO: 48526 - DNA, 25 bp, Homo sapien
gtggagccttcacttgagccgccac

SEQ ID NO: 48527 - DNA, 25 bp, Homo sapien
gcaagagggtgtgttgtaactttac

SEQ ID NO: 48528 - DNA, 25 bp, Homo sapien
gattctcagagtaggtgtaatgacc

SEQ ID NO: 48529 - DNA, 25 bp, Homo sapien
gcccccggcttgtaagaatcaggcc

SEQ ID NO: 48530 - DNA, 25 bp, Homo sapien
aattgcaagcgcaaactcgaagctg

SEQ ID NO: 48531 - DNA, 25 bp, Homo sapien
gtggagccttcacttgagccgccac

SEQ ID NO: 48532 - DNA, 25 bp, Homo sapien
gtctttaagaacaagtggagccttc

SEQ ID NO: 48533 - DNA, 25 bp, Homo sapien
ctaagtgatcgtcgcagttcgctgc

SEQ ID NO: 48534 - DNA, 25 bp, Homo sapien
cgaacacagtgagaatggattccta

SEQ ID NO: 48535 - DNA, 25 bp, Homo sapien
taaggacagcgacttctgaacacat

SEQ ID NO: 48536 - DNA, 25 bp, Homo sapien
gacacaatttgtaggctgagaaatc

SEQ ID NO: 48537 - DNA, 25 bp, Homo sapien
caaggcttagaaatgtatagacaca

SEQ ID NO: 48538 - DNA, 25 bp, Homo sapien
gacacaatttgtaggctgagaaatc

SEQ ID NO: 48539 - DNA, 25 bp, Homo sapien
aattgcaagcgcaaactcgaagctg

SEQ ID NO: 48540 - DNA, 25 bp, Homo sapien
cgaacacagtgagaatggattccta

SEQ ID NO: 48541 - DNA, 25 bp, Homo sapien
gtctttaagaacaagtggagccttc

SEQ ID NO: 48542 - DNA, 25 bp, Homo sapien
ctaagtgatcgtcgcagttcgctgc

SEQ ID NO: 48543 - DNA, 25 bp, Homo sapien
gcccccggcttgtaagaatcaggcc

SEQ ID NO: 48544 - DNA, 25 bp, Homo sapien
taaggacagcgacttctgaacacat

SEQ ID NO: 48545 - DNA, 25 bp, Homo sapien
gtggagccttcacttgagccgccac

SEQ ID NO: 48546 - DNA, 25 bp, Homo sapien
gattctcagagtaggtgtaatgacc

SEQ ID NO: 48547 - DNA, 25 bp, Homo sapien
caaggcttagaaatgtatagacaca

SEQ ID NO: 48548 - DNA, 25 bp, Homo sapien
gcaagagggtgtgttgtaactttac

SEQ ID NO: 48549 - DNA, 25 bp, Homo sapien
gcaagagggtgtgttgtaactttac

SEQ ID NO: 48550 - DNA, 25 bp, Homo sapien
gattctcagagtaggtgtaatgacc

SEQ ID NO: 48551 - DNA, 25 bp, Homo sapien
gcccccggcttgtaagaatcaggcc

SEQ ID NO: 48552 - DNA, 25 bp, Homo sapien
aattgcaagcgcaaactcgaagctg

SEQ ID NO: 48553 - DNA, 25 bp, Homo sapien
gtggagccttcacttgagccgccac

SEQ ID NO: 48554 - DNA, 25 bp, Homo sapien
gtctttaagaacaagtggagccttc

SEQ ID NO: 48555 - DNA, 25 bp, Homo sapien
ctaagtgatcgtcgcagttcgctgc

SEQ ID NO: 48556 - DNA, 25 bp, Homo sapien
cgaacacagtgagaatggattccta

SEQ ID NO: 48557 - DNA, 25 bp, Homo sapien
taaggacagcgacttctgaacacat

SEQ ID NO: 48558 - DNA, 25 bp, Homo sapien
gacacaatttgtaggctgagaaatc

SEQ ID NO: 48559 - DNA, 25 bp, Homo sapien
caaggcttagaaatgtatagacaca

SEQ ID NO: 48560 - DNA, 25 bp, Homo sapien
gtctttaagaacaagtggagccttc

SEQ ID NO: 48561 - DNA, 25 bp, Homo sapien
caaggcttagaaatgtatagacaca

SEQ ID NO: 48562 - DNA, 25 bp, Homo sapien
gcaagagggtgtgttgtaactttac

SEQ ID NO: 48563 - DNA, 25 bp, Homo sapien
gcccccggcttgtaagaatcaggcc

SEQ ID NO: 48564 - DNA, 25 bp, Homo sapien
ctaagtgatcgtcgcagttcgctgc

SEQ ID NO: 48565 - DNA, 25 bp, Homo sapien
gattctcagagtaggtgtaatgacc

SEQ ID NO: 48566 - DNA, 25 bp, Homo sapien
gtggagccttcacttgagccgccac

SEQ ID NO: 48567 - DNA, 25 bp, Homo sapien
taaggacagcgacttctgaacacat

SEQ ID NO: 48568 - DNA, 25 bp, Homo sapien
cgaacacagtgagaatggattccta

SEQ ID NO: 48569 - DNA, 25 bp, Homo sapien
aattgcaagcgcaaactcgaagctg

SEQ ID NO: 48570 - DNA, 25 bp, Homo sapien
gacacaatttgtaggctgagaaatc

SEQ ID NO: 48571 - DNA, 25 bp, Homo sapien
gcaagagggtgtgttgtaactttac

SEQ ID NO: 48572 - DNA, 25 bp, Homo sapien
gattctcagagtaggtgtaatgacc

SEQ ID NO: 48573 - DNA, 25 bp, Homo sapien
gcccccggcttgtaagaatcaggcc

SEQ ID NO: 48574 - DNA, 25 bp, Homo sapien
aattgcaagcgcaaactcgaagctg

SEQ ID NO: 48575 - DNA, 25 bp, Homo sapien
gtggagccttcacttgagccgccac

SEQ ID NO: 48576 - DNA, 25 bp, Homo sapien
gtctttaagaacaagtggagccttc

SEQ ID NO: 48577 - DNA, 25 bp, Homo sapien
ctaagtgatcgtcgcagttcgctgc

SEQ ID NO: 48578 - DNA, 25 bp, Homo sapien
cgaacacagtgagaatggattccta

SEQ ID NO: 48579 - DNA, 25 bp, Homo sapien
taaggacagcgacttctgaacacat

SEQ ID NO: 48580 - DNA, 25 bp, Homo sapien
gacacaatttgtaggctgagaaatc

SEQ ID NO: 48581 - DNA, 25 bp, Homo sapien
caaggcttagaaatgtatagacaca

SEQ ID NO: 48582 - DNA, 25 bp, Homo sapien
gacacaatttgtaggctgagaaatc

SEQ ID NO: 48583 - DNA, 25 bp, Homo sapien
gtctttaagaacaagtggagccttc

SEQ ID NO: 48584 - DNA, 25 bp, Homo sapien
gcaagagggtgtgttgtaactttac

SEQ ID NO: 48585 - DNA, 25 bp, Homo sapien
ctaagtgatcgtcgcagttcgctgc

SEQ ID NO: 48586 - DNA, 25 bp, Homo sapien
caaggcttagaaatgtatagacaca

SEQ ID NO: 48587 - DNA, 25 bp, Homo sapien
gcccccggcttgtaagaatcaggcc

SEQ ID NO: 48588 - DNA, 25 bp, Homo sapien
aattgcaagcgcaaactcgaagctg

SEQ ID NO: 48589 - DNA, 25 bp, Homo sapien
cgaacacagtgagaatggattccta

SEQ ID NO: 48590 - DNA, 25 bp, Homo sapien
taaggacagcgacttctgaacacat

SEQ ID NO: 48591 - DNA, 25 bp, Homo sapien
gtggagccttcacttgagccgccac

SEQ ID NO: 48592 - DNA, 25 bp, Homo sapien
gattctcagagtaggtgtaatgacc

SEQ ID NO: 48593 - DNA, 25 bp, Homo sapien
gcaagagggtgtgttgtaactttac

SEQ ID NO: 48594 - DNA, 25 bp, Homo sapien
gattctcagagtaggtgtaatgacc

SEQ ID NO: 48595 - DNA, 25 bp, Homo sapien
gcccccggcttgtaagaatcaggcc

SEQ ID NO: 48596 - DNA, 25 bp, Homo sapien
aattgcaagcgcaaactcgaagctg

SEQ ID NO: 48597 - DNA, 25 bp, Homo sapien
gtggagccttcacttgagccgccac

SEQ ID NO: 48598 - DNA, 25 bp, Homo sapien
gtctttaagaacaagtggagccttc

SEQ ID NO: 48599 - DNA, 25 bp, Homo sapien
ctaagtgatcgtcgcagttcgctgc

SEQ ID NO: 48600 - DNA, 25 bp, Homo sapien
cgaacacagtgagaatggattccta

SEQ ID NO: 48601 - DNA, 25 bp, Homo sapien
taaggacagcgacttctgaacacat

SEQ ID NO: 48602 - DNA, 25 bp, Homo sapien
gacacaatttgtaggctgagaaatc

SEQ ID NO: 48603 - DNA, 25 bp, Homo sapien
caaggcttagaaatgtatagacaca

SEQ ID NO: 48604 - DNA, 25 bp, Homo sapien
ctaagtgatcgtcgcagttcgctgc

SEQ ID NO: 48605 - DNA, 25 bp, Homo sapien
gattctcagagtaggtgtaatgacc

SEQ ID NO: 48606 - DNA, 25 bp, Homo sapien
gtggagccttcacttgagccgccac

SEQ ID NO: 48607 - DNA, 25 bp, Homo sapien
gcaagagggtgtgttgtaactttac

SEQ ID NO: 48608 - DNA, 25 bp, Homo sapien
gtctttaagaacaagtggagccttc

SEQ ID NO: 48609 - DNA, 25 bp, Homo sapien
gcccccggcttgtaagaatcaggcc

SEQ ID NO: 48610 - DNA, 25 bp, Homo sapien
aattgcaagcgcaaactcgaagctg

SEQ ID NO: 48611 - DNA, 25 bp, Homo sapien
gacacaatttgtaggctgagaaatc

SEQ ID NO: 48612 - DNA, 25 bp, Homo sapien
taaggacagcgacttctgaacacat

SEQ ID NO: 48613 - DNA, 25 bp, Homo sapien
cgaacacagtgagaatggattccta

SEQ ID NO: 48614 - DNA, 25 bp, Homo sapien
caaggcttagaaatgtatagacaca

SEQ ID NO: 48615 - DNA, 25 bp, Homo sapien
aattgcaagcgcaaactcgaagctg

SEQ ID NO: 48616 - DNA, 25 bp, Homo sapien
gcaagagggtgtgttgtaactttac

SEQ ID NO: 48617 - DNA, 25 bp, Homo sapien
gacacaatttgtaggctgagaaatc

SEQ ID NO: 48618 - DNA, 25 bp, Homo sapien
ctaagtgatcgtcgcagttcgctgc

SEQ ID NO: 48619 - DNA, 25 bp, Homo sapien
gtggagccttcacttgagccgccac

SEQ ID NO: 48620 - DNA, 25 bp, Homo sapien
caaggcttagaaatgtatagacaca

SEQ ID NO: 48621 - DNA, 25 bp, Homo sapien
taaggacagcgacttctgaacacat

SEQ ID NO: 48622 - DNA, 25 bp, Homo sapien
gattctcagagtaggtgtaatgacc

SEQ ID NO: 48623 - DNA, 25 bp, Homo sapien
gcccccggcttgtaagaatcaggcc

SEQ ID NO: 48624 - DNA, 25 bp, Homo sapien
cgaacacagtgagaatggattccta

SEQ ID NO: 48625 - DNA, 25 bp, Homo sapien
gtctttaagaacaagtggagccttc

SEQ ID NO: 48626 - DNA, 25 bp, Homo sapien
gcaagagggtgtgttgtaactttac

SEQ ID NO: 48627 - DNA, 25 bp, Homo sapien
gattctcagagtaggtgtaatgacc

SEQ ID NO: 48628 - DNA, 25 bp, Homo sapien
gcccccggcttgtaagaatcaggcc

SEQ ID NO: 48629 - DNA, 25 bp, Homo sapien
aattgcaagcgcaaactcgaagctg

SEQ ID NO: 48630 - DNA, 25 bp, Homo sapien
gtggagccttcacttgagccgccac

SEQ ID NO: 48631 - DNA, 25 bp, Homo sapien
gtctttaagaacaagtggagccttc

SEQ ID NO: 48632 - DNA, 25 bp, Homo sapien
ctaagtgatcgtcgcagttcgctgc

SEQ ID NO: 48633 - DNA, 25 bp, Homo sapien
cgaacacagtgagaatggattccta

SEQ ID NO: 48634 - DNA, 25 bp, Homo sapien
taaggacagcgacttctgaacacat

SEQ ID NO: 48635 - DNA, 25 bp, Homo sapien
gacacaatttgtaggctgagaaatc

SEQ ID NO: 48636 - DNA, 25 bp, Homo sapien
caaggcttagaaatgtatagacaca

SEQ ID NO: 48637 - DNA, 25 bp, Homo sapien
gattctcagagtaggtgtaatgacc

SEQ ID NO: 48638 - DNA, 25 bp, Homo sapien
gtctttaagaacaagtggagccttc

SEQ ID NO: 48639 - DNA, 25 bp, Homo sapien
gacacaatttgtaggctgagaaatc

SEQ ID NO: 48640 - DNA, 25 bp, Homo sapien
gtggagccttcacttgagccgccac

SEQ ID NO: 48641 - DNA, 25 bp, Homo sapien
caaggcttagaaatgtatagacaca

SEQ ID NO: 48642 - DNA, 25 bp, Homo sapien
aattgcaagcgcaaactcgaagctg

SEQ ID NO: 48643 - DNA, 25 bp, Homo sapien
gcaagagggtgtgttgtaactttac

SEQ ID NO: 48644 - DNA, 25 bp, Homo sapien
taaggacagcgacttctgaacacat

SEQ ID NO: 48645 - DNA, 25 bp, Homo sapien
gcccccggcttgtaagaatcaggcc

SEQ ID NO: 48646 - DNA, 25 bp, Homo sapien
cgaacacagtgagaatggattccta

SEQ ID NO: 48647 - DNA, 25 bp, Homo sapien
ctaagtgatcgtcgcagttcgctgc

SEQ ID NO: 48648 - DNA, 25 bp, Homo sapien
gcaagagggtgtgttgtaactttac

SEQ ID NO: 48649 - DNA, 25 bp, Homo sapien
gattctcagagtaggtgtaatgacc

SEQ ID NO: 48650 - DNA, 25 bp, Homo sapien
gcccccggcttgtaagaatcaggcc

SEQ ID NO: 48651 - DNA, 25 bp, Homo sapien
aattgcaagcgcaaactcgaagctg

SEQ ID NO: 48652 - DNA, 25 bp, Homo sapien
gtggagccttcacttgagccgccac

SEQ ID NO: 48653 - DNA, 25 bp, Homo sapien
gtctttaagaacaagtggagccttc

SEQ ID NO: 48654 - DNA, 25 bp, Homo sapien
ctaagtgatcgtcgcagttcgctgc

SEQ ID NO: 48655 - DNA, 25 bp, Homo sapien
cgaacacagtgagaatggattccta

SEQ ID NO: 48656 - DNA, 25 bp, Homo sapien
taaggacagcgacttctgaacacat

SEQ ID NO: 48657 - DNA, 25 bp, Homo sapien
gacacaatttgtaggctgagaaatc

SEQ ID NO: 48658 - DNA, 25 bp, Homo sapien
caaggcttagaaatgtatagacaca

SEQ ID NO: 48659 - DNA, 25 bp, Homo sapien
ctaagtgatcgtcgcagttcgctgc

SEQ ID NO: 48660 - DNA, 25 bp, Homo sapien
taaggacagcgacttctgaacacat

SEQ ID NO: 48661 - DNA, 25 bp, Homo sapien
gcaagagggtgtgttgtaactttac

SEQ ID NO: 48662 - DNA, 25 bp, Homo sapien
aattgcaagcgcaaactcgaagctg

SEQ ID NO: 48663 - DNA, 25 bp, Homo sapien
gcccccggcttgtaagaatcaggcc

SEQ ID NO: 48664 - DNA, 25 bp, Homo sapien
gattctcagagtaggtgtaatgacc

SEQ ID NO: 48665 - DNA, 25 bp, Homo sapien
gtggagccttcacttgagccgccac

SEQ ID NO: 48666 - DNA, 25 bp, Homo sapien
gacacaatttgtaggctgagaaatc

SEQ ID NO: 48667 - DNA, 25 bp, Homo sapien
gtctttaagaacaagtggagccttc

SEQ ID NO: 48668 - DNA, 25 bp, Homo sapien
caaggcttagaaatgtatagacaca

SEQ ID NO: 48669 - DNA, 25 bp, Homo sapien
cgaacacagtgagaatggattccta

SEQ ID NO: 48670 - DNA, 25 bp, Homo sapien
gcaagagggtgtgttgtaactttac

SEQ ID NO: 48671 - DNA, 25 bp, Homo sapien
gattctcagagtaggtgtaatgacc

SEQ ID NO: 48672 - DNA, 25 bp, Homo sapien
gcccccggcttgtaagaatcaggcc

SEQ ID NO: 48673 - DNA, 25 bp, Homo sapien
aattgcaagcgcaaactcgaagctg

SEQ ID NO: 48674 - DNA, 25 bp, Homo sapien
gtggagccttcacttgagccgccac

SEQ ID NO: 48675 - DNA, 25 bp, Homo sapien
gtctttaagaacaagtggagccttc

SEQ ID NO: 48676 - DNA, 25 bp, Homo sapien
ctaagtgatcgtcgcagttcgctgc

SEQ ID NO: 48677 - DNA, 25 bp, Homo sapien
cgaacacagtgagaatggattccta

SEQ ID NO: 48678 - DNA, 25 bp, Homo sapien
taaggacagcgacttctgaacacat

SEQ ID NO: 48679 - DNA, 25 bp, Homo sapien
gacacaatttgtaggctgagaaatc

SEQ ID NO: 48680 - DNA, 25 bp, Homo sapien
caaggcttagaaatgtatagacaca

SEQ ID NO: 48681 - DNA, 25 bp, Homo sapien
gattctcagagtaggtgtaatgacc

SEQ ID NO: 48682 - DNA, 25 bp, Homo sapien
gcccccggcttgtaagaatcaggcc

SEQ ID NO: 48683 - DNA, 25 bp, Homo sapien
gtctttaagaacaagtggagccttc

SEQ ID NO: 48684 - DNA, 25 bp, Homo sapien
taaggacagcgacttctgaacacat

SEQ ID NO: 48685 - DNA, 25 bp, Homo sapien
ctaagtgatcgtcgcagttcgctgc

SEQ ID NO: 48686 - DNA, 25 bp, Homo sapien
caaggcttagaaatgtatagacaca

SEQ ID NO: 48687 - DNA, 25 bp, Homo sapien
cgaacacagtgagaatggattccta

SEQ ID NO: 48688 - DNA, 25 bp, Homo sapien
gacacaatttgtaggctgagaaatc

SEQ ID NO: 48689 - DNA, 25 bp, Homo sapien
aattgcaagcgcaaactcgaagctg

SEQ ID NO: 48690 - DNA, 25 bp, Homo sapien
gtggagccttcacttgagccgccac

SEQ ID NO: 48691 - DNA, 25 bp, Homo sapien
gcaagagggtgtgttgtaactttac

SEQ ID NO: 48692 - DNA, 25 bp, Homo sapien
gcaagagggtgtgttgtaactttac

SEQ ID NO: 48693 - DNA, 25 bp, Homo sapien
gattctcagagtaggtgtaatgacc

SEQ ID NO: 48694 - DNA, 25 bp, Homo sapien
gcccccggcttgtaagaatcaggcc

SEQ ID NO: 48695 - DNA, 25 bp, Homo sapien
aattgcaagcgcaaactcgaagctg

SEQ ID NO: 48696 - DNA, 25 bp, Homo sapien
gtggagccttcacttgagccgccac

SEQ ID NO: 48697 - DNA, 25 bp, Homo sapien
gtctttaagaacaagtggagccttc

SEQ ID NO: 48698 - DNA, 25 bp, Homo sapien
ctaagtgatcgtcgcagttcgctgc

SEQ ID NO: 48699 - DNA, 25 bp, Homo sapien
cgaacacagtgagaatggattccta

SEQ ID NO: 48700 - DNA, 25 bp, Homo sapien
taaggacagcgacttctgaacacat

SEQ ID NO: 48701 - DNA, 25 bp, Homo sapien
gacacaatttgtaggctgagaaatc

SEQ ID NO: 48702 - DNA, 25 bp, Homo sapien
caaggcttagaaatgtatagacaca

SEQ ID NO: 48703 - DNA, 25 bp, Homo sapien
aattgcaagcgcaaactcgaagctg

SEQ ID NO: 48704 - DNA, 25 bp, Homo sapien
gattctcagagtaggtgtaatgacc

SEQ ID NO: 48705 - DNA, 25 bp, Homo sapien
gcaagagggtgtgttgtaactttac

SEQ ID NO: 48706 - DNA, 25 bp, Homo sapien
taaggacagcgacttctgaacacat

SEQ ID NO: 48707 - DNA, 25 bp, Homo sapien
cgaacacagtgagaatggattccta

SEQ ID NO: 48708 - DNA, 25 bp, Homo sapien
caaggcttagaaatgtatagacaca

SEQ ID NO: 48709 - DNA, 25 bp, Homo sapien
ctaagtgatcgtcgcagttcgctgc

SEQ ID NO: 48710 - DNA, 25 bp, Homo sapien
gacacaatttgtaggctgagaaatc

SEQ ID NO: 48711 - DNA, 25 bp, Homo sapien
gtctttaagaacaagtggagccttc

SEQ ID NO: 48712 - DNA, 25 bp, Homo sapien
gcccccggcttgtaagaatcaggcc

SEQ ID NO: 48713 - DNA, 25 bp, Homo sapien
gtggagccttcacttgagccgccac

SEQ ID NO: 48714 - DNA, 25 bp, Homo sapien
gcaagagggtgtgttgtaactttac

SEQ ID NO: 48715 - DNA, 25 bp, Homo sapien
gattctcagagtaggtgtaatgacc

SEQ ID NO: 48716 - DNA, 25 bp, Homo sapien
gcccccggcttgtaagaatcaggcc

SEQ ID NO: 48717 - DNA, 25 bp, Homo sapien
aattgcaagcgcaaactcgaagctg

SEQ ID NO: 48718 - DNA, 25 bp, Homo sapien
gtggagccttcacttgagccgccac

SEQ ID NO: 48719 - DNA, 25 bp, Homo sapien
gtctttaagaacaagtggagccttc

SEQ ID NO: 48720 - DNA, 25 bp, Homo sapien
ctaagtgatcgtcgcagttcgctgc

SEQ ID NO: 48721 - DNA, 25 bp, Homo sapien
cgaacacagtgagaatggattccta

SEQ ID NO: 48722 - DNA, 25 bp, Homo sapien
taaggacagcgacttctgaacacat

SEQ ID NO: 48723 - DNA, 25 bp, Homo sapien
gacacaatttgtaggctgagaaatc

SEQ ID NO: 48724 - DNA, 25 bp, Homo sapien
caaggcttagaaatgtatagacaca

SEQ ID NO: 48725 - DNA, 25 bp, Homo sapien
gtctttaagaacaagtggagccttc

SEQ ID NO: 48726 - DNA, 25 bp, Homo sapien
cgaacacagtgagaatggattccta

SEQ ID NO: 48727 - DNA, 25 bp, Homo sapien
gtggagccttcacttgagccgccac

SEQ ID NO: 48728 - DNA, 25 bp, Homo sapien
gacacaatttgtaggctgagaaatc

SEQ ID NO: 48729 - DNA, 25 bp, Homo sapien
taaggacagcgacttctgaacacat

SEQ ID NO: 48730 - DNA, 25 bp, Homo sapien
aattgcaagcgcaaactcgaagctg

SEQ ID NO: 48731 - DNA, 25 bp, Homo sapien
caaggcttagaaatgtatagacaca

SEQ ID NO: 48732 - DNA, 25 bp, Homo sapien
gcaagagggtgtgttgtaactttac

SEQ ID NO: 48733 - DNA, 25 bp, Homo sapien
gattctcagagtaggtgtaatgacc

SEQ ID NO: 48734 - DNA, 25 bp, Homo sapien
gcccccggcttgtaagaatcaggcc

SEQ ID NO: 48735 - DNA, 25 bp, Homo sapien
ctaagtgatcgtcgcagttcgctgc

SEQ ID NO: 48736 - DNA, 25 bp, Homo sapien
gcaagagggtgtgttgtaactttac

SEQ ID NO: 48737 - DNA, 25 bp, Homo sapien
gattctcagagtaggtgtaatgacc

SEQ ID NO: 48738 - DNA, 25 bp, Homo sapien
gcccccggcttgtaagaatcaggcc

SEQ ID NO: 48739 - DNA, 25 bp, Homo sapien
aattgcaagcgcaaactcgaagctg

SEQ ID NO: 48740 - DNA, 25 bp, Homo sapien
gtggagccttcacttgagccgccac

SEQ ID NO: 48741 - DNA, 25 bp, Homo sapien
gtctttaagaacaagtggagccttc

SEQ ID NO: 48742 - DNA, 25 bp, Homo sapien
ctaagtgatcgtcgcagttcgctgc

SEQ ID NO: 48743 - DNA, 25 bp, Homo sapien
cgaacacagtgagaatggattccta

SEQ ID NO: 48744 - DNA, 25 bp, Homo sapien
taaggacagcgacttctgaacacat

SEQ ID NO: 48745 - DNA, 25 bp, Homo sapien
gacacaatttgtaggctgagaaatc

SEQ ID NO: 48746 - DNA, 25 bp, Homo sapien
caaggcttagaaatgtatagacaca

SEQ ID NO: 48747 - DNA, 25 bp, Homo sapien
gcaagagggtgtgttgtaactttac

SEQ ID NO: 48748 - DNA, 25 bp, Homo sapien
gattctcagagtaggtgtaatgacc

SEQ ID NO: 48749 - DNA, 25 bp, Homo sapien
gcccccggcttgtaagaatcaggcc

SEQ ID NO: 48750 - DNA, 25 bp, Homo sapien
aattgcaagcgcaaactcgaagctg

SEQ ID NO: 48751 - DNA, 25 bp, Homo sapien
gtggagccttcacttgagccgccac

SEQ ID NO: 48752 - DNA, 25 bp, Homo sapien
gtctttaagaacaagtggagccttc

SEQ ID NO: 48753 - DNA, 25 bp, Homo sapien
ctaagtgatcgtcgcagttcgctgc

SEQ ID NO: 48754 - DNA, 25 bp, Homo sapien
cgaacacagtgagaatggattccta

SEQ ID NO: 48755 - DNA, 25 bp, Homo sapien
taaggacagcgacttctgaacacat

SEQ ID NO: 48756 - DNA, 25 bp, Homo sapien
gacacaatttgtaggctgagaaatc

SEQ ID NO: 48757 - DNA, 25 bp, Homo sapien
caaggcttagaaatgtatagacaca

SEQ ID NO: 48758 - DNA, 25 bp, Homo sapien
gtggagccttcacttgagccgccac

SEQ ID NO: 48759 - DNA, 25 bp, Homo sapien
gcccccggcttgtaagaatcaggcc

SEQ ID NO: 48760 - DNA, 25 bp, Homo sapien
ctaagtgatcgtcgcagttcgctgc

SEQ ID NO: 48761 - DNA, 25 bp, Homo sapien
gcaagagggtgtgttgtaactttac

SEQ ID NO: 48762 - DNA, 25 bp, Homo sapien
aattgcaagcgcaaactcgaagctg

SEQ ID NO: 48763 - DNA, 25 bp, Homo sapien
taaggacagcgacttctgaacacat

SEQ ID NO: 48764 - DNA, 25 bp, Homo sapien
gacacaatttgtaggctgagaaatc

SEQ ID NO: 48765 - DNA, 25 bp, Homo sapien
cgaacacagtgagaatggattccta

SEQ ID NO: 48766 - DNA, 25 bp, Homo sapien
gtctttaagaacaagtggagccttc

SEQ ID NO: 48767 - DNA, 25 bp, Homo sapien
caaggcttagaaatgtatagacaca

SEQ ID NO: 48768 - DNA, 25 bp, Homo sapien
gattctcagagtaggtgtaatgacc

SEQ ID NO: 48769 - DNA, 25 bp, Homo sapien
aattgcaagcgcaaactcgaagctg

SEQ ID NO: 48770 - DNA, 25 bp, Homo sapien
gattctcagagtaggtgtaatgacc

SEQ ID NO: 48771 - DNA, 25 bp, Homo sapien
ctaagtgatcgtcgcagttcgctgc

SEQ ID NO: 48772 - DNA, 25 bp, Homo sapien
gcaagagggtgtgttgtaactttac

SEQ ID NO: 48773 - DNA, 25 bp, Homo sapien
gtggagccttcacttgagccgccac

SEQ ID NO: 48774 - DNA, 25 bp, Homo sapien
taaggacagcgacttctgaacacat

SEQ ID NO: 48775 - DNA, 25 bp, Homo sapien
gacacaatttgtaggctgagaaatc

SEQ ID NO: 48776 - DNA, 25 bp, Homo sapien
cgaacacagtgagaatggattccta

SEQ ID NO: 48777 - DNA, 25 bp, Homo sapien
gcccccggcttgtaagaatcaggcc

SEQ ID NO: 48778 - DNA, 25 bp, Homo sapien
gtctttaagaacaagtggagccttc

SEQ ID NO: 48779 - DNA, 25 bp, Homo sapien
caaggcttagaaatgtatagacaca

SEQ ID NO: 48780 - DNA, 25 bp, Homo sapien
gattctcagagtaggtgtaatgacc

SEQ ID NO: 48781 - DNA, 25 bp, Homo sapien
ctaagtgatcgtcgcagttcgctgc

SEQ ID NO: 48782 - DNA, 25 bp, Homo sapien
gtggagccttcacttgagccgccac

SEQ ID NO: 48783 - DNA, 25 bp, Homo sapien
gcaagagggtgtgttgtaactttac

SEQ ID NO: 48784 - DNA, 25 bp, Homo sapien
gacacaatttgtaggctgagaaatc

SEQ ID NO: 48785 - DNA, 25 bp, Homo sapien
taaggacagcgacttctgaacacat

SEQ ID NO: 48786 - DNA, 25 bp, Homo sapien
aattgcaagcgcaaactcgaagctg

SEQ ID NO: 48787 - DNA, 25 bp, Homo sapien
gcccccggcttgtaagaatcaggcc

SEQ ID NO: 48788 - DNA, 25 bp, Homo sapien
cgaacacagtgagaatggattccta

SEQ ID NO: 48789 - DNA, 25 bp, Homo sapien
gtctttaagaacaagtggagccttc

SEQ ID NO: 48790 - DNA, 25 bp, Homo sapien
caaggcttagaaatgtatagacaca

SEQ ID NO: 48791 - DNA, 25 bp, Homo sapien
ctaagtgatcgtcgcagttcgctgc

SEQ ID NO: 48792 - DNA, 25 bp, Homo sapien
gcaagagggtgtgttgtaactttac

SEQ ID NO: 48793 - DNA, 25 bp, Homo sapien
gacacaatttgtaggctgagaaatc

SEQ ID NO: 48794 - DNA, 25 bp, Homo sapien
taaggacagcgacttctgaacacat

SEQ ID NO: 48795 - DNA, 25 bp, Homo sapien
gcccccggcttgtaagaatcaggcc

SEQ ID NO: 48796 - DNA, 25 bp, Homo sapien
cgaacacagtgagaatggattccta

SEQ ID NO: 48797 - DNA, 25 bp, Homo sapien
gtctttaagaacaagtggagccttc

SEQ ID NO: 48798 - DNA, 25 bp, Homo sapien
aattgcaagcgcaaactcgaagctg

SEQ ID NO: 48799 - DNA, 25 bp, Homo sapien
caaggcttagaaatgtatagacaca

SEQ ID NO: 48800 - DNA, 25 bp, Homo sapien
gattctcagagtaggtgtaatgacc

SEQ ID NO: 48801 - DNA, 25 bp, Homo sapien
gtggagccttcacttgagccgccac

SEQ ID NO: 48802 - DNA, 25 bp, Homo sapien
gtggagccttcacttgagccgccac

SEQ ID NO: 48803 - DNA, 25 bp, Homo sapien
aattgcaagcgcaaactcgaagctg

SEQ ID NO: 48804 - DNA, 25 bp, Homo sapien
gcaagagggtgtgttgtaactttac

SEQ ID NO: 48805 - DNA, 25 bp, Homo sapien
ctaagtgatcgtcgcagttcgctgc

SEQ ID NO: 48806 - DNA, 25 bp, Homo sapien
taaggacagcgacttctgaacacat

SEQ ID NO: 48807 - DNA, 25 bp, Homo sapien
gacacaatttgtaggctgagaaatc

SEQ ID NO: 48808 - DNA, 25 bp, Homo sapien
gcccccggcttgtaagaatcaggcc

SEQ ID NO: 48809 - DNA, 25 bp, Homo sapien
cgaacacagtgagaatggattccta

SEQ ID NO: 48810 - DNA, 25 bp, Homo sapien
gattctcagagtaggtgtaatgacc

SEQ ID NO: 48811 - DNA, 25 bp, Homo sapien
gtctttaagaacaagtggagccttc

SEQ ID NO: 48812 - DNA, 25 bp, Homo sapien
caaggcttagaaatgtatagacaca

SEQ ID NO: 48813 - DNA, 25 bp, Homo sapien
aattgcaagcgcaaactcgaagctg

SEQ ID NO: 48814 - DNA, 25 bp, Homo sapien
gcaagagggtgtgttgtaactttac

SEQ ID NO: 48815 - DNA, 25 bp, Homo sapien
gattctcagagtaggtgtaatgacc

SEQ ID NO: 48816 - DNA, 25 bp, Homo sapien
gacacaatttgtaggctgagaaatc

SEQ ID NO: 48817 - DNA, 25 bp, Homo sapien
taaggacagcgacttctgaacacat

SEQ ID NO: 48818 - DNA, 25 bp, Homo sapien
ctaagtgatcgtcgcagttcgctgc

SEQ ID NO: 48819 - DNA, 25 bp, Homo sapien
gcccccggcttgtaagaatcaggcc

SEQ ID NO: 48820 - DNA, 25 bp, Homo sapien
cgaacacagtgagaatggattccta

SEQ ID NO: 48821 - DNA, 25 bp, Homo sapien
gtctttaagaacaagtggagccttc

SEQ ID NO: 48822 - DNA, 25 bp, Homo sapien
caaggcttagaaatgtatagacaca

SEQ ID NO: 48823 - DNA, 25 bp, Homo sapien
gtggagccttcacttgagccgccac

SEQ ID NO: 48824 - DNA, 25 bp, Homo sapien
gtggagccttcacttgagccgccac

SEQ ID NO: 48825 - DNA, 25 bp, Homo sapien
gattctcagagtaggtgtaatgacc

SEQ ID NO: 48826 - DNA, 25 bp, Homo sapien
gcaagagggtgtgttgtaactttac

SEQ ID NO: 48827 - DNA, 25 bp, Homo sapien
gacacaatttgtaggctgagaaatc

SEQ ID NO: 48828 - DNA, 25 bp, Homo sapien
taaggacagcgacttctgaacacat

SEQ ID NO: 48829 - DNA, 25 bp, Homo sapien
ctaagtgatcgtcgcagttcgctgc

SEQ ID NO: 48830 - DNA, 25 bp, Homo sapien
aattgcaagcgcaaactcgaagctg

SEQ ID NO: 48831 - DNA, 25 bp, Homo sapien
cgaacacagtgagaatggattccta

SEQ ID NO: 48832 - DNA, 25 bp, Homo sapien
gcccccggcttgtaagaatcaggcc

SEQ ID NO: 48833 - DNA, 25 bp, Homo sapien
gtctttaagaacaagtggagccttc

SEQ ID NO: 48834 - DNA, 25 bp, Homo sapien
caaggcttagaaatgtatagacaca

SEQ ID NO: 48835 - DNA, 25 bp, Homo sapien
cgaacacagtgagaatggattccta

SEQ ID NO: 48836 - DNA, 25 bp, Homo sapien
gtggagccttcacttgagccgccac

SEQ ID NO: 48837 - DNA, 25 bp, Homo sapien
aattgcaagcgcaaactcgaagctg

SEQ ID NO: 48838 - DNA, 25 bp, Homo sapien
gcaagagggtgtgttgtaactttac

SEQ ID NO: 48839 - DNA, 25 bp, Homo sapien
taaggacagcgacttctgaacacat

SEQ ID NO: 48840 - DNA, 25 bp, Homo sapien
gacacaatttgtaggctgagaaatc

SEQ ID NO: 48841 - DNA, 25 bp, Homo sapien
ctaagtgatcgtcgcagttcgctgc

SEQ ID NO: 48842 - DNA, 25 bp, Homo sapien
gcccccggcttgtaagaatcaggcc

SEQ ID NO: 48843 - DNA, 25 bp, Homo sapien
gtctttaagaacaagtggagccttc

SEQ ID NO: 48844 - DNA, 25 bp, Homo sapien
gattctcagagtaggtgtaatgacc

SEQ ID NO: 48845 - DNA, 25 bp, Homo sapien
caaggcttagaaatgtatagacaca

SEQ ID NO: 48846 - DNA, 25 bp, Homo sapien
aattgcaagcgcaaactcgaagctg

SEQ ID NO: 48847 - DNA, 25 bp, Homo sapien
gcaagagggtgtgttgtaactttac

SEQ ID NO: 48848 - DNA, 25 bp, Homo sapien
ctaagtgatcgtcgcagttcgctgc

SEQ ID NO: 48849 - DNA, 25 bp, Homo sapien
taaggacagcgacttctgaacacat

SEQ ID NO: 48850 - DNA, 25 bp, Homo sapien
gacacaatttgtaggctgagaaatc

SEQ ID NO: 48851 - DNA, 25 bp, Homo sapien
gcccccggcttgtaagaatcaggcc

SEQ ID NO: 48852 - DNA, 25 bp, Homo sapien
cgaacacagtgagaatggattccta

SEQ ID NO: 48853 - DNA, 25 bp, Homo sapien
gtctttaagaacaagtggagccttc

SEQ ID NO: 48854 - DNA, 25 bp, Homo sapien
caaggcttagaaatgtatagacaca

SEQ ID NO: 48855 - DNA, 25 bp, Homo sapien
gtggagccttcacttgagccgccac

SEQ ID NO: 48856 - DNA, 25 bp, Homo sapien
gattctcagagtaggtgtaatgacc

SEQ ID NO: 48857 - DNA, 25 bp, Homo sapien
gtctttaagaacaagtggagccttc

SEQ ID NO: 48858 - DNA, 25 bp, Homo sapien
gcaagagggtgtgttgtaactttac

SEQ ID NO: 48859 - DNA, 25 bp, Homo sapien
gacacaatttgtaggctgagaaatc

SEQ ID NO: 48860 - DNA, 25 bp, Homo sapien
gtggagccttcacttgagccgccac

SEQ ID NO: 48861 - DNA, 25 bp, Homo sapien
gattctcagagtaggtgtaatgacc

SEQ ID NO: 48862 - DNA, 25 bp, Homo sapien
caaggcttagaaatgtatagacaca

SEQ ID NO: 48863 - DNA, 25 bp, Homo sapien
gcccccggcttgtaagaatcaggcc

SEQ ID NO: 48864 - DNA, 25 bp, Homo sapien
aattgcaagcgcaaactcgaagctg

SEQ ID NO: 48865 - DNA, 25 bp, Homo sapien
cgaacacagtgagaatggattccta

SEQ ID NO: 48866 - DNA, 25 bp, Homo sapien
ctaagtgatcgtcgcagttcgctgc

SEQ ID NO: 48867 - DNA, 25 bp, Homo sapien
taaggacagcgacttctgaacacat

SEQ ID NO: 48868 - DNA, 25 bp, Homo sapien
gattctcagagtaggtgtaatgacc

SEQ ID NO: 48869 - DNA, 25 bp, Homo sapien
gcaagagggtgtgttgtaactttac

SEQ ID NO: 48870 - DNA, 25 bp, Homo sapien
taaggacagcgacttctgaacacat

SEQ ID NO: 48871 - DNA, 25 bp, Homo sapien
gacacaatttgtaggctgagaaatc

SEQ ID NO: 48872 - DNA, 25 bp, Homo sapien
aattgcaagcgcaaactcgaagctg

SEQ ID NO: 48873 - DNA, 25 bp, Homo sapien
ctaagtgatcgtcgcagttcgctgc

SEQ ID NO: 48874 - DNA, 25 bp, Homo sapien
gcccccggcttgtaagaatcaggcc

SEQ ID NO: 48875 - DNA, 25 bp, Homo sapien
cgaacacagtgagaatggattccta

SEQ ID NO: 48876 - DNA, 25 bp, Homo sapien
gtggagccttcacttgagccgccac

SEQ ID NO: 48877 - DNA, 25 bp, Homo sapien
gtctttaagaacaagtggagccttc

SEQ ID NO: 48878 - DNA, 25 bp, Homo sapien
caaggcttagaaatgtatagacaca

SEQ ID NO: 48879 - DNA, 25 bp, Homo sapien
gcaagagggtgtgttgtaactttac

SEQ ID NO: 48880 - DNA, 25 bp, Homo sapien
gattctcagagtaggtgtaatgacc

SEQ ID NO: 48881 - DNA, 25 bp, Homo sapien
gcccccggcttgtaagaatcaggcc

SEQ ID NO: 48882 - DNA, 25 bp, Homo sapien
aattgcaagcgcaaactcgaagctg

SEQ ID NO: 48883 - DNA, 25 bp, Homo sapien
gtggagccttcacttgagccgccac

SEQ ID NO: 48884 - DNA, 25 bp, Homo sapien
gtctttaagaacaagtggagccttc

SEQ ID NO: 48885 - DNA, 25 bp, Homo sapien
ctaagtgatcgtcgcagttcgctgc

SEQ ID NO: 48886 - DNA, 25 bp, Homo sapien
cgaacacagtgagaatggattccta

SEQ ID NO: 48887 - DNA, 25 bp, Homo sapien
taaggacagcgacttctgaacacat

SEQ ID NO: 48888 - DNA, 25 bp, Homo sapien
gacacaatttgtaggctgagaaatc

SEQ ID NO: 48889 - DNA, 25 bp, Homo sapien
caaggcttagaaatgtatagacaca

SEQ ID NO: 48890 - DNA, 25 bp, Homo sapien
atgtgttcagaagtcgctgtcctta

SEQ ID NO: 48891 - DNA, 25 bp, Homo sapien
ggcctgattcttacaagccgggggc

SEQ ID NO: 48892 - DNA, 25 bp, Homo sapien
gtggcggctcaagtgaaggctccac

SEQ ID NO: 48893 - DNA, 25 bp, Homo sapien
gaaggctccacttgttcttaaagac

SEQ ID NO: 48894 - DNA, 25 bp, Homo sapien
taggaatccattctcactgtgttcg

SEQ ID NO: 48895 - DNA, 25 bp, Homo sapien
gcagcgaactgcgacgatcacttag

SEQ ID NO: 48896 - DNA, 25 bp, Homo sapien
gtaaagttacaacacaccctcttgc

SEQ ID NO: 48897 - DNA, 25 bp, Homo sapien
tgtgtctatacatttctaagccttg

SEQ ID NO: 48898 - DNA, 25 bp, Homo sapien
cagcttcgagtttgcgcttgcaatt

SEQ ID NO: 48899 - DNA, 25 bp, Homo sapien
gatttctcagcctacaaattgtgtc

SEQ ID NO: 48900 - DNA, 25 bp, Homo sapien
ggtcattacacctactctgagaatc

SEQ ID NO: 48901 - DNA, 25 bp, Homo sapien
gattctcagagtaggtgtaatgacc

SEQ ID NO: 48902 - DNA, 25 bp, Homo sapien
gcaagagggtgtgttgtaactttac

SEQ ID NO: 48903 - DNA, 25 bp, Homo sapien
gtggagccttcacttgagccgccac

SEQ ID NO: 48904 - DNA, 25 bp, Homo sapien
ctaagtgatcgtcgcagttcgctgc

SEQ ID NO: 48905 - DNA, 25 bp, Homo sapien
taaggacagcgacttctgaacacat

SEQ ID NO: 48906 - DNA, 25 bp, Homo sapien
gacacaatttgtaggctgagaaatc

SEQ ID NO: 48907 - DNA, 25 bp, Homo sapien
gcccccggcttgtaagaatcaggcc

SEQ ID NO: 48908 - DNA, 25 bp, Homo sapien
aattgcaagcgcaaactcgaagctg

SEQ ID NO: 48909 - DNA, 25 bp, Homo sapien
cgaacacagtgagaatggattccta

SEQ ID NO: 48910 - DNA, 25 bp, Homo sapien
gtctttaagaacaagtggagccttc

SEQ ID NO: 48911 - DNA, 25 bp, Homo sapien
caaggcttagaaatgtatagacaca

SEQ ID NO: 48912 - DNA, 25 bp, Homo sapien
gtctttaagaacaagtggagccttc

SEQ ID NO: 48913 - DNA, 25 bp, Homo sapien
gacacaatttgtaggctgagaaatc

SEQ ID NO: 48914 - DNA, 25 bp, Homo sapien
gtggagccttcacttgagccgccac

SEQ ID NO: 48915 - DNA, 25 bp, Homo sapien
cgaacacagtgagaatggattccta

SEQ ID NO: 48916 - DNA, 25 bp, Homo sapien
caaggcttagaaatgtatagacaca

SEQ ID NO: 48917 - DNA, 25 bp, Homo sapien
gattctcagagtaggtgtaatgacc

SEQ ID NO: 48918 - DNA, 25 bp, Homo sapien
gcccccggcttgtaagaatcaggcc

SEQ ID NO: 48919 - DNA, 25 bp, Homo sapien
gcaagagggtgtgttgtaactttac

SEQ ID NO: 48920 - DNA, 25 bp, Homo sapien
ctaagtgatcgtcgcagttcgctgc

SEQ ID NO: 48921 - DNA, 25 bp, Homo sapien
aattgcaagcgcaaactcgaagctg

SEQ ID NO: 48922 - DNA, 25 bp, Homo sapien
taaggacagcgacttctgaacacat

SEQ ID NO: 48923 - DNA, 25 bp, Homo sapien
gcaagagggtgtgttgtaactttac

SEQ ID NO: 48924 - DNA, 25 bp, Homo sapien
gattctcagagtaggtgtaatgacc

SEQ ID NO: 48925 - DNA, 25 bp, Homo sapien
gcccccggcttgtaagaatcaggcc

SEQ ID NO: 48926 - DNA, 25 bp, Homo sapien
aattgcaagcgcaaactcgaagctg

SEQ ID NO: 48927 - DNA, 25 bp, Homo sapien
gtggagccttcacttgagccgccac

SEQ ID NO: 48928 - DNA, 25 bp, Homo sapien
gtctttaagaacaagtggagccttc

SEQ ID NO: 48929 - DNA, 25 bp, Homo sapien
ctaagtgatcgtcgcagttcgctgc

SEQ ID NO: 48930 - DNA, 25 bp, Homo sapien
cgaacacagtgagaatggattccta

SEQ ID NO: 48931 - DNA, 25 bp, Homo sapien
taaggacagcgacttctgaacacat

SEQ ID NO: 48932 - DNA, 25 bp, Homo sapien
gacacaatttgtaggctgagaaatc

SEQ ID NO: 48933 - DNA, 25 bp, Homo sapien
caaggcttagaaatgtatagacaca

SEQ ID NO: 48934 - DNA, 25 bp, Homo sapien
taaggacagcgacttctgaacacat

SEQ ID NO: 48935 - DNA, 25 bp, Homo sapien
gtctttaagaacaagtggagccttc

SEQ ID NO: 48936 - DNA, 25 bp, Homo sapien
gtggagccttcacttgagccgccac

SEQ ID NO: 48937 - DNA, 25 bp, Homo sapien
cgaacacagtgagaatggattccta

SEQ ID NO: 48938 - DNA, 25 bp, Homo sapien
gacacaatttgtaggctgagaaatc

SEQ ID NO: 48939 - DNA, 25 bp, Homo sapien
gattctcagagtaggtgtaatgacc

SEQ ID NO: 48940 - DNA, 25 bp, Homo sapien
gcccccggcttgtaagaatcaggcc

SEQ ID NO: 48941 - DNA, 25 bp, Homo sapien
caaggcttagaaatgtatagacaca

SEQ ID NO: 48942 - DNA, 25 bp, Homo sapien
aattgcaagcgcaaactcgaagctg

SEQ ID NO: 48943 - DNA, 25 bp, Homo sapien
ctaagtgatcgtcgcagttcgctgc

SEQ ID NO: 48944 - DNA, 25 bp, Homo sapien
gcaagagggtgtgttgtaactttac

SEQ ID NO: 48945 - DNA, 25 bp, Homo sapien
gcaagagggtgtgttgtaactttac

SEQ ID NO: 48946 - DNA, 25 bp, Homo sapien
gattctcagagtaggtgtaatgacc

SEQ ID NO: 48947 - DNA, 25 bp, Homo sapien
gcccccggcttgtaagaatcaggcc

SEQ ID NO: 48948 - DNA, 25 bp, Homo sapien
aattgcaagcgcaaactcgaagctg

SEQ ID NO: 48949 - DNA, 25 bp, Homo sapien
gtggagccttcacttgagccgccac

SEQ ID NO: 48950 - DNA, 25 bp, Homo sapien
gtctttaagaacaagtggagccttc

SEQ ID NO: 48951 - DNA, 25 bp, Homo sapien
ctaagtgatcgtcgcagttcgctgc

SEQ ID NO: 48952 - DNA, 25 bp, Homo sapien
cgaacacagtgagaatggattccta

SEQ ID NO: 48953 - DNA, 25 bp, Homo sapien
taaggacagcgacttctgaacacat

SEQ ID NO: 48954 - DNA, 25 bp, Homo sapien
gacacaatttgtaggctgagaaatc

SEQ ID NO: 48955 - DNA, 25 bp, Homo sapien
caaggcttagaaatgtatagacaca

SEQ ID NO: 48956 - DNA, 25 bp, Homo sapien
gcccccggcttgtaagaatcaggcc

SEQ ID NO: 48957 - DNA, 25 bp, Homo sapien
taaggacagcgacttctgaacacat

SEQ ID NO: 48958 - DNA, 25 bp, Homo sapien
gtggagccttcacttgagccgccac

SEQ ID NO: 48959 - DNA, 25 bp, Homo sapien
aattgcaagcgcaaactcgaagctg

SEQ ID NO: 48960 - DNA, 25 bp, Homo sapien
gattctcagagtaggtgtaatgacc

SEQ ID NO: 48961 - DNA, 25 bp, Homo sapien
gtctttaagaacaagtggagccttc

SEQ ID NO: 48962 - DNA, 25 bp, Homo sapien
ctaagtgatcgtcgcagttcgctgc

SEQ ID NO: 48963 - DNA, 25 bp, Homo sapien
caaggcttagaaatgtatagacaca

SEQ ID NO: 48964 - DNA, 25 bp, Homo sapien
cgaacacagtgagaatggattccta

SEQ ID NO: 48965 - DNA, 25 bp, Homo sapien
gcaagagggtgtgttgtaactttac

SEQ ID NO: 48966 - DNA, 25 bp, Homo sapien
gacacaatttgtaggctgagaaatc

SEQ ID NO: 48967 - DNA, 25 bp, Homo sapien
gcaagagggtgtgttgtaactttac

SEQ ID NO: 48968 - DNA, 25 bp, Homo sapien
gattctcagagtaggtgtaatgacc

SEQ ID NO: 48969 - DNA, 25 bp, Homo sapien
gcccccggcttgtaagaatcaggcc

SEQ ID NO: 48970 - DNA, 25 bp, Homo sapien
aattgcaagcgcaaactcgaagctg

SEQ ID NO: 48971 - DNA, 25 bp, Homo sapien
gtggagccttcacttgagccgccac

SEQ ID NO: 48972 - DNA, 25 bp, Homo sapien
gtctttaagaacaagtggagccttc

SEQ ID NO: 48973 - DNA, 25 bp, Homo sapien
ctaagtgatcgtcgcagttcgctgc

SEQ ID NO: 48974 - DNA, 25 bp, Homo sapien
cgaacacagtgagaatggattccta

SEQ ID NO: 48975 - DNA, 25 bp, Homo sapien
taaggacagcgacttctgaacacat

SEQ ID NO: 48976 - DNA, 25 bp, Homo sapien
gacacaatttgtaggctgagaaatc

SEQ ID NO: 48977 - DNA, 25 bp, Homo sapien
caaggcttagaaatgtatagacaca

SEQ ID NO: 48978 - DNA, 25 bp, Homo sapien
gcaagagggtgtgttgtaactttac

SEQ ID NO: 48979 - DNA, 25 bp, Homo sapien
gattctcagagtaggtgtaatgacc

SEQ ID NO: 48980 - DNA, 25 bp, Homo sapien
gcccccggcttgtaagaatcaggcc

SEQ ID NO: 48981 - DNA, 25 bp, Homo sapien
aattgcaagcgcaaactcgaagctg

SEQ ID NO: 48982 - DNA, 25 bp, Homo sapien
gtggagccttcacttgagccgccac

SEQ ID NO: 48983 - DNA, 25 bp, Homo sapien
gtctttaagaacaagtggagccttc

SEQ ID NO: 48984 - DNA, 25 bp, Homo sapien
ctaagtgatcgtcgcagttcgctgc

SEQ ID NO: 48985 - DNA, 25 bp, Homo sapien
cgaacacagtgagaatggattccta

SEQ ID NO: 48986 - DNA, 25 bp, Homo sapien
taaggacagcgacttctgaacacat

SEQ ID NO: 48987 - DNA, 25 bp, Homo sapien
gacacaatttgtaggctgagaaatc

SEQ ID NO: 48988 - DNA, 25 bp, Homo sapien
caaggcttagaaatgtatagacaca

SEQ ID NO: 48989 - DNA, 25 bp, Homo sapien
gacacaatttgtaggctgagaaatc

SEQ ID NO: 48990 - DNA, 25 bp, Homo sapien
caaggcttagaaatgtatagacaca

SEQ ID NO: 48991 - DNA, 25 bp, Homo sapien
aattgcaagcgcaaactcgaagctg

SEQ ID NO: 48992 - DNA, 25 bp, Homo sapien
gcccccggcttgtaagaatcaggcc

SEQ ID NO: 48993 - DNA, 25 bp, Homo sapien
gattctcagagtaggtgtaatgacc

SEQ ID NO: 48994 - DNA, 25 bp, Homo sapien
ctaagtgatcgtcgcagttcgctgc

SEQ ID NO: 48995 - DNA, 25 bp, Homo sapien
cgaacacagtgagaatggattccta

SEQ ID NO: 48996 - DNA, 25 bp, Homo sapien
gtggagccttcacttgagccgccac

SEQ ID NO: 48997 - DNA, 25 bp, Homo sapien
gtctttaagaacaagtggagccttc

SEQ ID NO: 48998 - DNA, 25 bp, Homo sapien
taaggacagcgacttctgaacacat

SEQ ID NO: 48999 - DNA, 25 bp, Homo sapien
gcaagagggtgtgttgtaactttac

SEQ ID NO: 49000 - DNA, 25 bp, Homo sapien
gcaagagggtgtgttgtaactttac

SEQ ID NO: 49001 - DNA, 25 bp, Homo sapien
gattctcagagtaggtgtaatgacc

SEQ ID NO: 49002 - DNA, 25 bp, Homo sapien
gcccccggcttgtaagaatcaggcc

SEQ ID NO: 49003 - DNA, 25 bp, Homo sapien
aattgcaagcgcaaactcgaagctg

SEQ ID NO: 49004 - DNA, 25 bp, Homo sapien
gtggagccttcacttgagccgccac

SEQ ID NO: 49005 - DNA, 25 bp, Homo sapien
gtctttaagaacaagtggagccttc

SEQ ID NO: 49006 - DNA, 25 bp, Homo sapien
ctaagtgatcgtcgcagttcgctgc

SEQ ID NO: 49007 - DNA, 25 bp, Homo sapien
cgaacacagtgagaatggattccta

SEQ ID NO: 49008 - DNA, 25 bp, Homo sapien
taaggacagcgacttctgaacacat

SEQ ID NO: 49009 - DNA, 25 bp, Homo sapien
gacacaatttgtaggctgagaaatc

SEQ ID NO: 49010 - DNA, 25 bp, Homo sapien
caaggcttagaaatgtatagacaca

SEQ ID NO: 49011 - DNA, 25 bp, Homo sapien
caaggcttagaaatgtatagacaca

SEQ ID NO: 49012 - DNA, 25 bp, Homo sapien
gtggagccttcacttgagccgccac

SEQ ID NO: 49013 - DNA, 25 bp, Homo sapien
taaggacagcgacttctgaacacat

SEQ ID NO: 49014 - DNA, 25 bp, Homo sapien
gacacaatttgtaggctgagaaatc

SEQ ID NO: 49015 - DNA, 25 bp, Homo sapien
gcaagagggtgtgttgtaactttac

SEQ ID NO: 49016 - DNA, 25 bp, Homo sapien
gcccccggcttgtaagaatcaggcc

SEQ ID NO: 49017 - DNA, 25 bp, Homo sapien
gtctttaagaacaagtggagccttc

SEQ ID NO: 49018 - DNA, 25 bp, Homo sapien
ctaagtgatcgtcgcagttcgctgc

SEQ ID NO: 49019 - DNA, 25 bp, Homo sapien
aattgcaagcgcaaactcgaagctg

SEQ ID NO: 49020 - DNA, 25 bp, Homo sapien
cgaacacagtgagaatggattccta

SEQ ID NO: 49021 - DNA, 25 bp, Homo sapien
gattctcagagtaggtgtaatgacc

SEQ ID NO: 49022 - DNA, 25 bp, Homo sapien
gcaagagggtgtgttgtaactttac

SEQ ID NO: 49023 - DNA, 25 bp, Homo sapien
gattctcagagtaggtgtaatgacc

SEQ ID NO: 49024 - DNA, 25 bp, Homo sapien
gcccccggcttgtaagaatcaggcc

SEQ ID NO: 49025 - DNA, 25 bp, Homo sapien
aattgcaagcgcaaactcgaagctg

SEQ ID NO: 49026 - DNA, 25 bp, Homo sapien
gtggagccttcacttgagccgccac

SEQ ID NO: 49027 - DNA, 25 bp, Homo sapien
gtctttaagaacaagtggagccttc

SEQ ID NO: 49028 - DNA, 25 bp, Homo sapien
ctaagtgatcgtcgcagttcgctgc

SEQ ID NO: 49029 - DNA, 25 bp, Homo sapien
cgaacacagtgagaatggattccta

SEQ ID NO: 49030 - DNA, 25 bp, Homo sapien
taaggacagcgacttctgaacacat

SEQ ID NO: 49031 - DNA, 25 bp, Homo sapien
gacacaatttgtaggctgagaaatc

SEQ ID NO: 49032 - DNA, 25 bp, Homo sapien
caaggcttagaaatgtatagacaca

SEQ ID NO: 49033 - DNA, 25 bp, Homo sapien
ctaagtgatcgtcgcagttcgctgc

SEQ ID NO: 49034 - DNA, 25 bp, Homo sapien
gtctttaagaacaagtggagccttc

SEQ ID NO: 49035 - DNA, 25 bp, Homo sapien
gcaagagggtgtgttgtaactttac

SEQ ID NO: 49036 - DNA, 25 bp, Homo sapien
aattgcaagcgcaaactcgaagctg

SEQ ID NO: 49037 - DNA, 25 bp, Homo sapien
caaggcttagaaatgtatagacaca

SEQ ID NO: 49038 - DNA, 25 bp, Homo sapien
gtggagccttcacttgagccgccac

SEQ ID NO: 49039 - DNA, 25 bp, Homo sapien
gcccccggcttgtaagaatcaggcc

SEQ ID NO: 49040 - DNA, 25 bp, Homo sapien
taaggacagcgacttctgaacacat

SEQ ID NO: 49041 - DNA, 25 bp, Homo sapien
gattctcagagtaggtgtaatgacc

SEQ ID NO: 49042 - DNA, 25 bp, Homo sapien
cgaacacagtgagaatggattccta

SEQ ID NO: 49043 - DNA, 25 bp, Homo sapien
gacacaatttgtaggctgagaaatc

SEQ ID NO: 49044 - DNA, 25 bp, Homo sapien
gcaagagggtgtgttgtaactttac

SEQ ID NO: 49045 - DNA, 25 bp, Homo sapien
gattctcagagtaggtgtaatgacc

SEQ ID NO: 49046 - DNA, 25 bp, Homo sapien
gcccccggcttgtaagaatcaggcc

SEQ ID NO: 49047 - DNA, 25 bp, Homo sapien
aattgcaagcgcaaactcgaagctg

SEQ ID NO: 49048 - DNA, 25 bp, Homo sapien
gtggagccttcacttgagccgccac

SEQ ID NO: 49049 - DNA, 25 bp, Homo sapien
gtctttaagaacaagtggagccttc

SEQ ID NO: 49050 - DNA, 25 bp, Homo sapien
ctaagtgatcgtcgcagttcgctgc

SEQ ID NO: 49051 - DNA, 25 bp, Homo sapien
cgaacacagtgagaatggattccta

SEQ ID NO: 49052 - DNA, 25 bp, Homo sapien
taaggacagcgacttctgaacacat

SEQ ID NO: 49053 - DNA, 25 bp, Homo sapien
gacacaatttgtaggctgagaaatc

SEQ ID NO: 49054 - DNA, 25 bp, Homo sapien
caaggcttagaaatgtatagacaca

SEQ ID NO: 49055 - DNA, 25 bp, Homo sapien
aattgcaagcgcaaactcgaagctg

SEQ ID NO: 49056 - DNA, 25 bp, Homo sapien
caaggcttagaaatgtatagacaca

SEQ ID NO: 49057 - DNA, 25 bp, Homo sapien
gtctttaagaacaagtggagccttc

SEQ ID NO: 49058 - DNA, 25 bp, Homo sapien
ctaagtgatcgtcgcagttcgctgc

SEQ ID NO: 49059 - DNA, 25 bp, Homo sapien
gacacaatttgtaggctgagaaatc

SEQ ID NO: 49060 - DNA, 25 bp, Homo sapien
gattctcagagtaggtgtaatgacc

SEQ ID NO: 49061 - DNA, 25 bp, Homo sapien
gcccccggcttgtaagaatcaggcc

SEQ ID NO: 49062 - DNA, 25 bp, Homo sapien
gcaagagggtgtgttgtaactttac

SEQ ID NO: 49063 - DNA, 25 bp, Homo sapien
taaggacagcgacttctgaacacat

SEQ ID NO: 49064 - DNA, 25 bp, Homo sapien
gtggagccttcacttgagccgccac

SEQ ID NO: 49065 - DNA, 25 bp, Homo sapien
cgaacacagtgagaatggattccta

SEQ ID NO: 49066 - DNA, 25 bp, Homo sapien
gcaagagggtgtgttgtaactttac

SEQ ID NO: 49067 - DNA, 25 bp, Homo sapien
gattctcagagtaggtgtaatgacc

SEQ ID NO: 49068 - DNA, 25 bp, Homo sapien
gcccccggcttgtaagaatcaggcc

SEQ ID NO: 49069 - DNA, 25 bp, Homo sapien
aattgcaagcgcaaactcgaagctg

SEQ ID NO: 49070 - DNA, 25 bp, Homo sapien
gtggagccttcacttgagccgccac

SEQ ID NO: 49071 - DNA, 25 bp, Homo sapien
gtctttaagaacaagtggagccttc

SEQ ID NO: 49072 - DNA, 25 bp, Homo sapien
ctaagtgatcgtcgcagttcgctgc

SEQ ID NO: 49073 - DNA, 25 bp, Homo sapien
cgaacacagtgagaatggattccta

SEQ ID NO: 49074 - DNA, 25 bp, Homo sapien
taaggacagcgacttctgaacacat

SEQ ID NO: 49075 - DNA, 25 bp, Homo sapien
gacacaatttgtaggctgagaaatc

SEQ ID NO: 49076 - DNA, 25 bp, Homo sapien
caaggcttagaaatgtatagacaca

SEQ ID NO: 49077 - DNA, 25 bp, Homo sapien
gtggagccttcacttgagccgccac

SEQ ID NO: 49078 - DNA, 25 bp, Homo sapien
cgaacacagtgagaatggattccta

SEQ ID NO: 49079 - DNA, 25 bp, Homo sapien
gcccccggcttgtaagaatcaggcc

SEQ ID NO: 49080 - DNA, 25 bp, Homo sapien
gcaagagggtgtgttgtaactttac

SEQ ID NO: 49081 - DNA, 25 bp, Homo sapien
taaggacagcgacttctgaacacat

SEQ ID NO: 49082 - DNA, 25 bp, Homo sapien
aattgcaagcgcaaactcgaagctg

SEQ ID NO: 49083 - DNA, 25 bp, Homo sapien
ctaagtgatcgtcgcagttcgctgc

SEQ ID NO: 49084 - DNA, 25 bp, Homo sapien
gattctcagagtaggtgtaatgacc

SEQ ID NO: 49085 - DNA, 25 bp, Homo sapien
gtctttaagaacaagtggagccttc

SEQ ID NO: 49086 - DNA, 25 bp, Homo sapien
caaggcttagaaatgtatagacaca

SEQ ID NO: 49087 - DNA, 25 bp, Homo sapien
gacacaatttgtaggctgagaaatc

SEQ ID NO: 49088 - DNA, 25 bp, Homo sapien
gtggagccttcacttgagccgccac

SEQ ID NO: 49089 - DNA, 25 bp, Homo sapien
ctaagtgatcgtcgcagttcgctgc

SEQ ID NO: 49090 - DNA, 25 bp, Homo sapien
gattctcagagtaggtgtaatgacc

SEQ ID NO: 49091 - DNA, 25 bp, Homo sapien
gacacaatttgtaggctgagaaatc

SEQ ID NO: 49092 - DNA, 25 bp, Homo sapien
taaggacagcgacttctgaacacat

SEQ ID NO: 49093 - DNA, 25 bp, Homo sapien
gcaagagggtgtgttgtaactttac

SEQ ID NO: 49094 - DNA, 25 bp, Homo sapien
gcccccggcttgtaagaatcaggcc

SEQ ID NO: 49095 - DNA, 25 bp, Homo sapien
aattgcaagcgcaaactcgaagctg

SEQ ID NO: 49096 - DNA, 25 bp, Homo sapien
gtctttaagaacaagtggagccttc

SEQ ID NO: 49097 - DNA, 25 bp, Homo sapien
caaggcttagaaatgtatagacaca

SEQ ID NO: 49098 - DNA, 25 bp, Homo sapien
cgaacacagtgagaatggattccta

SEQ ID NO: 49099 - DNA, 25 bp, Homo sapien
gcaagagggtgtgttgtaactttac

SEQ ID NO: 49100 - DNA, 25 bp, Homo sapien
gattctcagagtaggtgtaatgacc

SEQ ID NO: 49101 - DNA, 25 bp, Homo sapien
gcccccggcttgtaagaatcaggcc

SEQ ID NO: 49102 - DNA, 25 bp, Homo sapien
aattgcaagcgcaaactcgaagctg

SEQ ID NO: 49103 - DNA, 25 bp, Homo sapien
gtggagccttcacttgagccgccac

SEQ ID NO: 49104 - DNA, 25 bp, Homo sapien
gtctttaagaacaagtggagccttc

SEQ ID NO: 49105 - DNA, 25 bp, Homo sapien
ctaagtgatcgtcgcagttcgctgc

SEQ ID NO: 49106 - DNA, 25 bp, Homo sapien
cgaacacagtgagaatggattccta

SEQ ID NO: 49107 - DNA, 25 bp, Homo sapien
taaggacagcgacttctgaacacat

SEQ ID NO: 49108 - DNA, 25 bp, Homo sapien
gacacaatttgtaggctgagaaatc

SEQ ID NO: 49109 - DNA, 25 bp, Homo sapien
caaggcttagaaatgtatagacaca

SEQ ID NO: 49110 - DNA, 25 bp, Homo sapien
caaggcttagaaatgtatagacaca

SEQ ID NO: 49111 - DNA, 25 bp, Homo sapien
gcaagagggtgtgttgtaactttac

SEQ ID NO: 49112 - DNA, 25 bp, Homo sapien
gcccccggcttgtaagaatcaggcc

SEQ ID NO: 49113 - DNA, 25 bp, Homo sapien
ctaagtgatcgtcgcagttcgctgc

SEQ ID NO: 49114 - DNA, 25 bp, Homo sapien
gtggagccttcacttgagccgccac

SEQ ID NO: 49115 - DNA, 25 bp, Homo sapien
gtctttaagaacaagtggagccttc

SEQ ID NO: 49116 - DNA, 25 bp, Homo sapien
gacacaatttgtaggctgagaaatc

SEQ ID NO: 49117 - DNA, 25 bp, Homo sapien
cgaacacagtgagaatggattccta

SEQ ID NO: 49118 - DNA, 25 bp, Homo sapien
taaggacagcgacttctgaacacat

SEQ ID NO: 49119 - DNA, 25 bp, Homo sapien
aattgcaagcgcaaactcgaagctg

SEQ ID NO: 49120 - DNA, 25 bp, Homo sapien
gattctcagagtaggtgtaatgacc

SEQ ID NO: 49121 - DNA, 25 bp, Homo sapien
gcaagagggtgtgttgtaactttac

SEQ ID NO: 49122 - DNA, 25 bp, Homo sapien
gattctcagagtaggtgtaatgacc

SEQ ID NO: 49123 - DNA, 25 bp, Homo sapien
gcccccggcttgtaagaatcaggcc

SEQ ID NO: 49124 - DNA, 25 bp, Homo sapien
aattgcaagcgcaaactcgaagctg

SEQ ID NO: 49125 - DNA, 25 bp, Homo sapien
gtggagccttcacttgagccgccac

SEQ ID NO: 49126 - DNA, 25 bp, Homo sapien
gtctttaagaacaagtggagccttc

SEQ ID NO: 49127 - DNA, 25 bp, Homo sapien
ctaagtgatcgtcgcagttcgctgc

SEQ ID NO: 49128 - DNA, 25 bp, Homo sapien
cgaacacagtgagaatggattccta

SEQ ID NO: 49129 - DNA, 25 bp, Homo sapien
taaggacagcgacttctgaacacat

SEQ ID NO: 49130 - DNA, 25 bp, Homo sapien
gacacaatttgtaggctgagaaatc

SEQ ID NO: 49131 - DNA, 25 bp, Homo sapien
caaggcttagaaatgtatagacaca

SEQ ID NO: 49132 - DNA, 25 bp, Homo sapien
caaggcttagaaatgtatagacaca

SEQ ID NO: 49133 - DNA, 25 bp, Homo sapien
cgaacacagtgagaatggattccta

SEQ ID NO: 49134 - DNA, 25 bp, Homo sapien
gcccccggcttgtaagaatcaggcc

SEQ ID NO: 49135 - DNA, 25 bp, Homo sapien
ctaagtgatcgtcgcagttcgctgc

SEQ ID NO: 49136 - DNA, 25 bp, Homo sapien
aattgcaagcgcaaactcgaagctg

SEQ ID NO: 49137 - DNA, 25 bp, Homo sapien
gattctcagagtaggtgtaatgacc

SEQ ID NO: 49138 - DNA, 25 bp, Homo sapien
gcaagagggtgtgttgtaactttac

SEQ ID NO: 49139 - DNA, 25 bp, Homo sapien
gtctttaagaacaagtggagccttc

SEQ ID NO: 49140 - DNA, 25 bp, Homo sapien
gtggagccttcacttgagccgccac

SEQ ID NO: 49141 - DNA, 25 bp, Homo sapien
gacacaatttgtaggctgagaaatc

SEQ ID NO: 49142 - DNA, 25 bp, Homo sapien
taaggacagcgacttctgaacacat

SEQ ID NO: 49143 - DNA, 25 bp, Homo sapien
gcaagagggtgtgttgtaactttac

SEQ ID NO: 49144 - DNA, 25 bp, Homo sapien
gattctcagagtaggtgtaatgacc

SEQ ID NO: 49145 - DNA, 25 bp, Homo sapien
gcccccggcttgtaagaatcaggcc

SEQ ID NO: 49146 - DNA, 25 bp, Homo sapien
aattgcaagcgcaaactcgaagctg

SEQ ID NO: 49147 - DNA, 25 bp, Homo sapien
gtggagccttcacttgagccgccac

SEQ ID NO: 49148 - DNA, 25 bp, Homo sapien
gtctttaagaacaagtggagccttc

SEQ ID NO: 49149 - DNA, 25 bp, Homo sapien
ctaagtgatcgtcgcagttcgctgc

SEQ ID NO: 49150 - DNA, 25 bp, Homo sapien
cgaacacagtgagaatggattccta

SEQ ID NO: 49151 - DNA, 25 bp, Homo sapien
taaggacagcgacttctgaacacat

SEQ ID NO: 49152 - DNA, 25 bp, Homo sapien
gacacaatttgtaggctgagaaatc

SEQ ID NO: 49153 - DNA, 25 bp, Homo sapien
caaggcttagaaatgtatagacaca

SEQ ID NO: 49154 - DNA, 25 bp, Homo sapien
gtggagccttcacttgagccgccac

SEQ ID NO: 49155 - DNA, 25 bp, Homo sapien
gtctttaagaacaagtggagccttc

SEQ ID NO: 49156 - DNA, 25 bp, Homo sapien
ctaagtgatcgtcgcagttcgctgc

SEQ ID NO: 49157 - DNA, 25 bp, Homo sapien
caaggcttagaaatgtatagacaca

SEQ ID NO: 49158 - DNA, 25 bp, Homo sapien
cgaacacagtgagaatggattccta

SEQ ID NO: 49159 - DNA, 25 bp, Homo sapien
taaggacagcgacttctgaacacat

SEQ ID NO: 49160 - DNA, 25 bp, Homo sapien
aattgcaagcgcaaactcgaagctg

SEQ ID NO: 49161 - DNA, 25 bp, Homo sapien
gcccccggcttgtaagaatcaggcc

SEQ ID NO: 49162 - DNA, 25 bp, Homo sapien
gattctcagagtaggtgtaatgacc

SEQ ID NO: 49163 - DNA, 25 bp, Homo sapien
gacacaatttgtaggctgagaaatc

SEQ ID NO: 49164 - DNA, 25 bp, Homo sapien
gcaagagggtgtgttgtaactttac

SEQ ID NO: 49165 - DNA, 25 bp, Homo sapien
gcaagagggtgtgttgtaactttac

SEQ ID NO: 49166 - DNA, 25 bp, Homo sapien
gattctcagagtaggtgtaatgacc

SEQ ID NO: 49167 - DNA, 25 bp, Homo sapien
gcccccggcttgtaagaatcaggcc

SEQ ID NO: 49168 - DNA, 25 bp, Homo sapien
aattgcaagcgcaaactcgaagctg

SEQ ID NO: 49169 - DNA, 25 bp, Homo sapien
gtggagccttcacttgagccgccac

SEQ ID NO: 49170 - DNA, 25 bp, Homo sapien
gtctttaagaacaagtggagccttc

SEQ ID NO: 49171 - DNA, 25 bp, Homo sapien
ctaagtgatcgtcgcagttcgctgc

SEQ ID NO: 49172 - DNA, 25 bp, Homo sapien
cgaacacagtgagaatggattccta

SEQ ID NO: 49173 - DNA, 25 bp, Homo sapien
taaggacagcgacttctgaacacat

SEQ ID NO: 49174 - DNA, 25 bp, Homo sapien
gacacaatttgtaggctgagaaatc

SEQ ID NO: 49175 - DNA, 25 bp, Homo sapien
caaggcttagaaatgtatagacaca

SEQ ID NO: 49176 - DNA, 25 bp, Homo sapien
gacacaatttgtaggctgagaaatc

SEQ ID NO: 49177 - DNA, 25 bp, Homo sapien
cgaacacagtgagaatggattccta

SEQ ID NO: 49178 - DNA, 25 bp, Homo sapien
ctaagtgatcgtcgcagttcgctgc

SEQ ID NO: 49179 - DNA, 25 bp, Homo sapien
gtggagccttcacttgagccgccac

SEQ ID NO: 49180 - DNA, 25 bp, Homo sapien
gcccccggcttgtaagaatcaggcc

SEQ ID NO: 49181 - DNA, 25 bp, Homo sapien
taaggacagcgacttctgaacacat

SEQ ID NO: 49182 - DNA, 25 bp, Homo sapien
aattgcaagcgcaaactcgaagctg

SEQ ID NO: 49183 - DNA, 25 bp, Homo sapien
caaggcttagaaatgtatagacaca

SEQ ID NO: 49184 - DNA, 25 bp, Homo sapien
gtctttaagaacaagtggagccttc

SEQ ID NO: 49185 - DNA, 25 bp, Homo sapien
gcaagagggtgtgttgtaactttac

SEQ ID NO: 49186 - DNA, 25 bp, Homo sapien
gattctcagagtaggtgtaatgacc

SEQ ID NO: 49187 - DNA, 25 bp, Homo sapien
gcaagagggtgtgttgtaactttac

SEQ ID NO: 49188 - DNA, 25 bp, Homo sapien
gattctcagagtaggtgtaatgacc

SEQ ID NO: 49189 - DNA, 25 bp, Homo sapien
gcccccggcttgtaagaatcaggcc

SEQ ID NO: 49190 - DNA, 25 bp, Homo sapien
aattgcaagcgcaaactcgaagctg

SEQ ID NO: 49191 - DNA, 25 bp, Homo sapien
gtggagccttcacttgagccgccac

SEQ ID NO: 49192 - DNA, 25 bp, Homo sapien
gtctttaagaacaagtggagccttc

SEQ ID NO: 49193 - DNA, 25 bp, Homo sapien
ctaagtgatcgtcgcagttcgctgc

SEQ ID NO: 49194 - DNA, 25 bp, Homo sapien
cgaacacagtgagaatggattccta

SEQ ID NO: 49195 - DNA, 25 bp, Homo sapien
taaggacagcgacttctgaacacat

SEQ ID NO: 49196 - DNA, 25 bp, Homo sapien
gacacaatttgtaggctgagaaatc

SEQ ID NO: 49197 - DNA, 25 bp, Homo sapien
caaggcttagaaatgtatagacaca

SEQ ID NO: 49198 - DNA, 25 bp, Homo sapien
gcccccggcttgtaagaatcaggcc

SEQ ID NO: 49199 - DNA, 25 bp, Homo sapien
ctaagtgatcgtcgcagttcgctgc

SEQ ID NO: 49200 - DNA, 25 bp, Homo sapien
gattctcagagtaggtgtaatgacc

SEQ ID NO: 49201 - DNA, 25 bp, Homo sapien
gcaagagggtgtgttgtaactttac

SEQ ID NO: 49202 - DNA, 25 bp, Homo sapien
gtctttaagaacaagtggagccttc

SEQ ID NO: 49203 - DNA, 25 bp, Homo sapien
gtggagccttcacttgagccgccac

SEQ ID NO: 49204 - DNA, 25 bp, Homo sapien
gacacaatttgtaggctgagaaatc

SEQ ID NO: 49205 - DNA, 25 bp, Homo sapien
taaggacagcgacttctgaacacat

SEQ ID NO: 49206 - DNA, 25 bp, Homo sapien
aattgcaagcgcaaactcgaagctg

SEQ ID NO: 49207 - DNA, 25 bp, Homo sapien
caaggcttagaaatgtatagacaca

SEQ ID NO: 49208 - DNA, 25 bp, Homo sapien
cgaacacagtgagaatggattccta

SEQ ID NO: 49209 - DNA, 25 bp, Homo sapien
gcaagagggtgtgttgtaactttac

SEQ ID NO: 49210 - DNA, 25 bp, Homo sapien
gattctcagagtaggtgtaatgacc

SEQ ID NO: 49211 - DNA, 25 bp, Homo sapien
gcccccggcttgtaagaatcaggcc

SEQ ID NO: 49212 - DNA, 25 bp, Homo sapien
aattgcaagcgcaaactcgaagctg

SEQ ID NO: 49213 - DNA, 25 bp, Homo sapien
gtggagccttcacttgagccgccac

SEQ ID NO: 49214 - DNA, 25 bp, Homo sapien
gtctttaagaacaagtggagccttc

SEQ ID NO: 49215 - DNA, 25 bp, Homo sapien
ctaagtgatcgtcgcagttcgctgc

SEQ ID NO: 49216 - DNA, 25 bp, Homo sapien
cgaacacagtgagaatggattccta

SEQ ID NO: 49217 - DNA, 25 bp, Homo sapien
taaggacagcgacttctgaacacat

SEQ ID NO: 49218 - DNA, 25 bp, Homo sapien
gacacaatttgtaggctgagaaatc

SEQ ID NO: 49219 - DNA, 25 bp, Homo sapien
caaggcttagaaatgtatagacaca

SEQ ID NO: 49220 - DNA, 25 bp, Homo sapien
gcaagagggtgtgttgtaactttac

SEQ ID NO: 49221 - DNA, 25 bp, Homo sapien
gattctcagagtaggtgtaatgacc

SEQ ID NO: 49222 - DNA, 25 bp, Homo sapien
gcccccggcttgtaagaatcaggcc

SEQ ID NO: 49223 - DNA, 25 bp, Homo sapien
aattgcaagcgcaaactcgaagctg

SEQ ID NO: 49224 - DNA, 25 bp, Homo sapien
gtggagccttcacttgagccgccac

SEQ ID NO: 49225 - DNA, 25 bp, Homo sapien
gtctttaagaacaagtggagccttc

SEQ ID NO: 49226 - DNA, 25 bp, Homo sapien
ctaagtgatcgtcgcagttcgctgc

SEQ ID NO: 49227 - DNA, 25 bp, Homo sapien
cgaacacagtgagaatggattccta

SEQ ID NO: 49228 - DNA, 25 bp, Homo sapien
taaggacagcgacttctgaacacat

SEQ ID NO: 49229 - DNA, 25 bp, Homo sapien
gacacaatttgtaggctgagaaatc

SEQ ID NO: 49230 - DNA, 25 bp, Homo sapien
caaggcttagaaatgtatagacaca

SEQ ID NO: 49231 - DNA, 25 bp, Homo sapien
gacacaatttgtaggctgagaaatc

SEQ ID NO: 49232 - DNA, 25 bp, Homo sapien
ctaagtgatcgtcgcagttcgctgc

SEQ ID NO: 49233 - DNA, 25 bp, Homo sapien
taaggacagcgacttctgaacacat

SEQ ID NO: 49234 - DNA, 25 bp, Homo sapien
gcaagagggtgtgttgtaactttac

SEQ ID NO: 49235 - DNA, 25 bp, Homo sapien
gcccccggcttgtaagaatcaggcc

SEQ ID NO: 49236 - DNA, 25 bp, Homo sapien
gattctcagagtaggtgtaatgacc

SEQ ID NO: 49237 - DNA, 25 bp, Homo sapien
gtctttaagaacaagtggagccttc

SEQ ID NO: 49238 - DNA, 25 bp, Homo sapien
gtggagccttcacttgagccgccac

SEQ ID NO: 49239 - DNA, 25 bp, Homo sapien
cgaacacagtgagaatggattccta

SEQ ID NO: 49240 - DNA, 25 bp, Homo sapien
caaggcttagaaatgtatagacaca

SEQ ID NO: 49241 - DNA, 25 bp, Homo sapien
aattgcaagcgcaaactcgaagctg

SEQ ID NO: 49242 - DNA, 25 bp, Homo sapien
gcaagagggtgtgttgtaactttac

SEQ ID NO: 49243 - DNA, 25 bp, Homo sapien
gattctcagagtaggtgtaatgacc

SEQ ID NO: 49244 - DNA, 25 bp, Homo sapien
gcccccggcttgtaagaatcaggcc

SEQ ID NO: 49245 - DNA, 25 bp, Homo sapien
aattgcaagcgcaaactcgaagctg

SEQ ID NO: 49246 - DNA, 25 bp, Homo sapien
gtggagccttcacttgagccgccac

SEQ ID NO: 49247 - DNA, 25 bp, Homo sapien
gtctttaagaacaagtggagccttc

SEQ ID NO: 49248 - DNA, 25 bp, Homo sapien
ctaagtgatcgtcgcagttcgctgc

SEQ ID NO: 49249 - DNA, 25 bp, Homo sapien
cgaacacagtgagaatggattccta

SEQ ID NO: 49250 - DNA, 25 bp, Homo sapien
taaggacagcgacttctgaacacat

SEQ ID NO: 49251 - DNA, 25 bp, Homo sapien
gacacaatttgtaggctgagaaatc

SEQ ID NO: 49252 - DNA, 25 bp, Homo sapien
caaggcttagaaatgtatagacaca

SEQ ID NO: 49253 - DNA, 25 bp, Homo sapien
gtggagccttcacttgagccgccac

SEQ ID NO: 49254 - DNA, 25 bp, Homo sapien
ctaagtgatcgtcgcagttcgctgc

SEQ ID NO: 49255 - DNA, 25 bp, Homo sapien
gacacaatttgtaggctgagaaatc

SEQ ID NO: 49256 - DNA, 25 bp, Homo sapien
gcaagagggtgtgttgtaactttac

SEQ ID NO: 49257 - DNA, 25 bp, Homo sapien
gtctttaagaacaagtggagccttc

SEQ ID NO: 49258 - DNA, 25 bp, Homo sapien
taaggacagcgacttctgaacacat

SEQ ID NO: 49259 - DNA, 25 bp, Homo sapien
aattgcaagcgcaaactcgaagctg

SEQ ID NO: 49260 - DNA, 25 bp, Homo sapien
caaggcttagaaatgtatagacaca

SEQ ID NO: 49261 - DNA, 25 bp, Homo sapien
cgaacacagtgagaatggattccta

SEQ ID NO: 49262 - DNA, 25 bp, Homo sapien
gcccccggcttgtaagaatcaggcc

SEQ ID NO: 49263 - DNA, 25 bp, Homo sapien
gattctcagagtaggtgtaatgacc

SEQ ID NO: 49264 - DNA, 25 bp, Homo sapien
gcaagagggtgtgttgtaactttac

SEQ ID NO: 49265 - DNA, 25 bp, Homo sapien
gattctcagagtaggtgtaatgacc

SEQ ID NO: 49266 - DNA, 25 bp, Homo sapien
gcccccggcttgtaagaatcaggcc

SEQ ID NO: 49267 - DNA, 25 bp, Homo sapien
aattgcaagcgcaaactcgaagctg

SEQ ID NO: 49268 - DNA, 25 bp, Homo sapien
gtggagccttcacttgagccgccac

SEQ ID NO: 49269 - DNA, 25 bp, Homo sapien
gtctttaagaacaagtggagccttc

SEQ ID NO: 49270 - DNA, 25 bp, Homo sapien
ctaagtgatcgtcgcagttcgctgc

SEQ ID NO: 49271 - DNA, 25 bp, Homo sapien
cgaacacagtgagaatggattccta

SEQ ID NO: 49272 - DNA, 25 bp, Homo sapien
taaggacagcgacttctgaacacat

SEQ ID NO: 49273 - DNA, 25 bp, Homo sapien
gacacaatttgtaggctgagaaatc

SEQ ID NO: 49274 - DNA, 25 bp, Homo sapien
caaggcttagaaatgtatagacaca

SEQ ID NO: 49275 - DNA, 25 bp, Homo sapien
taaggacagcgacttctgaacacat

SEQ ID NO: 49276 - DNA, 25 bp, Homo sapien
cgaacacagtgagaatggattccta

SEQ ID NO: 49277 - DNA, 25 bp, Homo sapien
ctaagtgatcgtcgcagttcgctgc

SEQ ID NO: 49278 - DNA, 25 bp, Homo sapien
aattgcaagcgcaaactcgaagctg

SEQ ID NO: 49279 - DNA, 25 bp, Homo sapien
gattctcagagtaggtgtaatgacc

SEQ ID NO: 49280 - DNA, 25 bp, Homo sapien
gcaagagggtgtgttgtaactttac

SEQ ID NO: 49281 - DNA, 25 bp, Homo sapien
gcccccggcttgtaagaatcaggcc

SEQ ID NO: 49282 - DNA, 25 bp, Homo sapien
caaggcttagaaatgtatagacaca

SEQ ID NO: 49283 - DNA, 25 bp, Homo sapien
gtggagccttcacttgagccgccac

SEQ ID NO: 49284 - DNA, 25 bp, Homo sapien
gtctttaagaacaagtggagccttc

SEQ ID NO: 49285 - DNA, 25 bp, Homo sapien
gacacaatttgtaggctgagaaatc

SEQ ID NO: 49286 - DNA, 25 bp, Homo sapien
gcaagagggtgtgttgtaactttac

SEQ ID NO: 49287 - DNA, 25 bp, Homo sapien
gattctcagagtaggtgtaatgacc

SEQ ID NO: 49288 - DNA, 25 bp, Homo sapien
gcccccggcttgtaagaatcaggcc

SEQ ID NO: 49289 - DNA, 25 bp, Homo sapien
aattgcaagcgcaaactcgaagctg

SEQ ID NO: 49290 - DNA, 25 bp, Homo sapien
gtggagccttcacttgagccgccac

SEQ ID NO: 49291 - DNA, 25 bp, Homo sapien
gtctttaagaacaagtggagccttc

SEQ ID NO: 49292 - DNA, 25 bp, Homo sapien
ctaagtgatcgtcgcagttcgctgc

SEQ ID NO: 49293 - DNA, 25 bp, Homo sapien
cgaacacagtgagaatggattccta

SEQ ID NO: 49294 - DNA, 25 bp, Homo sapien
taaggacagcgacttctgaacacat

SEQ ID NO: 49295 - DNA, 25 bp, Homo sapien
gacacaatttgtaggctgagaaatc

SEQ ID NO: 49296 - DNA, 25 bp, Homo sapien
caaggcttagaaatgtatagacaca

SEQ ID NO: 49297 - DNA, 25 bp, Homo sapien
caaggcttagaaatgtatagacaca

SEQ ID NO: 49298 - DNA, 25 bp, Homo sapien
gtggagccttcacttgagccgccac

SEQ ID NO: 49299 - DNA, 25 bp, Homo sapien
cgaacacagtgagaatggattccta

SEQ ID NO: 49300 - DNA, 25 bp, Homo sapien
taaggacagcgacttctgaacacat

SEQ ID NO: 49301 - DNA, 25 bp, Homo sapien
gcccccggcttgtaagaatcaggcc

SEQ ID NO: 49302 - DNA, 25 bp, Homo sapien
gacacaatttgtaggctgagaaatc

SEQ ID NO: 49303 - DNA, 25 bp, Homo sapien
gtctttaagaacaagtggagccttc

SEQ ID NO: 49304 - DNA, 25 bp, Homo sapien
ctaagtgatcgtcgcagttcgctgc

SEQ ID NO: 49305 - DNA, 25 bp, Homo sapien
aattgcaagcgcaaactcgaagctg

SEQ ID NO: 49306 - DNA, 25 bp, Homo sapien
gattctcagagtaggtgtaatgacc

SEQ ID NO: 49307 - DNA, 25 bp, Homo sapien
gcaagagggtgtgttgtaactttac

SEQ ID NO: 49308 - DNA, 25 bp, Homo sapien
gcaagagggtgtgttgtaactttac

SEQ ID NO: 49309 - DNA, 25 bp, Homo sapien
gattctcagagtaggtgtaatgacc

SEQ ID NO: 49310 - DNA, 25 bp, Homo sapien
gcccccggcttgtaagaatcaggcc

SEQ ID NO: 49311 - DNA, 25 bp, Homo sapien
aattgcaagcgcaaactcgaagctg

SEQ ID NO: 49312 - DNA, 25 bp, Homo sapien
gtggagccttcacttgagccgccac

SEQ ID NO: 49313 - DNA, 25 bp, Homo sapien
gtctttaagaacaagtggagccttc

SEQ ID NO: 49314 - DNA, 25 bp, Homo sapien
ctaagtgatcgtcgcagttcgctgc

SEQ ID NO: 49315 - DNA, 25 bp, Homo sapien
cgaacacagtgagaatggattccta

SEQ ID NO: 49316 - DNA, 25 bp, Homo sapien
taaggacagcgacttctgaacacat

SEQ ID NO: 49317 - DNA, 25 bp, Homo sapien
gacacaatttgtaggctgagaaatc

SEQ ID NO: 49318 - DNA, 25 bp, Homo sapien
caaggcttagaaatgtatagacaca

SEQ ID NO: 49319 - DNA, 25 bp, Homo sapien
cgaacacagtgagaatggattccta

SEQ ID NO: 49320 - DNA, 25 bp, Homo sapien
ctaagtgatcgtcgcagttcgctgc

SEQ ID NO: 49321 - DNA, 25 bp, Homo sapien
caaggcttagaaatgtatagacaca

SEQ ID NO: 49322 - DNA, 25 bp, Homo sapien
gcccccggcttgtaagaatcaggcc

SEQ ID NO: 49323 - DNA, 25 bp, Homo sapien
gtggagccttcacttgagccgccac

SEQ ID NO: 49324 - DNA, 25 bp, Homo sapien
gcaagagggtgtgttgtaactttac

SEQ ID NO: 49325 - DNA, 25 bp, Homo sapien
taaggacagcgacttctgaacacat

SEQ ID NO: 49326 - DNA, 25 bp, Homo sapien
gtctttaagaacaagtggagccttc

SEQ ID NO: 49327 - DNA, 25 bp, Homo sapien
aattgcaagcgcaaactcgaagctg

SEQ ID NO: 49328 - DNA, 25 bp, Homo sapien
gacacaatttgtaggctgagaaatc

SEQ ID NO: 49329 - DNA, 25 bp, Homo sapien
gattctcagagtaggtgtaatgacc

SEQ ID NO: 49330 - DNA, 25 bp, Homo sapien
gattctcagagtaggtgtaatgacc

SEQ ID NO: 49331 - DNA, 25 bp, Homo sapien
gtctttaagaacaagtggagccttc

SEQ ID NO: 49332 - DNA, 25 bp, Homo sapien
gacacaatttgtaggctgagaaatc

SEQ ID NO: 49333 - DNA, 25 bp, Homo sapien
ctaagtgatcgtcgcagttcgctgc

SEQ ID NO: 49334 - DNA, 25 bp, Homo sapien
taaggacagcgacttctgaacacat

SEQ ID NO: 49335 - DNA, 25 bp, Homo sapien
caaggcttagaaatgtatagacaca

SEQ ID NO: 49336 - DNA, 25 bp, Homo sapien
gtggagccttcacttgagccgccac

SEQ ID NO: 49337 - DNA, 25 bp, Homo sapien
gcccccggcttgtaagaatcaggcc

SEQ ID NO: 49338 - DNA, 25 bp, Homo sapien
gcaagagggtgtgttgtaactttac

SEQ ID NO: 49339 - DNA, 25 bp, Homo sapien
cgaacacagtgagaatggattccta

SEQ ID NO: 49340 - DNA, 25 bp, Homo sapien
aattgcaagcgcaaactcgaagctg

SEQ ID NO: 49341 - DNA, 25 bp, Homo sapien
gcaagagggtgtgttgtaactttac

SEQ ID NO: 49342 - DNA, 25 bp, Homo sapien
gattctcagagtaggtgtaatgacc

SEQ ID NO: 49343 - DNA, 25 bp, Homo sapien
gcccccggcttgtaagaatcaggcc

SEQ ID NO: 49344 - DNA, 25 bp, Homo sapien
aattgcaagcgcaaactcgaagctg

SEQ ID NO: 49345 - DNA, 25 bp, Homo sapien
gtggagccttcacttgagccgccac

SEQ ID NO: 49346 - DNA, 25 bp, Homo sapien
gtctttaagaacaagtggagccttc

SEQ ID NO: 49347 - DNA, 25 bp, Homo sapien
ctaagtgatcgtcgcagttcgctgc

SEQ ID NO: 49348 - DNA, 25 bp, Homo sapien
cgaacacagtgagaatggattccta

SEQ ID NO: 49349 - DNA, 25 bp, Homo sapien
taaggacagcgacttctgaacacat

SEQ ID NO: 49350 - DNA, 25 bp, Homo sapien
gacacaatttgtaggctgagaaatc

SEQ ID NO: 49351 - DNA, 25 bp, Homo sapien
caaggcttagaaatgtatagacaca

SEQ ID NO: 49352 - DNA, 25 bp, Homo sapien
gcccccggcttgtaagaatcaggcc

SEQ ID NO: 49353 - DNA, 25 bp, Homo sapien
gtggagccttcacttgagccgccac

SEQ ID NO: 49354 - DNA, 25 bp, Homo sapien
taaggacagcgacttctgaacacat

SEQ ID NO: 49355 - DNA, 25 bp, Homo sapien
cgaacacagtgagaatggattccta

SEQ ID NO: 49356 - DNA, 25 bp, Homo sapien
gattctcagagtaggtgtaatgacc

SEQ ID NO: 49357 - DNA, 25 bp, Homo sapien
caaggcttagaaatgtatagacaca

SEQ ID NO: 49358 - DNA, 25 bp, Homo sapien
gcaagagggtgtgttgtaactttac

SEQ ID NO: 49359 - DNA, 25 bp, Homo sapien
ctaagtgatcgtcgcagttcgctgc

SEQ ID NO: 49360 - DNA, 25 bp, Homo sapien
gtctttaagaacaagtggagccttc

SEQ ID NO: 49361 - DNA, 25 bp, Homo sapien
aattgcaagcgcaaactcgaagctg

SEQ ID NO: 49362 - DNA, 25 bp, Homo sapien
gacacaatttgtaggctgagaaatc

SEQ ID NO: 49363 - DNA, 25 bp, Homo sapien
gcaagagggtgtgttgtaactttac

SEQ ID NO: 49364 - DNA, 25 bp, Homo sapien
gattctcagagtaggtgtaatgacc

SEQ ID NO: 49365 - DNA, 25 bp, Homo sapien
gcccccggcttgtaagaatcaggcc

SEQ ID NO: 49366 - DNA, 25 bp, Homo sapien
aattgcaagcgcaaactcgaagctg

SEQ ID NO: 49367 - DNA, 25 bp, Homo sapien
gtggagccttcacttgagccgccac

SEQ ID NO: 49368 - DNA, 25 bp, Homo sapien
gtctttaagaacaagtggagccttc

SEQ ID NO: 49369 - DNA, 25 bp, Homo sapien
ctaagtgatcgtcgcagttcgctgc

SEQ ID NO: 49370 - DNA, 25 bp, Homo sapien
cgaacacagtgagaatggattccta

SEQ ID NO: 49371 - DNA, 25 bp, Homo sapien
taaggacagcgacttctgaacacat

SEQ ID NO: 49372 - DNA, 25 bp, Homo sapien
gacacaatttgtaggctgagaaatc

SEQ ID NO: 49373 - DNA, 25 bp, Homo sapien
caaggcttagaaatgtatagacaca

SEQ ID NO: 49374 - DNA, 25 bp, Homo sapien
gattctcagagtaggtgtaatgacc

SEQ ID NO: 49375 - DNA, 25 bp, Homo sapien
aattgcaagcgcaaactcgaagctg

SEQ ID NO: 49376 - DNA, 25 bp, Homo sapien
ctaagtgatcgtcgcagttcgctgc

SEQ ID NO: 49377 - DNA, 25 bp, Homo sapien
gtggagccttcacttgagccgccac

SEQ ID NO: 49378 - DNA, 25 bp, Homo sapien
gcccccggcttgtaagaatcaggcc

SEQ ID NO: 49379 - DNA, 25 bp, Homo sapien
gacacaatttgtaggctgagaaatc

SEQ ID NO: 49380 - DNA, 25 bp, Homo sapien
taaggacagcgacttctgaacacat

SEQ ID NO: 49381 - DNA, 25 bp, Homo sapien
caaggcttagaaatgtatagacaca

SEQ ID NO: 49382 - DNA, 25 bp, Homo sapien
gcaagagggtgtgttgtaactttac

SEQ ID NO: 49383 - DNA, 25 bp, Homo sapien
gtctttaagaacaagtggagccttc

SEQ ID NO: 49384 - DNA, 25 bp, Homo sapien
cgaacacagtgagaatggattccta

SEQ ID NO: 49385 - DNA, 25 bp, Homo sapien
gcaagagggtgtgttgtaactttac

SEQ ID NO: 49386 - DNA, 25 bp, Homo sapien
gattctcagagtaggtgtaatgacc

SEQ ID NO: 49387 - DNA, 25 bp, Homo sapien
gcccccggcttgtaagaatcaggcc

SEQ ID NO: 49388 - DNA, 25 bp, Homo sapien
aattgcaagcgcaaactcgaagctg

SEQ ID NO: 49389 - DNA, 25 bp, Homo sapien
gtggagccttcacttgagccgccac

SEQ ID NO: 49390 - DNA, 25 bp, Homo sapien
gtctttaagaacaagtggagccttc

SEQ ID NO: 49391 - DNA, 25 bp, Homo sapien
ctaagtgatcgtcgcagttcgctgc

SEQ ID NO: 49392 - DNA, 25 bp, Homo sapien
cgaacacagtgagaatggattccta

SEQ ID NO: 49393 - DNA, 25 bp, Homo sapien
taaggacagcgacttctgaacacat

SEQ ID NO: 49394 - DNA, 25 bp, Homo sapien
gacacaatttgtaggctgagaaatc

SEQ ID NO: 49395 - DNA, 25 bp, Homo sapien
caaggcttagaaatgtatagacaca

SEQ ID NO: 49396 - DNA, 25 bp, Homo sapien
ttgttgtctgcgggctcaaagccct

SEQ ID NO: 49397 - DNA, 25 bp, Homo sapien
tcacagagatgtctacagagacttt

SEQ ID NO: 49398 - DNA, 25 bp, Homo sapien
ggggaaccagaaacctagctatctg

SEQ ID NO: 49399 - DNA, 25 bp, Homo sapien
ttcccatcggtagctcttaacagac

SEQ ID NO: 49400 - DNA, 25 bp, Homo sapien
taaggaggtttgaataagccatctg

SEQ ID NO: 49401 - DNA, 25 bp, Homo sapien
tcagtggttaattggtgaaagcagg

SEQ ID NO: 49402 - DNA, 25 bp, Homo sapien
tgaaagcaggaaatgtatgcccttt

SEQ ID NO: 49403 - DNA, 25 bp, Homo sapien
acagaccaattagccaaatgcaaaa

SEQ ID NO: 49404 - DNA, 25 bp, Homo sapien
atgccctttactgtgctgctgttgc

SEQ ID NO: 49405 - DNA, 25 bp, Homo sapien
ataatccaggagtatataaccatgc

SEQ ID NO: 49406 - DNA, 25 bp, Homo sapien
cttggagctcaccacagtgctgatc

SEQ ID NO: 49407 - DNA, 25 bp, Homo sapien
taaggaggtttgaataagccatctg

SEQ ID NO: 49408 - DNA, 25 bp, Homo sapien
atgccctttactgtgctgctgttgc

SEQ ID NO: 49409 - DNA, 25 bp, Homo sapien
tgaaagcaggaaatgtatgcccttt

SEQ ID NO: 49410 - DNA, 25 bp, Homo sapien
tcagtggttaattggtgaaagcagg

SEQ ID NO: 49411 - DNA, 25 bp, Homo sapien
ggggaaccagaaacctagctatctg

SEQ ID NO: 49412 - DNA, 25 bp, Homo sapien
acagaccaattagccaaatgcaaaa

SEQ ID NO: 49413 - DNA, 25 bp, Homo sapien
ataatccaggagtatataaccatgc

SEQ ID NO: 49414 - DNA, 25 bp, Homo sapien
tcacagagatgtctacagagacttt

SEQ ID NO: 49415 - DNA, 25 bp, Homo sapien
ttgttgtctgcgggctcaaagccct

SEQ ID NO: 49416 - DNA, 25 bp, Homo sapien
ttcccatcggtagctcttaacagac

SEQ ID NO: 49417 - DNA, 25 bp, Homo sapien
cttggagctcaccacagtgctgatc

SEQ ID NO: 49418 - DNA, 25 bp, Homo sapien
taaggaggtttgaataagccatctg

SEQ ID NO: 49419 - DNA, 25 bp, Homo sapien
cttggagctcaccacagtgctgatc

SEQ ID NO: 49420 - DNA, 25 bp, Homo sapien
ggggaaccagaaacctagctatctg

SEQ ID NO: 49421 - DNA, 25 bp, Homo sapien
tcagtggttaattggtgaaagcagg

SEQ ID NO: 49422 - DNA, 25 bp, Homo sapien
ttcccatcggtagctcttaacagac

SEQ ID NO: 49423 - DNA, 25 bp, Homo sapien
atgccctttactgtgctgctgttgc

SEQ ID NO: 49424 - DNA, 25 bp, Homo sapien
ttgttgtctgcgggctcaaagccct

SEQ ID NO: 49425 - DNA, 25 bp, Homo sapien
acagaccaattagccaaatgcaaaa

SEQ ID NO: 49426 - DNA, 25 bp, Homo sapien
tcacagagatgtctacagagacttt

SEQ ID NO: 49427 - DNA, 25 bp, Homo sapien
ataatccaggagtatataaccatgc

SEQ ID NO: 49428 - DNA, 25 bp, Homo sapien
tgaaagcaggaaatgtatgcccttt

SEQ ID NO: 49429 - DNA, 25 bp, Homo sapien
ttgttgtctgcgggctcaaagccct

SEQ ID NO: 49430 - DNA, 25 bp, Homo sapien
ttcccatcggtagctcttaacagac

SEQ ID NO: 49431 - DNA, 25 bp, Homo sapien
cttggagctcaccacagtgctgatc

SEQ ID NO: 49432 - DNA, 25 bp, Homo sapien
taaggaggtttgaataagccatctg

SEQ ID NO: 49433 - DNA, 25 bp, Homo sapien
atgccctttactgtgctgctgttgc

SEQ ID NO: 49434 - DNA, 25 bp, Homo sapien
tgaaagcaggaaatgtatgcccttt

SEQ ID NO: 49435 - DNA, 25 bp, Homo sapien
tcagtggttaattggtgaaagcagg

SEQ ID NO: 49436 - DNA, 25 bp, Homo sapien
ggggaaccagaaacctagctatctg

SEQ ID NO: 49437 - DNA, 25 bp, Homo sapien
acagaccaattagccaaatgcaaaa

SEQ ID NO: 49438 - DNA, 25 bp, Homo sapien
ataatccaggagtatataaccatgc

SEQ ID NO: 49439 - DNA, 25 bp, Homo sapien
tcacagagatgtctacagagacttt

SEQ ID NO: 49440 - DNA, 25 bp, Homo sapien
tcagtggttaattggtgaaagcagg

SEQ ID NO: 49441 - DNA, 25 bp, Homo sapien
tgaaagcaggaaatgtatgcccttt

SEQ ID NO: 49442 - DNA, 25 bp, Homo sapien
cttggagctcaccacagtgctgatc

SEQ ID NO: 49443 - DNA, 25 bp, Homo sapien
ataatccaggagtatataaccatgc

SEQ ID NO: 49444 - DNA, 25 bp, Homo sapien
tcacagagatgtctacagagacttt

SEQ ID NO: 49445 - DNA, 25 bp, Homo sapien
taaggaggtttgaataagccatctg

SEQ ID NO: 49446 - DNA, 25 bp, Homo sapien
acagaccaattagccaaatgcaaaa

SEQ ID NO: 49447 - DNA, 25 bp, Homo sapien
atgccctttactgtgctgctgttgc

SEQ ID NO: 49448 - DNA, 25 bp, Homo sapien
ttgttgtctgcgggctcaaagccct

SEQ ID NO: 49449 - DNA, 25 bp, Homo sapien
ttcccatcggtagctcttaacagac

SEQ ID NO: 49450 - DNA, 25 bp, Homo sapien
ggggaaccagaaacctagctatctg

SEQ ID NO: 49451 - DNA, 25 bp, Homo sapien
taaggaggtttgaataagccatctg

SEQ ID NO: 49452 - DNA, 25 bp, Homo sapien
atgccctttactgtgctgctgttgc

SEQ ID NO: 49453 - DNA, 25 bp, Homo sapien
tgaaagcaggaaatgtatgcccttt

SEQ ID NO: 49454 - DNA, 25 bp, Homo sapien
tcagtggttaattggtgaaagcagg

SEQ ID NO: 49455 - DNA, 25 bp, Homo sapien
ggggaaccagaaacctagctatctg

SEQ ID NO: 49456 - DNA, 25 bp, Homo sapien
acagaccaattagccaaatgcaaaa

SEQ ID NO: 49457 - DNA, 25 bp, Homo sapien
ataatccaggagtatataaccatgc

SEQ ID NO: 49458 - DNA, 25 bp, Homo sapien
tcacagagatgtctacagagacttt

SEQ ID NO: 49459 - DNA, 25 bp, Homo sapien
ttgttgtctgcgggctcaaagccct

SEQ ID NO: 49460 - DNA, 25 bp, Homo sapien
ttcccatcggtagctcttaacagac

SEQ ID NO: 49461 - DNA, 25 bp, Homo sapien
cttggagctcaccacagtgctgatc

SEQ ID NO: 49462 - DNA, 25 bp, Homo sapien
taaggaggtttgaataagccatctg

SEQ ID NO: 49463 - DNA, 25 bp, Homo sapien
atgccctttactgtgctgctgttgc

SEQ ID NO: 49464 - DNA, 25 bp, Homo sapien
tgaaagcaggaaatgtatgcccttt

SEQ ID NO: 49465 - DNA, 25 bp, Homo sapien
tcagtggttaattggtgaaagcagg

SEQ ID NO: 49466 - DNA, 25 bp, Homo sapien
ggggaaccagaaacctagctatctg

SEQ ID NO: 49467 - DNA, 25 bp, Homo sapien
acagaccaattagccaaatgcaaaa

SEQ ID NO: 49468 - DNA, 25 bp, Homo sapien
ataatccaggagtatataaccatgc

SEQ ID NO: 49469 - DNA, 25 bp, Homo sapien
tcacagagatgtctacagagacttt

SEQ ID NO: 49470 - DNA, 25 bp, Homo sapien
ttgttgtctgcgggctcaaagccct

SEQ ID NO: 49471 - DNA, 25 bp, Homo sapien
ttcccatcggtagctcttaacagac

SEQ ID NO: 49472 - DNA, 25 bp, Homo sapien
cttggagctcaccacagtgctgatc

SEQ ID NO: 49473 - DNA, 25 bp, Homo sapien
ttgttgtctgcgggctcaaagccct

SEQ ID NO: 49474 - DNA, 25 bp, Homo sapien
ataatccaggagtatataaccatgc

SEQ ID NO: 49475 - DNA, 25 bp, Homo sapien
tcagtggttaattggtgaaagcagg

SEQ ID NO: 49476 - DNA, 25 bp, Homo sapien
taaggaggtttgaataagccatctg

SEQ ID NO: 49477 - DNA, 25 bp, Homo sapien
atgccctttactgtgctgctgttgc

SEQ ID NO: 49478 - DNA, 25 bp, Homo sapien
tgaaagcaggaaatgtatgcccttt

SEQ ID NO: 49479 - DNA, 25 bp, Homo sapien
tcacagagatgtctacagagacttt

SEQ ID NO: 49480 - DNA, 25 bp, Homo sapien
ggggaaccagaaacctagctatctg

SEQ ID NO: 49481 - DNA, 25 bp, Homo sapien
ttcccatcggtagctcttaacagac

SEQ ID NO: 49482 - DNA, 25 bp, Homo sapien
cttggagctcaccacagtgctgatc

SEQ ID NO: 49483 - DNA, 25 bp, Homo sapien
acagaccaattagccaaatgcaaaa

SEQ ID NO: 49484 - DNA, 25 bp, Homo sapien
taaggaggtttgaataagccatctg

SEQ ID NO: 49485 - DNA, 25 bp, Homo sapien
atgccctttactgtgctgctgttgc

SEQ ID NO: 49486 - DNA, 25 bp, Homo sapien
tgaaagcaggaaatgtatgcccttt

SEQ ID NO: 49487 - DNA, 25 bp, Homo sapien
tcagtggttaattggtgaaagcagg

SEQ ID NO: 49488 - DNA, 25 bp, Homo sapien
ggggaaccagaaacctagctatctg

SEQ ID NO: 49489 - DNA, 25 bp, Homo sapien
acagaccaattagccaaatgcaaaa

SEQ ID NO: 49490 - DNA, 25 bp, Homo sapien
ataatccaggagtatataaccatgc

SEQ ID NO: 49491 - DNA, 25 bp, Homo sapien
tcacagagatgtctacagagacttt

SEQ ID NO: 49492 - DNA, 25 bp, Homo sapien
ttgttgtctgcgggctcaaagccct

SEQ ID NO: 49493 - DNA, 25 bp, Homo sapien
ttcccatcggtagctcttaacagac

SEQ ID NO: 49494 - DNA, 25 bp, Homo sapien
cttggagctcaccacagtgctgatc

SEQ ID NO: 49495 - DNA, 25 bp, Homo sapien
tgaaagcaggaaatgtatgcccttt

SEQ ID NO: 49496 - DNA, 25 bp, Homo sapien
tcacagagatgtctacagagacttt

SEQ ID NO: 49497 - DNA, 25 bp, Homo sapien
tcagtggttaattggtgaaagcagg

SEQ ID NO: 49498 - DNA, 25 bp, Homo sapien
acagaccaattagccaaatgcaaaa

SEQ ID NO: 49499 - DNA, 25 bp, Homo sapien
ataatccaggagtatataaccatgc

SEQ ID NO: 49500 - DNA, 25 bp, Homo sapien
taaggaggtttgaataagccatctg

SEQ ID NO: 49501 - DNA, 25 bp, Homo sapien
ttcccatcggtagctcttaacagac

SEQ ID NO: 49502 - DNA, 25 bp, Homo sapien
atgccctttactgtgctgctgttgc

SEQ ID NO: 49503 - DNA, 25 bp, Homo sapien
cttggagctcaccacagtgctgatc

SEQ ID NO: 49504 - DNA, 25 bp, Homo sapien
ttgttgtctgcgggctcaaagccct

SEQ ID NO: 49505 - DNA, 25 bp, Homo sapien
ggggaaccagaaacctagctatctg

SEQ ID NO: 49506 - DNA, 25 bp, Homo sapien
taaggaggtttgaataagccatctg

SEQ ID NO: 49507 - DNA, 25 bp, Homo sapien
atgccctttactgtgctgctgttgc

SEQ ID NO: 49508 - DNA, 25 bp, Homo sapien
tgaaagcaggaaatgtatgcccttt

SEQ ID NO: 49509 - DNA, 25 bp, Homo sapien
tcagtggttaattggtgaaagcagg

SEQ ID NO: 49510 - DNA, 25 bp, Homo sapien
ggggaaccagaaacctagctatctg

SEQ ID NO: 49511 - DNA, 25 bp, Homo sapien
acagaccaattagccaaatgcaaaa

SEQ ID NO: 49512 - DNA, 25 bp, Homo sapien
ataatccaggagtatataaccatgc

SEQ ID NO: 49513 - DNA, 25 bp, Homo sapien
tcacagagatgtctacagagacttt

SEQ ID NO: 49514 - DNA, 25 bp, Homo sapien
ttgttgtctgcgggctcaaagccct

SEQ ID NO: 49515 - DNA, 25 bp, Homo sapien
ttcccatcggtagctcttaacagac

SEQ ID NO: 49516 - DNA, 25 bp, Homo sapien
cttggagctcaccacagtgctgatc

SEQ ID NO: 49517 - DNA, 25 bp, Homo sapien
ataatccaggagtatataaccatgc

SEQ ID NO: 49518 - DNA, 25 bp, Homo sapien
ttcccatcggtagctcttaacagac

SEQ ID NO: 49519 - DNA, 25 bp, Homo sapien
tgaaagcaggaaatgtatgcccttt

SEQ ID NO: 49520 - DNA, 25 bp, Homo sapien
tcacagagatgtctacagagacttt

SEQ ID NO: 49521 - DNA, 25 bp, Homo sapien
atgccctttactgtgctgctgttgc

SEQ ID NO: 49522 - DNA, 25 bp, Homo sapien
cttggagctcaccacagtgctgatc

SEQ ID NO: 49523 - DNA, 25 bp, Homo sapien
acagaccaattagccaaatgcaaaa

SEQ ID NO: 49524 - DNA, 25 bp, Homo sapien
tcagtggttaattggtgaaagcagg

SEQ ID NO: 49525 - DNA, 25 bp, Homo sapien
ttgttgtctgcgggctcaaagccct

SEQ ID NO: 49526 - DNA, 25 bp, Homo sapien
ggggaaccagaaacctagctatctg

SEQ ID NO: 49527 - DNA, 25 bp, Homo sapien
taaggaggtttgaataagccatctg

SEQ ID NO: 49528 - DNA, 25 bp, Homo sapien
taaggaggtttgaataagccatctg

SEQ ID NO: 49529 - DNA, 25 bp, Homo sapien
atgccctttactgtgctgctgttgc

SEQ ID NO: 49530 - DNA, 25 bp, Homo sapien
tgaaagcaggaaatgtatgcccttt

SEQ ID NO: 49531 - DNA, 25 bp, Homo sapien
tcagtggttaattggtgaaagcagg

SEQ ID NO: 49532 - DNA, 25 bp, Homo sapien
ggggaaccagaaacctagctatctg

SEQ ID NO: 49533 - DNA, 25 bp, Homo sapien
acagaccaattagccaaatgcaaaa

SEQ ID NO: 49534 - DNA, 25 bp, Homo sapien
ataatccaggagtatataaccatgc

SEQ ID NO: 49535 - DNA, 25 bp, Homo sapien
tcacagagatgtctacagagacttt

SEQ ID NO: 49536 - DNA, 25 bp, Homo sapien
ttgttgtctgcgggctcaaagccct

SEQ ID NO: 49537 - DNA, 25 bp, Homo sapien
ttcccatcggtagctcttaacagac

SEQ ID NO: 49538 - DNA, 25 bp, Homo sapien
cttggagctcaccacagtgctgatc

SEQ ID NO: 49539 - DNA, 25 bp, Homo sapien
atgccctttactgtgctgctgttgc

SEQ ID NO: 49540 - DNA, 25 bp, Homo sapien
tcacagagatgtctacagagacttt

SEQ ID NO: 49541 - DNA, 25 bp, Homo sapien
cttggagctcaccacagtgctgatc

SEQ ID NO: 49542 - DNA, 25 bp, Homo sapien
tcagtggttaattggtgaaagcagg

SEQ ID NO: 49543 - DNA, 25 bp, Homo sapien
ttcccatcggtagctcttaacagac

SEQ ID NO: 49544 - DNA, 25 bp, Homo sapien
taaggaggtttgaataagccatctg

SEQ ID NO: 49545 - DNA, 25 bp, Homo sapien
tgaaagcaggaaatgtatgcccttt

SEQ ID NO: 49546 - DNA, 25 bp, Homo sapien
ggggaaccagaaacctagctatctg

SEQ ID NO: 49547 - DNA, 25 bp, Homo sapien
acagaccaattagccaaatgcaaaa

SEQ ID NO: 49548 - DNA, 25 bp, Homo sapien
ttgttgtctgcgggctcaaagccct

SEQ ID NO: 49549 - DNA, 25 bp, Homo sapien
ataatccaggagtatataaccatgc

SEQ ID NO: 49550 - DNA, 25 bp, Homo sapien
taaggaggtttgaataagccatctg

SEQ ID NO: 49551 - DNA, 25 bp, Homo sapien
atgccctttactgtgctgctgttgc

SEQ ID NO: 49552 - DNA, 25 bp, Homo sapien
tgaaagcaggaaatgtatgcccttt

SEQ ID NO: 49553 - DNA, 25 bp, Homo sapien
tcagtggttaattggtgaaagcagg

SEQ ID NO: 49554 - DNA, 25 bp, Homo sapien
ggggaaccagaaacctagctatctg

SEQ ID NO: 49555 - DNA, 25 bp, Homo sapien
acagaccaattagccaaatgcaaaa

SEQ ID NO: 49556 - DNA, 25 bp, Homo sapien
ataatccaggagtatataaccatgc

SEQ ID NO: 49557 - DNA, 25 bp, Homo sapien
tcacagagatgtctacagagacttt

SEQ ID NO: 49558 - DNA, 25 bp, Homo sapien
ttgttgtctgcgggctcaaagccct

SEQ ID NO: 49559 - DNA, 25 bp, Homo sapien
ttcccatcggtagctcttaacagac

SEQ ID NO: 49560 - DNA, 25 bp, Homo sapien
cttggagctcaccacagtgctgatc

SEQ ID NO: 49561 - DNA, 25 bp, Homo sapien
cttggagctcaccacagtgctgatc

SEQ ID NO: 49562 - DNA, 25 bp, Homo sapien
acagaccaattagccaaatgcaaaa

SEQ ID NO: 49563 - DNA, 25 bp, Homo sapien
taaggaggtttgaataagccatctg

SEQ ID NO: 49564 - DNA, 25 bp, Homo sapien
atgccctttactgtgctgctgttgc

SEQ ID NO: 49565 - DNA, 25 bp, Homo sapien
ataatccaggagtatataaccatgc

SEQ ID NO: 49566 - DNA, 25 bp, Homo sapien
ttcccatcggtagctcttaacagac

SEQ ID NO: 49567 - DNA, 25 bp, Homo sapien
tcagtggttaattggtgaaagcagg

SEQ ID NO: 49568 - DNA, 25 bp, Homo sapien
ggggaaccagaaacctagctatctg

SEQ ID NO: 49569 - DNA, 25 bp, Homo sapien
tcacagagatgtctacagagacttt

SEQ ID NO: 49570 - DNA, 25 bp, Homo sapien
ttgttgtctgcgggctcaaagccct

SEQ ID NO: 49571 - DNA, 25 bp, Homo sapien
tgaaagcaggaaatgtatgcccttt

SEQ ID NO: 49572 - DNA, 25 bp, Homo sapien
acagaccaattagccaaatgcaaaa

SEQ ID NO: 49573 - DNA, 25 bp, Homo sapien
tgaaagcaggaaatgtatgcccttt

SEQ ID NO: 49574 - DNA, 25 bp, Homo sapien
cttggagctcaccacagtgctgatc

SEQ ID NO: 49575 - DNA, 25 bp, Homo sapien
ttgttgtctgcgggctcaaagccct

SEQ ID NO: 49576 - DNA, 25 bp, Homo sapien
ttcccatcggtagctcttaacagac

SEQ ID NO: 49577 - DNA, 25 bp, Homo sapien
ataatccaggagtatataaccatgc

SEQ ID NO: 49578 - DNA, 25 bp, Homo sapien
atgccctttactgtgctgctgttgc

SEQ ID NO: 49579 - DNA, 25 bp, Homo sapien
tcagtggttaattggtgaaagcagg

SEQ ID NO: 49580 - DNA, 25 bp, Homo sapien
tcacagagatgtctacagagacttt

SEQ ID NO: 49581 - DNA, 25 bp, Homo sapien
ggggaaccagaaacctagctatctg

SEQ ID NO: 49582 - DNA, 25 bp, Homo sapien
taaggaggtttgaataagccatctg

SEQ ID NO: 49583 - DNA, 25 bp, Homo sapien
taaggaggtttgaataagccatctg

SEQ ID NO: 49584 - DNA, 25 bp, Homo sapien
atgccctttactgtgctgctgttgc

SEQ ID NO: 49585 - DNA, 25 bp, Homo sapien
tgaaagcaggaaatgtatgcccttt

SEQ ID NO: 49586 - DNA, 25 bp, Homo sapien
tcagtggttaattggtgaaagcagg

SEQ ID NO: 49587 - DNA, 25 bp, Homo sapien
ggggaaccagaaacctagctatctg

SEQ ID NO: 49588 - DNA, 25 bp, Homo sapien
acagaccaattagccaaatgcaaaa

SEQ ID NO: 49589 - DNA, 25 bp, Homo sapien
ataatccaggagtatataaccatgc

SEQ ID NO: 49590 - DNA, 25 bp, Homo sapien
tcacagagatgtctacagagacttt

SEQ ID NO: 49591 - DNA, 25 bp, Homo sapien
ttgttgtctgcgggctcaaagccct

SEQ ID NO: 49592 - DNA, 25 bp, Homo sapien
ttcccatcggtagctcttaacagac

SEQ ID NO: 49593 - DNA, 25 bp, Homo sapien
cttggagctcaccacagtgctgatc

SEQ ID NO: 49594 - DNA, 25 bp, Homo sapien
cttggagctcaccacagtgctgatc

SEQ ID NO: 49595 - DNA, 25 bp, Homo sapien
atgccctttactgtgctgctgttgc

SEQ ID NO: 49596 - DNA, 25 bp, Homo sapien
tgaaagcaggaaatgtatgcccttt

SEQ ID NO: 49597 - DNA, 25 bp, Homo sapien
ataatccaggagtatataaccatgc

SEQ ID NO: 49598 - DNA, 25 bp, Homo sapien
ttgttgtctgcgggctcaaagccct

SEQ ID NO: 49599 - DNA, 25 bp, Homo sapien
tcacagagatgtctacagagacttt

SEQ ID NO: 49600 - DNA, 25 bp, Homo sapien
acagaccaattagccaaatgcaaaa

SEQ ID NO: 49601 - DNA, 25 bp, Homo sapien
ttcccatcggtagctcttaacagac

SEQ ID NO: 49602 - DNA, 25 bp, Homo sapien
ggggaaccagaaacctagctatctg

SEQ ID NO: 49603 - DNA, 25 bp, Homo sapien
tcagtggttaattggtgaaagcagg

SEQ ID NO: 49604 - DNA, 25 bp, Homo sapien
taaggaggtttgaataagccatctg

SEQ ID NO: 49605 - DNA, 25 bp, Homo sapien
taaggaggtttgaataagccatctg

SEQ ID NO: 49606 - DNA, 25 bp, Homo sapien
atgccctttactgtgctgctgttgc

SEQ ID NO: 49607 - DNA, 25 bp, Homo sapien
tgaaagcaggaaatgtatgcccttt

SEQ ID NO: 49608 - DNA, 25 bp, Homo sapien
tcagtggttaattggtgaaagcagg

SEQ ID NO: 49609 - DNA, 25 bp, Homo sapien
ggggaaccagaaacctagctatctg

SEQ ID NO: 49610 - DNA, 25 bp, Homo sapien
acagaccaattagccaaatgcaaaa

SEQ ID NO: 49611 - DNA, 25 bp, Homo sapien
ataatccaggagtatataaccatgc

SEQ ID NO: 49612 - DNA, 25 bp, Homo sapien
tcacagagatgtctacagagacttt

SEQ ID NO: 49613 - DNA, 25 bp, Homo sapien
ttgttgtctgcgggctcaaagccct

SEQ ID NO: 49614 - DNA, 25 bp, Homo sapien
ttcccatcggtagctcttaacagac

SEQ ID NO: 49615 - DNA, 25 bp, Homo sapien
cttggagctcaccacagtgctgatc

SEQ ID NO: 49616 - DNA, 25 bp, Homo sapien
ttgttgtctgcgggctcaaagccct

SEQ ID NO: 49617 - DNA, 25 bp, Homo sapien
ggggaaccagaaacctagctatctg

SEQ ID NO: 49618 - DNA, 25 bp, Homo sapien
taaggaggtttgaataagccatctg

SEQ ID NO: 49619 - DNA, 25 bp, Homo sapien
cttggagctcaccacagtgctgatc

SEQ ID NO: 49620 - DNA, 25 bp, Homo sapien
ataatccaggagtatataaccatgc

SEQ ID NO: 49621 - DNA, 25 bp, Homo sapien
tcagtggttaattggtgaaagcagg

SEQ ID NO: 49622 - DNA, 25 bp, Homo sapien
atgccctttactgtgctgctgttgc

SEQ ID NO: 49623 - DNA, 25 bp, Homo sapien
tcacagagatgtctacagagacttt

SEQ ID NO: 49624 - DNA, 25 bp, Homo sapien
acagaccaattagccaaatgcaaaa

SEQ ID NO: 49625 - DNA, 25 bp, Homo sapien
tgaaagcaggaaatgtatgcccttt

SEQ ID NO: 49626 - DNA, 25 bp, Homo sapien
ttcccatcggtagctcttaacagac

SEQ ID NO: 49627 - DNA, 25 bp, Homo sapien
taaggaggtttgaataagccatctg

SEQ ID NO: 49628 - DNA, 25 bp, Homo sapien
atgccctttactgtgctgctgttgc

SEQ ID NO: 49629 - DNA, 25 bp, Homo sapien
tgaaagcaggaaatgtatgcccttt

SEQ ID NO: 49630 - DNA, 25 bp, Homo sapien
tcagtggttaattggtgaaagcagg

SEQ ID NO: 49631 - DNA, 25 bp, Homo sapien
ggggaaccagaaacctagctatctg

SEQ ID NO: 49632 - DNA, 25 bp, Homo sapien
acagaccaattagccaaatgcaaaa

SEQ ID NO: 49633 - DNA, 25 bp, Homo sapien
ataatccaggagtatataaccatgc

SEQ ID NO: 49634 - DNA, 25 bp, Homo sapien
tcacagagatgtctacagagacttt

SEQ ID NO: 49635 - DNA, 25 bp, Homo sapien
ttgttgtctgcgggctcaaagccct

SEQ ID NO: 49636 - DNA, 25 bp, Homo sapien
ttcccatcggtagctcttaacagac

SEQ ID NO: 49637 - DNA, 25 bp, Homo sapien
cttggagctcaccacagtgctgatc

SEQ ID NO: 49638 - DNA, 25 bp, Homo sapien
cttggagctcaccacagtgctgatc

SEQ ID NO: 49639 - DNA, 25 bp, Homo sapien
tgaaagcaggaaatgtatgcccttt

SEQ ID NO: 49640 - DNA, 25 bp, Homo sapien
atgccctttactgtgctgctgttgc

SEQ ID NO: 49641 - DNA, 25 bp, Homo sapien
tcagtggttaattggtgaaagcagg

SEQ ID NO: 49642 - DNA, 25 bp, Homo sapien
ataatccaggagtatataaccatgc

SEQ ID NO: 49643 - DNA, 25 bp, Homo sapien
tcacagagatgtctacagagacttt

SEQ ID NO: 49644 - DNA, 25 bp, Homo sapien
ttcccatcggtagctcttaacagac

SEQ ID NO: 49645 - DNA, 25 bp, Homo sapien
acagaccaattagccaaatgcaaaa

SEQ ID NO: 49646 - DNA, 25 bp, Homo sapien
ttgttgtctgcgggctcaaagccct

SEQ ID NO: 49647 - DNA, 25 bp, Homo sapien
ggggaaccagaaacctagctatctg

SEQ ID NO: 49648 - DNA, 25 bp, Homo sapien
taaggaggtttgaataagccatctg

SEQ ID NO: 49649 - DNA, 25 bp, Homo sapien
taaggaggtttgaataagccatctg

SEQ ID NO: 49650 - DNA, 25 bp, Homo sapien
atgccctttactgtgctgctgttgc

SEQ ID NO: 49651 - DNA, 25 bp, Homo sapien
tgaaagcaggaaatgtatgcccttt

SEQ ID NO: 49652 - DNA, 25 bp, Homo sapien
tcagtggttaattggtgaaagcagg

SEQ ID NO: 49653 - DNA, 25 bp, Homo sapien
ggggaaccagaaacctagctatctg

SEQ ID NO: 49654 - DNA, 25 bp, Homo sapien
acagaccaattagccaaatgcaaaa

SEQ ID NO: 49655 - DNA, 25 bp, Homo sapien
ataatccaggagtatataaccatgc

SEQ ID NO: 49656 - DNA, 25 bp, Homo sapien
tcacagagatgtctacagagacttt

SEQ ID NO: 49657 - DNA, 25 bp, Homo sapien
ttgttgtctgcgggctcaaagccct

SEQ ID NO: 49658 - DNA, 25 bp, Homo sapien
ttcccatcggtagctcttaacagac

SEQ ID NO: 49659 - DNA, 25 bp, Homo sapien
cttggagctcaccacagtgctgatc

SEQ ID NO: 49660 - DNA, 25 bp, Homo sapien
tcacagagatgtctacagagacttt

SEQ ID NO: 49661 - DNA, 25 bp, Homo sapien
ggggaaccagaaacctagctatctg

SEQ ID NO: 49662 - DNA, 25 bp, Homo sapien
cttggagctcaccacagtgctgatc

SEQ ID NO: 49663 - DNA, 25 bp, Homo sapien
acagaccaattagccaaatgcaaaa

SEQ ID NO: 49664 - DNA, 25 bp, Homo sapien
ttcccatcggtagctcttaacagac

SEQ ID NO: 49665 - DNA, 25 bp, Homo sapien
tcagtggttaattggtgaaagcagg

SEQ ID NO: 49666 - DNA, 25 bp, Homo sapien
taaggaggtttgaataagccatctg

SEQ ID NO: 49667 - DNA, 25 bp, Homo sapien
atgccctttactgtgctgctgttgc

SEQ ID NO: 49668 - DNA, 25 bp, Homo sapien
tgaaagcaggaaatgtatgcccttt

SEQ ID NO: 49669 - DNA, 25 bp, Homo sapien
ataatccaggagtatataaccatgc

SEQ ID NO: 49670 - DNA, 25 bp, Homo sapien
ttgttgtctgcgggctcaaagccct

SEQ ID NO: 49671 - DNA, 25 bp, Homo sapien
taaggaggtttgaataagccatctg

SEQ ID NO: 49672 - DNA, 25 bp, Homo sapien
atgccctttactgtgctgctgttgc

SEQ ID NO: 49673 - DNA, 25 bp, Homo sapien
tgaaagcaggaaatgtatgcccttt

SEQ ID NO: 49674 - DNA, 25 bp, Homo sapien
tcagtggttaattggtgaaagcagg

SEQ ID NO: 49675 - DNA, 25 bp, Homo sapien
ggggaaccagaaacctagctatctg

SEQ ID NO: 49676 - DNA, 25 bp, Homo sapien
acagaccaattagccaaatgcaaaa

SEQ ID NO: 49677 - DNA, 25 bp, Homo sapien
ataatccaggagtatataaccatgc

SEQ ID NO: 49678 - DNA, 25 bp, Homo sapien
tcacagagatgtctacagagacttt

SEQ ID NO: 49679 - DNA, 25 bp, Homo sapien
ttgttgtctgcgggctcaaagccct

SEQ ID NO: 49680 - DNA, 25 bp, Homo sapien
ttcccatcggtagctcttaacagac

SEQ ID NO: 49681 - DNA, 25 bp, Homo sapien
cttggagctcaccacagtgctgatc

SEQ ID NO: 49682 - DNA, 25 bp, Homo sapien
tcagtggttaattggtgaaagcagg

SEQ ID NO: 49683 - DNA, 25 bp, Homo sapien
ttcccatcggtagctcttaacagac

SEQ ID NO: 49684 - DNA, 25 bp, Homo sapien
atgccctttactgtgctgctgttgc

SEQ ID NO: 49685 - DNA, 25 bp, Homo sapien
acagaccaattagccaaatgcaaaa

SEQ ID NO: 49686 - DNA, 25 bp, Homo sapien
ggggaaccagaaacctagctatctg

SEQ ID NO: 49687 - DNA, 25 bp, Homo sapien
tgaaagcaggaaatgtatgcccttt

SEQ ID NO: 49688 - DNA, 25 bp, Homo sapien
cttggagctcaccacagtgctgatc

SEQ ID NO: 49689 - DNA, 25 bp, Homo sapien
ataatccaggagtatataaccatgc

SEQ ID NO: 49690 - DNA, 25 bp, Homo sapien
tcacagagatgtctacagagacttt

SEQ ID NO: 49691 - DNA, 25 bp, Homo sapien
taaggaggtttgaataagccatctg

SEQ ID NO: 49692 - DNA, 25 bp, Homo sapien
ttgttgtctgcgggctcaaagccct

SEQ ID NO: 49693 - DNA, 25 bp, Homo sapien
taaggaggtttgaataagccatctg

SEQ ID NO: 49694 - DNA, 25 bp, Homo sapien
atgccctttactgtgctgctgttgc

SEQ ID NO: 49695 - DNA, 25 bp, Homo sapien
tgaaagcaggaaatgtatgcccttt

SEQ ID NO: 49696 - DNA, 25 bp, Homo sapien
tcagtggttaattggtgaaagcagg

SEQ ID NO: 49697 - DNA, 25 bp, Homo sapien
ggggaaccagaaacctagctatctg

SEQ ID NO: 49698 - DNA, 25 bp, Homo sapien
acagaccaattagccaaatgcaaaa

SEQ ID NO: 49699 - DNA, 25 bp, Homo sapien
ataatccaggagtatataaccatgc

SEQ ID NO: 49700 - DNA, 25 bp, Homo sapien
tcacagagatgtctacagagacttt

SEQ ID NO: 49701 - DNA, 25 bp, Homo sapien
ttgttgtctgcgggctcaaagccct

SEQ ID NO: 49702 - DNA, 25 bp, Homo sapien
ttcccatcggtagctcttaacagac

SEQ ID NO: 49703 - DNA, 25 bp, Homo sapien
cttggagctcaccacagtgctgatc

SEQ ID NO: 49704 - DNA, 25 bp, Homo sapien
taaggaggtttgaataagccatctg

SEQ ID NO: 49705 - DNA, 25 bp, Homo sapien
atgccctttactgtgctgctgttgc

SEQ ID NO: 49706 - DNA, 25 bp, Homo sapien
tgaaagcaggaaatgtatgcccttt

SEQ ID NO: 49707 - DNA, 25 bp, Homo sapien
tcagtggttaattggtgaaagcagg

SEQ ID NO: 49708 - DNA, 25 bp, Homo sapien
ggggaaccagaaacctagctatctg

SEQ ID NO: 49709 - DNA, 25 bp, Homo sapien
acagaccaattagccaaatgcaaaa

SEQ ID NO: 49710 - DNA, 25 bp, Homo sapien
ataatccaggagtatataaccatgc

SEQ ID NO: 49711 - DNA, 25 bp, Homo sapien
tcacagagatgtctacagagacttt

SEQ ID NO: 49712 - DNA, 25 bp, Homo sapien
ttgttgtctgcgggctcaaagccct

SEQ ID NO: 49713 - DNA, 25 bp, Homo sapien
ttcccatcggtagctcttaacagac

SEQ ID NO: 49714 - DNA, 25 bp, Homo sapien
cttggagctcaccacagtgctgatc

SEQ ID NO: 49715 - DNA, 25 bp, Homo sapien
taaggaggtttgaataagccatctg

SEQ ID NO: 49716 - DNA, 25 bp, Homo sapien
tcacagagatgtctacagagacttt

SEQ ID NO: 49717 - DNA, 25 bp, Homo sapien
cttggagctcaccacagtgctgatc

SEQ ID NO: 49718 - DNA, 25 bp, Homo sapien
acagaccaattagccaaatgcaaaa

SEQ ID NO: 49719 - DNA, 25 bp, Homo sapien
ggggaaccagaaacctagctatctg

SEQ ID NO: 49720 - DNA, 25 bp, Homo sapien
atgccctttactgtgctgctgttgc

SEQ ID NO: 49721 - DNA, 25 bp, Homo sapien
tgaaagcaggaaatgtatgcccttt

SEQ ID NO: 49722 - DNA, 25 bp, Homo sapien
ttcccatcggtagctcttaacagac

SEQ ID NO: 49723 - DNA, 25 bp, Homo sapien
tcagtggttaattggtgaaagcagg

SEQ ID NO: 49724 - DNA, 25 bp, Homo sapien
ttgttgtctgcgggctcaaagccct

SEQ ID NO: 49725 - DNA, 25 bp, Homo sapien
ataatccaggagtatataaccatgc

SEQ ID NO: 49726 - DNA, 25 bp, Homo sapien
taaggaggtttgaataagccatctg

SEQ ID NO: 49727 - DNA, 25 bp, Homo sapien
tcacagagatgtctacagagacttt

SEQ ID NO: 49728 - DNA, 25 bp, Homo sapien
cttggagctcaccacagtgctgatc

SEQ ID NO: 49729 - DNA, 25 bp, Homo sapien
tgaaagcaggaaatgtatgcccttt

SEQ ID NO: 49730 - DNA, 25 bp, Homo sapien
ggggaaccagaaacctagctatctg

SEQ ID NO: 49731 - DNA, 25 bp, Homo sapien
atgccctttactgtgctgctgttgc

SEQ ID NO: 49732 - DNA, 25 bp, Homo sapien
ttcccatcggtagctcttaacagac

SEQ ID NO: 49733 - DNA, 25 bp, Homo sapien
tcagtggttaattggtgaaagcagg

SEQ ID NO: 49734 - DNA, 25 bp, Homo sapien
ttgttgtctgcgggctcaaagccct

SEQ ID NO: 49735 - DNA, 25 bp, Homo sapien
ataatccaggagtatataaccatgc

SEQ ID NO: 49736 - DNA, 25 bp, Homo sapien
acagaccaattagccaaatgcaaaa

SEQ ID NO: 49737 - DNA, 25 bp, Homo sapien
taaggaggtttgaataagccatctg

SEQ ID NO: 49738 - DNA, 25 bp, Homo sapien
tcacagagatgtctacagagacttt

SEQ ID NO: 49739 - DNA, 25 bp, Homo sapien
cttggagctcaccacagtgctgatc

SEQ ID NO: 49740 - DNA, 25 bp, Homo sapien
ggggaaccagaaacctagctatctg

SEQ ID NO: 49741 - DNA, 25 bp, Homo sapien
atgccctttactgtgctgctgttgc

SEQ ID NO: 49742 - DNA, 25 bp, Homo sapien
ttcccatcggtagctcttaacagac

SEQ ID NO: 49743 - DNA, 25 bp, Homo sapien
tgaaagcaggaaatgtatgcccttt

SEQ ID NO: 49744 - DNA, 25 bp, Homo sapien
tcagtggttaattggtgaaagcagg

SEQ ID NO: 49745 - DNA, 25 bp, Homo sapien
ttgttgtctgcgggctcaaagccct

SEQ ID NO: 49746 - DNA, 25 bp, Homo sapien
ataatccaggagtatataaccatgc

SEQ ID NO: 49747 - DNA, 25 bp, Homo sapien
acagaccaattagccaaatgcaaaa

SEQ ID NO: 49748 - DNA, 25 bp, Homo sapien
taaggaggtttgaataagccatctg

SEQ ID NO: 49749 - DNA, 25 bp, Homo sapien
tcacagagatgtctacagagacttt

SEQ ID NO: 49750 - DNA, 25 bp, Homo sapien
cttggagctcaccacagtgctgatc

SEQ ID NO: 49751 - DNA, 25 bp, Homo sapien
acagaccaattagccaaatgcaaaa

SEQ ID NO: 49752 - DNA, 25 bp, Homo sapien
ggggaaccagaaacctagctatctg

SEQ ID NO: 49753 - DNA, 25 bp, Homo sapien
tgaaagcaggaaatgtatgcccttt

SEQ ID NO: 49754 - DNA, 25 bp, Homo sapien
atgccctttactgtgctgctgttgc

SEQ ID NO: 49755 - DNA, 25 bp, Homo sapien
ttcccatcggtagctcttaacagac

SEQ ID NO: 49756 - DNA, 25 bp, Homo sapien
tcagtggttaattggtgaaagcagg

SEQ ID NO: 49757 - DNA, 25 bp, Homo sapien
ttgttgtctgcgggctcaaagccct

SEQ ID NO: 49758 - DNA, 25 bp, Homo sapien
ataatccaggagtatataaccatgc

SEQ ID NO: 49759 - DNA, 25 bp, Homo sapien
taaggaggtttgaataagccatctg

SEQ ID NO: 49760 - DNA, 25 bp, Homo sapien
tcacagagatgtctacagagacttt

SEQ ID NO: 49761 - DNA, 25 bp, Homo sapien
cttggagctcaccacagtgctgatc

SEQ ID NO: 49762 - DNA, 25 bp, Homo sapien
acagaccaattagccaaatgcaaaa

SEQ ID NO: 49763 - DNA, 25 bp, Homo sapien
ggggaaccagaaacctagctatctg

SEQ ID NO: 49764 - DNA, 25 bp, Homo sapien
tgaaagcaggaaatgtatgcccttt

SEQ ID NO: 49765 - DNA, 25 bp, Homo sapien
atgccctttactgtgctgctgttgc

SEQ ID NO: 49766 - DNA, 25 bp, Homo sapien
ttcccatcggtagctcttaacagac

SEQ ID NO: 49767 - DNA, 25 bp, Homo sapien
tcagtggttaattggtgaaagcagg

SEQ ID NO: 49768 - DNA, 25 bp, Homo sapien
ttgttgtctgcgggctcaaagccct

SEQ ID NO: 49769 - DNA, 25 bp, Homo sapien
ataatccaggagtatataaccatgc

SEQ ID NO: 49770 - DNA, 25 bp, Homo sapien
taaggaggtttgaataagccatctg

SEQ ID NO: 49771 - DNA, 25 bp, Homo sapien
tcacagagatgtctacagagacttt

SEQ ID NO: 49772 - DNA, 25 bp, Homo sapien
cttggagctcaccacagtgctgatc

SEQ ID NO: 49773 - DNA, 25 bp, Homo sapien
ggggaaccagaaacctagctatctg

SEQ ID NO: 49774 - DNA, 25 bp, Homo sapien
tgaaagcaggaaatgtatgcccttt

SEQ ID NO: 49775 - DNA, 25 bp, Homo sapien
atgccctttactgtgctgctgttgc

SEQ ID NO: 49776 - DNA, 25 bp, Homo sapien
acagaccaattagccaaatgcaaaa

SEQ ID NO: 49777 - DNA, 25 bp, Homo sapien
ttcccatcggtagctcttaacagac

SEQ ID NO: 49778 - DNA, 25 bp, Homo sapien
tcagtggttaattggtgaaagcagg

SEQ ID NO: 49779 - DNA, 25 bp, Homo sapien
ttgttgtctgcgggctcaaagccct

SEQ ID NO: 49780 - DNA, 25 bp, Homo sapien
ataatccaggagtatataaccatgc

SEQ ID NO: 49781 - DNA, 25 bp, Homo sapien
taaggaggtttgaataagccatctg

SEQ ID NO: 49782 - DNA, 25 bp, Homo sapien
tcacagagatgtctacagagacttt

SEQ ID NO: 49783 - DNA, 25 bp, Homo sapien
cttggagctcaccacagtgctgatc

SEQ ID NO: 49784 - DNA, 25 bp, Homo sapien
ggggaaccagaaacctagctatctg

SEQ ID NO: 49785 - DNA, 25 bp, Homo sapien
acagaccaattagccaaatgcaaaa

SEQ ID NO: 49786 - DNA, 25 bp, Homo sapien
atgccctttactgtgctgctgttgc

SEQ ID NO: 49787 - DNA, 25 bp, Homo sapien
tgaaagcaggaaatgtatgcccttt

SEQ ID NO: 49788 - DNA, 25 bp, Homo sapien
ttcccatcggtagctcttaacagac

SEQ ID NO: 49789 - DNA, 25 bp, Homo sapien
tcagtggttaattggtgaaagcagg

SEQ ID NO: 49790 - DNA, 25 bp, Homo sapien
ttgttgtctgcgggctcaaagccct

SEQ ID NO: 49791 - DNA, 25 bp, Homo sapien
ataatccaggagtatataaccatgc

SEQ ID NO: 49792 - DNA, 25 bp, Homo sapien
taaggaggtttgaataagccatctg

SEQ ID NO: 49793 - DNA, 25 bp, Homo sapien
tcacagagatgtctacagagacttt

SEQ ID NO: 49794 - DNA, 25 bp, Homo sapien
cttggagctcaccacagtgctgatc

SEQ ID NO: 49795 - DNA, 25 bp, Homo sapien
ggggaaccagaaacctagctatctg

SEQ ID NO: 49796 - DNA, 25 bp, Homo sapien
tgaaagcaggaaatgtatgcccttt

SEQ ID NO: 49797 - DNA, 25 bp, Homo sapien
atgccctttactgtgctgctgttgc

SEQ ID NO: 49798 - DNA, 25 bp, Homo sapien
ttcccatcggtagctcttaacagac

SEQ ID NO: 49799 - DNA, 25 bp, Homo sapien
tcagtggttaattggtgaaagcagg

SEQ ID NO: 49800 - DNA, 25 bp, Homo sapien
ttgttgtctgcgggctcaaagccct

SEQ ID NO: 49801 - DNA, 25 bp, Homo sapien
ataatccaggagtatataaccatgc

SEQ ID NO: 49802 - DNA, 25 bp, Homo sapien
acagaccaattagccaaatgcaaaa

SEQ ID NO: 49803 - DNA, 25 bp, Homo sapien
taaggaggtttgaataagccatctg

SEQ ID NO: 49804 - DNA, 25 bp, Homo sapien
tcacagagatgtctacagagacttt

SEQ ID NO: 49805 - DNA, 25 bp, Homo sapien
cttggagctcaccacagtgctgatc

SEQ ID NO: 49806 - DNA, 25 bp, Homo sapien
ggggaaccagaaacctagctatctg

SEQ ID NO: 49807 - DNA, 25 bp, Homo sapien
tgaaagcaggaaatgtatgcccttt

SEQ ID NO: 49808 - DNA, 25 bp, Homo sapien
atgccctttactgtgctgctgttgc

SEQ ID NO: 49809 - DNA, 25 bp, Homo sapien
ttcccatcggtagctcttaacagac

SEQ ID NO: 49810 - DNA, 25 bp, Homo sapien
tcagtggttaattggtgaaagcagg

SEQ ID NO: 49811 - DNA, 25 bp, Homo sapien
ttgttgtctgcgggctcaaagccct

SEQ ID NO: 49812 - DNA, 25 bp, Homo sapien
ataatccaggagtatataaccatgc

SEQ ID NO: 49813 - DNA, 25 bp, Homo sapien
acagaccaattagccaaatgcaaaa

SEQ ID NO: 49814 - DNA, 25 bp, Homo sapien
ataatccaggagtatataaccatgc

SEQ ID NO: 49815 - DNA, 25 bp, Homo sapien
atgccctttactgtgctgctgttgc

SEQ ID NO: 49816 - DNA, 25 bp, Homo sapien
tcacagagatgtctacagagacttt

SEQ ID NO: 49817 - DNA, 25 bp, Homo sapien
ttgttgtctgcgggctcaaagccct

SEQ ID NO: 49818 - DNA, 25 bp, Homo sapien
taaggaggtttgaataagccatctg

SEQ ID NO: 49819 - DNA, 25 bp, Homo sapien
ttcccatcggtagctcttaacagac

SEQ ID NO: 49820 - DNA, 25 bp, Homo sapien
acagaccaattagccaaatgcaaaa

SEQ ID NO: 49821 - DNA, 25 bp, Homo sapien
tcagtggttaattggtgaaagcagg

SEQ ID NO: 49822 - DNA, 25 bp, Homo sapien
cttggagctcaccacagtgctgatc

SEQ ID NO: 49823 - DNA, 25 bp, Homo sapien
ggggaaccagaaacctagctatctg

SEQ ID NO: 49824 - DNA, 25 bp, Homo sapien
tgaaagcaggaaatgtatgcccttt

SEQ ID NO: 49825 - DNA, 25 bp, Homo sapien
taaggaggtttgaataagccatctg

SEQ ID NO: 49826 - DNA, 25 bp, Homo sapien
tcacagagatgtctacagagacttt

SEQ ID NO: 49827 - DNA, 25 bp, Homo sapien
cttggagctcaccacagtgctgatc

SEQ ID NO: 49828 - DNA, 25 bp, Homo sapien
ggggaaccagaaacctagctatctg

SEQ ID NO: 49829 - DNA, 25 bp, Homo sapien
atgccctttactgtgctgctgttgc

SEQ ID NO: 49830 - DNA, 25 bp, Homo sapien
ttcccatcggtagctcttaacagac

SEQ ID NO: 49831 - DNA, 25 bp, Homo sapien
tgaaagcaggaaatgtatgcccttt

SEQ ID NO: 49832 - DNA, 25 bp, Homo sapien
tcagtggttaattggtgaaagcagg

SEQ ID NO: 49833 - DNA, 25 bp, Homo sapien
ttgttgtctgcgggctcaaagccct

SEQ ID NO: 49834 - DNA, 25 bp, Homo sapien
ataatccaggagtatataaccatgc

SEQ ID NO: 49835 - DNA, 25 bp, Homo sapien
acagaccaattagccaaatgcaaaa

SEQ ID NO: 49836 - DNA, 25 bp, Homo sapien
taaggaggtttgaataagccatctg

SEQ ID NO: 49837 - DNA, 25 bp, Homo sapien
atgccctttactgtgctgctgttgc

SEQ ID NO: 49838 - DNA, 25 bp, Homo sapien
tgaaagcaggaaatgtatgcccttt

SEQ ID NO: 49839 - DNA, 25 bp, Homo sapien
tcagtggttaattggtgaaagcagg

SEQ ID NO: 49840 - DNA, 25 bp, Homo sapien
ggggaaccagaaacctagctatctg

SEQ ID NO: 49841 - DNA, 25 bp, Homo sapien
acagaccaattagccaaatgcaaaa

SEQ ID NO: 49842 - DNA, 25 bp, Homo sapien
ataatccaggagtatataaccatgc

SEQ ID NO: 49843 - DNA, 25 bp, Homo sapien
tcacagagatgtctacagagacttt

SEQ ID NO: 49844 - DNA, 25 bp, Homo sapien
ttgttgtctgcgggctcaaagccct

SEQ ID NO: 49845 - DNA, 25 bp, Homo sapien
ttcccatcggtagctcttaacagac

SEQ ID NO: 49846 - DNA, 25 bp, Homo sapien
cttggagctcaccacagtgctgatc

SEQ ID NO: 49847 - DNA, 25 bp, Homo sapien
gcatggttatatactcctggattat

SEQ ID NO: 49848 - DNA, 25 bp, Homo sapien
gtctgttaagagctaccgatgggaa

SEQ ID NO: 49849 - DNA, 25 bp, Homo sapien
cctgctttcaccaattaaccactga

SEQ ID NO: 49850 - DNA, 25 bp, Homo sapien
gcaacagcagcacagtaaagggcat

SEQ ID NO: 49851 - DNA, 25 bp, Homo sapien
cagatggcttattcaaacctcctta

SEQ ID NO: 49852 - DNA, 25 bp, Homo sapien
gatcagcactgtggtgagctccaag

SEQ ID NO: 49853 - DNA, 25 bp, Homo sapien
ttttgcatttggctaattggtctgt

SEQ ID NO: 49854 - DNA, 25 bp, Homo sapien
aaagggcatacatttcctgctttca

SEQ ID NO: 49855 - DNA, 25 bp, Homo sapien
aaagtctctgtagacatctctgtga

SEQ ID NO: 49856 - DNA, 25 bp, Homo sapien
cagatagctaggtttctggttcccc

SEQ ID NO: 49857 - DNA, 25 bp, Homo sapien
agggctttgagcccgcagacaacaa

SEQ ID NO: 49858 - DNA, 25 bp, Homo sapien
taaggaggtttgaataagccatctg

SEQ ID NO: 49859 - DNA, 25 bp, Homo sapien
tcacagagatgtctacagagacttt

SEQ ID NO: 49860 - DNA, 25 bp, Homo sapien
cttggagctcaccacagtgctgatc

SEQ ID NO: 49861 - DNA, 25 bp, Homo sapien
tgaaagcaggaaatgtatgcccttt

SEQ ID NO: 49862 - DNA, 25 bp, Homo sapien
ggggaaccagaaacctagctatctg

SEQ ID NO: 49863 - DNA, 25 bp, Homo sapien
atgccctttactgtgctgctgttgc

SEQ ID NO: 49864 - DNA, 25 bp, Homo sapien
ttcccatcggtagctcttaacagac

SEQ ID NO: 49865 - DNA, 25 bp, Homo sapien
tcagtggttaattggtgaaagcagg

SEQ ID NO: 49866 - DNA, 25 bp, Homo sapien
ttgttgtctgcgggctcaaagccct

SEQ ID NO: 49867 - DNA, 25 bp, Homo sapien
ataatccaggagtatataaccatgc

SEQ ID NO: 49868 - DNA, 25 bp, Homo sapien
acagaccaattagccaaatgcaaaa

SEQ ID NO: 49869 - DNA, 25 bp, Homo sapien
tcagtggttaattggtgaaagcagg

SEQ ID NO: 49870 - DNA, 25 bp, Homo sapien
taaggaggtttgaataagccatctg

SEQ ID NO: 49871 - DNA, 25 bp, Homo sapien
atgccctttactgtgctgctgttgc

SEQ ID NO: 49872 - DNA, 25 bp, Homo sapien
tcacagagatgtctacagagacttt

SEQ ID NO: 49873 - DNA, 25 bp, Homo sapien
tgaaagcaggaaatgtatgcccttt

SEQ ID NO: 49874 - DNA, 25 bp, Homo sapien
ggggaaccagaaacctagctatctg

SEQ ID NO: 49875 - DNA, 25 bp, Homo sapien
acagaccaattagccaaatgcaaaa

SEQ ID NO: 49876 - DNA, 25 bp, Homo sapien
ataatccaggagtatataaccatgc

SEQ ID NO: 49877 - DNA, 25 bp, Homo sapien
ttgttgtctgcgggctcaaagccct

SEQ ID NO: 49878 - DNA, 25 bp, Homo sapien
cttggagctcaccacagtgctgatc

SEQ ID NO: 49879 - DNA, 25 bp, Homo sapien
ttcccatcggtagctcttaacagac

SEQ ID NO: 49880 - DNA, 25 bp, Homo sapien
taaggaggtttgaataagccatctg

SEQ ID NO: 49881 - DNA, 25 bp, Homo sapien
atgccctttactgtgctgctgttgc

SEQ ID NO: 49882 - DNA, 25 bp, Homo sapien
tgaaagcaggaaatgtatgcccttt

SEQ ID NO: 49883 - DNA, 25 bp, Homo sapien
tcagtggttaattggtgaaagcagg

SEQ ID NO: 49884 - DNA, 25 bp, Homo sapien
ggggaaccagaaacctagctatctg

SEQ ID NO: 49885 - DNA, 25 bp, Homo sapien
acagaccaattagccaaatgcaaaa

SEQ ID NO: 49886 - DNA, 25 bp, Homo sapien
ataatccaggagtatataaccatgc

SEQ ID NO: 49887 - DNA, 25 bp, Homo sapien
tcacagagatgtctacagagacttt

SEQ ID NO: 49888 - DNA, 25 bp, Homo sapien
ttgttgtctgcgggctcaaagccct

SEQ ID NO: 49889 - DNA, 25 bp, Homo sapien
ttcccatcggtagctcttaacagac

SEQ ID NO: 49890 - DNA, 25 bp, Homo sapien
cttggagctcaccacagtgctgatc

SEQ ID NO: 49891 - DNA, 25 bp, Homo sapien
ttcccatcggtagctcttaacagac

SEQ ID NO: 49892 - DNA, 25 bp, Homo sapien
tgaaagcaggaaatgtatgcccttt

SEQ ID NO: 49893 - DNA, 25 bp, Homo sapien
ttgttgtctgcgggctcaaagccct

SEQ ID NO: 49894 - DNA, 25 bp, Homo sapien
tcacagagatgtctacagagacttt

SEQ ID NO: 49895 - DNA, 25 bp, Homo sapien
atgccctttactgtgctgctgttgc

SEQ ID NO: 49896 - DNA, 25 bp, Homo sapien
ataatccaggagtatataaccatgc

SEQ ID NO: 49897 - DNA, 25 bp, Homo sapien
acagaccaattagccaaatgcaaaa

SEQ ID NO: 49898 - DNA, 25 bp, Homo sapien
cttggagctcaccacagtgctgatc

SEQ ID NO: 49899 - DNA, 25 bp, Homo sapien
ggggaaccagaaacctagctatctg

SEQ ID NO: 49900 - DNA, 25 bp, Homo sapien
tcagtggttaattggtgaaagcagg

SEQ ID NO: 49901 - DNA, 25 bp, Homo sapien
taaggaggtttgaataagccatctg

SEQ ID NO: 49902 - DNA, 25 bp, Homo sapien
taaggaggtttgaataagccatctg

SEQ ID NO: 49903 - DNA, 25 bp, Homo sapien
atgccctttactgtgctgctgttgc

SEQ ID NO: 49904 - DNA, 25 bp, Homo sapien
tgaaagcaggaaatgtatgcccttt

SEQ ID NO: 49905 - DNA, 25 bp, Homo sapien
tcagtggttaattggtgaaagcagg

SEQ ID NO: 49906 - DNA, 25 bp, Homo sapien
ggggaaccagaaacctagctatctg

SEQ ID NO: 49907 - DNA, 25 bp, Homo sapien
acagaccaattagccaaatgcaaaa

SEQ ID NO: 49908 - DNA, 25 bp, Homo sapien
ataatccaggagtatataaccatgc

SEQ ID NO: 49909 - DNA, 25 bp, Homo sapien
tcacagagatgtctacagagacttt

SEQ ID NO: 49910 - DNA, 25 bp, Homo sapien
ttgttgtctgcgggctcaaagccct

SEQ ID NO: 49911 - DNA, 25 bp, Homo sapien
ttcccatcggtagctcttaacagac

SEQ ID NO: 49912 - DNA, 25 bp, Homo sapien
cttggagctcaccacagtgctgatc

SEQ ID NO: 49913 - DNA, 25 bp, Homo sapien
taaggaggtttgaataagccatctg

SEQ ID NO: 49914 - DNA, 25 bp, Homo sapien
ttgttgtctgcgggctcaaagccct

SEQ ID NO: 49915 - DNA, 25 bp, Homo sapien
ggggaaccagaaacctagctatctg

SEQ ID NO: 49916 - DNA, 25 bp, Homo sapien
atgccctttactgtgctgctgttgc

SEQ ID NO: 49917 - DNA, 25 bp, Homo sapien
acagaccaattagccaaatgcaaaa

SEQ ID NO: 49918 - DNA, 25 bp, Homo sapien
cttggagctcaccacagtgctgatc

SEQ ID NO: 49919 - DNA, 25 bp, Homo sapien
tcagtggttaattggtgaaagcagg

SEQ ID NO: 49920 - DNA, 25 bp, Homo sapien
tcacagagatgtctacagagacttt

SEQ ID NO: 49921 - DNA, 25 bp, Homo sapien
ttcccatcggtagctcttaacagac

SEQ ID NO: 49922 - DNA, 25 bp, Homo sapien
ataatccaggagtatataaccatgc

SEQ ID NO: 49923 - DNA, 25 bp, Homo sapien
tgaaagcaggaaatgtatgcccttt

SEQ ID NO: 49924 - DNA, 25 bp, Homo sapien
ttgttgtctgcgggctcaaagccct

SEQ ID NO: 49925 - DNA, 25 bp, Homo sapien
ttcccatcggtagctcttaacagac

SEQ ID NO: 49926 - DNA, 25 bp, Homo sapien
cttggagctcaccacagtgctgatc

SEQ ID NO: 49927 - DNA, 25 bp, Homo sapien
taaggaggtttgaataagccatctg

SEQ ID NO: 49928 - DNA, 25 bp, Homo sapien
atgccctttactgtgctgctgttgc

SEQ ID NO: 49929 - DNA, 25 bp, Homo sapien
tgaaagcaggaaatgtatgcccttt

SEQ ID NO: 49930 - DNA, 25 bp, Homo sapien
tcagtggttaattggtgaaagcagg

SEQ ID NO: 49931 - DNA, 25 bp, Homo sapien
ggggaaccagaaacctagctatctg

SEQ ID NO: 49932 - DNA, 25 bp, Homo sapien
acagaccaattagccaaatgcaaaa

SEQ ID NO: 49933 - DNA, 25 bp, Homo sapien
ataatccaggagtatataaccatgc

SEQ ID NO: 49934 - DNA, 25 bp, Homo sapien
tcacagagatgtctacagagacttt

SEQ ID NO: 49935 - DNA, 25 bp, Homo sapien
taaggaggtttgaataagccatctg

SEQ ID NO: 49936 - DNA, 25 bp, Homo sapien
atgccctttactgtgctgctgttgc

SEQ ID NO: 49937 - DNA, 25 bp, Homo sapien
tgaaagcaggaaatgtatgcccttt

SEQ ID NO: 49938 - DNA, 25 bp, Homo sapien
tcagtggttaattggtgaaagcagg

SEQ ID NO: 49939 - DNA, 25 bp, Homo sapien
ggggaaccagaaacctagctatctg

SEQ ID NO: 49940 - DNA, 25 bp, Homo sapien
acagaccaattagccaaatgcaaaa

SEQ ID NO: 49941 - DNA, 25 bp, Homo sapien
ataatccaggagtatataaccatgc

SEQ ID NO: 49942 - DNA, 25 bp, Homo sapien
tcacagagatgtctacagagacttt

SEQ ID NO: 49943 - DNA, 25 bp, Homo sapien
ttgttgtctgcgggctcaaagccct

SEQ ID NO: 49944 - DNA, 25 bp, Homo sapien
ttcccatcggtagctcttaacagac

SEQ ID NO: 49945 - DNA, 25 bp, Homo sapien
cttggagctcaccacagtgctgatc

SEQ ID NO: 49946 - DNA, 25 bp, Homo sapien
cttggagctcaccacagtgctgatc

SEQ ID NO: 49947 - DNA, 25 bp, Homo sapien
ggggaaccagaaacctagctatctg

SEQ ID NO: 49948 - DNA, 25 bp, Homo sapien
ataatccaggagtatataaccatgc

SEQ ID NO: 49949 - DNA, 25 bp, Homo sapien
tgaaagcaggaaatgtatgcccttt

SEQ ID NO: 49950 - DNA, 25 bp, Homo sapien
acagaccaattagccaaatgcaaaa

SEQ ID NO: 49951 - DNA, 25 bp, Homo sapien
atgccctttactgtgctgctgttgc

SEQ ID NO: 49952 - DNA, 25 bp, Homo sapien
tcagtggttaattggtgaaagcagg

SEQ ID NO: 49953 - DNA, 25 bp, Homo sapien
ttcccatcggtagctcttaacagac

SEQ ID NO: 49954 - DNA, 25 bp, Homo sapien
tcacagagatgtctacagagacttt

SEQ ID NO: 49955 - DNA, 25 bp, Homo sapien
ttgttgtctgcgggctcaaagccct

SEQ ID NO: 49956 - DNA, 25 bp, Homo sapien
taaggaggtttgaataagccatctg

SEQ ID NO: 49957 - DNA, 25 bp, Homo sapien
taaggaggtttgaataagccatctg

SEQ ID NO: 49958 - DNA, 25 bp, Homo sapien
atgccctttactgtgctgctgttgc

SEQ ID NO: 49959 - DNA, 25 bp, Homo sapien
tgaaagcaggaaatgtatgcccttt

SEQ ID NO: 49960 - DNA, 25 bp, Homo sapien
tcagtggttaattggtgaaagcagg

SEQ ID NO: 49961 - DNA, 25 bp, Homo sapien
ggggaaccagaaacctagctatctg

SEQ ID NO: 49962 - DNA, 25 bp, Homo sapien
acagaccaattagccaaatgcaaaa

SEQ ID NO: 49963 - DNA, 25 bp, Homo sapien
ataatccaggagtatataaccatgc

SEQ ID NO: 49964 - DNA, 25 bp, Homo sapien
tcacagagatgtctacagagacttt

SEQ ID NO: 49965 - DNA, 25 bp, Homo sapien
ttgttgtctgcgggctcaaagccct

SEQ ID NO: 49966 - DNA, 25 bp, Homo sapien
ttcccatcggtagctcttaacagac

SEQ ID NO: 49967 - DNA, 25 bp, Homo sapien
cttggagctcaccacagtgctgatc

SEQ ID NO: 49968 - DNA, 25 bp, Homo sapien
cttggagctcaccacagtgctgatc

SEQ ID NO: 49969 - DNA, 25 bp, Homo sapien
tcagtggttaattggtgaaagcagg

SEQ ID NO: 49970 - DNA, 25 bp, Homo sapien
atgccctttactgtgctgctgttgc

SEQ ID NO: 49971 - DNA, 25 bp, Homo sapien
ggggaaccagaaacctagctatctg

SEQ ID NO: 49972 - DNA, 25 bp, Homo sapien
taaggaggtttgaataagccatctg

SEQ ID NO: 49973 - DNA, 25 bp, Homo sapien
tcacagagatgtctacagagacttt

SEQ ID NO: 49974 - DNA, 25 bp, Homo sapien
ataatccaggagtatataaccatgc

SEQ ID NO: 49975 - DNA, 25 bp, Homo sapien
acagaccaattagccaaatgcaaaa

SEQ ID NO: 49976 - DNA, 25 bp, Homo sapien
ttcccatcggtagctcttaacagac

SEQ ID NO: 49977 - DNA, 25 bp, Homo sapien
ttgttgtctgcgggctcaaagccct

SEQ ID NO: 49978 - DNA, 25 bp, Homo sapien
tgaaagcaggaaatgtatgcccttt

SEQ ID NO: 49979 - DNA, 25 bp, Homo sapien
taaggaggtttgaataagccatctg

SEQ ID NO: 49980 - DNA, 25 bp, Homo sapien
atgccctttactgtgctgctgttgc

SEQ ID NO: 49981 - DNA, 25 bp, Homo sapien
tgaaagcaggaaatgtatgcccttt

SEQ ID NO: 49982 - DNA, 25 bp, Homo sapien
tcagtggttaattggtgaaagcagg

SEQ ID NO: 49983 - DNA, 25 bp, Homo sapien
ggggaaccagaaacctagctatctg

SEQ ID NO: 49984 - DNA, 25 bp, Homo sapien
acagaccaattagccaaatgcaaaa

SEQ ID NO: 49985 - DNA, 25 bp, Homo sapien
ataatccaggagtatataaccatgc

SEQ ID NO: 49986 - DNA, 25 bp, Homo sapien
tcacagagatgtctacagagacttt

SEQ ID NO: 49987 - DNA, 25 bp, Homo sapien
ttgttgtctgcgggctcaaagccct

SEQ ID NO: 49988 - DNA, 25 bp, Homo sapien
ttcccatcggtagctcttaacagac

SEQ ID NO: 49989 - DNA, 25 bp, Homo sapien
cttggagctcaccacagtgctgatc

SEQ ID NO: 49990 - DNA, 25 bp, Homo sapien
cttggagctcaccacagtgctgatc

SEQ ID NO: 49991 - DNA, 25 bp, Homo sapien
tcacagagatgtctacagagacttt

SEQ ID NO: 49992 - DNA, 25 bp, Homo sapien
tgaaagcaggaaatgtatgcccttt

SEQ ID NO: 49993 - DNA, 25 bp, Homo sapien
acagaccaattagccaaatgcaaaa

SEQ ID NO: 49994 - DNA, 25 bp, Homo sapien
tcagtggttaattggtgaaagcagg

SEQ ID NO: 49995 - DNA, 25 bp, Homo sapien
atgccctttactgtgctgctgttgc

SEQ ID NO: 49996 - DNA, 25 bp, Homo sapien
ataatccaggagtatataaccatgc

SEQ ID NO: 49997 - DNA, 25 bp, Homo sapien
ttgttgtctgcgggctcaaagccct

SEQ ID NO: 49998 - DNA, 25 bp, Homo sapien
ggggaaccagaaacctagctatctg

SEQ ID NO: 49999 - DNA, 25 bp, Homo sapien
taaggaggtttgaataagccatctg

SEQ ID NO: 50000 - DNA, 25 bp, Homo sapien
ttcccatcggtagctcttaacagac

SEQ ID NO: 50001 - DNA, 25 bp, Homo sapien
taaggaggtttgaataagccatctg

SEQ ID NO: 50002 - DNA, 25 bp, Homo sapien
atgccctttactgtgctgctgttgc

SEQ ID NO: 50003 - DNA, 25 bp, Homo sapien
tgaaagcaggaaatgtatgcccttt

SEQ ID NO: 50004 - DNA, 25 bp, Homo sapien
tcagtggttaattggtgaaagcagg

SEQ ID NO: 50005 - DNA, 25 bp, Homo sapien
ggggaaccagaaacctagctatctg

SEQ ID NO: 50006 - DNA, 25 bp, Homo sapien
acagaccaattagccaaatgcaaaa

SEQ ID NO: 50007 - DNA, 25 bp, Homo sapien
ataatccaggagtatataaccatgc

SEQ ID NO: 50008 - DNA, 25 bp, Homo sapien
tcacagagatgtctacagagacttt

SEQ ID NO: 50009 - DNA, 25 bp, Homo sapien
ttgttgtctgcgggctcaaagccct

SEQ ID NO: 50010 - DNA, 25 bp, Homo sapien
ttcccatcggtagctcttaacagac

SEQ ID NO: 50011 - DNA, 25 bp, Homo sapien
cttggagctcaccacagtgctgatc

SEQ ID NO: 50012 - DNA, 25 bp, Homo sapien
tcagtggttaattggtgaaagcagg

SEQ ID NO: 50013 - DNA, 25 bp, Homo sapien
atgccctttactgtgctgctgttgc

SEQ ID NO: 50014 - DNA, 25 bp, Homo sapien
ataatccaggagtatataaccatgc

SEQ ID NO: 50015 - DNA, 25 bp, Homo sapien
ttcccatcggtagctcttaacagac

SEQ ID NO: 50016 - DNA, 25 bp, Homo sapien
taaggaggtttgaataagccatctg

SEQ ID NO: 50017 - DNA, 25 bp, Homo sapien
cttggagctcaccacagtgctgatc

SEQ ID NO: 50018 - DNA, 25 bp, Homo sapien
tgaaagcaggaaatgtatgcccttt

SEQ ID NO: 50019 - DNA, 25 bp, Homo sapien
ggggaaccagaaacctagctatctg

SEQ ID NO: 50020 - DNA, 25 bp, Homo sapien
ttgttgtctgcgggctcaaagccct

SEQ ID NO: 50021 - DNA, 25 bp, Homo sapien
tcacagagatgtctacagagacttt

SEQ ID NO: 50022 - DNA, 25 bp, Homo sapien
acagaccaattagccaaatgcaaaa

SEQ ID NO: 50023 - DNA, 25 bp, Homo sapien
taaggaggtttgaataagccatctg

SEQ ID NO: 50024 - DNA, 25 bp, Homo sapien
atgccctttactgtgctgctgttgc

SEQ ID NO: 50025 - DNA, 25 bp, Homo sapien
tgaaagcaggaaatgtatgcccttt

SEQ ID NO: 50026 - DNA, 25 bp, Homo sapien
tcagtggttaattggtgaaagcagg

SEQ ID NO: 50027 - DNA, 25 bp, Homo sapien
ggggaaccagaaacctagctatctg

SEQ ID NO: 50028 - DNA, 25 bp, Homo sapien
acagaccaattagccaaatgcaaaa

SEQ ID NO: 50029 - DNA, 25 bp, Homo sapien
ataatccaggagtatataaccatgc

SEQ ID NO: 50030 - DNA, 25 bp, Homo sapien
tcacagagatgtctacagagacttt

SEQ ID NO: 50031 - DNA, 25 bp, Homo sapien
ttgttgtctgcgggctcaaagccct

SEQ ID NO: 50032 - DNA, 25 bp, Homo sapien
ttcccatcggtagctcttaacagac

SEQ ID NO: 50033 - DNA, 25 bp, Homo sapien
cttggagctcaccacagtgctgatc

SEQ ID NO: 50034 - DNA, 25 bp, Homo sapien
atgccctttactgtgctgctgttgc

SEQ ID NO: 50035 - DNA, 25 bp, Homo sapien
ggggaaccagaaacctagctatctg

SEQ ID NO: 50036 - DNA, 25 bp, Homo sapien
taaggaggtttgaataagccatctg

SEQ ID NO: 50037 - DNA, 25 bp, Homo sapien
tgaaagcaggaaatgtatgcccttt

SEQ ID NO: 50038 - DNA, 25 bp, Homo sapien
tcagtggttaattggtgaaagcagg

SEQ ID NO: 50039 - DNA, 25 bp, Homo sapien
ttgttgtctgcgggctcaaagccct

SEQ ID NO: 50040 - DNA, 25 bp, Homo sapien
tcacagagatgtctacagagacttt

SEQ ID NO: 50041 - DNA, 25 bp, Homo sapien
cttggagctcaccacagtgctgatc

SEQ ID NO: 50042 - DNA, 25 bp, Homo sapien
ataatccaggagtatataaccatgc

SEQ ID NO: 50043 - DNA, 25 bp, Homo sapien
acagaccaattagccaaatgcaaaa

SEQ ID NO: 50044 - DNA, 25 bp, Homo sapien
ttcccatcggtagctcttaacagac

SEQ ID NO: 50045 - DNA, 25 bp, Homo sapien
ttgttgtctgcgggctcaaagccct

SEQ ID NO: 50046 - DNA, 25 bp, Homo sapien
acagaccaattagccaaatgcaaaa

SEQ ID NO: 50047 - DNA, 25 bp, Homo sapien
taaggaggtttgaataagccatctg

SEQ ID NO: 50048 - DNA, 25 bp, Homo sapien
tcagtggttaattggtgaaagcagg

SEQ ID NO: 50049 - DNA, 25 bp, Homo sapien
tcacagagatgtctacagagacttt

SEQ ID NO: 50050 - DNA, 25 bp, Homo sapien
atgccctttactgtgctgctgttgc

SEQ ID NO: 50051 - DNA, 25 bp, Homo sapien
ataatccaggagtatataaccatgc

SEQ ID NO: 50052 - DNA, 25 bp, Homo sapien
ggggaaccagaaacctagctatctg

SEQ ID NO: 50053 - DNA, 25 bp, Homo sapien
ttcccatcggtagctcttaacagac

SEQ ID NO: 50054 - DNA, 25 bp, Homo sapien
cttggagctcaccacagtgctgatc

SEQ ID NO: 50055 - DNA, 25 bp, Homo sapien
tgaaagcaggaaatgtatgcccttt

SEQ ID NO: 50056 - DNA, 25 bp, Homo sapien
taaggaggtttgaataagccatctg

SEQ ID NO: 50057 - DNA, 25 bp, Homo sapien
atgccctttactgtgctgctgttgc

SEQ ID NO: 50058 - DNA, 25 bp, Homo sapien
tgaaagcaggaaatgtatgcccttt

SEQ ID NO: 50059 - DNA, 25 bp, Homo sapien
tcagtggttaattggtgaaagcagg

SEQ ID NO: 50060 - DNA, 25 bp, Homo sapien
ggggaaccagaaacctagctatctg

SEQ ID NO: 50061 - DNA, 25 bp, Homo sapien
acagaccaattagccaaatgcaaaa

SEQ ID NO: 50062 - DNA, 25 bp, Homo sapien
ataatccaggagtatataaccatgc

SEQ ID NO: 50063 - DNA, 25 bp, Homo sapien
tcacagagatgtctacagagacttt

SEQ ID NO: 50064 - DNA, 25 bp, Homo sapien
ttgttgtctgcgggctcaaagccct

SEQ ID NO: 50065 - DNA, 25 bp, Homo sapien
ttcccatcggtagctcttaacagac

SEQ ID NO: 50066 - DNA, 25 bp, Homo sapien
cttggagctcaccacagtgctgatc

SEQ ID NO: 50067 - DNA, 25 bp, Homo sapien
tcacagagatgtctacagagacttt

SEQ ID NO: 50068 - DNA, 25 bp, Homo sapien
ttgttgtctgcgggctcaaagccct

SEQ ID NO: 50069 - DNA, 25 bp, Homo sapien
atgccctttactgtgctgctgttgc

SEQ ID NO: 50070 - DNA, 25 bp, Homo sapien
ttcccatcggtagctcttaacagac

SEQ ID NO: 50071 - DNA, 25 bp, Homo sapien
acagaccaattagccaaatgcaaaa

SEQ ID NO: 50072 - DNA, 25 bp, Homo sapien
ggggaaccagaaacctagctatctg

SEQ ID NO: 50073 - DNA, 25 bp, Homo sapien
tgaaagcaggaaatgtatgcccttt

SEQ ID NO: 50074 - DNA, 25 bp, Homo sapien
cttggagctcaccacagtgctgatc

SEQ ID NO: 50075 - DNA, 25 bp, Homo sapien
tcagtggttaattggtgaaagcagg

SEQ ID NO: 50076 - DNA, 25 bp, Homo sapien
ataatccaggagtatataaccatgc

SEQ ID NO: 50077 - DNA, 25 bp, Homo sapien
taaggaggtttgaataagccatctg

SEQ ID NO: 50078 - DNA, 25 bp, Homo sapien
ttgttgtctgcgggctcaaagccct

SEQ ID NO: 50079 - DNA, 25 bp, Homo sapien
ttcccatcggtagctcttaacagac

SEQ ID NO: 50080 - DNA, 25 bp, Homo sapien
cttggagctcaccacagtgctgatc

SEQ ID NO: 50081 - DNA, 25 bp, Homo sapien
taaggaggtttgaataagccatctg

SEQ ID NO: 50082 - DNA, 25 bp, Homo sapien
atgccctttactgtgctgctgttgc

SEQ ID NO: 50083 - DNA, 25 bp, Homo sapien
tgaaagcaggaaatgtatgcccttt

SEQ ID NO: 50084 - DNA, 25 bp, Homo sapien
tcagtggttaattggtgaaagcagg

SEQ ID NO: 50085 - DNA, 25 bp, Homo sapien
ggggaaccagaaacctagctatctg

SEQ ID NO: 50086 - DNA, 25 bp, Homo sapien
acagaccaattagccaaatgcaaaa

SEQ ID NO: 50087 - DNA, 25 bp, Homo sapien
ataatccaggagtatataaccatgc

SEQ ID NO: 50088 - DNA, 25 bp, Homo sapien
tcacagagatgtctacagagacttt

SEQ ID NO: 50089 - DNA, 25 bp, Homo sapien
ggggaaccagaaacctagctatctg

SEQ ID NO: 50090 - DNA, 25 bp, Homo sapien
ataatccaggagtatataaccatgc

SEQ ID NO: 50091 - DNA, 25 bp, Homo sapien
ttcccatcggtagctcttaacagac

SEQ ID NO: 50092 - DNA, 25 bp, Homo sapien
atgccctttactgtgctgctgttgc

SEQ ID NO: 50093 - DNA, 25 bp, Homo sapien
acagaccaattagccaaatgcaaaa

SEQ ID NO: 50094 - DNA, 25 bp, Homo sapien
ttgttgtctgcgggctcaaagccct

SEQ ID NO: 50095 - DNA, 25 bp, Homo sapien
taaggaggtttgaataagccatctg

SEQ ID NO: 50096 - DNA, 25 bp, Homo sapien
tcacagagatgtctacagagacttt

SEQ ID NO: 50097 - DNA, 25 bp, Homo sapien
cttggagctcaccacagtgctgatc

SEQ ID NO: 50098 - DNA, 25 bp, Homo sapien
tgaaagcaggaaatgtatgcccttt

SEQ ID NO: 50099 - DNA, 25 bp, Homo sapien
tcagtggttaattggtgaaagcagg

SEQ ID NO: 50100 - DNA, 25 bp, Homo sapien
taaggaggtttgaataagccatctg

SEQ ID NO: 50101 - DNA, 25 bp, Homo sapien
atgccctttactgtgctgctgttgc

SEQ ID NO: 50102 - DNA, 25 bp, Homo sapien
tgaaagcaggaaatgtatgcccttt

SEQ ID NO: 50103 - DNA, 25 bp, Homo sapien
tcagtggttaattggtgaaagcagg

SEQ ID NO: 50104 - DNA, 25 bp, Homo sapien
ggggaaccagaaacctagctatctg

SEQ ID NO: 50105 - DNA, 25 bp, Homo sapien
acagaccaattagccaaatgcaaaa

SEQ ID NO: 50106 - DNA, 25 bp, Homo sapien
ataatccaggagtatataaccatgc

SEQ ID NO: 50107 - DNA, 25 bp, Homo sapien
tcacagagatgtctacagagacttt

SEQ ID NO: 50108 - DNA, 25 bp, Homo sapien
ttgttgtctgcgggctcaaagccct

SEQ ID NO: 50109 - DNA, 25 bp, Homo sapien
ttcccatcggtagctcttaacagac

SEQ ID NO: 50110 - DNA, 25 bp, Homo sapien
cttggagctcaccacagtgctgatc

SEQ ID NO: 50111 - DNA, 25 bp, Homo sapien
ggggaaccagaaacctagctatctg

SEQ ID NO: 50112 - DNA, 25 bp, Homo sapien
tcagtggttaattggtgaaagcagg

SEQ ID NO: 50113 - DNA, 25 bp, Homo sapien
cttggagctcaccacagtgctgatc

SEQ ID NO: 50114 - DNA, 25 bp, Homo sapien
atgccctttactgtgctgctgttgc

SEQ ID NO: 50115 - DNA, 25 bp, Homo sapien
ataatccaggagtatataaccatgc

SEQ ID NO: 50116 - DNA, 25 bp, Homo sapien
ttgttgtctgcgggctcaaagccct

SEQ ID NO: 50117 - DNA, 25 bp, Homo sapien
taaggaggtttgaataagccatctg

SEQ ID NO: 50118 - DNA, 25 bp, Homo sapien
ttcccatcggtagctcttaacagac

SEQ ID NO: 50119 - DNA, 25 bp, Homo sapien
tcacagagatgtctacagagacttt

SEQ ID NO: 50120 - DNA, 25 bp, Homo sapien
tgaaagcaggaaatgtatgcccttt

SEQ ID NO: 50121 - DNA, 25 bp, Homo sapien
acagaccaattagccaaatgcaaaa

SEQ ID NO: 50122 - DNA, 25 bp, Homo sapien
taaggaggtttgaataagccatctg

SEQ ID NO: 50123 - DNA, 25 bp, Homo sapien
atgccctttactgtgctgctgttgc

SEQ ID NO: 50124 - DNA, 25 bp, Homo sapien
tgaaagcaggaaatgtatgcccttt

SEQ ID NO: 50125 - DNA, 25 bp, Homo sapien
tcagtggttaattggtgaaagcagg

SEQ ID NO: 50126 - DNA, 25 bp, Homo sapien
ggggaaccagaaacctagctatctg

SEQ ID NO: 50127 - DNA, 25 bp, Homo sapien
acagaccaattagccaaatgcaaaa

SEQ ID NO: 50128 - DNA, 25 bp, Homo sapien
ataatccaggagtatataaccatgc

SEQ ID NO: 50129 - DNA, 25 bp, Homo sapien
tcacagagatgtctacagagacttt

SEQ ID NO: 50130 - DNA, 25 bp, Homo sapien
ttgttgtctgcgggctcaaagccct

SEQ ID NO: 50131 - DNA, 25 bp, Homo sapien
ttcccatcggtagctcttaacagac

SEQ ID NO: 50132 - DNA, 25 bp, Homo sapien
cttggagctcaccacagtgctgatc

SEQ ID NO: 50133 - DNA, 25 bp, Homo sapien
taaggaggtttgaataagccatctg

SEQ ID NO: 50134 - DNA, 25 bp, Homo sapien
ttgttgtctgcgggctcaaagccct

SEQ ID NO: 50135 - DNA, 25 bp, Homo sapien
tgaaagcaggaaatgtatgcccttt

SEQ ID NO: 50136 - DNA, 25 bp, Homo sapien
ggggaaccagaaacctagctatctg

SEQ ID NO: 50137 - DNA, 25 bp, Homo sapien
tcacagagatgtctacagagacttt

SEQ ID NO: 50138 - DNA, 25 bp, Homo sapien
ttcccatcggtagctcttaacagac

SEQ ID NO: 50139 - DNA, 25 bp, Homo sapien
atgccctttactgtgctgctgttgc

SEQ ID NO: 50140 - DNA, 25 bp, Homo sapien
ataatccaggagtatataaccatgc

SEQ ID NO: 50141 - DNA, 25 bp, Homo sapien
tcagtggttaattggtgaaagcagg

SEQ ID NO: 50142 - DNA, 25 bp, Homo sapien
acagaccaattagccaaatgcaaaa

SEQ ID NO: 50143 - DNA, 25 bp, Homo sapien
cttggagctcaccacagtgctgatc

SEQ ID NO: 50144 - DNA, 25 bp, Homo sapien
taaggaggtttgaataagccatctg

SEQ ID NO: 50145 - DNA, 25 bp, Homo sapien
atgccctttactgtgctgctgttgc

SEQ ID NO: 50146 - DNA, 25 bp, Homo sapien
tgaaagcaggaaatgtatgcccttt

SEQ ID NO: 50147 - DNA, 25 bp, Homo sapien
tcagtggttaattggtgaaagcagg

SEQ ID NO: 50148 - DNA, 25 bp, Homo sapien
ggggaaccagaaacctagctatctg

SEQ ID NO: 50149 - DNA, 25 bp, Homo sapien
acagaccaattagccaaatgcaaaa

SEQ ID NO: 50150 - DNA, 25 bp, Homo sapien
ataatccaggagtatataaccatgc

SEQ ID NO: 50151 - DNA, 25 bp, Homo sapien
tcacagagatgtctacagagacttt

SEQ ID NO: 50152 - DNA, 25 bp, Homo sapien
ttgttgtctgcgggctcaaagccct

SEQ ID NO: 50153 - DNA, 25 bp, Homo sapien
ttcccatcggtagctcttaacagac

SEQ ID NO: 50154 - DNA, 25 bp, Homo sapien
cttggagctcaccacagtgctgatc

SEQ ID NO: 50155 - DNA, 25 bp, Homo sapien
atgccctttactgtgctgctgttgc

SEQ ID NO: 50156 - DNA, 25 bp, Homo sapien
taaggaggtttgaataagccatctg

SEQ ID NO: 50157 - DNA, 25 bp, Homo sapien
ataatccaggagtatataaccatgc

SEQ ID NO: 50158 - DNA, 25 bp, Homo sapien
ttcccatcggtagctcttaacagac

SEQ ID NO: 50159 - DNA, 25 bp, Homo sapien
acagaccaattagccaaatgcaaaa

SEQ ID NO: 50160 - DNA, 25 bp, Homo sapien
tgaaagcaggaaatgtatgcccttt

SEQ ID NO: 50161 - DNA, 25 bp, Homo sapien
tcagtggttaattggtgaaagcagg

SEQ ID NO: 50162 - DNA, 25 bp, Homo sapien
cttggagctcaccacagtgctgatc

SEQ ID NO: 50163 - DNA, 25 bp, Homo sapien
ttgttgtctgcgggctcaaagccct

SEQ ID NO: 50164 - DNA, 25 bp, Homo sapien
ggggaaccagaaacctagctatctg

SEQ ID NO: 50165 - DNA, 25 bp, Homo sapien
tcacagagatgtctacagagacttt

SEQ ID NO: 50166 - DNA, 25 bp, Homo sapien
taaggaggtttgaataagccatctg

SEQ ID NO: 50167 - DNA, 25 bp, Homo sapien
atgccctttactgtgctgctgttgc

SEQ ID NO: 50168 - DNA, 25 bp, Homo sapien
tgaaagcaggaaatgtatgcccttt

SEQ ID NO: 50169 - DNA, 25 bp, Homo sapien
tcagtggttaattggtgaaagcagg

SEQ ID NO: 50170 - DNA, 25 bp, Homo sapien
ggggaaccagaaacctagctatctg

SEQ ID NO: 50171 - DNA, 25 bp, Homo sapien
acagaccaattagccaaatgcaaaa

SEQ ID NO: 50172 - DNA, 25 bp, Homo sapien
ataatccaggagtatataaccatgc

SEQ ID NO: 50173 - DNA, 25 bp, Homo sapien
tcacagagatgtctacagagacttt

SEQ ID NO: 50174 - DNA, 25 bp, Homo sapien
ttgttgtctgcgggctcaaagccct

SEQ ID NO: 50175 - DNA, 25 bp, Homo sapien
ttcccatcggtagctcttaacagac

SEQ ID NO: 50176 - DNA, 25 bp, Homo sapien
cttggagctcaccacagtgctgatc

SEQ ID NO: 50177 - DNA, 25 bp, Homo sapien
taaggaggtttgaataagccatctg

SEQ ID NO: 50178 - DNA, 25 bp, Homo sapien
atgccctttactgtgctgctgttgc

SEQ ID NO: 50179 - DNA, 25 bp, Homo sapien
tgaaagcaggaaatgtatgcccttt

SEQ ID NO: 50180 - DNA, 25 bp, Homo sapien
tcagtggttaattggtgaaagcagg

SEQ ID NO: 50181 - DNA, 25 bp, Homo sapien
ggggaaccagaaacctagctatctg

SEQ ID NO: 50182 - DNA, 25 bp, Homo sapien
acagaccaattagccaaatgcaaaa

SEQ ID NO: 50183 - DNA, 25 bp, Homo sapien
ataatccaggagtatataaccatgc

SEQ ID NO: 50184 - DNA, 25 bp, Homo sapien
tcacagagatgtctacagagacttt

SEQ ID NO: 50185 - DNA, 25 bp, Homo sapien
ttgttgtctgcgggctcaaagccct

SEQ ID NO: 50186 - DNA, 25 bp, Homo sapien
ttcccatcggtagctcttaacagac

SEQ ID NO: 50187 - DNA, 25 bp, Homo sapien
cttggagctcaccacagtgctgatc

SEQ ID NO: 50188 - DNA, 25 bp, Homo sapien
ttgttgtctgcgggctcaaagccct

SEQ ID NO: 50189 - DNA, 25 bp, Homo sapien
tgaaagcaggaaatgtatgcccttt

SEQ ID NO: 50190 - DNA, 25 bp, Homo sapien
taaggaggtttgaataagccatctg

SEQ ID NO: 50191 - DNA, 25 bp, Homo sapien
acagaccaattagccaaatgcaaaa

SEQ ID NO: 50192 - DNA, 25 bp, Homo sapien
ggggaaccagaaacctagctatctg

SEQ ID NO: 50193 - DNA, 25 bp, Homo sapien
atgccctttactgtgctgctgttgc

SEQ ID NO: 50194 - DNA, 25 bp, Homo sapien
tcacagagatgtctacagagacttt

SEQ ID NO: 50195 - DNA, 25 bp, Homo sapien
ttcccatcggtagctcttaacagac

SEQ ID NO: 50196 - DNA, 25 bp, Homo sapien
cttggagctcaccacagtgctgatc

SEQ ID NO: 50197 - DNA, 25 bp, Homo sapien
ataatccaggagtatataaccatgc

SEQ ID NO: 50198 - DNA, 25 bp, Homo sapien
tcagtggttaattggtgaaagcagg

SEQ ID NO: 50199 - DNA, 25 bp, Homo sapien
taaggaggtttgaataagccatctg

SEQ ID NO: 50200 - DNA, 25 bp, Homo sapien
atgccctttactgtgctgctgttgc

SEQ ID NO: 50201 - DNA, 25 bp, Homo sapien
tgaaagcaggaaatgtatgcccttt

SEQ ID NO: 50202 - DNA, 25 bp, Homo sapien
tcagtggttaattggtgaaagcagg

SEQ ID NO: 50203 - DNA, 25 bp, Homo sapien
ggggaaccagaaacctagctatctg

SEQ ID NO: 50204 - DNA, 25 bp, Homo sapien
acagaccaattagccaaatgcaaaa

SEQ ID NO: 50205 - DNA, 25 bp, Homo sapien
ataatccaggagtatataaccatgc

SEQ ID NO: 50206 - DNA, 25 bp, Homo sapien
tcacagagatgtctacagagacttt

SEQ ID NO: 50207 - DNA, 25 bp, Homo sapien
ttgttgtctgcgggctcaaagccct

SEQ ID NO: 50208 - DNA, 25 bp, Homo sapien
ttcccatcggtagctcttaacagac

SEQ ID NO: 50209 - DNA, 25 bp, Homo sapien
cttggagctcaccacagtgctgatc

SEQ ID NO: 50210 - DNA, 25 bp, Homo sapien
ttgttgtctgcgggctcaaagccct

SEQ ID NO: 50211 - DNA, 25 bp, Homo sapien
cttggagctcaccacagtgctgatc

SEQ ID NO: 50212 - DNA, 25 bp, Homo sapien
tgaaagcaggaaatgtatgcccttt

SEQ ID NO: 50213 - DNA, 25 bp, Homo sapien
atgccctttactgtgctgctgttgc

SEQ ID NO: 50214 - DNA, 25 bp, Homo sapien
tcacagagatgtctacagagacttt

SEQ ID NO: 50215 - DNA, 25 bp, Homo sapien
ggggaaccagaaacctagctatctg

SEQ ID NO: 50216 - DNA, 25 bp, Homo sapien
taaggaggtttgaataagccatctg

SEQ ID NO: 50217 - DNA, 25 bp, Homo sapien
acagaccaattagccaaatgcaaaa

SEQ ID NO: 50218 - DNA, 25 bp, Homo sapien
ttcccatcggtagctcttaacagac

SEQ ID NO: 50219 - DNA, 25 bp, Homo sapien
ataatccaggagtatataaccatgc

SEQ ID NO: 50220 - DNA, 25 bp, Homo sapien
tcagtggttaattggtgaaagcagg

SEQ ID NO: 50221 - DNA, 25 bp, Homo sapien
taaggaggtttgaataagccatctg

SEQ ID NO: 50222 - DNA, 25 bp, Homo sapien
atgccctttactgtgctgctgttgc

SEQ ID NO: 50223 - DNA, 25 bp, Homo sapien
tgaaagcaggaaatgtatgcccttt

SEQ ID NO: 50224 - DNA, 25 bp, Homo sapien
tcagtggttaattggtgaaagcagg

SEQ ID NO: 50225 - DNA, 25 bp, Homo sapien
ggggaaccagaaacctagctatctg

SEQ ID NO: 50226 - DNA, 25 bp, Homo sapien
acagaccaattagccaaatgcaaaa

SEQ ID NO: 50227 - DNA, 25 bp, Homo sapien
ataatccaggagtatataaccatgc

SEQ ID NO: 50228 - DNA, 25 bp, Homo sapien
tcacagagatgtctacagagacttt

SEQ ID NO: 50229 - DNA, 25 bp, Homo sapien
ttgttgtctgcgggctcaaagccct

SEQ ID NO: 50230 - DNA, 25 bp, Homo sapien
ttcccatcggtagctcttaacagac

SEQ ID NO: 50231 - DNA, 25 bp, Homo sapien
cttggagctcaccacagtgctgatc

SEQ ID NO: 50232 - DNA, 25 bp, Homo sapien
cttggagctcaccacagtgctgatc

SEQ ID NO: 50233 - DNA, 25 bp, Homo sapien
acagaccaattagccaaatgcaaaa

SEQ ID NO: 50234 - DNA, 25 bp, Homo sapien
tgaaagcaggaaatgtatgcccttt

SEQ ID NO: 50235 - DNA, 25 bp, Homo sapien
ttgttgtctgcgggctcaaagccct

SEQ ID NO: 50236 - DNA, 25 bp, Homo sapien
tcacagagatgtctacagagacttt

SEQ ID NO: 50237 - DNA, 25 bp, Homo sapien
ggggaaccagaaacctagctatctg

SEQ ID NO: 50238 - DNA, 25 bp, Homo sapien
tcagtggttaattggtgaaagcagg

SEQ ID NO: 50239 - DNA, 25 bp, Homo sapien
ttcccatcggtagctcttaacagac

SEQ ID NO: 50240 - DNA, 25 bp, Homo sapien
taaggaggtttgaataagccatctg

SEQ ID NO: 50241 - DNA, 25 bp, Homo sapien
ataatccaggagtatataaccatgc

SEQ ID NO: 50242 - DNA, 25 bp, Homo sapien
atgccctttactgtgctgctgttgc

SEQ ID NO: 50243 - DNA, 25 bp, Homo sapien
taaggaggtttgaataagccatctg

SEQ ID NO: 50244 - DNA, 25 bp, Homo sapien
atgccctttactgtgctgctgttgc

SEQ ID NO: 50245 - DNA, 25 bp, Homo sapien
tgaaagcaggaaatgtatgcccttt

SEQ ID NO: 50246 - DNA, 25 bp, Homo sapien
tcagtggttaattggtgaaagcagg

SEQ ID NO: 50247 - DNA, 25 bp, Homo sapien
ggggaaccagaaacctagctatctg

SEQ ID NO: 50248 - DNA, 25 bp, Homo sapien
acagaccaattagccaaatgcaaaa

SEQ ID NO: 50249 - DNA, 25 bp, Homo sapien
ataatccaggagtatataaccatgc

SEQ ID NO: 50250 - DNA, 25 bp, Homo sapien
tcacagagatgtctacagagacttt

SEQ ID NO: 50251 - DNA, 25 bp, Homo sapien
ttgttgtctgcgggctcaaagccct

SEQ ID NO: 50252 - DNA, 25 bp, Homo sapien
ttcccatcggtagctcttaacagac

SEQ ID NO: 50253 - DNA, 25 bp, Homo sapien
cttggagctcaccacagtgctgatc

SEQ ID NO: 50254 - DNA, 25 bp, Homo sapien
tcagtggttaattggtgaaagcagg

SEQ ID NO: 50255 - DNA, 25 bp, Homo sapien
ggggaaccagaaacctagctatctg

SEQ ID NO: 50256 - DNA, 25 bp, Homo sapien
cttggagctcaccacagtgctgatc

SEQ ID NO: 50257 - DNA, 25 bp, Homo sapien
ataatccaggagtatataaccatgc

SEQ ID NO: 50258 - DNA, 25 bp, Homo sapien
atgccctttactgtgctgctgttgc

SEQ ID NO: 50259 - DNA, 25 bp, Homo sapien
ttgttgtctgcgggctcaaagccct

SEQ ID NO: 50260 - DNA, 25 bp, Homo sapien
ttcccatcggtagctcttaacagac

SEQ ID NO: 50261 - DNA, 25 bp, Homo sapien
acagaccaattagccaaatgcaaaa

SEQ ID NO: 50262 - DNA, 25 bp, Homo sapien
taaggaggtttgaataagccatctg

SEQ ID NO: 50263 - DNA, 25 bp, Homo sapien
tcacagagatgtctacagagacttt

SEQ ID NO: 50264 - DNA, 25 bp, Homo sapien
tgaaagcaggaaatgtatgcccttt

SEQ ID NO: 50265 - DNA, 25 bp, Homo sapien
taaggaggtttgaataagccatctg

SEQ ID NO: 50266 - DNA, 25 bp, Homo sapien
atgccctttactgtgctgctgttgc

SEQ ID NO: 50267 - DNA, 25 bp, Homo sapien
tgaaagcaggaaatgtatgcccttt

SEQ ID NO: 50268 - DNA, 25 bp, Homo sapien
tcagtggttaattggtgaaagcagg

SEQ ID NO: 50269 - DNA, 25 bp, Homo sapien
ggggaaccagaaacctagctatctg

SEQ ID NO: 50270 - DNA, 25 bp, Homo sapien
acagaccaattagccaaatgcaaaa

SEQ ID NO: 50271 - DNA, 25 bp, Homo sapien
ataatccaggagtatataaccatgc

SEQ ID NO: 50272 - DNA, 25 bp, Homo sapien
tcacagagatgtctacagagacttt

SEQ ID NO: 50273 - DNA, 25 bp, Homo sapien
ttgttgtctgcgggctcaaagccct

SEQ ID NO: 50274 - DNA, 25 bp, Homo sapien
ttcccatcggtagctcttaacagac

SEQ ID NO: 50275 - DNA, 25 bp, Homo sapien
cttggagctcaccacagtgctgatc

SEQ ID NO: 50276 - DNA, 25 bp, Homo sapien
ttgttgtctgcgggctcaaagccct

SEQ ID NO: 50277 - DNA, 25 bp, Homo sapien
taaggaggtttgaataagccatctg

SEQ ID NO: 50278 - DNA, 25 bp, Homo sapien
cttggagctcaccacagtgctgatc

SEQ ID NO: 50279 - DNA, 25 bp, Homo sapien
ataatccaggagtatataaccatgc

SEQ ID NO: 50280 - DNA, 25 bp, Homo sapien
tcagtggttaattggtgaaagcagg

SEQ ID NO: 50281 - DNA, 25 bp, Homo sapien
acagaccaattagccaaatgcaaaa

SEQ ID NO: 50282 - DNA, 25 bp, Homo sapien
ggggaaccagaaacctagctatctg

SEQ ID NO: 50283 - DNA, 25 bp, Homo sapien
tcacagagatgtctacagagacttt

SEQ ID NO: 50284 - DNA, 25 bp, Homo sapien
tgaaagcaggaaatgtatgcccttt

SEQ ID NO: 50285 - DNA, 25 bp, Homo sapien
atgccctttactgtgctgctgttgc

SEQ ID NO: 50286 - DNA, 25 bp, Homo sapien
ttcccatcggtagctcttaacagac

SEQ ID NO: 50287 - DNA, 25 bp, Homo sapien
tgaaagcaggaaatgtatgcccttt

SEQ ID NO: 50288 - DNA, 25 bp, Homo sapien
ataatccaggagtatataaccatgc

SEQ ID NO: 50289 - DNA, 25 bp, Homo sapien
tcagtggttaattggtgaaagcagg

SEQ ID NO: 50290 - DNA, 25 bp, Homo sapien
cttggagctcaccacagtgctgatc

SEQ ID NO: 50291 - DNA, 25 bp, Homo sapien
ggggaaccagaaacctagctatctg

SEQ ID NO: 50292 - DNA, 25 bp, Homo sapien
taaggaggtttgaataagccatctg

SEQ ID NO: 50293 - DNA, 25 bp, Homo sapien
atgccctttactgtgctgctgttgc

SEQ ID NO: 50294 - DNA, 25 bp, Homo sapien
tcacagagatgtctacagagacttt

SEQ ID NO: 50295 - DNA, 25 bp, Homo sapien
ttgttgtctgcgggctcaaagccct

SEQ ID NO: 50296 - DNA, 25 bp, Homo sapien
acagaccaattagccaaatgcaaaa

SEQ ID NO: 50297 - DNA, 25 bp, Homo sapien
ttcccatcggtagctcttaacagac

SEQ ID NO: 50298 - DNA, 25 bp, Homo sapien
taaggaggtttgaataagccatctg

SEQ ID NO: 50299 - DNA, 25 bp, Homo sapien
atgccctttactgtgctgctgttgc

SEQ ID NO: 50300 - DNA, 25 bp, Homo sapien
tgaaagcaggaaatgtatgcccttt

SEQ ID NO: 50301 - DNA, 25 bp, Homo sapien
tcagtggttaattggtgaaagcagg

SEQ ID NO: 50302 - DNA, 25 bp, Homo sapien
ggggaaccagaaacctagctatctg

SEQ ID NO: 50303 - DNA, 25 bp, Homo sapien
acagaccaattagccaaatgcaaaa

SEQ ID NO: 50304 - DNA, 25 bp, Homo sapien
ataatccaggagtatataaccatgc

SEQ ID NO: 50305 - DNA, 25 bp, Homo sapien
tcacagagatgtctacagagacttt

SEQ ID NO: 50306 - DNA, 25 bp, Homo sapien
ttgttgtctgcgggctcaaagccct

SEQ ID NO: 50307 - DNA, 25 bp, Homo sapien
ttcccatcggtagctcttaacagac

SEQ ID NO: 50308 - DNA, 25 bp, Homo sapien
cttggagctcaccacagtgctgatc

SEQ ID NO: 50309 - DNA, 25 bp, Homo sapien
taaggaggtttgaataagccatctg

SEQ ID NO: 50310 - DNA, 25 bp, Homo sapien
atgccctttactgtgctgctgttgc

SEQ ID NO: 50311 - DNA, 25 bp, Homo sapien
ggggaaccagaaacctagctatctg

SEQ ID NO: 50312 - DNA, 25 bp, Homo sapien
ttcccatcggtagctcttaacagac

SEQ ID NO: 50313 - DNA, 25 bp, Homo sapien
tcagtggttaattggtgaaagcagg

SEQ ID NO: 50314 - DNA, 25 bp, Homo sapien
ataatccaggagtatataaccatgc

SEQ ID NO: 50315 - DNA, 25 bp, Homo sapien
cttggagctcaccacagtgctgatc

SEQ ID NO: 50316 - DNA, 25 bp, Homo sapien
tgaaagcaggaaatgtatgcccttt

SEQ ID NO: 50317 - DNA, 25 bp, Homo sapien
ttgttgtctgcgggctcaaagccct

SEQ ID NO: 50318 - DNA, 25 bp, Homo sapien
tcacagagatgtctacagagacttt

SEQ ID NO: 50319 - DNA, 25 bp, Homo sapien
acagaccaattagccaaatgcaaaa

SEQ ID NO: 50320 - DNA, 25 bp, Homo sapien
taaggaggtttgaataagccatctg

SEQ ID NO: 50321 - DNA, 25 bp, Homo sapien
atgccctttactgtgctgctgttgc

SEQ ID NO: 50322 - DNA, 25 bp, Homo sapien
tgaaagcaggaaatgtatgcccttt

SEQ ID NO: 50323 - DNA, 25 bp, Homo sapien
tcagtggttaattggtgaaagcagg

SEQ ID NO: 50324 - DNA, 25 bp, Homo sapien
ggggaaccagaaacctagctatctg

SEQ ID NO: 50325 - DNA, 25 bp, Homo sapien
acagaccaattagccaaatgcaaaa

SEQ ID NO: 50326 - DNA, 25 bp, Homo sapien
ataatccaggagtatataaccatgc

SEQ ID NO: 50327 - DNA, 25 bp, Homo sapien
tcacagagatgtctacagagacttt

SEQ ID NO: 50328 - DNA, 25 bp, Homo sapien
ttgttgtctgcgggctcaaagccct

SEQ ID NO: 50329 - DNA, 25 bp, Homo sapien
ttcccatcggtagctcttaacagac

SEQ ID NO: 50330 - DNA, 25 bp, Homo sapien
cttggagctcaccacagtgctgatc

SEQ ID NO: 50331 - DNA, 25 bp, Homo sapien
ttcccatcggtagctcttaacagac

SEQ ID NO: 50332 - DNA, 25 bp, Homo sapien
acagaccaattagccaaatgcaaaa

SEQ ID NO: 50333 - DNA, 25 bp, Homo sapien
cttggagctcaccacagtgctgatc

SEQ ID NO: 50334 - DNA, 25 bp, Homo sapien
tcagtggttaattggtgaaagcagg

SEQ ID NO: 50335 - DNA, 25 bp, Homo sapien
taaggaggtttgaataagccatctg

SEQ ID NO: 50336 - DNA, 25 bp, Homo sapien
tcacagagatgtctacagagacttt

SEQ ID NO: 50337 - DNA, 25 bp, Homo sapien
ataatccaggagtatataaccatgc

SEQ ID NO: 50338 - DNA, 25 bp, Homo sapien
tgaaagcaggaaatgtatgcccttt

SEQ ID NO: 50339 - DNA, 25 bp, Homo sapien
ttgttgtctgcgggctcaaagccct

SEQ ID NO: 50340 - DNA, 25 bp, Homo sapien
ggggaaccagaaacctagctatctg

SEQ ID NO: 50341 - DNA, 25 bp, Homo sapien
atgccctttactgtgctgctgttgc

SEQ ID NO: 50342 - DNA, 25 bp, Homo sapien
taaggaggtttgaataagccatctg

SEQ ID NO: 50343 - DNA, 25 bp, Homo sapien
atgccctttactgtgctgctgttgc

SEQ ID NO: 50344 - DNA, 25 bp, Homo sapien
tgaaagcaggaaatgtatgcccttt

SEQ ID NO: 50345 - DNA, 25 bp, Homo sapien
tcagtggttaattggtgaaagcagg

SEQ ID NO: 50346 - DNA, 25 bp, Homo sapien
ggggaaccagaaacctagctatctg

SEQ ID NO: 50347 - DNA, 25 bp, Homo sapien
acagaccaattagccaaatgcaaaa

SEQ ID NO: 50348 - DNA, 25 bp, Homo sapien
ataatccaggagtatataaccatgc

SEQ ID NO: 50349 - DNA, 25 bp, Homo sapien
tcacagagatgtctacagagacttt

SEQ ID NO: 50350 - DNA, 25 bp, Homo sapien
ttgttgtctgcgggctcaaagccct

SEQ ID NO: 50351 - DNA, 25 bp, Homo sapien
ttcccatcggtagctcttaacagac

SEQ ID NO: 50352 - DNA, 25 bp, Homo sapien
cttggagctcaccacagtgctgatc

SEQ ID NO: 50353 - DNA, 25 bp, Homo sapien
gtctcaaaatgagtggtggcatcat

SEQ ID NO: 50354 - DNA, 25 bp, Homo sapien
atcatatgtgcgggaaataaagatc

SEQ ID NO: 50355 - DNA, 25 bp, Homo sapien
tcgattgacttggttctgtggaata

SEQ ID NO: 50356 - DNA, 25 bp, Homo sapien
gctacattgtgcgcaaaggagatca

SEQ ID NO: 50357 - DNA, 25 bp, Homo sapien
cacagatgagctgcttacagcgagc

SEQ ID NO: 50358 - DNA, 25 bp, Homo sapien
ggttccaagagctccaaagctggtc

SEQ ID NO: 50359 - DNA, 25 bp, Homo sapien
gtggctgaggatgcaaataactctg

SEQ ID NO: 50360 - DNA, 25 bp, Homo sapien
gtaccaggaggtcactgatgctaac

SEQ ID NO: 50361 - DNA, 25 bp, Homo sapien
gatcttttacgtagctggggtcaca

SEQ ID NO: 50362 - DNA, 25 bp, Homo sapien
gagatcatgcagacgtagatatctg

SEQ ID NO: 50363 - DNA, 25 bp, Homo sapien
aataactctgatcacctggcccact

SEQ ID NO: 50364 - DNA, 25 bp, Homo sapien
cacagatgagctgcttacagcgagc

SEQ ID NO: 50365 - DNA, 25 bp, Homo sapien
gatcttttacgtagctggggtcaca

SEQ ID NO: 50366 - DNA, 25 bp, Homo sapien
aataactctgatcacctggcccact

SEQ ID NO: 50367 - DNA, 25 bp, Homo sapien
gtggctgaggatgcaaataactctg

SEQ ID NO: 50368 - DNA, 25 bp, Homo sapien
tcgattgacttggttctgtggaata

SEQ ID NO: 50369 - DNA, 25 bp, Homo sapien
gagatcatgcagacgtagatatctg

SEQ ID NO: 50370 - DNA, 25 bp, Homo sapien
gctacattgtgcgcaaaggagatca

SEQ ID NO: 50371 - DNA, 25 bp, Homo sapien
ggttccaagagctccaaagctggtc

SEQ ID NO: 50372 - DNA, 25 bp, Homo sapien
gtaccaggaggtcactgatgctaac

SEQ ID NO: 50373 - DNA, 25 bp, Homo sapien
atcatatgtgcgggaaataaagatc

SEQ ID NO: 50374 - DNA, 25 bp, Homo sapien
gtctcaaaatgagtggtggcatcat

SEQ ID NO: 50375 - DNA, 25 bp, Homo sapien
tcgattgacttggttctgtggaata

SEQ ID NO: 50376 - DNA, 25 bp, Homo sapien
gtaccaggaggtcactgatgctaac

SEQ ID NO: 50377 - DNA, 25 bp, Homo sapien
cacagatgagctgcttacagcgagc

SEQ ID NO: 50378 - DNA, 25 bp, Homo sapien
gagatcatgcagacgtagatatctg

SEQ ID NO: 50379 - DNA, 25 bp, Homo sapien
aataactctgatcacctggcccact

SEQ ID NO: 50380 - DNA, 25 bp, Homo sapien
ggttccaagagctccaaagctggtc

SEQ ID NO: 50381 - DNA, 25 bp, Homo sapien
atcatatgtgcgggaaataaagatc

SEQ ID NO: 50382 - DNA, 25 bp, Homo sapien
gatcttttacgtagctggggtcaca

SEQ ID NO: 50383 - DNA, 25 bp, Homo sapien
gtggctgaggatgcaaataactctg

SEQ ID NO: 50384 - DNA, 25 bp, Homo sapien
gctacattgtgcgcaaaggagatca

SEQ ID NO: 50385 - DNA, 25 bp, Homo sapien
gtctcaaaatgagtggtggcatcat

SEQ ID NO: 50386 - DNA, 25 bp, Homo sapien
gtaccaggaggtcactgatgctaac

SEQ ID NO: 50387 - DNA, 25 bp, Homo sapien
atcatatgtgcgggaaataaagatc

SEQ ID NO: 50388 - DNA, 25 bp, Homo sapien
gtctcaaaatgagtggtggcatcat

SEQ ID NO: 50389 - DNA, 25 bp, Homo sapien
cacagatgagctgcttacagcgagc

SEQ ID NO: 50390 - DNA, 25 bp, Homo sapien
gatcttttacgtagctggggtcaca

SEQ ID NO: 50391 - DNA, 25 bp, Homo sapien
aataactctgatcacctggcccact

SEQ ID NO: 50392 - DNA, 25 bp, Homo sapien
gtggctgaggatgcaaataactctg

SEQ ID NO: 50393 - DNA, 25 bp, Homo sapien
tcgattgacttggttctgtggaata

SEQ ID NO: 50394 - DNA, 25 bp, Homo sapien
gagatcatgcagacgtagatatctg

SEQ ID NO: 50395 - DNA, 25 bp, Homo sapien
gctacattgtgcgcaaaggagatca

SEQ ID NO: 50396 - DNA, 25 bp, Homo sapien
ggttccaagagctccaaagctggtc

SEQ ID NO: 50397 - DNA, 25 bp, Homo sapien
gctacattgtgcgcaaaggagatca

SEQ ID NO: 50398 - DNA, 25 bp, Homo sapien
atcatatgtgcgggaaataaagatc

SEQ ID NO: 50399 - DNA, 25 bp, Homo sapien
cacagatgagctgcttacagcgagc

SEQ ID NO: 50400 - DNA, 25 bp, Homo sapien
aataactctgatcacctggcccact

SEQ ID NO: 50401 - DNA, 25 bp, Homo sapien
gagatcatgcagacgtagatatctg

SEQ ID NO: 50402 - DNA, 25 bp, Homo sapien
ggttccaagagctccaaagctggtc

SEQ ID NO: 50403 - DNA, 25 bp, Homo sapien
gtggctgaggatgcaaataactctg

SEQ ID NO: 50404 - DNA, 25 bp, Homo sapien
gtctcaaaatgagtggtggcatcat

SEQ ID NO: 50405 - DNA, 25 bp, Homo sapien
gtaccaggaggtcactgatgctaac

SEQ ID NO: 50406 - DNA, 25 bp, Homo sapien
tcgattgacttggttctgtggaata

SEQ ID NO: 50407 - DNA, 25 bp, Homo sapien
gatcttttacgtagctggggtcaca

SEQ ID NO: 50408 - DNA, 25 bp, Homo sapien
cacagatgagctgcttacagcgagc

SEQ ID NO: 50409 - DNA, 25 bp, Homo sapien
gatcttttacgtagctggggtcaca

SEQ ID NO: 50410 - DNA, 25 bp, Homo sapien
aataactctgatcacctggcccact

SEQ ID NO: 50411 - DNA, 25 bp, Homo sapien
gtggctgaggatgcaaataactctg

SEQ ID NO: 50412 - DNA, 25 bp, Homo sapien
tcgattgacttggttctgtggaata

SEQ ID NO: 50413 - DNA, 25 bp, Homo sapien
gagatcatgcagacgtagatatctg

SEQ ID NO: 50414 - DNA, 25 bp, Homo sapien
gctacattgtgcgcaaaggagatca

SEQ ID NO: 50415 - DNA, 25 bp, Homo sapien
ggttccaagagctccaaagctggtc

SEQ ID NO: 50416 - DNA, 25 bp, Homo sapien
gtaccaggaggtcactgatgctaac

SEQ ID NO: 50417 - DNA, 25 bp, Homo sapien
atcatatgtgcgggaaataaagatc

SEQ ID NO: 50418 - DNA, 25 bp, Homo sapien
gtctcaaaatgagtggtggcatcat

SEQ ID NO: 50419 - DNA, 25 bp, Homo sapien
cacagatgagctgcttacagcgagc

SEQ ID NO: 50420 - DNA, 25 bp, Homo sapien
gatcttttacgtagctggggtcaca

SEQ ID NO: 50421 - DNA, 25 bp, Homo sapien
aataactctgatcacctggcccact

SEQ ID NO: 50422 - DNA, 25 bp, Homo sapien
gtggctgaggatgcaaataactctg

SEQ ID NO: 50423 - DNA, 25 bp, Homo sapien
tcgattgacttggttctgtggaata

SEQ ID NO: 50424 - DNA, 25 bp, Homo sapien
gagatcatgcagacgtagatatctg

SEQ ID NO: 50425 - DNA, 25 bp, Homo sapien
gctacattgtgcgcaaaggagatca

SEQ ID NO: 50426 - DNA, 25 bp, Homo sapien
ggttccaagagctccaaagctggtc

SEQ ID NO: 50427 - DNA, 25 bp, Homo sapien
gtaccaggaggtcactgatgctaac

SEQ ID NO: 50428 - DNA, 25 bp, Homo sapien
atcatatgtgcgggaaataaagatc

SEQ ID NO: 50429 - DNA, 25 bp, Homo sapien
gtctcaaaatgagtggtggcatcat

SEQ ID NO: 50430 - DNA, 25 bp, Homo sapien
gtggctgaggatgcaaataactctg

SEQ ID NO: 50431 - DNA, 25 bp, Homo sapien
ggttccaagagctccaaagctggtc

SEQ ID NO: 50432 - DNA, 25 bp, Homo sapien
atcatatgtgcgggaaataaagatc

SEQ ID NO: 50433 - DNA, 25 bp, Homo sapien
gtctcaaaatgagtggtggcatcat

SEQ ID NO: 50434 - DNA, 25 bp, Homo sapien
gtaccaggaggtcactgatgctaac

SEQ ID NO: 50435 - DNA, 25 bp, Homo sapien
gctacattgtgcgcaaaggagatca

SEQ ID NO: 50436 - DNA, 25 bp, Homo sapien
cacagatgagctgcttacagcgagc

SEQ ID NO: 50437 - DNA, 25 bp, Homo sapien
aataactctgatcacctggcccact

SEQ ID NO: 50438 - DNA, 25 bp, Homo sapien
gatcttttacgtagctggggtcaca

SEQ ID NO: 50439 - DNA, 25 bp, Homo sapien
tcgattgacttggttctgtggaata

SEQ ID NO: 50440 - DNA, 25 bp, Homo sapien
gagatcatgcagacgtagatatctg

SEQ ID NO: 50441 - DNA, 25 bp, Homo sapien
cacagatgagctgcttacagcgagc

SEQ ID NO: 50442 - DNA, 25 bp, Homo sapien
gatcttttacgtagctggggtcaca

SEQ ID NO: 50443 - DNA, 25 bp, Homo sapien
aataactctgatcacctggcccact

SEQ ID NO: 50444 - DNA, 25 bp, Homo sapien
gtggctgaggatgcaaataactctg

SEQ ID NO: 50445 - DNA, 25 bp, Homo sapien
tcgattgacttggttctgtggaata

SEQ ID NO: 50446 - DNA, 25 bp, Homo sapien
gagatcatgcagacgtagatatctg

SEQ ID NO: 50447 - DNA, 25 bp, Homo sapien
gctacattgtgcgcaaaggagatca

SEQ ID NO: 50448 - DNA, 25 bp, Homo sapien
ggttccaagagctccaaagctggtc

SEQ ID NO: 50449 - DNA, 25 bp, Homo sapien
gtaccaggaggtcactgatgctaac

SEQ ID NO: 50450 - DNA, 25 bp, Homo sapien
atcatatgtgcgggaaataaagatc

SEQ ID NO: 50451 - DNA, 25 bp, Homo sapien
gtctcaaaatgagtggtggcatcat

SEQ ID NO: 50452 - DNA, 25 bp, Homo sapien
tcgattgacttggttctgtggaata

SEQ ID NO: 50453 - DNA, 25 bp, Homo sapien
gatcttttacgtagctggggtcaca

SEQ ID NO: 50454 - DNA, 25 bp, Homo sapien
atcatatgtgcgggaaataaagatc

SEQ ID NO: 50455 - DNA, 25 bp, Homo sapien
gtaccaggaggtcactgatgctaac

SEQ ID NO: 50456 - DNA, 25 bp, Homo sapien
gagatcatgcagacgtagatatctg

SEQ ID NO: 50457 - DNA, 25 bp, Homo sapien
cacagatgagctgcttacagcgagc

SEQ ID NO: 50458 - DNA, 25 bp, Homo sapien
gctacattgtgcgcaaaggagatca

SEQ ID NO: 50459 - DNA, 25 bp, Homo sapien
aataactctgatcacctggcccact

SEQ ID NO: 50460 - DNA, 25 bp, Homo sapien
gtctcaaaatgagtggtggcatcat

SEQ ID NO: 50461 - DNA, 25 bp, Homo sapien
gtggctgaggatgcaaataactctg

SEQ ID NO: 50462 - DNA, 25 bp, Homo sapien
ggttccaagagctccaaagctggtc

SEQ ID NO: 50463 - DNA, 25 bp, Homo sapien
cacagatgagctgcttacagcgagc

SEQ ID NO: 50464 - DNA, 25 bp, Homo sapien
gatcttttacgtagctggggtcaca

SEQ ID NO: 50465 - DNA, 25 bp, Homo sapien
aataactctgatcacctggcccact

SEQ ID NO: 50466 - DNA, 25 bp, Homo sapien
gtggctgaggatgcaaataactctg

SEQ ID NO: 50467 - DNA, 25 bp, Homo sapien
tcgattgacttggttctgtggaata

SEQ ID NO: 50468 - DNA, 25 bp, Homo sapien
gagatcatgcagacgtagatatctg

SEQ ID NO: 50469 - DNA, 25 bp, Homo sapien
gctacattgtgcgcaaaggagatca

SEQ ID NO: 50470 - DNA, 25 bp, Homo sapien
ggttccaagagctccaaagctggtc

SEQ ID NO: 50471 - DNA, 25 bp, Homo sapien
gtaccaggaggtcactgatgctaac

SEQ ID NO: 50472 - DNA, 25 bp, Homo sapien
atcatatgtgcgggaaataaagatc

SEQ ID NO: 50473 - DNA, 25 bp, Homo sapien
gtctcaaaatgagtggtggcatcat

SEQ ID NO: 50474 - DNA, 25 bp, Homo sapien
gtctcaaaatgagtggtggcatcat

SEQ ID NO: 50475 - DNA, 25 bp, Homo sapien
gagatcatgcagacgtagatatctg

SEQ ID NO: 50476 - DNA, 25 bp, Homo sapien
aataactctgatcacctggcccact

SEQ ID NO: 50477 - DNA, 25 bp, Homo sapien
cacagatgagctgcttacagcgagc

SEQ ID NO: 50478 - DNA, 25 bp, Homo sapien
ggttccaagagctccaaagctggtc

SEQ ID NO: 50479 - DNA, 25 bp, Homo sapien
gctacattgtgcgcaaaggagatca

SEQ ID NO: 50480 - DNA, 25 bp, Homo sapien
gtggctgaggatgcaaataactctg

SEQ ID NO: 50481 - DNA, 25 bp, Homo sapien
atcatatgtgcgggaaataaagatc

SEQ ID NO: 50482 - DNA, 25 bp, Homo sapien
gatcttttacgtagctggggtcaca

SEQ ID NO: 50483 - DNA, 25 bp, Homo sapien
gtaccaggaggtcactgatgctaac

SEQ ID NO: 50484 - DNA, 25 bp, Homo sapien
tcgattgacttggttctgtggaata

SEQ ID NO: 50485 - DNA, 25 bp, Homo sapien
cacagatgagctgcttacagcgagc

SEQ ID NO: 50486 - DNA, 25 bp, Homo sapien
gatcttttacgtagctggggtcaca

SEQ ID NO: 50487 - DNA, 25 bp, Homo sapien
aataactctgatcacctggcccact

SEQ ID NO: 50488 - DNA, 25 bp, Homo sapien
gtggctgaggatgcaaataactctg

SEQ ID NO: 50489 - DNA, 25 bp, Homo sapien
tcgattgacttggttctgtggaata

SEQ ID NO: 50490 - DNA, 25 bp, Homo sapien
gagatcatgcagacgtagatatctg

SEQ ID NO: 50491 - DNA, 25 bp, Homo sapien
gctacattgtgcgcaaaggagatca

SEQ ID NO: 50492 - DNA, 25 bp, Homo sapien
ggttccaagagctccaaagctggtc

SEQ ID NO: 50493 - DNA, 25 bp, Homo sapien
gtaccaggaggtcactgatgctaac

SEQ ID NO: 50494 - DNA, 25 bp, Homo sapien
atcatatgtgcgggaaataaagatc

SEQ ID NO: 50495 - DNA, 25 bp, Homo sapien
gtctcaaaatgagtggtggcatcat

SEQ ID NO: 50496 - DNA, 25 bp, Homo sapien
gtctcaaaatgagtggtggcatcat

SEQ ID NO: 50497 - DNA, 25 bp, Homo sapien
cacagatgagctgcttacagcgagc

SEQ ID NO: 50498 - DNA, 25 bp, Homo sapien
gtggctgaggatgcaaataactctg

SEQ ID NO: 50499 - DNA, 25 bp, Homo sapien
gtaccaggaggtcactgatgctaac

SEQ ID NO: 50500 - DNA, 25 bp, Homo sapien
aataactctgatcacctggcccact

SEQ ID NO: 50501 - DNA, 25 bp, Homo sapien
gatcttttacgtagctggggtcaca

SEQ ID NO: 50502 - DNA, 25 bp, Homo sapien
ggttccaagagctccaaagctggtc

SEQ ID NO: 50503 - DNA, 25 bp, Homo sapien
atcatatgtgcgggaaataaagatc

SEQ ID NO: 50504 - DNA, 25 bp, Homo sapien
gctacattgtgcgcaaaggagatca

SEQ ID NO: 50505 - DNA, 25 bp, Homo sapien
tcgattgacttggttctgtggaata

SEQ ID NO: 50506 - DNA, 25 bp, Homo sapien
gagatcatgcagacgtagatatctg

SEQ ID NO: 50507 - DNA, 25 bp, Homo sapien
cacagatgagctgcttacagcgagc

SEQ ID NO: 50508 - DNA, 25 bp, Homo sapien
gatcttttacgtagctggggtcaca

SEQ ID NO: 50509 - DNA, 25 bp, Homo sapien
aataactctgatcacctggcccact

SEQ ID NO: 50510 - DNA, 25 bp, Homo sapien
gtggctgaggatgcaaataactctg

SEQ ID NO: 50511 - DNA, 25 bp, Homo sapien
tcgattgacttggttctgtggaata

SEQ ID NO: 50512 - DNA, 25 bp, Homo sapien
gagatcatgcagacgtagatatctg

SEQ ID NO: 50513 - DNA, 25 bp, Homo sapien
gctacattgtgcgcaaaggagatca

SEQ ID NO: 50514 - DNA, 25 bp, Homo sapien
ggttccaagagctccaaagctggtc

SEQ ID NO: 50515 - DNA, 25 bp, Homo sapien
gtaccaggaggtcactgatgctaac

SEQ ID NO: 50516 - DNA, 25 bp, Homo sapien
atcatatgtgcgggaaataaagatc

SEQ ID NO: 50517 - DNA, 25 bp, Homo sapien
gtctcaaaatgagtggtggcatcat

SEQ ID NO: 50518 - DNA, 25 bp, Homo sapien
cacagatgagctgcttacagcgagc

SEQ ID NO: 50519 - DNA, 25 bp, Homo sapien
gatcttttacgtagctggggtcaca

SEQ ID NO: 50520 - DNA, 25 bp, Homo sapien
gctacattgtgcgcaaaggagatca

SEQ ID NO: 50521 - DNA, 25 bp, Homo sapien
gtaccaggaggtcactgatgctaac

SEQ ID NO: 50522 - DNA, 25 bp, Homo sapien
gtggctgaggatgcaaataactctg

SEQ ID NO: 50523 - DNA, 25 bp, Homo sapien
ggttccaagagctccaaagctggtc

SEQ ID NO: 50524 - DNA, 25 bp, Homo sapien
aataactctgatcacctggcccact

SEQ ID NO: 50525 - DNA, 25 bp, Homo sapien
gtctcaaaatgagtggtggcatcat

SEQ ID NO: 50526 - DNA, 25 bp, Homo sapien
atcatatgtgcgggaaataaagatc

SEQ ID NO: 50527 - DNA, 25 bp, Homo sapien
gagatcatgcagacgtagatatctg

SEQ ID NO: 50528 - DNA, 25 bp, Homo sapien
tcgattgacttggttctgtggaata

SEQ ID NO: 50529 - DNA, 25 bp, Homo sapien
aataactctgatcacctggcccact

SEQ ID NO: 50530 - DNA, 25 bp, Homo sapien
cacagatgagctgcttacagcgagc

SEQ ID NO: 50531 - DNA, 25 bp, Homo sapien
gtctcaaaatgagtggtggcatcat

SEQ ID NO: 50532 - DNA, 25 bp, Homo sapien
gagatcatgcagacgtagatatctg

SEQ ID NO: 50533 - DNA, 25 bp, Homo sapien
ggttccaagagctccaaagctggtc

SEQ ID NO: 50534 - DNA, 25 bp, Homo sapien
atcatatgtgcgggaaataaagatc

SEQ ID NO: 50535 - DNA, 25 bp, Homo sapien
gctacattgtgcgcaaaggagatca

SEQ ID NO: 50536 - DNA, 25 bp, Homo sapien
tcgattgacttggttctgtggaata

SEQ ID NO: 50537 - DNA, 25 bp, Homo sapien
gtggctgaggatgcaaataactctg

SEQ ID NO: 50538 - DNA, 25 bp, Homo sapien
gatcttttacgtagctggggtcaca

SEQ ID NO: 50539 - DNA, 25 bp, Homo sapien
gtaccaggaggtcactgatgctaac

SEQ ID NO: 50540 - DNA, 25 bp, Homo sapien
cacagatgagctgcttacagcgagc

SEQ ID NO: 50541 - DNA, 25 bp, Homo sapien
gatcttttacgtagctggggtcaca

SEQ ID NO: 50542 - DNA, 25 bp, Homo sapien
aataactctgatcacctggcccact

SEQ ID NO: 50543 - DNA, 25 bp, Homo sapien
gtggctgaggatgcaaataactctg

SEQ ID NO: 50544 - DNA, 25 bp, Homo sapien
tcgattgacttggttctgtggaata

SEQ ID NO: 50545 - DNA, 25 bp, Homo sapien
gagatcatgcagacgtagatatctg

SEQ ID NO: 50546 - DNA, 25 bp, Homo sapien
gctacattgtgcgcaaaggagatca

SEQ ID NO: 50547 - DNA, 25 bp, Homo sapien
ggttccaagagctccaaagctggtc

SEQ ID NO: 50548 - DNA, 25 bp, Homo sapien
gtaccaggaggtcactgatgctaac

SEQ ID NO: 50549 - DNA, 25 bp, Homo sapien
atcatatgtgcgggaaataaagatc

SEQ ID NO: 50550 - DNA, 25 bp, Homo sapien
gtctcaaaatgagtggtggcatcat

SEQ ID NO: 50551 - DNA, 25 bp, Homo sapien
cacagatgagctgcttacagcgagc

SEQ ID NO: 50552 - DNA, 25 bp, Homo sapien
gagatcatgcagacgtagatatctg

SEQ ID NO: 50553 - DNA, 25 bp, Homo sapien
gatcttttacgtagctggggtcaca

SEQ ID NO: 50554 - DNA, 25 bp, Homo sapien
gtaccaggaggtcactgatgctaac

SEQ ID NO: 50555 - DNA, 25 bp, Homo sapien
atcatatgtgcgggaaataaagatc

SEQ ID NO: 50556 - DNA, 25 bp, Homo sapien
gctacattgtgcgcaaaggagatca

SEQ ID NO: 50557 - DNA, 25 bp, Homo sapien
ggttccaagagctccaaagctggtc

SEQ ID NO: 50558 - DNA, 25 bp, Homo sapien
gtggctgaggatgcaaataactctg

SEQ ID NO: 50559 - DNA, 25 bp, Homo sapien
gtctcaaaatgagtggtggcatcat

SEQ ID NO: 50560 - DNA, 25 bp, Homo sapien
aataactctgatcacctggcccact

SEQ ID NO: 50561 - DNA, 25 bp, Homo sapien
tcgattgacttggttctgtggaata

SEQ ID NO: 50562 - DNA, 25 bp, Homo sapien
cacagatgagctgcttacagcgagc

SEQ ID NO: 50563 - DNA, 25 bp, Homo sapien
gatcttttacgtagctggggtcaca

SEQ ID NO: 50564 - DNA, 25 bp, Homo sapien
aataactctgatcacctggcccact

SEQ ID NO: 50565 - DNA, 25 bp, Homo sapien
gtggctgaggatgcaaataactctg

SEQ ID NO: 50566 - DNA, 25 bp, Homo sapien
tcgattgacttggttctgtggaata

SEQ ID NO: 50567 - DNA, 25 bp, Homo sapien
gagatcatgcagacgtagatatctg

SEQ ID NO: 50568 - DNA, 25 bp, Homo sapien
gctacattgtgcgcaaaggagatca

SEQ ID NO: 50569 - DNA, 25 bp, Homo sapien
ggttccaagagctccaaagctggtc

SEQ ID NO: 50570 - DNA, 25 bp, Homo sapien
gtaccaggaggtcactgatgctaac

SEQ ID NO: 50571 - DNA, 25 bp, Homo sapien
atcatatgtgcgggaaataaagatc

SEQ ID NO: 50572 - DNA, 25 bp, Homo sapien
gtctcaaaatgagtggtggcatcat

SEQ ID NO: 50573 - DNA, 25 bp, Homo sapien
gtggctgaggatgcaaataactctg

SEQ ID NO: 50574 - DNA, 25 bp, Homo sapien
gagatcatgcagacgtagatatctg

SEQ ID NO: 50575 - DNA, 25 bp, Homo sapien
cacagatgagctgcttacagcgagc

SEQ ID NO: 50576 - DNA, 25 bp, Homo sapien
gatcttttacgtagctggggtcaca

SEQ ID NO: 50577 - DNA, 25 bp, Homo sapien
gtaccaggaggtcactgatgctaac

SEQ ID NO: 50578 - DNA, 25 bp, Homo sapien
gtctcaaaatgagtggtggcatcat

SEQ ID NO: 50579 - DNA, 25 bp, Homo sapien
gctacattgtgcgcaaaggagatca

SEQ ID NO: 50580 - DNA, 25 bp, Homo sapien
atcatatgtgcgggaaataaagatc

SEQ ID NO: 50581 - DNA, 25 bp, Homo sapien
aataactctgatcacctggcccact

SEQ ID NO: 50582 - DNA, 25 bp, Homo sapien
tcgattgacttggttctgtggaata

SEQ ID NO: 50583 - DNA, 25 bp, Homo sapien
ggttccaagagctccaaagctggtc

SEQ ID NO: 50584 - DNA, 25 bp, Homo sapien
cacagatgagctgcttacagcgagc

SEQ ID NO: 50585 - DNA, 25 bp, Homo sapien
gatcttttacgtagctggggtcaca

SEQ ID NO: 50586 - DNA, 25 bp, Homo sapien
aataactctgatcacctggcccact

SEQ ID NO: 50587 - DNA, 25 bp, Homo sapien
gtggctgaggatgcaaataactctg

SEQ ID NO: 50588 - DNA, 25 bp, Homo sapien
tcgattgacttggttctgtggaata

SEQ ID NO: 50589 - DNA, 25 bp, Homo sapien
gagatcatgcagacgtagatatctg

SEQ ID NO: 50590 - DNA, 25 bp, Homo sapien
gctacattgtgcgcaaaggagatca

SEQ ID NO: 50591 - DNA, 25 bp, Homo sapien
ggttccaagagctccaaagctggtc

SEQ ID NO: 50592 - DNA, 25 bp, Homo sapien
gtaccaggaggtcactgatgctaac

SEQ ID NO: 50593 - DNA, 25 bp, Homo sapien
atcatatgtgcgggaaataaagatc

SEQ ID NO: 50594 - DNA, 25 bp, Homo sapien
gtctcaaaatgagtggtggcatcat

SEQ ID NO: 50595 - DNA, 25 bp, Homo sapien
atcatatgtgcgggaaataaagatc

SEQ ID NO: 50596 - DNA, 25 bp, Homo sapien
gagatcatgcagacgtagatatctg

SEQ ID NO: 50597 - DNA, 25 bp, Homo sapien
cacagatgagctgcttacagcgagc

SEQ ID NO: 50598 - DNA, 25 bp, Homo sapien
gatcttttacgtagctggggtcaca

SEQ ID NO: 50599 - DNA, 25 bp, Homo sapien
ggttccaagagctccaaagctggtc

SEQ ID NO: 50600 - DNA, 25 bp, Homo sapien
gctacattgtgcgcaaaggagatca

SEQ ID NO: 50601 - DNA, 25 bp, Homo sapien
gtggctgaggatgcaaataactctg

SEQ ID NO: 50602 - DNA, 25 bp, Homo sapien
aataactctgatcacctggcccact

SEQ ID NO: 50603 - DNA, 25 bp, Homo sapien
gtaccaggaggtcactgatgctaac

SEQ ID NO: 50604 - DNA, 25 bp, Homo sapien
gtctcaaaatgagtggtggcatcat

SEQ ID NO: 50605 - DNA, 25 bp, Homo sapien
tcgattgacttggttctgtggaata

SEQ ID NO: 50606 - DNA, 25 bp, Homo sapien
cacagatgagctgcttacagcgagc

SEQ ID NO: 50607 - DNA, 25 bp, Homo sapien
gatcttttacgtagctggggtcaca

SEQ ID NO: 50608 - DNA, 25 bp, Homo sapien
aataactctgatcacctggcccact

SEQ ID NO: 50609 - DNA, 25 bp, Homo sapien
gtggctgaggatgcaaataactctg

SEQ ID NO: 50610 - DNA, 25 bp, Homo sapien
tcgattgacttggttctgtggaata

SEQ ID NO: 50611 - DNA, 25 bp, Homo sapien
gagatcatgcagacgtagatatctg

SEQ ID NO: 50612 - DNA, 25 bp, Homo sapien
gctacattgtgcgcaaaggagatca

SEQ ID NO: 50613 - DNA, 25 bp, Homo sapien
ggttccaagagctccaaagctggtc

SEQ ID NO: 50614 - DNA, 25 bp, Homo sapien
gtaccaggaggtcactgatgctaac

SEQ ID NO: 50615 - DNA, 25 bp, Homo sapien
atcatatgtgcgggaaataaagatc

SEQ ID NO: 50616 - DNA, 25 bp, Homo sapien
gtctcaaaatgagtggtggcatcat

SEQ ID NO: 50617 - DNA, 25 bp, Homo sapien
gagatcatgcagacgtagatatctg

SEQ ID NO: 50618 - DNA, 25 bp, Homo sapien
gatcttttacgtagctggggtcaca

SEQ ID NO: 50619 - DNA, 25 bp, Homo sapien
gctacattgtgcgcaaaggagatca

SEQ ID NO: 50620 - DNA, 25 bp, Homo sapien
aataactctgatcacctggcccact

SEQ ID NO: 50621 - DNA, 25 bp, Homo sapien
atcatatgtgcgggaaataaagatc

SEQ ID NO: 50622 - DNA, 25 bp, Homo sapien
gtctcaaaatgagtggtggcatcat

SEQ ID NO: 50623 - DNA, 25 bp, Homo sapien
ggttccaagagctccaaagctggtc

SEQ ID NO: 50624 - DNA, 25 bp, Homo sapien
tcgattgacttggttctgtggaata

SEQ ID NO: 50625 - DNA, 25 bp, Homo sapien
cacagatgagctgcttacagcgagc

SEQ ID NO: 50626 - DNA, 25 bp, Homo sapien
gtaccaggaggtcactgatgctaac

SEQ ID NO: 50627 - DNA, 25 bp, Homo sapien
gtggctgaggatgcaaataactctg

SEQ ID NO: 50628 - DNA, 25 bp, Homo sapien
cacagatgagctgcttacagcgagc

SEQ ID NO: 50629 - DNA, 25 bp, Homo sapien
gatcttttacgtagctggggtcaca

SEQ ID NO: 50630 - DNA, 25 bp, Homo sapien
aataactctgatcacctggcccact

SEQ ID NO: 50631 - DNA, 25 bp, Homo sapien
gtggctgaggatgcaaataactctg

SEQ ID NO: 50632 - DNA, 25 bp, Homo sapien
tcgattgacttggttctgtggaata

SEQ ID NO: 50633 - DNA, 25 bp, Homo sapien
gagatcatgcagacgtagatatctg

SEQ ID NO: 50634 - DNA, 25 bp, Homo sapien
gctacattgtgcgcaaaggagatca

SEQ ID NO: 50635 - DNA, 25 bp, Homo sapien
ggttccaagagctccaaagctggtc

SEQ ID NO: 50636 - DNA, 25 bp, Homo sapien
gtaccaggaggtcactgatgctaac

SEQ ID NO: 50637 - DNA, 25 bp, Homo sapien
atcatatgtgcgggaaataaagatc

SEQ ID NO: 50638 - DNA, 25 bp, Homo sapien
gtctcaaaatgagtggtggcatcat

SEQ ID NO: 50639 - DNA, 25 bp, Homo sapien
gatcttttacgtagctggggtcaca

SEQ ID NO: 50640 - DNA, 25 bp, Homo sapien
gtggctgaggatgcaaataactctg

SEQ ID NO: 50641 - DNA, 25 bp, Homo sapien
gctacattgtgcgcaaaggagatca

SEQ ID NO: 50642 - DNA, 25 bp, Homo sapien
gtaccaggaggtcactgatgctaac

SEQ ID NO: 50643 - DNA, 25 bp, Homo sapien
gtctcaaaatgagtggtggcatcat

SEQ ID NO: 50644 - DNA, 25 bp, Homo sapien
cacagatgagctgcttacagcgagc

SEQ ID NO: 50645 - DNA, 25 bp, Homo sapien
tcgattgacttggttctgtggaata

SEQ ID NO: 50646 - DNA, 25 bp, Homo sapien
atcatatgtgcgggaaataaagatc

SEQ ID NO: 50647 - DNA, 25 bp, Homo sapien
aataactctgatcacctggcccact

SEQ ID NO: 50648 - DNA, 25 bp, Homo sapien
gagatcatgcagacgtagatatctg

SEQ ID NO: 50649 - DNA, 25 bp, Homo sapien
ggttccaagagctccaaagctggtc

SEQ ID NO: 50650 - DNA, 25 bp, Homo sapien
cacagatgagctgcttacagcgagc

SEQ ID NO: 50651 - DNA, 25 bp, Homo sapien
gatcttttacgtagctggggtcaca

SEQ ID NO: 50652 - DNA, 25 bp, Homo sapien
aataactctgatcacctggcccact

SEQ ID NO: 50653 - DNA, 25 bp, Homo sapien
gtggctgaggatgcaaataactctg

SEQ ID NO: 50654 - DNA, 25 bp, Homo sapien
tcgattgacttggttctgtggaata

SEQ ID NO: 50655 - DNA, 25 bp, Homo sapien
gagatcatgcagacgtagatatctg

SEQ ID NO: 50656 - DNA, 25 bp, Homo sapien
gctacattgtgcgcaaaggagatca

SEQ ID NO: 50657 - DNA, 25 bp, Homo sapien
ggttccaagagctccaaagctggtc

SEQ ID NO: 50658 - DNA, 25 bp, Homo sapien
gtaccaggaggtcactgatgctaac

SEQ ID NO: 50659 - DNA, 25 bp, Homo sapien
atcatatgtgcgggaaataaagatc

SEQ ID NO: 50660 - DNA, 25 bp, Homo sapien
gtctcaaaatgagtggtggcatcat

SEQ ID NO: 50661 - DNA, 25 bp, Homo sapien
cacagatgagctgcttacagcgagc

SEQ ID NO: 50662 - DNA, 25 bp, Homo sapien
gatcttttacgtagctggggtcaca

SEQ ID NO: 50663 - DNA, 25 bp, Homo sapien
aataactctgatcacctggcccact

SEQ ID NO: 50664 - DNA, 25 bp, Homo sapien
gtggctgaggatgcaaataactctg

SEQ ID NO: 50665 - DNA, 25 bp, Homo sapien
tcgattgacttggttctgtggaata

SEQ ID NO: 50666 - DNA, 25 bp, Homo sapien
gagatcatgcagacgtagatatctg

SEQ ID NO: 50667 - DNA, 25 bp, Homo sapien
gctacattgtgcgcaaaggagatca

SEQ ID NO: 50668 - DNA, 25 bp, Homo sapien
ggttccaagagctccaaagctggtc

SEQ ID NO: 50669 - DNA, 25 bp, Homo sapien
gtaccaggaggtcactgatgctaac

SEQ ID NO: 50670 - DNA, 25 bp, Homo sapien
atcatatgtgcgggaaataaagatc

SEQ ID NO: 50671 - DNA, 25 bp, Homo sapien
gtctcaaaatgagtggtggcatcat

SEQ ID NO: 50672 - DNA, 25 bp, Homo sapien
atcatatgtgcgggaaataaagatc

SEQ ID NO: 50673 - DNA, 25 bp, Homo sapien
cacagatgagctgcttacagcgagc

SEQ ID NO: 50674 - DNA, 25 bp, Homo sapien
tcgattgacttggttctgtggaata

SEQ ID NO: 50675 - DNA, 25 bp, Homo sapien
ggttccaagagctccaaagctggtc

SEQ ID NO: 50676 - DNA, 25 bp, Homo sapien
gagatcatgcagacgtagatatctg

SEQ ID NO: 50677 - DNA, 25 bp, Homo sapien
gtggctgaggatgcaaataactctg

SEQ ID NO: 50678 - DNA, 25 bp, Homo sapien
gatcttttacgtagctggggtcaca

SEQ ID NO: 50679 - DNA, 25 bp, Homo sapien
gtctcaaaatgagtggtggcatcat

SEQ ID NO: 50680 - DNA, 25 bp, Homo sapien
aataactctgatcacctggcccact

SEQ ID NO: 50681 - DNA, 25 bp, Homo sapien
gctacattgtgcgcaaaggagatca

SEQ ID NO: 50682 - DNA, 25 bp, Homo sapien
gtaccaggaggtcactgatgctaac

SEQ ID NO: 50683 - DNA, 25 bp, Homo sapien
atcatatgtgcgggaaataaagatc

SEQ ID NO: 50684 - DNA, 25 bp, Homo sapien
cacagatgagctgcttacagcgagc

SEQ ID NO: 50685 - DNA, 25 bp, Homo sapien
tcgattgacttggttctgtggaata

SEQ ID NO: 50686 - DNA, 25 bp, Homo sapien
gtaccaggaggtcactgatgctaac

SEQ ID NO: 50687 - DNA, 25 bp, Homo sapien
gagatcatgcagacgtagatatctg

SEQ ID NO: 50688 - DNA, 25 bp, Homo sapien
ggttccaagagctccaaagctggtc

SEQ ID NO: 50689 - DNA, 25 bp, Homo sapien
gtggctgaggatgcaaataactctg

SEQ ID NO: 50690 - DNA, 25 bp, Homo sapien
gatcttttacgtagctggggtcaca

SEQ ID NO: 50691 - DNA, 25 bp, Homo sapien
aataactctgatcacctggcccact

SEQ ID NO: 50692 - DNA, 25 bp, Homo sapien
gtctcaaaatgagtggtggcatcat

SEQ ID NO: 50693 - DNA, 25 bp, Homo sapien
gctacattgtgcgcaaaggagatca

SEQ ID NO: 50694 - DNA, 25 bp, Homo sapien
cacagatgagctgcttacagcgagc

SEQ ID NO: 50695 - DNA, 25 bp, Homo sapien
atcatatgtgcgggaaataaagatc

SEQ ID NO: 50696 - DNA, 25 bp, Homo sapien
tcgattgacttggttctgtggaata

SEQ ID NO: 50697 - DNA, 25 bp, Homo sapien
gagatcatgcagacgtagatatctg

SEQ ID NO: 50698 - DNA, 25 bp, Homo sapien
ggttccaagagctccaaagctggtc

SEQ ID NO: 50699 - DNA, 25 bp, Homo sapien
gtggctgaggatgcaaataactctg

SEQ ID NO: 50700 - DNA, 25 bp, Homo sapien
gatcttttacgtagctggggtcaca

SEQ ID NO: 50701 - DNA, 25 bp, Homo sapien
aataactctgatcacctggcccact

SEQ ID NO: 50702 - DNA, 25 bp, Homo sapien
gtaccaggaggtcactgatgctaac

SEQ ID NO: 50703 - DNA, 25 bp, Homo sapien
gctacattgtgcgcaaaggagatca

SEQ ID NO: 50704 - DNA, 25 bp, Homo sapien
gtctcaaaatgagtggtggcatcat

SEQ ID NO: 50705 - DNA, 25 bp, Homo sapien
atcatatgtgcgggaaataaagatc

SEQ ID NO: 50706 - DNA, 25 bp, Homo sapien
cacagatgagctgcttacagcgagc

SEQ ID NO: 50707 - DNA, 25 bp, Homo sapien
tcgattgacttggttctgtggaata

SEQ ID NO: 50708 - DNA, 25 bp, Homo sapien
gagatcatgcagacgtagatatctg

SEQ ID NO: 50709 - DNA, 25 bp, Homo sapien
ggttccaagagctccaaagctggtc

SEQ ID NO: 50710 - DNA, 25 bp, Homo sapien
gtggctgaggatgcaaataactctg

SEQ ID NO: 50711 - DNA, 25 bp, Homo sapien
gatcttttacgtagctggggtcaca

SEQ ID NO: 50712 - DNA, 25 bp, Homo sapien
aataactctgatcacctggcccact

SEQ ID NO: 50713 - DNA, 25 bp, Homo sapien
gctacattgtgcgcaaaggagatca

SEQ ID NO: 50714 - DNA, 25 bp, Homo sapien
gtctcaaaatgagtggtggcatcat

SEQ ID NO: 50715 - DNA, 25 bp, Homo sapien
gtaccaggaggtcactgatgctaac

SEQ ID NO: 50716 - DNA, 25 bp, Homo sapien
atcatatgtgcgggaaataaagatc

SEQ ID NO: 50717 - DNA, 25 bp, Homo sapien
cacagatgagctgcttacagcgagc

SEQ ID NO: 50718 - DNA, 25 bp, Homo sapien
tcgattgacttggttctgtggaata

SEQ ID NO: 50719 - DNA, 25 bp, Homo sapien
gagatcatgcagacgtagatatctg

SEQ ID NO: 50720 - DNA, 25 bp, Homo sapien
ggttccaagagctccaaagctggtc

SEQ ID NO: 50721 - DNA, 25 bp, Homo sapien
gtggctgaggatgcaaataactctg

SEQ ID NO: 50722 - DNA, 25 bp, Homo sapien
gatcttttacgtagctggggtcaca

SEQ ID NO: 50723 - DNA, 25 bp, Homo sapien
gtctcaaaatgagtggtggcatcat

SEQ ID NO: 50724 - DNA, 25 bp, Homo sapien
aataactctgatcacctggcccact

SEQ ID NO: 50725 - DNA, 25 bp, Homo sapien
gctacattgtgcgcaaaggagatca

SEQ ID NO: 50726 - DNA, 25 bp, Homo sapien
gtaccaggaggtcactgatgctaac

SEQ ID NO: 50727 - DNA, 25 bp, Homo sapien
atcatatgtgcgggaaataaagatc

SEQ ID NO: 50728 - DNA, 25 bp, Homo sapien
cacagatgagctgcttacagcgagc

SEQ ID NO: 50729 - DNA, 25 bp, Homo sapien
tcgattgacttggttctgtggaata

SEQ ID NO: 50730 - DNA, 25 bp, Homo sapien
ggttccaagagctccaaagctggtc

SEQ ID NO: 50731 - DNA, 25 bp, Homo sapien
gagatcatgcagacgtagatatctg

SEQ ID NO: 50732 - DNA, 25 bp, Homo sapien
gtggctgaggatgcaaataactctg

SEQ ID NO: 50733 - DNA, 25 bp, Homo sapien
gatcttttacgtagctggggtcaca

SEQ ID NO: 50734 - DNA, 25 bp, Homo sapien
gctacattgtgcgcaaaggagatca

SEQ ID NO: 50735 - DNA, 25 bp, Homo sapien
aataactctgatcacctggcccact

SEQ ID NO: 50736 - DNA, 25 bp, Homo sapien
gtctcaaaatgagtggtggcatcat

SEQ ID NO: 50737 - DNA, 25 bp, Homo sapien
gtaccaggaggtcactgatgctaac

SEQ ID NO: 50738 - DNA, 25 bp, Homo sapien
atcatatgtgcgggaaataaagatc

SEQ ID NO: 50739 - DNA, 25 bp, Homo sapien
cacagatgagctgcttacagcgagc

SEQ ID NO: 50740 - DNA, 25 bp, Homo sapien
tcgattgacttggttctgtggaata

SEQ ID NO: 50741 - DNA, 25 bp, Homo sapien
gagatcatgcagacgtagatatctg

SEQ ID NO: 50742 - DNA, 25 bp, Homo sapien
ggttccaagagctccaaagctggtc

SEQ ID NO: 50743 - DNA, 25 bp, Homo sapien
gtggctgaggatgcaaataactctg

SEQ ID NO: 50744 - DNA, 25 bp, Homo sapien
gtctcaaaatgagtggtggcatcat

SEQ ID NO: 50745 - DNA, 25 bp, Homo sapien
gatcttttacgtagctggggtcaca

SEQ ID NO: 50746 - DNA, 25 bp, Homo sapien
gctacattgtgcgcaaaggagatca

SEQ ID NO: 50747 - DNA, 25 bp, Homo sapien
aataactctgatcacctggcccact

SEQ ID NO: 50748 - DNA, 25 bp, Homo sapien
gtaccaggaggtcactgatgctaac

SEQ ID NO: 50749 - DNA, 25 bp, Homo sapien
atcatatgtgcgggaaataaagatc

SEQ ID NO: 50750 - DNA, 25 bp, Homo sapien
cacagatgagctgcttacagcgagc

SEQ ID NO: 50751 - DNA, 25 bp, Homo sapien
tcgattgacttggttctgtggaata

SEQ ID NO: 50752 - DNA, 25 bp, Homo sapien
gagatcatgcagacgtagatatctg

SEQ ID NO: 50753 - DNA, 25 bp, Homo sapien
ggttccaagagctccaaagctggtc

SEQ ID NO: 50754 - DNA, 25 bp, Homo sapien
gtggctgaggatgcaaataactctg

SEQ ID NO: 50755 - DNA, 25 bp, Homo sapien
gatcttttacgtagctggggtcaca

SEQ ID NO: 50756 - DNA, 25 bp, Homo sapien
aataactctgatcacctggcccact

SEQ ID NO: 50757 - DNA, 25 bp, Homo sapien
gctacattgtgcgcaaaggagatca

SEQ ID NO: 50758 - DNA, 25 bp, Homo sapien
gtctcaaaatgagtggtggcatcat

SEQ ID NO: 50759 - DNA, 25 bp, Homo sapien
gtaccaggaggtcactgatgctaac

SEQ ID NO: 50760 - DNA, 25 bp, Homo sapien
atcatatgtgcgggaaataaagatc

SEQ ID NO: 50761 - DNA, 25 bp, Homo sapien
cacagatgagctgcttacagcgagc

SEQ ID NO: 50762 - DNA, 25 bp, Homo sapien
tcgattgacttggttctgtggaata

SEQ ID NO: 50763 - DNA, 25 bp, Homo sapien
gagatcatgcagacgtagatatctg

SEQ ID NO: 50764 - DNA, 25 bp, Homo sapien
ggttccaagagctccaaagctggtc

SEQ ID NO: 50765 - DNA, 25 bp, Homo sapien
gtggctgaggatgcaaataactctg

SEQ ID NO: 50766 - DNA, 25 bp, Homo sapien
gatcttttacgtagctggggtcaca

SEQ ID NO: 50767 - DNA, 25 bp, Homo sapien
aataactctgatcacctggcccact

SEQ ID NO: 50768 - DNA, 25 bp, Homo sapien
gctacattgtgcgcaaaggagatca

SEQ ID NO: 50769 - DNA, 25 bp, Homo sapien
gtctcaaaatgagtggtggcatcat

SEQ ID NO: 50770 - DNA, 25 bp, Homo sapien
gtaccaggaggtcactgatgctaac

SEQ ID NO: 50771 - DNA, 25 bp, Homo sapien
gagatcatgcagacgtagatatctg

SEQ ID NO: 50772 - DNA, 25 bp, Homo sapien
cacagatgagctgcttacagcgagc

SEQ ID NO: 50773 - DNA, 25 bp, Homo sapien
ggttccaagagctccaaagctggtc

SEQ ID NO: 50774 - DNA, 25 bp, Homo sapien
atcatatgtgcgggaaataaagatc

SEQ ID NO: 50775 - DNA, 25 bp, Homo sapien
gctacattgtgcgcaaaggagatca

SEQ ID NO: 50776 - DNA, 25 bp, Homo sapien
gatcttttacgtagctggggtcaca

SEQ ID NO: 50777 - DNA, 25 bp, Homo sapien
aataactctgatcacctggcccact

SEQ ID NO: 50778 - DNA, 25 bp, Homo sapien
gtctcaaaatgagtggtggcatcat

SEQ ID NO: 50779 - DNA, 25 bp, Homo sapien
gtggctgaggatgcaaataactctg

SEQ ID NO: 50780 - DNA, 25 bp, Homo sapien
tcgattgacttggttctgtggaata

SEQ ID NO: 50781 - DNA, 25 bp, Homo sapien
gtaccaggaggtcactgatgctaac

SEQ ID NO: 50782 - DNA, 25 bp, Homo sapien
atcatatgtgcgggaaataaagatc

SEQ ID NO: 50783 - DNA, 25 bp, Homo sapien
cacagatgagctgcttacagcgagc

SEQ ID NO: 50784 - DNA, 25 bp, Homo sapien
tcgattgacttggttctgtggaata

SEQ ID NO: 50785 - DNA, 25 bp, Homo sapien
gagatcatgcagacgtagatatctg

SEQ ID NO: 50786 - DNA, 25 bp, Homo sapien
ggttccaagagctccaaagctggtc

SEQ ID NO: 50787 - DNA, 25 bp, Homo sapien
gtggctgaggatgcaaataactctg

SEQ ID NO: 50788 - DNA, 25 bp, Homo sapien
gatcttttacgtagctggggtcaca

SEQ ID NO: 50789 - DNA, 25 bp, Homo sapien
gtaccaggaggtcactgatgctaac

SEQ ID NO: 50790 - DNA, 25 bp, Homo sapien
aataactctgatcacctggcccact

SEQ ID NO: 50791 - DNA, 25 bp, Homo sapien
gctacattgtgcgcaaaggagatca

SEQ ID NO: 50792 - DNA, 25 bp, Homo sapien
gtctcaaaatgagtggtggcatcat

SEQ ID NO: 50793 - DNA, 25 bp, Homo sapien
cacagatgagctgcttacagcgagc

SEQ ID NO: 50794 - DNA, 25 bp, Homo sapien
gatcttttacgtagctggggtcaca

SEQ ID NO: 50795 - DNA, 25 bp, Homo sapien
aataactctgatcacctggcccact

SEQ ID NO: 50796 - DNA, 25 bp, Homo sapien
gtggctgaggatgcaaataactctg

SEQ ID NO: 50797 - DNA, 25 bp, Homo sapien
tcgattgacttggttctgtggaata

SEQ ID NO: 50798 - DNA, 25 bp, Homo sapien
gagatcatgcagacgtagatatctg

SEQ ID NO: 50799 - DNA, 25 bp, Homo sapien
gctacattgtgcgcaaaggagatca

SEQ ID NO: 50800 - DNA, 25 bp, Homo sapien
ggttccaagagctccaaagctggtc

SEQ ID NO: 50801 - DNA, 25 bp, Homo sapien
gtaccaggaggtcactgatgctaac

SEQ ID NO: 50802 - DNA, 25 bp, Homo sapien
atcatatgtgcgggaaataaagatc

SEQ ID NO: 50803 - DNA, 25 bp, Homo sapien
gtctcaaaatgagtggtggcatcat

SEQ ID NO: 50804 - DNA, 25 bp, Homo sapien
gatctttatttcccgcacatatgat

SEQ ID NO: 50805 - DNA, 25 bp, Homo sapien
gctcgctgtaagcagctcatctgtg

SEQ ID NO: 50806 - DNA, 25 bp, Homo sapien
tattccacagaaccaagtcaatcga

SEQ ID NO: 50807 - DNA, 25 bp, Homo sapien
gaccagctttggagctcttggaacc

SEQ ID NO: 50808 - DNA, 25 bp, Homo sapien
agtgggccaggtgatcagagttatt

SEQ ID NO: 50809 - DNA, 25 bp, Homo sapien
gttagcatcagtgacctcctggtac

SEQ ID NO: 50810 - DNA, 25 bp, Homo sapien
cagagttatttgcatcctcagccac

SEQ ID NO: 50811 - DNA, 25 bp, Homo sapien
tgtgaccccagctacgtaaaagatc

SEQ ID NO: 50812 - DNA, 25 bp, Homo sapien
cagatatctacgtctgcatgatctc

SEQ ID NO: 50813 - DNA, 25 bp, Homo sapien
tgatctcctttgcgcacaatgtagc

SEQ ID NO: 50814 - DNA, 25 bp, Homo sapien
atgatgccaccactcattttgagac

SEQ ID NO: 50815 - DNA, 25 bp, Homo sapien
atcatatgtgcgggaaataaagatc

SEQ ID NO: 50816 - DNA, 25 bp, Homo sapien
cacagatgagctgcttacagcgagc

SEQ ID NO: 50817 - DNA, 25 bp, Homo sapien
tcgattgacttggttctgtggaata

SEQ ID NO: 50818 - DNA, 25 bp, Homo sapien
gagatcatgcagacgtagatatctg

SEQ ID NO: 50819 - DNA, 25 bp, Homo sapien
ggttccaagagctccaaagctggtc

SEQ ID NO: 50820 - DNA, 25 bp, Homo sapien
gtaccaggaggtcactgatgctaac

SEQ ID NO: 50821 - DNA, 25 bp, Homo sapien
gtggctgaggatgcaaataactctg

SEQ ID NO: 50822 - DNA, 25 bp, Homo sapien
gatcttttacgtagctggggtcaca

SEQ ID NO: 50823 - DNA, 25 bp, Homo sapien
aataactctgatcacctggcccact

SEQ ID NO: 50824 - DNA, 25 bp, Homo sapien
gctacattgtgcgcaaaggagatca

SEQ ID NO: 50825 - DNA, 25 bp, Homo sapien
gtctcaaaatgagtggtggcatcat

SEQ ID NO: 50826 - DNA, 25 bp, Homo sapien
gtggctgaggatgcaaataactctg

SEQ ID NO: 50827 - DNA, 25 bp, Homo sapien
aataactctgatcacctggcccact

SEQ ID NO: 50828 - DNA, 25 bp, Homo sapien
tcgattgacttggttctgtggaata

SEQ ID NO: 50829 - DNA, 25 bp, Homo sapien
gtaccaggaggtcactgatgctaac

SEQ ID NO: 50830 - DNA, 25 bp, Homo sapien
gatcttttacgtagctggggtcaca

SEQ ID NO: 50831 - DNA, 25 bp, Homo sapien
gtctcaaaatgagtggtggcatcat

SEQ ID NO: 50832 - DNA, 25 bp, Homo sapien
atcatatgtgcgggaaataaagatc

SEQ ID NO: 50833 - DNA, 25 bp, Homo sapien
gagatcatgcagacgtagatatctg

SEQ ID NO: 50834 - DNA, 25 bp, Homo sapien
cacagatgagctgcttacagcgagc

SEQ ID NO: 50835 - DNA, 25 bp, Homo sapien
ggttccaagagctccaaagctggtc

SEQ ID NO: 50836 - DNA, 25 bp, Homo sapien
gctacattgtgcgcaaaggagatca

SEQ ID NO: 50837 - DNA, 25 bp, Homo sapien
cacagatgagctgcttacagcgagc

SEQ ID NO: 50838 - DNA, 25 bp, Homo sapien
gatcttttacgtagctggggtcaca

SEQ ID NO: 50839 - DNA, 25 bp, Homo sapien
aataactctgatcacctggcccact

SEQ ID NO: 50840 - DNA, 25 bp, Homo sapien
gtggctgaggatgcaaataactctg

SEQ ID NO: 50841 - DNA, 25 bp, Homo sapien
tcgattgacttggttctgtggaata

SEQ ID NO: 50842 - DNA, 25 bp, Homo sapien
gagatcatgcagacgtagatatctg

SEQ ID NO: 50843 - DNA, 25 bp, Homo sapien
gctacattgtgcgcaaaggagatca

SEQ ID NO: 50844 - DNA, 25 bp, Homo sapien
ggttccaagagctccaaagctggtc

SEQ ID NO: 50845 - DNA, 25 bp, Homo sapien
gtaccaggaggtcactgatgctaac

SEQ ID NO: 50846 - DNA, 25 bp, Homo sapien
atcatatgtgcgggaaataaagatc

SEQ ID NO: 50847 - DNA, 25 bp, Homo sapien
gtctcaaaatgagtggtggcatcat

SEQ ID NO: 50848 - DNA, 25 bp, Homo sapien
ggttccaagagctccaaagctggtc

SEQ ID NO: 50849 - DNA, 25 bp, Homo sapien
atcatatgtgcgggaaataaagatc

SEQ ID NO: 50850 - DNA, 25 bp, Homo sapien
gtctcaaaatgagtggtggcatcat

SEQ ID NO: 50851 - DNA, 25 bp, Homo sapien
gtggctgaggatgcaaataactctg

SEQ ID NO: 50852 - DNA, 25 bp, Homo sapien
tcgattgacttggttctgtggaata

SEQ ID NO: 50853 - DNA, 25 bp, Homo sapien
gtaccaggaggtcactgatgctaac

SEQ ID NO: 50854 - DNA, 25 bp, Homo sapien
gagatcatgcagacgtagatatctg

SEQ ID NO: 50855 - DNA, 25 bp, Homo sapien
cacagatgagctgcttacagcgagc

SEQ ID NO: 50856 - DNA, 25 bp, Homo sapien
aataactctgatcacctggcccact

SEQ ID NO: 50857 - DNA, 25 bp, Homo sapien
gatcttttacgtagctggggtcaca

SEQ ID NO: 50858 - DNA, 25 bp, Homo sapien
gctacattgtgcgcaaaggagatca

SEQ ID NO: 50859 - DNA, 25 bp, Homo sapien
cacagatgagctgcttacagcgagc

SEQ ID NO: 50860 - DNA, 25 bp, Homo sapien
gatcttttacgtagctggggtcaca

SEQ ID NO: 50861 - DNA, 25 bp, Homo sapien
aataactctgatcacctggcccact

SEQ ID NO: 50862 - DNA, 25 bp, Homo sapien
gtggctgaggatgcaaataactctg

SEQ ID NO: 50863 - DNA, 25 bp, Homo sapien
tcgattgacttggttctgtggaata

SEQ ID NO: 50864 - DNA, 25 bp, Homo sapien
gagatcatgcagacgtagatatctg

SEQ ID NO: 50865 - DNA, 25 bp, Homo sapien
gctacattgtgcgcaaaggagatca

SEQ ID NO: 50866 - DNA, 25 bp, Homo sapien
ggttccaagagctccaaagctggtc

SEQ ID NO: 50867 - DNA, 25 bp, Homo sapien
gtaccaggaggtcactgatgctaac

SEQ ID NO: 50868 - DNA, 25 bp, Homo sapien
atcatatgtgcgggaaataaagatc

SEQ ID NO: 50869 - DNA, 25 bp, Homo sapien
gtctcaaaatgagtggtggcatcat

SEQ ID NO: 50870 - DNA, 25 bp, Homo sapien
ggttccaagagctccaaagctggtc

SEQ ID NO: 50871 - DNA, 25 bp, Homo sapien
gatcttttacgtagctggggtcaca

SEQ ID NO: 50872 - DNA, 25 bp, Homo sapien
gtctcaaaatgagtggtggcatcat

SEQ ID NO: 50873 - DNA, 25 bp, Homo sapien
atcatatgtgcgggaaataaagatc

SEQ ID NO: 50874 - DNA, 25 bp, Homo sapien
cacagatgagctgcttacagcgagc

SEQ ID NO: 50875 - DNA, 25 bp, Homo sapien
gtggctgaggatgcaaataactctg

SEQ ID NO: 50876 - DNA, 25 bp, Homo sapien
gagatcatgcagacgtagatatctg

SEQ ID NO: 50877 - DNA, 25 bp, Homo sapien
aataactctgatcacctggcccact

SEQ ID NO: 50878 - DNA, 25 bp, Homo sapien
gctacattgtgcgcaaaggagatca

SEQ ID NO: 50879 - DNA, 25 bp, Homo sapien
gtaccaggaggtcactgatgctaac

SEQ ID NO: 50880 - DNA, 25 bp, Homo sapien
tcgattgacttggttctgtggaata

SEQ ID NO: 50881 - DNA, 25 bp, Homo sapien
gtaccaggaggtcactgatgctaac

SEQ ID NO: 50882 - DNA, 25 bp, Homo sapien
atcatatgtgcgggaaataaagatc

SEQ ID NO: 50883 - DNA, 25 bp, Homo sapien
gtctcaaaatgagtggtggcatcat

SEQ ID NO: 50884 - DNA, 25 bp, Homo sapien
cacagatgagctgcttacagcgagc

SEQ ID NO: 50885 - DNA, 25 bp, Homo sapien
gatcttttacgtagctggggtcaca

SEQ ID NO: 50886 - DNA, 25 bp, Homo sapien
aataactctgatcacctggcccact

SEQ ID NO: 50887 - DNA, 25 bp, Homo sapien
gtggctgaggatgcaaataactctg

SEQ ID NO: 50888 - DNA, 25 bp, Homo sapien
tcgattgacttggttctgtggaata

SEQ ID NO: 50889 - DNA, 25 bp, Homo sapien
gagatcatgcagacgtagatatctg

SEQ ID NO: 50890 - DNA, 25 bp, Homo sapien
gctacattgtgcgcaaaggagatca

SEQ ID NO: 50891 - DNA, 25 bp, Homo sapien
ggttccaagagctccaaagctggtc

SEQ ID NO: 50892 - DNA, 25 bp, Homo sapien
cacagatgagctgcttacagcgagc

SEQ ID NO: 50893 - DNA, 25 bp, Homo sapien
gatcttttacgtagctggggtcaca

SEQ ID NO: 50894 - DNA, 25 bp, Homo sapien
aataactctgatcacctggcccact

SEQ ID NO: 50895 - DNA, 25 bp, Homo sapien
gtggctgaggatgcaaataactctg

SEQ ID NO: 50896 - DNA, 25 bp, Homo sapien
tcgattgacttggttctgtggaata

SEQ ID NO: 50897 - DNA, 25 bp, Homo sapien
gagatcatgcagacgtagatatctg

SEQ ID NO: 50898 - DNA, 25 bp, Homo sapien
gctacattgtgcgcaaaggagatca

SEQ ID NO: 50899 - DNA, 25 bp, Homo sapien
ggttccaagagctccaaagctggtc

SEQ ID NO: 50900 - DNA, 25 bp, Homo sapien
gtaccaggaggtcactgatgctaac

SEQ ID NO: 50901 - DNA, 25 bp, Homo sapien
atcatatgtgcgggaaataaagatc

SEQ ID NO: 50902 - DNA, 25 bp, Homo sapien
gtctcaaaatgagtggtggcatcat

SEQ ID NO: 50903 - DNA, 25 bp, Homo sapien
gtaccaggaggtcactgatgctaac

SEQ ID NO: 50904 - DNA, 25 bp, Homo sapien
gctacattgtgcgcaaaggagatca

SEQ ID NO: 50905 - DNA, 25 bp, Homo sapien
gatcttttacgtagctggggtcaca

SEQ ID NO: 50906 - DNA, 25 bp, Homo sapien
ggttccaagagctccaaagctggtc

SEQ ID NO: 50907 - DNA, 25 bp, Homo sapien
gtctcaaaatgagtggtggcatcat

SEQ ID NO: 50908 - DNA, 25 bp, Homo sapien
tcgattgacttggttctgtggaata

SEQ ID NO: 50909 - DNA, 25 bp, Homo sapien
cacagatgagctgcttacagcgagc

SEQ ID NO: 50910 - DNA, 25 bp, Homo sapien
gtggctgaggatgcaaataactctg

SEQ ID NO: 50911 - DNA, 25 bp, Homo sapien
atcatatgtgcgggaaataaagatc

SEQ ID NO: 50912 - DNA, 25 bp, Homo sapien
aataactctgatcacctggcccact

SEQ ID NO: 50913 - DNA, 25 bp, Homo sapien
gagatcatgcagacgtagatatctg

SEQ ID NO: 50914 - DNA, 25 bp, Homo sapien
cacagatgagctgcttacagcgagc

SEQ ID NO: 50915 - DNA, 25 bp, Homo sapien
gatcttttacgtagctggggtcaca

SEQ ID NO: 50916 - DNA, 25 bp, Homo sapien
aataactctgatcacctggcccact

SEQ ID NO: 50917 - DNA, 25 bp, Homo sapien
gtggctgaggatgcaaataactctg

SEQ ID NO: 50918 - DNA, 25 bp, Homo sapien
tcgattgacttggttctgtggaata

SEQ ID NO: 50919 - DNA, 25 bp, Homo sapien
gagatcatgcagacgtagatatctg

SEQ ID NO: 50920 - DNA, 25 bp, Homo sapien
gctacattgtgcgcaaaggagatca

SEQ ID NO: 50921 - DNA, 25 bp, Homo sapien
ggttccaagagctccaaagctggtc

SEQ ID NO: 50922 - DNA, 25 bp, Homo sapien
gtaccaggaggtcactgatgctaac

SEQ ID NO: 50923 - DNA, 25 bp, Homo sapien
atcatatgtgcgggaaataaagatc

SEQ ID NO: 50924 - DNA, 25 bp, Homo sapien
gtctcaaaatgagtggtggcatcat

SEQ ID NO: 50925 - DNA, 25 bp, Homo sapien
gtaccaggaggtcactgatgctaac

SEQ ID NO: 50926 - DNA, 25 bp, Homo sapien
gatcttttacgtagctggggtcaca

SEQ ID NO: 50927 - DNA, 25 bp, Homo sapien
cacagatgagctgcttacagcgagc

SEQ ID NO: 50928 - DNA, 25 bp, Homo sapien
gagatcatgcagacgtagatatctg

SEQ ID NO: 50929 - DNA, 25 bp, Homo sapien
aataactctgatcacctggcccact

SEQ ID NO: 50930 - DNA, 25 bp, Homo sapien
gtggctgaggatgcaaataactctg

SEQ ID NO: 50931 - DNA, 25 bp, Homo sapien
atcatatgtgcgggaaataaagatc

SEQ ID NO: 50932 - DNA, 25 bp, Homo sapien
ggttccaagagctccaaagctggtc

SEQ ID NO: 50933 - DNA, 25 bp, Homo sapien
gtctcaaaatgagtggtggcatcat

SEQ ID NO: 50934 - DNA, 25 bp, Homo sapien
tcgattgacttggttctgtggaata

SEQ ID NO: 50935 - DNA, 25 bp, Homo sapien
gctacattgtgcgcaaaggagatca

SEQ ID NO: 50936 - DNA, 25 bp, Homo sapien
cacagatgagctgcttacagcgagc

SEQ ID NO: 50937 - DNA, 25 bp, Homo sapien
gatcttttacgtagctggggtcaca

SEQ ID NO: 50938 - DNA, 25 bp, Homo sapien
aataactctgatcacctggcccact

SEQ ID NO: 50939 - DNA, 25 bp, Homo sapien
gtggctgaggatgcaaataactctg

SEQ ID NO: 50940 - DNA, 25 bp, Homo sapien
tcgattgacttggttctgtggaata

SEQ ID NO: 50941 - DNA, 25 bp, Homo sapien
gagatcatgcagacgtagatatctg

SEQ ID NO: 50942 - DNA, 25 bp, Homo sapien
gctacattgtgcgcaaaggagatca

SEQ ID NO: 50943 - DNA, 25 bp, Homo sapien
ggttccaagagctccaaagctggtc

SEQ ID NO: 50944 - DNA, 25 bp, Homo sapien
gtaccaggaggtcactgatgctaac

SEQ ID NO: 50945 - DNA, 25 bp, Homo sapien
atcatatgtgcgggaaataaagatc

SEQ ID NO: 50946 - DNA, 25 bp, Homo sapien
gtctcaaaatgagtggtggcatcat

SEQ ID NO: 50947 - DNA, 25 bp, Homo sapien
gctacattgtgcgcaaaggagatca

SEQ ID NO: 50948 - DNA, 25 bp, Homo sapien
gtaccaggaggtcactgatgctaac

SEQ ID NO: 50949 - DNA, 25 bp, Homo sapien
ggttccaagagctccaaagctggtc

SEQ ID NO: 50950 - DNA, 25 bp, Homo sapien
gatcttttacgtagctggggtcaca

SEQ ID NO: 50951 - DNA, 25 bp, Homo sapien
atcatatgtgcgggaaataaagatc

SEQ ID NO: 50952 - DNA, 25 bp, Homo sapien
aataactctgatcacctggcccact

SEQ ID NO: 50953 - DNA, 25 bp, Homo sapien
gagatcatgcagacgtagatatctg

SEQ ID NO: 50954 - DNA, 25 bp, Homo sapien
gtctcaaaatgagtggtggcatcat

SEQ ID NO: 50955 - DNA, 25 bp, Homo sapien
cacagatgagctgcttacagcgagc

SEQ ID NO: 50956 - DNA, 25 bp, Homo sapien
tcgattgacttggttctgtggaata

SEQ ID NO: 50957 - DNA, 25 bp, Homo sapien
gtggctgaggatgcaaataactctg

SEQ ID NO: 50958 - DNA, 25 bp, Homo sapien
cacagatgagctgcttacagcgagc

SEQ ID NO: 50959 - DNA, 25 bp, Homo sapien
gatcttttacgtagctggggtcaca

SEQ ID NO: 50960 - DNA, 25 bp, Homo sapien
aataactctgatcacctggcccact

SEQ ID NO: 50961 - DNA, 25 bp, Homo sapien
gtggctgaggatgcaaataactctg

SEQ ID NO: 50962 - DNA, 25 bp, Homo sapien
tcgattgacttggttctgtggaata

SEQ ID NO: 50963 - DNA, 25 bp, Homo sapien
gagatcatgcagacgtagatatctg

SEQ ID NO: 50964 - DNA, 25 bp, Homo sapien
gctacattgtgcgcaaaggagatca

SEQ ID NO: 50965 - DNA, 25 bp, Homo sapien
ggttccaagagctccaaagctggtc

SEQ ID NO: 50966 - DNA, 25 bp, Homo sapien
gtaccaggaggtcactgatgctaac

SEQ ID NO: 50967 - DNA, 25 bp, Homo sapien
atcatatgtgcgggaaataaagatc

SEQ ID NO: 50968 - DNA, 25 bp, Homo sapien
gtctcaaaatgagtggtggcatcat

SEQ ID NO: 50969 - DNA, 25 bp, Homo sapien
cacagatgagctgcttacagcgagc

SEQ ID NO: 50970 - DNA, 25 bp, Homo sapien
gtggctgaggatgcaaataactctg

SEQ ID NO: 50971 - DNA, 25 bp, Homo sapien
tcgattgacttggttctgtggaata

SEQ ID NO: 50972 - DNA, 25 bp, Homo sapien
gtaccaggaggtcactgatgctaac

SEQ ID NO: 50973 - DNA, 25 bp, Homo sapien
gtctcaaaatgagtggtggcatcat

SEQ ID NO: 50974 - DNA, 25 bp, Homo sapien
gatcttttacgtagctggggtcaca

SEQ ID NO: 50975 - DNA, 25 bp, Homo sapien
gctacattgtgcgcaaaggagatca

SEQ ID NO: 50976 - DNA, 25 bp, Homo sapien
ggttccaagagctccaaagctggtc

SEQ ID NO: 50977 - DNA, 25 bp, Homo sapien
atcatatgtgcgggaaataaagatc

SEQ ID NO: 50978 - DNA, 25 bp, Homo sapien
aataactctgatcacctggcccact

SEQ ID NO: 50979 - DNA, 25 bp, Homo sapien
gagatcatgcagacgtagatatctg

SEQ ID NO: 50980 - DNA, 25 bp, Homo sapien
cacagatgagctgcttacagcgagc

SEQ ID NO: 50981 - DNA, 25 bp, Homo sapien
gatcttttacgtagctggggtcaca

SEQ ID NO: 50982 - DNA, 25 bp, Homo sapien
aataactctgatcacctggcccact

SEQ ID NO: 50983 - DNA, 25 bp, Homo sapien
gtggctgaggatgcaaataactctg

SEQ ID NO: 50984 - DNA, 25 bp, Homo sapien
tcgattgacttggttctgtggaata

SEQ ID NO: 50985 - DNA, 25 bp, Homo sapien
gagatcatgcagacgtagatatctg

SEQ ID NO: 50986 - DNA, 25 bp, Homo sapien
gctacattgtgcgcaaaggagatca

SEQ ID NO: 50987 - DNA, 25 bp, Homo sapien
ggttccaagagctccaaagctggtc

SEQ ID NO: 50988 - DNA, 25 bp, Homo sapien
gtaccaggaggtcactgatgctaac

SEQ ID NO: 50989 - DNA, 25 bp, Homo sapien
atcatatgtgcgggaaataaagatc

SEQ ID NO: 50990 - DNA, 25 bp, Homo sapien
gtctcaaaatgagtggtggcatcat

SEQ ID NO: 50991 - DNA, 25 bp, Homo sapien
gtggctgaggatgcaaataactctg

SEQ ID NO: 50992 - DNA, 25 bp, Homo sapien
gtaccaggaggtcactgatgctaac

SEQ ID NO: 50993 - DNA, 25 bp, Homo sapien
gatcttttacgtagctggggtcaca

SEQ ID NO: 50994 - DNA, 25 bp, Homo sapien
tcgattgacttggttctgtggaata

SEQ ID NO: 50995 - DNA, 25 bp, Homo sapien
gctacattgtgcgcaaaggagatca

SEQ ID NO: 50996 - DNA, 25 bp, Homo sapien
atcatatgtgcgggaaataaagatc

SEQ ID NO: 50997 - DNA, 25 bp, Homo sapien
ggttccaagagctccaaagctggtc

SEQ ID NO: 50998 - DNA, 25 bp, Homo sapien
gagatcatgcagacgtagatatctg

SEQ ID NO: 50999 - DNA, 25 bp, Homo sapien
cacagatgagctgcttacagcgagc

SEQ ID NO: 51000 - DNA, 25 bp, Homo sapien
aataactctgatcacctggcccact

SEQ ID NO: 51001 - DNA, 25 bp, Homo sapien
gtctcaaaatgagtggtggcatcat

SEQ ID NO: 51002 - DNA, 25 bp, Homo sapien
gtctcaaaatgagtggtggcatcat

SEQ ID NO: 51003 - DNA, 25 bp, Homo sapien
gtaccaggaggtcactgatgctaac

SEQ ID NO: 51004 - DNA, 25 bp, Homo sapien
aataactctgatcacctggcccact

SEQ ID NO: 51005 - DNA, 25 bp, Homo sapien
ggttccaagagctccaaagctggtc

SEQ ID NO: 51006 - DNA, 25 bp, Homo sapien
gatcttttacgtagctggggtcaca

SEQ ID NO: 51007 - DNA, 25 bp, Homo sapien
gctacattgtgcgcaaaggagatca

SEQ ID NO: 51008 - DNA, 25 bp, Homo sapien
atcatatgtgcgggaaataaagatc

SEQ ID NO: 51009 - DNA, 25 bp, Homo sapien
cacagatgagctgcttacagcgagc

SEQ ID NO: 51010 - DNA, 25 bp, Homo sapien
gtggctgaggatgcaaataactctg

SEQ ID NO: 51011 - DNA, 25 bp, Homo sapien
gagatcatgcagacgtagatatctg

SEQ ID NO: 51012 - DNA, 25 bp, Homo sapien
tcgattgacttggttctgtggaata

SEQ ID NO: 51013 - DNA, 25 bp, Homo sapien
cacagatgagctgcttacagcgagc

SEQ ID NO: 51014 - DNA, 25 bp, Homo sapien
gatcttttacgtagctggggtcaca

SEQ ID NO: 51015 - DNA, 25 bp, Homo sapien
aataactctgatcacctggcccact

SEQ ID NO: 51016 - DNA, 25 bp, Homo sapien
gtggctgaggatgcaaataactctg

SEQ ID NO: 51017 - DNA, 25 bp, Homo sapien
tcgattgacttggttctgtggaata

SEQ ID NO: 51018 - DNA, 25 bp, Homo sapien
gagatcatgcagacgtagatatctg

SEQ ID NO: 51019 - DNA, 25 bp, Homo sapien
gctacattgtgcgcaaaggagatca

SEQ ID NO: 51020 - DNA, 25 bp, Homo sapien
ggttccaagagctccaaagctggtc

SEQ ID NO: 51021 - DNA, 25 bp, Homo sapien
gtaccaggaggtcactgatgctaac

SEQ ID NO: 51022 - DNA, 25 bp, Homo sapien
atcatatgtgcgggaaataaagatc

SEQ ID NO: 51023 - DNA, 25 bp, Homo sapien
gtctcaaaatgagtggtggcatcat

SEQ ID NO: 51024 - DNA, 25 bp, Homo sapien
gatcttttacgtagctggggtcaca

SEQ ID NO: 51025 - DNA, 25 bp, Homo sapien
gctacattgtgcgcaaaggagatca

SEQ ID NO: 51026 - DNA, 25 bp, Homo sapien
atcatatgtgcgggaaataaagatc

SEQ ID NO: 51027 - DNA, 25 bp, Homo sapien
cacagatgagctgcttacagcgagc

SEQ ID NO: 51028 - DNA, 25 bp, Homo sapien
gtggctgaggatgcaaataactctg

SEQ ID NO: 51029 - DNA, 25 bp, Homo sapien
tcgattgacttggttctgtggaata

SEQ ID NO: 51030 - DNA, 25 bp, Homo sapien
ggttccaagagctccaaagctggtc

SEQ ID NO: 51031 - DNA, 25 bp, Homo sapien
gagatcatgcagacgtagatatctg

SEQ ID NO: 51032 - DNA, 25 bp, Homo sapien
gtaccaggaggtcactgatgctaac

SEQ ID NO: 51033 - DNA, 25 bp, Homo sapien
aataactctgatcacctggcccact

SEQ ID NO: 51034 - DNA, 25 bp, Homo sapien
gtctcaaaatgagtggtggcatcat

SEQ ID NO: 51035 - DNA, 25 bp, Homo sapien
gtaccaggaggtcactgatgctaac

SEQ ID NO: 51036 - DNA, 25 bp, Homo sapien
atcatatgtgcgggaaataaagatc

SEQ ID NO: 51037 - DNA, 25 bp, Homo sapien
gtctcaaaatgagtggtggcatcat

SEQ ID NO: 51038 - DNA, 25 bp, Homo sapien
cacagatgagctgcttacagcgagc

SEQ ID NO: 51039 - DNA, 25 bp, Homo sapien
gatcttttacgtagctggggtcaca

SEQ ID NO: 51040 - DNA, 25 bp, Homo sapien
aataactctgatcacctggcccact

SEQ ID NO: 51041 - DNA, 25 bp, Homo sapien
gtggctgaggatgcaaataactctg

SEQ ID NO: 51042 - DNA, 25 bp, Homo sapien
tcgattgacttggttctgtggaata

SEQ ID NO: 51043 - DNA, 25 bp, Homo sapien
gagatcatgcagacgtagatatctg

SEQ ID NO: 51044 - DNA, 25 bp, Homo sapien
gctacattgtgcgcaaaggagatca

SEQ ID NO: 51045 - DNA, 25 bp, Homo sapien
ggttccaagagctccaaagctggtc

SEQ ID NO: 51046 - DNA, 25 bp, Homo sapien
gtggctgaggatgcaaataactctg

SEQ ID NO: 51047 - DNA, 25 bp, Homo sapien
gtaccaggaggtcactgatgctaac

SEQ ID NO: 51048 - DNA, 25 bp, Homo sapien
cacagatgagctgcttacagcgagc

SEQ ID NO: 51049 - DNA, 25 bp, Homo sapien
gtctcaaaatgagtggtggcatcat

SEQ ID NO: 51050 - DNA, 25 bp, Homo sapien
gagatcatgcagacgtagatatctg

SEQ ID NO: 51051 - DNA, 25 bp, Homo sapien
ggttccaagagctccaaagctggtc

SEQ ID NO: 51052 - DNA, 25 bp, Homo sapien
gctacattgtgcgcaaaggagatca

SEQ ID NO: 51053 - DNA, 25 bp, Homo sapien
aataactctgatcacctggcccact

SEQ ID NO: 51054 - DNA, 25 bp, Homo sapien
gatcttttacgtagctggggtcaca

SEQ ID NO: 51055 - DNA, 25 bp, Homo sapien
atcatatgtgcgggaaataaagatc

SEQ ID NO: 51056 - DNA, 25 bp, Homo sapien
tcgattgacttggttctgtggaata

SEQ ID NO: 51057 - DNA, 25 bp, Homo sapien
cacagatgagctgcttacagcgagc

SEQ ID NO: 51058 - DNA, 25 bp, Homo sapien
gatcttttacgtagctggggtcaca

SEQ ID NO: 51059 - DNA, 25 bp, Homo sapien
aataactctgatcacctggcccact

SEQ ID NO: 51060 - DNA, 25 bp, Homo sapien
gtggctgaggatgcaaataactctg

SEQ ID NO: 51061 - DNA, 25 bp, Homo sapien
tcgattgacttggttctgtggaata

SEQ ID NO: 51062 - DNA, 25 bp, Homo sapien
gagatcatgcagacgtagatatctg

SEQ ID NO: 51063 - DNA, 25 bp, Homo sapien
gctacattgtgcgcaaaggagatca

SEQ ID NO: 51064 - DNA, 25 bp, Homo sapien
ggttccaagagctccaaagctggtc

SEQ ID NO: 51065 - DNA, 25 bp, Homo sapien
gtaccaggaggtcactgatgctaac

SEQ ID NO: 51066 - DNA, 25 bp, Homo sapien
atcatatgtgcgggaaataaagatc

SEQ ID NO: 51067 - DNA, 25 bp, Homo sapien
gtctcaaaatgagtggtggcatcat

SEQ ID NO: 51068 - DNA, 25 bp, Homo sapien
gctacattgtgcgcaaaggagatca

SEQ ID NO: 51069 - DNA, 25 bp, Homo sapien
tcgattgacttggttctgtggaata

SEQ ID NO: 51070 - DNA, 25 bp, Homo sapien
gtaccaggaggtcactgatgctaac

SEQ ID NO: 51071 - DNA, 25 bp, Homo sapien
gtctcaaaatgagtggtggcatcat

SEQ ID NO: 51072 - DNA, 25 bp, Homo sapien
gtggctgaggatgcaaataactctg

SEQ ID NO: 51073 - DNA, 25 bp, Homo sapien
ggttccaagagctccaaagctggtc

SEQ ID NO: 51074 - DNA, 25 bp, Homo sapien
cacagatgagctgcttacagcgagc

SEQ ID NO: 51075 - DNA, 25 bp, Homo sapien
atcatatgtgcgggaaataaagatc

SEQ ID NO: 51076 - DNA, 25 bp, Homo sapien
aataactctgatcacctggcccact

SEQ ID NO: 51077 - DNA, 25 bp, Homo sapien
gagatcatgcagacgtagatatctg

SEQ ID NO: 51078 - DNA, 25 bp, Homo sapien
gatcttttacgtagctggggtcaca

SEQ ID NO: 51079 - DNA, 25 bp, Homo sapien
cacagatgagctgcttacagcgagc

SEQ ID NO: 51080 - DNA, 25 bp, Homo sapien
gatcttttacgtagctggggtcaca

SEQ ID NO: 51081 - DNA, 25 bp, Homo sapien
aataactctgatcacctggcccact

SEQ ID NO: 51082 - DNA, 25 bp, Homo sapien
gtggctgaggatgcaaataactctg

SEQ ID NO: 51083 - DNA, 25 bp, Homo sapien
tcgattgacttggttctgtggaata

SEQ ID NO: 51084 - DNA, 25 bp, Homo sapien
gagatcatgcagacgtagatatctg

SEQ ID NO: 51085 - DNA, 25 bp, Homo sapien
gctacattgtgcgcaaaggagatca

SEQ ID NO: 51086 - DNA, 25 bp, Homo sapien
ggttccaagagctccaaagctggtc

SEQ ID NO: 51087 - DNA, 25 bp, Homo sapien
gtaccaggaggtcactgatgctaac

SEQ ID NO: 51088 - DNA, 25 bp, Homo sapien
atcatatgtgcgggaaataaagatc

SEQ ID NO: 51089 - DNA, 25 bp, Homo sapien
gtctcaaaatgagtggtggcatcat

SEQ ID NO: 51090 - DNA, 25 bp, Homo sapien
aataactctgatcacctggcccact

SEQ ID NO: 51091 - DNA, 25 bp, Homo sapien
tcgattgacttggttctgtggaata

SEQ ID NO: 51092 - DNA, 25 bp, Homo sapien
gtctcaaaatgagtggtggcatcat

SEQ ID NO: 51093 - DNA, 25 bp, Homo sapien
gctacattgtgcgcaaaggagatca

SEQ ID NO: 51094 - DNA, 25 bp, Homo sapien
gagatcatgcagacgtagatatctg

SEQ ID NO: 51095 - DNA, 25 bp, Homo sapien
gtggctgaggatgcaaataactctg

SEQ ID NO: 51096 - DNA, 25 bp, Homo sapien
gatcttttacgtagctggggtcaca

SEQ ID NO: 51097 - DNA, 25 bp, Homo sapien
ggttccaagagctccaaagctggtc

SEQ ID NO: 51098 - DNA, 25 bp, Homo sapien
cacagatgagctgcttacagcgagc

SEQ ID NO: 51099 - DNA, 25 bp, Homo sapien
gtaccaggaggtcactgatgctaac

SEQ ID NO: 51100 - DNA, 25 bp, Homo sapien
atcatatgtgcgggaaataaagatc

SEQ ID NO: 51101 - DNA, 25 bp, Homo sapien
cacagatgagctgcttacagcgagc

SEQ ID NO: 51102 - DNA, 25 bp, Homo sapien
gatcttttacgtagctggggtcaca

SEQ ID NO: 51103 - DNA, 25 bp, Homo sapien
aataactctgatcacctggcccact

SEQ ID NO: 51104 - DNA, 25 bp, Homo sapien
gtggctgaggatgcaaataactctg

SEQ ID NO: 51105 - DNA, 25 bp, Homo sapien
tcgattgacttggttctgtggaata

SEQ ID NO: 51106 - DNA, 25 bp, Homo sapien
gagatcatgcagacgtagatatctg

SEQ ID NO: 51107 - DNA, 25 bp, Homo sapien
gctacattgtgcgcaaaggagatca

SEQ ID NO: 51108 - DNA, 25 bp, Homo sapien
ggttccaagagctccaaagctggtc

SEQ ID NO: 51109 - DNA, 25 bp, Homo sapien
gtaccaggaggtcactgatgctaac

SEQ ID NO: 51110 - DNA, 25 bp, Homo sapien
atcatatgtgcgggaaataaagatc

SEQ ID NO: 51111 - DNA, 25 bp, Homo sapien
gtctcaaaatgagtggtggcatcat

SEQ ID NO: 51112 - DNA, 25 bp, Homo sapien
gtggctgaggatgcaaataactctg

SEQ ID NO: 51113 - DNA, 25 bp, Homo sapien
gatcttttacgtagctggggtcaca

SEQ ID NO: 51114 - DNA, 25 bp, Homo sapien
gtctcaaaatgagtggtggcatcat

SEQ ID NO: 51115 - DNA, 25 bp, Homo sapien
gctacattgtgcgcaaaggagatca

SEQ ID NO: 51116 - DNA, 25 bp, Homo sapien
atcatatgtgcgggaaataaagatc

SEQ ID NO: 51117 - DNA, 25 bp, Homo sapien
ggttccaagagctccaaagctggtc

SEQ ID NO: 51118 - DNA, 25 bp, Homo sapien
tcgattgacttggttctgtggaata

SEQ ID NO: 51119 - DNA, 25 bp, Homo sapien
gagatcatgcagacgtagatatctg

SEQ ID NO: 51120 - DNA, 25 bp, Homo sapien
gtaccaggaggtcactgatgctaac

SEQ ID NO: 51121 - DNA, 25 bp, Homo sapien
cacagatgagctgcttacagcgagc

SEQ ID NO: 51122 - DNA, 25 bp, Homo sapien
aataactctgatcacctggcccact

SEQ ID NO: 51123 - DNA, 25 bp, Homo sapien
cacagatgagctgcttacagcgagc

SEQ ID NO: 51124 - DNA, 25 bp, Homo sapien
gatcttttacgtagctggggtcaca

SEQ ID NO: 51125 - DNA, 25 bp, Homo sapien
aataactctgatcacctggcccact

SEQ ID NO: 51126 - DNA, 25 bp, Homo sapien
gtggctgaggatgcaaataactctg

SEQ ID NO: 51127 - DNA, 25 bp, Homo sapien
tcgattgacttggttctgtggaata

SEQ ID NO: 51128 - DNA, 25 bp, Homo sapien
gagatcatgcagacgtagatatctg

SEQ ID NO: 51129 - DNA, 25 bp, Homo sapien
gctacattgtgcgcaaaggagatca

SEQ ID NO: 51130 - DNA, 25 bp, Homo sapien
ggttccaagagctccaaagctggtc

SEQ ID NO: 51131 - DNA, 25 bp, Homo sapien
gtaccaggaggtcactgatgctaac

SEQ ID NO: 51132 - DNA, 25 bp, Homo sapien
atcatatgtgcgggaaataaagatc

SEQ ID NO: 51133 - DNA, 25 bp, Homo sapien
gtctcaaaatgagtggtggcatcat

SEQ ID NO: 51134 - DNA, 25 bp, Homo sapien
cacagatgagctgcttacagcgagc

SEQ ID NO: 51135 - DNA, 25 bp, Homo sapien
gatcttttacgtagctggggtcaca

SEQ ID NO: 51136 - DNA, 25 bp, Homo sapien
aataactctgatcacctggcccact

SEQ ID NO: 51137 - DNA, 25 bp, Homo sapien
gtggctgaggatgcaaataactctg

SEQ ID NO: 51138 - DNA, 25 bp, Homo sapien
tcgattgacttggttctgtggaata

SEQ ID NO: 51139 - DNA, 25 bp, Homo sapien
gagatcatgcagacgtagatatctg

SEQ ID NO: 51140 - DNA, 25 bp, Homo sapien
gctacattgtgcgcaaaggagatca

SEQ ID NO: 51141 - DNA, 25 bp, Homo sapien
ggttccaagagctccaaagctggtc

SEQ ID NO: 51142 - DNA, 25 bp, Homo sapien
gtaccaggaggtcactgatgctaac

SEQ ID NO: 51143 - DNA, 25 bp, Homo sapien
atcatatgtgcgggaaataaagatc

SEQ ID NO: 51144 - DNA, 25 bp, Homo sapien
gtctcaaaatgagtggtggcatcat

SEQ ID NO: 51145 - DNA, 25 bp, Homo sapien
gagatcatgcagacgtagatatctg

SEQ ID NO: 51146 - DNA, 25 bp, Homo sapien
gatcttttacgtagctggggtcaca

SEQ ID NO: 51147 - DNA, 25 bp, Homo sapien
atcatatgtgcgggaaataaagatc

SEQ ID NO: 51148 - DNA, 25 bp, Homo sapien
tcgattgacttggttctgtggaata

SEQ ID NO: 51149 - DNA, 25 bp, Homo sapien
gctacattgtgcgcaaaggagatca

SEQ ID NO: 51150 - DNA, 25 bp, Homo sapien
gtctcaaaatgagtggtggcatcat

SEQ ID NO: 51151 - DNA, 25 bp, Homo sapien
cacagatgagctgcttacagcgagc

SEQ ID NO: 51152 - DNA, 25 bp, Homo sapien
gtggctgaggatgcaaataactctg

SEQ ID NO: 51153 - DNA, 25 bp, Homo sapien
ggttccaagagctccaaagctggtc

SEQ ID NO: 51154 - DNA, 25 bp, Homo sapien
aataactctgatcacctggcccact

SEQ ID NO: 51155 - DNA, 25 bp, Homo sapien
gtaccaggaggtcactgatgctaac

SEQ ID NO: 51156 - DNA, 25 bp, Homo sapien
cacagatgagctgcttacagcgagc

SEQ ID NO: 51157 - DNA, 25 bp, Homo sapien
gatcttttacgtagctggggtcaca

SEQ ID NO: 51158 - DNA, 25 bp, Homo sapien
aataactctgatcacctggcccact

SEQ ID NO: 51159 - DNA, 25 bp, Homo sapien
gtggctgaggatgcaaataactctg

SEQ ID NO: 51160 - DNA, 25 bp, Homo sapien
tcgattgacttggttctgtggaata

SEQ ID NO: 51161 - DNA, 25 bp, Homo sapien
gagatcatgcagacgtagatatctg

SEQ ID NO: 51162 - DNA, 25 bp, Homo sapien
gctacattgtgcgcaaaggagatca

SEQ ID NO: 51163 - DNA, 25 bp, Homo sapien
ggttccaagagctccaaagctggtc

SEQ ID NO: 51164 - DNA, 25 bp, Homo sapien
gtaccaggaggtcactgatgctaac

SEQ ID NO: 51165 - DNA, 25 bp, Homo sapien
atcatatgtgcgggaaataaagatc

SEQ ID NO: 51166 - DNA, 25 bp, Homo sapien
gtctcaaaatgagtggtggcatcat

SEQ ID NO: 51167 - DNA, 25 bp, Homo sapien
tcgattgacttggttctgtggaata

SEQ ID NO: 51168 - DNA, 25 bp, Homo sapien
gtctcaaaatgagtggtggcatcat

SEQ ID NO: 51169 - DNA, 25 bp, Homo sapien
gtggctgaggatgcaaataactctg

SEQ ID NO: 51170 - DNA, 25 bp, Homo sapien
cacagatgagctgcttacagcgagc

SEQ ID NO: 51171 - DNA, 25 bp, Homo sapien
gatcttttacgtagctggggtcaca

SEQ ID NO: 51172 - DNA, 25 bp, Homo sapien
aataactctgatcacctggcccact

SEQ ID NO: 51173 - DNA, 25 bp, Homo sapien
gtaccaggaggtcactgatgctaac

SEQ ID NO: 51174 - DNA, 25 bp, Homo sapien
gctacattgtgcgcaaaggagatca

SEQ ID NO: 51175 - DNA, 25 bp, Homo sapien
ggttccaagagctccaaagctggtc

SEQ ID NO: 51176 - DNA, 25 bp, Homo sapien
atcatatgtgcgggaaataaagatc

SEQ ID NO: 51177 - DNA, 25 bp, Homo sapien
gagatcatgcagacgtagatatctg

SEQ ID NO: 51178 - DNA, 25 bp, Homo sapien
cacagatgagctgcttacagcgagc

SEQ ID NO: 51179 - DNA, 25 bp, Homo sapien
gatcttttacgtagctggggtcaca

SEQ ID NO: 51180 - DNA, 25 bp, Homo sapien
aataactctgatcacctggcccact

SEQ ID NO: 51181 - DNA, 25 bp, Homo sapien
gtggctgaggatgcaaataactctg

SEQ ID NO: 51182 - DNA, 25 bp, Homo sapien
tcgattgacttggttctgtggaata

SEQ ID NO: 51183 - DNA, 25 bp, Homo sapien
gagatcatgcagacgtagatatctg

SEQ ID NO: 51184 - DNA, 25 bp, Homo sapien
gctacattgtgcgcaaaggagatca

SEQ ID NO: 51185 - DNA, 25 bp, Homo sapien
ggttccaagagctccaaagctggtc

SEQ ID NO: 51186 - DNA, 25 bp, Homo sapien
gtaccaggaggtcactgatgctaac

SEQ ID NO: 51187 - DNA, 25 bp, Homo sapien
atcatatgtgcgggaaataaagatc

SEQ ID NO: 51188 - DNA, 25 bp, Homo sapien
gtctcaaaatgagtggtggcatcat

SEQ ID NO: 51189 - DNA, 25 bp, Homo sapien
aataactctgatcacctggcccact

SEQ ID NO: 51190 - DNA, 25 bp, Homo sapien
tcgattgacttggttctgtggaata

SEQ ID NO: 51191 - DNA, 25 bp, Homo sapien
gagatcatgcagacgtagatatctg

SEQ ID NO: 51192 - DNA, 25 bp, Homo sapien
gctacattgtgcgcaaaggagatca

SEQ ID NO: 51193 - DNA, 25 bp, Homo sapien
cacagatgagctgcttacagcgagc

SEQ ID NO: 51194 - DNA, 25 bp, Homo sapien
gtggctgaggatgcaaataactctg

SEQ ID NO: 51195 - DNA, 25 bp, Homo sapien
gatcttttacgtagctggggtcaca

SEQ ID NO: 51196 - DNA, 25 bp, Homo sapien
ggttccaagagctccaaagctggtc

SEQ ID NO: 51197 - DNA, 25 bp, Homo sapien
gtctcaaaatgagtggtggcatcat

SEQ ID NO: 51198 - DNA, 25 bp, Homo sapien
atcatatgtgcgggaaataaagatc

SEQ ID NO: 51199 - DNA, 25 bp, Homo sapien
gtaccaggaggtcactgatgctaac

SEQ ID NO: 51200 - DNA, 25 bp, Homo sapien
cacagatgagctgcttacagcgagc

SEQ ID NO: 51201 - DNA, 25 bp, Homo sapien
gatcttttacgtagctggggtcaca

SEQ ID NO: 51202 - DNA, 25 bp, Homo sapien
aataactctgatcacctggcccact

SEQ ID NO: 51203 - DNA, 25 bp, Homo sapien
gtggctgaggatgcaaataactctg

SEQ ID NO: 51204 - DNA, 25 bp, Homo sapien
tcgattgacttggttctgtggaata

SEQ ID NO: 51205 - DNA, 25 bp, Homo sapien
gagatcatgcagacgtagatatctg

SEQ ID NO: 51206 - DNA, 25 bp, Homo sapien
gctacattgtgcgcaaaggagatca

SEQ ID NO: 51207 - DNA, 25 bp, Homo sapien
ggttccaagagctccaaagctggtc

SEQ ID NO: 51208 - DNA, 25 bp, Homo sapien
gtaccaggaggtcactgatgctaac

SEQ ID NO: 51209 - DNA, 25 bp, Homo sapien
atcatatgtgcgggaaataaagatc

SEQ ID NO: 51210 - DNA, 25 bp, Homo sapien
gtctcaaaatgagtggtggcatcat

SEQ ID NO: 51211 - DNA, 25 bp, Homo sapien
gtctcaaaatgagtggtggcatcat

SEQ ID NO: 51212 - DNA, 25 bp, Homo sapien
cacagatgagctgcttacagcgagc

SEQ ID NO: 51213 - DNA, 25 bp, Homo sapien
gctacattgtgcgcaaaggagatca

SEQ ID NO: 51214 - DNA, 25 bp, Homo sapien
ggttccaagagctccaaagctggtc

SEQ ID NO: 51215 - DNA, 25 bp, Homo sapien
gtggctgaggatgcaaataactctg

SEQ ID NO: 51216 - DNA, 25 bp, Homo sapien
aataactctgatcacctggcccact

SEQ ID NO: 51217 - DNA, 25 bp, Homo sapien
atcatatgtgcgggaaataaagatc

SEQ ID NO: 51218 - DNA, 25 bp, Homo sapien
gatcttttacgtagctggggtcaca

SEQ ID NO: 51219 - DNA, 25 bp, Homo sapien
gtaccaggaggtcactgatgctaac

SEQ ID NO: 51220 - DNA, 25 bp, Homo sapien
gagatcatgcagacgtagatatctg

SEQ ID NO: 51221 - DNA, 25 bp, Homo sapien
tcgattgacttggttctgtggaata

SEQ ID NO: 51222 - DNA, 25 bp, Homo sapien
cacagatgagctgcttacagcgagc

SEQ ID NO: 51223 - DNA, 25 bp, Homo sapien
gatcttttacgtagctggggtcaca

SEQ ID NO: 51224 - DNA, 25 bp, Homo sapien
aataactctgatcacctggcccact

SEQ ID NO: 51225 - DNA, 25 bp, Homo sapien
gtggctgaggatgcaaataactctg

SEQ ID NO: 51226 - DNA, 25 bp, Homo sapien
tcgattgacttggttctgtggaata

SEQ ID NO: 51227 - DNA, 25 bp, Homo sapien
gagatcatgcagacgtagatatctg

SEQ ID NO: 51228 - DNA, 25 bp, Homo sapien
gctacattgtgcgcaaaggagatca

SEQ ID NO: 51229 - DNA, 25 bp, Homo sapien
ggttccaagagctccaaagctggtc

SEQ ID NO: 51230 - DNA, 25 bp, Homo sapien
gtaccaggaggtcactgatgctaac

SEQ ID NO: 51231 - DNA, 25 bp, Homo sapien
atcatatgtgcgggaaataaagatc

SEQ ID NO: 51232 - DNA, 25 bp, Homo sapien
gtctcaaaatgagtggtggcatcat

SEQ ID NO: 51233 - DNA, 25 bp, Homo sapien
gtctcaaaatgagtggtggcatcat

SEQ ID NO: 51234 - DNA, 25 bp, Homo sapien
atcatatgtgcgggaaataaagatc

SEQ ID NO: 51235 - DNA, 25 bp, Homo sapien
cacagatgagctgcttacagcgagc

SEQ ID NO: 51236 - DNA, 25 bp, Homo sapien
tcgattgacttggttctgtggaata

SEQ ID NO: 51237 - DNA, 25 bp, Homo sapien
gtggctgaggatgcaaataactctg

SEQ ID NO: 51238 - DNA, 25 bp, Homo sapien
gctacattgtgcgcaaaggagatca

SEQ ID NO: 51239 - DNA, 25 bp, Homo sapien
gatcttttacgtagctggggtcaca

SEQ ID NO: 51240 - DNA, 25 bp, Homo sapien
gtaccaggaggtcactgatgctaac

SEQ ID NO: 51241 - DNA, 25 bp, Homo sapien
aataactctgatcacctggcccact

SEQ ID NO: 51242 - DNA, 25 bp, Homo sapien
ggttccaagagctccaaagctggtc

SEQ ID NO: 51243 - DNA, 25 bp, Homo sapien
gagatcatgcagacgtagatatctg

SEQ ID NO: 51244 - DNA, 25 bp, Homo sapien
tcgattgacttggttctgtggaata

SEQ ID NO: 51245 - DNA, 25 bp, Homo sapien
ggttccaagagctccaaagctggtc

SEQ ID NO: 51246 - DNA, 25 bp, Homo sapien
gtctcaaaatgagtggtggcatcat

SEQ ID NO: 51247 - DNA, 25 bp, Homo sapien
gctacattgtgcgcaaaggagatca

SEQ ID NO: 51248 - DNA, 25 bp, Homo sapien
gatcttttacgtagctggggtcaca

SEQ ID NO: 51249 - DNA, 25 bp, Homo sapien
aataactctgatcacctggcccact

SEQ ID NO: 51250 - DNA, 25 bp, Homo sapien
gtggctgaggatgcaaataactctg

SEQ ID NO: 51251 - DNA, 25 bp, Homo sapien
gtaccaggaggtcactgatgctaac

SEQ ID NO: 51252 - DNA, 25 bp, Homo sapien
cacagatgagctgcttacagcgagc

SEQ ID NO: 51253 - DNA, 25 bp, Homo sapien
atcatatgtgcgggaaataaagatc

SEQ ID NO: 51254 - DNA, 25 bp, Homo sapien
gagatcatgcagacgtagatatctg

SEQ ID NO: 51255 - DNA, 25 bp, Homo sapien
cacagatgagctgcttacagcgagc

SEQ ID NO: 51256 - DNA, 25 bp, Homo sapien
gatcttttacgtagctggggtcaca

SEQ ID NO: 51257 - DNA, 25 bp, Homo sapien
aataactctgatcacctggcccact

SEQ ID NO: 51258 - DNA, 25 bp, Homo sapien
gtggctgaggatgcaaataactctg

SEQ ID NO: 51259 - DNA, 25 bp, Homo sapien
tcgattgacttggttctgtggaata

SEQ ID NO: 51260 - DNA, 25 bp, Homo sapien
gagatcatgcagacgtagatatctg

SEQ ID NO: 51261 - DNA, 25 bp, Homo sapien
gctacattgtgcgcaaaggagatca

SEQ ID NO: 51262 - DNA, 25 bp, Homo sapien
ggttccaagagctccaaagctggtc

SEQ ID NO: 51263 - DNA, 25 bp, Homo sapien
gtaccaggaggtcactgatgctaac

SEQ ID NO: 51264 - DNA, 25 bp, Homo sapien
atcatatgtgcgggaaataaagatc

SEQ ID NO: 51265 - DNA, 25 bp, Homo sapien
gtctcaaaatgagtggtggcatcat

SEQ ID NO: 51266 - DNA, 25 bp, Homo sapien
aataactctgatcacctggcccact

SEQ ID NO: 51267 - DNA, 25 bp, Homo sapien
tcgattgacttggttctgtggaata

SEQ ID NO: 51268 - DNA, 25 bp, Homo sapien
gatcttttacgtagctggggtcaca

SEQ ID NO: 51269 - DNA, 25 bp, Homo sapien
cacagatgagctgcttacagcgagc

SEQ ID NO: 51270 - DNA, 25 bp, Homo sapien
gtctcaaaatgagtggtggcatcat

SEQ ID NO: 51271 - DNA, 25 bp, Homo sapien
ggttccaagagctccaaagctggtc

SEQ ID NO: 51272 - DNA, 25 bp, Homo sapien
atcatatgtgcgggaaataaagatc

SEQ ID NO: 51273 - DNA, 25 bp, Homo sapien
gagatcatgcagacgtagatatctg

SEQ ID NO: 51274 - DNA, 25 bp, Homo sapien
gctacattgtgcgcaaaggagatca

SEQ ID NO: 51275 - DNA, 25 bp, Homo sapien
gtggctgaggatgcaaataactctg

SEQ ID NO: 51276 - DNA, 25 bp, Homo sapien
gtaccaggaggtcactgatgctaac

SEQ ID NO: 51277 - DNA, 25 bp, Homo sapien
cacagatgagctgcttacagcgagc

SEQ ID NO: 51278 - DNA, 25 bp, Homo sapien
gatcttttacgtagctggggtcaca

SEQ ID NO: 51279 - DNA, 25 bp, Homo sapien
aataactctgatcacctggcccact

SEQ ID NO: 51280 - DNA, 25 bp, Homo sapien
gtggctgaggatgcaaataactctg

SEQ ID NO: 51281 - DNA, 25 bp, Homo sapien
tcgattgacttggttctgtggaata

SEQ ID NO: 51282 - DNA, 25 bp, Homo sapien
gagatcatgcagacgtagatatctg

SEQ ID NO: 51283 - DNA, 25 bp, Homo sapien
gctacattgtgcgcaaaggagatca

SEQ ID NO: 51284 - DNA, 25 bp, Homo sapien
ggttccaagagctccaaagctggtc

SEQ ID NO: 51285 - DNA, 25 bp, Homo sapien
gtaccaggaggtcactgatgctaac

SEQ ID NO: 51286 - DNA, 25 bp, Homo sapien
atcatatgtgcgggaaataaagatc

SEQ ID NO: 51287 - DNA, 25 bp, Homo sapien
gtctcaaaatgagtggtggcatcat

SEQ ID NO: 51288 - DNA, 25 bp, Homo sapien
gtctcaaaatgagtggtggcatcat

SEQ ID NO: 51289 - DNA, 25 bp, Homo sapien
gtaccaggaggtcactgatgctaac

SEQ ID NO: 51290 - DNA, 25 bp, Homo sapien
cacagatgagctgcttacagcgagc

SEQ ID NO: 51291 - DNA, 25 bp, Homo sapien
aataactctgatcacctggcccact

SEQ ID NO: 51292 - DNA, 25 bp, Homo sapien
gagatcatgcagacgtagatatctg

SEQ ID NO: 51293 - DNA, 25 bp, Homo sapien
atcatatgtgcgggaaataaagatc

SEQ ID NO: 51294 - DNA, 25 bp, Homo sapien
tcgattgacttggttctgtggaata

SEQ ID NO: 51295 - DNA, 25 bp, Homo sapien
gtggctgaggatgcaaataactctg

SEQ ID NO: 51296 - DNA, 25 bp, Homo sapien
gatcttttacgtagctggggtcaca

SEQ ID NO: 51297 - DNA, 25 bp, Homo sapien
gctacattgtgcgcaaaggagatca

SEQ ID NO: 51298 - DNA, 25 bp, Homo sapien
ggttccaagagctccaaagctggtc

SEQ ID NO: 51299 - DNA, 25 bp, Homo sapien
cacagatgagctgcttacagcgagc

SEQ ID NO: 51300 - DNA, 25 bp, Homo sapien
gatcttttacgtagctggggtcaca

SEQ ID NO: 51301 - DNA, 25 bp, Homo sapien
aataactctgatcacctggcccact

SEQ ID NO: 51302 - DNA, 25 bp, Homo sapien
gtggctgaggatgcaaataactctg

SEQ ID NO: 51303 - DNA, 25 bp, Homo sapien
tcgattgacttggttctgtggaata

SEQ ID NO: 51304 - DNA, 25 bp, Homo sapien
gagatcatgcagacgtagatatctg

SEQ ID NO: 51305 - DNA, 25 bp, Homo sapien
gctacattgtgcgcaaaggagatca

SEQ ID NO: 51306 - DNA, 25 bp, Homo sapien
ggttccaagagctccaaagctggtc

SEQ ID NO: 51307 - DNA, 25 bp, Homo sapien
gtaccaggaggtcactgatgctaac

SEQ ID NO: 51308 - DNA, 25 bp, Homo sapien
atcatatgtgcgggaaataaagatc

SEQ ID NO: 51309 - DNA, 25 bp, Homo sapien
gtctcaaaatgagtggtggcatcat

SEQ ID NO: 51310 - DNA, 25 bp, Homo sapien
agtagaggctctgtcaagtcaatac

SEQ ID NO: 51311 - DNA, 25 bp, Homo sapien
ctatgtctggggtttggttagaatt

SEQ ID NO: 51312 - DNA, 25 bp, Homo sapien
aacagaatgtggtaactgccaatgc

SEQ ID NO: 51313 - DNA, 25 bp, Homo sapien
cagcagcagcacatagctacactga

SEQ ID NO: 51314 - DNA, 25 bp, Homo sapien
ttggagccattttgagacagaagta

SEQ ID NO: 51315 - DNA, 25 bp, Homo sapien
gatgacacacaacctgtatggatcc

SEQ ID NO: 51316 - DNA, 25 bp, Homo sapien
ggatgctgtcccaaaccgtggaata

SEQ ID NO: 51317 - DNA, 25 bp, Homo sapien
tgaacctcaagaggacagatgacac

SEQ ID NO: 51318 - DNA, 25 bp, Homo sapien
aagaagccacgcctgagatacaaaa

SEQ ID NO: 51319 - DNA, 25 bp, Homo sapien
atagggaaaacttccggatgctgtc

SEQ ID NO: 51320 - DNA, 25 bp, Homo sapien
ctcaagttgtctgtgtcggtatccc

SEQ ID NO: 51321 - DNA, 25 bp, Homo sapien
aacagaatgtggtaactgccaatgc

SEQ ID NO: 51322 - DNA, 25 bp, Homo sapien
ctcaagttgtctgtgtcggtatccc

SEQ ID NO: 51323 - DNA, 25 bp, Homo sapien
cagcagcagcacatagctacactga

SEQ ID NO: 51324 - DNA, 25 bp, Homo sapien
gatgacacacaacctgtatggatcc

SEQ ID NO: 51325 - DNA, 25 bp, Homo sapien
tgaacctcaagaggacagatgacac

SEQ ID NO: 51326 - DNA, 25 bp, Homo sapien
ggatgctgtcccaaaccgtggaata

SEQ ID NO: 51327 - DNA, 25 bp, Homo sapien
atagggaaaacttccggatgctgtc

SEQ ID NO: 51328 - DNA, 25 bp, Homo sapien
ctatgtctggggtttggttagaatt

SEQ ID NO: 51329 - DNA, 25 bp, Homo sapien
aagaagccacgcctgagatacaaaa

SEQ ID NO: 51330 - DNA, 25 bp, Homo sapien
agtagaggctctgtcaagtcaatac

SEQ ID NO: 51331 - DNA, 25 bp, Homo sapien
ttggagccattttgagacagaagta

SEQ ID NO: 51332 - DNA, 25 bp, Homo sapien
cagcagcagcacatagctacactga

SEQ ID NO: 51333 - DNA, 25 bp, Homo sapien
tgaacctcaagaggacagatgacac

SEQ ID NO: 51334 - DNA, 25 bp, Homo sapien
agtagaggctctgtcaagtcaatac

SEQ ID NO: 51335 - DNA, 25 bp, Homo sapien
aacagaatgtggtaactgccaatgc

SEQ ID NO: 51336 - DNA, 25 bp, Homo sapien
atagggaaaacttccggatgctgtc

SEQ ID NO: 51337 - DNA, 25 bp, Homo sapien
aagaagccacgcctgagatacaaaa

SEQ ID NO: 51338 - DNA, 25 bp, Homo sapien
ctcaagttgtctgtgtcggtatccc

SEQ ID NO: 51339 - DNA, 25 bp, Homo sapien
ggatgctgtcccaaaccgtggaata

SEQ ID NO: 51340 - DNA, 25 bp, Homo sapien
ttggagccattttgagacagaagta

SEQ ID NO: 51341 - DNA, 25 bp, Homo sapien
gatgacacacaacctgtatggatcc

SEQ ID NO: 51342 - DNA, 25 bp, Homo sapien
ctatgtctggggtttggttagaatt

SEQ ID NO: 51343 - DNA, 25 bp, Homo sapien
aacagaatgtggtaactgccaatgc

SEQ ID NO: 51344 - DNA, 25 bp, Homo sapien
ctcaagttgtctgtgtcggtatccc

SEQ ID NO: 51345 - DNA, 25 bp, Homo sapien
cagcagcagcacatagctacactga

SEQ ID NO: 51346 - DNA, 25 bp, Homo sapien
gatgacacacaacctgtatggatcc

SEQ ID NO: 51347 - DNA, 25 bp, Homo sapien
tgaacctcaagaggacagatgacac

SEQ ID NO: 51348 - DNA, 25 bp, Homo sapien
ggatgctgtcccaaaccgtggaata

SEQ ID NO: 51349 - DNA, 25 bp, Homo sapien
atagggaaaacttccggatgctgtc

SEQ ID NO: 51350 - DNA, 25 bp, Homo sapien
ctatgtctggggtttggttagaatt

SEQ ID NO: 51351 - DNA, 25 bp, Homo sapien
aagaagccacgcctgagatacaaaa

SEQ ID NO: 51352 - DNA, 25 bp, Homo sapien
agtagaggctctgtcaagtcaatac

SEQ ID NO: 51353 - DNA, 25 bp, Homo sapien
ttggagccattttgagacagaagta

SEQ ID NO: 51354 - DNA, 25 bp, Homo sapien
ctcaagttgtctgtgtcggtatccc

SEQ ID NO: 51355 - DNA, 25 bp, Homo sapien
tgaacctcaagaggacagatgacac

SEQ ID NO: 51356 - DNA, 25 bp, Homo sapien
aagaagccacgcctgagatacaaaa

SEQ ID NO: 51357 - DNA, 25 bp, Homo sapien
gatgacacacaacctgtatggatcc

SEQ ID NO: 51358 - DNA, 25 bp, Homo sapien
agtagaggctctgtcaagtcaatac

SEQ ID NO: 51359 - DNA, 25 bp, Homo sapien
atagggaaaacttccggatgctgtc

SEQ ID NO: 51360 - DNA, 25 bp, Homo sapien
cagcagcagcacatagctacactga

SEQ ID NO: 51361 - DNA, 25 bp, Homo sapien
aacagaatgtggtaactgccaatgc

SEQ ID NO: 51362 - DNA, 25 bp, Homo sapien
ttggagccattttgagacagaagta

SEQ ID NO: 51363 - DNA, 25 bp, Homo sapien
ggatgctgtcccaaaccgtggaata

SEQ ID NO: 51364 - DNA, 25 bp, Homo sapien
ctatgtctggggtttggttagaatt

SEQ ID NO: 51365 - DNA, 25 bp, Homo sapien
aacagaatgtggtaactgccaatgc

SEQ ID NO: 51366 - DNA, 25 bp, Homo sapien
ctcaagttgtctgtgtcggtatccc

SEQ ID NO: 51367 - DNA, 25 bp, Homo sapien
cagcagcagcacatagctacactga

SEQ ID NO: 51368 - DNA, 25 bp, Homo sapien
gatgacacacaacctgtatggatcc

SEQ ID NO: 51369 - DNA, 25 bp, Homo sapien
tgaacctcaagaggacagatgacac

SEQ ID NO: 51370 - DNA, 25 bp, Homo sapien
ggatgctgtcccaaaccgtggaata

SEQ ID NO: 51371 - DNA, 25 bp, Homo sapien
atagggaaaacttccggatgctgtc

SEQ ID NO: 51372 - DNA, 25 bp, Homo sapien
ctatgtctggggtttggttagaatt

SEQ ID NO: 51373 - DNA, 25 bp, Homo sapien
aagaagccacgcctgagatacaaaa

SEQ ID NO: 51374 - DNA, 25 bp, Homo sapien
agtagaggctctgtcaagtcaatac

SEQ ID NO: 51375 - DNA, 25 bp, Homo sapien
ttggagccattttgagacagaagta

SEQ ID NO: 51376 - DNA, 25 bp, Homo sapien
aacagaatgtggtaactgccaatgc

SEQ ID NO: 51377 - DNA, 25 bp, Homo sapien
ctcaagttgtctgtgtcggtatccc

SEQ ID NO: 51378 - DNA, 25 bp, Homo sapien
cagcagcagcacatagctacactga

SEQ ID NO: 51379 - DNA, 25 bp, Homo sapien
gatgacacacaacctgtatggatcc

SEQ ID NO: 51380 - DNA, 25 bp, Homo sapien
tgaacctcaagaggacagatgacac

SEQ ID NO: 51381 - DNA, 25 bp, Homo sapien
ggatgctgtcccaaaccgtggaata

SEQ ID NO: 51382 - DNA, 25 bp, Homo sapien
atagggaaaacttccggatgctgtc

SEQ ID NO: 51383 - DNA, 25 bp, Homo sapien
ctatgtctggggtttggttagaatt

SEQ ID NO: 51384 - DNA, 25 bp, Homo sapien
aagaagccacgcctgagatacaaaa

SEQ ID NO: 51385 - DNA, 25 bp, Homo sapien
agtagaggctctgtcaagtcaatac

SEQ ID NO: 51386 - DNA, 25 bp, Homo sapien
ttggagccattttgagacagaagta

SEQ ID NO: 51387 - DNA, 25 bp, Homo sapien
ggatgctgtcccaaaccgtggaata

SEQ ID NO: 51388 - DNA, 25 bp, Homo sapien
aagaagccacgcctgagatacaaaa

SEQ ID NO: 51389 - DNA, 25 bp, Homo sapien
ttggagccattttgagacagaagta

SEQ ID NO: 51390 - DNA, 25 bp, Homo sapien
aacagaatgtggtaactgccaatgc

SEQ ID NO: 51391 - DNA, 25 bp, Homo sapien
gatgacacacaacctgtatggatcc

SEQ ID NO: 51392 - DNA, 25 bp, Homo sapien
cagcagcagcacatagctacactga

SEQ ID NO: 51393 - DNA, 25 bp, Homo sapien
agtagaggctctgtcaagtcaatac

SEQ ID NO: 51394 - DNA, 25 bp, Homo sapien
ctcaagttgtctgtgtcggtatccc

SEQ ID NO: 51395 - DNA, 25 bp, Homo sapien
tgaacctcaagaggacagatgacac

SEQ ID NO: 51396 - DNA, 25 bp, Homo sapien
atagggaaaacttccggatgctgtc

SEQ ID NO: 51397 - DNA, 25 bp, Homo sapien
ctatgtctggggtttggttagaatt

SEQ ID NO: 51398 - DNA, 25 bp, Homo sapien
aacagaatgtggtaactgccaatgc

SEQ ID NO: 51399 - DNA, 25 bp, Homo sapien
ctcaagttgtctgtgtcggtatccc

SEQ ID NO: 51400 - DNA, 25 bp, Homo sapien
cagcagcagcacatagctacactga

SEQ ID NO: 51401 - DNA, 25 bp, Homo sapien
gatgacacacaacctgtatggatcc

SEQ ID NO: 51402 - DNA, 25 bp, Homo sapien
tgaacctcaagaggacagatgacac

SEQ ID NO: 51403 - DNA, 25 bp, Homo sapien
ggatgctgtcccaaaccgtggaata

SEQ ID NO: 51404 - DNA, 25 bp, Homo sapien
atagggaaaacttccggatgctgtc

SEQ ID NO: 51405 - DNA, 25 bp, Homo sapien
ctatgtctggggtttggttagaatt

SEQ ID NO: 51406 - DNA, 25 bp, Homo sapien
aagaagccacgcctgagatacaaaa

SEQ ID NO: 51407 - DNA, 25 bp, Homo sapien
agtagaggctctgtcaagtcaatac

SEQ ID NO: 51408 - DNA, 25 bp, Homo sapien
ttggagccattttgagacagaagta

SEQ ID NO: 51409 - DNA, 25 bp, Homo sapien
agtagaggctctgtcaagtcaatac

SEQ ID NO: 51410 - DNA, 25 bp, Homo sapien
cagcagcagcacatagctacactga

SEQ ID NO: 51411 - DNA, 25 bp, Homo sapien
tgaacctcaagaggacagatgacac

SEQ ID NO: 51412 - DNA, 25 bp, Homo sapien
atagggaaaacttccggatgctgtc

SEQ ID NO: 51413 - DNA, 25 bp, Homo sapien
aagaagccacgcctgagatacaaaa

SEQ ID NO: 51414 - DNA, 25 bp, Homo sapien
ctatgtctggggtttggttagaatt

SEQ ID NO: 51415 - DNA, 25 bp, Homo sapien
aacagaatgtggtaactgccaatgc

SEQ ID NO: 51416 - DNA, 25 bp, Homo sapien
ttggagccattttgagacagaagta

SEQ ID NO: 51417 - DNA, 25 bp, Homo sapien
ctcaagttgtctgtgtcggtatccc

SEQ ID NO: 51418 - DNA, 25 bp, Homo sapien
ggatgctgtcccaaaccgtggaata

SEQ ID NO: 51419 - DNA, 25 bp, Homo sapien
gatgacacacaacctgtatggatcc

SEQ ID NO: 51420 - DNA, 25 bp, Homo sapien
aacagaatgtggtaactgccaatgc

SEQ ID NO: 51421 - DNA, 25 bp, Homo sapien
ctcaagttgtctgtgtcggtatccc

SEQ ID NO: 51422 - DNA, 25 bp, Homo sapien
cagcagcagcacatagctacactga

SEQ ID NO: 51423 - DNA, 25 bp, Homo sapien
gatgacacacaacctgtatggatcc

SEQ ID NO: 51424 - DNA, 25 bp, Homo sapien
tgaacctcaagaggacagatgacac

SEQ ID NO: 51425 - DNA, 25 bp, Homo sapien
ggatgctgtcccaaaccgtggaata

SEQ ID NO: 51426 - DNA, 25 bp, Homo sapien
atagggaaaacttccggatgctgtc

SEQ ID NO: 51427 - DNA, 25 bp, Homo sapien
ctatgtctggggtttggttagaatt

SEQ ID NO: 51428 - DNA, 25 bp, Homo sapien
aagaagccacgcctgagatacaaaa

SEQ ID NO: 51429 - DNA, 25 bp, Homo sapien
agtagaggctctgtcaagtcaatac

SEQ ID NO: 51430 - DNA, 25 bp, Homo sapien
ttggagccattttgagacagaagta

SEQ ID NO: 51431 - DNA, 25 bp, Homo sapien
ctatgtctggggtttggttagaatt

SEQ ID NO: 51432 - DNA, 25 bp, Homo sapien
tgaacctcaagaggacagatgacac

SEQ ID NO: 51433 - DNA, 25 bp, Homo sapien
cagcagcagcacatagctacactga

SEQ ID NO: 51434 - DNA, 25 bp, Homo sapien
aagaagccacgcctgagatacaaaa

SEQ ID NO: 51435 - DNA, 25 bp, Homo sapien
aacagaatgtggtaactgccaatgc

SEQ ID NO: 51436 - DNA, 25 bp, Homo sapien
ctcaagttgtctgtgtcggtatccc

SEQ ID NO: 51437 - DNA, 25 bp, Homo sapien
atagggaaaacttccggatgctgtc

SEQ ID NO: 51438 - DNA, 25 bp, Homo sapien
gatgacacacaacctgtatggatcc

SEQ ID NO: 51439 - DNA, 25 bp, Homo sapien
ggatgctgtcccaaaccgtggaata

SEQ ID NO: 51440 - DNA, 25 bp, Homo sapien
agtagaggctctgtcaagtcaatac

SEQ ID NO: 51441 - DNA, 25 bp, Homo sapien
ttggagccattttgagacagaagta

SEQ ID NO: 51442 - DNA, 25 bp, Homo sapien
aacagaatgtggtaactgccaatgc

SEQ ID NO: 51443 - DNA, 25 bp, Homo sapien
ctcaagttgtctgtgtcggtatccc

SEQ ID NO: 51444 - DNA, 25 bp, Homo sapien
cagcagcagcacatagctacactga

SEQ ID NO: 51445 - DNA, 25 bp, Homo sapien
gatgacacacaacctgtatggatcc

SEQ ID NO: 51446 - DNA, 25 bp, Homo sapien
tgaacctcaagaggacagatgacac

SEQ ID NO: 51447 - DNA, 25 bp, Homo sapien
ggatgctgtcccaaaccgtggaata

SEQ ID NO: 51448 - DNA, 25 bp, Homo sapien
atagggaaaacttccggatgctgtc

SEQ ID NO: 51449 - DNA, 25 bp, Homo sapien
ctatgtctggggtttggttagaatt

SEQ ID NO: 51450 - DNA, 25 bp, Homo sapien
aagaagccacgcctgagatacaaaa

SEQ ID NO: 51451 - DNA, 25 bp, Homo sapien
agtagaggctctgtcaagtcaatac

SEQ ID NO: 51452 - DNA, 25 bp, Homo sapien
ttggagccattttgagacagaagta

SEQ ID NO: 51453 - DNA, 25 bp, Homo sapien
ctatgtctggggtttggttagaatt

SEQ ID NO: 51454 - DNA, 25 bp, Homo sapien
gatgacacacaacctgtatggatcc

SEQ ID NO: 51455 - DNA, 25 bp, Homo sapien
aacagaatgtggtaactgccaatgc

SEQ ID NO: 51456 - DNA, 25 bp, Homo sapien
ctcaagttgtctgtgtcggtatccc

SEQ ID NO: 51457 - DNA, 25 bp, Homo sapien
atagggaaaacttccggatgctgtc

SEQ ID NO: 51458 - DNA, 25 bp, Homo sapien
tgaacctcaagaggacagatgacac

SEQ ID NO: 51459 - DNA, 25 bp, Homo sapien
agtagaggctctgtcaagtcaatac

SEQ ID NO: 51460 - DNA, 25 bp, Homo sapien
cagcagcagcacatagctacactga

SEQ ID NO: 51461 - DNA, 25 bp, Homo sapien
ggatgctgtcccaaaccgtggaata

SEQ ID NO: 51462 - DNA, 25 bp, Homo sapien
ttggagccattttgagacagaagta

SEQ ID NO: 51463 - DNA, 25 bp, Homo sapien
aagaagccacgcctgagatacaaaa

SEQ ID NO: 51464 - DNA, 25 bp, Homo sapien
aacagaatgtggtaactgccaatgc

SEQ ID NO: 51465 - DNA, 25 bp, Homo sapien
ctcaagttgtctgtgtcggtatccc

SEQ ID NO: 51466 - DNA, 25 bp, Homo sapien
cagcagcagcacatagctacactga

SEQ ID NO: 51467 - DNA, 25 bp, Homo sapien
gatgacacacaacctgtatggatcc

SEQ ID NO: 51468 - DNA, 25 bp, Homo sapien
tgaacctcaagaggacagatgacac

SEQ ID NO: 51469 - DNA, 25 bp, Homo sapien
ggatgctgtcccaaaccgtggaata

SEQ ID NO: 51470 - DNA, 25 bp, Homo sapien
atagggaaaacttccggatgctgtc

SEQ ID NO: 51471 - DNA, 25 bp, Homo sapien
ctatgtctggggtttggttagaatt

SEQ ID NO: 51472 - DNA, 25 bp, Homo sapien
aagaagccacgcctgagatacaaaa

SEQ ID NO: 51473 - DNA, 25 bp, Homo sapien
agtagaggctctgtcaagtcaatac

SEQ ID NO: 51474 - DNA, 25 bp, Homo sapien
ttggagccattttgagacagaagta

SEQ ID NO: 51475 - DNA, 25 bp, Homo sapien
ggatgctgtcccaaaccgtggaata

SEQ ID NO: 51476 - DNA, 25 bp, Homo sapien
agtagaggctctgtcaagtcaatac

SEQ ID NO: 51477 - DNA, 25 bp, Homo sapien
aacagaatgtggtaactgccaatgc

SEQ ID NO: 51478 - DNA, 25 bp, Homo sapien
atagggaaaacttccggatgctgtc

SEQ ID NO: 51479 - DNA, 25 bp, Homo sapien
ctcaagttgtctgtgtcggtatccc

SEQ ID NO: 51480 - DNA, 25 bp, Homo sapien
gatgacacacaacctgtatggatcc

SEQ ID NO: 51481 - DNA, 25 bp, Homo sapien
ctatgtctggggtttggttagaatt

SEQ ID NO: 51482 - DNA, 25 bp, Homo sapien
cagcagcagcacatagctacactga

SEQ ID NO: 51483 - DNA, 25 bp, Homo sapien
ttggagccattttgagacagaagta

SEQ ID NO: 51484 - DNA, 25 bp, Homo sapien
aagaagccacgcctgagatacaaaa

SEQ ID NO: 51485 - DNA, 25 bp, Homo sapien
tgaacctcaagaggacagatgacac

SEQ ID NO: 51486 - DNA, 25 bp, Homo sapien
agtagaggctctgtcaagtcaatac

SEQ ID NO: 51487 - DNA, 25 bp, Homo sapien
ctatgtctggggtttggttagaatt

SEQ ID NO: 51488 - DNA, 25 bp, Homo sapien
cagcagcagcacatagctacactga

SEQ ID NO: 51489 - DNA, 25 bp, Homo sapien
aacagaatgtggtaactgccaatgc

SEQ ID NO: 51490 - DNA, 25 bp, Homo sapien
tgaacctcaagaggacagatgacac

SEQ ID NO: 51491 - DNA, 25 bp, Homo sapien
atagggaaaacttccggatgctgtc

SEQ ID NO: 51492 - DNA, 25 bp, Homo sapien
gatgacacacaacctgtatggatcc

SEQ ID NO: 51493 - DNA, 25 bp, Homo sapien
aagaagccacgcctgagatacaaaa

SEQ ID NO: 51494 - DNA, 25 bp, Homo sapien
ctcaagttgtctgtgtcggtatccc

SEQ ID NO: 51495 - DNA, 25 bp, Homo sapien
ggatgctgtcccaaaccgtggaata

SEQ ID NO: 51496 - DNA, 25 bp, Homo sapien
ttggagccattttgagacagaagta

SEQ ID NO: 51497 - DNA, 25 bp, Homo sapien
aacagaatgtggtaactgccaatgc

SEQ ID NO: 51498 - DNA, 25 bp, Homo sapien
ctcaagttgtctgtgtcggtatccc

SEQ ID NO: 51499 - DNA, 25 bp, Homo sapien
cagcagcagcacatagctacactga

SEQ ID NO: 51500 - DNA, 25 bp, Homo sapien
gatgacacacaacctgtatggatcc

SEQ ID NO: 51501 - DNA, 25 bp, Homo sapien
tgaacctcaagaggacagatgacac

SEQ ID NO: 51502 - DNA, 25 bp, Homo sapien
ggatgctgtcccaaaccgtggaata

SEQ ID NO: 51503 - DNA, 25 bp, Homo sapien
atagggaaaacttccggatgctgtc

SEQ ID NO: 51504 - DNA, 25 bp, Homo sapien
ctatgtctggggtttggttagaatt

SEQ ID NO: 51505 - DNA, 25 bp, Homo sapien
aagaagccacgcctgagatacaaaa

SEQ ID NO: 51506 - DNA, 25 bp, Homo sapien
agtagaggctctgtcaagtcaatac

SEQ ID NO: 51507 - DNA, 25 bp, Homo sapien
ttggagccattttgagacagaagta

SEQ ID NO: 51508 - DNA, 25 bp, Homo sapien
ggatgctgtcccaaaccgtggaata

SEQ ID NO: 51509 - DNA, 25 bp, Homo sapien
aacagaatgtggtaactgccaatgc

SEQ ID NO: 51510 - DNA, 25 bp, Homo sapien
tgaacctcaagaggacagatgacac

SEQ ID NO: 51511 - DNA, 25 bp, Homo sapien
atagggaaaacttccggatgctgtc

SEQ ID NO: 51512 - DNA, 25 bp, Homo sapien
cagcagcagcacatagctacactga

SEQ ID NO: 51513 - DNA, 25 bp, Homo sapien
ttggagccattttgagacagaagta

SEQ ID NO: 51514 - DNA, 25 bp, Homo sapien
gatgacacacaacctgtatggatcc

SEQ ID NO: 51515 - DNA, 25 bp, Homo sapien
agtagaggctctgtcaagtcaatac

SEQ ID NO: 51516 - DNA, 25 bp, Homo sapien
ctcaagttgtctgtgtcggtatccc

SEQ ID NO: 51517 - DNA, 25 bp, Homo sapien
ctatgtctggggtttggttagaatt

SEQ ID NO: 51518 - DNA, 25 bp, Homo sapien
aagaagccacgcctgagatacaaaa

SEQ ID NO: 51519 - DNA, 25 bp, Homo sapien
aacagaatgtggtaactgccaatgc

SEQ ID NO: 51520 - DNA, 25 bp, Homo sapien
ctcaagttgtctgtgtcggtatccc

SEQ ID NO: 51521 - DNA, 25 bp, Homo sapien
cagcagcagcacatagctacactga

SEQ ID NO: 51522 - DNA, 25 bp, Homo sapien
gatgacacacaacctgtatggatcc

SEQ ID NO: 51523 - DNA, 25 bp, Homo sapien
tgaacctcaagaggacagatgacac

SEQ ID NO: 51524 - DNA, 25 bp, Homo sapien
ggatgctgtcccaaaccgtggaata

SEQ ID NO: 51525 - DNA, 25 bp, Homo sapien
atagggaaaacttccggatgctgtc

SEQ ID NO: 51526 - DNA, 25 bp, Homo sapien
ctatgtctggggtttggttagaatt

SEQ ID NO: 51527 - DNA, 25 bp, Homo sapien
aagaagccacgcctgagatacaaaa

SEQ ID NO: 51528 - DNA, 25 bp, Homo sapien
agtagaggctctgtcaagtcaatac

SEQ ID NO: 51529 - DNA, 25 bp, Homo sapien
ttggagccattttgagacagaagta

SEQ ID NO: 51530 - DNA, 25 bp, Homo sapien
gatgacacacaacctgtatggatcc

SEQ ID NO: 51531 - DNA, 25 bp, Homo sapien
atagggaaaacttccggatgctgtc

SEQ ID NO: 51532 - DNA, 25 bp, Homo sapien
ctcaagttgtctgtgtcggtatccc

SEQ ID NO: 51533 - DNA, 25 bp, Homo sapien
ggatgctgtcccaaaccgtggaata

SEQ ID NO: 51534 - DNA, 25 bp, Homo sapien
aacagaatgtggtaactgccaatgc

SEQ ID NO: 51535 - DNA, 25 bp, Homo sapien
aagaagccacgcctgagatacaaaa

SEQ ID NO: 51536 - DNA, 25 bp, Homo sapien
agtagaggctctgtcaagtcaatac

SEQ ID NO: 51537 - DNA, 25 bp, Homo sapien
cagcagcagcacatagctacactga

SEQ ID NO: 51538 - DNA, 25 bp, Homo sapien
ttggagccattttgagacagaagta

SEQ ID NO: 51539 - DNA, 25 bp, Homo sapien
ctatgtctggggtttggttagaatt

SEQ ID NO: 51540 - DNA, 25 bp, Homo sapien
tgaacctcaagaggacagatgacac

SEQ ID NO: 51541 - DNA, 25 bp, Homo sapien
aacagaatgtggtaactgccaatgc

SEQ ID NO: 51542 - DNA, 25 bp, Homo sapien
ctcaagttgtctgtgtcggtatccc

SEQ ID NO: 51543 - DNA, 25 bp, Homo sapien
cagcagcagcacatagctacactga

SEQ ID NO: 51544 - DNA, 25 bp, Homo sapien
gatgacacacaacctgtatggatcc

SEQ ID NO: 51545 - DNA, 25 bp, Homo sapien
tgaacctcaagaggacagatgacac

SEQ ID NO: 51546 - DNA, 25 bp, Homo sapien
ggatgctgtcccaaaccgtggaata

SEQ ID NO: 51547 - DNA, 25 bp, Homo sapien
atagggaaaacttccggatgctgtc

SEQ ID NO: 51548 - DNA, 25 bp, Homo sapien
ctatgtctggggtttggttagaatt

SEQ ID NO: 51549 - DNA, 25 bp, Homo sapien
aagaagccacgcctgagatacaaaa

SEQ ID NO: 51550 - DNA, 25 bp, Homo sapien
agtagaggctctgtcaagtcaatac

SEQ ID NO: 51551 - DNA, 25 bp, Homo sapien
ttggagccattttgagacagaagta

SEQ ID NO: 51552 - DNA, 25 bp, Homo sapien
tgaacctcaagaggacagatgacac

SEQ ID NO: 51553 - DNA, 25 bp, Homo sapien
aacagaatgtggtaactgccaatgc

SEQ ID NO: 51554 - DNA, 25 bp, Homo sapien
ctcaagttgtctgtgtcggtatccc

SEQ ID NO: 51555 - DNA, 25 bp, Homo sapien
cagcagcagcacatagctacactga

SEQ ID NO: 51556 - DNA, 25 bp, Homo sapien
atagggaaaacttccggatgctgtc

SEQ ID NO: 51557 - DNA, 25 bp, Homo sapien
ttggagccattttgagacagaagta

SEQ ID NO: 51558 - DNA, 25 bp, Homo sapien
ggatgctgtcccaaaccgtggaata

SEQ ID NO: 51559 - DNA, 25 bp, Homo sapien
agtagaggctctgtcaagtcaatac

SEQ ID NO: 51560 - DNA, 25 bp, Homo sapien
ctatgtctggggtttggttagaatt

SEQ ID NO: 51561 - DNA, 25 bp, Homo sapien
gatgacacacaacctgtatggatcc

SEQ ID NO: 51562 - DNA, 25 bp, Homo sapien
aagaagccacgcctgagatacaaaa

SEQ ID NO: 51563 - DNA, 25 bp, Homo sapien
aacagaatgtggtaactgccaatgc

SEQ ID NO: 51564 - DNA, 25 bp, Homo sapien
ctcaagttgtctgtgtcggtatccc

SEQ ID NO: 51565 - DNA, 25 bp, Homo sapien
cagcagcagcacatagctacactga

SEQ ID NO: 51566 - DNA, 25 bp, Homo sapien
gatgacacacaacctgtatggatcc

SEQ ID NO: 51567 - DNA, 25 bp, Homo sapien
tgaacctcaagaggacagatgacac

SEQ ID NO: 51568 - DNA, 25 bp, Homo sapien
ggatgctgtcccaaaccgtggaata

SEQ ID NO: 51569 - DNA, 25 bp, Homo sapien
atagggaaaacttccggatgctgtc

SEQ ID NO: 51570 - DNA, 25 bp, Homo sapien
ctatgtctggggtttggttagaatt

SEQ ID NO: 51571 - DNA, 25 bp, Homo sapien
aagaagccacgcctgagatacaaaa

SEQ ID NO: 51572 - DNA, 25 bp, Homo sapien
agtagaggctctgtcaagtcaatac

SEQ ID NO: 51573 - DNA, 25 bp, Homo sapien
ttggagccattttgagacagaagta

SEQ ID NO: 51574 - DNA, 25 bp, Homo sapien
cagcagcagcacatagctacactga

SEQ ID NO: 51575 - DNA, 25 bp, Homo sapien
ttggagccattttgagacagaagta

SEQ ID NO: 51576 - DNA, 25 bp, Homo sapien
aagaagccacgcctgagatacaaaa

SEQ ID NO: 51577 - DNA, 25 bp, Homo sapien
ggatgctgtcccaaaccgtggaata

SEQ ID NO: 51578 - DNA, 25 bp, Homo sapien
gatgacacacaacctgtatggatcc

SEQ ID NO: 51579 - DNA, 25 bp, Homo sapien
atagggaaaacttccggatgctgtc

SEQ ID NO: 51580 - DNA, 25 bp, Homo sapien
ctatgtctggggtttggttagaatt

SEQ ID NO: 51581 - DNA, 25 bp, Homo sapien
tgaacctcaagaggacagatgacac

SEQ ID NO: 51582 - DNA, 25 bp, Homo sapien
aacagaatgtggtaactgccaatgc

SEQ ID NO: 51583 - DNA, 25 bp, Homo sapien
ctcaagttgtctgtgtcggtatccc

SEQ ID NO: 51584 - DNA, 25 bp, Homo sapien
agtagaggctctgtcaagtcaatac

SEQ ID NO: 51585 - DNA, 25 bp, Homo sapien
aacagaatgtggtaactgccaatgc

SEQ ID NO: 51586 - DNA, 25 bp, Homo sapien
ctcaagttgtctgtgtcggtatccc

SEQ ID NO: 51587 - DNA, 25 bp, Homo sapien
cagcagcagcacatagctacactga

SEQ ID NO: 51588 - DNA, 25 bp, Homo sapien
gatgacacacaacctgtatggatcc

SEQ ID NO: 51589 - DNA, 25 bp, Homo sapien
tgaacctcaagaggacagatgacac

SEQ ID NO: 51590 - DNA, 25 bp, Homo sapien
ggatgctgtcccaaaccgtggaata

SEQ ID NO: 51591 - DNA, 25 bp, Homo sapien
atagggaaaacttccggatgctgtc

SEQ ID NO: 51592 - DNA, 25 bp, Homo sapien
ctatgtctggggtttggttagaatt

SEQ ID NO: 51593 - DNA, 25 bp, Homo sapien
aagaagccacgcctgagatacaaaa

SEQ ID NO: 51594 - DNA, 25 bp, Homo sapien
agtagaggctctgtcaagtcaatac

SEQ ID NO: 51595 - DNA, 25 bp, Homo sapien
ttggagccattttgagacagaagta

SEQ ID NO: 51596 - DNA, 25 bp, Homo sapien
atagggaaaacttccggatgctgtc

SEQ ID NO: 51597 - DNA, 25 bp, Homo sapien
cagcagcagcacatagctacactga

SEQ ID NO: 51598 - DNA, 25 bp, Homo sapien
ttggagccattttgagacagaagta

SEQ ID NO: 51599 - DNA, 25 bp, Homo sapien
tgaacctcaagaggacagatgacac

SEQ ID NO: 51600 - DNA, 25 bp, Homo sapien
agtagaggctctgtcaagtcaatac

SEQ ID NO: 51601 - DNA, 25 bp, Homo sapien
aagaagccacgcctgagatacaaaa

SEQ ID NO: 51602 - DNA, 25 bp, Homo sapien
ggatgctgtcccaaaccgtggaata

SEQ ID NO: 51603 - DNA, 25 bp, Homo sapien
ctcaagttgtctgtgtcggtatccc

SEQ ID NO: 51604 - DNA, 25 bp, Homo sapien
gatgacacacaacctgtatggatcc

SEQ ID NO: 51605 - DNA, 25 bp, Homo sapien
ctatgtctggggtttggttagaatt

SEQ ID NO: 51606 - DNA, 25 bp, Homo sapien
aacagaatgtggtaactgccaatgc

SEQ ID NO: 51607 - DNA, 25 bp, Homo sapien
aacagaatgtggtaactgccaatgc

SEQ ID NO: 51608 - DNA, 25 bp, Homo sapien
ctcaagttgtctgtgtcggtatccc

SEQ ID NO: 51609 - DNA, 25 bp, Homo sapien
cagcagcagcacatagctacactga

SEQ ID NO: 51610 - DNA, 25 bp, Homo sapien
gatgacacacaacctgtatggatcc

SEQ ID NO: 51611 - DNA, 25 bp, Homo sapien
tgaacctcaagaggacagatgacac

SEQ ID NO: 51612 - DNA, 25 bp, Homo sapien
ggatgctgtcccaaaccgtggaata

SEQ ID NO: 51613 - DNA, 25 bp, Homo sapien
atagggaaaacttccggatgctgtc

SEQ ID NO: 51614 - DNA, 25 bp, Homo sapien
ctatgtctggggtttggttagaatt

SEQ ID NO: 51615 - DNA, 25 bp, Homo sapien
aagaagccacgcctgagatacaaaa

SEQ ID NO: 51616 - DNA, 25 bp, Homo sapien
agtagaggctctgtcaagtcaatac

SEQ ID NO: 51617 - DNA, 25 bp, Homo sapien
ttggagccattttgagacagaagta

SEQ ID NO: 51618 - DNA, 25 bp, Homo sapien
aacagaatgtggtaactgccaatgc

SEQ ID NO: 51619 - DNA, 25 bp, Homo sapien
ctcaagttgtctgtgtcggtatccc

SEQ ID NO: 51620 - DNA, 25 bp, Homo sapien
cagcagcagcacatagctacactga

SEQ ID NO: 51621 - DNA, 25 bp, Homo sapien
gatgacacacaacctgtatggatcc

SEQ ID NO: 51622 - DNA, 25 bp, Homo sapien
tgaacctcaagaggacagatgacac

SEQ ID NO: 51623 - DNA, 25 bp, Homo sapien
ggatgctgtcccaaaccgtggaata

SEQ ID NO: 51624 - DNA, 25 bp, Homo sapien
atagggaaaacttccggatgctgtc

SEQ ID NO: 51625 - DNA, 25 bp, Homo sapien
ctatgtctggggtttggttagaatt

SEQ ID NO: 51626 - DNA, 25 bp, Homo sapien
aagaagccacgcctgagatacaaaa

SEQ ID NO: 51627 - DNA, 25 bp, Homo sapien
agtagaggctctgtcaagtcaatac

SEQ ID NO: 51628 - DNA, 25 bp, Homo sapien
ttggagccattttgagacagaagta

SEQ ID NO: 51629 - DNA, 25 bp, Homo sapien
gatgacacacaacctgtatggatcc

SEQ ID NO: 51630 - DNA, 25 bp, Homo sapien
ggatgctgtcccaaaccgtggaata

SEQ ID NO: 51631 - DNA, 25 bp, Homo sapien
aagaagccacgcctgagatacaaaa

SEQ ID NO: 51632 - DNA, 25 bp, Homo sapien
ctcaagttgtctgtgtcggtatccc

SEQ ID NO: 51633 - DNA, 25 bp, Homo sapien
agtagaggctctgtcaagtcaatac

SEQ ID NO: 51634 - DNA, 25 bp, Homo sapien
tgaacctcaagaggacagatgacac

SEQ ID NO: 51635 - DNA, 25 bp, Homo sapien
ctatgtctggggtttggttagaatt

SEQ ID NO: 51636 - DNA, 25 bp, Homo sapien
atagggaaaacttccggatgctgtc

SEQ ID NO: 51637 - DNA, 25 bp, Homo sapien
aacagaatgtggtaactgccaatgc

SEQ ID NO: 51638 - DNA, 25 bp, Homo sapien
cagcagcagcacatagctacactga

SEQ ID NO: 51639 - DNA, 25 bp, Homo sapien
ttggagccattttgagacagaagta

SEQ ID NO: 51640 - DNA, 25 bp, Homo sapien
gatgacacacaacctgtatggatcc

SEQ ID NO: 51641 - DNA, 25 bp, Homo sapien
ggatgctgtcccaaaccgtggaata

SEQ ID NO: 51642 - DNA, 25 bp, Homo sapien
aagaagccacgcctgagatacaaaa

SEQ ID NO: 51643 - DNA, 25 bp, Homo sapien
agtagaggctctgtcaagtcaatac

SEQ ID NO: 51644 - DNA, 25 bp, Homo sapien
ctcaagttgtctgtgtcggtatccc

SEQ ID NO: 51645 - DNA, 25 bp, Homo sapien
ctatgtctggggtttggttagaatt

SEQ ID NO: 51646 - DNA, 25 bp, Homo sapien
tgaacctcaagaggacagatgacac

SEQ ID NO: 51647 - DNA, 25 bp, Homo sapien
atagggaaaacttccggatgctgtc

SEQ ID NO: 51648 - DNA, 25 bp, Homo sapien
ttggagccattttgagacagaagta

SEQ ID NO: 51649 - DNA, 25 bp, Homo sapien
aacagaatgtggtaactgccaatgc

SEQ ID NO: 51650 - DNA, 25 bp, Homo sapien
cagcagcagcacatagctacactga

SEQ ID NO: 51651 - DNA, 25 bp, Homo sapien
gatgacacacaacctgtatggatcc

SEQ ID NO: 51652 - DNA, 25 bp, Homo sapien
ggatgctgtcccaaaccgtggaata

SEQ ID NO: 51653 - DNA, 25 bp, Homo sapien
aagaagccacgcctgagatacaaaa

SEQ ID NO: 51654 - DNA, 25 bp, Homo sapien
ctcaagttgtctgtgtcggtatccc

SEQ ID NO: 51655 - DNA, 25 bp, Homo sapien
agtagaggctctgtcaagtcaatac

SEQ ID NO: 51656 - DNA, 25 bp, Homo sapien
tgaacctcaagaggacagatgacac

SEQ ID NO: 51657 - DNA, 25 bp, Homo sapien
ctatgtctggggtttggttagaatt

SEQ ID NO: 51658 - DNA, 25 bp, Homo sapien
atagggaaaacttccggatgctgtc

SEQ ID NO: 51659 - DNA, 25 bp, Homo sapien
ttggagccattttgagacagaagta

SEQ ID NO: 51660 - DNA, 25 bp, Homo sapien
aacagaatgtggtaactgccaatgc

SEQ ID NO: 51661 - DNA, 25 bp, Homo sapien
cagcagcagcacatagctacactga

SEQ ID NO: 51662 - DNA, 25 bp, Homo sapien
gatgacacacaacctgtatggatcc

SEQ ID NO: 51663 - DNA, 25 bp, Homo sapien
ggatgctgtcccaaaccgtggaata

SEQ ID NO: 51664 - DNA, 25 bp, Homo sapien
aagaagccacgcctgagatacaaaa

SEQ ID NO: 51665 - DNA, 25 bp, Homo sapien
ctcaagttgtctgtgtcggtatccc

SEQ ID NO: 51666 - DNA, 25 bp, Homo sapien
agtagaggctctgtcaagtcaatac

SEQ ID NO: 51667 - DNA, 25 bp, Homo sapien
tgaacctcaagaggacagatgacac

SEQ ID NO: 51668 - DNA, 25 bp, Homo sapien
ctatgtctggggtttggttagaatt

SEQ ID NO: 51669 - DNA, 25 bp, Homo sapien
ttggagccattttgagacagaagta

SEQ ID NO: 51670 - DNA, 25 bp, Homo sapien
atagggaaaacttccggatgctgtc

SEQ ID NO: 51671 - DNA, 25 bp, Homo sapien
aacagaatgtggtaactgccaatgc

SEQ ID NO: 51672 - DNA, 25 bp, Homo sapien
cagcagcagcacatagctacactga

SEQ ID NO: 51673 - DNA, 25 bp, Homo sapien
gatgacacacaacctgtatggatcc

SEQ ID NO: 51674 - DNA, 25 bp, Homo sapien
ggatgctgtcccaaaccgtggaata

SEQ ID NO: 51675 - DNA, 25 bp, Homo sapien
aagaagccacgcctgagatacaaaa

SEQ ID NO: 51676 - DNA, 25 bp, Homo sapien
ctcaagttgtctgtgtcggtatccc

SEQ ID NO: 51677 - DNA, 25 bp, Homo sapien
agtagaggctctgtcaagtcaatac

SEQ ID NO: 51678 - DNA, 25 bp, Homo sapien
ctatgtctggggtttggttagaatt

SEQ ID NO: 51679 - DNA, 25 bp, Homo sapien
tgaacctcaagaggacagatgacac

SEQ ID NO: 51680 - DNA, 25 bp, Homo sapien
atagggaaaacttccggatgctgtc

SEQ ID NO: 51681 - DNA, 25 bp, Homo sapien
aacagaatgtggtaactgccaatgc

SEQ ID NO: 51682 - DNA, 25 bp, Homo sapien
cagcagcagcacatagctacactga

SEQ ID NO: 51683 - DNA, 25 bp, Homo sapien
ttggagccattttgagacagaagta

SEQ ID NO: 51684 - DNA, 25 bp, Homo sapien
gatgacacacaacctgtatggatcc

SEQ ID NO: 51685 - DNA, 25 bp, Homo sapien
ggatgctgtcccaaaccgtggaata

SEQ ID NO: 51686 - DNA, 25 bp, Homo sapien
aagaagccacgcctgagatacaaaa

SEQ ID NO: 51687 - DNA, 25 bp, Homo sapien
ttggagccattttgagacagaagta

SEQ ID NO: 51688 - DNA, 25 bp, Homo sapien
agtagaggctctgtcaagtcaatac

SEQ ID NO: 51689 - DNA, 25 bp, Homo sapien
ctcaagttgtctgtgtcggtatccc

SEQ ID NO: 51690 - DNA, 25 bp, Homo sapien
tgaacctcaagaggacagatgacac

SEQ ID NO: 51691 - DNA, 25 bp, Homo sapien
ctatgtctggggtttggttagaatt

SEQ ID NO: 51692 - DNA, 25 bp, Homo sapien
atagggaaaacttccggatgctgtc

SEQ ID NO: 51693 - DNA, 25 bp, Homo sapien
aacagaatgtggtaactgccaatgc

SEQ ID NO: 51694 - DNA, 25 bp, Homo sapien
cagcagcagcacatagctacactga

SEQ ID NO: 51695 - DNA, 25 bp, Homo sapien
gatgacacacaacctgtatggatcc

SEQ ID NO: 51696 - DNA, 25 bp, Homo sapien
ggatgctgtcccaaaccgtggaata

SEQ ID NO: 51697 - DNA, 25 bp, Homo sapien
aagaagccacgcctgagatacaaaa

SEQ ID NO: 51698 - DNA, 25 bp, Homo sapien
agtagaggctctgtcaagtcaatac

SEQ ID NO: 51699 - DNA, 25 bp, Homo sapien
ctcaagttgtctgtgtcggtatccc

SEQ ID NO: 51700 - DNA, 25 bp, Homo sapien
ctatgtctggggtttggttagaatt

SEQ ID NO: 51701 - DNA, 25 bp, Homo sapien
tgaacctcaagaggacagatgacac

SEQ ID NO: 51702 - DNA, 25 bp, Homo sapien
ttggagccattttgagacagaagta

SEQ ID NO: 51703 - DNA, 25 bp, Homo sapien
atagggaaaacttccggatgctgtc

SEQ ID NO: 51704 - DNA, 25 bp, Homo sapien
aacagaatgtggtaactgccaatgc

SEQ ID NO: 51705 - DNA, 25 bp, Homo sapien
cagcagcagcacatagctacactga

SEQ ID NO: 51706 - DNA, 25 bp, Homo sapien
gatgacacacaacctgtatggatcc

SEQ ID NO: 51707 - DNA, 25 bp, Homo sapien
ggatgctgtcccaaaccgtggaata

SEQ ID NO: 51708 - DNA, 25 bp, Homo sapien
aagaagccacgcctgagatacaaaa

SEQ ID NO: 51709 - DNA, 25 bp, Homo sapien
ctcaagttgtctgtgtcggtatccc

SEQ ID NO: 51710 - DNA, 25 bp, Homo sapien
agtagaggctctgtcaagtcaatac

SEQ ID NO: 51711 - DNA, 25 bp, Homo sapien
tgaacctcaagaggacagatgacac

SEQ ID NO: 51712 - DNA, 25 bp, Homo sapien
ctatgtctggggtttggttagaatt

SEQ ID NO: 51713 - DNA, 25 bp, Homo sapien
ttggagccattttgagacagaagta

SEQ ID NO: 51714 - DNA, 25 bp, Homo sapien
atagggaaaacttccggatgctgtc

SEQ ID NO: 51715 - DNA, 25 bp, Homo sapien
cagcagcagcacatagctacactga

SEQ ID NO: 51716 - DNA, 25 bp, Homo sapien
aacagaatgtggtaactgccaatgc

SEQ ID NO: 51717 - DNA, 25 bp, Homo sapien
ttggagccattttgagacagaagta

SEQ ID NO: 51718 - DNA, 25 bp, Homo sapien
gatgacacacaacctgtatggatcc

SEQ ID NO: 51719 - DNA, 25 bp, Homo sapien
ggatgctgtcccaaaccgtggaata

SEQ ID NO: 51720 - DNA, 25 bp, Homo sapien
aagaagccacgcctgagatacaaaa

SEQ ID NO: 51721 - DNA, 25 bp, Homo sapien
ctcaagttgtctgtgtcggtatccc

SEQ ID NO: 51722 - DNA, 25 bp, Homo sapien
agtagaggctctgtcaagtcaatac

SEQ ID NO: 51723 - DNA, 25 bp, Homo sapien
ctatgtctggggtttggttagaatt

SEQ ID NO: 51724 - DNA, 25 bp, Homo sapien
tgaacctcaagaggacagatgacac

SEQ ID NO: 51725 - DNA, 25 bp, Homo sapien
atagggaaaacttccggatgctgtc

SEQ ID NO: 51726 - DNA, 25 bp, Homo sapien
aacagaatgtggtaactgccaatgc

SEQ ID NO: 51727 - DNA, 25 bp, Homo sapien
cagcagcagcacatagctacactga

SEQ ID NO: 51728 - DNA, 25 bp, Homo sapien
agtagaggctctgtcaagtcaatac

SEQ ID NO: 51729 - DNA, 25 bp, Homo sapien
tgaacctcaagaggacagatgacac

SEQ ID NO: 51730 - DNA, 25 bp, Homo sapien
ggatgctgtcccaaaccgtggaata

SEQ ID NO: 51731 - DNA, 25 bp, Homo sapien
ctatgtctggggtttggttagaatt

SEQ ID NO: 51732 - DNA, 25 bp, Homo sapien
ttggagccattttgagacagaagta

SEQ ID NO: 51733 - DNA, 25 bp, Homo sapien
aacagaatgtggtaactgccaatgc

SEQ ID NO: 51734 - DNA, 25 bp, Homo sapien
aagaagccacgcctgagatacaaaa

SEQ ID NO: 51735 - DNA, 25 bp, Homo sapien
cagcagcagcacatagctacactga

SEQ ID NO: 51736 - DNA, 25 bp, Homo sapien
ctcaagttgtctgtgtcggtatccc

SEQ ID NO: 51737 - DNA, 25 bp, Homo sapien
atagggaaaacttccggatgctgtc

SEQ ID NO: 51738 - DNA, 25 bp, Homo sapien
gatgacacacaacctgtatggatcc

SEQ ID NO: 51739 - DNA, 25 bp, Homo sapien
gatgacacacaacctgtatggatcc

SEQ ID NO: 51740 - DNA, 25 bp, Homo sapien
ggatgctgtcccaaaccgtggaata

SEQ ID NO: 51741 - DNA, 25 bp, Homo sapien
aagaagccacgcctgagatacaaaa

SEQ ID NO: 51742 - DNA, 25 bp, Homo sapien
ctcaagttgtctgtgtcggtatccc

SEQ ID NO: 51743 - DNA, 25 bp, Homo sapien
agtagaggctctgtcaagtcaatac

SEQ ID NO: 51744 - DNA, 25 bp, Homo sapien
ctatgtctggggtttggttagaatt

SEQ ID NO: 51745 - DNA, 25 bp, Homo sapien
tgaacctcaagaggacagatgacac

SEQ ID NO: 51746 - DNA, 25 bp, Homo sapien
atagggaaaacttccggatgctgtc

SEQ ID NO: 51747 - DNA, 25 bp, Homo sapien
aacagaatgtggtaactgccaatgc

SEQ ID NO: 51748 - DNA, 25 bp, Homo sapien
cagcagcagcacatagctacactga

SEQ ID NO: 51749 - DNA, 25 bp, Homo sapien
ttggagccattttgagacagaagta

SEQ ID NO: 51750 - DNA, 25 bp, Homo sapien
aacagaatgtggtaactgccaatgc

SEQ ID NO: 51751 - DNA, 25 bp, Homo sapien
ctcaagttgtctgtgtcggtatccc

SEQ ID NO: 51752 - DNA, 25 bp, Homo sapien
cagcagcagcacatagctacactga

SEQ ID NO: 51753 - DNA, 25 bp, Homo sapien
gatgacacacaacctgtatggatcc

SEQ ID NO: 51754 - DNA, 25 bp, Homo sapien
tgaacctcaagaggacagatgacac

SEQ ID NO: 51755 - DNA, 25 bp, Homo sapien
ggatgctgtcccaaaccgtggaata

SEQ ID NO: 51756 - DNA, 25 bp, Homo sapien
atagggaaaacttccggatgctgtc

SEQ ID NO: 51757 - DNA, 25 bp, Homo sapien
ctatgtctggggtttggttagaatt

SEQ ID NO: 51758 - DNA, 25 bp, Homo sapien
aagaagccacgcctgagatacaaaa

SEQ ID NO: 51759 - DNA, 25 bp, Homo sapien
agtagaggctctgtcaagtcaatac

SEQ ID NO: 51760 - DNA, 25 bp, Homo sapien
ttggagccattttgagacagaagta

SEQ ID NO: 51761 - DNA, 25 bp, Homo sapien
gtattgacttgacagagcctctact

SEQ ID NO: 51762 - DNA, 25 bp, Homo sapien
tcagtgtagctatgtgctgctgctg

SEQ ID NO: 51763 - DNA, 25 bp, Homo sapien
gacagcatccggaagttttccctat

SEQ ID NO: 51764 - DNA, 25 bp, Homo sapien
gcattggcagttaccacattctgtt

SEQ ID NO: 51765 - DNA, 25 bp, Homo sapien
ttttgtatctcaggcgtggcttctt

SEQ ID NO: 51766 - DNA, 25 bp, Homo sapien
gtgtcatctgtcctcttgaggttca

SEQ ID NO: 51767 - DNA, 25 bp, Homo sapien
gggataccgacacagacaacttgag

SEQ ID NO: 51768 - DNA, 25 bp, Homo sapien
aattctaaccaaaccccagacatag

SEQ ID NO: 51769 - DNA, 25 bp, Homo sapien
ggatccatacaggttgtgtgtcatc

SEQ ID NO: 51770 - DNA, 25 bp, Homo sapien
tacttctgtctcaaaatggctccaa

SEQ ID NO: 51771 - DNA, 25 bp, Homo sapien
tattccacggtttgggacagcatcc

SEQ ID NO: 51772 - DNA, 25 bp, Homo sapien
gatgacacacaacctgtatggatcc

SEQ ID NO: 51773 - DNA, 25 bp, Homo sapien
ggatgctgtcccaaaccgtggaata

SEQ ID NO: 51774 - DNA, 25 bp, Homo sapien
aagaagccacgcctgagatacaaaa

SEQ ID NO: 51775 - DNA, 25 bp, Homo sapien
agtagaggctctgtcaagtcaatac

SEQ ID NO: 51776 - DNA, 25 bp, Homo sapien
ctcaagttgtctgtgtcggtatccc

SEQ ID NO: 51777 - DNA, 25 bp, Homo sapien
ctatgtctggggtttggttagaatt

SEQ ID NO: 51778 - DNA, 25 bp, Homo sapien
tgaacctcaagaggacagatgacac

SEQ ID NO: 51779 - DNA, 25 bp, Homo sapien
atagggaaaacttccggatgctgtc

SEQ ID NO: 51780 - DNA, 25 bp, Homo sapien
aacagaatgtggtaactgccaatgc

SEQ ID NO: 51781 - DNA, 25 bp, Homo sapien
ttggagccattttgagacagaagta

SEQ ID NO: 51782 - DNA, 25 bp, Homo sapien
cagcagcagcacatagctacactga

SEQ ID NO: 51783 - DNA, 25 bp, Homo sapien
gatgacacacaacctgtatggatcc

SEQ ID NO: 51784 - DNA, 25 bp, Homo sapien
ttggagccattttgagacagaagta

SEQ ID NO: 51785 - DNA, 25 bp, Homo sapien
ctcaagttgtctgtgtcggtatccc

SEQ ID NO: 51786 - DNA, 25 bp, Homo sapien
ggatgctgtcccaaaccgtggaata

SEQ ID NO: 51787 - DNA, 25 bp, Homo sapien
cagcagcagcacatagctacactga

SEQ ID NO: 51788 - DNA, 25 bp, Homo sapien
aacagaatgtggtaactgccaatgc

SEQ ID NO: 51789 - DNA, 25 bp, Homo sapien
agtagaggctctgtcaagtcaatac

SEQ ID NO: 51790 - DNA, 25 bp, Homo sapien
ctatgtctggggtttggttagaatt

SEQ ID NO: 51791 - DNA, 25 bp, Homo sapien
tgaacctcaagaggacagatgacac

SEQ ID NO: 51792 - DNA, 25 bp, Homo sapien
atagggaaaacttccggatgctgtc

SEQ ID NO: 51793 - DNA, 25 bp, Homo sapien
aagaagccacgcctgagatacaaaa

SEQ ID NO: 51794 - DNA, 25 bp, Homo sapien
aacagaatgtggtaactgccaatgc

SEQ ID NO: 51795 - DNA, 25 bp, Homo sapien
ctcaagttgtctgtgtcggtatccc

SEQ ID NO: 51796 - DNA, 25 bp, Homo sapien
cagcagcagcacatagctacactga

SEQ ID NO: 51797 - DNA, 25 bp, Homo sapien
gatgacacacaacctgtatggatcc

SEQ ID NO: 51798 - DNA, 25 bp, Homo sapien
tgaacctcaagaggacagatgacac

SEQ ID NO: 51799 - DNA, 25 bp, Homo sapien
ggatgctgtcccaaaccgtggaata

SEQ ID NO: 51800 - DNA, 25 bp, Homo sapien
atagggaaaacttccggatgctgtc

SEQ ID NO: 51801 - DNA, 25 bp, Homo sapien
ctatgtctggggtttggttagaatt

SEQ ID NO: 51802 - DNA, 25 bp, Homo sapien
aagaagccacgcctgagatacaaaa

SEQ ID NO: 51803 - DNA, 25 bp, Homo sapien
agtagaggctctgtcaagtcaatac

SEQ ID NO: 51804 - DNA, 25 bp, Homo sapien
ttggagccattttgagacagaagta

SEQ ID NO: 51805 - DNA, 25 bp, Homo sapien
tgaacctcaagaggacagatgacac

SEQ ID NO: 51806 - DNA, 25 bp, Homo sapien
gatgacacacaacctgtatggatcc

SEQ ID NO: 51807 - DNA, 25 bp, Homo sapien
ggatgctgtcccaaaccgtggaata

SEQ ID NO: 51808 - DNA, 25 bp, Homo sapien
ttggagccattttgagacagaagta

SEQ ID NO: 51809 - DNA, 25 bp, Homo sapien
agtagaggctctgtcaagtcaatac

SEQ ID NO: 51810 - DNA, 25 bp, Homo sapien
atagggaaaacttccggatgctgtc

SEQ ID NO: 51811 - DNA, 25 bp, Homo sapien
ctcaagttgtctgtgtcggtatccc

SEQ ID NO: 51812 - DNA, 25 bp, Homo sapien
aacagaatgtggtaactgccaatgc

SEQ ID NO: 51813 - DNA, 25 bp, Homo sapien
ctatgtctggggtttggttagaatt

SEQ ID NO: 51814 - DNA, 25 bp, Homo sapien
cagcagcagcacatagctacactga

SEQ ID NO: 51815 - DNA, 25 bp, Homo sapien
aagaagccacgcctgagatacaaaa

SEQ ID NO: 51816 - DNA, 25 bp, Homo sapien
aacagaatgtggtaactgccaatgc

SEQ ID NO: 51817 - DNA, 25 bp, Homo sapien
ctcaagttgtctgtgtcggtatccc

SEQ ID NO: 51818 - DNA, 25 bp, Homo sapien
cagcagcagcacatagctacactga

SEQ ID NO: 51819 - DNA, 25 bp, Homo sapien
gatgacacacaacctgtatggatcc

SEQ ID NO: 51820 - DNA, 25 bp, Homo sapien
tgaacctcaagaggacagatgacac

SEQ ID NO: 51821 - DNA, 25 bp, Homo sapien
ggatgctgtcccaaaccgtggaata

SEQ ID NO: 51822 - DNA, 25 bp, Homo sapien
atagggaaaacttccggatgctgtc

SEQ ID NO: 51823 - DNA, 25 bp, Homo sapien
ctatgtctggggtttggttagaatt

SEQ ID NO: 51824 - DNA, 25 bp, Homo sapien
aagaagccacgcctgagatacaaaa

SEQ ID NO: 51825 - DNA, 25 bp, Homo sapien
agtagaggctctgtcaagtcaatac

SEQ ID NO: 51826 - DNA, 25 bp, Homo sapien
ttggagccattttgagacagaagta

SEQ ID NO: 51827 - DNA, 25 bp, Homo sapien
tgaacctcaagaggacagatgacac

SEQ ID NO: 51828 - DNA, 25 bp, Homo sapien
ttggagccattttgagacagaagta

SEQ ID NO: 51829 - DNA, 25 bp, Homo sapien
ctatgtctggggtttggttagaatt

SEQ ID NO: 51830 - DNA, 25 bp, Homo sapien
ggatgctgtcccaaaccgtggaata

SEQ ID NO: 51831 - DNA, 25 bp, Homo sapien
atagggaaaacttccggatgctgtc

SEQ ID NO: 51832 - DNA, 25 bp, Homo sapien
cagcagcagcacatagctacactga

SEQ ID NO: 51833 - DNA, 25 bp, Homo sapien
agtagaggctctgtcaagtcaatac

SEQ ID NO: 51834 - DNA, 25 bp, Homo sapien
aagaagccacgcctgagatacaaaa

SEQ ID NO: 51835 - DNA, 25 bp, Homo sapien
gatgacacacaacctgtatggatcc

SEQ ID NO: 51836 - DNA, 25 bp, Homo sapien
aacagaatgtggtaactgccaatgc

SEQ ID NO: 51837 - DNA, 25 bp, Homo sapien
ctcaagttgtctgtgtcggtatccc

SEQ ID NO: 51838 - DNA, 25 bp, Homo sapien
aacagaatgtggtaactgccaatgc

SEQ ID NO: 51839 - DNA, 25 bp, Homo sapien
ctcaagttgtctgtgtcggtatccc

SEQ ID NO: 51840 - DNA, 25 bp, Homo sapien
cagcagcagcacatagctacactga

SEQ ID NO: 51841 - DNA, 25 bp, Homo sapien
gatgacacacaacctgtatggatcc

SEQ ID NO: 51842 - DNA, 25 bp, Homo sapien
tgaacctcaagaggacagatgacac

SEQ ID NO: 51843 - DNA, 25 bp, Homo sapien
ggatgctgtcccaaaccgtggaata

SEQ ID NO: 51844 - DNA, 25 bp, Homo sapien
atagggaaaacttccggatgctgtc

SEQ ID NO: 51845 - DNA, 25 bp, Homo sapien
ctatgtctggggtttggttagaatt

SEQ ID NO: 51846 - DNA, 25 bp, Homo sapien
aagaagccacgcctgagatacaaaa

SEQ ID NO: 51847 - DNA, 25 bp, Homo sapien
agtagaggctctgtcaagtcaatac

SEQ ID NO: 51848 - DNA, 25 bp, Homo sapien
ttggagccattttgagacagaagta

SEQ ID NO: 51849 - DNA, 25 bp, Homo sapien
aacagaatgtggtaactgccaatgc

SEQ ID NO: 51850 - DNA, 25 bp, Homo sapien
ctcaagttgtctgtgtcggtatccc

SEQ ID NO: 51851 - DNA, 25 bp, Homo sapien
cagcagcagcacatagctacactga

SEQ ID NO: 51852 - DNA, 25 bp, Homo sapien
gatgacacacaacctgtatggatcc

SEQ ID NO: 51853 - DNA, 25 bp, Homo sapien
tgaacctcaagaggacagatgacac

SEQ ID NO: 51854 - DNA, 25 bp, Homo sapien
ggatgctgtcccaaaccgtggaata

SEQ ID NO: 51855 - DNA, 25 bp, Homo sapien
atagggaaaacttccggatgctgtc

SEQ ID NO: 51856 - DNA, 25 bp, Homo sapien
ctatgtctggggtttggttagaatt

SEQ ID NO: 51857 - DNA, 25 bp, Homo sapien
aagaagccacgcctgagatacaaaa

SEQ ID NO: 51858 - DNA, 25 bp, Homo sapien
agtagaggctctgtcaagtcaatac

SEQ ID NO: 51859 - DNA, 25 bp, Homo sapien
ttggagccattttgagacagaagta

SEQ ID NO: 51860 - DNA, 25 bp, Homo sapien
gatgacacacaacctgtatggatcc

SEQ ID NO: 51861 - DNA, 25 bp, Homo sapien
agtagaggctctgtcaagtcaatac

SEQ ID NO: 51862 - DNA, 25 bp, Homo sapien
ctcaagttgtctgtgtcggtatccc

SEQ ID NO: 51863 - DNA, 25 bp, Homo sapien
aagaagccacgcctgagatacaaaa

SEQ ID NO: 51864 - DNA, 25 bp, Homo sapien
tgaacctcaagaggacagatgacac

SEQ ID NO: 51865 - DNA, 25 bp, Homo sapien
ttggagccattttgagacagaagta

SEQ ID NO: 51866 - DNA, 25 bp, Homo sapien
atagggaaaacttccggatgctgtc

SEQ ID NO: 51867 - DNA, 25 bp, Homo sapien
aacagaatgtggtaactgccaatgc

SEQ ID NO: 51868 - DNA, 25 bp, Homo sapien
cagcagcagcacatagctacactga

SEQ ID NO: 51869 - DNA, 25 bp, Homo sapien
ggatgctgtcccaaaccgtggaata

SEQ ID NO: 51870 - DNA, 25 bp, Homo sapien
ctatgtctggggtttggttagaatt

SEQ ID NO: 51871 - DNA, 25 bp, Homo sapien
aacagaatgtggtaactgccaatgc

SEQ ID NO: 51872 - DNA, 25 bp, Homo sapien
ctcaagttgtctgtgtcggtatccc

SEQ ID NO: 51873 - DNA, 25 bp, Homo sapien
cagcagcagcacatagctacactga

SEQ ID NO: 51874 - DNA, 25 bp, Homo sapien
gatgacacacaacctgtatggatcc

SEQ ID NO: 51875 - DNA, 25 bp, Homo sapien
tgaacctcaagaggacagatgacac

SEQ ID NO: 51876 - DNA, 25 bp, Homo sapien
ggatgctgtcccaaaccgtggaata

SEQ ID NO: 51877 - DNA, 25 bp, Homo sapien
atagggaaaacttccggatgctgtc

SEQ ID NO: 51878 - DNA, 25 bp, Homo sapien
ctatgtctggggtttggttagaatt

SEQ ID NO: 51879 - DNA, 25 bp, Homo sapien
aagaagccacgcctgagatacaaaa

SEQ ID NO: 51880 - DNA, 25 bp, Homo sapien
agtagaggctctgtcaagtcaatac

SEQ ID NO: 51881 - DNA, 25 bp, Homo sapien
ttggagccattttgagacagaagta

SEQ ID NO: 51882 - DNA, 25 bp, Homo sapien
ctcaagttgtctgtgtcggtatccc

SEQ ID NO: 51883 - DNA, 25 bp, Homo sapien
tgaacctcaagaggacagatgacac

SEQ ID NO: 51884 - DNA, 25 bp, Homo sapien
agtagaggctctgtcaagtcaatac

SEQ ID NO: 51885 - DNA, 25 bp, Homo sapien
atagggaaaacttccggatgctgtc

SEQ ID NO: 51886 - DNA, 25 bp, Homo sapien
aagaagccacgcctgagatacaaaa

SEQ ID NO: 51887 - DNA, 25 bp, Homo sapien
ggatgctgtcccaaaccgtggaata

SEQ ID NO: 51888 - DNA, 25 bp, Homo sapien
aacagaatgtggtaactgccaatgc

SEQ ID NO: 51889 - DNA, 25 bp, Homo sapien
cagcagcagcacatagctacactga

SEQ ID NO: 51890 - DNA, 25 bp, Homo sapien
ttggagccattttgagacagaagta

SEQ ID NO: 51891 - DNA, 25 bp, Homo sapien
ctatgtctggggtttggttagaatt

SEQ ID NO: 51892 - DNA, 25 bp, Homo sapien
gatgacacacaacctgtatggatcc

SEQ ID NO: 51893 - DNA, 25 bp, Homo sapien
aacagaatgtggtaactgccaatgc

SEQ ID NO: 51894 - DNA, 25 bp, Homo sapien
ctcaagttgtctgtgtcggtatccc

SEQ ID NO: 51895 - DNA, 25 bp, Homo sapien
cagcagcagcacatagctacactga

SEQ ID NO: 51896 - DNA, 25 bp, Homo sapien
gatgacacacaacctgtatggatcc

SEQ ID NO: 51897 - DNA, 25 bp, Homo sapien
tgaacctcaagaggacagatgacac

SEQ ID NO: 51898 - DNA, 25 bp, Homo sapien
ggatgctgtcccaaaccgtggaata

SEQ ID NO: 51899 - DNA, 25 bp, Homo sapien
atagggaaaacttccggatgctgtc

SEQ ID NO: 51900 - DNA, 25 bp, Homo sapien
ctatgtctggggtttggttagaatt

SEQ ID NO: 51901 - DNA, 25 bp, Homo sapien
aagaagccacgcctgagatacaaaa

SEQ ID NO: 51902 - DNA, 25 bp, Homo sapien
agtagaggctctgtcaagtcaatac

SEQ ID NO: 51903 - DNA, 25 bp, Homo sapien
ttggagccattttgagacagaagta

SEQ ID NO: 51904 - DNA, 25 bp, Homo sapien
aagaagccacgcctgagatacaaaa

SEQ ID NO: 51905 - DNA, 25 bp, Homo sapien
aacagaatgtggtaactgccaatgc

SEQ ID NO: 51906 - DNA, 25 bp, Homo sapien
ggatgctgtcccaaaccgtggaata

SEQ ID NO: 51907 - DNA, 25 bp, Homo sapien
atagggaaaacttccggatgctgtc

SEQ ID NO: 51908 - DNA, 25 bp, Homo sapien
ttggagccattttgagacagaagta

SEQ ID NO: 51909 - DNA, 25 bp, Homo sapien
tgaacctcaagaggacagatgacac

SEQ ID NO: 51910 - DNA, 25 bp, Homo sapien
cagcagcagcacatagctacactga

SEQ ID NO: 51911 - DNA, 25 bp, Homo sapien
ctatgtctggggtttggttagaatt

SEQ ID NO: 51912 - DNA, 25 bp, Homo sapien
ctcaagttgtctgtgtcggtatccc

SEQ ID NO: 51913 - DNA, 25 bp, Homo sapien
agtagaggctctgtcaagtcaatac

SEQ ID NO: 51914 - DNA, 25 bp, Homo sapien
gatgacacacaacctgtatggatcc

SEQ ID NO: 51915 - DNA, 25 bp, Homo sapien
aacagaatgtggtaactgccaatgc

SEQ ID NO: 51916 - DNA, 25 bp, Homo sapien
ctcaagttgtctgtgtcggtatccc

SEQ ID NO: 51917 - DNA, 25 bp, Homo sapien
cagcagcagcacatagctacactga

SEQ ID NO: 51918 - DNA, 25 bp, Homo sapien
gatgacacacaacctgtatggatcc

SEQ ID NO: 51919 - DNA, 25 bp, Homo sapien
tgaacctcaagaggacagatgacac

SEQ ID NO: 51920 - DNA, 25 bp, Homo sapien
ggatgctgtcccaaaccgtggaata

SEQ ID NO: 51921 - DNA, 25 bp, Homo sapien
atagggaaaacttccggatgctgtc

SEQ ID NO: 51922 - DNA, 25 bp, Homo sapien
ctatgtctggggtttggttagaatt

SEQ ID NO: 51923 - DNA, 25 bp, Homo sapien
aagaagccacgcctgagatacaaaa

SEQ ID NO: 51924 - DNA, 25 bp, Homo sapien
agtagaggctctgtcaagtcaatac

SEQ ID NO: 51925 - DNA, 25 bp, Homo sapien
ttggagccattttgagacagaagta

SEQ ID NO: 51926 - DNA, 25 bp, Homo sapien
ctatgtctggggtttggttagaatt

SEQ ID NO: 51927 - DNA, 25 bp, Homo sapien
ttggagccattttgagacagaagta

SEQ ID NO: 51928 - DNA, 25 bp, Homo sapien
ggatgctgtcccaaaccgtggaata

SEQ ID NO: 51929 - DNA, 25 bp, Homo sapien
aagaagccacgcctgagatacaaaa

SEQ ID NO: 51930 - DNA, 25 bp, Homo sapien
cagcagcagcacatagctacactga

SEQ ID NO: 51931 - DNA, 25 bp, Homo sapien
agtagaggctctgtcaagtcaatac

SEQ ID NO: 51932 - DNA, 25 bp, Homo sapien
gatgacacacaacctgtatggatcc

SEQ ID NO: 51933 - DNA, 25 bp, Homo sapien
atagggaaaacttccggatgctgtc

SEQ ID NO: 51934 - DNA, 25 bp, Homo sapien
aacagaatgtggtaactgccaatgc

SEQ ID NO: 51935 - DNA, 25 bp, Homo sapien
tgaacctcaagaggacagatgacac

SEQ ID NO: 51936 - DNA, 25 bp, Homo sapien
ctcaagttgtctgtgtcggtatccc

SEQ ID NO: 51937 - DNA, 25 bp, Homo sapien
aacagaatgtggtaactgccaatgc

SEQ ID NO: 51938 - DNA, 25 bp, Homo sapien
ctcaagttgtctgtgtcggtatccc

SEQ ID NO: 51939 - DNA, 25 bp, Homo sapien
cagcagcagcacatagctacactga

SEQ ID NO: 51940 - DNA, 25 bp, Homo sapien
gatgacacacaacctgtatggatcc

SEQ ID NO: 51941 - DNA, 25 bp, Homo sapien
tgaacctcaagaggacagatgacac

SEQ ID NO: 51942 - DNA, 25 bp, Homo sapien
ggatgctgtcccaaaccgtggaata

SEQ ID NO: 51943 - DNA, 25 bp, Homo sapien
atagggaaaacttccggatgctgtc

SEQ ID NO: 51944 - DNA, 25 bp, Homo sapien
ctatgtctggggtttggttagaatt

SEQ ID NO: 51945 - DNA, 25 bp, Homo sapien
aagaagccacgcctgagatacaaaa

SEQ ID NO: 51946 - DNA, 25 bp, Homo sapien
agtagaggctctgtcaagtcaatac

SEQ ID NO: 51947 - DNA, 25 bp, Homo sapien
ttggagccattttgagacagaagta

SEQ ID NO: 51948 - DNA, 25 bp, Homo sapien
agtagaggctctgtcaagtcaatac

SEQ ID NO: 51949 - DNA, 25 bp, Homo sapien
ggatgctgtcccaaaccgtggaata

SEQ ID NO: 51950 - DNA, 25 bp, Homo sapien
tgaacctcaagaggacagatgacac

SEQ ID NO: 51951 - DNA, 25 bp, Homo sapien
aacagaatgtggtaactgccaatgc

SEQ ID NO: 51952 - DNA, 25 bp, Homo sapien
aagaagccacgcctgagatacaaaa

SEQ ID NO: 51953 - DNA, 25 bp, Homo sapien
atagggaaaacttccggatgctgtc

SEQ ID NO: 51954 - DNA, 25 bp, Homo sapien
ctatgtctggggtttggttagaatt

SEQ ID NO: 51955 - DNA, 25 bp, Homo sapien
ttggagccattttgagacagaagta

SEQ ID NO: 51956 - DNA, 25 bp, Homo sapien
ctcaagttgtctgtgtcggtatccc

SEQ ID NO: 51957 - DNA, 25 bp, Homo sapien
gatgacacacaacctgtatggatcc

SEQ ID NO: 51958 - DNA, 25 bp, Homo sapien
cagcagcagcacatagctacactga

SEQ ID NO: 51959 - DNA, 25 bp, Homo sapien
ctcaagttgtctgtgtcggtatccc

SEQ ID NO: 51960 - DNA, 25 bp, Homo sapien
cagcagcagcacatagctacactga

SEQ ID NO: 51961 - DNA, 25 bp, Homo sapien
ttggagccattttgagacagaagta

SEQ ID NO: 51962 - DNA, 25 bp, Homo sapien
atagggaaaacttccggatgctgtc

SEQ ID NO: 51963 - DNA, 25 bp, Homo sapien
aagaagccacgcctgagatacaaaa

SEQ ID NO: 51964 - DNA, 25 bp, Homo sapien
tgaacctcaagaggacagatgacac

SEQ ID NO: 51965 - DNA, 25 bp, Homo sapien
ctatgtctggggtttggttagaatt

SEQ ID NO: 51966 - DNA, 25 bp, Homo sapien
gatgacacacaacctgtatggatcc

SEQ ID NO: 51967 - DNA, 25 bp, Homo sapien
aacagaatgtggtaactgccaatgc

SEQ ID NO: 51968 - DNA, 25 bp, Homo sapien
ggatgctgtcccaaaccgtggaata

SEQ ID NO: 51969 - DNA, 25 bp, Homo sapien
agtagaggctctgtcaagtcaatac

SEQ ID NO: 51970 - DNA, 25 bp, Homo sapien
aacagaatgtggtaactgccaatgc

SEQ ID NO: 51971 - DNA, 25 bp, Homo sapien
ctcaagttgtctgtgtcggtatccc

SEQ ID NO: 51972 - DNA, 25 bp, Homo sapien
cagcagcagcacatagctacactga

SEQ ID NO: 51973 - DNA, 25 bp, Homo sapien
gatgacacacaacctgtatggatcc

SEQ ID NO: 51974 - DNA, 25 bp, Homo sapien
tgaacctcaagaggacagatgacac

SEQ ID NO: 51975 - DNA, 25 bp, Homo sapien
ggatgctgtcccaaaccgtggaata

SEQ ID NO: 51976 - DNA, 25 bp, Homo sapien
atagggaaaacttccggatgctgtc

SEQ ID NO: 51977 - DNA, 25 bp, Homo sapien
ctatgtctggggtttggttagaatt

SEQ ID NO: 51978 - DNA, 25 bp, Homo sapien
aagaagccacgcctgagatacaaaa

SEQ ID NO: 51979 - DNA, 25 bp, Homo sapien
agtagaggctctgtcaagtcaatac

SEQ ID NO: 51980 - DNA, 25 bp, Homo sapien
ttggagccattttgagacagaagta

SEQ ID NO: 51981 - DNA, 25 bp, Homo sapien
agtagaggctctgtcaagtcaatac

SEQ ID NO: 51982 - DNA, 25 bp, Homo sapien
ttggagccattttgagacagaagta

SEQ ID NO: 51983 - DNA, 25 bp, Homo sapien
aagaagccacgcctgagatacaaaa

SEQ ID NO: 51984 - DNA, 25 bp, Homo sapien
tgaacctcaagaggacagatgacac

SEQ ID NO: 51985 - DNA, 25 bp, Homo sapien
atagggaaaacttccggatgctgtc

SEQ ID NO: 51986 - DNA, 25 bp, Homo sapien
ctcaagttgtctgtgtcggtatccc

SEQ ID NO: 51987 - DNA, 25 bp, Homo sapien
ctatgtctggggtttggttagaatt

SEQ ID NO: 51988 - DNA, 25 bp, Homo sapien
cagcagcagcacatagctacactga

SEQ ID NO: 51989 - DNA, 25 bp, Homo sapien
ggatgctgtcccaaaccgtggaata

SEQ ID NO: 51990 - DNA, 25 bp, Homo sapien
aacagaatgtggtaactgccaatgc

SEQ ID NO: 51991 - DNA, 25 bp, Homo sapien
gatgacacacaacctgtatggatcc

SEQ ID NO: 51992 - DNA, 25 bp, Homo sapien
aacagaatgtggtaactgccaatgc

SEQ ID NO: 51993 - DNA, 25 bp, Homo sapien
ctcaagttgtctgtgtcggtatccc

SEQ ID NO: 51994 - DNA, 25 bp, Homo sapien
cagcagcagcacatagctacactga

SEQ ID NO: 51995 - DNA, 25 bp, Homo sapien
gatgacacacaacctgtatggatcc

SEQ ID NO: 51996 - DNA, 25 bp, Homo sapien
tgaacctcaagaggacagatgacac

SEQ ID NO: 51997 - DNA, 25 bp, Homo sapien
ggatgctgtcccaaaccgtggaata

SEQ ID NO: 51998 - DNA, 25 bp, Homo sapien
atagggaaaacttccggatgctgtc

SEQ ID NO: 51999 - DNA, 25 bp, Homo sapien
ctatgtctggggtttggttagaatt

SEQ ID NO: 52000 - DNA, 25 bp, Homo sapien
aagaagccacgcctgagatacaaaa

SEQ ID NO: 52001 - DNA, 25 bp, Homo sapien
agtagaggctctgtcaagtcaatac

SEQ ID NO: 52002 - DNA, 25 bp, Homo sapien
ttggagccattttgagacagaagta

SEQ ID NO: 52003 - DNA, 25 bp, Homo sapien
tgaacctcaagaggacagatgacac

SEQ ID NO: 52004 - DNA, 25 bp, Homo sapien
gatgacacacaacctgtatggatcc

SEQ ID NO: 52005 - DNA, 25 bp, Homo sapien
ttggagccattttgagacagaagta

SEQ ID NO: 52006 - DNA, 25 bp, Homo sapien
aagaagccacgcctgagatacaaaa

SEQ ID NO: 52007 - DNA, 25 bp, Homo sapien
cagcagcagcacatagctacactga

SEQ ID NO: 52008 - DNA, 25 bp, Homo sapien
ggatgctgtcccaaaccgtggaata

SEQ ID NO: 52009 - DNA, 25 bp, Homo sapien
ctcaagttgtctgtgtcggtatccc

SEQ ID NO: 52010 - DNA, 25 bp, Homo sapien
ctatgtctggggtttggttagaatt

SEQ ID NO: 52011 - DNA, 25 bp, Homo sapien
agtagaggctctgtcaagtcaatac

SEQ ID NO: 52012 - DNA, 25 bp, Homo sapien
aacagaatgtggtaactgccaatgc

SEQ ID NO: 52013 - DNA, 25 bp, Homo sapien
atagggaaaacttccggatgctgtc

SEQ ID NO: 52014 - DNA, 25 bp, Homo sapien
aacagaatgtggtaactgccaatgc

SEQ ID NO: 52015 - DNA, 25 bp, Homo sapien
ctcaagttgtctgtgtcggtatccc

SEQ ID NO: 52016 - DNA, 25 bp, Homo sapien
cagcagcagcacatagctacactga

SEQ ID NO: 52017 - DNA, 25 bp, Homo sapien
gatgacacacaacctgtatggatcc

SEQ ID NO: 52018 - DNA, 25 bp, Homo sapien
tgaacctcaagaggacagatgacac

SEQ ID NO: 52019 - DNA, 25 bp, Homo sapien
ggatgctgtcccaaaccgtggaata

SEQ ID NO: 52020 - DNA, 25 bp, Homo sapien
atagggaaaacttccggatgctgtc

SEQ ID NO: 52021 - DNA, 25 bp, Homo sapien
ctatgtctggggtttggttagaatt

SEQ ID NO: 52022 - DNA, 25 bp, Homo sapien
aagaagccacgcctgagatacaaaa

SEQ ID NO: 52023 - DNA, 25 bp, Homo sapien
agtagaggctctgtcaagtcaatac

SEQ ID NO: 52024 - DNA, 25 bp, Homo sapien
ttggagccattttgagacagaagta

SEQ ID NO: 52025 - DNA, 25 bp, Homo sapien
ggatgctgtcccaaaccgtggaata

SEQ ID NO: 52026 - DNA, 25 bp, Homo sapien
ctcaagttgtctgtgtcggtatccc

SEQ ID NO: 52027 - DNA, 25 bp, Homo sapien
atagggaaaacttccggatgctgtc

SEQ ID NO: 52028 - DNA, 25 bp, Homo sapien
agtagaggctctgtcaagtcaatac

SEQ ID NO: 52029 - DNA, 25 bp, Homo sapien
aagaagccacgcctgagatacaaaa

SEQ ID NO: 52030 - DNA, 25 bp, Homo sapien
cagcagcagcacatagctacactga

SEQ ID NO: 52031 - DNA, 25 bp, Homo sapien
ctatgtctggggtttggttagaatt

SEQ ID NO: 52032 - DNA, 25 bp, Homo sapien
ttggagccattttgagacagaagta

SEQ ID NO: 52033 - DNA, 25 bp, Homo sapien
tgaacctcaagaggacagatgacac

SEQ ID NO: 52034 - DNA, 25 bp, Homo sapien
aacagaatgtggtaactgccaatgc

SEQ ID NO: 52035 - DNA, 25 bp, Homo sapien
gatgacacacaacctgtatggatcc

SEQ ID NO: 52036 - DNA, 25 bp, Homo sapien
aacagaatgtggtaactgccaatgc

SEQ ID NO: 52037 - DNA, 25 bp, Homo sapien
ctcaagttgtctgtgtcggtatccc

SEQ ID NO: 52038 - DNA, 25 bp, Homo sapien
cagcagcagcacatagctacactga

SEQ ID NO: 52039 - DNA, 25 bp, Homo sapien
gatgacacacaacctgtatggatcc

SEQ ID NO: 52040 - DNA, 25 bp, Homo sapien
tgaacctcaagaggacagatgacac

SEQ ID NO: 52041 - DNA, 25 bp, Homo sapien
ggatgctgtcccaaaccgtggaata

SEQ ID NO: 52042 - DNA, 25 bp, Homo sapien
atagggaaaacttccggatgctgtc

SEQ ID NO: 52043 - DNA, 25 bp, Homo sapien
ctatgtctggggtttggttagaatt

SEQ ID NO: 52044 - DNA, 25 bp, Homo sapien
aagaagccacgcctgagatacaaaa

SEQ ID NO: 52045 - DNA, 25 bp, Homo sapien
agtagaggctctgtcaagtcaatac

SEQ ID NO: 52046 - DNA, 25 bp, Homo sapien
ttggagccattttgagacagaagta

SEQ ID NO: 52047 - DNA, 25 bp, Homo sapien
cagcagcagcacatagctacactga

SEQ ID NO: 52048 - DNA, 25 bp, Homo sapien
aacagaatgtggtaactgccaatgc

SEQ ID NO: 52049 - DNA, 25 bp, Homo sapien
atagggaaaacttccggatgctgtc

SEQ ID NO: 52050 - DNA, 25 bp, Homo sapien
tgaacctcaagaggacagatgacac

SEQ ID NO: 52051 - DNA, 25 bp, Homo sapien
aagaagccacgcctgagatacaaaa

SEQ ID NO: 52052 - DNA, 25 bp, Homo sapien
gatgacacacaacctgtatggatcc

SEQ ID NO: 52053 - DNA, 25 bp, Homo sapien
agtagaggctctgtcaagtcaatac

SEQ ID NO: 52054 - DNA, 25 bp, Homo sapien
ggatgctgtcccaaaccgtggaata

SEQ ID NO: 52055 - DNA, 25 bp, Homo sapien
ctcaagttgtctgtgtcggtatccc

SEQ ID NO: 52056 - DNA, 25 bp, Homo sapien
ctatgtctggggtttggttagaatt

SEQ ID NO: 52057 - DNA, 25 bp, Homo sapien
ttggagccattttgagacagaagta

SEQ ID NO: 52058 - DNA, 25 bp, Homo sapien
aacagaatgtggtaactgccaatgc

SEQ ID NO: 52059 - DNA, 25 bp, Homo sapien
ctcaagttgtctgtgtcggtatccc

SEQ ID NO: 52060 - DNA, 25 bp, Homo sapien
cagcagcagcacatagctacactga

SEQ ID NO: 52061 - DNA, 25 bp, Homo sapien
gatgacacacaacctgtatggatcc

SEQ ID NO: 52062 - DNA, 25 bp, Homo sapien
tgaacctcaagaggacagatgacac

SEQ ID NO: 52063 - DNA, 25 bp, Homo sapien
ggatgctgtcccaaaccgtggaata

SEQ ID NO: 52064 - DNA, 25 bp, Homo sapien
atagggaaaacttccggatgctgtc

SEQ ID NO: 52065 - DNA, 25 bp, Homo sapien
ctatgtctggggtttggttagaatt

SEQ ID NO: 52066 - DNA, 25 bp, Homo sapien
aagaagccacgcctgagatacaaaa

SEQ ID NO: 52067 - DNA, 25 bp, Homo sapien
agtagaggctctgtcaagtcaatac

SEQ ID NO: 52068 - DNA, 25 bp, Homo sapien
ttggagccattttgagacagaagta

SEQ ID NO: 52069 - DNA, 25 bp, Homo sapien
ttggagccattttgagacagaagta

SEQ ID NO: 52070 - DNA, 25 bp, Homo sapien
aacagaatgtggtaactgccaatgc

SEQ ID NO: 52071 - DNA, 25 bp, Homo sapien
ctatgtctggggtttggttagaatt

SEQ ID NO: 52072 - DNA, 25 bp, Homo sapien
ggatgctgtcccaaaccgtggaata

SEQ ID NO: 52073 - DNA, 25 bp, Homo sapien
tgaacctcaagaggacagatgacac

SEQ ID NO: 52074 - DNA, 25 bp, Homo sapien
gatgacacacaacctgtatggatcc

SEQ ID NO: 52075 - DNA, 25 bp, Homo sapien
cagcagcagcacatagctacactga

SEQ ID NO: 52076 - DNA, 25 bp, Homo sapien
agtagaggctctgtcaagtcaatac

SEQ ID NO: 52077 - DNA, 25 bp, Homo sapien
aagaagccacgcctgagatacaaaa

SEQ ID NO: 52078 - DNA, 25 bp, Homo sapien
ctcaagttgtctgtgtcggtatccc

SEQ ID NO: 52079 - DNA, 25 bp, Homo sapien
atagggaaaacttccggatgctgtc

SEQ ID NO: 52080 - DNA, 25 bp, Homo sapien
aacagaatgtggtaactgccaatgc

SEQ ID NO: 52081 - DNA, 25 bp, Homo sapien
ctcaagttgtctgtgtcggtatccc

SEQ ID NO: 52082 - DNA, 25 bp, Homo sapien
cagcagcagcacatagctacactga

SEQ ID NO: 52083 - DNA, 25 bp, Homo sapien
gatgacacacaacctgtatggatcc

SEQ ID NO: 52084 - DNA, 25 bp, Homo sapien
tgaacctcaagaggacagatgacac

SEQ ID NO: 52085 - DNA, 25 bp, Homo sapien
ggatgctgtcccaaaccgtggaata

SEQ ID NO: 52086 - DNA, 25 bp, Homo sapien
atagggaaaacttccggatgctgtc

SEQ ID NO: 52087 - DNA, 25 bp, Homo sapien
ctatgtctggggtttggttagaatt

SEQ ID NO: 52088 - DNA, 25 bp, Homo sapien
aagaagccacgcctgagatacaaaa

SEQ ID NO: 52089 - DNA, 25 bp, Homo sapien
agtagaggctctgtcaagtcaatac

SEQ ID NO: 52090 - DNA, 25 bp, Homo sapien
ttggagccattttgagacagaagta

SEQ ID NO: 52091 - DNA, 25 bp, Homo sapien
aacagaatgtggtaactgccaatgc

SEQ ID NO: 52092 - DNA, 25 bp, Homo sapien
ctcaagttgtctgtgtcggtatccc

SEQ ID NO: 52093 - DNA, 25 bp, Homo sapien
cagcagcagcacatagctacactga

SEQ ID NO: 52094 - DNA, 25 bp, Homo sapien
gatgacacacaacctgtatggatcc

SEQ ID NO: 52095 - DNA, 25 bp, Homo sapien
tgaacctcaagaggacagatgacac

SEQ ID NO: 52096 - DNA, 25 bp, Homo sapien
ggatgctgtcccaaaccgtggaata

SEQ ID NO: 52097 - DNA, 25 bp, Homo sapien
atagggaaaacttccggatgctgtc

SEQ ID NO: 52098 - DNA, 25 bp, Homo sapien
ctatgtctggggtttggttagaatt

SEQ ID NO: 52099 - DNA, 25 bp, Homo sapien
aagaagccacgcctgagatacaaaa

SEQ ID NO: 52100 - DNA, 25 bp, Homo sapien
agtagaggctctgtcaagtcaatac

SEQ ID NO: 52101 - DNA, 25 bp, Homo sapien
ttggagccattttgagacagaagta

SEQ ID NO: 52102 - DNA, 25 bp, Homo sapien
ctatgtctggggtttggttagaatt

SEQ ID NO: 52103 - DNA, 25 bp, Homo sapien
ggatgctgtcccaaaccgtggaata

SEQ ID NO: 52104 - DNA, 25 bp, Homo sapien
ctcaagttgtctgtgtcggtatccc

SEQ ID NO: 52105 - DNA, 25 bp, Homo sapien
gatgacacacaacctgtatggatcc

SEQ ID NO: 52106 - DNA, 25 bp, Homo sapien
atagggaaaacttccggatgctgtc

SEQ ID NO: 52107 - DNA, 25 bp, Homo sapien
ttggagccattttgagacagaagta

SEQ ID NO: 52108 - DNA, 25 bp, Homo sapien
aacagaatgtggtaactgccaatgc

SEQ ID NO: 52109 - DNA, 25 bp, Homo sapien
tgaacctcaagaggacagatgacac

SEQ ID NO: 52110 - DNA, 25 bp, Homo sapien
aagaagccacgcctgagatacaaaa

SEQ ID NO: 52111 - DNA, 25 bp, Homo sapien
cagcagcagcacatagctacactga

SEQ ID NO: 52112 - DNA, 25 bp, Homo sapien
agtagaggctctgtcaagtcaatac

SEQ ID NO: 52113 - DNA, 25 bp, Homo sapien
aacagaatgtggtaactgccaatgc

SEQ ID NO: 52114 - DNA, 25 bp, Homo sapien
ctcaagttgtctgtgtcggtatccc

SEQ ID NO: 52115 - DNA, 25 bp, Homo sapien
cagcagcagcacatagctacactga

SEQ ID NO: 52116 - DNA, 25 bp, Homo sapien
gatgacacacaacctgtatggatcc

SEQ ID NO: 52117 - DNA, 25 bp, Homo sapien
tgaacctcaagaggacagatgacac

SEQ ID NO: 52118 - DNA, 25 bp, Homo sapien
ggatgctgtcccaaaccgtggaata

SEQ ID NO: 52119 - DNA, 25 bp, Homo sapien
atagggaaaacttccggatgctgtc

SEQ ID NO: 52120 - DNA, 25 bp, Homo sapien
ctatgtctggggtttggttagaatt

SEQ ID NO: 52121 - DNA, 25 bp, Homo sapien
aagaagccacgcctgagatacaaaa

SEQ ID NO: 52122 - DNA, 25 bp, Homo sapien
agtagaggctctgtcaagtcaatac

SEQ ID NO: 52123 - DNA, 25 bp, Homo sapien
ttggagccattttgagacagaagta

SEQ ID NO: 52124 - DNA, 25 bp, Homo sapien
agtagaggctctgtcaagtcaatac

SEQ ID NO: 52125 - DNA, 25 bp, Homo sapien
aacagaatgtggtaactgccaatgc

SEQ ID NO: 52126 - DNA, 25 bp, Homo sapien
ttggagccattttgagacagaagta

SEQ ID NO: 52127 - DNA, 25 bp, Homo sapien
atagggaaaacttccggatgctgtc

SEQ ID NO: 52128 - DNA, 25 bp, Homo sapien
tgaacctcaagaggacagatgacac

SEQ ID NO: 52129 - DNA, 25 bp, Homo sapien
gatgacacacaacctgtatggatcc

SEQ ID NO: 52130 - DNA, 25 bp, Homo sapien
aagaagccacgcctgagatacaaaa

SEQ ID NO: 52131 - DNA, 25 bp, Homo sapien
ctcaagttgtctgtgtcggtatccc

SEQ ID NO: 52132 - DNA, 25 bp, Homo sapien
cagcagcagcacatagctacactga

SEQ ID NO: 52133 - DNA, 25 bp, Homo sapien
ctatgtctggggtttggttagaatt

SEQ ID NO: 52134 - DNA, 25 bp, Homo sapien
ggatgctgtcccaaaccgtggaata

SEQ ID NO: 52135 - DNA, 25 bp, Homo sapien
aacagaatgtggtaactgccaatgc

SEQ ID NO: 52136 - DNA, 25 bp, Homo sapien
ctcaagttgtctgtgtcggtatccc

SEQ ID NO: 52137 - DNA, 25 bp, Homo sapien
cagcagcagcacatagctacactga

SEQ ID NO: 52138 - DNA, 25 bp, Homo sapien
gatgacacacaacctgtatggatcc

SEQ ID NO: 52139 - DNA, 25 bp, Homo sapien
tgaacctcaagaggacagatgacac

SEQ ID NO: 52140 - DNA, 25 bp, Homo sapien
ggatgctgtcccaaaccgtggaata

SEQ ID NO: 52141 - DNA, 25 bp, Homo sapien
atagggaaaacttccggatgctgtc

SEQ ID NO: 52142 - DNA, 25 bp, Homo sapien
ctatgtctggggtttggttagaatt

SEQ ID NO: 52143 - DNA, 25 bp, Homo sapien
aagaagccacgcctgagatacaaaa

SEQ ID NO: 52144 - DNA, 25 bp, Homo sapien
agtagaggctctgtcaagtcaatac

SEQ ID NO: 52145 - DNA, 25 bp, Homo sapien
ttggagccattttgagacagaagta

SEQ ID NO: 52146 - DNA, 25 bp, Homo sapien
atagggaaaacttccggatgctgtc

SEQ ID NO: 52147 - DNA, 25 bp, Homo sapien
tgaacctcaagaggacagatgacac

SEQ ID NO: 52148 - DNA, 25 bp, Homo sapien
ctatgtctggggtttggttagaatt

SEQ ID NO: 52149 - DNA, 25 bp, Homo sapien
ctcaagttgtctgtgtcggtatccc

SEQ ID NO: 52150 - DNA, 25 bp, Homo sapien
agtagaggctctgtcaagtcaatac

SEQ ID NO: 52151 - DNA, 25 bp, Homo sapien
gatgacacacaacctgtatggatcc

SEQ ID NO: 52152 - DNA, 25 bp, Homo sapien
ttggagccattttgagacagaagta

SEQ ID NO: 52153 - DNA, 25 bp, Homo sapien
cagcagcagcacatagctacactga

SEQ ID NO: 52154 - DNA, 25 bp, Homo sapien
aacagaatgtggtaactgccaatgc

SEQ ID NO: 52155 - DNA, 25 bp, Homo sapien
ggatgctgtcccaaaccgtggaata

SEQ ID NO: 52156 - DNA, 25 bp, Homo sapien
aagaagccacgcctgagatacaaaa

SEQ ID NO: 52157 - DNA, 25 bp, Homo sapien
aacagaatgtggtaactgccaatgc

SEQ ID NO: 52158 - DNA, 25 bp, Homo sapien
ctcaagttgtctgtgtcggtatccc

SEQ ID NO: 52159 - DNA, 25 bp, Homo sapien
cagcagcagcacatagctacactga

SEQ ID NO: 52160 - DNA, 25 bp, Homo sapien
gatgacacacaacctgtatggatcc

SEQ ID NO: 52161 - DNA, 25 bp, Homo sapien
tgaacctcaagaggacagatgacac

SEQ ID NO: 52162 - DNA, 25 bp, Homo sapien
ggatgctgtcccaaaccgtggaata

SEQ ID NO: 52163 - DNA, 25 bp, Homo sapien
atagggaaaacttccggatgctgtc

SEQ ID NO: 52164 - DNA, 25 bp, Homo sapien
ctatgtctggggtttggttagaatt

SEQ ID NO: 52165 - DNA, 25 bp, Homo sapien
aagaagccacgcctgagatacaaaa

SEQ ID NO: 52166 - DNA, 25 bp, Homo sapien
agtagaggctctgtcaagtcaatac

SEQ ID NO: 52167 - DNA, 25 bp, Homo sapien
ttggagccattttgagacagaagta

SEQ ID NO: 52168 - DNA, 25 bp, Homo sapien
agtagaggctctgtcaagtcaatac

SEQ ID NO: 52169 - DNA, 25 bp, Homo sapien
ggatgctgtcccaaaccgtggaata

SEQ ID NO: 52170 - DNA, 25 bp, Homo sapien
tgaacctcaagaggacagatgacac

SEQ ID NO: 52171 - DNA, 25 bp, Homo sapien
ttggagccattttgagacagaagta

SEQ ID NO: 52172 - DNA, 25 bp, Homo sapien
atagggaaaacttccggatgctgtc

SEQ ID NO: 52173 - DNA, 25 bp, Homo sapien
gatgacacacaacctgtatggatcc

SEQ ID NO: 52174 - DNA, 25 bp, Homo sapien
cagcagcagcacatagctacactga

SEQ ID NO: 52175 - DNA, 25 bp, Homo sapien
aagaagccacgcctgagatacaaaa

SEQ ID NO: 52176 - DNA, 25 bp, Homo sapien
aacagaatgtggtaactgccaatgc

SEQ ID NO: 52177 - DNA, 25 bp, Homo sapien
ctatgtctggggtttggttagaatt

SEQ ID NO: 52178 - DNA, 25 bp, Homo sapien
ctcaagttgtctgtgtcggtatccc

SEQ ID NO: 52179 - DNA, 25 bp, Homo sapien
aacagaatgtggtaactgccaatgc

SEQ ID NO: 52180 - DNA, 25 bp, Homo sapien
ctcaagttgtctgtgtcggtatccc

SEQ ID NO: 52181 - DNA, 25 bp, Homo sapien
cagcagcagcacatagctacactga

SEQ ID NO: 52182 - DNA, 25 bp, Homo sapien
gatgacacacaacctgtatggatcc

SEQ ID NO: 52183 - DNA, 25 bp, Homo sapien
tgaacctcaagaggacagatgacac

SEQ ID NO: 52184 - DNA, 25 bp, Homo sapien
ggatgctgtcccaaaccgtggaata

SEQ ID NO: 52185 - DNA, 25 bp, Homo sapien
atagggaaaacttccggatgctgtc

SEQ ID NO: 52186 - DNA, 25 bp, Homo sapien
ctatgtctggggtttggttagaatt

SEQ ID NO: 52187 - DNA, 25 bp, Homo sapien
aagaagccacgcctgagatacaaaa

SEQ ID NO: 52188 - DNA, 25 bp, Homo sapien
agtagaggctctgtcaagtcaatac

SEQ ID NO: 52189 - DNA, 25 bp, Homo sapien
ttggagccattttgagacagaagta

SEQ ID NO: 52190 - DNA, 25 bp, Homo sapien
tgaacctcaagaggacagatgacac

SEQ ID NO: 52191 - DNA, 25 bp, Homo sapien
agtagaggctctgtcaagtcaatac

SEQ ID NO: 52192 - DNA, 25 bp, Homo sapien
cagcagcagcacatagctacactga

SEQ ID NO: 52193 - DNA, 25 bp, Homo sapien
ggatgctgtcccaaaccgtggaata

SEQ ID NO: 52194 - DNA, 25 bp, Homo sapien
ctcaagttgtctgtgtcggtatccc

SEQ ID NO: 52195 - DNA, 25 bp, Homo sapien
ctatgtctggggtttggttagaatt

SEQ ID NO: 52196 - DNA, 25 bp, Homo sapien
aagaagccacgcctgagatacaaaa

SEQ ID NO: 52197 - DNA, 25 bp, Homo sapien
atagggaaaacttccggatgctgtc

SEQ ID NO: 52198 - DNA, 25 bp, Homo sapien
ttggagccattttgagacagaagta

SEQ ID NO: 52199 - DNA, 25 bp, Homo sapien
aacagaatgtggtaactgccaatgc

SEQ ID NO: 52200 - DNA, 25 bp, Homo sapien
gatgacacacaacctgtatggatcc

SEQ ID NO: 52201 - DNA, 25 bp, Homo sapien
cagcagcagcacatagctacactga

SEQ ID NO: 52202 - DNA, 25 bp, Homo sapien
ctcaagttgtctgtgtcggtatccc

SEQ ID NO: 52203 - DNA, 25 bp, Homo sapien
agtagaggctctgtcaagtcaatac

SEQ ID NO: 52204 - DNA, 25 bp, Homo sapien
aagaagccacgcctgagatacaaaa

SEQ ID NO: 52205 - DNA, 25 bp, Homo sapien
atagggaaaacttccggatgctgtc

SEQ ID NO: 52206 - DNA, 25 bp, Homo sapien
ttggagccattttgagacagaagta

SEQ ID NO: 52207 - DNA, 25 bp, Homo sapien
tgaacctcaagaggacagatgacac

SEQ ID NO: 52208 - DNA, 25 bp, Homo sapien
gatgacacacaacctgtatggatcc

SEQ ID NO: 52209 - DNA, 25 bp, Homo sapien
ggatgctgtcccaaaccgtggaata

SEQ ID NO: 52210 - DNA, 25 bp, Homo sapien
aacagaatgtggtaactgccaatgc

SEQ ID NO: 52211 - DNA, 25 bp, Homo sapien
ctatgtctggggtttggttagaatt

SEQ ID NO: 52212 - DNA, 25 bp, Homo sapien
aacagaatgtggtaactgccaatgc

SEQ ID NO: 52213 - DNA, 25 bp, Homo sapien
ctcaagttgtctgtgtcggtatccc

SEQ ID NO: 52214 - DNA, 25 bp, Homo sapien
cagcagcagcacatagctacactga

SEQ ID NO: 52215 - DNA, 25 bp, Homo sapien
gatgacacacaacctgtatggatcc

SEQ ID NO: 52216 - DNA, 25 bp, Homo sapien
tgaacctcaagaggacagatgacac

SEQ ID NO: 52217 - DNA, 25 bp, Homo sapien
ggatgctgtcccaaaccgtggaata

SEQ ID NO: 52218 - DNA, 25 bp, Homo sapien
atagggaaaacttccggatgctgtc

SEQ ID NO: 52219 - DNA, 25 bp, Homo sapien
ctatgtctggggtttggttagaatt

SEQ ID NO: 52220 - DNA, 25 bp, Homo sapien
aagaagccacgcctgagatacaaaa

SEQ ID NO: 52221 - DNA, 25 bp, Homo sapien
agtagaggctctgtcaagtcaatac

SEQ ID NO: 52222 - DNA, 25 bp, Homo sapien
ttggagccattttgagacagaagta

SEQ ID NO: 52223 - DNA, 25 bp, Homo sapien
gatgacacacaacctgtatggatcc

SEQ ID NO: 52224 - DNA, 25 bp, Homo sapien
cagcagcagcacatagctacactga

SEQ ID NO: 52225 - DNA, 25 bp, Homo sapien
tgaacctcaagaggacagatgacac

SEQ ID NO: 52226 - DNA, 25 bp, Homo sapien
agtagaggctctgtcaagtcaatac

SEQ ID NO: 52227 - DNA, 25 bp, Homo sapien
aacagaatgtggtaactgccaatgc

SEQ ID NO: 52228 - DNA, 25 bp, Homo sapien
ctatgtctggggtttggttagaatt

SEQ ID NO: 52229 - DNA, 25 bp, Homo sapien
ggatgctgtcccaaaccgtggaata

SEQ ID NO: 52230 - DNA, 25 bp, Homo sapien
ttggagccattttgagacagaagta

SEQ ID NO: 52231 - DNA, 25 bp, Homo sapien
aagaagccacgcctgagatacaaaa

SEQ ID NO: 52232 - DNA, 25 bp, Homo sapien
atagggaaaacttccggatgctgtc

SEQ ID NO: 52233 - DNA, 25 bp, Homo sapien
ctcaagttgtctgtgtcggtatccc

SEQ ID NO: 52234 - DNA, 25 bp, Homo sapien
aacagaatgtggtaactgccaatgc

SEQ ID NO: 52235 - DNA, 25 bp, Homo sapien
ctcaagttgtctgtgtcggtatccc

SEQ ID NO: 52236 - DNA, 25 bp, Homo sapien
cagcagcagcacatagctacactga

SEQ ID NO: 52237 - DNA, 25 bp, Homo sapien
gatgacacacaacctgtatggatcc

SEQ ID NO: 52238 - DNA, 25 bp, Homo sapien
tgaacctcaagaggacagatgacac

SEQ ID NO: 52239 - DNA, 25 bp, Homo sapien
ggatgctgtcccaaaccgtggaata

SEQ ID NO: 52240 - DNA, 25 bp, Homo sapien
atagggaaaacttccggatgctgtc

SEQ ID NO: 52241 - DNA, 25 bp, Homo sapien
ctatgtctggggtttggttagaatt

SEQ ID NO: 52242 - DNA, 25 bp, Homo sapien
aagaagccacgcctgagatacaaaa

SEQ ID NO: 52243 - DNA, 25 bp, Homo sapien
agtagaggctctgtcaagtcaatac

SEQ ID NO: 52244 - DNA, 25 bp, Homo sapien
ttggagccattttgagacagaagta

SEQ ID NO: 52245 - DNA, 25 bp, Homo sapien
ctcaagttgtctgtgtcggtatccc

SEQ ID NO: 52246 - DNA, 25 bp, Homo sapien
cagcagcagcacatagctacactga

SEQ ID NO: 52247 - DNA, 25 bp, Homo sapien
ttggagccattttgagacagaagta

SEQ ID NO: 52248 - DNA, 25 bp, Homo sapien
ggatgctgtcccaaaccgtggaata

SEQ ID NO: 52249 - DNA, 25 bp, Homo sapien
aacagaatgtggtaactgccaatgc

SEQ ID NO: 52250 - DNA, 25 bp, Homo sapien
tgaacctcaagaggacagatgacac

SEQ ID NO: 52251 - DNA, 25 bp, Homo sapien
gatgacacacaacctgtatggatcc

SEQ ID NO: 52252 - DNA, 25 bp, Homo sapien
ctatgtctggggtttggttagaatt

SEQ ID NO: 52253 - DNA, 25 bp, Homo sapien
agtagaggctctgtcaagtcaatac

SEQ ID NO: 52254 - DNA, 25 bp, Homo sapien
aagaagccacgcctgagatacaaaa

SEQ ID NO: 52255 - DNA, 25 bp, Homo sapien
atagggaaaacttccggatgctgtc

SEQ ID NO: 52256 - DNA, 25 bp, Homo sapien
aacagaatgtggtaactgccaatgc

SEQ ID NO: 52257 - DNA, 25 bp, Homo sapien
ctcaagttgtctgtgtcggtatccc

SEQ ID NO: 52258 - DNA, 25 bp, Homo sapien
cagcagcagcacatagctacactga

SEQ ID NO: 52259 - DNA, 25 bp, Homo sapien
gatgacacacaacctgtatggatcc

SEQ ID NO: 52260 - DNA, 25 bp, Homo sapien
tgaacctcaagaggacagatgacac

SEQ ID NO: 52261 - DNA, 25 bp, Homo sapien
ggatgctgtcccaaaccgtggaata

SEQ ID NO: 52262 - DNA, 25 bp, Homo sapien
atagggaaaacttccggatgctgtc

SEQ ID NO: 52263 - DNA, 25 bp, Homo sapien
ctatgtctggggtttggttagaatt

SEQ ID NO: 52264 - DNA, 25 bp, Homo sapien
aagaagccacgcctgagatacaaaa

SEQ ID NO: 52265 - DNA, 25 bp, Homo sapien
agtagaggctctgtcaagtcaatac

SEQ ID NO: 52266 - DNA, 25 bp, Homo sapien
ttggagccattttgagacagaagta

SEQ ID NO: 52267 - DNA, 25 bp, Homo sapien
tgcgcagtggacagcaatcttttca

SEQ ID NO: 52268 - DNA, 25 bp, Homo sapien
cgcgtcagtctgcctccactctccc

SEQ ID NO: 52269 - DNA, 25 bp, Homo sapien
ccaacacagatgttgagacagagtt

SEQ ID NO: 52270 - DNA, 25 bp, Homo sapien
tcccgcatggggttctccttttcac

SEQ ID NO: 52271 - DNA, 25 bp, Homo sapien
tgcgaagttcccgcatggggttctc

SEQ ID NO: 52272 - DNA, 25 bp, Homo sapien
catttctccggatgccaaaggatct

SEQ ID NO: 52273 - DNA, 25 bp, Homo sapien
agtttgcggatgcgaagttcccgca

SEQ ID NO: 52274 - DNA, 25 bp, Homo sapien
ctccaactcccgcacctttagaccc

SEQ ID NO: 52275 - DNA, 25 bp, Homo sapien
aacaccttggctgctcgcgtcagtc

SEQ ID NO: 52276 - DNA, 25 bp, Homo sapien
tccaggccgtagataccaatgcttg

SEQ ID NO: 52277 - DNA, 25 bp, Homo sapien
tatctagctttggaaaacacagggg

SEQ ID NO: 52278 - DNA, 25 bp, Homo sapien
tccaggccgtagataccaatgcttg

SEQ ID NO: 52279 - DNA, 25 bp, Homo sapien
tcccgcatggggttctccttttcac

SEQ ID NO: 52280 - DNA, 25 bp, Homo sapien
tgcgaagttcccgcatggggttctc

SEQ ID NO: 52281 - DNA, 25 bp, Homo sapien
agtttgcggatgcgaagttcccgca

SEQ ID NO: 52282 - DNA, 25 bp, Homo sapien
ccaacacagatgttgagacagagtt

SEQ ID NO: 52283 - DNA, 25 bp, Homo sapien
cgcgtcagtctgcctccactctccc

SEQ ID NO: 52284 - DNA, 25 bp, Homo sapien
aacaccttggctgctcgcgtcagtc

SEQ ID NO: 52285 - DNA, 25 bp, Homo sapien
tatctagctttggaaaacacagggg

SEQ ID NO: 52286 - DNA, 25 bp, Homo sapien
catttctccggatgccaaaggatct

SEQ ID NO: 52287 - DNA, 25 bp, Homo sapien
tgcgcagtggacagcaatcttttca

SEQ ID NO: 52288 - DNA, 25 bp, Homo sapien
ctccaactcccgcacctttagaccc

SEQ ID NO: 52289 - DNA, 25 bp, Homo sapien
catttctccggatgccaaaggatct

SEQ ID NO: 52290 - DNA, 25 bp, Homo sapien
agtttgcggatgcgaagttcccgca

SEQ ID NO: 52291 - DNA, 25 bp, Homo sapien
ccaacacagatgttgagacagagtt

SEQ ID NO: 52292 - DNA, 25 bp, Homo sapien
ctccaactcccgcacctttagaccc

SEQ ID NO: 52293 - DNA, 25 bp, Homo sapien
aacaccttggctgctcgcgtcagtc

SEQ ID NO: 52294 - DNA, 25 bp, Homo sapien
tcccgcatggggttctccttttcac

SEQ ID NO: 52295 - DNA, 25 bp, Homo sapien
tgcgaagttcccgcatggggttctc

SEQ ID NO: 52296 - DNA, 25 bp, Homo sapien
tccaggccgtagataccaatgcttg

SEQ ID NO: 52297 - DNA, 25 bp, Homo sapien
tatctagctttggaaaacacagggg

SEQ ID NO: 52298 - DNA, 25 bp, Homo sapien
cgcgtcagtctgcctccactctccc

SEQ ID NO: 52299 - DNA, 25 bp, Homo sapien
tgcgcagtggacagcaatcttttca

SEQ ID NO: 52300 - DNA, 25 bp, Homo sapien
tcccgcatggggttctccttttcac

SEQ ID NO: 52301 - DNA, 25 bp, Homo sapien
tgcgaagttcccgcatggggttctc

SEQ ID NO: 52302 - DNA, 25 bp, Homo sapien
agtttgcggatgcgaagttcccgca

SEQ ID NO: 52303 - DNA, 25 bp, Homo sapien
ccaacacagatgttgagacagagtt

SEQ ID NO: 52304 - DNA, 25 bp, Homo sapien
cgcgtcagtctgcctccactctccc

SEQ ID NO: 52305 - DNA, 25 bp, Homo sapien
aacaccttggctgctcgcgtcagtc

SEQ ID NO: 52306 - DNA, 25 bp, Homo sapien
tatctagctttggaaaacacagggg

SEQ ID NO: 52307 - DNA, 25 bp, Homo sapien
catttctccggatgccaaaggatct

SEQ ID NO: 52308 - DNA, 25 bp, Homo sapien
tgcgcagtggacagcaatcttttca

SEQ ID NO: 52309 - DNA, 25 bp, Homo sapien
ctccaactcccgcacctttagaccc

SEQ ID NO: 52310 - DNA, 25 bp, Homo sapien
tccaggccgtagataccaatgcttg

SEQ ID NO: 52311 - DNA, 25 bp, Homo sapien
tatctagctttggaaaacacagggg

SEQ ID NO: 52312 - DNA, 25 bp, Homo sapien
catttctccggatgccaaaggatct

SEQ ID NO: 52313 - DNA, 25 bp, Homo sapien
agtttgcggatgcgaagttcccgca

SEQ ID NO: 52314 - DNA, 25 bp, Homo sapien
tgcgcagtggacagcaatcttttca

SEQ ID NO: 52315 - DNA, 25 bp, Homo sapien
ctccaactcccgcacctttagaccc

SEQ ID NO: 52316 - DNA, 25 bp, Homo sapien
cgcgtcagtctgcctccactctccc

SEQ ID NO: 52317 - DNA, 25 bp, Homo sapien
ccaacacagatgttgagacagagtt

SEQ ID NO: 52318 - DNA, 25 bp, Homo sapien
tcccgcatggggttctccttttcac

SEQ ID NO: 52319 - DNA, 25 bp, Homo sapien
tgcgaagttcccgcatggggttctc

SEQ ID NO: 52320 - DNA, 25 bp, Homo sapien
tccaggccgtagataccaatgcttg

SEQ ID NO: 52321 - DNA, 25 bp, Homo sapien
aacaccttggctgctcgcgtcagtc

SEQ ID NO: 52322 - DNA, 25 bp, Homo sapien
tccaggccgtagataccaatgcttg

SEQ ID NO: 52323 - DNA, 25 bp, Homo sapien
tcccgcatggggttctccttttcac

SEQ ID NO: 52324 - DNA, 25 bp, Homo sapien
tgcgaagttcccgcatggggttctc

SEQ ID NO: 52325 - DNA, 25 bp, Homo sapien
agtttgcggatgcgaagttcccgca

SEQ ID NO: 52326 - DNA, 25 bp, Homo sapien
ccaacacagatgttgagacagagtt

SEQ ID NO: 52327 - DNA, 25 bp, Homo sapien
cgcgtcagtctgcctccactctccc

SEQ ID NO: 52328 - DNA, 25 bp, Homo sapien
aacaccttggctgctcgcgtcagtc

SEQ ID NO: 52329 - DNA, 25 bp, Homo sapien
tatctagctttggaaaacacagggg

SEQ ID NO: 52330 - DNA, 25 bp, Homo sapien
catttctccggatgccaaaggatct

SEQ ID NO: 52331 - DNA, 25 bp, Homo sapien
tgcgcagtggacagcaatcttttca

SEQ ID NO: 52332 - DNA, 25 bp, Homo sapien
ctccaactcccgcacctttagaccc

SEQ ID NO: 52333 - DNA, 25 bp, Homo sapien
tccaggccgtagataccaatgcttg

SEQ ID NO: 52334 - DNA, 25 bp, Homo sapien
tcccgcatggggttctccttttcac

SEQ ID NO: 52335 - DNA, 25 bp, Homo sapien
tgcgaagttcccgcatggggttctc

SEQ ID NO: 52336 - DNA, 25 bp, Homo sapien
agtttgcggatgcgaagttcccgca

SEQ ID NO: 52337 - DNA, 25 bp, Homo sapien
ccaacacagatgttgagacagagtt

SEQ ID NO: 52338 - DNA, 25 bp, Homo sapien
cgcgtcagtctgcctccactctccc

SEQ ID NO: 52339 - DNA, 25 bp, Homo sapien
aacaccttggctgctcgcgtcagtc

SEQ ID NO: 52340 - DNA, 25 bp, Homo sapien
tatctagctttggaaaacacagggg

SEQ ID NO: 52341 - DNA, 25 bp, Homo sapien
catttctccggatgccaaaggatct

SEQ ID NO: 52342 - DNA, 25 bp, Homo sapien
tgcgcagtggacagcaatcttttca

SEQ ID NO: 52343 - DNA, 25 bp, Homo sapien
ctccaactcccgcacctttagaccc

SEQ ID NO: 52344 - DNA, 25 bp, Homo sapien
tatctagctttggaaaacacagggg

SEQ ID NO: 52345 - DNA, 25 bp, Homo sapien
tcccgcatggggttctccttttcac

SEQ ID NO: 52346 - DNA, 25 bp, Homo sapien
tgcgcagtggacagcaatcttttca

SEQ ID NO: 52347 - DNA, 25 bp, Homo sapien
ccaacacagatgttgagacagagtt

SEQ ID NO: 52348 - DNA, 25 bp, Homo sapien
tgcgaagttcccgcatggggttctc

SEQ ID NO: 52349 - DNA, 25 bp, Homo sapien
ctccaactcccgcacctttagaccc

SEQ ID NO: 52350 - DNA, 25 bp, Homo sapien
tccaggccgtagataccaatgcttg

SEQ ID NO: 52351 - DNA, 25 bp, Homo sapien
agtttgcggatgcgaagttcccgca

SEQ ID NO: 52352 - DNA, 25 bp, Homo sapien
catttctccggatgccaaaggatct

SEQ ID NO: 52353 - DNA, 25 bp, Homo sapien
cgcgtcagtctgcctccactctccc

SEQ ID NO: 52354 - DNA, 25 bp, Homo sapien
aacaccttggctgctcgcgtcagtc

SEQ ID NO: 52355 - DNA, 25 bp, Homo sapien
tccaggccgtagataccaatgcttg

SEQ ID NO: 52356 - DNA, 25 bp, Homo sapien
tcccgcatggggttctccttttcac

SEQ ID NO: 52357 - DNA, 25 bp, Homo sapien
tgcgaagttcccgcatggggttctc

SEQ ID NO: 52358 - DNA, 25 bp, Homo sapien
agtttgcggatgcgaagttcccgca

SEQ ID NO: 52359 - DNA, 25 bp, Homo sapien
ccaacacagatgttgagacagagtt

SEQ ID NO: 52360 - DNA, 25 bp, Homo sapien
cgcgtcagtctgcctccactctccc

SEQ ID NO: 52361 - DNA, 25 bp, Homo sapien
aacaccttggctgctcgcgtcagtc

SEQ ID NO: 52362 - DNA, 25 bp, Homo sapien
tatctagctttggaaaacacagggg

SEQ ID NO: 52363 - DNA, 25 bp, Homo sapien
catttctccggatgccaaaggatct

SEQ ID NO: 52364 - DNA, 25 bp, Homo sapien
tgcgcagtggacagcaatcttttca

SEQ ID NO: 52365 - DNA, 25 bp, Homo sapien
ctccaactcccgcacctttagaccc

SEQ ID NO: 52366 - DNA, 25 bp, Homo sapien
cgcgtcagtctgcctccactctccc

SEQ ID NO: 52367 - DNA, 25 bp, Homo sapien
agtttgcggatgcgaagttcccgca

SEQ ID NO: 52368 - DNA, 25 bp, Homo sapien
tgcgaagttcccgcatggggttctc

SEQ ID NO: 52369 - DNA, 25 bp, Homo sapien
catttctccggatgccaaaggatct

SEQ ID NO: 52370 - DNA, 25 bp, Homo sapien
ctccaactcccgcacctttagaccc

SEQ ID NO: 52371 - DNA, 25 bp, Homo sapien
tatctagctttggaaaacacagggg

SEQ ID NO: 52372 - DNA, 25 bp, Homo sapien
tccaggccgtagataccaatgcttg

SEQ ID NO: 52373 - DNA, 25 bp, Homo sapien
ccaacacagatgttgagacagagtt

SEQ ID NO: 52374 - DNA, 25 bp, Homo sapien
tcccgcatggggttctccttttcac

SEQ ID NO: 52375 - DNA, 25 bp, Homo sapien
aacaccttggctgctcgcgtcagtc

SEQ ID NO: 52376 - DNA, 25 bp, Homo sapien
tgcgcagtggacagcaatcttttca

SEQ ID NO: 52377 - DNA, 25 bp, Homo sapien
tccaggccgtagataccaatgcttg

SEQ ID NO: 52378 - DNA, 25 bp, Homo sapien
tcccgcatggggttctccttttcac

SEQ ID NO: 52379 - DNA, 25 bp, Homo sapien
tgcgaagttcccgcatggggttctc

SEQ ID NO: 52380 - DNA, 25 bp, Homo sapien
agtttgcggatgcgaagttcccgca

SEQ ID NO: 52381 - DNA, 25 bp, Homo sapien
ccaacacagatgttgagacagagtt

SEQ ID NO: 52382 - DNA, 25 bp, Homo sapien
cgcgtcagtctgcctccactctccc

SEQ ID NO: 52383 - DNA, 25 bp, Homo sapien
aacaccttggctgctcgcgtcagtc

SEQ ID NO: 52384 - DNA, 25 bp, Homo sapien
tatctagctttggaaaacacagggg

SEQ ID NO: 52385 - DNA, 25 bp, Homo sapien
catttctccggatgccaaaggatct

SEQ ID NO: 52386 - DNA, 25 bp, Homo sapien
tgcgcagtggacagcaatcttttca

SEQ ID NO: 52387 - DNA, 25 bp, Homo sapien
ctccaactcccgcacctttagaccc

SEQ ID NO: 52388 - DNA, 25 bp, Homo sapien
agtttgcggatgcgaagttcccgca

SEQ ID NO: 52389 - DNA, 25 bp, Homo sapien
ccaacacagatgttgagacagagtt

SEQ ID NO: 52390 - DNA, 25 bp, Homo sapien
catttctccggatgccaaaggatct

SEQ ID NO: 52391 - DNA, 25 bp, Homo sapien
tccaggccgtagataccaatgcttg

SEQ ID NO: 52392 - DNA, 25 bp, Homo sapien
tgcgaagttcccgcatggggttctc

SEQ ID NO: 52393 - DNA, 25 bp, Homo sapien
cgcgtcagtctgcctccactctccc

SEQ ID NO: 52394 - DNA, 25 bp, Homo sapien
tcccgcatggggttctccttttcac

SEQ ID NO: 52395 - DNA, 25 bp, Homo sapien
ctccaactcccgcacctttagaccc

SEQ ID NO: 52396 - DNA, 25 bp, Homo sapien
tgcgcagtggacagcaatcttttca

SEQ ID NO: 52397 - DNA, 25 bp, Homo sapien
tatctagctttggaaaacacagggg

SEQ ID NO: 52398 - DNA, 25 bp, Homo sapien
aacaccttggctgctcgcgtcagtc

SEQ ID NO: 52399 - DNA, 25 bp, Homo sapien
tccaggccgtagataccaatgcttg

SEQ ID NO: 52400 - DNA, 25 bp, Homo sapien
tcccgcatggggttctccttttcac

SEQ ID NO: 52401 - DNA, 25 bp, Homo sapien
tgcgaagttcccgcatggggttctc

SEQ ID NO: 52402 - DNA, 25 bp, Homo sapien
agtttgcggatgcgaagttcccgca

SEQ ID NO: 52403 - DNA, 25 bp, Homo sapien
ccaacacagatgttgagacagagtt

SEQ ID NO: 52404 - DNA, 25 bp, Homo sapien
cgcgtcagtctgcctccactctccc

SEQ ID NO: 52405 - DNA, 25 bp, Homo sapien
aacaccttggctgctcgcgtcagtc

SEQ ID NO: 52406 - DNA, 25 bp, Homo sapien
tatctagctttggaaaacacagggg

SEQ ID NO: 52407 - DNA, 25 bp, Homo sapien
catttctccggatgccaaaggatct

SEQ ID NO: 52408 - DNA, 25 bp, Homo sapien
tgcgcagtggacagcaatcttttca

SEQ ID NO: 52409 - DNA, 25 bp, Homo sapien
ctccaactcccgcacctttagaccc

SEQ ID NO: 52410 - DNA, 25 bp, Homo sapien
tatctagctttggaaaacacagggg

SEQ ID NO: 52411 - DNA, 25 bp, Homo sapien
tgcgcagtggacagcaatcttttca

SEQ ID NO: 52412 - DNA, 25 bp, Homo sapien
aacaccttggctgctcgcgtcagtc

SEQ ID NO: 52413 - DNA, 25 bp, Homo sapien
tgcgaagttcccgcatggggttctc

SEQ ID NO: 52414 - DNA, 25 bp, Homo sapien
tccaggccgtagataccaatgcttg

SEQ ID NO: 52415 - DNA, 25 bp, Homo sapien
cgcgtcagtctgcctccactctccc

SEQ ID NO: 52416 - DNA, 25 bp, Homo sapien
ctccaactcccgcacctttagaccc

SEQ ID NO: 52417 - DNA, 25 bp, Homo sapien
tcccgcatggggttctccttttcac

SEQ ID NO: 52418 - DNA, 25 bp, Homo sapien
catttctccggatgccaaaggatct

SEQ ID NO: 52419 - DNA, 25 bp, Homo sapien
agtttgcggatgcgaagttcccgca

SEQ ID NO: 52420 - DNA, 25 bp, Homo sapien
ccaacacagatgttgagacagagtt

SEQ ID NO: 52421 - DNA, 25 bp, Homo sapien
tccaggccgtagataccaatgcttg

SEQ ID NO: 52422 - DNA, 25 bp, Homo sapien
tcccgcatggggttctccttttcac

SEQ ID NO: 52423 - DNA, 25 bp, Homo sapien
tgcgaagttcccgcatggggttctc

SEQ ID NO: 52424 - DNA, 25 bp, Homo sapien
agtttgcggatgcgaagttcccgca

SEQ ID NO: 52425 - DNA, 25 bp, Homo sapien
ccaacacagatgttgagacagagtt

SEQ ID NO: 52426 - DNA, 25 bp, Homo sapien
cgcgtcagtctgcctccactctccc

SEQ ID NO: 52427 - DNA, 25 bp, Homo sapien
aacaccttggctgctcgcgtcagtc

SEQ ID NO: 52428 - DNA, 25 bp, Homo sapien
tatctagctttggaaaacacagggg

SEQ ID NO: 52429 - DNA, 25 bp, Homo sapien
catttctccggatgccaaaggatct

SEQ ID NO: 52430 - DNA, 25 bp, Homo sapien
tgcgcagtggacagcaatcttttca

SEQ ID NO: 52431 - DNA, 25 bp, Homo sapien
ctccaactcccgcacctttagaccc

SEQ ID NO: 52432 - DNA, 25 bp, Homo sapien
ccaacacagatgttgagacagagtt

SEQ ID NO: 52433 - DNA, 25 bp, Homo sapien
aacaccttggctgctcgcgtcagtc

SEQ ID NO: 52434 - DNA, 25 bp, Homo sapien
catttctccggatgccaaaggatct

SEQ ID NO: 52435 - DNA, 25 bp, Homo sapien
tgcgaagttcccgcatggggttctc

SEQ ID NO: 52436 - DNA, 25 bp, Homo sapien
ctccaactcccgcacctttagaccc

SEQ ID NO: 52437 - DNA, 25 bp, Homo sapien
tcccgcatggggttctccttttcac

SEQ ID NO: 52438 - DNA, 25 bp, Homo sapien
tatctagctttggaaaacacagggg

SEQ ID NO: 52439 - DNA, 25 bp, Homo sapien
cgcgtcagtctgcctccactctccc

SEQ ID NO: 52440 - DNA, 25 bp, Homo sapien
tccaggccgtagataccaatgcttg

SEQ ID NO: 52441 - DNA, 25 bp, Homo sapien
agtttgcggatgcgaagttcccgca

SEQ ID NO: 52442 - DNA, 25 bp, Homo sapien
tgcgcagtggacagcaatcttttca

SEQ ID NO: 52443 - DNA, 25 bp, Homo sapien
catttctccggatgccaaaggatct

SEQ ID NO: 52444 - DNA, 25 bp, Homo sapien
agtttgcggatgcgaagttcccgca

SEQ ID NO: 52445 - DNA, 25 bp, Homo sapien
tgcgaagttcccgcatggggttctc

SEQ ID NO: 52446 - DNA, 25 bp, Homo sapien
aacaccttggctgctcgcgtcagtc

SEQ ID NO: 52447 - DNA, 25 bp, Homo sapien
tgcgcagtggacagcaatcttttca

SEQ ID NO: 52448 - DNA, 25 bp, Homo sapien
tcccgcatggggttctccttttcac

SEQ ID NO: 52449 - DNA, 25 bp, Homo sapien
cgcgtcagtctgcctccactctccc

SEQ ID NO: 52450 - DNA, 25 bp, Homo sapien
ccaacacagatgttgagacagagtt

SEQ ID NO: 52451 - DNA, 25 bp, Homo sapien
ctccaactcccgcacctttagaccc

SEQ ID NO: 52452 - DNA, 25 bp, Homo sapien
tatctagctttggaaaacacagggg

SEQ ID NO: 52453 - DNA, 25 bp, Homo sapien
tccaggccgtagataccaatgcttg

SEQ ID NO: 52454 - DNA, 25 bp, Homo sapien
tccaggccgtagataccaatgcttg

SEQ ID NO: 52455 - DNA, 25 bp, Homo sapien
tcccgcatggggttctccttttcac

SEQ ID NO: 52456 - DNA, 25 bp, Homo sapien
tgcgaagttcccgcatggggttctc

SEQ ID NO: 52457 - DNA, 25 bp, Homo sapien
agtttgcggatgcgaagttcccgca

SEQ ID NO: 52458 - DNA, 25 bp, Homo sapien
ccaacacagatgttgagacagagtt

SEQ ID NO: 52459 - DNA, 25 bp, Homo sapien
cgcgtcagtctgcctccactctccc

SEQ ID NO: 52460 - DNA, 25 bp, Homo sapien
aacaccttggctgctcgcgtcagtc

SEQ ID NO: 52461 - DNA, 25 bp, Homo sapien
tatctagctttggaaaacacagggg

SEQ ID NO: 52462 - DNA, 25 bp, Homo sapien
catttctccggatgccaaaggatct

SEQ ID NO: 52463 - DNA, 25 bp, Homo sapien
tgcgcagtggacagcaatcttttca

SEQ ID NO: 52464 - DNA, 25 bp, Homo sapien
ctccaactcccgcacctttagaccc

SEQ ID NO: 52465 - DNA, 25 bp, Homo sapien
agtttgcggatgcgaagttcccgca

SEQ ID NO: 52466 - DNA, 25 bp, Homo sapien
tcccgcatggggttctccttttcac

SEQ ID NO: 52467 - DNA, 25 bp, Homo sapien
tgcgcagtggacagcaatcttttca

SEQ ID NO: 52468 - DNA, 25 bp, Homo sapien
tgcgaagttcccgcatggggttctc

SEQ ID NO: 52469 - DNA, 25 bp, Homo sapien
ccaacacagatgttgagacagagtt

SEQ ID NO: 52470 - DNA, 25 bp, Homo sapien
catttctccggatgccaaaggatct

SEQ ID NO: 52471 - DNA, 25 bp, Homo sapien
tatctagctttggaaaacacagggg

SEQ ID NO: 52472 - DNA, 25 bp, Homo sapien
cgcgtcagtctgcctccactctccc

SEQ ID NO: 52473 - DNA, 25 bp, Homo sapien
ctccaactcccgcacctttagaccc

SEQ ID NO: 52474 - DNA, 25 bp, Homo sapien
tccaggccgtagataccaatgcttg

SEQ ID NO: 52475 - DNA, 25 bp, Homo sapien
aacaccttggctgctcgcgtcagtc

SEQ ID NO: 52476 - DNA, 25 bp, Homo sapien
tccaggccgtagataccaatgcttg

SEQ ID NO: 52477 - DNA, 25 bp, Homo sapien
tcccgcatggggttctccttttcac

SEQ ID NO: 52478 - DNA, 25 bp, Homo sapien
tgcgaagttcccgcatggggttctc

SEQ ID NO: 52479 - DNA, 25 bp, Homo sapien
agtttgcggatgcgaagttcccgca

SEQ ID NO: 52480 - DNA, 25 bp, Homo sapien
ccaacacagatgttgagacagagtt

SEQ ID NO: 52481 - DNA, 25 bp, Homo sapien
cgcgtcagtctgcctccactctccc

SEQ ID NO: 52482 - DNA, 25 bp, Homo sapien
aacaccttggctgctcgcgtcagtc

SEQ ID NO: 52483 - DNA, 25 bp, Homo sapien
tatctagctttggaaaacacagggg

SEQ ID NO: 52484 - DNA, 25 bp, Homo sapien
catttctccggatgccaaaggatct

SEQ ID NO: 52485 - DNA, 25 bp, Homo sapien
tgcgcagtggacagcaatcttttca

SEQ ID NO: 52486 - DNA, 25 bp, Homo sapien
ctccaactcccgcacctttagaccc

SEQ ID NO: 52487 - DNA, 25 bp, Homo sapien
tcccgcatggggttctccttttcac

SEQ ID NO: 52488 - DNA, 25 bp, Homo sapien
tccaggccgtagataccaatgcttg

SEQ ID NO: 52489 - DNA, 25 bp, Homo sapien
catttctccggatgccaaaggatct

SEQ ID NO: 52490 - DNA, 25 bp, Homo sapien
ccaacacagatgttgagacagagtt

SEQ ID NO: 52491 - DNA, 25 bp, Homo sapien
ctccaactcccgcacctttagaccc

SEQ ID NO: 52492 - DNA, 25 bp, Homo sapien
tgcgcagtggacagcaatcttttca

SEQ ID NO: 52493 - DNA, 25 bp, Homo sapien
aacaccttggctgctcgcgtcagtc

SEQ ID NO: 52494 - DNA, 25 bp, Homo sapien
tgcgaagttcccgcatggggttctc

SEQ ID NO: 52495 - DNA, 25 bp, Homo sapien
agtttgcggatgcgaagttcccgca

SEQ ID NO: 52496 - DNA, 25 bp, Homo sapien
tatctagctttggaaaacacagggg

SEQ ID NO: 52497 - DNA, 25 bp, Homo sapien
cgcgtcagtctgcctccactctccc

SEQ ID NO: 52498 - DNA, 25 bp, Homo sapien
tccaggccgtagataccaatgcttg

SEQ ID NO: 52499 - DNA, 25 bp, Homo sapien
tcccgcatggggttctccttttcac

SEQ ID NO: 52500 - DNA, 25 bp, Homo sapien
tgcgaagttcccgcatggggttctc

SEQ ID NO: 52501 - DNA, 25 bp, Homo sapien
agtttgcggatgcgaagttcccgca

SEQ ID NO: 52502 - DNA, 25 bp, Homo sapien
ccaacacagatgttgagacagagtt

SEQ ID NO: 52503 - DNA, 25 bp, Homo sapien
cgcgtcagtctgcctccactctccc

SEQ ID NO: 52504 - DNA, 25 bp, Homo sapien
aacaccttggctgctcgcgtcagtc

SEQ ID NO: 52505 - DNA, 25 bp, Homo sapien
tatctagctttggaaaacacagggg

SEQ ID NO: 52506 - DNA, 25 bp, Homo sapien
catttctccggatgccaaaggatct

SEQ ID NO: 52507 - DNA, 25 bp, Homo sapien
tgcgcagtggacagcaatcttttca

SEQ ID NO: 52508 - DNA, 25 bp, Homo sapien
ctccaactcccgcacctttagaccc

SEQ ID NO: 52509 - DNA, 25 bp, Homo sapien
tccaggccgtagataccaatgcttg

SEQ ID NO: 52510 - DNA, 25 bp, Homo sapien
tcccgcatggggttctccttttcac

SEQ ID NO: 52511 - DNA, 25 bp, Homo sapien
agtttgcggatgcgaagttcccgca

SEQ ID NO: 52512 - DNA, 25 bp, Homo sapien
tgcgaagttcccgcatggggttctc

SEQ ID NO: 52513 - DNA, 25 bp, Homo sapien
tatctagctttggaaaacacagggg

SEQ ID NO: 52514 - DNA, 25 bp, Homo sapien
aacaccttggctgctcgcgtcagtc

SEQ ID NO: 52515 - DNA, 25 bp, Homo sapien
ctccaactcccgcacctttagaccc

SEQ ID NO: 52516 - DNA, 25 bp, Homo sapien
catttctccggatgccaaaggatct

SEQ ID NO: 52517 - DNA, 25 bp, Homo sapien
ccaacacagatgttgagacagagtt

SEQ ID NO: 52518 - DNA, 25 bp, Homo sapien
tgcgcagtggacagcaatcttttca

SEQ ID NO: 52519 - DNA, 25 bp, Homo sapien
cgcgtcagtctgcctccactctccc

SEQ ID NO: 52520 - DNA, 25 bp, Homo sapien
tccaggccgtagataccaatgcttg

SEQ ID NO: 52521 - DNA, 25 bp, Homo sapien
tcccgcatggggttctccttttcac

SEQ ID NO: 52522 - DNA, 25 bp, Homo sapien
tgcgaagttcccgcatggggttctc

SEQ ID NO: 52523 - DNA, 25 bp, Homo sapien
agtttgcggatgcgaagttcccgca

SEQ ID NO: 52524 - DNA, 25 bp, Homo sapien
ccaacacagatgttgagacagagtt

SEQ ID NO: 52525 - DNA, 25 bp, Homo sapien
cgcgtcagtctgcctccactctccc

SEQ ID NO: 52526 - DNA, 25 bp, Homo sapien
aacaccttggctgctcgcgtcagtc

SEQ ID NO: 52527 - DNA, 25 bp, Homo sapien
tatctagctttggaaaacacagggg

SEQ ID NO: 52528 - DNA, 25 bp, Homo sapien
catttctccggatgccaaaggatct

SEQ ID NO: 52529 - DNA, 25 bp, Homo sapien
tgcgcagtggacagcaatcttttca

SEQ ID NO: 52530 - DNA, 25 bp, Homo sapien
ctccaactcccgcacctttagaccc

SEQ ID NO: 52531 - DNA, 25 bp, Homo sapien
cgcgtcagtctgcctccactctccc

SEQ ID NO: 52532 - DNA, 25 bp, Homo sapien
tccaggccgtagataccaatgcttg

SEQ ID NO: 52533 - DNA, 25 bp, Homo sapien
tgcgcagtggacagcaatcttttca

SEQ ID NO: 52534 - DNA, 25 bp, Homo sapien
ccaacacagatgttgagacagagtt

SEQ ID NO: 52535 - DNA, 25 bp, Homo sapien
catttctccggatgccaaaggatct

SEQ ID NO: 52536 - DNA, 25 bp, Homo sapien
agtttgcggatgcgaagttcccgca

SEQ ID NO: 52537 - DNA, 25 bp, Homo sapien
tatctagctttggaaaacacagggg

SEQ ID NO: 52538 - DNA, 25 bp, Homo sapien
tcccgcatggggttctccttttcac

SEQ ID NO: 52539 - DNA, 25 bp, Homo sapien
tgcgaagttcccgcatggggttctc

SEQ ID NO: 52540 - DNA, 25 bp, Homo sapien
aacaccttggctgctcgcgtcagtc

SEQ ID NO: 52541 - DNA, 25 bp, Homo sapien
ctccaactcccgcacctttagaccc

SEQ ID NO: 52542 - DNA, 25 bp, Homo sapien
tccaggccgtagataccaatgcttg

SEQ ID NO: 52543 - DNA, 25 bp, Homo sapien
tcccgcatggggttctccttttcac

SEQ ID NO: 52544 - DNA, 25 bp, Homo sapien
tgcgaagttcccgcatggggttctc

SEQ ID NO: 52545 - DNA, 25 bp, Homo sapien
agtttgcggatgcgaagttcccgca

SEQ ID NO: 52546 - DNA, 25 bp, Homo sapien
ccaacacagatgttgagacagagtt

SEQ ID NO: 52547 - DNA, 25 bp, Homo sapien
cgcgtcagtctgcctccactctccc

SEQ ID NO: 52548 - DNA, 25 bp, Homo sapien
aacaccttggctgctcgcgtcagtc

SEQ ID NO: 52549 - DNA, 25 bp, Homo sapien
tatctagctttggaaaacacagggg

SEQ ID NO: 52550 - DNA, 25 bp, Homo sapien
catttctccggatgccaaaggatct

SEQ ID NO: 52551 - DNA, 25 bp, Homo sapien
tgcgcagtggacagcaatcttttca

SEQ ID NO: 52552 - DNA, 25 bp, Homo sapien
ctccaactcccgcacctttagaccc

SEQ ID NO: 52553 - DNA, 25 bp, Homo sapien
catttctccggatgccaaaggatct

SEQ ID NO: 52554 - DNA, 25 bp, Homo sapien
ccaacacagatgttgagacagagtt

SEQ ID NO: 52555 - DNA, 25 bp, Homo sapien
tgcgaagttcccgcatggggttctc

SEQ ID NO: 52556 - DNA, 25 bp, Homo sapien
tatctagctttggaaaacacagggg

SEQ ID NO: 52557 - DNA, 25 bp, Homo sapien
aacaccttggctgctcgcgtcagtc

SEQ ID NO: 52558 - DNA, 25 bp, Homo sapien
cgcgtcagtctgcctccactctccc

SEQ ID NO: 52559 - DNA, 25 bp, Homo sapien
ctccaactcccgcacctttagaccc

SEQ ID NO: 52560 - DNA, 25 bp, Homo sapien
tcccgcatggggttctccttttcac

SEQ ID NO: 52561 - DNA, 25 bp, Homo sapien
tccaggccgtagataccaatgcttg

SEQ ID NO: 52562 - DNA, 25 bp, Homo sapien
agtttgcggatgcgaagttcccgca

SEQ ID NO: 52563 - DNA, 25 bp, Homo sapien
tgcgcagtggacagcaatcttttca

SEQ ID NO: 52564 - DNA, 25 bp, Homo sapien
tccaggccgtagataccaatgcttg

SEQ ID NO: 52565 - DNA, 25 bp, Homo sapien
tcccgcatggggttctccttttcac

SEQ ID NO: 52566 - DNA, 25 bp, Homo sapien
tgcgaagttcccgcatggggttctc

SEQ ID NO: 52567 - DNA, 25 bp, Homo sapien
agtttgcggatgcgaagttcccgca

SEQ ID NO: 52568 - DNA, 25 bp, Homo sapien
ccaacacagatgttgagacagagtt

SEQ ID NO: 52569 - DNA, 25 bp, Homo sapien
cgcgtcagtctgcctccactctccc

SEQ ID NO: 52570 - DNA, 25 bp, Homo sapien
aacaccttggctgctcgcgtcagtc

SEQ ID NO: 52571 - DNA, 25 bp, Homo sapien
tatctagctttggaaaacacagggg

SEQ ID NO: 52572 - DNA, 25 bp, Homo sapien
catttctccggatgccaaaggatct

SEQ ID NO: 52573 - DNA, 25 bp, Homo sapien
tgcgcagtggacagcaatcttttca

SEQ ID NO: 52574 - DNA, 25 bp, Homo sapien
ctccaactcccgcacctttagaccc

SEQ ID NO: 52575 - DNA, 25 bp, Homo sapien
tccaggccgtagataccaatgcttg

SEQ ID NO: 52576 - DNA, 25 bp, Homo sapien
tcccgcatggggttctccttttcac

SEQ ID NO: 52577 - DNA, 25 bp, Homo sapien
tgcgaagttcccgcatggggttctc

SEQ ID NO: 52578 - DNA, 25 bp, Homo sapien
agtttgcggatgcgaagttcccgca

SEQ ID NO: 52579 - DNA, 25 bp, Homo sapien
ccaacacagatgttgagacagagtt

SEQ ID NO: 52580 - DNA, 25 bp, Homo sapien
cgcgtcagtctgcctccactctccc

SEQ ID NO: 52581 - DNA, 25 bp, Homo sapien
aacaccttggctgctcgcgtcagtc

SEQ ID NO: 52582 - DNA, 25 bp, Homo sapien
tatctagctttggaaaacacagggg

SEQ ID NO: 52583 - DNA, 25 bp, Homo sapien
catttctccggatgccaaaggatct

SEQ ID NO: 52584 - DNA, 25 bp, Homo sapien
tgcgcagtggacagcaatcttttca

SEQ ID NO: 52585 - DNA, 25 bp, Homo sapien
ctccaactcccgcacctttagaccc

SEQ ID NO: 52586 - DNA, 25 bp, Homo sapien
aacaccttggctgctcgcgtcagtc

SEQ ID NO: 52587 - DNA, 25 bp, Homo sapien
catttctccggatgccaaaggatct

SEQ ID NO: 52588 - DNA, 25 bp, Homo sapien
cgcgtcagtctgcctccactctccc

SEQ ID NO: 52589 - DNA, 25 bp, Homo sapien
ctccaactcccgcacctttagaccc

SEQ ID NO: 52590 - DNA, 25 bp, Homo sapien
agtttgcggatgcgaagttcccgca

SEQ ID NO: 52591 - DNA, 25 bp, Homo sapien
tgcgcagtggacagcaatcttttca

SEQ ID NO: 52592 - DNA, 25 bp, Homo sapien
tatctagctttggaaaacacagggg

SEQ ID NO: 52593 - DNA, 25 bp, Homo sapien
ccaacacagatgttgagacagagtt

SEQ ID NO: 52594 - DNA, 25 bp, Homo sapien
tcccgcatggggttctccttttcac

SEQ ID NO: 52595 - DNA, 25 bp, Homo sapien
tccaggccgtagataccaatgcttg

SEQ ID NO: 52596 - DNA, 25 bp, Homo sapien
tgcgaagttcccgcatggggttctc

SEQ ID NO: 52597 - DNA, 25 bp, Homo sapien
aacaccttggctgctcgcgtcagtc

SEQ ID NO: 52598 - DNA, 25 bp, Homo sapien
cgcgtcagtctgcctccactctccc

SEQ ID NO: 52599 - DNA, 25 bp, Homo sapien
catttctccggatgccaaaggatct

SEQ ID NO: 52600 - DNA, 25 bp, Homo sapien
ctccaactcccgcacctttagaccc

SEQ ID NO: 52601 - DNA, 25 bp, Homo sapien
agtttgcggatgcgaagttcccgca

SEQ ID NO: 52602 - DNA, 25 bp, Homo sapien
tgcgcagtggacagcaatcttttca

SEQ ID NO: 52603 - DNA, 25 bp, Homo sapien
tatctagctttggaaaacacagggg

SEQ ID NO: 52604 - DNA, 25 bp, Homo sapien
ccaacacagatgttgagacagagtt

SEQ ID NO: 52605 - DNA, 25 bp, Homo sapien
tccaggccgtagataccaatgcttg

SEQ ID NO: 52606 - DNA, 25 bp, Homo sapien
tcccgcatggggttctccttttcac

SEQ ID NO: 52607 - DNA, 25 bp, Homo sapien
tgcgaagttcccgcatggggttctc

SEQ ID NO: 52608 - DNA, 25 bp, Homo sapien
aacaccttggctgctcgcgtcagtc

SEQ ID NO: 52609 - DNA, 25 bp, Homo sapien
tccaggccgtagataccaatgcttg

SEQ ID NO: 52610 - DNA, 25 bp, Homo sapien
catttctccggatgccaaaggatct

SEQ ID NO: 52611 - DNA, 25 bp, Homo sapien
cgcgtcagtctgcctccactctccc

SEQ ID NO: 52612 - DNA, 25 bp, Homo sapien
agtttgcggatgcgaagttcccgca

SEQ ID NO: 52613 - DNA, 25 bp, Homo sapien
ctccaactcccgcacctttagaccc

SEQ ID NO: 52614 - DNA, 25 bp, Homo sapien
tgcgcagtggacagcaatcttttca

SEQ ID NO: 52615 - DNA, 25 bp, Homo sapien
tatctagctttggaaaacacagggg

SEQ ID NO: 52616 - DNA, 25 bp, Homo sapien
ccaacacagatgttgagacagagtt

SEQ ID NO: 52617 - DNA, 25 bp, Homo sapien
tcccgcatggggttctccttttcac

SEQ ID NO: 52618 - DNA, 25 bp, Homo sapien
tgcgaagttcccgcatggggttctc

SEQ ID NO: 52619 - DNA, 25 bp, Homo sapien
aacaccttggctgctcgcgtcagtc

SEQ ID NO: 52620 - DNA, 25 bp, Homo sapien
tccaggccgtagataccaatgcttg

SEQ ID NO: 52621 - DNA, 25 bp, Homo sapien
catttctccggatgccaaaggatct

SEQ ID NO: 52622 - DNA, 25 bp, Homo sapien
cgcgtcagtctgcctccactctccc

SEQ ID NO: 52623 - DNA, 25 bp, Homo sapien
ctccaactcccgcacctttagaccc

SEQ ID NO: 52624 - DNA, 25 bp, Homo sapien
agtttgcggatgcgaagttcccgca

SEQ ID NO: 52625 - DNA, 25 bp, Homo sapien
tgcgcagtggacagcaatcttttca

SEQ ID NO: 52626 - DNA, 25 bp, Homo sapien
tatctagctttggaaaacacagggg

SEQ ID NO: 52627 - DNA, 25 bp, Homo sapien
ccaacacagatgttgagacagagtt

SEQ ID NO: 52628 - DNA, 25 bp, Homo sapien
tcccgcatggggttctccttttcac

SEQ ID NO: 52629 - DNA, 25 bp, Homo sapien
tgcgaagttcccgcatggggttctc

SEQ ID NO: 52630 - DNA, 25 bp, Homo sapien
aacaccttggctgctcgcgtcagtc

SEQ ID NO: 52631 - DNA, 25 bp, Homo sapien
catttctccggatgccaaaggatct

SEQ ID NO: 52632 - DNA, 25 bp, Homo sapien
cgcgtcagtctgcctccactctccc

SEQ ID NO: 52633 - DNA, 25 bp, Homo sapien
ctccaactcccgcacctttagaccc

SEQ ID NO: 52634 - DNA, 25 bp, Homo sapien
agtttgcggatgcgaagttcccgca

SEQ ID NO: 52635 - DNA, 25 bp, Homo sapien
tgcgcagtggacagcaatcttttca

SEQ ID NO: 52636 - DNA, 25 bp, Homo sapien
tatctagctttggaaaacacagggg

SEQ ID NO: 52637 - DNA, 25 bp, Homo sapien
ccaacacagatgttgagacagagtt

SEQ ID NO: 52638 - DNA, 25 bp, Homo sapien
tccaggccgtagataccaatgcttg

SEQ ID NO: 52639 - DNA, 25 bp, Homo sapien
tcccgcatggggttctccttttcac

SEQ ID NO: 52640 - DNA, 25 bp, Homo sapien
tgcgaagttcccgcatggggttctc

SEQ ID NO: 52641 - DNA, 25 bp, Homo sapien
aacaccttggctgctcgcgtcagtc

SEQ ID NO: 52642 - DNA, 25 bp, Homo sapien
catttctccggatgccaaaggatct

SEQ ID NO: 52643 - DNA, 25 bp, Homo sapien
cgcgtcagtctgcctccactctccc

SEQ ID NO: 52644 - DNA, 25 bp, Homo sapien
ctccaactcccgcacctttagaccc

SEQ ID NO: 52645 - DNA, 25 bp, Homo sapien
agtttgcggatgcgaagttcccgca

SEQ ID NO: 52646 - DNA, 25 bp, Homo sapien
tatctagctttggaaaacacagggg

SEQ ID NO: 52647 - DNA, 25 bp, Homo sapien
tgcgcagtggacagcaatcttttca

SEQ ID NO: 52648 - DNA, 25 bp, Homo sapien
ccaacacagatgttgagacagagtt

SEQ ID NO: 52649 - DNA, 25 bp, Homo sapien
tcccgcatggggttctccttttcac

SEQ ID NO: 52650 - DNA, 25 bp, Homo sapien
tgcgaagttcccgcatggggttctc

SEQ ID NO: 52651 - DNA, 25 bp, Homo sapien
tccaggccgtagataccaatgcttg

SEQ ID NO: 52652 - DNA, 25 bp, Homo sapien
aacaccttggctgctcgcgtcagtc

SEQ ID NO: 52653 - DNA, 25 bp, Homo sapien
cgcgtcagtctgcctccactctccc

SEQ ID NO: 52654 - DNA, 25 bp, Homo sapien
catttctccggatgccaaaggatct

SEQ ID NO: 52655 - DNA, 25 bp, Homo sapien
agtttgcggatgcgaagttcccgca

SEQ ID NO: 52656 - DNA, 25 bp, Homo sapien
ctccaactcccgcacctttagaccc

SEQ ID NO: 52657 - DNA, 25 bp, Homo sapien
tatctagctttggaaaacacagggg

SEQ ID NO: 52658 - DNA, 25 bp, Homo sapien
tgcgcagtggacagcaatcttttca

SEQ ID NO: 52659 - DNA, 25 bp, Homo sapien
ccaacacagatgttgagacagagtt

SEQ ID NO: 52660 - DNA, 25 bp, Homo sapien
tccaggccgtagataccaatgcttg

SEQ ID NO: 52661 - DNA, 25 bp, Homo sapien
tcccgcatggggttctccttttcac

SEQ ID NO: 52662 - DNA, 25 bp, Homo sapien
tgcgaagttcccgcatggggttctc

SEQ ID NO: 52663 - DNA, 25 bp, Homo sapien
aacaccttggctgctcgcgtcagtc

SEQ ID NO: 52664 - DNA, 25 bp, Homo sapien
tccaggccgtagataccaatgcttg

SEQ ID NO: 52665 - DNA, 25 bp, Homo sapien
cgcgtcagtctgcctccactctccc

SEQ ID NO: 52666 - DNA, 25 bp, Homo sapien
catttctccggatgccaaaggatct

SEQ ID NO: 52667 - DNA, 25 bp, Homo sapien
ctccaactcccgcacctttagaccc

SEQ ID NO: 52668 - DNA, 25 bp, Homo sapien
agtttgcggatgcgaagttcccgca

SEQ ID NO: 52669 - DNA, 25 bp, Homo sapien
tgcgcagtggacagcaatcttttca

SEQ ID NO: 52670 - DNA, 25 bp, Homo sapien
tatctagctttggaaaacacagggg

SEQ ID NO: 52671 - DNA, 25 bp, Homo sapien
ccaacacagatgttgagacagagtt

SEQ ID NO: 52672 - DNA, 25 bp, Homo sapien
tcccgcatggggttctccttttcac

SEQ ID NO: 52673 - DNA, 25 bp, Homo sapien
tgcgaagttcccgcatggggttctc

SEQ ID NO: 52674 - DNA, 25 bp, Homo sapien
tccaggccgtagataccaatgcttg

SEQ ID NO: 52675 - DNA, 25 bp, Homo sapien
aacaccttggctgctcgcgtcagtc

SEQ ID NO: 52676 - DNA, 25 bp, Homo sapien
cgcgtcagtctgcctccactctccc

SEQ ID NO: 52677 - DNA, 25 bp, Homo sapien
catttctccggatgccaaaggatct

SEQ ID NO: 52678 - DNA, 25 bp, Homo sapien
agtttgcggatgcgaagttcccgca

SEQ ID NO: 52679 - DNA, 25 bp, Homo sapien
ctccaactcccgcacctttagaccc

SEQ ID NO: 52680 - DNA, 25 bp, Homo sapien
tgcgcagtggacagcaatcttttca

SEQ ID NO: 52681 - DNA, 25 bp, Homo sapien
tatctagctttggaaaacacagggg

SEQ ID NO: 52682 - DNA, 25 bp, Homo sapien
ccaacacagatgttgagacagagtt

SEQ ID NO: 52683 - DNA, 25 bp, Homo sapien
tcccgcatggggttctccttttcac

SEQ ID NO: 52684 - DNA, 25 bp, Homo sapien
tgcgaagttcccgcatggggttctc

SEQ ID NO: 52685 - DNA, 25 bp, Homo sapien
tgcgaagttcccgcatggggttctc

SEQ ID NO: 52686 - DNA, 25 bp, Homo sapien
tccaggccgtagataccaatgcttg

SEQ ID NO: 52687 - DNA, 25 bp, Homo sapien
agtttgcggatgcgaagttcccgca

SEQ ID NO: 52688 - DNA, 25 bp, Homo sapien
tatctagctttggaaaacacagggg

SEQ ID NO: 52689 - DNA, 25 bp, Homo sapien
cgcgtcagtctgcctccactctccc

SEQ ID NO: 52690 - DNA, 25 bp, Homo sapien
ccaacacagatgttgagacagagtt

SEQ ID NO: 52691 - DNA, 25 bp, Homo sapien
ctccaactcccgcacctttagaccc

SEQ ID NO: 52692 - DNA, 25 bp, Homo sapien
tgcgcagtggacagcaatcttttca

SEQ ID NO: 52693 - DNA, 25 bp, Homo sapien
tcccgcatggggttctccttttcac

SEQ ID NO: 52694 - DNA, 25 bp, Homo sapien
catttctccggatgccaaaggatct

SEQ ID NO: 52695 - DNA, 25 bp, Homo sapien
aacaccttggctgctcgcgtcagtc

SEQ ID NO: 52696 - DNA, 25 bp, Homo sapien
aacaccttggctgctcgcgtcagtc

SEQ ID NO: 52697 - DNA, 25 bp, Homo sapien
cgcgtcagtctgcctccactctccc

SEQ ID NO: 52698 - DNA, 25 bp, Homo sapien
catttctccggatgccaaaggatct

SEQ ID NO: 52699 - DNA, 25 bp, Homo sapien
ctccaactcccgcacctttagaccc

SEQ ID NO: 52700 - DNA, 25 bp, Homo sapien
agtttgcggatgcgaagttcccgca

SEQ ID NO: 52701 - DNA, 25 bp, Homo sapien
tgcgcagtggacagcaatcttttca

SEQ ID NO: 52702 - DNA, 25 bp, Homo sapien
tatctagctttggaaaacacagggg

SEQ ID NO: 52703 - DNA, 25 bp, Homo sapien
ccaacacagatgttgagacagagtt

SEQ ID NO: 52704 - DNA, 25 bp, Homo sapien
tcccgcatggggttctccttttcac

SEQ ID NO: 52705 - DNA, 25 bp, Homo sapien
tgcgaagttcccgcatggggttctc

SEQ ID NO: 52706 - DNA, 25 bp, Homo sapien
tccaggccgtagataccaatgcttg

SEQ ID NO: 52707 - DNA, 25 bp, Homo sapien
tccaggccgtagataccaatgcttg

SEQ ID NO: 52708 - DNA, 25 bp, Homo sapien
tcccgcatggggttctccttttcac

SEQ ID NO: 52709 - DNA, 25 bp, Homo sapien
tgcgaagttcccgcatggggttctc

SEQ ID NO: 52710 - DNA, 25 bp, Homo sapien
agtttgcggatgcgaagttcccgca

SEQ ID NO: 52711 - DNA, 25 bp, Homo sapien
ccaacacagatgttgagacagagtt

SEQ ID NO: 52712 - DNA, 25 bp, Homo sapien
cgcgtcagtctgcctccactctccc

SEQ ID NO: 52713 - DNA, 25 bp, Homo sapien
aacaccttggctgctcgcgtcagtc

SEQ ID NO: 52714 - DNA, 25 bp, Homo sapien
tatctagctttggaaaacacagggg

SEQ ID NO: 52715 - DNA, 25 bp, Homo sapien
catttctccggatgccaaaggatct

SEQ ID NO: 52716 - DNA, 25 bp, Homo sapien
tgcgcagtggacagcaatcttttca

SEQ ID NO: 52717 - DNA, 25 bp, Homo sapien
ctccaactcccgcacctttagaccc

SEQ ID NO: 52718 - DNA, 25 bp, Homo sapien
cccctgtgttttccaaagctagata

SEQ ID NO: 52719 - DNA, 25 bp, Homo sapien
tgcgggaacttcgcatccgcaaact

SEQ ID NO: 52720 - DNA, 25 bp, Homo sapien
gggtctaaaggtgcgggagttggag

SEQ ID NO: 52721 - DNA, 25 bp, Homo sapien
agatcctttggcatccggagaaatg

SEQ ID NO: 52722 - DNA, 25 bp, Homo sapien
gggagagtggaggcagactgacgcg

SEQ ID NO: 52723 - DNA, 25 bp, Homo sapien
gtgaaaaggagaaccccatgcggga

SEQ ID NO: 52724 - DNA, 25 bp, Homo sapien
caagcattggtatctacggcctgga

SEQ ID NO: 52725 - DNA, 25 bp, Homo sapien
tgaaaagattgctgtccactgcgca

SEQ ID NO: 52726 - DNA, 25 bp, Homo sapien
gactgacgcgagcagccaaggtgtt

SEQ ID NO: 52727 - DNA, 25 bp, Homo sapien
gagaaccccatgcgggaacttcgca

SEQ ID NO: 52728 - DNA, 25 bp, Homo sapien
aactctgtctcaacatctgtgttgg

SEQ ID NO: 52729 - DNA, 25 bp, Homo sapien
aacaccttggctgctcgcgtcagtc

SEQ ID NO: 52730 - DNA, 25 bp, Homo sapien
cgcgtcagtctgcctccactctccc

SEQ ID NO: 52731 - DNA, 25 bp, Homo sapien
catttctccggatgccaaaggatct

SEQ ID NO: 52732 - DNA, 25 bp, Homo sapien
ctccaactcccgcacctttagaccc

SEQ ID NO: 52733 - DNA, 25 bp, Homo sapien
ccaacacagatgttgagacagagtt

SEQ ID NO: 52734 - DNA, 25 bp, Homo sapien
agtttgcggatgcgaagttcccgca

SEQ ID NO: 52735 - DNA, 25 bp, Homo sapien
tatctagctttggaaaacacagggg

SEQ ID NO: 52736 - DNA, 25 bp, Homo sapien
tgcgcagtggacagcaatcttttca

SEQ ID NO: 52737 - DNA, 25 bp, Homo sapien
tccaggccgtagataccaatgcttg

SEQ ID NO: 52738 - DNA, 25 bp, Homo sapien
tcccgcatggggttctccttttcac

SEQ ID NO: 52739 - DNA, 25 bp, Homo sapien
tgcgaagttcccgcatggggttctc

SEQ ID NO: 52740 - DNA, 25 bp, Homo sapien
tcccgcatggggttctccttttcac

SEQ ID NO: 52741 - DNA, 25 bp, Homo sapien
tatctagctttggaaaacacagggg

SEQ ID NO: 52742 - DNA, 25 bp, Homo sapien
tccaggccgtagataccaatgcttg

SEQ ID NO: 52743 - DNA, 25 bp, Homo sapien
aacaccttggctgctcgcgtcagtc

SEQ ID NO: 52744 - DNA, 25 bp, Homo sapien
agtttgcggatgcgaagttcccgca

SEQ ID NO: 52745 - DNA, 25 bp, Homo sapien
cgcgtcagtctgcctccactctccc

SEQ ID NO: 52746 - DNA, 25 bp, Homo sapien
ccaacacagatgttgagacagagtt

SEQ ID NO: 52747 - DNA, 25 bp, Homo sapien
catttctccggatgccaaaggatct

SEQ ID NO: 52748 - DNA, 25 bp, Homo sapien
tgcgcagtggacagcaatcttttca

SEQ ID NO: 52749 - DNA, 25 bp, Homo sapien
tgcgaagttcccgcatggggttctc

SEQ ID NO: 52750 - DNA, 25 bp, Homo sapien
ctccaactcccgcacctttagaccc

SEQ ID NO: 52751 - DNA, 25 bp, Homo sapien
tccaggccgtagataccaatgcttg

SEQ ID NO: 52752 - DNA, 25 bp, Homo sapien
tcccgcatggggttctccttttcac

SEQ ID NO: 52753 - DNA, 25 bp, Homo sapien
tgcgaagttcccgcatggggttctc

SEQ ID NO: 52754 - DNA, 25 bp, Homo sapien
agtttgcggatgcgaagttcccgca

SEQ ID NO: 52755 - DNA, 25 bp, Homo sapien
ccaacacagatgttgagacagagtt

SEQ ID NO: 52756 - DNA, 25 bp, Homo sapien
cgcgtcagtctgcctccactctccc

SEQ ID NO: 52757 - DNA, 25 bp, Homo sapien
aacaccttggctgctcgcgtcagtc

SEQ ID NO: 52758 - DNA, 25 bp, Homo sapien
tatctagctttggaaaacacagggg

SEQ ID NO: 52759 - DNA, 25 bp, Homo sapien
catttctccggatgccaaaggatct

SEQ ID NO: 52760 - DNA, 25 bp, Homo sapien
tgcgcagtggacagcaatcttttca

SEQ ID NO: 52761 - DNA, 25 bp, Homo sapien
ctccaactcccgcacctttagaccc

SEQ ID NO: 52762 - DNA, 25 bp, Homo sapien
catttctccggatgccaaaggatct

SEQ ID NO: 52763 - DNA, 25 bp, Homo sapien
tgcgaagttcccgcatggggttctc

SEQ ID NO: 52764 - DNA, 25 bp, Homo sapien
tcccgcatggggttctccttttcac

SEQ ID NO: 52765 - DNA, 25 bp, Homo sapien
ccaacacagatgttgagacagagtt

SEQ ID NO: 52766 - DNA, 25 bp, Homo sapien
ctccaactcccgcacctttagaccc

SEQ ID NO: 52767 - DNA, 25 bp, Homo sapien
tgcgcagtggacagcaatcttttca

SEQ ID NO: 52768 - DNA, 25 bp, Homo sapien
tccaggccgtagataccaatgcttg

SEQ ID NO: 52769 - DNA, 25 bp, Homo sapien
tatctagctttggaaaacacagggg

SEQ ID NO: 52770 - DNA, 25 bp, Homo sapien
agtttgcggatgcgaagttcccgca

SEQ ID NO: 52771 - DNA, 25 bp, Homo sapien
cgcgtcagtctgcctccactctccc

SEQ ID NO: 52772 - DNA, 25 bp, Homo sapien
aacaccttggctgctcgcgtcagtc

SEQ ID NO: 52773 - DNA, 25 bp, Homo sapien
tccaggccgtagataccaatgcttg

SEQ ID NO: 52774 - DNA, 25 bp, Homo sapien
tcccgcatggggttctccttttcac

SEQ ID NO: 52775 - DNA, 25 bp, Homo sapien
tgcgaagttcccgcatggggttctc

SEQ ID NO: 52776 - DNA, 25 bp, Homo sapien
agtttgcggatgcgaagttcccgca

SEQ ID NO: 52777 - DNA, 25 bp, Homo sapien
ccaacacagatgttgagacagagtt

SEQ ID NO: 52778 - DNA, 25 bp, Homo sapien
cgcgtcagtctgcctccactctccc

SEQ ID NO: 52779 - DNA, 25 bp, Homo sapien
aacaccttggctgctcgcgtcagtc

SEQ ID NO: 52780 - DNA, 25 bp, Homo sapien
tatctagctttggaaaacacagggg

SEQ ID NO: 52781 - DNA, 25 bp, Homo sapien
catttctccggatgccaaaggatct

SEQ ID NO: 52782 - DNA, 25 bp, Homo sapien
tgcgcagtggacagcaatcttttca

SEQ ID NO: 52783 - DNA, 25 bp, Homo sapien
ctccaactcccgcacctttagaccc

SEQ ID NO: 52784 - DNA, 25 bp, Homo sapien
tatctagctttggaaaacacagggg

SEQ ID NO: 52785 - DNA, 25 bp, Homo sapien
aacaccttggctgctcgcgtcagtc

SEQ ID NO: 52786 - DNA, 25 bp, Homo sapien
tgcgaagttcccgcatggggttctc

SEQ ID NO: 52787 - DNA, 25 bp, Homo sapien
agtttgcggatgcgaagttcccgca

SEQ ID NO: 52788 - DNA, 25 bp, Homo sapien
tccaggccgtagataccaatgcttg

SEQ ID NO: 52789 - DNA, 25 bp, Homo sapien
ctccaactcccgcacctttagaccc

SEQ ID NO: 52790 - DNA, 25 bp, Homo sapien
tgcgcagtggacagcaatcttttca

SEQ ID NO: 52791 - DNA, 25 bp, Homo sapien
cgcgtcagtctgcctccactctccc

SEQ ID NO: 52792 - DNA, 25 bp, Homo sapien
tcccgcatggggttctccttttcac

SEQ ID NO: 52793 - DNA, 25 bp, Homo sapien
catttctccggatgccaaaggatct

SEQ ID NO: 52794 - DNA, 25 bp, Homo sapien
ccaacacagatgttgagacagagtt

SEQ ID NO: 52795 - DNA, 25 bp, Homo sapien
tcccgcatggggttctccttttcac

SEQ ID NO: 52796 - DNA, 25 bp, Homo sapien
tgcgaagttcccgcatggggttctc

SEQ ID NO: 52797 - DNA, 25 bp, Homo sapien
agtttgcggatgcgaagttcccgca

SEQ ID NO: 52798 - DNA, 25 bp, Homo sapien
ccaacacagatgttgagacagagtt

SEQ ID NO: 52799 - DNA, 25 bp, Homo sapien
cgcgtcagtctgcctccactctccc

SEQ ID NO: 52800 - DNA, 25 bp, Homo sapien
aacaccttggctgctcgcgtcagtc

SEQ ID NO: 52801 - DNA, 25 bp, Homo sapien
tatctagctttggaaaacacagggg

SEQ ID NO: 52802 - DNA, 25 bp, Homo sapien
catttctccggatgccaaaggatct

SEQ ID NO: 52803 - DNA, 25 bp, Homo sapien
tgcgcagtggacagcaatcttttca

SEQ ID NO: 52804 - DNA, 25 bp, Homo sapien
ctccaactcccgcacctttagaccc

SEQ ID NO: 52805 - DNA, 25 bp, Homo sapien
tccaggccgtagataccaatgcttg

SEQ ID NO: 52806 - DNA, 25 bp, Homo sapien
tccaggccgtagataccaatgcttg

SEQ ID NO: 52807 - DNA, 25 bp, Homo sapien
tcccgcatggggttctccttttcac

SEQ ID NO: 52808 - DNA, 25 bp, Homo sapien
tgcgaagttcccgcatggggttctc

SEQ ID NO: 52809 - DNA, 25 bp, Homo sapien
agtttgcggatgcgaagttcccgca

SEQ ID NO: 52810 - DNA, 25 bp, Homo sapien
ccaacacagatgttgagacagagtt

SEQ ID NO: 52811 - DNA, 25 bp, Homo sapien
cgcgtcagtctgcctccactctccc

SEQ ID NO: 52812 - DNA, 25 bp, Homo sapien
aacaccttggctgctcgcgtcagtc

SEQ ID NO: 52813 - DNA, 25 bp, Homo sapien
tatctagctttggaaaacacagggg

SEQ ID NO: 52814 - DNA, 25 bp, Homo sapien
catttctccggatgccaaaggatct

SEQ ID NO: 52815 - DNA, 25 bp, Homo sapien
tgcgcagtggacagcaatcttttca

SEQ ID NO: 52816 - DNA, 25 bp, Homo sapien
ctccaactcccgcacctttagaccc

SEQ ID NO: 52817 - DNA, 25 bp, Homo sapien
tccaggccgtagataccaatgcttg

SEQ ID NO: 52818 - DNA, 25 bp, Homo sapien
ccaacacagatgttgagacagagtt

SEQ ID NO: 52819 - DNA, 25 bp, Homo sapien
agtttgcggatgcgaagttcccgca

SEQ ID NO: 52820 - DNA, 25 bp, Homo sapien
tgcgcagtggacagcaatcttttca

SEQ ID NO: 52821 - DNA, 25 bp, Homo sapien
ctccaactcccgcacctttagaccc

SEQ ID NO: 52822 - DNA, 25 bp, Homo sapien
catttctccggatgccaaaggatct

SEQ ID NO: 52823 - DNA, 25 bp, Homo sapien
tgcgaagttcccgcatggggttctc

SEQ ID NO: 52824 - DNA, 25 bp, Homo sapien
aacaccttggctgctcgcgtcagtc

SEQ ID NO: 52825 - DNA, 25 bp, Homo sapien
tatctagctttggaaaacacagggg

SEQ ID NO: 52826 - DNA, 25 bp, Homo sapien
cgcgtcagtctgcctccactctccc

SEQ ID NO: 52827 - DNA, 25 bp, Homo sapien
tcccgcatggggttctccttttcac

SEQ ID NO: 52828 - DNA, 25 bp, Homo sapien
tccaggccgtagataccaatgcttg

SEQ ID NO: 52829 - DNA, 25 bp, Homo sapien
tcccgcatggggttctccttttcac

SEQ ID NO: 52830 - DNA, 25 bp, Homo sapien
tgcgaagttcccgcatggggttctc

SEQ ID NO: 52831 - DNA, 25 bp, Homo sapien
agtttgcggatgcgaagttcccgca

SEQ ID NO: 52832 - DNA, 25 bp, Homo sapien
ccaacacagatgttgagacagagtt

SEQ ID NO: 52833 - DNA, 25 bp, Homo sapien
cgcgtcagtctgcctccactctccc

SEQ ID NO: 52834 - DNA, 25 bp, Homo sapien
aacaccttggctgctcgcgtcagtc

SEQ ID NO: 52835 - DNA, 25 bp, Homo sapien
tatctagctttggaaaacacagggg

SEQ ID NO: 52836 - DNA, 25 bp, Homo sapien
catttctccggatgccaaaggatct

SEQ ID NO: 52837 - DNA, 25 bp, Homo sapien
tgcgcagtggacagcaatcttttca

SEQ ID NO: 52838 - DNA, 25 bp, Homo sapien
ctccaactcccgcacctttagaccc

SEQ ID NO: 52839 - DNA, 25 bp, Homo sapien
tgcgcagtggacagcaatcttttca

SEQ ID NO: 52840 - DNA, 25 bp, Homo sapien
ctccaactcccgcacctttagaccc

SEQ ID NO: 52841 - DNA, 25 bp, Homo sapien
tccaggccgtagataccaatgcttg

SEQ ID NO: 52842 - DNA, 25 bp, Homo sapien
agtttgcggatgcgaagttcccgca

SEQ ID NO: 52843 - DNA, 25 bp, Homo sapien
ccaacacagatgttgagacagagtt

SEQ ID NO: 52844 - DNA, 25 bp, Homo sapien
tcccgcatggggttctccttttcac

SEQ ID NO: 52845 - DNA, 25 bp, Homo sapien
aacaccttggctgctcgcgtcagtc

SEQ ID NO: 52846 - DNA, 25 bp, Homo sapien
tgcgaagttcccgcatggggttctc

SEQ ID NO: 52847 - DNA, 25 bp, Homo sapien
catttctccggatgccaaaggatct

SEQ ID NO: 52848 - DNA, 25 bp, Homo sapien
tatctagctttggaaaacacagggg

SEQ ID NO: 52849 - DNA, 25 bp, Homo sapien
cgcgtcagtctgcctccactctccc

SEQ ID NO: 52850 - DNA, 25 bp, Homo sapien
tccaggccgtagataccaatgcttg

SEQ ID NO: 52851 - DNA, 25 bp, Homo sapien
tcccgcatggggttctccttttcac

SEQ ID NO: 52852 - DNA, 25 bp, Homo sapien
tgcgaagttcccgcatggggttctc

SEQ ID NO: 52853 - DNA, 25 bp, Homo sapien
agtttgcggatgcgaagttcccgca

SEQ ID NO: 52854 - DNA, 25 bp, Homo sapien
ccaacacagatgttgagacagagtt

SEQ ID NO: 52855 - DNA, 25 bp, Homo sapien
cgcgtcagtctgcctccactctccc

SEQ ID NO: 52856 - DNA, 25 bp, Homo sapien
aacaccttggctgctcgcgtcagtc

SEQ ID NO: 52857 - DNA, 25 bp, Homo sapien
tatctagctttggaaaacacagggg

SEQ ID NO: 52858 - DNA, 25 bp, Homo sapien
catttctccggatgccaaaggatct

SEQ ID NO: 52859 - DNA, 25 bp, Homo sapien
tgcgcagtggacagcaatcttttca

SEQ ID NO: 52860 - DNA, 25 bp, Homo sapien
ctccaactcccgcacctttagaccc

SEQ ID NO: 52861 - DNA, 25 bp, Homo sapien
tccaggccgtagataccaatgcttg

SEQ ID NO: 52862 - DNA, 25 bp, Homo sapien
ccaacacagatgttgagacagagtt

SEQ ID NO: 52863 - DNA, 25 bp, Homo sapien
tatctagctttggaaaacacagggg

SEQ ID NO: 52864 - DNA, 25 bp, Homo sapien
ctccaactcccgcacctttagaccc

SEQ ID NO: 52865 - DNA, 25 bp, Homo sapien
tgcgaagttcccgcatggggttctc

SEQ ID NO: 52866 - DNA, 25 bp, Homo sapien
catttctccggatgccaaaggatct

SEQ ID NO: 52867 - DNA, 25 bp, Homo sapien
cgcgtcagtctgcctccactctccc

SEQ ID NO: 52868 - DNA, 25 bp, Homo sapien
agtttgcggatgcgaagttcccgca

SEQ ID NO: 52869 - DNA, 25 bp, Homo sapien
tcccgcatggggttctccttttcac

SEQ ID NO: 52870 - DNA, 25 bp, Homo sapien
aacaccttggctgctcgcgtcagtc

SEQ ID NO: 52871 - DNA, 25 bp, Homo sapien
tgcgcagtggacagcaatcttttca

SEQ ID NO: 52872 - DNA, 25 bp, Homo sapien
tccaggccgtagataccaatgcttg

SEQ ID NO: 52873 - DNA, 25 bp, Homo sapien
tcccgcatggggttctccttttcac

SEQ ID NO: 52874 - DNA, 25 bp, Homo sapien
tgcgaagttcccgcatggggttctc

SEQ ID NO: 52875 - DNA, 25 bp, Homo sapien
agtttgcggatgcgaagttcccgca

SEQ ID NO: 52876 - DNA, 25 bp, Homo sapien
ccaacacagatgttgagacagagtt

SEQ ID NO: 52877 - DNA, 25 bp, Homo sapien
cgcgtcagtctgcctccactctccc

SEQ ID NO: 52878 - DNA, 25 bp, Homo sapien
aacaccttggctgctcgcgtcagtc

SEQ ID NO: 52879 - DNA, 25 bp, Homo sapien
tatctagctttggaaaacacagggg

SEQ ID NO: 52880 - DNA, 25 bp, Homo sapien
catttctccggatgccaaaggatct

SEQ ID NO: 52881 - DNA, 25 bp, Homo sapien
tgcgcagtggacagcaatcttttca

SEQ ID NO: 52882 - DNA, 25 bp, Homo sapien
ctccaactcccgcacctttagaccc

SEQ ID NO: 52883 - DNA, 25 bp, Homo sapien
tgcgcagtggacagcaatcttttca

SEQ ID NO: 52884 - DNA, 25 bp, Homo sapien
aacaccttggctgctcgcgtcagtc

SEQ ID NO: 52885 - DNA, 25 bp, Homo sapien
ctccaactcccgcacctttagaccc

SEQ ID NO: 52886 - DNA, 25 bp, Homo sapien
tatctagctttggaaaacacagggg

SEQ ID NO: 52887 - DNA, 25 bp, Homo sapien
tgcgaagttcccgcatggggttctc

SEQ ID NO: 52888 - DNA, 25 bp, Homo sapien
agtttgcggatgcgaagttcccgca

SEQ ID NO: 52889 - DNA, 25 bp, Homo sapien
ccaacacagatgttgagacagagtt

SEQ ID NO: 52890 - DNA, 25 bp, Homo sapien
tccaggccgtagataccaatgcttg

SEQ ID NO: 52891 - DNA, 25 bp, Homo sapien
catttctccggatgccaaaggatct

SEQ ID NO: 52892 - DNA, 25 bp, Homo sapien
cgcgtcagtctgcctccactctccc

SEQ ID NO: 52893 - DNA, 25 bp, Homo sapien
tcccgcatggggttctccttttcac

SEQ ID NO: 52894 - DNA, 25 bp, Homo sapien
tccaggccgtagataccaatgcttg

SEQ ID NO: 52895 - DNA, 25 bp, Homo sapien
tcccgcatggggttctccttttcac

SEQ ID NO: 52896 - DNA, 25 bp, Homo sapien
tgcgaagttcccgcatggggttctc

SEQ ID NO: 52897 - DNA, 25 bp, Homo sapien
agtttgcggatgcgaagttcccgca

SEQ ID NO: 52898 - DNA, 25 bp, Homo sapien
ccaacacagatgttgagacagagtt

SEQ ID NO: 52899 - DNA, 25 bp, Homo sapien
cgcgtcagtctgcctccactctccc

SEQ ID NO: 52900 - DNA, 25 bp, Homo sapien
aacaccttggctgctcgcgtcagtc

SEQ ID NO: 52901 - DNA, 25 bp, Homo sapien
tatctagctttggaaaacacagggg

SEQ ID NO: 52902 - DNA, 25 bp, Homo sapien
catttctccggatgccaaaggatct

SEQ ID NO: 52903 - DNA, 25 bp, Homo sapien
tgcgcagtggacagcaatcttttca

SEQ ID NO: 52904 - DNA, 25 bp, Homo sapien
ctccaactcccgcacctttagaccc

SEQ ID NO: 52905 - DNA, 25 bp, Homo sapien
tcccgcatggggttctccttttcac

SEQ ID NO: 52906 - DNA, 25 bp, Homo sapien
agtttgcggatgcgaagttcccgca

SEQ ID NO: 52907 - DNA, 25 bp, Homo sapien
tatctagctttggaaaacacagggg

SEQ ID NO: 52908 - DNA, 25 bp, Homo sapien
tgcgaagttcccgcatggggttctc

SEQ ID NO: 52909 - DNA, 25 bp, Homo sapien
ctccaactcccgcacctttagaccc

SEQ ID NO: 52910 - DNA, 25 bp, Homo sapien
ccaacacagatgttgagacagagtt

SEQ ID NO: 52911 - DNA, 25 bp, Homo sapien
aacaccttggctgctcgcgtcagtc

SEQ ID NO: 52912 - DNA, 25 bp, Homo sapien
cgcgtcagtctgcctccactctccc

SEQ ID NO: 52913 - DNA, 25 bp, Homo sapien
tccaggccgtagataccaatgcttg

SEQ ID NO: 52914 - DNA, 25 bp, Homo sapien
catttctccggatgccaaaggatct

SEQ ID NO: 52915 - DNA, 25 bp, Homo sapien
tgcgcagtggacagcaatcttttca

SEQ ID NO: 52916 - DNA, 25 bp, Homo sapien
ctccaactcccgcacctttagaccc

SEQ ID NO: 52917 - DNA, 25 bp, Homo sapien
ccaacacagatgttgagacagagtt

SEQ ID NO: 52918 - DNA, 25 bp, Homo sapien
tcccgcatggggttctccttttcac

SEQ ID NO: 52919 - DNA, 25 bp, Homo sapien
tatctagctttggaaaacacagggg

SEQ ID NO: 52920 - DNA, 25 bp, Homo sapien
tgcgcagtggacagcaatcttttca

SEQ ID NO: 52921 - DNA, 25 bp, Homo sapien
agtttgcggatgcgaagttcccgca

SEQ ID NO: 52922 - DNA, 25 bp, Homo sapien
cgcgtcagtctgcctccactctccc

SEQ ID NO: 52923 - DNA, 25 bp, Homo sapien
aacaccttggctgctcgcgtcagtc

SEQ ID NO: 52924 - DNA, 25 bp, Homo sapien
tgcgaagttcccgcatggggttctc

SEQ ID NO: 52925 - DNA, 25 bp, Homo sapien
tccaggccgtagataccaatgcttg

SEQ ID NO: 52926 - DNA, 25 bp, Homo sapien
catttctccggatgccaaaggatct

SEQ ID NO: 52927 - DNA, 25 bp, Homo sapien
tccaggccgtagataccaatgcttg

SEQ ID NO: 52928 - DNA, 25 bp, Homo sapien
tcccgcatggggttctccttttcac

SEQ ID NO: 52929 - DNA, 25 bp, Homo sapien
tgcgaagttcccgcatggggttctc

SEQ ID NO: 52930 - DNA, 25 bp, Homo sapien
agtttgcggatgcgaagttcccgca

SEQ ID NO: 52931 - DNA, 25 bp, Homo sapien
ccaacacagatgttgagacagagtt

SEQ ID NO: 52932 - DNA, 25 bp, Homo sapien
cgcgtcagtctgcctccactctccc

SEQ ID NO: 52933 - DNA, 25 bp, Homo sapien
aacaccttggctgctcgcgtcagtc

SEQ ID NO: 52934 - DNA, 25 bp, Homo sapien
tatctagctttggaaaacacagggg

SEQ ID NO: 52935 - DNA, 25 bp, Homo sapien
catttctccggatgccaaaggatct

SEQ ID NO: 52936 - DNA, 25 bp, Homo sapien
tgcgcagtggacagcaatcttttca

SEQ ID NO: 52937 - DNA, 25 bp, Homo sapien
ctccaactcccgcacctttagaccc

SEQ ID NO: 52938 - DNA, 25 bp, Homo sapien
ctccaactcccgcacctttagaccc

SEQ ID NO: 52939 - DNA, 25 bp, Homo sapien
tgcgcagtggacagcaatcttttca

SEQ ID NO: 52940 - DNA, 25 bp, Homo sapien
aacaccttggctgctcgcgtcagtc

SEQ ID NO: 52941 - DNA, 25 bp, Homo sapien
cgcgtcagtctgcctccactctccc

SEQ ID NO: 52942 - DNA, 25 bp, Homo sapien
tcccgcatggggttctccttttcac

SEQ ID NO: 52943 - DNA, 25 bp, Homo sapien
tgcgaagttcccgcatggggttctc

SEQ ID NO: 52944 - DNA, 25 bp, Homo sapien
ccaacacagatgttgagacagagtt

SEQ ID NO: 52945 - DNA, 25 bp, Homo sapien
catttctccggatgccaaaggatct

SEQ ID NO: 52946 - DNA, 25 bp, Homo sapien
agtttgcggatgcgaagttcccgca

SEQ ID NO: 52947 - DNA, 25 bp, Homo sapien
tatctagctttggaaaacacagggg

SEQ ID NO: 52948 - DNA, 25 bp, Homo sapien
tccaggccgtagataccaatgcttg

SEQ ID NO: 52949 - DNA, 25 bp, Homo sapien
tcccgcatggggttctccttttcac

SEQ ID NO: 52950 - DNA, 25 bp, Homo sapien
tgcgaagttcccgcatggggttctc

SEQ ID NO: 52951 - DNA, 25 bp, Homo sapien
agtttgcggatgcgaagttcccgca

SEQ ID NO: 52952 - DNA, 25 bp, Homo sapien
ccaacacagatgttgagacagagtt

SEQ ID NO: 52953 - DNA, 25 bp, Homo sapien
cgcgtcagtctgcctccactctccc

SEQ ID NO: 52954 - DNA, 25 bp, Homo sapien
aacaccttggctgctcgcgtcagtc

SEQ ID NO: 52955 - DNA, 25 bp, Homo sapien
tatctagctttggaaaacacagggg

SEQ ID NO: 52956 - DNA, 25 bp, Homo sapien
catttctccggatgccaaaggatct

SEQ ID NO: 52957 - DNA, 25 bp, Homo sapien
tgcgcagtggacagcaatcttttca

SEQ ID NO: 52958 - DNA, 25 bp, Homo sapien
ctccaactcccgcacctttagaccc

SEQ ID NO: 52959 - DNA, 25 bp, Homo sapien
tccaggccgtagataccaatgcttg

SEQ ID NO: 52960 - DNA, 25 bp, Homo sapien
ctccaactcccgcacctttagaccc

SEQ ID NO: 52961 - DNA, 25 bp, Homo sapien
tatctagctttggaaaacacagggg

SEQ ID NO: 52962 - DNA, 25 bp, Homo sapien
tcccgcatggggttctccttttcac

SEQ ID NO: 52963 - DNA, 25 bp, Homo sapien
tgcgcagtggacagcaatcttttca

SEQ ID NO: 52964 - DNA, 25 bp, Homo sapien
catttctccggatgccaaaggatct

SEQ ID NO: 52965 - DNA, 25 bp, Homo sapien
aacaccttggctgctcgcgtcagtc

SEQ ID NO: 52966 - DNA, 25 bp, Homo sapien
agtttgcggatgcgaagttcccgca

SEQ ID NO: 52967 - DNA, 25 bp, Homo sapien
tccaggccgtagataccaatgcttg

SEQ ID NO: 52968 - DNA, 25 bp, Homo sapien
tgcgaagttcccgcatggggttctc

SEQ ID NO: 52969 - DNA, 25 bp, Homo sapien
cgcgtcagtctgcctccactctccc

SEQ ID NO: 52970 - DNA, 25 bp, Homo sapien
ccaacacagatgttgagacagagtt

SEQ ID NO: 52971 - DNA, 25 bp, Homo sapien
tccaggccgtagataccaatgcttg

SEQ ID NO: 52972 - DNA, 25 bp, Homo sapien
tcccgcatggggttctccttttcac

SEQ ID NO: 52973 - DNA, 25 bp, Homo sapien
tgcgaagttcccgcatggggttctc

SEQ ID NO: 52974 - DNA, 25 bp, Homo sapien
agtttgcggatgcgaagttcccgca

SEQ ID NO: 52975 - DNA, 25 bp, Homo sapien
ccaacacagatgttgagacagagtt

SEQ ID NO: 52976 - DNA, 25 bp, Homo sapien
cgcgtcagtctgcctccactctccc

SEQ ID NO: 52977 - DNA, 25 bp, Homo sapien
aacaccttggctgctcgcgtcagtc

SEQ ID NO: 52978 - DNA, 25 bp, Homo sapien
tatctagctttggaaaacacagggg

SEQ ID NO: 52979 - DNA, 25 bp, Homo sapien
catttctccggatgccaaaggatct

SEQ ID NO: 52980 - DNA, 25 bp, Homo sapien
tgcgcagtggacagcaatcttttca

SEQ ID NO: 52981 - DNA, 25 bp, Homo sapien
ctccaactcccgcacctttagaccc

SEQ ID NO: 52982 - DNA, 25 bp, Homo sapien
cgcgtcagtctgcctccactctccc

SEQ ID NO: 52983 - DNA, 25 bp, Homo sapien
catttctccggatgccaaaggatct

SEQ ID NO: 52984 - DNA, 25 bp, Homo sapien
tatctagctttggaaaacacagggg

SEQ ID NO: 52985 - DNA, 25 bp, Homo sapien
tgcgcagtggacagcaatcttttca

SEQ ID NO: 52986 - DNA, 25 bp, Homo sapien
ccaacacagatgttgagacagagtt

SEQ ID NO: 52987 - DNA, 25 bp, Homo sapien
agtttgcggatgcgaagttcccgca

SEQ ID NO: 52988 - DNA, 25 bp, Homo sapien
aacaccttggctgctcgcgtcagtc

SEQ ID NO: 52989 - DNA, 25 bp, Homo sapien
tgcgaagttcccgcatggggttctc

SEQ ID NO: 52990 - DNA, 25 bp, Homo sapien
tccaggccgtagataccaatgcttg

SEQ ID NO: 52991 - DNA, 25 bp, Homo sapien
ctccaactcccgcacctttagaccc

SEQ ID NO: 52992 - DNA, 25 bp, Homo sapien
tcccgcatggggttctccttttcac

SEQ ID NO: 52993 - DNA, 25 bp, Homo sapien
tccaggccgtagataccaatgcttg

SEQ ID NO: 52994 - DNA, 25 bp, Homo sapien
tcccgcatggggttctccttttcac

SEQ ID NO: 52995 - DNA, 25 bp, Homo sapien
tgcgaagttcccgcatggggttctc

SEQ ID NO: 52996 - DNA, 25 bp, Homo sapien
agtttgcggatgcgaagttcccgca

SEQ ID NO: 52997 - DNA, 25 bp, Homo sapien
ccaacacagatgttgagacagagtt

SEQ ID NO: 52998 - DNA, 25 bp, Homo sapien
cgcgtcagtctgcctccactctccc

SEQ ID NO: 52999 - DNA, 25 bp, Homo sapien
aacaccttggctgctcgcgtcagtc

SEQ ID NO: 53000 - DNA, 25 bp, Homo sapien
tatctagctttggaaaacacagggg

SEQ ID NO: 53001 - DNA, 25 bp, Homo sapien
catttctccggatgccaaaggatct

SEQ ID NO: 53002 - DNA, 25 bp, Homo sapien
tgcgcagtggacagcaatcttttca

SEQ ID NO: 53003 - DNA, 25 bp, Homo sapien
ctccaactcccgcacctttagaccc

SEQ ID NO: 53004 - DNA, 25 bp, Homo sapien
cgcgtcagtctgcctccactctccc

SEQ ID NO: 53005 - DNA, 25 bp, Homo sapien
tgcgcagtggacagcaatcttttca

SEQ ID NO: 53006 - DNA, 25 bp, Homo sapien
ctccaactcccgcacctttagaccc

SEQ ID NO: 53007 - DNA, 25 bp, Homo sapien
tgcgaagttcccgcatggggttctc

SEQ ID NO: 53008 - DNA, 25 bp, Homo sapien
ccaacacagatgttgagacagagtt

SEQ ID NO: 53009 - DNA, 25 bp, Homo sapien
tcccgcatggggttctccttttcac

SEQ ID NO: 53010 - DNA, 25 bp, Homo sapien
tccaggccgtagataccaatgcttg

SEQ ID NO: 53011 - DNA, 25 bp, Homo sapien
catttctccggatgccaaaggatct

SEQ ID NO: 53012 - DNA, 25 bp, Homo sapien
agtttgcggatgcgaagttcccgca

SEQ ID NO: 53013 - DNA, 25 bp, Homo sapien
aacaccttggctgctcgcgtcagtc

SEQ ID NO: 53014 - DNA, 25 bp, Homo sapien
tatctagctttggaaaacacagggg

SEQ ID NO: 53015 - DNA, 25 bp, Homo sapien
tccaggccgtagataccaatgcttg

SEQ ID NO: 53016 - DNA, 25 bp, Homo sapien
tcccgcatggggttctccttttcac

SEQ ID NO: 53017 - DNA, 25 bp, Homo sapien
tgcgaagttcccgcatggggttctc

SEQ ID NO: 53018 - DNA, 25 bp, Homo sapien
agtttgcggatgcgaagttcccgca

SEQ ID NO: 53019 - DNA, 25 bp, Homo sapien
ccaacacagatgttgagacagagtt

SEQ ID NO: 53020 - DNA, 25 bp, Homo sapien
cgcgtcagtctgcctccactctccc

SEQ ID NO: 53021 - DNA, 25 bp, Homo sapien
aacaccttggctgctcgcgtcagtc

SEQ ID NO: 53022 - DNA, 25 bp, Homo sapien
tatctagctttggaaaacacagggg

SEQ ID NO: 53023 - DNA, 25 bp, Homo sapien
catttctccggatgccaaaggatct

SEQ ID NO: 53024 - DNA, 25 bp, Homo sapien
tgcgcagtggacagcaatcttttca

SEQ ID NO: 53025 - DNA, 25 bp, Homo sapien
ctccaactcccgcacctttagaccc

SEQ ID NO: 53026 - DNA, 25 bp, Homo sapien
ctccaactcccgcacctttagaccc

SEQ ID NO: 53027 - DNA, 25 bp, Homo sapien
cgcgtcagtctgcctccactctccc

SEQ ID NO: 53028 - DNA, 25 bp, Homo sapien
tatctagctttggaaaacacagggg

SEQ ID NO: 53029 - DNA, 25 bp, Homo sapien
aacaccttggctgctcgcgtcagtc

SEQ ID NO: 53030 - DNA, 25 bp, Homo sapien
tgcgaagttcccgcatggggttctc

SEQ ID NO: 53031 - DNA, 25 bp, Homo sapien
agtttgcggatgcgaagttcccgca

SEQ ID NO: 53032 - DNA, 25 bp, Homo sapien
tcccgcatggggttctccttttcac

SEQ ID NO: 53033 - DNA, 25 bp, Homo sapien
tgcgcagtggacagcaatcttttca

SEQ ID NO: 53034 - DNA, 25 bp, Homo sapien
tccaggccgtagataccaatgcttg

SEQ ID NO: 53035 - DNA, 25 bp, Homo sapien
ccaacacagatgttgagacagagtt

SEQ ID NO: 53036 - DNA, 25 bp, Homo sapien
catttctccggatgccaaaggatct

SEQ ID NO: 53037 - DNA, 25 bp, Homo sapien
tccaggccgtagataccaatgcttg

SEQ ID NO: 53038 - DNA, 25 bp, Homo sapien
tcccgcatggggttctccttttcac

SEQ ID NO: 53039 - DNA, 25 bp, Homo sapien
tgcgaagttcccgcatggggttctc

SEQ ID NO: 53040 - DNA, 25 bp, Homo sapien
agtttgcggatgcgaagttcccgca

SEQ ID NO: 53041 - DNA, 25 bp, Homo sapien
ccaacacagatgttgagacagagtt

SEQ ID NO: 53042 - DNA, 25 bp, Homo sapien
cgcgtcagtctgcctccactctccc

SEQ ID NO: 53043 - DNA, 25 bp, Homo sapien
aacaccttggctgctcgcgtcagtc

SEQ ID NO: 53044 - DNA, 25 bp, Homo sapien
tatctagctttggaaaacacagggg

SEQ ID NO: 53045 - DNA, 25 bp, Homo sapien
catttctccggatgccaaaggatct

SEQ ID NO: 53046 - DNA, 25 bp, Homo sapien
tgcgcagtggacagcaatcttttca

SEQ ID NO: 53047 - DNA, 25 bp, Homo sapien
ctccaactcccgcacctttagaccc

SEQ ID NO: 53048 - DNA, 25 bp, Homo sapien
tccaggccgtagataccaatgcttg

SEQ ID NO: 53049 - DNA, 25 bp, Homo sapien
tcccgcatggggttctccttttcac

SEQ ID NO: 53050 - DNA, 25 bp, Homo sapien
tgcgaagttcccgcatggggttctc

SEQ ID NO: 53051 - DNA, 25 bp, Homo sapien
agtttgcggatgcgaagttcccgca

SEQ ID NO: 53052 - DNA, 25 bp, Homo sapien
ccaacacagatgttgagacagagtt

SEQ ID NO: 53053 - DNA, 25 bp, Homo sapien
cgcgtcagtctgcctccactctccc

SEQ ID NO: 53054 - DNA, 25 bp, Homo sapien
aacaccttggctgctcgcgtcagtc

SEQ ID NO: 53055 - DNA, 25 bp, Homo sapien
tatctagctttggaaaacacagggg

SEQ ID NO: 53056 - DNA, 25 bp, Homo sapien
catttctccggatgccaaaggatct

SEQ ID NO: 53057 - DNA, 25 bp, Homo sapien
tgcgcagtggacagcaatcttttca

SEQ ID NO: 53058 - DNA, 25 bp, Homo sapien
ctccaactcccgcacctttagaccc

SEQ ID NO: 53059 - DNA, 25 bp, Homo sapien
tgcgaagttcccgcatggggttctc

SEQ ID NO: 53060 - DNA, 25 bp, Homo sapien
ccaacacagatgttgagacagagtt

SEQ ID NO: 53061 - DNA, 25 bp, Homo sapien
ctccaactcccgcacctttagaccc

SEQ ID NO: 53062 - DNA, 25 bp, Homo sapien
catttctccggatgccaaaggatct

SEQ ID NO: 53063 - DNA, 25 bp, Homo sapien
aacaccttggctgctcgcgtcagtc

SEQ ID NO: 53064 - DNA, 25 bp, Homo sapien
agtttgcggatgcgaagttcccgca

SEQ ID NO: 53065 - DNA, 25 bp, Homo sapien
tccaggccgtagataccaatgcttg

SEQ ID NO: 53066 - DNA, 25 bp, Homo sapien
tatctagctttggaaaacacagggg

SEQ ID NO: 53067 - DNA, 25 bp, Homo sapien
cgcgtcagtctgcctccactctccc

SEQ ID NO: 53068 - DNA, 25 bp, Homo sapien
tgcgcagtggacagcaatcttttca

SEQ ID NO: 53069 - DNA, 25 bp, Homo sapien
tcccgcatggggttctccttttcac

SEQ ID NO: 53070 - DNA, 25 bp, Homo sapien
tccaggccgtagataccaatgcttg

SEQ ID NO: 53071 - DNA, 25 bp, Homo sapien
tcccgcatggggttctccttttcac

SEQ ID NO: 53072 - DNA, 25 bp, Homo sapien
tgcgaagttcccgcatggggttctc

SEQ ID NO: 53073 - DNA, 25 bp, Homo sapien
agtttgcggatgcgaagttcccgca

SEQ ID NO: 53074 - DNA, 25 bp, Homo sapien
ccaacacagatgttgagacagagtt

SEQ ID NO: 53075 - DNA, 25 bp, Homo sapien
cgcgtcagtctgcctccactctccc

SEQ ID NO: 53076 - DNA, 25 bp, Homo sapien
aacaccttggctgctcgcgtcagtc

SEQ ID NO: 53077 - DNA, 25 bp, Homo sapien
tatctagctttggaaaacacagggg

SEQ ID NO: 53078 - DNA, 25 bp, Homo sapien
catttctccggatgccaaaggatct

SEQ ID NO: 53079 - DNA, 25 bp, Homo sapien
tgcgcagtggacagcaatcttttca

SEQ ID NO: 53080 - DNA, 25 bp, Homo sapien
ctccaactcccgcacctttagaccc

SEQ ID NO: 53081 - DNA, 25 bp, Homo sapien
catttctccggatgccaaaggatct

SEQ ID NO: 53082 - DNA, 25 bp, Homo sapien
ctccaactcccgcacctttagaccc

SEQ ID NO: 53083 - DNA, 25 bp, Homo sapien
tccaggccgtagataccaatgcttg

SEQ ID NO: 53084 - DNA, 25 bp, Homo sapien
cgcgtcagtctgcctccactctccc

SEQ ID NO: 53085 - DNA, 25 bp, Homo sapien
aacaccttggctgctcgcgtcagtc

SEQ ID NO: 53086 - DNA, 25 bp, Homo sapien
tgcgaagttcccgcatggggttctc

SEQ ID NO: 53087 - DNA, 25 bp, Homo sapien
agtttgcggatgcgaagttcccgca

SEQ ID NO: 53088 - DNA, 25 bp, Homo sapien
ccaacacagatgttgagacagagtt

SEQ ID NO: 53089 - DNA, 25 bp, Homo sapien
tgcgcagtggacagcaatcttttca

SEQ ID NO: 53090 - DNA, 25 bp, Homo sapien
tatctagctttggaaaacacagggg

SEQ ID NO: 53091 - DNA, 25 bp, Homo sapien
tcccgcatggggttctccttttcac

SEQ ID NO: 53092 - DNA, 25 bp, Homo sapien
tccaggccgtagataccaatgcttg

SEQ ID NO: 53093 - DNA, 25 bp, Homo sapien
tcccgcatggggttctccttttcac

SEQ ID NO: 53094 - DNA, 25 bp, Homo sapien
tgcgaagttcccgcatggggttctc

SEQ ID NO: 53095 - DNA, 25 bp, Homo sapien
agtttgcggatgcgaagttcccgca

SEQ ID NO: 53096 - DNA, 25 bp, Homo sapien
ccaacacagatgttgagacagagtt

SEQ ID NO: 53097 - DNA, 25 bp, Homo sapien
cgcgtcagtctgcctccactctccc

SEQ ID NO: 53098 - DNA, 25 bp, Homo sapien
aacaccttggctgctcgcgtcagtc

SEQ ID NO: 53099 - DNA, 25 bp, Homo sapien
tatctagctttggaaaacacagggg

SEQ ID NO: 53100 - DNA, 25 bp, Homo sapien
catttctccggatgccaaaggatct

SEQ ID NO: 53101 - DNA, 25 bp, Homo sapien
tgcgcagtggacagcaatcttttca

SEQ ID NO: 53102 - DNA, 25 bp, Homo sapien
ctccaactcccgcacctttagaccc

SEQ ID NO: 53103 - DNA, 25 bp, Homo sapien
tccaggccgtagataccaatgcttg

SEQ ID NO: 53104 - DNA, 25 bp, Homo sapien
tatctagctttggaaaacacagggg

SEQ ID NO: 53105 - DNA, 25 bp, Homo sapien
cgcgtcagtctgcctccactctccc

SEQ ID NO: 53106 - DNA, 25 bp, Homo sapien
tcccgcatggggttctccttttcac

SEQ ID NO: 53107 - DNA, 25 bp, Homo sapien
tgcgaagttcccgcatggggttctc

SEQ ID NO: 53108 - DNA, 25 bp, Homo sapien
ctccaactcccgcacctttagaccc

SEQ ID NO: 53109 - DNA, 25 bp, Homo sapien
tgcgcagtggacagcaatcttttca

SEQ ID NO: 53110 - DNA, 25 bp, Homo sapien
ccaacacagatgttgagacagagtt

SEQ ID NO: 53111 - DNA, 25 bp, Homo sapien
aacaccttggctgctcgcgtcagtc

SEQ ID NO: 53112 - DNA, 25 bp, Homo sapien
catttctccggatgccaaaggatct

SEQ ID NO: 53113 - DNA, 25 bp, Homo sapien
agtttgcggatgcgaagttcccgca

SEQ ID NO: 53114 - DNA, 25 bp, Homo sapien
tccaggccgtagataccaatgcttg

SEQ ID NO: 53115 - DNA, 25 bp, Homo sapien
tcccgcatggggttctccttttcac

SEQ ID NO: 53116 - DNA, 25 bp, Homo sapien
tgcgaagttcccgcatggggttctc

SEQ ID NO: 53117 - DNA, 25 bp, Homo sapien
agtttgcggatgcgaagttcccgca

SEQ ID NO: 53118 - DNA, 25 bp, Homo sapien
ccaacacagatgttgagacagagtt

SEQ ID NO: 53119 - DNA, 25 bp, Homo sapien
cgcgtcagtctgcctccactctccc

SEQ ID NO: 53120 - DNA, 25 bp, Homo sapien
aacaccttggctgctcgcgtcagtc

SEQ ID NO: 53121 - DNA, 25 bp, Homo sapien
tatctagctttggaaaacacagggg

SEQ ID NO: 53122 - DNA, 25 bp, Homo sapien
catttctccggatgccaaaggatct

SEQ ID NO: 53123 - DNA, 25 bp, Homo sapien
tgcgcagtggacagcaatcttttca

SEQ ID NO: 53124 - DNA, 25 bp, Homo sapien
ctccaactcccgcacctttagaccc

SEQ ID NO: 53125 - DNA, 25 bp, Homo sapien
tatctagctttggaaaacacagggg

SEQ ID NO: 53126 - DNA, 25 bp, Homo sapien
tgcgcagtggacagcaatcttttca

SEQ ID NO: 53127 - DNA, 25 bp, Homo sapien
aacaccttggctgctcgcgtcagtc

SEQ ID NO: 53128 - DNA, 25 bp, Homo sapien
catttctccggatgccaaaggatct

SEQ ID NO: 53129 - DNA, 25 bp, Homo sapien
tgcgaagttcccgcatggggttctc

SEQ ID NO: 53130 - DNA, 25 bp, Homo sapien
agtttgcggatgcgaagttcccgca

SEQ ID NO: 53131 - DNA, 25 bp, Homo sapien
ctccaactcccgcacctttagaccc

SEQ ID NO: 53132 - DNA, 25 bp, Homo sapien
ccaacacagatgttgagacagagtt

SEQ ID NO: 53133 - DNA, 25 bp, Homo sapien
tccaggccgtagataccaatgcttg

SEQ ID NO: 53134 - DNA, 25 bp, Homo sapien
tcccgcatggggttctccttttcac

SEQ ID NO: 53135 - DNA, 25 bp, Homo sapien
cgcgtcagtctgcctccactctccc

SEQ ID NO: 53136 - DNA, 25 bp, Homo sapien
tccaggccgtagataccaatgcttg

SEQ ID NO: 53137 - DNA, 25 bp, Homo sapien
tcccgcatggggttctccttttcac

SEQ ID NO: 53138 - DNA, 25 bp, Homo sapien
tgcgaagttcccgcatggggttctc

SEQ ID NO: 53139 - DNA, 25 bp, Homo sapien
agtttgcggatgcgaagttcccgca

SEQ ID NO: 53140 - DNA, 25 bp, Homo sapien
ccaacacagatgttgagacagagtt

SEQ ID NO: 53141 - DNA, 25 bp, Homo sapien
cgcgtcagtctgcctccactctccc

SEQ ID NO: 53142 - DNA, 25 bp, Homo sapien
aacaccttggctgctcgcgtcagtc

SEQ ID NO: 53143 - DNA, 25 bp, Homo sapien
tatctagctttggaaaacacagggg

SEQ ID NO: 53144 - DNA, 25 bp, Homo sapien
catttctccggatgccaaaggatct

SEQ ID NO: 53145 - DNA, 25 bp, Homo sapien
tgcgcagtggacagcaatcttttca

SEQ ID NO: 53146 - DNA, 25 bp, Homo sapien
ctccaactcccgcacctttagaccc

SEQ ID NO: 53147 - DNA, 25 bp, Homo sapien
cgcgtcagtctgcctccactctccc

SEQ ID NO: 53148 - DNA, 25 bp, Homo sapien
ctccaactcccgcacctttagaccc

SEQ ID NO: 53149 - DNA, 25 bp, Homo sapien
tcccgcatggggttctccttttcac

SEQ ID NO: 53150 - DNA, 25 bp, Homo sapien
tccaggccgtagataccaatgcttg

SEQ ID NO: 53151 - DNA, 25 bp, Homo sapien
tgcgcagtggacagcaatcttttca

SEQ ID NO: 53152 - DNA, 25 bp, Homo sapien
ccaacacagatgttgagacagagtt

SEQ ID NO: 53153 - DNA, 25 bp, Homo sapien
tgcgaagttcccgcatggggttctc

SEQ ID NO: 53154 - DNA, 25 bp, Homo sapien
aacaccttggctgctcgcgtcagtc

SEQ ID NO: 53155 - DNA, 25 bp, Homo sapien
tatctagctttggaaaacacagggg

SEQ ID NO: 53156 - DNA, 25 bp, Homo sapien
agtttgcggatgcgaagttcccgca

SEQ ID NO: 53157 - DNA, 25 bp, Homo sapien
catttctccggatgccaaaggatct

SEQ ID NO: 53158 - DNA, 25 bp, Homo sapien
tcccgcatggggttctccttttcac

SEQ ID NO: 53159 - DNA, 25 bp, Homo sapien
catttctccggatgccaaaggatct

SEQ ID NO: 53160 - DNA, 25 bp, Homo sapien
ctccaactcccgcacctttagaccc

SEQ ID NO: 53161 - DNA, 25 bp, Homo sapien
tgcgcagtggacagcaatcttttca

SEQ ID NO: 53162 - DNA, 25 bp, Homo sapien
agtttgcggatgcgaagttcccgca

SEQ ID NO: 53163 - DNA, 25 bp, Homo sapien
ccaacacagatgttgagacagagtt

SEQ ID NO: 53164 - DNA, 25 bp, Homo sapien
tccaggccgtagataccaatgcttg

SEQ ID NO: 53165 - DNA, 25 bp, Homo sapien
tatctagctttggaaaacacagggg

SEQ ID NO: 53166 - DNA, 25 bp, Homo sapien
aacaccttggctgctcgcgtcagtc

SEQ ID NO: 53167 - DNA, 25 bp, Homo sapien
cgcgtcagtctgcctccactctccc

SEQ ID NO: 53168 - DNA, 25 bp, Homo sapien
tgcgaagttcccgcatggggttctc

SEQ ID NO: 53169 - DNA, 25 bp, Homo sapien
tccaggccgtagataccaatgcttg

SEQ ID NO: 53170 - DNA, 25 bp, Homo sapien
tcccgcatggggttctccttttcac

SEQ ID NO: 53171 - DNA, 25 bp, Homo sapien
tgcgaagttcccgcatggggttctc

SEQ ID NO: 53172 - DNA, 25 bp, Homo sapien
agtttgcggatgcgaagttcccgca

SEQ ID NO: 53173 - DNA, 25 bp, Homo sapien
ccaacacagatgttgagacagagtt

SEQ ID NO: 53174 - DNA, 25 bp, Homo sapien
cgcgtcagtctgcctccactctccc

SEQ ID NO: 53175 - DNA, 25 bp, Homo sapien
aacaccttggctgctcgcgtcagtc

SEQ ID NO: 53176 - DNA, 25 bp, Homo sapien
tatctagctttggaaaacacagggg

SEQ ID NO: 53177 - DNA, 25 bp, Homo sapien
catttctccggatgccaaaggatct

SEQ ID NO: 53178 - DNA, 25 bp, Homo sapien
tgcgcagtggacagcaatcttttca

SEQ ID NO: 53179 - DNA, 25 bp, Homo sapien
ctccaactcccgcacctttagaccc

SEQ ID NO: 53180 - DNA, 25 bp, Homo sapien
aacaccttggctgctcgcgtcagtc

SEQ ID NO: 53181 - DNA, 25 bp, Homo sapien
tcccgcatggggttctccttttcac

SEQ ID NO: 53182 - DNA, 25 bp, Homo sapien
ccaacacagatgttgagacagagtt

SEQ ID NO: 53183 - DNA, 25 bp, Homo sapien
tgcgaagttcccgcatggggttctc

SEQ ID NO: 53184 - DNA, 25 bp, Homo sapien
agtttgcggatgcgaagttcccgca

SEQ ID NO: 53185 - DNA, 25 bp, Homo sapien
tatctagctttggaaaacacagggg

SEQ ID NO: 53186 - DNA, 25 bp, Homo sapien
catttctccggatgccaaaggatct

SEQ ID NO: 53187 - DNA, 25 bp, Homo sapien
tgcgcagtggacagcaatcttttca

SEQ ID NO: 53188 - DNA, 25 bp, Homo sapien
ctccaactcccgcacctttagaccc

SEQ ID NO: 53189 - DNA, 25 bp, Homo sapien
cgcgtcagtctgcctccactctccc

SEQ ID NO: 53190 - DNA, 25 bp, Homo sapien
tccaggccgtagataccaatgcttg

SEQ ID NO: 53191 - DNA, 25 bp, Homo sapien
tccaggccgtagataccaatgcttg

SEQ ID NO: 53192 - DNA, 25 bp, Homo sapien
tcccgcatggggttctccttttcac

SEQ ID NO: 53193 - DNA, 25 bp, Homo sapien
tgcgaagttcccgcatggggttctc

SEQ ID NO: 53194 - DNA, 25 bp, Homo sapien
agtttgcggatgcgaagttcccgca

SEQ ID NO: 53195 - DNA, 25 bp, Homo sapien
ccaacacagatgttgagacagagtt

SEQ ID NO: 53196 - DNA, 25 bp, Homo sapien
cgcgtcagtctgcctccactctccc

SEQ ID NO: 53197 - DNA, 25 bp, Homo sapien
aacaccttggctgctcgcgtcagtc

SEQ ID NO: 53198 - DNA, 25 bp, Homo sapien
tatctagctttggaaaacacagggg

SEQ ID NO: 53199 - DNA, 25 bp, Homo sapien
catttctccggatgccaaaggatct

SEQ ID NO: 53200 - DNA, 25 bp, Homo sapien
tgcgcagtggacagcaatcttttca

SEQ ID NO: 53201 - DNA, 25 bp, Homo sapien
ctccaactcccgcacctttagaccc

SEQ ID NO: 53202 - DNA, 25 bp, Homo sapien
tatctagctttggaaaacacagggg

SEQ ID NO: 53203 - DNA, 25 bp, Homo sapien
agtttgcggatgcgaagttcccgca

SEQ ID NO: 53204 - DNA, 25 bp, Homo sapien
tgcgaagttcccgcatggggttctc

SEQ ID NO: 53205 - DNA, 25 bp, Homo sapien
cgcgtcagtctgcctccactctccc

SEQ ID NO: 53206 - DNA, 25 bp, Homo sapien
catttctccggatgccaaaggatct

SEQ ID NO: 53207 - DNA, 25 bp, Homo sapien
ctccaactcccgcacctttagaccc

SEQ ID NO: 53208 - DNA, 25 bp, Homo sapien
tgcgcagtggacagcaatcttttca

SEQ ID NO: 53209 - DNA, 25 bp, Homo sapien
tccaggccgtagataccaatgcttg

SEQ ID NO: 53210 - DNA, 25 bp, Homo sapien
ccaacacagatgttgagacagagtt

SEQ ID NO: 53211 - DNA, 25 bp, Homo sapien
aacaccttggctgctcgcgtcagtc

SEQ ID NO: 53212 - DNA, 25 bp, Homo sapien
tcccgcatggggttctccttttcac

SEQ ID NO: 53213 - DNA, 25 bp, Homo sapien
tccaggccgtagataccaatgcttg

SEQ ID NO: 53214 - DNA, 25 bp, Homo sapien
tcccgcatggggttctccttttcac

SEQ ID NO: 53215 - DNA, 25 bp, Homo sapien
tgcgaagttcccgcatggggttctc

SEQ ID NO: 53216 - DNA, 25 bp, Homo sapien
agtttgcggatgcgaagttcccgca

SEQ ID NO: 53217 - DNA, 25 bp, Homo sapien
ccaacacagatgttgagacagagtt

SEQ ID NO: 53218 - DNA, 25 bp, Homo sapien
cgcgtcagtctgcctccactctccc

SEQ ID NO: 53219 - DNA, 25 bp, Homo sapien
aacaccttggctgctcgcgtcagtc

SEQ ID NO: 53220 - DNA, 25 bp, Homo sapien
tatctagctttggaaaacacagggg

SEQ ID NO: 53221 - DNA, 25 bp, Homo sapien
catttctccggatgccaaaggatct

SEQ ID NO: 53222 - DNA, 25 bp, Homo sapien
tgcgcagtggacagcaatcttttca

SEQ ID NO: 53223 - DNA, 25 bp, Homo sapien
ctccaactcccgcacctttagaccc

SEQ ID NO: 53224 - DNA, 25 bp, Homo sapien
gatagagaaggtgagttattaaaca

SEQ ID NO: 53225 - DNA, 25 bp, Homo sapien
agccagggatactaccaagatcact

SEQ ID NO: 53226 - DNA, 25 bp, Homo sapien
gatagagtggaaaatcctaagtagg

SEQ ID NO: 53227 - DNA, 25 bp, Homo sapien
ccagccccagattggtccctggagc

SEQ ID NO: 53228 - DNA, 25 bp, Homo sapien
acatctaactagagaaagtcaggga

SEQ ID NO: 53229 - DNA, 25 bp, Homo sapien
attaaacctaccagagaggagagga

SEQ ID NO: 53230 - DNA, 25 bp, Homo sapien
agaaatggaatgaaacacccaatcc

SEQ ID NO: 53231 - DNA, 25 bp, Homo sapien
caaaagagctgttaagtgaatggga

SEQ ID NO: 53232 - DNA, 25 bp, Homo sapien
gcctgaagtgaggaaaacctattta

SEQ ID NO: 53233 - DNA, 25 bp, Homo sapien
acattttgagcaaggatagagaagg

SEQ ID NO: 53234 - DNA, 25 bp, Homo sapien
gaggaggaactgcagttaccactat

SEQ ID NO: 53235 - DNA, 25 bp, Homo sapien
gatagagtggaaaatcctaagtagg

SEQ ID NO: 53236 - DNA, 25 bp, Homo sapien
acatctaactagagaaagtcaggga

SEQ ID NO: 53237 - DNA, 25 bp, Homo sapien
gcctgaagtgaggaaaacctattta

SEQ ID NO: 53238 - DNA, 25 bp, Homo sapien
ccagccccagattggtccctggagc

SEQ ID NO: 53239 - DNA, 25 bp, Homo sapien
agccagggatactaccaagatcact

SEQ ID NO: 53240 - DNA, 25 bp, Homo sapien
caaaagagctgttaagtgaatggga

SEQ ID NO: 53241 - DNA, 25 bp, Homo sapien
agaaatggaatgaaacacccaatcc

SEQ ID NO: 53242 - DNA, 25 bp, Homo sapien
attaaacctaccagagaggagagga

SEQ ID NO: 53243 - DNA, 25 bp, Homo sapien
gaggaggaactgcagttaccactat

SEQ ID NO: 53244 - DNA, 25 bp, Homo sapien
gatagagaaggtgagttattaaaca

SEQ ID NO: 53245 - DNA, 25 bp, Homo sapien
acattttgagcaaggatagagaagg

SEQ ID NO: 53246 - DNA, 25 bp, Homo sapien
agccagggatactaccaagatcact

SEQ ID NO: 53247 - DNA, 25 bp, Homo sapien
caaaagagctgttaagtgaatggga

SEQ ID NO: 53248 - DNA, 25 bp, Homo sapien
gatagagaaggtgagttattaaaca

SEQ ID NO: 53249 - DNA, 25 bp, Homo sapien
attaaacctaccagagaggagagga

SEQ ID NO: 53250 - DNA, 25 bp, Homo sapien
acattttgagcaaggatagagaagg

SEQ ID NO: 53251 - DNA, 25 bp, Homo sapien
agaaatggaatgaaacacccaatcc

SEQ ID NO: 53252 - DNA, 25 bp, Homo sapien
gcctgaagtgaggaaaacctattta

SEQ ID NO: 53253 - DNA, 25 bp, Homo sapien
acatctaactagagaaagtcaggga

SEQ ID NO: 53254 - DNA, 25 bp, Homo sapien
gaggaggaactgcagttaccactat

SEQ ID NO: 53255 - DNA, 25 bp, Homo sapien
ccagccccagattggtccctggagc

SEQ ID NO: 53256 - DNA, 25 bp, Homo sapien
gatagagtggaaaatcctaagtagg

SEQ ID NO: 53257 - DNA, 25 bp, Homo sapien
gatagagtggaaaatcctaagtagg

SEQ ID NO: 53258 - DNA, 25 bp, Homo sapien
acatctaactagagaaagtcaggga

SEQ ID NO: 53259 - DNA, 25 bp, Homo sapien
gcctgaagtgaggaaaacctattta

SEQ ID NO: 53260 - DNA, 25 bp, Homo sapien
ccagccccagattggtccctggagc

SEQ ID NO: 53261 - DNA, 25 bp, Homo sapien
agccagggatactaccaagatcact

SEQ ID NO: 53262 - DNA, 25 bp, Homo sapien
caaaagagctgttaagtgaatggga

SEQ ID NO: 53263 - DNA, 25 bp, Homo sapien
agaaatggaatgaaacacccaatcc

SEQ ID NO: 53264 - DNA, 25 bp, Homo sapien
attaaacctaccagagaggagagga

SEQ ID NO: 53265 - DNA, 25 bp, Homo sapien
gaggaggaactgcagttaccactat

SEQ ID NO: 53266 - DNA, 25 bp, Homo sapien
gatagagaaggtgagttattaaaca

SEQ ID NO: 53267 - DNA, 25 bp, Homo sapien
acattttgagcaaggatagagaagg

SEQ ID NO: 53268 - DNA, 25 bp, Homo sapien
agccagggatactaccaagatcact

SEQ ID NO: 53269 - DNA, 25 bp, Homo sapien
caaaagagctgttaagtgaatggga

SEQ ID NO: 53270 - DNA, 25 bp, Homo sapien
ccagccccagattggtccctggagc

SEQ ID NO: 53271 - DNA, 25 bp, Homo sapien
gatagagaaggtgagttattaaaca

SEQ ID NO: 53272 - DNA, 25 bp, Homo sapien
acatctaactagagaaagtcaggga

SEQ ID NO: 53273 - DNA, 25 bp, Homo sapien
gcctgaagtgaggaaaacctattta

SEQ ID NO: 53274 - DNA, 25 bp, Homo sapien
gatagagtggaaaatcctaagtagg

SEQ ID NO: 53275 - DNA, 25 bp, Homo sapien
agaaatggaatgaaacacccaatcc

SEQ ID NO: 53276 - DNA, 25 bp, Homo sapien
acattttgagcaaggatagagaagg

SEQ ID NO: 53277 - DNA, 25 bp, Homo sapien
attaaacctaccagagaggagagga

SEQ ID NO: 53278 - DNA, 25 bp, Homo sapien
gaggaggaactgcagttaccactat

SEQ ID NO: 53279 - DNA, 25 bp, Homo sapien
gatagagtggaaaatcctaagtagg

SEQ ID NO: 53280 - DNA, 25 bp, Homo sapien
acatctaactagagaaagtcaggga

SEQ ID NO: 53281 - DNA, 25 bp, Homo sapien
gcctgaagtgaggaaaacctattta

SEQ ID NO: 53282 - DNA, 25 bp, Homo sapien
ccagccccagattggtccctggagc

SEQ ID NO: 53283 - DNA, 25 bp, Homo sapien
agccagggatactaccaagatcact

SEQ ID NO: 53284 - DNA, 25 bp, Homo sapien
caaaagagctgttaagtgaatggga

SEQ ID NO: 53285 - DNA, 25 bp, Homo sapien
agaaatggaatgaaacacccaatcc

SEQ ID NO: 53286 - DNA, 25 bp, Homo sapien
attaaacctaccagagaggagagga

SEQ ID NO: 53287 - DNA, 25 bp, Homo sapien
gaggaggaactgcagttaccactat

SEQ ID NO: 53288 - DNA, 25 bp, Homo sapien
gatagagaaggtgagttattaaaca

SEQ ID NO: 53289 - DNA, 25 bp, Homo sapien
acattttgagcaaggatagagaagg

SEQ ID NO: 53290 - DNA, 25 bp, Homo sapien
gatagagtggaaaatcctaagtagg

SEQ ID NO: 53291 - DNA, 25 bp, Homo sapien
acatctaactagagaaagtcaggga

SEQ ID NO: 53292 - DNA, 25 bp, Homo sapien
gcctgaagtgaggaaaacctattta

SEQ ID NO: 53293 - DNA, 25 bp, Homo sapien
ccagccccagattggtccctggagc

SEQ ID NO: 53294 - DNA, 25 bp, Homo sapien
agccagggatactaccaagatcact

SEQ ID NO: 53295 - DNA, 25 bp, Homo sapien
caaaagagctgttaagtgaatggga

SEQ ID NO: 53296 - DNA, 25 bp, Homo sapien
agaaatggaatgaaacacccaatcc

SEQ ID NO: 53297 - DNA, 25 bp, Homo sapien
attaaacctaccagagaggagagga

SEQ ID NO: 53298 - DNA, 25 bp, Homo sapien
gaggaggaactgcagttaccactat

SEQ ID NO: 53299 - DNA, 25 bp, Homo sapien
gatagagaaggtgagttattaaaca

SEQ ID NO: 53300 - DNA, 25 bp, Homo sapien
acattttgagcaaggatagagaagg

SEQ ID NO: 53301 - DNA, 25 bp, Homo sapien
gcctgaagtgaggaaaacctattta

SEQ ID NO: 53302 - DNA, 25 bp, Homo sapien
gaggaggaactgcagttaccactat

SEQ ID NO: 53303 - DNA, 25 bp, Homo sapien
gatagagtggaaaatcctaagtagg

SEQ ID NO: 53304 - DNA, 25 bp, Homo sapien
agccagggatactaccaagatcact

SEQ ID NO: 53305 - DNA, 25 bp, Homo sapien
acattttgagcaaggatagagaagg

SEQ ID NO: 53306 - DNA, 25 bp, Homo sapien
caaaagagctgttaagtgaatggga

SEQ ID NO: 53307 - DNA, 25 bp, Homo sapien
gatagagaaggtgagttattaaaca

SEQ ID NO: 53308 - DNA, 25 bp, Homo sapien
agaaatggaatgaaacacccaatcc

SEQ ID NO: 53309 - DNA, 25 bp, Homo sapien
ccagccccagattggtccctggagc

SEQ ID NO: 53310 - DNA, 25 bp, Homo sapien
attaaacctaccagagaggagagga

SEQ ID NO: 53311 - DNA, 25 bp, Homo sapien
acatctaactagagaaagtcaggga

SEQ ID NO: 53312 - DNA, 25 bp, Homo sapien
gatagagtggaaaatcctaagtagg

SEQ ID NO: 53313 - DNA, 25 bp, Homo sapien
acatctaactagagaaagtcaggga

SEQ ID NO: 53314 - DNA, 25 bp, Homo sapien
gcctgaagtgaggaaaacctattta

SEQ ID NO: 53315 - DNA, 25 bp, Homo sapien
ccagccccagattggtccctggagc

SEQ ID NO: 53316 - DNA, 25 bp, Homo sapien
agccagggatactaccaagatcact

SEQ ID NO: 53317 - DNA, 25 bp, Homo sapien
caaaagagctgttaagtgaatggga

SEQ ID NO: 53318 - DNA, 25 bp, Homo sapien
agaaatggaatgaaacacccaatcc

SEQ ID NO: 53319 - DNA, 25 bp, Homo sapien
attaaacctaccagagaggagagga

SEQ ID NO: 53320 - DNA, 25 bp, Homo sapien
gaggaggaactgcagttaccactat

SEQ ID NO: 53321 - DNA, 25 bp, Homo sapien
gatagagaaggtgagttattaaaca

SEQ ID NO: 53322 - DNA, 25 bp, Homo sapien
acattttgagcaaggatagagaagg

SEQ ID NO: 53323 - DNA, 25 bp, Homo sapien
acattttgagcaaggatagagaagg

SEQ ID NO: 53324 - DNA, 25 bp, Homo sapien
agaaatggaatgaaacacccaatcc

SEQ ID NO: 53325 - DNA, 25 bp, Homo sapien
acatctaactagagaaagtcaggga

SEQ ID NO: 53326 - DNA, 25 bp, Homo sapien
agccagggatactaccaagatcact

SEQ ID NO: 53327 - DNA, 25 bp, Homo sapien
gaggaggaactgcagttaccactat

SEQ ID NO: 53328 - DNA, 25 bp, Homo sapien
ccagccccagattggtccctggagc

SEQ ID NO: 53329 - DNA, 25 bp, Homo sapien
attaaacctaccagagaggagagga

SEQ ID NO: 53330 - DNA, 25 bp, Homo sapien
gatagagaaggtgagttattaaaca

SEQ ID NO: 53331 - DNA, 25 bp, Homo sapien
gatagagtggaaaatcctaagtagg

SEQ ID NO: 53332 - DNA, 25 bp, Homo sapien
caaaagagctgttaagtgaatggga

SEQ ID NO: 53333 - DNA, 25 bp, Homo sapien
gcctgaagtgaggaaaacctattta

SEQ ID NO: 53334 - DNA, 25 bp, Homo sapien
gatagagtggaaaatcctaagtagg

SEQ ID NO: 53335 - DNA, 25 bp, Homo sapien
acatctaactagagaaagtcaggga

SEQ ID NO: 53336 - DNA, 25 bp, Homo sapien
gcctgaagtgaggaaaacctattta

SEQ ID NO: 53337 - DNA, 25 bp, Homo sapien
ccagccccagattggtccctggagc

SEQ ID NO: 53338 - DNA, 25 bp, Homo sapien
agccagggatactaccaagatcact

SEQ ID NO: 53339 - DNA, 25 bp, Homo sapien
caaaagagctgttaagtgaatggga

SEQ ID NO: 53340 - DNA, 25 bp, Homo sapien
agaaatggaatgaaacacccaatcc

SEQ ID NO: 53341 - DNA, 25 bp, Homo sapien
attaaacctaccagagaggagagga

SEQ ID NO: 53342 - DNA, 25 bp, Homo sapien
gaggaggaactgcagttaccactat

SEQ ID NO: 53343 - DNA, 25 bp, Homo sapien
gatagagaaggtgagttattaaaca

SEQ ID NO: 53344 - DNA, 25 bp, Homo sapien
acattttgagcaaggatagagaagg

SEQ ID NO: 53345 - DNA, 25 bp, Homo sapien
gatagagtggaaaatcctaagtagg

SEQ ID NO: 53346 - DNA, 25 bp, Homo sapien
gaggaggaactgcagttaccactat

SEQ ID NO: 53347 - DNA, 25 bp, Homo sapien
gcctgaagtgaggaaaacctattta

SEQ ID NO: 53348 - DNA, 25 bp, Homo sapien
attaaacctaccagagaggagagga

SEQ ID NO: 53349 - DNA, 25 bp, Homo sapien
acatctaactagagaaagtcaggga

SEQ ID NO: 53350 - DNA, 25 bp, Homo sapien
agaaatggaatgaaacacccaatcc

SEQ ID NO: 53351 - DNA, 25 bp, Homo sapien
gatagagaaggtgagttattaaaca

SEQ ID NO: 53352 - DNA, 25 bp, Homo sapien
agccagggatactaccaagatcact

SEQ ID NO: 53353 - DNA, 25 bp, Homo sapien
acattttgagcaaggatagagaagg

SEQ ID NO: 53354 - DNA, 25 bp, Homo sapien
ccagccccagattggtccctggagc

SEQ ID NO: 53355 - DNA, 25 bp, Homo sapien
caaaagagctgttaagtgaatggga

SEQ ID NO: 53356 - DNA, 25 bp, Homo sapien
gatagagtggaaaatcctaagtagg

SEQ ID NO: 53357 - DNA, 25 bp, Homo sapien
acatctaactagagaaagtcaggga

SEQ ID NO: 53358 - DNA, 25 bp, Homo sapien
gcctgaagtgaggaaaacctattta

SEQ ID NO: 53359 - DNA, 25 bp, Homo sapien
ccagccccagattggtccctggagc

SEQ ID NO: 53360 - DNA, 25 bp, Homo sapien
agccagggatactaccaagatcact

SEQ ID NO: 53361 - DNA, 25 bp, Homo sapien
caaaagagctgttaagtgaatggga

SEQ ID NO: 53362 - DNA, 25 bp, Homo sapien
agaaatggaatgaaacacccaatcc

SEQ ID NO: 53363 - DNA, 25 bp, Homo sapien
attaaacctaccagagaggagagga

SEQ ID NO: 53364 - DNA, 25 bp, Homo sapien
gaggaggaactgcagttaccactat

SEQ ID NO: 53365 - DNA, 25 bp, Homo sapien
gatagagaaggtgagttattaaaca

SEQ ID NO: 53366 - DNA, 25 bp, Homo sapien
acattttgagcaaggatagagaagg

SEQ ID NO: 53367 - DNA, 25 bp, Homo sapien
gatagagaaggtgagttattaaaca

SEQ ID NO: 53368 - DNA, 25 bp, Homo sapien
acatctaactagagaaagtcaggga

SEQ ID NO: 53369 - DNA, 25 bp, Homo sapien
acattttgagcaaggatagagaagg

SEQ ID NO: 53370 - DNA, 25 bp, Homo sapien
attaaacctaccagagaggagagga

SEQ ID NO: 53371 - DNA, 25 bp, Homo sapien
agccagggatactaccaagatcact

SEQ ID NO: 53372 - DNA, 25 bp, Homo sapien
gcctgaagtgaggaaaacctattta

SEQ ID NO: 53373 - DNA, 25 bp, Homo sapien
caaaagagctgttaagtgaatggga

SEQ ID NO: 53374 - DNA, 25 bp, Homo sapien
ccagccccagattggtccctggagc

SEQ ID NO: 53375 - DNA, 25 bp, Homo sapien
gaggaggaactgcagttaccactat

SEQ ID NO: 53376 - DNA, 25 bp, Homo sapien
agaaatggaatgaaacacccaatcc

SEQ ID NO: 53377 - DNA, 25 bp, Homo sapien
gatagagtggaaaatcctaagtagg

SEQ ID NO: 53378 - DNA, 25 bp, Homo sapien
gatagagtggaaaatcctaagtagg

SEQ ID NO: 53379 - DNA, 25 bp, Homo sapien
acatctaactagagaaagtcaggga

SEQ ID NO: 53380 - DNA, 25 bp, Homo sapien
gcctgaagtgaggaaaacctattta

SEQ ID NO: 53381 - DNA, 25 bp, Homo sapien
ccagccccagattggtccctggagc

SEQ ID NO: 53382 - DNA, 25 bp, Homo sapien
agccagggatactaccaagatcact

SEQ ID NO: 53383 - DNA, 25 bp, Homo sapien
caaaagagctgttaagtgaatggga

SEQ ID NO: 53384 - DNA, 25 bp, Homo sapien
agaaatggaatgaaacacccaatcc

SEQ ID NO: 53385 - DNA, 25 bp, Homo sapien
attaaacctaccagagaggagagga

SEQ ID NO: 53386 - DNA, 25 bp, Homo sapien
gaggaggaactgcagttaccactat

SEQ ID NO: 53387 - DNA, 25 bp, Homo sapien
gatagagaaggtgagttattaaaca

SEQ ID NO: 53388 - DNA, 25 bp, Homo sapien
acattttgagcaaggatagagaagg

SEQ ID NO: 53389 - DNA, 25 bp, Homo sapien
acattttgagcaaggatagagaagg

SEQ ID NO: 53390 - DNA, 25 bp, Homo sapien
attaaacctaccagagaggagagga

SEQ ID NO: 53391 - DNA, 25 bp, Homo sapien
agccagggatactaccaagatcact

SEQ ID NO: 53392 - DNA, 25 bp, Homo sapien
acatctaactagagaaagtcaggga

SEQ ID NO: 53393 - DNA, 25 bp, Homo sapien
gaggaggaactgcagttaccactat

SEQ ID NO: 53394 - DNA, 25 bp, Homo sapien
gatagagaaggtgagttattaaaca

SEQ ID NO: 53395 - DNA, 25 bp, Homo sapien
agaaatggaatgaaacacccaatcc

SEQ ID NO: 53396 - DNA, 25 bp, Homo sapien
gcctgaagtgaggaaaacctattta

SEQ ID NO: 53397 - DNA, 25 bp, Homo sapien
gatagagtggaaaatcctaagtagg

SEQ ID NO: 53398 - DNA, 25 bp, Homo sapien
ccagccccagattggtccctggagc

SEQ ID NO: 53399 - DNA, 25 bp, Homo sapien
caaaagagctgttaagtgaatggga

SEQ ID NO: 53400 - DNA, 25 bp, Homo sapien
attaaacctaccagagaggagagga

SEQ ID NO: 53401 - DNA, 25 bp, Homo sapien
caaaagagctgttaagtgaatggga

SEQ ID NO: 53402 - DNA, 25 bp, Homo sapien
acatctaactagagaaagtcaggga

SEQ ID NO: 53403 - DNA, 25 bp, Homo sapien
gcctgaagtgaggaaaacctattta

SEQ ID NO: 53404 - DNA, 25 bp, Homo sapien
ccagccccagattggtccctggagc

SEQ ID NO: 53405 - DNA, 25 bp, Homo sapien
agccagggatactaccaagatcact

SEQ ID NO: 53406 - DNA, 25 bp, Homo sapien
agaaatggaatgaaacacccaatcc

SEQ ID NO: 53407 - DNA, 25 bp, Homo sapien
gaggaggaactgcagttaccactat

SEQ ID NO: 53408 - DNA, 25 bp, Homo sapien
acattttgagcaaggatagagaagg

SEQ ID NO: 53409 - DNA, 25 bp, Homo sapien
gatagagaaggtgagttattaaaca

SEQ ID NO: 53410 - DNA, 25 bp, Homo sapien
gatagagtggaaaatcctaagtagg

SEQ ID NO: 53411 - DNA, 25 bp, Homo sapien
gatagagtggaaaatcctaagtagg

SEQ ID NO: 53412 - DNA, 25 bp, Homo sapien
acatctaactagagaaagtcaggga

SEQ ID NO: 53413 - DNA, 25 bp, Homo sapien
gcctgaagtgaggaaaacctattta

SEQ ID NO: 53414 - DNA, 25 bp, Homo sapien
ccagccccagattggtccctggagc

SEQ ID NO: 53415 - DNA, 25 bp, Homo sapien
agccagggatactaccaagatcact

SEQ ID NO: 53416 - DNA, 25 bp, Homo sapien
caaaagagctgttaagtgaatggga

SEQ ID NO: 53417 - DNA, 25 bp, Homo sapien
agaaatggaatgaaacacccaatcc

SEQ ID NO: 53418 - DNA, 25 bp, Homo sapien
attaaacctaccagagaggagagga

SEQ ID NO: 53419 - DNA, 25 bp, Homo sapien
gaggaggaactgcagttaccactat

SEQ ID NO: 53420 - DNA, 25 bp, Homo sapien
gatagagaaggtgagttattaaaca

SEQ ID NO: 53421 - DNA, 25 bp, Homo sapien
acattttgagcaaggatagagaagg

SEQ ID NO: 53422 - DNA, 25 bp, Homo sapien
attaaacctaccagagaggagagga

SEQ ID NO: 53423 - DNA, 25 bp, Homo sapien
gcctgaagtgaggaaaacctattta

SEQ ID NO: 53424 - DNA, 25 bp, Homo sapien
gatagagaaggtgagttattaaaca

SEQ ID NO: 53425 - DNA, 25 bp, Homo sapien
gatagagtggaaaatcctaagtagg

SEQ ID NO: 53426 - DNA, 25 bp, Homo sapien
caaaagagctgttaagtgaatggga

SEQ ID NO: 53427 - DNA, 25 bp, Homo sapien
ccagccccagattggtccctggagc

SEQ ID NO: 53428 - DNA, 25 bp, Homo sapien
acatctaactagagaaagtcaggga

SEQ ID NO: 53429 - DNA, 25 bp, Homo sapien
acattttgagcaaggatagagaagg

SEQ ID NO: 53430 - DNA, 25 bp, Homo sapien
gaggaggaactgcagttaccactat

SEQ ID NO: 53431 - DNA, 25 bp, Homo sapien
agccagggatactaccaagatcact

SEQ ID NO: 53432 - DNA, 25 bp, Homo sapien
agaaatggaatgaaacacccaatcc

SEQ ID NO: 53433 - DNA, 25 bp, Homo sapien
gatagagtggaaaatcctaagtagg

SEQ ID NO: 53434 - DNA, 25 bp, Homo sapien
acatctaactagagaaagtcaggga

SEQ ID NO: 53435 - DNA, 25 bp, Homo sapien
gcctgaagtgaggaaaacctattta

SEQ ID NO: 53436 - DNA, 25 bp, Homo sapien
ccagccccagattggtccctggagc

SEQ ID NO: 53437 - DNA, 25 bp, Homo sapien
agccagggatactaccaagatcact

SEQ ID NO: 53438 - DNA, 25 bp, Homo sapien
caaaagagctgttaagtgaatggga

SEQ ID NO: 53439 - DNA, 25 bp, Homo sapien
agaaatggaatgaaacacccaatcc

SEQ ID NO: 53440 - DNA, 25 bp, Homo sapien
attaaacctaccagagaggagagga

SEQ ID NO: 53441 - DNA, 25 bp, Homo sapien
gaggaggaactgcagttaccactat

SEQ ID NO: 53442 - DNA, 25 bp, Homo sapien
gatagagaaggtgagttattaaaca

SEQ ID NO: 53443 - DNA, 25 bp, Homo sapien
acattttgagcaaggatagagaagg

SEQ ID NO: 53444 - DNA, 25 bp, Homo sapien
ccagccccagattggtccctggagc

SEQ ID NO: 53445 - DNA, 25 bp, Homo sapien
acatctaactagagaaagtcaggga

SEQ ID NO: 53446 - DNA, 25 bp, Homo sapien
agaaatggaatgaaacacccaatcc

SEQ ID NO: 53447 - DNA, 25 bp, Homo sapien
gatagagtggaaaatcctaagtagg

SEQ ID NO: 53448 - DNA, 25 bp, Homo sapien
agccagggatactaccaagatcact

SEQ ID NO: 53449 - DNA, 25 bp, Homo sapien
gcctgaagtgaggaaaacctattta

SEQ ID NO: 53450 - DNA, 25 bp, Homo sapien
attaaacctaccagagaggagagga

SEQ ID NO: 53451 - DNA, 25 bp, Homo sapien
gatagagaaggtgagttattaaaca

SEQ ID NO: 53452 - DNA, 25 bp, Homo sapien
gaggaggaactgcagttaccactat

SEQ ID NO: 53453 - DNA, 25 bp, Homo sapien
acattttgagcaaggatagagaagg

SEQ ID NO: 53454 - DNA, 25 bp, Homo sapien
caaaagagctgttaagtgaatggga

SEQ ID NO: 53455 - DNA, 25 bp, Homo sapien
gatagagtggaaaatcctaagtagg

SEQ ID NO: 53456 - DNA, 25 bp, Homo sapien
acatctaactagagaaagtcaggga

SEQ ID NO: 53457 - DNA, 25 bp, Homo sapien
gcctgaagtgaggaaaacctattta

SEQ ID NO: 53458 - DNA, 25 bp, Homo sapien
ccagccccagattggtccctggagc

SEQ ID NO: 53459 - DNA, 25 bp, Homo sapien
agccagggatactaccaagatcact

SEQ ID NO: 53460 - DNA, 25 bp, Homo sapien
caaaagagctgttaagtgaatggga

SEQ ID NO: 53461 - DNA, 25 bp, Homo sapien
agaaatggaatgaaacacccaatcc

SEQ ID NO: 53462 - DNA, 25 bp, Homo sapien
attaaacctaccagagaggagagga

SEQ ID NO: 53463 - DNA, 25 bp, Homo sapien
gaggaggaactgcagttaccactat

SEQ ID NO: 53464 - DNA, 25 bp, Homo sapien
gatagagaaggtgagttattaaaca

SEQ ID NO: 53465 - DNA, 25 bp, Homo sapien
acattttgagcaaggatagagaagg

SEQ ID NO: 53466 - DNA, 25 bp, Homo sapien
attaaacctaccagagaggagagga

SEQ ID NO: 53467 - DNA, 25 bp, Homo sapien
acattttgagcaaggatagagaagg

SEQ ID NO: 53468 - DNA, 25 bp, Homo sapien
gatagagtggaaaatcctaagtagg

SEQ ID NO: 53469 - DNA, 25 bp, Homo sapien
ccagccccagattggtccctggagc

SEQ ID NO: 53470 - DNA, 25 bp, Homo sapien
caaaagagctgttaagtgaatggga

SEQ ID NO: 53471 - DNA, 25 bp, Homo sapien
gcctgaagtgaggaaaacctattta

SEQ ID NO: 53472 - DNA, 25 bp, Homo sapien
gaggaggaactgcagttaccactat

SEQ ID NO: 53473 - DNA, 25 bp, Homo sapien
agccagggatactaccaagatcact

SEQ ID NO: 53474 - DNA, 25 bp, Homo sapien
acatctaactagagaaagtcaggga

SEQ ID NO: 53475 - DNA, 25 bp, Homo sapien
gatagagaaggtgagttattaaaca

SEQ ID NO: 53476 - DNA, 25 bp, Homo sapien
agaaatggaatgaaacacccaatcc

SEQ ID NO: 53477 - DNA, 25 bp, Homo sapien
gatagagtggaaaatcctaagtagg

SEQ ID NO: 53478 - DNA, 25 bp, Homo sapien
acatctaactagagaaagtcaggga

SEQ ID NO: 53479 - DNA, 25 bp, Homo sapien
gcctgaagtgaggaaaacctattta

SEQ ID NO: 53480 - DNA, 25 bp, Homo sapien
ccagccccagattggtccctggagc

SEQ ID NO: 53481 - DNA, 25 bp, Homo sapien
agccagggatactaccaagatcact

SEQ ID NO: 53482 - DNA, 25 bp, Homo sapien
caaaagagctgttaagtgaatggga

SEQ ID NO: 53483 - DNA, 25 bp, Homo sapien
agaaatggaatgaaacacccaatcc

SEQ ID NO: 53484 - DNA, 25 bp, Homo sapien
attaaacctaccagagaggagagga

SEQ ID NO: 53485 - DNA, 25 bp, Homo sapien
gaggaggaactgcagttaccactat

SEQ ID NO: 53486 - DNA, 25 bp, Homo sapien
gatagagaaggtgagttattaaaca

SEQ ID NO: 53487 - DNA, 25 bp, Homo sapien
acattttgagcaaggatagagaagg

SEQ ID NO: 53488 - DNA, 25 bp, Homo sapien
ccagccccagattggtccctggagc

SEQ ID NO: 53489 - DNA, 25 bp, Homo sapien
gaggaggaactgcagttaccactat

SEQ ID NO: 53490 - DNA, 25 bp, Homo sapien
attaaacctaccagagaggagagga

SEQ ID NO: 53491 - DNA, 25 bp, Homo sapien
agaaatggaatgaaacacccaatcc

SEQ ID NO: 53492 - DNA, 25 bp, Homo sapien
gatagagtggaaaatcctaagtagg

SEQ ID NO: 53493 - DNA, 25 bp, Homo sapien
gcctgaagtgaggaaaacctattta

SEQ ID NO: 53494 - DNA, 25 bp, Homo sapien
agccagggatactaccaagatcact

SEQ ID NO: 53495 - DNA, 25 bp, Homo sapien
acatctaactagagaaagtcaggga

SEQ ID NO: 53496 - DNA, 25 bp, Homo sapien
gatagagaaggtgagttattaaaca

SEQ ID NO: 53497 - DNA, 25 bp, Homo sapien
caaaagagctgttaagtgaatggga

SEQ ID NO: 53498 - DNA, 25 bp, Homo sapien
acattttgagcaaggatagagaagg

SEQ ID NO: 53499 - DNA, 25 bp, Homo sapien
gatagagtggaaaatcctaagtagg

SEQ ID NO: 53500 - DNA, 25 bp, Homo sapien
acatctaactagagaaagtcaggga

SEQ ID NO: 53501 - DNA, 25 bp, Homo sapien
gcctgaagtgaggaaaacctattta

SEQ ID NO: 53502 - DNA, 25 bp, Homo sapien
ccagccccagattggtccctggagc

SEQ ID NO: 53503 - DNA, 25 bp, Homo sapien
agccagggatactaccaagatcact

SEQ ID NO: 53504 - DNA, 25 bp, Homo sapien
caaaagagctgttaagtgaatggga

SEQ ID NO: 53505 - DNA, 25 bp, Homo sapien
agaaatggaatgaaacacccaatcc

SEQ ID NO: 53506 - DNA, 25 bp, Homo sapien
attaaacctaccagagaggagagga

SEQ ID NO: 53507 - DNA, 25 bp, Homo sapien
gaggaggaactgcagttaccactat

SEQ ID NO: 53508 - DNA, 25 bp, Homo sapien
gatagagaaggtgagttattaaaca

SEQ ID NO: 53509 - DNA, 25 bp, Homo sapien
acattttgagcaaggatagagaagg

SEQ ID NO: 53510 - DNA, 25 bp, Homo sapien
gatagagaaggtgagttattaaaca

SEQ ID NO: 53511 - DNA, 25 bp, Homo sapien
ccagccccagattggtccctggagc

SEQ ID NO: 53512 - DNA, 25 bp, Homo sapien
agaaatggaatgaaacacccaatcc

SEQ ID NO: 53513 - DNA, 25 bp, Homo sapien
acattttgagcaaggatagagaagg

SEQ ID NO: 53514 - DNA, 25 bp, Homo sapien
attaaacctaccagagaggagagga

SEQ ID NO: 53515 - DNA, 25 bp, Homo sapien
gcctgaagtgaggaaaacctattta

SEQ ID NO: 53516 - DNA, 25 bp, Homo sapien
gaggaggaactgcagttaccactat

SEQ ID NO: 53517 - DNA, 25 bp, Homo sapien
acatctaactagagaaagtcaggga

SEQ ID NO: 53518 - DNA, 25 bp, Homo sapien
gatagagtggaaaatcctaagtagg

SEQ ID NO: 53519 - DNA, 25 bp, Homo sapien
caaaagagctgttaagtgaatggga

SEQ ID NO: 53520 - DNA, 25 bp, Homo sapien
agccagggatactaccaagatcact

SEQ ID NO: 53521 - DNA, 25 bp, Homo sapien
gatagagtggaaaatcctaagtagg

SEQ ID NO: 53522 - DNA, 25 bp, Homo sapien
acatctaactagagaaagtcaggga

SEQ ID NO: 53523 - DNA, 25 bp, Homo sapien
gcctgaagtgaggaaaacctattta

SEQ ID NO: 53524 - DNA, 25 bp, Homo sapien
ccagccccagattggtccctggagc

SEQ ID NO: 53525 - DNA, 25 bp, Homo sapien
agccagggatactaccaagatcact

SEQ ID NO: 53526 - DNA, 25 bp, Homo sapien
caaaagagctgttaagtgaatggga

SEQ ID NO: 53527 - DNA, 25 bp, Homo sapien
agaaatggaatgaaacacccaatcc

SEQ ID NO: 53528 - DNA, 25 bp, Homo sapien
attaaacctaccagagaggagagga

SEQ ID NO: 53529 - DNA, 25 bp, Homo sapien
gaggaggaactgcagttaccactat

SEQ ID NO: 53530 - DNA, 25 bp, Homo sapien
gatagagaaggtgagttattaaaca

SEQ ID NO: 53531 - DNA, 25 bp, Homo sapien
acattttgagcaaggatagagaagg

SEQ ID NO: 53532 - DNA, 25 bp, Homo sapien
gatagagtggaaaatcctaagtagg

SEQ ID NO: 53533 - DNA, 25 bp, Homo sapien
acatctaactagagaaagtcaggga

SEQ ID NO: 53534 - DNA, 25 bp, Homo sapien
gcctgaagtgaggaaaacctattta

SEQ ID NO: 53535 - DNA, 25 bp, Homo sapien
ccagccccagattggtccctggagc

SEQ ID NO: 53536 - DNA, 25 bp, Homo sapien
agccagggatactaccaagatcact

SEQ ID NO: 53537 - DNA, 25 bp, Homo sapien
caaaagagctgttaagtgaatggga

SEQ ID NO: 53538 - DNA, 25 bp, Homo sapien
agaaatggaatgaaacacccaatcc

SEQ ID NO: 53539 - DNA, 25 bp, Homo sapien
attaaacctaccagagaggagagga

SEQ ID NO: 53540 - DNA, 25 bp, Homo sapien
gaggaggaactgcagttaccactat

SEQ ID NO: 53541 - DNA, 25 bp, Homo sapien
gatagagaaggtgagttattaaaca

SEQ ID NO: 53542 - DNA, 25 bp, Homo sapien
acattttgagcaaggatagagaagg

SEQ ID NO: 53543 - DNA, 25 bp, Homo sapien
acattttgagcaaggatagagaagg

SEQ ID NO: 53544 - DNA, 25 bp, Homo sapien
caaaagagctgttaagtgaatggga

SEQ ID NO: 53545 - DNA, 25 bp, Homo sapien
acatctaactagagaaagtcaggga

SEQ ID NO: 53546 - DNA, 25 bp, Homo sapien
gaggaggaactgcagttaccactat

SEQ ID NO: 53547 - DNA, 25 bp, Homo sapien
agccagggatactaccaagatcact

SEQ ID NO: 53548 - DNA, 25 bp, Homo sapien
attaaacctaccagagaggagagga

SEQ ID NO: 53549 - DNA, 25 bp, Homo sapien
gatagagaaggtgagttattaaaca

SEQ ID NO: 53550 - DNA, 25 bp, Homo sapien
gatagagtggaaaatcctaagtagg

SEQ ID NO: 53551 - DNA, 25 bp, Homo sapien
gcctgaagtgaggaaaacctattta

SEQ ID NO: 53552 - DNA, 25 bp, Homo sapien
agaaatggaatgaaacacccaatcc

SEQ ID NO: 53553 - DNA, 25 bp, Homo sapien
ccagccccagattggtccctggagc

SEQ ID NO: 53554 - DNA, 25 bp, Homo sapien
agaaatggaatgaaacacccaatcc

SEQ ID NO: 53555 - DNA, 25 bp, Homo sapien
acattttgagcaaggatagagaagg

SEQ ID NO: 53556 - DNA, 25 bp, Homo sapien
caaaagagctgttaagtgaatggga

SEQ ID NO: 53557 - DNA, 25 bp, Homo sapien
acatctaactagagaaagtcaggga

SEQ ID NO: 53558 - DNA, 25 bp, Homo sapien
gaggaggaactgcagttaccactat

SEQ ID NO: 53559 - DNA, 25 bp, Homo sapien
agccagggatactaccaagatcact

SEQ ID NO: 53560 - DNA, 25 bp, Homo sapien
attaaacctaccagagaggagagga

SEQ ID NO: 53561 - DNA, 25 bp, Homo sapien
gatagagtggaaaatcctaagtagg

SEQ ID NO: 53562 - DNA, 25 bp, Homo sapien
gatagagaaggtgagttattaaaca

SEQ ID NO: 53563 - DNA, 25 bp, Homo sapien
gcctgaagtgaggaaaacctattta

SEQ ID NO: 53564 - DNA, 25 bp, Homo sapien
ccagccccagattggtccctggagc

SEQ ID NO: 53565 - DNA, 25 bp, Homo sapien
acattttgagcaaggatagagaagg

SEQ ID NO: 53566 - DNA, 25 bp, Homo sapien
caaaagagctgttaagtgaatggga

SEQ ID NO: 53567 - DNA, 25 bp, Homo sapien
gaggaggaactgcagttaccactat

SEQ ID NO: 53568 - DNA, 25 bp, Homo sapien
acatctaactagagaaagtcaggga

SEQ ID NO: 53569 - DNA, 25 bp, Homo sapien
agccagggatactaccaagatcact

SEQ ID NO: 53570 - DNA, 25 bp, Homo sapien
attaaacctaccagagaggagagga

SEQ ID NO: 53571 - DNA, 25 bp, Homo sapien
gatagagtggaaaatcctaagtagg

SEQ ID NO: 53572 - DNA, 25 bp, Homo sapien
gatagagaaggtgagttattaaaca

SEQ ID NO: 53573 - DNA, 25 bp, Homo sapien
gcctgaagtgaggaaaacctattta

SEQ ID NO: 53574 - DNA, 25 bp, Homo sapien
agaaatggaatgaaacacccaatcc

SEQ ID NO: 53575 - DNA, 25 bp, Homo sapien
ccagccccagattggtccctggagc

SEQ ID NO: 53576 - DNA, 25 bp, Homo sapien
acattttgagcaaggatagagaagg

SEQ ID NO: 53577 - DNA, 25 bp, Homo sapien
agaaatggaatgaaacacccaatcc

SEQ ID NO: 53578 - DNA, 25 bp, Homo sapien
acatctaactagagaaagtcaggga

SEQ ID NO: 53579 - DNA, 25 bp, Homo sapien
caaaagagctgttaagtgaatggga

SEQ ID NO: 53580 - DNA, 25 bp, Homo sapien
gaggaggaactgcagttaccactat

SEQ ID NO: 53581 - DNA, 25 bp, Homo sapien
agccagggatactaccaagatcact

SEQ ID NO: 53582 - DNA, 25 bp, Homo sapien
attaaacctaccagagaggagagga

SEQ ID NO: 53583 - DNA, 25 bp, Homo sapien
gatagagaaggtgagttattaaaca

SEQ ID NO: 53584 - DNA, 25 bp, Homo sapien
gcctgaagtgaggaaaacctattta

SEQ ID NO: 53585 - DNA, 25 bp, Homo sapien
gatagagtggaaaatcctaagtagg

SEQ ID NO: 53586 - DNA, 25 bp, Homo sapien
ccagccccagattggtccctggagc

SEQ ID NO: 53587 - DNA, 25 bp, Homo sapien
acattttgagcaaggatagagaagg

SEQ ID NO: 53588 - DNA, 25 bp, Homo sapien
caaaagagctgttaagtgaatggga

SEQ ID NO: 53589 - DNA, 25 bp, Homo sapien
acatctaactagagaaagtcaggga

SEQ ID NO: 53590 - DNA, 25 bp, Homo sapien
gaggaggaactgcagttaccactat

SEQ ID NO: 53591 - DNA, 25 bp, Homo sapien
agccagggatactaccaagatcact

SEQ ID NO: 53592 - DNA, 25 bp, Homo sapien
gatagagtggaaaatcctaagtagg

SEQ ID NO: 53593 - DNA, 25 bp, Homo sapien
attaaacctaccagagaggagagga

SEQ ID NO: 53594 - DNA, 25 bp, Homo sapien
gatagagaaggtgagttattaaaca

SEQ ID NO: 53595 - DNA, 25 bp, Homo sapien
gcctgaagtgaggaaaacctattta

SEQ ID NO: 53596 - DNA, 25 bp, Homo sapien
ccagccccagattggtccctggagc

SEQ ID NO: 53597 - DNA, 25 bp, Homo sapien
agaaatggaatgaaacacccaatcc

SEQ ID NO: 53598 - DNA, 25 bp, Homo sapien
acattttgagcaaggatagagaagg

SEQ ID NO: 53599 - DNA, 25 bp, Homo sapien
agaaatggaatgaaacacccaatcc

SEQ ID NO: 53600 - DNA, 25 bp, Homo sapien
acatctaactagagaaagtcaggga

SEQ ID NO: 53601 - DNA, 25 bp, Homo sapien
caaaagagctgttaagtgaatggga

SEQ ID NO: 53602 - DNA, 25 bp, Homo sapien
gaggaggaactgcagttaccactat

SEQ ID NO: 53603 - DNA, 25 bp, Homo sapien
gatagagtggaaaatcctaagtagg

SEQ ID NO: 53604 - DNA, 25 bp, Homo sapien
agccagggatactaccaagatcact

SEQ ID NO: 53605 - DNA, 25 bp, Homo sapien
attaaacctaccagagaggagagga

SEQ ID NO: 53606 - DNA, 25 bp, Homo sapien
gatagagaaggtgagttattaaaca

SEQ ID NO: 53607 - DNA, 25 bp, Homo sapien
gcctgaagtgaggaaaacctattta

SEQ ID NO: 53608 - DNA, 25 bp, Homo sapien
ccagccccagattggtccctggagc

SEQ ID NO: 53609 - DNA, 25 bp, Homo sapien
acattttgagcaaggatagagaagg

SEQ ID NO: 53610 - DNA, 25 bp, Homo sapien
caaaagagctgttaagtgaatggga

SEQ ID NO: 53611 - DNA, 25 bp, Homo sapien
gaggaggaactgcagttaccactat

SEQ ID NO: 53612 - DNA, 25 bp, Homo sapien
acatctaactagagaaagtcaggga

SEQ ID NO: 53613 - DNA, 25 bp, Homo sapien
agccagggatactaccaagatcact

SEQ ID NO: 53614 - DNA, 25 bp, Homo sapien
attaaacctaccagagaggagagga

SEQ ID NO: 53615 - DNA, 25 bp, Homo sapien
gatagagaaggtgagttattaaaca

SEQ ID NO: 53616 - DNA, 25 bp, Homo sapien
gcctgaagtgaggaaaacctattta

SEQ ID NO: 53617 - DNA, 25 bp, Homo sapien
gatagagtggaaaatcctaagtagg

SEQ ID NO: 53618 - DNA, 25 bp, Homo sapien
agaaatggaatgaaacacccaatcc

SEQ ID NO: 53619 - DNA, 25 bp, Homo sapien
ccagccccagattggtccctggagc

SEQ ID NO: 53620 - DNA, 25 bp, Homo sapien
acattttgagcaaggatagagaagg

SEQ ID NO: 53621 - DNA, 25 bp, Homo sapien
caaaagagctgttaagtgaatggga

SEQ ID NO: 53622 - DNA, 25 bp, Homo sapien
gaggaggaactgcagttaccactat

SEQ ID NO: 53623 - DNA, 25 bp, Homo sapien
acatctaactagagaaagtcaggga

SEQ ID NO: 53624 - DNA, 25 bp, Homo sapien
agccagggatactaccaagatcact

SEQ ID NO: 53625 - DNA, 25 bp, Homo sapien
attaaacctaccagagaggagagga

SEQ ID NO: 53626 - DNA, 25 bp, Homo sapien
gatagagaaggtgagttattaaaca

SEQ ID NO: 53627 - DNA, 25 bp, Homo sapien
gatagagtggaaaatcctaagtagg

SEQ ID NO: 53628 - DNA, 25 bp, Homo sapien
gcctgaagtgaggaaaacctattta

SEQ ID NO: 53629 - DNA, 25 bp, Homo sapien
agaaatggaatgaaacacccaatcc

SEQ ID NO: 53630 - DNA, 25 bp, Homo sapien
ccagccccagattggtccctggagc

SEQ ID NO: 53631 - DNA, 25 bp, Homo sapien
acattttgagcaaggatagagaagg

SEQ ID NO: 53632 - DNA, 25 bp, Homo sapien
caaaagagctgttaagtgaatggga

SEQ ID NO: 53633 - DNA, 25 bp, Homo sapien
gaggaggaactgcagttaccactat

SEQ ID NO: 53634 - DNA, 25 bp, Homo sapien
agaaatggaatgaaacacccaatcc

SEQ ID NO: 53635 - DNA, 25 bp, Homo sapien
acatctaactagagaaagtcaggga

SEQ ID NO: 53636 - DNA, 25 bp, Homo sapien
agccagggatactaccaagatcact

SEQ ID NO: 53637 - DNA, 25 bp, Homo sapien
attaaacctaccagagaggagagga

SEQ ID NO: 53638 - DNA, 25 bp, Homo sapien
gatagagaaggtgagttattaaaca

SEQ ID NO: 53639 - DNA, 25 bp, Homo sapien
gcctgaagtgaggaaaacctattta

SEQ ID NO: 53640 - DNA, 25 bp, Homo sapien
gatagagtggaaaatcctaagtagg

SEQ ID NO: 53641 - DNA, 25 bp, Homo sapien
ccagccccagattggtccctggagc

SEQ ID NO: 53642 - DNA, 25 bp, Homo sapien
attaaacctaccagagaggagagga

SEQ ID NO: 53643 - DNA, 25 bp, Homo sapien
caaaagagctgttaagtgaatggga

SEQ ID NO: 53644 - DNA, 25 bp, Homo sapien
gaggaggaactgcagttaccactat

SEQ ID NO: 53645 - DNA, 25 bp, Homo sapien
acattttgagcaaggatagagaagg

SEQ ID NO: 53646 - DNA, 25 bp, Homo sapien
gatagagtggaaaatcctaagtagg

SEQ ID NO: 53647 - DNA, 25 bp, Homo sapien
gatagagaaggtgagttattaaaca

SEQ ID NO: 53648 - DNA, 25 bp, Homo sapien
gcctgaagtgaggaaaacctattta

SEQ ID NO: 53649 - DNA, 25 bp, Homo sapien
agccagggatactaccaagatcact

SEQ ID NO: 53650 - DNA, 25 bp, Homo sapien
ccagccccagattggtccctggagc

SEQ ID NO: 53651 - DNA, 25 bp, Homo sapien
agaaatggaatgaaacacccaatcc

SEQ ID NO: 53652 - DNA, 25 bp, Homo sapien
acatctaactagagaaagtcaggga

SEQ ID NO: 53653 - DNA, 25 bp, Homo sapien
acattttgagcaaggatagagaagg

SEQ ID NO: 53654 - DNA, 25 bp, Homo sapien
agaaatggaatgaaacacccaatcc

SEQ ID NO: 53655 - DNA, 25 bp, Homo sapien
gaggaggaactgcagttaccactat

SEQ ID NO: 53656 - DNA, 25 bp, Homo sapien
caaaagagctgttaagtgaatggga

SEQ ID NO: 53657 - DNA, 25 bp, Homo sapien
acatctaactagagaaagtcaggga

SEQ ID NO: 53658 - DNA, 25 bp, Homo sapien
agccagggatactaccaagatcact

SEQ ID NO: 53659 - DNA, 25 bp, Homo sapien
attaaacctaccagagaggagagga

SEQ ID NO: 53660 - DNA, 25 bp, Homo sapien
gatagagtggaaaatcctaagtagg

SEQ ID NO: 53661 - DNA, 25 bp, Homo sapien
gatagagaaggtgagttattaaaca

SEQ ID NO: 53662 - DNA, 25 bp, Homo sapien
gcctgaagtgaggaaaacctattta

SEQ ID NO: 53663 - DNA, 25 bp, Homo sapien
ccagccccagattggtccctggagc

SEQ ID NO: 53664 - DNA, 25 bp, Homo sapien
gatagagtggaaaatcctaagtagg

SEQ ID NO: 53665 - DNA, 25 bp, Homo sapien
acatctaactagagaaagtcaggga

SEQ ID NO: 53666 - DNA, 25 bp, Homo sapien
gcctgaagtgaggaaaacctattta

SEQ ID NO: 53667 - DNA, 25 bp, Homo sapien
ccagccccagattggtccctggagc

SEQ ID NO: 53668 - DNA, 25 bp, Homo sapien
agccagggatactaccaagatcact

SEQ ID NO: 53669 - DNA, 25 bp, Homo sapien
caaaagagctgttaagtgaatggga

SEQ ID NO: 53670 - DNA, 25 bp, Homo sapien
agaaatggaatgaaacacccaatcc

SEQ ID NO: 53671 - DNA, 25 bp, Homo sapien
attaaacctaccagagaggagagga

SEQ ID NO: 53672 - DNA, 25 bp, Homo sapien
gaggaggaactgcagttaccactat

SEQ ID NO: 53673 - DNA, 25 bp, Homo sapien
gatagagaaggtgagttattaaaca

SEQ ID NO: 53674 - DNA, 25 bp, Homo sapien
acattttgagcaaggatagagaagg

SEQ ID NO: 53675 - DNA, 25 bp, Homo sapien
tgtttaataactcaccttctctatc

SEQ ID NO: 53676 - DNA, 25 bp, Homo sapien
cctacttaggattttccactctatc

SEQ ID NO: 53677 - DNA, 25 bp, Homo sapien
gctccagggaccaatctggggctgg

SEQ ID NO: 53678 - DNA, 25 bp, Homo sapien
taaataggttttcctcacttcaggc

SEQ ID NO: 53679 - DNA, 25 bp, Homo sapien
ccttctctatccttgctcaaaatgt

SEQ ID NO: 53680 - DNA, 25 bp, Homo sapien
tccctgactttctctagttagatgt

SEQ ID NO: 53681 - DNA, 25 bp, Homo sapien
atagtggtaactgcagttcctcctc

SEQ ID NO: 53682 - DNA, 25 bp, Homo sapien
agtgatcttggtagtatccctggct

SEQ ID NO: 53683 - DNA, 25 bp, Homo sapien
ggattgggtgtttcattccatttct

SEQ ID NO: 53684 - DNA, 25 bp, Homo sapien
tcccattcacttaacagctcttttg

SEQ ID NO: 53685 - DNA, 25 bp, Homo sapien
tcctctcctctctggtaggtttaat

SEQ ID NO: 53686 - DNA, 25 bp, Homo sapien
acattttgagcaaggatagagaagg

SEQ ID NO: 53687 - DNA, 25 bp, Homo sapien
agaaatggaatgaaacacccaatcc

SEQ ID NO: 53688 - DNA, 25 bp, Homo sapien
caaaagagctgttaagtgaatggga

SEQ ID NO: 53689 - DNA, 25 bp, Homo sapien
acatctaactagagaaagtcaggga

SEQ ID NO: 53690 - DNA, 25 bp, Homo sapien
gaggaggaactgcagttaccactat

SEQ ID NO: 53691 - DNA, 25 bp, Homo sapien
agccagggatactaccaagatcact

SEQ ID NO: 53692 - DNA, 25 bp, Homo sapien
attaaacctaccagagaggagagga

SEQ ID NO: 53693 - DNA, 25 bp, Homo sapien
gatagagtggaaaatcctaagtagg

SEQ ID NO: 53694 - DNA, 25 bp, Homo sapien
gatagagaaggtgagttattaaaca

SEQ ID NO: 53695 - DNA, 25 bp, Homo sapien
gcctgaagtgaggaaaacctattta

SEQ ID NO: 53696 - DNA, 25 bp, Homo sapien
ccagccccagattggtccctggagc

SEQ ID NO: 53697 - DNA, 25 bp, Homo sapien
ccagccccagattggtccctggagc

SEQ ID NO: 53698 - DNA, 25 bp, Homo sapien
acattttgagcaaggatagagaagg

SEQ ID NO: 53699 - DNA, 25 bp, Homo sapien
attaaacctaccagagaggagagga

SEQ ID NO: 53700 - DNA, 25 bp, Homo sapien
gcctgaagtgaggaaaacctattta

SEQ ID NO: 53701 - DNA, 25 bp, Homo sapien
caaaagagctgttaagtgaatggga

SEQ ID NO: 53702 - DNA, 25 bp, Homo sapien
gatagagtggaaaatcctaagtagg

SEQ ID NO: 53703 - DNA, 25 bp, Homo sapien
gatagagaaggtgagttattaaaca

SEQ ID NO: 53704 - DNA, 25 bp, Homo sapien
agaaatggaatgaaacacccaatcc

SEQ ID NO: 53705 - DNA, 25 bp, Homo sapien
acatctaactagagaaagtcaggga

SEQ ID NO: 53706 - DNA, 25 bp, Homo sapien
gaggaggaactgcagttaccactat

SEQ ID NO: 53707 - DNA, 25 bp, Homo sapien
agccagggatactaccaagatcact

SEQ ID NO: 53708 - DNA, 25 bp, Homo sapien
gatagagtggaaaatcctaagtagg

SEQ ID NO: 53709 - DNA, 25 bp, Homo sapien
acatctaactagagaaagtcaggga

SEQ ID NO: 53710 - DNA, 25 bp, Homo sapien
gcctgaagtgaggaaaacctattta

SEQ ID NO: 53711 - DNA, 25 bp, Homo sapien
ccagccccagattggtccctggagc

SEQ ID NO: 53712 - DNA, 25 bp, Homo sapien
agccagggatactaccaagatcact

SEQ ID NO: 53713 - DNA, 25 bp, Homo sapien
caaaagagctgttaagtgaatggga

SEQ ID NO: 53714 - DNA, 25 bp, Homo sapien
agaaatggaatgaaacacccaatcc

SEQ ID NO: 53715 - DNA, 25 bp, Homo sapien
attaaacctaccagagaggagagga

SEQ ID NO: 53716 - DNA, 25 bp, Homo sapien
gaggaggaactgcagttaccactat

SEQ ID NO: 53717 - DNA, 25 bp, Homo sapien
gatagagaaggtgagttattaaaca

SEQ ID NO: 53718 - DNA, 25 bp, Homo sapien
acattttgagcaaggatagagaagg

SEQ ID NO: 53719 - DNA, 25 bp, Homo sapien
acattttgagcaaggatagagaagg

SEQ ID NO: 53720 - DNA, 25 bp, Homo sapien
gatagagaaggtgagttattaaaca

SEQ ID NO: 53721 - DNA, 25 bp, Homo sapien
agccagggatactaccaagatcact

SEQ ID NO: 53722 - DNA, 25 bp, Homo sapien
gaggaggaactgcagttaccactat

SEQ ID NO: 53723 - DNA, 25 bp, Homo sapien
ccagccccagattggtccctggagc

SEQ ID NO: 53724 - DNA, 25 bp, Homo sapien
agaaatggaatgaaacacccaatcc

SEQ ID NO: 53725 - DNA, 25 bp, Homo sapien
attaaacctaccagagaggagagga

SEQ ID NO: 53726 - DNA, 25 bp, Homo sapien
caaaagagctgttaagtgaatggga

SEQ ID NO: 53727 - DNA, 25 bp, Homo sapien
acatctaactagagaaagtcaggga

SEQ ID NO: 53728 - DNA, 25 bp, Homo sapien
gcctgaagtgaggaaaacctattta

SEQ ID NO: 53729 - DNA, 25 bp, Homo sapien
gatagagtggaaaatcctaagtagg

SEQ ID NO: 53730 - DNA, 25 bp, Homo sapien
gatagagtggaaaatcctaagtagg

SEQ ID NO: 53731 - DNA, 25 bp, Homo sapien
acatctaactagagaaagtcaggga

SEQ ID NO: 53732 - DNA, 25 bp, Homo sapien
gcctgaagtgaggaaaacctattta

SEQ ID NO: 53733 - DNA, 25 bp, Homo sapien
ccagccccagattggtccctggagc

SEQ ID NO: 53734 - DNA, 25 bp, Homo sapien
agccagggatactaccaagatcact

SEQ ID NO: 53735 - DNA, 25 bp, Homo sapien
caaaagagctgttaagtgaatggga

SEQ ID NO: 53736 - DNA, 25 bp, Homo sapien
agaaatggaatgaaacacccaatcc

SEQ ID NO: 53737 - DNA, 25 bp, Homo sapien
attaaacctaccagagaggagagga

SEQ ID NO: 53738 - DNA, 25 bp, Homo sapien
gaggaggaactgcagttaccactat

SEQ ID NO: 53739 - DNA, 25 bp, Homo sapien
gatagagaaggtgagttattaaaca

SEQ ID NO: 53740 - DNA, 25 bp, Homo sapien
acattttgagcaaggatagagaagg

SEQ ID NO: 53741 - DNA, 25 bp, Homo sapien
attaaacctaccagagaggagagga

SEQ ID NO: 53742 - DNA, 25 bp, Homo sapien
agccagggatactaccaagatcact

SEQ ID NO: 53743 - DNA, 25 bp, Homo sapien
gaggaggaactgcagttaccactat

SEQ ID NO: 53744 - DNA, 25 bp, Homo sapien
acatctaactagagaaagtcaggga

SEQ ID NO: 53745 - DNA, 25 bp, Homo sapien
gcctgaagtgaggaaaacctattta

SEQ ID NO: 53746 - DNA, 25 bp, Homo sapien
agaaatggaatgaaacacccaatcc

SEQ ID NO: 53747 - DNA, 25 bp, Homo sapien
gatagagaaggtgagttattaaaca

SEQ ID NO: 53748 - DNA, 25 bp, Homo sapien
gatagagtggaaaatcctaagtagg

SEQ ID NO: 53749 - DNA, 25 bp, Homo sapien
acattttgagcaaggatagagaagg

SEQ ID NO: 53750 - DNA, 25 bp, Homo sapien
caaaagagctgttaagtgaatggga

SEQ ID NO: 53751 - DNA, 25 bp, Homo sapien
ccagccccagattggtccctggagc

SEQ ID NO: 53752 - DNA, 25 bp, Homo sapien
gatagagtggaaaatcctaagtagg

SEQ ID NO: 53753 - DNA, 25 bp, Homo sapien
acatctaactagagaaagtcaggga

SEQ ID NO: 53754 - DNA, 25 bp, Homo sapien
gcctgaagtgaggaaaacctattta

SEQ ID NO: 53755 - DNA, 25 bp, Homo sapien
ccagccccagattggtccctggagc

SEQ ID NO: 53756 - DNA, 25 bp, Homo sapien
agccagggatactaccaagatcact

SEQ ID NO: 53757 - DNA, 25 bp, Homo sapien
caaaagagctgttaagtgaatggga

SEQ ID NO: 53758 - DNA, 25 bp, Homo sapien
agaaatggaatgaaacacccaatcc

SEQ ID NO: 53759 - DNA, 25 bp, Homo sapien
attaaacctaccagagaggagagga

SEQ ID NO: 53760 - DNA, 25 bp, Homo sapien
gaggaggaactgcagttaccactat

SEQ ID NO: 53761 - DNA, 25 bp, Homo sapien
gatagagaaggtgagttattaaaca

SEQ ID NO: 53762 - DNA, 25 bp, Homo sapien
acattttgagcaaggatagagaagg

SEQ ID NO: 53763 - DNA, 25 bp, Homo sapien
gatagagtggaaaatcctaagtagg

SEQ ID NO: 53764 - DNA, 25 bp, Homo sapien
acatctaactagagaaagtcaggga

SEQ ID NO: 53765 - DNA, 25 bp, Homo sapien
gcctgaagtgaggaaaacctattta

SEQ ID NO: 53766 - DNA, 25 bp, Homo sapien
ccagccccagattggtccctggagc

SEQ ID NO: 53767 - DNA, 25 bp, Homo sapien
agccagggatactaccaagatcact

SEQ ID NO: 53768 - DNA, 25 bp, Homo sapien
caaaagagctgttaagtgaatggga

SEQ ID NO: 53769 - DNA, 25 bp, Homo sapien
agaaatggaatgaaacacccaatcc

SEQ ID NO: 53770 - DNA, 25 bp, Homo sapien
attaaacctaccagagaggagagga

SEQ ID NO: 53771 - DNA, 25 bp, Homo sapien
gaggaggaactgcagttaccactat

SEQ ID NO: 53772 - DNA, 25 bp, Homo sapien
gatagagaaggtgagttattaaaca

SEQ ID NO: 53773 - DNA, 25 bp, Homo sapien
acattttgagcaaggatagagaagg

SEQ ID NO: 53774 - DNA, 25 bp, Homo sapien
caaaagagctgttaagtgaatggga

SEQ ID NO: 53775 - DNA, 25 bp, Homo sapien
gatagagtggaaaatcctaagtagg

SEQ ID NO: 53776 - DNA, 25 bp, Homo sapien
gatagagaaggtgagttattaaaca

SEQ ID NO: 53777 - DNA, 25 bp, Homo sapien
gcctgaagtgaggaaaacctattta

SEQ ID NO: 53778 - DNA, 25 bp, Homo sapien
agccagggatactaccaagatcact

SEQ ID NO: 53779 - DNA, 25 bp, Homo sapien
agaaatggaatgaaacacccaatcc

SEQ ID NO: 53780 - DNA, 25 bp, Homo sapien
acatctaactagagaaagtcaggga

SEQ ID NO: 53781 - DNA, 25 bp, Homo sapien
gaggaggaactgcagttaccactat

SEQ ID NO: 53782 - DNA, 25 bp, Homo sapien
attaaacctaccagagaggagagga

SEQ ID NO: 53783 - DNA, 25 bp, Homo sapien
ccagccccagattggtccctggagc

SEQ ID NO: 53784 - DNA, 25 bp, Homo sapien
acattttgagcaaggatagagaagg

SEQ ID NO: 53785 - DNA, 25 bp, Homo sapien
gatagagtggaaaatcctaagtagg

SEQ ID NO: 53786 - DNA, 25 bp, Homo sapien
acatctaactagagaaagtcaggga

SEQ ID NO: 53787 - DNA, 25 bp, Homo sapien
gcctgaagtgaggaaaacctattta

SEQ ID NO: 53788 - DNA, 25 bp, Homo sapien
ccagccccagattggtccctggagc

SEQ ID NO: 53789 - DNA, 25 bp, Homo sapien
agccagggatactaccaagatcact

SEQ ID NO: 53790 - DNA, 25 bp, Homo sapien
caaaagagctgttaagtgaatggga

SEQ ID NO: 53791 - DNA, 25 bp, Homo sapien
agaaatggaatgaaacacccaatcc

SEQ ID NO: 53792 - DNA, 25 bp, Homo sapien
attaaacctaccagagaggagagga

SEQ ID NO: 53793 - DNA, 25 bp, Homo sapien
gaggaggaactgcagttaccactat

SEQ ID NO: 53794 - DNA, 25 bp, Homo sapien
gatagagaaggtgagttattaaaca

SEQ ID NO: 53795 - DNA, 25 bp, Homo sapien
acattttgagcaaggatagagaagg

SEQ ID NO: 53796 - DNA, 25 bp, Homo sapien
gaggaggaactgcagttaccactat

SEQ ID NO: 53797 - DNA, 25 bp, Homo sapien
gatagagaaggtgagttattaaaca

SEQ ID NO: 53798 - DNA, 25 bp, Homo sapien
attaaacctaccagagaggagagga

SEQ ID NO: 53799 - DNA, 25 bp, Homo sapien
ccagccccagattggtccctggagc

SEQ ID NO: 53800 - DNA, 25 bp, Homo sapien
gatagagtggaaaatcctaagtagg

SEQ ID NO: 53801 - DNA, 25 bp, Homo sapien
gcctgaagtgaggaaaacctattta

SEQ ID NO: 53802 - DNA, 25 bp, Homo sapien
acattttgagcaaggatagagaagg

SEQ ID NO: 53803 - DNA, 25 bp, Homo sapien
agccagggatactaccaagatcact

SEQ ID NO: 53804 - DNA, 25 bp, Homo sapien
caaaagagctgttaagtgaatggga

SEQ ID NO: 53805 - DNA, 25 bp, Homo sapien
acatctaactagagaaagtcaggga

SEQ ID NO: 53806 - DNA, 25 bp, Homo sapien
agaaatggaatgaaacacccaatcc

SEQ ID NO: 53807 - DNA, 25 bp, Homo sapien
gatagagtggaaaatcctaagtagg

SEQ ID NO: 53808 - DNA, 25 bp, Homo sapien
acatctaactagagaaagtcaggga

SEQ ID NO: 53809 - DNA, 25 bp, Homo sapien
gcctgaagtgaggaaaacctattta

SEQ ID NO: 53810 - DNA, 25 bp, Homo sapien
ccagccccagattggtccctggagc

SEQ ID NO: 53811 - DNA, 25 bp, Homo sapien
agccagggatactaccaagatcact

SEQ ID NO: 53812 - DNA, 25 bp, Homo sapien
caaaagagctgttaagtgaatggga

SEQ ID NO: 53813 - DNA, 25 bp, Homo sapien
agaaatggaatgaaacacccaatcc

SEQ ID NO: 53814 - DNA, 25 bp, Homo sapien
attaaacctaccagagaggagagga

SEQ ID NO: 53815 - DNA, 25 bp, Homo sapien
gaggaggaactgcagttaccactat

SEQ ID NO: 53816 - DNA, 25 bp, Homo sapien
gatagagaaggtgagttattaaaca

SEQ ID NO: 53817 - DNA, 25 bp, Homo sapien
acattttgagcaaggatagagaagg

SEQ ID NO: 53818 - DNA, 25 bp, Homo sapien
gcctgaagtgaggaaaacctattta

SEQ ID NO: 53819 - DNA, 25 bp, Homo sapien
caaaagagctgttaagtgaatggga

SEQ ID NO: 53820 - DNA, 25 bp, Homo sapien
gatagagaaggtgagttattaaaca

SEQ ID NO: 53821 - DNA, 25 bp, Homo sapien
gatagagtggaaaatcctaagtagg

SEQ ID NO: 53822 - DNA, 25 bp, Homo sapien
attaaacctaccagagaggagagga

SEQ ID NO: 53823 - DNA, 25 bp, Homo sapien
agccagggatactaccaagatcact

SEQ ID NO: 53824 - DNA, 25 bp, Homo sapien
acatctaactagagaaagtcaggga

SEQ ID NO: 53825 - DNA, 25 bp, Homo sapien
ccagccccagattggtccctggagc

SEQ ID NO: 53826 - DNA, 25 bp, Homo sapien
gaggaggaactgcagttaccactat

SEQ ID NO: 53827 - DNA, 25 bp, Homo sapien
agaaatggaatgaaacacccaatcc

SEQ ID NO: 53828 - DNA, 25 bp, Homo sapien
acattttgagcaaggatagagaagg

SEQ ID NO: 53829 - DNA, 25 bp, Homo sapien
gatagagtggaaaatcctaagtagg

SEQ ID NO: 53830 - DNA, 25 bp, Homo sapien
acatctaactagagaaagtcaggga

SEQ ID NO: 53831 - DNA, 25 bp, Homo sapien
gcctgaagtgaggaaaacctattta

SEQ ID NO: 53832 - DNA, 25 bp, Homo sapien
ccagccccagattggtccctggagc

SEQ ID NO: 53833 - DNA, 25 bp, Homo sapien
agccagggatactaccaagatcact

SEQ ID NO: 53834 - DNA, 25 bp, Homo sapien
caaaagagctgttaagtgaatggga

SEQ ID NO: 53835 - DNA, 25 bp, Homo sapien
agaaatggaatgaaacacccaatcc

SEQ ID NO: 53836 - DNA, 25 bp, Homo sapien
attaaacctaccagagaggagagga

SEQ ID NO: 53837 - DNA, 25 bp, Homo sapien
gaggaggaactgcagttaccactat

SEQ ID NO: 53838 - DNA, 25 bp, Homo sapien
gatagagaaggtgagttattaaaca

SEQ ID NO: 53839 - DNA, 25 bp, Homo sapien
acattttgagcaaggatagagaagg

SEQ ID NO: 53840 - DNA, 25 bp, Homo sapien
agaaatggaatgaaacacccaatcc

SEQ ID NO: 53841 - DNA, 25 bp, Homo sapien
agccagggatactaccaagatcact

SEQ ID NO: 53842 - DNA, 25 bp, Homo sapien
gatagagtggaaaatcctaagtagg

SEQ ID NO: 53843 - DNA, 25 bp, Homo sapien
gcctgaagtgaggaaaacctattta

SEQ ID NO: 53844 - DNA, 25 bp, Homo sapien
acattttgagcaaggatagagaagg

SEQ ID NO: 53845 - DNA, 25 bp, Homo sapien
gatagagaaggtgagttattaaaca

SEQ ID NO: 53846 - DNA, 25 bp, Homo sapien
attaaacctaccagagaggagagga

SEQ ID NO: 53847 - DNA, 25 bp, Homo sapien
ccagccccagattggtccctggagc

SEQ ID NO: 53848 - DNA, 25 bp, Homo sapien
acatctaactagagaaagtcaggga

SEQ ID NO: 53849 - DNA, 25 bp, Homo sapien
gaggaggaactgcagttaccactat

SEQ ID NO: 53850 - DNA, 25 bp, Homo sapien
caaaagagctgttaagtgaatggga

SEQ ID NO: 53851 - DNA, 25 bp, Homo sapien
gatagagtggaaaatcctaagtagg

SEQ ID NO: 53852 - DNA, 25 bp, Homo sapien
acatctaactagagaaagtcaggga

SEQ ID NO: 53853 - DNA, 25 bp, Homo sapien
gcctgaagtgaggaaaacctattta

SEQ ID NO: 53854 - DNA, 25 bp, Homo sapien
ccagccccagattggtccctggagc

SEQ ID NO: 53855 - DNA, 25 bp, Homo sapien
agccagggatactaccaagatcact

SEQ ID NO: 53856 - DNA, 25 bp, Homo sapien
caaaagagctgttaagtgaatggga

SEQ ID NO: 53857 - DNA, 25 bp, Homo sapien
agaaatggaatgaaacacccaatcc

SEQ ID NO: 53858 - DNA, 25 bp, Homo sapien
attaaacctaccagagaggagagga

SEQ ID NO: 53859 - DNA, 25 bp, Homo sapien
gaggaggaactgcagttaccactat

SEQ ID NO: 53860 - DNA, 25 bp, Homo sapien
gatagagaaggtgagttattaaaca

SEQ ID NO: 53861 - DNA, 25 bp, Homo sapien
acattttgagcaaggatagagaagg

SEQ ID NO: 53862 - DNA, 25 bp, Homo sapien
caaaagagctgttaagtgaatggga

SEQ ID NO: 53863 - DNA, 25 bp, Homo sapien
attaaacctaccagagaggagagga

SEQ ID NO: 53864 - DNA, 25 bp, Homo sapien
acatctaactagagaaagtcaggga

SEQ ID NO: 53865 - DNA, 25 bp, Homo sapien
gatagagaaggtgagttattaaaca

SEQ ID NO: 53866 - DNA, 25 bp, Homo sapien
ccagccccagattggtccctggagc

SEQ ID NO: 53867 - DNA, 25 bp, Homo sapien
agaaatggaatgaaacacccaatcc

SEQ ID NO: 53868 - DNA, 25 bp, Homo sapien
agccagggatactaccaagatcact

SEQ ID NO: 53869 - DNA, 25 bp, Homo sapien
gatagagtggaaaatcctaagtagg

SEQ ID NO: 53870 - DNA, 25 bp, Homo sapien
acattttgagcaaggatagagaagg

SEQ ID NO: 53871 - DNA, 25 bp, Homo sapien
gaggaggaactgcagttaccactat

SEQ ID NO: 53872 - DNA, 25 bp, Homo sapien
gcctgaagtgaggaaaacctattta

SEQ ID NO: 53873 - DNA, 25 bp, Homo sapien
ccagccccagattggtccctggagc

SEQ ID NO: 53874 - DNA, 25 bp, Homo sapien
acatctaactagagaaagtcaggga

SEQ ID NO: 53875 - DNA, 25 bp, Homo sapien
gatagagtggaaaatcctaagtagg

SEQ ID NO: 53876 - DNA, 25 bp, Homo sapien
gaggaggaactgcagttaccactat

SEQ ID NO: 53877 - DNA, 25 bp, Homo sapien
attaaacctaccagagaggagagga

SEQ ID NO: 53878 - DNA, 25 bp, Homo sapien
acattttgagcaaggatagagaagg

SEQ ID NO: 53879 - DNA, 25 bp, Homo sapien
agccagggatactaccaagatcact

SEQ ID NO: 53880 - DNA, 25 bp, Homo sapien
gcctgaagtgaggaaaacctattta

SEQ ID NO: 53881 - DNA, 25 bp, Homo sapien
caaaagagctgttaagtgaatggga

SEQ ID NO: 53882 - DNA, 25 bp, Homo sapien
gatagagaaggtgagttattaaaca

SEQ ID NO: 53883 - DNA, 25 bp, Homo sapien
agaaatggaatgaaacacccaatcc

SEQ ID NO: 53884 - DNA, 25 bp, Homo sapien
gatagagtggaaaatcctaagtagg

SEQ ID NO: 53885 - DNA, 25 bp, Homo sapien
acatctaactagagaaagtcaggga

SEQ ID NO: 53886 - DNA, 25 bp, Homo sapien
gcctgaagtgaggaaaacctattta

SEQ ID NO: 53887 - DNA, 25 bp, Homo sapien
ccagccccagattggtccctggagc

SEQ ID NO: 53888 - DNA, 25 bp, Homo sapien
agccagggatactaccaagatcact

SEQ ID NO: 53889 - DNA, 25 bp, Homo sapien
caaaagagctgttaagtgaatggga

SEQ ID NO: 53890 - DNA, 25 bp, Homo sapien
agaaatggaatgaaacacccaatcc

SEQ ID NO: 53891 - DNA, 25 bp, Homo sapien
attaaacctaccagagaggagagga

SEQ ID NO: 53892 - DNA, 25 bp, Homo sapien
gaggaggaactgcagttaccactat

SEQ ID NO: 53893 - DNA, 25 bp, Homo sapien
gatagagaaggtgagttattaaaca

SEQ ID NO: 53894 - DNA, 25 bp, Homo sapien
acattttgagcaaggatagagaagg

SEQ ID NO: 53895 - DNA, 25 bp, Homo sapien
ccagccccagattggtccctggagc

SEQ ID NO: 53896 - DNA, 25 bp, Homo sapien
gaggaggaactgcagttaccactat

SEQ ID NO: 53897 - DNA, 25 bp, Homo sapien
acatctaactagagaaagtcaggga

SEQ ID NO: 53898 - DNA, 25 bp, Homo sapien
agaaatggaatgaaacacccaatcc

SEQ ID NO: 53899 - DNA, 25 bp, Homo sapien
gatagagaaggtgagttattaaaca

SEQ ID NO: 53900 - DNA, 25 bp, Homo sapien
attaaacctaccagagaggagagga

SEQ ID NO: 53901 - DNA, 25 bp, Homo sapien
agccagggatactaccaagatcact

SEQ ID NO: 53902 - DNA, 25 bp, Homo sapien
acattttgagcaaggatagagaagg

SEQ ID NO: 53903 - DNA, 25 bp, Homo sapien
gatagagtggaaaatcctaagtagg

SEQ ID NO: 53904 - DNA, 25 bp, Homo sapien
gcctgaagtgaggaaaacctattta

SEQ ID NO: 53905 - DNA, 25 bp, Homo sapien
caaaagagctgttaagtgaatggga

SEQ ID NO: 53906 - DNA, 25 bp, Homo sapien
gatagagtggaaaatcctaagtagg

SEQ ID NO: 53907 - DNA, 25 bp, Homo sapien
acatctaactagagaaagtcaggga

SEQ ID NO: 53908 - DNA, 25 bp, Homo sapien
gcctgaagtgaggaaaacctattta

SEQ ID NO: 53909 - DNA, 25 bp, Homo sapien
ccagccccagattggtccctggagc

SEQ ID NO: 53910 - DNA, 25 bp, Homo sapien
agccagggatactaccaagatcact

SEQ ID NO: 53911 - DNA, 25 bp, Homo sapien
caaaagagctgttaagtgaatggga

SEQ ID NO: 53912 - DNA, 25 bp, Homo sapien
agaaatggaatgaaacacccaatcc

SEQ ID NO: 53913 - DNA, 25 bp, Homo sapien
attaaacctaccagagaggagagga

SEQ ID NO: 53914 - DNA, 25 bp, Homo sapien
gaggaggaactgcagttaccactat

SEQ ID NO: 53915 - DNA, 25 bp, Homo sapien
gatagagaaggtgagttattaaaca

SEQ ID NO: 53916 - DNA, 25 bp, Homo sapien
acattttgagcaaggatagagaagg

SEQ ID NO: 53917 - DNA, 25 bp, Homo sapien
gatagagaaggtgagttattaaaca

SEQ ID NO: 53918 - DNA, 25 bp, Homo sapien
gatagagtggaaaatcctaagtagg

SEQ ID NO: 53919 - DNA, 25 bp, Homo sapien
acattttgagcaaggatagagaagg

SEQ ID NO: 53920 - DNA, 25 bp, Homo sapien
ccagccccagattggtccctggagc

SEQ ID NO: 53921 - DNA, 25 bp, Homo sapien
gaggaggaactgcagttaccactat

SEQ ID NO: 53922 - DNA, 25 bp, Homo sapien
agccagggatactaccaagatcact

SEQ ID NO: 53923 - DNA, 25 bp, Homo sapien
gcctgaagtgaggaaaacctattta

SEQ ID NO: 53924 - DNA, 25 bp, Homo sapien
agaaatggaatgaaacacccaatcc

SEQ ID NO: 53925 - DNA, 25 bp, Homo sapien
attaaacctaccagagaggagagga

SEQ ID NO: 53926 - DNA, 25 bp, Homo sapien
acatctaactagagaaagtcaggga

SEQ ID NO: 53927 - DNA, 25 bp, Homo sapien
caaaagagctgttaagtgaatggga

SEQ ID NO: 53928 - DNA, 25 bp, Homo sapien
gatagagtggaaaatcctaagtagg

SEQ ID NO: 53929 - DNA, 25 bp, Homo sapien
acatctaactagagaaagtcaggga

SEQ ID NO: 53930 - DNA, 25 bp, Homo sapien
gcctgaagtgaggaaaacctattta

SEQ ID NO: 53931 - DNA, 25 bp, Homo sapien
ccagccccagattggtccctggagc

SEQ ID NO: 53932 - DNA, 25 bp, Homo sapien
agccagggatactaccaagatcact

SEQ ID NO: 53933 - DNA, 25 bp, Homo sapien
caaaagagctgttaagtgaatggga

SEQ ID NO: 53934 - DNA, 25 bp, Homo sapien
agaaatggaatgaaacacccaatcc

SEQ ID NO: 53935 - DNA, 25 bp, Homo sapien
attaaacctaccagagaggagagga

SEQ ID NO: 53936 - DNA, 25 bp, Homo sapien
gaggaggaactgcagttaccactat

SEQ ID NO: 53937 - DNA, 25 bp, Homo sapien
gatagagaaggtgagttattaaaca

SEQ ID NO: 53938 - DNA, 25 bp, Homo sapien
acattttgagcaaggatagagaagg

SEQ ID NO: 53939 - DNA, 25 bp, Homo sapien
acattttgagcaaggatagagaagg

SEQ ID NO: 53940 - DNA, 25 bp, Homo sapien
caaaagagctgttaagtgaatggga

SEQ ID NO: 53941 - DNA, 25 bp, Homo sapien
acatctaactagagaaagtcaggga

SEQ ID NO: 53942 - DNA, 25 bp, Homo sapien
ccagccccagattggtccctggagc

SEQ ID NO: 53943 - DNA, 25 bp, Homo sapien
agaaatggaatgaaacacccaatcc

SEQ ID NO: 53944 - DNA, 25 bp, Homo sapien
attaaacctaccagagaggagagga

SEQ ID NO: 53945 - DNA, 25 bp, Homo sapien
gatagagtggaaaatcctaagtagg

SEQ ID NO: 53946 - DNA, 25 bp, Homo sapien
agccagggatactaccaagatcact

SEQ ID NO: 53947 - DNA, 25 bp, Homo sapien
gatagagaaggtgagttattaaaca

SEQ ID NO: 53948 - DNA, 25 bp, Homo sapien
gcctgaagtgaggaaaacctattta

SEQ ID NO: 53949 - DNA, 25 bp, Homo sapien
gaggaggaactgcagttaccactat

SEQ ID NO: 53950 - DNA, 25 bp, Homo sapien
gatagagtggaaaatcctaagtagg

SEQ ID NO: 53951 - DNA, 25 bp, Homo sapien
acatctaactagagaaagtcaggga

SEQ ID NO: 53952 - DNA, 25 bp, Homo sapien
gcctgaagtgaggaaaacctattta

SEQ ID NO: 53953 - DNA, 25 bp, Homo sapien
ccagccccagattggtccctggagc

SEQ ID NO: 53954 - DNA, 25 bp, Homo sapien
agccagggatactaccaagatcact

SEQ ID NO: 53955 - DNA, 25 bp, Homo sapien
caaaagagctgttaagtgaatggga

SEQ ID NO: 53956 - DNA, 25 bp, Homo sapien
agaaatggaatgaaacacccaatcc

SEQ ID NO: 53957 - DNA, 25 bp, Homo sapien
attaaacctaccagagaggagagga

SEQ ID NO: 53958 - DNA, 25 bp, Homo sapien
gaggaggaactgcagttaccactat

SEQ ID NO: 53959 - DNA, 25 bp, Homo sapien
gatagagaaggtgagttattaaaca

SEQ ID NO: 53960 - DNA, 25 bp, Homo sapien
acattttgagcaaggatagagaagg

SEQ ID NO: 53961 - DNA, 25 bp, Homo sapien
gatagagaaggtgagttattaaaca

SEQ ID NO: 53962 - DNA, 25 bp, Homo sapien
acattttgagcaaggatagagaagg

SEQ ID NO: 53963 - DNA, 25 bp, Homo sapien
gaggaggaactgcagttaccactat

SEQ ID NO: 53964 - DNA, 25 bp, Homo sapien
agaaatggaatgaaacacccaatcc

SEQ ID NO: 53965 - DNA, 25 bp, Homo sapien
agccagggatactaccaagatcact

SEQ ID NO: 53966 - DNA, 25 bp, Homo sapien
acatctaactagagaaagtcaggga

SEQ ID NO: 53967 - DNA, 25 bp, Homo sapien
ccagccccagattggtccctggagc

SEQ ID NO: 53968 - DNA, 25 bp, Homo sapien
attaaacctaccagagaggagagga

SEQ ID NO: 53969 - DNA, 25 bp, Homo sapien
gcctgaagtgaggaaaacctattta

SEQ ID NO: 53970 - DNA, 25 bp, Homo sapien
caaaagagctgttaagtgaatggga

SEQ ID NO: 53971 - DNA, 25 bp, Homo sapien
gatagagtggaaaatcctaagtagg

SEQ ID NO: 53972 - DNA, 25 bp, Homo sapien
gatagagtggaaaatcctaagtagg

SEQ ID NO: 53973 - DNA, 25 bp, Homo sapien
acatctaactagagaaagtcaggga

SEQ ID NO: 53974 - DNA, 25 bp, Homo sapien
gcctgaagtgaggaaaacctattta

SEQ ID NO: 53975 - DNA, 25 bp, Homo sapien
ccagccccagattggtccctggagc

SEQ ID NO: 53976 - DNA, 25 bp, Homo sapien
agccagggatactaccaagatcact

SEQ ID NO: 53977 - DNA, 25 bp, Homo sapien
caaaagagctgttaagtgaatggga

SEQ ID NO: 53978 - DNA, 25 bp, Homo sapien
agaaatggaatgaaacacccaatcc

SEQ ID NO: 53979 - DNA, 25 bp, Homo sapien
attaaacctaccagagaggagagga

SEQ ID NO: 53980 - DNA, 25 bp, Homo sapien
gaggaggaactgcagttaccactat

SEQ ID NO: 53981 - DNA, 25 bp, Homo sapien
gatagagaaggtgagttattaaaca

SEQ ID NO: 53982 - DNA, 25 bp, Homo sapien
acattttgagcaaggatagagaagg

SEQ ID NO: 53983 - DNA, 25 bp, Homo sapien
acattttgagcaaggatagagaagg

SEQ ID NO: 53984 - DNA, 25 bp, Homo sapien
attaaacctaccagagaggagagga

SEQ ID NO: 53985 - DNA, 25 bp, Homo sapien
agccagggatactaccaagatcact

SEQ ID NO: 53986 - DNA, 25 bp, Homo sapien
gcctgaagtgaggaaaacctattta

SEQ ID NO: 53987 - DNA, 25 bp, Homo sapien
caaaagagctgttaagtgaatggga

SEQ ID NO: 53988 - DNA, 25 bp, Homo sapien
acatctaactagagaaagtcaggga

SEQ ID NO: 53989 - DNA, 25 bp, Homo sapien
ccagccccagattggtccctggagc

SEQ ID NO: 53990 - DNA, 25 bp, Homo sapien
agaaatggaatgaaacacccaatcc

SEQ ID NO: 53991 - DNA, 25 bp, Homo sapien
gatagagaaggtgagttattaaaca

SEQ ID NO: 53992 - DNA, 25 bp, Homo sapien
gatagagtggaaaatcctaagtagg

SEQ ID NO: 53993 - DNA, 25 bp, Homo sapien
gaggaggaactgcagttaccactat

SEQ ID NO: 53994 - DNA, 25 bp, Homo sapien
gatagagtggaaaatcctaagtagg

SEQ ID NO: 53995 - DNA, 25 bp, Homo sapien
acatctaactagagaaagtcaggga

SEQ ID NO: 53996 - DNA, 25 bp, Homo sapien
gcctgaagtgaggaaaacctattta

SEQ ID NO: 53997 - DNA, 25 bp, Homo sapien
ccagccccagattggtccctggagc

SEQ ID NO: 53998 - DNA, 25 bp, Homo sapien
agccagggatactaccaagatcact

SEQ ID NO: 53999 - DNA, 25 bp, Homo sapien
caaaagagctgttaagtgaatggga

SEQ ID NO: 54000 - DNA, 25 bp, Homo sapien
agaaatggaatgaaacacccaatcc

SEQ ID NO: 54001 - DNA, 25 bp, Homo sapien
attaaacctaccagagaggagagga

SEQ ID NO: 54002 - DNA, 25 bp, Homo sapien
gaggaggaactgcagttaccactat

SEQ ID NO: 54003 - DNA, 25 bp, Homo sapien
gatagagaaggtgagttattaaaca

SEQ ID NO: 54004 - DNA, 25 bp, Homo sapien
acattttgagcaaggatagagaagg

SEQ ID NO: 54005 - DNA, 25 bp, Homo sapien
gatagagtggaaaatcctaagtagg

SEQ ID NO: 54006 - DNA, 25 bp, Homo sapien
acatctaactagagaaagtcaggga

SEQ ID NO: 54007 - DNA, 25 bp, Homo sapien
gcctgaagtgaggaaaacctattta

SEQ ID NO: 54008 - DNA, 25 bp, Homo sapien
ccagccccagattggtccctggagc

SEQ ID NO: 54009 - DNA, 25 bp, Homo sapien
agccagggatactaccaagatcact

SEQ ID NO: 54010 - DNA, 25 bp, Homo sapien
caaaagagctgttaagtgaatggga

SEQ ID NO: 54011 - DNA, 25 bp, Homo sapien
agaaatggaatgaaacacccaatcc

SEQ ID NO: 54012 - DNA, 25 bp, Homo sapien
attaaacctaccagagaggagagga

SEQ ID NO: 54013 - DNA, 25 bp, Homo sapien
gaggaggaactgcagttaccactat

SEQ ID NO: 54014 - DNA, 25 bp, Homo sapien
gatagagaaggtgagttattaaaca

SEQ ID NO: 54015 - DNA, 25 bp, Homo sapien
acattttgagcaaggatagagaagg

SEQ ID NO: 54016 - DNA, 25 bp, Homo sapien
attaaacctaccagagaggagagga

SEQ ID NO: 54017 - DNA, 25 bp, Homo sapien
gaggaggaactgcagttaccactat

SEQ ID NO: 54018 - DNA, 25 bp, Homo sapien
caaaagagctgttaagtgaatggga

SEQ ID NO: 54019 - DNA, 25 bp, Homo sapien
acatctaactagagaaagtcaggga

SEQ ID NO: 54020 - DNA, 25 bp, Homo sapien
ccagccccagattggtccctggagc

SEQ ID NO: 54021 - DNA, 25 bp, Homo sapien
gcctgaagtgaggaaaacctattta

SEQ ID NO: 54022 - DNA, 25 bp, Homo sapien
acattttgagcaaggatagagaagg

SEQ ID NO: 54023 - DNA, 25 bp, Homo sapien
gatagagtggaaaatcctaagtagg

SEQ ID NO: 54024 - DNA, 25 bp, Homo sapien
agaaatggaatgaaacacccaatcc

SEQ ID NO: 54025 - DNA, 25 bp, Homo sapien
agccagggatactaccaagatcact

SEQ ID NO: 54026 - DNA, 25 bp, Homo sapien
gatagagaaggtgagttattaaaca

SEQ ID NO: 54027 - DNA, 25 bp, Homo sapien
gatagagtggaaaatcctaagtagg

SEQ ID NO: 54028 - DNA, 25 bp, Homo sapien
acatctaactagagaaagtcaggga

SEQ ID NO: 54029 - DNA, 25 bp, Homo sapien
gcctgaagtgaggaaaacctattta

SEQ ID NO: 54030 - DNA, 25 bp, Homo sapien
ccagccccagattggtccctggagc

SEQ ID NO: 54031 - DNA, 25 bp, Homo sapien
agccagggatactaccaagatcact

SEQ ID NO: 54032 - DNA, 25 bp, Homo sapien
caaaagagctgttaagtgaatggga

SEQ ID NO: 54033 - DNA, 25 bp, Homo sapien
agaaatggaatgaaacacccaatcc

SEQ ID NO: 54034 - DNA, 25 bp, Homo sapien
attaaacctaccagagaggagagga

SEQ ID NO: 54035 - DNA, 25 bp, Homo sapien
gaggaggaactgcagttaccactat

SEQ ID NO: 54036 - DNA, 25 bp, Homo sapien
gatagagaaggtgagttattaaaca

SEQ ID NO: 54037 - DNA, 25 bp, Homo sapien
acattttgagcaaggatagagaagg

SEQ ID NO: 54038 - DNA, 25 bp, Homo sapien
agccagggatactaccaagatcact

SEQ ID NO: 54039 - DNA, 25 bp, Homo sapien
gaggaggaactgcagttaccactat

SEQ ID NO: 54040 - DNA, 25 bp, Homo sapien
gatagagtggaaaatcctaagtagg

SEQ ID NO: 54041 - DNA, 25 bp, Homo sapien
agaaatggaatgaaacacccaatcc

SEQ ID NO: 54042 - DNA, 25 bp, Homo sapien
attaaacctaccagagaggagagga

SEQ ID NO: 54043 - DNA, 25 bp, Homo sapien
acattttgagcaaggatagagaagg

SEQ ID NO: 54044 - DNA, 25 bp, Homo sapien
caaaagagctgttaagtgaatggga

SEQ ID NO: 54045 - DNA, 25 bp, Homo sapien
ccagccccagattggtccctggagc

SEQ ID NO: 54046 - DNA, 25 bp, Homo sapien
acatctaactagagaaagtcaggga

SEQ ID NO: 54047 - DNA, 25 bp, Homo sapien
gcctgaagtgaggaaaacctattta

SEQ ID NO: 54048 - DNA, 25 bp, Homo sapien
gatagagaaggtgagttattaaaca

SEQ ID NO: 54049 - DNA, 25 bp, Homo sapien
gatagagtggaaaatcctaagtagg

SEQ ID NO: 54050 - DNA, 25 bp, Homo sapien
acatctaactagagaaagtcaggga

SEQ ID NO: 54051 - DNA, 25 bp, Homo sapien
gcctgaagtgaggaaaacctattta

SEQ ID NO: 54052 - DNA, 25 bp, Homo sapien
ccagccccagattggtccctggagc

SEQ ID NO: 54053 - DNA, 25 bp, Homo sapien
agccagggatactaccaagatcact

SEQ ID NO: 54054 - DNA, 25 bp, Homo sapien
caaaagagctgttaagtgaatggga

SEQ ID NO: 54055 - DNA, 25 bp, Homo sapien
agaaatggaatgaaacacccaatcc

SEQ ID NO: 54056 - DNA, 25 bp, Homo sapien
attaaacctaccagagaggagagga

SEQ ID NO: 54057 - DNA, 25 bp, Homo sapien
gaggaggaactgcagttaccactat

SEQ ID NO: 54058 - DNA, 25 bp, Homo sapien
gatagagaaggtgagttattaaaca

SEQ ID NO: 54059 - DNA, 25 bp, Homo sapien
acattttgagcaaggatagagaagg

SEQ ID NO: 54060 - DNA, 25 bp, Homo sapien
acattttgagcaaggatagagaagg

SEQ ID NO: 54061 - DNA, 25 bp, Homo sapien
gaggaggaactgcagttaccactat

SEQ ID NO: 54062 - DNA, 25 bp, Homo sapien
attaaacctaccagagaggagagga

SEQ ID NO: 54063 - DNA, 25 bp, Homo sapien
acatctaactagagaaagtcaggga

SEQ ID NO: 54064 - DNA, 25 bp, Homo sapien
agaaatggaatgaaacacccaatcc

SEQ ID NO: 54065 - DNA, 25 bp, Homo sapien
gatagagaaggtgagttattaaaca

SEQ ID NO: 54066 - DNA, 25 bp, Homo sapien
gcctgaagtgaggaaaacctattta

SEQ ID NO: 54067 - DNA, 25 bp, Homo sapien
ccagccccagattggtccctggagc

SEQ ID NO: 54068 - DNA, 25 bp, Homo sapien
gatagagtggaaaatcctaagtagg

SEQ ID NO: 54069 - DNA, 25 bp, Homo sapien
agccagggatactaccaagatcact

SEQ ID NO: 54070 - DNA, 25 bp, Homo sapien
caaaagagctgttaagtgaatggga

SEQ ID NO: 54071 - DNA, 25 bp, Homo sapien
gatagagtggaaaatcctaagtagg

SEQ ID NO: 54072 - DNA, 25 bp, Homo sapien
acatctaactagagaaagtcaggga

SEQ ID NO: 54073 - DNA, 25 bp, Homo sapien
gcctgaagtgaggaaaacctattta

SEQ ID NO: 54074 - DNA, 25 bp, Homo sapien
ccagccccagattggtccctggagc

SEQ ID NO: 54075 - DNA, 25 bp, Homo sapien
agccagggatactaccaagatcact

SEQ ID NO: 54076 - DNA, 25 bp, Homo sapien
caaaagagctgttaagtgaatggga

SEQ ID NO: 54077 - DNA, 25 bp, Homo sapien
agaaatggaatgaaacacccaatcc

SEQ ID NO: 54078 - DNA, 25 bp, Homo sapien
attaaacctaccagagaggagagga

SEQ ID NO: 54079 - DNA, 25 bp, Homo sapien
gaggaggaactgcagttaccactat

SEQ ID NO: 54080 - DNA, 25 bp, Homo sapien
gatagagaaggtgagttattaaaca

SEQ ID NO: 54081 - DNA, 25 bp, Homo sapien
acattttgagcaaggatagagaagg

SEQ ID NO: 54082 - DNA, 25 bp, Homo sapien
gcctgaagtgaggaaaacctattta

SEQ ID NO: 54083 - DNA, 25 bp, Homo sapien
agccagggatactaccaagatcact

SEQ ID NO: 54084 - DNA, 25 bp, Homo sapien
ccagccccagattggtccctggagc

SEQ ID NO: 54085 - DNA, 25 bp, Homo sapien
gatagagtggaaaatcctaagtagg

SEQ ID NO: 54086 - DNA, 25 bp, Homo sapien
acatctaactagagaaagtcaggga

SEQ ID NO: 54087 - DNA, 25 bp, Homo sapien
gatagagaaggtgagttattaaaca

SEQ ID NO: 54088 - DNA, 25 bp, Homo sapien
attaaacctaccagagaggagagga

SEQ ID NO: 54089 - DNA, 25 bp, Homo sapien
agaaatggaatgaaacacccaatcc

SEQ ID NO: 54090 - DNA, 25 bp, Homo sapien
gaggaggaactgcagttaccactat

SEQ ID NO: 54091 - DNA, 25 bp, Homo sapien
caaaagagctgttaagtgaatggga

SEQ ID NO: 54092 - DNA, 25 bp, Homo sapien
acattttgagcaaggatagagaagg

SEQ ID NO: 54093 - DNA, 25 bp, Homo sapien
gatagagtggaaaatcctaagtagg

SEQ ID NO: 54094 - DNA, 25 bp, Homo sapien
acatctaactagagaaagtcaggga

SEQ ID NO: 54095 - DNA, 25 bp, Homo sapien
gcctgaagtgaggaaaacctattta

SEQ ID NO: 54096 - DNA, 25 bp, Homo sapien
ccagccccagattggtccctggagc

SEQ ID NO: 54097 - DNA, 25 bp, Homo sapien
agccagggatactaccaagatcact

SEQ ID NO: 54098 - DNA, 25 bp, Homo sapien
caaaagagctgttaagtgaatggga

SEQ ID NO: 54099 - DNA, 25 bp, Homo sapien
agaaatggaatgaaacacccaatcc

SEQ ID NO: 54100 - DNA, 25 bp, Homo sapien
attaaacctaccagagaggagagga

SEQ ID NO: 54101 - DNA, 25 bp, Homo sapien
gaggaggaactgcagttaccactat

SEQ ID NO: 54102 - DNA, 25 bp, Homo sapien
gatagagaaggtgagttattaaaca

SEQ ID NO: 54103 - DNA, 25 bp, Homo sapien
acattttgagcaaggatagagaagg

SEQ ID NO: 54104 - DNA, 25 bp, Homo sapien
acatctaactagagaaagtcaggga

SEQ ID NO: 54105 - DNA, 25 bp, Homo sapien
gaggaggaactgcagttaccactat

SEQ ID NO: 54106 - DNA, 25 bp, Homo sapien
ccagccccagattggtccctggagc

SEQ ID NO: 54107 - DNA, 25 bp, Homo sapien
agccagggatactaccaagatcact

SEQ ID NO: 54108 - DNA, 25 bp, Homo sapien
gcctgaagtgaggaaaacctattta

SEQ ID NO: 54109 - DNA, 25 bp, Homo sapien
caaaagagctgttaagtgaatggga

SEQ ID NO: 54110 - DNA, 25 bp, Homo sapien
agaaatggaatgaaacacccaatcc

SEQ ID NO: 54111 - DNA, 25 bp, Homo sapien
gatagagaaggtgagttattaaaca

SEQ ID NO: 54112 - DNA, 25 bp, Homo sapien
attaaacctaccagagaggagagga

SEQ ID NO: 54113 - DNA, 25 bp, Homo sapien
gatagagtggaaaatcctaagtagg

SEQ ID NO: 54114 - DNA, 25 bp, Homo sapien
acattttgagcaaggatagagaagg

SEQ ID NO: 54115 - DNA, 25 bp, Homo sapien
agccagggatactaccaagatcact

SEQ ID NO: 54116 - DNA, 25 bp, Homo sapien
gcctgaagtgaggaaaacctattta

SEQ ID NO: 54117 - DNA, 25 bp, Homo sapien
gaggaggaactgcagttaccactat

SEQ ID NO: 54118 - DNA, 25 bp, Homo sapien
acatctaactagagaaagtcaggga

SEQ ID NO: 54119 - DNA, 25 bp, Homo sapien
attaaacctaccagagaggagagga

SEQ ID NO: 54120 - DNA, 25 bp, Homo sapien
ccagccccagattggtccctggagc

SEQ ID NO: 54121 - DNA, 25 bp, Homo sapien
caaaagagctgttaagtgaatggga

SEQ ID NO: 54122 - DNA, 25 bp, Homo sapien
gatagagaaggtgagttattaaaca

SEQ ID NO: 54123 - DNA, 25 bp, Homo sapien
acattttgagcaaggatagagaagg

SEQ ID NO: 54124 - DNA, 25 bp, Homo sapien
agaaatggaatgaaacacccaatcc

SEQ ID NO: 54125 - DNA, 25 bp, Homo sapien
gatagagtggaaaatcctaagtagg

SEQ ID NO: 54126 - DNA, 25 bp, Homo sapien
gatagagtggaaaatcctaagtagg

SEQ ID NO: 54127 - DNA, 25 bp, Homo sapien
acatctaactagagaaagtcaggga

SEQ ID NO: 54128 - DNA, 25 bp, Homo sapien
gcctgaagtgaggaaaacctattta

SEQ ID NO: 54129 - DNA, 25 bp, Homo sapien
ccagccccagattggtccctggagc

SEQ ID NO: 54130 - DNA, 25 bp, Homo sapien
agccagggatactaccaagatcact

SEQ ID NO: 54131 - DNA, 25 bp, Homo sapien
caaaagagctgttaagtgaatggga

SEQ ID NO: 54132 - DNA, 25 bp, Homo sapien
agaaatggaatgaaacacccaatcc

SEQ ID NO: 54133 - DNA, 25 bp, Homo sapien
attaaacctaccagagaggagagga

SEQ ID NO: 54134 - DNA, 25 bp, Homo sapien
gaggaggaactgcagttaccactat

SEQ ID NO: 54135 - DNA, 25 bp, Homo sapien
gatagagaaggtgagttattaaaca

SEQ ID NO: 54136 - DNA, 25 bp, Homo sapien
acattttgagcaaggatagagaagg

SEQ ID NO: 54137 - DNA, 25 bp, Homo sapien
acattttgagcaaggatagagaagg

SEQ ID NO: 54138 - DNA, 25 bp, Homo sapien
ccagccccagattggtccctggagc

SEQ ID NO: 54139 - DNA, 25 bp, Homo sapien
acatctaactagagaaagtcaggga

SEQ ID NO: 54140 - DNA, 25 bp, Homo sapien
caaaagagctgttaagtgaatggga

SEQ ID NO: 54141 - DNA, 25 bp, Homo sapien
agccagggatactaccaagatcact

SEQ ID NO: 54142 - DNA, 25 bp, Homo sapien
gcctgaagtgaggaaaacctattta

SEQ ID NO: 54143 - DNA, 25 bp, Homo sapien
agaaatggaatgaaacacccaatcc

SEQ ID NO: 54144 - DNA, 25 bp, Homo sapien
gaggaggaactgcagttaccactat

SEQ ID NO: 54145 - DNA, 25 bp, Homo sapien
attaaacctaccagagaggagagga

SEQ ID NO: 54146 - DNA, 25 bp, Homo sapien
gatagagaaggtgagttattaaaca

SEQ ID NO: 54147 - DNA, 25 bp, Homo sapien
gatagagtggaaaatcctaagtagg

SEQ ID NO: 54148 - DNA, 25 bp, Homo sapien
gatagagtggaaaatcctaagtagg

SEQ ID NO: 54149 - DNA, 25 bp, Homo sapien
acatctaactagagaaagtcaggga

SEQ ID NO: 54150 - DNA, 25 bp, Homo sapien
gcctgaagtgaggaaaacctattta

SEQ ID NO: 54151 - DNA, 25 bp, Homo sapien
ccagccccagattggtccctggagc

SEQ ID NO: 54152 - DNA, 25 bp, Homo sapien
agccagggatactaccaagatcact

SEQ ID NO: 54153 - DNA, 25 bp, Homo sapien
caaaagagctgttaagtgaatggga

SEQ ID NO: 54154 - DNA, 25 bp, Homo sapien
agaaatggaatgaaacacccaatcc

SEQ ID NO: 54155 - DNA, 25 bp, Homo sapien
attaaacctaccagagaggagagga

SEQ ID NO: 54156 - DNA, 25 bp, Homo sapien
gaggaggaactgcagttaccactat

SEQ ID NO: 54157 - DNA, 25 bp, Homo sapien
gatagagaaggtgagttattaaaca

SEQ ID NO: 54158 - DNA, 25 bp, Homo sapien
acattttgagcaaggatagagaagg

SEQ ID NO: 54159 - DNA, 25 bp, Homo sapien
ccagccccagattggtccctggagc

SEQ ID NO: 54160 - DNA, 25 bp, Homo sapien
gaggaggaactgcagttaccactat

SEQ ID NO: 54161 - DNA, 25 bp, Homo sapien
gatagagaaggtgagttattaaaca

SEQ ID NO: 54162 - DNA, 25 bp, Homo sapien
attaaacctaccagagaggagagga

SEQ ID NO: 54163 - DNA, 25 bp, Homo sapien
gatagagtggaaaatcctaagtagg

SEQ ID NO: 54164 - DNA, 25 bp, Homo sapien
agccagggatactaccaagatcact

SEQ ID NO: 54165 - DNA, 25 bp, Homo sapien
acatctaactagagaaagtcaggga

SEQ ID NO: 54166 - DNA, 25 bp, Homo sapien
agaaatggaatgaaacacccaatcc

SEQ ID NO: 54167 - DNA, 25 bp, Homo sapien
acattttgagcaaggatagagaagg

SEQ ID NO: 54168 - DNA, 25 bp, Homo sapien
gcctgaagtgaggaaaacctattta

SEQ ID NO: 54169 - DNA, 25 bp, Homo sapien
caaaagagctgttaagtgaatggga

SEQ ID NO: 54170 - DNA, 25 bp, Homo sapien
gatagagtggaaaatcctaagtagg

SEQ ID NO: 54171 - DNA, 25 bp, Homo sapien
acatctaactagagaaagtcaggga

SEQ ID NO: 54172 - DNA, 25 bp, Homo sapien
gcctgaagtgaggaaaacctattta

SEQ ID NO: 54173 - DNA, 25 bp, Homo sapien
ccagccccagattggtccctggagc

SEQ ID NO: 54174 - DNA, 25 bp, Homo sapien
agccagggatactaccaagatcact

SEQ ID NO: 54175 - DNA, 25 bp, Homo sapien
caaaagagctgttaagtgaatggga

SEQ ID NO: 54176 - DNA, 25 bp, Homo sapien
agaaatggaatgaaacacccaatcc

SEQ ID NO: 54177 - DNA, 25 bp, Homo sapien
attaaacctaccagagaggagagga

SEQ ID NO: 54178 - DNA, 25 bp, Homo sapien
gaggaggaactgcagttaccactat

SEQ ID NO: 54179 - DNA, 25 bp, Homo sapien
gatagagaaggtgagttattaaaca

SEQ ID NO: 54180 - DNA, 25 bp, Homo sapien
acattttgagcaaggatagagaagg

SEQ ID NO: 54181 - DNA, 25 bp, Homo sapien
ggttccagcagctcaggctccttcc

SEQ ID NO: 54182 - DNA, 25 bp, Homo sapien
gcctagagaacatatatcgggtgcc

SEQ ID NO: 54183 - DNA, 25 bp, Homo sapien
cggctcttagagtgcttaatgtgct

SEQ ID NO: 54184 - DNA, 25 bp, Homo sapien
attttggcgaattactggaagatgg

SEQ ID NO: 54185 - DNA, 25 bp, Homo sapien
tgtggccaaaggaacaactccatgt

SEQ ID NO: 54186 - DNA, 25 bp, Homo sapien
gaattcatagggaataggttccagc

SEQ ID NO: 54187 - DNA, 25 bp, Homo sapien
acgtttcaggaagttatctcggctc

SEQ ID NO: 54188 - DNA, 25 bp, Homo sapien
acaaagtgtgcttctctgggtggag

SEQ ID NO: 54189 - DNA, 25 bp, Homo sapien
tggcgctttagttgaacccaggtac

SEQ ID NO: 54190 - DNA, 25 bp, Homo sapien
catggtaacacttgtggggcattcc

SEQ ID NO: 54191 - DNA, 25 bp, Homo sapien
gcatgctgggtaacattgtagactc

SEQ ID NO: 54192 - DNA, 25 bp, Homo sapien
attttggcgaattactggaagatgg

SEQ ID NO: 54193 - DNA, 25 bp, Homo sapien
gcctagagaacatatatcgggtgcc

SEQ ID NO: 54194 - DNA, 25 bp, Homo sapien
tgtggccaaaggaacaactccatgt

SEQ ID NO: 54195 - DNA, 25 bp, Homo sapien
catggtaacacttgtggggcattcc

SEQ ID NO: 54196 - DNA, 25 bp, Homo sapien
gcatgctgggtaacattgtagactc

SEQ ID NO: 54197 - DNA, 25 bp, Homo sapien
cggctcttagagtgcttaatgtgct

SEQ ID NO: 54198 - DNA, 25 bp, Homo sapien
acgtttcaggaagttatctcggctc

SEQ ID NO: 54199 - DNA, 25 bp, Homo sapien
tggcgctttagttgaacccaggtac

SEQ ID NO: 54200 - DNA, 25 bp, Homo sapien
acaaagtgtgcttctctgggtggag

SEQ ID NO: 54201 - DNA, 25 bp, Homo sapien
ggttccagcagctcaggctccttcc

SEQ ID NO: 54202 - DNA, 25 bp, Homo sapien
gaattcatagggaataggttccagc

SEQ ID NO: 54203 - DNA, 25 bp, Homo sapien
cggctcttagagtgcttaatgtgct

SEQ ID NO: 54204 - DNA, 25 bp, Homo sapien
gcatgctgggtaacattgtagactc

SEQ ID NO: 54205 - DNA, 25 bp, Homo sapien
acgtttcaggaagttatctcggctc

SEQ ID NO: 54206 - DNA, 25 bp, Homo sapien
tgtggccaaaggaacaactccatgt

SEQ ID NO: 54207 - DNA, 25 bp, Homo sapien
catggtaacacttgtggggcattcc

SEQ ID NO: 54208 - DNA, 25 bp, Homo sapien
attttggcgaattactggaagatgg

SEQ ID NO: 54209 - DNA, 25 bp, Homo sapien
gaattcatagggaataggttccagc

SEQ ID NO: 54210 - DNA, 25 bp, Homo sapien
tggcgctttagttgaacccaggtac

SEQ ID NO: 54211 - DNA, 25 bp, Homo sapien
acaaagtgtgcttctctgggtggag

SEQ ID NO: 54212 - DNA, 25 bp, Homo sapien
ggttccagcagctcaggctccttcc

SEQ ID NO: 54213 - DNA, 25 bp, Homo sapien
gcctagagaacatatatcgggtgcc

SEQ ID NO: 54214 - DNA, 25 bp, Homo sapien
gcatgctgggtaacattgtagactc

SEQ ID NO: 54215 - DNA, 25 bp, Homo sapien
cggctcttagagtgcttaatgtgct

SEQ ID NO: 54216 - DNA, 25 bp, Homo sapien
acgtttcaggaagttatctcggctc

SEQ ID NO: 54217 - DNA, 25 bp, Homo sapien
tggcgctttagttgaacccaggtac

SEQ ID NO: 54218 - DNA, 25 bp, Homo sapien
acaaagtgtgcttctctgggtggag

SEQ ID NO: 54219 - DNA, 25 bp, Homo sapien
ggttccagcagctcaggctccttcc

SEQ ID NO: 54220 - DNA, 25 bp, Homo sapien
gaattcatagggaataggttccagc

SEQ ID NO: 54221 - DNA, 25 bp, Homo sapien
attttggcgaattactggaagatgg

SEQ ID NO: 54222 - DNA, 25 bp, Homo sapien
gcctagagaacatatatcgggtgcc

SEQ ID NO: 54223 - DNA, 25 bp, Homo sapien
tgtggccaaaggaacaactccatgt

SEQ ID NO: 54224 - DNA, 25 bp, Homo sapien
catggtaacacttgtggggcattcc

SEQ ID NO: 54225 - DNA, 25 bp, Homo sapien
gaattcatagggaataggttccagc

SEQ ID NO: 54226 - DNA, 25 bp, Homo sapien
acgtttcaggaagttatctcggctc

SEQ ID NO: 54227 - DNA, 25 bp, Homo sapien
tgtggccaaaggaacaactccatgt

SEQ ID NO: 54228 - DNA, 25 bp, Homo sapien
attttggcgaattactggaagatgg

SEQ ID NO: 54229 - DNA, 25 bp, Homo sapien
cggctcttagagtgcttaatgtgct

SEQ ID NO: 54230 - DNA, 25 bp, Homo sapien
tggcgctttagttgaacccaggtac

SEQ ID NO: 54231 - DNA, 25 bp, Homo sapien
gcatgctgggtaacattgtagactc

SEQ ID NO: 54232 - DNA, 25 bp, Homo sapien
gcctagagaacatatatcgggtgcc

SEQ ID NO: 54233 - DNA, 25 bp, Homo sapien
acaaagtgtgcttctctgggtggag

SEQ ID NO: 54234 - DNA, 25 bp, Homo sapien
catggtaacacttgtggggcattcc

SEQ ID NO: 54235 - DNA, 25 bp, Homo sapien
ggttccagcagctcaggctccttcc

SEQ ID NO: 54236 - DNA, 25 bp, Homo sapien
attttggcgaattactggaagatgg

SEQ ID NO: 54237 - DNA, 25 bp, Homo sapien
gcctagagaacatatatcgggtgcc

SEQ ID NO: 54238 - DNA, 25 bp, Homo sapien
tgtggccaaaggaacaactccatgt

SEQ ID NO: 54239 - DNA, 25 bp, Homo sapien
catggtaacacttgtggggcattcc

SEQ ID NO: 54240 - DNA, 25 bp, Homo sapien
gcatgctgggtaacattgtagactc

SEQ ID NO: 54241 - DNA, 25 bp, Homo sapien
cggctcttagagtgcttaatgtgct

SEQ ID NO: 54242 - DNA, 25 bp, Homo sapien
acgtttcaggaagttatctcggctc

SEQ ID NO: 54243 - DNA, 25 bp, Homo sapien
tggcgctttagttgaacccaggtac

SEQ ID NO: 54244 - DNA, 25 bp, Homo sapien
acaaagtgtgcttctctgggtggag

SEQ ID NO: 54245 - DNA, 25 bp, Homo sapien
ggttccagcagctcaggctccttcc

SEQ ID NO: 54246 - DNA, 25 bp, Homo sapien
gaattcatagggaataggttccagc

SEQ ID NO: 54247 - DNA, 25 bp, Homo sapien
attttggcgaattactggaagatgg

SEQ ID NO: 54248 - DNA, 25 bp, Homo sapien
gcctagagaacatatatcgggtgcc

SEQ ID NO: 54249 - DNA, 25 bp, Homo sapien
tgtggccaaaggaacaactccatgt

SEQ ID NO: 54250 - DNA, 25 bp, Homo sapien
catggtaacacttgtggggcattcc

SEQ ID NO: 54251 - DNA, 25 bp, Homo sapien
gcatgctgggtaacattgtagactc

SEQ ID NO: 54252 - DNA, 25 bp, Homo sapien
cggctcttagagtgcttaatgtgct

SEQ ID NO: 54253 - DNA, 25 bp, Homo sapien
acgtttcaggaagttatctcggctc

SEQ ID NO: 54254 - DNA, 25 bp, Homo sapien
tggcgctttagttgaacccaggtac

SEQ ID NO: 54255 - DNA, 25 bp, Homo sapien
acaaagtgtgcttctctgggtggag

SEQ ID NO: 54256 - DNA, 25 bp, Homo sapien
ggttccagcagctcaggctccttcc

SEQ ID NO: 54257 - DNA, 25 bp, Homo sapien
gaattcatagggaataggttccagc

SEQ ID NO: 54258 - DNA, 25 bp, Homo sapien
tgtggccaaaggaacaactccatgt

SEQ ID NO: 54259 - DNA, 25 bp, Homo sapien
tggcgctttagttgaacccaggtac

SEQ ID NO: 54260 - DNA, 25 bp, Homo sapien
gcctagagaacatatatcgggtgcc

SEQ ID NO: 54261 - DNA, 25 bp, Homo sapien
acaaagtgtgcttctctgggtggag

SEQ ID NO: 54262 - DNA, 25 bp, Homo sapien
ggttccagcagctcaggctccttcc

SEQ ID NO: 54263 - DNA, 25 bp, Homo sapien
attttggcgaattactggaagatgg

SEQ ID NO: 54264 - DNA, 25 bp, Homo sapien
acgtttcaggaagttatctcggctc

SEQ ID NO: 54265 - DNA, 25 bp, Homo sapien
gcatgctgggtaacattgtagactc

SEQ ID NO: 54266 - DNA, 25 bp, Homo sapien
catggtaacacttgtggggcattcc

SEQ ID NO: 54267 - DNA, 25 bp, Homo sapien
cggctcttagagtgcttaatgtgct

SEQ ID NO: 54268 - DNA, 25 bp, Homo sapien
gaattcatagggaataggttccagc

SEQ ID NO: 54269 - DNA, 25 bp, Homo sapien
attttggcgaattactggaagatgg

SEQ ID NO: 54270 - DNA, 25 bp, Homo sapien
gcctagagaacatatatcgggtgcc

SEQ ID NO: 54271 - DNA, 25 bp, Homo sapien
tgtggccaaaggaacaactccatgt

SEQ ID NO: 54272 - DNA, 25 bp, Homo sapien
catggtaacacttgtggggcattcc

SEQ ID NO: 54273 - DNA, 25 bp, Homo sapien
gcatgctgggtaacattgtagactc

SEQ ID NO: 54274 - DNA, 25 bp, Homo sapien
cggctcttagagtgcttaatgtgct

SEQ ID NO: 54275 - DNA, 25 bp, Homo sapien
acgtttcaggaagttatctcggctc

SEQ ID NO: 54276 - DNA, 25 bp, Homo sapien
tggcgctttagttgaacccaggtac

SEQ ID NO: 54277 - DNA, 25 bp, Homo sapien
acaaagtgtgcttctctgggtggag

SEQ ID NO: 54278 - DNA, 25 bp, Homo sapien
ggttccagcagctcaggctccttcc

SEQ ID NO: 54279 - DNA, 25 bp, Homo sapien
gaattcatagggaataggttccagc

SEQ ID NO: 54280 - DNA, 25 bp, Homo sapien
acaaagtgtgcttctctgggtggag

SEQ ID NO: 54281 - DNA, 25 bp, Homo sapien
gaattcatagggaataggttccagc

SEQ ID NO: 54282 - DNA, 25 bp, Homo sapien
catggtaacacttgtggggcattcc

SEQ ID NO: 54283 - DNA, 25 bp, Homo sapien
attttggcgaattactggaagatgg

SEQ ID NO: 54284 - DNA, 25 bp, Homo sapien
tgtggccaaaggaacaactccatgt

SEQ ID NO: 54285 - DNA, 25 bp, Homo sapien
tggcgctttagttgaacccaggtac

SEQ ID NO: 54286 - DNA, 25 bp, Homo sapien
ggttccagcagctcaggctccttcc

SEQ ID NO: 54287 - DNA, 25 bp, Homo sapien
gcatgctgggtaacattgtagactc

SEQ ID NO: 54288 - DNA, 25 bp, Homo sapien
cggctcttagagtgcttaatgtgct

SEQ ID NO: 54289 - DNA, 25 bp, Homo sapien
acgtttcaggaagttatctcggctc

SEQ ID NO: 54290 - DNA, 25 bp, Homo sapien
gcctagagaacatatatcgggtgcc

SEQ ID NO: 54291 - DNA, 25 bp, Homo sapien
attttggcgaattactggaagatgg

SEQ ID NO: 54292 - DNA, 25 bp, Homo sapien
gcctagagaacatatatcgggtgcc

SEQ ID NO: 54293 - DNA, 25 bp, Homo sapien
tgtggccaaaggaacaactccatgt

SEQ ID NO: 54294 - DNA, 25 bp, Homo sapien
catggtaacacttgtggggcattcc

SEQ ID NO: 54295 - DNA, 25 bp, Homo sapien
gcatgctgggtaacattgtagactc

SEQ ID NO: 54296 - DNA, 25 bp, Homo sapien
cggctcttagagtgcttaatgtgct

SEQ ID NO: 54297 - DNA, 25 bp, Homo sapien
acgtttcaggaagttatctcggctc

SEQ ID NO: 54298 - DNA, 25 bp, Homo sapien
tggcgctttagttgaacccaggtac

SEQ ID NO: 54299 - DNA, 25 bp, Homo sapien
acaaagtgtgcttctctgggtggag

SEQ ID NO: 54300 - DNA, 25 bp, Homo sapien
ggttccagcagctcaggctccttcc

SEQ ID NO: 54301 - DNA, 25 bp, Homo sapien
gaattcatagggaataggttccagc

SEQ ID NO: 54302 - DNA, 25 bp, Homo sapien
ggttccagcagctcaggctccttcc

SEQ ID NO: 54303 - DNA, 25 bp, Homo sapien
tggcgctttagttgaacccaggtac

SEQ ID NO: 54304 - DNA, 25 bp, Homo sapien
tgtggccaaaggaacaactccatgt

SEQ ID NO: 54305 - DNA, 25 bp, Homo sapien
attttggcgaattactggaagatgg

SEQ ID NO: 54306 - DNA, 25 bp, Homo sapien
gaattcatagggaataggttccagc

SEQ ID NO: 54307 - DNA, 25 bp, Homo sapien
gcctagagaacatatatcgggtgcc

SEQ ID NO: 54308 - DNA, 25 bp, Homo sapien
acgtttcaggaagttatctcggctc

SEQ ID NO: 54309 - DNA, 25 bp, Homo sapien
catggtaacacttgtggggcattcc

SEQ ID NO: 54310 - DNA, 25 bp, Homo sapien
gcatgctgggtaacattgtagactc

SEQ ID NO: 54311 - DNA, 25 bp, Homo sapien
cggctcttagagtgcttaatgtgct

SEQ ID NO: 54312 - DNA, 25 bp, Homo sapien
acaaagtgtgcttctctgggtggag

SEQ ID NO: 54313 - DNA, 25 bp, Homo sapien
attttggcgaattactggaagatgg

SEQ ID NO: 54314 - DNA, 25 bp, Homo sapien
gcctagagaacatatatcgggtgcc

SEQ ID NO: 54315 - DNA, 25 bp, Homo sapien
tgtggccaaaggaacaactccatgt

SEQ ID NO: 54316 - DNA, 25 bp, Homo sapien
catggtaacacttgtggggcattcc

SEQ ID NO: 54317 - DNA, 25 bp, Homo sapien
gcatgctgggtaacattgtagactc

SEQ ID NO: 54318 - DNA, 25 bp, Homo sapien
cggctcttagagtgcttaatgtgct

SEQ ID NO: 54319 - DNA, 25 bp, Homo sapien
acgtttcaggaagttatctcggctc

SEQ ID NO: 54320 - DNA, 25 bp, Homo sapien
tggcgctttagttgaacccaggtac

SEQ ID NO: 54321 - DNA, 25 bp, Homo sapien
acaaagtgtgcttctctgggtggag

SEQ ID NO: 54322 - DNA, 25 bp, Homo sapien
ggttccagcagctcaggctccttcc

SEQ ID NO: 54323 - DNA, 25 bp, Homo sapien
gaattcatagggaataggttccagc

SEQ ID NO: 54324 - DNA, 25 bp, Homo sapien
attttggcgaattactggaagatgg

SEQ ID NO: 54325 - DNA, 25 bp, Homo sapien
acaaagtgtgcttctctgggtggag

SEQ ID NO: 54326 - DNA, 25 bp, Homo sapien
catggtaacacttgtggggcattcc

SEQ ID NO: 54327 - DNA, 25 bp, Homo sapien
tggcgctttagttgaacccaggtac

SEQ ID NO: 54328 - DNA, 25 bp, Homo sapien
ggttccagcagctcaggctccttcc

SEQ ID NO: 54329 - DNA, 25 bp, Homo sapien
acgtttcaggaagttatctcggctc

SEQ ID NO: 54330 - DNA, 25 bp, Homo sapien
gaattcatagggaataggttccagc

SEQ ID NO: 54331 - DNA, 25 bp, Homo sapien
tgtggccaaaggaacaactccatgt

SEQ ID NO: 54332 - DNA, 25 bp, Homo sapien
gcctagagaacatatatcgggtgcc

SEQ ID NO: 54333 - DNA, 25 bp, Homo sapien
gcatgctgggtaacattgtagactc

SEQ ID NO: 54334 - DNA, 25 bp, Homo sapien
cggctcttagagtgcttaatgtgct

SEQ ID NO: 54335 - DNA, 25 bp, Homo sapien
attttggcgaattactggaagatgg

SEQ ID NO: 54336 - DNA, 25 bp, Homo sapien
gcctagagaacatatatcgggtgcc

SEQ ID NO: 54337 - DNA, 25 bp, Homo sapien
tgtggccaaaggaacaactccatgt

SEQ ID NO: 54338 - DNA, 25 bp, Homo sapien
catggtaacacttgtggggcattcc

SEQ ID NO: 54339 - DNA, 25 bp, Homo sapien
gcatgctgggtaacattgtagactc

SEQ ID NO: 54340 - DNA, 25 bp, Homo sapien
cggctcttagagtgcttaatgtgct

SEQ ID NO: 54341 - DNA, 25 bp, Homo sapien
acgtttcaggaagttatctcggctc

SEQ ID NO: 54342 - DNA, 25 bp, Homo sapien
tggcgctttagttgaacccaggtac

SEQ ID NO: 54343 - DNA, 25 bp, Homo sapien
acaaagtgtgcttctctgggtggag

SEQ ID NO: 54344 - DNA, 25 bp, Homo sapien
ggttccagcagctcaggctccttcc

SEQ ID NO: 54345 - DNA, 25 bp, Homo sapien
gaattcatagggaataggttccagc

SEQ ID NO: 54346 - DNA, 25 bp, Homo sapien
gcctagagaacatatatcgggtgcc

SEQ ID NO: 54347 - DNA, 25 bp, Homo sapien
cggctcttagagtgcttaatgtgct

SEQ ID NO: 54348 - DNA, 25 bp, Homo sapien
tgtggccaaaggaacaactccatgt

SEQ ID NO: 54349 - DNA, 25 bp, Homo sapien
gcatgctgggtaacattgtagactc

SEQ ID NO: 54350 - DNA, 25 bp, Homo sapien
tggcgctttagttgaacccaggtac

SEQ ID NO: 54351 - DNA, 25 bp, Homo sapien
acgtttcaggaagttatctcggctc

SEQ ID NO: 54352 - DNA, 25 bp, Homo sapien
catggtaacacttgtggggcattcc

SEQ ID NO: 54353 - DNA, 25 bp, Homo sapien
ggttccagcagctcaggctccttcc

SEQ ID NO: 54354 - DNA, 25 bp, Homo sapien
attttggcgaattactggaagatgg

SEQ ID NO: 54355 - DNA, 25 bp, Homo sapien
acaaagtgtgcttctctgggtggag

SEQ ID NO: 54356 - DNA, 25 bp, Homo sapien
gaattcatagggaataggttccagc

SEQ ID NO: 54357 - DNA, 25 bp, Homo sapien
acaaagtgtgcttctctgggtggag

SEQ ID NO: 54358 - DNA, 25 bp, Homo sapien
tggcgctttagttgaacccaggtac

SEQ ID NO: 54359 - DNA, 25 bp, Homo sapien
acgtttcaggaagttatctcggctc

SEQ ID NO: 54360 - DNA, 25 bp, Homo sapien
gcatgctgggtaacattgtagactc

SEQ ID NO: 54361 - DNA, 25 bp, Homo sapien
tgtggccaaaggaacaactccatgt

SEQ ID NO: 54362 - DNA, 25 bp, Homo sapien
catggtaacacttgtggggcattcc

SEQ ID NO: 54363 - DNA, 25 bp, Homo sapien
cggctcttagagtgcttaatgtgct

SEQ ID NO: 54364 - DNA, 25 bp, Homo sapien
ggttccagcagctcaggctccttcc

SEQ ID NO: 54365 - DNA, 25 bp, Homo sapien
attttggcgaattactggaagatgg

SEQ ID NO: 54366 - DNA, 25 bp, Homo sapien
gcctagagaacatatatcgggtgcc

SEQ ID NO: 54367 - DNA, 25 bp, Homo sapien
gaattcatagggaataggttccagc

SEQ ID NO: 54368 - DNA, 25 bp, Homo sapien
attttggcgaattactggaagatgg

SEQ ID NO: 54369 - DNA, 25 bp, Homo sapien
gcctagagaacatatatcgggtgcc

SEQ ID NO: 54370 - DNA, 25 bp, Homo sapien
tgtggccaaaggaacaactccatgt

SEQ ID NO: 54371 - DNA, 25 bp, Homo sapien
catggtaacacttgtggggcattcc

SEQ ID NO: 54372 - DNA, 25 bp, Homo sapien
gcatgctgggtaacattgtagactc

SEQ ID NO: 54373 - DNA, 25 bp, Homo sapien
cggctcttagagtgcttaatgtgct

SEQ ID NO: 54374 - DNA, 25 bp, Homo sapien
acgtttcaggaagttatctcggctc

SEQ ID NO: 54375 - DNA, 25 bp, Homo sapien
tggcgctttagttgaacccaggtac

SEQ ID NO: 54376 - DNA, 25 bp, Homo sapien
acaaagtgtgcttctctgggtggag

SEQ ID NO: 54377 - DNA, 25 bp, Homo sapien
ggttccagcagctcaggctccttcc

SEQ ID NO: 54378 - DNA, 25 bp, Homo sapien
gaattcatagggaataggttccagc

SEQ ID NO: 54379 - DNA, 25 bp, Homo sapien
gaattcatagggaataggttccagc

SEQ ID NO: 54380 - DNA, 25 bp, Homo sapien
acaaagtgtgcttctctgggtggag

SEQ ID NO: 54381 - DNA, 25 bp, Homo sapien
catggtaacacttgtggggcattcc

SEQ ID NO: 54382 - DNA, 25 bp, Homo sapien
gcatgctgggtaacattgtagactc

SEQ ID NO: 54383 - DNA, 25 bp, Homo sapien
gcctagagaacatatatcgggtgcc

SEQ ID NO: 54384 - DNA, 25 bp, Homo sapien
ggttccagcagctcaggctccttcc

SEQ ID NO: 54385 - DNA, 25 bp, Homo sapien
cggctcttagagtgcttaatgtgct

SEQ ID NO: 54386 - DNA, 25 bp, Homo sapien
acgtttcaggaagttatctcggctc

SEQ ID NO: 54387 - DNA, 25 bp, Homo sapien
tggcgctttagttgaacccaggtac

SEQ ID NO: 54388 - DNA, 25 bp, Homo sapien
tgtggccaaaggaacaactccatgt

SEQ ID NO: 54389 - DNA, 25 bp, Homo sapien
attttggcgaattactggaagatgg

SEQ ID NO: 54390 - DNA, 25 bp, Homo sapien
attttggcgaattactggaagatgg

SEQ ID NO: 54391 - DNA, 25 bp, Homo sapien
gcctagagaacatatatcgggtgcc

SEQ ID NO: 54392 - DNA, 25 bp, Homo sapien
tgtggccaaaggaacaactccatgt

SEQ ID NO: 54393 - DNA, 25 bp, Homo sapien
catggtaacacttgtggggcattcc

SEQ ID NO: 54394 - DNA, 25 bp, Homo sapien
gcatgctgggtaacattgtagactc

SEQ ID NO: 54395 - DNA, 25 bp, Homo sapien
cggctcttagagtgcttaatgtgct

SEQ ID NO: 54396 - DNA, 25 bp, Homo sapien
acgtttcaggaagttatctcggctc

SEQ ID NO: 54397 - DNA, 25 bp, Homo sapien
tggcgctttagttgaacccaggtac

SEQ ID NO: 54398 - DNA, 25 bp, Homo sapien
acaaagtgtgcttctctgggtggag

SEQ ID NO: 54399 - DNA, 25 bp, Homo sapien
ggttccagcagctcaggctccttcc

SEQ ID NO: 54400 - DNA, 25 bp, Homo sapien
gaattcatagggaataggttccagc

SEQ ID NO: 54401 - DNA, 25 bp, Homo sapien
tggcgctttagttgaacccaggtac

SEQ ID NO: 54402 - DNA, 25 bp, Homo sapien
ggttccagcagctcaggctccttcc

SEQ ID NO: 54403 - DNA, 25 bp, Homo sapien
acaaagtgtgcttctctgggtggag

SEQ ID NO: 54404 - DNA, 25 bp, Homo sapien
gaattcatagggaataggttccagc

SEQ ID NO: 54405 - DNA, 25 bp, Homo sapien
acgtttcaggaagttatctcggctc

SEQ ID NO: 54406 - DNA, 25 bp, Homo sapien
gcctagagaacatatatcgggtgcc

SEQ ID NO: 54407 - DNA, 25 bp, Homo sapien
catggtaacacttgtggggcattcc

SEQ ID NO: 54408 - DNA, 25 bp, Homo sapien
cggctcttagagtgcttaatgtgct

SEQ ID NO: 54409 - DNA, 25 bp, Homo sapien
gcatgctgggtaacattgtagactc

SEQ ID NO: 54410 - DNA, 25 bp, Homo sapien
tgtggccaaaggaacaactccatgt

SEQ ID NO: 54411 - DNA, 25 bp, Homo sapien
attttggcgaattactggaagatgg

SEQ ID NO: 54412 - DNA, 25 bp, Homo sapien
attttggcgaattactggaagatgg

SEQ ID NO: 54413 - DNA, 25 bp, Homo sapien
gcctagagaacatatatcgggtgcc

SEQ ID NO: 54414 - DNA, 25 bp, Homo sapien
tgtggccaaaggaacaactccatgt

SEQ ID NO: 54415 - DNA, 25 bp, Homo sapien
catggtaacacttgtggggcattcc

SEQ ID NO: 54416 - DNA, 25 bp, Homo sapien
gcatgctgggtaacattgtagactc

SEQ ID NO: 54417 - DNA, 25 bp, Homo sapien
cggctcttagagtgcttaatgtgct

SEQ ID NO: 54418 - DNA, 25 bp, Homo sapien
acgtttcaggaagttatctcggctc

SEQ ID NO: 54419 - DNA, 25 bp, Homo sapien
tggcgctttagttgaacccaggtac

SEQ ID NO: 54420 - DNA, 25 bp, Homo sapien
acaaagtgtgcttctctgggtggag

SEQ ID NO: 54421 - DNA, 25 bp, Homo sapien
ggttccagcagctcaggctccttcc

SEQ ID NO: 54422 - DNA, 25 bp, Homo sapien
gaattcatagggaataggttccagc

SEQ ID NO: 54423 - DNA, 25 bp, Homo sapien
ggttccagcagctcaggctccttcc

SEQ ID NO: 54424 - DNA, 25 bp, Homo sapien
catggtaacacttgtggggcattcc

SEQ ID NO: 54425 - DNA, 25 bp, Homo sapien
tgtggccaaaggaacaactccatgt

SEQ ID NO: 54426 - DNA, 25 bp, Homo sapien
gcctagagaacatatatcgggtgcc

SEQ ID NO: 54427 - DNA, 25 bp, Homo sapien
gcatgctgggtaacattgtagactc

SEQ ID NO: 54428 - DNA, 25 bp, Homo sapien
gaattcatagggaataggttccagc

SEQ ID NO: 54429 - DNA, 25 bp, Homo sapien
tggcgctttagttgaacccaggtac

SEQ ID NO: 54430 - DNA, 25 bp, Homo sapien
cggctcttagagtgcttaatgtgct

SEQ ID NO: 54431 - DNA, 25 bp, Homo sapien
acaaagtgtgcttctctgggtggag

SEQ ID NO: 54432 - DNA, 25 bp, Homo sapien
acgtttcaggaagttatctcggctc

SEQ ID NO: 54433 - DNA, 25 bp, Homo sapien
attttggcgaattactggaagatgg

SEQ ID NO: 54434 - DNA, 25 bp, Homo sapien
attttggcgaattactggaagatgg

SEQ ID NO: 54435 - DNA, 25 bp, Homo sapien
gcctagagaacatatatcgggtgcc

SEQ ID NO: 54436 - DNA, 25 bp, Homo sapien
tgtggccaaaggaacaactccatgt

SEQ ID NO: 54437 - DNA, 25 bp, Homo sapien
catggtaacacttgtggggcattcc

SEQ ID NO: 54438 - DNA, 25 bp, Homo sapien
gcatgctgggtaacattgtagactc

SEQ ID NO: 54439 - DNA, 25 bp, Homo sapien
cggctcttagagtgcttaatgtgct

SEQ ID NO: 54440 - DNA, 25 bp, Homo sapien
acgtttcaggaagttatctcggctc

SEQ ID NO: 54441 - DNA, 25 bp, Homo sapien
tggcgctttagttgaacccaggtac

SEQ ID NO: 54442 - DNA, 25 bp, Homo sapien
acaaagtgtgcttctctgggtggag

SEQ ID NO: 54443 - DNA, 25 bp, Homo sapien
ggttccagcagctcaggctccttcc

SEQ ID NO: 54444 - DNA, 25 bp, Homo sapien
gaattcatagggaataggttccagc

SEQ ID NO: 54445 - DNA, 25 bp, Homo sapien
cggctcttagagtgcttaatgtgct

SEQ ID NO: 54446 - DNA, 25 bp, Homo sapien
catggtaacacttgtggggcattcc

SEQ ID NO: 54447 - DNA, 25 bp, Homo sapien
gcctagagaacatatatcgggtgcc

SEQ ID NO: 54448 - DNA, 25 bp, Homo sapien
acaaagtgtgcttctctgggtggag

SEQ ID NO: 54449 - DNA, 25 bp, Homo sapien
gaattcatagggaataggttccagc

SEQ ID NO: 54450 - DNA, 25 bp, Homo sapien
attttggcgaattactggaagatgg

SEQ ID NO: 54451 - DNA, 25 bp, Homo sapien
tgtggccaaaggaacaactccatgt

SEQ ID NO: 54452 - DNA, 25 bp, Homo sapien
acgtttcaggaagttatctcggctc

SEQ ID NO: 54453 - DNA, 25 bp, Homo sapien
gcatgctgggtaacattgtagactc

SEQ ID NO: 54454 - DNA, 25 bp, Homo sapien
ggttccagcagctcaggctccttcc

SEQ ID NO: 54455 - DNA, 25 bp, Homo sapien
tggcgctttagttgaacccaggtac

SEQ ID NO: 54456 - DNA, 25 bp, Homo sapien
attttggcgaattactggaagatgg

SEQ ID NO: 54457 - DNA, 25 bp, Homo sapien
gcctagagaacatatatcgggtgcc

SEQ ID NO: 54458 - DNA, 25 bp, Homo sapien
tgtggccaaaggaacaactccatgt

SEQ ID NO: 54459 - DNA, 25 bp, Homo sapien
catggtaacacttgtggggcattcc

SEQ ID NO: 54460 - DNA, 25 bp, Homo sapien
gcatgctgggtaacattgtagactc

SEQ ID NO: 54461 - DNA, 25 bp, Homo sapien
cggctcttagagtgcttaatgtgct

SEQ ID NO: 54462 - DNA, 25 bp, Homo sapien
acgtttcaggaagttatctcggctc

SEQ ID NO: 54463 - DNA, 25 bp, Homo sapien
tggcgctttagttgaacccaggtac

SEQ ID NO: 54464 - DNA, 25 bp, Homo sapien
acaaagtgtgcttctctgggtggag

SEQ ID NO: 54465 - DNA, 25 bp, Homo sapien
ggttccagcagctcaggctccttcc

SEQ ID NO: 54466 - DNA, 25 bp, Homo sapien
gaattcatagggaataggttccagc

SEQ ID NO: 54467 - DNA, 25 bp, Homo sapien
gcatgctgggtaacattgtagactc

SEQ ID NO: 54468 - DNA, 25 bp, Homo sapien
acaaagtgtgcttctctgggtggag

SEQ ID NO: 54469 - DNA, 25 bp, Homo sapien
tggcgctttagttgaacccaggtac

SEQ ID NO: 54470 - DNA, 25 bp, Homo sapien
gaattcatagggaataggttccagc

SEQ ID NO: 54471 - DNA, 25 bp, Homo sapien
acgtttcaggaagttatctcggctc

SEQ ID NO: 54472 - DNA, 25 bp, Homo sapien
gcctagagaacatatatcgggtgcc

SEQ ID NO: 54473 - DNA, 25 bp, Homo sapien
cggctcttagagtgcttaatgtgct

SEQ ID NO: 54474 - DNA, 25 bp, Homo sapien
tgtggccaaaggaacaactccatgt

SEQ ID NO: 54475 - DNA, 25 bp, Homo sapien
attttggcgaattactggaagatgg

SEQ ID NO: 54476 - DNA, 25 bp, Homo sapien
ggttccagcagctcaggctccttcc

SEQ ID NO: 54477 - DNA, 25 bp, Homo sapien
catggtaacacttgtggggcattcc

SEQ ID NO: 54478 - DNA, 25 bp, Homo sapien
attttggcgaattactggaagatgg

SEQ ID NO: 54479 - DNA, 25 bp, Homo sapien
gcctagagaacatatatcgggtgcc

SEQ ID NO: 54480 - DNA, 25 bp, Homo sapien
tgtggccaaaggaacaactccatgt

SEQ ID NO: 54481 - DNA, 25 bp, Homo sapien
catggtaacacttgtggggcattcc

SEQ ID NO: 54482 - DNA, 25 bp, Homo sapien
gcatgctgggtaacattgtagactc

SEQ ID NO: 54483 - DNA, 25 bp, Homo sapien
cggctcttagagtgcttaatgtgct

SEQ ID NO: 54484 - DNA, 25 bp, Homo sapien
acgtttcaggaagttatctcggctc

SEQ ID NO: 54485 - DNA, 25 bp, Homo sapien
tggcgctttagttgaacccaggtac

SEQ ID NO: 54486 - DNA, 25 bp, Homo sapien
acaaagtgtgcttctctgggtggag

SEQ ID NO: 54487 - DNA, 25 bp, Homo sapien
ggttccagcagctcaggctccttcc

SEQ ID NO: 54488 - DNA, 25 bp, Homo sapien
gaattcatagggaataggttccagc

SEQ ID NO: 54489 - DNA, 25 bp, Homo sapien
attttggcgaattactggaagatgg

SEQ ID NO: 54490 - DNA, 25 bp, Homo sapien
gcctagagaacatatatcgggtgcc

SEQ ID NO: 54491 - DNA, 25 bp, Homo sapien
tgtggccaaaggaacaactccatgt

SEQ ID NO: 54492 - DNA, 25 bp, Homo sapien
catggtaacacttgtggggcattcc

SEQ ID NO: 54493 - DNA, 25 bp, Homo sapien
gcatgctgggtaacattgtagactc

SEQ ID NO: 54494 - DNA, 25 bp, Homo sapien
cggctcttagagtgcttaatgtgct

SEQ ID NO: 54495 - DNA, 25 bp, Homo sapien
acgtttcaggaagttatctcggctc

SEQ ID NO: 54496 - DNA, 25 bp, Homo sapien
tggcgctttagttgaacccaggtac

SEQ ID NO: 54497 - DNA, 25 bp, Homo sapien
acaaagtgtgcttctctgggtggag

SEQ ID NO: 54498 - DNA, 25 bp, Homo sapien
ggttccagcagctcaggctccttcc

SEQ ID NO: 54499 - DNA, 25 bp, Homo sapien
gaattcatagggaataggttccagc

SEQ ID NO: 54500 - DNA, 25 bp, Homo sapien
cggctcttagagtgcttaatgtgct

SEQ ID NO: 54501 - DNA, 25 bp, Homo sapien
gcctagagaacatatatcgggtgcc

SEQ ID NO: 54502 - DNA, 25 bp, Homo sapien
ggttccagcagctcaggctccttcc

SEQ ID NO: 54503 - DNA, 25 bp, Homo sapien
catggtaacacttgtggggcattcc

SEQ ID NO: 54504 - DNA, 25 bp, Homo sapien
tggcgctttagttgaacccaggtac

SEQ ID NO: 54505 - DNA, 25 bp, Homo sapien
gcatgctgggtaacattgtagactc

SEQ ID NO: 54506 - DNA, 25 bp, Homo sapien
acaaagtgtgcttctctgggtggag

SEQ ID NO: 54507 - DNA, 25 bp, Homo sapien
tgtggccaaaggaacaactccatgt

SEQ ID NO: 54508 - DNA, 25 bp, Homo sapien
acgtttcaggaagttatctcggctc

SEQ ID NO: 54509 - DNA, 25 bp, Homo sapien
attttggcgaattactggaagatgg

SEQ ID NO: 54510 - DNA, 25 bp, Homo sapien
gaattcatagggaataggttccagc

SEQ ID NO: 54511 - DNA, 25 bp, Homo sapien
cggctcttagagtgcttaatgtgct

SEQ ID NO: 54512 - DNA, 25 bp, Homo sapien
gaattcatagggaataggttccagc

SEQ ID NO: 54513 - DNA, 25 bp, Homo sapien
ggttccagcagctcaggctccttcc

SEQ ID NO: 54514 - DNA, 25 bp, Homo sapien
gcctagagaacatatatcgggtgcc

SEQ ID NO: 54515 - DNA, 25 bp, Homo sapien
tggcgctttagttgaacccaggtac

SEQ ID NO: 54516 - DNA, 25 bp, Homo sapien
catggtaacacttgtggggcattcc

SEQ ID NO: 54517 - DNA, 25 bp, Homo sapien
gcatgctgggtaacattgtagactc

SEQ ID NO: 54518 - DNA, 25 bp, Homo sapien
tgtggccaaaggaacaactccatgt

SEQ ID NO: 54519 - DNA, 25 bp, Homo sapien
acaaagtgtgcttctctgggtggag

SEQ ID NO: 54520 - DNA, 25 bp, Homo sapien
acgtttcaggaagttatctcggctc

SEQ ID NO: 54521 - DNA, 25 bp, Homo sapien
attttggcgaattactggaagatgg

SEQ ID NO: 54522 - DNA, 25 bp, Homo sapien
gaattcatagggaataggttccagc

SEQ ID NO: 54523 - DNA, 25 bp, Homo sapien
cggctcttagagtgcttaatgtgct

SEQ ID NO: 54524 - DNA, 25 bp, Homo sapien
ggttccagcagctcaggctccttcc

SEQ ID NO: 54525 - DNA, 25 bp, Homo sapien
gcctagagaacatatatcgggtgcc

SEQ ID NO: 54526 - DNA, 25 bp, Homo sapien
tggcgctttagttgaacccaggtac

SEQ ID NO: 54527 - DNA, 25 bp, Homo sapien
catggtaacacttgtggggcattcc

SEQ ID NO: 54528 - DNA, 25 bp, Homo sapien
gcatgctgggtaacattgtagactc

SEQ ID NO: 54529 - DNA, 25 bp, Homo sapien
tgtggccaaaggaacaactccatgt

SEQ ID NO: 54530 - DNA, 25 bp, Homo sapien
acaaagtgtgcttctctgggtggag

SEQ ID NO: 54531 - DNA, 25 bp, Homo sapien
acgtttcaggaagttatctcggctc

SEQ ID NO: 54532 - DNA, 25 bp, Homo sapien
attttggcgaattactggaagatgg

SEQ ID NO: 54533 - DNA, 25 bp, Homo sapien
gaattcatagggaataggttccagc

SEQ ID NO: 54534 - DNA, 25 bp, Homo sapien
cggctcttagagtgcttaatgtgct

SEQ ID NO: 54535 - DNA, 25 bp, Homo sapien
ggttccagcagctcaggctccttcc

SEQ ID NO: 54536 - DNA, 25 bp, Homo sapien
gcctagagaacatatatcgggtgcc

SEQ ID NO: 54537 - DNA, 25 bp, Homo sapien
tggcgctttagttgaacccaggtac

SEQ ID NO: 54538 - DNA, 25 bp, Homo sapien
catggtaacacttgtggggcattcc

SEQ ID NO: 54539 - DNA, 25 bp, Homo sapien
gcatgctgggtaacattgtagactc

SEQ ID NO: 54540 - DNA, 25 bp, Homo sapien
tgtggccaaaggaacaactccatgt

SEQ ID NO: 54541 - DNA, 25 bp, Homo sapien
acaaagtgtgcttctctgggtggag

SEQ ID NO: 54542 - DNA, 25 bp, Homo sapien
acgtttcaggaagttatctcggctc

SEQ ID NO: 54543 - DNA, 25 bp, Homo sapien
attttggcgaattactggaagatgg

SEQ ID NO: 54544 - DNA, 25 bp, Homo sapien
gaattcatagggaataggttccagc

SEQ ID NO: 54545 - DNA, 25 bp, Homo sapien
cggctcttagagtgcttaatgtgct

SEQ ID NO: 54546 - DNA, 25 bp, Homo sapien
ggttccagcagctcaggctccttcc

SEQ ID NO: 54547 - DNA, 25 bp, Homo sapien
gcctagagaacatatatcgggtgcc

SEQ ID NO: 54548 - DNA, 25 bp, Homo sapien
tggcgctttagttgaacccaggtac

SEQ ID NO: 54549 - DNA, 25 bp, Homo sapien
catggtaacacttgtggggcattcc

SEQ ID NO: 54550 - DNA, 25 bp, Homo sapien
gcatgctgggtaacattgtagactc

SEQ ID NO: 54551 - DNA, 25 bp, Homo sapien
tgtggccaaaggaacaactccatgt

SEQ ID NO: 54552 - DNA, 25 bp, Homo sapien
acaaagtgtgcttctctgggtggag

SEQ ID NO: 54553 - DNA, 25 bp, Homo sapien
acgtttcaggaagttatctcggctc

SEQ ID NO: 54554 - DNA, 25 bp, Homo sapien
attttggcgaattactggaagatgg

SEQ ID NO: 54555 - DNA, 25 bp, Homo sapien
cggctcttagagtgcttaatgtgct

SEQ ID NO: 54556 - DNA, 25 bp, Homo sapien
ggttccagcagctcaggctccttcc

SEQ ID NO: 54557 - DNA, 25 bp, Homo sapien
gcctagagaacatatatcgggtgcc

SEQ ID NO: 54558 - DNA, 25 bp, Homo sapien
catggtaacacttgtggggcattcc

SEQ ID NO: 54559 - DNA, 25 bp, Homo sapien
tggcgctttagttgaacccaggtac

SEQ ID NO: 54560 - DNA, 25 bp, Homo sapien
gcatgctgggtaacattgtagactc

SEQ ID NO: 54561 - DNA, 25 bp, Homo sapien
acaaagtgtgcttctctgggtggag

SEQ ID NO: 54562 - DNA, 25 bp, Homo sapien
tgtggccaaaggaacaactccatgt

SEQ ID NO: 54563 - DNA, 25 bp, Homo sapien
acgtttcaggaagttatctcggctc

SEQ ID NO: 54564 - DNA, 25 bp, Homo sapien
attttggcgaattactggaagatgg

SEQ ID NO: 54565 - DNA, 25 bp, Homo sapien
gaattcatagggaataggttccagc

SEQ ID NO: 54566 - DNA, 25 bp, Homo sapien
cggctcttagagtgcttaatgtgct

SEQ ID NO: 54567 - DNA, 25 bp, Homo sapien
gaattcatagggaataggttccagc

SEQ ID NO: 54568 - DNA, 25 bp, Homo sapien
ggttccagcagctcaggctccttcc

SEQ ID NO: 54569 - DNA, 25 bp, Homo sapien
gcctagagaacatatatcgggtgcc

SEQ ID NO: 54570 - DNA, 25 bp, Homo sapien
tggcgctttagttgaacccaggtac

SEQ ID NO: 54571 - DNA, 25 bp, Homo sapien
catggtaacacttgtggggcattcc

SEQ ID NO: 54572 - DNA, 25 bp, Homo sapien
gcatgctgggtaacattgtagactc

SEQ ID NO: 54573 - DNA, 25 bp, Homo sapien
acaaagtgtgcttctctgggtggag

SEQ ID NO: 54574 - DNA, 25 bp, Homo sapien
tgtggccaaaggaacaactccatgt

SEQ ID NO: 54575 - DNA, 25 bp, Homo sapien
acgtttcaggaagttatctcggctc

SEQ ID NO: 54576 - DNA, 25 bp, Homo sapien
attttggcgaattactggaagatgg

SEQ ID NO: 54577 - DNA, 25 bp, Homo sapien
gaattcatagggaataggttccagc

SEQ ID NO: 54578 - DNA, 25 bp, Homo sapien
cggctcttagagtgcttaatgtgct

SEQ ID NO: 54579 - DNA, 25 bp, Homo sapien
ggttccagcagctcaggctccttcc

SEQ ID NO: 54580 - DNA, 25 bp, Homo sapien
gcctagagaacatatatcgggtgcc

SEQ ID NO: 54581 - DNA, 25 bp, Homo sapien
tggcgctttagttgaacccaggtac

SEQ ID NO: 54582 - DNA, 25 bp, Homo sapien
catggtaacacttgtggggcattcc

SEQ ID NO: 54583 - DNA, 25 bp, Homo sapien
gcatgctgggtaacattgtagactc

SEQ ID NO: 54584 - DNA, 25 bp, Homo sapien
acaaagtgtgcttctctgggtggag

SEQ ID NO: 54585 - DNA, 25 bp, Homo sapien
tgtggccaaaggaacaactccatgt

SEQ ID NO: 54586 - DNA, 25 bp, Homo sapien
acgtttcaggaagttatctcggctc

SEQ ID NO: 54587 - DNA, 25 bp, Homo sapien
attttggcgaattactggaagatgg

SEQ ID NO: 54588 - DNA, 25 bp, Homo sapien
cggctcttagagtgcttaatgtgct

SEQ ID NO: 54589 - DNA, 25 bp, Homo sapien
gaattcatagggaataggttccagc

SEQ ID NO: 54590 - DNA, 25 bp, Homo sapien
ggttccagcagctcaggctccttcc

SEQ ID NO: 54591 - DNA, 25 bp, Homo sapien
gcctagagaacatatatcgggtgcc

SEQ ID NO: 54592 - DNA, 25 bp, Homo sapien
tggcgctttagttgaacccaggtac

SEQ ID NO: 54593 - DNA, 25 bp, Homo sapien
catggtaacacttgtggggcattcc

SEQ ID NO: 54594 - DNA, 25 bp, Homo sapien
gcatgctgggtaacattgtagactc

SEQ ID NO: 54595 - DNA, 25 bp, Homo sapien
tgtggccaaaggaacaactccatgt

SEQ ID NO: 54596 - DNA, 25 bp, Homo sapien
acaaagtgtgcttctctgggtggag

SEQ ID NO: 54597 - DNA, 25 bp, Homo sapien
acgtttcaggaagttatctcggctc

SEQ ID NO: 54598 - DNA, 25 bp, Homo sapien
attttggcgaattactggaagatgg

SEQ ID NO: 54599 - DNA, 25 bp, Homo sapien
cggctcttagagtgcttaatgtgct

SEQ ID NO: 54600 - DNA, 25 bp, Homo sapien
attttggcgaattactggaagatgg

SEQ ID NO: 54601 - DNA, 25 bp, Homo sapien
gaattcatagggaataggttccagc

SEQ ID NO: 54602 - DNA, 25 bp, Homo sapien
ggttccagcagctcaggctccttcc

SEQ ID NO: 54603 - DNA, 25 bp, Homo sapien
gcatgctgggtaacattgtagactc

SEQ ID NO: 54604 - DNA, 25 bp, Homo sapien
gcctagagaacatatatcgggtgcc

SEQ ID NO: 54605 - DNA, 25 bp, Homo sapien
tggcgctttagttgaacccaggtac

SEQ ID NO: 54606 - DNA, 25 bp, Homo sapien
acaaagtgtgcttctctgggtggag

SEQ ID NO: 54607 - DNA, 25 bp, Homo sapien
tgtggccaaaggaacaactccatgt

SEQ ID NO: 54608 - DNA, 25 bp, Homo sapien
acgtttcaggaagttatctcggctc

SEQ ID NO: 54609 - DNA, 25 bp, Homo sapien
catggtaacacttgtggggcattcc

SEQ ID NO: 54610 - DNA, 25 bp, Homo sapien
gaattcatagggaataggttccagc

SEQ ID NO: 54611 - DNA, 25 bp, Homo sapien
cggctcttagagtgcttaatgtgct

SEQ ID NO: 54612 - DNA, 25 bp, Homo sapien
ggttccagcagctcaggctccttcc

SEQ ID NO: 54613 - DNA, 25 bp, Homo sapien
gcctagagaacatatatcgggtgcc

SEQ ID NO: 54614 - DNA, 25 bp, Homo sapien
catggtaacacttgtggggcattcc

SEQ ID NO: 54615 - DNA, 25 bp, Homo sapien
tggcgctttagttgaacccaggtac

SEQ ID NO: 54616 - DNA, 25 bp, Homo sapien
gcatgctgggtaacattgtagactc

SEQ ID NO: 54617 - DNA, 25 bp, Homo sapien
tgtggccaaaggaacaactccatgt

SEQ ID NO: 54618 - DNA, 25 bp, Homo sapien
acaaagtgtgcttctctgggtggag

SEQ ID NO: 54619 - DNA, 25 bp, Homo sapien
acgtttcaggaagttatctcggctc

SEQ ID NO: 54620 - DNA, 25 bp, Homo sapien
attttggcgaattactggaagatgg

SEQ ID NO: 54621 - DNA, 25 bp, Homo sapien
attttggcgaattactggaagatgg

SEQ ID NO: 54622 - DNA, 25 bp, Homo sapien
gcctagagaacatatatcgggtgcc

SEQ ID NO: 54623 - DNA, 25 bp, Homo sapien
tgtggccaaaggaacaactccatgt

SEQ ID NO: 54624 - DNA, 25 bp, Homo sapien
catggtaacacttgtggggcattcc

SEQ ID NO: 54625 - DNA, 25 bp, Homo sapien
gcatgctgggtaacattgtagactc

SEQ ID NO: 54626 - DNA, 25 bp, Homo sapien
cggctcttagagtgcttaatgtgct

SEQ ID NO: 54627 - DNA, 25 bp, Homo sapien
acgtttcaggaagttatctcggctc

SEQ ID NO: 54628 - DNA, 25 bp, Homo sapien
tggcgctttagttgaacccaggtac

SEQ ID NO: 54629 - DNA, 25 bp, Homo sapien
acaaagtgtgcttctctgggtggag

SEQ ID NO: 54630 - DNA, 25 bp, Homo sapien
ggttccagcagctcaggctccttcc

SEQ ID NO: 54631 - DNA, 25 bp, Homo sapien
gaattcatagggaataggttccagc

SEQ ID NO: 54632 - DNA, 25 bp, Homo sapien
ggcacccgatatatgttctctaggc

SEQ ID NO: 54633 - DNA, 25 bp, Homo sapien
agcacattaagcactctaagagccg

SEQ ID NO: 54634 - DNA, 25 bp, Homo sapien
ctccacccagagaagcacactttgt

SEQ ID NO: 54635 - DNA, 25 bp, Homo sapien
gagtctacaatgttacccagcatgc

SEQ ID NO: 54636 - DNA, 25 bp, Homo sapien
gtacctgggttcaactaaagcgcca

SEQ ID NO: 54637 - DNA, 25 bp, Homo sapien
acatggagttgttcctttggccaca

SEQ ID NO: 54638 - DNA, 25 bp, Homo sapien
ccatcttccagtaattcgccaaaat

SEQ ID NO: 54639 - DNA, 25 bp, Homo sapien
gagccgagataacttcctgaaacgt

SEQ ID NO: 54640 - DNA, 25 bp, Homo sapien
ggaaggagcctgagctgctggaacc

SEQ ID NO: 54641 - DNA, 25 bp, Homo sapien
gctggaacctattccctatgaattc

SEQ ID NO: 54642 - DNA, 25 bp, Homo sapien
ggaatgccccacaagtgttaccatg

SEQ ID NO: 54643 - DNA, 25 bp, Homo sapien
gaattcatagggaataggttccagc

SEQ ID NO: 54644 - DNA, 25 bp, Homo sapien
cggctcttagagtgcttaatgtgct

SEQ ID NO: 54645 - DNA, 25 bp, Homo sapien
ggttccagcagctcaggctccttcc

SEQ ID NO: 54646 - DNA, 25 bp, Homo sapien
tggcgctttagttgaacccaggtac

SEQ ID NO: 54647 - DNA, 25 bp, Homo sapien
gcctagagaacatatatcgggtgcc

SEQ ID NO: 54648 - DNA, 25 bp, Homo sapien
catggtaacacttgtggggcattcc

SEQ ID NO: 54649 - DNA, 25 bp, Homo sapien
gcatgctgggtaacattgtagactc

SEQ ID NO: 54650 - DNA, 25 bp, Homo sapien
acaaagtgtgcttctctgggtggag

SEQ ID NO: 54651 - DNA, 25 bp, Homo sapien
tgtggccaaaggaacaactccatgt

SEQ ID NO: 54652 - DNA, 25 bp, Homo sapien
acgtttcaggaagttatctcggctc

SEQ ID NO: 54653 - DNA, 25 bp, Homo sapien
attttggcgaattactggaagatgg

SEQ ID NO: 54654 - DNA, 25 bp, Homo sapien
acgtttcaggaagttatctcggctc

SEQ ID NO: 54655 - DNA, 25 bp, Homo sapien
attttggcgaattactggaagatgg

SEQ ID NO: 54656 - DNA, 25 bp, Homo sapien
cggctcttagagtgcttaatgtgct

SEQ ID NO: 54657 - DNA, 25 bp, Homo sapien
gcctagagaacatatatcgggtgcc

SEQ ID NO: 54658 - DNA, 25 bp, Homo sapien
tgtggccaaaggaacaactccatgt

SEQ ID NO: 54659 - DNA, 25 bp, Homo sapien
tggcgctttagttgaacccaggtac

SEQ ID NO: 54660 - DNA, 25 bp, Homo sapien
acaaagtgtgcttctctgggtggag

SEQ ID NO: 54661 - DNA, 25 bp, Homo sapien
gcatgctgggtaacattgtagactc

SEQ ID NO: 54662 - DNA, 25 bp, Homo sapien
gaattcatagggaataggttccagc

SEQ ID NO: 54663 - DNA, 25 bp, Homo sapien
catggtaacacttgtggggcattcc

SEQ ID NO: 54664 - DNA, 25 bp, Homo sapien
ggttccagcagctcaggctccttcc

SEQ ID NO: 54665 - DNA, 25 bp, Homo sapien
attttggcgaattactggaagatgg

SEQ ID NO: 54666 - DNA, 25 bp, Homo sapien
gcctagagaacatatatcgggtgcc

SEQ ID NO: 54667 - DNA, 25 bp, Homo sapien
tgtggccaaaggaacaactccatgt

SEQ ID NO: 54668 - DNA, 25 bp, Homo sapien
catggtaacacttgtggggcattcc

SEQ ID NO: 54669 - DNA, 25 bp, Homo sapien
gcatgctgggtaacattgtagactc

SEQ ID NO: 54670 - DNA, 25 bp, Homo sapien
cggctcttagagtgcttaatgtgct

SEQ ID NO: 54671 - DNA, 25 bp, Homo sapien
acgtttcaggaagttatctcggctc

SEQ ID NO: 54672 - DNA, 25 bp, Homo sapien
tggcgctttagttgaacccaggtac

SEQ ID NO: 54673 - DNA, 25 bp, Homo sapien
acaaagtgtgcttctctgggtggag

SEQ ID NO: 54674 - DNA, 25 bp, Homo sapien
ggttccagcagctcaggctccttcc

SEQ ID NO: 54675 - DNA, 25 bp, Homo sapien
gaattcatagggaataggttccagc

SEQ ID NO: 54676 - DNA, 25 bp, Homo sapien
catggtaacacttgtggggcattcc

SEQ ID NO: 54677 - DNA, 25 bp, Homo sapien
gcatgctgggtaacattgtagactc

SEQ ID NO: 54678 - DNA, 25 bp, Homo sapien
cggctcttagagtgcttaatgtgct

SEQ ID NO: 54679 - DNA, 25 bp, Homo sapien
tgtggccaaaggaacaactccatgt

SEQ ID NO: 54680 - DNA, 25 bp, Homo sapien
gaattcatagggaataggttccagc

SEQ ID NO: 54681 - DNA, 25 bp, Homo sapien
acaaagtgtgcttctctgggtggag

SEQ ID NO: 54682 - DNA, 25 bp, Homo sapien
tggcgctttagttgaacccaggtac

SEQ ID NO: 54683 - DNA, 25 bp, Homo sapien
gcctagagaacatatatcgggtgcc

SEQ ID NO: 54684 - DNA, 25 bp, Homo sapien
acgtttcaggaagttatctcggctc

SEQ ID NO: 54685 - DNA, 25 bp, Homo sapien
ggttccagcagctcaggctccttcc

SEQ ID NO: 54686 - DNA, 25 bp, Homo sapien
attttggcgaattactggaagatgg

SEQ ID NO: 54687 - DNA, 25 bp, Homo sapien
attttggcgaattactggaagatgg

SEQ ID NO: 54688 - DNA, 25 bp, Homo sapien
gcctagagaacatatatcgggtgcc

SEQ ID NO: 54689 - DNA, 25 bp, Homo sapien
tgtggccaaaggaacaactccatgt

SEQ ID NO: 54690 - DNA, 25 bp, Homo sapien
catggtaacacttgtggggcattcc

SEQ ID NO: 54691 - DNA, 25 bp, Homo sapien
gcatgctgggtaacattgtagactc

SEQ ID NO: 54692 - DNA, 25 bp, Homo sapien
cggctcttagagtgcttaatgtgct

SEQ ID NO: 54693 - DNA, 25 bp, Homo sapien
acgtttcaggaagttatctcggctc

SEQ ID NO: 54694 - DNA, 25 bp, Homo sapien
tggcgctttagttgaacccaggtac

SEQ ID NO: 54695 - DNA, 25 bp, Homo sapien
acaaagtgtgcttctctgggtggag

SEQ ID NO: 54696 - DNA, 25 bp, Homo sapien
ggttccagcagctcaggctccttcc

SEQ ID NO: 54697 - DNA, 25 bp, Homo sapien
gaattcatagggaataggttccagc

SEQ ID NO: 54698 - DNA, 25 bp, Homo sapien
acaaagtgtgcttctctgggtggag

SEQ ID NO: 54699 - DNA, 25 bp, Homo sapien
gcctagagaacatatatcgggtgcc

SEQ ID NO: 54700 - DNA, 25 bp, Homo sapien
tggcgctttagttgaacccaggtac

SEQ ID NO: 54701 - DNA, 25 bp, Homo sapien
cggctcttagagtgcttaatgtgct

SEQ ID NO: 54702 - DNA, 25 bp, Homo sapien
catggtaacacttgtggggcattcc

SEQ ID NO: 54703 - DNA, 25 bp, Homo sapien
gcatgctgggtaacattgtagactc

SEQ ID NO: 54704 - DNA, 25 bp, Homo sapien
tgtggccaaaggaacaactccatgt

SEQ ID NO: 54705 - DNA, 25 bp, Homo sapien
gaattcatagggaataggttccagc

SEQ ID NO: 54706 - DNA, 25 bp, Homo sapien
attttggcgaattactggaagatgg

SEQ ID NO: 54707 - DNA, 25 bp, Homo sapien
ggttccagcagctcaggctccttcc

SEQ ID NO: 54708 - DNA, 25 bp, Homo sapien
acgtttcaggaagttatctcggctc

SEQ ID NO: 54709 - DNA, 25 bp, Homo sapien
gcatgctgggtaacattgtagactc

SEQ ID NO: 54710 - DNA, 25 bp, Homo sapien
cggctcttagagtgcttaatgtgct

SEQ ID NO: 54711 - DNA, 25 bp, Homo sapien
acgtttcaggaagttatctcggctc

SEQ ID NO: 54712 - DNA, 25 bp, Homo sapien
tggcgctttagttgaacccaggtac

SEQ ID NO: 54713 - DNA, 25 bp, Homo sapien
acaaagtgtgcttctctgggtggag

SEQ ID NO: 54714 - DNA, 25 bp, Homo sapien
ggttccagcagctcaggctccttcc

SEQ ID NO: 54715 - DNA, 25 bp, Homo sapien
gaattcatagggaataggttccagc

SEQ ID NO: 54716 - DNA, 25 bp, Homo sapien
attttggcgaattactggaagatgg

SEQ ID NO: 54717 - DNA, 25 bp, Homo sapien
gcctagagaacatatatcgggtgcc

SEQ ID NO: 54718 - DNA, 25 bp, Homo sapien
tgtggccaaaggaacaactccatgt

SEQ ID NO: 54719 - DNA, 25 bp, Homo sapien
catggtaacacttgtggggcattcc

SEQ ID NO: 54720 - DNA, 25 bp, Homo sapien
attttggcgaattactggaagatgg

SEQ ID NO: 54721 - DNA, 25 bp, Homo sapien
gcctagagaacatatatcgggtgcc

SEQ ID NO: 54722 - DNA, 25 bp, Homo sapien
tgtggccaaaggaacaactccatgt

SEQ ID NO: 54723 - DNA, 25 bp, Homo sapien
catggtaacacttgtggggcattcc

SEQ ID NO: 54724 - DNA, 25 bp, Homo sapien
gcatgctgggtaacattgtagactc

SEQ ID NO: 54725 - DNA, 25 bp, Homo sapien
cggctcttagagtgcttaatgtgct

SEQ ID NO: 54726 - DNA, 25 bp, Homo sapien
acgtttcaggaagttatctcggctc

SEQ ID NO: 54727 - DNA, 25 bp, Homo sapien
tggcgctttagttgaacccaggtac

SEQ ID NO: 54728 - DNA, 25 bp, Homo sapien
acaaagtgtgcttctctgggtggag

SEQ ID NO: 54729 - DNA, 25 bp, Homo sapien
ggttccagcagctcaggctccttcc

SEQ ID NO: 54730 - DNA, 25 bp, Homo sapien
gaattcatagggaataggttccagc

SEQ ID NO: 54731 - DNA, 25 bp, Homo sapien
tgtggccaaaggaacaactccatgt

SEQ ID NO: 54732 - DNA, 25 bp, Homo sapien
attttggcgaattactggaagatgg

SEQ ID NO: 54733 - DNA, 25 bp, Homo sapien
gcatgctgggtaacattgtagactc

SEQ ID NO: 54734 - DNA, 25 bp, Homo sapien
cggctcttagagtgcttaatgtgct

SEQ ID NO: 54735 - DNA, 25 bp, Homo sapien
ggttccagcagctcaggctccttcc

SEQ ID NO: 54736 - DNA, 25 bp, Homo sapien
catggtaacacttgtggggcattcc

SEQ ID NO: 54737 - DNA, 25 bp, Homo sapien
tggcgctttagttgaacccaggtac

SEQ ID NO: 54738 - DNA, 25 bp, Homo sapien
gcctagagaacatatatcgggtgcc

SEQ ID NO: 54739 - DNA, 25 bp, Homo sapien
acgtttcaggaagttatctcggctc

SEQ ID NO: 54740 - DNA, 25 bp, Homo sapien
gaattcatagggaataggttccagc

SEQ ID NO: 54741 - DNA, 25 bp, Homo sapien
acaaagtgtgcttctctgggtggag

SEQ ID NO: 54742 - DNA, 25 bp, Homo sapien
attttggcgaattactggaagatgg

SEQ ID NO: 54743 - DNA, 25 bp, Homo sapien
gcctagagaacatatatcgggtgcc

SEQ ID NO: 54744 - DNA, 25 bp, Homo sapien
tgtggccaaaggaacaactccatgt

SEQ ID NO: 54745 - DNA, 25 bp, Homo sapien
catggtaacacttgtggggcattcc

SEQ ID NO: 54746 - DNA, 25 bp, Homo sapien
gcatgctgggtaacattgtagactc

SEQ ID NO: 54747 - DNA, 25 bp, Homo sapien
cggctcttagagtgcttaatgtgct

SEQ ID NO: 54748 - DNA, 25 bp, Homo sapien
acgtttcaggaagttatctcggctc

SEQ ID NO: 54749 - DNA, 25 bp, Homo sapien
tggcgctttagttgaacccaggtac

SEQ ID NO: 54750 - DNA, 25 bp, Homo sapien
acaaagtgtgcttctctgggtggag

SEQ ID NO: 54751 - DNA, 25 bp, Homo sapien
ggttccagcagctcaggctccttcc

SEQ ID NO: 54752 - DNA, 25 bp, Homo sapien
gaattcatagggaataggttccagc

SEQ ID NO: 54753 - DNA, 25 bp, Homo sapien
tgtggccaaaggaacaactccatgt

SEQ ID NO: 54754 - DNA, 25 bp, Homo sapien
gcatgctgggtaacattgtagactc

SEQ ID NO: 54755 - DNA, 25 bp, Homo sapien
acaaagtgtgcttctctgggtggag

SEQ ID NO: 54756 - DNA, 25 bp, Homo sapien
gcctagagaacatatatcgggtgcc

SEQ ID NO: 54757 - DNA, 25 bp, Homo sapien
attttggcgaattactggaagatgg

SEQ ID NO: 54758 - DNA, 25 bp, Homo sapien
tggcgctttagttgaacccaggtac

SEQ ID NO: 54759 - DNA, 25 bp, Homo sapien
acgtttcaggaagttatctcggctc

SEQ ID NO: 54760 - DNA, 25 bp, Homo sapien
gaattcatagggaataggttccagc

SEQ ID NO: 54761 - DNA, 25 bp, Homo sapien
ggttccagcagctcaggctccttcc

SEQ ID NO: 54762 - DNA, 25 bp, Homo sapien
catggtaacacttgtggggcattcc

SEQ ID NO: 54763 - DNA, 25 bp, Homo sapien
cggctcttagagtgcttaatgtgct

SEQ ID NO: 54764 - DNA, 25 bp, Homo sapien
attttggcgaattactggaagatgg

SEQ ID NO: 54765 - DNA, 25 bp, Homo sapien
gcctagagaacatatatcgggtgcc

SEQ ID NO: 54766 - DNA, 25 bp, Homo sapien
tgtggccaaaggaacaactccatgt

SEQ ID NO: 54767 - DNA, 25 bp, Homo sapien
catggtaacacttgtggggcattcc

SEQ ID NO: 54768 - DNA, 25 bp, Homo sapien
gcatgctgggtaacattgtagactc

SEQ ID NO: 54769 - DNA, 25 bp, Homo sapien
cggctcttagagtgcttaatgtgct

SEQ ID NO: 54770 - DNA, 25 bp, Homo sapien
acgtttcaggaagttatctcggctc

SEQ ID NO: 54771 - DNA, 25 bp, Homo sapien
tggcgctttagttgaacccaggtac

SEQ ID NO: 54772 - DNA, 25 bp, Homo sapien
acaaagtgtgcttctctgggtggag

SEQ ID NO: 54773 - DNA, 25 bp, Homo sapien
ggttccagcagctcaggctccttcc

SEQ ID NO: 54774 - DNA, 25 bp, Homo sapien
gaattcatagggaataggttccagc

SEQ ID NO: 54775 - DNA, 25 bp, Homo sapien
tgtggccaaaggaacaactccatgt

SEQ ID NO: 54776 - DNA, 25 bp, Homo sapien
gcctagagaacatatatcgggtgcc

SEQ ID NO: 54777 - DNA, 25 bp, Homo sapien
catggtaacacttgtggggcattcc

SEQ ID NO: 54778 - DNA, 25 bp, Homo sapien
acaaagtgtgcttctctgggtggag

SEQ ID NO: 54779 - DNA, 25 bp, Homo sapien
ggttccagcagctcaggctccttcc

SEQ ID NO: 54780 - DNA, 25 bp, Homo sapien
gaattcatagggaataggttccagc

SEQ ID NO: 54781 - DNA, 25 bp, Homo sapien
gcatgctgggtaacattgtagactc

SEQ ID NO: 54782 - DNA, 25 bp, Homo sapien
cggctcttagagtgcttaatgtgct

SEQ ID NO: 54783 - DNA, 25 bp, Homo sapien
tggcgctttagttgaacccaggtac

SEQ ID NO: 54784 - DNA, 25 bp, Homo sapien
attttggcgaattactggaagatgg

SEQ ID NO: 54785 - DNA, 25 bp, Homo sapien
acgtttcaggaagttatctcggctc

SEQ ID NO: 54786 - DNA, 25 bp, Homo sapien
attttggcgaattactggaagatgg

SEQ ID NO: 54787 - DNA, 25 bp, Homo sapien
gcctagagaacatatatcgggtgcc

SEQ ID NO: 54788 - DNA, 25 bp, Homo sapien
tgtggccaaaggaacaactccatgt

SEQ ID NO: 54789 - DNA, 25 bp, Homo sapien
catggtaacacttgtggggcattcc

SEQ ID NO: 54790 - DNA, 25 bp, Homo sapien
gcatgctgggtaacattgtagactc

SEQ ID NO: 54791 - DNA, 25 bp, Homo sapien
cggctcttagagtgcttaatgtgct

SEQ ID NO: 54792 - DNA, 25 bp, Homo sapien
acgtttcaggaagttatctcggctc

SEQ ID NO: 54793 - DNA, 25 bp, Homo sapien
tggcgctttagttgaacccaggtac

SEQ ID NO: 54794 - DNA, 25 bp, Homo sapien
acaaagtgtgcttctctgggtggag

SEQ ID NO: 54795 - DNA, 25 bp, Homo sapien
ggttccagcagctcaggctccttcc

SEQ ID NO: 54796 - DNA, 25 bp, Homo sapien
gaattcatagggaataggttccagc

SEQ ID NO: 54797 - DNA, 25 bp, Homo sapien
gaattcatagggaataggttccagc

SEQ ID NO: 54798 - DNA, 25 bp, Homo sapien
ggttccagcagctcaggctccttcc

SEQ ID NO: 54799 - DNA, 25 bp, Homo sapien
tgtggccaaaggaacaactccatgt

SEQ ID NO: 54800 - DNA, 25 bp, Homo sapien
tggcgctttagttgaacccaggtac

SEQ ID NO: 54801 - DNA, 25 bp, Homo sapien
attttggcgaattactggaagatgg

SEQ ID NO: 54802 - DNA, 25 bp, Homo sapien
gcctagagaacatatatcgggtgcc

SEQ ID NO: 54803 - DNA, 25 bp, Homo sapien
acgtttcaggaagttatctcggctc

SEQ ID NO: 54804 - DNA, 25 bp, Homo sapien
acaaagtgtgcttctctgggtggag

SEQ ID NO: 54805 - DNA, 25 bp, Homo sapien
gcatgctgggtaacattgtagactc

SEQ ID NO: 54806 - DNA, 25 bp, Homo sapien
cggctcttagagtgcttaatgtgct

SEQ ID NO: 54807 - DNA, 25 bp, Homo sapien
catggtaacacttgtggggcattcc

SEQ ID NO: 54808 - DNA, 25 bp, Homo sapien
attttggcgaattactggaagatgg

SEQ ID NO: 54809 - DNA, 25 bp, Homo sapien
gcctagagaacatatatcgggtgcc

SEQ ID NO: 54810 - DNA, 25 bp, Homo sapien
tgtggccaaaggaacaactccatgt

SEQ ID NO: 54811 - DNA, 25 bp, Homo sapien
catggtaacacttgtggggcattcc

SEQ ID NO: 54812 - DNA, 25 bp, Homo sapien
gcatgctgggtaacattgtagactc

SEQ ID NO: 54813 - DNA, 25 bp, Homo sapien
cggctcttagagtgcttaatgtgct

SEQ ID NO: 54814 - DNA, 25 bp, Homo sapien
acgtttcaggaagttatctcggctc

SEQ ID NO: 54815 - DNA, 25 bp, Homo sapien
tggcgctttagttgaacccaggtac

SEQ ID NO: 54816 - DNA, 25 bp, Homo sapien
acaaagtgtgcttctctgggtggag

SEQ ID NO: 54817 - DNA, 25 bp, Homo sapien
ggttccagcagctcaggctccttcc

SEQ ID NO: 54818 - DNA, 25 bp, Homo sapien
gaattcatagggaataggttccagc

SEQ ID NO: 54819 - DNA, 25 bp, Homo sapien
tgtggccaaaggaacaactccatgt

SEQ ID NO: 54820 - DNA, 25 bp, Homo sapien
gcatgctgggtaacattgtagactc

SEQ ID NO: 54821 - DNA, 25 bp, Homo sapien
ggttccagcagctcaggctccttcc

SEQ ID NO: 54822 - DNA, 25 bp, Homo sapien
acgtttcaggaagttatctcggctc

SEQ ID NO: 54823 - DNA, 25 bp, Homo sapien
cggctcttagagtgcttaatgtgct

SEQ ID NO: 54824 - DNA, 25 bp, Homo sapien
tggcgctttagttgaacccaggtac

SEQ ID NO: 54825 - DNA, 25 bp, Homo sapien
attttggcgaattactggaagatgg

SEQ ID NO: 54826 - DNA, 25 bp, Homo sapien
gaattcatagggaataggttccagc

SEQ ID NO: 54827 - DNA, 25 bp, Homo sapien
catggtaacacttgtggggcattcc

SEQ ID NO: 54828 - DNA, 25 bp, Homo sapien
gcctagagaacatatatcgggtgcc

SEQ ID NO: 54829 - DNA, 25 bp, Homo sapien
acaaagtgtgcttctctgggtggag

SEQ ID NO: 54830 - DNA, 25 bp, Homo sapien
attttggcgaattactggaagatgg

SEQ ID NO: 54831 - DNA, 25 bp, Homo sapien
acaaagtgtgcttctctgggtggag

SEQ ID NO: 54832 - DNA, 25 bp, Homo sapien
ggttccagcagctcaggctccttcc

SEQ ID NO: 54833 - DNA, 25 bp, Homo sapien
tggcgctttagttgaacccaggtac

SEQ ID NO: 54834 - DNA, 25 bp, Homo sapien
catggtaacacttgtggggcattcc

SEQ ID NO: 54835 - DNA, 25 bp, Homo sapien
gcctagagaacatatatcgggtgcc

SEQ ID NO: 54836 - DNA, 25 bp, Homo sapien
tgtggccaaaggaacaactccatgt

SEQ ID NO: 54837 - DNA, 25 bp, Homo sapien
gaattcatagggaataggttccagc

SEQ ID NO: 54838 - DNA, 25 bp, Homo sapien
acgtttcaggaagttatctcggctc

SEQ ID NO: 54839 - DNA, 25 bp, Homo sapien
cggctcttagagtgcttaatgtgct

SEQ ID NO: 54840 - DNA, 25 bp, Homo sapien
gcatgctgggtaacattgtagactc

SEQ ID NO: 54841 - DNA, 25 bp, Homo sapien
attttggcgaattactggaagatgg

SEQ ID NO: 54842 - DNA, 25 bp, Homo sapien
gcctagagaacatatatcgggtgcc

SEQ ID NO: 54843 - DNA, 25 bp, Homo sapien
tgtggccaaaggaacaactccatgt

SEQ ID NO: 54844 - DNA, 25 bp, Homo sapien
catggtaacacttgtggggcattcc

SEQ ID NO: 54845 - DNA, 25 bp, Homo sapien
gcatgctgggtaacattgtagactc

SEQ ID NO: 54846 - DNA, 25 bp, Homo sapien
cggctcttagagtgcttaatgtgct

SEQ ID NO: 54847 - DNA, 25 bp, Homo sapien
acgtttcaggaagttatctcggctc

SEQ ID NO: 54848 - DNA, 25 bp, Homo sapien
tggcgctttagttgaacccaggtac

SEQ ID NO: 54849 - DNA, 25 bp, Homo sapien
acaaagtgtgcttctctgggtggag

SEQ ID NO: 54850 - DNA, 25 bp, Homo sapien
ggttccagcagctcaggctccttcc

SEQ ID NO: 54851 - DNA, 25 bp, Homo sapien
gaattcatagggaataggttccagc

SEQ ID NO: 54852 - DNA, 25 bp, Homo sapien
attttggcgaattactggaagatgg

SEQ ID NO: 54853 - DNA, 25 bp, Homo sapien
gcctagagaacatatatcgggtgcc

SEQ ID NO: 54854 - DNA, 25 bp, Homo sapien
catggtaacacttgtggggcattcc

SEQ ID NO: 54855 - DNA, 25 bp, Homo sapien
cggctcttagagtgcttaatgtgct

SEQ ID NO: 54856 - DNA, 25 bp, Homo sapien
acgtttcaggaagttatctcggctc

SEQ ID NO: 54857 - DNA, 25 bp, Homo sapien
tggcgctttagttgaacccaggtac

SEQ ID NO: 54858 - DNA, 25 bp, Homo sapien
tgtggccaaaggaacaactccatgt

SEQ ID NO: 54859 - DNA, 25 bp, Homo sapien
gaattcatagggaataggttccagc

SEQ ID NO: 54860 - DNA, 25 bp, Homo sapien
acaaagtgtgcttctctgggtggag

SEQ ID NO: 54861 - DNA, 25 bp, Homo sapien
gcatgctgggtaacattgtagactc

SEQ ID NO: 54862 - DNA, 25 bp, Homo sapien
ggttccagcagctcaggctccttcc

SEQ ID NO: 54863 - DNA, 25 bp, Homo sapien
gcatgctgggtaacattgtagactc

SEQ ID NO: 54864 - DNA, 25 bp, Homo sapien
cggctcttagagtgcttaatgtgct

SEQ ID NO: 54865 - DNA, 25 bp, Homo sapien
acgtttcaggaagttatctcggctc

SEQ ID NO: 54866 - DNA, 25 bp, Homo sapien
tggcgctttagttgaacccaggtac

SEQ ID NO: 54867 - DNA, 25 bp, Homo sapien
acaaagtgtgcttctctgggtggag

SEQ ID NO: 54868 - DNA, 25 bp, Homo sapien
ggttccagcagctcaggctccttcc

SEQ ID NO: 54869 - DNA, 25 bp, Homo sapien
gaattcatagggaataggttccagc

SEQ ID NO: 54870 - DNA, 25 bp, Homo sapien
attttggcgaattactggaagatgg

SEQ ID NO: 54871 - DNA, 25 bp, Homo sapien
gcctagagaacatatatcgggtgcc

SEQ ID NO: 54872 - DNA, 25 bp, Homo sapien
tgtggccaaaggaacaactccatgt

SEQ ID NO: 54873 - DNA, 25 bp, Homo sapien
catggtaacacttgtggggcattcc

SEQ ID NO: 54874 - DNA, 25 bp, Homo sapien
gcatgctgggtaacattgtagactc

SEQ ID NO: 54875 - DNA, 25 bp, Homo sapien
tggcgctttagttgaacccaggtac

SEQ ID NO: 54876 - DNA, 25 bp, Homo sapien
attttggcgaattactggaagatgg

SEQ ID NO: 54877 - DNA, 25 bp, Homo sapien
cggctcttagagtgcttaatgtgct

SEQ ID NO: 54878 - DNA, 25 bp, Homo sapien
tgtggccaaaggaacaactccatgt

SEQ ID NO: 54879 - DNA, 25 bp, Homo sapien
ggttccagcagctcaggctccttcc

SEQ ID NO: 54880 - DNA, 25 bp, Homo sapien
acaaagtgtgcttctctgggtggag

SEQ ID NO: 54881 - DNA, 25 bp, Homo sapien
acgtttcaggaagttatctcggctc

SEQ ID NO: 54882 - DNA, 25 bp, Homo sapien
catggtaacacttgtggggcattcc

SEQ ID NO: 54883 - DNA, 25 bp, Homo sapien
gaattcatagggaataggttccagc

SEQ ID NO: 54884 - DNA, 25 bp, Homo sapien
gcctagagaacatatatcgggtgcc

SEQ ID NO: 54885 - DNA, 25 bp, Homo sapien
attttggcgaattactggaagatgg

SEQ ID NO: 54886 - DNA, 25 bp, Homo sapien
gcctagagaacatatatcgggtgcc

SEQ ID NO: 54887 - DNA, 25 bp, Homo sapien
tgtggccaaaggaacaactccatgt

SEQ ID NO: 54888 - DNA, 25 bp, Homo sapien
catggtaacacttgtggggcattcc

SEQ ID NO: 54889 - DNA, 25 bp, Homo sapien
gcatgctgggtaacattgtagactc

SEQ ID NO: 54890 - DNA, 25 bp, Homo sapien
cggctcttagagtgcttaatgtgct

SEQ ID NO: 54891 - DNA, 25 bp, Homo sapien
acgtttcaggaagttatctcggctc

SEQ ID NO: 54892 - DNA, 25 bp, Homo sapien
tggcgctttagttgaacccaggtac

SEQ ID NO: 54893 - DNA, 25 bp, Homo sapien
acaaagtgtgcttctctgggtggag

SEQ ID NO: 54894 - DNA, 25 bp, Homo sapien
ggttccagcagctcaggctccttcc

SEQ ID NO: 54895 - DNA, 25 bp, Homo sapien
gaattcatagggaataggttccagc

SEQ ID NO: 54896 - DNA, 25 bp, Homo sapien
gcctagagaacatatatcgggtgcc

SEQ ID NO: 54897 - DNA, 25 bp, Homo sapien
cggctcttagagtgcttaatgtgct

SEQ ID NO: 54898 - DNA, 25 bp, Homo sapien
acgtttcaggaagttatctcggctc

SEQ ID NO: 54899 - DNA, 25 bp, Homo sapien
attttggcgaattactggaagatgg

SEQ ID NO: 54900 - DNA, 25 bp, Homo sapien
tgtggccaaaggaacaactccatgt

SEQ ID NO: 54901 - DNA, 25 bp, Homo sapien
gcatgctgggtaacattgtagactc

SEQ ID NO: 54902 - DNA, 25 bp, Homo sapien
ggttccagcagctcaggctccttcc

SEQ ID NO: 54903 - DNA, 25 bp, Homo sapien
gaattcatagggaataggttccagc

SEQ ID NO: 54904 - DNA, 25 bp, Homo sapien
tggcgctttagttgaacccaggtac

SEQ ID NO: 54905 - DNA, 25 bp, Homo sapien
catggtaacacttgtggggcattcc

SEQ ID NO: 54906 - DNA, 25 bp, Homo sapien
acaaagtgtgcttctctgggtggag

SEQ ID NO: 54907 - DNA, 25 bp, Homo sapien
attttggcgaattactggaagatgg

SEQ ID NO: 54908 - DNA, 25 bp, Homo sapien
gcctagagaacatatatcgggtgcc

SEQ ID NO: 54909 - DNA, 25 bp, Homo sapien
tgtggccaaaggaacaactccatgt

SEQ ID NO: 54910 - DNA, 25 bp, Homo sapien
catggtaacacttgtggggcattcc

SEQ ID NO: 54911 - DNA, 25 bp, Homo sapien
gcatgctgggtaacattgtagactc

SEQ ID NO: 54912 - DNA, 25 bp, Homo sapien
cggctcttagagtgcttaatgtgct

SEQ ID NO: 54913 - DNA, 25 bp, Homo sapien
acgtttcaggaagttatctcggctc

SEQ ID NO: 54914 - DNA, 25 bp, Homo sapien
tggcgctttagttgaacccaggtac

SEQ ID NO: 54915 - DNA, 25 bp, Homo sapien
acaaagtgtgcttctctgggtggag

SEQ ID NO: 54916 - DNA, 25 bp, Homo sapien
ggttccagcagctcaggctccttcc

SEQ ID NO: 54917 - DNA, 25 bp, Homo sapien
gaattcatagggaataggttccagc

SEQ ID NO: 54918 - DNA, 25 bp, Homo sapien
catggtaacacttgtggggcattcc

SEQ ID NO: 54919 - DNA, 25 bp, Homo sapien
tggcgctttagttgaacccaggtac

SEQ ID NO: 54920 - DNA, 25 bp, Homo sapien
attttggcgaattactggaagatgg

SEQ ID NO: 54921 - DNA, 25 bp, Homo sapien
cggctcttagagtgcttaatgtgct

SEQ ID NO: 54922 - DNA, 25 bp, Homo sapien
ggttccagcagctcaggctccttcc

SEQ ID NO: 54923 - DNA, 25 bp, Homo sapien
gcatgctgggtaacattgtagactc

SEQ ID NO: 54924 - DNA, 25 bp, Homo sapien
gcctagagaacatatatcgggtgcc

SEQ ID NO: 54925 - DNA, 25 bp, Homo sapien
gaattcatagggaataggttccagc

SEQ ID NO: 54926 - DNA, 25 bp, Homo sapien
acgtttcaggaagttatctcggctc

SEQ ID NO: 54927 - DNA, 25 bp, Homo sapien
tgtggccaaaggaacaactccatgt

SEQ ID NO: 54928 - DNA, 25 bp, Homo sapien
acaaagtgtgcttctctgggtggag

SEQ ID NO: 54929 - DNA, 25 bp, Homo sapien
attttggcgaattactggaagatgg

SEQ ID NO: 54930 - DNA, 25 bp, Homo sapien
gcctagagaacatatatcgggtgcc

SEQ ID NO: 54931 - DNA, 25 bp, Homo sapien
tgtggccaaaggaacaactccatgt

SEQ ID NO: 54932 - DNA, 25 bp, Homo sapien
catggtaacacttgtggggcattcc

SEQ ID NO: 54933 - DNA, 25 bp, Homo sapien
gcatgctgggtaacattgtagactc

SEQ ID NO: 54934 - DNA, 25 bp, Homo sapien
cggctcttagagtgcttaatgtgct

SEQ ID NO: 54935 - DNA, 25 bp, Homo sapien
acgtttcaggaagttatctcggctc

SEQ ID NO: 54936 - DNA, 25 bp, Homo sapien
tggcgctttagttgaacccaggtac

SEQ ID NO: 54937 - DNA, 25 bp, Homo sapien
acaaagtgtgcttctctgggtggag

SEQ ID NO: 54938 - DNA, 25 bp, Homo sapien
ggttccagcagctcaggctccttcc

SEQ ID NO: 54939 - DNA, 25 bp, Homo sapien
gaattcatagggaataggttccagc

SEQ ID NO: 54940 - DNA, 25 bp, Homo sapien
acaaagtgtgcttctctgggtggag

SEQ ID NO: 54941 - DNA, 25 bp, Homo sapien
ggttccagcagctcaggctccttcc

SEQ ID NO: 54942 - DNA, 25 bp, Homo sapien
catggtaacacttgtggggcattcc

SEQ ID NO: 54943 - DNA, 25 bp, Homo sapien
tgtggccaaaggaacaactccatgt

SEQ ID NO: 54944 - DNA, 25 bp, Homo sapien
gaattcatagggaataggttccagc

SEQ ID NO: 54945 - DNA, 25 bp, Homo sapien
gcctagagaacatatatcgggtgcc

SEQ ID NO: 54946 - DNA, 25 bp, Homo sapien
tggcgctttagttgaacccaggtac

SEQ ID NO: 54947 - DNA, 25 bp, Homo sapien
acgtttcaggaagttatctcggctc

SEQ ID NO: 54948 - DNA, 25 bp, Homo sapien
gcatgctgggtaacattgtagactc

SEQ ID NO: 54949 - DNA, 25 bp, Homo sapien
cggctcttagagtgcttaatgtgct

SEQ ID NO: 54950 - DNA, 25 bp, Homo sapien
attttggcgaattactggaagatgg

SEQ ID NO: 54951 - DNA, 25 bp, Homo sapien
attttggcgaattactggaagatgg

SEQ ID NO: 54952 - DNA, 25 bp, Homo sapien
gcctagagaacatatatcgggtgcc

SEQ ID NO: 54953 - DNA, 25 bp, Homo sapien
tgtggccaaaggaacaactccatgt

SEQ ID NO: 54954 - DNA, 25 bp, Homo sapien
catggtaacacttgtggggcattcc

SEQ ID NO: 54955 - DNA, 25 bp, Homo sapien
gcatgctgggtaacattgtagactc

SEQ ID NO: 54956 - DNA, 25 bp, Homo sapien
cggctcttagagtgcttaatgtgct

SEQ ID NO: 54957 - DNA, 25 bp, Homo sapien
acgtttcaggaagttatctcggctc

SEQ ID NO: 54958 - DNA, 25 bp, Homo sapien
tggcgctttagttgaacccaggtac

SEQ ID NO: 54959 - DNA, 25 bp, Homo sapien
acaaagtgtgcttctctgggtggag

SEQ ID NO: 54960 - DNA, 25 bp, Homo sapien
ggttccagcagctcaggctccttcc

SEQ ID NO: 54961 - DNA, 25 bp, Homo sapien
gaattcatagggaataggttccagc

SEQ ID NO: 54962 - DNA, 25 bp, Homo sapien
attttggcgaattactggaagatgg

SEQ ID NO: 54963 - DNA, 25 bp, Homo sapien
gcctagagaacatatatcgggtgcc

SEQ ID NO: 54964 - DNA, 25 bp, Homo sapien
tgtggccaaaggaacaactccatgt

SEQ ID NO: 54965 - DNA, 25 bp, Homo sapien
catggtaacacttgtggggcattcc

SEQ ID NO: 54966 - DNA, 25 bp, Homo sapien
gcatgctgggtaacattgtagactc

SEQ ID NO: 54967 - DNA, 25 bp, Homo sapien
cggctcttagagtgcttaatgtgct

SEQ ID NO: 54968 - DNA, 25 bp, Homo sapien
acgtttcaggaagttatctcggctc

SEQ ID NO: 54969 - DNA, 25 bp, Homo sapien
tggcgctttagttgaacccaggtac

SEQ ID NO: 54970 - DNA, 25 bp, Homo sapien
acaaagtgtgcttctctgggtggag

SEQ ID NO: 54971 - DNA, 25 bp, Homo sapien
ggttccagcagctcaggctccttcc

SEQ ID NO: 54972 - DNA, 25 bp, Homo sapien
gaattcatagggaataggttccagc

SEQ ID NO: 54973 - DNA, 25 bp, Homo sapien
tgtggccaaaggaacaactccatgt

SEQ ID NO: 54974 - DNA, 25 bp, Homo sapien
acaaagtgtgcttctctgggtggag

SEQ ID NO: 54975 - DNA, 25 bp, Homo sapien
gaattcatagggaataggttccagc

SEQ ID NO: 54976 - DNA, 25 bp, Homo sapien
acgtttcaggaagttatctcggctc

SEQ ID NO: 54977 - DNA, 25 bp, Homo sapien
catggtaacacttgtggggcattcc

SEQ ID NO: 54978 - DNA, 25 bp, Homo sapien
ggttccagcagctcaggctccttcc

SEQ ID NO: 54979 - DNA, 25 bp, Homo sapien
cggctcttagagtgcttaatgtgct

SEQ ID NO: 54980 - DNA, 25 bp, Homo sapien
gcatgctgggtaacattgtagactc

SEQ ID NO: 54981 - DNA, 25 bp, Homo sapien
attttggcgaattactggaagatgg

SEQ ID NO: 54982 - DNA, 25 bp, Homo sapien
gcctagagaacatatatcgggtgcc

SEQ ID NO: 54983 - DNA, 25 bp, Homo sapien
tggcgctttagttgaacccaggtac

SEQ ID NO: 54984 - DNA, 25 bp, Homo sapien
attttggcgaattactggaagatgg

SEQ ID NO: 54985 - DNA, 25 bp, Homo sapien
gcctagagaacatatatcgggtgcc

SEQ ID NO: 54986 - DNA, 25 bp, Homo sapien
tgtggccaaaggaacaactccatgt

SEQ ID NO: 54987 - DNA, 25 bp, Homo sapien
catggtaacacttgtggggcattcc

SEQ ID NO: 54988 - DNA, 25 bp, Homo sapien
gcatgctgggtaacattgtagactc

SEQ ID NO: 54989 - DNA, 25 bp, Homo sapien
cggctcttagagtgcttaatgtgct

SEQ ID NO: 54990 - DNA, 25 bp, Homo sapien
acgtttcaggaagttatctcggctc

SEQ ID NO: 54991 - DNA, 25 bp, Homo sapien
tggcgctttagttgaacccaggtac

SEQ ID NO: 54992 - DNA, 25 bp, Homo sapien
acaaagtgtgcttctctgggtggag

SEQ ID NO: 54993 - DNA, 25 bp, Homo sapien
ggttccagcagctcaggctccttcc

SEQ ID NO: 54994 - DNA, 25 bp, Homo sapien
gaattcatagggaataggttccagc

SEQ ID NO: 54995 - DNA, 25 bp, Homo sapien
catggtaacacttgtggggcattcc

SEQ ID NO: 54996 - DNA, 25 bp, Homo sapien
tgtggccaaaggaacaactccatgt

SEQ ID NO: 54997 - DNA, 25 bp, Homo sapien
cggctcttagagtgcttaatgtgct

SEQ ID NO: 54998 - DNA, 25 bp, Homo sapien
attttggcgaattactggaagatgg

SEQ ID NO: 54999 - DNA, 25 bp, Homo sapien
gcctagagaacatatatcgggtgcc

SEQ ID NO: 55000 - DNA, 25 bp, Homo sapien
gaattcatagggaataggttccagc

SEQ ID NO: 55001 - DNA, 25 bp, Homo sapien
ggttccagcagctcaggctccttcc

SEQ ID NO: 55002 - DNA, 25 bp, Homo sapien
tggcgctttagttgaacccaggtac

SEQ ID NO: 55003 - DNA, 25 bp, Homo sapien
acgtttcaggaagttatctcggctc

SEQ ID NO: 55004 - DNA, 25 bp, Homo sapien
gcatgctgggtaacattgtagactc

SEQ ID NO: 55005 - DNA, 25 bp, Homo sapien
acaaagtgtgcttctctgggtggag

SEQ ID NO: 55006 - DNA, 25 bp, Homo sapien
attttggcgaattactggaagatgg

SEQ ID NO: 55007 - DNA, 25 bp, Homo sapien
gcctagagaacatatatcgggtgcc

SEQ ID NO: 55008 - DNA, 25 bp, Homo sapien
tgtggccaaaggaacaactccatgt

SEQ ID NO: 55009 - DNA, 25 bp, Homo sapien
catggtaacacttgtggggcattcc

SEQ ID NO: 55010 - DNA, 25 bp, Homo sapien
gcatgctgggtaacattgtagactc

SEQ ID NO: 55011 - DNA, 25 bp, Homo sapien
cggctcttagagtgcttaatgtgct

SEQ ID NO: 55012 - DNA, 25 bp, Homo sapien
acgtttcaggaagttatctcggctc

SEQ ID NO: 55013 - DNA, 25 bp, Homo sapien
tggcgctttagttgaacccaggtac

SEQ ID NO: 55014 - DNA, 25 bp, Homo sapien
acaaagtgtgcttctctgggtggag

SEQ ID NO: 55015 - DNA, 25 bp, Homo sapien
ggttccagcagctcaggctccttcc

SEQ ID NO: 55016 - DNA, 25 bp, Homo sapien
gaattcatagggaataggttccagc

SEQ ID NO: 55017 - DNA, 25 bp, Homo sapien
gcctagagaacatatatcgggtgcc

SEQ ID NO: 55018 - DNA, 25 bp, Homo sapien
acgtttcaggaagttatctcggctc

SEQ ID NO: 55019 - DNA, 25 bp, Homo sapien
catggtaacacttgtggggcattcc

SEQ ID NO: 55020 - DNA, 25 bp, Homo sapien
cggctcttagagtgcttaatgtgct

SEQ ID NO: 55021 - DNA, 25 bp, Homo sapien
attttggcgaattactggaagatgg

SEQ ID NO: 55022 - DNA, 25 bp, Homo sapien
gaattcatagggaataggttccagc

SEQ ID NO: 55023 - DNA, 25 bp, Homo sapien
ggttccagcagctcaggctccttcc

SEQ ID NO: 55024 - DNA, 25 bp, Homo sapien
tggcgctttagttgaacccaggtac

SEQ ID NO: 55025 - DNA, 25 bp, Homo sapien
gcatgctgggtaacattgtagactc

SEQ ID NO: 55026 - DNA, 25 bp, Homo sapien
tgtggccaaaggaacaactccatgt

SEQ ID NO: 55027 - DNA, 25 bp, Homo sapien
acaaagtgtgcttctctgggtggag

SEQ ID NO: 55028 - DNA, 25 bp, Homo sapien
attttggcgaattactggaagatgg

SEQ ID NO: 55029 - DNA, 25 bp, Homo sapien
gcctagagaacatatatcgggtgcc

SEQ ID NO: 55030 - DNA, 25 bp, Homo sapien
tgtggccaaaggaacaactccatgt

SEQ ID NO: 55031 - DNA, 25 bp, Homo sapien
catggtaacacttgtggggcattcc

SEQ ID NO: 55032 - DNA, 25 bp, Homo sapien
gcatgctgggtaacattgtagactc

SEQ ID NO: 55033 - DNA, 25 bp, Homo sapien
cggctcttagagtgcttaatgtgct

SEQ ID NO: 55034 - DNA, 25 bp, Homo sapien
acgtttcaggaagttatctcggctc

SEQ ID NO: 55035 - DNA, 25 bp, Homo sapien
tggcgctttagttgaacccaggtac

SEQ ID NO: 55036 - DNA, 25 bp, Homo sapien
acaaagtgtgcttctctgggtggag

SEQ ID NO: 55037 - DNA, 25 bp, Homo sapien
ggttccagcagctcaggctccttcc

SEQ ID NO: 55038 - DNA, 25 bp, Homo sapien
gaattcatagggaataggttccagc

SEQ ID NO: 55039 - DNA, 25 bp, Homo sapien
tggcgctttagttgaacccaggtac

SEQ ID NO: 55040 - DNA, 25 bp, Homo sapien
cggctcttagagtgcttaatgtgct

SEQ ID NO: 55041 - DNA, 25 bp, Homo sapien
gcctagagaacatatatcgggtgcc

SEQ ID NO: 55042 - DNA, 25 bp, Homo sapien
attttggcgaattactggaagatgg

SEQ ID NO: 55043 - DNA, 25 bp, Homo sapien
gcatgctgggtaacattgtagactc

SEQ ID NO: 55044 - DNA, 25 bp, Homo sapien
tgtggccaaaggaacaactccatgt

SEQ ID NO: 55045 - DNA, 25 bp, Homo sapien
ggttccagcagctcaggctccttcc

SEQ ID NO: 55046 - DNA, 25 bp, Homo sapien
acgtttcaggaagttatctcggctc

SEQ ID NO: 55047 - DNA, 25 bp, Homo sapien
catggtaacacttgtggggcattcc

SEQ ID NO: 55048 - DNA, 25 bp, Homo sapien
gaattcatagggaataggttccagc

SEQ ID NO: 55049 - DNA, 25 bp, Homo sapien
acaaagtgtgcttctctgggtggag

SEQ ID NO: 55050 - DNA, 25 bp, Homo sapien
attttggcgaattactggaagatgg

SEQ ID NO: 55051 - DNA, 25 bp, Homo sapien
gcctagagaacatatatcgggtgcc

SEQ ID NO: 55052 - DNA, 25 bp, Homo sapien
tgtggccaaaggaacaactccatgt

SEQ ID NO: 55053 - DNA, 25 bp, Homo sapien
catggtaacacttgtggggcattcc

SEQ ID NO: 55054 - DNA, 25 bp, Homo sapien
gcatgctgggtaacattgtagactc

SEQ ID NO: 55055 - DNA, 25 bp, Homo sapien
cggctcttagagtgcttaatgtgct

SEQ ID NO: 55056 - DNA, 25 bp, Homo sapien
acgtttcaggaagttatctcggctc

SEQ ID NO: 55057 - DNA, 25 bp, Homo sapien
tggcgctttagttgaacccaggtac

SEQ ID NO: 55058 - DNA, 25 bp, Homo sapien
acaaagtgtgcttctctgggtggag

SEQ ID NO: 55059 - DNA, 25 bp, Homo sapien
ggttccagcagctcaggctccttcc

SEQ ID NO: 55060 - DNA, 25 bp, Homo sapien
gaattcatagggaataggttccagc

SEQ ID NO: 55061 - DNA, 25 bp, Homo sapien
catggtaacacttgtggggcattcc

SEQ ID NO: 55062 - DNA, 25 bp, Homo sapien
gcctagagaacatatatcgggtgcc

SEQ ID NO: 55063 - DNA, 25 bp, Homo sapien
acgtttcaggaagttatctcggctc

SEQ ID NO: 55064 - DNA, 25 bp, Homo sapien
acaaagtgtgcttctctgggtggag

SEQ ID NO: 55065 - DNA, 25 bp, Homo sapien
ggttccagcagctcaggctccttcc

SEQ ID NO: 55066 - DNA, 25 bp, Homo sapien
tgtggccaaaggaacaactccatgt

SEQ ID NO: 55067 - DNA, 25 bp, Homo sapien
tggcgctttagttgaacccaggtac

SEQ ID NO: 55068 - DNA, 25 bp, Homo sapien
gcatgctgggtaacattgtagactc

SEQ ID NO: 55069 - DNA, 25 bp, Homo sapien
attttggcgaattactggaagatgg

SEQ ID NO: 55070 - DNA, 25 bp, Homo sapien
gaattcatagggaataggttccagc

SEQ ID NO: 55071 - DNA, 25 bp, Homo sapien
cggctcttagagtgcttaatgtgct

SEQ ID NO: 55072 - DNA, 25 bp, Homo sapien
tggcgctttagttgaacccaggtac

SEQ ID NO: 55073 - DNA, 25 bp, Homo sapien
cggctcttagagtgcttaatgtgct

SEQ ID NO: 55074 - DNA, 25 bp, Homo sapien
ggttccagcagctcaggctccttcc

SEQ ID NO: 55075 - DNA, 25 bp, Homo sapien
tgtggccaaaggaacaactccatgt

SEQ ID NO: 55076 - DNA, 25 bp, Homo sapien
gcatgctgggtaacattgtagactc

SEQ ID NO: 55077 - DNA, 25 bp, Homo sapien
acgtttcaggaagttatctcggctc

SEQ ID NO: 55078 - DNA, 25 bp, Homo sapien
gcctagagaacatatatcgggtgcc

SEQ ID NO: 55079 - DNA, 25 bp, Homo sapien
catggtaacacttgtggggcattcc

SEQ ID NO: 55080 - DNA, 25 bp, Homo sapien
attttggcgaattactggaagatgg

SEQ ID NO: 55081 - DNA, 25 bp, Homo sapien
gaattcatagggaataggttccagc

SEQ ID NO: 55082 - DNA, 25 bp, Homo sapien
acaaagtgtgcttctctgggtggag

SEQ ID NO: 55083 - DNA, 25 bp, Homo sapien
attttggcgaattactggaagatgg

SEQ ID NO: 55084 - DNA, 25 bp, Homo sapien
gcctagagaacatatatcgggtgcc

SEQ ID NO: 55085 - DNA, 25 bp, Homo sapien
tgtggccaaaggaacaactccatgt

SEQ ID NO: 55086 - DNA, 25 bp, Homo sapien
catggtaacacttgtggggcattcc

SEQ ID NO: 55087 - DNA, 25 bp, Homo sapien
gcatgctgggtaacattgtagactc

SEQ ID NO: 55088 - DNA, 25 bp, Homo sapien
cggctcttagagtgcttaatgtgct

SEQ ID NO: 55089 - DNA, 25 bp, Homo sapien
acgtttcaggaagttatctcggctc

SEQ ID NO: 55090 - DNA, 25 bp, Homo sapien
tggcgctttagttgaacccaggtac

SEQ ID NO: 55091 - DNA, 25 bp, Homo sapien
acaaagtgtgcttctctgggtggag

SEQ ID NO: 55092 - DNA, 25 bp, Homo sapien
ggttccagcagctcaggctccttcc

SEQ ID NO: 55093 - DNA, 25 bp, Homo sapien
gaattcatagggaataggttccagc

SEQ ID NO: 55094 - DNA, 25 bp, Homo sapien
tgtggccaaaggaacaactccatgt

SEQ ID NO: 55095 - DNA, 25 bp, Homo sapien
gaattcatagggaataggttccagc

SEQ ID NO: 55096 - DNA, 25 bp, Homo sapien
gcatgctgggtaacattgtagactc

SEQ ID NO: 55097 - DNA, 25 bp, Homo sapien
tggcgctttagttgaacccaggtac

SEQ ID NO: 55098 - DNA, 25 bp, Homo sapien
gcctagagaacatatatcgggtgcc

SEQ ID NO: 55099 - DNA, 25 bp, Homo sapien
acgtttcaggaagttatctcggctc

SEQ ID NO: 55100 - DNA, 25 bp, Homo sapien
catggtaacacttgtggggcattcc

SEQ ID NO: 55101 - DNA, 25 bp, Homo sapien
attttggcgaattactggaagatgg

SEQ ID NO: 55102 - DNA, 25 bp, Homo sapien
acaaagtgtgcttctctgggtggag

SEQ ID NO: 55103 - DNA, 25 bp, Homo sapien
ggttccagcagctcaggctccttcc

SEQ ID NO: 55104 - DNA, 25 bp, Homo sapien
cggctcttagagtgcttaatgtgct

SEQ ID NO: 55105 - DNA, 25 bp, Homo sapien
attttggcgaattactggaagatgg

SEQ ID NO: 55106 - DNA, 25 bp, Homo sapien
gcctagagaacatatatcgggtgcc

SEQ ID NO: 55107 - DNA, 25 bp, Homo sapien
tgtggccaaaggaacaactccatgt

SEQ ID NO: 55108 - DNA, 25 bp, Homo sapien
catggtaacacttgtggggcattcc

SEQ ID NO: 55109 - DNA, 25 bp, Homo sapien
gcatgctgggtaacattgtagactc

SEQ ID NO: 55110 - DNA, 25 bp, Homo sapien
cggctcttagagtgcttaatgtgct

SEQ ID NO: 55111 - DNA, 25 bp, Homo sapien
acgtttcaggaagttatctcggctc

SEQ ID NO: 55112 - DNA, 25 bp, Homo sapien
tggcgctttagttgaacccaggtac

SEQ ID NO: 55113 - DNA, 25 bp, Homo sapien
acaaagtgtgcttctctgggtggag

SEQ ID NO: 55114 - DNA, 25 bp, Homo sapien
ggttccagcagctcaggctccttcc

SEQ ID NO: 55115 - DNA, 25 bp, Homo sapien
gaattcatagggaataggttccagc

SEQ ID NO: 55116 - DNA, 25 bp, Homo sapien
tggcgctttagttgaacccaggtac

SEQ ID NO: 55117 - DNA, 25 bp, Homo sapien
gaattcatagggaataggttccagc

SEQ ID NO: 55118 - DNA, 25 bp, Homo sapien
gcctagagaacatatatcgggtgcc

SEQ ID NO: 55119 - DNA, 25 bp, Homo sapien
gcatgctgggtaacattgtagactc

SEQ ID NO: 55120 - DNA, 25 bp, Homo sapien
acaaagtgtgcttctctgggtggag

SEQ ID NO: 55121 - DNA, 25 bp, Homo sapien
cggctcttagagtgcttaatgtgct

SEQ ID NO: 55122 - DNA, 25 bp, Homo sapien
acgtttcaggaagttatctcggctc

SEQ ID NO: 55123 - DNA, 25 bp, Homo sapien
ggttccagcagctcaggctccttcc

SEQ ID NO: 55124 - DNA, 25 bp, Homo sapien
attttggcgaattactggaagatgg

SEQ ID NO: 55125 - DNA, 25 bp, Homo sapien
tgtggccaaaggaacaactccatgt

SEQ ID NO: 55126 - DNA, 25 bp, Homo sapien
catggtaacacttgtggggcattcc

SEQ ID NO: 55127 - DNA, 25 bp, Homo sapien
attttggcgaattactggaagatgg

SEQ ID NO: 55128 - DNA, 25 bp, Homo sapien
gcctagagaacatatatcgggtgcc

SEQ ID NO: 55129 - DNA, 25 bp, Homo sapien
tgtggccaaaggaacaactccatgt

SEQ ID NO: 55130 - DNA, 25 bp, Homo sapien
catggtaacacttgtggggcattcc

SEQ ID NO: 55131 - DNA, 25 bp, Homo sapien
gcatgctgggtaacattgtagactc

SEQ ID NO: 55132 - DNA, 25 bp, Homo sapien
cggctcttagagtgcttaatgtgct

SEQ ID NO: 55133 - DNA, 25 bp, Homo sapien
acgtttcaggaagttatctcggctc

SEQ ID NO: 55134 - DNA, 25 bp, Homo sapien
tggcgctttagttgaacccaggtac

SEQ ID NO: 55135 - DNA, 25 bp, Homo sapien
acaaagtgtgcttctctgggtggag

SEQ ID NO: 55136 - DNA, 25 bp, Homo sapien
ggttccagcagctcaggctccttcc

SEQ ID NO: 55137 - DNA, 25 bp, Homo sapien
gaattcatagggaataggttccagc

SEQ ID NO: 55138 - DNA, 25 bp, Homo sapien
tatcagcaagagatgcaccagtaat

SEQ ID NO: 55139 - DNA, 25 bp, Homo sapien
acagctccacggaaagacaaaagat

SEQ ID NO: 55140 - DNA, 25 bp, Homo sapien
cccgctaaaactgcacagctcgacc

SEQ ID NO: 55141 - DNA, 25 bp, Homo sapien
ccagtttatctgccgaggattcctc

SEQ ID NO: 55142 - DNA, 25 bp, Homo sapien
gaaaggaaagccgactcgcatttcg

SEQ ID NO: 55143 - DNA, 25 bp, Homo sapien
agtaatggccctctggaatttgact

SEQ ID NO: 55144 - DNA, 25 bp, Homo sapien
aatttgactgctcggcgggttcttt

SEQ ID NO: 55145 - DNA, 25 bp, Homo sapien
tctgtagaggacagtccagtttatc

SEQ ID NO: 55146 - DNA, 25 bp, Homo sapien
gctcgaccttcatggcgacagctcc

SEQ ID NO: 55147 - DNA, 25 bp, Homo sapien
agcagccctgatagcttgttctcgt

SEQ ID NO: 55148 - DNA, 25 bp, Homo sapien
tgtccggggtagatcttgtacccgc

SEQ ID NO: 55149 - DNA, 25 bp, Homo sapien
acagctccacggaaagacaaaagat

SEQ ID NO: 55150 - DNA, 25 bp, Homo sapien
gctcgaccttcatggcgacagctcc

SEQ ID NO: 55151 - DNA, 25 bp, Homo sapien
cccgctaaaactgcacagctcgacc

SEQ ID NO: 55152 - DNA, 25 bp, Homo sapien
tgtccggggtagatcttgtacccgc

SEQ ID NO: 55153 - DNA, 25 bp, Homo sapien
gaaaggaaagccgactcgcatttcg

SEQ ID NO: 55154 - DNA, 25 bp, Homo sapien
ccagtttatctgccgaggattcctc

SEQ ID NO: 55155 - DNA, 25 bp, Homo sapien
tctgtagaggacagtccagtttatc

SEQ ID NO: 55156 - DNA, 25 bp, Homo sapien
aatttgactgctcggcgggttcttt

SEQ ID NO: 55157 - DNA, 25 bp, Homo sapien
agtaatggccctctggaatttgact

SEQ ID NO: 55158 - DNA, 25 bp, Homo sapien
tatcagcaagagatgcaccagtaat

SEQ ID NO: 55159 - DNA, 25 bp, Homo sapien
agcagccctgatagcttgttctcgt

SEQ ID NO: 55160 - DNA, 25 bp, Homo sapien
ccagtttatctgccgaggattcctc

SEQ ID NO: 55161 - DNA, 25 bp, Homo sapien
gaaaggaaagccgactcgcatttcg

SEQ ID NO: 55162 - DNA, 25 bp, Homo sapien
cccgctaaaactgcacagctcgacc

SEQ ID NO: 55163 - DNA, 25 bp, Homo sapien
aatttgactgctcggcgggttcttt

SEQ ID NO: 55164 - DNA, 25 bp, Homo sapien
tgtccggggtagatcttgtacccgc

SEQ ID NO: 55165 - DNA, 25 bp, Homo sapien
tatcagcaagagatgcaccagtaat

SEQ ID NO: 55166 - DNA, 25 bp, Homo sapien
gctcgaccttcatggcgacagctcc

SEQ ID NO: 55167 - DNA, 25 bp, Homo sapien
tctgtagaggacagtccagtttatc

SEQ ID NO: 55168 - DNA, 25 bp, Homo sapien
agtaatggccctctggaatttgact

SEQ ID NO: 55169 - DNA, 25 bp, Homo sapien
agcagccctgatagcttgttctcgt

SEQ ID NO: 55170 - DNA, 25 bp, Homo sapien
acagctccacggaaagacaaaagat

SEQ ID NO: 55171 - DNA, 25 bp, Homo sapien
acagctccacggaaagacaaaagat

SEQ ID NO: 55172 - DNA, 25 bp, Homo sapien
gctcgaccttcatggcgacagctcc

SEQ ID NO: 55173 - DNA, 25 bp, Homo sapien
cccgctaaaactgcacagctcgacc

SEQ ID NO: 55174 - DNA, 25 bp, Homo sapien
tgtccggggtagatcttgtacccgc

SEQ ID NO: 55175 - DNA, 25 bp, Homo sapien
gaaaggaaagccgactcgcatttcg

SEQ ID NO: 55176 - DNA, 25 bp, Homo sapien
ccagtttatctgccgaggattcctc

SEQ ID NO: 55177 - DNA, 25 bp, Homo sapien
tctgtagaggacagtccagtttatc

SEQ ID NO: 55178 - DNA, 25 bp, Homo sapien
aatttgactgctcggcgggttcttt

SEQ ID NO: 55179 - DNA, 25 bp, Homo sapien
agtaatggccctctggaatttgact

SEQ ID NO: 55180 - DNA, 25 bp, Homo sapien
tatcagcaagagatgcaccagtaat

SEQ ID NO: 55181 - DNA, 25 bp, Homo sapien
agcagccctgatagcttgttctcgt

SEQ ID NO: 55182 - DNA, 25 bp, Homo sapien
gctcgaccttcatggcgacagctcc

SEQ ID NO: 55183 - DNA, 25 bp, Homo sapien
tatcagcaagagatgcaccagtaat

SEQ ID NO: 55184 - DNA, 25 bp, Homo sapien
ccagtttatctgccgaggattcctc

SEQ ID NO: 55185 - DNA, 25 bp, Homo sapien
tgtccggggtagatcttgtacccgc

SEQ ID NO: 55186 - DNA, 25 bp, Homo sapien
gaaaggaaagccgactcgcatttcg

SEQ ID NO: 55187 - DNA, 25 bp, Homo sapien
cccgctaaaactgcacagctcgacc

SEQ ID NO: 55188 - DNA, 25 bp, Homo sapien
tctgtagaggacagtccagtttatc

SEQ ID NO: 55189 - DNA, 25 bp, Homo sapien
acagctccacggaaagacaaaagat

SEQ ID NO: 55190 - DNA, 25 bp, Homo sapien
aatttgactgctcggcgggttcttt

SEQ ID NO: 55191 - DNA, 25 bp, Homo sapien
agtaatggccctctggaatttgact

SEQ ID NO: 55192 - DNA, 25 bp, Homo sapien
agcagccctgatagcttgttctcgt

SEQ ID NO: 55193 - DNA, 25 bp, Homo sapien
acagctccacggaaagacaaaagat

SEQ ID NO: 55194 - DNA, 25 bp, Homo sapien
gctcgaccttcatggcgacagctcc

SEQ ID NO: 55195 - DNA, 25 bp, Homo sapien
cccgctaaaactgcacagctcgacc

SEQ ID NO: 55196 - DNA, 25 bp, Homo sapien
tgtccggggtagatcttgtacccgc

SEQ ID NO: 55197 - DNA, 25 bp, Homo sapien
gaaaggaaagccgactcgcatttcg

SEQ ID NO: 55198 - DNA, 25 bp, Homo sapien
ccagtttatctgccgaggattcctc

SEQ ID NO: 55199 - DNA, 25 bp, Homo sapien
tctgtagaggacagtccagtttatc

SEQ ID NO: 55200 - DNA, 25 bp, Homo sapien
aatttgactgctcggcgggttcttt

SEQ ID NO: 55201 - DNA, 25 bp, Homo sapien
agtaatggccctctggaatttgact

SEQ ID NO: 55202 - DNA, 25 bp, Homo sapien
tatcagcaagagatgcaccagtaat

SEQ ID NO: 55203 - DNA, 25 bp, Homo sapien
agcagccctgatagcttgttctcgt

SEQ ID NO: 55204 - DNA, 25 bp, Homo sapien
acagctccacggaaagacaaaagat

SEQ ID NO: 55205 - DNA, 25 bp, Homo sapien
gctcgaccttcatggcgacagctcc

SEQ ID NO: 55206 - DNA, 25 bp, Homo sapien
cccgctaaaactgcacagctcgacc

SEQ ID NO: 55207 - DNA, 25 bp, Homo sapien
tgtccggggtagatcttgtacccgc

SEQ ID NO: 55208 - DNA, 25 bp, Homo sapien
gaaaggaaagccgactcgcatttcg

SEQ ID NO: 55209 - DNA, 25 bp, Homo sapien
ccagtttatctgccgaggattcctc

SEQ ID NO: 55210 - DNA, 25 bp, Homo sapien
tctgtagaggacagtccagtttatc

SEQ ID NO: 55211 - DNA, 25 bp, Homo sapien
aatttgactgctcggcgggttcttt

SEQ ID NO: 55212 - DNA, 25 bp, Homo sapien
agtaatggccctctggaatttgact

SEQ ID NO: 55213 - DNA, 25 bp, Homo sapien
tatcagcaagagatgcaccagtaat

SEQ ID NO: 55214 - DNA, 25 bp, Homo sapien
agcagccctgatagcttgttctcgt

SEQ ID NO: 55215 - DNA, 25 bp, Homo sapien
acagctccacggaaagacaaaagat

SEQ ID NO: 55216 - DNA, 25 bp, Homo sapien
tctgtagaggacagtccagtttatc

SEQ ID NO: 55217 - DNA, 25 bp, Homo sapien
gaaaggaaagccgactcgcatttcg

SEQ ID NO: 55218 - DNA, 25 bp, Homo sapien
tatcagcaagagatgcaccagtaat

SEQ ID NO: 55219 - DNA, 25 bp, Homo sapien
cccgctaaaactgcacagctcgacc

SEQ ID NO: 55220 - DNA, 25 bp, Homo sapien
tgtccggggtagatcttgtacccgc

SEQ ID NO: 55221 - DNA, 25 bp, Homo sapien
agcagccctgatagcttgttctcgt

SEQ ID NO: 55222 - DNA, 25 bp, Homo sapien
agtaatggccctctggaatttgact

SEQ ID NO: 55223 - DNA, 25 bp, Homo sapien
ccagtttatctgccgaggattcctc

SEQ ID NO: 55224 - DNA, 25 bp, Homo sapien
gctcgaccttcatggcgacagctcc

SEQ ID NO: 55225 - DNA, 25 bp, Homo sapien
aatttgactgctcggcgggttcttt

SEQ ID NO: 55226 - DNA, 25 bp, Homo sapien
acagctccacggaaagacaaaagat

SEQ ID NO: 55227 - DNA, 25 bp, Homo sapien
gctcgaccttcatggcgacagctcc

SEQ ID NO: 55228 - DNA, 25 bp, Homo sapien
cccgctaaaactgcacagctcgacc

SEQ ID NO: 55229 - DNA, 25 bp, Homo sapien
tgtccggggtagatcttgtacccgc

SEQ ID NO: 55230 - DNA, 25 bp, Homo sapien
gaaaggaaagccgactcgcatttcg

SEQ ID NO: 55231 - DNA, 25 bp, Homo sapien
ccagtttatctgccgaggattcctc

SEQ ID NO: 55232 - DNA, 25 bp, Homo sapien
tctgtagaggacagtccagtttatc

SEQ ID NO: 55233 - DNA, 25 bp, Homo sapien
aatttgactgctcggcgggttcttt

SEQ ID NO: 55234 - DNA, 25 bp, Homo sapien
agtaatggccctctggaatttgact

SEQ ID NO: 55235 - DNA, 25 bp, Homo sapien
tatcagcaagagatgcaccagtaat

SEQ ID NO: 55236 - DNA, 25 bp, Homo sapien
agcagccctgatagcttgttctcgt

SEQ ID NO: 55237 - DNA, 25 bp, Homo sapien
gaaaggaaagccgactcgcatttcg

SEQ ID NO: 55238 - DNA, 25 bp, Homo sapien
tatcagcaagagatgcaccagtaat

SEQ ID NO: 55239 - DNA, 25 bp, Homo sapien
ccagtttatctgccgaggattcctc

SEQ ID NO: 55240 - DNA, 25 bp, Homo sapien
tgtccggggtagatcttgtacccgc

SEQ ID NO: 55241 - DNA, 25 bp, Homo sapien
gctcgaccttcatggcgacagctcc

SEQ ID NO: 55242 - DNA, 25 bp, Homo sapien
tctgtagaggacagtccagtttatc

SEQ ID NO: 55243 - DNA, 25 bp, Homo sapien
cccgctaaaactgcacagctcgacc

SEQ ID NO: 55244 - DNA, 25 bp, Homo sapien
agcagccctgatagcttgttctcgt

SEQ ID NO: 55245 - DNA, 25 bp, Homo sapien
agtaatggccctctggaatttgact

SEQ ID NO: 55246 - DNA, 25 bp, Homo sapien
aatttgactgctcggcgggttcttt

SEQ ID NO: 55247 - DNA, 25 bp, Homo sapien
acagctccacggaaagacaaaagat

SEQ ID NO: 55248 - DNA, 25 bp, Homo sapien
acagctccacggaaagacaaaagat

SEQ ID NO: 55249 - DNA, 25 bp, Homo sapien
gctcgaccttcatggcgacagctcc

SEQ ID NO: 55250 - DNA, 25 bp, Homo sapien
cccgctaaaactgcacagctcgacc

SEQ ID NO: 55251 - DNA, 25 bp, Homo sapien
tgtccggggtagatcttgtacccgc

SEQ ID NO: 55252 - DNA, 25 bp, Homo sapien
gaaaggaaagccgactcgcatttcg

SEQ ID NO: 55253 - DNA, 25 bp, Homo sapien
ccagtttatctgccgaggattcctc

SEQ ID NO: 55254 - DNA, 25 bp, Homo sapien
tctgtagaggacagtccagtttatc

SEQ ID NO: 55255 - DNA, 25 bp, Homo sapien
aatttgactgctcggcgggttcttt

SEQ ID NO: 55256 - DNA, 25 bp, Homo sapien
agtaatggccctctggaatttgact

SEQ ID NO: 55257 - DNA, 25 bp, Homo sapien
tatcagcaagagatgcaccagtaat

SEQ ID NO: 55258 - DNA, 25 bp, Homo sapien
agcagccctgatagcttgttctcgt

SEQ ID NO: 55259 - DNA, 25 bp, Homo sapien
cccgctaaaactgcacagctcgacc

SEQ ID NO: 55260 - DNA, 25 bp, Homo sapien
gctcgaccttcatggcgacagctcc

SEQ ID NO: 55261 - DNA, 25 bp, Homo sapien
ccagtttatctgccgaggattcctc

SEQ ID NO: 55262 - DNA, 25 bp, Homo sapien
agcagccctgatagcttgttctcgt

SEQ ID NO: 55263 - DNA, 25 bp, Homo sapien
tatcagcaagagatgcaccagtaat

SEQ ID NO: 55264 - DNA, 25 bp, Homo sapien
gaaaggaaagccgactcgcatttcg

SEQ ID NO: 55265 - DNA, 25 bp, Homo sapien
acagctccacggaaagacaaaagat

SEQ ID NO: 55266 - DNA, 25 bp, Homo sapien
tgtccggggtagatcttgtacccgc

SEQ ID NO: 55267 - DNA, 25 bp, Homo sapien
agtaatggccctctggaatttgact

SEQ ID NO: 55268 - DNA, 25 bp, Homo sapien
tctgtagaggacagtccagtttatc

SEQ ID NO: 55269 - DNA, 25 bp, Homo sapien
aatttgactgctcggcgggttcttt

SEQ ID NO: 55270 - DNA, 25 bp, Homo sapien
acagctccacggaaagacaaaagat

SEQ ID NO: 55271 - DNA, 25 bp, Homo sapien
gctcgaccttcatggcgacagctcc

SEQ ID NO: 55272 - DNA, 25 bp, Homo sapien
cccgctaaaactgcacagctcgacc

SEQ ID NO: 55273 - DNA, 25 bp, Homo sapien
tgtccggggtagatcttgtacccgc

SEQ ID NO: 55274 - DNA, 25 bp, Homo sapien
gaaaggaaagccgactcgcatttcg

SEQ ID NO: 55275 - DNA, 25 bp, Homo sapien
ccagtttatctgccgaggattcctc

SEQ ID NO: 55276 - DNA, 25 bp, Homo sapien
tctgtagaggacagtccagtttatc

SEQ ID NO: 55277 - DNA, 25 bp, Homo sapien
aatttgactgctcggcgggttcttt

SEQ ID NO: 55278 - DNA, 25 bp, Homo sapien
agtaatggccctctggaatttgact

SEQ ID NO: 55279 - DNA, 25 bp, Homo sapien
tatcagcaagagatgcaccagtaat

SEQ ID NO: 55280 - DNA, 25 bp, Homo sapien
agcagccctgatagcttgttctcgt

SEQ ID NO: 55281 - DNA, 25 bp, Homo sapien
tatcagcaagagatgcaccagtaat

SEQ ID NO: 55282 - DNA, 25 bp, Homo sapien
agcagccctgatagcttgttctcgt

SEQ ID NO: 55283 - DNA, 25 bp, Homo sapien
tgtccggggtagatcttgtacccgc

SEQ ID NO: 55284 - DNA, 25 bp, Homo sapien
gaaaggaaagccgactcgcatttcg

SEQ ID NO: 55285 - DNA, 25 bp, Homo sapien
gctcgaccttcatggcgacagctcc

SEQ ID NO: 55286 - DNA, 25 bp, Homo sapien
acagctccacggaaagacaaaagat

SEQ ID NO: 55287 - DNA, 25 bp, Homo sapien
cccgctaaaactgcacagctcgacc

SEQ ID NO: 55288 - DNA, 25 bp, Homo sapien
tctgtagaggacagtccagtttatc

SEQ ID NO: 55289 - DNA, 25 bp, Homo sapien
ccagtttatctgccgaggattcctc

SEQ ID NO: 55290 - DNA, 25 bp, Homo sapien
aatttgactgctcggcgggttcttt

SEQ ID NO: 55291 - DNA, 25 bp, Homo sapien
agtaatggccctctggaatttgact

SEQ ID NO: 55292 - DNA, 25 bp, Homo sapien
acagctccacggaaagacaaaagat

SEQ ID NO: 55293 - DNA, 25 bp, Homo sapien
gctcgaccttcatggcgacagctcc

SEQ ID NO: 55294 - DNA, 25 bp, Homo sapien
cccgctaaaactgcacagctcgacc

SEQ ID NO: 55295 - DNA, 25 bp, Homo sapien
tgtccggggtagatcttgtacccgc

SEQ ID NO: 55296 - DNA, 25 bp, Homo sapien
gaaaggaaagccgactcgcatttcg

SEQ ID NO: 55297 - DNA, 25 bp, Homo sapien
ccagtttatctgccgaggattcctc

SEQ ID NO: 55298 - DNA, 25 bp, Homo sapien
tctgtagaggacagtccagtttatc

SEQ ID NO: 55299 - DNA, 25 bp, Homo sapien
aatttgactgctcggcgggttcttt

SEQ ID NO: 55300 - DNA, 25 bp, Homo sapien
agtaatggccctctggaatttgact

SEQ ID NO: 55301 - DNA, 25 bp, Homo sapien
tatcagcaagagatgcaccagtaat

SEQ ID NO: 55302 - DNA, 25 bp, Homo sapien
agcagccctgatagcttgttctcgt

SEQ ID NO: 55303 - DNA, 25 bp, Homo sapien
agtaatggccctctggaatttgact

SEQ ID NO: 55304 - DNA, 25 bp, Homo sapien
ccagtttatctgccgaggattcctc

SEQ ID NO: 55305 - DNA, 25 bp, Homo sapien
agcagccctgatagcttgttctcgt

SEQ ID NO: 55306 - DNA, 25 bp, Homo sapien
acagctccacggaaagacaaaagat

SEQ ID NO: 55307 - DNA, 25 bp, Homo sapien
tgtccggggtagatcttgtacccgc

SEQ ID NO: 55308 - DNA, 25 bp, Homo sapien
tctgtagaggacagtccagtttatc

SEQ ID NO: 55309 - DNA, 25 bp, Homo sapien
gctcgaccttcatggcgacagctcc

SEQ ID NO: 55310 - DNA, 25 bp, Homo sapien
aatttgactgctcggcgggttcttt

SEQ ID NO: 55311 - DNA, 25 bp, Homo sapien
tatcagcaagagatgcaccagtaat

SEQ ID NO: 55312 - DNA, 25 bp, Homo sapien
gaaaggaaagccgactcgcatttcg

SEQ ID NO: 55313 - DNA, 25 bp, Homo sapien
cccgctaaaactgcacagctcgacc

SEQ ID NO: 55314 - DNA, 25 bp, Homo sapien
agtaatggccctctggaatttgact

SEQ ID NO: 55315 - DNA, 25 bp, Homo sapien
aatttgactgctcggcgggttcttt

SEQ ID NO: 55316 - DNA, 25 bp, Homo sapien
gctcgaccttcatggcgacagctcc

SEQ ID NO: 55317 - DNA, 25 bp, Homo sapien
ccagtttatctgccgaggattcctc

SEQ ID NO: 55318 - DNA, 25 bp, Homo sapien
acagctccacggaaagacaaaagat

SEQ ID NO: 55319 - DNA, 25 bp, Homo sapien
cccgctaaaactgcacagctcgacc

SEQ ID NO: 55320 - DNA, 25 bp, Homo sapien
tgtccggggtagatcttgtacccgc

SEQ ID NO: 55321 - DNA, 25 bp, Homo sapien
agcagccctgatagcttgttctcgt

SEQ ID NO: 55322 - DNA, 25 bp, Homo sapien
tctgtagaggacagtccagtttatc

SEQ ID NO: 55323 - DNA, 25 bp, Homo sapien
gaaaggaaagccgactcgcatttcg

SEQ ID NO: 55324 - DNA, 25 bp, Homo sapien
tatcagcaagagatgcaccagtaat

SEQ ID NO: 55325 - DNA, 25 bp, Homo sapien
acagctccacggaaagacaaaagat

SEQ ID NO: 55326 - DNA, 25 bp, Homo sapien
gctcgaccttcatggcgacagctcc

SEQ ID NO: 55327 - DNA, 25 bp, Homo sapien
cccgctaaaactgcacagctcgacc

SEQ ID NO: 55328 - DNA, 25 bp, Homo sapien
tgtccggggtagatcttgtacccgc

SEQ ID NO: 55329 - DNA, 25 bp, Homo sapien
gaaaggaaagccgactcgcatttcg

SEQ ID NO: 55330 - DNA, 25 bp, Homo sapien
ccagtttatctgccgaggattcctc

SEQ ID NO: 55331 - DNA, 25 bp, Homo sapien
tctgtagaggacagtccagtttatc

SEQ ID NO: 55332 - DNA, 25 bp, Homo sapien
aatttgactgctcggcgggttcttt

SEQ ID NO: 55333 - DNA, 25 bp, Homo sapien
agtaatggccctctggaatttgact

SEQ ID NO: 55334 - DNA, 25 bp, Homo sapien
tatcagcaagagatgcaccagtaat

SEQ ID NO: 55335 - DNA, 25 bp, Homo sapien
agcagccctgatagcttgttctcgt

SEQ ID NO: 55336 - DNA, 25 bp, Homo sapien
tgtccggggtagatcttgtacccgc

SEQ ID NO: 55337 - DNA, 25 bp, Homo sapien
agcagccctgatagcttgttctcgt

SEQ ID NO: 55338 - DNA, 25 bp, Homo sapien
tatcagcaagagatgcaccagtaat

SEQ ID NO: 55339 - DNA, 25 bp, Homo sapien
ccagtttatctgccgaggattcctc

SEQ ID NO: 55340 - DNA, 25 bp, Homo sapien
gaaaggaaagccgactcgcatttcg

SEQ ID NO: 55341 - DNA, 25 bp, Homo sapien
tctgtagaggacagtccagtttatc

SEQ ID NO: 55342 - DNA, 25 bp, Homo sapien
aatttgactgctcggcgggttcttt

SEQ ID NO: 55343 - DNA, 25 bp, Homo sapien
agtaatggccctctggaatttgact

SEQ ID NO: 55344 - DNA, 25 bp, Homo sapien
gctcgaccttcatggcgacagctcc

SEQ ID NO: 55345 - DNA, 25 bp, Homo sapien
cccgctaaaactgcacagctcgacc

SEQ ID NO: 55346 - DNA, 25 bp, Homo sapien
acagctccacggaaagacaaaagat

SEQ ID NO: 55347 - DNA, 25 bp, Homo sapien
acagctccacggaaagacaaaagat

SEQ ID NO: 55348 - DNA, 25 bp, Homo sapien
gctcgaccttcatggcgacagctcc

SEQ ID NO: 55349 - DNA, 25 bp, Homo sapien
cccgctaaaactgcacagctcgacc

SEQ ID NO: 55350 - DNA, 25 bp, Homo sapien
tgtccggggtagatcttgtacccgc

SEQ ID NO: 55351 - DNA, 25 bp, Homo sapien
gaaaggaaagccgactcgcatttcg

SEQ ID NO: 55352 - DNA, 25 bp, Homo sapien
ccagtttatctgccgaggattcctc

SEQ ID NO: 55353 - DNA, 25 bp, Homo sapien
tctgtagaggacagtccagtttatc

SEQ ID NO: 55354 - DNA, 25 bp, Homo sapien
aatttgactgctcggcgggttcttt

SEQ ID NO: 55355 - DNA, 25 bp, Homo sapien
agtaatggccctctggaatttgact

SEQ ID NO: 55356 - DNA, 25 bp, Homo sapien
tatcagcaagagatgcaccagtaat

SEQ ID NO: 55357 - DNA, 25 bp, Homo sapien
agcagccctgatagcttgttctcgt

SEQ ID NO: 55358 - DNA, 25 bp, Homo sapien
acagctccacggaaagacaaaagat

SEQ ID NO: 55359 - DNA, 25 bp, Homo sapien
gctcgaccttcatggcgacagctcc

SEQ ID NO: 55360 - DNA, 25 bp, Homo sapien
gaaaggaaagccgactcgcatttcg

SEQ ID NO: 55361 - DNA, 25 bp, Homo sapien
agcagccctgatagcttgttctcgt

SEQ ID NO: 55362 - DNA, 25 bp, Homo sapien
aatttgactgctcggcgggttcttt

SEQ ID NO: 55363 - DNA, 25 bp, Homo sapien
tgtccggggtagatcttgtacccgc

SEQ ID NO: 55364 - DNA, 25 bp, Homo sapien
tatcagcaagagatgcaccagtaat

SEQ ID NO: 55365 - DNA, 25 bp, Homo sapien
agtaatggccctctggaatttgact

SEQ ID NO: 55366 - DNA, 25 bp, Homo sapien
cccgctaaaactgcacagctcgacc

SEQ ID NO: 55367 - DNA, 25 bp, Homo sapien
tctgtagaggacagtccagtttatc

SEQ ID NO: 55368 - DNA, 25 bp, Homo sapien
ccagtttatctgccgaggattcctc

SEQ ID NO: 55369 - DNA, 25 bp, Homo sapien
acagctccacggaaagacaaaagat

SEQ ID NO: 55370 - DNA, 25 bp, Homo sapien
gctcgaccttcatggcgacagctcc

SEQ ID NO: 55371 - DNA, 25 bp, Homo sapien
cccgctaaaactgcacagctcgacc

SEQ ID NO: 55372 - DNA, 25 bp, Homo sapien
tgtccggggtagatcttgtacccgc

SEQ ID NO: 55373 - DNA, 25 bp, Homo sapien
gaaaggaaagccgactcgcatttcg

SEQ ID NO: 55374 - DNA, 25 bp, Homo sapien
ccagtttatctgccgaggattcctc

SEQ ID NO: 55375 - DNA, 25 bp, Homo sapien
tctgtagaggacagtccagtttatc

SEQ ID NO: 55376 - DNA, 25 bp, Homo sapien
aatttgactgctcggcgggttcttt

SEQ ID NO: 55377 - DNA, 25 bp, Homo sapien
agtaatggccctctggaatttgact

SEQ ID NO: 55378 - DNA, 25 bp, Homo sapien
tatcagcaagagatgcaccagtaat

SEQ ID NO: 55379 - DNA, 25 bp, Homo sapien
agcagccctgatagcttgttctcgt

SEQ ID NO: 55380 - DNA, 25 bp, Homo sapien
agcagccctgatagcttgttctcgt

SEQ ID NO: 55381 - DNA, 25 bp, Homo sapien
tatcagcaagagatgcaccagtaat

SEQ ID NO: 55382 - DNA, 25 bp, Homo sapien
gctcgaccttcatggcgacagctcc

SEQ ID NO: 55383 - DNA, 25 bp, Homo sapien
aatttgactgctcggcgggttcttt

SEQ ID NO: 55384 - DNA, 25 bp, Homo sapien
ccagtttatctgccgaggattcctc

SEQ ID NO: 55385 - DNA, 25 bp, Homo sapien
tctgtagaggacagtccagtttatc

SEQ ID NO: 55386 - DNA, 25 bp, Homo sapien
gaaaggaaagccgactcgcatttcg

SEQ ID NO: 55387 - DNA, 25 bp, Homo sapien
tgtccggggtagatcttgtacccgc

SEQ ID NO: 55388 - DNA, 25 bp, Homo sapien
agtaatggccctctggaatttgact

SEQ ID NO: 55389 - DNA, 25 bp, Homo sapien
acagctccacggaaagacaaaagat

SEQ ID NO: 55390 - DNA, 25 bp, Homo sapien
cccgctaaaactgcacagctcgacc

SEQ ID NO: 55391 - DNA, 25 bp, Homo sapien
acagctccacggaaagacaaaagat

SEQ ID NO: 55392 - DNA, 25 bp, Homo sapien
gctcgaccttcatggcgacagctcc

SEQ ID NO: 55393 - DNA, 25 bp, Homo sapien
cccgctaaaactgcacagctcgacc

SEQ ID NO: 55394 - DNA, 25 bp, Homo sapien
tgtccggggtagatcttgtacccgc

SEQ ID NO: 55395 - DNA, 25 bp, Homo sapien
gaaaggaaagccgactcgcatttcg

SEQ ID NO: 55396 - DNA, 25 bp, Homo sapien
ccagtttatctgccgaggattcctc

SEQ ID NO: 55397 - DNA, 25 bp, Homo sapien
tctgtagaggacagtccagtttatc

SEQ ID NO: 55398 - DNA, 25 bp, Homo sapien
aatttgactgctcggcgggttcttt

SEQ ID NO: 55399 - DNA, 25 bp, Homo sapien
agtaatggccctctggaatttgact

SEQ ID NO: 55400 - DNA, 25 bp, Homo sapien
tatcagcaagagatgcaccagtaat

SEQ ID NO: 55401 - DNA, 25 bp, Homo sapien
agcagccctgatagcttgttctcgt

SEQ ID NO: 55402 - DNA, 25 bp, Homo sapien
aatttgactgctcggcgggttcttt

SEQ ID NO: 55403 - DNA, 25 bp, Homo sapien
agtaatggccctctggaatttgact

SEQ ID NO: 55404 - DNA, 25 bp, Homo sapien
ccagtttatctgccgaggattcctc

SEQ ID NO: 55405 - DNA, 25 bp, Homo sapien
tctgtagaggacagtccagtttatc

SEQ ID NO: 55406 - DNA, 25 bp, Homo sapien
tgtccggggtagatcttgtacccgc

SEQ ID NO: 55407 - DNA, 25 bp, Homo sapien
gaaaggaaagccgactcgcatttcg

SEQ ID NO: 55408 - DNA, 25 bp, Homo sapien
agcagccctgatagcttgttctcgt

SEQ ID NO: 55409 - DNA, 25 bp, Homo sapien
acagctccacggaaagacaaaagat

SEQ ID NO: 55410 - DNA, 25 bp, Homo sapien
cccgctaaaactgcacagctcgacc

SEQ ID NO: 55411 - DNA, 25 bp, Homo sapien
gctcgaccttcatggcgacagctcc

SEQ ID NO: 55412 - DNA, 25 bp, Homo sapien
tatcagcaagagatgcaccagtaat

SEQ ID NO: 55413 - DNA, 25 bp, Homo sapien
acagctccacggaaagacaaaagat

SEQ ID NO: 55414 - DNA, 25 bp, Homo sapien
gctcgaccttcatggcgacagctcc

SEQ ID NO: 55415 - DNA, 25 bp, Homo sapien
cccgctaaaactgcacagctcgacc

SEQ ID NO: 55416 - DNA, 25 bp, Homo sapien
tgtccggggtagatcttgtacccgc

SEQ ID NO: 55417 - DNA, 25 bp, Homo sapien
gaaaggaaagccgactcgcatttcg

SEQ ID NO: 55418 - DNA, 25 bp, Homo sapien
ccagtttatctgccgaggattcctc

SEQ ID NO: 55419 - DNA, 25 bp, Homo sapien
tctgtagaggacagtccagtttatc

SEQ ID NO: 55420 - DNA, 25 bp, Homo sapien
aatttgactgctcggcgggttcttt

SEQ ID NO: 55421 - DNA, 25 bp, Homo sapien
agtaatggccctctggaatttgact

SEQ ID NO: 55422 - DNA, 25 bp, Homo sapien
tatcagcaagagatgcaccagtaat

SEQ ID NO: 55423 - DNA, 25 bp, Homo sapien
agcagccctgatagcttgttctcgt

SEQ ID NO: 55424 - DNA, 25 bp, Homo sapien
ccagtttatctgccgaggattcctc

SEQ ID NO: 55425 - DNA, 25 bp, Homo sapien
agcagccctgatagcttgttctcgt

SEQ ID NO: 55426 - DNA, 25 bp, Homo sapien
cccgctaaaactgcacagctcgacc

SEQ ID NO: 55427 - DNA, 25 bp, Homo sapien
tatcagcaagagatgcaccagtaat

SEQ ID NO: 55428 - DNA, 25 bp, Homo sapien
tctgtagaggacagtccagtttatc

SEQ ID NO: 55429 - DNA, 25 bp, Homo sapien
acagctccacggaaagacaaaagat

SEQ ID NO: 55430 - DNA, 25 bp, Homo sapien
tgtccggggtagatcttgtacccgc

SEQ ID NO: 55431 - DNA, 25 bp, Homo sapien
gctcgaccttcatggcgacagctcc

SEQ ID NO: 55432 - DNA, 25 bp, Homo sapien
gaaaggaaagccgactcgcatttcg

SEQ ID NO: 55433 - DNA, 25 bp, Homo sapien
aatttgactgctcggcgggttcttt

SEQ ID NO: 55434 - DNA, 25 bp, Homo sapien
agtaatggccctctggaatttgact

SEQ ID NO: 55435 - DNA, 25 bp, Homo sapien
acagctccacggaaagacaaaagat

SEQ ID NO: 55436 - DNA, 25 bp, Homo sapien
gctcgaccttcatggcgacagctcc

SEQ ID NO: 55437 - DNA, 25 bp, Homo sapien
cccgctaaaactgcacagctcgacc

SEQ ID NO: 55438 - DNA, 25 bp, Homo sapien
tgtccggggtagatcttgtacccgc

SEQ ID NO: 55439 - DNA, 25 bp, Homo sapien
gaaaggaaagccgactcgcatttcg

SEQ ID NO: 55440 - DNA, 25 bp, Homo sapien
ccagtttatctgccgaggattcctc

SEQ ID NO: 55441 - DNA, 25 bp, Homo sapien
tctgtagaggacagtccagtttatc

SEQ ID NO: 55442 - DNA, 25 bp, Homo sapien
aatttgactgctcggcgggttcttt

SEQ ID NO: 55443 - DNA, 25 bp, Homo sapien
agtaatggccctctggaatttgact

SEQ ID NO: 55444 - DNA, 25 bp, Homo sapien
tatcagcaagagatgcaccagtaat

SEQ ID NO: 55445 - DNA, 25 bp, Homo sapien
agcagccctgatagcttgttctcgt

SEQ ID NO: 55446 - DNA, 25 bp, Homo sapien
acagctccacggaaagacaaaagat

SEQ ID NO: 55447 - DNA, 25 bp, Homo sapien
gctcgaccttcatggcgacagctcc

SEQ ID NO: 55448 - DNA, 25 bp, Homo sapien
cccgctaaaactgcacagctcgacc

SEQ ID NO: 55449 - DNA, 25 bp, Homo sapien
tgtccggggtagatcttgtacccgc

SEQ ID NO: 55450 - DNA, 25 bp, Homo sapien
gaaaggaaagccgactcgcatttcg

SEQ ID NO: 55451 - DNA, 25 bp, Homo sapien
ccagtttatctgccgaggattcctc

SEQ ID NO: 55452 - DNA, 25 bp, Homo sapien
tctgtagaggacagtccagtttatc

SEQ ID NO: 55453 - DNA, 25 bp, Homo sapien
aatttgactgctcggcgggttcttt

SEQ ID NO: 55454 - DNA, 25 bp, Homo sapien
agtaatggccctctggaatttgact

SEQ ID NO: 55455 - DNA, 25 bp, Homo sapien
tatcagcaagagatgcaccagtaat

SEQ ID NO: 55456 - DNA, 25 bp, Homo sapien
agcagccctgatagcttgttctcgt

SEQ ID NO: 55457 - DNA, 25 bp, Homo sapien
gaaaggaaagccgactcgcatttcg

SEQ ID NO: 55458 - DNA, 25 bp, Homo sapien
agtaatggccctctggaatttgact

SEQ ID NO: 55459 - DNA, 25 bp, Homo sapien
tgtccggggtagatcttgtacccgc

SEQ ID NO: 55460 - DNA, 25 bp, Homo sapien
tctgtagaggacagtccagtttatc

SEQ ID NO: 55461 - DNA, 25 bp, Homo sapien
aatttgactgctcggcgggttcttt

SEQ ID NO: 55462 - DNA, 25 bp, Homo sapien
gctcgaccttcatggcgacagctcc

SEQ ID NO: 55463 - DNA, 25 bp, Homo sapien
agcagccctgatagcttgttctcgt

SEQ ID NO: 55464 - DNA, 25 bp, Homo sapien
cccgctaaaactgcacagctcgacc

SEQ ID NO: 55465 - DNA, 25 bp, Homo sapien
acagctccacggaaagacaaaagat

SEQ ID NO: 55466 - DNA, 25 bp, Homo sapien
ccagtttatctgccgaggattcctc

SEQ ID NO: 55467 - DNA, 25 bp, Homo sapien
tatcagcaagagatgcaccagtaat

SEQ ID NO: 55468 - DNA, 25 bp, Homo sapien
cccgctaaaactgcacagctcgacc

SEQ ID NO: 55469 - DNA, 25 bp, Homo sapien
agtaatggccctctggaatttgact

SEQ ID NO: 55470 - DNA, 25 bp, Homo sapien
tgtccggggtagatcttgtacccgc

SEQ ID NO: 55471 - DNA, 25 bp, Homo sapien
tctgtagaggacagtccagtttatc

SEQ ID NO: 55472 - DNA, 25 bp, Homo sapien
aatttgactgctcggcgggttcttt

SEQ ID NO: 55473 - DNA, 25 bp, Homo sapien
agcagccctgatagcttgttctcgt

SEQ ID NO: 55474 - DNA, 25 bp, Homo sapien
gctcgaccttcatggcgacagctcc

SEQ ID NO: 55475 - DNA, 25 bp, Homo sapien
gaaaggaaagccgactcgcatttcg

SEQ ID NO: 55476 - DNA, 25 bp, Homo sapien
ccagtttatctgccgaggattcctc

SEQ ID NO: 55477 - DNA, 25 bp, Homo sapien
acagctccacggaaagacaaaagat

SEQ ID NO: 55478 - DNA, 25 bp, Homo sapien
tatcagcaagagatgcaccagtaat

SEQ ID NO: 55479 - DNA, 25 bp, Homo sapien
cccgctaaaactgcacagctcgacc

SEQ ID NO: 55480 - DNA, 25 bp, Homo sapien
agtaatggccctctggaatttgact

SEQ ID NO: 55481 - DNA, 25 bp, Homo sapien
gaaaggaaagccgactcgcatttcg

SEQ ID NO: 55482 - DNA, 25 bp, Homo sapien
tgtccggggtagatcttgtacccgc

SEQ ID NO: 55483 - DNA, 25 bp, Homo sapien
tctgtagaggacagtccagtttatc

SEQ ID NO: 55484 - DNA, 25 bp, Homo sapien
aatttgactgctcggcgggttcttt

SEQ ID NO: 55485 - DNA, 25 bp, Homo sapien
gctcgaccttcatggcgacagctcc

SEQ ID NO: 55486 - DNA, 25 bp, Homo sapien
agcagccctgatagcttgttctcgt

SEQ ID NO: 55487 - DNA, 25 bp, Homo sapien
acagctccacggaaagacaaaagat

SEQ ID NO: 55488 - DNA, 25 bp, Homo sapien
ccagtttatctgccgaggattcctc

SEQ ID NO: 55489 - DNA, 25 bp, Homo sapien
tatcagcaagagatgcaccagtaat

SEQ ID NO: 55490 - DNA, 25 bp, Homo sapien
tatcagcaagagatgcaccagtaat

SEQ ID NO: 55491 - DNA, 25 bp, Homo sapien
agtaatggccctctggaatttgact

SEQ ID NO: 55492 - DNA, 25 bp, Homo sapien
tgtccggggtagatcttgtacccgc

SEQ ID NO: 55493 - DNA, 25 bp, Homo sapien
tctgtagaggacagtccagtttatc

SEQ ID NO: 55494 - DNA, 25 bp, Homo sapien
aatttgactgctcggcgggttcttt

SEQ ID NO: 55495 - DNA, 25 bp, Homo sapien
gctcgaccttcatggcgacagctcc

SEQ ID NO: 55496 - DNA, 25 bp, Homo sapien
agcagccctgatagcttgttctcgt

SEQ ID NO: 55497 - DNA, 25 bp, Homo sapien
gaaaggaaagccgactcgcatttcg

SEQ ID NO: 55498 - DNA, 25 bp, Homo sapien
acagctccacggaaagacaaaagat

SEQ ID NO: 55499 - DNA, 25 bp, Homo sapien
cccgctaaaactgcacagctcgacc

SEQ ID NO: 55500 - DNA, 25 bp, Homo sapien
ccagtttatctgccgaggattcctc

SEQ ID NO: 55501 - DNA, 25 bp, Homo sapien
tatcagcaagagatgcaccagtaat

SEQ ID NO: 55502 - DNA, 25 bp, Homo sapien
gaaaggaaagccgactcgcatttcg

SEQ ID NO: 55503 - DNA, 25 bp, Homo sapien
agtaatggccctctggaatttgact

SEQ ID NO: 55504 - DNA, 25 bp, Homo sapien
tgtccggggtagatcttgtacccgc

SEQ ID NO: 55505 - DNA, 25 bp, Homo sapien
tctgtagaggacagtccagtttatc

SEQ ID NO: 55506 - DNA, 25 bp, Homo sapien
aatttgactgctcggcgggttcttt

SEQ ID NO: 55507 - DNA, 25 bp, Homo sapien
gctcgaccttcatggcgacagctcc

SEQ ID NO: 55508 - DNA, 25 bp, Homo sapien
agcagccctgatagcttgttctcgt

SEQ ID NO: 55509 - DNA, 25 bp, Homo sapien
cccgctaaaactgcacagctcgacc

SEQ ID NO: 55510 - DNA, 25 bp, Homo sapien
acagctccacggaaagacaaaagat

SEQ ID NO: 55511 - DNA, 25 bp, Homo sapien
ccagtttatctgccgaggattcctc

SEQ ID NO: 55512 - DNA, 25 bp, Homo sapien
cccgctaaaactgcacagctcgacc

SEQ ID NO: 55513 - DNA, 25 bp, Homo sapien
gaaaggaaagccgactcgcatttcg

SEQ ID NO: 55514 - DNA, 25 bp, Homo sapien
agtaatggccctctggaatttgact

SEQ ID NO: 55515 - DNA, 25 bp, Homo sapien
tgtccggggtagatcttgtacccgc

SEQ ID NO: 55516 - DNA, 25 bp, Homo sapien
tctgtagaggacagtccagtttatc

SEQ ID NO: 55517 - DNA, 25 bp, Homo sapien
aatttgactgctcggcgggttcttt

SEQ ID NO: 55518 - DNA, 25 bp, Homo sapien
gctcgaccttcatggcgacagctcc

SEQ ID NO: 55519 - DNA, 25 bp, Homo sapien
agcagccctgatagcttgttctcgt

SEQ ID NO: 55520 - DNA, 25 bp, Homo sapien
acagctccacggaaagacaaaagat

SEQ ID NO: 55521 - DNA, 25 bp, Homo sapien
ccagtttatctgccgaggattcctc

SEQ ID NO: 55522 - DNA, 25 bp, Homo sapien
tatcagcaagagatgcaccagtaat

SEQ ID NO: 55523 - DNA, 25 bp, Homo sapien
tatcagcaagagatgcaccagtaat

SEQ ID NO: 55524 - DNA, 25 bp, Homo sapien
agtaatggccctctggaatttgact

SEQ ID NO: 55525 - DNA, 25 bp, Homo sapien
tgtccggggtagatcttgtacccgc

SEQ ID NO: 55526 - DNA, 25 bp, Homo sapien
tctgtagaggacagtccagtttatc

SEQ ID NO: 55527 - DNA, 25 bp, Homo sapien
aatttgactgctcggcgggttcttt

SEQ ID NO: 55528 - DNA, 25 bp, Homo sapien
gctcgaccttcatggcgacagctcc

SEQ ID NO: 55529 - DNA, 25 bp, Homo sapien
agcagccctgatagcttgttctcgt

SEQ ID NO: 55530 - DNA, 25 bp, Homo sapien
cccgctaaaactgcacagctcgacc

SEQ ID NO: 55531 - DNA, 25 bp, Homo sapien
ccagtttatctgccgaggattcctc

SEQ ID NO: 55532 - DNA, 25 bp, Homo sapien
acagctccacggaaagacaaaagat

SEQ ID NO: 55533 - DNA, 25 bp, Homo sapien
gaaaggaaagccgactcgcatttcg

SEQ ID NO: 55534 - DNA, 25 bp, Homo sapien
tatcagcaagagatgcaccagtaat

SEQ ID NO: 55535 - DNA, 25 bp, Homo sapien
cccgctaaaactgcacagctcgacc

SEQ ID NO: 55536 - DNA, 25 bp, Homo sapien
agtaatggccctctggaatttgact

SEQ ID NO: 55537 - DNA, 25 bp, Homo sapien
tgtccggggtagatcttgtacccgc

SEQ ID NO: 55538 - DNA, 25 bp, Homo sapien
tctgtagaggacagtccagtttatc

SEQ ID NO: 55539 - DNA, 25 bp, Homo sapien
aatttgactgctcggcgggttcttt

SEQ ID NO: 55540 - DNA, 25 bp, Homo sapien
gctcgaccttcatggcgacagctcc

SEQ ID NO: 55541 - DNA, 25 bp, Homo sapien
agcagccctgatagcttgttctcgt

SEQ ID NO: 55542 - DNA, 25 bp, Homo sapien
gaaaggaaagccgactcgcatttcg

SEQ ID NO: 55543 - DNA, 25 bp, Homo sapien
ccagtttatctgccgaggattcctc

SEQ ID NO: 55544 - DNA, 25 bp, Homo sapien
acagctccacggaaagacaaaagat

SEQ ID NO: 55545 - DNA, 25 bp, Homo sapien
agtaatggccctctggaatttgact

SEQ ID NO: 55546 - DNA, 25 bp, Homo sapien
tgtccggggtagatcttgtacccgc

SEQ ID NO: 55547 - DNA, 25 bp, Homo sapien
tctgtagaggacagtccagtttatc

SEQ ID NO: 55548 - DNA, 25 bp, Homo sapien
aatttgactgctcggcgggttcttt

SEQ ID NO: 55549 - DNA, 25 bp, Homo sapien
gctcgaccttcatggcgacagctcc

SEQ ID NO: 55550 - DNA, 25 bp, Homo sapien
agcagccctgatagcttgttctcgt

SEQ ID NO: 55551 - DNA, 25 bp, Homo sapien
cccgctaaaactgcacagctcgacc

SEQ ID NO: 55552 - DNA, 25 bp, Homo sapien
acagctccacggaaagacaaaagat

SEQ ID NO: 55553 - DNA, 25 bp, Homo sapien
gaaaggaaagccgactcgcatttcg

SEQ ID NO: 55554 - DNA, 25 bp, Homo sapien
ccagtttatctgccgaggattcctc

SEQ ID NO: 55555 - DNA, 25 bp, Homo sapien
tatcagcaagagatgcaccagtaat

SEQ ID NO: 55556 - DNA, 25 bp, Homo sapien
cccgctaaaactgcacagctcgacc

SEQ ID NO: 55557 - DNA, 25 bp, Homo sapien
gaaaggaaagccgactcgcatttcg

SEQ ID NO: 55558 - DNA, 25 bp, Homo sapien
ccagtttatctgccgaggattcctc

SEQ ID NO: 55559 - DNA, 25 bp, Homo sapien
tgtccggggtagatcttgtacccgc

SEQ ID NO: 55560 - DNA, 25 bp, Homo sapien
tatcagcaagagatgcaccagtaat

SEQ ID NO: 55561 - DNA, 25 bp, Homo sapien
agcagccctgatagcttgttctcgt

SEQ ID NO: 55562 - DNA, 25 bp, Homo sapien
tctgtagaggacagtccagtttatc

SEQ ID NO: 55563 - DNA, 25 bp, Homo sapien
agtaatggccctctggaatttgact

SEQ ID NO: 55564 - DNA, 25 bp, Homo sapien
gctcgaccttcatggcgacagctcc

SEQ ID NO: 55565 - DNA, 25 bp, Homo sapien
acagctccacggaaagacaaaagat

SEQ ID NO: 55566 - DNA, 25 bp, Homo sapien
aatttgactgctcggcgggttcttt

SEQ ID NO: 55567 - DNA, 25 bp, Homo sapien
gaaaggaaagccgactcgcatttcg

SEQ ID NO: 55568 - DNA, 25 bp, Homo sapien
agtaatggccctctggaatttgact

SEQ ID NO: 55569 - DNA, 25 bp, Homo sapien
tgtccggggtagatcttgtacccgc

SEQ ID NO: 55570 - DNA, 25 bp, Homo sapien
tctgtagaggacagtccagtttatc

SEQ ID NO: 55571 - DNA, 25 bp, Homo sapien
aatttgactgctcggcgggttcttt

SEQ ID NO: 55572 - DNA, 25 bp, Homo sapien
gctcgaccttcatggcgacagctcc

SEQ ID NO: 55573 - DNA, 25 bp, Homo sapien
agcagccctgatagcttgttctcgt

SEQ ID NO: 55574 - DNA, 25 bp, Homo sapien
ccagtttatctgccgaggattcctc

SEQ ID NO: 55575 - DNA, 25 bp, Homo sapien
cccgctaaaactgcacagctcgacc

SEQ ID NO: 55576 - DNA, 25 bp, Homo sapien
acagctccacggaaagacaaaagat

SEQ ID NO: 55577 - DNA, 25 bp, Homo sapien
tatcagcaagagatgcaccagtaat

SEQ ID NO: 55578 - DNA, 25 bp, Homo sapien
acagctccacggaaagacaaaagat

SEQ ID NO: 55579 - DNA, 25 bp, Homo sapien
gctcgaccttcatggcgacagctcc

SEQ ID NO: 55580 - DNA, 25 bp, Homo sapien
cccgctaaaactgcacagctcgacc

SEQ ID NO: 55581 - DNA, 25 bp, Homo sapien
tgtccggggtagatcttgtacccgc

SEQ ID NO: 55582 - DNA, 25 bp, Homo sapien
gaaaggaaagccgactcgcatttcg

SEQ ID NO: 55583 - DNA, 25 bp, Homo sapien
ccagtttatctgccgaggattcctc

SEQ ID NO: 55584 - DNA, 25 bp, Homo sapien
tctgtagaggacagtccagtttatc

SEQ ID NO: 55585 - DNA, 25 bp, Homo sapien
aatttgactgctcggcgggttcttt

SEQ ID NO: 55586 - DNA, 25 bp, Homo sapien
agtaatggccctctggaatttgact

SEQ ID NO: 55587 - DNA, 25 bp, Homo sapien
tatcagcaagagatgcaccagtaat

SEQ ID NO: 55588 - DNA, 25 bp, Homo sapien
agcagccctgatagcttgttctcgt

SEQ ID NO: 55589 - DNA, 25 bp, Homo sapien
acgagaacaagctatcagggctgct

SEQ ID NO: 55590 - DNA, 25 bp, Homo sapien
atcttttgtctttccgtggagctgt

SEQ ID NO: 55591 - DNA, 25 bp, Homo sapien
ggagctgtcgccatgaaggtcgagc

SEQ ID NO: 55592 - DNA, 25 bp, Homo sapien
cgaaatgcgagtcggctttcctttc

SEQ ID NO: 55593 - DNA, 25 bp, Homo sapien
agtcaaattccagagggccattact

SEQ ID NO: 55594 - DNA, 25 bp, Homo sapien
ggtcgagctgtgcagttttagcggg

SEQ ID NO: 55595 - DNA, 25 bp, Homo sapien
gaggaatcctcggcagataaactgg

SEQ ID NO: 55596 - DNA, 25 bp, Homo sapien
attactggtgcatctcttgctgata

SEQ ID NO: 55597 - DNA, 25 bp, Homo sapien
aaagaacccgccgagcagtcaaatt

SEQ ID NO: 55598 - DNA, 25 bp, Homo sapien
gataaactggactgtcctctacaga

SEQ ID NO: 55599 - DNA, 25 bp, Homo sapien
gcgggtacaagatctaccccggaca

SEQ ID NO: 55600 - DNA, 25 bp, Homo sapien
gaaaggaaagccgactcgcatttcg

SEQ ID NO: 55601 - DNA, 25 bp, Homo sapien
agtaatggccctctggaatttgact

SEQ ID NO: 55602 - DNA, 25 bp, Homo sapien
tgtccggggtagatcttgtacccgc

SEQ ID NO: 55603 - DNA, 25 bp, Homo sapien
tctgtagaggacagtccagtttatc

SEQ ID NO: 55604 - DNA, 25 bp, Homo sapien
aatttgactgctcggcgggttcttt

SEQ ID NO: 55605 - DNA, 25 bp, Homo sapien
agcagccctgatagcttgttctcgt

SEQ ID NO: 55606 - DNA, 25 bp, Homo sapien
gctcgaccttcatggcgacagctcc

SEQ ID NO: 55607 - DNA, 25 bp, Homo sapien
acagctccacggaaagacaaaagat

SEQ ID NO: 55608 - DNA, 25 bp, Homo sapien
ccagtttatctgccgaggattcctc

SEQ ID NO: 55609 - DNA, 25 bp, Homo sapien
cccgctaaaactgcacagctcgacc

SEQ ID NO: 55610 - DNA, 25 bp, Homo sapien
tatcagcaagagatgcaccagtaat

SEQ ID NO: 55611 - DNA, 25 bp, Homo sapien
aatttgactgctcggcgggttcttt

SEQ ID NO: 55612 - DNA, 25 bp, Homo sapien
agcagccctgatagcttgttctcgt

SEQ ID NO: 55613 - DNA, 25 bp, Homo sapien
gctcgaccttcatggcgacagctcc

SEQ ID NO: 55614 - DNA, 25 bp, Homo sapien
tgtccggggtagatcttgtacccgc

SEQ ID NO: 55615 - DNA, 25 bp, Homo sapien
tatcagcaagagatgcaccagtaat

SEQ ID NO: 55616 - DNA, 25 bp, Homo sapien
tctgtagaggacagtccagtttatc

SEQ ID NO: 55617 - DNA, 25 bp, Homo sapien
cccgctaaaactgcacagctcgacc

SEQ ID NO: 55618 - DNA, 25 bp, Homo sapien
ccagtttatctgccgaggattcctc

SEQ ID NO: 55619 - DNA, 25 bp, Homo sapien
acagctccacggaaagacaaaagat

SEQ ID NO: 55620 - DNA, 25 bp, Homo sapien
agtaatggccctctggaatttgact

SEQ ID NO: 55621 - DNA, 25 bp, Homo sapien
gaaaggaaagccgactcgcatttcg

SEQ ID NO: 55622 - DNA, 25 bp, Homo sapien
acagctccacggaaagacaaaagat

SEQ ID NO: 55623 - DNA, 25 bp, Homo sapien
gctcgaccttcatggcgacagctcc

SEQ ID NO: 55624 - DNA, 25 bp, Homo sapien
cccgctaaaactgcacagctcgacc

SEQ ID NO: 55625 - DNA, 25 bp, Homo sapien
tgtccggggtagatcttgtacccgc

SEQ ID NO: 55626 - DNA, 25 bp, Homo sapien
gaaaggaaagccgactcgcatttcg

SEQ ID NO: 55627 - DNA, 25 bp, Homo sapien
ccagtttatctgccgaggattcctc

SEQ ID NO: 55628 - DNA, 25 bp, Homo sapien
tctgtagaggacagtccagtttatc

SEQ ID NO: 55629 - DNA, 25 bp, Homo sapien
aatttgactgctcggcgggttcttt

SEQ ID NO: 55630 - DNA, 25 bp, Homo sapien
agtaatggccctctggaatttgact

SEQ ID NO: 55631 - DNA, 25 bp, Homo sapien
tatcagcaagagatgcaccagtaat

SEQ ID NO: 55632 - DNA, 25 bp, Homo sapien
agcagccctgatagcttgttctcgt

SEQ ID NO: 55633 - DNA, 25 bp, Homo sapien
gaaaggaaagccgactcgcatttcg

SEQ ID NO: 55634 - DNA, 25 bp, Homo sapien
tatcagcaagagatgcaccagtaat

SEQ ID NO: 55635 - DNA, 25 bp, Homo sapien
acagctccacggaaagacaaaagat

SEQ ID NO: 55636 - DNA, 25 bp, Homo sapien
tgtccggggtagatcttgtacccgc

SEQ ID NO: 55637 - DNA, 25 bp, Homo sapien
gctcgaccttcatggcgacagctcc

SEQ ID NO: 55638 - DNA, 25 bp, Homo sapien
aatttgactgctcggcgggttcttt

SEQ ID NO: 55639 - DNA, 25 bp, Homo sapien
agcagccctgatagcttgttctcgt

SEQ ID NO: 55640 - DNA, 25 bp, Homo sapien
ccagtttatctgccgaggattcctc

SEQ ID NO: 55641 - DNA, 25 bp, Homo sapien
agtaatggccctctggaatttgact

SEQ ID NO: 55642 - DNA, 25 bp, Homo sapien
tctgtagaggacagtccagtttatc

SEQ ID NO: 55643 - DNA, 25 bp, Homo sapien
cccgctaaaactgcacagctcgacc

SEQ ID NO: 55644 - DNA, 25 bp, Homo sapien
acagctccacggaaagacaaaagat

SEQ ID NO: 55645 - DNA, 25 bp, Homo sapien
gctcgaccttcatggcgacagctcc

SEQ ID NO: 55646 - DNA, 25 bp, Homo sapien
cccgctaaaactgcacagctcgacc

SEQ ID NO: 55647 - DNA, 25 bp, Homo sapien
tgtccggggtagatcttgtacccgc

SEQ ID NO: 55648 - DNA, 25 bp, Homo sapien
gaaaggaaagccgactcgcatttcg

SEQ ID NO: 55649 - DNA, 25 bp, Homo sapien
ccagtttatctgccgaggattcctc

SEQ ID NO: 55650 - DNA, 25 bp, Homo sapien
tctgtagaggacagtccagtttatc

SEQ ID NO: 55651 - DNA, 25 bp, Homo sapien
aatttgactgctcggcgggttcttt

SEQ ID NO: 55652 - DNA, 25 bp, Homo sapien
agtaatggccctctggaatttgact

SEQ ID NO: 55653 - DNA, 25 bp, Homo sapien
tatcagcaagagatgcaccagtaat

SEQ ID NO: 55654 - DNA, 25 bp, Homo sapien
agcagccctgatagcttgttctcgt

SEQ ID NO: 55655 - DNA, 25 bp, Homo sapien
acagctccacggaaagacaaaagat

SEQ ID NO: 55656 - DNA, 25 bp, Homo sapien
gaaaggaaagccgactcgcatttcg

SEQ ID NO: 55657 - DNA, 25 bp, Homo sapien
agtaatggccctctggaatttgact

SEQ ID NO: 55658 - DNA, 25 bp, Homo sapien
aatttgactgctcggcgggttcttt

SEQ ID NO: 55659 - DNA, 25 bp, Homo sapien
gctcgaccttcatggcgacagctcc

SEQ ID NO: 55660 - DNA, 25 bp, Homo sapien
cccgctaaaactgcacagctcgacc

SEQ ID NO: 55661 - DNA, 25 bp, Homo sapien
ccagtttatctgccgaggattcctc

SEQ ID NO: 55662 - DNA, 25 bp, Homo sapien
agcagccctgatagcttgttctcgt

SEQ ID NO: 55663 - DNA, 25 bp, Homo sapien
tatcagcaagagatgcaccagtaat

SEQ ID NO: 55664 - DNA, 25 bp, Homo sapien
tctgtagaggacagtccagtttatc

SEQ ID NO: 55665 - DNA, 25 bp, Homo sapien
tgtccggggtagatcttgtacccgc

SEQ ID NO: 55666 - DNA, 25 bp, Homo sapien
acagctccacggaaagacaaaagat

SEQ ID NO: 55667 - DNA, 25 bp, Homo sapien
gctcgaccttcatggcgacagctcc

SEQ ID NO: 55668 - DNA, 25 bp, Homo sapien
cccgctaaaactgcacagctcgacc

SEQ ID NO: 55669 - DNA, 25 bp, Homo sapien
tgtccggggtagatcttgtacccgc

SEQ ID NO: 55670 - DNA, 25 bp, Homo sapien
gaaaggaaagccgactcgcatttcg

SEQ ID NO: 55671 - DNA, 25 bp, Homo sapien
ccagtttatctgccgaggattcctc

SEQ ID NO: 55672 - DNA, 25 bp, Homo sapien
tctgtagaggacagtccagtttatc

SEQ ID NO: 55673 - DNA, 25 bp, Homo sapien
aatttgactgctcggcgggttcttt

SEQ ID NO: 55674 - DNA, 25 bp, Homo sapien
agtaatggccctctggaatttgact

SEQ ID NO: 55675 - DNA, 25 bp, Homo sapien
tatcagcaagagatgcaccagtaat

SEQ ID NO: 55676 - DNA, 25 bp, Homo sapien
agcagccctgatagcttgttctcgt

SEQ ID NO: 55677 - DNA, 25 bp, Homo sapien
acagctccacggaaagacaaaagat

SEQ ID NO: 55678 - DNA, 25 bp, Homo sapien
gctcgaccttcatggcgacagctcc

SEQ ID NO: 55679 - DNA, 25 bp, Homo sapien
cccgctaaaactgcacagctcgacc

SEQ ID NO: 55680 - DNA, 25 bp, Homo sapien
tgtccggggtagatcttgtacccgc

SEQ ID NO: 55681 - DNA, 25 bp, Homo sapien
gaaaggaaagccgactcgcatttcg

SEQ ID NO: 55682 - DNA, 25 bp, Homo sapien
ccagtttatctgccgaggattcctc

SEQ ID NO: 55683 - DNA, 25 bp, Homo sapien
tctgtagaggacagtccagtttatc

SEQ ID NO: 55684 - DNA, 25 bp, Homo sapien
aatttgactgctcggcgggttcttt

SEQ ID NO: 55685 - DNA, 25 bp, Homo sapien
agtaatggccctctggaatttgact

SEQ ID NO: 55686 - DNA, 25 bp, Homo sapien
tatcagcaagagatgcaccagtaat

SEQ ID NO: 55687 - DNA, 25 bp, Homo sapien
agcagccctgatagcttgttctcgt

SEQ ID NO: 55688 - DNA, 25 bp, Homo sapien
tctgtagaggacagtccagtttatc

SEQ ID NO: 55689 - DNA, 25 bp, Homo sapien
tatcagcaagagatgcaccagtaat

SEQ ID NO: 55690 - DNA, 25 bp, Homo sapien
agcagccctgatagcttgttctcgt

SEQ ID NO: 55691 - DNA, 25 bp, Homo sapien
ccagtttatctgccgaggattcctc

SEQ ID NO: 55692 - DNA, 25 bp, Homo sapien
tgtccggggtagatcttgtacccgc

SEQ ID NO: 55693 - DNA, 25 bp, Homo sapien
cccgctaaaactgcacagctcgacc

SEQ ID NO: 55694 - DNA, 25 bp, Homo sapien
gaaaggaaagccgactcgcatttcg

SEQ ID NO: 55695 - DNA, 25 bp, Homo sapien
agtaatggccctctggaatttgact

SEQ ID NO: 55696 - DNA, 25 bp, Homo sapien
acagctccacggaaagacaaaagat

SEQ ID NO: 55697 - DNA, 25 bp, Homo sapien
gctcgaccttcatggcgacagctcc

SEQ ID NO: 55698 - DNA, 25 bp, Homo sapien
aatttgactgctcggcgggttcttt

SEQ ID NO: 55699 - DNA, 25 bp, Homo sapien
acagctccacggaaagacaaaagat

SEQ ID NO: 55700 - DNA, 25 bp, Homo sapien
gctcgaccttcatggcgacagctcc

SEQ ID NO: 55701 - DNA, 25 bp, Homo sapien
cccgctaaaactgcacagctcgacc

SEQ ID NO: 55702 - DNA, 25 bp, Homo sapien
tgtccggggtagatcttgtacccgc

SEQ ID NO: 55703 - DNA, 25 bp, Homo sapien
gaaaggaaagccgactcgcatttcg

SEQ ID NO: 55704 - DNA, 25 bp, Homo sapien
ccagtttatctgccgaggattcctc

SEQ ID NO: 55705 - DNA, 25 bp, Homo sapien
tctgtagaggacagtccagtttatc

SEQ ID NO: 55706 - DNA, 25 bp, Homo sapien
aatttgactgctcggcgggttcttt

SEQ ID NO: 55707 - DNA, 25 bp, Homo sapien
agtaatggccctctggaatttgact

SEQ ID NO: 55708 - DNA, 25 bp, Homo sapien
tatcagcaagagatgcaccagtaat

SEQ ID NO: 55709 - DNA, 25 bp, Homo sapien
agcagccctgatagcttgttctcgt

SEQ ID NO: 55710 - DNA, 25 bp, Homo sapien
ccagtttatctgccgaggattcctc

SEQ ID NO: 55711 - DNA, 25 bp, Homo sapien
acagctccacggaaagacaaaagat

SEQ ID NO: 55712 - DNA, 25 bp, Homo sapien
tctgtagaggacagtccagtttatc

SEQ ID NO: 55713 - DNA, 25 bp, Homo sapien
aatttgactgctcggcgggttcttt

SEQ ID NO: 55714 - DNA, 25 bp, Homo sapien
agtaatggccctctggaatttgact

SEQ ID NO: 55715 - DNA, 25 bp, Homo sapien
cccgctaaaactgcacagctcgacc

SEQ ID NO: 55716 - DNA, 25 bp, Homo sapien
tgtccggggtagatcttgtacccgc

SEQ ID NO: 55717 - DNA, 25 bp, Homo sapien
gaaaggaaagccgactcgcatttcg

SEQ ID NO: 55718 - DNA, 25 bp, Homo sapien
tatcagcaagagatgcaccagtaat

SEQ ID NO: 55719 - DNA, 25 bp, Homo sapien
agcagccctgatagcttgttctcgt

SEQ ID NO: 55720 - DNA, 25 bp, Homo sapien
gctcgaccttcatggcgacagctcc

SEQ ID NO: 55721 - DNA, 25 bp, Homo sapien
acagctccacggaaagacaaaagat

SEQ ID NO: 55722 - DNA, 25 bp, Homo sapien
gctcgaccttcatggcgacagctcc

SEQ ID NO: 55723 - DNA, 25 bp, Homo sapien
cccgctaaaactgcacagctcgacc

SEQ ID NO: 55724 - DNA, 25 bp, Homo sapien
tgtccggggtagatcttgtacccgc

SEQ ID NO: 55725 - DNA, 25 bp, Homo sapien
gaaaggaaagccgactcgcatttcg

SEQ ID NO: 55726 - DNA, 25 bp, Homo sapien
ccagtttatctgccgaggattcctc

SEQ ID NO: 55727 - DNA, 25 bp, Homo sapien
tctgtagaggacagtccagtttatc

SEQ ID NO: 55728 - DNA, 25 bp, Homo sapien
aatttgactgctcggcgggttcttt

SEQ ID NO: 55729 - DNA, 25 bp, Homo sapien
agtaatggccctctggaatttgact

SEQ ID NO: 55730 - DNA, 25 bp, Homo sapien
tatcagcaagagatgcaccagtaat

SEQ ID NO: 55731 - DNA, 25 bp, Homo sapien
agcagccctgatagcttgttctcgt

SEQ ID NO: 55732 - DNA, 25 bp, Homo sapien
tgtccggggtagatcttgtacccgc

SEQ ID NO: 55733 - DNA, 25 bp, Homo sapien
acagctccacggaaagacaaaagat

SEQ ID NO: 55734 - DNA, 25 bp, Homo sapien
tctgtagaggacagtccagtttatc

SEQ ID NO: 55735 - DNA, 25 bp, Homo sapien
gaaaggaaagccgactcgcatttcg

SEQ ID NO: 55736 - DNA, 25 bp, Homo sapien
agcagccctgatagcttgttctcgt

SEQ ID NO: 55737 - DNA, 25 bp, Homo sapien
ccagtttatctgccgaggattcctc

SEQ ID NO: 55738 - DNA, 25 bp, Homo sapien
tatcagcaagagatgcaccagtaat

SEQ ID NO: 55739 - DNA, 25 bp, Homo sapien
aatttgactgctcggcgggttcttt

SEQ ID NO: 55740 - DNA, 25 bp, Homo sapien
gctcgaccttcatggcgacagctcc

SEQ ID NO: 55741 - DNA, 25 bp, Homo sapien
cccgctaaaactgcacagctcgacc

SEQ ID NO: 55742 - DNA, 25 bp, Homo sapien
agtaatggccctctggaatttgact

SEQ ID NO: 55743 - DNA, 25 bp, Homo sapien
acagctccacggaaagacaaaagat

SEQ ID NO: 55744 - DNA, 25 bp, Homo sapien
gctcgaccttcatggcgacagctcc

SEQ ID NO: 55745 - DNA, 25 bp, Homo sapien
cccgctaaaactgcacagctcgacc

SEQ ID NO: 55746 - DNA, 25 bp, Homo sapien
tgtccggggtagatcttgtacccgc

SEQ ID NO: 55747 - DNA, 25 bp, Homo sapien
gaaaggaaagccgactcgcatttcg

SEQ ID NO: 55748 - DNA, 25 bp, Homo sapien
ccagtttatctgccgaggattcctc

SEQ ID NO: 55749 - DNA, 25 bp, Homo sapien
tctgtagaggacagtccagtttatc

SEQ ID NO: 55750 - DNA, 25 bp, Homo sapien
aatttgactgctcggcgggttcttt

SEQ ID NO: 55751 - DNA, 25 bp, Homo sapien
agtaatggccctctggaatttgact

SEQ ID NO: 55752 - DNA, 25 bp, Homo sapien
tatcagcaagagatgcaccagtaat

SEQ ID NO: 55753 - DNA, 25 bp, Homo sapien
agcagccctgatagcttgttctcgt

SEQ ID NO: 55754 - DNA, 25 bp, Homo sapien
tatcagcaagagatgcaccagtaat

SEQ ID NO: 55755 - DNA, 25 bp, Homo sapien
agtaatggccctctggaatttgact

SEQ ID NO: 55756 - DNA, 25 bp, Homo sapien
tgtccggggtagatcttgtacccgc

SEQ ID NO: 55757 - DNA, 25 bp, Homo sapien
agcagccctgatagcttgttctcgt

SEQ ID NO: 55758 - DNA, 25 bp, Homo sapien
aatttgactgctcggcgggttcttt

SEQ ID NO: 55759 - DNA, 25 bp, Homo sapien
ccagtttatctgccgaggattcctc

SEQ ID NO: 55760 - DNA, 25 bp, Homo sapien
gctcgaccttcatggcgacagctcc

SEQ ID NO: 55761 - DNA, 25 bp, Homo sapien
cccgctaaaactgcacagctcgacc

SEQ ID NO: 55762 - DNA, 25 bp, Homo sapien
gaaaggaaagccgactcgcatttcg

SEQ ID NO: 55763 - DNA, 25 bp, Homo sapien
tctgtagaggacagtccagtttatc

SEQ ID NO: 55764 - DNA, 25 bp, Homo sapien
acagctccacggaaagacaaaagat

SEQ ID NO: 55765 - DNA, 25 bp, Homo sapien
acagctccacggaaagacaaaagat

SEQ ID NO: 55766 - DNA, 25 bp, Homo sapien
gctcgaccttcatggcgacagctcc

SEQ ID NO: 55767 - DNA, 25 bp, Homo sapien
cccgctaaaactgcacagctcgacc

SEQ ID NO: 55768 - DNA, 25 bp, Homo sapien
tgtccggggtagatcttgtacccgc

SEQ ID NO: 55769 - DNA, 25 bp, Homo sapien
gaaaggaaagccgactcgcatttcg

SEQ ID NO: 55770 - DNA, 25 bp, Homo sapien
ccagtttatctgccgaggattcctc

SEQ ID NO: 55771 - DNA, 25 bp, Homo sapien
tctgtagaggacagtccagtttatc

SEQ ID NO: 55772 - DNA, 25 bp, Homo sapien
aatttgactgctcggcgggttcttt

SEQ ID NO: 55773 - DNA, 25 bp, Homo sapien
agtaatggccctctggaatttgact

SEQ ID NO: 55774 - DNA, 25 bp, Homo sapien
tatcagcaagagatgcaccagtaat

SEQ ID NO: 55775 - DNA, 25 bp, Homo sapien
agcagccctgatagcttgttctcgt

SEQ ID NO: 55776 - DNA, 25 bp, Homo sapien
gaaaggaaagccgactcgcatttcg

SEQ ID NO: 55777 - DNA, 25 bp, Homo sapien
acagctccacggaaagacaaaagat

SEQ ID NO: 55778 - DNA, 25 bp, Homo sapien
ccagtttatctgccgaggattcctc

SEQ ID NO: 55779 - DNA, 25 bp, Homo sapien
tctgtagaggacagtccagtttatc

SEQ ID NO: 55780 - DNA, 25 bp, Homo sapien
agtaatggccctctggaatttgact

SEQ ID NO: 55781 - DNA, 25 bp, Homo sapien
tgtccggggtagatcttgtacccgc

SEQ ID NO: 55782 - DNA, 25 bp, Homo sapien
tatcagcaagagatgcaccagtaat

SEQ ID NO: 55783 - DNA, 25 bp, Homo sapien
gctcgaccttcatggcgacagctcc

SEQ ID NO: 55784 - DNA, 25 bp, Homo sapien
aatttgactgctcggcgggttcttt

SEQ ID NO: 55785 - DNA, 25 bp, Homo sapien
agcagccctgatagcttgttctcgt

SEQ ID NO: 55786 - DNA, 25 bp, Homo sapien
cccgctaaaactgcacagctcgacc

SEQ ID NO: 55787 - DNA, 25 bp, Homo sapien
ccagtttatctgccgaggattcctc

SEQ ID NO: 55788 - DNA, 25 bp, Homo sapien
tatcagcaagagatgcaccagtaat

SEQ ID NO: 55789 - DNA, 25 bp, Homo sapien
gaaaggaaagccgactcgcatttcg

SEQ ID NO: 55790 - DNA, 25 bp, Homo sapien
aatttgactgctcggcgggttcttt

SEQ ID NO: 55791 - DNA, 25 bp, Homo sapien
acagctccacggaaagacaaaagat

SEQ ID NO: 55792 - DNA, 25 bp, Homo sapien
cccgctaaaactgcacagctcgacc

SEQ ID NO: 55793 - DNA, 25 bp, Homo sapien
tgtccggggtagatcttgtacccgc

SEQ ID NO: 55794 - DNA, 25 bp, Homo sapien
gctcgaccttcatggcgacagctcc

SEQ ID NO: 55795 - DNA, 25 bp, Homo sapien
agtaatggccctctggaatttgact

SEQ ID NO: 55796 - DNA, 25 bp, Homo sapien
agcagccctgatagcttgttctcgt

SEQ ID NO: 55797 - DNA, 25 bp, Homo sapien
tctgtagaggacagtccagtttatc

SEQ ID NO: 55798 - DNA, 25 bp, Homo sapien
acagctccacggaaagacaaaagat

SEQ ID NO: 55799 - DNA, 25 bp, Homo sapien
gctcgaccttcatggcgacagctcc

SEQ ID NO: 55800 - DNA, 25 bp, Homo sapien
cccgctaaaactgcacagctcgacc

SEQ ID NO: 55801 - DNA, 25 bp, Homo sapien
tgtccggggtagatcttgtacccgc

SEQ ID NO: 55802 - DNA, 25 bp, Homo sapien
gaaaggaaagccgactcgcatttcg

SEQ ID NO: 55803 - DNA, 25 bp, Homo sapien
ccagtttatctgccgaggattcctc

SEQ ID NO: 55804 - DNA, 25 bp, Homo sapien
tctgtagaggacagtccagtttatc

SEQ ID NO: 55805 - DNA, 25 bp, Homo sapien
aatttgactgctcggcgggttcttt

SEQ ID NO: 55806 - DNA, 25 bp, Homo sapien
agtaatggccctctggaatttgact

SEQ ID NO: 55807 - DNA, 25 bp, Homo sapien
tatcagcaagagatgcaccagtaat

SEQ ID NO: 55808 - DNA, 25 bp, Homo sapien
agcagccctgatagcttgttctcgt

SEQ ID NO: 55809 - DNA, 25 bp, Homo sapien
gctcgaccttcatggcgacagctcc

SEQ ID NO: 55810 - DNA, 25 bp, Homo sapien
acagctccacggaaagacaaaagat

SEQ ID NO: 55811 - DNA, 25 bp, Homo sapien
tctgtagaggacagtccagtttatc

SEQ ID NO: 55812 - DNA, 25 bp, Homo sapien
tatcagcaagagatgcaccagtaat

SEQ ID NO: 55813 - DNA, 25 bp, Homo sapien
cccgctaaaactgcacagctcgacc

SEQ ID NO: 55814 - DNA, 25 bp, Homo sapien
tgtccggggtagatcttgtacccgc

SEQ ID NO: 55815 - DNA, 25 bp, Homo sapien
agtaatggccctctggaatttgact

SEQ ID NO: 55816 - DNA, 25 bp, Homo sapien
aatttgactgctcggcgggttcttt

SEQ ID NO: 55817 - DNA, 25 bp, Homo sapien
gaaaggaaagccgactcgcatttcg

SEQ ID NO: 55818 - DNA, 25 bp, Homo sapien
agcagccctgatagcttgttctcgt

SEQ ID NO: 55819 - DNA, 25 bp, Homo sapien
ccagtttatctgccgaggattcctc

SEQ ID NO: 55820 - DNA, 25 bp, Homo sapien
acagctccacggaaagacaaaagat

SEQ ID NO: 55821 - DNA, 25 bp, Homo sapien
gctcgaccttcatggcgacagctcc

SEQ ID NO: 55822 - DNA, 25 bp, Homo sapien
cccgctaaaactgcacagctcgacc

SEQ ID NO: 55823 - DNA, 25 bp, Homo sapien
tgtccggggtagatcttgtacccgc

SEQ ID NO: 55824 - DNA, 25 bp, Homo sapien
gaaaggaaagccgactcgcatttcg

SEQ ID NO: 55825 - DNA, 25 bp, Homo sapien
ccagtttatctgccgaggattcctc

SEQ ID NO: 55826 - DNA, 25 bp, Homo sapien
tctgtagaggacagtccagtttatc

SEQ ID NO: 55827 - DNA, 25 bp, Homo sapien
aatttgactgctcggcgggttcttt

SEQ ID NO: 55828 - DNA, 25 bp, Homo sapien
agtaatggccctctggaatttgact

SEQ ID NO: 55829 - DNA, 25 bp, Homo sapien
tatcagcaagagatgcaccagtaat

SEQ ID NO: 55830 - DNA, 25 bp, Homo sapien
agcagccctgatagcttgttctcgt

SEQ ID NO: 55831 - DNA, 25 bp, Homo sapien
agtaatggccctctggaatttgact

SEQ ID NO: 55832 - DNA, 25 bp, Homo sapien
gctcgaccttcatggcgacagctcc

SEQ ID NO: 55833 - DNA, 25 bp, Homo sapien
aatttgactgctcggcgggttcttt

SEQ ID NO: 55834 - DNA, 25 bp, Homo sapien
tatcagcaagagatgcaccagtaat

SEQ ID NO: 55835 - DNA, 25 bp, Homo sapien
tctgtagaggacagtccagtttatc

SEQ ID NO: 55836 - DNA, 25 bp, Homo sapien
ccagtttatctgccgaggattcctc

SEQ ID NO: 55837 - DNA, 25 bp, Homo sapien
gaaaggaaagccgactcgcatttcg

SEQ ID NO: 55838 - DNA, 25 bp, Homo sapien
tgtccggggtagatcttgtacccgc

SEQ ID NO: 55839 - DNA, 25 bp, Homo sapien
cccgctaaaactgcacagctcgacc

SEQ ID NO: 55840 - DNA, 25 bp, Homo sapien
agcagccctgatagcttgttctcgt

SEQ ID NO: 55841 - DNA, 25 bp, Homo sapien
acagctccacggaaagacaaaagat

SEQ ID NO: 55842 - DNA, 25 bp, Homo sapien
acagctccacggaaagacaaaagat

SEQ ID NO: 55843 - DNA, 25 bp, Homo sapien
gctcgaccttcatggcgacagctcc

SEQ ID NO: 55844 - DNA, 25 bp, Homo sapien
cccgctaaaactgcacagctcgacc

SEQ ID NO: 55845 - DNA, 25 bp, Homo sapien
tgtccggggtagatcttgtacccgc

SEQ ID NO: 55846 - DNA, 25 bp, Homo sapien
gaaaggaaagccgactcgcatttcg

SEQ ID NO: 55847 - DNA, 25 bp, Homo sapien
ccagtttatctgccgaggattcctc

SEQ ID NO: 55848 - DNA, 25 bp, Homo sapien
tctgtagaggacagtccagtttatc

SEQ ID NO: 55849 - DNA, 25 bp, Homo sapien
aatttgactgctcggcgggttcttt

SEQ ID NO: 55850 - DNA, 25 bp, Homo sapien
agtaatggccctctggaatttgact

SEQ ID NO: 55851 - DNA, 25 bp, Homo sapien
tatcagcaagagatgcaccagtaat

SEQ ID NO: 55852 - DNA, 25 bp, Homo sapien
agcagccctgatagcttgttctcgt

SEQ ID NO: 55853 - DNA, 25 bp, Homo sapien
acagctccacggaaagacaaaagat

SEQ ID NO: 55854 - DNA, 25 bp, Homo sapien
gctcgaccttcatggcgacagctcc

SEQ ID NO: 55855 - DNA, 25 bp, Homo sapien
cccgctaaaactgcacagctcgacc

SEQ ID NO: 55856 - DNA, 25 bp, Homo sapien
agtaatggccctctggaatttgact

SEQ ID NO: 55857 - DNA, 25 bp, Homo sapien
aatttgactgctcggcgggttcttt

SEQ ID NO: 55858 - DNA, 25 bp, Homo sapien
gaaaggaaagccgactcgcatttcg

SEQ ID NO: 55859 - DNA, 25 bp, Homo sapien
tctgtagaggacagtccagtttatc

SEQ ID NO: 55860 - DNA, 25 bp, Homo sapien
tgtccggggtagatcttgtacccgc

SEQ ID NO: 55861 - DNA, 25 bp, Homo sapien
ccagtttatctgccgaggattcctc

SEQ ID NO: 55862 - DNA, 25 bp, Homo sapien
tatcagcaagagatgcaccagtaat

SEQ ID NO: 55863 - DNA, 25 bp, Homo sapien
agcagccctgatagcttgttctcgt

SEQ ID NO: 55864 - DNA, 25 bp, Homo sapien
acagctccacggaaagacaaaagat

SEQ ID NO: 55865 - DNA, 25 bp, Homo sapien
gctcgaccttcatggcgacagctcc

SEQ ID NO: 55866 - DNA, 25 bp, Homo sapien
cccgctaaaactgcacagctcgacc

SEQ ID NO: 55867 - DNA, 25 bp, Homo sapien
tgtccggggtagatcttgtacccgc

SEQ ID NO: 55868 - DNA, 25 bp, Homo sapien
gaaaggaaagccgactcgcatttcg

SEQ ID NO: 55869 - DNA, 25 bp, Homo sapien
ccagtttatctgccgaggattcctc

SEQ ID NO: 55870 - DNA, 25 bp, Homo sapien
tctgtagaggacagtccagtttatc

SEQ ID NO: 55871 - DNA, 25 bp, Homo sapien
aatttgactgctcggcgggttcttt

SEQ ID NO: 55872 - DNA, 25 bp, Homo sapien
agtaatggccctctggaatttgact

SEQ ID NO: 55873 - DNA, 25 bp, Homo sapien
tatcagcaagagatgcaccagtaat

SEQ ID NO: 55874 - DNA, 25 bp, Homo sapien
agcagccctgatagcttgttctcgt

SEQ ID NO: 55875 - DNA, 25 bp, Homo sapien
tgtccggggtagatcttgtacccgc

SEQ ID NO: 55876 - DNA, 25 bp, Homo sapien
aatttgactgctcggcgggttcttt

SEQ ID NO: 55877 - DNA, 25 bp, Homo sapien
ccagtttatctgccgaggattcctc

SEQ ID NO: 55878 - DNA, 25 bp, Homo sapien
gctcgaccttcatggcgacagctcc

SEQ ID NO: 55879 - DNA, 25 bp, Homo sapien
acagctccacggaaagacaaaagat

SEQ ID NO: 55880 - DNA, 25 bp, Homo sapien
tatcagcaagagatgcaccagtaat

SEQ ID NO: 55881 - DNA, 25 bp, Homo sapien
agcagccctgatagcttgttctcgt

SEQ ID NO: 55882 - DNA, 25 bp, Homo sapien
gaaaggaaagccgactcgcatttcg

SEQ ID NO: 55883 - DNA, 25 bp, Homo sapien
tctgtagaggacagtccagtttatc

SEQ ID NO: 55884 - DNA, 25 bp, Homo sapien
agtaatggccctctggaatttgact

SEQ ID NO: 55885 - DNA, 25 bp, Homo sapien
cccgctaaaactgcacagctcgacc

SEQ ID NO: 55886 - DNA, 25 bp, Homo sapien
acagctccacggaaagacaaaagat

SEQ ID NO: 55887 - DNA, 25 bp, Homo sapien
gctcgaccttcatggcgacagctcc

SEQ ID NO: 55888 - DNA, 25 bp, Homo sapien
cccgctaaaactgcacagctcgacc

SEQ ID NO: 55889 - DNA, 25 bp, Homo sapien
tgtccggggtagatcttgtacccgc

SEQ ID NO: 55890 - DNA, 25 bp, Homo sapien
gaaaggaaagccgactcgcatttcg

SEQ ID NO: 55891 - DNA, 25 bp, Homo sapien
ccagtttatctgccgaggattcctc

SEQ ID NO: 55892 - DNA, 25 bp, Homo sapien
tctgtagaggacagtccagtttatc

SEQ ID NO: 55893 - DNA, 25 bp, Homo sapien
aatttgactgctcggcgggttcttt

SEQ ID NO: 55894 - DNA, 25 bp, Homo sapien
agtaatggccctctggaatttgact

SEQ ID NO: 55895 - DNA, 25 bp, Homo sapien
tatcagcaagagatgcaccagtaat

SEQ ID NO: 55896 - DNA, 25 bp, Homo sapien
agcagccctgatagcttgttctcgt

SEQ ID NO: 55897 - DNA, 25 bp, Homo sapien
tctgtagaggacagtccagtttatc

SEQ ID NO: 55898 - DNA, 25 bp, Homo sapien
acagctccacggaaagacaaaagat

SEQ ID NO: 55899 - DNA, 25 bp, Homo sapien
cccgctaaaactgcacagctcgacc

SEQ ID NO: 55900 - DNA, 25 bp, Homo sapien
gaaaggaaagccgactcgcatttcg

SEQ ID NO: 55901 - DNA, 25 bp, Homo sapien
agtaatggccctctggaatttgact

SEQ ID NO: 55902 - DNA, 25 bp, Homo sapien
agcagccctgatagcttgttctcgt

SEQ ID NO: 55903 - DNA, 25 bp, Homo sapien
aatttgactgctcggcgggttcttt

SEQ ID NO: 55904 - DNA, 25 bp, Homo sapien
tatcagcaagagatgcaccagtaat

SEQ ID NO: 55905 - DNA, 25 bp, Homo sapien
gctcgaccttcatggcgacagctcc

SEQ ID NO: 55906 - DNA, 25 bp, Homo sapien
ccagtttatctgccgaggattcctc

SEQ ID NO: 55907 - DNA, 25 bp, Homo sapien
tgtccggggtagatcttgtacccgc

SEQ ID NO: 55908 - DNA, 25 bp, Homo sapien
acagctccacggaaagacaaaagat

SEQ ID NO: 55909 - DNA, 25 bp, Homo sapien
gctcgaccttcatggcgacagctcc

SEQ ID NO: 55910 - DNA, 25 bp, Homo sapien
cccgctaaaactgcacagctcgacc

SEQ ID NO: 55911 - DNA, 25 bp, Homo sapien
tgtccggggtagatcttgtacccgc

SEQ ID NO: 55912 - DNA, 25 bp, Homo sapien
gaaaggaaagccgactcgcatttcg

SEQ ID NO: 55913 - DNA, 25 bp, Homo sapien
ccagtttatctgccgaggattcctc

SEQ ID NO: 55914 - DNA, 25 bp, Homo sapien
tctgtagaggacagtccagtttatc

SEQ ID NO: 55915 - DNA, 25 bp, Homo sapien
aatttgactgctcggcgggttcttt

SEQ ID NO: 55916 - DNA, 25 bp, Homo sapien
agtaatggccctctggaatttgact

SEQ ID NO: 55917 - DNA, 25 bp, Homo sapien
tatcagcaagagatgcaccagtaat

SEQ ID NO: 55918 - DNA, 25 bp, Homo sapien
agcagccctgatagcttgttctcgt

SEQ ID NO: 55919 - DNA, 25 bp, Homo sapien
acagctccacggaaagacaaaagat

SEQ ID NO: 55920 - DNA, 25 bp, Homo sapien
gctcgaccttcatggcgacagctcc

SEQ ID NO: 55921 - DNA, 25 bp, Homo sapien
cccgctaaaactgcacagctcgacc

SEQ ID NO: 55922 - DNA, 25 bp, Homo sapien
tgtccggggtagatcttgtacccgc

SEQ ID NO: 55923 - DNA, 25 bp, Homo sapien
gaaaggaaagccgactcgcatttcg

SEQ ID NO: 55924 - DNA, 25 bp, Homo sapien
ccagtttatctgccgaggattcctc

SEQ ID NO: 55925 - DNA, 25 bp, Homo sapien
tctgtagaggacagtccagtttatc

SEQ ID NO: 55926 - DNA, 25 bp, Homo sapien
aatttgactgctcggcgggttcttt

SEQ ID NO: 55927 - DNA, 25 bp, Homo sapien
agtaatggccctctggaatttgact

SEQ ID NO: 55928 - DNA, 25 bp, Homo sapien
tatcagcaagagatgcaccagtaat

SEQ ID NO: 55929 - DNA, 25 bp, Homo sapien
agcagccctgatagcttgttctcgt

SEQ ID NO: 55930 - DNA, 25 bp, Homo sapien
gctcgaccttcatggcgacagctcc

SEQ ID NO: 55931 - DNA, 25 bp, Homo sapien
aatttgactgctcggcgggttcttt

SEQ ID NO: 55932 - DNA, 25 bp, Homo sapien
tctgtagaggacagtccagtttatc

SEQ ID NO: 55933 - DNA, 25 bp, Homo sapien
agtaatggccctctggaatttgact

SEQ ID NO: 55934 - DNA, 25 bp, Homo sapien
agcagccctgatagcttgttctcgt

SEQ ID NO: 55935 - DNA, 25 bp, Homo sapien
ccagtttatctgccgaggattcctc

SEQ ID NO: 55936 - DNA, 25 bp, Homo sapien
acagctccacggaaagacaaaagat

SEQ ID NO: 55937 - DNA, 25 bp, Homo sapien
gaaaggaaagccgactcgcatttcg

SEQ ID NO: 55938 - DNA, 25 bp, Homo sapien
cccgctaaaactgcacagctcgacc

SEQ ID NO: 55939 - DNA, 25 bp, Homo sapien
tgtccggggtagatcttgtacccgc

SEQ ID NO: 55940 - DNA, 25 bp, Homo sapien
tatcagcaagagatgcaccagtaat

SEQ ID NO: 55941 - DNA, 25 bp, Homo sapien
acagctccacggaaagacaaaagat

SEQ ID NO: 55942 - DNA, 25 bp, Homo sapien
gctcgaccttcatggcgacagctcc

SEQ ID NO: 55943 - DNA, 25 bp, Homo sapien
cccgctaaaactgcacagctcgacc

SEQ ID NO: 55944 - DNA, 25 bp, Homo sapien
tgtccggggtagatcttgtacccgc

SEQ ID NO: 55945 - DNA, 25 bp, Homo sapien
gaaaggaaagccgactcgcatttcg

SEQ ID NO: 55946 - DNA, 25 bp, Homo sapien
ccagtttatctgccgaggattcctc

SEQ ID NO: 55947 - DNA, 25 bp, Homo sapien
tctgtagaggacagtccagtttatc

SEQ ID NO: 55948 - DNA, 25 bp, Homo sapien
aatttgactgctcggcgggttcttt

SEQ ID NO: 55949 - DNA, 25 bp, Homo sapien
agtaatggccctctggaatttgact

SEQ ID NO: 55950 - DNA, 25 bp, Homo sapien
tatcagcaagagatgcaccagtaat

SEQ ID NO: 55951 - DNA, 25 bp, Homo sapien
agcagccctgatagcttgttctcgt

SEQ ID NO: 55952 - DNA, 25 bp, Homo sapien
acagctccacggaaagacaaaagat

SEQ ID NO: 55953 - DNA, 25 bp, Homo sapien
agcagccctgatagcttgttctcgt

SEQ ID NO: 55954 - DNA, 25 bp, Homo sapien
tatcagcaagagatgcaccagtaat

SEQ ID NO: 55955 - DNA, 25 bp, Homo sapien
aatttgactgctcggcgggttcttt

SEQ ID NO: 55956 - DNA, 25 bp, Homo sapien
tctgtagaggacagtccagtttatc

SEQ ID NO: 55957 - DNA, 25 bp, Homo sapien
cccgctaaaactgcacagctcgacc

SEQ ID NO: 55958 - DNA, 25 bp, Homo sapien
agtaatggccctctggaatttgact

SEQ ID NO: 55959 - DNA, 25 bp, Homo sapien
ccagtttatctgccgaggattcctc

SEQ ID NO: 55960 - DNA, 25 bp, Homo sapien
gctcgaccttcatggcgacagctcc

SEQ ID NO: 55961 - DNA, 25 bp, Homo sapien
gaaaggaaagccgactcgcatttcg

SEQ ID NO: 55962 - DNA, 25 bp, Homo sapien
tgtccggggtagatcttgtacccgc

SEQ ID NO: 55963 - DNA, 25 bp, Homo sapien
acagctccacggaaagacaaaagat

SEQ ID NO: 55964 - DNA, 25 bp, Homo sapien
gctcgaccttcatggcgacagctcc

SEQ ID NO: 55965 - DNA, 25 bp, Homo sapien
cccgctaaaactgcacagctcgacc

SEQ ID NO: 55966 - DNA, 25 bp, Homo sapien
tgtccggggtagatcttgtacccgc

SEQ ID NO: 55967 - DNA, 25 bp, Homo sapien
gaaaggaaagccgactcgcatttcg

SEQ ID NO: 55968 - DNA, 25 bp, Homo sapien
ccagtttatctgccgaggattcctc

SEQ ID NO: 55969 - DNA, 25 bp, Homo sapien
tctgtagaggacagtccagtttatc

SEQ ID NO: 55970 - DNA, 25 bp, Homo sapien
aatttgactgctcggcgggttcttt

SEQ ID NO: 55971 - DNA, 25 bp, Homo sapien
agtaatggccctctggaatttgact

SEQ ID NO: 55972 - DNA, 25 bp, Homo sapien
tatcagcaagagatgcaccagtaat

SEQ ID NO: 55973 - DNA, 25 bp, Homo sapien
agcagccctgatagcttgttctcgt

SEQ ID NO: 55974 - DNA, 25 bp, Homo sapien
agtaatggccctctggaatttgact

SEQ ID NO: 55975 - DNA, 25 bp, Homo sapien
tctgtagaggacagtccagtttatc

SEQ ID NO: 55976 - DNA, 25 bp, Homo sapien
acagctccacggaaagacaaaagat

SEQ ID NO: 55977 - DNA, 25 bp, Homo sapien
aatttgactgctcggcgggttcttt

SEQ ID NO: 55978 - DNA, 25 bp, Homo sapien
tatcagcaagagatgcaccagtaat

SEQ ID NO: 55979 - DNA, 25 bp, Homo sapien
cccgctaaaactgcacagctcgacc

SEQ ID NO: 55980 - DNA, 25 bp, Homo sapien
agcagccctgatagcttgttctcgt

SEQ ID NO: 55981 - DNA, 25 bp, Homo sapien
tgtccggggtagatcttgtacccgc

SEQ ID NO: 55982 - DNA, 25 bp, Homo sapien
gaaaggaaagccgactcgcatttcg

SEQ ID NO: 55983 - DNA, 25 bp, Homo sapien
gctcgaccttcatggcgacagctcc

SEQ ID NO: 55984 - DNA, 25 bp, Homo sapien
ccagtttatctgccgaggattcctc

SEQ ID NO: 55985 - DNA, 25 bp, Homo sapien
acagctccacggaaagacaaaagat

SEQ ID NO: 55986 - DNA, 25 bp, Homo sapien
gctcgaccttcatggcgacagctcc

SEQ ID NO: 55987 - DNA, 25 bp, Homo sapien
cccgctaaaactgcacagctcgacc

SEQ ID NO: 55988 - DNA, 25 bp, Homo sapien
tgtccggggtagatcttgtacccgc

SEQ ID NO: 55989 - DNA, 25 bp, Homo sapien
gaaaggaaagccgactcgcatttcg

SEQ ID NO: 55990 - DNA, 25 bp, Homo sapien
ccagtttatctgccgaggattcctc

SEQ ID NO: 55991 - DNA, 25 bp, Homo sapien
tctgtagaggacagtccagtttatc

SEQ ID NO: 55992 - DNA, 25 bp, Homo sapien
aatttgactgctcggcgggttcttt

SEQ ID NO: 55993 - DNA, 25 bp, Homo sapien
agtaatggccctctggaatttgact

SEQ ID NO: 55994 - DNA, 25 bp, Homo sapien
tatcagcaagagatgcaccagtaat

SEQ ID NO: 55995 - DNA, 25 bp, Homo sapien
agcagccctgatagcttgttctcgt

SEQ ID NO: 55996 - DNA, 25 bp, Homo sapien
gaaaggaaagccgactcgcatttcg

SEQ ID NO: 55997 - DNA, 25 bp, Homo sapien
gctcgaccttcatggcgacagctcc

SEQ ID NO: 55998 - DNA, 25 bp, Homo sapien
ccagtttatctgccgaggattcctc

SEQ ID NO: 55999 - DNA, 25 bp, Homo sapien
aatttgactgctcggcgggttcttt

SEQ ID NO: 56000 - DNA, 25 bp, Homo sapien
agcagccctgatagcttgttctcgt

SEQ ID NO: 56001 - DNA, 25 bp, Homo sapien
agtaatggccctctggaatttgact

SEQ ID NO: 56002 - DNA, 25 bp, Homo sapien
tatcagcaagagatgcaccagtaat

SEQ ID NO: 56003 - DNA, 25 bp, Homo sapien
acagctccacggaaagacaaaagat

SEQ ID NO: 56004 - DNA, 25 bp, Homo sapien
tgtccggggtagatcttgtacccgc

SEQ ID NO: 56005 - DNA, 25 bp, Homo sapien
tctgtagaggacagtccagtttatc

SEQ ID NO: 56006 - DNA, 25 bp, Homo sapien
cccgctaaaactgcacagctcgacc

SEQ ID NO: 56007 - DNA, 25 bp, Homo sapien
acagctccacggaaagacaaaagat

SEQ ID NO: 56008 - DNA, 25 bp, Homo sapien
gctcgaccttcatggcgacagctcc

SEQ ID NO: 56009 - DNA, 25 bp, Homo sapien
cccgctaaaactgcacagctcgacc

SEQ ID NO: 56010 - DNA, 25 bp, Homo sapien
tgtccggggtagatcttgtacccgc

SEQ ID NO: 56011 - DNA, 25 bp, Homo sapien
gaaaggaaagccgactcgcatttcg

SEQ ID NO: 56012 - DNA, 25 bp, Homo sapien
ccagtttatctgccgaggattcctc

SEQ ID NO: 56013 - DNA, 25 bp, Homo sapien
tctgtagaggacagtccagtttatc

SEQ ID NO: 56014 - DNA, 25 bp, Homo sapien
aatttgactgctcggcgggttcttt

SEQ ID NO: 56015 - DNA, 25 bp, Homo sapien
agtaatggccctctggaatttgact

SEQ ID NO: 56016 - DNA, 25 bp, Homo sapien
tatcagcaagagatgcaccagtaat

SEQ ID NO: 56017 - DNA, 25 bp, Homo sapien
agcagccctgatagcttgttctcgt

SEQ ID NO: 56018 - DNA, 25 bp, Homo sapien
agtaatggccctctggaatttgact

SEQ ID NO: 56019 - DNA, 25 bp, Homo sapien
tctgtagaggacagtccagtttatc

SEQ ID NO: 56020 - DNA, 25 bp, Homo sapien
gaaaggaaagccgactcgcatttcg

SEQ ID NO: 56021 - DNA, 25 bp, Homo sapien
agcagccctgatagcttgttctcgt

SEQ ID NO: 56022 - DNA, 25 bp, Homo sapien
gctcgaccttcatggcgacagctcc

SEQ ID NO: 56023 - DNA, 25 bp, Homo sapien
aatttgactgctcggcgggttcttt

SEQ ID NO: 56024 - DNA, 25 bp, Homo sapien
tgtccggggtagatcttgtacccgc

SEQ ID NO: 56025 - DNA, 25 bp, Homo sapien
tatcagcaagagatgcaccagtaat

SEQ ID NO: 56026 - DNA, 25 bp, Homo sapien
acagctccacggaaagacaaaagat

SEQ ID NO: 56027 - DNA, 25 bp, Homo sapien
ccagtttatctgccgaggattcctc

SEQ ID NO: 56028 - DNA, 25 bp, Homo sapien
cccgctaaaactgcacagctcgacc

SEQ ID NO: 56029 - DNA, 25 bp, Homo sapien
acagctccacggaaagacaaaagat

SEQ ID NO: 56030 - DNA, 25 bp, Homo sapien
tgtccggggtagatcttgtacccgc

SEQ ID NO: 56031 - DNA, 25 bp, Homo sapien
cccgctaaaactgcacagctcgacc

SEQ ID NO: 56032 - DNA, 25 bp, Homo sapien
tctgtagaggacagtccagtttatc

SEQ ID NO: 56033 - DNA, 25 bp, Homo sapien
ccagtttatctgccgaggattcctc

SEQ ID NO: 56034 - DNA, 25 bp, Homo sapien
agcagccctgatagcttgttctcgt

SEQ ID NO: 56035 - DNA, 25 bp, Homo sapien
agtaatggccctctggaatttgact

SEQ ID NO: 56036 - DNA, 25 bp, Homo sapien
gctcgaccttcatggcgacagctcc

SEQ ID NO: 56037 - DNA, 25 bp, Homo sapien
aatttgactgctcggcgggttcttt

SEQ ID NO: 56038 - DNA, 25 bp, Homo sapien
tatcagcaagagatgcaccagtaat

SEQ ID NO: 56039 - DNA, 25 bp, Homo sapien
gaaaggaaagccgactcgcatttcg

SEQ ID NO: 56040 - DNA, 25 bp, Homo sapien
acagctccacggaaagacaaaagat

SEQ ID NO: 56041 - DNA, 25 bp, Homo sapien
gctcgaccttcatggcgacagctcc

SEQ ID NO: 56042 - DNA, 25 bp, Homo sapien
cccgctaaaactgcacagctcgacc

SEQ ID NO: 56043 - DNA, 25 bp, Homo sapien
tgtccggggtagatcttgtacccgc

SEQ ID NO: 56044 - DNA, 25 bp, Homo sapien
gaaaggaaagccgactcgcatttcg

SEQ ID NO: 56045 - DNA, 25 bp, Homo sapien
ccagtttatctgccgaggattcctc

SEQ ID NO: 56046 - DNA, 25 bp, Homo sapien
tctgtagaggacagtccagtttatc

SEQ ID NO: 56047 - DNA, 25 bp, Homo sapien
aatttgactgctcggcgggttcttt

SEQ ID NO: 56048 - DNA, 25 bp, Homo sapien
agtaatggccctctggaatttgact

SEQ ID NO: 56049 - DNA, 25 bp, Homo sapien
tatcagcaagagatgcaccagtaat

SEQ ID NO: 56050 - DNA, 25 bp, Homo sapien
agcagccctgatagcttgttctcgt

SEQ ID NO: 56051 - DNA, 25 bp, Homo sapien
tctgtagaggacagtccagtttatc

SEQ ID NO: 56052 - DNA, 25 bp, Homo sapien
tgtccggggtagatcttgtacccgc

SEQ ID NO: 56053 - DNA, 25 bp, Homo sapien
cccgctaaaactgcacagctcgacc

SEQ ID NO: 56054 - DNA, 25 bp, Homo sapien
agtaatggccctctggaatttgact

SEQ ID NO: 56055 - DNA, 25 bp, Homo sapien
acagctccacggaaagacaaaagat

SEQ ID NO: 56056 - DNA, 25 bp, Homo sapien
agcagccctgatagcttgttctcgt

SEQ ID NO: 56057 - DNA, 25 bp, Homo sapien
tatcagcaagagatgcaccagtaat

SEQ ID NO: 56058 - DNA, 25 bp, Homo sapien
ccagtttatctgccgaggattcctc

SEQ ID NO: 56059 - DNA, 25 bp, Homo sapien
gctcgaccttcatggcgacagctcc

SEQ ID NO: 56060 - DNA, 25 bp, Homo sapien
gaaaggaaagccgactcgcatttcg

SEQ ID NO: 56061 - DNA, 25 bp, Homo sapien
aatttgactgctcggcgggttcttt

SEQ ID NO: 56062 - DNA, 25 bp, Homo sapien
acagctccacggaaagacaaaagat

SEQ ID NO: 56063 - DNA, 25 bp, Homo sapien
gctcgaccttcatggcgacagctcc

SEQ ID NO: 56064 - DNA, 25 bp, Homo sapien
cccgctaaaactgcacagctcgacc

SEQ ID NO: 56065 - DNA, 25 bp, Homo sapien
tgtccggggtagatcttgtacccgc

SEQ ID NO: 56066 - DNA, 25 bp, Homo sapien
gaaaggaaagccgactcgcatttcg

SEQ ID NO: 56067 - DNA, 25 bp, Homo sapien
ccagtttatctgccgaggattcctc

SEQ ID NO: 56068 - DNA, 25 bp, Homo sapien
tctgtagaggacagtccagtttatc

SEQ ID NO: 56069 - DNA, 25 bp, Homo sapien
aatttgactgctcggcgggttcttt

SEQ ID NO: 56070 - DNA, 25 bp, Homo sapien
agtaatggccctctggaatttgact

SEQ ID NO: 56071 - DNA, 25 bp, Homo sapien
tatcagcaagagatgcaccagtaat

SEQ ID NO: 56072 - DNA, 25 bp, Homo sapien
agcagccctgatagcttgttctcgt

SEQ ID NO: 56073 - DNA, 25 bp, Homo sapien
ccagtttatctgccgaggattcctc

SEQ ID NO: 56074 - DNA, 25 bp, Homo sapien
gaaaggaaagccgactcgcatttcg

SEQ ID NO: 56075 - DNA, 25 bp, Homo sapien
tatcagcaagagatgcaccagtaat

SEQ ID NO: 56076 - DNA, 25 bp, Homo sapien
aatttgactgctcggcgggttcttt

SEQ ID NO: 56077 - DNA, 25 bp, Homo sapien
tgtccggggtagatcttgtacccgc

SEQ ID NO: 56078 - DNA, 25 bp, Homo sapien
agcagccctgatagcttgttctcgt

SEQ ID NO: 56079 - DNA, 25 bp, Homo sapien
agtaatggccctctggaatttgact

SEQ ID NO: 56080 - DNA, 25 bp, Homo sapien
tctgtagaggacagtccagtttatc

SEQ ID NO: 56081 - DNA, 25 bp, Homo sapien
acagctccacggaaagacaaaagat

SEQ ID NO: 56082 - DNA, 25 bp, Homo sapien
gctcgaccttcatggcgacagctcc

SEQ ID NO: 56083 - DNA, 25 bp, Homo sapien
cccgctaaaactgcacagctcgacc

SEQ ID NO: 56084 - DNA, 25 bp, Homo sapien
acagctccacggaaagacaaaagat

SEQ ID NO: 56085 - DNA, 25 bp, Homo sapien
gctcgaccttcatggcgacagctcc

SEQ ID NO: 56086 - DNA, 25 bp, Homo sapien
cccgctaaaactgcacagctcgacc

SEQ ID NO: 56087 - DNA, 25 bp, Homo sapien
tgtccggggtagatcttgtacccgc

SEQ ID NO: 56088 - DNA, 25 bp, Homo sapien
gaaaggaaagccgactcgcatttcg

SEQ ID NO: 56089 - DNA, 25 bp, Homo sapien
ccagtttatctgccgaggattcctc

SEQ ID NO: 56090 - DNA, 25 bp, Homo sapien
tctgtagaggacagtccagtttatc

SEQ ID NO: 56091 - DNA, 25 bp, Homo sapien
aatttgactgctcggcgggttcttt

SEQ ID NO: 56092 - DNA, 25 bp, Homo sapien
agtaatggccctctggaatttgact

SEQ ID NO: 56093 - DNA, 25 bp, Homo sapien
tatcagcaagagatgcaccagtaat

SEQ ID NO: 56094 - DNA, 25 bp, Homo sapien
agcagccctgatagcttgttctcgt

SEQ ID NO: 56095 - DNA, 25 bp, Homo sapien
tcaaagctgctttcaagagctactc

SEQ ID NO: 56096 - DNA, 25 bp, Homo sapien
gtgagggtgtaacacacatacttct

SEQ ID NO: 56097 - DNA, 25 bp, Homo sapien
tgaaaagaactgtactccctgcata

SEQ ID NO: 56098 - DNA, 25 bp, Homo sapien
gttagggaagcaactactgaactta

SEQ ID NO: 56099 - DNA, 25 bp, Homo sapien
aactaaatgagattgcctttgcagt

SEQ ID NO: 56100 - DNA, 25 bp, Homo sapien
aaaaaggtcccaaacatcaggctgt

SEQ ID NO: 56101 - DNA, 25 bp, Homo sapien
actccctgcataacaagagattatt

SEQ ID NO: 56102 - DNA, 25 bp, Homo sapien
ttgcctttgcagttagggaagcaac

SEQ ID NO: 56103 - DNA, 25 bp, Homo sapien
ttgtgttgaactgccccacacagca

SEQ ID NO: 56104 - DNA, 25 bp, Homo sapien
tagaggatgcatttgacatgccaac

SEQ ID NO: 56105 - DNA, 25 bp, Homo sapien
ctgaacttatgtatgaatgaaaaga

SEQ ID NO: 56106 - DNA, 25 bp, Homo sapien
tcaaagctgctttcaagagctactc

SEQ ID NO: 56107 - DNA, 25 bp, Homo sapien
gtgagggtgtaacacacatacttct

SEQ ID NO: 56108 - DNA, 25 bp, Homo sapien
ttgtgttgaactgccccacacagca

SEQ ID NO: 56109 - DNA, 25 bp, Homo sapien
tagaggatgcatttgacatgccaac

SEQ ID NO: 56110 - DNA, 25 bp, Homo sapien
aaaaaggtcccaaacatcaggctgt

SEQ ID NO: 56111 - DNA, 25 bp, Homo sapien
actccctgcataacaagagattatt

SEQ ID NO: 56112 - DNA, 25 bp, Homo sapien
tgaaaagaactgtactccctgcata

SEQ ID NO: 56113 - DNA, 25 bp, Homo sapien
ctgaacttatgtatgaatgaaaaga

SEQ ID NO: 56114 - DNA, 25 bp, Homo sapien
gttagggaagcaactactgaactta

SEQ ID NO: 56115 - DNA, 25 bp, Homo sapien
ttgcctttgcagttagggaagcaac

SEQ ID NO: 56116 - DNA, 25 bp, Homo sapien
aactaaatgagattgcctttgcagt

SEQ ID NO: 56117 - DNA, 25 bp, Homo sapien
aactaaatgagattgcctttgcagt

SEQ ID NO: 56118 - DNA, 25 bp, Homo sapien
ttgcctttgcagttagggaagcaac

SEQ ID NO: 56119 - DNA, 25 bp, Homo sapien
actccctgcataacaagagattatt

SEQ ID NO: 56120 - DNA, 25 bp, Homo sapien
tagaggatgcatttgacatgccaac

SEQ ID NO: 56121 - DNA, 25 bp, Homo sapien
ttgtgttgaactgccccacacagca

SEQ ID NO: 56122 - DNA, 25 bp, Homo sapien
aaaaaggtcccaaacatcaggctgt

SEQ ID NO: 56123 - DNA, 25 bp, Homo sapien
ctgaacttatgtatgaatgaaaaga

SEQ ID NO: 56124 - DNA, 25 bp, Homo sapien
gtgagggtgtaacacacatacttct

SEQ ID NO: 56125 - DNA, 25 bp, Homo sapien
tcaaagctgctttcaagagctactc

SEQ ID NO: 56126 - DNA, 25 bp, Homo sapien
gttagggaagcaactactgaactta

SEQ ID NO: 56127 - DNA, 25 bp, Homo sapien
tgaaaagaactgtactccctgcata

SEQ ID NO: 56128 - DNA, 25 bp, Homo sapien
actccctgcataacaagagattatt

SEQ ID NO: 56129 - DNA, 25 bp, Homo sapien
tgaaaagaactgtactccctgcata

SEQ ID NO: 56130 - DNA, 25 bp, Homo sapien
ctgaacttatgtatgaatgaaaaga

SEQ ID NO: 56131 - DNA, 25 bp, Homo sapien
gttagggaagcaactactgaactta

SEQ ID NO: 56132 - DNA, 25 bp, Homo sapien
ttgcctttgcagttagggaagcaac

SEQ ID NO: 56133 - DNA, 25 bp, Homo sapien
aactaaatgagattgcctttgcagt

SEQ ID NO: 56134 - DNA, 25 bp, Homo sapien
tcaaagctgctttcaagagctactc

SEQ ID NO: 56135 - DNA, 25 bp, Homo sapien
gtgagggtgtaacacacatacttct

SEQ ID NO: 56136 - DNA, 25 bp, Homo sapien
ttgtgttgaactgccccacacagca

SEQ ID NO: 56137 - DNA, 25 bp, Homo sapien
tagaggatgcatttgacatgccaac

SEQ ID NO: 56138 - DNA, 25 bp, Homo sapien
aaaaaggtcccaaacatcaggctgt

SEQ ID NO: 56139 - DNA, 25 bp, Homo sapien
ttgcctttgcagttagggaagcaac

SEQ ID NO: 56140 - DNA, 25 bp, Homo sapien
gtgagggtgtaacacacatacttct

SEQ ID NO: 56141 - DNA, 25 bp, Homo sapien
tgaaaagaactgtactccctgcata

SEQ ID NO: 56142 - DNA, 25 bp, Homo sapien
tcaaagctgctttcaagagctactc

SEQ ID NO: 56143 - DNA, 25 bp, Homo sapien
aactaaatgagattgcctttgcagt

SEQ ID NO: 56144 - DNA, 25 bp, Homo sapien
gttagggaagcaactactgaactta

SEQ ID NO: 56145 - DNA, 25 bp, Homo sapien
ttgtgttgaactgccccacacagca

SEQ ID NO: 56146 - DNA, 25 bp, Homo sapien
aaaaaggtcccaaacatcaggctgt

SEQ ID NO: 56147 - DNA, 25 bp, Homo sapien
actccctgcataacaagagattatt

SEQ ID NO: 56148 - DNA, 25 bp, Homo sapien
ctgaacttatgtatgaatgaaaaga

SEQ ID NO: 56149 - DNA, 25 bp, Homo sapien
tagaggatgcatttgacatgccaac

SEQ ID NO: 56150 - DNA, 25 bp, Homo sapien
tcaaagctgctttcaagagctactc

SEQ ID NO: 56151 - DNA, 25 bp, Homo sapien
gtgagggtgtaacacacatacttct

SEQ ID NO: 56152 - DNA, 25 bp, Homo sapien
ttgtgttgaactgccccacacagca

SEQ ID NO: 56153 - DNA, 25 bp, Homo sapien
tagaggatgcatttgacatgccaac

SEQ ID NO: 56154 - DNA, 25 bp, Homo sapien
aaaaaggtcccaaacatcaggctgt

SEQ ID NO: 56155 - DNA, 25 bp, Homo sapien
actccctgcataacaagagattatt

SEQ ID NO: 56156 - DNA, 25 bp, Homo sapien
tgaaaagaactgtactccctgcata

SEQ ID NO: 56157 - DNA, 25 bp, Homo sapien
ctgaacttatgtatgaatgaaaaga

SEQ ID NO: 56158 - DNA, 25 bp, Homo sapien
gttagggaagcaactactgaactta

SEQ ID NO: 56159 - DNA, 25 bp, Homo sapien
ttgcctttgcagttagggaagcaac

SEQ ID NO: 56160 - DNA, 25 bp, Homo sapien
aactaaatgagattgcctttgcagt

SEQ ID NO: 56161 - DNA, 25 bp, Homo sapien
tcaaagctgctttcaagagctactc

SEQ ID NO: 56162 - DNA, 25 bp, Homo sapien
gtgagggtgtaacacacatacttct

SEQ ID NO: 56163 - DNA, 25 bp, Homo sapien
ttgtgttgaactgccccacacagca

SEQ ID NO: 56164 - DNA, 25 bp, Homo sapien
tagaggatgcatttgacatgccaac

SEQ ID NO: 56165 - DNA, 25 bp, Homo sapien
aaaaaggtcccaaacatcaggctgt

SEQ ID NO: 56166 - DNA, 25 bp, Homo sapien
actccctgcataacaagagattatt

SEQ ID NO: 56167 - DNA, 25 bp, Homo sapien
tgaaaagaactgtactccctgcata

SEQ ID NO: 56168 - DNA, 25 bp, Homo sapien
ctgaacttatgtatgaatgaaaaga

SEQ ID NO: 56169 - DNA, 25 bp, Homo sapien
gttagggaagcaactactgaactta

SEQ ID NO: 56170 - DNA, 25 bp, Homo sapien
ttgcctttgcagttagggaagcaac

SEQ ID NO: 56171 - DNA, 25 bp, Homo sapien
aactaaatgagattgcctttgcagt

SEQ ID NO: 56172 - DNA, 25 bp, Homo sapien
ttgtgttgaactgccccacacagca

SEQ ID NO: 56173 - DNA, 25 bp, Homo sapien
gtgagggtgtaacacacatacttct

SEQ ID NO: 56174 - DNA, 25 bp, Homo sapien
actccctgcataacaagagattatt

SEQ ID NO: 56175 - DNA, 25 bp, Homo sapien
tcaaagctgctttcaagagctactc

SEQ ID NO: 56176 - DNA, 25 bp, Homo sapien
tagaggatgcatttgacatgccaac

SEQ ID NO: 56177 - DNA, 25 bp, Homo sapien
ctgaacttatgtatgaatgaaaaga

SEQ ID NO: 56178 - DNA, 25 bp, Homo sapien
tgaaaagaactgtactccctgcata

SEQ ID NO: 56179 - DNA, 25 bp, Homo sapien
aactaaatgagattgcctttgcagt

SEQ ID NO: 56180 - DNA, 25 bp, Homo sapien
aaaaaggtcccaaacatcaggctgt

SEQ ID NO: 56181 - DNA, 25 bp, Homo sapien
ttgcctttgcagttagggaagcaac

SEQ ID NO: 56182 - DNA, 25 bp, Homo sapien
gttagggaagcaactactgaactta

SEQ ID NO: 56183 - DNA, 25 bp, Homo sapien
tcaaagctgctttcaagagctactc

SEQ ID NO: 56184 - DNA, 25 bp, Homo sapien
gtgagggtgtaacacacatacttct

SEQ ID NO: 56185 - DNA, 25 bp, Homo sapien
ttgtgttgaactgccccacacagca

SEQ ID NO: 56186 - DNA, 25 bp, Homo sapien
tagaggatgcatttgacatgccaac

SEQ ID NO: 56187 - DNA, 25 bp, Homo sapien
aaaaaggtcccaaacatcaggctgt

SEQ ID NO: 56188 - DNA, 25 bp, Homo sapien
actccctgcataacaagagattatt

SEQ ID NO: 56189 - DNA, 25 bp, Homo sapien
tgaaaagaactgtactccctgcata

SEQ ID NO: 56190 - DNA, 25 bp, Homo sapien
ctgaacttatgtatgaatgaaaaga

SEQ ID NO: 56191 - DNA, 25 bp, Homo sapien
gttagggaagcaactactgaactta

SEQ ID NO: 56192 - DNA, 25 bp, Homo sapien
ttgcctttgcagttagggaagcaac

SEQ ID NO: 56193 - DNA, 25 bp, Homo sapien
aactaaatgagattgcctttgcagt

SEQ ID NO: 56194 - DNA, 25 bp, Homo sapien
tcaaagctgctttcaagagctactc

SEQ ID NO: 56195 - DNA, 25 bp, Homo sapien
actccctgcataacaagagattatt

SEQ ID NO: 56196 - DNA, 25 bp, Homo sapien
gttagggaagcaactactgaactta

SEQ ID NO: 56197 - DNA, 25 bp, Homo sapien
ttgtgttgaactgccccacacagca

SEQ ID NO: 56198 - DNA, 25 bp, Homo sapien
ctgaacttatgtatgaatgaaaaga

SEQ ID NO: 56199 - DNA, 25 bp, Homo sapien
ttgcctttgcagttagggaagcaac

SEQ ID NO: 56200 - DNA, 25 bp, Homo sapien
gtgagggtgtaacacacatacttct

SEQ ID NO: 56201 - DNA, 25 bp, Homo sapien
tgaaaagaactgtactccctgcata

SEQ ID NO: 56202 - DNA, 25 bp, Homo sapien
aaaaaggtcccaaacatcaggctgt

SEQ ID NO: 56203 - DNA, 25 bp, Homo sapien
aactaaatgagattgcctttgcagt

SEQ ID NO: 56204 - DNA, 25 bp, Homo sapien
tagaggatgcatttgacatgccaac

SEQ ID NO: 56205 - DNA, 25 bp, Homo sapien
tcaaagctgctttcaagagctactc

SEQ ID NO: 56206 - DNA, 25 bp, Homo sapien
gtgagggtgtaacacacatacttct

SEQ ID NO: 56207 - DNA, 25 bp, Homo sapien
ttgtgttgaactgccccacacagca

SEQ ID NO: 56208 - DNA, 25 bp, Homo sapien
tagaggatgcatttgacatgccaac

SEQ ID NO: 56209 - DNA, 25 bp, Homo sapien
aaaaaggtcccaaacatcaggctgt

SEQ ID NO: 56210 - DNA, 25 bp, Homo sapien
actccctgcataacaagagattatt

SEQ ID NO: 56211 - DNA, 25 bp, Homo sapien
tgaaaagaactgtactccctgcata

SEQ ID NO: 56212 - DNA, 25 bp, Homo sapien
ctgaacttatgtatgaatgaaaaga

SEQ ID NO: 56213 - DNA, 25 bp, Homo sapien
gttagggaagcaactactgaactta

SEQ ID NO: 56214 - DNA, 25 bp, Homo sapien
ttgcctttgcagttagggaagcaac

SEQ ID NO: 56215 - DNA, 25 bp, Homo sapien
aactaaatgagattgcctttgcagt

SEQ ID NO: 56216 - DNA, 25 bp, Homo sapien
aactaaatgagattgcctttgcagt

SEQ ID NO: 56217 - DNA, 25 bp, Homo sapien
tgaaaagaactgtactccctgcata

SEQ ID NO: 56218 - DNA, 25 bp, Homo sapien
ctgaacttatgtatgaatgaaaaga

SEQ ID NO: 56219 - DNA, 25 bp, Homo sapien
ttgtgttgaactgccccacacagca

SEQ ID NO: 56220 - DNA, 25 bp, Homo sapien
actccctgcataacaagagattatt

SEQ ID NO: 56221 - DNA, 25 bp, Homo sapien
ttgcctttgcagttagggaagcaac

SEQ ID NO: 56222 - DNA, 25 bp, Homo sapien
aaaaaggtcccaaacatcaggctgt

SEQ ID NO: 56223 - DNA, 25 bp, Homo sapien
tcaaagctgctttcaagagctactc

SEQ ID NO: 56224 - DNA, 25 bp, Homo sapien
gtgagggtgtaacacacatacttct

SEQ ID NO: 56225 - DNA, 25 bp, Homo sapien
tagaggatgcatttgacatgccaac

SEQ ID NO: 56226 - DNA, 25 bp, Homo sapien
gttagggaagcaactactgaactta

SEQ ID NO: 56227 - DNA, 25 bp, Homo sapien
tcaaagctgctttcaagagctactc

SEQ ID NO: 56228 - DNA, 25 bp, Homo sapien
gtgagggtgtaacacacatacttct

SEQ ID NO: 56229 - DNA, 25 bp, Homo sapien
ttgtgttgaactgccccacacagca

SEQ ID NO: 56230 - DNA, 25 bp, Homo sapien
tagaggatgcatttgacatgccaac

SEQ ID NO: 56231 - DNA, 25 bp, Homo sapien
aaaaaggtcccaaacatcaggctgt

SEQ ID NO: 56232 - DNA, 25 bp, Homo sapien
actccctgcataacaagagattatt

SEQ ID NO: 56233 - DNA, 25 bp, Homo sapien
tgaaaagaactgtactccctgcata

SEQ ID NO: 56234 - DNA, 25 bp, Homo sapien
ctgaacttatgtatgaatgaaaaga

SEQ ID NO: 56235 - DNA, 25 bp, Homo sapien
gttagggaagcaactactgaactta

SEQ ID NO: 56236 - DNA, 25 bp, Homo sapien
ttgcctttgcagttagggaagcaac

SEQ ID NO: 56237 - DNA, 25 bp, Homo sapien
aactaaatgagattgcctttgcagt

SEQ ID NO: 56238 - DNA, 25 bp, Homo sapien
ttgtgttgaactgccccacacagca

SEQ ID NO: 56239 - DNA, 25 bp, Homo sapien
tgaaaagaactgtactccctgcata

SEQ ID NO: 56240 - DNA, 25 bp, Homo sapien
ctgaacttatgtatgaatgaaaaga

SEQ ID NO: 56241 - DNA, 25 bp, Homo sapien
aaaaaggtcccaaacatcaggctgt

SEQ ID NO: 56242 - DNA, 25 bp, Homo sapien
aactaaatgagattgcctttgcagt

SEQ ID NO: 56243 - DNA, 25 bp, Homo sapien
ttgcctttgcagttagggaagcaac

SEQ ID NO: 56244 - DNA, 25 bp, Homo sapien
tagaggatgcatttgacatgccaac

SEQ ID NO: 56245 - DNA, 25 bp, Homo sapien
gtgagggtgtaacacacatacttct

SEQ ID NO: 56246 - DNA, 25 bp, Homo sapien
gttagggaagcaactactgaactta

SEQ ID NO: 56247 - DNA, 25 bp, Homo sapien
tcaaagctgctttcaagagctactc

SEQ ID NO: 56248 - DNA, 25 bp, Homo sapien
actccctgcataacaagagattatt

SEQ ID NO: 56249 - DNA, 25 bp, Homo sapien
tcaaagctgctttcaagagctactc

SEQ ID NO: 56250 - DNA, 25 bp, Homo sapien
gtgagggtgtaacacacatacttct

SEQ ID NO: 56251 - DNA, 25 bp, Homo sapien
ttgtgttgaactgccccacacagca

SEQ ID NO: 56252 - DNA, 25 bp, Homo sapien
tagaggatgcatttgacatgccaac

SEQ ID NO: 56253 - DNA, 25 bp, Homo sapien
aaaaaggtcccaaacatcaggctgt

SEQ ID NO: 56254 - DNA, 25 bp, Homo sapien
actccctgcataacaagagattatt

SEQ ID NO: 56255 - DNA, 25 bp, Homo sapien
tgaaaagaactgtactccctgcata

SEQ ID NO: 56256 - DNA, 25 bp, Homo sapien
ctgaacttatgtatgaatgaaaaga

SEQ ID NO: 56257 - DNA, 25 bp, Homo sapien
gttagggaagcaactactgaactta

SEQ ID NO: 56258 - DNA, 25 bp, Homo sapien
ttgcctttgcagttagggaagcaac

SEQ ID NO: 56259 - DNA, 25 bp, Homo sapien
aactaaatgagattgcctttgcagt

SEQ ID NO: 56260 - DNA, 25 bp, Homo sapien
tagaggatgcatttgacatgccaac

SEQ ID NO: 56261 - DNA, 25 bp, Homo sapien
ttgcctttgcagttagggaagcaac

SEQ ID NO: 56262 - DNA, 25 bp, Homo sapien
gttagggaagcaactactgaactta

SEQ ID NO: 56263 - DNA, 25 bp, Homo sapien
aaaaaggtcccaaacatcaggctgt

SEQ ID NO: 56264 - DNA, 25 bp, Homo sapien
actccctgcataacaagagattatt

SEQ ID NO: 56265 - DNA, 25 bp, Homo sapien
aactaaatgagattgcctttgcagt

SEQ ID NO: 56266 - DNA, 25 bp, Homo sapien
ttgtgttgaactgccccacacagca

SEQ ID NO: 56267 - DNA, 25 bp, Homo sapien
tcaaagctgctttcaagagctactc

SEQ ID NO: 56268 - DNA, 25 bp, Homo sapien
tgaaaagaactgtactccctgcata

SEQ ID NO: 56269 - DNA, 25 bp, Homo sapien
gtgagggtgtaacacacatacttct

SEQ ID NO: 56270 - DNA, 25 bp, Homo sapien
ctgaacttatgtatgaatgaaaaga

SEQ ID NO: 56271 - DNA, 25 bp, Homo sapien
ctgaacttatgtatgaatgaaaaga

SEQ ID NO: 56272 - DNA, 25 bp, Homo sapien
gttagggaagcaactactgaactta

SEQ ID NO: 56273 - DNA, 25 bp, Homo sapien
actccctgcataacaagagattatt

SEQ ID NO: 56274 - DNA, 25 bp, Homo sapien
tcaaagctgctttcaagagctactc

SEQ ID NO: 56275 - DNA, 25 bp, Homo sapien
gtgagggtgtaacacacatacttct

SEQ ID NO: 56276 - DNA, 25 bp, Homo sapien
tgaaaagaactgtactccctgcata

SEQ ID NO: 56277 - DNA, 25 bp, Homo sapien
ttgtgttgaactgccccacacagca

SEQ ID NO: 56278 - DNA, 25 bp, Homo sapien
aactaaatgagattgcctttgcagt

SEQ ID NO: 56279 - DNA, 25 bp, Homo sapien
ttgcctttgcagttagggaagcaac

SEQ ID NO: 56280 - DNA, 25 bp, Homo sapien
tagaggatgcatttgacatgccaac

SEQ ID NO: 56281 - DNA, 25 bp, Homo sapien
aaaaaggtcccaaacatcaggctgt

SEQ ID NO: 56282 - DNA, 25 bp, Homo sapien
tcaaagctgctttcaagagctactc

SEQ ID NO: 56283 - DNA, 25 bp, Homo sapien
gtgagggtgtaacacacatacttct

SEQ ID NO: 56284 - DNA, 25 bp, Homo sapien
ttgtgttgaactgccccacacagca

SEQ ID NO: 56285 - DNA, 25 bp, Homo sapien
tagaggatgcatttgacatgccaac

SEQ ID NO: 56286 - DNA, 25 bp, Homo sapien
aaaaaggtcccaaacatcaggctgt

SEQ ID NO: 56287 - DNA, 25 bp, Homo sapien
actccctgcataacaagagattatt

SEQ ID NO: 56288 - DNA, 25 bp, Homo sapien
tgaaaagaactgtactccctgcata

SEQ ID NO: 56289 - DNA, 25 bp, Homo sapien
ctgaacttatgtatgaatgaaaaga

SEQ ID NO: 56290 - DNA, 25 bp, Homo sapien
gttagggaagcaactactgaactta

SEQ ID NO: 56291 - DNA, 25 bp, Homo sapien
ttgcctttgcagttagggaagcaac

SEQ ID NO: 56292 - DNA, 25 bp, Homo sapien
aactaaatgagattgcctttgcagt

SEQ ID NO: 56293 - DNA, 25 bp, Homo sapien
tcaaagctgctttcaagagctactc

SEQ ID NO: 56294 - DNA, 25 bp, Homo sapien
tagaggatgcatttgacatgccaac

SEQ ID NO: 56295 - DNA, 25 bp, Homo sapien
ctgaacttatgtatgaatgaaaaga

SEQ ID NO: 56296 - DNA, 25 bp, Homo sapien
gtgagggtgtaacacacatacttct

SEQ ID NO: 56297 - DNA, 25 bp, Homo sapien
actccctgcataacaagagattatt

SEQ ID NO: 56298 - DNA, 25 bp, Homo sapien
tgaaaagaactgtactccctgcata

SEQ ID NO: 56299 - DNA, 25 bp, Homo sapien
ttgtgttgaactgccccacacagca

SEQ ID NO: 56300 - DNA, 25 bp, Homo sapien
aactaaatgagattgcctttgcagt

SEQ ID NO: 56301 - DNA, 25 bp, Homo sapien
aaaaaggtcccaaacatcaggctgt

SEQ ID NO: 56302 - DNA, 25 bp, Homo sapien
ttgcctttgcagttagggaagcaac

SEQ ID NO: 56303 - DNA, 25 bp, Homo sapien
gttagggaagcaactactgaactta

SEQ ID NO: 56304 - DNA, 25 bp, Homo sapien
tcaaagctgctttcaagagctactc

SEQ ID NO: 56305 - DNA, 25 bp, Homo sapien
gtgagggtgtaacacacatacttct

SEQ ID NO: 56306 - DNA, 25 bp, Homo sapien
ttgtgttgaactgccccacacagca

SEQ ID NO: 56307 - DNA, 25 bp, Homo sapien
tagaggatgcatttgacatgccaac

SEQ ID NO: 56308 - DNA, 25 bp, Homo sapien
aaaaaggtcccaaacatcaggctgt

SEQ ID NO: 56309 - DNA, 25 bp, Homo sapien
actccctgcataacaagagattatt

SEQ ID NO: 56310 - DNA, 25 bp, Homo sapien
tgaaaagaactgtactccctgcata

SEQ ID NO: 56311 - DNA, 25 bp, Homo sapien
ctgaacttatgtatgaatgaaaaga

SEQ ID NO: 56312 - DNA, 25 bp, Homo sapien
gttagggaagcaactactgaactta

SEQ ID NO: 56313 - DNA, 25 bp, Homo sapien
ttgcctttgcagttagggaagcaac

SEQ ID NO: 56314 - DNA, 25 bp, Homo sapien
aactaaatgagattgcctttgcagt

SEQ ID NO: 56315 - DNA, 25 bp, Homo sapien
actccctgcataacaagagattatt

SEQ ID NO: 56316 - DNA, 25 bp, Homo sapien
ttgcctttgcagttagggaagcaac

SEQ ID NO: 56317 - DNA, 25 bp, Homo sapien
tgaaaagaactgtactccctgcata

SEQ ID NO: 56318 - DNA, 25 bp, Homo sapien
gtgagggtgtaacacacatacttct

SEQ ID NO: 56319 - DNA, 25 bp, Homo sapien
gttagggaagcaactactgaactta

SEQ ID NO: 56320 - DNA, 25 bp, Homo sapien
tagaggatgcatttgacatgccaac

SEQ ID NO: 56321 - DNA, 25 bp, Homo sapien
aactaaatgagattgcctttgcagt

SEQ ID NO: 56322 - DNA, 25 bp, Homo sapien
ctgaacttatgtatgaatgaaaaga

SEQ ID NO: 56323 - DNA, 25 bp, Homo sapien
ttgtgttgaactgccccacacagca

SEQ ID NO: 56324 - DNA, 25 bp, Homo sapien
aaaaaggtcccaaacatcaggctgt

SEQ ID NO: 56325 - DNA, 25 bp, Homo sapien
tcaaagctgctttcaagagctactc

SEQ ID NO: 56326 - DNA, 25 bp, Homo sapien
tcaaagctgctttcaagagctactc

SEQ ID NO: 56327 - DNA, 25 bp, Homo sapien
gtgagggtgtaacacacatacttct

SEQ ID NO: 56328 - DNA, 25 bp, Homo sapien
ttgtgttgaactgccccacacagca

SEQ ID NO: 56329 - DNA, 25 bp, Homo sapien
tagaggatgcatttgacatgccaac

SEQ ID NO: 56330 - DNA, 25 bp, Homo sapien
aaaaaggtcccaaacatcaggctgt

SEQ ID NO: 56331 - DNA, 25 bp, Homo sapien
actccctgcataacaagagattatt

SEQ ID NO: 56332 - DNA, 25 bp, Homo sapien
tgaaaagaactgtactccctgcata

SEQ ID NO: 56333 - DNA, 25 bp, Homo sapien
ctgaacttatgtatgaatgaaaaga

SEQ ID NO: 56334 - DNA, 25 bp, Homo sapien
gttagggaagcaactactgaactta

SEQ ID NO: 56335 - DNA, 25 bp, Homo sapien
ttgcctttgcagttagggaagcaac

SEQ ID NO: 56336 - DNA, 25 bp, Homo sapien
aactaaatgagattgcctttgcagt

SEQ ID NO: 56337 - DNA, 25 bp, Homo sapien
actccctgcataacaagagattatt

SEQ ID NO: 56338 - DNA, 25 bp, Homo sapien
tcaaagctgctttcaagagctactc

SEQ ID NO: 56339 - DNA, 25 bp, Homo sapien
ttgcctttgcagttagggaagcaac

SEQ ID NO: 56340 - DNA, 25 bp, Homo sapien
tagaggatgcatttgacatgccaac

SEQ ID NO: 56341 - DNA, 25 bp, Homo sapien
gtgagggtgtaacacacatacttct

SEQ ID NO: 56342 - DNA, 25 bp, Homo sapien
ttgtgttgaactgccccacacagca

SEQ ID NO: 56343 - DNA, 25 bp, Homo sapien
aactaaatgagattgcctttgcagt

SEQ ID NO: 56344 - DNA, 25 bp, Homo sapien
gttagggaagcaactactgaactta

SEQ ID NO: 56345 - DNA, 25 bp, Homo sapien
ctgaacttatgtatgaatgaaaaga

SEQ ID NO: 56346 - DNA, 25 bp, Homo sapien
aaaaaggtcccaaacatcaggctgt

SEQ ID NO: 56347 - DNA, 25 bp, Homo sapien
tgaaaagaactgtactccctgcata

SEQ ID NO: 56348 - DNA, 25 bp, Homo sapien
tcaaagctgctttcaagagctactc

SEQ ID NO: 56349 - DNA, 25 bp, Homo sapien
gtgagggtgtaacacacatacttct

SEQ ID NO: 56350 - DNA, 25 bp, Homo sapien
ttgtgttgaactgccccacacagca

SEQ ID NO: 56351 - DNA, 25 bp, Homo sapien
tagaggatgcatttgacatgccaac

SEQ ID NO: 56352 - DNA, 25 bp, Homo sapien
aaaaaggtcccaaacatcaggctgt

SEQ ID NO: 56353 - DNA, 25 bp, Homo sapien
actccctgcataacaagagattatt

SEQ ID NO: 56354 - DNA, 25 bp, Homo sapien
tgaaaagaactgtactccctgcata

SEQ ID NO: 56355 - DNA, 25 bp, Homo sapien
ctgaacttatgtatgaatgaaaaga

SEQ ID NO: 56356 - DNA, 25 bp, Homo sapien
gttagggaagcaactactgaactta

SEQ ID NO: 56357 - DNA, 25 bp, Homo sapien
ttgcctttgcagttagggaagcaac

SEQ ID NO: 56358 - DNA, 25 bp, Homo sapien
aactaaatgagattgcctttgcagt

SEQ ID NO: 56359 - DNA, 25 bp, Homo sapien
tagaggatgcatttgacatgccaac

SEQ ID NO: 56360 - DNA, 25 bp, Homo sapien
tgaaaagaactgtactccctgcata

SEQ ID NO: 56361 - DNA, 25 bp, Homo sapien
ctgaacttatgtatgaatgaaaaga

SEQ ID NO: 56362 - DNA, 25 bp, Homo sapien
tcaaagctgctttcaagagctactc

SEQ ID NO: 56363 - DNA, 25 bp, Homo sapien
aactaaatgagattgcctttgcagt

SEQ ID NO: 56364 - DNA, 25 bp, Homo sapien
gttagggaagcaactactgaactta

SEQ ID NO: 56365 - DNA, 25 bp, Homo sapien
actccctgcataacaagagattatt

SEQ ID NO: 56366 - DNA, 25 bp, Homo sapien
gtgagggtgtaacacacatacttct

SEQ ID NO: 56367 - DNA, 25 bp, Homo sapien
ttgtgttgaactgccccacacagca

SEQ ID NO: 56368 - DNA, 25 bp, Homo sapien
ttgcctttgcagttagggaagcaac

SEQ ID NO: 56369 - DNA, 25 bp, Homo sapien
aaaaaggtcccaaacatcaggctgt

SEQ ID NO: 56370 - DNA, 25 bp, Homo sapien
tcaaagctgctttcaagagctactc

SEQ ID NO: 56371 - DNA, 25 bp, Homo sapien
gtgagggtgtaacacacatacttct

SEQ ID NO: 56372 - DNA, 25 bp, Homo sapien
ttgtgttgaactgccccacacagca

SEQ ID NO: 56373 - DNA, 25 bp, Homo sapien
tagaggatgcatttgacatgccaac

SEQ ID NO: 56374 - DNA, 25 bp, Homo sapien
aaaaaggtcccaaacatcaggctgt

SEQ ID NO: 56375 - DNA, 25 bp, Homo sapien
actccctgcataacaagagattatt

SEQ ID NO: 56376 - DNA, 25 bp, Homo sapien
tgaaaagaactgtactccctgcata

SEQ ID NO: 56377 - DNA, 25 bp, Homo sapien
ctgaacttatgtatgaatgaaaaga

SEQ ID NO: 56378 - DNA, 25 bp, Homo sapien
gttagggaagcaactactgaactta

SEQ ID NO: 56379 - DNA, 25 bp, Homo sapien
ttgcctttgcagttagggaagcaac

SEQ ID NO: 56380 - DNA, 25 bp, Homo sapien
aactaaatgagattgcctttgcagt

SEQ ID NO: 56381 - DNA, 25 bp, Homo sapien
actccctgcataacaagagattatt

SEQ ID NO: 56382 - DNA, 25 bp, Homo sapien
ttgcctttgcagttagggaagcaac

SEQ ID NO: 56383 - DNA, 25 bp, Homo sapien
tgaaaagaactgtactccctgcata

SEQ ID NO: 56384 - DNA, 25 bp, Homo sapien
ctgaacttatgtatgaatgaaaaga

SEQ ID NO: 56385 - DNA, 25 bp, Homo sapien
tagaggatgcatttgacatgccaac

SEQ ID NO: 56386 - DNA, 25 bp, Homo sapien
aactaaatgagattgcctttgcagt

SEQ ID NO: 56387 - DNA, 25 bp, Homo sapien
gttagggaagcaactactgaactta

SEQ ID NO: 56388 - DNA, 25 bp, Homo sapien
ttgtgttgaactgccccacacagca

SEQ ID NO: 56389 - DNA, 25 bp, Homo sapien
gtgagggtgtaacacacatacttct

SEQ ID NO: 56390 - DNA, 25 bp, Homo sapien
aaaaaggtcccaaacatcaggctgt

SEQ ID NO: 56391 - DNA, 25 bp, Homo sapien
tcaaagctgctttcaagagctactc

SEQ ID NO: 56392 - DNA, 25 bp, Homo sapien
tcaaagctgctttcaagagctactc

SEQ ID NO: 56393 - DNA, 25 bp, Homo sapien
gtgagggtgtaacacacatacttct

SEQ ID NO: 56394 - DNA, 25 bp, Homo sapien
ttgtgttgaactgccccacacagca

SEQ ID NO: 56395 - DNA, 25 bp, Homo sapien
tagaggatgcatttgacatgccaac

SEQ ID NO: 56396 - DNA, 25 bp, Homo sapien
aaaaaggtcccaaacatcaggctgt

SEQ ID NO: 56397 - DNA, 25 bp, Homo sapien
actccctgcataacaagagattatt

SEQ ID NO: 56398 - DNA, 25 bp, Homo sapien
tgaaaagaactgtactccctgcata

SEQ ID NO: 56399 - DNA, 25 bp, Homo sapien
ctgaacttatgtatgaatgaaaaga

SEQ ID NO: 56400 - DNA, 25 bp, Homo sapien
gttagggaagcaactactgaactta

SEQ ID NO: 56401 - DNA, 25 bp, Homo sapien
ttgcctttgcagttagggaagcaac

SEQ ID NO: 56402 - DNA, 25 bp, Homo sapien
aactaaatgagattgcctttgcagt

SEQ ID NO: 56403 - DNA, 25 bp, Homo sapien
tcaaagctgctttcaagagctactc

SEQ ID NO: 56404 - DNA, 25 bp, Homo sapien
gtgagggtgtaacacacatacttct

SEQ ID NO: 56405 - DNA, 25 bp, Homo sapien
ttgtgttgaactgccccacacagca

SEQ ID NO: 56406 - DNA, 25 bp, Homo sapien
tagaggatgcatttgacatgccaac

SEQ ID NO: 56407 - DNA, 25 bp, Homo sapien
aaaaaggtcccaaacatcaggctgt

SEQ ID NO: 56408 - DNA, 25 bp, Homo sapien
actccctgcataacaagagattatt

SEQ ID NO: 56409 - DNA, 25 bp, Homo sapien
tgaaaagaactgtactccctgcata

SEQ ID NO: 56410 - DNA, 25 bp, Homo sapien
ctgaacttatgtatgaatgaaaaga

SEQ ID NO: 56411 - DNA, 25 bp, Homo sapien
gttagggaagcaactactgaactta

SEQ ID NO: 56412 - DNA, 25 bp, Homo sapien
ttgcctttgcagttagggaagcaac

SEQ ID NO: 56413 - DNA, 25 bp, Homo sapien
aactaaatgagattgcctttgcagt

SEQ ID NO: 56414 - DNA, 25 bp, Homo sapien
gttagggaagcaactactgaactta

SEQ ID NO: 56415 - DNA, 25 bp, Homo sapien
gtgagggtgtaacacacatacttct

SEQ ID NO: 56416 - DNA, 25 bp, Homo sapien
ctgaacttatgtatgaatgaaaaga

SEQ ID NO: 56417 - DNA, 25 bp, Homo sapien
aaaaaggtcccaaacatcaggctgt

SEQ ID NO: 56418 - DNA, 25 bp, Homo sapien
tcaaagctgctttcaagagctactc

SEQ ID NO: 56419 - DNA, 25 bp, Homo sapien
ttgcctttgcagttagggaagcaac

SEQ ID NO: 56420 - DNA, 25 bp, Homo sapien
actccctgcataacaagagattatt

SEQ ID NO: 56421 - DNA, 25 bp, Homo sapien
aactaaatgagattgcctttgcagt

SEQ ID NO: 56422 - DNA, 25 bp, Homo sapien
tagaggatgcatttgacatgccaac

SEQ ID NO: 56423 - DNA, 25 bp, Homo sapien
tgaaaagaactgtactccctgcata

SEQ ID NO: 56424 - DNA, 25 bp, Homo sapien
ttgtgttgaactgccccacacagca

SEQ ID NO: 56425 - DNA, 25 bp, Homo sapien
gtgagggtgtaacacacatacttct

SEQ ID NO: 56426 - DNA, 25 bp, Homo sapien
gttagggaagcaactactgaactta

SEQ ID NO: 56427 - DNA, 25 bp, Homo sapien
ctgaacttatgtatgaatgaaaaga

SEQ ID NO: 56428 - DNA, 25 bp, Homo sapien
aaaaaggtcccaaacatcaggctgt

SEQ ID NO: 56429 - DNA, 25 bp, Homo sapien
actccctgcataacaagagattatt

SEQ ID NO: 56430 - DNA, 25 bp, Homo sapien
tcaaagctgctttcaagagctactc

SEQ ID NO: 56431 - DNA, 25 bp, Homo sapien
ttgcctttgcagttagggaagcaac

SEQ ID NO: 56432 - DNA, 25 bp, Homo sapien
aactaaatgagattgcctttgcagt

SEQ ID NO: 56433 - DNA, 25 bp, Homo sapien
tagaggatgcatttgacatgccaac

SEQ ID NO: 56434 - DNA, 25 bp, Homo sapien
tgaaaagaactgtactccctgcata

SEQ ID NO: 56435 - DNA, 25 bp, Homo sapien
ttgtgttgaactgccccacacagca

SEQ ID NO: 56436 - DNA, 25 bp, Homo sapien
gttagggaagcaactactgaactta

SEQ ID NO: 56437 - DNA, 25 bp, Homo sapien
gtgagggtgtaacacacatacttct

SEQ ID NO: 56438 - DNA, 25 bp, Homo sapien
actccctgcataacaagagattatt

SEQ ID NO: 56439 - DNA, 25 bp, Homo sapien
aaaaaggtcccaaacatcaggctgt

SEQ ID NO: 56440 - DNA, 25 bp, Homo sapien
ctgaacttatgtatgaatgaaaaga

SEQ ID NO: 56441 - DNA, 25 bp, Homo sapien
tcaaagctgctttcaagagctactc

SEQ ID NO: 56442 - DNA, 25 bp, Homo sapien
ttgcctttgcagttagggaagcaac

SEQ ID NO: 56443 - DNA, 25 bp, Homo sapien
aactaaatgagattgcctttgcagt

SEQ ID NO: 56444 - DNA, 25 bp, Homo sapien
tagaggatgcatttgacatgccaac

SEQ ID NO: 56445 - DNA, 25 bp, Homo sapien
tgaaaagaactgtactccctgcata

SEQ ID NO: 56446 - DNA, 25 bp, Homo sapien
ttgtgttgaactgccccacacagca

SEQ ID NO: 56447 - DNA, 25 bp, Homo sapien
gttagggaagcaactactgaactta

SEQ ID NO: 56448 - DNA, 25 bp, Homo sapien
gtgagggtgtaacacacatacttct

SEQ ID NO: 56449 - DNA, 25 bp, Homo sapien
actccctgcataacaagagattatt

SEQ ID NO: 56450 - DNA, 25 bp, Homo sapien
ctgaacttatgtatgaatgaaaaga

SEQ ID NO: 56451 - DNA, 25 bp, Homo sapien
aaaaaggtcccaaacatcaggctgt

SEQ ID NO: 56452 - DNA, 25 bp, Homo sapien
tcaaagctgctttcaagagctactc

SEQ ID NO: 56453 - DNA, 25 bp, Homo sapien
ttgcctttgcagttagggaagcaac

SEQ ID NO: 56454 - DNA, 25 bp, Homo sapien
aactaaatgagattgcctttgcagt

SEQ ID NO: 56455 - DNA, 25 bp, Homo sapien
tagaggatgcatttgacatgccaac

SEQ ID NO: 56456 - DNA, 25 bp, Homo sapien
tgaaaagaactgtactccctgcata

SEQ ID NO: 56457 - DNA, 25 bp, Homo sapien
ttgtgttgaactgccccacacagca

SEQ ID NO: 56458 - DNA, 25 bp, Homo sapien
gttagggaagcaactactgaactta

SEQ ID NO: 56459 - DNA, 25 bp, Homo sapien
gtgagggtgtaacacacatacttct

SEQ ID NO: 56460 - DNA, 25 bp, Homo sapien
ctgaacttatgtatgaatgaaaaga

SEQ ID NO: 56461 - DNA, 25 bp, Homo sapien
aaaaaggtcccaaacatcaggctgt

SEQ ID NO: 56462 - DNA, 25 bp, Homo sapien
tcaaagctgctttcaagagctactc

SEQ ID NO: 56463 - DNA, 25 bp, Homo sapien
actccctgcataacaagagattatt

SEQ ID NO: 56464 - DNA, 25 bp, Homo sapien
ttgcctttgcagttagggaagcaac

SEQ ID NO: 56465 - DNA, 25 bp, Homo sapien
aactaaatgagattgcctttgcagt

SEQ ID NO: 56466 - DNA, 25 bp, Homo sapien
tagaggatgcatttgacatgccaac

SEQ ID NO: 56467 - DNA, 25 bp, Homo sapien
tgaaaagaactgtactccctgcata

SEQ ID NO: 56468 - DNA, 25 bp, Homo sapien
ttgtgttgaactgccccacacagca

SEQ ID NO: 56469 - DNA, 25 bp, Homo sapien
gttagggaagcaactactgaactta

SEQ ID NO: 56470 - DNA, 25 bp, Homo sapien
gtgagggtgtaacacacatacttct

SEQ ID NO: 56471 - DNA, 25 bp, Homo sapien
aaaaaggtcccaaacatcaggctgt

SEQ ID NO: 56472 - DNA, 25 bp, Homo sapien
ctgaacttatgtatgaatgaaaaga

SEQ ID NO: 56473 - DNA, 25 bp, Homo sapien
actccctgcataacaagagattatt

SEQ ID NO: 56474 - DNA, 25 bp, Homo sapien
tcaaagctgctttcaagagctactc

SEQ ID NO: 56475 - DNA, 25 bp, Homo sapien
ttgcctttgcagttagggaagcaac

SEQ ID NO: 56476 - DNA, 25 bp, Homo sapien
aactaaatgagattgcctttgcagt

SEQ ID NO: 56477 - DNA, 25 bp, Homo sapien
tagaggatgcatttgacatgccaac

SEQ ID NO: 56478 - DNA, 25 bp, Homo sapien
tgaaaagaactgtactccctgcata

SEQ ID NO: 56479 - DNA, 25 bp, Homo sapien
ttgtgttgaactgccccacacagca

SEQ ID NO: 56480 - DNA, 25 bp, Homo sapien
gtgagggtgtaacacacatacttct

SEQ ID NO: 56481 - DNA, 25 bp, Homo sapien
gttagggaagcaactactgaactta

SEQ ID NO: 56482 - DNA, 25 bp, Homo sapien
ctgaacttatgtatgaatgaaaaga

SEQ ID NO: 56483 - DNA, 25 bp, Homo sapien
aaaaaggtcccaaacatcaggctgt

SEQ ID NO: 56484 - DNA, 25 bp, Homo sapien
tcaaagctgctttcaagagctactc

SEQ ID NO: 56485 - DNA, 25 bp, Homo sapien
ttgcctttgcagttagggaagcaac

SEQ ID NO: 56486 - DNA, 25 bp, Homo sapien
aactaaatgagattgcctttgcagt

SEQ ID NO: 56487 - DNA, 25 bp, Homo sapien
tagaggatgcatttgacatgccaac

SEQ ID NO: 56488 - DNA, 25 bp, Homo sapien
tgaaaagaactgtactccctgcata

SEQ ID NO: 56489 - DNA, 25 bp, Homo sapien
actccctgcataacaagagattatt

SEQ ID NO: 56490 - DNA, 25 bp, Homo sapien
ttgtgttgaactgccccacacagca

SEQ ID NO: 56491 - DNA, 25 bp, Homo sapien
gttagggaagcaactactgaactta

SEQ ID NO: 56492 - DNA, 25 bp, Homo sapien
gtgagggtgtaacacacatacttct

SEQ ID NO: 56493 - DNA, 25 bp, Homo sapien
ctgaacttatgtatgaatgaaaaga

SEQ ID NO: 56494 - DNA, 25 bp, Homo sapien
aaaaaggtcccaaacatcaggctgt

SEQ ID NO: 56495 - DNA, 25 bp, Homo sapien
tcaaagctgctttcaagagctactc

SEQ ID NO: 56496 - DNA, 25 bp, Homo sapien
ttgcctttgcagttagggaagcaac

SEQ ID NO: 56497 - DNA, 25 bp, Homo sapien
aactaaatgagattgcctttgcagt

SEQ ID NO: 56498 - DNA, 25 bp, Homo sapien
actccctgcataacaagagattatt

SEQ ID NO: 56499 - DNA, 25 bp, Homo sapien
tagaggatgcatttgacatgccaac

SEQ ID NO: 56500 - DNA, 25 bp, Homo sapien
tgaaaagaactgtactccctgcata

SEQ ID NO: 56501 - DNA, 25 bp, Homo sapien
ttgtgttgaactgccccacacagca

SEQ ID NO: 56502 - DNA, 25 bp, Homo sapien
tgaaaagaactgtactccctgcata

SEQ ID NO: 56503 - DNA, 25 bp, Homo sapien
gtgagggtgtaacacacatacttct

SEQ ID NO: 56504 - DNA, 25 bp, Homo sapien
gttagggaagcaactactgaactta

SEQ ID NO: 56505 - DNA, 25 bp, Homo sapien
aaaaaggtcccaaacatcaggctgt

SEQ ID NO: 56506 - DNA, 25 bp, Homo sapien
ctgaacttatgtatgaatgaaaaga

SEQ ID NO: 56507 - DNA, 25 bp, Homo sapien
tcaaagctgctttcaagagctactc

SEQ ID NO: 56508 - DNA, 25 bp, Homo sapien
ttgcctttgcagttagggaagcaac

SEQ ID NO: 56509 - DNA, 25 bp, Homo sapien
aactaaatgagattgcctttgcagt

SEQ ID NO: 56510 - DNA, 25 bp, Homo sapien
tagaggatgcatttgacatgccaac

SEQ ID NO: 56511 - DNA, 25 bp, Homo sapien
actccctgcataacaagagattatt

SEQ ID NO: 56512 - DNA, 25 bp, Homo sapien
ttgtgttgaactgccccacacagca

SEQ ID NO: 56513 - DNA, 25 bp, Homo sapien
aactaaatgagattgcctttgcagt

SEQ ID NO: 56514 - DNA, 25 bp, Homo sapien
gttagggaagcaactactgaactta

SEQ ID NO: 56515 - DNA, 25 bp, Homo sapien
actccctgcataacaagagattatt

SEQ ID NO: 56516 - DNA, 25 bp, Homo sapien
tgaaaagaactgtactccctgcata

SEQ ID NO: 56517 - DNA, 25 bp, Homo sapien
aaaaaggtcccaaacatcaggctgt

SEQ ID NO: 56518 - DNA, 25 bp, Homo sapien
tagaggatgcatttgacatgccaac

SEQ ID NO: 56519 - DNA, 25 bp, Homo sapien
ttgtgttgaactgccccacacagca

SEQ ID NO: 56520 - DNA, 25 bp, Homo sapien
ctgaacttatgtatgaatgaaaaga

SEQ ID NO: 56521 - DNA, 25 bp, Homo sapien
tcaaagctgctttcaagagctactc

SEQ ID NO: 56522 - DNA, 25 bp, Homo sapien
gtgagggtgtaacacacatacttct

SEQ ID NO: 56523 - DNA, 25 bp, Homo sapien
ttgcctttgcagttagggaagcaac

SEQ ID NO: 56524 - DNA, 25 bp, Homo sapien
gtgagggtgtaacacacatacttct

SEQ ID NO: 56525 - DNA, 25 bp, Homo sapien
gttagggaagcaactactgaactta

SEQ ID NO: 56526 - DNA, 25 bp, Homo sapien
ctgaacttatgtatgaatgaaaaga

SEQ ID NO: 56527 - DNA, 25 bp, Homo sapien
aaaaaggtcccaaacatcaggctgt

SEQ ID NO: 56528 - DNA, 25 bp, Homo sapien
actccctgcataacaagagattatt

SEQ ID NO: 56529 - DNA, 25 bp, Homo sapien
tcaaagctgctttcaagagctactc

SEQ ID NO: 56530 - DNA, 25 bp, Homo sapien
ttgcctttgcagttagggaagcaac

SEQ ID NO: 56531 - DNA, 25 bp, Homo sapien
aactaaatgagattgcctttgcagt

SEQ ID NO: 56532 - DNA, 25 bp, Homo sapien
tagaggatgcatttgacatgccaac

SEQ ID NO: 56533 - DNA, 25 bp, Homo sapien
tgaaaagaactgtactccctgcata

SEQ ID NO: 56534 - DNA, 25 bp, Homo sapien
ttgtgttgaactgccccacacagca

SEQ ID NO: 56535 - DNA, 25 bp, Homo sapien
tcaaagctgctttcaagagctactc

SEQ ID NO: 56536 - DNA, 25 bp, Homo sapien
gtgagggtgtaacacacatacttct

SEQ ID NO: 56537 - DNA, 25 bp, Homo sapien
ttgtgttgaactgccccacacagca

SEQ ID NO: 56538 - DNA, 25 bp, Homo sapien
tagaggatgcatttgacatgccaac

SEQ ID NO: 56539 - DNA, 25 bp, Homo sapien
aaaaaggtcccaaacatcaggctgt

SEQ ID NO: 56540 - DNA, 25 bp, Homo sapien
actccctgcataacaagagattatt

SEQ ID NO: 56541 - DNA, 25 bp, Homo sapien
tgaaaagaactgtactccctgcata

SEQ ID NO: 56542 - DNA, 25 bp, Homo sapien
ctgaacttatgtatgaatgaaaaga

SEQ ID NO: 56543 - DNA, 25 bp, Homo sapien
gttagggaagcaactactgaactta

SEQ ID NO: 56544 - DNA, 25 bp, Homo sapien
ttgcctttgcagttagggaagcaac

SEQ ID NO: 56545 - DNA, 25 bp, Homo sapien
aactaaatgagattgcctttgcagt

SEQ ID NO: 56546 - DNA, 25 bp, Homo sapien
aataatctcttgttatgcagggagt

SEQ ID NO: 56547 - DNA, 25 bp, Homo sapien
tgctgtgtggggcagttcaacacaa

SEQ ID NO: 56548 - DNA, 25 bp, Homo sapien
gttgcttccctaactgcaaaggcaa

SEQ ID NO: 56549 - DNA, 25 bp, Homo sapien
tcttttcattcatacataagttcag

SEQ ID NO: 56550 - DNA, 25 bp, Homo sapien
acagcctgatgtttgggaccttttt

SEQ ID NO: 56551 - DNA, 25 bp, Homo sapien
taagttcagtagttgcttccctaac

SEQ ID NO: 56552 - DNA, 25 bp, Homo sapien
actgcaaaggcaatctcatttagtt

SEQ ID NO: 56553 - DNA, 25 bp, Homo sapien
agaagtatgtgtgttacaccctcac

SEQ ID NO: 56554 - DNA, 25 bp, Homo sapien
tatgcagggagtacagttcttttca

SEQ ID NO: 56555 - DNA, 25 bp, Homo sapien
gagtagctcttgaaagcagctttga

SEQ ID NO: 56556 - DNA, 25 bp, Homo sapien
gttggcatgtcaaatgcatcctcta

SEQ ID NO: 56557 - DNA, 25 bp, Homo sapien
tgaaaagaactgtactccctgcata

SEQ ID NO: 56558 - DNA, 25 bp, Homo sapien
gttagggaagcaactactgaactta

SEQ ID NO: 56559 - DNA, 25 bp, Homo sapien
gtgagggtgtaacacacatacttct

SEQ ID NO: 56560 - DNA, 25 bp, Homo sapien
ctgaacttatgtatgaatgaaaaga

SEQ ID NO: 56561 - DNA, 25 bp, Homo sapien
aaaaaggtcccaaacatcaggctgt

SEQ ID NO: 56562 - DNA, 25 bp, Homo sapien
tcaaagctgctttcaagagctactc

SEQ ID NO: 56563 - DNA, 25 bp, Homo sapien
ttgcctttgcagttagggaagcaac

SEQ ID NO: 56564 - DNA, 25 bp, Homo sapien
actccctgcataacaagagattatt

SEQ ID NO: 56565 - DNA, 25 bp, Homo sapien
aactaaatgagattgcctttgcagt

SEQ ID NO: 56566 - DNA, 25 bp, Homo sapien
tagaggatgcatttgacatgccaac

SEQ ID NO: 56567 - DNA, 25 bp, Homo sapien
ttgtgttgaactgccccacacagca

SEQ ID NO: 56568 - DNA, 25 bp, Homo sapien
tagaggatgcatttgacatgccaac

SEQ ID NO: 56569 - DNA, 25 bp, Homo sapien
aaaaaggtcccaaacatcaggctgt

SEQ ID NO: 56570 - DNA, 25 bp, Homo sapien
tgaaaagaactgtactccctgcata

SEQ ID NO: 56571 - DNA, 25 bp, Homo sapien
tcaaagctgctttcaagagctactc

SEQ ID NO: 56572 - DNA, 25 bp, Homo sapien
ttgcctttgcagttagggaagcaac

SEQ ID NO: 56573 - DNA, 25 bp, Homo sapien
aactaaatgagattgcctttgcagt

SEQ ID NO: 56574 - DNA, 25 bp, Homo sapien
ttgtgttgaactgccccacacagca

SEQ ID NO: 56575 - DNA, 25 bp, Homo sapien
ctgaacttatgtatgaatgaaaaga

SEQ ID NO: 56576 - DNA, 25 bp, Homo sapien
gtgagggtgtaacacacatacttct

SEQ ID NO: 56577 - DNA, 25 bp, Homo sapien
actccctgcataacaagagattatt

SEQ ID NO: 56578 - DNA, 25 bp, Homo sapien
gttagggaagcaactactgaactta

SEQ ID NO: 56579 - DNA, 25 bp, Homo sapien
tcaaagctgctttcaagagctactc

SEQ ID NO: 56580 - DNA, 25 bp, Homo sapien
gtgagggtgtaacacacatacttct

SEQ ID NO: 56581 - DNA, 25 bp, Homo sapien
ttgtgttgaactgccccacacagca

SEQ ID NO: 56582 - DNA, 25 bp, Homo sapien
tagaggatgcatttgacatgccaac

SEQ ID NO: 56583 - DNA, 25 bp, Homo sapien
aaaaaggtcccaaacatcaggctgt

SEQ ID NO: 56584 - DNA, 25 bp, Homo sapien
actccctgcataacaagagattatt

SEQ ID NO: 56585 - DNA, 25 bp, Homo sapien
tgaaaagaactgtactccctgcata

SEQ ID NO: 56586 - DNA, 25 bp, Homo sapien
ctgaacttatgtatgaatgaaaaga

SEQ ID NO: 56587 - DNA, 25 bp, Homo sapien
gttagggaagcaactactgaactta

SEQ ID NO: 56588 - DNA, 25 bp, Homo sapien
ttgcctttgcagttagggaagcaac

SEQ ID NO: 56589 - DNA, 25 bp, Homo sapien
aactaaatgagattgcctttgcagt

SEQ ID NO: 56590 - DNA, 25 bp, Homo sapien
tcaaagctgctttcaagagctactc

SEQ ID NO: 56591 - DNA, 25 bp, Homo sapien
aactaaatgagattgcctttgcagt

SEQ ID NO: 56592 - DNA, 25 bp, Homo sapien
aaaaaggtcccaaacatcaggctgt

SEQ ID NO: 56593 - DNA, 25 bp, Homo sapien
actccctgcataacaagagattatt

SEQ ID NO: 56594 - DNA, 25 bp, Homo sapien
ttgtgttgaactgccccacacagca

SEQ ID NO: 56595 - DNA, 25 bp, Homo sapien
gttagggaagcaactactgaactta

SEQ ID NO: 56596 - DNA, 25 bp, Homo sapien
gtgagggtgtaacacacatacttct

SEQ ID NO: 56597 - DNA, 25 bp, Homo sapien
tgaaaagaactgtactccctgcata

SEQ ID NO: 56598 - DNA, 25 bp, Homo sapien
tagaggatgcatttgacatgccaac

SEQ ID NO: 56599 - DNA, 25 bp, Homo sapien
ttgcctttgcagttagggaagcaac

SEQ ID NO: 56600 - DNA, 25 bp, Homo sapien
ctgaacttatgtatgaatgaaaaga

SEQ ID NO: 56601 - DNA, 25 bp, Homo sapien
tcaaagctgctttcaagagctactc

SEQ ID NO: 56602 - DNA, 25 bp, Homo sapien
gtgagggtgtaacacacatacttct

SEQ ID NO: 56603 - DNA, 25 bp, Homo sapien
ttgtgttgaactgccccacacagca

SEQ ID NO: 56604 - DNA, 25 bp, Homo sapien
tagaggatgcatttgacatgccaac

SEQ ID NO: 56605 - DNA, 25 bp, Homo sapien
aaaaaggtcccaaacatcaggctgt

SEQ ID NO: 56606 - DNA, 25 bp, Homo sapien
actccctgcataacaagagattatt

SEQ ID NO: 56607 - DNA, 25 bp, Homo sapien
tgaaaagaactgtactccctgcata

SEQ ID NO: 56608 - DNA, 25 bp, Homo sapien
ctgaacttatgtatgaatgaaaaga

SEQ ID NO: 56609 - DNA, 25 bp, Homo sapien
gttagggaagcaactactgaactta

SEQ ID NO: 56610 - DNA, 25 bp, Homo sapien
ttgcctttgcagttagggaagcaac

SEQ ID NO: 56611 - DNA, 25 bp, Homo sapien
aactaaatgagattgcctttgcagt

SEQ ID NO: 56612 - DNA, 25 bp, Homo sapien
tagaggatgcatttgacatgccaac

SEQ ID NO: 56613 - DNA, 25 bp, Homo sapien
gttagggaagcaactactgaactta

SEQ ID NO: 56614 - DNA, 25 bp, Homo sapien
tcaaagctgctttcaagagctactc

SEQ ID NO: 56615 - DNA, 25 bp, Homo sapien
ttgcctttgcagttagggaagcaac

SEQ ID NO: 56616 - DNA, 25 bp, Homo sapien
tgaaaagaactgtactccctgcata

SEQ ID NO: 56617 - DNA, 25 bp, Homo sapien
ttgtgttgaactgccccacacagca

SEQ ID NO: 56618 - DNA, 25 bp, Homo sapien
actccctgcataacaagagattatt

SEQ ID NO: 56619 - DNA, 25 bp, Homo sapien
aactaaatgagattgcctttgcagt

SEQ ID NO: 56620 - DNA, 25 bp, Homo sapien
ctgaacttatgtatgaatgaaaaga

SEQ ID NO: 56621 - DNA, 25 bp, Homo sapien
gtgagggtgtaacacacatacttct

SEQ ID NO: 56622 - DNA, 25 bp, Homo sapien
aaaaaggtcccaaacatcaggctgt

SEQ ID NO: 56623 - DNA, 25 bp, Homo sapien
actccctgcataacaagagattatt

SEQ ID NO: 56624 - DNA, 25 bp, Homo sapien
tgaaaagaactgtactccctgcata

SEQ ID NO: 56625 - DNA, 25 bp, Homo sapien
ctgaacttatgtatgaatgaaaaga

SEQ ID NO: 56626 - DNA, 25 bp, Homo sapien
gttagggaagcaactactgaactta

SEQ ID NO: 56627 - DNA, 25 bp, Homo sapien
ttgcctttgcagttagggaagcaac

SEQ ID NO: 56628 - DNA, 25 bp, Homo sapien
aactaaatgagattgcctttgcagt

SEQ ID NO: 56629 - DNA, 25 bp, Homo sapien
tcaaagctgctttcaagagctactc

SEQ ID NO: 56630 - DNA, 25 bp, Homo sapien
gtgagggtgtaacacacatacttct

SEQ ID NO: 56631 - DNA, 25 bp, Homo sapien
ttgtgttgaactgccccacacagca

SEQ ID NO: 56632 - DNA, 25 bp, Homo sapien
tagaggatgcatttgacatgccaac

SEQ ID NO: 56633 - DNA, 25 bp, Homo sapien
aaaaaggtcccaaacatcaggctgt

SEQ ID NO: 56634 - DNA, 25 bp, Homo sapien
tcaaagctgctttcaagagctactc

SEQ ID NO: 56635 - DNA, 25 bp, Homo sapien
gtgagggtgtaacacacatacttct

SEQ ID NO: 56636 - DNA, 25 bp, Homo sapien
ttgtgttgaactgccccacacagca

SEQ ID NO: 56637 - DNA, 25 bp, Homo sapien
tagaggatgcatttgacatgccaac

SEQ ID NO: 56638 - DNA, 25 bp, Homo sapien
aaaaaggtcccaaacatcaggctgt

SEQ ID NO: 56639 - DNA, 25 bp, Homo sapien
actccctgcataacaagagattatt

SEQ ID NO: 56640 - DNA, 25 bp, Homo sapien
tgaaaagaactgtactccctgcata

SEQ ID NO: 56641 - DNA, 25 bp, Homo sapien
ctgaacttatgtatgaatgaaaaga

SEQ ID NO: 56642 - DNA, 25 bp, Homo sapien
gttagggaagcaactactgaactta

SEQ ID NO: 56643 - DNA, 25 bp, Homo sapien
ttgcctttgcagttagggaagcaac

SEQ ID NO: 56644 - DNA, 25 bp, Homo sapien
aactaaatgagattgcctttgcagt

SEQ ID NO: 56645 - DNA, 25 bp, Homo sapien
tgaaaagaactgtactccctgcata

SEQ ID NO: 56646 - DNA, 25 bp, Homo sapien
gtgagggtgtaacacacatacttct

SEQ ID NO: 56647 - DNA, 25 bp, Homo sapien
ctgaacttatgtatgaatgaaaaga

SEQ ID NO: 56648 - DNA, 25 bp, Homo sapien
actccctgcataacaagagattatt

SEQ ID NO: 56649 - DNA, 25 bp, Homo sapien
aaaaaggtcccaaacatcaggctgt

SEQ ID NO: 56650 - DNA, 25 bp, Homo sapien
tagaggatgcatttgacatgccaac

SEQ ID NO: 56651 - DNA, 25 bp, Homo sapien
ttgtgttgaactgccccacacagca

SEQ ID NO: 56652 - DNA, 25 bp, Homo sapien
ttgcctttgcagttagggaagcaac

SEQ ID NO: 56653 - DNA, 25 bp, Homo sapien
gttagggaagcaactactgaactta

SEQ ID NO: 56654 - DNA, 25 bp, Homo sapien
aactaaatgagattgcctttgcagt

SEQ ID NO: 56655 - DNA, 25 bp, Homo sapien
tcaaagctgctttcaagagctactc

SEQ ID NO: 56656 - DNA, 25 bp, Homo sapien
tcaaagctgctttcaagagctactc

SEQ ID NO: 56657 - DNA, 25 bp, Homo sapien
gtgagggtgtaacacacatacttct

SEQ ID NO: 56658 - DNA, 25 bp, Homo sapien
ttgtgttgaactgccccacacagca

SEQ ID NO: 56659 - DNA, 25 bp, Homo sapien
tagaggatgcatttgacatgccaac

SEQ ID NO: 56660 - DNA, 25 bp, Homo sapien
aaaaaggtcccaaacatcaggctgt

SEQ ID NO: 56661 - DNA, 25 bp, Homo sapien
actccctgcataacaagagattatt

SEQ ID NO: 56662 - DNA, 25 bp, Homo sapien
tgaaaagaactgtactccctgcata

SEQ ID NO: 56663 - DNA, 25 bp, Homo sapien
ctgaacttatgtatgaatgaaaaga

SEQ ID NO: 56664 - DNA, 25 bp, Homo sapien
gttagggaagcaactactgaactta

SEQ ID NO: 56665 - DNA, 25 bp, Homo sapien
ttgcctttgcagttagggaagcaac

SEQ ID NO: 56666 - DNA, 25 bp, Homo sapien
aactaaatgagattgcctttgcagt

SEQ ID NO: 56667 - DNA, 25 bp, Homo sapien
ctgaacttatgtatgaatgaaaaga

SEQ ID NO: 56668 - DNA, 25 bp, Homo sapien
aactaaatgagattgcctttgcagt

SEQ ID NO: 56669 - DNA, 25 bp, Homo sapien
tcaaagctgctttcaagagctactc

SEQ ID NO: 56670 - DNA, 25 bp, Homo sapien
ttgtgttgaactgccccacacagca

SEQ ID NO: 56671 - DNA, 25 bp, Homo sapien
actccctgcataacaagagattatt

SEQ ID NO: 56672 - DNA, 25 bp, Homo sapien
gtgagggtgtaacacacatacttct

SEQ ID NO: 56673 - DNA, 25 bp, Homo sapien
gttagggaagcaactactgaactta

SEQ ID NO: 56674 - DNA, 25 bp, Homo sapien
aaaaaggtcccaaacatcaggctgt

SEQ ID NO: 56675 - DNA, 25 bp, Homo sapien
ttgcctttgcagttagggaagcaac

SEQ ID NO: 56676 - DNA, 25 bp, Homo sapien
tagaggatgcatttgacatgccaac

SEQ ID NO: 56677 - DNA, 25 bp, Homo sapien
tgaaaagaactgtactccctgcata

SEQ ID NO: 56678 - DNA, 25 bp, Homo sapien
tcaaagctgctttcaagagctactc

SEQ ID NO: 56679 - DNA, 25 bp, Homo sapien
gtgagggtgtaacacacatacttct

SEQ ID NO: 56680 - DNA, 25 bp, Homo sapien
ttgtgttgaactgccccacacagca

SEQ ID NO: 56681 - DNA, 25 bp, Homo sapien
tagaggatgcatttgacatgccaac

SEQ ID NO: 56682 - DNA, 25 bp, Homo sapien
aaaaaggtcccaaacatcaggctgt

SEQ ID NO: 56683 - DNA, 25 bp, Homo sapien
actccctgcataacaagagattatt

SEQ ID NO: 56684 - DNA, 25 bp, Homo sapien
tgaaaagaactgtactccctgcata

SEQ ID NO: 56685 - DNA, 25 bp, Homo sapien
ctgaacttatgtatgaatgaaaaga

SEQ ID NO: 56686 - DNA, 25 bp, Homo sapien
gttagggaagcaactactgaactta

SEQ ID NO: 56687 - DNA, 25 bp, Homo sapien
ttgcctttgcagttagggaagcaac

SEQ ID NO: 56688 - DNA, 25 bp, Homo sapien
aactaaatgagattgcctttgcagt

SEQ ID NO: 56689 - DNA, 25 bp, Homo sapien
aaaaaggtcccaaacatcaggctgt

SEQ ID NO: 56690 - DNA, 25 bp, Homo sapien
gtgagggtgtaacacacatacttct

SEQ ID NO: 56691 - DNA, 25 bp, Homo sapien
aactaaatgagattgcctttgcagt

SEQ ID NO: 56692 - DNA, 25 bp, Homo sapien
tcaaagctgctttcaagagctactc

SEQ ID NO: 56693 - DNA, 25 bp, Homo sapien
ttgcctttgcagttagggaagcaac

SEQ ID NO: 56694 - DNA, 25 bp, Homo sapien
actccctgcataacaagagattatt

SEQ ID NO: 56695 - DNA, 25 bp, Homo sapien
ctgaacttatgtatgaatgaaaaga

SEQ ID NO: 56696 - DNA, 25 bp, Homo sapien
ttgtgttgaactgccccacacagca

SEQ ID NO: 56697 - DNA, 25 bp, Homo sapien
gttagggaagcaactactgaactta

SEQ ID NO: 56698 - DNA, 25 bp, Homo sapien
tagaggatgcatttgacatgccaac

SEQ ID NO: 56699 - DNA, 25 bp, Homo sapien
tgaaaagaactgtactccctgcata

SEQ ID NO: 56700 - DNA, 25 bp, Homo sapien
tcaaagctgctttcaagagctactc

SEQ ID NO: 56701 - DNA, 25 bp, Homo sapien
gtgagggtgtaacacacatacttct

SEQ ID NO: 56702 - DNA, 25 bp, Homo sapien
ttgtgttgaactgccccacacagca

SEQ ID NO: 56703 - DNA, 25 bp, Homo sapien
tagaggatgcatttgacatgccaac

SEQ ID NO: 56704 - DNA, 25 bp, Homo sapien
aaaaaggtcccaaacatcaggctgt

SEQ ID NO: 56705 - DNA, 25 bp, Homo sapien
actccctgcataacaagagattatt

SEQ ID NO: 56706 - DNA, 25 bp, Homo sapien
tgaaaagaactgtactccctgcata

SEQ ID NO: 56707 - DNA, 25 bp, Homo sapien
ctgaacttatgtatgaatgaaaaga

SEQ ID NO: 56708 - DNA, 25 bp, Homo sapien
gttagggaagcaactactgaactta

SEQ ID NO: 56709 - DNA, 25 bp, Homo sapien
ttgcctttgcagttagggaagcaac

SEQ ID NO: 56710 - DNA, 25 bp, Homo sapien
aactaaatgagattgcctttgcagt

SEQ ID NO: 56711 - DNA, 25 bp, Homo sapien
ctgaacttatgtatgaatgaaaaga

SEQ ID NO: 56712 - DNA, 25 bp, Homo sapien
actccctgcataacaagagattatt

SEQ ID NO: 56713 - DNA, 25 bp, Homo sapien
aaaaaggtcccaaacatcaggctgt

SEQ ID NO: 56714 - DNA, 25 bp, Homo sapien
ttgcctttgcagttagggaagcaac

SEQ ID NO: 56715 - DNA, 25 bp, Homo sapien
ttgtgttgaactgccccacacagca

SEQ ID NO: 56716 - DNA, 25 bp, Homo sapien
tcaaagctgctttcaagagctactc

SEQ ID NO: 56717 - DNA, 25 bp, Homo sapien
tgaaaagaactgtactccctgcata

SEQ ID NO: 56718 - DNA, 25 bp, Homo sapien
gtgagggtgtaacacacatacttct

SEQ ID NO: 56719 - DNA, 25 bp, Homo sapien
gttagggaagcaactactgaactta

SEQ ID NO: 56720 - DNA, 25 bp, Homo sapien
tagaggatgcatttgacatgccaac

SEQ ID NO: 56721 - DNA, 25 bp, Homo sapien
aactaaatgagattgcctttgcagt

SEQ ID NO: 56722 - DNA, 25 bp, Homo sapien
tcaaagctgctttcaagagctactc

SEQ ID NO: 56723 - DNA, 25 bp, Homo sapien
gtgagggtgtaacacacatacttct

SEQ ID NO: 56724 - DNA, 25 bp, Homo sapien
ttgtgttgaactgccccacacagca

SEQ ID NO: 56725 - DNA, 25 bp, Homo sapien
tagaggatgcatttgacatgccaac

SEQ ID NO: 56726 - DNA, 25 bp, Homo sapien
aaaaaggtcccaaacatcaggctgt

SEQ ID NO: 56727 - DNA, 25 bp, Homo sapien
actccctgcataacaagagattatt

SEQ ID NO: 56728 - DNA, 25 bp, Homo sapien
tgaaaagaactgtactccctgcata

SEQ ID NO: 56729 - DNA, 25 bp, Homo sapien
ctgaacttatgtatgaatgaaaaga

SEQ ID NO: 56730 - DNA, 25 bp, Homo sapien
gttagggaagcaactactgaactta

SEQ ID NO: 56731 - DNA, 25 bp, Homo sapien
ttgcctttgcagttagggaagcaac

SEQ ID NO: 56732 - DNA, 25 bp, Homo sapien
aactaaatgagattgcctttgcagt

SEQ ID NO: 56733 - DNA, 25 bp, Homo sapien
gttagggaagcaactactgaactta

SEQ ID NO: 56734 - DNA, 25 bp, Homo sapien
aactaaatgagattgcctttgcagt

SEQ ID NO: 56735 - DNA, 25 bp, Homo sapien
gtgagggtgtaacacacatacttct

SEQ ID NO: 56736 - DNA, 25 bp, Homo sapien
tagaggatgcatttgacatgccaac

SEQ ID NO: 56737 - DNA, 25 bp, Homo sapien
ttgcctttgcagttagggaagcaac

SEQ ID NO: 56738 - DNA, 25 bp, Homo sapien
aaaaaggtcccaaacatcaggctgt

SEQ ID NO: 56739 - DNA, 25 bp, Homo sapien
tcaaagctgctttcaagagctactc

SEQ ID NO: 56740 - DNA, 25 bp, Homo sapien
tgaaaagaactgtactccctgcata

SEQ ID NO: 56741 - DNA, 25 bp, Homo sapien
ctgaacttatgtatgaatgaaaaga

SEQ ID NO: 56742 - DNA, 25 bp, Homo sapien
ttgtgttgaactgccccacacagca

SEQ ID NO: 56743 - DNA, 25 bp, Homo sapien
actccctgcataacaagagattatt

SEQ ID NO: 56744 - DNA, 25 bp, Homo sapien
ttgtgttgaactgccccacacagca

SEQ ID NO: 56745 - DNA, 25 bp, Homo sapien
tagaggatgcatttgacatgccaac

SEQ ID NO: 56746 - DNA, 25 bp, Homo sapien
gttagggaagcaactactgaactta

SEQ ID NO: 56747 - DNA, 25 bp, Homo sapien
gtgagggtgtaacacacatacttct

SEQ ID NO: 56748 - DNA, 25 bp, Homo sapien
aaaaaggtcccaaacatcaggctgt

SEQ ID NO: 56749 - DNA, 25 bp, Homo sapien
tcaaagctgctttcaagagctactc

SEQ ID NO: 56750 - DNA, 25 bp, Homo sapien
ctgaacttatgtatgaatgaaaaga

SEQ ID NO: 56751 - DNA, 25 bp, Homo sapien
aactaaatgagattgcctttgcagt

SEQ ID NO: 56752 - DNA, 25 bp, Homo sapien
actccctgcataacaagagattatt

SEQ ID NO: 56753 - DNA, 25 bp, Homo sapien
ttgcctttgcagttagggaagcaac

SEQ ID NO: 56754 - DNA, 25 bp, Homo sapien
tgaaaagaactgtactccctgcata

SEQ ID NO: 56755 - DNA, 25 bp, Homo sapien
tcaaagctgctttcaagagctactc

SEQ ID NO: 56756 - DNA, 25 bp, Homo sapien
gtgagggtgtaacacacatacttct

SEQ ID NO: 56757 - DNA, 25 bp, Homo sapien
ttgtgttgaactgccccacacagca

SEQ ID NO: 56758 - DNA, 25 bp, Homo sapien
tagaggatgcatttgacatgccaac

SEQ ID NO: 56759 - DNA, 25 bp, Homo sapien
aaaaaggtcccaaacatcaggctgt

SEQ ID NO: 56760 - DNA, 25 bp, Homo sapien
actccctgcataacaagagattatt

SEQ ID NO: 56761 - DNA, 25 bp, Homo sapien
tgaaaagaactgtactccctgcata

SEQ ID NO: 56762 - DNA, 25 bp, Homo sapien
ctgaacttatgtatgaatgaaaaga

SEQ ID NO: 56763 - DNA, 25 bp, Homo sapien
gttagggaagcaactactgaactta

SEQ ID NO: 56764 - DNA, 25 bp, Homo sapien
ttgcctttgcagttagggaagcaac

SEQ ID NO: 56765 - DNA, 25 bp, Homo sapien
aactaaatgagattgcctttgcagt

SEQ ID NO: 56766 - DNA, 25 bp, Homo sapien
ttgcctttgcagttagggaagcaac

SEQ ID NO: 56767 - DNA, 25 bp, Homo sapien
tcaaagctgctttcaagagctactc

SEQ ID NO: 56768 - DNA, 25 bp, Homo sapien
tagaggatgcatttgacatgccaac

SEQ ID NO: 56769 - DNA, 25 bp, Homo sapien
aactaaatgagattgcctttgcagt

SEQ ID NO: 56770 - DNA, 25 bp, Homo sapien
actccctgcataacaagagattatt

SEQ ID NO: 56771 - DNA, 25 bp, Homo sapien
ctgaacttatgtatgaatgaaaaga

SEQ ID NO: 56772 - DNA, 25 bp, Homo sapien
ttgtgttgaactgccccacacagca

SEQ ID NO: 56773 - DNA, 25 bp, Homo sapien
tgaaaagaactgtactccctgcata

SEQ ID NO: 56774 - DNA, 25 bp, Homo sapien
gttagggaagcaactactgaactta

SEQ ID NO: 56775 - DNA, 25 bp, Homo sapien
gtgagggtgtaacacacatacttct

SEQ ID NO: 56776 - DNA, 25 bp, Homo sapien
aaaaaggtcccaaacatcaggctgt

SEQ ID NO: 56777 - DNA, 25 bp, Homo sapien
actccctgcataacaagagattatt

SEQ ID NO: 56778 - DNA, 25 bp, Homo sapien
tgaaaagaactgtactccctgcata

SEQ ID NO: 56779 - DNA, 25 bp, Homo sapien
ctgaacttatgtatgaatgaaaaga

SEQ ID NO: 56780 - DNA, 25 bp, Homo sapien
gttagggaagcaactactgaactta

SEQ ID NO: 56781 - DNA, 25 bp, Homo sapien
ttgcctttgcagttagggaagcaac

SEQ ID NO: 56782 - DNA, 25 bp, Homo sapien
aactaaatgagattgcctttgcagt

SEQ ID NO: 56783 - DNA, 25 bp, Homo sapien
tcaaagctgctttcaagagctactc

SEQ ID NO: 56784 - DNA, 25 bp, Homo sapien
gtgagggtgtaacacacatacttct

SEQ ID NO: 56785 - DNA, 25 bp, Homo sapien
ttgtgttgaactgccccacacagca

SEQ ID NO: 56786 - DNA, 25 bp, Homo sapien
tagaggatgcatttgacatgccaac

SEQ ID NO: 56787 - DNA, 25 bp, Homo sapien
aaaaaggtcccaaacatcaggctgt

SEQ ID NO: 56788 - DNA, 25 bp, Homo sapien
ttgcctttgcagttagggaagcaac

SEQ ID NO: 56789 - DNA, 25 bp, Homo sapien
tcaaagctgctttcaagagctactc

SEQ ID NO: 56790 - DNA, 25 bp, Homo sapien
aactaaatgagattgcctttgcagt

SEQ ID NO: 56791 - DNA, 25 bp, Homo sapien
actccctgcataacaagagattatt

SEQ ID NO: 56792 - DNA, 25 bp, Homo sapien
gttagggaagcaactactgaactta

SEQ ID NO: 56793 - DNA, 25 bp, Homo sapien
ttgtgttgaactgccccacacagca

SEQ ID NO: 56794 - DNA, 25 bp, Homo sapien
aaaaaggtcccaaacatcaggctgt

SEQ ID NO: 56795 - DNA, 25 bp, Homo sapien
gtgagggtgtaacacacatacttct

SEQ ID NO: 56796 - DNA, 25 bp, Homo sapien
tagaggatgcatttgacatgccaac

SEQ ID NO: 56797 - DNA, 25 bp, Homo sapien
ctgaacttatgtatgaatgaaaaga

SEQ ID NO: 56798 - DNA, 25 bp, Homo sapien
tgaaaagaactgtactccctgcata

SEQ ID NO: 56799 - DNA, 25 bp, Homo sapien
tcaaagctgctttcaagagctactc

SEQ ID NO: 56800 - DNA, 25 bp, Homo sapien
gtgagggtgtaacacacatacttct

SEQ ID NO: 56801 - DNA, 25 bp, Homo sapien
ttgtgttgaactgccccacacagca

SEQ ID NO: 56802 - DNA, 25 bp, Homo sapien
tagaggatgcatttgacatgccaac

SEQ ID NO: 56803 - DNA, 25 bp, Homo sapien
aaaaaggtcccaaacatcaggctgt

SEQ ID NO: 56804 - DNA, 25 bp, Homo sapien
actccctgcataacaagagattatt

SEQ ID NO: 56805 - DNA, 25 bp, Homo sapien
tgaaaagaactgtactccctgcata

SEQ ID NO: 56806 - DNA, 25 bp, Homo sapien
ctgaacttatgtatgaatgaaaaga

SEQ ID NO: 56807 - DNA, 25 bp, Homo sapien
gttagggaagcaactactgaactta

SEQ ID NO: 56808 - DNA, 25 bp, Homo sapien
ttgcctttgcagttagggaagcaac

SEQ ID NO: 56809 - DNA, 25 bp, Homo sapien
aactaaatgagattgcctttgcagt

SEQ ID NO: 56810 - DNA, 25 bp, Homo sapien
actccctgcataacaagagattatt

SEQ ID NO: 56811 - DNA, 25 bp, Homo sapien
tgaaaagaactgtactccctgcata

SEQ ID NO: 56812 - DNA, 25 bp, Homo sapien
aactaaatgagattgcctttgcagt

SEQ ID NO: 56813 - DNA, 25 bp, Homo sapien
ttgtgttgaactgccccacacagca

SEQ ID NO: 56814 - DNA, 25 bp, Homo sapien
aaaaaggtcccaaacatcaggctgt

SEQ ID NO: 56815 - DNA, 25 bp, Homo sapien
ttgcctttgcagttagggaagcaac

SEQ ID NO: 56816 - DNA, 25 bp, Homo sapien
tagaggatgcatttgacatgccaac

SEQ ID NO: 56817 - DNA, 25 bp, Homo sapien
tcaaagctgctttcaagagctactc

SEQ ID NO: 56818 - DNA, 25 bp, Homo sapien
ctgaacttatgtatgaatgaaaaga

SEQ ID NO: 56819 - DNA, 25 bp, Homo sapien
gtgagggtgtaacacacatacttct

SEQ ID NO: 56820 - DNA, 25 bp, Homo sapien
gttagggaagcaactactgaactta

SEQ ID NO: 56821 - DNA, 25 bp, Homo sapien
tcaaagctgctttcaagagctactc

SEQ ID NO: 56822 - DNA, 25 bp, Homo sapien
gtgagggtgtaacacacatacttct

SEQ ID NO: 56823 - DNA, 25 bp, Homo sapien
ttgtgttgaactgccccacacagca

SEQ ID NO: 56824 - DNA, 25 bp, Homo sapien
tagaggatgcatttgacatgccaac

SEQ ID NO: 56825 - DNA, 25 bp, Homo sapien
aaaaaggtcccaaacatcaggctgt

SEQ ID NO: 56826 - DNA, 25 bp, Homo sapien
actccctgcataacaagagattatt

SEQ ID NO: 56827 - DNA, 25 bp, Homo sapien
tgaaaagaactgtactccctgcata

SEQ ID NO: 56828 - DNA, 25 bp, Homo sapien
ctgaacttatgtatgaatgaaaaga

SEQ ID NO: 56829 - DNA, 25 bp, Homo sapien
gttagggaagcaactactgaactta

SEQ ID NO: 56830 - DNA, 25 bp, Homo sapien
ttgcctttgcagttagggaagcaac

SEQ ID NO: 56831 - DNA, 25 bp, Homo sapien
aactaaatgagattgcctttgcagt

SEQ ID NO: 56832 - DNA, 25 bp, Homo sapien
gttagggaagcaactactgaactta

SEQ ID NO: 56833 - DNA, 25 bp, Homo sapien
ttgtgttgaactgccccacacagca

SEQ ID NO: 56834 - DNA, 25 bp, Homo sapien
gtgagggtgtaacacacatacttct

SEQ ID NO: 56835 - DNA, 25 bp, Homo sapien
ttgcctttgcagttagggaagcaac

SEQ ID NO: 56836 - DNA, 25 bp, Homo sapien
tagaggatgcatttgacatgccaac

SEQ ID NO: 56837 - DNA, 25 bp, Homo sapien
aaaaaggtcccaaacatcaggctgt

SEQ ID NO: 56838 - DNA, 25 bp, Homo sapien
actccctgcataacaagagattatt

SEQ ID NO: 56839 - DNA, 25 bp, Homo sapien
tcaaagctgctttcaagagctactc

SEQ ID NO: 56840 - DNA, 25 bp, Homo sapien
tgaaaagaactgtactccctgcata

SEQ ID NO: 56841 - DNA, 25 bp, Homo sapien
aactaaatgagattgcctttgcagt

SEQ ID NO: 56842 - DNA, 25 bp, Homo sapien
ctgaacttatgtatgaatgaaaaga

SEQ ID NO: 56843 - DNA, 25 bp, Homo sapien
tcaaagctgctttcaagagctactc

SEQ ID NO: 56844 - DNA, 25 bp, Homo sapien
gtgagggtgtaacacacatacttct

SEQ ID NO: 56845 - DNA, 25 bp, Homo sapien
ttgtgttgaactgccccacacagca

SEQ ID NO: 56846 - DNA, 25 bp, Homo sapien
tagaggatgcatttgacatgccaac

SEQ ID NO: 56847 - DNA, 25 bp, Homo sapien
aaaaaggtcccaaacatcaggctgt

SEQ ID NO: 56848 - DNA, 25 bp, Homo sapien
actccctgcataacaagagattatt

SEQ ID NO: 56849 - DNA, 25 bp, Homo sapien
tgaaaagaactgtactccctgcata

SEQ ID NO: 56850 - DNA, 25 bp, Homo sapien
ctgaacttatgtatgaatgaaaaga

SEQ ID NO: 56851 - DNA, 25 bp, Homo sapien
gttagggaagcaactactgaactta

SEQ ID NO: 56852 - DNA, 25 bp, Homo sapien
ttgcctttgcagttagggaagcaac

SEQ ID NO: 56853 - DNA, 25 bp, Homo sapien
aactaaatgagattgcctttgcagt

SEQ ID NO: 56854 - DNA, 25 bp, Homo sapien
ctgaacttatgtatgaatgaaaaga

SEQ ID NO: 56855 - DNA, 25 bp, Homo sapien
ttgcctttgcagttagggaagcaac

SEQ ID NO: 56856 - DNA, 25 bp, Homo sapien
gtgagggtgtaacacacatacttct

SEQ ID NO: 56857 - DNA, 25 bp, Homo sapien
tagaggatgcatttgacatgccaac

SEQ ID NO: 56858 - DNA, 25 bp, Homo sapien
aactaaatgagattgcctttgcagt

SEQ ID NO: 56859 - DNA, 25 bp, Homo sapien
tgaaaagaactgtactccctgcata

SEQ ID NO: 56860 - DNA, 25 bp, Homo sapien
gttagggaagcaactactgaactta

SEQ ID NO: 56861 - DNA, 25 bp, Homo sapien
aaaaaggtcccaaacatcaggctgt

SEQ ID NO: 56862 - DNA, 25 bp, Homo sapien
actccctgcataacaagagattatt

SEQ ID NO: 56863 - DNA, 25 bp, Homo sapien
ttgtgttgaactgccccacacagca

SEQ ID NO: 56864 - DNA, 25 bp, Homo sapien
tcaaagctgctttcaagagctactc

SEQ ID NO: 56865 - DNA, 25 bp, Homo sapien
tcaaagctgctttcaagagctactc

SEQ ID NO: 56866 - DNA, 25 bp, Homo sapien
gtgagggtgtaacacacatacttct

SEQ ID NO: 56867 - DNA, 25 bp, Homo sapien
ttgtgttgaactgccccacacagca

SEQ ID NO: 56868 - DNA, 25 bp, Homo sapien
tagaggatgcatttgacatgccaac

SEQ ID NO: 56869 - DNA, 25 bp, Homo sapien
aaaaaggtcccaaacatcaggctgt

SEQ ID NO: 56870 - DNA, 25 bp, Homo sapien
actccctgcataacaagagattatt

SEQ ID NO: 56871 - DNA, 25 bp, Homo sapien
tgaaaagaactgtactccctgcata

SEQ ID NO: 56872 - DNA, 25 bp, Homo sapien
ctgaacttatgtatgaatgaaaaga

SEQ ID NO: 56873 - DNA, 25 bp, Homo sapien
gttagggaagcaactactgaactta

SEQ ID NO: 56874 - DNA, 25 bp, Homo sapien
ttgcctttgcagttagggaagcaac

SEQ ID NO: 56875 - DNA, 25 bp, Homo sapien
aactaaatgagattgcctttgcagt

SEQ ID NO: 56876 - DNA, 25 bp, Homo sapien
tcaaagctgctttcaagagctactc

SEQ ID NO: 56877 - DNA, 25 bp, Homo sapien
gtgagggtgtaacacacatacttct

SEQ ID NO: 56878 - DNA, 25 bp, Homo sapien
ttgtgttgaactgccccacacagca

SEQ ID NO: 56879 - DNA, 25 bp, Homo sapien
tagaggatgcatttgacatgccaac

SEQ ID NO: 56880 - DNA, 25 bp, Homo sapien
aaaaaggtcccaaacatcaggctgt

SEQ ID NO: 56881 - DNA, 25 bp, Homo sapien
actccctgcataacaagagattatt

SEQ ID NO: 56882 - DNA, 25 bp, Homo sapien
tgaaaagaactgtactccctgcata

SEQ ID NO: 56883 - DNA, 25 bp, Homo sapien
ctgaacttatgtatgaatgaaaaga

SEQ ID NO: 56884 - DNA, 25 bp, Homo sapien
gttagggaagcaactactgaactta

SEQ ID NO: 56885 - DNA, 25 bp, Homo sapien
ttgcctttgcagttagggaagcaac

SEQ ID NO: 56886 - DNA, 25 bp, Homo sapien
aactaaatgagattgcctttgcagt

SEQ ID NO: 56887 - DNA, 25 bp, Homo sapien
gtgagggtgtaacacacatacttct

SEQ ID NO: 56888 - DNA, 25 bp, Homo sapien
ttgtgttgaactgccccacacagca

SEQ ID NO: 56889 - DNA, 25 bp, Homo sapien
tcaaagctgctttcaagagctactc

SEQ ID NO: 56890 - DNA, 25 bp, Homo sapien
tagaggatgcatttgacatgccaac

SEQ ID NO: 56891 - DNA, 25 bp, Homo sapien
tgaaaagaactgtactccctgcata

SEQ ID NO: 56892 - DNA, 25 bp, Homo sapien
ctgaacttatgtatgaatgaaaaga

SEQ ID NO: 56893 - DNA, 25 bp, Homo sapien
gttagggaagcaactactgaactta

SEQ ID NO: 56894 - DNA, 25 bp, Homo sapien
aaaaaggtcccaaacatcaggctgt

SEQ ID NO: 56895 - DNA, 25 bp, Homo sapien
ttgcctttgcagttagggaagcaac

SEQ ID NO: 56896 - DNA, 25 bp, Homo sapien
actccctgcataacaagagattatt

SEQ ID NO: 56897 - DNA, 25 bp, Homo sapien
aactaaatgagattgcctttgcagt

SEQ ID NO: 56898 - DNA, 25 bp, Homo sapien
tcaaagctgctttcaagagctactc

SEQ ID NO: 56899 - DNA, 25 bp, Homo sapien
gtgagggtgtaacacacatacttct

SEQ ID NO: 56900 - DNA, 25 bp, Homo sapien
ttgtgttgaactgccccacacagca

SEQ ID NO: 56901 - DNA, 25 bp, Homo sapien
tagaggatgcatttgacatgccaac

SEQ ID NO: 56902 - DNA, 25 bp, Homo sapien
aaaaaggtcccaaacatcaggctgt

SEQ ID NO: 56903 - DNA, 25 bp, Homo sapien
actccctgcataacaagagattatt

SEQ ID NO: 56904 - DNA, 25 bp, Homo sapien
tgaaaagaactgtactccctgcata

SEQ ID NO: 56905 - DNA, 25 bp, Homo sapien
ctgaacttatgtatgaatgaaaaga

SEQ ID NO: 56906 - DNA, 25 bp, Homo sapien
gttagggaagcaactactgaactta

SEQ ID NO: 56907 - DNA, 25 bp, Homo sapien
ttgcctttgcagttagggaagcaac

SEQ ID NO: 56908 - DNA, 25 bp, Homo sapien
aactaaatgagattgcctttgcagt

SEQ ID NO: 56909 - DNA, 25 bp, Homo sapien
aactaaatgagattgcctttgcagt

SEQ ID NO: 56910 - DNA, 25 bp, Homo sapien
tagaggatgcatttgacatgccaac

SEQ ID NO: 56911 - DNA, 25 bp, Homo sapien
gtgagggtgtaacacacatacttct

SEQ ID NO: 56912 - DNA, 25 bp, Homo sapien
ttgtgttgaactgccccacacagca

SEQ ID NO: 56913 - DNA, 25 bp, Homo sapien
aaaaaggtcccaaacatcaggctgt

SEQ ID NO: 56914 - DNA, 25 bp, Homo sapien
actccctgcataacaagagattatt

SEQ ID NO: 56915 - DNA, 25 bp, Homo sapien
tgaaaagaactgtactccctgcata

SEQ ID NO: 56916 - DNA, 25 bp, Homo sapien
gttagggaagcaactactgaactta

SEQ ID NO: 56917 - DNA, 25 bp, Homo sapien
tcaaagctgctttcaagagctactc

SEQ ID NO: 56918 - DNA, 25 bp, Homo sapien
ctgaacttatgtatgaatgaaaaga

SEQ ID NO: 56919 - DNA, 25 bp, Homo sapien
ttgcctttgcagttagggaagcaac

SEQ ID NO: 56920 - DNA, 25 bp, Homo sapien
tcaaagctgctttcaagagctactc

SEQ ID NO: 56921 - DNA, 25 bp, Homo sapien
gtgagggtgtaacacacatacttct

SEQ ID NO: 56922 - DNA, 25 bp, Homo sapien
ttgtgttgaactgccccacacagca

SEQ ID NO: 56923 - DNA, 25 bp, Homo sapien
tagaggatgcatttgacatgccaac

SEQ ID NO: 56924 - DNA, 25 bp, Homo sapien
aaaaaggtcccaaacatcaggctgt

SEQ ID NO: 56925 - DNA, 25 bp, Homo sapien
actccctgcataacaagagattatt

SEQ ID NO: 56926 - DNA, 25 bp, Homo sapien
tgaaaagaactgtactccctgcata

SEQ ID NO: 56927 - DNA, 25 bp, Homo sapien
ctgaacttatgtatgaatgaaaaga

SEQ ID NO: 56928 - DNA, 25 bp, Homo sapien
gttagggaagcaactactgaactta

SEQ ID NO: 56929 - DNA, 25 bp, Homo sapien
ttgcctttgcagttagggaagcaac

SEQ ID NO: 56930 - DNA, 25 bp, Homo sapien
aactaaatgagattgcctttgcagt

SEQ ID NO: 56931 - DNA, 25 bp, Homo sapien
ttgcctttgcagttagggaagcaac

SEQ ID NO: 56932 - DNA, 25 bp, Homo sapien
tgaaaagaactgtactccctgcata

SEQ ID NO: 56933 - DNA, 25 bp, Homo sapien
ttgtgttgaactgccccacacagca

SEQ ID NO: 56934 - DNA, 25 bp, Homo sapien
aactaaatgagattgcctttgcagt

SEQ ID NO: 56935 - DNA, 25 bp, Homo sapien
gttagggaagcaactactgaactta

SEQ ID NO: 56936 - DNA, 25 bp, Homo sapien
aaaaaggtcccaaacatcaggctgt

SEQ ID NO: 56937 - DNA, 25 bp, Homo sapien
gtgagggtgtaacacacatacttct

SEQ ID NO: 56938 - DNA, 25 bp, Homo sapien
actccctgcataacaagagattatt

SEQ ID NO: 56939 - DNA, 25 bp, Homo sapien
ctgaacttatgtatgaatgaaaaga

SEQ ID NO: 56940 - DNA, 25 bp, Homo sapien
tagaggatgcatttgacatgccaac

SEQ ID NO: 56941 - DNA, 25 bp, Homo sapien
tcaaagctgctttcaagagctactc

SEQ ID NO: 56942 - DNA, 25 bp, Homo sapien
tcaaagctgctttcaagagctactc

SEQ ID NO: 56943 - DNA, 25 bp, Homo sapien
gtgagggtgtaacacacatacttct

SEQ ID NO: 56944 - DNA, 25 bp, Homo sapien
ttgtgttgaactgccccacacagca

SEQ ID NO: 56945 - DNA, 25 bp, Homo sapien
tagaggatgcatttgacatgccaac

SEQ ID NO: 56946 - DNA, 25 bp, Homo sapien
aaaaaggtcccaaacatcaggctgt

SEQ ID NO: 56947 - DNA, 25 bp, Homo sapien
actccctgcataacaagagattatt

SEQ ID NO: 56948 - DNA, 25 bp, Homo sapien
tgaaaagaactgtactccctgcata

SEQ ID NO: 56949 - DNA, 25 bp, Homo sapien
ctgaacttatgtatgaatgaaaaga

SEQ ID NO: 56950 - DNA, 25 bp, Homo sapien
gttagggaagcaactactgaactta

SEQ ID NO: 56951 - DNA, 25 bp, Homo sapien
ttgcctttgcagttagggaagcaac

SEQ ID NO: 56952 - DNA, 25 bp, Homo sapien
aactaaatgagattgcctttgcagt

SEQ ID NO: 56953 - DNA, 25 bp, Homo sapien
tcaaagctgctttcaagagctactc

SEQ ID NO: 56954 - DNA, 25 bp, Homo sapien
tagaggatgcatttgacatgccaac

SEQ ID NO: 56955 - DNA, 25 bp, Homo sapien
ttgtgttgaactgccccacacagca

SEQ ID NO: 56956 - DNA, 25 bp, Homo sapien
aaaaaggtcccaaacatcaggctgt

SEQ ID NO: 56957 - DNA, 25 bp, Homo sapien
ctgaacttatgtatgaatgaaaaga

SEQ ID NO: 56958 - DNA, 25 bp, Homo sapien
tgaaaagaactgtactccctgcata

SEQ ID NO: 56959 - DNA, 25 bp, Homo sapien
gtgagggtgtaacacacatacttct

SEQ ID NO: 56960 - DNA, 25 bp, Homo sapien
ttgcctttgcagttagggaagcaac

SEQ ID NO: 56961 - DNA, 25 bp, Homo sapien
actccctgcataacaagagattatt

SEQ ID NO: 56962 - DNA, 25 bp, Homo sapien
aactaaatgagattgcctttgcagt

SEQ ID NO: 56963 - DNA, 25 bp, Homo sapien
gttagggaagcaactactgaactta

SEQ ID NO: 56964 - DNA, 25 bp, Homo sapien
tcaaagctgctttcaagagctactc

SEQ ID NO: 56965 - DNA, 25 bp, Homo sapien
gtgagggtgtaacacacatacttct

SEQ ID NO: 56966 - DNA, 25 bp, Homo sapien
ttgtgttgaactgccccacacagca

SEQ ID NO: 56967 - DNA, 25 bp, Homo sapien
tagaggatgcatttgacatgccaac

SEQ ID NO: 56968 - DNA, 25 bp, Homo sapien
aaaaaggtcccaaacatcaggctgt

SEQ ID NO: 56969 - DNA, 25 bp, Homo sapien
actccctgcataacaagagattatt

SEQ ID NO: 56970 - DNA, 25 bp, Homo sapien
tgaaaagaactgtactccctgcata

SEQ ID NO: 56971 - DNA, 25 bp, Homo sapien
ctgaacttatgtatgaatgaaaaga

SEQ ID NO: 56972 - DNA, 25 bp, Homo sapien
gttagggaagcaactactgaactta

SEQ ID NO: 56973 - DNA, 25 bp, Homo sapien
ttgcctttgcagttagggaagcaac

SEQ ID NO: 56974 - DNA, 25 bp, Homo sapien
aactaaatgagattgcctttgcagt

SEQ ID NO: 56975 - DNA, 25 bp, Homo sapien
aaaaaggtcccaaacatcaggctgt

SEQ ID NO: 56976 - DNA, 25 bp, Homo sapien
tgaaaagaactgtactccctgcata

SEQ ID NO: 56977 - DNA, 25 bp, Homo sapien
ttgtgttgaactgccccacacagca

SEQ ID NO: 56978 - DNA, 25 bp, Homo sapien
tagaggatgcatttgacatgccaac

SEQ ID NO: 56979 - DNA, 25 bp, Homo sapien
ctgaacttatgtatgaatgaaaaga

SEQ ID NO: 56980 - DNA, 25 bp, Homo sapien
gtgagggtgtaacacacatacttct

SEQ ID NO: 56981 - DNA, 25 bp, Homo sapien
ttgcctttgcagttagggaagcaac

SEQ ID NO: 56982 - DNA, 25 bp, Homo sapien
tcaaagctgctttcaagagctactc

SEQ ID NO: 56983 - DNA, 25 bp, Homo sapien
gttagggaagcaactactgaactta

SEQ ID NO: 56984 - DNA, 25 bp, Homo sapien
aactaaatgagattgcctttgcagt

SEQ ID NO: 56985 - DNA, 25 bp, Homo sapien
actccctgcataacaagagattatt

SEQ ID NO: 56986 - DNA, 25 bp, Homo sapien
gttagggaagcaactactgaactta

SEQ ID NO: 56987 - DNA, 25 bp, Homo sapien
tgaaaagaactgtactccctgcata

SEQ ID NO: 56988 - DNA, 25 bp, Homo sapien
actccctgcataacaagagattatt

SEQ ID NO: 56989 - DNA, 25 bp, Homo sapien
tagaggatgcatttgacatgccaac

SEQ ID NO: 56990 - DNA, 25 bp, Homo sapien
tcaaagctgctttcaagagctactc

SEQ ID NO: 56991 - DNA, 25 bp, Homo sapien
aaaaaggtcccaaacatcaggctgt

SEQ ID NO: 56992 - DNA, 25 bp, Homo sapien
ttgcctttgcagttagggaagcaac

SEQ ID NO: 56993 - DNA, 25 bp, Homo sapien
ttgtgttgaactgccccacacagca

SEQ ID NO: 56994 - DNA, 25 bp, Homo sapien
aactaaatgagattgcctttgcagt

SEQ ID NO: 56995 - DNA, 25 bp, Homo sapien
gtgagggtgtaacacacatacttct

SEQ ID NO: 56996 - DNA, 25 bp, Homo sapien
ctgaacttatgtatgaatgaaaaga

SEQ ID NO: 56997 - DNA, 25 bp, Homo sapien
tcaaagctgctttcaagagctactc

SEQ ID NO: 56998 - DNA, 25 bp, Homo sapien
gtgagggtgtaacacacatacttct

SEQ ID NO: 56999 - DNA, 25 bp, Homo sapien
ttgtgttgaactgccccacacagca

SEQ ID NO: 57000 - DNA, 25 bp, Homo sapien
tagaggatgcatttgacatgccaac

SEQ ID NO: 57001 - DNA, 25 bp, Homo sapien
aaaaaggtcccaaacatcaggctgt

SEQ ID NO: 57002 - DNA, 25 bp, Homo sapien
actccctgcataacaagagattatt

SEQ ID NO: 57003 - DNA, 25 bp, Homo sapien
tgaaaagaactgtactccctgcata

SEQ ID NO: 57004 - DNA, 25 bp, Homo sapien
ctgaacttatgtatgaatgaaaaga

SEQ ID NO: 57005 - DNA, 25 bp, Homo sapien
gttagggaagcaactactgaactta

SEQ ID NO: 57006 - DNA, 25 bp, Homo sapien
ttgcctttgcagttagggaagcaac

SEQ ID NO: 57007 - DNA, 25 bp, Homo sapien
aactaaatgagattgcctttgcagt

SEQ ID NO: 57008 - DNA, 25 bp, Homo sapien
tcaaagctgctttcaagagctactc

SEQ ID NO: 57009 - DNA, 25 bp, Homo sapien
gttagggaagcaactactgaactta

SEQ ID NO: 57010 - DNA, 25 bp, Homo sapien
aactaaatgagattgcctttgcagt

SEQ ID NO: 57011 - DNA, 25 bp, Homo sapien
ttgcctttgcagttagggaagcaac

SEQ ID NO: 57012 - DNA, 25 bp, Homo sapien
aaaaaggtcccaaacatcaggctgt

SEQ ID NO: 57013 - DNA, 25 bp, Homo sapien
gtgagggtgtaacacacatacttct

SEQ ID NO: 57014 - DNA, 25 bp, Homo sapien
ctgaacttatgtatgaatgaaaaga

SEQ ID NO: 57015 - DNA, 25 bp, Homo sapien
ttgtgttgaactgccccacacagca

SEQ ID NO: 57016 - DNA, 25 bp, Homo sapien
actccctgcataacaagagattatt

SEQ ID NO: 57017 - DNA, 25 bp, Homo sapien
tagaggatgcatttgacatgccaac

SEQ ID NO: 57018 - DNA, 25 bp, Homo sapien
tgaaaagaactgtactccctgcata

SEQ ID NO: 57019 - DNA, 25 bp, Homo sapien
tcaaagctgctttcaagagctactc

SEQ ID NO: 57020 - DNA, 25 bp, Homo sapien
gtgagggtgtaacacacatacttct

SEQ ID NO: 57021 - DNA, 25 bp, Homo sapien
ttgtgttgaactgccccacacagca

SEQ ID NO: 57022 - DNA, 25 bp, Homo sapien
tagaggatgcatttgacatgccaac

SEQ ID NO: 57023 - DNA, 25 bp, Homo sapien
aaaaaggtcccaaacatcaggctgt

SEQ ID NO: 57024 - DNA, 25 bp, Homo sapien
actccctgcataacaagagattatt

SEQ ID NO: 57025 - DNA, 25 bp, Homo sapien
tgaaaagaactgtactccctgcata

SEQ ID NO: 57026 - DNA, 25 bp, Homo sapien
ctgaacttatgtatgaatgaaaaga

SEQ ID NO: 57027 - DNA, 25 bp, Homo sapien
gttagggaagcaactactgaactta

SEQ ID NO: 57028 - DNA, 25 bp, Homo sapien
ttgcctttgcagttagggaagcaac

SEQ ID NO: 57029 - DNA, 25 bp, Homo sapien
aactaaatgagattgcctttgcagt

SEQ ID NO: 57030 - DNA, 25 bp, Homo sapien
actccctgcataacaagagattatt

SEQ ID NO: 57031 - DNA, 25 bp, Homo sapien
tagaggatgcatttgacatgccaac

SEQ ID NO: 57032 - DNA, 25 bp, Homo sapien
gttagggaagcaactactgaactta

SEQ ID NO: 57033 - DNA, 25 bp, Homo sapien
aactaaatgagattgcctttgcagt

SEQ ID NO: 57034 - DNA, 25 bp, Homo sapien
aaaaaggtcccaaacatcaggctgt

SEQ ID NO: 57035 - DNA, 25 bp, Homo sapien
gtgagggtgtaacacacatacttct

SEQ ID NO: 57036 - DNA, 25 bp, Homo sapien
ctgaacttatgtatgaatgaaaaga

SEQ ID NO: 57037 - DNA, 25 bp, Homo sapien
tcaaagctgctttcaagagctactc

SEQ ID NO: 57038 - DNA, 25 bp, Homo sapien
ttgtgttgaactgccccacacagca

SEQ ID NO: 57039 - DNA, 25 bp, Homo sapien
ttgcctttgcagttagggaagcaac

SEQ ID NO: 57040 - DNA, 25 bp, Homo sapien
tgaaaagaactgtactccctgcata

SEQ ID NO: 57041 - DNA, 25 bp, Homo sapien
tcaaagctgctttcaagagctactc

SEQ ID NO: 57042 - DNA, 25 bp, Homo sapien
gtgagggtgtaacacacatacttct

SEQ ID NO: 57043 - DNA, 25 bp, Homo sapien
ttgtgttgaactgccccacacagca

SEQ ID NO: 57044 - DNA, 25 bp, Homo sapien
tagaggatgcatttgacatgccaac

SEQ ID NO: 57045 - DNA, 25 bp, Homo sapien
aaaaaggtcccaaacatcaggctgt

SEQ ID NO: 57046 - DNA, 25 bp, Homo sapien
actccctgcataacaagagattatt

SEQ ID NO: 57047 - DNA, 25 bp, Homo sapien
tgaaaagaactgtactccctgcata

SEQ ID NO: 57048 - DNA, 25 bp, Homo sapien
ctgaacttatgtatgaatgaaaaga

SEQ ID NO: 57049 - DNA, 25 bp, Homo sapien
gttagggaagcaactactgaactta

SEQ ID NO: 57050 - DNA, 25 bp, Homo sapien
ttgcctttgcagttagggaagcaac

SEQ ID NO: 57051 - DNA, 25 bp, Homo sapien
aactaaatgagattgcctttgcagt

SEQ ID NO: 57052 - DNA, 25 bp, Homo sapien
atgtcttagtaaaagagcagttatc

SEQ ID NO: 57053 - DNA, 25 bp, Homo sapien
tcactcacatatgcggggcttagtc

SEQ ID NO: 57054 - DNA, 25 bp, Homo sapien
gcggggcttagtcactagcaaactt

SEQ ID NO: 57055 - DNA, 25 bp, Homo sapien
ggcagcgtgcctgaagtactttcac

SEQ ID NO: 57056 - DNA, 25 bp, Homo sapien
agtgtgggtcctccctccctgcata

SEQ ID NO: 57057 - DNA, 25 bp, Homo sapien
caaataatggactccgcatggatgt

SEQ ID NO: 57058 - DNA, 25 bp, Homo sapien
ggcaaagttagcaagaacaccagat

SEQ ID NO: 57059 - DNA, 25 bp, Homo sapien
cacaattaagcaacagtgaagggca

SEQ ID NO: 57060 - DNA, 25 bp, Homo sapien
ttctataggtagagactatgtctta

SEQ ID NO: 57061 - DNA, 25 bp, Homo sapien
tccctgcatagctgttaccaggagg

SEQ ID NO: 57062 - DNA, 25 bp, Homo sapien
aaaattgctgtgtaaaataagtgtt

SEQ ID NO: 57063 - DNA, 25 bp, Homo sapien
ggcaaagttagcaagaacaccagat

SEQ ID NO: 57064 - DNA, 25 bp, Homo sapien
cacaattaagcaacagtgaagggca

SEQ ID NO: 57065 - DNA, 25 bp, Homo sapien
caaataatggactccgcatggatgt

SEQ ID NO: 57066 - DNA, 25 bp, Homo sapien
gcggggcttagtcactagcaaactt

SEQ ID NO: 57067 - DNA, 25 bp, Homo sapien
tcactcacatatgcggggcttagtc

SEQ ID NO: 57068 - DNA, 25 bp, Homo sapien
ggcagcgtgcctgaagtactttcac

SEQ ID NO: 57069 - DNA, 25 bp, Homo sapien
tccctgcatagctgttaccaggagg

SEQ ID NO: 57070 - DNA, 25 bp, Homo sapien
agtgtgggtcctccctccctgcata

SEQ ID NO: 57071 - DNA, 25 bp, Homo sapien
atgtcttagtaaaagagcagttatc

SEQ ID NO: 57072 - DNA, 25 bp, Homo sapien
ttctataggtagagactatgtctta

SEQ ID NO: 57073 - DNA, 25 bp, Homo sapien
aaaattgctgtgtaaaataagtgtt

SEQ ID NO: 57074 - DNA, 25 bp, Homo sapien
tccctgcatagctgttaccaggagg

SEQ ID NO: 57075 - DNA, 25 bp, Homo sapien
ggcagcgtgcctgaagtactttcac

SEQ ID NO: 57076 - DNA, 25 bp, Homo sapien
tcactcacatatgcggggcttagtc

SEQ ID NO: 57077 - DNA, 25 bp, Homo sapien
caaataatggactccgcatggatgt

SEQ ID NO: 57078 - DNA, 25 bp, Homo sapien
atgtcttagtaaaagagcagttatc

SEQ ID NO: 57079 - DNA, 25 bp, Homo sapien
agtgtgggtcctccctccctgcata

SEQ ID NO: 57080 - DNA, 25 bp, Homo sapien
cacaattaagcaacagtgaagggca

SEQ ID NO: 57081 - DNA, 25 bp, Homo sapien
aaaattgctgtgtaaaataagtgtt

SEQ ID NO: 57082 - DNA, 25 bp, Homo sapien
ggcaaagttagcaagaacaccagat

SEQ ID NO: 57083 - DNA, 25 bp, Homo sapien
ttctataggtagagactatgtctta

SEQ ID NO: 57084 - DNA, 25 bp, Homo sapien
gcggggcttagtcactagcaaactt

SEQ ID NO: 57085 - DNA, 25 bp, Homo sapien
ggcaaagttagcaagaacaccagat

SEQ ID NO: 57086 - DNA, 25 bp, Homo sapien
cacaattaagcaacagtgaagggca

SEQ ID NO: 57087 - DNA, 25 bp, Homo sapien
caaataatggactccgcatggatgt

SEQ ID NO: 57088 - DNA, 25 bp, Homo sapien
gcggggcttagtcactagcaaactt

SEQ ID NO: 57089 - DNA, 25 bp, Homo sapien
tcactcacatatgcggggcttagtc

SEQ ID NO: 57090 - DNA, 25 bp, Homo sapien
ggcagcgtgcctgaagtactttcac

SEQ ID NO: 57091 - DNA, 25 bp, Homo sapien
tccctgcatagctgttaccaggagg

SEQ ID NO: 57092 - DNA, 25 bp, Homo sapien
agtgtgggtcctccctccctgcata

SEQ ID NO: 57093 - DNA, 25 bp, Homo sapien
atgtcttagtaaaagagcagttatc

SEQ ID NO: 57094 - DNA, 25 bp, Homo sapien
ttctataggtagagactatgtctta

SEQ ID NO: 57095 - DNA, 25 bp, Homo sapien
aaaattgctgtgtaaaataagtgtt

SEQ ID NO: 57096 - DNA, 25 bp, Homo sapien
ttctataggtagagactatgtctta

SEQ ID NO: 57097 - DNA, 25 bp, Homo sapien
tccctgcatagctgttaccaggagg

SEQ ID NO: 57098 - DNA, 25 bp, Homo sapien
caaataatggactccgcatggatgt

SEQ ID NO: 57099 - DNA, 25 bp, Homo sapien
cacaattaagcaacagtgaagggca

SEQ ID NO: 57100 - DNA, 25 bp, Homo sapien
ggcaaagttagcaagaacaccagat

SEQ ID NO: 57101 - DNA, 25 bp, Homo sapien
ggcagcgtgcctgaagtactttcac

SEQ ID NO: 57102 - DNA, 25 bp, Homo sapien
aaaattgctgtgtaaaataagtgtt

SEQ ID NO: 57103 - DNA, 25 bp, Homo sapien
tcactcacatatgcggggcttagtc

SEQ ID NO: 57104 - DNA, 25 bp, Homo sapien
agtgtgggtcctccctccctgcata

SEQ ID NO: 57105 - DNA, 25 bp, Homo sapien
gcggggcttagtcactagcaaactt

SEQ ID NO: 57106 - DNA, 25 bp, Homo sapien
atgtcttagtaaaagagcagttatc

SEQ ID NO: 57107 - DNA, 25 bp, Homo sapien
ggcaaagttagcaagaacaccagat

SEQ ID NO: 57108 - DNA, 25 bp, Homo sapien
cacaattaagcaacagtgaagggca

SEQ ID NO: 57109 - DNA, 25 bp, Homo sapien
caaataatggactccgcatggatgt

SEQ ID NO: 57110 - DNA, 25 bp, Homo sapien
gcggggcttagtcactagcaaactt

SEQ ID NO: 57111 - DNA, 25 bp, Homo sapien
tcactcacatatgcggggcttagtc

SEQ ID NO: 57112 - DNA, 25 bp, Homo sapien
ggcagcgtgcctgaagtactttcac

SEQ ID NO: 57113 - DNA, 25 bp, Homo sapien
tccctgcatagctgttaccaggagg

SEQ ID NO: 57114 - DNA, 25 bp, Homo sapien
agtgtgggtcctccctccctgcata

SEQ ID NO: 57115 - DNA, 25 bp, Homo sapien
atgtcttagtaaaagagcagttatc

SEQ ID NO: 57116 - DNA, 25 bp, Homo sapien
ttctataggtagagactatgtctta

SEQ ID NO: 57117 - DNA, 25 bp, Homo sapien
aaaattgctgtgtaaaataagtgtt

SEQ ID NO: 57118 - DNA, 25 bp, Homo sapien
ggcaaagttagcaagaacaccagat

SEQ ID NO: 57119 - DNA, 25 bp, Homo sapien
cacaattaagcaacagtgaagggca

SEQ ID NO: 57120 - DNA, 25 bp, Homo sapien
caaataatggactccgcatggatgt

SEQ ID NO: 57121 - DNA, 25 bp, Homo sapien
gcggggcttagtcactagcaaactt

SEQ ID NO: 57122 - DNA, 25 bp, Homo sapien
tcactcacatatgcggggcttagtc

SEQ ID NO: 57123 - DNA, 25 bp, Homo sapien
ggcagcgtgcctgaagtactttcac

SEQ ID NO: 57124 - DNA, 25 bp, Homo sapien
tccctgcatagctgttaccaggagg

SEQ ID NO: 57125 - DNA, 25 bp, Homo sapien
agtgtgggtcctccctccctgcata

SEQ ID NO: 57126 - DNA, 25 bp, Homo sapien
atgtcttagtaaaagagcagttatc

SEQ ID NO: 57127 - DNA, 25 bp, Homo sapien
ttctataggtagagactatgtctta

SEQ ID NO: 57128 - DNA, 25 bp, Homo sapien
aaaattgctgtgtaaaataagtgtt

SEQ ID NO: 57129 - DNA, 25 bp, Homo sapien
caaataatggactccgcatggatgt

SEQ ID NO: 57130 - DNA, 25 bp, Homo sapien
cacaattaagcaacagtgaagggca

SEQ ID NO: 57131 - DNA, 25 bp, Homo sapien
agtgtgggtcctccctccctgcata

SEQ ID NO: 57132 - DNA, 25 bp, Homo sapien
atgtcttagtaaaagagcagttatc

SEQ ID NO: 57133 - DNA, 25 bp, Homo sapien
ggcagcgtgcctgaagtactttcac

SEQ ID NO: 57134 - DNA, 25 bp, Homo sapien
aaaattgctgtgtaaaataagtgtt

SEQ ID NO: 57135 - DNA, 25 bp, Homo sapien
ttctataggtagagactatgtctta

SEQ ID NO: 57136 - DNA, 25 bp, Homo sapien
tcactcacatatgcggggcttagtc

SEQ ID NO: 57137 - DNA, 25 bp, Homo sapien
gcggggcttagtcactagcaaactt

SEQ ID NO: 57138 - DNA, 25 bp, Homo sapien
ggcaaagttagcaagaacaccagat

SEQ ID NO: 57139 - DNA, 25 bp, Homo sapien
tccctgcatagctgttaccaggagg

SEQ ID NO: 57140 - DNA, 25 bp, Homo sapien
ggcaaagttagcaagaacaccagat

SEQ ID NO: 57141 - DNA, 25 bp, Homo sapien
cacaattaagcaacagtgaagggca

SEQ ID NO: 57142 - DNA, 25 bp, Homo sapien
caaataatggactccgcatggatgt

SEQ ID NO: 57143 - DNA, 25 bp, Homo sapien
gcggggcttagtcactagcaaactt

SEQ ID NO: 57144 - DNA, 25 bp, Homo sapien
tcactcacatatgcggggcttagtc

SEQ ID NO: 57145 - DNA, 25 bp, Homo sapien
ggcagcgtgcctgaagtactttcac

SEQ ID NO: 57146 - DNA, 25 bp, Homo sapien
tccctgcatagctgttaccaggagg

SEQ ID NO: 57147 - DNA, 25 bp, Homo sapien
agtgtgggtcctccctccctgcata

SEQ ID NO: 57148 - DNA, 25 bp, Homo sapien
atgtcttagtaaaagagcagttatc

SEQ ID NO: 57149 - DNA, 25 bp, Homo sapien
ttctataggtagagactatgtctta

SEQ ID NO: 57150 - DNA, 25 bp, Homo sapien
aaaattgctgtgtaaaataagtgtt

SEQ ID NO: 57151 - DNA, 25 bp, Homo sapien
aaaattgctgtgtaaaataagtgtt

SEQ ID NO: 57152 - DNA, 25 bp, Homo sapien
caaataatggactccgcatggatgt

SEQ ID NO: 57153 - DNA, 25 bp, Homo sapien
cacaattaagcaacagtgaagggca

SEQ ID NO: 57154 - DNA, 25 bp, Homo sapien
ggcaaagttagcaagaacaccagat

SEQ ID NO: 57155 - DNA, 25 bp, Homo sapien
atgtcttagtaaaagagcagttatc

SEQ ID NO: 57156 - DNA, 25 bp, Homo sapien
ggcagcgtgcctgaagtactttcac

SEQ ID NO: 57157 - DNA, 25 bp, Homo sapien
agtgtgggtcctccctccctgcata

SEQ ID NO: 57158 - DNA, 25 bp, Homo sapien
tcactcacatatgcggggcttagtc

SEQ ID NO: 57159 - DNA, 25 bp, Homo sapien
ttctataggtagagactatgtctta

SEQ ID NO: 57160 - DNA, 25 bp, Homo sapien
gcggggcttagtcactagcaaactt

SEQ ID NO: 57161 - DNA, 25 bp, Homo sapien
tccctgcatagctgttaccaggagg

SEQ ID NO: 57162 - DNA, 25 bp, Homo sapien
ggcaaagttagcaagaacaccagat

SEQ ID NO: 57163 - DNA, 25 bp, Homo sapien
cacaattaagcaacagtgaagggca

SEQ ID NO: 57164 - DNA, 25 bp, Homo sapien
caaataatggactccgcatggatgt

SEQ ID NO: 57165 - DNA, 25 bp, Homo sapien
gcggggcttagtcactagcaaactt

SEQ ID NO: 57166 - DNA, 25 bp, Homo sapien
tcactcacatatgcggggcttagtc

SEQ ID NO: 57167 - DNA, 25 bp, Homo sapien
ggcagcgtgcctgaagtactttcac

SEQ ID NO: 57168 - DNA, 25 bp, Homo sapien
tccctgcatagctgttaccaggagg

SEQ ID NO: 57169 - DNA, 25 bp, Homo sapien
agtgtgggtcctccctccctgcata

SEQ ID NO: 57170 - DNA, 25 bp, Homo sapien
atgtcttagtaaaagagcagttatc

SEQ ID NO: 57171 - DNA, 25 bp, Homo sapien
ttctataggtagagactatgtctta

SEQ ID NO: 57172 - DNA, 25 bp, Homo sapien
aaaattgctgtgtaaaataagtgtt

SEQ ID NO: 57173 - DNA, 25 bp, Homo sapien
ttctataggtagagactatgtctta

SEQ ID NO: 57174 - DNA, 25 bp, Homo sapien
tcactcacatatgcggggcttagtc

SEQ ID NO: 57175 - DNA, 25 bp, Homo sapien
aaaattgctgtgtaaaataagtgtt

SEQ ID NO: 57176 - DNA, 25 bp, Homo sapien
caaataatggactccgcatggatgt

SEQ ID NO: 57177 - DNA, 25 bp, Homo sapien
atgtcttagtaaaagagcagttatc

SEQ ID NO: 57178 - DNA, 25 bp, Homo sapien
ggcaaagttagcaagaacaccagat

SEQ ID NO: 57179 - DNA, 25 bp, Homo sapien
cacaattaagcaacagtgaagggca

SEQ ID NO: 57180 - DNA, 25 bp, Homo sapien
gcggggcttagtcactagcaaactt

SEQ ID NO: 57181 - DNA, 25 bp, Homo sapien
agtgtgggtcctccctccctgcata

SEQ ID NO: 57182 - DNA, 25 bp, Homo sapien
tccctgcatagctgttaccaggagg

SEQ ID NO: 57183 - DNA, 25 bp, Homo sapien
ggcagcgtgcctgaagtactttcac

SEQ ID NO: 57184 - DNA, 25 bp, Homo sapien
ggcaaagttagcaagaacaccagat

SEQ ID NO: 57185 - DNA, 25 bp, Homo sapien
cacaattaagcaacagtgaagggca

SEQ ID NO: 57186 - DNA, 25 bp, Homo sapien
caaataatggactccgcatggatgt

SEQ ID NO: 57187 - DNA, 25 bp, Homo sapien
gcggggcttagtcactagcaaactt

SEQ ID NO: 57188 - DNA, 25 bp, Homo sapien
tcactcacatatgcggggcttagtc

SEQ ID NO: 57189 - DNA, 25 bp, Homo sapien
ggcagcgtgcctgaagtactttcac

SEQ ID NO: 57190 - DNA, 25 bp, Homo sapien
tccctgcatagctgttaccaggagg

SEQ ID NO: 57191 - DNA, 25 bp, Homo sapien
agtgtgggtcctccctccctgcata

SEQ ID NO: 57192 - DNA, 25 bp, Homo sapien
atgtcttagtaaaagagcagttatc

SEQ ID NO: 57193 - DNA, 25 bp, Homo sapien
ttctataggtagagactatgtctta

SEQ ID NO: 57194 - DNA, 25 bp, Homo sapien
aaaattgctgtgtaaaataagtgtt

SEQ ID NO: 57195 - DNA, 25 bp, Homo sapien
ggcagcgtgcctgaagtactttcac

SEQ ID NO: 57196 - DNA, 25 bp, Homo sapien
ttctataggtagagactatgtctta

SEQ ID NO: 57197 - DNA, 25 bp, Homo sapien
agtgtgggtcctccctccctgcata

SEQ ID NO: 57198 - DNA, 25 bp, Homo sapien
gcggggcttagtcactagcaaactt

SEQ ID NO: 57199 - DNA, 25 bp, Homo sapien
aaaattgctgtgtaaaataagtgtt

SEQ ID NO: 57200 - DNA, 25 bp, Homo sapien
ggcaaagttagcaagaacaccagat

SEQ ID NO: 57201 - DNA, 25 bp, Homo sapien
tccctgcatagctgttaccaggagg

SEQ ID NO: 57202 - DNA, 25 bp, Homo sapien
caaataatggactccgcatggatgt

SEQ ID NO: 57203 - DNA, 25 bp, Homo sapien
tcactcacatatgcggggcttagtc

SEQ ID NO: 57204 - DNA, 25 bp, Homo sapien
atgtcttagtaaaagagcagttatc

SEQ ID NO: 57205 - DNA, 25 bp, Homo sapien
cacaattaagcaacagtgaagggca

SEQ ID NO: 57206 - DNA, 25 bp, Homo sapien
ggcaaagttagcaagaacaccagat

SEQ ID NO: 57207 - DNA, 25 bp, Homo sapien
cacaattaagcaacagtgaagggca

SEQ ID NO: 57208 - DNA, 25 bp, Homo sapien
caaataatggactccgcatggatgt

SEQ ID NO: 57209 - DNA, 25 bp, Homo sapien
gcggggcttagtcactagcaaactt

SEQ ID NO: 57210 - DNA, 25 bp, Homo sapien
tcactcacatatgcggggcttagtc

SEQ ID NO: 57211 - DNA, 25 bp, Homo sapien
ggcagcgtgcctgaagtactttcac

SEQ ID NO: 57212 - DNA, 25 bp, Homo sapien
tccctgcatagctgttaccaggagg

SEQ ID NO: 57213 - DNA, 25 bp, Homo sapien
agtgtgggtcctccctccctgcata

SEQ ID NO: 57214 - DNA, 25 bp, Homo sapien
atgtcttagtaaaagagcagttatc

SEQ ID NO: 57215 - DNA, 25 bp, Homo sapien
ttctataggtagagactatgtctta

SEQ ID NO: 57216 - DNA, 25 bp, Homo sapien
aaaattgctgtgtaaaataagtgtt

SEQ ID NO: 57217 - DNA, 25 bp, Homo sapien
aaaattgctgtgtaaaataagtgtt

SEQ ID NO: 57218 - DNA, 25 bp, Homo sapien
atgtcttagtaaaagagcagttatc

SEQ ID NO: 57219 - DNA, 25 bp, Homo sapien
agtgtgggtcctccctccctgcata

SEQ ID NO: 57220 - DNA, 25 bp, Homo sapien
tcactcacatatgcggggcttagtc

SEQ ID NO: 57221 - DNA, 25 bp, Homo sapien
caaataatggactccgcatggatgt

SEQ ID NO: 57222 - DNA, 25 bp, Homo sapien
gcggggcttagtcactagcaaactt

SEQ ID NO: 57223 - DNA, 25 bp, Homo sapien
ggcagcgtgcctgaagtactttcac

SEQ ID NO: 57224 - DNA, 25 bp, Homo sapien
tccctgcatagctgttaccaggagg

SEQ ID NO: 57225 - DNA, 25 bp, Homo sapien
ggcaaagttagcaagaacaccagat

SEQ ID NO: 57226 - DNA, 25 bp, Homo sapien
ttctataggtagagactatgtctta

SEQ ID NO: 57227 - DNA, 25 bp, Homo sapien
cacaattaagcaacagtgaagggca

SEQ ID NO: 57228 - DNA, 25 bp, Homo sapien
cacaattaagcaacagtgaagggca

SEQ ID NO: 57229 - DNA, 25 bp, Homo sapien
ggcagcgtgcctgaagtactttcac

SEQ ID NO: 57230 - DNA, 25 bp, Homo sapien
atgtcttagtaaaagagcagttatc

SEQ ID NO: 57231 - DNA, 25 bp, Homo sapien
ttctataggtagagactatgtctta

SEQ ID NO: 57232 - DNA, 25 bp, Homo sapien
agtgtgggtcctccctccctgcata

SEQ ID NO: 57233 - DNA, 25 bp, Homo sapien
tcactcacatatgcggggcttagtc

SEQ ID NO: 57234 - DNA, 25 bp, Homo sapien
ggcaaagttagcaagaacaccagat

SEQ ID NO: 57235 - DNA, 25 bp, Homo sapien
aaaattgctgtgtaaaataagtgtt

SEQ ID NO: 57236 - DNA, 25 bp, Homo sapien
tccctgcatagctgttaccaggagg

SEQ ID NO: 57237 - DNA, 25 bp, Homo sapien
gcggggcttagtcactagcaaactt

SEQ ID NO: 57238 - DNA, 25 bp, Homo sapien
caaataatggactccgcatggatgt

SEQ ID NO: 57239 - DNA, 25 bp, Homo sapien
ggcaaagttagcaagaacaccagat

SEQ ID NO: 57240 - DNA, 25 bp, Homo sapien
cacaattaagcaacagtgaagggca

SEQ ID NO: 57241 - DNA, 25 bp, Homo sapien
caaataatggactccgcatggatgt

SEQ ID NO: 57242 - DNA, 25 bp, Homo sapien
gcggggcttagtcactagcaaactt

SEQ ID NO: 57243 - DNA, 25 bp, Homo sapien
tcactcacatatgcggggcttagtc

SEQ ID NO: 57244 - DNA, 25 bp, Homo sapien
ggcagcgtgcctgaagtactttcac

SEQ ID NO: 57245 - DNA, 25 bp, Homo sapien
tccctgcatagctgttaccaggagg

SEQ ID NO: 57246 - DNA, 25 bp, Homo sapien
agtgtgggtcctccctccctgcata

SEQ ID NO: 57247 - DNA, 25 bp, Homo sapien
atgtcttagtaaaagagcagttatc

SEQ ID NO: 57248 - DNA, 25 bp, Homo sapien
ttctataggtagagactatgtctta

SEQ ID NO: 57249 - DNA, 25 bp, Homo sapien
aaaattgctgtgtaaaataagtgtt

SEQ ID NO: 57250 - DNA, 25 bp, Homo sapien
cacaattaagcaacagtgaagggca

SEQ ID NO: 57251 - DNA, 25 bp, Homo sapien
tccctgcatagctgttaccaggagg

SEQ ID NO: 57252 - DNA, 25 bp, Homo sapien
ggcagcgtgcctgaagtactttcac

SEQ ID NO: 57253 - DNA, 25 bp, Homo sapien
gcggggcttagtcactagcaaactt

SEQ ID NO: 57254 - DNA, 25 bp, Homo sapien
atgtcttagtaaaagagcagttatc

SEQ ID NO: 57255 - DNA, 25 bp, Homo sapien
tcactcacatatgcggggcttagtc

SEQ ID NO: 57256 - DNA, 25 bp, Homo sapien
aaaattgctgtgtaaaataagtgtt

SEQ ID NO: 57257 - DNA, 25 bp, Homo sapien
ggcaaagttagcaagaacaccagat

SEQ ID NO: 57258 - DNA, 25 bp, Homo sapien
agtgtgggtcctccctccctgcata

SEQ ID NO: 57259 - DNA, 25 bp, Homo sapien
caaataatggactccgcatggatgt

SEQ ID NO: 57260 - DNA, 25 bp, Homo sapien
ttctataggtagagactatgtctta

SEQ ID NO: 57261 - DNA, 25 bp, Homo sapien
ggcaaagttagcaagaacaccagat

SEQ ID NO: 57262 - DNA, 25 bp, Homo sapien
cacaattaagcaacagtgaagggca

SEQ ID NO: 57263 - DNA, 25 bp, Homo sapien
caaataatggactccgcatggatgt

SEQ ID NO: 57264 - DNA, 25 bp, Homo sapien
gcggggcttagtcactagcaaactt

SEQ ID NO: 57265 - DNA, 25 bp, Homo sapien
tcactcacatatgcggggcttagtc

SEQ ID NO: 57266 - DNA, 25 bp, Homo sapien
ggcagcgtgcctgaagtactttcac

SEQ ID NO: 57267 - DNA, 25 bp, Homo sapien
tccctgcatagctgttaccaggagg

SEQ ID NO: 57268 - DNA, 25 bp, Homo sapien
agtgtgggtcctccctccctgcata

SEQ ID NO: 57269 - DNA, 25 bp, Homo sapien
atgtcttagtaaaagagcagttatc

SEQ ID NO: 57270 - DNA, 25 bp, Homo sapien
ttctataggtagagactatgtctta

SEQ ID NO: 57271 - DNA, 25 bp, Homo sapien
aaaattgctgtgtaaaataagtgtt

SEQ ID NO: 57272 - DNA, 25 bp, Homo sapien
atgtcttagtaaaagagcagttatc

SEQ ID NO: 57273 - DNA, 25 bp, Homo sapien
ggcaaagttagcaagaacaccagat

SEQ ID NO: 57274 - DNA, 25 bp, Homo sapien
caaataatggactccgcatggatgt

SEQ ID NO: 57275 - DNA, 25 bp, Homo sapien
ggcagcgtgcctgaagtactttcac

SEQ ID NO: 57276 - DNA, 25 bp, Homo sapien
gcggggcttagtcactagcaaactt

SEQ ID NO: 57277 - DNA, 25 bp, Homo sapien
agtgtgggtcctccctccctgcata

SEQ ID NO: 57278 - DNA, 25 bp, Homo sapien
tccctgcatagctgttaccaggagg

SEQ ID NO: 57279 - DNA, 25 bp, Homo sapien
cacaattaagcaacagtgaagggca

SEQ ID NO: 57280 - DNA, 25 bp, Homo sapien
ttctataggtagagactatgtctta

SEQ ID NO: 57281 - DNA, 25 bp, Homo sapien
tcactcacatatgcggggcttagtc

SEQ ID NO: 57282 - DNA, 25 bp, Homo sapien
aaaattgctgtgtaaaataagtgtt

SEQ ID NO: 57283 - DNA, 25 bp, Homo sapien
ggcaaagttagcaagaacaccagat

SEQ ID NO: 57284 - DNA, 25 bp, Homo sapien
cacaattaagcaacagtgaagggca

SEQ ID NO: 57285 - DNA, 25 bp, Homo sapien
caaataatggactccgcatggatgt

SEQ ID NO: 57286 - DNA, 25 bp, Homo sapien
gcggggcttagtcactagcaaactt

SEQ ID NO: 57287 - DNA, 25 bp, Homo sapien
tcactcacatatgcggggcttagtc

SEQ ID NO: 57288 - DNA, 25 bp, Homo sapien
ggcagcgtgcctgaagtactttcac

SEQ ID NO: 57289 - DNA, 25 bp, Homo sapien
tccctgcatagctgttaccaggagg

SEQ ID NO: 57290 - DNA, 25 bp, Homo sapien
agtgtgggtcctccctccctgcata

SEQ ID NO: 57291 - DNA, 25 bp, Homo sapien
atgtcttagtaaaagagcagttatc

SEQ ID NO: 57292 - DNA, 25 bp, Homo sapien
ttctataggtagagactatgtctta

SEQ ID NO: 57293 - DNA, 25 bp, Homo sapien
aaaattgctgtgtaaaataagtgtt

SEQ ID NO: 57294 - DNA, 25 bp, Homo sapien
caaataatggactccgcatggatgt

SEQ ID NO: 57295 - DNA, 25 bp, Homo sapien
atgtcttagtaaaagagcagttatc

SEQ ID NO: 57296 - DNA, 25 bp, Homo sapien
agtgtgggtcctccctccctgcata

SEQ ID NO: 57297 - DNA, 25 bp, Homo sapien
gcggggcttagtcactagcaaactt

SEQ ID NO: 57298 - DNA, 25 bp, Homo sapien
tcactcacatatgcggggcttagtc

SEQ ID NO: 57299 - DNA, 25 bp, Homo sapien
aaaattgctgtgtaaaataagtgtt

SEQ ID NO: 57300 - DNA, 25 bp, Homo sapien
ggcaaagttagcaagaacaccagat

SEQ ID NO: 57301 - DNA, 25 bp, Homo sapien
ggcagcgtgcctgaagtactttcac

SEQ ID NO: 57302 - DNA, 25 bp, Homo sapien
cacaattaagcaacagtgaagggca

SEQ ID NO: 57303 - DNA, 25 bp, Homo sapien
tccctgcatagctgttaccaggagg

SEQ ID NO: 57304 - DNA, 25 bp, Homo sapien
ttctataggtagagactatgtctta

SEQ ID NO: 57305 - DNA, 25 bp, Homo sapien
ggcaaagttagcaagaacaccagat

SEQ ID NO: 57306 - DNA, 25 bp, Homo sapien
cacaattaagcaacagtgaagggca

SEQ ID NO: 57307 - DNA, 25 bp, Homo sapien
caaataatggactccgcatggatgt

SEQ ID NO: 57308 - DNA, 25 bp, Homo sapien
gcggggcttagtcactagcaaactt

SEQ ID NO: 57309 - DNA, 25 bp, Homo sapien
tcactcacatatgcggggcttagtc

SEQ ID NO: 57310 - DNA, 25 bp, Homo sapien
ggcagcgtgcctgaagtactttcac

SEQ ID NO: 57311 - DNA, 25 bp, Homo sapien
tccctgcatagctgttaccaggagg

SEQ ID NO: 57312 - DNA, 25 bp, Homo sapien
agtgtgggtcctccctccctgcata

SEQ ID NO: 57313 - DNA, 25 bp, Homo sapien
atgtcttagtaaaagagcagttatc

SEQ ID NO: 57314 - DNA, 25 bp, Homo sapien
ttctataggtagagactatgtctta

SEQ ID NO: 57315 - DNA, 25 bp, Homo sapien
aaaattgctgtgtaaaataagtgtt

SEQ ID NO: 57316 - DNA, 25 bp, Homo sapien
tccctgcatagctgttaccaggagg

SEQ ID NO: 57317 - DNA, 25 bp, Homo sapien
agtgtgggtcctccctccctgcata

SEQ ID NO: 57318 - DNA, 25 bp, Homo sapien
caaataatggactccgcatggatgt

SEQ ID NO: 57319 - DNA, 25 bp, Homo sapien
ggcaaagttagcaagaacaccagat

SEQ ID NO: 57320 - DNA, 25 bp, Homo sapien
aaaattgctgtgtaaaataagtgtt

SEQ ID NO: 57321 - DNA, 25 bp, Homo sapien
atgtcttagtaaaagagcagttatc

SEQ ID NO: 57322 - DNA, 25 bp, Homo sapien
gcggggcttagtcactagcaaactt

SEQ ID NO: 57323 - DNA, 25 bp, Homo sapien
ttctataggtagagactatgtctta

SEQ ID NO: 57324 - DNA, 25 bp, Homo sapien
tcactcacatatgcggggcttagtc

SEQ ID NO: 57325 - DNA, 25 bp, Homo sapien
cacaattaagcaacagtgaagggca

SEQ ID NO: 57326 - DNA, 25 bp, Homo sapien
ggcagcgtgcctgaagtactttcac

SEQ ID NO: 57327 - DNA, 25 bp, Homo sapien
ggcaaagttagcaagaacaccagat

SEQ ID NO: 57328 - DNA, 25 bp, Homo sapien
cacaattaagcaacagtgaagggca

SEQ ID NO: 57329 - DNA, 25 bp, Homo sapien
caaataatggactccgcatggatgt

SEQ ID NO: 57330 - DNA, 25 bp, Homo sapien
gcggggcttagtcactagcaaactt

SEQ ID NO: 57331 - DNA, 25 bp, Homo sapien
tcactcacatatgcggggcttagtc

SEQ ID NO: 57332 - DNA, 25 bp, Homo sapien
ggcagcgtgcctgaagtactttcac

SEQ ID NO: 57333 - DNA, 25 bp, Homo sapien
tccctgcatagctgttaccaggagg

SEQ ID NO: 57334 - DNA, 25 bp, Homo sapien
agtgtgggtcctccctccctgcata

SEQ ID NO: 57335 - DNA, 25 bp, Homo sapien
atgtcttagtaaaagagcagttatc

SEQ ID NO: 57336 - DNA, 25 bp, Homo sapien
ttctataggtagagactatgtctta

SEQ ID NO: 57337 - DNA, 25 bp, Homo sapien
aaaattgctgtgtaaaataagtgtt

SEQ ID NO: 57338 - DNA, 25 bp, Homo sapien
atgtcttagtaaaagagcagttatc

SEQ ID NO: 57339 - DNA, 25 bp, Homo sapien
agtgtgggtcctccctccctgcata

SEQ ID NO: 57340 - DNA, 25 bp, Homo sapien
tccctgcatagctgttaccaggagg

SEQ ID NO: 57341 - DNA, 25 bp, Homo sapien
caaataatggactccgcatggatgt

SEQ ID NO: 57342 - DNA, 25 bp, Homo sapien
aaaattgctgtgtaaaataagtgtt

SEQ ID NO: 57343 - DNA, 25 bp, Homo sapien
cacaattaagcaacagtgaagggca

SEQ ID NO: 57344 - DNA, 25 bp, Homo sapien
ggcagcgtgcctgaagtactttcac

SEQ ID NO: 57345 - DNA, 25 bp, Homo sapien
tcactcacatatgcggggcttagtc

SEQ ID NO: 57346 - DNA, 25 bp, Homo sapien
ggcaaagttagcaagaacaccagat

SEQ ID NO: 57347 - DNA, 25 bp, Homo sapien
ttctataggtagagactatgtctta

SEQ ID NO: 57348 - DNA, 25 bp, Homo sapien
gcggggcttagtcactagcaaactt

SEQ ID NO: 57349 - DNA, 25 bp, Homo sapien
ggcaaagttagcaagaacaccagat

SEQ ID NO: 57350 - DNA, 25 bp, Homo sapien
cacaattaagcaacagtgaagggca

SEQ ID NO: 57351 - DNA, 25 bp, Homo sapien
caaataatggactccgcatggatgt

SEQ ID NO: 57352 - DNA, 25 bp, Homo sapien
gcggggcttagtcactagcaaactt

SEQ ID NO: 57353 - DNA, 25 bp, Homo sapien
tcactcacatatgcggggcttagtc

SEQ ID NO: 57354 - DNA, 25 bp, Homo sapien
ggcagcgtgcctgaagtactttcac

SEQ ID NO: 57355 - DNA, 25 bp, Homo sapien
tccctgcatagctgttaccaggagg

SEQ ID NO: 57356 - DNA, 25 bp, Homo sapien
agtgtgggtcctccctccctgcata

SEQ ID NO: 57357 - DNA, 25 bp, Homo sapien
atgtcttagtaaaagagcagttatc

SEQ ID NO: 57358 - DNA, 25 bp, Homo sapien
ttctataggtagagactatgtctta

SEQ ID NO: 57359 - DNA, 25 bp, Homo sapien
aaaattgctgtgtaaaataagtgtt

SEQ ID NO: 57360 - DNA, 25 bp, Homo sapien
ggcaaagttagcaagaacaccagat

SEQ ID NO: 57361 - DNA, 25 bp, Homo sapien
cacaattaagcaacagtgaagggca

SEQ ID NO: 57362 - DNA, 25 bp, Homo sapien
caaataatggactccgcatggatgt

SEQ ID NO: 57363 - DNA, 25 bp, Homo sapien
gcggggcttagtcactagcaaactt

SEQ ID NO: 57364 - DNA, 25 bp, Homo sapien
tcactcacatatgcggggcttagtc

SEQ ID NO: 57365 - DNA, 25 bp, Homo sapien
ggcagcgtgcctgaagtactttcac

SEQ ID NO: 57366 - DNA, 25 bp, Homo sapien
tccctgcatagctgttaccaggagg

SEQ ID NO: 57367 - DNA, 25 bp, Homo sapien
agtgtgggtcctccctccctgcata

SEQ ID NO: 57368 - DNA, 25 bp, Homo sapien
atgtcttagtaaaagagcagttatc

SEQ ID NO: 57369 - DNA, 25 bp, Homo sapien
ttctataggtagagactatgtctta

SEQ ID NO: 57370 - DNA, 25 bp, Homo sapien
aaaattgctgtgtaaaataagtgtt

SEQ ID NO: 57371 - DNA, 25 bp, Homo sapien
caaataatggactccgcatggatgt

SEQ ID NO: 57372 - DNA, 25 bp, Homo sapien
ttctataggtagagactatgtctta

SEQ ID NO: 57373 - DNA, 25 bp, Homo sapien
atgtcttagtaaaagagcagttatc

SEQ ID NO: 57374 - DNA, 25 bp, Homo sapien
tccctgcatagctgttaccaggagg

SEQ ID NO: 57375 - DNA, 25 bp, Homo sapien
aaaattgctgtgtaaaataagtgtt

SEQ ID NO: 57376 - DNA, 25 bp, Homo sapien
tcactcacatatgcggggcttagtc

SEQ ID NO: 57377 - DNA, 25 bp, Homo sapien
ggcaaagttagcaagaacaccagat

SEQ ID NO: 57378 - DNA, 25 bp, Homo sapien
agtgtgggtcctccctccctgcata

SEQ ID NO: 57379 - DNA, 25 bp, Homo sapien
ggcagcgtgcctgaagtactttcac

SEQ ID NO: 57380 - DNA, 25 bp, Homo sapien
gcggggcttagtcactagcaaactt

SEQ ID NO: 57381 - DNA, 25 bp, Homo sapien
cacaattaagcaacagtgaagggca

SEQ ID NO: 57382 - DNA, 25 bp, Homo sapien
caaataatggactccgcatggatgt

SEQ ID NO: 57383 - DNA, 25 bp, Homo sapien
ttctataggtagagactatgtctta

SEQ ID NO: 57384 - DNA, 25 bp, Homo sapien
atgtcttagtaaaagagcagttatc

SEQ ID NO: 57385 - DNA, 25 bp, Homo sapien
tccctgcatagctgttaccaggagg

SEQ ID NO: 57386 - DNA, 25 bp, Homo sapien
aaaattgctgtgtaaaataagtgtt

SEQ ID NO: 57387 - DNA, 25 bp, Homo sapien
tcactcacatatgcggggcttagtc

SEQ ID NO: 57388 - DNA, 25 bp, Homo sapien
ggcaaagttagcaagaacaccagat

SEQ ID NO: 57389 - DNA, 25 bp, Homo sapien
agtgtgggtcctccctccctgcata

SEQ ID NO: 57390 - DNA, 25 bp, Homo sapien
gcggggcttagtcactagcaaactt

SEQ ID NO: 57391 - DNA, 25 bp, Homo sapien
ggcagcgtgcctgaagtactttcac

SEQ ID NO: 57392 - DNA, 25 bp, Homo sapien
cacaattaagcaacagtgaagggca

SEQ ID NO: 57393 - DNA, 25 bp, Homo sapien
caaataatggactccgcatggatgt

SEQ ID NO: 57394 - DNA, 25 bp, Homo sapien
ttctataggtagagactatgtctta

SEQ ID NO: 57395 - DNA, 25 bp, Homo sapien
atgtcttagtaaaagagcagttatc

SEQ ID NO: 57396 - DNA, 25 bp, Homo sapien
tccctgcatagctgttaccaggagg

SEQ ID NO: 57397 - DNA, 25 bp, Homo sapien
aaaattgctgtgtaaaataagtgtt

SEQ ID NO: 57398 - DNA, 25 bp, Homo sapien
tcactcacatatgcggggcttagtc

SEQ ID NO: 57399 - DNA, 25 bp, Homo sapien
ggcaaagttagcaagaacaccagat

SEQ ID NO: 57400 - DNA, 25 bp, Homo sapien
agtgtgggtcctccctccctgcata

SEQ ID NO: 57401 - DNA, 25 bp, Homo sapien
ggcagcgtgcctgaagtactttcac

SEQ ID NO: 57402 - DNA, 25 bp, Homo sapien
gcggggcttagtcactagcaaactt

SEQ ID NO: 57403 - DNA, 25 bp, Homo sapien
cacaattaagcaacagtgaagggca

SEQ ID NO: 57404 - DNA, 25 bp, Homo sapien
caaataatggactccgcatggatgt

SEQ ID NO: 57405 - DNA, 25 bp, Homo sapien
ttctataggtagagactatgtctta

SEQ ID NO: 57406 - DNA, 25 bp, Homo sapien
atgtcttagtaaaagagcagttatc

SEQ ID NO: 57407 - DNA, 25 bp, Homo sapien
aaaattgctgtgtaaaataagtgtt

SEQ ID NO: 57408 - DNA, 25 bp, Homo sapien
tccctgcatagctgttaccaggagg

SEQ ID NO: 57409 - DNA, 25 bp, Homo sapien
tcactcacatatgcggggcttagtc

SEQ ID NO: 57410 - DNA, 25 bp, Homo sapien
ggcaaagttagcaagaacaccagat

SEQ ID NO: 57411 - DNA, 25 bp, Homo sapien
agtgtgggtcctccctccctgcata

SEQ ID NO: 57412 - DNA, 25 bp, Homo sapien
ggcagcgtgcctgaagtactttcac

SEQ ID NO: 57413 - DNA, 25 bp, Homo sapien
cacaattaagcaacagtgaagggca

SEQ ID NO: 57414 - DNA, 25 bp, Homo sapien
gcggggcttagtcactagcaaactt

SEQ ID NO: 57415 - DNA, 25 bp, Homo sapien
caaataatggactccgcatggatgt

SEQ ID NO: 57416 - DNA, 25 bp, Homo sapien
ttctataggtagagactatgtctta

SEQ ID NO: 57417 - DNA, 25 bp, Homo sapien
atgtcttagtaaaagagcagttatc

SEQ ID NO: 57418 - DNA, 25 bp, Homo sapien
aaaattgctgtgtaaaataagtgtt

SEQ ID NO: 57419 - DNA, 25 bp, Homo sapien
tccctgcatagctgttaccaggagg

SEQ ID NO: 57420 - DNA, 25 bp, Homo sapien
tcactcacatatgcggggcttagtc

SEQ ID NO: 57421 - DNA, 25 bp, Homo sapien
ggcaaagttagcaagaacaccagat

SEQ ID NO: 57422 - DNA, 25 bp, Homo sapien
agtgtgggtcctccctccctgcata

SEQ ID NO: 57423 - DNA, 25 bp, Homo sapien
gcggggcttagtcactagcaaactt

SEQ ID NO: 57424 - DNA, 25 bp, Homo sapien
ggcagcgtgcctgaagtactttcac

SEQ ID NO: 57425 - DNA, 25 bp, Homo sapien
cacaattaagcaacagtgaagggca

SEQ ID NO: 57426 - DNA, 25 bp, Homo sapien
caaataatggactccgcatggatgt

SEQ ID NO: 57427 - DNA, 25 bp, Homo sapien
ttctataggtagagactatgtctta

SEQ ID NO: 57428 - DNA, 25 bp, Homo sapien
atgtcttagtaaaagagcagttatc

SEQ ID NO: 57429 - DNA, 25 bp, Homo sapien
tccctgcatagctgttaccaggagg

SEQ ID NO: 57430 - DNA, 25 bp, Homo sapien
aaaattgctgtgtaaaataagtgtt

SEQ ID NO: 57431 - DNA, 25 bp, Homo sapien
tcactcacatatgcggggcttagtc

SEQ ID NO: 57432 - DNA, 25 bp, Homo sapien
ggcaaagttagcaagaacaccagat

SEQ ID NO: 57433 - DNA, 25 bp, Homo sapien
agtgtgggtcctccctccctgcata

SEQ ID NO: 57434 - DNA, 25 bp, Homo sapien
gcggggcttagtcactagcaaactt

SEQ ID NO: 57435 - DNA, 25 bp, Homo sapien
ggcagcgtgcctgaagtactttcac

SEQ ID NO: 57436 - DNA, 25 bp, Homo sapien
cacaattaagcaacagtgaagggca

SEQ ID NO: 57437 - DNA, 25 bp, Homo sapien
caaataatggactccgcatggatgt

SEQ ID NO: 57438 - DNA, 25 bp, Homo sapien
ttctataggtagagactatgtctta

SEQ ID NO: 57439 - DNA, 25 bp, Homo sapien
atgtcttagtaaaagagcagttatc

SEQ ID NO: 57440 - DNA, 25 bp, Homo sapien
aaaattgctgtgtaaaataagtgtt

SEQ ID NO: 57441 - DNA, 25 bp, Homo sapien
tccctgcatagctgttaccaggagg

SEQ ID NO: 57442 - DNA, 25 bp, Homo sapien
tcactcacatatgcggggcttagtc

SEQ ID NO: 57443 - DNA, 25 bp, Homo sapien
ggcaaagttagcaagaacaccagat

SEQ ID NO: 57444 - DNA, 25 bp, Homo sapien
agtgtgggtcctccctccctgcata

SEQ ID NO: 57445 - DNA, 25 bp, Homo sapien
gcggggcttagtcactagcaaactt

SEQ ID NO: 57446 - DNA, 25 bp, Homo sapien
ggcagcgtgcctgaagtactttcac

SEQ ID NO: 57447 - DNA, 25 bp, Homo sapien
cacaattaagcaacagtgaagggca

SEQ ID NO: 57448 - DNA, 25 bp, Homo sapien
caaataatggactccgcatggatgt

SEQ ID NO: 57449 - DNA, 25 bp, Homo sapien
ttctataggtagagactatgtctta

SEQ ID NO: 57450 - DNA, 25 bp, Homo sapien
aaaattgctgtgtaaaataagtgtt

SEQ ID NO: 57451 - DNA, 25 bp, Homo sapien
atgtcttagtaaaagagcagttatc

SEQ ID NO: 57452 - DNA, 25 bp, Homo sapien
tccctgcatagctgttaccaggagg

SEQ ID NO: 57453 - DNA, 25 bp, Homo sapien
tcactcacatatgcggggcttagtc

SEQ ID NO: 57454 - DNA, 25 bp, Homo sapien
ggcaaagttagcaagaacaccagat

SEQ ID NO: 57455 - DNA, 25 bp, Homo sapien
agtgtgggtcctccctccctgcata

SEQ ID NO: 57456 - DNA, 25 bp, Homo sapien
ggcagcgtgcctgaagtactttcac

SEQ ID NO: 57457 - DNA, 25 bp, Homo sapien
gcggggcttagtcactagcaaactt

SEQ ID NO: 57458 - DNA, 25 bp, Homo sapien
cacaattaagcaacagtgaagggca

SEQ ID NO: 57459 - DNA, 25 bp, Homo sapien
caaataatggactccgcatggatgt

SEQ ID NO: 57460 - DNA, 25 bp, Homo sapien
ttctataggtagagactatgtctta

SEQ ID NO: 57461 - DNA, 25 bp, Homo sapien
aaaattgctgtgtaaaataagtgtt

SEQ ID NO: 57462 - DNA, 25 bp, Homo sapien
atgtcttagtaaaagagcagttatc

SEQ ID NO: 57463 - DNA, 25 bp, Homo sapien
tccctgcatagctgttaccaggagg

SEQ ID NO: 57464 - DNA, 25 bp, Homo sapien
tcactcacatatgcggggcttagtc

SEQ ID NO: 57465 - DNA, 25 bp, Homo sapien
ggcaaagttagcaagaacaccagat

SEQ ID NO: 57466 - DNA, 25 bp, Homo sapien
agtgtgggtcctccctccctgcata

SEQ ID NO: 57467 - DNA, 25 bp, Homo sapien
ggcagcgtgcctgaagtactttcac

SEQ ID NO: 57468 - DNA, 25 bp, Homo sapien
gcggggcttagtcactagcaaactt

SEQ ID NO: 57469 - DNA, 25 bp, Homo sapien
cacaattaagcaacagtgaagggca

SEQ ID NO: 57470 - DNA, 25 bp, Homo sapien
aaaattgctgtgtaaaataagtgtt

SEQ ID NO: 57471 - DNA, 25 bp, Homo sapien
ttctataggtagagactatgtctta

SEQ ID NO: 57472 - DNA, 25 bp, Homo sapien
atgtcttagtaaaagagcagttatc

SEQ ID NO: 57473 - DNA, 25 bp, Homo sapien
tcactcacatatgcggggcttagtc

SEQ ID NO: 57474 - DNA, 25 bp, Homo sapien
ggcagcgtgcctgaagtactttcac

SEQ ID NO: 57475 - DNA, 25 bp, Homo sapien
tccctgcatagctgttaccaggagg

SEQ ID NO: 57476 - DNA, 25 bp, Homo sapien
agtgtgggtcctccctccctgcata

SEQ ID NO: 57477 - DNA, 25 bp, Homo sapien
gcggggcttagtcactagcaaactt

SEQ ID NO: 57478 - DNA, 25 bp, Homo sapien
cacaattaagcaacagtgaagggca

SEQ ID NO: 57479 - DNA, 25 bp, Homo sapien
caaataatggactccgcatggatgt

SEQ ID NO: 57480 - DNA, 25 bp, Homo sapien
ggcaaagttagcaagaacaccagat

SEQ ID NO: 57481 - DNA, 25 bp, Homo sapien
caaataatggactccgcatggatgt

SEQ ID NO: 57482 - DNA, 25 bp, Homo sapien
ttctataggtagagactatgtctta

SEQ ID NO: 57483 - DNA, 25 bp, Homo sapien
atgtcttagtaaaagagcagttatc

SEQ ID NO: 57484 - DNA, 25 bp, Homo sapien
aaaattgctgtgtaaaataagtgtt

SEQ ID NO: 57485 - DNA, 25 bp, Homo sapien
tccctgcatagctgttaccaggagg

SEQ ID NO: 57486 - DNA, 25 bp, Homo sapien
tcactcacatatgcggggcttagtc

SEQ ID NO: 57487 - DNA, 25 bp, Homo sapien
ggcaaagttagcaagaacaccagat

SEQ ID NO: 57488 - DNA, 25 bp, Homo sapien
agtgtgggtcctccctccctgcata

SEQ ID NO: 57489 - DNA, 25 bp, Homo sapien
ggcagcgtgcctgaagtactttcac

SEQ ID NO: 57490 - DNA, 25 bp, Homo sapien
gcggggcttagtcactagcaaactt

SEQ ID NO: 57491 - DNA, 25 bp, Homo sapien
cacaattaagcaacagtgaagggca

SEQ ID NO: 57492 - DNA, 25 bp, Homo sapien
ggcaaagttagcaagaacaccagat

SEQ ID NO: 57493 - DNA, 25 bp, Homo sapien
cacaattaagcaacagtgaagggca

SEQ ID NO: 57494 - DNA, 25 bp, Homo sapien
caaataatggactccgcatggatgt

SEQ ID NO: 57495 - DNA, 25 bp, Homo sapien
gcggggcttagtcactagcaaactt

SEQ ID NO: 57496 - DNA, 25 bp, Homo sapien
tcactcacatatgcggggcttagtc

SEQ ID NO: 57497 - DNA, 25 bp, Homo sapien
ggcagcgtgcctgaagtactttcac

SEQ ID NO: 57498 - DNA, 25 bp, Homo sapien
tccctgcatagctgttaccaggagg

SEQ ID NO: 57499 - DNA, 25 bp, Homo sapien
agtgtgggtcctccctccctgcata

SEQ ID NO: 57500 - DNA, 25 bp, Homo sapien
atgtcttagtaaaagagcagttatc

SEQ ID NO: 57501 - DNA, 25 bp, Homo sapien
ttctataggtagagactatgtctta

SEQ ID NO: 57502 - DNA, 25 bp, Homo sapien
aaaattgctgtgtaaaataagtgtt

SEQ ID NO: 57503 - DNA, 25 bp, Homo sapien
gataactgctcttttactaagacat

SEQ ID NO: 57504 - DNA, 25 bp, Homo sapien
taagacatagtctctacctatagaa

SEQ ID NO: 57505 - DNA, 25 bp, Homo sapien
tatgcagggagggaggacccacact

SEQ ID NO: 57506 - DNA, 25 bp, Homo sapien
gactaagccccgcatatgtgagtga

SEQ ID NO: 57507 - DNA, 25 bp, Homo sapien
tgcccttcactgttgcttaattgtg

SEQ ID NO: 57508 - DNA, 25 bp, Homo sapien
aacacttattttacacagcaatttt

SEQ ID NO: 57509 - DNA, 25 bp, Homo sapien
aagtttgctagtgactaagccccgc

SEQ ID NO: 57510 - DNA, 25 bp, Homo sapien
gtgaaagtacttcaggcacgctgcc

SEQ ID NO: 57511 - DNA, 25 bp, Homo sapien
cctcctggtaacagctatgcaggga

SEQ ID NO: 57512 - DNA, 25 bp, Homo sapien
acatccatgcggagtccattatttg

SEQ ID NO: 57513 - DNA, 25 bp, Homo sapien
atctggtgttcttgctaactttgcc

SEQ ID NO: 57514 - DNA, 25 bp, Homo sapien
ttctataggtagagactatgtctta

SEQ ID NO: 57515 - DNA, 25 bp, Homo sapien
caaataatggactccgcatggatgt

SEQ ID NO: 57516 - DNA, 25 bp, Homo sapien
atgtcttagtaaaagagcagttatc

SEQ ID NO: 57517 - DNA, 25 bp, Homo sapien
tccctgcatagctgttaccaggagg

SEQ ID NO: 57518 - DNA, 25 bp, Homo sapien
aaaattgctgtgtaaaataagtgtt

SEQ ID NO: 57519 - DNA, 25 bp, Homo sapien
ggcaaagttagcaagaacaccagat

SEQ ID NO: 57520 - DNA, 25 bp, Homo sapien
tcactcacatatgcggggcttagtc

SEQ ID NO: 57521 - DNA, 25 bp, Homo sapien
agtgtgggtcctccctccctgcata

SEQ ID NO: 57522 - DNA, 25 bp, Homo sapien
gcggggcttagtcactagcaaactt

SEQ ID NO: 57523 - DNA, 25 bp, Homo sapien
ggcagcgtgcctgaagtactttcac

SEQ ID NO: 57524 - DNA, 25 bp, Homo sapien
cacaattaagcaacagtgaagggca

SEQ ID NO: 57525 - DNA, 25 bp, Homo sapien
ttctataggtagagactatgtctta

SEQ ID NO: 57526 - DNA, 25 bp, Homo sapien
tccctgcatagctgttaccaggagg

SEQ ID NO: 57527 - DNA, 25 bp, Homo sapien
aaaattgctgtgtaaaataagtgtt

SEQ ID NO: 57528 - DNA, 25 bp, Homo sapien
tcactcacatatgcggggcttagtc

SEQ ID NO: 57529 - DNA, 25 bp, Homo sapien
agtgtgggtcctccctccctgcata

SEQ ID NO: 57530 - DNA, 25 bp, Homo sapien
cacaattaagcaacagtgaagggca

SEQ ID NO: 57531 - DNA, 25 bp, Homo sapien
caaataatggactccgcatggatgt

SEQ ID NO: 57532 - DNA, 25 bp, Homo sapien
ggcagcgtgcctgaagtactttcac

SEQ ID NO: 57533 - DNA, 25 bp, Homo sapien
gcggggcttagtcactagcaaactt

SEQ ID NO: 57534 - DNA, 25 bp, Homo sapien
ggcaaagttagcaagaacaccagat

SEQ ID NO: 57535 - DNA, 25 bp, Homo sapien
atgtcttagtaaaagagcagttatc

SEQ ID NO: 57536 - DNA, 25 bp, Homo sapien
ggcaaagttagcaagaacaccagat

SEQ ID NO: 57537 - DNA, 25 bp, Homo sapien
cacaattaagcaacagtgaagggca

SEQ ID NO: 57538 - DNA, 25 bp, Homo sapien
caaataatggactccgcatggatgt

SEQ ID NO: 57539 - DNA, 25 bp, Homo sapien
gcggggcttagtcactagcaaactt

SEQ ID NO: 57540 - DNA, 25 bp, Homo sapien
tcactcacatatgcggggcttagtc

SEQ ID NO: 57541 - DNA, 25 bp, Homo sapien
ggcagcgtgcctgaagtactttcac

SEQ ID NO: 57542 - DNA, 25 bp, Homo sapien
tccctgcatagctgttaccaggagg

SEQ ID NO: 57543 - DNA, 25 bp, Homo sapien
agtgtgggtcctccctccctgcata

SEQ ID NO: 57544 - DNA, 25 bp, Homo sapien
atgtcttagtaaaagagcagttatc

SEQ ID NO: 57545 - DNA, 25 bp, Homo sapien
ttctataggtagagactatgtctta

SEQ ID NO: 57546 - DNA, 25 bp, Homo sapien
aaaattgctgtgtaaaataagtgtt

SEQ ID NO: 57547 - DNA, 25 bp, Homo sapien
tcactcacatatgcggggcttagtc

SEQ ID NO: 57548 - DNA, 25 bp, Homo sapien
cacaattaagcaacagtgaagggca

SEQ ID NO: 57549 - DNA, 25 bp, Homo sapien
caaataatggactccgcatggatgt

SEQ ID NO: 57550 - DNA, 25 bp, Homo sapien
atgtcttagtaaaagagcagttatc

SEQ ID NO: 57551 - DNA, 25 bp, Homo sapien
ttctataggtagagactatgtctta

SEQ ID NO: 57552 - DNA, 25 bp, Homo sapien
aaaattgctgtgtaaaataagtgtt

SEQ ID NO: 57553 - DNA, 25 bp, Homo sapien
ggcaaagttagcaagaacaccagat

SEQ ID NO: 57554 - DNA, 25 bp, Homo sapien
tccctgcatagctgttaccaggagg

SEQ ID NO: 57555 - DNA, 25 bp, Homo sapien
gcggggcttagtcactagcaaactt

SEQ ID NO: 57556 - DNA, 25 bp, Homo sapien
ggcagcgtgcctgaagtactttcac

SEQ ID NO: 57557 - DNA, 25 bp, Homo sapien
agtgtgggtcctccctccctgcata

SEQ ID NO: 57558 - DNA, 25 bp, Homo sapien
ggcaaagttagcaagaacaccagat

SEQ ID NO: 57559 - DNA, 25 bp, Homo sapien
cacaattaagcaacagtgaagggca

SEQ ID NO: 57560 - DNA, 25 bp, Homo sapien
caaataatggactccgcatggatgt

SEQ ID NO: 57561 - DNA, 25 bp, Homo sapien
gcggggcttagtcactagcaaactt

SEQ ID NO: 57562 - DNA, 25 bp, Homo sapien
tcactcacatatgcggggcttagtc

SEQ ID NO: 57563 - DNA, 25 bp, Homo sapien
ggcagcgtgcctgaagtactttcac

SEQ ID NO: 57564 - DNA, 25 bp, Homo sapien
tccctgcatagctgttaccaggagg

SEQ ID NO: 57565 - DNA, 25 bp, Homo sapien
agtgtgggtcctccctccctgcata

SEQ ID NO: 57566 - DNA, 25 bp, Homo sapien
atgtcttagtaaaagagcagttatc

SEQ ID NO: 57567 - DNA, 25 bp, Homo sapien
ttctataggtagagactatgtctta

SEQ ID NO: 57568 - DNA, 25 bp, Homo sapien
aaaattgctgtgtaaaataagtgtt

SEQ ID NO: 57569 - DNA, 25 bp, Homo sapien
ttctataggtagagactatgtctta

SEQ ID NO: 57570 - DNA, 25 bp, Homo sapien
atgtcttagtaaaagagcagttatc

SEQ ID NO: 57571 - DNA, 25 bp, Homo sapien
gcggggcttagtcactagcaaactt

SEQ ID NO: 57572 - DNA, 25 bp, Homo sapien
tcactcacatatgcggggcttagtc

SEQ ID NO: 57573 - DNA, 25 bp, Homo sapien
tccctgcatagctgttaccaggagg

SEQ ID NO: 57574 - DNA, 25 bp, Homo sapien
caaataatggactccgcatggatgt

SEQ ID NO: 57575 - DNA, 25 bp, Homo sapien
ggcaaagttagcaagaacaccagat

SEQ ID NO: 57576 - DNA, 25 bp, Homo sapien
cacaattaagcaacagtgaagggca

SEQ ID NO: 57577 - DNA, 25 bp, Homo sapien
ggcagcgtgcctgaagtactttcac

SEQ ID NO: 57578 - DNA, 25 bp, Homo sapien
agtgtgggtcctccctccctgcata

SEQ ID NO: 57579 - DNA, 25 bp, Homo sapien
aaaattgctgtgtaaaataagtgtt

SEQ ID NO: 57580 - DNA, 25 bp, Homo sapien
ggcaaagttagcaagaacaccagat

SEQ ID NO: 57581 - DNA, 25 bp, Homo sapien
cacaattaagcaacagtgaagggca

SEQ ID NO: 57582 - DNA, 25 bp, Homo sapien
caaataatggactccgcatggatgt

SEQ ID NO: 57583 - DNA, 25 bp, Homo sapien
gcggggcttagtcactagcaaactt

SEQ ID NO: 57584 - DNA, 25 bp, Homo sapien
tcactcacatatgcggggcttagtc

SEQ ID NO: 57585 - DNA, 25 bp, Homo sapien
ggcagcgtgcctgaagtactttcac

SEQ ID NO: 57586 - DNA, 25 bp, Homo sapien
tccctgcatagctgttaccaggagg

SEQ ID NO: 57587 - DNA, 25 bp, Homo sapien
agtgtgggtcctccctccctgcata

SEQ ID NO: 57588 - DNA, 25 bp, Homo sapien
atgtcttagtaaaagagcagttatc

SEQ ID NO: 57589 - DNA, 25 bp, Homo sapien
ttctataggtagagactatgtctta

SEQ ID NO: 57590 - DNA, 25 bp, Homo sapien
aaaattgctgtgtaaaataagtgtt

SEQ ID NO: 57591 - DNA, 25 bp, Homo sapien
ggcaaagttagcaagaacaccagat

SEQ ID NO: 57592 - DNA, 25 bp, Homo sapien
cacaattaagcaacagtgaagggca

SEQ ID NO: 57593 - DNA, 25 bp, Homo sapien
caaataatggactccgcatggatgt

SEQ ID NO: 57594 - DNA, 25 bp, Homo sapien
gcggggcttagtcactagcaaactt

SEQ ID NO: 57595 - DNA, 25 bp, Homo sapien
tcactcacatatgcggggcttagtc

SEQ ID NO: 57596 - DNA, 25 bp, Homo sapien
ggcagcgtgcctgaagtactttcac

SEQ ID NO: 57597 - DNA, 25 bp, Homo sapien
tccctgcatagctgttaccaggagg

SEQ ID NO: 57598 - DNA, 25 bp, Homo sapien
agtgtgggtcctccctccctgcata

SEQ ID NO: 57599 - DNA, 25 bp, Homo sapien
atgtcttagtaaaagagcagttatc

SEQ ID NO: 57600 - DNA, 25 bp, Homo sapien
ttctataggtagagactatgtctta

SEQ ID NO: 57601 - DNA, 25 bp, Homo sapien
aaaattgctgtgtaaaataagtgtt

SEQ ID NO: 57602 - DNA, 25 bp, Homo sapien
gcggggcttagtcactagcaaactt

SEQ ID NO: 57603 - DNA, 25 bp, Homo sapien
ggcagcgtgcctgaagtactttcac

SEQ ID NO: 57604 - DNA, 25 bp, Homo sapien
ggcaaagttagcaagaacaccagat

SEQ ID NO: 57605 - DNA, 25 bp, Homo sapien
tccctgcatagctgttaccaggagg

SEQ ID NO: 57606 - DNA, 25 bp, Homo sapien
ttctataggtagagactatgtctta

SEQ ID NO: 57607 - DNA, 25 bp, Homo sapien
tcactcacatatgcggggcttagtc

SEQ ID NO: 57608 - DNA, 25 bp, Homo sapien
atgtcttagtaaaagagcagttatc

SEQ ID NO: 57609 - DNA, 25 bp, Homo sapien
aaaattgctgtgtaaaataagtgtt

SEQ ID NO: 57610 - DNA, 25 bp, Homo sapien
cacaattaagcaacagtgaagggca

SEQ ID NO: 57611 - DNA, 25 bp, Homo sapien
caaataatggactccgcatggatgt

SEQ ID NO: 57612 - DNA, 25 bp, Homo sapien
agtgtgggtcctccctccctgcata

SEQ ID NO: 57613 - DNA, 25 bp, Homo sapien
ggcaaagttagcaagaacaccagat

SEQ ID NO: 57614 - DNA, 25 bp, Homo sapien
cacaattaagcaacagtgaagggca

SEQ ID NO: 57615 - DNA, 25 bp, Homo sapien
caaataatggactccgcatggatgt

SEQ ID NO: 57616 - DNA, 25 bp, Homo sapien
gcggggcttagtcactagcaaactt

SEQ ID NO: 57617 - DNA, 25 bp, Homo sapien
tcactcacatatgcggggcttagtc

SEQ ID NO: 57618 - DNA, 25 bp, Homo sapien
ggcagcgtgcctgaagtactttcac

SEQ ID NO: 57619 - DNA, 25 bp, Homo sapien
tccctgcatagctgttaccaggagg

SEQ ID NO: 57620 - DNA, 25 bp, Homo sapien
agtgtgggtcctccctccctgcata

SEQ ID NO: 57621 - DNA, 25 bp, Homo sapien
atgtcttagtaaaagagcagttatc

SEQ ID NO: 57622 - DNA, 25 bp, Homo sapien
ttctataggtagagactatgtctta

SEQ ID NO: 57623 - DNA, 25 bp, Homo sapien
aaaattgctgtgtaaaataagtgtt

SEQ ID NO: 57624 - DNA, 25 bp, Homo sapien
caaataatggactccgcatggatgt

SEQ ID NO: 57625 - DNA, 25 bp, Homo sapien
agtgtgggtcctccctccctgcata

SEQ ID NO: 57626 - DNA, 25 bp, Homo sapien
ttctataggtagagactatgtctta

SEQ ID NO: 57627 - DNA, 25 bp, Homo sapien
tcactcacatatgcggggcttagtc

SEQ ID NO: 57628 - DNA, 25 bp, Homo sapien
gcggggcttagtcactagcaaactt

SEQ ID NO: 57629 - DNA, 25 bp, Homo sapien
cacaattaagcaacagtgaagggca

SEQ ID NO: 57630 - DNA, 25 bp, Homo sapien
tccctgcatagctgttaccaggagg

SEQ ID NO: 57631 - DNA, 25 bp, Homo sapien
ggcagcgtgcctgaagtactttcac

SEQ ID NO: 57632 - DNA, 25 bp, Homo sapien
ggcaaagttagcaagaacaccagat

SEQ ID NO: 57633 - DNA, 25 bp, Homo sapien
atgtcttagtaaaagagcagttatc

SEQ ID NO: 57634 - DNA, 25 bp, Homo sapien
aaaattgctgtgtaaaataagtgtt

SEQ ID NO: 57635 - DNA, 25 bp, Homo sapien
ggcaaagttagcaagaacaccagat

SEQ ID NO: 57636 - DNA, 25 bp, Homo sapien
cacaattaagcaacagtgaagggca

SEQ ID NO: 57637 - DNA, 25 bp, Homo sapien
caaataatggactccgcatggatgt

SEQ ID NO: 57638 - DNA, 25 bp, Homo sapien
gcggggcttagtcactagcaaactt

SEQ ID NO: 57639 - DNA, 25 bp, Homo sapien
tcactcacatatgcggggcttagtc

SEQ ID NO: 57640 - DNA, 25 bp, Homo sapien
ggcagcgtgcctgaagtactttcac

SEQ ID NO: 57641 - DNA, 25 bp, Homo sapien
tccctgcatagctgttaccaggagg

SEQ ID NO: 57642 - DNA, 25 bp, Homo sapien
agtgtgggtcctccctccctgcata

SEQ ID NO: 57643 - DNA, 25 bp, Homo sapien
atgtcttagtaaaagagcagttatc

SEQ ID NO: 57644 - DNA, 25 bp, Homo sapien
ttctataggtagagactatgtctta

SEQ ID NO: 57645 - DNA, 25 bp, Homo sapien
aaaattgctgtgtaaaataagtgtt

SEQ ID NO: 57646 - DNA, 25 bp, Homo sapien
cacaattaagcaacagtgaagggca

SEQ ID NO: 57647 - DNA, 25 bp, Homo sapien
gcggggcttagtcactagcaaactt

SEQ ID NO: 57648 - DNA, 25 bp, Homo sapien
atgtcttagtaaaagagcagttatc

SEQ ID NO: 57649 - DNA, 25 bp, Homo sapien
ggcagcgtgcctgaagtactttcac

SEQ ID NO: 57650 - DNA, 25 bp, Homo sapien
caaataatggactccgcatggatgt

SEQ ID NO: 57651 - DNA, 25 bp, Homo sapien
ggcaaagttagcaagaacaccagat

SEQ ID NO: 57652 - DNA, 25 bp, Homo sapien
aaaattgctgtgtaaaataagtgtt

SEQ ID NO: 57653 - DNA, 25 bp, Homo sapien
tcactcacatatgcggggcttagtc

SEQ ID NO: 57654 - DNA, 25 bp, Homo sapien
agtgtgggtcctccctccctgcata

SEQ ID NO: 57655 - DNA, 25 bp, Homo sapien
ttctataggtagagactatgtctta

SEQ ID NO: 57656 - DNA, 25 bp, Homo sapien
tccctgcatagctgttaccaggagg

SEQ ID NO: 57657 - DNA, 25 bp, Homo sapien
ggcaaagttagcaagaacaccagat

SEQ ID NO: 57658 - DNA, 25 bp, Homo sapien
cacaattaagcaacagtgaagggca

SEQ ID NO: 57659 - DNA, 25 bp, Homo sapien
caaataatggactccgcatggatgt

SEQ ID NO: 57660 - DNA, 25 bp, Homo sapien
gcggggcttagtcactagcaaactt

SEQ ID NO: 57661 - DNA, 25 bp, Homo sapien
tcactcacatatgcggggcttagtc

SEQ ID NO: 57662 - DNA, 25 bp, Homo sapien
ggcagcgtgcctgaagtactttcac

SEQ ID NO: 57663 - DNA, 25 bp, Homo sapien
tccctgcatagctgttaccaggagg

SEQ ID NO: 57664 - DNA, 25 bp, Homo sapien
agtgtgggtcctccctccctgcata

SEQ ID NO: 57665 - DNA, 25 bp, Homo sapien
atgtcttagtaaaagagcagttatc

SEQ ID NO: 57666 - DNA, 25 bp, Homo sapien
ttctataggtagagactatgtctta

SEQ ID NO: 57667 - DNA, 25 bp, Homo sapien
aaaattgctgtgtaaaataagtgtt

SEQ ID NO: 57668 - DNA, 25 bp, Homo sapien
ggcaaagttagcaagaacaccagat

SEQ ID NO: 57669 - DNA, 25 bp, Homo sapien
aaaattgctgtgtaaaataagtgtt

SEQ ID NO: 57670 - DNA, 25 bp, Homo sapien
tcactcacatatgcggggcttagtc

SEQ ID NO: 57671 - DNA, 25 bp, Homo sapien
tccctgcatagctgttaccaggagg

SEQ ID NO: 57672 - DNA, 25 bp, Homo sapien
ggcagcgtgcctgaagtactttcac

SEQ ID NO: 57673 - DNA, 25 bp, Homo sapien
caaataatggactccgcatggatgt

SEQ ID NO: 57674 - DNA, 25 bp, Homo sapien
atgtcttagtaaaagagcagttatc

SEQ ID NO: 57675 - DNA, 25 bp, Homo sapien
ttctataggtagagactatgtctta

SEQ ID NO: 57676 - DNA, 25 bp, Homo sapien
gcggggcttagtcactagcaaactt

SEQ ID NO: 57677 - DNA, 25 bp, Homo sapien
agtgtgggtcctccctccctgcata

SEQ ID NO: 57678 - DNA, 25 bp, Homo sapien
cacaattaagcaacagtgaagggca

SEQ ID NO: 57679 - DNA, 25 bp, Homo sapien
ggcaaagttagcaagaacaccagat

SEQ ID NO: 57680 - DNA, 25 bp, Homo sapien
cacaattaagcaacagtgaagggca

SEQ ID NO: 57681 - DNA, 25 bp, Homo sapien
caaataatggactccgcatggatgt

SEQ ID NO: 57682 - DNA, 25 bp, Homo sapien
gcggggcttagtcactagcaaactt

SEQ ID NO: 57683 - DNA, 25 bp, Homo sapien
tcactcacatatgcggggcttagtc

SEQ ID NO: 57684 - DNA, 25 bp, Homo sapien
ggcagcgtgcctgaagtactttcac

SEQ ID NO: 57685 - DNA, 25 bp, Homo sapien
tccctgcatagctgttaccaggagg

SEQ ID NO: 57686 - DNA, 25 bp, Homo sapien
agtgtgggtcctccctccctgcata

SEQ ID NO: 57687 - DNA, 25 bp, Homo sapien
atgtcttagtaaaagagcagttatc

SEQ ID NO: 57688 - DNA, 25 bp, Homo sapien
ttctataggtagagactatgtctta

SEQ ID NO: 57689 - DNA, 25 bp, Homo sapien
aaaattgctgtgtaaaataagtgtt

SEQ ID NO: 57690 - DNA, 25 bp, Homo sapien
ggcagcgtgcctgaagtactttcac

SEQ ID NO: 57691 - DNA, 25 bp, Homo sapien
ggcaaagttagcaagaacaccagat

SEQ ID NO: 57692 - DNA, 25 bp, Homo sapien
atgtcttagtaaaagagcagttatc

SEQ ID NO: 57693 - DNA, 25 bp, Homo sapien
tcactcacatatgcggggcttagtc

SEQ ID NO: 57694 - DNA, 25 bp, Homo sapien
caaataatggactccgcatggatgt

SEQ ID NO: 57695 - DNA, 25 bp, Homo sapien
aaaattgctgtgtaaaataagtgtt

SEQ ID NO: 57696 - DNA, 25 bp, Homo sapien
gcggggcttagtcactagcaaactt

SEQ ID NO: 57697 - DNA, 25 bp, Homo sapien
ttctataggtagagactatgtctta

SEQ ID NO: 57698 - DNA, 25 bp, Homo sapien
tccctgcatagctgttaccaggagg

SEQ ID NO: 57699 - DNA, 25 bp, Homo sapien
agtgtgggtcctccctccctgcata

SEQ ID NO: 57700 - DNA, 25 bp, Homo sapien
cacaattaagcaacagtgaagggca

SEQ ID NO: 57701 - DNA, 25 bp, Homo sapien
cacaattaagcaacagtgaagggca

SEQ ID NO: 57702 - DNA, 25 bp, Homo sapien
agtgtgggtcctccctccctgcata

SEQ ID NO: 57703 - DNA, 25 bp, Homo sapien
tcactcacatatgcggggcttagtc

SEQ ID NO: 57704 - DNA, 25 bp, Homo sapien
ggcaaagttagcaagaacaccagat

SEQ ID NO: 57705 - DNA, 25 bp, Homo sapien
caaataatggactccgcatggatgt

SEQ ID NO: 57706 - DNA, 25 bp, Homo sapien
ggcagcgtgcctgaagtactttcac

SEQ ID NO: 57707 - DNA, 25 bp, Homo sapien
tccctgcatagctgttaccaggagg

SEQ ID NO: 57708 - DNA, 25 bp, Homo sapien
ttctataggtagagactatgtctta

SEQ ID NO: 57709 - DNA, 25 bp, Homo sapien
gcggggcttagtcactagcaaactt

SEQ ID NO: 57710 - DNA, 25 bp, Homo sapien
atgtcttagtaaaagagcagttatc

SEQ ID NO: 57711 - DNA, 25 bp, Homo sapien
aaaattgctgtgtaaaataagtgtt

SEQ ID NO: 57712 - DNA, 25 bp, Homo sapien
ggcaaagttagcaagaacaccagat

SEQ ID NO: 57713 - DNA, 25 bp, Homo sapien
cacaattaagcaacagtgaagggca

SEQ ID NO: 57714 - DNA, 25 bp, Homo sapien
caaataatggactccgcatggatgt

SEQ ID NO: 57715 - DNA, 25 bp, Homo sapien
gcggggcttagtcactagcaaactt

SEQ ID NO: 57716 - DNA, 25 bp, Homo sapien
tcactcacatatgcggggcttagtc

SEQ ID NO: 57717 - DNA, 25 bp, Homo sapien
ggcagcgtgcctgaagtactttcac

SEQ ID NO: 57718 - DNA, 25 bp, Homo sapien
tccctgcatagctgttaccaggagg

SEQ ID NO: 57719 - DNA, 25 bp, Homo sapien
agtgtgggtcctccctccctgcata

SEQ ID NO: 57720 - DNA, 25 bp, Homo sapien
atgtcttagtaaaagagcagttatc

SEQ ID NO: 57721 - DNA, 25 bp, Homo sapien
ttctataggtagagactatgtctta

SEQ ID NO: 57722 - DNA, 25 bp, Homo sapien
aaaattgctgtgtaaaataagtgtt

SEQ ID NO: 57723 - DNA, 25 bp, Homo sapien
tcactcacatatgcggggcttagtc

SEQ ID NO: 57724 - DNA, 25 bp, Homo sapien
ggcaaagttagcaagaacaccagat

SEQ ID NO: 57725 - DNA, 25 bp, Homo sapien
ggcagcgtgcctgaagtactttcac

SEQ ID NO: 57726 - DNA, 25 bp, Homo sapien
cacaattaagcaacagtgaagggca

SEQ ID NO: 57727 - DNA, 25 bp, Homo sapien
agtgtgggtcctccctccctgcata

SEQ ID NO: 57728 - DNA, 25 bp, Homo sapien
gcggggcttagtcactagcaaactt

SEQ ID NO: 57729 - DNA, 25 bp, Homo sapien
aaaattgctgtgtaaaataagtgtt

SEQ ID NO: 57730 - DNA, 25 bp, Homo sapien
tccctgcatagctgttaccaggagg

SEQ ID NO: 57731 - DNA, 25 bp, Homo sapien
atgtcttagtaaaagagcagttatc

SEQ ID NO: 57732 - DNA, 25 bp, Homo sapien
ttctataggtagagactatgtctta

SEQ ID NO: 57733 - DNA, 25 bp, Homo sapien
caaataatggactccgcatggatgt

SEQ ID NO: 57734 - DNA, 25 bp, Homo sapien
ggcaaagttagcaagaacaccagat

SEQ ID NO: 57735 - DNA, 25 bp, Homo sapien
cacaattaagcaacagtgaagggca

SEQ ID NO: 57736 - DNA, 25 bp, Homo sapien
caaataatggactccgcatggatgt

SEQ ID NO: 57737 - DNA, 25 bp, Homo sapien
gcggggcttagtcactagcaaactt

SEQ ID NO: 57738 - DNA, 25 bp, Homo sapien
tcactcacatatgcggggcttagtc

SEQ ID NO: 57739 - DNA, 25 bp, Homo sapien
ggcagcgtgcctgaagtactttcac

SEQ ID NO: 57740 - DNA, 25 bp, Homo sapien
tccctgcatagctgttaccaggagg

SEQ ID NO: 57741 - DNA, 25 bp, Homo sapien
agtgtgggtcctccctccctgcata

SEQ ID NO: 57742 - DNA, 25 bp, Homo sapien
atgtcttagtaaaagagcagttatc

SEQ ID NO: 57743 - DNA, 25 bp, Homo sapien
ttctataggtagagactatgtctta

SEQ ID NO: 57744 - DNA, 25 bp, Homo sapien
aaaattgctgtgtaaaataagtgtt

SEQ ID NO: 57745 - DNA, 25 bp, Homo sapien
caaataatggactccgcatggatgt

SEQ ID NO: 57746 - DNA, 25 bp, Homo sapien
atgtcttagtaaaagagcagttatc

SEQ ID NO: 57747 - DNA, 25 bp, Homo sapien
ttctataggtagagactatgtctta

SEQ ID NO: 57748 - DNA, 25 bp, Homo sapien
tcactcacatatgcggggcttagtc

SEQ ID NO: 57749 - DNA, 25 bp, Homo sapien
cacaattaagcaacagtgaagggca

SEQ ID NO: 57750 - DNA, 25 bp, Homo sapien
ggcaaagttagcaagaacaccagat

SEQ ID NO: 57751 - DNA, 25 bp, Homo sapien
agtgtgggtcctccctccctgcata

SEQ ID NO: 57752 - DNA, 25 bp, Homo sapien
gcggggcttagtcactagcaaactt

SEQ ID NO: 57753 - DNA, 25 bp, Homo sapien
tccctgcatagctgttaccaggagg

SEQ ID NO: 57754 - DNA, 25 bp, Homo sapien
ggcagcgtgcctgaagtactttcac

SEQ ID NO: 57755 - DNA, 25 bp, Homo sapien
aaaattgctgtgtaaaataagtgtt

SEQ ID NO: 57756 - DNA, 25 bp, Homo sapien
ggcaaagttagcaagaacaccagat

SEQ ID NO: 57757 - DNA, 25 bp, Homo sapien
cacaattaagcaacagtgaagggca

SEQ ID NO: 57758 - DNA, 25 bp, Homo sapien
caaataatggactccgcatggatgt

SEQ ID NO: 57759 - DNA, 25 bp, Homo sapien
gcggggcttagtcactagcaaactt

SEQ ID NO: 57760 - DNA, 25 bp, Homo sapien
tcactcacatatgcggggcttagtc

SEQ ID NO: 57761 - DNA, 25 bp, Homo sapien
ggcagcgtgcctgaagtactttcac

SEQ ID NO: 57762 - DNA, 25 bp, Homo sapien
tccctgcatagctgttaccaggagg

SEQ ID NO: 57763 - DNA, 25 bp, Homo sapien
agtgtgggtcctccctccctgcata

SEQ ID NO: 57764 - DNA, 25 bp, Homo sapien
atgtcttagtaaaagagcagttatc

SEQ ID NO: 57765 - DNA, 25 bp, Homo sapien
ttctataggtagagactatgtctta

SEQ ID NO: 57766 - DNA, 25 bp, Homo sapien
aaaattgctgtgtaaaataagtgtt

SEQ ID NO: 57767 - DNA, 25 bp, Homo sapien
ggcagcgtgcctgaagtactttcac

SEQ ID NO: 57768 - DNA, 25 bp, Homo sapien
agtgtgggtcctccctccctgcata

SEQ ID NO: 57769 - DNA, 25 bp, Homo sapien
caaataatggactccgcatggatgt

SEQ ID NO: 57770 - DNA, 25 bp, Homo sapien
ggcaaagttagcaagaacaccagat

SEQ ID NO: 57771 - DNA, 25 bp, Homo sapien
aaaattgctgtgtaaaataagtgtt

SEQ ID NO: 57772 - DNA, 25 bp, Homo sapien
tccctgcatagctgttaccaggagg

SEQ ID NO: 57773 - DNA, 25 bp, Homo sapien
ttctataggtagagactatgtctta

SEQ ID NO: 57774 - DNA, 25 bp, Homo sapien
tcactcacatatgcggggcttagtc

SEQ ID NO: 57775 - DNA, 25 bp, Homo sapien
cacaattaagcaacagtgaagggca

SEQ ID NO: 57776 - DNA, 25 bp, Homo sapien
atgtcttagtaaaagagcagttatc

SEQ ID NO: 57777 - DNA, 25 bp, Homo sapien
gcggggcttagtcactagcaaactt

SEQ ID NO: 57778 - DNA, 25 bp, Homo sapien
ggcaaagttagcaagaacaccagat

SEQ ID NO: 57779 - DNA, 25 bp, Homo sapien
cacaattaagcaacagtgaagggca

SEQ ID NO: 57780 - DNA, 25 bp, Homo sapien
caaataatggactccgcatggatgt

SEQ ID NO: 57781 - DNA, 25 bp, Homo sapien
gcggggcttagtcactagcaaactt

SEQ ID NO: 57782 - DNA, 25 bp, Homo sapien
tcactcacatatgcggggcttagtc

SEQ ID NO: 57783 - DNA, 25 bp, Homo sapien
ggcagcgtgcctgaagtactttcac

SEQ ID NO: 57784 - DNA, 25 bp, Homo sapien
tccctgcatagctgttaccaggagg

SEQ ID NO: 57785 - DNA, 25 bp, Homo sapien
agtgtgggtcctccctccctgcata

SEQ ID NO: 57786 - DNA, 25 bp, Homo sapien
atgtcttagtaaaagagcagttatc

SEQ ID NO: 57787 - DNA, 25 bp, Homo sapien
ttctataggtagagactatgtctta

SEQ ID NO: 57788 - DNA, 25 bp, Homo sapien
aaaattgctgtgtaaaataagtgtt

SEQ ID NO: 57789 - DNA, 25 bp, Homo sapien
ttctataggtagagactatgtctta

SEQ ID NO: 57790 - DNA, 25 bp, Homo sapien
agtgtgggtcctccctccctgcata

SEQ ID NO: 57791 - DNA, 25 bp, Homo sapien
tcactcacatatgcggggcttagtc

SEQ ID NO: 57792 - DNA, 25 bp, Homo sapien
gcggggcttagtcactagcaaactt

SEQ ID NO: 57793 - DNA, 25 bp, Homo sapien
cacaattaagcaacagtgaagggca

SEQ ID NO: 57794 - DNA, 25 bp, Homo sapien
atgtcttagtaaaagagcagttatc

SEQ ID NO: 57795 - DNA, 25 bp, Homo sapien
caaataatggactccgcatggatgt

SEQ ID NO: 57796 - DNA, 25 bp, Homo sapien
ggcagcgtgcctgaagtactttcac

SEQ ID NO: 57797 - DNA, 25 bp, Homo sapien
aaaattgctgtgtaaaataagtgtt

SEQ ID NO: 57798 - DNA, 25 bp, Homo sapien
tccctgcatagctgttaccaggagg

SEQ ID NO: 57799 - DNA, 25 bp, Homo sapien
ggcaaagttagcaagaacaccagat

SEQ ID NO: 57800 - DNA, 25 bp, Homo sapien
ggcaaagttagcaagaacaccagat

SEQ ID NO: 57801 - DNA, 25 bp, Homo sapien
cacaattaagcaacagtgaagggca

SEQ ID NO: 57802 - DNA, 25 bp, Homo sapien
caaataatggactccgcatggatgt

SEQ ID NO: 57803 - DNA, 25 bp, Homo sapien
gcggggcttagtcactagcaaactt

SEQ ID NO: 57804 - DNA, 25 bp, Homo sapien
tcactcacatatgcggggcttagtc

SEQ ID NO: 57805 - DNA, 25 bp, Homo sapien
ggcagcgtgcctgaagtactttcac

SEQ ID NO: 57806 - DNA, 25 bp, Homo sapien
tccctgcatagctgttaccaggagg

SEQ ID NO: 57807 - DNA, 25 bp, Homo sapien
agtgtgggtcctccctccctgcata

SEQ ID NO: 57808 - DNA, 25 bp, Homo sapien
atgtcttagtaaaagagcagttatc

SEQ ID NO: 57809 - DNA, 25 bp, Homo sapien
ttctataggtagagactatgtctta

SEQ ID NO: 57810 - DNA, 25 bp, Homo sapien
aaaattgctgtgtaaaataagtgtt

SEQ ID NO: 57811 - DNA, 25 bp, Homo sapien
gcggggcttagtcactagcaaactt

SEQ ID NO: 57812 - DNA, 25 bp, Homo sapien
aaaattgctgtgtaaaataagtgtt

SEQ ID NO: 57813 - DNA, 25 bp, Homo sapien
atgtcttagtaaaagagcagttatc

SEQ ID NO: 57814 - DNA, 25 bp, Homo sapien
ttctataggtagagactatgtctta

SEQ ID NO: 57815 - DNA, 25 bp, Homo sapien
caaataatggactccgcatggatgt

SEQ ID NO: 57816 - DNA, 25 bp, Homo sapien
ggcaaagttagcaagaacaccagat

SEQ ID NO: 57817 - DNA, 25 bp, Homo sapien
tccctgcatagctgttaccaggagg

SEQ ID NO: 57818 - DNA, 25 bp, Homo sapien
ggcagcgtgcctgaagtactttcac

SEQ ID NO: 57819 - DNA, 25 bp, Homo sapien
cacaattaagcaacagtgaagggca

SEQ ID NO: 57820 - DNA, 25 bp, Homo sapien
tcactcacatatgcggggcttagtc

SEQ ID NO: 57821 - DNA, 25 bp, Homo sapien
agtgtgggtcctccctccctgcata

SEQ ID NO: 57822 - DNA, 25 bp, Homo sapien
ggcaaagttagcaagaacaccagat

SEQ ID NO: 57823 - DNA, 25 bp, Homo sapien
cacaattaagcaacagtgaagggca

SEQ ID NO: 57824 - DNA, 25 bp, Homo sapien
caaataatggactccgcatggatgt

SEQ ID NO: 57825 - DNA, 25 bp, Homo sapien
gcggggcttagtcactagcaaactt

SEQ ID NO: 57826 - DNA, 25 bp, Homo sapien
tcactcacatatgcggggcttagtc

SEQ ID NO: 57827 - DNA, 25 bp, Homo sapien
ggcagcgtgcctgaagtactttcac

SEQ ID NO: 57828 - DNA, 25 bp, Homo sapien
tccctgcatagctgttaccaggagg

SEQ ID NO: 57829 - DNA, 25 bp, Homo sapien
agtgtgggtcctccctccctgcata

SEQ ID NO: 57830 - DNA, 25 bp, Homo sapien
atgtcttagtaaaagagcagttatc

SEQ ID NO: 57831 - DNA, 25 bp, Homo sapien
ttctataggtagagactatgtctta

SEQ ID NO: 57832 - DNA, 25 bp, Homo sapien
aaaattgctgtgtaaaataagtgtt

SEQ ID NO: 57833 - DNA, 25 bp, Homo sapien
ggcaaagttagcaagaacaccagat

SEQ ID NO: 57834 - DNA, 25 bp, Homo sapien
cacaattaagcaacagtgaagggca

SEQ ID NO: 57835 - DNA, 25 bp, Homo sapien
caaataatggactccgcatggatgt

SEQ ID NO: 57836 - DNA, 25 bp, Homo sapien
gcggggcttagtcactagcaaactt

SEQ ID NO: 57837 - DNA, 25 bp, Homo sapien
tcactcacatatgcggggcttagtc

SEQ ID NO: 57838 - DNA, 25 bp, Homo sapien
ggcagcgtgcctgaagtactttcac

SEQ ID NO: 57839 - DNA, 25 bp, Homo sapien
tccctgcatagctgttaccaggagg

SEQ ID NO: 57840 - DNA, 25 bp, Homo sapien
agtgtgggtcctccctccctgcata

SEQ ID NO: 57841 - DNA, 25 bp, Homo sapien
atgtcttagtaaaagagcagttatc

SEQ ID NO: 57842 - DNA, 25 bp, Homo sapien
ttctataggtagagactatgtctta

SEQ ID NO: 57843 - DNA, 25 bp, Homo sapien
aaaattgctgtgtaaaataagtgtt

SEQ ID NO: 57844 - DNA, 25 bp, Homo sapien
caaataatggactccgcatggatgt

SEQ ID NO: 57845 - DNA, 25 bp, Homo sapien
cacaattaagcaacagtgaagggca

SEQ ID NO: 57846 - DNA, 25 bp, Homo sapien
atgtcttagtaaaagagcagttatc

SEQ ID NO: 57847 - DNA, 25 bp, Homo sapien
aaaattgctgtgtaaaataagtgtt

SEQ ID NO: 57848 - DNA, 25 bp, Homo sapien
agtgtgggtcctccctccctgcata

SEQ ID NO: 57849 - DNA, 25 bp, Homo sapien
ggcaaagttagcaagaacaccagat

SEQ ID NO: 57850 - DNA, 25 bp, Homo sapien
ggcagcgtgcctgaagtactttcac

SEQ ID NO: 57851 - DNA, 25 bp, Homo sapien
gcggggcttagtcactagcaaactt

SEQ ID NO: 57852 - DNA, 25 bp, Homo sapien
tcactcacatatgcggggcttagtc

SEQ ID NO: 57853 - DNA, 25 bp, Homo sapien
tccctgcatagctgttaccaggagg

SEQ ID NO: 57854 - DNA, 25 bp, Homo sapien
ttctataggtagagactatgtctta

SEQ ID NO: 57855 - DNA, 25 bp, Homo sapien
ggcaaagttagcaagaacaccagat

SEQ ID NO: 57856 - DNA, 25 bp, Homo sapien
cacaattaagcaacagtgaagggca

SEQ ID NO: 57857 - DNA, 25 bp, Homo sapien
caaataatggactccgcatggatgt

SEQ ID NO: 57858 - DNA, 25 bp, Homo sapien
gcggggcttagtcactagcaaactt

SEQ ID NO: 57859 - DNA, 25 bp, Homo sapien
tcactcacatatgcggggcttagtc

SEQ ID NO: 57860 - DNA, 25 bp, Homo sapien
ggcagcgtgcctgaagtactttcac

SEQ ID NO: 57861 - DNA, 25 bp, Homo sapien
tccctgcatagctgttaccaggagg

SEQ ID NO: 57862 - DNA, 25 bp, Homo sapien
agtgtgggtcctccctccctgcata

SEQ ID NO: 57863 - DNA, 25 bp, Homo sapien
atgtcttagtaaaagagcagttatc

SEQ ID NO: 57864 - DNA, 25 bp, Homo sapien
ttctataggtagagactatgtctta

SEQ ID NO: 57865 - DNA, 25 bp, Homo sapien
aaaattgctgtgtaaaataagtgtt

SEQ ID NO: 57866 - DNA, 25 bp, Homo sapien
tccctgcatagctgttaccaggagg

SEQ ID NO: 57867 - DNA, 25 bp, Homo sapien
ggcagcgtgcctgaagtactttcac

SEQ ID NO: 57868 - DNA, 25 bp, Homo sapien
ggcaaagttagcaagaacaccagat

SEQ ID NO: 57869 - DNA, 25 bp, Homo sapien
caaataatggactccgcatggatgt

SEQ ID NO: 57870 - DNA, 25 bp, Homo sapien
atgtcttagtaaaagagcagttatc

SEQ ID NO: 57871 - DNA, 25 bp, Homo sapien
aaaattgctgtgtaaaataagtgtt

SEQ ID NO: 57872 - DNA, 25 bp, Homo sapien
gcggggcttagtcactagcaaactt

SEQ ID NO: 57873 - DNA, 25 bp, Homo sapien
ttctataggtagagactatgtctta

SEQ ID NO: 57874 - DNA, 25 bp, Homo sapien
agtgtgggtcctccctccctgcata

SEQ ID NO: 57875 - DNA, 25 bp, Homo sapien
tcactcacatatgcggggcttagtc

SEQ ID NO: 57876 - DNA, 25 bp, Homo sapien
cacaattaagcaacagtgaagggca

SEQ ID NO: 57877 - DNA, 25 bp, Homo sapien
ggcaaagttagcaagaacaccagat

SEQ ID NO: 57878 - DNA, 25 bp, Homo sapien
cacaattaagcaacagtgaagggca

SEQ ID NO: 57879 - DNA, 25 bp, Homo sapien
caaataatggactccgcatggatgt

SEQ ID NO: 57880 - DNA, 25 bp, Homo sapien
gcggggcttagtcactagcaaactt

SEQ ID NO: 57881 - DNA, 25 bp, Homo sapien
tcactcacatatgcggggcttagtc

SEQ ID NO: 57882 - DNA, 25 bp, Homo sapien
ggcagcgtgcctgaagtactttcac

SEQ ID NO: 57883 - DNA, 25 bp, Homo sapien
tccctgcatagctgttaccaggagg

SEQ ID NO: 57884 - DNA, 25 bp, Homo sapien
agtgtgggtcctccctccctgcata

SEQ ID NO: 57885 - DNA, 25 bp, Homo sapien
atgtcttagtaaaagagcagttatc

SEQ ID NO: 57886 - DNA, 25 bp, Homo sapien
ttctataggtagagactatgtctta

SEQ ID NO: 57887 - DNA, 25 bp, Homo sapien
aaaattgctgtgtaaaataagtgtt

SEQ ID NO: 57888 - DNA, 25 bp, Homo sapien
agtgtgggtcctccctccctgcata

SEQ ID NO: 57889 - DNA, 25 bp, Homo sapien
cacaattaagcaacagtgaagggca

SEQ ID NO: 57890 - DNA, 25 bp, Homo sapien
tccctgcatagctgttaccaggagg

SEQ ID NO: 57891 - DNA, 25 bp, Homo sapien
caaataatggactccgcatggatgt

SEQ ID NO: 57892 - DNA, 25 bp, Homo sapien
tcactcacatatgcggggcttagtc

SEQ ID NO: 57893 - DNA, 25 bp, Homo sapien
ggcaaagttagcaagaacaccagat

SEQ ID NO: 57894 - DNA, 25 bp, Homo sapien
aaaattgctgtgtaaaataagtgtt

SEQ ID NO: 57895 - DNA, 25 bp, Homo sapien
gcggggcttagtcactagcaaactt

SEQ ID NO: 57896 - DNA, 25 bp, Homo sapien
ttctataggtagagactatgtctta

SEQ ID NO: 57897 - DNA, 25 bp, Homo sapien
ggcagcgtgcctgaagtactttcac

SEQ ID NO: 57898 - DNA, 25 bp, Homo sapien
atgtcttagtaaaagagcagttatc

SEQ ID NO: 57899 - DNA, 25 bp, Homo sapien
ggcaaagttagcaagaacaccagat

SEQ ID NO: 57900 - DNA, 25 bp, Homo sapien
cacaattaagcaacagtgaagggca

SEQ ID NO: 57901 - DNA, 25 bp, Homo sapien
caaataatggactccgcatggatgt

SEQ ID NO: 57902 - DNA, 25 bp, Homo sapien
gcggggcttagtcactagcaaactt

SEQ ID NO: 57903 - DNA, 25 bp, Homo sapien
tcactcacatatgcggggcttagtc

SEQ ID NO: 57904 - DNA, 25 bp, Homo sapien
ggcagcgtgcctgaagtactttcac

SEQ ID NO: 57905 - DNA, 25 bp, Homo sapien
tccctgcatagctgttaccaggagg

SEQ ID NO: 57906 - DNA, 25 bp, Homo sapien
agtgtgggtcctccctccctgcata

SEQ ID NO: 57907 - DNA, 25 bp, Homo sapien
atgtcttagtaaaagagcagttatc

SEQ ID NO: 57908 - DNA, 25 bp, Homo sapien
ttctataggtagagactatgtctta

SEQ ID NO: 57909 - DNA, 25 bp, Homo sapien
aaaattgctgtgtaaaataagtgtt

SEQ ID NO: 57910 - DNA, 25 bp, Homo sapien
tccctgcatagctgttaccaggagg

SEQ ID NO: 57911 - DNA, 25 bp, Homo sapien
cacaattaagcaacagtgaagggca

SEQ ID NO: 57912 - DNA, 25 bp, Homo sapien
ggcagcgtgcctgaagtactttcac

SEQ ID NO: 57913 - DNA, 25 bp, Homo sapien
tcactcacatatgcggggcttagtc

SEQ ID NO: 57914 - DNA, 25 bp, Homo sapien
ttctataggtagagactatgtctta

SEQ ID NO: 57915 - DNA, 25 bp, Homo sapien
agtgtgggtcctccctccctgcata

SEQ ID NO: 57916 - DNA, 25 bp, Homo sapien
gcggggcttagtcactagcaaactt

SEQ ID NO: 57917 - DNA, 25 bp, Homo sapien
atgtcttagtaaaagagcagttatc

SEQ ID NO: 57918 - DNA, 25 bp, Homo sapien
caaataatggactccgcatggatgt

SEQ ID NO: 57919 - DNA, 25 bp, Homo sapien
aaaattgctgtgtaaaataagtgtt

SEQ ID NO: 57920 - DNA, 25 bp, Homo sapien
ggcaaagttagcaagaacaccagat

SEQ ID NO: 57921 - DNA, 25 bp, Homo sapien
ggcaaagttagcaagaacaccagat

SEQ ID NO: 57922 - DNA, 25 bp, Homo sapien
cacaattaagcaacagtgaagggca

SEQ ID NO: 57923 - DNA, 25 bp, Homo sapien
caaataatggactccgcatggatgt

SEQ ID NO: 57924 - DNA, 25 bp, Homo sapien
gcggggcttagtcactagcaaactt

SEQ ID NO: 57925 - DNA, 25 bp, Homo sapien
tcactcacatatgcggggcttagtc

SEQ ID NO: 57926 - DNA, 25 bp, Homo sapien
ggcagcgtgcctgaagtactttcac

SEQ ID NO: 57927 - DNA, 25 bp, Homo sapien
tccctgcatagctgttaccaggagg

SEQ ID NO: 57928 - DNA, 25 bp, Homo sapien
agtgtgggtcctccctccctgcata

SEQ ID NO: 57929 - DNA, 25 bp, Homo sapien
atgtcttagtaaaagagcagttatc

SEQ ID NO: 57930 - DNA, 25 bp, Homo sapien
ttctataggtagagactatgtctta

SEQ ID NO: 57931 - DNA, 25 bp, Homo sapien
aaaattgctgtgtaaaataagtgtt

SEQ ID NO: 57932 - DNA, 25 bp, Homo sapien
cacaattaagcaacagtgaagggca

SEQ ID NO: 57933 - DNA, 25 bp, Homo sapien
gcggggcttagtcactagcaaactt

SEQ ID NO: 57934 - DNA, 25 bp, Homo sapien
agtgtgggtcctccctccctgcata

SEQ ID NO: 57935 - DNA, 25 bp, Homo sapien
ggcagcgtgcctgaagtactttcac

SEQ ID NO: 57936 - DNA, 25 bp, Homo sapien
atgtcttagtaaaagagcagttatc

SEQ ID NO: 57937 - DNA, 25 bp, Homo sapien
caaataatggactccgcatggatgt

SEQ ID NO: 57938 - DNA, 25 bp, Homo sapien
tccctgcatagctgttaccaggagg

SEQ ID NO: 57939 - DNA, 25 bp, Homo sapien
ttctataggtagagactatgtctta

SEQ ID NO: 57940 - DNA, 25 bp, Homo sapien
aaaattgctgtgtaaaataagtgtt

SEQ ID NO: 57941 - DNA, 25 bp, Homo sapien
tcactcacatatgcggggcttagtc

SEQ ID NO: 57942 - DNA, 25 bp, Homo sapien
ggcaaagttagcaagaacaccagat

SEQ ID NO: 57943 - DNA, 25 bp, Homo sapien
cacaattaagcaacagtgaagggca

SEQ ID NO: 57944 - DNA, 25 bp, Homo sapien
tcactcacatatgcggggcttagtc

SEQ ID NO: 57945 - DNA, 25 bp, Homo sapien
atgtcttagtaaaagagcagttatc

SEQ ID NO: 57946 - DNA, 25 bp, Homo sapien
ggcaaagttagcaagaacaccagat

SEQ ID NO: 57947 - DNA, 25 bp, Homo sapien
aaaattgctgtgtaaaataagtgtt

SEQ ID NO: 57948 - DNA, 25 bp, Homo sapien
tccctgcatagctgttaccaggagg

SEQ ID NO: 57949 - DNA, 25 bp, Homo sapien
ggcagcgtgcctgaagtactttcac

SEQ ID NO: 57950 - DNA, 25 bp, Homo sapien
gcggggcttagtcactagcaaactt

SEQ ID NO: 57951 - DNA, 25 bp, Homo sapien
agtgtgggtcctccctccctgcata

SEQ ID NO: 57952 - DNA, 25 bp, Homo sapien
caaataatggactccgcatggatgt

SEQ ID NO: 57953 - DNA, 25 bp, Homo sapien
ttctataggtagagactatgtctta

SEQ ID NO: 57954 - DNA, 25 bp, Homo sapien
ggcaaagttagcaagaacaccagat

SEQ ID NO: 57955 - DNA, 25 bp, Homo sapien
cacaattaagcaacagtgaagggca

SEQ ID NO: 57956 - DNA, 25 bp, Homo sapien
caaataatggactccgcatggatgt

SEQ ID NO: 57957 - DNA, 25 bp, Homo sapien
gcggggcttagtcactagcaaactt

SEQ ID NO: 57958 - DNA, 25 bp, Homo sapien
tcactcacatatgcggggcttagtc

SEQ ID NO: 57959 - DNA, 25 bp, Homo sapien
ggcagcgtgcctgaagtactttcac

SEQ ID NO: 57960 - DNA, 25 bp, Homo sapien
tccctgcatagctgttaccaggagg

SEQ ID NO: 57961 - DNA, 25 bp, Homo sapien
agtgtgggtcctccctccctgcata

SEQ ID NO: 57962 - DNA, 25 bp, Homo sapien
atgtcttagtaaaagagcagttatc

SEQ ID NO: 57963 - DNA, 25 bp, Homo sapien
ttctataggtagagactatgtctta

SEQ ID NO: 57964 - DNA, 25 bp, Homo sapien
aaaattgctgtgtaaaataagtgtt

SEQ ID NO: 57965 - DNA, 25 bp, Homo sapien
ggcaaagttagcaagaacaccagat

SEQ ID NO: 57966 - DNA, 25 bp, Homo sapien
aaaattgctgtgtaaaataagtgtt

SEQ ID NO: 57967 - DNA, 25 bp, Homo sapien
ttctataggtagagactatgtctta

SEQ ID NO: 57968 - DNA, 25 bp, Homo sapien
tccctgcatagctgttaccaggagg

SEQ ID NO: 57969 - DNA, 25 bp, Homo sapien
caaataatggactccgcatggatgt

SEQ ID NO: 57970 - DNA, 25 bp, Homo sapien
gcggggcttagtcactagcaaactt

SEQ ID NO: 57971 - DNA, 25 bp, Homo sapien
atgtcttagtaaaagagcagttatc

SEQ ID NO: 57972 - DNA, 25 bp, Homo sapien
ggcagcgtgcctgaagtactttcac

SEQ ID NO: 57973 - DNA, 25 bp, Homo sapien
tcactcacatatgcggggcttagtc

SEQ ID NO: 57974 - DNA, 25 bp, Homo sapien
cacaattaagcaacagtgaagggca

SEQ ID NO: 57975 - DNA, 25 bp, Homo sapien
agtgtgggtcctccctccctgcata

SEQ ID NO: 57976 - DNA, 25 bp, Homo sapien
ggcaaagttagcaagaacaccagat

SEQ ID NO: 57977 - DNA, 25 bp, Homo sapien
cacaattaagcaacagtgaagggca

SEQ ID NO: 57978 - DNA, 25 bp, Homo sapien
caaataatggactccgcatggatgt

SEQ ID NO: 57979 - DNA, 25 bp, Homo sapien
gcggggcttagtcactagcaaactt

SEQ ID NO: 57980 - DNA, 25 bp, Homo sapien
tcactcacatatgcggggcttagtc

SEQ ID NO: 57981 - DNA, 25 bp, Homo sapien
ggcagcgtgcctgaagtactttcac

SEQ ID NO: 57982 - DNA, 25 bp, Homo sapien
tccctgcatagctgttaccaggagg

SEQ ID NO: 57983 - DNA, 25 bp, Homo sapien
agtgtgggtcctccctccctgcata

SEQ ID NO: 57984 - DNA, 25 bp, Homo sapien
atgtcttagtaaaagagcagttatc

SEQ ID NO: 57985 - DNA, 25 bp, Homo sapien
ttctataggtagagactatgtctta

SEQ ID NO: 57986 - DNA, 25 bp, Homo sapien
aaaattgctgtgtaaaataagtgtt

SEQ ID NO: 57987 - DNA, 25 bp, Homo sapien
tccctgcatagctgttaccaggagg

SEQ ID NO: 57988 - DNA, 25 bp, Homo sapien
atgtcttagtaaaagagcagttatc

SEQ ID NO: 57989 - DNA, 25 bp, Homo sapien
ttctataggtagagactatgtctta

SEQ ID NO: 57990 - DNA, 25 bp, Homo sapien
caaataatggactccgcatggatgt

SEQ ID NO: 57991 - DNA, 25 bp, Homo sapien
ggcaaagttagcaagaacaccagat

SEQ ID NO: 57992 - DNA, 25 bp, Homo sapien
agtgtgggtcctccctccctgcata

SEQ ID NO: 57993 - DNA, 25 bp, Homo sapien
ggcagcgtgcctgaagtactttcac

SEQ ID NO: 57994 - DNA, 25 bp, Homo sapien
aaaattgctgtgtaaaataagtgtt

SEQ ID NO: 57995 - DNA, 25 bp, Homo sapien
cacaattaagcaacagtgaagggca

SEQ ID NO: 57996 - DNA, 25 bp, Homo sapien
gcggggcttagtcactagcaaactt

SEQ ID NO: 57997 - DNA, 25 bp, Homo sapien
tcactcacatatgcggggcttagtc

SEQ ID NO: 57998 - DNA, 25 bp, Homo sapien
ggcaaagttagcaagaacaccagat

SEQ ID NO: 57999 - DNA, 25 bp, Homo sapien
cacaattaagcaacagtgaagggca

SEQ ID NO: 58000 - DNA, 25 bp, Homo sapien
caaataatggactccgcatggatgt

SEQ ID NO: 58001 - DNA, 25 bp, Homo sapien
gcggggcttagtcactagcaaactt

SEQ ID NO: 58002 - DNA, 25 bp, Homo sapien
tcactcacatatgcggggcttagtc

SEQ ID NO: 58003 - DNA, 25 bp, Homo sapien
ggcagcgtgcctgaagtactttcac

SEQ ID NO: 58004 - DNA, 25 bp, Homo sapien
tccctgcatagctgttaccaggagg

SEQ ID NO: 58005 - DNA, 25 bp, Homo sapien
agtgtgggtcctccctccctgcata

SEQ ID NO: 58006 - DNA, 25 bp, Homo sapien
atgtcttagtaaaagagcagttatc

SEQ ID NO: 58007 - DNA, 25 bp, Homo sapien
ttctataggtagagactatgtctta

SEQ ID NO: 58008 - DNA, 25 bp, Homo sapien
aaaattgctgtgtaaaataagtgtt

SEQ ID NO: 58009 - DNA, 25 bp, Homo sapien
ttcagcgtcacgatcagactgttac

SEQ ID NO: 58010 - DNA, 25 bp, Homo sapien
tagcaatcaacagcatggggtgcaa

SEQ ID NO: 58011 - DNA, 25 bp, Homo sapien
aagatggcttaagagtagactaact

SEQ ID NO: 58012 - DNA, 25 bp, Homo sapien
ttgcataggatgtgccaacaatcac

SEQ ID NO: 58013 - DNA, 25 bp, Homo sapien
ccacagaacagaaactaaaataacc

SEQ ID NO: 58014 - DNA, 25 bp, Homo sapien
tgttggggaaatttaccaagatggc

SEQ ID NO: 58015 - DNA, 25 bp, Homo sapien
ccaaggtttccgaagacaatggctt

SEQ ID NO: 58016 - DNA, 25 bp, Homo sapien
tagtcacaaatacagtcctcgagtt

SEQ ID NO: 58017 - DNA, 25 bp, Homo sapien
ttcaggtcacaacagtaactatcag

SEQ ID NO: 58018 - DNA, 25 bp, Homo sapien
acatgataatggatacacaagcttc

SEQ ID NO: 58019 - DNA, 25 bp, Homo sapien
acctggcatcaccctgaaggaattc

SEQ ID NO: 58020 - DNA, 25 bp, Homo sapien
tagtcacaaatacagtcctcgagtt

SEQ ID NO: 58021 - DNA, 25 bp, Homo sapien
ccacagaacagaaactaaaataacc

SEQ ID NO: 58022 - DNA, 25 bp, Homo sapien
tagcaatcaacagcatggggtgcaa

SEQ ID NO: 58023 - DNA, 25 bp, Homo sapien
ttcagcgtcacgatcagactgttac

SEQ ID NO: 58024 - DNA, 25 bp, Homo sapien
aagatggcttaagagtagactaact

SEQ ID NO: 58025 - DNA, 25 bp, Homo sapien
tgttggggaaatttaccaagatggc

SEQ ID NO: 58026 - DNA, 25 bp, Homo sapien
acctggcatcaccctgaaggaattc

SEQ ID NO: 58027 - DNA, 25 bp, Homo sapien
ccaaggtttccgaagacaatggctt

SEQ ID NO: 58028 - DNA, 25 bp, Homo sapien
ttcaggtcacaacagtaactatcag

SEQ ID NO: 58029 - DNA, 25 bp, Homo sapien
ttgcataggatgtgccaacaatcac

SEQ ID NO: 58030 - DNA, 25 bp, Homo sapien
acatgataatggatacacaagcttc

SEQ ID NO: 58031 - DNA, 25 bp, Homo sapien
ccaaggtttccgaagacaatggctt

SEQ ID NO: 58032 - DNA, 25 bp, Homo sapien
acctggcatcaccctgaaggaattc

SEQ ID NO: 58033 - DNA, 25 bp, Homo sapien
ttgcataggatgtgccaacaatcac

SEQ ID NO: 58034 - DNA, 25 bp, Homo sapien
tagcaatcaacagcatggggtgcaa

SEQ ID NO: 58035 - DNA, 25 bp, Homo sapien
tagtcacaaatacagtcctcgagtt

SEQ ID NO: 58036 - DNA, 25 bp, Homo sapien
ccacagaacagaaactaaaataacc

SEQ ID NO: 58037 - DNA, 25 bp, Homo sapien
acatgataatggatacacaagcttc

SEQ ID NO: 58038 - DNA, 25 bp, Homo sapien
tgttggggaaatttaccaagatggc

SEQ ID NO: 58039 - DNA, 25 bp, Homo sapien
ttcagcgtcacgatcagactgttac

SEQ ID NO: 58040 - DNA, 25 bp, Homo sapien
ttcaggtcacaacagtaactatcag

SEQ ID NO: 58041 - DNA, 25 bp, Homo sapien
aagatggcttaagagtagactaact

SEQ ID NO: 58042 - DNA, 25 bp, Homo sapien
tagtcacaaatacagtcctcgagtt

SEQ ID NO: 58043 - DNA, 25 bp, Homo sapien
ccacagaacagaaactaaaataacc

SEQ ID NO: 58044 - DNA, 25 bp, Homo sapien
tagcaatcaacagcatggggtgcaa

SEQ ID NO: 58045 - DNA, 25 bp, Homo sapien
ttcagcgtcacgatcagactgttac

SEQ ID NO: 58046 - DNA, 25 bp, Homo sapien
aagatggcttaagagtagactaact

SEQ ID NO: 58047 - DNA, 25 bp, Homo sapien
tgttggggaaatttaccaagatggc

SEQ ID NO: 58048 - DNA, 25 bp, Homo sapien
acctggcatcaccctgaaggaattc

SEQ ID NO: 58049 - DNA, 25 bp, Homo sapien
ccaaggtttccgaagacaatggctt

SEQ ID NO: 58050 - DNA, 25 bp, Homo sapien
ttcaggtcacaacagtaactatcag

SEQ ID NO: 58051 - DNA, 25 bp, Homo sapien
ttgcataggatgtgccaacaatcac

SEQ ID NO: 58052 - DNA, 25 bp, Homo sapien
acatgataatggatacacaagcttc

SEQ ID NO: 58053 - DNA, 25 bp, Homo sapien
tagcaatcaacagcatggggtgcaa

SEQ ID NO: 58054 - DNA, 25 bp, Homo sapien
tgttggggaaatttaccaagatggc

SEQ ID NO: 58055 - DNA, 25 bp, Homo sapien
ttcaggtcacaacagtaactatcag

SEQ ID NO: 58056 - DNA, 25 bp, Homo sapien
ttcagcgtcacgatcagactgttac

SEQ ID NO: 58057 - DNA, 25 bp, Homo sapien
aagatggcttaagagtagactaact

SEQ ID NO: 58058 - DNA, 25 bp, Homo sapien
ttgcataggatgtgccaacaatcac

SEQ ID NO: 58059 - DNA, 25 bp, Homo sapien
acctggcatcaccctgaaggaattc

SEQ ID NO: 58060 - DNA, 25 bp, Homo sapien
acatgataatggatacacaagcttc

SEQ ID NO: 58061 - DNA, 25 bp, Homo sapien
ccacagaacagaaactaaaataacc

SEQ ID NO: 58062 - DNA, 25 bp, Homo sapien
ccaaggtttccgaagacaatggctt

SEQ ID NO: 58063 - DNA, 25 bp, Homo sapien
tagtcacaaatacagtcctcgagtt

SEQ ID NO: 58064 - DNA, 25 bp, Homo sapien
tagtcacaaatacagtcctcgagtt

SEQ ID NO: 58065 - DNA, 25 bp, Homo sapien
ccacagaacagaaactaaaataacc

SEQ ID NO: 58066 - DNA, 25 bp, Homo sapien
tagcaatcaacagcatggggtgcaa

SEQ ID NO: 58067 - DNA, 25 bp, Homo sapien
ttcagcgtcacgatcagactgttac

SEQ ID NO: 58068 - DNA, 25 bp, Homo sapien
aagatggcttaagagtagactaact

SEQ ID NO: 58069 - DNA, 25 bp, Homo sapien
tgttggggaaatttaccaagatggc

SEQ ID NO: 58070 - DNA, 25 bp, Homo sapien
acctggcatcaccctgaaggaattc

SEQ ID NO: 58071 - DNA, 25 bp, Homo sapien
ccaaggtttccgaagacaatggctt

SEQ ID NO: 58072 - DNA, 25 bp, Homo sapien
ttcaggtcacaacagtaactatcag

SEQ ID NO: 58073 - DNA, 25 bp, Homo sapien
ttgcataggatgtgccaacaatcac

SEQ ID NO: 58074 - DNA, 25 bp, Homo sapien
acatgataatggatacacaagcttc

SEQ ID NO: 58075 - DNA, 25 bp, Homo sapien
tagtcacaaatacagtcctcgagtt

SEQ ID NO: 58076 - DNA, 25 bp, Homo sapien
ccacagaacagaaactaaaataacc

SEQ ID NO: 58077 - DNA, 25 bp, Homo sapien
tagcaatcaacagcatggggtgcaa

SEQ ID NO: 58078 - DNA, 25 bp, Homo sapien
ttcagcgtcacgatcagactgttac

SEQ ID NO: 58079 - DNA, 25 bp, Homo sapien
aagatggcttaagagtagactaact

SEQ ID NO: 58080 - DNA, 25 bp, Homo sapien
tgttggggaaatttaccaagatggc

SEQ ID NO: 58081 - DNA, 25 bp, Homo sapien
acctggcatcaccctgaaggaattc

SEQ ID NO: 58082 - DNA, 25 bp, Homo sapien
ccaaggtttccgaagacaatggctt

SEQ ID NO: 58083 - DNA, 25 bp, Homo sapien
ttcaggtcacaacagtaactatcag

SEQ ID NO: 58084 - DNA, 25 bp, Homo sapien
ttgcataggatgtgccaacaatcac

SEQ ID NO: 58085 - DNA, 25 bp, Homo sapien
acatgataatggatacacaagcttc

SEQ ID NO: 58086 - DNA, 25 bp, Homo sapien
aagatggcttaagagtagactaact

SEQ ID NO: 58087 - DNA, 25 bp, Homo sapien
tgttggggaaatttaccaagatggc

SEQ ID NO: 58088 - DNA, 25 bp, Homo sapien
ttgcataggatgtgccaacaatcac

SEQ ID NO: 58089 - DNA, 25 bp, Homo sapien
acctggcatcaccctgaaggaattc

SEQ ID NO: 58090 - DNA, 25 bp, Homo sapien
ccaaggtttccgaagacaatggctt

SEQ ID NO: 58091 - DNA, 25 bp, Homo sapien
tagtcacaaatacagtcctcgagtt

SEQ ID NO: 58092 - DNA, 25 bp, Homo sapien
ttcagcgtcacgatcagactgttac

SEQ ID NO: 58093 - DNA, 25 bp, Homo sapien
tagcaatcaacagcatggggtgcaa

SEQ ID NO: 58094 - DNA, 25 bp, Homo sapien
acatgataatggatacacaagcttc

SEQ ID NO: 58095 - DNA, 25 bp, Homo sapien
ccacagaacagaaactaaaataacc

SEQ ID NO: 58096 - DNA, 25 bp, Homo sapien
ttcaggtcacaacagtaactatcag

SEQ ID NO: 58097 - DNA, 25 bp, Homo sapien
tagtcacaaatacagtcctcgagtt

SEQ ID NO: 58098 - DNA, 25 bp, Homo sapien
ccacagaacagaaactaaaataacc

SEQ ID NO: 58099 - DNA, 25 bp, Homo sapien
tagcaatcaacagcatggggtgcaa

SEQ ID NO: 58100 - DNA, 25 bp, Homo sapien
ttcagcgtcacgatcagactgttac

SEQ ID NO: 58101 - DNA, 25 bp, Homo sapien
aagatggcttaagagtagactaact

SEQ ID NO: 58102 - DNA, 25 bp, Homo sapien
tgttggggaaatttaccaagatggc

SEQ ID NO: 58103 - DNA, 25 bp, Homo sapien
acctggcatcaccctgaaggaattc

SEQ ID NO: 58104 - DNA, 25 bp, Homo sapien
ccaaggtttccgaagacaatggctt

SEQ ID NO: 58105 - DNA, 25 bp, Homo sapien
ttcaggtcacaacagtaactatcag

SEQ ID NO: 58106 - DNA, 25 bp, Homo sapien
ttgcataggatgtgccaacaatcac

SEQ ID NO: 58107 - DNA, 25 bp, Homo sapien
acatgataatggatacacaagcttc

SEQ ID NO: 58108 - DNA, 25 bp, Homo sapien
ttcagcgtcacgatcagactgttac

SEQ ID NO: 58109 - DNA, 25 bp, Homo sapien
tgttggggaaatttaccaagatggc

SEQ ID NO: 58110 - DNA, 25 bp, Homo sapien
tagcaatcaacagcatggggtgcaa

SEQ ID NO: 58111 - DNA, 25 bp, Homo sapien
ccaaggtttccgaagacaatggctt

SEQ ID NO: 58112 - DNA, 25 bp, Homo sapien
tagtcacaaatacagtcctcgagtt

SEQ ID NO: 58113 - DNA, 25 bp, Homo sapien
aagatggcttaagagtagactaact

SEQ ID NO: 58114 - DNA, 25 bp, Homo sapien
ccacagaacagaaactaaaataacc

SEQ ID NO: 58115 - DNA, 25 bp, Homo sapien
ttgcataggatgtgccaacaatcac

SEQ ID NO: 58116 - DNA, 25 bp, Homo sapien
acatgataatggatacacaagcttc

SEQ ID NO: 58117 - DNA, 25 bp, Homo sapien
ttcaggtcacaacagtaactatcag

SEQ ID NO: 58118 - DNA, 25 bp, Homo sapien
acctggcatcaccctgaaggaattc

SEQ ID NO: 58119 - DNA, 25 bp, Homo sapien
tagtcacaaatacagtcctcgagtt

SEQ ID NO: 58120 - DNA, 25 bp, Homo sapien
ccacagaacagaaactaaaataacc

SEQ ID NO: 58121 - DNA, 25 bp, Homo sapien
tagcaatcaacagcatggggtgcaa

SEQ ID NO: 58122 - DNA, 25 bp, Homo sapien
ttcagcgtcacgatcagactgttac

SEQ ID NO: 58123 - DNA, 25 bp, Homo sapien
aagatggcttaagagtagactaact

SEQ ID NO: 58124 - DNA, 25 bp, Homo sapien
tgttggggaaatttaccaagatggc

SEQ ID NO: 58125 - DNA, 25 bp, Homo sapien
acctggcatcaccctgaaggaattc

SEQ ID NO: 58126 - DNA, 25 bp, Homo sapien
ccaaggtttccgaagacaatggctt

SEQ ID NO: 58127 - DNA, 25 bp, Homo sapien
ttcaggtcacaacagtaactatcag

SEQ ID NO: 58128 - DNA, 25 bp, Homo sapien
ttgcataggatgtgccaacaatcac

SEQ ID NO: 58129 - DNA, 25 bp, Homo sapien
acatgataatggatacacaagcttc

SEQ ID NO: 58130 - DNA, 25 bp, Homo sapien
ttcaggtcacaacagtaactatcag

SEQ ID NO: 58131 - DNA, 25 bp, Homo sapien
ttcagcgtcacgatcagactgttac

SEQ ID NO: 58132 - DNA, 25 bp, Homo sapien
ttgcataggatgtgccaacaatcac

SEQ ID NO: 58133 - DNA, 25 bp, Homo sapien
acatgataatggatacacaagcttc

SEQ ID NO: 58134 - DNA, 25 bp, Homo sapien
tgttggggaaatttaccaagatggc

SEQ ID NO: 58135 - DNA, 25 bp, Homo sapien
ccaaggtttccgaagacaatggctt

SEQ ID NO: 58136 - DNA, 25 bp, Homo sapien
aagatggcttaagagtagactaact

SEQ ID NO: 58137 - DNA, 25 bp, Homo sapien
acctggcatcaccctgaaggaattc

SEQ ID NO: 58138 - DNA, 25 bp, Homo sapien
tagcaatcaacagcatggggtgcaa

SEQ ID NO: 58139 - DNA, 25 bp, Homo sapien
ccacagaacagaaactaaaataacc

SEQ ID NO: 58140 - DNA, 25 bp, Homo sapien
tagtcacaaatacagtcctcgagtt

SEQ ID NO: 58141 - DNA, 25 bp, Homo sapien
tagtcacaaatacagtcctcgagtt

SEQ ID NO: 58142 - DNA, 25 bp, Homo sapien
ccacagaacagaaactaaaataacc

SEQ ID NO: 58143 - DNA, 25 bp, Homo sapien
tagcaatcaacagcatggggtgcaa

SEQ ID NO: 58144 - DNA, 25 bp, Homo sapien
ttcagcgtcacgatcagactgttac

SEQ ID NO: 58145 - DNA, 25 bp, Homo sapien
aagatggcttaagagtagactaact

SEQ ID NO: 58146 - DNA, 25 bp, Homo sapien
tgttggggaaatttaccaagatggc

SEQ ID NO: 58147 - DNA, 25 bp, Homo sapien
acctggcatcaccctgaaggaattc

SEQ ID NO: 58148 - DNA, 25 bp, Homo sapien
ccaaggtttccgaagacaatggctt

SEQ ID NO: 58149 - DNA, 25 bp, Homo sapien
ttcaggtcacaacagtaactatcag

SEQ ID NO: 58150 - DNA, 25 bp, Homo sapien
ttgcataggatgtgccaacaatcac

SEQ ID NO: 58151 - DNA, 25 bp, Homo sapien
acatgataatggatacacaagcttc

SEQ ID NO: 58152 - DNA, 25 bp, Homo sapien
ttcaggtcacaacagtaactatcag

SEQ ID NO: 58153 - DNA, 25 bp, Homo sapien
ccacagaacagaaactaaaataacc

SEQ ID NO: 58154 - DNA, 25 bp, Homo sapien
tgttggggaaatttaccaagatggc

SEQ ID NO: 58155 - DNA, 25 bp, Homo sapien
acatgataatggatacacaagcttc

SEQ ID NO: 58156 - DNA, 25 bp, Homo sapien
ttcagcgtcacgatcagactgttac

SEQ ID NO: 58157 - DNA, 25 bp, Homo sapien
ccaaggtttccgaagacaatggctt

SEQ ID NO: 58158 - DNA, 25 bp, Homo sapien
ttgcataggatgtgccaacaatcac

SEQ ID NO: 58159 - DNA, 25 bp, Homo sapien
tagcaatcaacagcatggggtgcaa

SEQ ID NO: 58160 - DNA, 25 bp, Homo sapien
acctggcatcaccctgaaggaattc

SEQ ID NO: 58161 - DNA, 25 bp, Homo sapien
tagtcacaaatacagtcctcgagtt

SEQ ID NO: 58162 - DNA, 25 bp, Homo sapien
aagatggcttaagagtagactaact

SEQ ID NO: 58163 - DNA, 25 bp, Homo sapien
tagtcacaaatacagtcctcgagtt

SEQ ID NO: 58164 - DNA, 25 bp, Homo sapien
ccacagaacagaaactaaaataacc

SEQ ID NO: 58165 - DNA, 25 bp, Homo sapien
tagcaatcaacagcatggggtgcaa

SEQ ID NO: 58166 - DNA, 25 bp, Homo sapien
ttcagcgtcacgatcagactgttac

SEQ ID NO: 58167 - DNA, 25 bp, Homo sapien
aagatggcttaagagtagactaact

SEQ ID NO: 58168 - DNA, 25 bp, Homo sapien
tgttggggaaatttaccaagatggc

SEQ ID NO: 58169 - DNA, 25 bp, Homo sapien
acctggcatcaccctgaaggaattc

SEQ ID NO: 58170 - DNA, 25 bp, Homo sapien
ccaaggtttccgaagacaatggctt

SEQ ID NO: 58171 - DNA, 25 bp, Homo sapien
ttcaggtcacaacagtaactatcag

SEQ ID NO: 58172 - DNA, 25 bp, Homo sapien
ttgcataggatgtgccaacaatcac

SEQ ID NO: 58173 - DNA, 25 bp, Homo sapien
acatgataatggatacacaagcttc

SEQ ID NO: 58174 - DNA, 25 bp, Homo sapien
tgttggggaaatttaccaagatggc

SEQ ID NO: 58175 - DNA, 25 bp, Homo sapien
ttcaggtcacaacagtaactatcag

SEQ ID NO: 58176 - DNA, 25 bp, Homo sapien
tagcaatcaacagcatggggtgcaa

SEQ ID NO: 58177 - DNA, 25 bp, Homo sapien
ccaaggtttccgaagacaatggctt

SEQ ID NO: 58178 - DNA, 25 bp, Homo sapien
ttgcataggatgtgccaacaatcac

SEQ ID NO: 58179 - DNA, 25 bp, Homo sapien
aagatggcttaagagtagactaact

SEQ ID NO: 58180 - DNA, 25 bp, Homo sapien
acatgataatggatacacaagcttc

SEQ ID NO: 58181 - DNA, 25 bp, Homo sapien
ccacagaacagaaactaaaataacc

SEQ ID NO: 58182 - DNA, 25 bp, Homo sapien
acctggcatcaccctgaaggaattc

SEQ ID NO: 58183 - DNA, 25 bp, Homo sapien
ttcagcgtcacgatcagactgttac

SEQ ID NO: 58184 - DNA, 25 bp, Homo sapien
tagtcacaaatacagtcctcgagtt

SEQ ID NO: 58185 - DNA, 25 bp, Homo sapien
aagatggcttaagagtagactaact

SEQ ID NO: 58186 - DNA, 25 bp, Homo sapien
acctggcatcaccctgaaggaattc

SEQ ID NO: 58187 - DNA, 25 bp, Homo sapien
tagtcacaaatacagtcctcgagtt

SEQ ID NO: 58188 - DNA, 25 bp, Homo sapien
tgttggggaaatttaccaagatggc

SEQ ID NO: 58189 - DNA, 25 bp, Homo sapien
ttcaggtcacaacagtaactatcag

SEQ ID NO: 58190 - DNA, 25 bp, Homo sapien
acatgataatggatacacaagcttc

SEQ ID NO: 58191 - DNA, 25 bp, Homo sapien
ttgcataggatgtgccaacaatcac

SEQ ID NO: 58192 - DNA, 25 bp, Homo sapien
ttcagcgtcacgatcagactgttac

SEQ ID NO: 58193 - DNA, 25 bp, Homo sapien
ccacagaacagaaactaaaataacc

SEQ ID NO: 58194 - DNA, 25 bp, Homo sapien
tagcaatcaacagcatggggtgcaa

SEQ ID NO: 58195 - DNA, 25 bp, Homo sapien
ccaaggtttccgaagacaatggctt

SEQ ID NO: 58196 - DNA, 25 bp, Homo sapien
tagtcacaaatacagtcctcgagtt

SEQ ID NO: 58197 - DNA, 25 bp, Homo sapien
ccacagaacagaaactaaaataacc

SEQ ID NO: 58198 - DNA, 25 bp, Homo sapien
tagcaatcaacagcatggggtgcaa

SEQ ID NO: 58199 - DNA, 25 bp, Homo sapien
ttcagcgtcacgatcagactgttac

SEQ ID NO: 58200 - DNA, 25 bp, Homo sapien
aagatggcttaagagtagactaact

SEQ ID NO: 58201 - DNA, 25 bp, Homo sapien
tgttggggaaatttaccaagatggc

SEQ ID NO: 58202 - DNA, 25 bp, Homo sapien
acctggcatcaccctgaaggaattc

SEQ ID NO: 58203 - DNA, 25 bp, Homo sapien
ccaaggtttccgaagacaatggctt

SEQ ID NO: 58204 - DNA, 25 bp, Homo sapien
ttcaggtcacaacagtaactatcag

SEQ ID NO: 58205 - DNA, 25 bp, Homo sapien
ttgcataggatgtgccaacaatcac

SEQ ID NO: 58206 - DNA, 25 bp, Homo sapien
acatgataatggatacacaagcttc

SEQ ID NO: 58207 - DNA, 25 bp, Homo sapien
ttcaggtcacaacagtaactatcag

SEQ ID NO: 58208 - DNA, 25 bp, Homo sapien
tagtcacaaatacagtcctcgagtt

SEQ ID NO: 58209 - DNA, 25 bp, Homo sapien
acctggcatcaccctgaaggaattc

SEQ ID NO: 58210 - DNA, 25 bp, Homo sapien
aagatggcttaagagtagactaact

SEQ ID NO: 58211 - DNA, 25 bp, Homo sapien
acatgataatggatacacaagcttc

SEQ ID NO: 58212 - DNA, 25 bp, Homo sapien
ccaaggtttccgaagacaatggctt

SEQ ID NO: 58213 - DNA, 25 bp, Homo sapien
tgttggggaaatttaccaagatggc

SEQ ID NO: 58214 - DNA, 25 bp, Homo sapien
ttgcataggatgtgccaacaatcac

SEQ ID NO: 58215 - DNA, 25 bp, Homo sapien
ttcagcgtcacgatcagactgttac

SEQ ID NO: 58216 - DNA, 25 bp, Homo sapien
tagcaatcaacagcatggggtgcaa

SEQ ID NO: 58217 - DNA, 25 bp, Homo sapien
ccacagaacagaaactaaaataacc

SEQ ID NO: 58218 - DNA, 25 bp, Homo sapien
tagtcacaaatacagtcctcgagtt

SEQ ID NO: 58219 - DNA, 25 bp, Homo sapien
ccacagaacagaaactaaaataacc

SEQ ID NO: 58220 - DNA, 25 bp, Homo sapien
tagcaatcaacagcatggggtgcaa

SEQ ID NO: 58221 - DNA, 25 bp, Homo sapien
ttcagcgtcacgatcagactgttac

SEQ ID NO: 58222 - DNA, 25 bp, Homo sapien
aagatggcttaagagtagactaact

SEQ ID NO: 58223 - DNA, 25 bp, Homo sapien
tgttggggaaatttaccaagatggc

SEQ ID NO: 58224 - DNA, 25 bp, Homo sapien
acctggcatcaccctgaaggaattc

SEQ ID NO: 58225 - DNA, 25 bp, Homo sapien
ccaaggtttccgaagacaatggctt

SEQ ID NO: 58226 - DNA, 25 bp, Homo sapien
ttcaggtcacaacagtaactatcag

SEQ ID NO: 58227 - DNA, 25 bp, Homo sapien
ttgcataggatgtgccaacaatcac

SEQ ID NO: 58228 - DNA, 25 bp, Homo sapien
acatgataatggatacacaagcttc

SEQ ID NO: 58229 - DNA, 25 bp, Homo sapien
acctggcatcaccctgaaggaattc

SEQ ID NO: 58230 - DNA, 25 bp, Homo sapien
ttcaggtcacaacagtaactatcag

SEQ ID NO: 58231 - DNA, 25 bp, Homo sapien
tagcaatcaacagcatggggtgcaa

SEQ ID NO: 58232 - DNA, 25 bp, Homo sapien
ccacagaacagaaactaaaataacc

SEQ ID NO: 58233 - DNA, 25 bp, Homo sapien
tgttggggaaatttaccaagatggc

SEQ ID NO: 58234 - DNA, 25 bp, Homo sapien
tagtcacaaatacagtcctcgagtt

SEQ ID NO: 58235 - DNA, 25 bp, Homo sapien
ccaaggtttccgaagacaatggctt

SEQ ID NO: 58236 - DNA, 25 bp, Homo sapien
aagatggcttaagagtagactaact

SEQ ID NO: 58237 - DNA, 25 bp, Homo sapien
ttgcataggatgtgccaacaatcac

SEQ ID NO: 58238 - DNA, 25 bp, Homo sapien
acatgataatggatacacaagcttc

SEQ ID NO: 58239 - DNA, 25 bp, Homo sapien
ttcagcgtcacgatcagactgttac

SEQ ID NO: 58240 - DNA, 25 bp, Homo sapien
tagtcacaaatacagtcctcgagtt

SEQ ID NO: 58241 - DNA, 25 bp, Homo sapien
ccacagaacagaaactaaaataacc

SEQ ID NO: 58242 - DNA, 25 bp, Homo sapien
tagcaatcaacagcatggggtgcaa

SEQ ID NO: 58243 - DNA, 25 bp, Homo sapien
ttcagcgtcacgatcagactgttac

SEQ ID NO: 58244 - DNA, 25 bp, Homo sapien
aagatggcttaagagtagactaact

SEQ ID NO: 58245 - DNA, 25 bp, Homo sapien
tgttggggaaatttaccaagatggc

SEQ ID NO: 58246 - DNA, 25 bp, Homo sapien
acctggcatcaccctgaaggaattc

SEQ ID NO: 58247 - DNA, 25 bp, Homo sapien
ccaaggtttccgaagacaatggctt

SEQ ID NO: 58248 - DNA, 25 bp, Homo sapien
ttcaggtcacaacagtaactatcag

SEQ ID NO: 58249 - DNA, 25 bp, Homo sapien
ttgcataggatgtgccaacaatcac

SEQ ID NO: 58250 - DNA, 25 bp, Homo sapien
acatgataatggatacacaagcttc

SEQ ID NO: 58251 - DNA, 25 bp, Homo sapien
aagatggcttaagagtagactaact

SEQ ID NO: 58252 - DNA, 25 bp, Homo sapien
ccacagaacagaaactaaaataacc

SEQ ID NO: 58253 - DNA, 25 bp, Homo sapien
ccaaggtttccgaagacaatggctt

SEQ ID NO: 58254 - DNA, 25 bp, Homo sapien
tagcaatcaacagcatggggtgcaa

SEQ ID NO: 58255 - DNA, 25 bp, Homo sapien
tagtcacaaatacagtcctcgagtt

SEQ ID NO: 58256 - DNA, 25 bp, Homo sapien
acctggcatcaccctgaaggaattc

SEQ ID NO: 58257 - DNA, 25 bp, Homo sapien
tgttggggaaatttaccaagatggc

SEQ ID NO: 58258 - DNA, 25 bp, Homo sapien
acatgataatggatacacaagcttc

SEQ ID NO: 58259 - DNA, 25 bp, Homo sapien
ttgcataggatgtgccaacaatcac

SEQ ID NO: 58260 - DNA, 25 bp, Homo sapien
ttcagcgtcacgatcagactgttac

SEQ ID NO: 58261 - DNA, 25 bp, Homo sapien
ttcaggtcacaacagtaactatcag

SEQ ID NO: 58262 - DNA, 25 bp, Homo sapien
tagtcacaaatacagtcctcgagtt

SEQ ID NO: 58263 - DNA, 25 bp, Homo sapien
ccacagaacagaaactaaaataacc

SEQ ID NO: 58264 - DNA, 25 bp, Homo sapien
tagcaatcaacagcatggggtgcaa

SEQ ID NO: 58265 - DNA, 25 bp, Homo sapien
ttcagcgtcacgatcagactgttac

SEQ ID NO: 58266 - DNA, 25 bp, Homo sapien
aagatggcttaagagtagactaact

SEQ ID NO: 58267 - DNA, 25 bp, Homo sapien
tgttggggaaatttaccaagatggc

SEQ ID NO: 58268 - DNA, 25 bp, Homo sapien
acctggcatcaccctgaaggaattc

SEQ ID NO: 58269 - DNA, 25 bp, Homo sapien
ccaaggtttccgaagacaatggctt

SEQ ID NO: 58270 - DNA, 25 bp, Homo sapien
ttcaggtcacaacagtaactatcag

SEQ ID NO: 58271 - DNA, 25 bp, Homo sapien
ttgcataggatgtgccaacaatcac

SEQ ID NO: 58272 - DNA, 25 bp, Homo sapien
acatgataatggatacacaagcttc

SEQ ID NO: 58273 - DNA, 25 bp, Homo sapien
acctggcatcaccctgaaggaattc

SEQ ID NO: 58274 - DNA, 25 bp, Homo sapien
tagcaatcaacagcatggggtgcaa

SEQ ID NO: 58275 - DNA, 25 bp, Homo sapien
ttgcataggatgtgccaacaatcac

SEQ ID NO: 58276 - DNA, 25 bp, Homo sapien
acatgataatggatacacaagcttc

SEQ ID NO: 58277 - DNA, 25 bp, Homo sapien
ttcaggtcacaacagtaactatcag

SEQ ID NO: 58278 - DNA, 25 bp, Homo sapien
ccaaggtttccgaagacaatggctt

SEQ ID NO: 58279 - DNA, 25 bp, Homo sapien
tgttggggaaatttaccaagatggc

SEQ ID NO: 58280 - DNA, 25 bp, Homo sapien
tagtcacaaatacagtcctcgagtt

SEQ ID NO: 58281 - DNA, 25 bp, Homo sapien
ccacagaacagaaactaaaataacc

SEQ ID NO: 58282 - DNA, 25 bp, Homo sapien
aagatggcttaagagtagactaact

SEQ ID NO: 58283 - DNA, 25 bp, Homo sapien
ttcagcgtcacgatcagactgttac

SEQ ID NO: 58284 - DNA, 25 bp, Homo sapien
tagtcacaaatacagtcctcgagtt

SEQ ID NO: 58285 - DNA, 25 bp, Homo sapien
ccacagaacagaaactaaaataacc

SEQ ID NO: 58286 - DNA, 25 bp, Homo sapien
tagcaatcaacagcatggggtgcaa

SEQ ID NO: 58287 - DNA, 25 bp, Homo sapien
ttcagcgtcacgatcagactgttac

SEQ ID NO: 58288 - DNA, 25 bp, Homo sapien
aagatggcttaagagtagactaact

SEQ ID NO: 58289 - DNA, 25 bp, Homo sapien
tgttggggaaatttaccaagatggc

SEQ ID NO: 58290 - DNA, 25 bp, Homo sapien
acctggcatcaccctgaaggaattc

SEQ ID NO: 58291 - DNA, 25 bp, Homo sapien
ccaaggtttccgaagacaatggctt

SEQ ID NO: 58292 - DNA, 25 bp, Homo sapien
ttcaggtcacaacagtaactatcag

SEQ ID NO: 58293 - DNA, 25 bp, Homo sapien
ttgcataggatgtgccaacaatcac

SEQ ID NO: 58294 - DNA, 25 bp, Homo sapien
acatgataatggatacacaagcttc

SEQ ID NO: 58295 - DNA, 25 bp, Homo sapien
ttcagcgtcacgatcagactgttac

SEQ ID NO: 58296 - DNA, 25 bp, Homo sapien
ttcaggtcacaacagtaactatcag

SEQ ID NO: 58297 - DNA, 25 bp, Homo sapien
tgttggggaaatttaccaagatggc

SEQ ID NO: 58298 - DNA, 25 bp, Homo sapien
ttgcataggatgtgccaacaatcac

SEQ ID NO: 58299 - DNA, 25 bp, Homo sapien
acatgataatggatacacaagcttc

SEQ ID NO: 58300 - DNA, 25 bp, Homo sapien
acctggcatcaccctgaaggaattc

SEQ ID NO: 58301 - DNA, 25 bp, Homo sapien
tagcaatcaacagcatggggtgcaa

SEQ ID NO: 58302 - DNA, 25 bp, Homo sapien
tagtcacaaatacagtcctcgagtt

SEQ ID NO: 58303 - DNA, 25 bp, Homo sapien
ccaaggtttccgaagacaatggctt

SEQ ID NO: 58304 - DNA, 25 bp, Homo sapien
aagatggcttaagagtagactaact

SEQ ID NO: 58305 - DNA, 25 bp, Homo sapien
ccacagaacagaaactaaaataacc

SEQ ID NO: 58306 - DNA, 25 bp, Homo sapien
tagtcacaaatacagtcctcgagtt

SEQ ID NO: 58307 - DNA, 25 bp, Homo sapien
ccacagaacagaaactaaaataacc

SEQ ID NO: 58308 - DNA, 25 bp, Homo sapien
tagcaatcaacagcatggggtgcaa

SEQ ID NO: 58309 - DNA, 25 bp, Homo sapien
ttcagcgtcacgatcagactgttac

SEQ ID NO: 58310 - DNA, 25 bp, Homo sapien
aagatggcttaagagtagactaact

SEQ ID NO: 58311 - DNA, 25 bp, Homo sapien
tgttggggaaatttaccaagatggc

SEQ ID NO: 58312 - DNA, 25 bp, Homo sapien
acctggcatcaccctgaaggaattc

SEQ ID NO: 58313 - DNA, 25 bp, Homo sapien
ccaaggtttccgaagacaatggctt

SEQ ID NO: 58314 - DNA, 25 bp, Homo sapien
ttcaggtcacaacagtaactatcag

SEQ ID NO: 58315 - DNA, 25 bp, Homo sapien
ttgcataggatgtgccaacaatcac

SEQ ID NO: 58316 - DNA, 25 bp, Homo sapien
acatgataatggatacacaagcttc

SEQ ID NO: 58317 - DNA, 25 bp, Homo sapien
tagtcacaaatacagtcctcgagtt

SEQ ID NO: 58318 - DNA, 25 bp, Homo sapien
ccacagaacagaaactaaaataacc

SEQ ID NO: 58319 - DNA, 25 bp, Homo sapien
tagcaatcaacagcatggggtgcaa

SEQ ID NO: 58320 - DNA, 25 bp, Homo sapien
ttcagcgtcacgatcagactgttac

SEQ ID NO: 58321 - DNA, 25 bp, Homo sapien
aagatggcttaagagtagactaact

SEQ ID NO: 58322 - DNA, 25 bp, Homo sapien
tgttggggaaatttaccaagatggc

SEQ ID NO: 58323 - DNA, 25 bp, Homo sapien
acctggcatcaccctgaaggaattc

SEQ ID NO: 58324 - DNA, 25 bp, Homo sapien
ccaaggtttccgaagacaatggctt

SEQ ID NO: 58325 - DNA, 25 bp, Homo sapien
ttcaggtcacaacagtaactatcag

SEQ ID NO: 58326 - DNA, 25 bp, Homo sapien
ttgcataggatgtgccaacaatcac

SEQ ID NO: 58327 - DNA, 25 bp, Homo sapien
acatgataatggatacacaagcttc

SEQ ID NO: 58328 - DNA, 25 bp, Homo sapien
ccacagaacagaaactaaaataacc

SEQ ID NO: 58329 - DNA, 25 bp, Homo sapien
tagtcacaaatacagtcctcgagtt

SEQ ID NO: 58330 - DNA, 25 bp, Homo sapien
ttgcataggatgtgccaacaatcac

SEQ ID NO: 58331 - DNA, 25 bp, Homo sapien
acatgataatggatacacaagcttc

SEQ ID NO: 58332 - DNA, 25 bp, Homo sapien
ttcagcgtcacgatcagactgttac

SEQ ID NO: 58333 - DNA, 25 bp, Homo sapien
ttcaggtcacaacagtaactatcag

SEQ ID NO: 58334 - DNA, 25 bp, Homo sapien
ccaaggtttccgaagacaatggctt

SEQ ID NO: 58335 - DNA, 25 bp, Homo sapien
aagatggcttaagagtagactaact

SEQ ID NO: 58336 - DNA, 25 bp, Homo sapien
tgttggggaaatttaccaagatggc

SEQ ID NO: 58337 - DNA, 25 bp, Homo sapien
acctggcatcaccctgaaggaattc

SEQ ID NO: 58338 - DNA, 25 bp, Homo sapien
tagcaatcaacagcatggggtgcaa

SEQ ID NO: 58339 - DNA, 25 bp, Homo sapien
ccacagaacagaaactaaaataacc

SEQ ID NO: 58340 - DNA, 25 bp, Homo sapien
tagtcacaaatacagtcctcgagtt

SEQ ID NO: 58341 - DNA, 25 bp, Homo sapien
ttgcataggatgtgccaacaatcac

SEQ ID NO: 58342 - DNA, 25 bp, Homo sapien
ttcagcgtcacgatcagactgttac

SEQ ID NO: 58343 - DNA, 25 bp, Homo sapien
acatgataatggatacacaagcttc

SEQ ID NO: 58344 - DNA, 25 bp, Homo sapien
ttcaggtcacaacagtaactatcag

SEQ ID NO: 58345 - DNA, 25 bp, Homo sapien
ccaaggtttccgaagacaatggctt

SEQ ID NO: 58346 - DNA, 25 bp, Homo sapien
aagatggcttaagagtagactaact

SEQ ID NO: 58347 - DNA, 25 bp, Homo sapien
tgttggggaaatttaccaagatggc

SEQ ID NO: 58348 - DNA, 25 bp, Homo sapien
acctggcatcaccctgaaggaattc

SEQ ID NO: 58349 - DNA, 25 bp, Homo sapien
tagcaatcaacagcatggggtgcaa

SEQ ID NO: 58350 - DNA, 25 bp, Homo sapien
ccacagaacagaaactaaaataacc

SEQ ID NO: 58351 - DNA, 25 bp, Homo sapien
tagtcacaaatacagtcctcgagtt

SEQ ID NO: 58352 - DNA, 25 bp, Homo sapien
ttgcataggatgtgccaacaatcac

SEQ ID NO: 58353 - DNA, 25 bp, Homo sapien
acatgataatggatacacaagcttc

SEQ ID NO: 58354 - DNA, 25 bp, Homo sapien
ttcagcgtcacgatcagactgttac

SEQ ID NO: 58355 - DNA, 25 bp, Homo sapien
ccaaggtttccgaagacaatggctt

SEQ ID NO: 58356 - DNA, 25 bp, Homo sapien
ttcaggtcacaacagtaactatcag

SEQ ID NO: 58357 - DNA, 25 bp, Homo sapien
aagatggcttaagagtagactaact

SEQ ID NO: 58358 - DNA, 25 bp, Homo sapien
tgttggggaaatttaccaagatggc

SEQ ID NO: 58359 - DNA, 25 bp, Homo sapien
acctggcatcaccctgaaggaattc

SEQ ID NO: 58360 - DNA, 25 bp, Homo sapien
tagcaatcaacagcatggggtgcaa

SEQ ID NO: 58361 - DNA, 25 bp, Homo sapien
ccacagaacagaaactaaaataacc

SEQ ID NO: 58362 - DNA, 25 bp, Homo sapien
tagtcacaaatacagtcctcgagtt

SEQ ID NO: 58363 - DNA, 25 bp, Homo sapien
ttgcataggatgtgccaacaatcac

SEQ ID NO: 58364 - DNA, 25 bp, Homo sapien
ttcagcgtcacgatcagactgttac

SEQ ID NO: 58365 - DNA, 25 bp, Homo sapien
ttcaggtcacaacagtaactatcag

SEQ ID NO: 58366 - DNA, 25 bp, Homo sapien
ccaaggtttccgaagacaatggctt

SEQ ID NO: 58367 - DNA, 25 bp, Homo sapien
acatgataatggatacacaagcttc

SEQ ID NO: 58368 - DNA, 25 bp, Homo sapien
aagatggcttaagagtagactaact

SEQ ID NO: 58369 - DNA, 25 bp, Homo sapien
tagcaatcaacagcatggggtgcaa

SEQ ID NO: 58370 - DNA, 25 bp, Homo sapien
tgttggggaaatttaccaagatggc

SEQ ID NO: 58371 - DNA, 25 bp, Homo sapien
acctggcatcaccctgaaggaattc

SEQ ID NO: 58372 - DNA, 25 bp, Homo sapien
ttcaggtcacaacagtaactatcag

SEQ ID NO: 58373 - DNA, 25 bp, Homo sapien
ccacagaacagaaactaaaataacc

SEQ ID NO: 58374 - DNA, 25 bp, Homo sapien
tagtcacaaatacagtcctcgagtt

SEQ ID NO: 58375 - DNA, 25 bp, Homo sapien
ttgcataggatgtgccaacaatcac

SEQ ID NO: 58376 - DNA, 25 bp, Homo sapien
acatgataatggatacacaagcttc

SEQ ID NO: 58377 - DNA, 25 bp, Homo sapien
ttcagcgtcacgatcagactgttac

SEQ ID NO: 58378 - DNA, 25 bp, Homo sapien
ccaaggtttccgaagacaatggctt

SEQ ID NO: 58379 - DNA, 25 bp, Homo sapien
aagatggcttaagagtagactaact

SEQ ID NO: 58380 - DNA, 25 bp, Homo sapien
acctggcatcaccctgaaggaattc

SEQ ID NO: 58381 - DNA, 25 bp, Homo sapien
tgttggggaaatttaccaagatggc

SEQ ID NO: 58382 - DNA, 25 bp, Homo sapien
tagcaatcaacagcatggggtgcaa

SEQ ID NO: 58383 - DNA, 25 bp, Homo sapien
ttcaggtcacaacagtaactatcag

SEQ ID NO: 58384 - DNA, 25 bp, Homo sapien
ccacagaacagaaactaaaataacc

SEQ ID NO: 58385 - DNA, 25 bp, Homo sapien
tagtcacaaatacagtcctcgagtt

SEQ ID NO: 58386 - DNA, 25 bp, Homo sapien
ttgcataggatgtgccaacaatcac

SEQ ID NO: 58387 - DNA, 25 bp, Homo sapien
acatgataatggatacacaagcttc

SEQ ID NO: 58388 - DNA, 25 bp, Homo sapien
ttcagcgtcacgatcagactgttac

SEQ ID NO: 58389 - DNA, 25 bp, Homo sapien
ccaaggtttccgaagacaatggctt

SEQ ID NO: 58390 - DNA, 25 bp, Homo sapien
aagatggcttaagagtagactaact

SEQ ID NO: 58391 - DNA, 25 bp, Homo sapien
tgttggggaaatttaccaagatggc

SEQ ID NO: 58392 - DNA, 25 bp, Homo sapien
tagcaatcaacagcatggggtgcaa

SEQ ID NO: 58393 - DNA, 25 bp, Homo sapien
acctggcatcaccctgaaggaattc

SEQ ID NO: 58394 - DNA, 25 bp, Homo sapien
ccacagaacagaaactaaaataacc

SEQ ID NO: 58395 - DNA, 25 bp, Homo sapien
tagtcacaaatacagtcctcgagtt

SEQ ID NO: 58396 - DNA, 25 bp, Homo sapien
ttgcataggatgtgccaacaatcac

SEQ ID NO: 58397 - DNA, 25 bp, Homo sapien
ttcagcgtcacgatcagactgttac

SEQ ID NO: 58398 - DNA, 25 bp, Homo sapien
acatgataatggatacacaagcttc

SEQ ID NO: 58399 - DNA, 25 bp, Homo sapien
ttcaggtcacaacagtaactatcag

SEQ ID NO: 58400 - DNA, 25 bp, Homo sapien
ccaaggtttccgaagacaatggctt

SEQ ID NO: 58401 - DNA, 25 bp, Homo sapien
aagatggcttaagagtagactaact

SEQ ID NO: 58402 - DNA, 25 bp, Homo sapien
acctggcatcaccctgaaggaattc

SEQ ID NO: 58403 - DNA, 25 bp, Homo sapien
tgttggggaaatttaccaagatggc

SEQ ID NO: 58404 - DNA, 25 bp, Homo sapien
tagcaatcaacagcatggggtgcaa

SEQ ID NO: 58405 - DNA, 25 bp, Homo sapien
ccacagaacagaaactaaaataacc

SEQ ID NO: 58406 - DNA, 25 bp, Homo sapien
tagtcacaaatacagtcctcgagtt

SEQ ID NO: 58407 - DNA, 25 bp, Homo sapien
ttgcataggatgtgccaacaatcac

SEQ ID NO: 58408 - DNA, 25 bp, Homo sapien
acatgataatggatacacaagcttc

SEQ ID NO: 58409 - DNA, 25 bp, Homo sapien
ttcagcgtcacgatcagactgttac

SEQ ID NO: 58410 - DNA, 25 bp, Homo sapien
ccaaggtttccgaagacaatggctt

SEQ ID NO: 58411 - DNA, 25 bp, Homo sapien
ttcaggtcacaacagtaactatcag

SEQ ID NO: 58412 - DNA, 25 bp, Homo sapien
aagatggcttaagagtagactaact

SEQ ID NO: 58413 - DNA, 25 bp, Homo sapien
tgttggggaaatttaccaagatggc

SEQ ID NO: 58414 - DNA, 25 bp, Homo sapien
tagcaatcaacagcatggggtgcaa

SEQ ID NO: 58415 - DNA, 25 bp, Homo sapien
acctggcatcaccctgaaggaattc

SEQ ID NO: 58416 - DNA, 25 bp, Homo sapien
ccacagaacagaaactaaaataacc

SEQ ID NO: 58417 - DNA, 25 bp, Homo sapien
tagtcacaaatacagtcctcgagtt

SEQ ID NO: 58418 - DNA, 25 bp, Homo sapien
ttgcataggatgtgccaacaatcac

SEQ ID NO: 58419 - DNA, 25 bp, Homo sapien
ttcagcgtcacgatcagactgttac

SEQ ID NO: 58420 - DNA, 25 bp, Homo sapien
acatgataatggatacacaagcttc

SEQ ID NO: 58421 - DNA, 25 bp, Homo sapien
ttcaggtcacaacagtaactatcag

SEQ ID NO: 58422 - DNA, 25 bp, Homo sapien
ccaaggtttccgaagacaatggctt

SEQ ID NO: 58423 - DNA, 25 bp, Homo sapien
aagatggcttaagagtagactaact

SEQ ID NO: 58424 - DNA, 25 bp, Homo sapien
acctggcatcaccctgaaggaattc

SEQ ID NO: 58425 - DNA, 25 bp, Homo sapien
tagcaatcaacagcatggggtgcaa

SEQ ID NO: 58426 - DNA, 25 bp, Homo sapien
tgttggggaaatttaccaagatggc

SEQ ID NO: 58427 - DNA, 25 bp, Homo sapien
acctggcatcaccctgaaggaattc

SEQ ID NO: 58428 - DNA, 25 bp, Homo sapien
tgttggggaaatttaccaagatggc

SEQ ID NO: 58429 - DNA, 25 bp, Homo sapien
aagatggcttaagagtagactaact

SEQ ID NO: 58430 - DNA, 25 bp, Homo sapien
ccaaggtttccgaagacaatggctt

SEQ ID NO: 58431 - DNA, 25 bp, Homo sapien
tagcaatcaacagcatggggtgcaa

SEQ ID NO: 58432 - DNA, 25 bp, Homo sapien
acatgataatggatacacaagcttc

SEQ ID NO: 58433 - DNA, 25 bp, Homo sapien
ttcagcgtcacgatcagactgttac

SEQ ID NO: 58434 - DNA, 25 bp, Homo sapien
ttgcataggatgtgccaacaatcac

SEQ ID NO: 58435 - DNA, 25 bp, Homo sapien
ttcaggtcacaacagtaactatcag

SEQ ID NO: 58436 - DNA, 25 bp, Homo sapien
ccacagaacagaaactaaaataacc

SEQ ID NO: 58437 - DNA, 25 bp, Homo sapien
tagtcacaaatacagtcctcgagtt

SEQ ID NO: 58438 - DNA, 25 bp, Homo sapien
ccacagaacagaaactaaaataacc

SEQ ID NO: 58439 - DNA, 25 bp, Homo sapien
tagtcacaaatacagtcctcgagtt

SEQ ID NO: 58440 - DNA, 25 bp, Homo sapien
ttgcataggatgtgccaacaatcac

SEQ ID NO: 58441 - DNA, 25 bp, Homo sapien
ccaaggtttccgaagacaatggctt

SEQ ID NO: 58442 - DNA, 25 bp, Homo sapien
ttcagcgtcacgatcagactgttac

SEQ ID NO: 58443 - DNA, 25 bp, Homo sapien
acatgataatggatacacaagcttc

SEQ ID NO: 58444 - DNA, 25 bp, Homo sapien
ttcaggtcacaacagtaactatcag

SEQ ID NO: 58445 - DNA, 25 bp, Homo sapien
aagatggcttaagagtagactaact

SEQ ID NO: 58446 - DNA, 25 bp, Homo sapien
acctggcatcaccctgaaggaattc

SEQ ID NO: 58447 - DNA, 25 bp, Homo sapien
tgttggggaaatttaccaagatggc

SEQ ID NO: 58448 - DNA, 25 bp, Homo sapien
tagcaatcaacagcatggggtgcaa

SEQ ID NO: 58449 - DNA, 25 bp, Homo sapien
tagtcacaaatacagtcctcgagtt

SEQ ID NO: 58450 - DNA, 25 bp, Homo sapien
ccacagaacagaaactaaaataacc

SEQ ID NO: 58451 - DNA, 25 bp, Homo sapien
tagcaatcaacagcatggggtgcaa

SEQ ID NO: 58452 - DNA, 25 bp, Homo sapien
ttcagcgtcacgatcagactgttac

SEQ ID NO: 58453 - DNA, 25 bp, Homo sapien
aagatggcttaagagtagactaact

SEQ ID NO: 58454 - DNA, 25 bp, Homo sapien
tgttggggaaatttaccaagatggc

SEQ ID NO: 58455 - DNA, 25 bp, Homo sapien
acctggcatcaccctgaaggaattc

SEQ ID NO: 58456 - DNA, 25 bp, Homo sapien
ccaaggtttccgaagacaatggctt

SEQ ID NO: 58457 - DNA, 25 bp, Homo sapien
ttcaggtcacaacagtaactatcag

SEQ ID NO: 58458 - DNA, 25 bp, Homo sapien
ttgcataggatgtgccaacaatcac

SEQ ID NO: 58459 - DNA, 25 bp, Homo sapien
acatgataatggatacacaagcttc

SEQ ID NO: 58460 - DNA, 25 bp, Homo sapien
gccatcttggtaaatttccccaaca

SEQ ID NO: 58461 - DNA, 25 bp, Homo sapien
agttagtctactcttaagccatctt

SEQ ID NO: 58462 - DNA, 25 bp, Homo sapien
aagccattgtcttcggaaaccttgg

SEQ ID NO: 58463 - DNA, 25 bp, Homo sapien
ggttattttagtttctgttctgtgg

SEQ ID NO: 58464 - DNA, 25 bp, Homo sapien
gtaacagtctgatcgtgacgctgaa

SEQ ID NO: 58465 - DNA, 25 bp, Homo sapien
gaagcttgtgtatccattatcatgt

SEQ ID NO: 58466 - DNA, 25 bp, Homo sapien
gaattccttcagggtgatgccaggt

SEQ ID NO: 58467 - DNA, 25 bp, Homo sapien
gtgattgttggcacatcctatgcaa

SEQ ID NO: 58468 - DNA, 25 bp, Homo sapien
ctgatagttactgttgtgacctgaa

SEQ ID NO: 58469 - DNA, 25 bp, Homo sapien
aactcgaggactgtatttgtgacta

SEQ ID NO: 58470 - DNA, 25 bp, Homo sapien
ttgcaccccatgctgttgattgcta

SEQ ID NO: 58471 - DNA, 25 bp, Homo sapien
ccacagaacagaaactaaaataacc

SEQ ID NO: 58472 - DNA, 25 bp, Homo sapien
tagtcacaaatacagtcctcgagtt

SEQ ID NO: 58473 - DNA, 25 bp, Homo sapien
ttgcataggatgtgccaacaatcac

SEQ ID NO: 58474 - DNA, 25 bp, Homo sapien
ttcagcgtcacgatcagactgttac

SEQ ID NO: 58475 - DNA, 25 bp, Homo sapien
ttcaggtcacaacagtaactatcag

SEQ ID NO: 58476 - DNA, 25 bp, Homo sapien
acatgataatggatacacaagcttc

SEQ ID NO: 58477 - DNA, 25 bp, Homo sapien
aagatggcttaagagtagactaact

SEQ ID NO: 58478 - DNA, 25 bp, Homo sapien
tagcaatcaacagcatggggtgcaa

SEQ ID NO: 58479 - DNA, 25 bp, Homo sapien
tgttggggaaatttaccaagatggc

SEQ ID NO: 58480 - DNA, 25 bp, Homo sapien
acctggcatcaccctgaaggaattc

SEQ ID NO: 58481 - DNA, 25 bp, Homo sapien
ccaaggtttccgaagacaatggctt

SEQ ID NO: 58482 - DNA, 25 bp, Homo sapien
tagtcacaaatacagtcctcgagtt

SEQ ID NO: 58483 - DNA, 25 bp, Homo sapien
ttgcataggatgtgccaacaatcac

SEQ ID NO: 58484 - DNA, 25 bp, Homo sapien
ccaaggtttccgaagacaatggctt

SEQ ID NO: 58485 - DNA, 25 bp, Homo sapien
tagcaatcaacagcatggggtgcaa

SEQ ID NO: 58486 - DNA, 25 bp, Homo sapien
ttcaggtcacaacagtaactatcag

SEQ ID NO: 58487 - DNA, 25 bp, Homo sapien
ccacagaacagaaactaaaataacc

SEQ ID NO: 58488 - DNA, 25 bp, Homo sapien
acatgataatggatacacaagcttc

SEQ ID NO: 58489 - DNA, 25 bp, Homo sapien
ttcagcgtcacgatcagactgttac

SEQ ID NO: 58490 - DNA, 25 bp, Homo sapien
tgttggggaaatttaccaagatggc

SEQ ID NO: 58491 - DNA, 25 bp, Homo sapien
acctggcatcaccctgaaggaattc

SEQ ID NO: 58492 - DNA, 25 bp, Homo sapien
aagatggcttaagagtagactaact

SEQ ID NO: 58493 - DNA, 25 bp, Homo sapien
tagtcacaaatacagtcctcgagtt

SEQ ID NO: 58494 - DNA, 25 bp, Homo sapien
ccacagaacagaaactaaaataacc

SEQ ID NO: 58495 - DNA, 25 bp, Homo sapien
tagcaatcaacagcatggggtgcaa

SEQ ID NO: 58496 - DNA, 25 bp, Homo sapien
ttcagcgtcacgatcagactgttac

SEQ ID NO: 58497 - DNA, 25 bp, Homo sapien
aagatggcttaagagtagactaact

SEQ ID NO: 58498 - DNA, 25 bp, Homo sapien
tgttggggaaatttaccaagatggc

SEQ ID NO: 58499 - DNA, 25 bp, Homo sapien
acctggcatcaccctgaaggaattc

SEQ ID NO: 58500 - DNA, 25 bp, Homo sapien
ccaaggtttccgaagacaatggctt

SEQ ID NO: 58501 - DNA, 25 bp, Homo sapien
ttcaggtcacaacagtaactatcag

SEQ ID NO: 58502 - DNA, 25 bp, Homo sapien
ttgcataggatgtgccaacaatcac

SEQ ID NO: 58503 - DNA, 25 bp, Homo sapien
acatgataatggatacacaagcttc

SEQ ID NO: 58504 - DNA, 25 bp, Homo sapien
acctggcatcaccctgaaggaattc

SEQ ID NO: 58505 - DNA, 25 bp, Homo sapien
aagatggcttaagagtagactaact

SEQ ID NO: 58506 - DNA, 25 bp, Homo sapien
ttcaggtcacaacagtaactatcag

SEQ ID NO: 58507 - DNA, 25 bp, Homo sapien
ccacagaacagaaactaaaataacc

SEQ ID NO: 58508 - DNA, 25 bp, Homo sapien
ttcagcgtcacgatcagactgttac

SEQ ID NO: 58509 - DNA, 25 bp, Homo sapien
acatgataatggatacacaagcttc

SEQ ID NO: 58510 - DNA, 25 bp, Homo sapien
tgttggggaaatttaccaagatggc

SEQ ID NO: 58511 - DNA, 25 bp, Homo sapien
ccaaggtttccgaagacaatggctt

SEQ ID NO: 58512 - DNA, 25 bp, Homo sapien
ttgcataggatgtgccaacaatcac

SEQ ID NO: 58513 - DNA, 25 bp, Homo sapien
tagcaatcaacagcatggggtgcaa

SEQ ID NO: 58514 - DNA, 25 bp, Homo sapien
tagtcacaaatacagtcctcgagtt

SEQ ID NO: 58515 - DNA, 25 bp, Homo sapien
tagtcacaaatacagtcctcgagtt

SEQ ID NO: 58516 - DNA, 25 bp, Homo sapien
ccacagaacagaaactaaaataacc

SEQ ID NO: 58517 - DNA, 25 bp, Homo sapien
tagcaatcaacagcatggggtgcaa

SEQ ID NO: 58518 - DNA, 25 bp, Homo sapien
ttcagcgtcacgatcagactgttac

SEQ ID NO: 58519 - DNA, 25 bp, Homo sapien
aagatggcttaagagtagactaact

SEQ ID NO: 58520 - DNA, 25 bp, Homo sapien
tgttggggaaatttaccaagatggc

SEQ ID NO: 58521 - DNA, 25 bp, Homo sapien
acctggcatcaccctgaaggaattc

SEQ ID NO: 58522 - DNA, 25 bp, Homo sapien
ccaaggtttccgaagacaatggctt

SEQ ID NO: 58523 - DNA, 25 bp, Homo sapien
ttcaggtcacaacagtaactatcag

SEQ ID NO: 58524 - DNA, 25 bp, Homo sapien
ttgcataggatgtgccaacaatcac

SEQ ID NO: 58525 - DNA, 25 bp, Homo sapien
acatgataatggatacacaagcttc

SEQ ID NO: 58526 - DNA, 25 bp, Homo sapien
ttcagcgtcacgatcagactgttac

SEQ ID NO: 58527 - DNA, 25 bp, Homo sapien
ccaaggtttccgaagacaatggctt

SEQ ID NO: 58528 - DNA, 25 bp, Homo sapien
ccacagaacagaaactaaaataacc

SEQ ID NO: 58529 - DNA, 25 bp, Homo sapien
tagcaatcaacagcatggggtgcaa

SEQ ID NO: 58530 - DNA, 25 bp, Homo sapien
aagatggcttaagagtagactaact

SEQ ID NO: 58531 - DNA, 25 bp, Homo sapien
tgttggggaaatttaccaagatggc

SEQ ID NO: 58532 - DNA, 25 bp, Homo sapien
acctggcatcaccctgaaggaattc

SEQ ID NO: 58533 - DNA, 25 bp, Homo sapien
ttcaggtcacaacagtaactatcag

SEQ ID NO: 58534 - DNA, 25 bp, Homo sapien
ttgcataggatgtgccaacaatcac

SEQ ID NO: 58535 - DNA, 25 bp, Homo sapien
tagtcacaaatacagtcctcgagtt

SEQ ID NO: 58536 - DNA, 25 bp, Homo sapien
acatgataatggatacacaagcttc

SEQ ID NO: 58537 - DNA, 25 bp, Homo sapien
tagtcacaaatacagtcctcgagtt

SEQ ID NO: 58538 - DNA, 25 bp, Homo sapien
ccacagaacagaaactaaaataacc

SEQ ID NO: 58539 - DNA, 25 bp, Homo sapien
tagcaatcaacagcatggggtgcaa

SEQ ID NO: 58540 - DNA, 25 bp, Homo sapien
ttcagcgtcacgatcagactgttac

SEQ ID NO: 58541 - DNA, 25 bp, Homo sapien
aagatggcttaagagtagactaact

SEQ ID NO: 58542 - DNA, 25 bp, Homo sapien
tgttggggaaatttaccaagatggc

SEQ ID NO: 58543 - DNA, 25 bp, Homo sapien
acctggcatcaccctgaaggaattc

SEQ ID NO: 58544 - DNA, 25 bp, Homo sapien
ccaaggtttccgaagacaatggctt

SEQ ID NO: 58545 - DNA, 25 bp, Homo sapien
ttcaggtcacaacagtaactatcag

SEQ ID NO: 58546 - DNA, 25 bp, Homo sapien
ttgcataggatgtgccaacaatcac

SEQ ID NO: 58547 - DNA, 25 bp, Homo sapien
acatgataatggatacacaagcttc

SEQ ID NO: 58548 - DNA, 25 bp, Homo sapien
tagtcacaaatacagtcctcgagtt

SEQ ID NO: 58549 - DNA, 25 bp, Homo sapien
ccacagaacagaaactaaaataacc

SEQ ID NO: 58550 - DNA, 25 bp, Homo sapien
tagcaatcaacagcatggggtgcaa

SEQ ID NO: 58551 - DNA, 25 bp, Homo sapien
ttcagcgtcacgatcagactgttac

SEQ ID NO: 58552 - DNA, 25 bp, Homo sapien
aagatggcttaagagtagactaact

SEQ ID NO: 58553 - DNA, 25 bp, Homo sapien
tgttggggaaatttaccaagatggc

SEQ ID NO: 58554 - DNA, 25 bp, Homo sapien
acctggcatcaccctgaaggaattc

SEQ ID NO: 58555 - DNA, 25 bp, Homo sapien
ccaaggtttccgaagacaatggctt

SEQ ID NO: 58556 - DNA, 25 bp, Homo sapien
ttcaggtcacaacagtaactatcag

SEQ ID NO: 58557 - DNA, 25 bp, Homo sapien
ttgcataggatgtgccaacaatcac

SEQ ID NO: 58558 - DNA, 25 bp, Homo sapien
acatgataatggatacacaagcttc

SEQ ID NO: 58559 - DNA, 25 bp, Homo sapien
tgttggggaaatttaccaagatggc

SEQ ID NO: 58560 - DNA, 25 bp, Homo sapien
ccaaggtttccgaagacaatggctt

SEQ ID NO: 58561 - DNA, 25 bp, Homo sapien
ttcaggtcacaacagtaactatcag

SEQ ID NO: 58562 - DNA, 25 bp, Homo sapien
ccacagaacagaaactaaaataacc

SEQ ID NO: 58563 - DNA, 25 bp, Homo sapien
tagtcacaaatacagtcctcgagtt

SEQ ID NO: 58564 - DNA, 25 bp, Homo sapien
ttcagcgtcacgatcagactgttac

SEQ ID NO: 58565 - DNA, 25 bp, Homo sapien
tagcaatcaacagcatggggtgcaa

SEQ ID NO: 58566 - DNA, 25 bp, Homo sapien
aagatggcttaagagtagactaact

SEQ ID NO: 58567 - DNA, 25 bp, Homo sapien
ttgcataggatgtgccaacaatcac

SEQ ID NO: 58568 - DNA, 25 bp, Homo sapien
acctggcatcaccctgaaggaattc

SEQ ID NO: 58569 - DNA, 25 bp, Homo sapien
acatgataatggatacacaagcttc

SEQ ID NO: 58570 - DNA, 25 bp, Homo sapien
tagtcacaaatacagtcctcgagtt

SEQ ID NO: 58571 - DNA, 25 bp, Homo sapien
ccacagaacagaaactaaaataacc

SEQ ID NO: 58572 - DNA, 25 bp, Homo sapien
tagcaatcaacagcatggggtgcaa

SEQ ID NO: 58573 - DNA, 25 bp, Homo sapien
ttcagcgtcacgatcagactgttac

SEQ ID NO: 58574 - DNA, 25 bp, Homo sapien
aagatggcttaagagtagactaact

SEQ ID NO: 58575 - DNA, 25 bp, Homo sapien
tgttggggaaatttaccaagatggc

SEQ ID NO: 58576 - DNA, 25 bp, Homo sapien
acctggcatcaccctgaaggaattc

SEQ ID NO: 58577 - DNA, 25 bp, Homo sapien
ccaaggtttccgaagacaatggctt

SEQ ID NO: 58578 - DNA, 25 bp, Homo sapien
ttcaggtcacaacagtaactatcag

SEQ ID NO: 58579 - DNA, 25 bp, Homo sapien
ttgcataggatgtgccaacaatcac

SEQ ID NO: 58580 - DNA, 25 bp, Homo sapien
acatgataatggatacacaagcttc

SEQ ID NO: 58581 - DNA, 25 bp, Homo sapien
ccacagaacagaaactaaaataacc

SEQ ID NO: 58582 - DNA, 25 bp, Homo sapien
tgttggggaaatttaccaagatggc

SEQ ID NO: 58583 - DNA, 25 bp, Homo sapien
ttcagcgtcacgatcagactgttac

SEQ ID NO: 58584 - DNA, 25 bp, Homo sapien
tagcaatcaacagcatggggtgcaa

SEQ ID NO: 58585 - DNA, 25 bp, Homo sapien
ccaaggtttccgaagacaatggctt

SEQ ID NO: 58586 - DNA, 25 bp, Homo sapien
acatgataatggatacacaagcttc

SEQ ID NO: 58587 - DNA, 25 bp, Homo sapien
tagtcacaaatacagtcctcgagtt

SEQ ID NO: 58588 - DNA, 25 bp, Homo sapien
aagatggcttaagagtagactaact

SEQ ID NO: 58589 - DNA, 25 bp, Homo sapien
ttcaggtcacaacagtaactatcag

SEQ ID NO: 58590 - DNA, 25 bp, Homo sapien
acctggcatcaccctgaaggaattc

SEQ ID NO: 58591 - DNA, 25 bp, Homo sapien
ttgcataggatgtgccaacaatcac

SEQ ID NO: 58592 - DNA, 25 bp, Homo sapien
tagtcacaaatacagtcctcgagtt

SEQ ID NO: 58593 - DNA, 25 bp, Homo sapien
ccacagaacagaaactaaaataacc

SEQ ID NO: 58594 - DNA, 25 bp, Homo sapien
tagcaatcaacagcatggggtgcaa

SEQ ID NO: 58595 - DNA, 25 bp, Homo sapien
ttcagcgtcacgatcagactgttac

SEQ ID NO: 58596 - DNA, 25 bp, Homo sapien
aagatggcttaagagtagactaact

SEQ ID NO: 58597 - DNA, 25 bp, Homo sapien
tgttggggaaatttaccaagatggc

SEQ ID NO: 58598 - DNA, 25 bp, Homo sapien
acctggcatcaccctgaaggaattc

SEQ ID NO: 58599 - DNA, 25 bp, Homo sapien
ccaaggtttccgaagacaatggctt

SEQ ID NO: 58600 - DNA, 25 bp, Homo sapien
ttcaggtcacaacagtaactatcag

SEQ ID NO: 58601 - DNA, 25 bp, Homo sapien
ttgcataggatgtgccaacaatcac

SEQ ID NO: 58602 - DNA, 25 bp, Homo sapien
acatgataatggatacacaagcttc

SEQ ID NO: 58603 - DNA, 25 bp, Homo sapien
acatgataatggatacacaagcttc

SEQ ID NO: 58604 - DNA, 25 bp, Homo sapien
ttcagcgtcacgatcagactgttac

SEQ ID NO: 58605 - DNA, 25 bp, Homo sapien
ttcaggtcacaacagtaactatcag

SEQ ID NO: 58606 - DNA, 25 bp, Homo sapien
ccaaggtttccgaagacaatggctt

SEQ ID NO: 58607 - DNA, 25 bp, Homo sapien
tgttggggaaatttaccaagatggc

SEQ ID NO: 58608 - DNA, 25 bp, Homo sapien
acctggcatcaccctgaaggaattc

SEQ ID NO: 58609 - DNA, 25 bp, Homo sapien
aagatggcttaagagtagactaact

SEQ ID NO: 58610 - DNA, 25 bp, Homo sapien
ttgcataggatgtgccaacaatcac

SEQ ID NO: 58611 - DNA, 25 bp, Homo sapien
tagtcacaaatacagtcctcgagtt

SEQ ID NO: 58612 - DNA, 25 bp, Homo sapien
ccacagaacagaaactaaaataacc

SEQ ID NO: 58613 - DNA, 25 bp, Homo sapien
tagcaatcaacagcatggggtgcaa

SEQ ID NO: 58614 - DNA, 25 bp, Homo sapien
tagtcacaaatacagtcctcgagtt

SEQ ID NO: 58615 - DNA, 25 bp, Homo sapien
ccacagaacagaaactaaaataacc

SEQ ID NO: 58616 - DNA, 25 bp, Homo sapien
tagcaatcaacagcatggggtgcaa

SEQ ID NO: 58617 - DNA, 25 bp, Homo sapien
ttcagcgtcacgatcagactgttac

SEQ ID NO: 58618 - DNA, 25 bp, Homo sapien
aagatggcttaagagtagactaact

SEQ ID NO: 58619 - DNA, 25 bp, Homo sapien
tgttggggaaatttaccaagatggc

SEQ ID NO: 58620 - DNA, 25 bp, Homo sapien
acctggcatcaccctgaaggaattc

SEQ ID NO: 58621 - DNA, 25 bp, Homo sapien
ccaaggtttccgaagacaatggctt

SEQ ID NO: 58622 - DNA, 25 bp, Homo sapien
ttcaggtcacaacagtaactatcag

SEQ ID NO: 58623 - DNA, 25 bp, Homo sapien
ttgcataggatgtgccaacaatcac

SEQ ID NO: 58624 - DNA, 25 bp, Homo sapien
acatgataatggatacacaagcttc

SEQ ID NO: 58625 - DNA, 25 bp, Homo sapien
acatgataatggatacacaagcttc

SEQ ID NO: 58626 - DNA, 25 bp, Homo sapien
acctggcatcaccctgaaggaattc

SEQ ID NO: 58627 - DNA, 25 bp, Homo sapien
tgttggggaaatttaccaagatggc

SEQ ID NO: 58628 - DNA, 25 bp, Homo sapien
ccaaggtttccgaagacaatggctt

SEQ ID NO: 58629 - DNA, 25 bp, Homo sapien
ccacagaacagaaactaaaataacc

SEQ ID NO: 58630 - DNA, 25 bp, Homo sapien
ttcagcgtcacgatcagactgttac

SEQ ID NO: 58631 - DNA, 25 bp, Homo sapien
aagatggcttaagagtagactaact

SEQ ID NO: 58632 - DNA, 25 bp, Homo sapien
tagtcacaaatacagtcctcgagtt

SEQ ID NO: 58633 - DNA, 25 bp, Homo sapien
tagcaatcaacagcatggggtgcaa

SEQ ID NO: 58634 - DNA, 25 bp, Homo sapien
ttgcataggatgtgccaacaatcac

SEQ ID NO: 58635 - DNA, 25 bp, Homo sapien
ttcaggtcacaacagtaactatcag

SEQ ID NO: 58636 - DNA, 25 bp, Homo sapien
tagtcacaaatacagtcctcgagtt

SEQ ID NO: 58637 - DNA, 25 bp, Homo sapien
ccacagaacagaaactaaaataacc

SEQ ID NO: 58638 - DNA, 25 bp, Homo sapien
tagcaatcaacagcatggggtgcaa

SEQ ID NO: 58639 - DNA, 25 bp, Homo sapien
ttcagcgtcacgatcagactgttac

SEQ ID NO: 58640 - DNA, 25 bp, Homo sapien
aagatggcttaagagtagactaact

SEQ ID NO: 58641 - DNA, 25 bp, Homo sapien
tgttggggaaatttaccaagatggc

SEQ ID NO: 58642 - DNA, 25 bp, Homo sapien
acctggcatcaccctgaaggaattc

SEQ ID NO: 58643 - DNA, 25 bp, Homo sapien
ccaaggtttccgaagacaatggctt

SEQ ID NO: 58644 - DNA, 25 bp, Homo sapien
ttcaggtcacaacagtaactatcag

SEQ ID NO: 58645 - DNA, 25 bp, Homo sapien
ttgcataggatgtgccaacaatcac

SEQ ID NO: 58646 - DNA, 25 bp, Homo sapien
acatgataatggatacacaagcttc

SEQ ID NO: 58647 - DNA, 25 bp, Homo sapien
ccaaggtttccgaagacaatggctt

SEQ ID NO: 58648 - DNA, 25 bp, Homo sapien
acctggcatcaccctgaaggaattc

SEQ ID NO: 58649 - DNA, 25 bp, Homo sapien
tagtcacaaatacagtcctcgagtt

SEQ ID NO: 58650 - DNA, 25 bp, Homo sapien
ttcagcgtcacgatcagactgttac

SEQ ID NO: 58651 - DNA, 25 bp, Homo sapien
aagatggcttaagagtagactaact

SEQ ID NO: 58652 - DNA, 25 bp, Homo sapien
acatgataatggatacacaagcttc

SEQ ID NO: 58653 - DNA, 25 bp, Homo sapien
tgttggggaaatttaccaagatggc

SEQ ID NO: 58654 - DNA, 25 bp, Homo sapien
ttcaggtcacaacagtaactatcag

SEQ ID NO: 58655 - DNA, 25 bp, Homo sapien
ttgcataggatgtgccaacaatcac

SEQ ID NO: 58656 - DNA, 25 bp, Homo sapien
ccacagaacagaaactaaaataacc

SEQ ID NO: 58657 - DNA, 25 bp, Homo sapien
tagcaatcaacagcatggggtgcaa

SEQ ID NO: 58658 - DNA, 25 bp, Homo sapien
acctggcatcaccctgaaggaattc

SEQ ID NO: 58659 - DNA, 25 bp, Homo sapien
ttgcataggatgtgccaacaatcac

SEQ ID NO: 58660 - DNA, 25 bp, Homo sapien
ttcagcgtcacgatcagactgttac

SEQ ID NO: 58661 - DNA, 25 bp, Homo sapien
tagcaatcaacagcatggggtgcaa

SEQ ID NO: 58662 - DNA, 25 bp, Homo sapien
ccaaggtttccgaagacaatggctt

SEQ ID NO: 58663 - DNA, 25 bp, Homo sapien
acatgataatggatacacaagcttc

SEQ ID NO: 58664 - DNA, 25 bp, Homo sapien
tgttggggaaatttaccaagatggc

SEQ ID NO: 58665 - DNA, 25 bp, Homo sapien
ttcaggtcacaacagtaactatcag

SEQ ID NO: 58666 - DNA, 25 bp, Homo sapien
ccacagaacagaaactaaaataacc

SEQ ID NO: 58667 - DNA, 25 bp, Homo sapien
tagtcacaaatacagtcctcgagtt

SEQ ID NO: 58668 - DNA, 25 bp, Homo sapien
aagatggcttaagagtagactaact

SEQ ID NO: 58669 - DNA, 25 bp, Homo sapien
tagtcacaaatacagtcctcgagtt

SEQ ID NO: 58670 - DNA, 25 bp, Homo sapien
ccacagaacagaaactaaaataacc

SEQ ID NO: 58671 - DNA, 25 bp, Homo sapien
tagcaatcaacagcatggggtgcaa

SEQ ID NO: 58672 - DNA, 25 bp, Homo sapien
ttcagcgtcacgatcagactgttac

SEQ ID NO: 58673 - DNA, 25 bp, Homo sapien
aagatggcttaagagtagactaact

SEQ ID NO: 58674 - DNA, 25 bp, Homo sapien
tgttggggaaatttaccaagatggc

SEQ ID NO: 58675 - DNA, 25 bp, Homo sapien
acctggcatcaccctgaaggaattc

SEQ ID NO: 58676 - DNA, 25 bp, Homo sapien
ccaaggtttccgaagacaatggctt

SEQ ID NO: 58677 - DNA, 25 bp, Homo sapien
ttcaggtcacaacagtaactatcag

SEQ ID NO: 58678 - DNA, 25 bp, Homo sapien
ttgcataggatgtgccaacaatcac

SEQ ID NO: 58679 - DNA, 25 bp, Homo sapien
acatgataatggatacacaagcttc

SEQ ID NO: 58680 - DNA, 25 bp, Homo sapien
ccacagaacagaaactaaaataacc

SEQ ID NO: 58681 - DNA, 25 bp, Homo sapien
acctggcatcaccctgaaggaattc

SEQ ID NO: 58682 - DNA, 25 bp, Homo sapien
ccaaggtttccgaagacaatggctt

SEQ ID NO: 58683 - DNA, 25 bp, Homo sapien
tagcaatcaacagcatggggtgcaa

SEQ ID NO: 58684 - DNA, 25 bp, Homo sapien
aagatggcttaagagtagactaact

SEQ ID NO: 58685 - DNA, 25 bp, Homo sapien
ttcaggtcacaacagtaactatcag

SEQ ID NO: 58686 - DNA, 25 bp, Homo sapien
tgttggggaaatttaccaagatggc

SEQ ID NO: 58687 - DNA, 25 bp, Homo sapien
acatgataatggatacacaagcttc

SEQ ID NO: 58688 - DNA, 25 bp, Homo sapien
tagtcacaaatacagtcctcgagtt

SEQ ID NO: 58689 - DNA, 25 bp, Homo sapien
ttgcataggatgtgccaacaatcac

SEQ ID NO: 58690 - DNA, 25 bp, Homo sapien
ttcagcgtcacgatcagactgttac

SEQ ID NO: 58691 - DNA, 25 bp, Homo sapien
tagtcacaaatacagtcctcgagtt

SEQ ID NO: 58692 - DNA, 25 bp, Homo sapien
ccacagaacagaaactaaaataacc

SEQ ID NO: 58693 - DNA, 25 bp, Homo sapien
tagcaatcaacagcatggggtgcaa

SEQ ID NO: 58694 - DNA, 25 bp, Homo sapien
ttcagcgtcacgatcagactgttac

SEQ ID NO: 58695 - DNA, 25 bp, Homo sapien
aagatggcttaagagtagactaact

SEQ ID NO: 58696 - DNA, 25 bp, Homo sapien
tgttggggaaatttaccaagatggc

SEQ ID NO: 58697 - DNA, 25 bp, Homo sapien
acctggcatcaccctgaaggaattc

SEQ ID NO: 58698 - DNA, 25 bp, Homo sapien
ccaaggtttccgaagacaatggctt

SEQ ID NO: 58699 - DNA, 25 bp, Homo sapien
ttcaggtcacaacagtaactatcag

SEQ ID NO: 58700 - DNA, 25 bp, Homo sapien
ttgcataggatgtgccaacaatcac

SEQ ID NO: 58701 - DNA, 25 bp, Homo sapien
acatgataatggatacacaagcttc

SEQ ID NO: 58702 - DNA, 25 bp, Homo sapien
ttgcataggatgtgccaacaatcac

SEQ ID NO: 58703 - DNA, 25 bp, Homo sapien
tagtcacaaatacagtcctcgagtt

SEQ ID NO: 58704 - DNA, 25 bp, Homo sapien
acatgataatggatacacaagcttc

SEQ ID NO: 58705 - DNA, 25 bp, Homo sapien
ccaaggtttccgaagacaatggctt

SEQ ID NO: 58706 - DNA, 25 bp, Homo sapien
tgttggggaaatttaccaagatggc

SEQ ID NO: 58707 - DNA, 25 bp, Homo sapien
ttcagcgtcacgatcagactgttac

SEQ ID NO: 58708 - DNA, 25 bp, Homo sapien
acctggcatcaccctgaaggaattc

SEQ ID NO: 58709 - DNA, 25 bp, Homo sapien
tagcaatcaacagcatggggtgcaa

SEQ ID NO: 58710 - DNA, 25 bp, Homo sapien
ccacagaacagaaactaaaataacc

SEQ ID NO: 58711 - DNA, 25 bp, Homo sapien
ttcaggtcacaacagtaactatcag

SEQ ID NO: 58712 - DNA, 25 bp, Homo sapien
aagatggcttaagagtagactaact

SEQ ID NO: 58713 - DNA, 25 bp, Homo sapien
tagtcacaaatacagtcctcgagtt

SEQ ID NO: 58714 - DNA, 25 bp, Homo sapien
ccacagaacagaaactaaaataacc

SEQ ID NO: 58715 - DNA, 25 bp, Homo sapien
tagcaatcaacagcatggggtgcaa

SEQ ID NO: 58716 - DNA, 25 bp, Homo sapien
ttcagcgtcacgatcagactgttac

SEQ ID NO: 58717 - DNA, 25 bp, Homo sapien
aagatggcttaagagtagactaact

SEQ ID NO: 58718 - DNA, 25 bp, Homo sapien
tgttggggaaatttaccaagatggc

SEQ ID NO: 58719 - DNA, 25 bp, Homo sapien
acctggcatcaccctgaaggaattc

SEQ ID NO: 58720 - DNA, 25 bp, Homo sapien
ccaaggtttccgaagacaatggctt

SEQ ID NO: 58721 - DNA, 25 bp, Homo sapien
ttcaggtcacaacagtaactatcag

SEQ ID NO: 58722 - DNA, 25 bp, Homo sapien
ttgcataggatgtgccaacaatcac

SEQ ID NO: 58723 - DNA, 25 bp, Homo sapien
acatgataatggatacacaagcttc

SEQ ID NO: 58724 - DNA, 25 bp, Homo sapien
aagatggcttaagagtagactaact

SEQ ID NO: 58725 - DNA, 25 bp, Homo sapien
tagcaatcaacagcatggggtgcaa

SEQ ID NO: 58726 - DNA, 25 bp, Homo sapien
tgttggggaaatttaccaagatggc

SEQ ID NO: 58727 - DNA, 25 bp, Homo sapien
ccacagaacagaaactaaaataacc

SEQ ID NO: 58728 - DNA, 25 bp, Homo sapien
ttcaggtcacaacagtaactatcag

SEQ ID NO: 58729 - DNA, 25 bp, Homo sapien
ccaaggtttccgaagacaatggctt

SEQ ID NO: 58730 - DNA, 25 bp, Homo sapien
ttcagcgtcacgatcagactgttac

SEQ ID NO: 58731 - DNA, 25 bp, Homo sapien
acctggcatcaccctgaaggaattc

SEQ ID NO: 58732 - DNA, 25 bp, Homo sapien
acatgataatggatacacaagcttc

SEQ ID NO: 58733 - DNA, 25 bp, Homo sapien
tagtcacaaatacagtcctcgagtt

SEQ ID NO: 58734 - DNA, 25 bp, Homo sapien
ttgcataggatgtgccaacaatcac

SEQ ID NO: 58735 - DNA, 25 bp, Homo sapien
tagtcacaaatacagtcctcgagtt

SEQ ID NO: 58736 - DNA, 25 bp, Homo sapien
ccacagaacagaaactaaaataacc

SEQ ID NO: 58737 - DNA, 25 bp, Homo sapien
tagcaatcaacagcatggggtgcaa

SEQ ID NO: 58738 - DNA, 25 bp, Homo sapien
ttcagcgtcacgatcagactgttac

SEQ ID NO: 58739 - DNA, 25 bp, Homo sapien
aagatggcttaagagtagactaact

SEQ ID NO: 58740 - DNA, 25 bp, Homo sapien
tgttggggaaatttaccaagatggc

SEQ ID NO: 58741 - DNA, 25 bp, Homo sapien
acctggcatcaccctgaaggaattc

SEQ ID NO: 58742 - DNA, 25 bp, Homo sapien
ccaaggtttccgaagacaatggctt

SEQ ID NO: 58743 - DNA, 25 bp, Homo sapien
ttcaggtcacaacagtaactatcag

SEQ ID NO: 58744 - DNA, 25 bp, Homo sapien
ttgcataggatgtgccaacaatcac

SEQ ID NO: 58745 - DNA, 25 bp, Homo sapien
acatgataatggatacacaagcttc

SEQ ID NO: 58746 - DNA, 25 bp, Homo sapien
ttcagcgtcacgatcagactgttac

SEQ ID NO: 58747 - DNA, 25 bp, Homo sapien
acctggcatcaccctgaaggaattc

SEQ ID NO: 58748 - DNA, 25 bp, Homo sapien
tgttggggaaatttaccaagatggc

SEQ ID NO: 58749 - DNA, 25 bp, Homo sapien
ccacagaacagaaactaaaataacc

SEQ ID NO: 58750 - DNA, 25 bp, Homo sapien
ttgcataggatgtgccaacaatcac

SEQ ID NO: 58751 - DNA, 25 bp, Homo sapien
acatgataatggatacacaagcttc

SEQ ID NO: 58752 - DNA, 25 bp, Homo sapien
tagtcacaaatacagtcctcgagtt

SEQ ID NO: 58753 - DNA, 25 bp, Homo sapien
ttcaggtcacaacagtaactatcag

SEQ ID NO: 58754 - DNA, 25 bp, Homo sapien
tagcaatcaacagcatggggtgcaa

SEQ ID NO: 58755 - DNA, 25 bp, Homo sapien
ccaaggtttccgaagacaatggctt

SEQ ID NO: 58756 - DNA, 25 bp, Homo sapien
aagatggcttaagagtagactaact

SEQ ID NO: 58757 - DNA, 25 bp, Homo sapien
tagtcacaaatacagtcctcgagtt

SEQ ID NO: 58758 - DNA, 25 bp, Homo sapien
ccacagaacagaaactaaaataacc

SEQ ID NO: 58759 - DNA, 25 bp, Homo sapien
tagcaatcaacagcatggggtgcaa

SEQ ID NO: 58760 - DNA, 25 bp, Homo sapien
ttcagcgtcacgatcagactgttac

SEQ ID NO: 58761 - DNA, 25 bp, Homo sapien
aagatggcttaagagtagactaact

SEQ ID NO: 58762 - DNA, 25 bp, Homo sapien
tgttggggaaatttaccaagatggc

SEQ ID NO: 58763 - DNA, 25 bp, Homo sapien
acctggcatcaccctgaaggaattc

SEQ ID NO: 58764 - DNA, 25 bp, Homo sapien
ccaaggtttccgaagacaatggctt

SEQ ID NO: 58765 - DNA, 25 bp, Homo sapien
ttcaggtcacaacagtaactatcag

SEQ ID NO: 58766 - DNA, 25 bp, Homo sapien
ttgcataggatgtgccaacaatcac

SEQ ID NO: 58767 - DNA, 25 bp, Homo sapien
acatgataatggatacacaagcttc

SEQ ID NO: 58768 - DNA, 25 bp, Homo sapien
tagtcacaaatacagtcctcgagtt

SEQ ID NO: 58769 - DNA, 25 bp, Homo sapien
ttcagcgtcacgatcagactgttac

SEQ ID NO: 58770 - DNA, 25 bp, Homo sapien
tagcaatcaacagcatggggtgcaa

SEQ ID NO: 58771 - DNA, 25 bp, Homo sapien
ttcaggtcacaacagtaactatcag

SEQ ID NO: 58772 - DNA, 25 bp, Homo sapien
tgttggggaaatttaccaagatggc

SEQ ID NO: 58773 - DNA, 25 bp, Homo sapien
ttgcataggatgtgccaacaatcac

SEQ ID NO: 58774 - DNA, 25 bp, Homo sapien
aagatggcttaagagtagactaact

SEQ ID NO: 58775 - DNA, 25 bp, Homo sapien
ccacagaacagaaactaaaataacc

SEQ ID NO: 58776 - DNA, 25 bp, Homo sapien
acatgataatggatacacaagcttc

SEQ ID NO: 58777 - DNA, 25 bp, Homo sapien
ccaaggtttccgaagacaatggctt

SEQ ID NO: 58778 - DNA, 25 bp, Homo sapien
acctggcatcaccctgaaggaattc

SEQ ID NO: 58779 - DNA, 25 bp, Homo sapien
tagtcacaaatacagtcctcgagtt

SEQ ID NO: 58780 - DNA, 25 bp, Homo sapien
ccacagaacagaaactaaaataacc

SEQ ID NO: 58781 - DNA, 25 bp, Homo sapien
tagcaatcaacagcatggggtgcaa

SEQ ID NO: 58782 - DNA, 25 bp, Homo sapien
ttcagcgtcacgatcagactgttac

SEQ ID NO: 58783 - DNA, 25 bp, Homo sapien
aagatggcttaagagtagactaact

SEQ ID NO: 58784 - DNA, 25 bp, Homo sapien
tgttggggaaatttaccaagatggc

SEQ ID NO: 58785 - DNA, 25 bp, Homo sapien
acctggcatcaccctgaaggaattc

SEQ ID NO: 58786 - DNA, 25 bp, Homo sapien
ccaaggtttccgaagacaatggctt

SEQ ID NO: 58787 - DNA, 25 bp, Homo sapien
ttcaggtcacaacagtaactatcag

SEQ ID NO: 58788 - DNA, 25 bp, Homo sapien
ttgcataggatgtgccaacaatcac

SEQ ID NO: 58789 - DNA, 25 bp, Homo sapien
acatgataatggatacacaagcttc

SEQ ID NO: 58790 - DNA, 25 bp, Homo sapien
tagtcacaaatacagtcctcgagtt

SEQ ID NO: 58791 - DNA, 25 bp, Homo sapien
ccacagaacagaaactaaaataacc

SEQ ID NO: 58792 - DNA, 25 bp, Homo sapien
tagcaatcaacagcatggggtgcaa

SEQ ID NO: 58793 - DNA, 25 bp, Homo sapien
ttcagcgtcacgatcagactgttac

SEQ ID NO: 58794 - DNA, 25 bp, Homo sapien
aagatggcttaagagtagactaact

SEQ ID NO: 58795 - DNA, 25 bp, Homo sapien
tgttggggaaatttaccaagatggc

SEQ ID NO: 58796 - DNA, 25 bp, Homo sapien
acctggcatcaccctgaaggaattc

SEQ ID NO: 58797 - DNA, 25 bp, Homo sapien
ccaaggtttccgaagacaatggctt

SEQ ID NO: 58798 - DNA, 25 bp, Homo sapien
ttcaggtcacaacagtaactatcag

SEQ ID NO: 58799 - DNA, 25 bp, Homo sapien
ttgcataggatgtgccaacaatcac

SEQ ID NO: 58800 - DNA, 25 bp, Homo sapien
acatgataatggatacacaagcttc

SEQ ID NO: 58801 - DNA, 25 bp, Homo sapien
acatgataatggatacacaagcttc

SEQ ID NO: 58802 - DNA, 25 bp, Homo sapien
ttcaggtcacaacagtaactatcag

SEQ ID NO: 58803 - DNA, 25 bp, Homo sapien
aagatggcttaagagtagactaact

SEQ ID NO: 58804 - DNA, 25 bp, Homo sapien
ccaaggtttccgaagacaatggctt

SEQ ID NO: 58805 - DNA, 25 bp, Homo sapien
tgttggggaaatttaccaagatggc

SEQ ID NO: 58806 - DNA, 25 bp, Homo sapien
ttgcataggatgtgccaacaatcac

SEQ ID NO: 58807 - DNA, 25 bp, Homo sapien
acctggcatcaccctgaaggaattc

SEQ ID NO: 58808 - DNA, 25 bp, Homo sapien
ttcagcgtcacgatcagactgttac

SEQ ID NO: 58809 - DNA, 25 bp, Homo sapien
tagcaatcaacagcatggggtgcaa

SEQ ID NO: 58810 - DNA, 25 bp, Homo sapien
tagtcacaaatacagtcctcgagtt

SEQ ID NO: 58811 - DNA, 25 bp, Homo sapien
ccacagaacagaaactaaaataacc

SEQ ID NO: 58812 - DNA, 25 bp, Homo sapien
tagtcacaaatacagtcctcgagtt

SEQ ID NO: 58813 - DNA, 25 bp, Homo sapien
ccacagaacagaaactaaaataacc

SEQ ID NO: 58814 - DNA, 25 bp, Homo sapien
tagcaatcaacagcatggggtgcaa

SEQ ID NO: 58815 - DNA, 25 bp, Homo sapien
ttcagcgtcacgatcagactgttac

SEQ ID NO: 58816 - DNA, 25 bp, Homo sapien
aagatggcttaagagtagactaact

SEQ ID NO: 58817 - DNA, 25 bp, Homo sapien
tgttggggaaatttaccaagatggc

SEQ ID NO: 58818 - DNA, 25 bp, Homo sapien
acctggcatcaccctgaaggaattc

SEQ ID NO: 58819 - DNA, 25 bp, Homo sapien
ccaaggtttccgaagacaatggctt

SEQ ID NO: 58820 - DNA, 25 bp, Homo sapien
ttcaggtcacaacagtaactatcag

SEQ ID NO: 58821 - DNA, 25 bp, Homo sapien
ttgcataggatgtgccaacaatcac

SEQ ID NO: 58822 - DNA, 25 bp, Homo sapien
acatgataatggatacacaagcttc

SEQ ID NO: 58823 - DNA, 25 bp, Homo sapien
ccaaggtttccgaagacaatggctt

SEQ ID NO: 58824 - DNA, 25 bp, Homo sapien
ttgcataggatgtgccaacaatcac

SEQ ID NO: 58825 - DNA, 25 bp, Homo sapien
acctggcatcaccctgaaggaattc

SEQ ID NO: 58826 - DNA, 25 bp, Homo sapien
tagcaatcaacagcatggggtgcaa

SEQ ID NO: 58827 - DNA, 25 bp, Homo sapien
tagtcacaaatacagtcctcgagtt

SEQ ID NO: 58828 - DNA, 25 bp, Homo sapien
tgttggggaaatttaccaagatggc

SEQ ID NO: 58829 - DNA, 25 bp, Homo sapien
aagatggcttaagagtagactaact

SEQ ID NO: 58830 - DNA, 25 bp, Homo sapien
ttcaggtcacaacagtaactatcag

SEQ ID NO: 58831 - DNA, 25 bp, Homo sapien
ttcagcgtcacgatcagactgttac

SEQ ID NO: 58832 - DNA, 25 bp, Homo sapien
ccacagaacagaaactaaaataacc

SEQ ID NO: 58833 - DNA, 25 bp, Homo sapien
acatgataatggatacacaagcttc

SEQ ID NO: 58834 - DNA, 25 bp, Homo sapien
tagtcacaaatacagtcctcgagtt

SEQ ID NO: 58835 - DNA, 25 bp, Homo sapien
ccacagaacagaaactaaaataacc

SEQ ID NO: 58836 - DNA, 25 bp, Homo sapien
tagcaatcaacagcatggggtgcaa

SEQ ID NO: 58837 - DNA, 25 bp, Homo sapien
ttcagcgtcacgatcagactgttac

SEQ ID NO: 58838 - DNA, 25 bp, Homo sapien
aagatggcttaagagtagactaact

SEQ ID NO: 58839 - DNA, 25 bp, Homo sapien
tgttggggaaatttaccaagatggc

SEQ ID NO: 58840 - DNA, 25 bp, Homo sapien
acctggcatcaccctgaaggaattc

SEQ ID NO: 58841 - DNA, 25 bp, Homo sapien
ccaaggtttccgaagacaatggctt

SEQ ID NO: 58842 - DNA, 25 bp, Homo sapien
ttcaggtcacaacagtaactatcag

SEQ ID NO: 58843 - DNA, 25 bp, Homo sapien
ttgcataggatgtgccaacaatcac

SEQ ID NO: 58844 - DNA, 25 bp, Homo sapien
acatgataatggatacacaagcttc

SEQ ID NO: 58845 - DNA, 25 bp, Homo sapien
aagatggcttaagagtagactaact

SEQ ID NO: 58846 - DNA, 25 bp, Homo sapien
acctggcatcaccctgaaggaattc

SEQ ID NO: 58847 - DNA, 25 bp, Homo sapien
tgttggggaaatttaccaagatggc

SEQ ID NO: 58848 - DNA, 25 bp, Homo sapien
ttcagcgtcacgatcagactgttac

SEQ ID NO: 58849 - DNA, 25 bp, Homo sapien
ttgcataggatgtgccaacaatcac

SEQ ID NO: 58850 - DNA, 25 bp, Homo sapien
ttcaggtcacaacagtaactatcag

SEQ ID NO: 58851 - DNA, 25 bp, Homo sapien
ccaaggtttccgaagacaatggctt

SEQ ID NO: 58852 - DNA, 25 bp, Homo sapien
tagcaatcaacagcatggggtgcaa

SEQ ID NO: 58853 - DNA, 25 bp, Homo sapien
tagtcacaaatacagtcctcgagtt

SEQ ID NO: 58854 - DNA, 25 bp, Homo sapien
ccacagaacagaaactaaaataacc

SEQ ID NO: 58855 - DNA, 25 bp, Homo sapien
acatgataatggatacacaagcttc

SEQ ID NO: 58856 - DNA, 25 bp, Homo sapien
tagtcacaaatacagtcctcgagtt

SEQ ID NO: 58857 - DNA, 25 bp, Homo sapien
ccacagaacagaaactaaaataacc

SEQ ID NO: 58858 - DNA, 25 bp, Homo sapien
tagcaatcaacagcatggggtgcaa

SEQ ID NO: 58859 - DNA, 25 bp, Homo sapien
ttcagcgtcacgatcagactgttac

SEQ ID NO: 58860 - DNA, 25 bp, Homo sapien
aagatggcttaagagtagactaact

SEQ ID NO: 58861 - DNA, 25 bp, Homo sapien
tgttggggaaatttaccaagatggc

SEQ ID NO: 58862 - DNA, 25 bp, Homo sapien
acctggcatcaccctgaaggaattc

SEQ ID NO: 58863 - DNA, 25 bp, Homo sapien
ccaaggtttccgaagacaatggctt

SEQ ID NO: 58864 - DNA, 25 bp, Homo sapien
ttcaggtcacaacagtaactatcag

SEQ ID NO: 58865 - DNA, 25 bp, Homo sapien
ttgcataggatgtgccaacaatcac

SEQ ID NO: 58866 - DNA, 25 bp, Homo sapien
acatgataatggatacacaagcttc

SEQ ID NO: 58867 - DNA, 25 bp, Homo sapien
ccacagaacagaaactaaaataacc

SEQ ID NO: 58868 - DNA, 25 bp, Homo sapien
tgttggggaaatttaccaagatggc

SEQ ID NO: 58869 - DNA, 25 bp, Homo sapien
ttgcataggatgtgccaacaatcac

SEQ ID NO: 58870 - DNA, 25 bp, Homo sapien
tagtcacaaatacagtcctcgagtt

SEQ ID NO: 58871 - DNA, 25 bp, Homo sapien
acatgataatggatacacaagcttc

SEQ ID NO: 58872 - DNA, 25 bp, Homo sapien
aagatggcttaagagtagactaact

SEQ ID NO: 58873 - DNA, 25 bp, Homo sapien
ccaaggtttccgaagacaatggctt

SEQ ID NO: 58874 - DNA, 25 bp, Homo sapien
ttcaggtcacaacagtaactatcag

SEQ ID NO: 58875 - DNA, 25 bp, Homo sapien
ttcagcgtcacgatcagactgttac

SEQ ID NO: 58876 - DNA, 25 bp, Homo sapien
acctggcatcaccctgaaggaattc

SEQ ID NO: 58877 - DNA, 25 bp, Homo sapien
tagcaatcaacagcatggggtgcaa

SEQ ID NO: 58878 - DNA, 25 bp, Homo sapien
tagtcacaaatacagtcctcgagtt

SEQ ID NO: 58879 - DNA, 25 bp, Homo sapien
ccacagaacagaaactaaaataacc

SEQ ID NO: 58880 - DNA, 25 bp, Homo sapien
tagcaatcaacagcatggggtgcaa

SEQ ID NO: 58881 - DNA, 25 bp, Homo sapien
ttcagcgtcacgatcagactgttac

SEQ ID NO: 58882 - DNA, 25 bp, Homo sapien
aagatggcttaagagtagactaact

SEQ ID NO: 58883 - DNA, 25 bp, Homo sapien
tgttggggaaatttaccaagatggc

SEQ ID NO: 58884 - DNA, 25 bp, Homo sapien
acctggcatcaccctgaaggaattc

SEQ ID NO: 58885 - DNA, 25 bp, Homo sapien
ccaaggtttccgaagacaatggctt

SEQ ID NO: 58886 - DNA, 25 bp, Homo sapien
ttcaggtcacaacagtaactatcag

SEQ ID NO: 58887 - DNA, 25 bp, Homo sapien
ttgcataggatgtgccaacaatcac

SEQ ID NO: 58888 - DNA, 25 bp, Homo sapien
acatgataatggatacacaagcttc

SEQ ID NO: 58889 - DNA, 25 bp, Homo sapien
tagcaatcaacagcatggggtgcaa

SEQ ID NO: 58890 - DNA, 25 bp, Homo sapien
ccaaggtttccgaagacaatggctt

SEQ ID NO: 58891 - DNA, 25 bp, Homo sapien
acctggcatcaccctgaaggaattc

SEQ ID NO: 58892 - DNA, 25 bp, Homo sapien
aagatggcttaagagtagactaact

SEQ ID NO: 58893 - DNA, 25 bp, Homo sapien
acatgataatggatacacaagcttc

SEQ ID NO: 58894 - DNA, 25 bp, Homo sapien
tagtcacaaatacagtcctcgagtt

SEQ ID NO: 58895 - DNA, 25 bp, Homo sapien
ttgcataggatgtgccaacaatcac

SEQ ID NO: 58896 - DNA, 25 bp, Homo sapien
ttcagcgtcacgatcagactgttac

SEQ ID NO: 58897 - DNA, 25 bp, Homo sapien
ttcaggtcacaacagtaactatcag

SEQ ID NO: 58898 - DNA, 25 bp, Homo sapien
tgttggggaaatttaccaagatggc

SEQ ID NO: 58899 - DNA, 25 bp, Homo sapien
ccacagaacagaaactaaaataacc

SEQ ID NO: 58900 - DNA, 25 bp, Homo sapien
ccacagaacagaaactaaaataacc

SEQ ID NO: 58901 - DNA, 25 bp, Homo sapien
tagtcacaaatacagtcctcgagtt

SEQ ID NO: 58902 - DNA, 25 bp, Homo sapien
acatgataatggatacacaagcttc

SEQ ID NO: 58903 - DNA, 25 bp, Homo sapien
ttcaggtcacaacagtaactatcag

SEQ ID NO: 58904 - DNA, 25 bp, Homo sapien
ttgcataggatgtgccaacaatcac

SEQ ID NO: 58905 - DNA, 25 bp, Homo sapien
tgttggggaaatttaccaagatggc

SEQ ID NO: 58906 - DNA, 25 bp, Homo sapien
ttcagcgtcacgatcagactgttac

SEQ ID NO: 58907 - DNA, 25 bp, Homo sapien
tagcaatcaacagcatggggtgcaa

SEQ ID NO: 58908 - DNA, 25 bp, Homo sapien
ccaaggtttccgaagacaatggctt

SEQ ID NO: 58909 - DNA, 25 bp, Homo sapien
aagatggcttaagagtagactaact

SEQ ID NO: 58910 - DNA, 25 bp, Homo sapien
acctggcatcaccctgaaggaattc

SEQ ID NO: 58911 - DNA, 25 bp, Homo sapien
tagtcacaaatacagtcctcgagtt

SEQ ID NO: 58912 - DNA, 25 bp, Homo sapien
ccacagaacagaaactaaaataacc

SEQ ID NO: 58913 - DNA, 25 bp, Homo sapien
tagcaatcaacagcatggggtgcaa

SEQ ID NO: 58914 - DNA, 25 bp, Homo sapien
ttcagcgtcacgatcagactgttac

SEQ ID NO: 58915 - DNA, 25 bp, Homo sapien
aagatggcttaagagtagactaact

SEQ ID NO: 58916 - DNA, 25 bp, Homo sapien
tgttggggaaatttaccaagatggc

SEQ ID NO: 58917 - DNA, 25 bp, Homo sapien
acctggcatcaccctgaaggaattc

SEQ ID NO: 58918 - DNA, 25 bp, Homo sapien
ccaaggtttccgaagacaatggctt

SEQ ID NO: 58919 - DNA, 25 bp, Homo sapien
ttcaggtcacaacagtaactatcag

SEQ ID NO: 58920 - DNA, 25 bp, Homo sapien
ttgcataggatgtgccaacaatcac

SEQ ID NO: 58921 - DNA, 25 bp, Homo sapien
acatgataatggatacacaagcttc

SEQ ID NO: 58922 - DNA, 25 bp, Homo sapien
ccaaggtttccgaagacaatggctt

SEQ ID NO: 58923 - DNA, 25 bp, Homo sapien
tagcaatcaacagcatggggtgcaa

SEQ ID NO: 58924 - DNA, 25 bp, Homo sapien
ttcaggtcacaacagtaactatcag

SEQ ID NO: 58925 - DNA, 25 bp, Homo sapien
ttcagcgtcacgatcagactgttac

SEQ ID NO: 58926 - DNA, 25 bp, Homo sapien
ttgcataggatgtgccaacaatcac

SEQ ID NO: 58927 - DNA, 25 bp, Homo sapien
acctggcatcaccctgaaggaattc

SEQ ID NO: 58928 - DNA, 25 bp, Homo sapien
tagtcacaaatacagtcctcgagtt

SEQ ID NO: 58929 - DNA, 25 bp, Homo sapien
aagatggcttaagagtagactaact

SEQ ID NO: 58930 - DNA, 25 bp, Homo sapien
tgttggggaaatttaccaagatggc

SEQ ID NO: 58931 - DNA, 25 bp, Homo sapien
ccacagaacagaaactaaaataacc

SEQ ID NO: 58932 - DNA, 25 bp, Homo sapien
acatgataatggatacacaagcttc

SEQ ID NO: 58933 - DNA, 25 bp, Homo sapien
tagtcacaaatacagtcctcgagtt

SEQ ID NO: 58934 - DNA, 25 bp, Homo sapien
ccacagaacagaaactaaaataacc

SEQ ID NO: 58935 - DNA, 25 bp, Homo sapien
tagcaatcaacagcatggggtgcaa

SEQ ID NO: 58936 - DNA, 25 bp, Homo sapien
ttcagcgtcacgatcagactgttac

SEQ ID NO: 58937 - DNA, 25 bp, Homo sapien
aagatggcttaagagtagactaact

SEQ ID NO: 58938 - DNA, 25 bp, Homo sapien
tgttggggaaatttaccaagatggc

SEQ ID NO: 58939 - DNA, 25 bp, Homo sapien
acctggcatcaccctgaaggaattc

SEQ ID NO: 58940 - DNA, 25 bp, Homo sapien
ccaaggtttccgaagacaatggctt

SEQ ID NO: 58941 - DNA, 25 bp, Homo sapien
ttcaggtcacaacagtaactatcag

SEQ ID NO: 58942 - DNA, 25 bp, Homo sapien
ttgcataggatgtgccaacaatcac

SEQ ID NO: 58943 - DNA, 25 bp, Homo sapien
acatgataatggatacacaagcttc

SEQ ID NO: 58944 - DNA, 25 bp, Homo sapien
acctggcatcaccctgaaggaattc

SEQ ID NO: 58945 - DNA, 25 bp, Homo sapien
ttgcataggatgtgccaacaatcac

SEQ ID NO: 58946 - DNA, 25 bp, Homo sapien
ttcagcgtcacgatcagactgttac

SEQ ID NO: 58947 - DNA, 25 bp, Homo sapien
tagcaatcaacagcatggggtgcaa

SEQ ID NO: 58948 - DNA, 25 bp, Homo sapien
tgttggggaaatttaccaagatggc

SEQ ID NO: 58949 - DNA, 25 bp, Homo sapien
ccaaggtttccgaagacaatggctt

SEQ ID NO: 58950 - DNA, 25 bp, Homo sapien
acatgataatggatacacaagcttc

SEQ ID NO: 58951 - DNA, 25 bp, Homo sapien
ttcaggtcacaacagtaactatcag

SEQ ID NO: 58952 - DNA, 25 bp, Homo sapien
aagatggcttaagagtagactaact

SEQ ID NO: 58953 - DNA, 25 bp, Homo sapien
tagtcacaaatacagtcctcgagtt

SEQ ID NO: 58954 - DNA, 25 bp, Homo sapien
ccacagaacagaaactaaaataacc

SEQ ID NO: 58955 - DNA, 25 bp, Homo sapien
tagtcacaaatacagtcctcgagtt

SEQ ID NO: 58956 - DNA, 25 bp, Homo sapien
ccacagaacagaaactaaaataacc

SEQ ID NO: 58957 - DNA, 25 bp, Homo sapien
tagcaatcaacagcatggggtgcaa

SEQ ID NO: 58958 - DNA, 25 bp, Homo sapien
ttcagcgtcacgatcagactgttac

SEQ ID NO: 58959 - DNA, 25 bp, Homo sapien
aagatggcttaagagtagactaact

SEQ ID NO: 58960 - DNA, 25 bp, Homo sapien
tgttggggaaatttaccaagatggc

SEQ ID NO: 58961 - DNA, 25 bp, Homo sapien
acctggcatcaccctgaaggaattc

SEQ ID NO: 58962 - DNA, 25 bp, Homo sapien
ccaaggtttccgaagacaatggctt

SEQ ID NO: 58963 - DNA, 25 bp, Homo sapien
ttcaggtcacaacagtaactatcag

SEQ ID NO: 58964 - DNA, 25 bp, Homo sapien
ttgcataggatgtgccaacaatcac

SEQ ID NO: 58965 - DNA, 25 bp, Homo sapien
acatgataatggatacacaagcttc

SEQ ID NO: 58966 - DNA, 25 bp, Homo sapien
tgcattttggttgcggctccaccgc

SEQ ID NO: 58967 - DNA, 25 bp, Homo sapien
gtagtcagacaaagtacgtccatct

SEQ ID NO: 58968 - DNA, 25 bp, Homo sapien
gggagtggtgtaagacttcttcttc

SEQ ID NO: 58969 - DNA, 25 bp, Homo sapien
tcaggaggaattccttccttatcct

SEQ ID NO: 58970 - DNA, 25 bp, Homo sapien
atattgtagtcagacaaagtacgtc

SEQ ID NO: 58971 - DNA, 25 bp, Homo sapien
tacgtccatcttctagctgcttgcc

SEQ ID NO: 58972 - DNA, 25 bp, Homo sapien
ttctatcgtatccgagggttcaacc

SEQ ID NO: 58973 - DNA, 25 bp, Homo sapien
tctggtttgttgaaacagtaagtca

SEQ ID NO: 58974 - DNA, 25 bp, Homo sapien
gacgaaggcgactaattttgccatt

SEQ ID NO: 58975 - DNA, 25 bp, Homo sapien
atccgagggttcaacctcgagggtg

SEQ ID NO: 58976 - DNA, 25 bp, Homo sapien
gcactctcgacgaaggcgactaatt

SEQ ID NO: 58977 - DNA, 25 bp, Homo sapien
tgcattttggttgcggctccaccgc

SEQ ID NO: 58978 - DNA, 25 bp, Homo sapien
atccgagggttcaacctcgagggtg

SEQ ID NO: 58979 - DNA, 25 bp, Homo sapien
ttctatcgtatccgagggttcaacc

SEQ ID NO: 58980 - DNA, 25 bp, Homo sapien
tcaggaggaattccttccttatcct

SEQ ID NO: 58981 - DNA, 25 bp, Homo sapien
tacgtccatcttctagctgcttgcc

SEQ ID NO: 58982 - DNA, 25 bp, Homo sapien
gtagtcagacaaagtacgtccatct

SEQ ID NO: 58983 - DNA, 25 bp, Homo sapien
atattgtagtcagacaaagtacgtc

SEQ ID NO: 58984 - DNA, 25 bp, Homo sapien
gggagtggtgtaagacttcttcttc

SEQ ID NO: 58985 - DNA, 25 bp, Homo sapien
gacgaaggcgactaattttgccatt

SEQ ID NO: 58986 - DNA, 25 bp, Homo sapien
gcactctcgacgaaggcgactaatt

SEQ ID NO: 58987 - DNA, 25 bp, Homo sapien
tctggtttgttgaaacagtaagtca

SEQ ID NO: 58988 - DNA, 25 bp, Homo sapien
tacgtccatcttctagctgcttgcc

SEQ ID NO: 58989 - DNA, 25 bp, Homo sapien
atattgtagtcagacaaagtacgtc

SEQ ID NO: 58990 - DNA, 25 bp, Homo sapien
gcactctcgacgaaggcgactaatt

SEQ ID NO: 58991 - DNA, 25 bp, Homo sapien
gggagtggtgtaagacttcttcttc

SEQ ID NO: 58992 - DNA, 25 bp, Homo sapien
tcaggaggaattccttccttatcct

SEQ ID NO: 58993 - DNA, 25 bp, Homo sapien
tgcattttggttgcggctccaccgc

SEQ ID NO: 58994 - DNA, 25 bp, Homo sapien
gtagtcagacaaagtacgtccatct

SEQ ID NO: 58995 - DNA, 25 bp, Homo sapien
ttctatcgtatccgagggttcaacc

SEQ ID NO: 58996 - DNA, 25 bp, Homo sapien
tctggtttgttgaaacagtaagtca

SEQ ID NO: 58997 - DNA, 25 bp, Homo sapien
atccgagggttcaacctcgagggtg

SEQ ID NO: 58998 - DNA, 25 bp, Homo sapien
gacgaaggcgactaattttgccatt

SEQ ID NO: 58999 - DNA, 25 bp, Homo sapien
tgcattttggttgcggctccaccgc

SEQ ID NO: 59000 - DNA, 25 bp, Homo sapien
atccgagggttcaacctcgagggtg

SEQ ID NO: 59001 - DNA, 25 bp, Homo sapien
ttctatcgtatccgagggttcaacc

SEQ ID NO: 59002 - DNA, 25 bp, Homo sapien
tcaggaggaattccttccttatcct

SEQ ID NO: 59003 - DNA, 25 bp, Homo sapien
tacgtccatcttctagctgcttgcc

SEQ ID NO: 59004 - DNA, 25 bp, Homo sapien
gtagtcagacaaagtacgtccatct

SEQ ID NO: 59005 - DNA, 25 bp, Homo sapien
atattgtagtcagacaaagtacgtc

SEQ ID NO: 59006 - DNA, 25 bp, Homo sapien
gggagtggtgtaagacttcttcttc

SEQ ID NO: 59007 - DNA, 25 bp, Homo sapien
gacgaaggcgactaattttgccatt

SEQ ID NO: 59008 - DNA, 25 bp, Homo sapien
gcactctcgacgaaggcgactaatt

SEQ ID NO: 59009 - DNA, 25 bp, Homo sapien
tctggtttgttgaaacagtaagtca

SEQ ID NO: 59010 - DNA, 25 bp, Homo sapien
ttctatcgtatccgagggttcaacc

SEQ ID NO: 59011 - DNA, 25 bp, Homo sapien
tcaggaggaattccttccttatcct

SEQ ID NO: 59012 - DNA, 25 bp, Homo sapien
gggagtggtgtaagacttcttcttc

SEQ ID NO: 59013 - DNA, 25 bp, Homo sapien
tgcattttggttgcggctccaccgc

SEQ ID NO: 59014 - DNA, 25 bp, Homo sapien
gacgaaggcgactaattttgccatt

SEQ ID NO: 59015 - DNA, 25 bp, Homo sapien
atattgtagtcagacaaagtacgtc

SEQ ID NO: 59016 - DNA, 25 bp, Homo sapien
gtagtcagacaaagtacgtccatct

SEQ ID NO: 59017 - DNA, 25 bp, Homo sapien
tctggtttgttgaaacagtaagtca

SEQ ID NO: 59018 - DNA, 25 bp, Homo sapien
tacgtccatcttctagctgcttgcc

SEQ ID NO: 59019 - DNA, 25 bp, Homo sapien
atccgagggttcaacctcgagggtg

SEQ ID NO: 59020 - DNA, 25 bp, Homo sapien
gcactctcgacgaaggcgactaatt

SEQ ID NO: 59021 - DNA, 25 bp, Homo sapien
tgcattttggttgcggctccaccgc

SEQ ID NO: 59022 - DNA, 25 bp, Homo sapien
atccgagggttcaacctcgagggtg

SEQ ID NO: 59023 - DNA, 25 bp, Homo sapien
ttctatcgtatccgagggttcaacc

SEQ ID NO: 59024 - DNA, 25 bp, Homo sapien
tcaggaggaattccttccttatcct

SEQ ID NO: 59025 - DNA, 25 bp, Homo sapien
tacgtccatcttctagctgcttgcc

SEQ ID NO: 59026 - DNA, 25 bp, Homo sapien
gtagtcagacaaagtacgtccatct

SEQ ID NO: 59027 - DNA, 25 bp, Homo sapien
atattgtagtcagacaaagtacgtc

SEQ ID NO: 59028 - DNA, 25 bp, Homo sapien
gggagtggtgtaagacttcttcttc

SEQ ID NO: 59029 - DNA, 25 bp, Homo sapien
gacgaaggcgactaattttgccatt

SEQ ID NO: 59030 - DNA, 25 bp, Homo sapien
gcactctcgacgaaggcgactaatt

SEQ ID NO: 59031 - DNA, 25 bp, Homo sapien
tctggtttgttgaaacagtaagtca

SEQ ID NO: 59032 - DNA, 25 bp, Homo sapien
tgcattttggttgcggctccaccgc

SEQ ID NO: 59033 - DNA, 25 bp, Homo sapien
atccgagggttcaacctcgagggtg

SEQ ID NO: 59034 - DNA, 25 bp, Homo sapien
ttctatcgtatccgagggttcaacc

SEQ ID NO: 59035 - DNA, 25 bp, Homo sapien
tcaggaggaattccttccttatcct

SEQ ID NO: 59036 - DNA, 25 bp, Homo sapien
tacgtccatcttctagctgcttgcc

SEQ ID NO: 59037 - DNA, 25 bp, Homo sapien
gtagtcagacaaagtacgtccatct

SEQ ID NO: 59038 - DNA, 25 bp, Homo sapien
atattgtagtcagacaaagtacgtc

SEQ ID NO: 59039 - DNA, 25 bp, Homo sapien
gggagtggtgtaagacttcttcttc

SEQ ID NO: 59040 - DNA, 25 bp, Homo sapien
gacgaaggcgactaattttgccatt

SEQ ID NO: 59041 - DNA, 25 bp, Homo sapien
gcactctcgacgaaggcgactaatt

SEQ ID NO: 59042 - DNA, 25 bp, Homo sapien
tctggtttgttgaaacagtaagtca

SEQ ID NO: 59043 - DNA, 25 bp, Homo sapien
gtagtcagacaaagtacgtccatct

SEQ ID NO: 59044 - DNA, 25 bp, Homo sapien
tgcattttggttgcggctccaccgc

SEQ ID NO: 59045 - DNA, 25 bp, Homo sapien
tacgtccatcttctagctgcttgcc

SEQ ID NO: 59046 - DNA, 25 bp, Homo sapien
gggagtggtgtaagacttcttcttc

SEQ ID NO: 59047 - DNA, 25 bp, Homo sapien
ttctatcgtatccgagggttcaacc

SEQ ID NO: 59048 - DNA, 25 bp, Homo sapien
atattgtagtcagacaaagtacgtc

SEQ ID NO: 59049 - DNA, 25 bp, Homo sapien
tctggtttgttgaaacagtaagtca

SEQ ID NO: 59050 - DNA, 25 bp, Homo sapien
gcactctcgacgaaggcgactaatt

SEQ ID NO: 59051 - DNA, 25 bp, Homo sapien
gacgaaggcgactaattttgccatt

SEQ ID NO: 59052 - DNA, 25 bp, Homo sapien
tcaggaggaattccttccttatcct

SEQ ID NO: 59053 - DNA, 25 bp, Homo sapien
atccgagggttcaacctcgagggtg

SEQ ID NO: 59054 - DNA, 25 bp, Homo sapien
tgcattttggttgcggctccaccgc

SEQ ID NO: 59055 - DNA, 25 bp, Homo sapien
atccgagggttcaacctcgagggtg

SEQ ID NO: 59056 - DNA, 25 bp, Homo sapien
ttctatcgtatccgagggttcaacc

SEQ ID NO: 59057 - DNA, 25 bp, Homo sapien
tcaggaggaattccttccttatcct

SEQ ID NO: 59058 - DNA, 25 bp, Homo sapien
tacgtccatcttctagctgcttgcc

SEQ ID NO: 59059 - DNA, 25 bp, Homo sapien
gtagtcagacaaagtacgtccatct

SEQ ID NO: 59060 - DNA, 25 bp, Homo sapien
atattgtagtcagacaaagtacgtc

SEQ ID NO: 59061 - DNA, 25 bp, Homo sapien
gggagtggtgtaagacttcttcttc

SEQ ID NO: 59062 - DNA, 25 bp, Homo sapien
gacgaaggcgactaattttgccatt

SEQ ID NO: 59063 - DNA, 25 bp, Homo sapien
gcactctcgacgaaggcgactaatt

SEQ ID NO: 59064 - DNA, 25 bp, Homo sapien
tctggtttgttgaaacagtaagtca

SEQ ID NO: 59065 - DNA, 25 bp, Homo sapien
atccgagggttcaacctcgagggtg

SEQ ID NO: 59066 - DNA, 25 bp, Homo sapien
tctggtttgttgaaacagtaagtca

SEQ ID NO: 59067 - DNA, 25 bp, Homo sapien
gtagtcagacaaagtacgtccatct

SEQ ID NO: 59068 - DNA, 25 bp, Homo sapien
gggagtggtgtaagacttcttcttc

SEQ ID NO: 59069 - DNA, 25 bp, Homo sapien
gcactctcgacgaaggcgactaatt

SEQ ID NO: 59070 - DNA, 25 bp, Homo sapien
tacgtccatcttctagctgcttgcc

SEQ ID NO: 59071 - DNA, 25 bp, Homo sapien
tcaggaggaattccttccttatcct

SEQ ID NO: 59072 - DNA, 25 bp, Homo sapien
atattgtagtcagacaaagtacgtc

SEQ ID NO: 59073 - DNA, 25 bp, Homo sapien
tgcattttggttgcggctccaccgc

SEQ ID NO: 59074 - DNA, 25 bp, Homo sapien
gacgaaggcgactaattttgccatt

SEQ ID NO: 59075 - DNA, 25 bp, Homo sapien
ttctatcgtatccgagggttcaacc

SEQ ID NO: 59076 - DNA, 25 bp, Homo sapien
tgcattttggttgcggctccaccgc

SEQ ID NO: 59077 - DNA, 25 bp, Homo sapien
atccgagggttcaacctcgagggtg

SEQ ID NO: 59078 - DNA, 25 bp, Homo sapien
ttctatcgtatccgagggttcaacc

SEQ ID NO: 59079 - DNA, 25 bp, Homo sapien
tcaggaggaattccttccttatcct

SEQ ID NO: 59080 - DNA, 25 bp, Homo sapien
tacgtccatcttctagctgcttgcc

SEQ ID NO: 59081 - DNA, 25 bp, Homo sapien
gtagtcagacaaagtacgtccatct

SEQ ID NO: 59082 - DNA, 25 bp, Homo sapien
atattgtagtcagacaaagtacgtc

SEQ ID NO: 59083 - DNA, 25 bp, Homo sapien
gggagtggtgtaagacttcttcttc

SEQ ID NO: 59084 - DNA, 25 bp, Homo sapien
gacgaaggcgactaattttgccatt

SEQ ID NO: 59085 - DNA, 25 bp, Homo sapien
gcactctcgacgaaggcgactaatt

SEQ ID NO: 59086 - DNA, 25 bp, Homo sapien
tctggtttgttgaaacagtaagtca

SEQ ID NO: 59087 - DNA, 25 bp, Homo sapien
gggagtggtgtaagacttcttcttc

SEQ ID NO: 59088 - DNA, 25 bp, Homo sapien
atattgtagtcagacaaagtacgtc

SEQ ID NO: 59089 - DNA, 25 bp, Homo sapien
tctggtttgttgaaacagtaagtca

SEQ ID NO: 59090 - DNA, 25 bp, Homo sapien
gacgaaggcgactaattttgccatt

SEQ ID NO: 59091 - DNA, 25 bp, Homo sapien
ttctatcgtatccgagggttcaacc

SEQ ID NO: 59092 - DNA, 25 bp, Homo sapien
tacgtccatcttctagctgcttgcc

SEQ ID NO: 59093 - DNA, 25 bp, Homo sapien
atccgagggttcaacctcgagggtg

SEQ ID NO: 59094 - DNA, 25 bp, Homo sapien
tcaggaggaattccttccttatcct

SEQ ID NO: 59095 - DNA, 25 bp, Homo sapien
gcactctcgacgaaggcgactaatt

SEQ ID NO: 59096 - DNA, 25 bp, Homo sapien
gtagtcagacaaagtacgtccatct

SEQ ID NO: 59097 - DNA, 25 bp, Homo sapien
tgcattttggttgcggctccaccgc

SEQ ID NO: 59098 - DNA, 25 bp, Homo sapien
tgcattttggttgcggctccaccgc

SEQ ID NO: 59099 - DNA, 25 bp, Homo sapien
atccgagggttcaacctcgagggtg

SEQ ID NO: 59100 - DNA, 25 bp, Homo sapien
ttctatcgtatccgagggttcaacc

SEQ ID NO: 59101 - DNA, 25 bp, Homo sapien
tcaggaggaattccttccttatcct

SEQ ID NO: 59102 - DNA, 25 bp, Homo sapien
tacgtccatcttctagctgcttgcc

SEQ ID NO: 59103 - DNA, 25 bp, Homo sapien
gtagtcagacaaagtacgtccatct

SEQ ID NO: 59104 - DNA, 25 bp, Homo sapien
atattgtagtcagacaaagtacgtc

SEQ ID NO: 59105 - DNA, 25 bp, Homo sapien
gggagtggtgtaagacttcttcttc

SEQ ID NO: 59106 - DNA, 25 bp, Homo sapien
gacgaaggcgactaattttgccatt

SEQ ID NO: 59107 - DNA, 25 bp, Homo sapien
gcactctcgacgaaggcgactaatt

SEQ ID NO: 59108 - DNA, 25 bp, Homo sapien
tctggtttgttgaaacagtaagtca

SEQ ID NO: 59109 - DNA, 25 bp, Homo sapien
tctggtttgttgaaacagtaagtca

SEQ ID NO: 59110 - DNA, 25 bp, Homo sapien
ttctatcgtatccgagggttcaacc

SEQ ID NO: 59111 - DNA, 25 bp, Homo sapien
gggagtggtgtaagacttcttcttc

SEQ ID NO: 59112 - DNA, 25 bp, Homo sapien
tacgtccatcttctagctgcttgcc

SEQ ID NO: 59113 - DNA, 25 bp, Homo sapien
tgcattttggttgcggctccaccgc

SEQ ID NO: 59114 - DNA, 25 bp, Homo sapien
atattgtagtcagacaaagtacgtc

SEQ ID NO: 59115 - DNA, 25 bp, Homo sapien
gcactctcgacgaaggcgactaatt

SEQ ID NO: 59116 - DNA, 25 bp, Homo sapien
atccgagggttcaacctcgagggtg

SEQ ID NO: 59117 - DNA, 25 bp, Homo sapien
gacgaaggcgactaattttgccatt

SEQ ID NO: 59118 - DNA, 25 bp, Homo sapien
gtagtcagacaaagtacgtccatct

SEQ ID NO: 59119 - DNA, 25 bp, Homo sapien
tcaggaggaattccttccttatcct

SEQ ID NO: 59120 - DNA, 25 bp, Homo sapien
tgcattttggttgcggctccaccgc

SEQ ID NO: 59121 - DNA, 25 bp, Homo sapien
atccgagggttcaacctcgagggtg

SEQ ID NO: 59122 - DNA, 25 bp, Homo sapien
ttctatcgtatccgagggttcaacc

SEQ ID NO: 59123 - DNA, 25 bp, Homo sapien
tcaggaggaattccttccttatcct

SEQ ID NO: 59124 - DNA, 25 bp, Homo sapien
tacgtccatcttctagctgcttgcc

SEQ ID NO: 59125 - DNA, 25 bp, Homo sapien
gtagtcagacaaagtacgtccatct

SEQ ID NO: 59126 - DNA, 25 bp, Homo sapien
atattgtagtcagacaaagtacgtc

SEQ ID NO: 59127 - DNA, 25 bp, Homo sapien
gggagtggtgtaagacttcttcttc

SEQ ID NO: 59128 - DNA, 25 bp, Homo sapien
gacgaaggcgactaattttgccatt

SEQ ID NO: 59129 - DNA, 25 bp, Homo sapien
gcactctcgacgaaggcgactaatt

SEQ ID NO: 59130 - DNA, 25 bp, Homo sapien
tctggtttgttgaaacagtaagtca

SEQ ID NO: 59131 - DNA, 25 bp, Homo sapien
tgcattttggttgcggctccaccgc

SEQ ID NO: 59132 - DNA, 25 bp, Homo sapien
gcactctcgacgaaggcgactaatt

SEQ ID NO: 59133 - DNA, 25 bp, Homo sapien
tctggtttgttgaaacagtaagtca

SEQ ID NO: 59134 - DNA, 25 bp, Homo sapien
tacgtccatcttctagctgcttgcc

SEQ ID NO: 59135 - DNA, 25 bp, Homo sapien
atccgagggttcaacctcgagggtg

SEQ ID NO: 59136 - DNA, 25 bp, Homo sapien
gggagtggtgtaagacttcttcttc

SEQ ID NO: 59137 - DNA, 25 bp, Homo sapien
gtagtcagacaaagtacgtccatct

SEQ ID NO: 59138 - DNA, 25 bp, Homo sapien
atattgtagtcagacaaagtacgtc

SEQ ID NO: 59139 - DNA, 25 bp, Homo sapien
tcaggaggaattccttccttatcct

SEQ ID NO: 59140 - DNA, 25 bp, Homo sapien
gacgaaggcgactaattttgccatt

SEQ ID NO: 59141 - DNA, 25 bp, Homo sapien
ttctatcgtatccgagggttcaacc

SEQ ID NO: 59142 - DNA, 25 bp, Homo sapien
tgcattttggttgcggctccaccgc

SEQ ID NO: 59143 - DNA, 25 bp, Homo sapien
atattgtagtcagacaaagtacgtc

SEQ ID NO: 59144 - DNA, 25 bp, Homo sapien
tcaggaggaattccttccttatcct

SEQ ID NO: 59145 - DNA, 25 bp, Homo sapien
gtagtcagacaaagtacgtccatct

SEQ ID NO: 59146 - DNA, 25 bp, Homo sapien
gcactctcgacgaaggcgactaatt

SEQ ID NO: 59147 - DNA, 25 bp, Homo sapien
gacgaaggcgactaattttgccatt

SEQ ID NO: 59148 - DNA, 25 bp, Homo sapien
tacgtccatcttctagctgcttgcc

SEQ ID NO: 59149 - DNA, 25 bp, Homo sapien
tctggtttgttgaaacagtaagtca

SEQ ID NO: 59150 - DNA, 25 bp, Homo sapien
gggagtggtgtaagacttcttcttc

SEQ ID NO: 59151 - DNA, 25 bp, Homo sapien
atccgagggttcaacctcgagggtg

SEQ ID NO: 59152 - DNA, 25 bp, Homo sapien
ttctatcgtatccgagggttcaacc

SEQ ID NO: 59153 - DNA, 25 bp, Homo sapien
tgcattttggttgcggctccaccgc

SEQ ID NO: 59154 - DNA, 25 bp, Homo sapien
atccgagggttcaacctcgagggtg

SEQ ID NO: 59155 - DNA, 25 bp, Homo sapien
ttctatcgtatccgagggttcaacc

SEQ ID NO: 59156 - DNA, 25 bp, Homo sapien
tcaggaggaattccttccttatcct

SEQ ID NO: 59157 - DNA, 25 bp, Homo sapien
tacgtccatcttctagctgcttgcc

SEQ ID NO: 59158 - DNA, 25 bp, Homo sapien
gtagtcagacaaagtacgtccatct

SEQ ID NO: 59159 - DNA, 25 bp, Homo sapien
atattgtagtcagacaaagtacgtc

SEQ ID NO: 59160 - DNA, 25 bp, Homo sapien
gggagtggtgtaagacttcttcttc

SEQ ID NO: 59161 - DNA, 25 bp, Homo sapien
gacgaaggcgactaattttgccatt

SEQ ID NO: 59162 - DNA, 25 bp, Homo sapien
gcactctcgacgaaggcgactaatt

SEQ ID NO: 59163 - DNA, 25 bp, Homo sapien
tctggtttgttgaaacagtaagtca

SEQ ID NO: 59164 - DNA, 25 bp, Homo sapien
tcaggaggaattccttccttatcct

SEQ ID NO: 59165 - DNA, 25 bp, Homo sapien
atccgagggttcaacctcgagggtg

SEQ ID NO: 59166 - DNA, 25 bp, Homo sapien
tgcattttggttgcggctccaccgc

SEQ ID NO: 59167 - DNA, 25 bp, Homo sapien
tacgtccatcttctagctgcttgcc

SEQ ID NO: 59168 - DNA, 25 bp, Homo sapien
gggagtggtgtaagacttcttcttc

SEQ ID NO: 59169 - DNA, 25 bp, Homo sapien
gcactctcgacgaaggcgactaatt

SEQ ID NO: 59170 - DNA, 25 bp, Homo sapien
gacgaaggcgactaattttgccatt

SEQ ID NO: 59171 - DNA, 25 bp, Homo sapien
ttctatcgtatccgagggttcaacc

SEQ ID NO: 59172 - DNA, 25 bp, Homo sapien
tctggtttgttgaaacagtaagtca

SEQ ID NO: 59173 - DNA, 25 bp, Homo sapien
gtagtcagacaaagtacgtccatct

SEQ ID NO: 59174 - DNA, 25 bp, Homo sapien
atattgtagtcagacaaagtacgtc

SEQ ID NO: 59175 - DNA, 25 bp, Homo sapien
tgcattttggttgcggctccaccgc

SEQ ID NO: 59176 - DNA, 25 bp, Homo sapien
atccgagggttcaacctcgagggtg

SEQ ID NO: 59177 - DNA, 25 bp, Homo sapien
ttctatcgtatccgagggttcaacc

SEQ ID NO: 59178 - DNA, 25 bp, Homo sapien
tcaggaggaattccttccttatcct

SEQ ID NO: 59179 - DNA, 25 bp, Homo sapien
tacgtccatcttctagctgcttgcc

SEQ ID NO: 59180 - DNA, 25 bp, Homo sapien
gtagtcagacaaagtacgtccatct

SEQ ID NO: 59181 - DNA, 25 bp, Homo sapien
atattgtagtcagacaaagtacgtc

SEQ ID NO: 59182 - DNA, 25 bp, Homo sapien
gggagtggtgtaagacttcttcttc

SEQ ID NO: 59183 - DNA, 25 bp, Homo sapien
gacgaaggcgactaattttgccatt

SEQ ID NO: 59184 - DNA, 25 bp, Homo sapien
gcactctcgacgaaggcgactaatt

SEQ ID NO: 59185 - DNA, 25 bp, Homo sapien
tctggtttgttgaaacagtaagtca

SEQ ID NO: 59186 - DNA, 25 bp, Homo sapien
gggagtggtgtaagacttcttcttc

SEQ ID NO: 59187 - DNA, 25 bp, Homo sapien
tacgtccatcttctagctgcttgcc

SEQ ID NO: 59188 - DNA, 25 bp, Homo sapien
gtagtcagacaaagtacgtccatct

SEQ ID NO: 59189 - DNA, 25 bp, Homo sapien
gacgaaggcgactaattttgccatt

SEQ ID NO: 59190 - DNA, 25 bp, Homo sapien
gcactctcgacgaaggcgactaatt

SEQ ID NO: 59191 - DNA, 25 bp, Homo sapien
ttctatcgtatccgagggttcaacc

SEQ ID NO: 59192 - DNA, 25 bp, Homo sapien
atccgagggttcaacctcgagggtg

SEQ ID NO: 59193 - DNA, 25 bp, Homo sapien
tctggtttgttgaaacagtaagtca

SEQ ID NO: 59194 - DNA, 25 bp, Homo sapien
atattgtagtcagacaaagtacgtc

SEQ ID NO: 59195 - DNA, 25 bp, Homo sapien
tgcattttggttgcggctccaccgc

SEQ ID NO: 59196 - DNA, 25 bp, Homo sapien
tcaggaggaattccttccttatcct

SEQ ID NO: 59197 - DNA, 25 bp, Homo sapien
tgcattttggttgcggctccaccgc

SEQ ID NO: 59198 - DNA, 25 bp, Homo sapien
atccgagggttcaacctcgagggtg

SEQ ID NO: 59199 - DNA, 25 bp, Homo sapien
ttctatcgtatccgagggttcaacc

SEQ ID NO: 59200 - DNA, 25 bp, Homo sapien
tcaggaggaattccttccttatcct

SEQ ID NO: 59201 - DNA, 25 bp, Homo sapien
tacgtccatcttctagctgcttgcc

SEQ ID NO: 59202 - DNA, 25 bp, Homo sapien
gtagtcagacaaagtacgtccatct

SEQ ID NO: 59203 - DNA, 25 bp, Homo sapien
atattgtagtcagacaaagtacgtc

SEQ ID NO: 59204 - DNA, 25 bp, Homo sapien
gggagtggtgtaagacttcttcttc

SEQ ID NO: 59205 - DNA, 25 bp, Homo sapien
gacgaaggcgactaattttgccatt

SEQ ID NO: 59206 - DNA, 25 bp, Homo sapien
gcactctcgacgaaggcgactaatt

SEQ ID NO: 59207 - DNA, 25 bp, Homo sapien
tctggtttgttgaaacagtaagtca

SEQ ID NO: 59208 - DNA, 25 bp, Homo sapien
gggagtggtgtaagacttcttcttc

SEQ ID NO: 59209 - DNA, 25 bp, Homo sapien
tacgtccatcttctagctgcttgcc

SEQ ID NO: 59210 - DNA, 25 bp, Homo sapien
gacgaaggcgactaattttgccatt

SEQ ID NO: 59211 - DNA, 25 bp, Homo sapien
gcactctcgacgaaggcgactaatt

SEQ ID NO: 59212 - DNA, 25 bp, Homo sapien
atattgtagtcagacaaagtacgtc

SEQ ID NO: 59213 - DNA, 25 bp, Homo sapien
tctggtttgttgaaacagtaagtca

SEQ ID NO: 59214 - DNA, 25 bp, Homo sapien
tgcattttggttgcggctccaccgc

SEQ ID NO: 59215 - DNA, 25 bp, Homo sapien
gtagtcagacaaagtacgtccatct

SEQ ID NO: 59216 - DNA, 25 bp, Homo sapien
atccgagggttcaacctcgagggtg

SEQ ID NO: 59217 - DNA, 25 bp, Homo sapien
tcaggaggaattccttccttatcct

SEQ ID NO: 59218 - DNA, 25 bp, Homo sapien
ttctatcgtatccgagggttcaacc

SEQ ID NO: 59219 - DNA, 25 bp, Homo sapien
tgcattttggttgcggctccaccgc

SEQ ID NO: 59220 - DNA, 25 bp, Homo sapien
atccgagggttcaacctcgagggtg

SEQ ID NO: 59221 - DNA, 25 bp, Homo sapien
ttctatcgtatccgagggttcaacc

SEQ ID NO: 59222 - DNA, 25 bp, Homo sapien
tcaggaggaattccttccttatcct

SEQ ID NO: 59223 - DNA, 25 bp, Homo sapien
tacgtccatcttctagctgcttgcc

SEQ ID NO: 59224 - DNA, 25 bp, Homo sapien
gtagtcagacaaagtacgtccatct

SEQ ID NO: 59225 - DNA, 25 bp, Homo sapien
atattgtagtcagacaaagtacgtc

SEQ ID NO: 59226 - DNA, 25 bp, Homo sapien
gggagtggtgtaagacttcttcttc

SEQ ID NO: 59227 - DNA, 25 bp, Homo sapien
gacgaaggcgactaattttgccatt

SEQ ID NO: 59228 - DNA, 25 bp, Homo sapien
gcactctcgacgaaggcgactaatt

SEQ ID NO: 59229 - DNA, 25 bp, Homo sapien
tctggtttgttgaaacagtaagtca

SEQ ID NO: 59230 - DNA, 25 bp, Homo sapien
gcactctcgacgaaggcgactaatt

SEQ ID NO: 59231 - DNA, 25 bp, Homo sapien
ttctatcgtatccgagggttcaacc

SEQ ID NO: 59232 - DNA, 25 bp, Homo sapien
tacgtccatcttctagctgcttgcc

SEQ ID NO: 59233 - DNA, 25 bp, Homo sapien
tctggtttgttgaaacagtaagtca

SEQ ID NO: 59234 - DNA, 25 bp, Homo sapien
gtagtcagacaaagtacgtccatct

SEQ ID NO: 59235 - DNA, 25 bp, Homo sapien
gacgaaggcgactaattttgccatt

SEQ ID NO: 59236 - DNA, 25 bp, Homo sapien
atccgagggttcaacctcgagggtg

SEQ ID NO: 59237 - DNA, 25 bp, Homo sapien
tcaggaggaattccttccttatcct

SEQ ID NO: 59238 - DNA, 25 bp, Homo sapien
atattgtagtcagacaaagtacgtc

SEQ ID NO: 59239 - DNA, 25 bp, Homo sapien
tgcattttggttgcggctccaccgc

SEQ ID NO: 59240 - DNA, 25 bp, Homo sapien
gggagtggtgtaagacttcttcttc

SEQ ID NO: 59241 - DNA, 25 bp, Homo sapien
tgcattttggttgcggctccaccgc

SEQ ID NO: 59242 - DNA, 25 bp, Homo sapien
atccgagggttcaacctcgagggtg

SEQ ID NO: 59243 - DNA, 25 bp, Homo sapien
ttctatcgtatccgagggttcaacc

SEQ ID NO: 59244 - DNA, 25 bp, Homo sapien
tcaggaggaattccttccttatcct

SEQ ID NO: 59245 - DNA, 25 bp, Homo sapien
tacgtccatcttctagctgcttgcc

SEQ ID NO: 59246 - DNA, 25 bp, Homo sapien
gtagtcagacaaagtacgtccatct

SEQ ID NO: 59247 - DNA, 25 bp, Homo sapien
atattgtagtcagacaaagtacgtc

SEQ ID NO: 59248 - DNA, 25 bp, Homo sapien
gggagtggtgtaagacttcttcttc

SEQ ID NO: 59249 - DNA, 25 bp, Homo sapien
gacgaaggcgactaattttgccatt

SEQ ID NO: 59250 - DNA, 25 bp, Homo sapien
gcactctcgacgaaggcgactaatt

SEQ ID NO: 59251 - DNA, 25 bp, Homo sapien
tctggtttgttgaaacagtaagtca

SEQ ID NO: 59252 - DNA, 25 bp, Homo sapien
tacgtccatcttctagctgcttgcc

SEQ ID NO: 59253 - DNA, 25 bp, Homo sapien
gtagtcagacaaagtacgtccatct

SEQ ID NO: 59254 - DNA, 25 bp, Homo sapien
gcactctcgacgaaggcgactaatt

SEQ ID NO: 59255 - DNA, 25 bp, Homo sapien
ttctatcgtatccgagggttcaacc

SEQ ID NO: 59256 - DNA, 25 bp, Homo sapien
tctggtttgttgaaacagtaagtca

SEQ ID NO: 59257 - DNA, 25 bp, Homo sapien
tgcattttggttgcggctccaccgc

SEQ ID NO: 59258 - DNA, 25 bp, Homo sapien
gggagtggtgtaagacttcttcttc

SEQ ID NO: 59259 - DNA, 25 bp, Homo sapien
tcaggaggaattccttccttatcct

SEQ ID NO: 59260 - DNA, 25 bp, Homo sapien
atattgtagtcagacaaagtacgtc

SEQ ID NO: 59261 - DNA, 25 bp, Homo sapien
atccgagggttcaacctcgagggtg

SEQ ID NO: 59262 - DNA, 25 bp, Homo sapien
gacgaaggcgactaattttgccatt

SEQ ID NO: 59263 - DNA, 25 bp, Homo sapien
tgcattttggttgcggctccaccgc

SEQ ID NO: 59264 - DNA, 25 bp, Homo sapien
atccgagggttcaacctcgagggtg

SEQ ID NO: 59265 - DNA, 25 bp, Homo sapien
ttctatcgtatccgagggttcaacc

SEQ ID NO: 59266 - DNA, 25 bp, Homo sapien
tcaggaggaattccttccttatcct

SEQ ID NO: 59267 - DNA, 25 bp, Homo sapien
tacgtccatcttctagctgcttgcc

SEQ ID NO: 59268 - DNA, 25 bp, Homo sapien
gtagtcagacaaagtacgtccatct

SEQ ID NO: 59269 - DNA, 25 bp, Homo sapien
atattgtagtcagacaaagtacgtc

SEQ ID NO: 59270 - DNA, 25 bp, Homo sapien
gggagtggtgtaagacttcttcttc

SEQ ID NO: 59271 - DNA, 25 bp, Homo sapien
gacgaaggcgactaattttgccatt

SEQ ID NO: 59272 - DNA, 25 bp, Homo sapien
gcactctcgacgaaggcgactaatt

SEQ ID NO: 59273 - DNA, 25 bp, Homo sapien
tctggtttgttgaaacagtaagtca

SEQ ID NO: 59274 - DNA, 25 bp, Homo sapien
tgcattttggttgcggctccaccgc

SEQ ID NO: 59275 - DNA, 25 bp, Homo sapien
atccgagggttcaacctcgagggtg

SEQ ID NO: 59276 - DNA, 25 bp, Homo sapien
ttctatcgtatccgagggttcaacc

SEQ ID NO: 59277 - DNA, 25 bp, Homo sapien
tcaggaggaattccttccttatcct

SEQ ID NO: 59278 - DNA, 25 bp, Homo sapien
tacgtccatcttctagctgcttgcc

SEQ ID NO: 59279 - DNA, 25 bp, Homo sapien
gtagtcagacaaagtacgtccatct

SEQ ID NO: 59280 - DNA, 25 bp, Homo sapien
atattgtagtcagacaaagtacgtc

SEQ ID NO: 59281 - DNA, 25 bp, Homo sapien
gggagtggtgtaagacttcttcttc

SEQ ID NO: 59282 - DNA, 25 bp, Homo sapien
gacgaaggcgactaattttgccatt

SEQ ID NO: 59283 - DNA, 25 bp, Homo sapien
gcactctcgacgaaggcgactaatt

SEQ ID NO: 59284 - DNA, 25 bp, Homo sapien
tctggtttgttgaaacagtaagtca

SEQ ID NO: 59285 - DNA, 25 bp, Homo sapien
gacgaaggcgactaattttgccatt

SEQ ID NO: 59286 - DNA, 25 bp, Homo sapien
gtagtcagacaaagtacgtccatct

SEQ ID NO: 59287 - DNA, 25 bp, Homo sapien
atattgtagtcagacaaagtacgtc

SEQ ID NO: 59288 - DNA, 25 bp, Homo sapien
atccgagggttcaacctcgagggtg

SEQ ID NO: 59289 - DNA, 25 bp, Homo sapien
ttctatcgtatccgagggttcaacc

SEQ ID NO: 59290 - DNA, 25 bp, Homo sapien
gcactctcgacgaaggcgactaatt

SEQ ID NO: 59291 - DNA, 25 bp, Homo sapien
tacgtccatcttctagctgcttgcc

SEQ ID NO: 59292 - DNA, 25 bp, Homo sapien
gggagtggtgtaagacttcttcttc

SEQ ID NO: 59293 - DNA, 25 bp, Homo sapien
tcaggaggaattccttccttatcct

SEQ ID NO: 59294 - DNA, 25 bp, Homo sapien
tgcattttggttgcggctccaccgc

SEQ ID NO: 59295 - DNA, 25 bp, Homo sapien
tctggtttgttgaaacagtaagtca

SEQ ID NO: 59296 - DNA, 25 bp, Homo sapien
gacgaaggcgactaattttgccatt

SEQ ID NO: 59297 - DNA, 25 bp, Homo sapien
gtagtcagacaaagtacgtccatct

SEQ ID NO: 59298 - DNA, 25 bp, Homo sapien
atattgtagtcagacaaagtacgtc

SEQ ID NO: 59299 - DNA, 25 bp, Homo sapien
atccgagggttcaacctcgagggtg

SEQ ID NO: 59300 - DNA, 25 bp, Homo sapien
ttctatcgtatccgagggttcaacc

SEQ ID NO: 59301 - DNA, 25 bp, Homo sapien
gcactctcgacgaaggcgactaatt

SEQ ID NO: 59302 - DNA, 25 bp, Homo sapien
tacgtccatcttctagctgcttgcc

SEQ ID NO: 59303 - DNA, 25 bp, Homo sapien
gggagtggtgtaagacttcttcttc

SEQ ID NO: 59304 - DNA, 25 bp, Homo sapien
tcaggaggaattccttccttatcct

SEQ ID NO: 59305 - DNA, 25 bp, Homo sapien
tgcattttggttgcggctccaccgc

SEQ ID NO: 59306 - DNA, 25 bp, Homo sapien
tctggtttgttgaaacagtaagtca

SEQ ID NO: 59307 - DNA, 25 bp, Homo sapien
gacgaaggcgactaattttgccatt

SEQ ID NO: 59308 - DNA, 25 bp, Homo sapien
gtagtcagacaaagtacgtccatct

SEQ ID NO: 59309 - DNA, 25 bp, Homo sapien
atattgtagtcagacaaagtacgtc

SEQ ID NO: 59310 - DNA, 25 bp, Homo sapien
atccgagggttcaacctcgagggtg

SEQ ID NO: 59311 - DNA, 25 bp, Homo sapien
gggagtggtgtaagacttcttcttc

SEQ ID NO: 59312 - DNA, 25 bp, Homo sapien
ttctatcgtatccgagggttcaacc

SEQ ID NO: 59313 - DNA, 25 bp, Homo sapien
gcactctcgacgaaggcgactaatt

SEQ ID NO: 59314 - DNA, 25 bp, Homo sapien
tacgtccatcttctagctgcttgcc

SEQ ID NO: 59315 - DNA, 25 bp, Homo sapien
tcaggaggaattccttccttatcct

SEQ ID NO: 59316 - DNA, 25 bp, Homo sapien
tgcattttggttgcggctccaccgc

SEQ ID NO: 59317 - DNA, 25 bp, Homo sapien
tctggtttgttgaaacagtaagtca

SEQ ID NO: 59318 - DNA, 25 bp, Homo sapien
gacgaaggcgactaattttgccatt

SEQ ID NO: 59319 - DNA, 25 bp, Homo sapien
gtagtcagacaaagtacgtccatct

SEQ ID NO: 59320 - DNA, 25 bp, Homo sapien
atccgagggttcaacctcgagggtg

SEQ ID NO: 59321 - DNA, 25 bp, Homo sapien
atattgtagtcagacaaagtacgtc

SEQ ID NO: 59322 - DNA, 25 bp, Homo sapien
gggagtggtgtaagacttcttcttc

SEQ ID NO: 59323 - DNA, 25 bp, Homo sapien
ttctatcgtatccgagggttcaacc

SEQ ID NO: 59324 - DNA, 25 bp, Homo sapien
gcactctcgacgaaggcgactaatt

SEQ ID NO: 59325 - DNA, 25 bp, Homo sapien
tacgtccatcttctagctgcttgcc

SEQ ID NO: 59326 - DNA, 25 bp, Homo sapien
tcaggaggaattccttccttatcct

SEQ ID NO: 59327 - DNA, 25 bp, Homo sapien
tgcattttggttgcggctccaccgc

SEQ ID NO: 59328 - DNA, 25 bp, Homo sapien
tctggtttgttgaaacagtaagtca

SEQ ID NO: 59329 - DNA, 25 bp, Homo sapien
atattgtagtcagacaaagtacgtc

SEQ ID NO: 59330 - DNA, 25 bp, Homo sapien
gtagtcagacaaagtacgtccatct

SEQ ID NO: 59331 - DNA, 25 bp, Homo sapien
atccgagggttcaacctcgagggtg

SEQ ID NO: 59332 - DNA, 25 bp, Homo sapien
gggagtggtgtaagacttcttcttc

SEQ ID NO: 59333 - DNA, 25 bp, Homo sapien
ttctatcgtatccgagggttcaacc

SEQ ID NO: 59334 - DNA, 25 bp, Homo sapien
gcactctcgacgaaggcgactaatt

SEQ ID NO: 59335 - DNA, 25 bp, Homo sapien
tacgtccatcttctagctgcttgcc

SEQ ID NO: 59336 - DNA, 25 bp, Homo sapien
tcaggaggaattccttccttatcct

SEQ ID NO: 59337 - DNA, 25 bp, Homo sapien
tgcattttggttgcggctccaccgc

SEQ ID NO: 59338 - DNA, 25 bp, Homo sapien
tctggtttgttgaaacagtaagtca

SEQ ID NO: 59339 - DNA, 25 bp, Homo sapien
gacgaaggcgactaattttgccatt

SEQ ID NO: 59340 - DNA, 25 bp, Homo sapien
atccgagggttcaacctcgagggtg

SEQ ID NO: 59341 - DNA, 25 bp, Homo sapien
gtagtcagacaaagtacgtccatct

SEQ ID NO: 59342 - DNA, 25 bp, Homo sapien
atattgtagtcagacaaagtacgtc

SEQ ID NO: 59343 - DNA, 25 bp, Homo sapien
gggagtggtgtaagacttcttcttc

SEQ ID NO: 59344 - DNA, 25 bp, Homo sapien
ttctatcgtatccgagggttcaacc

SEQ ID NO: 59345 - DNA, 25 bp, Homo sapien
tacgtccatcttctagctgcttgcc

SEQ ID NO: 59346 - DNA, 25 bp, Homo sapien
gcactctcgacgaaggcgactaatt

SEQ ID NO: 59347 - DNA, 25 bp, Homo sapien
tcaggaggaattccttccttatcct

SEQ ID NO: 59348 - DNA, 25 bp, Homo sapien
tgcattttggttgcggctccaccgc

SEQ ID NO: 59349 - DNA, 25 bp, Homo sapien
tctggtttgttgaaacagtaagtca

SEQ ID NO: 59350 - DNA, 25 bp, Homo sapien
gacgaaggcgactaattttgccatt

SEQ ID NO: 59351 - DNA, 25 bp, Homo sapien
gacgaaggcgactaattttgccatt

SEQ ID NO: 59352 - DNA, 25 bp, Homo sapien
gtagtcagacaaagtacgtccatct

SEQ ID NO: 59353 - DNA, 25 bp, Homo sapien
atattgtagtcagacaaagtacgtc

SEQ ID NO: 59354 - DNA, 25 bp, Homo sapien
atccgagggttcaacctcgagggtg

SEQ ID NO: 59355 - DNA, 25 bp, Homo sapien
ttctatcgtatccgagggttcaacc

SEQ ID NO: 59356 - DNA, 25 bp, Homo sapien
gcactctcgacgaaggcgactaatt

SEQ ID NO: 59357 - DNA, 25 bp, Homo sapien
tacgtccatcttctagctgcttgcc

SEQ ID NO: 59358 - DNA, 25 bp, Homo sapien
gggagtggtgtaagacttcttcttc

SEQ ID NO: 59359 - DNA, 25 bp, Homo sapien
tcaggaggaattccttccttatcct

SEQ ID NO: 59360 - DNA, 25 bp, Homo sapien
tgcattttggttgcggctccaccgc

SEQ ID NO: 59361 - DNA, 25 bp, Homo sapien
tctggtttgttgaaacagtaagtca

SEQ ID NO: 59362 - DNA, 25 bp, Homo sapien
gacgaaggcgactaattttgccatt

SEQ ID NO: 59363 - DNA, 25 bp, Homo sapien
gtagtcagacaaagtacgtccatct

SEQ ID NO: 59364 - DNA, 25 bp, Homo sapien
atattgtagtcagacaaagtacgtc

SEQ ID NO: 59365 - DNA, 25 bp, Homo sapien
atccgagggttcaacctcgagggtg

SEQ ID NO: 59366 - DNA, 25 bp, Homo sapien
gggagtggtgtaagacttcttcttc

SEQ ID NO: 59367 - DNA, 25 bp, Homo sapien
ttctatcgtatccgagggttcaacc

SEQ ID NO: 59368 - DNA, 25 bp, Homo sapien
gcactctcgacgaaggcgactaatt

SEQ ID NO: 59369 - DNA, 25 bp, Homo sapien
tacgtccatcttctagctgcttgcc

SEQ ID NO: 59370 - DNA, 25 bp, Homo sapien
tcaggaggaattccttccttatcct

SEQ ID NO: 59371 - DNA, 25 bp, Homo sapien
tgcattttggttgcggctccaccgc

SEQ ID NO: 59372 - DNA, 25 bp, Homo sapien
tctggtttgttgaaacagtaagtca

SEQ ID NO: 59373 - DNA, 25 bp, Homo sapien
gacgaaggcgactaattttgccatt

SEQ ID NO: 59374 - DNA, 25 bp, Homo sapien
gtagtcagacaaagtacgtccatct

SEQ ID NO: 59375 - DNA, 25 bp, Homo sapien
atattgtagtcagacaaagtacgtc

SEQ ID NO: 59376 - DNA, 25 bp, Homo sapien
atccgagggttcaacctcgagggtg

SEQ ID NO: 59377 - DNA, 25 bp, Homo sapien
ttctatcgtatccgagggttcaacc

SEQ ID NO: 59378 - DNA, 25 bp, Homo sapien
gggagtggtgtaagacttcttcttc

SEQ ID NO: 59379 - DNA, 25 bp, Homo sapien
gcactctcgacgaaggcgactaatt

SEQ ID NO: 59380 - DNA, 25 bp, Homo sapien
tacgtccatcttctagctgcttgcc

SEQ ID NO: 59381 - DNA, 25 bp, Homo sapien
tcaggaggaattccttccttatcct

SEQ ID NO: 59382 - DNA, 25 bp, Homo sapien
tgcattttggttgcggctccaccgc

SEQ ID NO: 59383 - DNA, 25 bp, Homo sapien
tctggtttgttgaaacagtaagtca

SEQ ID NO: 59384 - DNA, 25 bp, Homo sapien
tgcattttggttgcggctccaccgc

SEQ ID NO: 59385 - DNA, 25 bp, Homo sapien
tctggtttgttgaaacagtaagtca

SEQ ID NO: 59386 - DNA, 25 bp, Homo sapien
gacgaaggcgactaattttgccatt

SEQ ID NO: 59387 - DNA, 25 bp, Homo sapien
tcaggaggaattccttccttatcct

SEQ ID NO: 59388 - DNA, 25 bp, Homo sapien
gggagtggtgtaagacttcttcttc

SEQ ID NO: 59389 - DNA, 25 bp, Homo sapien
gtagtcagacaaagtacgtccatct

SEQ ID NO: 59390 - DNA, 25 bp, Homo sapien
atccgagggttcaacctcgagggtg

SEQ ID NO: 59391 - DNA, 25 bp, Homo sapien
tacgtccatcttctagctgcttgcc

SEQ ID NO: 59392 - DNA, 25 bp, Homo sapien
ttctatcgtatccgagggttcaacc

SEQ ID NO: 59393 - DNA, 25 bp, Homo sapien
gcactctcgacgaaggcgactaatt

SEQ ID NO: 59394 - DNA, 25 bp, Homo sapien
atattgtagtcagacaaagtacgtc

SEQ ID NO: 59395 - DNA, 25 bp, Homo sapien
gtagtcagacaaagtacgtccatct

SEQ ID NO: 59396 - DNA, 25 bp, Homo sapien
atccgagggttcaacctcgagggtg

SEQ ID NO: 59397 - DNA, 25 bp, Homo sapien
atattgtagtcagacaaagtacgtc

SEQ ID NO: 59398 - DNA, 25 bp, Homo sapien
ttctatcgtatccgagggttcaacc

SEQ ID NO: 59399 - DNA, 25 bp, Homo sapien
gcactctcgacgaaggcgactaatt

SEQ ID NO: 59400 - DNA, 25 bp, Homo sapien
tacgtccatcttctagctgcttgcc

SEQ ID NO: 59401 - DNA, 25 bp, Homo sapien
gggagtggtgtaagacttcttcttc

SEQ ID NO: 59402 - DNA, 25 bp, Homo sapien
tcaggaggaattccttccttatcct

SEQ ID NO: 59403 - DNA, 25 bp, Homo sapien
tgcattttggttgcggctccaccgc

SEQ ID NO: 59404 - DNA, 25 bp, Homo sapien
tctggtttgttgaaacagtaagtca

SEQ ID NO: 59405 - DNA, 25 bp, Homo sapien
gacgaaggcgactaattttgccatt

SEQ ID NO: 59406 - DNA, 25 bp, Homo sapien
tgcattttggttgcggctccaccgc

SEQ ID NO: 59407 - DNA, 25 bp, Homo sapien
atccgagggttcaacctcgagggtg

SEQ ID NO: 59408 - DNA, 25 bp, Homo sapien
ttctatcgtatccgagggttcaacc

SEQ ID NO: 59409 - DNA, 25 bp, Homo sapien
tcaggaggaattccttccttatcct

SEQ ID NO: 59410 - DNA, 25 bp, Homo sapien
tacgtccatcttctagctgcttgcc

SEQ ID NO: 59411 - DNA, 25 bp, Homo sapien
gtagtcagacaaagtacgtccatct

SEQ ID NO: 59412 - DNA, 25 bp, Homo sapien
atattgtagtcagacaaagtacgtc

SEQ ID NO: 59413 - DNA, 25 bp, Homo sapien
gggagtggtgtaagacttcttcttc

SEQ ID NO: 59414 - DNA, 25 bp, Homo sapien
gacgaaggcgactaattttgccatt

SEQ ID NO: 59415 - DNA, 25 bp, Homo sapien
gcactctcgacgaaggcgactaatt

SEQ ID NO: 59416 - DNA, 25 bp, Homo sapien
tctggtttgttgaaacagtaagtca

SEQ ID NO: 59417 - DNA, 25 bp, Homo sapien
aattagtcgccttcgtcgagagtgc

SEQ ID NO: 59418 - DNA, 25 bp, Homo sapien
gcggtggagccgcaaccaaaatgca

SEQ ID NO: 59419 - DNA, 25 bp, Homo sapien
ggttgaaccctcggatacgatagaa

SEQ ID NO: 59420 - DNA, 25 bp, Homo sapien
tgacttactgtttcaacaaaccaga

SEQ ID NO: 59421 - DNA, 25 bp, Homo sapien
caccctcgaggttgaaccctcggat

SEQ ID NO: 59422 - DNA, 25 bp, Homo sapien
aggataaggaaggaattcctcctga

SEQ ID NO: 59423 - DNA, 25 bp, Homo sapien
ggcaagcagctagaagatggacgta

SEQ ID NO: 59424 - DNA, 25 bp, Homo sapien
aatggcaaaattagtcgccttcgtc

SEQ ID NO: 59425 - DNA, 25 bp, Homo sapien
agatggacgtactttgtctgactac

SEQ ID NO: 59426 - DNA, 25 bp, Homo sapien
gacgtactttgtctgactacaatat

SEQ ID NO: 59427 - DNA, 25 bp, Homo sapien
gaagaagaagtcttacaccactccc

SEQ ID NO: 59428 - DNA, 25 bp, Homo sapien
gacgaaggcgactaattttgccatt

SEQ ID NO: 59429 - DNA, 25 bp, Homo sapien
gtagtcagacaaagtacgtccatct

SEQ ID NO: 59430 - DNA, 25 bp, Homo sapien
atattgtagtcagacaaagtacgtc

SEQ ID NO: 59431 - DNA, 25 bp, Homo sapien
atccgagggttcaacctcgagggtg

SEQ ID NO: 59432 - DNA, 25 bp, Homo sapien
ttctatcgtatccgagggttcaacc

SEQ ID NO: 59433 - DNA, 25 bp, Homo sapien
gcactctcgacgaaggcgactaatt

SEQ ID NO: 59434 - DNA, 25 bp, Homo sapien
tacgtccatcttctagctgcttgcc

SEQ ID NO: 59435 - DNA, 25 bp, Homo sapien
gggagtggtgtaagacttcttcttc

SEQ ID NO: 59436 - DNA, 25 bp, Homo sapien
tcaggaggaattccttccttatcct

SEQ ID NO: 59437 - DNA, 25 bp, Homo sapien
tgcattttggttgcggctccaccgc

SEQ ID NO: 59438 - DNA, 25 bp, Homo sapien
tctggtttgttgaaacagtaagtca

SEQ ID NO: 59439 - DNA, 25 bp, Homo sapien
gcactctcgacgaaggcgactaatt

SEQ ID NO: 59440 - DNA, 25 bp, Homo sapien
gtagtcagacaaagtacgtccatct

SEQ ID NO: 59441 - DNA, 25 bp, Homo sapien
tctggtttgttgaaacagtaagtca

SEQ ID NO: 59442 - DNA, 25 bp, Homo sapien
atccgagggttcaacctcgagggtg

SEQ ID NO: 59443 - DNA, 25 bp, Homo sapien
ttctatcgtatccgagggttcaacc

SEQ ID NO: 59444 - DNA, 25 bp, Homo sapien
tacgtccatcttctagctgcttgcc

SEQ ID NO: 59445 - DNA, 25 bp, Homo sapien
gacgaaggcgactaattttgccatt

SEQ ID NO: 59446 - DNA, 25 bp, Homo sapien
gggagtggtgtaagacttcttcttc

SEQ ID NO: 59447 - DNA, 25 bp, Homo sapien
tcaggaggaattccttccttatcct

SEQ ID NO: 59448 - DNA, 25 bp, Homo sapien
tgcattttggttgcggctccaccgc

SEQ ID NO: 59449 - DNA, 25 bp, Homo sapien
atattgtagtcagacaaagtacgtc

SEQ ID NO: 59450 - DNA, 25 bp, Homo sapien
tgcattttggttgcggctccaccgc

SEQ ID NO: 59451 - DNA, 25 bp, Homo sapien
atccgagggttcaacctcgagggtg

SEQ ID NO: 59452 - DNA, 25 bp, Homo sapien
ttctatcgtatccgagggttcaacc

SEQ ID NO: 59453 - DNA, 25 bp, Homo sapien
tcaggaggaattccttccttatcct

SEQ ID NO: 59454 - DNA, 25 bp, Homo sapien
tacgtccatcttctagctgcttgcc

SEQ ID NO: 59455 - DNA, 25 bp, Homo sapien
gtagtcagacaaagtacgtccatct

SEQ ID NO: 59456 - DNA, 25 bp, Homo sapien
atattgtagtcagacaaagtacgtc

SEQ ID NO: 59457 - DNA, 25 bp, Homo sapien
gggagtggtgtaagacttcttcttc

SEQ ID NO: 59458 - DNA, 25 bp, Homo sapien
gacgaaggcgactaattttgccatt

SEQ ID NO: 59459 - DNA, 25 bp, Homo sapien
gcactctcgacgaaggcgactaatt

SEQ ID NO: 59460 - DNA, 25 bp, Homo sapien
tctggtttgttgaaacagtaagtca

SEQ ID NO: 59461 - DNA, 25 bp, Homo sapien
gcactctcgacgaaggcgactaatt

SEQ ID NO: 59462 - DNA, 25 bp, Homo sapien
tgcattttggttgcggctccaccgc

SEQ ID NO: 59463 - DNA, 25 bp, Homo sapien
tacgtccatcttctagctgcttgcc

SEQ ID NO: 59464 - DNA, 25 bp, Homo sapien
tcaggaggaattccttccttatcct

SEQ ID NO: 59465 - DNA, 25 bp, Homo sapien
gtagtcagacaaagtacgtccatct

SEQ ID NO: 59466 - DNA, 25 bp, Homo sapien
tctggtttgttgaaacagtaagtca

SEQ ID NO: 59467 - DNA, 25 bp, Homo sapien
gacgaaggcgactaattttgccatt

SEQ ID NO: 59468 - DNA, 25 bp, Homo sapien
gggagtggtgtaagacttcttcttc

SEQ ID NO: 59469 - DNA, 25 bp, Homo sapien
atattgtagtcagacaaagtacgtc

SEQ ID NO: 59470 - DNA, 25 bp, Homo sapien
ttctatcgtatccgagggttcaacc

SEQ ID NO: 59471 - DNA, 25 bp, Homo sapien
atccgagggttcaacctcgagggtg

SEQ ID NO: 59472 - DNA, 25 bp, Homo sapien
tgcattttggttgcggctccaccgc

SEQ ID NO: 59473 - DNA, 25 bp, Homo sapien
atccgagggttcaacctcgagggtg

SEQ ID NO: 59474 - DNA, 25 bp, Homo sapien
ttctatcgtatccgagggttcaacc

SEQ ID NO: 59475 - DNA, 25 bp, Homo sapien
tcaggaggaattccttccttatcct

SEQ ID NO: 59476 - DNA, 25 bp, Homo sapien
tacgtccatcttctagctgcttgcc

SEQ ID NO: 59477 - DNA, 25 bp, Homo sapien
gtagtcagacaaagtacgtccatct

SEQ ID NO: 59478 - DNA, 25 bp, Homo sapien
atattgtagtcagacaaagtacgtc

SEQ ID NO: 59479 - DNA, 25 bp, Homo sapien
gggagtggtgtaagacttcttcttc

SEQ ID NO: 59480 - DNA, 25 bp, Homo sapien
gacgaaggcgactaattttgccatt

SEQ ID NO: 59481 - DNA, 25 bp, Homo sapien
gcactctcgacgaaggcgactaatt

SEQ ID NO: 59482 - DNA, 25 bp, Homo sapien
tctggtttgttgaaacagtaagtca

SEQ ID NO: 59483 - DNA, 25 bp, Homo sapien
gggagtggtgtaagacttcttcttc

SEQ ID NO: 59484 - DNA, 25 bp, Homo sapien
tgcattttggttgcggctccaccgc

SEQ ID NO: 59485 - DNA, 25 bp, Homo sapien
atattgtagtcagacaaagtacgtc

SEQ ID NO: 59486 - DNA, 25 bp, Homo sapien
gacgaaggcgactaattttgccatt

SEQ ID NO: 59487 - DNA, 25 bp, Homo sapien
ttctatcgtatccgagggttcaacc

SEQ ID NO: 59488 - DNA, 25 bp, Homo sapien
tcaggaggaattccttccttatcct

SEQ ID NO: 59489 - DNA, 25 bp, Homo sapien
gtagtcagacaaagtacgtccatct

SEQ ID NO: 59490 - DNA, 25 bp, Homo sapien
tctggtttgttgaaacagtaagtca

SEQ ID NO: 59491 - DNA, 25 bp, Homo sapien
gcactctcgacgaaggcgactaatt

SEQ ID NO: 59492 - DNA, 25 bp, Homo sapien
tacgtccatcttctagctgcttgcc

SEQ ID NO: 59493 - DNA, 25 bp, Homo sapien
atccgagggttcaacctcgagggtg

SEQ ID NO: 59494 - DNA, 25 bp, Homo sapien
tgcattttggttgcggctccaccgc

SEQ ID NO: 59495 - DNA, 25 bp, Homo sapien
atccgagggttcaacctcgagggtg

SEQ ID NO: 59496 - DNA, 25 bp, Homo sapien
ttctatcgtatccgagggttcaacc

SEQ ID NO: 59497 - DNA, 25 bp, Homo sapien
tcaggaggaattccttccttatcct

SEQ ID NO: 59498 - DNA, 25 bp, Homo sapien
tacgtccatcttctagctgcttgcc

SEQ ID NO: 59499 - DNA, 25 bp, Homo sapien
gtagtcagacaaagtacgtccatct

SEQ ID NO: 59500 - DNA, 25 bp, Homo sapien
atattgtagtcagacaaagtacgtc

SEQ ID NO: 59501 - DNA, 25 bp, Homo sapien
gggagtggtgtaagacttcttcttc

SEQ ID NO: 59502 - DNA, 25 bp, Homo sapien
gacgaaggcgactaattttgccatt

SEQ ID NO: 59503 - DNA, 25 bp, Homo sapien
gcactctcgacgaaggcgactaatt

SEQ ID NO: 59504 - DNA, 25 bp, Homo sapien
tctggtttgttgaaacagtaagtca

SEQ ID NO: 59505 - DNA, 25 bp, Homo sapien
tgcattttggttgcggctccaccgc

SEQ ID NO: 59506 - DNA, 25 bp, Homo sapien
atccgagggttcaacctcgagggtg

SEQ ID NO: 59507 - DNA, 25 bp, Homo sapien
ttctatcgtatccgagggttcaacc

SEQ ID NO: 59508 - DNA, 25 bp, Homo sapien
tcaggaggaattccttccttatcct

SEQ ID NO: 59509 - DNA, 25 bp, Homo sapien
tacgtccatcttctagctgcttgcc

SEQ ID NO: 59510 - DNA, 25 bp, Homo sapien
gtagtcagacaaagtacgtccatct

SEQ ID NO: 59511 - DNA, 25 bp, Homo sapien
atattgtagtcagacaaagtacgtc

SEQ ID NO: 59512 - DNA, 25 bp, Homo sapien
gggagtggtgtaagacttcttcttc

SEQ ID NO: 59513 - DNA, 25 bp, Homo sapien
gacgaaggcgactaattttgccatt

SEQ ID NO: 59514 - DNA, 25 bp, Homo sapien
gcactctcgacgaaggcgactaatt

SEQ ID NO: 59515 - DNA, 25 bp, Homo sapien
tctggtttgttgaaacagtaagtca

SEQ ID NO: 59516 - DNA, 25 bp, Homo sapien
atattgtagtcagacaaagtacgtc

SEQ ID NO: 59517 - DNA, 25 bp, Homo sapien
tgcattttggttgcggctccaccgc

SEQ ID NO: 59518 - DNA, 25 bp, Homo sapien
tcaggaggaattccttccttatcct

SEQ ID NO: 59519 - DNA, 25 bp, Homo sapien
atccgagggttcaacctcgagggtg

SEQ ID NO: 59520 - DNA, 25 bp, Homo sapien
gacgaaggcgactaattttgccatt

SEQ ID NO: 59521 - DNA, 25 bp, Homo sapien
tacgtccatcttctagctgcttgcc

SEQ ID NO: 59522 - DNA, 25 bp, Homo sapien
gcactctcgacgaaggcgactaatt

SEQ ID NO: 59523 - DNA, 25 bp, Homo sapien
gggagtggtgtaagacttcttcttc

SEQ ID NO: 59524 - DNA, 25 bp, Homo sapien
gtagtcagacaaagtacgtccatct

SEQ ID NO: 59525 - DNA, 25 bp, Homo sapien
tctggtttgttgaaacagtaagtca

SEQ ID NO: 59526 - DNA, 25 bp, Homo sapien
ttctatcgtatccgagggttcaacc

SEQ ID NO: 59527 - DNA, 25 bp, Homo sapien
tgcattttggttgcggctccaccgc

SEQ ID NO: 59528 - DNA, 25 bp, Homo sapien
atccgagggttcaacctcgagggtg

SEQ ID NO: 59529 - DNA, 25 bp, Homo sapien
ttctatcgtatccgagggttcaacc

SEQ ID NO: 59530 - DNA, 25 bp, Homo sapien
tcaggaggaattccttccttatcct

SEQ ID NO: 59531 - DNA, 25 bp, Homo sapien
tacgtccatcttctagctgcttgcc

SEQ ID NO: 59532 - DNA, 25 bp, Homo sapien
gtagtcagacaaagtacgtccatct

SEQ ID NO: 59533 - DNA, 25 bp, Homo sapien
atattgtagtcagacaaagtacgtc

SEQ ID NO: 59534 - DNA, 25 bp, Homo sapien
gggagtggtgtaagacttcttcttc

SEQ ID NO: 59535 - DNA, 25 bp, Homo sapien
gacgaaggcgactaattttgccatt

SEQ ID NO: 59536 - DNA, 25 bp, Homo sapien
gcactctcgacgaaggcgactaatt

SEQ ID NO: 59537 - DNA, 25 bp, Homo sapien
tctggtttgttgaaacagtaagtca

SEQ ID NO: 59538 - DNA, 25 bp, Homo sapien
gacgaaggcgactaattttgccatt

SEQ ID NO: 59539 - DNA, 25 bp, Homo sapien
tgcattttggttgcggctccaccgc

SEQ ID NO: 59540 - DNA, 25 bp, Homo sapien
tacgtccatcttctagctgcttgcc

SEQ ID NO: 59541 - DNA, 25 bp, Homo sapien
atattgtagtcagacaaagtacgtc

SEQ ID NO: 59542 - DNA, 25 bp, Homo sapien
tctggtttgttgaaacagtaagtca

SEQ ID NO: 59543 - DNA, 25 bp, Homo sapien
gtagtcagacaaagtacgtccatct

SEQ ID NO: 59544 - DNA, 25 bp, Homo sapien
tcaggaggaattccttccttatcct

SEQ ID NO: 59545 - DNA, 25 bp, Homo sapien
atccgagggttcaacctcgagggtg

SEQ ID NO: 59546 - DNA, 25 bp, Homo sapien
gcactctcgacgaaggcgactaatt

SEQ ID NO: 59547 - DNA, 25 bp, Homo sapien
gggagtggtgtaagacttcttcttc

SEQ ID NO: 59548 - DNA, 25 bp, Homo sapien
ttctatcgtatccgagggttcaacc

SEQ ID NO: 59549 - DNA, 25 bp, Homo sapien
tgcattttggttgcggctccaccgc

SEQ ID NO: 59550 - DNA, 25 bp, Homo sapien
atccgagggttcaacctcgagggtg

SEQ ID NO: 59551 - DNA, 25 bp, Homo sapien
ttctatcgtatccgagggttcaacc

SEQ ID NO: 59552 - DNA, 25 bp, Homo sapien
tcaggaggaattccttccttatcct

SEQ ID NO: 59553 - DNA, 25 bp, Homo sapien
tacgtccatcttctagctgcttgcc

SEQ ID NO: 59554 - DNA, 25 bp, Homo sapien
gtagtcagacaaagtacgtccatct

SEQ ID NO: 59555 - DNA, 25 bp, Homo sapien
atattgtagtcagacaaagtacgtc

SEQ ID NO: 59556 - DNA, 25 bp, Homo sapien
gggagtggtgtaagacttcttcttc

SEQ ID NO: 59557 - DNA, 25 bp, Homo sapien
gacgaaggcgactaattttgccatt

SEQ ID NO: 59558 - DNA, 25 bp, Homo sapien
gcactctcgacgaaggcgactaatt

SEQ ID NO: 59559 - DNA, 25 bp, Homo sapien
tctggtttgttgaaacagtaagtca

SEQ ID NO: 59560 - DNA, 25 bp, Homo sapien
tcaggaggaattccttccttatcct

SEQ ID NO: 59561 - DNA, 25 bp, Homo sapien
atattgtagtcagacaaagtacgtc

SEQ ID NO: 59562 - DNA, 25 bp, Homo sapien
gggagtggtgtaagacttcttcttc

SEQ ID NO: 59563 - DNA, 25 bp, Homo sapien
ttctatcgtatccgagggttcaacc

SEQ ID NO: 59564 - DNA, 25 bp, Homo sapien
tacgtccatcttctagctgcttgcc

SEQ ID NO: 59565 - DNA, 25 bp, Homo sapien
gacgaaggcgactaattttgccatt

SEQ ID NO: 59566 - DNA, 25 bp, Homo sapien
tgcattttggttgcggctccaccgc

SEQ ID NO: 59567 - DNA, 25 bp, Homo sapien
tctggtttgttgaaacagtaagtca

SEQ ID NO: 59568 - DNA, 25 bp, Homo sapien
gtagtcagacaaagtacgtccatct

SEQ ID NO: 59569 - DNA, 25 bp, Homo sapien
gcactctcgacgaaggcgactaatt

SEQ ID NO: 59570 - DNA, 25 bp, Homo sapien
atccgagggttcaacctcgagggtg

SEQ ID NO: 59571 - DNA, 25 bp, Homo sapien
tgcattttggttgcggctccaccgc

SEQ ID NO: 59572 - DNA, 25 bp, Homo sapien
atccgagggttcaacctcgagggtg

SEQ ID NO: 59573 - DNA, 25 bp, Homo sapien
ttctatcgtatccgagggttcaacc

SEQ ID NO: 59574 - DNA, 25 bp, Homo sapien
tcaggaggaattccttccttatcct

SEQ ID NO: 59575 - DNA, 25 bp, Homo sapien
tacgtccatcttctagctgcttgcc

SEQ ID NO: 59576 - DNA, 25 bp, Homo sapien
gtagtcagacaaagtacgtccatct

SEQ ID NO: 59577 - DNA, 25 bp, Homo sapien
atattgtagtcagacaaagtacgtc

SEQ ID NO: 59578 - DNA, 25 bp, Homo sapien
gggagtggtgtaagacttcttcttc

SEQ ID NO: 59579 - DNA, 25 bp, Homo sapien
gacgaaggcgactaattttgccatt

SEQ ID NO: 59580 - DNA, 25 bp, Homo sapien
gcactctcgacgaaggcgactaatt

SEQ ID NO: 59581 - DNA, 25 bp, Homo sapien
tctggtttgttgaaacagtaagtca

SEQ ID NO: 59582 - DNA, 25 bp, Homo sapien
tgcattttggttgcggctccaccgc

SEQ ID NO: 59583 - DNA, 25 bp, Homo sapien
gtagtcagacaaagtacgtccatct

SEQ ID NO: 59584 - DNA, 25 bp, Homo sapien
tcaggaggaattccttccttatcct

SEQ ID NO: 59585 - DNA, 25 bp, Homo sapien
ttctatcgtatccgagggttcaacc

SEQ ID NO: 59586 - DNA, 25 bp, Homo sapien
atccgagggttcaacctcgagggtg

SEQ ID NO: 59587 - DNA, 25 bp, Homo sapien
gcactctcgacgaaggcgactaatt

SEQ ID NO: 59588 - DNA, 25 bp, Homo sapien
tacgtccatcttctagctgcttgcc

SEQ ID NO: 59589 - DNA, 25 bp, Homo sapien
tctggtttgttgaaacagtaagtca

SEQ ID NO: 59590 - DNA, 25 bp, Homo sapien
gacgaaggcgactaattttgccatt

SEQ ID NO: 59591 - DNA, 25 bp, Homo sapien
gggagtggtgtaagacttcttcttc

SEQ ID NO: 59592 - DNA, 25 bp, Homo sapien
atattgtagtcagacaaagtacgtc

SEQ ID NO: 59593 - DNA, 25 bp, Homo sapien
tgcattttggttgcggctccaccgc

SEQ ID NO: 59594 - DNA, 25 bp, Homo sapien
atccgagggttcaacctcgagggtg

SEQ ID NO: 59595 - DNA, 25 bp, Homo sapien
ttctatcgtatccgagggttcaacc

SEQ ID NO: 59596 - DNA, 25 bp, Homo sapien
tcaggaggaattccttccttatcct

SEQ ID NO: 59597 - DNA, 25 bp, Homo sapien
tacgtccatcttctagctgcttgcc

SEQ ID NO: 59598 - DNA, 25 bp, Homo sapien
gtagtcagacaaagtacgtccatct

SEQ ID NO: 59599 - DNA, 25 bp, Homo sapien
atattgtagtcagacaaagtacgtc

SEQ ID NO: 59600 - DNA, 25 bp, Homo sapien
gggagtggtgtaagacttcttcttc

SEQ ID NO: 59601 - DNA, 25 bp, Homo sapien
gacgaaggcgactaattttgccatt

SEQ ID NO: 59602 - DNA, 25 bp, Homo sapien
gcactctcgacgaaggcgactaatt

SEQ ID NO: 59603 - DNA, 25 bp, Homo sapien
tctggtttgttgaaacagtaagtca

SEQ ID NO: 59604 - DNA, 25 bp, Homo sapien
gcactctcgacgaaggcgactaatt

SEQ ID NO: 59605 - DNA, 25 bp, Homo sapien
tgcattttggttgcggctccaccgc

SEQ ID NO: 59606 - DNA, 25 bp, Homo sapien
tctggtttgttgaaacagtaagtca

SEQ ID NO: 59607 - DNA, 25 bp, Homo sapien
gggagtggtgtaagacttcttcttc

SEQ ID NO: 59608 - DNA, 25 bp, Homo sapien
gtagtcagacaaagtacgtccatct

SEQ ID NO: 59609 - DNA, 25 bp, Homo sapien
gacgaaggcgactaattttgccatt

SEQ ID NO: 59610 - DNA, 25 bp, Homo sapien
ttctatcgtatccgagggttcaacc

SEQ ID NO: 59611 - DNA, 25 bp, Homo sapien
atattgtagtcagacaaagtacgtc

SEQ ID NO: 59612 - DNA, 25 bp, Homo sapien
tcaggaggaattccttccttatcct

SEQ ID NO: 59613 - DNA, 25 bp, Homo sapien
tacgtccatcttctagctgcttgcc

SEQ ID NO: 59614 - DNA, 25 bp, Homo sapien
atccgagggttcaacctcgagggtg

SEQ ID NO: 59615 - DNA, 25 bp, Homo sapien
gacgaaggcgactaattttgccatt

SEQ ID NO: 59616 - DNA, 25 bp, Homo sapien
tgcattttggttgcggctccaccgc

SEQ ID NO: 59617 - DNA, 25 bp, Homo sapien
ttctatcgtatccgagggttcaacc

SEQ ID NO: 59618 - DNA, 25 bp, Homo sapien
gtagtcagacaaagtacgtccatct

SEQ ID NO: 59619 - DNA, 25 bp, Homo sapien
gggagtggtgtaagacttcttcttc

SEQ ID NO: 59620 - DNA, 25 bp, Homo sapien
gcactctcgacgaaggcgactaatt

SEQ ID NO: 59621 - DNA, 25 bp, Homo sapien
atccgagggttcaacctcgagggtg

SEQ ID NO: 59622 - DNA, 25 bp, Homo sapien
tctggtttgttgaaacagtaagtca

SEQ ID NO: 59623 - DNA, 25 bp, Homo sapien
atattgtagtcagacaaagtacgtc

SEQ ID NO: 59624 - DNA, 25 bp, Homo sapien
tacgtccatcttctagctgcttgcc

SEQ ID NO: 59625 - DNA, 25 bp, Homo sapien
tcaggaggaattccttccttatcct

SEQ ID NO: 59626 - DNA, 25 bp, Homo sapien
tgcattttggttgcggctccaccgc

SEQ ID NO: 59627 - DNA, 25 bp, Homo sapien
atccgagggttcaacctcgagggtg

SEQ ID NO: 59628 - DNA, 25 bp, Homo sapien
ttctatcgtatccgagggttcaacc

SEQ ID NO: 59629 - DNA, 25 bp, Homo sapien
tcaggaggaattccttccttatcct

SEQ ID NO: 59630 - DNA, 25 bp, Homo sapien
tacgtccatcttctagctgcttgcc

SEQ ID NO: 59631 - DNA, 25 bp, Homo sapien
gtagtcagacaaagtacgtccatct

SEQ ID NO: 59632 - DNA, 25 bp, Homo sapien
atattgtagtcagacaaagtacgtc

SEQ ID NO: 59633 - DNA, 25 bp, Homo sapien
gggagtggtgtaagacttcttcttc

SEQ ID NO: 59634 - DNA, 25 bp, Homo sapien
gacgaaggcgactaattttgccatt

SEQ ID NO: 59635 - DNA, 25 bp, Homo sapien
gcactctcgacgaaggcgactaatt

SEQ ID NO: 59636 - DNA, 25 bp, Homo sapien
tctggtttgttgaaacagtaagtca

SEQ ID NO: 59637 - DNA, 25 bp, Homo sapien
tacgtccatcttctagctgcttgcc

SEQ ID NO: 59638 - DNA, 25 bp, Homo sapien
gcactctcgacgaaggcgactaatt

SEQ ID NO: 59639 - DNA, 25 bp, Homo sapien
tgcattttggttgcggctccaccgc

SEQ ID NO: 59640 - DNA, 25 bp, Homo sapien
gacgaaggcgactaattttgccatt

SEQ ID NO: 59641 - DNA, 25 bp, Homo sapien
atccgagggttcaacctcgagggtg

SEQ ID NO: 59642 - DNA, 25 bp, Homo sapien
gggagtggtgtaagacttcttcttc

SEQ ID NO: 59643 - DNA, 25 bp, Homo sapien
ttctatcgtatccgagggttcaacc

SEQ ID NO: 59644 - DNA, 25 bp, Homo sapien
gtagtcagacaaagtacgtccatct

SEQ ID NO: 59645 - DNA, 25 bp, Homo sapien
tctggtttgttgaaacagtaagtca

SEQ ID NO: 59646 - DNA, 25 bp, Homo sapien
atattgtagtcagacaaagtacgtc

SEQ ID NO: 59647 - DNA, 25 bp, Homo sapien
tcaggaggaattccttccttatcct

SEQ ID NO: 59648 - DNA, 25 bp, Homo sapien
tgcattttggttgcggctccaccgc

SEQ ID NO: 59649 - DNA, 25 bp, Homo sapien
atccgagggttcaacctcgagggtg

SEQ ID NO: 59650 - DNA, 25 bp, Homo sapien
ttctatcgtatccgagggttcaacc

SEQ ID NO: 59651 - DNA, 25 bp, Homo sapien
tcaggaggaattccttccttatcct

SEQ ID NO: 59652 - DNA, 25 bp, Homo sapien
tacgtccatcttctagctgcttgcc

SEQ ID NO: 59653 - DNA, 25 bp, Homo sapien
gtagtcagacaaagtacgtccatct

SEQ ID NO: 59654 - DNA, 25 bp, Homo sapien
atattgtagtcagacaaagtacgtc

SEQ ID NO: 59655 - DNA, 25 bp, Homo sapien
gggagtggtgtaagacttcttcttc

SEQ ID NO: 59656 - DNA, 25 bp, Homo sapien
gacgaaggcgactaattttgccatt

SEQ ID NO: 59657 - DNA, 25 bp, Homo sapien
gcactctcgacgaaggcgactaatt

SEQ ID NO: 59658 - DNA, 25 bp, Homo sapien
tctggtttgttgaaacagtaagtca

SEQ ID NO: 59659 - DNA, 25 bp, Homo sapien
tacgtccatcttctagctgcttgcc

SEQ ID NO: 59660 - DNA, 25 bp, Homo sapien
gacgaaggcgactaattttgccatt

SEQ ID NO: 59661 - DNA, 25 bp, Homo sapien
tcaggaggaattccttccttatcct

SEQ ID NO: 59662 - DNA, 25 bp, Homo sapien
gcactctcgacgaaggcgactaatt

SEQ ID NO: 59663 - DNA, 25 bp, Homo sapien
ttctatcgtatccgagggttcaacc

SEQ ID NO: 59664 - DNA, 25 bp, Homo sapien
atattgtagtcagacaaagtacgtc

SEQ ID NO: 59665 - DNA, 25 bp, Homo sapien
tgcattttggttgcggctccaccgc

SEQ ID NO: 59666 - DNA, 25 bp, Homo sapien
gtagtcagacaaagtacgtccatct

SEQ ID NO: 59667 - DNA, 25 bp, Homo sapien
atccgagggttcaacctcgagggtg

SEQ ID NO: 59668 - DNA, 25 bp, Homo sapien
tctggtttgttgaaacagtaagtca

SEQ ID NO: 59669 - DNA, 25 bp, Homo sapien
gggagtggtgtaagacttcttcttc

SEQ ID NO: 59670 - DNA, 25 bp, Homo sapien
tgcattttggttgcggctccaccgc

SEQ ID NO: 59671 - DNA, 25 bp, Homo sapien
atccgagggttcaacctcgagggtg

SEQ ID NO: 59672 - DNA, 25 bp, Homo sapien
ttctatcgtatccgagggttcaacc

SEQ ID NO: 59673 - DNA, 25 bp, Homo sapien
tcaggaggaattccttccttatcct

SEQ ID NO: 59674 - DNA, 25 bp, Homo sapien
tacgtccatcttctagctgcttgcc

SEQ ID NO: 59675 - DNA, 25 bp, Homo sapien
gtagtcagacaaagtacgtccatct

SEQ ID NO: 59676 - DNA, 25 bp, Homo sapien
atattgtagtcagacaaagtacgtc

SEQ ID NO: 59677 - DNA, 25 bp, Homo sapien
gggagtggtgtaagacttcttcttc

SEQ ID NO: 59678 - DNA, 25 bp, Homo sapien
gacgaaggcgactaattttgccatt

SEQ ID NO: 59679 - DNA, 25 bp, Homo sapien
gcactctcgacgaaggcgactaatt

SEQ ID NO: 59680 - DNA, 25 bp, Homo sapien
tctggtttgttgaaacagtaagtca

SEQ ID NO: 59681 - DNA, 25 bp, Homo sapien
ttctatcgtatccgagggttcaacc

SEQ ID NO: 59682 - DNA, 25 bp, Homo sapien
atccgagggttcaacctcgagggtg

SEQ ID NO: 59683 - DNA, 25 bp, Homo sapien
gggagtggtgtaagacttcttcttc

SEQ ID NO: 59684 - DNA, 25 bp, Homo sapien
tcaggaggaattccttccttatcct

SEQ ID NO: 59685 - DNA, 25 bp, Homo sapien
gtagtcagacaaagtacgtccatct

SEQ ID NO: 59686 - DNA, 25 bp, Homo sapien
atattgtagtcagacaaagtacgtc

SEQ ID NO: 59687 - DNA, 25 bp, Homo sapien
gcactctcgacgaaggcgactaatt

SEQ ID NO: 59688 - DNA, 25 bp, Homo sapien
tctggtttgttgaaacagtaagtca

SEQ ID NO: 59689 - DNA, 25 bp, Homo sapien
gacgaaggcgactaattttgccatt

SEQ ID NO: 59690 - DNA, 25 bp, Homo sapien
tacgtccatcttctagctgcttgcc

SEQ ID NO: 59691 - DNA, 25 bp, Homo sapien
tgcattttggttgcggctccaccgc

SEQ ID NO: 59692 - DNA, 25 bp, Homo sapien
tgcattttggttgcggctccaccgc

SEQ ID NO: 59693 - DNA, 25 bp, Homo sapien
atccgagggttcaacctcgagggtg

SEQ ID NO: 59694 - DNA, 25 bp, Homo sapien
ttctatcgtatccgagggttcaacc

SEQ ID NO: 59695 - DNA, 25 bp, Homo sapien
tcaggaggaattccttccttatcct

SEQ ID NO: 59696 - DNA, 25 bp, Homo sapien
tacgtccatcttctagctgcttgcc

SEQ ID NO: 59697 - DNA, 25 bp, Homo sapien
gtagtcagacaaagtacgtccatct

SEQ ID NO: 59698 - DNA, 25 bp, Homo sapien
atattgtagtcagacaaagtacgtc

SEQ ID NO: 59699 - DNA, 25 bp, Homo sapien
gggagtggtgtaagacttcttcttc

SEQ ID NO: 59700 - DNA, 25 bp, Homo sapien
gacgaaggcgactaattttgccatt

SEQ ID NO: 59701 - DNA, 25 bp, Homo sapien
gcactctcgacgaaggcgactaatt

SEQ ID NO: 59702 - DNA, 25 bp, Homo sapien
tctggtttgttgaaacagtaagtca

SEQ ID NO: 59703 - DNA, 25 bp, Homo sapien
atattgtagtcagacaaagtacgtc

SEQ ID NO: 59704 - DNA, 25 bp, Homo sapien
gggagtggtgtaagacttcttcttc

SEQ ID NO: 59705 - DNA, 25 bp, Homo sapien
atccgagggttcaacctcgagggtg

SEQ ID NO: 59706 - DNA, 25 bp, Homo sapien
tcaggaggaattccttccttatcct

SEQ ID NO: 59707 - DNA, 25 bp, Homo sapien
tgcattttggttgcggctccaccgc

SEQ ID NO: 59708 - DNA, 25 bp, Homo sapien
gcactctcgacgaaggcgactaatt

SEQ ID NO: 59709 - DNA, 25 bp, Homo sapien
gacgaaggcgactaattttgccatt

SEQ ID NO: 59710 - DNA, 25 bp, Homo sapien
gtagtcagacaaagtacgtccatct

SEQ ID NO: 59711 - DNA, 25 bp, Homo sapien
tctggtttgttgaaacagtaagtca

SEQ ID NO: 59712 - DNA, 25 bp, Homo sapien
tacgtccatcttctagctgcttgcc

SEQ ID NO: 59713 - DNA, 25 bp, Homo sapien
ttctatcgtatccgagggttcaacc

SEQ ID NO: 59714 - DNA, 25 bp, Homo sapien
tgcattttggttgcggctccaccgc

SEQ ID NO: 59715 - DNA, 25 bp, Homo sapien
atccgagggttcaacctcgagggtg

SEQ ID NO: 59716 - DNA, 25 bp, Homo sapien
ttctatcgtatccgagggttcaacc

SEQ ID NO: 59717 - DNA, 25 bp, Homo sapien
tcaggaggaattccttccttatcct

SEQ ID NO: 59718 - DNA, 25 bp, Homo sapien
tacgtccatcttctagctgcttgcc

SEQ ID NO: 59719 - DNA, 25 bp, Homo sapien
gtagtcagacaaagtacgtccatct

SEQ ID NO: 59720 - DNA, 25 bp, Homo sapien
atattgtagtcagacaaagtacgtc

SEQ ID NO: 59721 - DNA, 25 bp, Homo sapien
gggagtggtgtaagacttcttcttc

SEQ ID NO: 59722 - DNA, 25 bp, Homo sapien
gacgaaggcgactaattttgccatt

SEQ ID NO: 59723 - DNA, 25 bp, Homo sapien
gcactctcgacgaaggcgactaatt

SEQ ID NO: 59724 - DNA, 25 bp, Homo sapien
tctggtttgttgaaacagtaagtca

SEQ ID NO: 59725 - DNA, 25 bp, Homo sapien
tcaggaggaattccttccttatcct

SEQ ID NO: 59726 - DNA, 25 bp, Homo sapien
tacgtccatcttctagctgcttgcc

SEQ ID NO: 59727 - DNA, 25 bp, Homo sapien
tctggtttgttgaaacagtaagtca

SEQ ID NO: 59728 - DNA, 25 bp, Homo sapien
tgcattttggttgcggctccaccgc

SEQ ID NO: 59729 - DNA, 25 bp, Homo sapien
gtagtcagacaaagtacgtccatct

SEQ ID NO: 59730 - DNA, 25 bp, Homo sapien
atccgagggttcaacctcgagggtg

SEQ ID NO: 59731 - DNA, 25 bp, Homo sapien
atattgtagtcagacaaagtacgtc

SEQ ID NO: 59732 - DNA, 25 bp, Homo sapien
gggagtggtgtaagacttcttcttc

SEQ ID NO: 59733 - DNA, 25 bp, Homo sapien
ttctatcgtatccgagggttcaacc

SEQ ID NO: 59734 - DNA, 25 bp, Homo sapien
gcactctcgacgaaggcgactaatt

SEQ ID NO: 59735 - DNA, 25 bp, Homo sapien
gacgaaggcgactaattttgccatt

SEQ ID NO: 59736 - DNA, 25 bp, Homo sapien
tgcattttggttgcggctccaccgc

SEQ ID NO: 59737 - DNA, 25 bp, Homo sapien
atccgagggttcaacctcgagggtg

SEQ ID NO: 59738 - DNA, 25 bp, Homo sapien
ttctatcgtatccgagggttcaacc

SEQ ID NO: 59739 - DNA, 25 bp, Homo sapien
tcaggaggaattccttccttatcct

SEQ ID NO: 59740 - DNA, 25 bp, Homo sapien
tacgtccatcttctagctgcttgcc

SEQ ID NO: 59741 - DNA, 25 bp, Homo sapien
gtagtcagacaaagtacgtccatct

SEQ ID NO: 59742 - DNA, 25 bp, Homo sapien
atattgtagtcagacaaagtacgtc

SEQ ID NO: 59743 - DNA, 25 bp, Homo sapien
gggagtggtgtaagacttcttcttc

SEQ ID NO: 59744 - DNA, 25 bp, Homo sapien
gacgaaggcgactaattttgccatt

SEQ ID NO: 59745 - DNA, 25 bp, Homo sapien
gcactctcgacgaaggcgactaatt

SEQ ID NO: 59746 - DNA, 25 bp, Homo sapien
tctggtttgttgaaacagtaagtca

SEQ ID NO: 59747 - DNA, 25 bp, Homo sapien
tgcattttggttgcggctccaccgc

SEQ ID NO: 59748 - DNA, 25 bp, Homo sapien
atccgagggttcaacctcgagggtg

SEQ ID NO: 59749 - DNA, 25 bp, Homo sapien
ttctatcgtatccgagggttcaacc

SEQ ID NO: 59750 - DNA, 25 bp, Homo sapien
tcaggaggaattccttccttatcct

SEQ ID NO: 59751 - DNA, 25 bp, Homo sapien
tacgtccatcttctagctgcttgcc

SEQ ID NO: 59752 - DNA, 25 bp, Homo sapien
gtagtcagacaaagtacgtccatct

SEQ ID NO: 59753 - DNA, 25 bp, Homo sapien
atattgtagtcagacaaagtacgtc

SEQ ID NO: 59754 - DNA, 25 bp, Homo sapien
gggagtggtgtaagacttcttcttc

SEQ ID NO: 59755 - DNA, 25 bp, Homo sapien
gacgaaggcgactaattttgccatt

SEQ ID NO: 59756 - DNA, 25 bp, Homo sapien
gcactctcgacgaaggcgactaatt

SEQ ID NO: 59757 - DNA, 25 bp, Homo sapien
tctggtttgttgaaacagtaagtca

SEQ ID NO: 59758 - DNA, 25 bp, Homo sapien
tacgtccatcttctagctgcttgcc

SEQ ID NO: 59759 - DNA, 25 bp, Homo sapien
atccgagggttcaacctcgagggtg

SEQ ID NO: 59760 - DNA, 25 bp, Homo sapien
gacgaaggcgactaattttgccatt

SEQ ID NO: 59761 - DNA, 25 bp, Homo sapien
gcactctcgacgaaggcgactaatt

SEQ ID NO: 59762 - DNA, 25 bp, Homo sapien
tgcattttggttgcggctccaccgc

SEQ ID NO: 59763 - DNA, 25 bp, Homo sapien
atattgtagtcagacaaagtacgtc

SEQ ID NO: 59764 - DNA, 25 bp, Homo sapien
ttctatcgtatccgagggttcaacc

SEQ ID NO: 59765 - DNA, 25 bp, Homo sapien
tcaggaggaattccttccttatcct

SEQ ID NO: 59766 - DNA, 25 bp, Homo sapien
gggagtggtgtaagacttcttcttc

SEQ ID NO: 59767 - DNA, 25 bp, Homo sapien
tctggtttgttgaaacagtaagtca

SEQ ID NO: 59768 - DNA, 25 bp, Homo sapien
gtagtcagacaaagtacgtccatct

SEQ ID NO: 59769 - DNA, 25 bp, Homo sapien
tgcattttggttgcggctccaccgc

SEQ ID NO: 59770 - DNA, 25 bp, Homo sapien
atccgagggttcaacctcgagggtg

SEQ ID NO: 59771 - DNA, 25 bp, Homo sapien
ttctatcgtatccgagggttcaacc

SEQ ID NO: 59772 - DNA, 25 bp, Homo sapien
tcaggaggaattccttccttatcct

SEQ ID NO: 59773 - DNA, 25 bp, Homo sapien
tacgtccatcttctagctgcttgcc

SEQ ID NO: 59774 - DNA, 25 bp, Homo sapien
gtagtcagacaaagtacgtccatct

SEQ ID NO: 59775 - DNA, 25 bp, Homo sapien
atattgtagtcagacaaagtacgtc

SEQ ID NO: 59776 - DNA, 25 bp, Homo sapien
gggagtggtgtaagacttcttcttc

SEQ ID NO: 59777 - DNA, 25 bp, Homo sapien
gacgaaggcgactaattttgccatt

SEQ ID NO: 59778 - DNA, 25 bp, Homo sapien
gcactctcgacgaaggcgactaatt

SEQ ID NO: 59779 - DNA, 25 bp, Homo sapien
tctggtttgttgaaacagtaagtca

SEQ ID NO: 59780 - DNA, 25 bp, Homo sapien
atattgtagtcagacaaagtacgtc

SEQ ID NO: 59781 - DNA, 25 bp, Homo sapien
ttctatcgtatccgagggttcaacc

SEQ ID NO: 59782 - DNA, 25 bp, Homo sapien
tacgtccatcttctagctgcttgcc

SEQ ID NO: 59783 - DNA, 25 bp, Homo sapien
atccgagggttcaacctcgagggtg

SEQ ID NO: 59784 - DNA, 25 bp, Homo sapien
tcaggaggaattccttccttatcct

SEQ ID NO: 59785 - DNA, 25 bp, Homo sapien
gcactctcgacgaaggcgactaatt

SEQ ID NO: 59786 - DNA, 25 bp, Homo sapien
gggagtggtgtaagacttcttcttc

SEQ ID NO: 59787 - DNA, 25 bp, Homo sapien
tctggtttgttgaaacagtaagtca

SEQ ID NO: 59788 - DNA, 25 bp, Homo sapien
gtagtcagacaaagtacgtccatct

SEQ ID NO: 59789 - DNA, 25 bp, Homo sapien
gacgaaggcgactaattttgccatt

SEQ ID NO: 59790 - DNA, 25 bp, Homo sapien
tgcattttggttgcggctccaccgc

SEQ ID NO: 59791 - DNA, 25 bp, Homo sapien
tgcattttggttgcggctccaccgc

SEQ ID NO: 59792 - DNA, 25 bp, Homo sapien
atccgagggttcaacctcgagggtg

SEQ ID NO: 59793 - DNA, 25 bp, Homo sapien
ttctatcgtatccgagggttcaacc

SEQ ID NO: 59794 - DNA, 25 bp, Homo sapien
tcaggaggaattccttccttatcct

SEQ ID NO: 59795 - DNA, 25 bp, Homo sapien
tacgtccatcttctagctgcttgcc

SEQ ID NO: 59796 - DNA, 25 bp, Homo sapien
gtagtcagacaaagtacgtccatct

SEQ ID NO: 59797 - DNA, 25 bp, Homo sapien
atattgtagtcagacaaagtacgtc

SEQ ID NO: 59798 - DNA, 25 bp, Homo sapien
gggagtggtgtaagacttcttcttc

SEQ ID NO: 59799 - DNA, 25 bp, Homo sapien
gacgaaggcgactaattttgccatt

SEQ ID NO: 59800 - DNA, 25 bp, Homo sapien
gcactctcgacgaaggcgactaatt

SEQ ID NO: 59801 - DNA, 25 bp, Homo sapien
tctggtttgttgaaacagtaagtca

SEQ ID NO: 59802 - DNA, 25 bp, Homo sapien
gtagtcagacaaagtacgtccatct

SEQ ID NO: 59803 - DNA, 25 bp, Homo sapien
tctggtttgttgaaacagtaagtca

SEQ ID NO: 59804 - DNA, 25 bp, Homo sapien
tacgtccatcttctagctgcttgcc

SEQ ID NO: 59805 - DNA, 25 bp, Homo sapien
gacgaaggcgactaattttgccatt

SEQ ID NO: 59806 - DNA, 25 bp, Homo sapien
tgcattttggttgcggctccaccgc

SEQ ID NO: 59807 - DNA, 25 bp, Homo sapien
tcaggaggaattccttccttatcct

SEQ ID NO: 59808 - DNA, 25 bp, Homo sapien
atattgtagtcagacaaagtacgtc

SEQ ID NO: 59809 - DNA, 25 bp, Homo sapien
atccgagggttcaacctcgagggtg

SEQ ID NO: 59810 - DNA, 25 bp, Homo sapien
gcactctcgacgaaggcgactaatt

SEQ ID NO: 59811 - DNA, 25 bp, Homo sapien
gggagtggtgtaagacttcttcttc

SEQ ID NO: 59812 - DNA, 25 bp, Homo sapien
ttctatcgtatccgagggttcaacc

SEQ ID NO: 59813 - DNA, 25 bp, Homo sapien
tgcattttggttgcggctccaccgc

SEQ ID NO: 59814 - DNA, 25 bp, Homo sapien
atccgagggttcaacctcgagggtg

SEQ ID NO: 59815 - DNA, 25 bp, Homo sapien
ttctatcgtatccgagggttcaacc

SEQ ID NO: 59816 - DNA, 25 bp, Homo sapien
tcaggaggaattccttccttatcct

SEQ ID NO: 59817 - DNA, 25 bp, Homo sapien
tacgtccatcttctagctgcttgcc

SEQ ID NO: 59818 - DNA, 25 bp, Homo sapien
gtagtcagacaaagtacgtccatct

SEQ ID NO: 59819 - DNA, 25 bp, Homo sapien
atattgtagtcagacaaagtacgtc

SEQ ID NO: 59820 - DNA, 25 bp, Homo sapien
gggagtggtgtaagacttcttcttc

SEQ ID NO: 59821 - DNA, 25 bp, Homo sapien
gacgaaggcgactaattttgccatt

SEQ ID NO: 59822 - DNA, 25 bp, Homo sapien
gcactctcgacgaaggcgactaatt

SEQ ID NO: 59823 - DNA, 25 bp, Homo sapien
tctggtttgttgaaacagtaagtca

SEQ ID NO: 59824 - DNA, 25 bp, Homo sapien
atccgagggttcaacctcgagggtg

SEQ ID NO: 59825 - DNA, 25 bp, Homo sapien
gggagtggtgtaagacttcttcttc

SEQ ID NO: 59826 - DNA, 25 bp, Homo sapien
gcactctcgacgaaggcgactaatt

SEQ ID NO: 59827 - DNA, 25 bp, Homo sapien
tctggtttgttgaaacagtaagtca

SEQ ID NO: 59828 - DNA, 25 bp, Homo sapien
gtagtcagacaaagtacgtccatct

SEQ ID NO: 59829 - DNA, 25 bp, Homo sapien
tcaggaggaattccttccttatcct

SEQ ID NO: 59830 - DNA, 25 bp, Homo sapien
tacgtccatcttctagctgcttgcc

SEQ ID NO: 59831 - DNA, 25 bp, Homo sapien
gacgaaggcgactaattttgccatt

SEQ ID NO: 59832 - DNA, 25 bp, Homo sapien
atattgtagtcagacaaagtacgtc

SEQ ID NO: 59833 - DNA, 25 bp, Homo sapien
ttctatcgtatccgagggttcaacc

SEQ ID NO: 59834 - DNA, 25 bp, Homo sapien
tgcattttggttgcggctccaccgc

SEQ ID NO: 59835 - DNA, 25 bp, Homo sapien
tgcattttggttgcggctccaccgc

SEQ ID NO: 59836 - DNA, 25 bp, Homo sapien
atccgagggttcaacctcgagggtg

SEQ ID NO: 59837 - DNA, 25 bp, Homo sapien
ttctatcgtatccgagggttcaacc

SEQ ID NO: 59838 - DNA, 25 bp, Homo sapien
tcaggaggaattccttccttatcct

SEQ ID NO: 59839 - DNA, 25 bp, Homo sapien
tacgtccatcttctagctgcttgcc

SEQ ID NO: 59840 - DNA, 25 bp, Homo sapien
gtagtcagacaaagtacgtccatct

SEQ ID NO: 59841 - DNA, 25 bp, Homo sapien
atattgtagtcagacaaagtacgtc

SEQ ID NO: 59842 - DNA, 25 bp, Homo sapien
gggagtggtgtaagacttcttcttc

SEQ ID NO: 59843 - DNA, 25 bp, Homo sapien
gacgaaggcgactaattttgccatt

SEQ ID NO: 59844 - DNA, 25 bp, Homo sapien
gcactctcgacgaaggcgactaatt

SEQ ID NO: 59845 - DNA, 25 bp, Homo sapien
tctggtttgttgaaacagtaagtca

SEQ ID NO: 59846 - DNA, 25 bp, Homo sapien
gggagtggtgtaagacttcttcttc

SEQ ID NO: 59847 - DNA, 25 bp, Homo sapien
tctggtttgttgaaacagtaagtca

SEQ ID NO: 59848 - DNA, 25 bp, Homo sapien
ttctatcgtatccgagggttcaacc

SEQ ID NO: 59849 - DNA, 25 bp, Homo sapien
tacgtccatcttctagctgcttgcc

SEQ ID NO: 59850 - DNA, 25 bp, Homo sapien
tcaggaggaattccttccttatcct

SEQ ID NO: 59851 - DNA, 25 bp, Homo sapien
gtagtcagacaaagtacgtccatct

SEQ ID NO: 59852 - DNA, 25 bp, Homo sapien
gcactctcgacgaaggcgactaatt

SEQ ID NO: 59853 - DNA, 25 bp, Homo sapien
gacgaaggcgactaattttgccatt

SEQ ID NO: 59854 - DNA, 25 bp, Homo sapien
tgcattttggttgcggctccaccgc

SEQ ID NO: 59855 - DNA, 25 bp, Homo sapien
atccgagggttcaacctcgagggtg

SEQ ID NO: 59856 - DNA, 25 bp, Homo sapien
atattgtagtcagacaaagtacgtc

SEQ ID NO: 59857 - DNA, 25 bp, Homo sapien
tctggtttgttgaaacagtaagtca

SEQ ID NO: 59858 - DNA, 25 bp, Homo sapien
tacgtccatcttctagctgcttgcc

SEQ ID NO: 59859 - DNA, 25 bp, Homo sapien
gcactctcgacgaaggcgactaatt

SEQ ID NO: 59860 - DNA, 25 bp, Homo sapien
tcaggaggaattccttccttatcct

SEQ ID NO: 59861 - DNA, 25 bp, Homo sapien
atattgtagtcagacaaagtacgtc

SEQ ID NO: 59862 - DNA, 25 bp, Homo sapien
gggagtggtgtaagacttcttcttc

SEQ ID NO: 59863 - DNA, 25 bp, Homo sapien
tgcattttggttgcggctccaccgc

SEQ ID NO: 59864 - DNA, 25 bp, Homo sapien
ttctatcgtatccgagggttcaacc

SEQ ID NO: 59865 - DNA, 25 bp, Homo sapien
gtagtcagacaaagtacgtccatct

SEQ ID NO: 59866 - DNA, 25 bp, Homo sapien
atccgagggttcaacctcgagggtg

SEQ ID NO: 59867 - DNA, 25 bp, Homo sapien
gacgaaggcgactaattttgccatt

SEQ ID NO: 59868 - DNA, 25 bp, Homo sapien
tgcattttggttgcggctccaccgc

SEQ ID NO: 59869 - DNA, 25 bp, Homo sapien
atccgagggttcaacctcgagggtg

SEQ ID NO: 59870 - DNA, 25 bp, Homo sapien
ttctatcgtatccgagggttcaacc

SEQ ID NO: 59871 - DNA, 25 bp, Homo sapien
tcaggaggaattccttccttatcct

SEQ ID NO: 59872 - DNA, 25 bp, Homo sapien
tacgtccatcttctagctgcttgcc

SEQ ID NO: 59873 - DNA, 25 bp, Homo sapien
gtagtcagacaaagtacgtccatct

SEQ ID NO: 59874 - DNA, 25 bp, Homo sapien
atattgtagtcagacaaagtacgtc

SEQ ID NO: 59875 - DNA, 25 bp, Homo sapien
gggagtggtgtaagacttcttcttc

SEQ ID NO: 59876 - DNA, 25 bp, Homo sapien
gacgaaggcgactaattttgccatt

SEQ ID NO: 59877 - DNA, 25 bp, Homo sapien
gcactctcgacgaaggcgactaatt

SEQ ID NO: 59878 - DNA, 25 bp, Homo sapien
tctggtttgttgaaacagtaagtca

SEQ ID NO: 59879 - DNA, 25 bp, Homo sapien
tcaggaggaattccttccttatcct

SEQ ID NO: 59880 - DNA, 25 bp, Homo sapien
ttctatcgtatccgagggttcaacc

SEQ ID NO: 59881 - DNA, 25 bp, Homo sapien
gacgaaggcgactaattttgccatt

SEQ ID NO: 59882 - DNA, 25 bp, Homo sapien
tgcattttggttgcggctccaccgc

SEQ ID NO: 59883 - DNA, 25 bp, Homo sapien
atccgagggttcaacctcgagggtg

SEQ ID NO: 59884 - DNA, 25 bp, Homo sapien
gcactctcgacgaaggcgactaatt

SEQ ID NO: 59885 - DNA, 25 bp, Homo sapien
tctggtttgttgaaacagtaagtca

SEQ ID NO: 59886 - DNA, 25 bp, Homo sapien
atattgtagtcagacaaagtacgtc

SEQ ID NO: 59887 - DNA, 25 bp, Homo sapien
gggagtggtgtaagacttcttcttc

SEQ ID NO: 59888 - DNA, 25 bp, Homo sapien
gtagtcagacaaagtacgtccatct

SEQ ID NO: 59889 - DNA, 25 bp, Homo sapien
tacgtccatcttctagctgcttgcc

SEQ ID NO: 59890 - DNA, 25 bp, Homo sapien
tgcattttggttgcggctccaccgc

SEQ ID NO: 59891 - DNA, 25 bp, Homo sapien
atccgagggttcaacctcgagggtg

SEQ ID NO: 59892 - DNA, 25 bp, Homo sapien
ttctatcgtatccgagggttcaacc

SEQ ID NO: 59893 - DNA, 25 bp, Homo sapien
tcaggaggaattccttccttatcct

SEQ ID NO: 59894 - DNA, 25 bp, Homo sapien
tacgtccatcttctagctgcttgcc

SEQ ID NO: 59895 - DNA, 25 bp, Homo sapien
gtagtcagacaaagtacgtccatct

SEQ ID NO: 59896 - DNA, 25 bp, Homo sapien
atattgtagtcagacaaagtacgtc

SEQ ID NO: 59897 - DNA, 25 bp, Homo sapien
gggagtggtgtaagacttcttcttc

SEQ ID NO: 59898 - DNA, 25 bp, Homo sapien
gacgaaggcgactaattttgccatt

SEQ ID NO: 59899 - DNA, 25 bp, Homo sapien
gcactctcgacgaaggcgactaatt

SEQ ID NO: 59900 - DNA, 25 bp, Homo sapien
tctggtttgttgaaacagtaagtca

SEQ ID NO: 59901 - DNA, 25 bp, Homo sapien
gacgaaggcgactaattttgccatt

SEQ ID NO: 59902 - DNA, 25 bp, Homo sapien
ttctatcgtatccgagggttcaacc

SEQ ID NO: 59903 - DNA, 25 bp, Homo sapien
tgcattttggttgcggctccaccgc

SEQ ID NO: 59904 - DNA, 25 bp, Homo sapien
atccgagggttcaacctcgagggtg

SEQ ID NO: 59905 - DNA, 25 bp, Homo sapien
gtagtcagacaaagtacgtccatct

SEQ ID NO: 59906 - DNA, 25 bp, Homo sapien
tcaggaggaattccttccttatcct

SEQ ID NO: 59907 - DNA, 25 bp, Homo sapien
gggagtggtgtaagacttcttcttc

SEQ ID NO: 59908 - DNA, 25 bp, Homo sapien
gcactctcgacgaaggcgactaatt

SEQ ID NO: 59909 - DNA, 25 bp, Homo sapien
atattgtagtcagacaaagtacgtc

SEQ ID NO: 59910 - DNA, 25 bp, Homo sapien
tctggtttgttgaaacagtaagtca

SEQ ID NO: 59911 - DNA, 25 bp, Homo sapien
tacgtccatcttctagctgcttgcc

SEQ ID NO: 59912 - DNA, 25 bp, Homo sapien
tgcattttggttgcggctccaccgc

SEQ ID NO: 59913 - DNA, 25 bp, Homo sapien
atccgagggttcaacctcgagggtg

SEQ ID NO: 59914 - DNA, 25 bp, Homo sapien
ttctatcgtatccgagggttcaacc

SEQ ID NO: 59915 - DNA, 25 bp, Homo sapien
tcaggaggaattccttccttatcct

SEQ ID NO: 59916 - DNA, 25 bp, Homo sapien
tacgtccatcttctagctgcttgcc

SEQ ID NO: 59917 - DNA, 25 bp, Homo sapien
gtagtcagacaaagtacgtccatct

SEQ ID NO: 59918 - DNA, 25 bp, Homo sapien
atattgtagtcagacaaagtacgtc

SEQ ID NO: 59919 - DNA, 25 bp, Homo sapien
gggagtggtgtaagacttcttcttc

SEQ ID NO: 59920 - DNA, 25 bp, Homo sapien
gacgaaggcgactaattttgccatt

SEQ ID NO: 59921 - DNA, 25 bp, Homo sapien
gcactctcgacgaaggcgactaatt

SEQ ID NO: 59922 - DNA, 25 bp, Homo sapien
tctggtttgttgaaacagtaagtca

SEQ ID NO: 59923 - DNA, 25 bp, Homo sapien
ccttcacgtcgtcagatgtcaactt

SEQ ID NO: 59924 - DNA, 25 bp, Homo sapien
caaatttatgcgaccagggcagagg

SEQ ID NO: 59925 - DNA, 25 bp, Homo sapien
ttataatatcgagccaaacggtgaa

SEQ ID NO: 59926 - DNA, 25 bp, Homo sapien
agggaggactcgcttggtcttataa

SEQ ID NO: 59927 - DNA, 25 bp, Homo sapien
ttagaatcagacggaatttagcatc

SEQ ID NO: 59928 - DNA, 25 bp, Homo sapien
gccaaacggtgaatccggctctcta

SEQ ID NO: 59929 - DNA, 25 bp, Homo sapien
gcagaggctgtagatgattcatatt

SEQ ID NO: 59930 - DNA, 25 bp, Homo sapien
taaatggtagagatcttcaggaaga

SEQ ID NO: 59931 - DNA, 25 bp, Homo sapien
tacaccgatctgtgaaggagtaagg

SEQ ID NO: 59932 - DNA, 25 bp, Homo sapien
gagcatgcatgcgacccatgatggc

SEQ ID NO: 59933 - DNA, 25 bp, Homo sapien
aggagtaaggcccttcttggccagt

SEQ ID NO: 59934 - DNA, 25 bp, Homo sapien
aggagtaaggcccttcttggccagt

SEQ ID NO: 59935 - DNA, 25 bp, Homo sapien
tacaccgatctgtgaaggagtaagg

SEQ ID NO: 59936 - DNA, 25 bp, Homo sapien
taaatggtagagatcttcaggaaga

SEQ ID NO: 59937 - DNA, 25 bp, Homo sapien
ttagaatcagacggaatttagcatc

SEQ ID NO: 59938 - DNA, 25 bp, Homo sapien
gccaaacggtgaatccggctctcta

SEQ ID NO: 59939 - DNA, 25 bp, Homo sapien
ttataatatcgagccaaacggtgaa

SEQ ID NO: 59940 - DNA, 25 bp, Homo sapien
agggaggactcgcttggtcttataa

SEQ ID NO: 59941 - DNA, 25 bp, Homo sapien
gcagaggctgtagatgattcatatt

SEQ ID NO: 59942 - DNA, 25 bp, Homo sapien
caaatttatgcgaccagggcagagg

SEQ ID NO: 59943 - DNA, 25 bp, Homo sapien
gagcatgcatgcgacccatgatggc

SEQ ID NO: 59944 - DNA, 25 bp, Homo sapien
ccttcacgtcgtcagatgtcaactt

SEQ ID NO: 59945 - DNA, 25 bp, Homo sapien
tacaccgatctgtgaaggagtaagg

SEQ ID NO: 59946 - DNA, 25 bp, Homo sapien
gagcatgcatgcgacccatgatggc

SEQ ID NO: 59947 - DNA, 25 bp, Homo sapien
ccttcacgtcgtcagatgtcaactt

SEQ ID NO: 59948 - DNA, 25 bp, Homo sapien
ttagaatcagacggaatttagcatc

SEQ ID NO: 59949 - DNA, 25 bp, Homo sapien
agggaggactcgcttggtcttataa

SEQ ID NO: 59950 - DNA, 25 bp, Homo sapien
ttataatatcgagccaaacggtgaa

SEQ ID NO: 59951 - DNA, 25 bp, Homo sapien
aggagtaaggcccttcttggccagt

SEQ ID NO: 59952 - DNA, 25 bp, Homo sapien
gccaaacggtgaatccggctctcta

SEQ ID NO: 59953 - DNA, 25 bp, Homo sapien
taaatggtagagatcttcaggaaga

SEQ ID NO: 59954 - DNA, 25 bp, Homo sapien
gcagaggctgtagatgattcatatt

SEQ ID NO: 59955 - DNA, 25 bp, Homo sapien
caaatttatgcgaccagggcagagg

SEQ ID NO: 59956 - DNA, 25 bp, Homo sapien
gagcatgcatgcgacccatgatggc

SEQ ID NO: 59957 - DNA, 25 bp, Homo sapien
ccttcacgtcgtcagatgtcaactt

SEQ ID NO: 59958 - DNA, 25 bp, Homo sapien
aggagtaaggcccttcttggccagt

SEQ ID NO: 59959 - DNA, 25 bp, Homo sapien
tacaccgatctgtgaaggagtaagg

SEQ ID NO: 59960 - DNA, 25 bp, Homo sapien
taaatggtagagatcttcaggaaga

SEQ ID NO: 59961 - DNA, 25 bp, Homo sapien
ttagaatcagacggaatttagcatc

SEQ ID NO: 59962 - DNA, 25 bp, Homo sapien
gccaaacggtgaatccggctctcta

SEQ ID NO: 59963 - DNA, 25 bp, Homo sapien
ttataatatcgagccaaacggtgaa

SEQ ID NO: 59964 - DNA, 25 bp, Homo sapien
agggaggactcgcttggtcttataa

SEQ ID NO: 59965 - DNA, 25 bp, Homo sapien
gcagaggctgtagatgattcatatt

SEQ ID NO: 59966 - DNA, 25 bp, Homo sapien
caaatttatgcgaccagggcagagg

SEQ ID NO: 59967 - DNA, 25 bp, Homo sapien
agggaggactcgcttggtcttataa

SEQ ID NO: 59968 - DNA, 25 bp, Homo sapien
gagcatgcatgcgacccatgatggc

SEQ ID NO: 59969 - DNA, 25 bp, Homo sapien
ttataatatcgagccaaacggtgaa

SEQ ID NO: 59970 - DNA, 25 bp, Homo sapien
gcagaggctgtagatgattcatatt

SEQ ID NO: 59971 - DNA, 25 bp, Homo sapien
ccttcacgtcgtcagatgtcaactt

SEQ ID NO: 59972 - DNA, 25 bp, Homo sapien
aggagtaaggcccttcttggccagt

SEQ ID NO: 59973 - DNA, 25 bp, Homo sapien
ttagaatcagacggaatttagcatc

SEQ ID NO: 59974 - DNA, 25 bp, Homo sapien
taaatggtagagatcttcaggaaga

SEQ ID NO: 59975 - DNA, 25 bp, Homo sapien
caaatttatgcgaccagggcagagg

SEQ ID NO: 59976 - DNA, 25 bp, Homo sapien
gccaaacggtgaatccggctctcta

SEQ ID NO: 59977 - DNA, 25 bp, Homo sapien
tacaccgatctgtgaaggagtaagg

SEQ ID NO: 59978 - DNA, 25 bp, Homo sapien
aggagtaaggcccttcttggccagt

SEQ ID NO: 59979 - DNA, 25 bp, Homo sapien
tacaccgatctgtgaaggagtaagg

SEQ ID NO: 59980 - DNA, 25 bp, Homo sapien
taaatggtagagatcttcaggaaga

SEQ ID NO: 59981 - DNA, 25 bp, Homo sapien
ttagaatcagacggaatttagcatc

SEQ ID NO: 59982 - DNA, 25 bp, Homo sapien
gccaaacggtgaatccggctctcta

SEQ ID NO: 59983 - DNA, 25 bp, Homo sapien
ttataatatcgagccaaacggtgaa

SEQ ID NO: 59984 - DNA, 25 bp, Homo sapien
agggaggactcgcttggtcttataa

SEQ ID NO: 59985 - DNA, 25 bp, Homo sapien
gcagaggctgtagatgattcatatt

SEQ ID NO: 59986 - DNA, 25 bp, Homo sapien
caaatttatgcgaccagggcagagg

SEQ ID NO: 59987 - DNA, 25 bp, Homo sapien
gagcatgcatgcgacccatgatggc

SEQ ID NO: 59988 - DNA, 25 bp, Homo sapien
ccttcacgtcgtcagatgtcaactt

SEQ ID NO: 59989 - DNA, 25 bp, Homo sapien
aggagtaaggcccttcttggccagt

SEQ ID NO: 59990 - DNA, 25 bp, Homo sapien
tacaccgatctgtgaaggagtaagg

SEQ ID NO: 59991 - DNA, 25 bp, Homo sapien
taaatggtagagatcttcaggaaga

SEQ ID NO: 59992 - DNA, 25 bp, Homo sapien
ttagaatcagacggaatttagcatc

SEQ ID NO: 59993 - DNA, 25 bp, Homo sapien
gccaaacggtgaatccggctctcta

SEQ ID NO: 59994 - DNA, 25 bp, Homo sapien
ttataatatcgagccaaacggtgaa

SEQ ID NO: 59995 - DNA, 25 bp, Homo sapien
agggaggactcgcttggtcttataa

SEQ ID NO: 59996 - DNA, 25 bp, Homo sapien
gcagaggctgtagatgattcatatt

SEQ ID NO: 59997 - DNA, 25 bp, Homo sapien
caaatttatgcgaccagggcagagg

SEQ ID NO: 59998 - DNA, 25 bp, Homo sapien
gagcatgcatgcgacccatgatggc

SEQ ID NO: 59999 - DNA, 25 bp, Homo sapien
ccttcacgtcgtcagatgtcaactt

SEQ ID NO: 60000 - DNA, 25 bp, Homo sapien
gcagaggctgtagatgattcatatt

SEQ ID NO: 60001 - DNA, 25 bp, Homo sapien
ccttcacgtcgtcagatgtcaactt

SEQ ID NO: 60002 - DNA, 25 bp, Homo sapien
tacaccgatctgtgaaggagtaagg

SEQ ID NO: 60003 - DNA, 25 bp, Homo sapien
ttataatatcgagccaaacggtgaa

SEQ ID NO: 60004 - DNA, 25 bp, Homo sapien
gccaaacggtgaatccggctctcta

SEQ ID NO: 60005 - DNA, 25 bp, Homo sapien
caaatttatgcgaccagggcagagg

SEQ ID NO: 60006 - DNA, 25 bp, Homo sapien
taaatggtagagatcttcaggaaga

SEQ ID NO: 60007 - DNA, 25 bp, Homo sapien
gagcatgcatgcgacccatgatggc

SEQ ID NO: 60008 - DNA, 25 bp, Homo sapien
agggaggactcgcttggtcttataa

SEQ ID NO: 60009 - DNA, 25 bp, Homo sapien
ttagaatcagacggaatttagcatc

SEQ ID NO: 60010 - DNA, 25 bp, Homo sapien
aggagtaaggcccttcttggccagt

SEQ ID NO: 60011 - DNA, 25 bp, Homo sapien
aggagtaaggcccttcttggccagt

SEQ ID NO: 60012 - DNA, 25 bp, Homo sapien
tacaccgatctgtgaaggagtaagg

SEQ ID NO: 60013 - DNA, 25 bp, Homo sapien
taaatggtagagatcttcaggaaga

SEQ ID NO: 60014 - DNA, 25 bp, Homo sapien
ttagaatcagacggaatttagcatc

SEQ ID NO: 60015 - DNA, 25 bp, Homo sapien
gccaaacggtgaatccggctctcta

SEQ ID NO: 60016 - DNA, 25 bp, Homo sapien
ttataatatcgagccaaacggtgaa

SEQ ID NO: 60017 - DNA, 25 bp, Homo sapien
agggaggactcgcttggtcttataa

SEQ ID NO: 60018 - DNA, 25 bp, Homo sapien
gcagaggctgtagatgattcatatt

SEQ ID NO: 60019 - DNA, 25 bp, Homo sapien
caaatttatgcgaccagggcagagg

SEQ ID NO: 60020 - DNA, 25 bp, Homo sapien
gagcatgcatgcgacccatgatggc

SEQ ID NO: 60021 - DNA, 25 bp, Homo sapien
ccttcacgtcgtcagatgtcaactt

SEQ ID NO: 60022 - DNA, 25 bp, Homo sapien
caaatttatgcgaccagggcagagg

SEQ ID NO: 60023 - DNA, 25 bp, Homo sapien
gagcatgcatgcgacccatgatggc

SEQ ID NO: 60024 - DNA, 25 bp, Homo sapien
ccttcacgtcgtcagatgtcaactt

SEQ ID NO: 60025 - DNA, 25 bp, Homo sapien
tacaccgatctgtgaaggagtaagg

SEQ ID NO: 60026 - DNA, 25 bp, Homo sapien
aggagtaaggcccttcttggccagt

SEQ ID NO: 60027 - DNA, 25 bp, Homo sapien
taaatggtagagatcttcaggaaga

SEQ ID NO: 60028 - DNA, 25 bp, Homo sapien
gccaaacggtgaatccggctctcta

SEQ ID NO: 60029 - DNA, 25 bp, Homo sapien
ttataatatcgagccaaacggtgaa

SEQ ID NO: 60030 - DNA, 25 bp, Homo sapien
gcagaggctgtagatgattcatatt

SEQ ID NO: 60031 - DNA, 25 bp, Homo sapien
ttagaatcagacggaatttagcatc

SEQ ID NO: 60032 - DNA, 25 bp, Homo sapien
agggaggactcgcttggtcttataa

SEQ ID NO: 60033 - DNA, 25 bp, Homo sapien
aggagtaaggcccttcttggccagt

SEQ ID NO: 60034 - DNA, 25 bp, Homo sapien
tacaccgatctgtgaaggagtaagg

SEQ ID NO: 60035 - DNA, 25 bp, Homo sapien
taaatggtagagatcttcaggaaga

SEQ ID NO: 60036 - DNA, 25 bp, Homo sapien
ttagaatcagacggaatttagcatc

SEQ ID NO: 60037 - DNA, 25 bp, Homo sapien
gccaaacggtgaatccggctctcta

SEQ ID NO: 60038 - DNA, 25 bp, Homo sapien
ttataatatcgagccaaacggtgaa

SEQ ID NO: 60039 - DNA, 25 bp, Homo sapien
agggaggactcgcttggtcttataa

SEQ ID NO: 60040 - DNA, 25 bp, Homo sapien
gcagaggctgtagatgattcatatt

SEQ ID NO: 60041 - DNA, 25 bp, Homo sapien
caaatttatgcgaccagggcagagg

SEQ ID NO: 60042 - DNA, 25 bp, Homo sapien
gagcatgcatgcgacccatgatggc

SEQ ID NO: 60043 - DNA, 25 bp, Homo sapien
ccttcacgtcgtcagatgtcaactt

SEQ ID NO: 60044 - DNA, 25 bp, Homo sapien
taaatggtagagatcttcaggaaga

SEQ ID NO: 60045 - DNA, 25 bp, Homo sapien
gccaaacggtgaatccggctctcta

SEQ ID NO: 60046 - DNA, 25 bp, Homo sapien
gagcatgcatgcgacccatgatggc

SEQ ID NO: 60047 - DNA, 25 bp, Homo sapien
gcagaggctgtagatgattcatatt

SEQ ID NO: 60048 - DNA, 25 bp, Homo sapien
caaatttatgcgaccagggcagagg

SEQ ID NO: 60049 - DNA, 25 bp, Homo sapien
ccttcacgtcgtcagatgtcaactt

SEQ ID NO: 60050 - DNA, 25 bp, Homo sapien
agggaggactcgcttggtcttataa

SEQ ID NO: 60051 - DNA, 25 bp, Homo sapien
ttagaatcagacggaatttagcatc

SEQ ID NO: 60052 - DNA, 25 bp, Homo sapien
tacaccgatctgtgaaggagtaagg

SEQ ID NO: 60053 - DNA, 25 bp, Homo sapien
ttataatatcgagccaaacggtgaa

SEQ ID NO: 60054 - DNA, 25 bp, Homo sapien
aggagtaaggcccttcttggccagt

SEQ ID NO: 60055 - DNA, 25 bp, Homo sapien
aggagtaaggcccttcttggccagt

SEQ ID NO: 60056 - DNA, 25 bp, Homo sapien
tacaccgatctgtgaaggagtaagg

SEQ ID NO: 60057 - DNA, 25 bp, Homo sapien
taaatggtagagatcttcaggaaga

SEQ ID NO: 60058 - DNA, 25 bp, Homo sapien
ttagaatcagacggaatttagcatc

SEQ ID NO: 60059 - DNA, 25 bp, Homo sapien
gccaaacggtgaatccggctctcta

SEQ ID NO: 60060 - DNA, 25 bp, Homo sapien
ttataatatcgagccaaacggtgaa

SEQ ID NO: 60061 - DNA, 25 bp, Homo sapien
agggaggactcgcttggtcttataa

SEQ ID NO: 60062 - DNA, 25 bp, Homo sapien
gcagaggctgtagatgattcatatt

SEQ ID NO: 60063 - DNA, 25 bp, Homo sapien
caaatttatgcgaccagggcagagg

SEQ ID NO: 60064 - DNA, 25 bp, Homo sapien
gagcatgcatgcgacccatgatggc

SEQ ID NO: 60065 - DNA, 25 bp, Homo sapien
ccttcacgtcgtcagatgtcaactt

SEQ ID NO: 60066 - DNA, 25 bp, Homo sapien
ccttcacgtcgtcagatgtcaactt

SEQ ID NO: 60067 - DNA, 25 bp, Homo sapien
ttagaatcagacggaatttagcatc

SEQ ID NO: 60068 - DNA, 25 bp, Homo sapien
caaatttatgcgaccagggcagagg

SEQ ID NO: 60069 - DNA, 25 bp, Homo sapien
aggagtaaggcccttcttggccagt

SEQ ID NO: 60070 - DNA, 25 bp, Homo sapien
agggaggactcgcttggtcttataa

SEQ ID NO: 60071 - DNA, 25 bp, Homo sapien
gccaaacggtgaatccggctctcta

SEQ ID NO: 60072 - DNA, 25 bp, Homo sapien
ttataatatcgagccaaacggtgaa

SEQ ID NO: 60073 - DNA, 25 bp, Homo sapien
gagcatgcatgcgacccatgatggc

SEQ ID NO: 60074 - DNA, 25 bp, Homo sapien
taaatggtagagatcttcaggaaga

SEQ ID NO: 60075 - DNA, 25 bp, Homo sapien
tacaccgatctgtgaaggagtaagg

SEQ ID NO: 60076 - DNA, 25 bp, Homo sapien
gcagaggctgtagatgattcatatt

SEQ ID NO: 60077 - DNA, 25 bp, Homo sapien
aggagtaaggcccttcttggccagt

SEQ ID NO: 60078 - DNA, 25 bp, Homo sapien
tacaccgatctgtgaaggagtaagg

SEQ ID NO: 60079 - DNA, 25 bp, Homo sapien
taaatggtagagatcttcaggaaga

SEQ ID NO: 60080 - DNA, 25 bp, Homo sapien
ttagaatcagacggaatttagcatc

SEQ ID NO: 60081 - DNA, 25 bp, Homo sapien
gccaaacggtgaatccggctctcta

SEQ ID NO: 60082 - DNA, 25 bp, Homo sapien
ttataatatcgagccaaacggtgaa

SEQ ID NO: 60083 - DNA, 25 bp, Homo sapien
agggaggactcgcttggtcttataa

SEQ ID NO: 60084 - DNA, 25 bp, Homo sapien
gcagaggctgtagatgattcatatt

SEQ ID NO: 60085 - DNA, 25 bp, Homo sapien
caaatttatgcgaccagggcagagg

SEQ ID NO: 60086 - DNA, 25 bp, Homo sapien
gagcatgcatgcgacccatgatggc

SEQ ID NO: 60087 - DNA, 25 bp, Homo sapien
ccttcacgtcgtcagatgtcaactt

SEQ ID NO: 60088 - DNA, 25 bp, Homo sapien
gccaaacggtgaatccggctctcta

SEQ ID NO: 60089 - DNA, 25 bp, Homo sapien
gcagaggctgtagatgattcatatt

SEQ ID NO: 60090 - DNA, 25 bp, Homo sapien
caaatttatgcgaccagggcagagg

SEQ ID NO: 60091 - DNA, 25 bp, Homo sapien
tacaccgatctgtgaaggagtaagg

SEQ ID NO: 60092 - DNA, 25 bp, Homo sapien
ttagaatcagacggaatttagcatc

SEQ ID NO: 60093 - DNA, 25 bp, Homo sapien
ttataatatcgagccaaacggtgaa

SEQ ID NO: 60094 - DNA, 25 bp, Homo sapien
aggagtaaggcccttcttggccagt

SEQ ID NO: 60095 - DNA, 25 bp, Homo sapien
taaatggtagagatcttcaggaaga

SEQ ID NO: 60096 - DNA, 25 bp, Homo sapien
ccttcacgtcgtcagatgtcaactt

SEQ ID NO: 60097 - DNA, 25 bp, Homo sapien
gagcatgcatgcgacccatgatggc

SEQ ID NO: 60098 - DNA, 25 bp, Homo sapien
agggaggactcgcttggtcttataa

SEQ ID NO: 60099 - DNA, 25 bp, Homo sapien
caaatttatgcgaccagggcagagg

SEQ ID NO: 60100 - DNA, 25 bp, Homo sapien
gccaaacggtgaatccggctctcta

SEQ ID NO: 60101 - DNA, 25 bp, Homo sapien
gagcatgcatgcgacccatgatggc

SEQ ID NO: 60102 - DNA, 25 bp, Homo sapien
ttagaatcagacggaatttagcatc

SEQ ID NO: 60103 - DNA, 25 bp, Homo sapien
taaatggtagagatcttcaggaaga

SEQ ID NO: 60104 - DNA, 25 bp, Homo sapien
ttataatatcgagccaaacggtgaa

SEQ ID NO: 60105 - DNA, 25 bp, Homo sapien
gcagaggctgtagatgattcatatt

SEQ ID NO: 60106 - DNA, 25 bp, Homo sapien
agggaggactcgcttggtcttataa

SEQ ID NO: 60107 - DNA, 25 bp, Homo sapien
ccttcacgtcgtcagatgtcaactt

SEQ ID NO: 60108 - DNA, 25 bp, Homo sapien
tacaccgatctgtgaaggagtaagg

SEQ ID NO: 60109 - DNA, 25 bp, Homo sapien
aggagtaaggcccttcttggccagt

SEQ ID NO: 60110 - DNA, 25 bp, Homo sapien
aggagtaaggcccttcttggccagt

SEQ ID NO: 60111 - DNA, 25 bp, Homo sapien
tacaccgatctgtgaaggagtaagg

SEQ ID NO: 60112 - DNA, 25 bp, Homo sapien
taaatggtagagatcttcaggaaga

SEQ ID NO: 60113 - DNA, 25 bp, Homo sapien
ttagaatcagacggaatttagcatc

SEQ ID NO: 60114 - DNA, 25 bp, Homo sapien
gccaaacggtgaatccggctctcta

SEQ ID NO: 60115 - DNA, 25 bp, Homo sapien
ttataatatcgagccaaacggtgaa

SEQ ID NO: 60116 - DNA, 25 bp, Homo sapien
agggaggactcgcttggtcttataa

SEQ ID NO: 60117 - DNA, 25 bp, Homo sapien
gcagaggctgtagatgattcatatt

SEQ ID NO: 60118 - DNA, 25 bp, Homo sapien
caaatttatgcgaccagggcagagg

SEQ ID NO: 60119 - DNA, 25 bp, Homo sapien
gagcatgcatgcgacccatgatggc

SEQ ID NO: 60120 - DNA, 25 bp, Homo sapien
ccttcacgtcgtcagatgtcaactt

SEQ ID NO: 60121 - DNA, 25 bp, Homo sapien
ccttcacgtcgtcagatgtcaactt

SEQ ID NO: 60122 - DNA, 25 bp, Homo sapien
tacaccgatctgtgaaggagtaagg

SEQ ID NO: 60123 - DNA, 25 bp, Homo sapien
aggagtaaggcccttcttggccagt

SEQ ID NO: 60124 - DNA, 25 bp, Homo sapien
taaatggtagagatcttcaggaaga

SEQ ID NO: 60125 - DNA, 25 bp, Homo sapien
gcagaggctgtagatgattcatatt

SEQ ID NO: 60126 - DNA, 25 bp, Homo sapien
caaatttatgcgaccagggcagagg

SEQ ID NO: 60127 - DNA, 25 bp, Homo sapien
ttagaatcagacggaatttagcatc

SEQ ID NO: 60128 - DNA, 25 bp, Homo sapien
gccaaacggtgaatccggctctcta

SEQ ID NO: 60129 - DNA, 25 bp, Homo sapien
ttataatatcgagccaaacggtgaa

SEQ ID NO: 60130 - DNA, 25 bp, Homo sapien
gagcatgcatgcgacccatgatggc

SEQ ID NO: 60131 - DNA, 25 bp, Homo sapien
agggaggactcgcttggtcttataa

SEQ ID NO: 60132 - DNA, 25 bp, Homo sapien
aggagtaaggcccttcttggccagt

SEQ ID NO: 60133 - DNA, 25 bp, Homo sapien
tacaccgatctgtgaaggagtaagg

SEQ ID NO: 60134 - DNA, 25 bp, Homo sapien
taaatggtagagatcttcaggaaga

SEQ ID NO: 60135 - DNA, 25 bp, Homo sapien
ttagaatcagacggaatttagcatc

SEQ ID NO: 60136 - DNA, 25 bp, Homo sapien
gccaaacggtgaatccggctctcta

SEQ ID NO: 60137 - DNA, 25 bp, Homo sapien
ttataatatcgagccaaacggtgaa

SEQ ID NO: 60138 - DNA, 25 bp, Homo sapien
agggaggactcgcttggtcttataa

SEQ ID NO: 60139 - DNA, 25 bp, Homo sapien
gcagaggctgtagatgattcatatt

SEQ ID NO: 60140 - DNA, 25 bp, Homo sapien
caaatttatgcgaccagggcagagg

SEQ ID NO: 60141 - DNA, 25 bp, Homo sapien
gagcatgcatgcgacccatgatggc

SEQ ID NO: 60142 - DNA, 25 bp, Homo sapien
ccttcacgtcgtcagatgtcaactt

SEQ ID NO: 60143 - DNA, 25 bp, Homo sapien
gagcatgcatgcgacccatgatggc

SEQ ID NO: 60144 - DNA, 25 bp, Homo sapien
gccaaacggtgaatccggctctcta

SEQ ID NO: 60145 - DNA, 25 bp, Homo sapien
tacaccgatctgtgaaggagtaagg

SEQ ID NO: 60146 - DNA, 25 bp, Homo sapien
ttagaatcagacggaatttagcatc

SEQ ID NO: 60147 - DNA, 25 bp, Homo sapien
caaatttatgcgaccagggcagagg

SEQ ID NO: 60148 - DNA, 25 bp, Homo sapien
aggagtaaggcccttcttggccagt

SEQ ID NO: 60149 - DNA, 25 bp, Homo sapien
agggaggactcgcttggtcttataa

SEQ ID NO: 60150 - DNA, 25 bp, Homo sapien
gcagaggctgtagatgattcatatt

SEQ ID NO: 60151 - DNA, 25 bp, Homo sapien
ccttcacgtcgtcagatgtcaactt

SEQ ID NO: 60152 - DNA, 25 bp, Homo sapien
taaatggtagagatcttcaggaaga

SEQ ID NO: 60153 - DNA, 25 bp, Homo sapien
ttataatatcgagccaaacggtgaa

SEQ ID NO: 60154 - DNA, 25 bp, Homo sapien
aggagtaaggcccttcttggccagt

SEQ ID NO: 60155 - DNA, 25 bp, Homo sapien
tacaccgatctgtgaaggagtaagg

SEQ ID NO: 60156 - DNA, 25 bp, Homo sapien
taaatggtagagatcttcaggaaga

SEQ ID NO: 60157 - DNA, 25 bp, Homo sapien
ttagaatcagacggaatttagcatc

SEQ ID NO: 60158 - DNA, 25 bp, Homo sapien
gccaaacggtgaatccggctctcta

SEQ ID NO: 60159 - DNA, 25 bp, Homo sapien
ttataatatcgagccaaacggtgaa

SEQ ID NO: 60160 - DNA, 25 bp, Homo sapien
agggaggactcgcttggtcttataa

SEQ ID NO: 60161 - DNA, 25 bp, Homo sapien
gcagaggctgtagatgattcatatt

SEQ ID NO: 60162 - DNA, 25 bp, Homo sapien
caaatttatgcgaccagggcagagg

SEQ ID NO: 60163 - DNA, 25 bp, Homo sapien
gagcatgcatgcgacccatgatggc

SEQ ID NO: 60164 - DNA, 25 bp, Homo sapien
ccttcacgtcgtcagatgtcaactt

SEQ ID NO: 60165 - DNA, 25 bp, Homo sapien
caaatttatgcgaccagggcagagg

SEQ ID NO: 60166 - DNA, 25 bp, Homo sapien
ccttcacgtcgtcagatgtcaactt

SEQ ID NO: 60167 - DNA, 25 bp, Homo sapien
ttataatatcgagccaaacggtgaa

SEQ ID NO: 60168 - DNA, 25 bp, Homo sapien
gccaaacggtgaatccggctctcta

SEQ ID NO: 60169 - DNA, 25 bp, Homo sapien
agggaggactcgcttggtcttataa

SEQ ID NO: 60170 - DNA, 25 bp, Homo sapien
aggagtaaggcccttcttggccagt

SEQ ID NO: 60171 - DNA, 25 bp, Homo sapien
tacaccgatctgtgaaggagtaagg

SEQ ID NO: 60172 - DNA, 25 bp, Homo sapien
taaatggtagagatcttcaggaaga

SEQ ID NO: 60173 - DNA, 25 bp, Homo sapien
gcagaggctgtagatgattcatatt

SEQ ID NO: 60174 - DNA, 25 bp, Homo sapien
gagcatgcatgcgacccatgatggc

SEQ ID NO: 60175 - DNA, 25 bp, Homo sapien
ttagaatcagacggaatttagcatc

SEQ ID NO: 60176 - DNA, 25 bp, Homo sapien
aggagtaaggcccttcttggccagt

SEQ ID NO: 60177 - DNA, 25 bp, Homo sapien
tacaccgatctgtgaaggagtaagg

SEQ ID NO: 60178 - DNA, 25 bp, Homo sapien
taaatggtagagatcttcaggaaga

SEQ ID NO: 60179 - DNA, 25 bp, Homo sapien
ttagaatcagacggaatttagcatc

SEQ ID NO: 60180 - DNA, 25 bp, Homo sapien
gccaaacggtgaatccggctctcta

SEQ ID NO: 60181 - DNA, 25 bp, Homo sapien
ttataatatcgagccaaacggtgaa

SEQ ID NO: 60182 - DNA, 25 bp, Homo sapien
agggaggactcgcttggtcttataa

SEQ ID NO: 60183 - DNA, 25 bp, Homo sapien
gcagaggctgtagatgattcatatt

SEQ ID NO: 60184 - DNA, 25 bp, Homo sapien
caaatttatgcgaccagggcagagg

SEQ ID NO: 60185 - DNA, 25 bp, Homo sapien
gagcatgcatgcgacccatgatggc

SEQ ID NO: 60186 - DNA, 25 bp, Homo sapien
ccttcacgtcgtcagatgtcaactt

SEQ ID NO: 60187 - DNA, 25 bp, Homo sapien
ttagaatcagacggaatttagcatc

SEQ ID NO: 60188 - DNA, 25 bp, Homo sapien
taaatggtagagatcttcaggaaga

SEQ ID NO: 60189 - DNA, 25 bp, Homo sapien
caaatttatgcgaccagggcagagg

SEQ ID NO: 60190 - DNA, 25 bp, Homo sapien
ccttcacgtcgtcagatgtcaactt

SEQ ID NO: 60191 - DNA, 25 bp, Homo sapien
gagcatgcatgcgacccatgatggc

SEQ ID NO: 60192 - DNA, 25 bp, Homo sapien
gcagaggctgtagatgattcatatt

SEQ ID NO: 60193 - DNA, 25 bp, Homo sapien
agggaggactcgcttggtcttataa

SEQ ID NO: 60194 - DNA, 25 bp, Homo sapien
gccaaacggtgaatccggctctcta

SEQ ID NO: 60195 - DNA, 25 bp, Homo sapien
ttataatatcgagccaaacggtgaa

SEQ ID NO: 60196 - DNA, 25 bp, Homo sapien
tacaccgatctgtgaaggagtaagg

SEQ ID NO: 60197 - DNA, 25 bp, Homo sapien
aggagtaaggcccttcttggccagt

SEQ ID NO: 60198 - DNA, 25 bp, Homo sapien
aggagtaaggcccttcttggccagt

SEQ ID NO: 60199 - DNA, 25 bp, Homo sapien
tacaccgatctgtgaaggagtaagg

SEQ ID NO: 60200 - DNA, 25 bp, Homo sapien
taaatggtagagatcttcaggaaga

SEQ ID NO: 60201 - DNA, 25 bp, Homo sapien
ttagaatcagacggaatttagcatc

SEQ ID NO: 60202 - DNA, 25 bp, Homo sapien
gccaaacggtgaatccggctctcta

SEQ ID NO: 60203 - DNA, 25 bp, Homo sapien
ttataatatcgagccaaacggtgaa

SEQ ID NO: 60204 - DNA, 25 bp, Homo sapien
agggaggactcgcttggtcttataa

SEQ ID NO: 60205 - DNA, 25 bp, Homo sapien
gcagaggctgtagatgattcatatt

SEQ ID NO: 60206 - DNA, 25 bp, Homo sapien
caaatttatgcgaccagggcagagg

SEQ ID NO: 60207 - DNA, 25 bp, Homo sapien
gagcatgcatgcgacccatgatggc

SEQ ID NO: 60208 - DNA, 25 bp, Homo sapien
ccttcacgtcgtcagatgtcaactt

SEQ ID NO: 60209 - DNA, 25 bp, Homo sapien
ccttcacgtcgtcagatgtcaactt

SEQ ID NO: 60210 - DNA, 25 bp, Homo sapien
agggaggactcgcttggtcttataa

SEQ ID NO: 60211 - DNA, 25 bp, Homo sapien
gcagaggctgtagatgattcatatt

SEQ ID NO: 60212 - DNA, 25 bp, Homo sapien
taaatggtagagatcttcaggaaga

SEQ ID NO: 60213 - DNA, 25 bp, Homo sapien
tacaccgatctgtgaaggagtaagg

SEQ ID NO: 60214 - DNA, 25 bp, Homo sapien
gccaaacggtgaatccggctctcta

SEQ ID NO: 60215 - DNA, 25 bp, Homo sapien
gagcatgcatgcgacccatgatggc

SEQ ID NO: 60216 - DNA, 25 bp, Homo sapien
aggagtaaggcccttcttggccagt

SEQ ID NO: 60217 - DNA, 25 bp, Homo sapien
ttagaatcagacggaatttagcatc

SEQ ID NO: 60218 - DNA, 25 bp, Homo sapien
ttataatatcgagccaaacggtgaa

SEQ ID NO: 60219 - DNA, 25 bp, Homo sapien
caaatttatgcgaccagggcagagg

SEQ ID NO: 60220 - DNA, 25 bp, Homo sapien
aggagtaaggcccttcttggccagt

SEQ ID NO: 60221 - DNA, 25 bp, Homo sapien
tacaccgatctgtgaaggagtaagg

SEQ ID NO: 60222 - DNA, 25 bp, Homo sapien
taaatggtagagatcttcaggaaga

SEQ ID NO: 60223 - DNA, 25 bp, Homo sapien
ttagaatcagacggaatttagcatc

SEQ ID NO: 60224 - DNA, 25 bp, Homo sapien
gccaaacggtgaatccggctctcta

SEQ ID NO: 60225 - DNA, 25 bp, Homo sapien
ttataatatcgagccaaacggtgaa

SEQ ID NO: 60226 - DNA, 25 bp, Homo sapien
agggaggactcgcttggtcttataa

SEQ ID NO: 60227 - DNA, 25 bp, Homo sapien
gcagaggctgtagatgattcatatt

SEQ ID NO: 60228 - DNA, 25 bp, Homo sapien
caaatttatgcgaccagggcagagg

SEQ ID NO: 60229 - DNA, 25 bp, Homo sapien
gagcatgcatgcgacccatgatggc

SEQ ID NO: 60230 - DNA, 25 bp, Homo sapien
ccttcacgtcgtcagatgtcaactt

SEQ ID NO: 60231 - DNA, 25 bp, Homo sapien
aggagtaaggcccttcttggccagt

SEQ ID NO: 60232 - DNA, 25 bp, Homo sapien
tacaccgatctgtgaaggagtaagg

SEQ ID NO: 60233 - DNA, 25 bp, Homo sapien
taaatggtagagatcttcaggaaga

SEQ ID NO: 60234 - DNA, 25 bp, Homo sapien
ttagaatcagacggaatttagcatc

SEQ ID NO: 60235 - DNA, 25 bp, Homo sapien
gccaaacggtgaatccggctctcta

SEQ ID NO: 60236 - DNA, 25 bp, Homo sapien
ttataatatcgagccaaacggtgaa

SEQ ID NO: 60237 - DNA, 25 bp, Homo sapien
agggaggactcgcttggtcttataa

SEQ ID NO: 60238 - DNA, 25 bp, Homo sapien
gcagaggctgtagatgattcatatt

SEQ ID NO: 60239 - DNA, 25 bp, Homo sapien
caaatttatgcgaccagggcagagg

SEQ ID NO: 60240 - DNA, 25 bp, Homo sapien
gagcatgcatgcgacccatgatggc

SEQ ID NO: 60241 - DNA, 25 bp, Homo sapien
ccttcacgtcgtcagatgtcaactt

SEQ ID NO: 60242 - DNA, 25 bp, Homo sapien
gcagaggctgtagatgattcatatt

SEQ ID NO: 60243 - DNA, 25 bp, Homo sapien
taaatggtagagatcttcaggaaga

SEQ ID NO: 60244 - DNA, 25 bp, Homo sapien
ttagaatcagacggaatttagcatc

SEQ ID NO: 60245 - DNA, 25 bp, Homo sapien
tacaccgatctgtgaaggagtaagg

SEQ ID NO: 60246 - DNA, 25 bp, Homo sapien
aggagtaaggcccttcttggccagt

SEQ ID NO: 60247 - DNA, 25 bp, Homo sapien
gccaaacggtgaatccggctctcta

SEQ ID NO: 60248 - DNA, 25 bp, Homo sapien
gagcatgcatgcgacccatgatggc

SEQ ID NO: 60249 - DNA, 25 bp, Homo sapien
ccttcacgtcgtcagatgtcaactt

SEQ ID NO: 60250 - DNA, 25 bp, Homo sapien
ttataatatcgagccaaacggtgaa

SEQ ID NO: 60251 - DNA, 25 bp, Homo sapien
caaatttatgcgaccagggcagagg

SEQ ID NO: 60252 - DNA, 25 bp, Homo sapien
agggaggactcgcttggtcttataa

SEQ ID NO: 60253 - DNA, 25 bp, Homo sapien
taaatggtagagatcttcaggaaga

SEQ ID NO: 60254 - DNA, 25 bp, Homo sapien
gcagaggctgtagatgattcatatt

SEQ ID NO: 60255 - DNA, 25 bp, Homo sapien
ttagaatcagacggaatttagcatc

SEQ ID NO: 60256 - DNA, 25 bp, Homo sapien
tacaccgatctgtgaaggagtaagg

SEQ ID NO: 60257 - DNA, 25 bp, Homo sapien
aggagtaaggcccttcttggccagt

SEQ ID NO: 60258 - DNA, 25 bp, Homo sapien
gagcatgcatgcgacccatgatggc

SEQ ID NO: 60259 - DNA, 25 bp, Homo sapien
gccaaacggtgaatccggctctcta

SEQ ID NO: 60260 - DNA, 25 bp, Homo sapien
ccttcacgtcgtcagatgtcaactt

SEQ ID NO: 60261 - DNA, 25 bp, Homo sapien
ttataatatcgagccaaacggtgaa

SEQ ID NO: 60262 - DNA, 25 bp, Homo sapien
caaatttatgcgaccagggcagagg

SEQ ID NO: 60263 - DNA, 25 bp, Homo sapien
agggaggactcgcttggtcttataa

SEQ ID NO: 60264 - DNA, 25 bp, Homo sapien
gcagaggctgtagatgattcatatt

SEQ ID NO: 60265 - DNA, 25 bp, Homo sapien
taaatggtagagatcttcaggaaga

SEQ ID NO: 60266 - DNA, 25 bp, Homo sapien
ttagaatcagacggaatttagcatc

SEQ ID NO: 60267 - DNA, 25 bp, Homo sapien
tacaccgatctgtgaaggagtaagg

SEQ ID NO: 60268 - DNA, 25 bp, Homo sapien
aggagtaaggcccttcttggccagt

SEQ ID NO: 60269 - DNA, 25 bp, Homo sapien
gccaaacggtgaatccggctctcta

SEQ ID NO: 60270 - DNA, 25 bp, Homo sapien
gagcatgcatgcgacccatgatggc

SEQ ID NO: 60271 - DNA, 25 bp, Homo sapien
ccttcacgtcgtcagatgtcaactt

SEQ ID NO: 60272 - DNA, 25 bp, Homo sapien
caaatttatgcgaccagggcagagg

SEQ ID NO: 60273 - DNA, 25 bp, Homo sapien
ttataatatcgagccaaacggtgaa

SEQ ID NO: 60274 - DNA, 25 bp, Homo sapien
agggaggactcgcttggtcttataa

SEQ ID NO: 60275 - DNA, 25 bp, Homo sapien
taaatggtagagatcttcaggaaga

SEQ ID NO: 60276 - DNA, 25 bp, Homo sapien
ttagaatcagacggaatttagcatc

SEQ ID NO: 60277 - DNA, 25 bp, Homo sapien
gcagaggctgtagatgattcatatt

SEQ ID NO: 60278 - DNA, 25 bp, Homo sapien
tacaccgatctgtgaaggagtaagg

SEQ ID NO: 60279 - DNA, 25 bp, Homo sapien
aggagtaaggcccttcttggccagt

SEQ ID NO: 60280 - DNA, 25 bp, Homo sapien
gccaaacggtgaatccggctctcta

SEQ ID NO: 60281 - DNA, 25 bp, Homo sapien
gagcatgcatgcgacccatgatggc

SEQ ID NO: 60282 - DNA, 25 bp, Homo sapien
ccttcacgtcgtcagatgtcaactt

SEQ ID NO: 60283 - DNA, 25 bp, Homo sapien
ttataatatcgagccaaacggtgaa

SEQ ID NO: 60284 - DNA, 25 bp, Homo sapien
caaatttatgcgaccagggcagagg

SEQ ID NO: 60285 - DNA, 25 bp, Homo sapien
agggaggactcgcttggtcttataa

SEQ ID NO: 60286 - DNA, 25 bp, Homo sapien
gcagaggctgtagatgattcatatt

SEQ ID NO: 60287 - DNA, 25 bp, Homo sapien
ttataatatcgagccaaacggtgaa

SEQ ID NO: 60288 - DNA, 25 bp, Homo sapien
taaatggtagagatcttcaggaaga

SEQ ID NO: 60289 - DNA, 25 bp, Homo sapien
ttagaatcagacggaatttagcatc

SEQ ID NO: 60290 - DNA, 25 bp, Homo sapien
tacaccgatctgtgaaggagtaagg

SEQ ID NO: 60291 - DNA, 25 bp, Homo sapien
aggagtaaggcccttcttggccagt

SEQ ID NO: 60292 - DNA, 25 bp, Homo sapien
gagcatgcatgcgacccatgatggc

SEQ ID NO: 60293 - DNA, 25 bp, Homo sapien
gccaaacggtgaatccggctctcta

SEQ ID NO: 60294 - DNA, 25 bp, Homo sapien
ccttcacgtcgtcagatgtcaactt

SEQ ID NO: 60295 - DNA, 25 bp, Homo sapien
caaatttatgcgaccagggcagagg

SEQ ID NO: 60296 - DNA, 25 bp, Homo sapien
agggaggactcgcttggtcttataa

SEQ ID NO: 60297 - DNA, 25 bp, Homo sapien
ttataatatcgagccaaacggtgaa

SEQ ID NO: 60298 - DNA, 25 bp, Homo sapien
gcagaggctgtagatgattcatatt

SEQ ID NO: 60299 - DNA, 25 bp, Homo sapien
taaatggtagagatcttcaggaaga

SEQ ID NO: 60300 - DNA, 25 bp, Homo sapien
ttagaatcagacggaatttagcatc

SEQ ID NO: 60301 - DNA, 25 bp, Homo sapien
tacaccgatctgtgaaggagtaagg

SEQ ID NO: 60302 - DNA, 25 bp, Homo sapien
aggagtaaggcccttcttggccagt

SEQ ID NO: 60303 - DNA, 25 bp, Homo sapien
gagcatgcatgcgacccatgatggc

SEQ ID NO: 60304 - DNA, 25 bp, Homo sapien
gccaaacggtgaatccggctctcta

SEQ ID NO: 60305 - DNA, 25 bp, Homo sapien
ccttcacgtcgtcagatgtcaactt

SEQ ID NO: 60306 - DNA, 25 bp, Homo sapien
caaatttatgcgaccagggcagagg

SEQ ID NO: 60307 - DNA, 25 bp, Homo sapien
agggaggactcgcttggtcttataa

SEQ ID NO: 60308 - DNA, 25 bp, Homo sapien
gcagaggctgtagatgattcatatt

SEQ ID NO: 60309 - DNA, 25 bp, Homo sapien
taaatggtagagatcttcaggaaga

SEQ ID NO: 60310 - DNA, 25 bp, Homo sapien
ttagaatcagacggaatttagcatc

SEQ ID NO: 60311 - DNA, 25 bp, Homo sapien
tacaccgatctgtgaaggagtaagg

SEQ ID NO: 60312 - DNA, 25 bp, Homo sapien
aggagtaaggcccttcttggccagt

SEQ ID NO: 60313 - DNA, 25 bp, Homo sapien
gccaaacggtgaatccggctctcta

SEQ ID NO: 60314 - DNA, 25 bp, Homo sapien
gagcatgcatgcgacccatgatggc

SEQ ID NO: 60315 - DNA, 25 bp, Homo sapien
ccttcacgtcgtcagatgtcaactt

SEQ ID NO: 60316 - DNA, 25 bp, Homo sapien
ttataatatcgagccaaacggtgaa

SEQ ID NO: 60317 - DNA, 25 bp, Homo sapien
caaatttatgcgaccagggcagagg

SEQ ID NO: 60318 - DNA, 25 bp, Homo sapien
agggaggactcgcttggtcttataa

SEQ ID NO: 60319 - DNA, 25 bp, Homo sapien
taaatggtagagatcttcaggaaga

SEQ ID NO: 60320 - DNA, 25 bp, Homo sapien
gcagaggctgtagatgattcatatt

SEQ ID NO: 60321 - DNA, 25 bp, Homo sapien
ttagaatcagacggaatttagcatc

SEQ ID NO: 60322 - DNA, 25 bp, Homo sapien
tacaccgatctgtgaaggagtaagg

SEQ ID NO: 60323 - DNA, 25 bp, Homo sapien
aggagtaaggcccttcttggccagt

SEQ ID NO: 60324 - DNA, 25 bp, Homo sapien
gagcatgcatgcgacccatgatggc

SEQ ID NO: 60325 - DNA, 25 bp, Homo sapien
gccaaacggtgaatccggctctcta

SEQ ID NO: 60326 - DNA, 25 bp, Homo sapien
ccttcacgtcgtcagatgtcaactt

SEQ ID NO: 60327 - DNA, 25 bp, Homo sapien
ttataatatcgagccaaacggtgaa

SEQ ID NO: 60328 - DNA, 25 bp, Homo sapien
agggaggactcgcttggtcttataa

SEQ ID NO: 60329 - DNA, 25 bp, Homo sapien
caaatttatgcgaccagggcagagg

SEQ ID NO: 60330 - DNA, 25 bp, Homo sapien
ttataatatcgagccaaacggtgaa

SEQ ID NO: 60331 - DNA, 25 bp, Homo sapien
gcagaggctgtagatgattcatatt

SEQ ID NO: 60332 - DNA, 25 bp, Homo sapien
taaatggtagagatcttcaggaaga

SEQ ID NO: 60333 - DNA, 25 bp, Homo sapien
ttagaatcagacggaatttagcatc

SEQ ID NO: 60334 - DNA, 25 bp, Homo sapien
tacaccgatctgtgaaggagtaagg

SEQ ID NO: 60335 - DNA, 25 bp, Homo sapien
aggagtaaggcccttcttggccagt

SEQ ID NO: 60336 - DNA, 25 bp, Homo sapien
gagcatgcatgcgacccatgatggc

SEQ ID NO: 60337 - DNA, 25 bp, Homo sapien
gccaaacggtgaatccggctctcta

SEQ ID NO: 60338 - DNA, 25 bp, Homo sapien
ccttcacgtcgtcagatgtcaactt

SEQ ID NO: 60339 - DNA, 25 bp, Homo sapien
agggaggactcgcttggtcttataa

SEQ ID NO: 60340 - DNA, 25 bp, Homo sapien
caaatttatgcgaccagggcagagg

SEQ ID NO: 60341 - DNA, 25 bp, Homo sapien
ttataatatcgagccaaacggtgaa

SEQ ID NO: 60342 - DNA, 25 bp, Homo sapien
gagcatgcatgcgacccatgatggc

SEQ ID NO: 60343 - DNA, 25 bp, Homo sapien
caaatttatgcgaccagggcagagg

SEQ ID NO: 60344 - DNA, 25 bp, Homo sapien
taaatggtagagatcttcaggaaga

SEQ ID NO: 60345 - DNA, 25 bp, Homo sapien
aggagtaaggcccttcttggccagt

SEQ ID NO: 60346 - DNA, 25 bp, Homo sapien
ttagaatcagacggaatttagcatc

SEQ ID NO: 60347 - DNA, 25 bp, Homo sapien
gccaaacggtgaatccggctctcta

SEQ ID NO: 60348 - DNA, 25 bp, Homo sapien
tacaccgatctgtgaaggagtaagg

SEQ ID NO: 60349 - DNA, 25 bp, Homo sapien
ccttcacgtcgtcagatgtcaactt

SEQ ID NO: 60350 - DNA, 25 bp, Homo sapien
gcagaggctgtagatgattcatatt

SEQ ID NO: 60351 - DNA, 25 bp, Homo sapien
agggaggactcgcttggtcttataa

SEQ ID NO: 60352 - DNA, 25 bp, Homo sapien
gcagaggctgtagatgattcatatt

SEQ ID NO: 60353 - DNA, 25 bp, Homo sapien
taaatggtagagatcttcaggaaga

SEQ ID NO: 60354 - DNA, 25 bp, Homo sapien
ttagaatcagacggaatttagcatc

SEQ ID NO: 60355 - DNA, 25 bp, Homo sapien
tacaccgatctgtgaaggagtaagg

SEQ ID NO: 60356 - DNA, 25 bp, Homo sapien
aggagtaaggcccttcttggccagt

SEQ ID NO: 60357 - DNA, 25 bp, Homo sapien
gccaaacggtgaatccggctctcta

SEQ ID NO: 60358 - DNA, 25 bp, Homo sapien
gagcatgcatgcgacccatgatggc

SEQ ID NO: 60359 - DNA, 25 bp, Homo sapien
ccttcacgtcgtcagatgtcaactt

SEQ ID NO: 60360 - DNA, 25 bp, Homo sapien
caaatttatgcgaccagggcagagg

SEQ ID NO: 60361 - DNA, 25 bp, Homo sapien
ttataatatcgagccaaacggtgaa

SEQ ID NO: 60362 - DNA, 25 bp, Homo sapien
agggaggactcgcttggtcttataa

SEQ ID NO: 60363 - DNA, 25 bp, Homo sapien
aggagtaaggcccttcttggccagt

SEQ ID NO: 60364 - DNA, 25 bp, Homo sapien
tacaccgatctgtgaaggagtaagg

SEQ ID NO: 60365 - DNA, 25 bp, Homo sapien
taaatggtagagatcttcaggaaga

SEQ ID NO: 60366 - DNA, 25 bp, Homo sapien
ttagaatcagacggaatttagcatc

SEQ ID NO: 60367 - DNA, 25 bp, Homo sapien
gccaaacggtgaatccggctctcta

SEQ ID NO: 60368 - DNA, 25 bp, Homo sapien
ttataatatcgagccaaacggtgaa

SEQ ID NO: 60369 - DNA, 25 bp, Homo sapien
agggaggactcgcttggtcttataa

SEQ ID NO: 60370 - DNA, 25 bp, Homo sapien
gcagaggctgtagatgattcatatt

SEQ ID NO: 60371 - DNA, 25 bp, Homo sapien
caaatttatgcgaccagggcagagg

SEQ ID NO: 60372 - DNA, 25 bp, Homo sapien
gagcatgcatgcgacccatgatggc

SEQ ID NO: 60373 - DNA, 25 bp, Homo sapien
ccttcacgtcgtcagatgtcaactt

SEQ ID NO: 60374 - DNA, 25 bp, Homo sapien
tagagagccggattcaccgtttggc

SEQ ID NO: 60375 - DNA, 25 bp, Homo sapien
actggccaagaagggccttactcct

SEQ ID NO: 60376 - DNA, 25 bp, Homo sapien
ttataagaccaagcgagtcctccct

SEQ ID NO: 60377 - DNA, 25 bp, Homo sapien
ccttactccttcacagatcggtgta

SEQ ID NO: 60378 - DNA, 25 bp, Homo sapien
gatgctaaattccgtctgattctaa

SEQ ID NO: 60379 - DNA, 25 bp, Homo sapien
ttcaccgtttggctcgatattataa

SEQ ID NO: 60380 - DNA, 25 bp, Homo sapien
aagttgacatctgacgacgtgaagg

SEQ ID NO: 60381 - DNA, 25 bp, Homo sapien
tcttcctgaagatctctaccattta

SEQ ID NO: 60382 - DNA, 25 bp, Homo sapien
cctctgccctggtcgcataaatttg

SEQ ID NO: 60383 - DNA, 25 bp, Homo sapien
aatatgaatcatctacagcctctgc

SEQ ID NO: 60384 - DNA, 25 bp, Homo sapien
gccatcatgggtcgcatgcatgctc

SEQ ID NO: 60385 - DNA, 25 bp, Homo sapien
gcagaggctgtagatgattcatatt

SEQ ID NO: 60386 - DNA, 25 bp, Homo sapien
taaatggtagagatcttcaggaaga

SEQ ID NO: 60387 - DNA, 25 bp, Homo sapien
ttagaatcagacggaatttagcatc

SEQ ID NO: 60388 - DNA, 25 bp, Homo sapien
ttataatatcgagccaaacggtgaa

SEQ ID NO: 60389 - DNA, 25 bp, Homo sapien
tacaccgatctgtgaaggagtaagg

SEQ ID NO: 60390 - DNA, 25 bp, Homo sapien
aggagtaaggcccttcttggccagt

SEQ ID NO: 60391 - DNA, 25 bp, Homo sapien
gagcatgcatgcgacccatgatggc

SEQ ID NO: 60392 - DNA, 25 bp, Homo sapien
gccaaacggtgaatccggctctcta

SEQ ID NO: 60393 - DNA, 25 bp, Homo sapien
ccttcacgtcgtcagatgtcaactt

SEQ ID NO: 60394 - DNA, 25 bp, Homo sapien
caaatttatgcgaccagggcagagg

SEQ ID NO: 60395 - DNA, 25 bp, Homo sapien
agggaggactcgcttggtcttataa

SEQ ID NO: 60396 - DNA, 25 bp, Homo sapien
gccaaacggtgaatccggctctcta

SEQ ID NO: 60397 - DNA, 25 bp, Homo sapien
gcagaggctgtagatgattcatatt

SEQ ID NO: 60398 - DNA, 25 bp, Homo sapien
ttagaatcagacggaatttagcatc

SEQ ID NO: 60399 - DNA, 25 bp, Homo sapien
gagcatgcatgcgacccatgatggc

SEQ ID NO: 60400 - DNA, 25 bp, Homo sapien
agggaggactcgcttggtcttataa

SEQ ID NO: 60401 - DNA, 25 bp, Homo sapien
ttataatatcgagccaaacggtgaa

SEQ ID NO: 60402 - DNA, 25 bp, Homo sapien
aggagtaaggcccttcttggccagt

SEQ ID NO: 60403 - DNA, 25 bp, Homo sapien
caaatttatgcgaccagggcagagg

SEQ ID NO: 60404 - DNA, 25 bp, Homo sapien
taaatggtagagatcttcaggaaga

SEQ ID NO: 60405 - DNA, 25 bp, Homo sapien
ccttcacgtcgtcagatgtcaactt

SEQ ID NO: 60406 - DNA, 25 bp, Homo sapien
tacaccgatctgtgaaggagtaagg

SEQ ID NO: 60407 - DNA, 25 bp, Homo sapien
aggagtaaggcccttcttggccagt

SEQ ID NO: 60408 - DNA, 25 bp, Homo sapien
tacaccgatctgtgaaggagtaagg

SEQ ID NO: 60409 - DNA, 25 bp, Homo sapien
taaatggtagagatcttcaggaaga

SEQ ID NO: 60410 - DNA, 25 bp, Homo sapien
ttagaatcagacggaatttagcatc

SEQ ID NO: 60411 - DNA, 25 bp, Homo sapien
gccaaacggtgaatccggctctcta

SEQ ID NO: 60412 - DNA, 25 bp, Homo sapien
ttataatatcgagccaaacggtgaa

SEQ ID NO: 60413 - DNA, 25 bp, Homo sapien
agggaggactcgcttggtcttataa

SEQ ID NO: 60414 - DNA, 25 bp, Homo sapien
gcagaggctgtagatgattcatatt

SEQ ID NO: 60415 - DNA, 25 bp, Homo sapien
caaatttatgcgaccagggcagagg

SEQ ID NO: 60416 - DNA, 25 bp, Homo sapien
gagcatgcatgcgacccatgatggc

SEQ ID NO: 60417 - DNA, 25 bp, Homo sapien
ccttcacgtcgtcagatgtcaactt

SEQ ID NO: 60418 - DNA, 25 bp, Homo sapien
gagcatgcatgcgacccatgatggc

SEQ ID NO: 60419 - DNA, 25 bp, Homo sapien
tacaccgatctgtgaaggagtaagg

SEQ ID NO: 60420 - DNA, 25 bp, Homo sapien
caaatttatgcgaccagggcagagg

SEQ ID NO: 60421 - DNA, 25 bp, Homo sapien
ttagaatcagacggaatttagcatc

SEQ ID NO: 60422 - DNA, 25 bp, Homo sapien
gccaaacggtgaatccggctctcta

SEQ ID NO: 60423 - DNA, 25 bp, Homo sapien
agggaggactcgcttggtcttataa

SEQ ID NO: 60424 - DNA, 25 bp, Homo sapien
ccttcacgtcgtcagatgtcaactt

SEQ ID NO: 60425 - DNA, 25 bp, Homo sapien
aggagtaaggcccttcttggccagt

SEQ ID NO: 60426 - DNA, 25 bp, Homo sapien
gcagaggctgtagatgattcatatt

SEQ ID NO: 60427 - DNA, 25 bp, Homo sapien
taaatggtagagatcttcaggaaga

SEQ ID NO: 60428 - DNA, 25 bp, Homo sapien
ttataatatcgagccaaacggtgaa

SEQ ID NO: 60429 - DNA, 25 bp, Homo sapien
aggagtaaggcccttcttggccagt

SEQ ID NO: 60430 - DNA, 25 bp, Homo sapien
tacaccgatctgtgaaggagtaagg

SEQ ID NO: 60431 - DNA, 25 bp, Homo sapien
taaatggtagagatcttcaggaaga

SEQ ID NO: 60432 - DNA, 25 bp, Homo sapien
ttagaatcagacggaatttagcatc

SEQ ID NO: 60433 - DNA, 25 bp, Homo sapien
gccaaacggtgaatccggctctcta

SEQ ID NO: 60434 - DNA, 25 bp, Homo sapien
ttataatatcgagccaaacggtgaa

SEQ ID NO: 60435 - DNA, 25 bp, Homo sapien
agggaggactcgcttggtcttataa

SEQ ID NO: 60436 - DNA, 25 bp, Homo sapien
gcagaggctgtagatgattcatatt

SEQ ID NO: 60437 - DNA, 25 bp, Homo sapien
caaatttatgcgaccagggcagagg

SEQ ID NO: 60438 - DNA, 25 bp, Homo sapien
gagcatgcatgcgacccatgatggc

SEQ ID NO: 60439 - DNA, 25 bp, Homo sapien
ccttcacgtcgtcagatgtcaactt

SEQ ID NO: 60440 - DNA, 25 bp, Homo sapien
aggagtaaggcccttcttggccagt

SEQ ID NO: 60441 - DNA, 25 bp, Homo sapien
agggaggactcgcttggtcttataa

SEQ ID NO: 60442 - DNA, 25 bp, Homo sapien
ttagaatcagacggaatttagcatc

SEQ ID NO: 60443 - DNA, 25 bp, Homo sapien
gccaaacggtgaatccggctctcta

SEQ ID NO: 60444 - DNA, 25 bp, Homo sapien
tacaccgatctgtgaaggagtaagg

SEQ ID NO: 60445 - DNA, 25 bp, Homo sapien
gagcatgcatgcgacccatgatggc

SEQ ID NO: 60446 - DNA, 25 bp, Homo sapien
gcagaggctgtagatgattcatatt

SEQ ID NO: 60447 - DNA, 25 bp, Homo sapien
caaatttatgcgaccagggcagagg

SEQ ID NO: 60448 - DNA, 25 bp, Homo sapien
taaatggtagagatcttcaggaaga

SEQ ID NO: 60449 - DNA, 25 bp, Homo sapien
ttataatatcgagccaaacggtgaa

SEQ ID NO: 60450 - DNA, 25 bp, Homo sapien
ccttcacgtcgtcagatgtcaactt

SEQ ID NO: 60451 - DNA, 25 bp, Homo sapien
gagcatgcatgcgacccatgatggc

SEQ ID NO: 60452 - DNA, 25 bp, Homo sapien
ccttcacgtcgtcagatgtcaactt

SEQ ID NO: 60453 - DNA, 25 bp, Homo sapien
aggagtaaggcccttcttggccagt

SEQ ID NO: 60454 - DNA, 25 bp, Homo sapien
tacaccgatctgtgaaggagtaagg

SEQ ID NO: 60455 - DNA, 25 bp, Homo sapien
taaatggtagagatcttcaggaaga

SEQ ID NO: 60456 - DNA, 25 bp, Homo sapien
ttagaatcagacggaatttagcatc

SEQ ID NO: 60457 - DNA, 25 bp, Homo sapien
gccaaacggtgaatccggctctcta

SEQ ID NO: 60458 - DNA, 25 bp, Homo sapien
ttataatatcgagccaaacggtgaa

SEQ ID NO: 60459 - DNA, 25 bp, Homo sapien
agggaggactcgcttggtcttataa

SEQ ID NO: 60460 - DNA, 25 bp, Homo sapien
gcagaggctgtagatgattcatatt

SEQ ID NO: 60461 - DNA, 25 bp, Homo sapien
caaatttatgcgaccagggcagagg

SEQ ID NO: 60462 - DNA, 25 bp, Homo sapien
aggagtaaggcccttcttggccagt

SEQ ID NO: 60463 - DNA, 25 bp, Homo sapien
tacaccgatctgtgaaggagtaagg

SEQ ID NO: 60464 - DNA, 25 bp, Homo sapien
taaatggtagagatcttcaggaaga

SEQ ID NO: 60465 - DNA, 25 bp, Homo sapien
ttagaatcagacggaatttagcatc

SEQ ID NO: 60466 - DNA, 25 bp, Homo sapien
gccaaacggtgaatccggctctcta

SEQ ID NO: 60467 - DNA, 25 bp, Homo sapien
ttataatatcgagccaaacggtgaa

SEQ ID NO: 60468 - DNA, 25 bp, Homo sapien
agggaggactcgcttggtcttataa

SEQ ID NO: 60469 - DNA, 25 bp, Homo sapien
gcagaggctgtagatgattcatatt

SEQ ID NO: 60470 - DNA, 25 bp, Homo sapien
caaatttatgcgaccagggcagagg

SEQ ID NO: 60471 - DNA, 25 bp, Homo sapien
gagcatgcatgcgacccatgatggc

SEQ ID NO: 60472 - DNA, 25 bp, Homo sapien
ccttcacgtcgtcagatgtcaactt

SEQ ID NO: 60473 - DNA, 25 bp, Homo sapien
aggagtaaggcccttcttggccagt

SEQ ID NO: 60474 - DNA, 25 bp, Homo sapien
gccaaacggtgaatccggctctcta

SEQ ID NO: 60475 - DNA, 25 bp, Homo sapien
ccttcacgtcgtcagatgtcaactt

SEQ ID NO: 60476 - DNA, 25 bp, Homo sapien
ttagaatcagacggaatttagcatc

SEQ ID NO: 60477 - DNA, 25 bp, Homo sapien
agggaggactcgcttggtcttataa

SEQ ID NO: 60478 - DNA, 25 bp, Homo sapien
tacaccgatctgtgaaggagtaagg

SEQ ID NO: 60479 - DNA, 25 bp, Homo sapien
taaatggtagagatcttcaggaaga

SEQ ID NO: 60480 - DNA, 25 bp, Homo sapien
gagcatgcatgcgacccatgatggc

SEQ ID NO: 60481 - DNA, 25 bp, Homo sapien
gcagaggctgtagatgattcatatt

SEQ ID NO: 60482 - DNA, 25 bp, Homo sapien
ttataatatcgagccaaacggtgaa

SEQ ID NO: 60483 - DNA, 25 bp, Homo sapien
caaatttatgcgaccagggcagagg

SEQ ID NO: 60484 - DNA, 25 bp, Homo sapien
aggagtaaggcccttcttggccagt

SEQ ID NO: 60485 - DNA, 25 bp, Homo sapien
tacaccgatctgtgaaggagtaagg

SEQ ID NO: 60486 - DNA, 25 bp, Homo sapien
taaatggtagagatcttcaggaaga

SEQ ID NO: 60487 - DNA, 25 bp, Homo sapien
ttagaatcagacggaatttagcatc

SEQ ID NO: 60488 - DNA, 25 bp, Homo sapien
gccaaacggtgaatccggctctcta

SEQ ID NO: 60489 - DNA, 25 bp, Homo sapien
ttataatatcgagccaaacggtgaa

SEQ ID NO: 60490 - DNA, 25 bp, Homo sapien
agggaggactcgcttggtcttataa

SEQ ID NO: 60491 - DNA, 25 bp, Homo sapien
gcagaggctgtagatgattcatatt

SEQ ID NO: 60492 - DNA, 25 bp, Homo sapien
caaatttatgcgaccagggcagagg

SEQ ID NO: 60493 - DNA, 25 bp, Homo sapien
gagcatgcatgcgacccatgatggc

SEQ ID NO: 60494 - DNA, 25 bp, Homo sapien
ccttcacgtcgtcagatgtcaactt

SEQ ID NO: 60495 - DNA, 25 bp, Homo sapien
ttagaatcagacggaatttagcatc

SEQ ID NO: 60496 - DNA, 25 bp, Homo sapien
caaatttatgcgaccagggcagagg

SEQ ID NO: 60497 - DNA, 25 bp, Homo sapien
gccaaacggtgaatccggctctcta

SEQ ID NO: 60498 - DNA, 25 bp, Homo sapien
ttataatatcgagccaaacggtgaa

SEQ ID NO: 60499 - DNA, 25 bp, Homo sapien
gcagaggctgtagatgattcatatt

SEQ ID NO: 60500 - DNA, 25 bp, Homo sapien
agggaggactcgcttggtcttataa

SEQ ID NO: 60501 - DNA, 25 bp, Homo sapien
taaatggtagagatcttcaggaaga

SEQ ID NO: 60502 - DNA, 25 bp, Homo sapien
gagcatgcatgcgacccatgatggc

SEQ ID NO: 60503 - DNA, 25 bp, Homo sapien
aggagtaaggcccttcttggccagt

SEQ ID NO: 60504 - DNA, 25 bp, Homo sapien
ccttcacgtcgtcagatgtcaactt

SEQ ID NO: 60505 - DNA, 25 bp, Homo sapien
tacaccgatctgtgaaggagtaagg

SEQ ID NO: 60506 - DNA, 25 bp, Homo sapien
aggagtaaggcccttcttggccagt

SEQ ID NO: 60507 - DNA, 25 bp, Homo sapien
tacaccgatctgtgaaggagtaagg

SEQ ID NO: 60508 - DNA, 25 bp, Homo sapien
taaatggtagagatcttcaggaaga

SEQ ID NO: 60509 - DNA, 25 bp, Homo sapien
ttagaatcagacggaatttagcatc

SEQ ID NO: 60510 - DNA, 25 bp, Homo sapien
gccaaacggtgaatccggctctcta

SEQ ID NO: 60511 - DNA, 25 bp, Homo sapien
ttataatatcgagccaaacggtgaa

SEQ ID NO: 60512 - DNA, 25 bp, Homo sapien
agggaggactcgcttggtcttataa

SEQ ID NO: 60513 - DNA, 25 bp, Homo sapien
gcagaggctgtagatgattcatatt

SEQ ID NO: 60514 - DNA, 25 bp, Homo sapien
caaatttatgcgaccagggcagagg

SEQ ID NO: 60515 - DNA, 25 bp, Homo sapien
gagcatgcatgcgacccatgatggc

SEQ ID NO: 60516 - DNA, 25 bp, Homo sapien
ccttcacgtcgtcagatgtcaactt

SEQ ID NO: 60517 - DNA, 25 bp, Homo sapien
ttataatatcgagccaaacggtgaa

SEQ ID NO: 60518 - DNA, 25 bp, Homo sapien
caaatttatgcgaccagggcagagg

SEQ ID NO: 60519 - DNA, 25 bp, Homo sapien
taaatggtagagatcttcaggaaga

SEQ ID NO: 60520 - DNA, 25 bp, Homo sapien
gcagaggctgtagatgattcatatt

SEQ ID NO: 60521 - DNA, 25 bp, Homo sapien
agggaggactcgcttggtcttataa

SEQ ID NO: 60522 - DNA, 25 bp, Homo sapien
gccaaacggtgaatccggctctcta

SEQ ID NO: 60523 - DNA, 25 bp, Homo sapien
ccttcacgtcgtcagatgtcaactt

SEQ ID NO: 60524 - DNA, 25 bp, Homo sapien
ttagaatcagacggaatttagcatc

SEQ ID NO: 60525 - DNA, 25 bp, Homo sapien
tacaccgatctgtgaaggagtaagg

SEQ ID NO: 60526 - DNA, 25 bp, Homo sapien
gagcatgcatgcgacccatgatggc

SEQ ID NO: 60527 - DNA, 25 bp, Homo sapien
aggagtaaggcccttcttggccagt

SEQ ID NO: 60528 - DNA, 25 bp, Homo sapien
aggagtaaggcccttcttggccagt

SEQ ID NO: 60529 - DNA, 25 bp, Homo sapien
tacaccgatctgtgaaggagtaagg

SEQ ID NO: 60530 - DNA, 25 bp, Homo sapien
taaatggtagagatcttcaggaaga

SEQ ID NO: 60531 - DNA, 25 bp, Homo sapien
ttagaatcagacggaatttagcatc

SEQ ID NO: 60532 - DNA, 25 bp, Homo sapien
gccaaacggtgaatccggctctcta

SEQ ID NO: 60533 - DNA, 25 bp, Homo sapien
ttataatatcgagccaaacggtgaa

SEQ ID NO: 60534 - DNA, 25 bp, Homo sapien
agggaggactcgcttggtcttataa

SEQ ID NO: 60535 - DNA, 25 bp, Homo sapien
gcagaggctgtagatgattcatatt

SEQ ID NO: 60536 - DNA, 25 bp, Homo sapien
caaatttatgcgaccagggcagagg

SEQ ID NO: 60537 - DNA, 25 bp, Homo sapien
gagcatgcatgcgacccatgatggc

SEQ ID NO: 60538 - DNA, 25 bp, Homo sapien
ccttcacgtcgtcagatgtcaactt

SEQ ID NO: 60539 - DNA, 25 bp, Homo sapien
tacaccgatctgtgaaggagtaagg

SEQ ID NO: 60540 - DNA, 25 bp, Homo sapien
gcagaggctgtagatgattcatatt

SEQ ID NO: 60541 - DNA, 25 bp, Homo sapien
caaatttatgcgaccagggcagagg

SEQ ID NO: 60542 - DNA, 25 bp, Homo sapien
gccaaacggtgaatccggctctcta

SEQ ID NO: 60543 - DNA, 25 bp, Homo sapien
agggaggactcgcttggtcttataa

SEQ ID NO: 60544 - DNA, 25 bp, Homo sapien
ttagaatcagacggaatttagcatc

SEQ ID NO: 60545 - DNA, 25 bp, Homo sapien
ccttcacgtcgtcagatgtcaactt

SEQ ID NO: 60546 - DNA, 25 bp, Homo sapien
aggagtaaggcccttcttggccagt

SEQ ID NO: 60547 - DNA, 25 bp, Homo sapien
ttataatatcgagccaaacggtgaa

SEQ ID NO: 60548 - DNA, 25 bp, Homo sapien
taaatggtagagatcttcaggaaga

SEQ ID NO: 60549 - DNA, 25 bp, Homo sapien
gagcatgcatgcgacccatgatggc

SEQ ID NO: 60550 - DNA, 25 bp, Homo sapien
aggagtaaggcccttcttggccagt

SEQ ID NO: 60551 - DNA, 25 bp, Homo sapien
tacaccgatctgtgaaggagtaagg

SEQ ID NO: 60552 - DNA, 25 bp, Homo sapien
taaatggtagagatcttcaggaaga

SEQ ID NO: 60553 - DNA, 25 bp, Homo sapien
ttagaatcagacggaatttagcatc

SEQ ID NO: 60554 - DNA, 25 bp, Homo sapien
gccaaacggtgaatccggctctcta

SEQ ID NO: 60555 - DNA, 25 bp, Homo sapien
ttataatatcgagccaaacggtgaa

SEQ ID NO: 60556 - DNA, 25 bp, Homo sapien
agggaggactcgcttggtcttataa

SEQ ID NO: 60557 - DNA, 25 bp, Homo sapien
gcagaggctgtagatgattcatatt

SEQ ID NO: 60558 - DNA, 25 bp, Homo sapien
caaatttatgcgaccagggcagagg

SEQ ID NO: 60559 - DNA, 25 bp, Homo sapien
gagcatgcatgcgacccatgatggc

SEQ ID NO: 60560 - DNA, 25 bp, Homo sapien
ccttcacgtcgtcagatgtcaactt

SEQ ID NO: 60561 - DNA, 25 bp, Homo sapien
gccaaacggtgaatccggctctcta

SEQ ID NO: 60562 - DNA, 25 bp, Homo sapien
gagcatgcatgcgacccatgatggc

SEQ ID NO: 60563 - DNA, 25 bp, Homo sapien
ttagaatcagacggaatttagcatc

SEQ ID NO: 60564 - DNA, 25 bp, Homo sapien
ccttcacgtcgtcagatgtcaactt

SEQ ID NO: 60565 - DNA, 25 bp, Homo sapien
taaatggtagagatcttcaggaaga

SEQ ID NO: 60566 - DNA, 25 bp, Homo sapien
agggaggactcgcttggtcttataa

SEQ ID NO: 60567 - DNA, 25 bp, Homo sapien
ttataatatcgagccaaacggtgaa

SEQ ID NO: 60568 - DNA, 25 bp, Homo sapien
gcagaggctgtagatgattcatatt

SEQ ID NO: 60569 - DNA, 25 bp, Homo sapien
aggagtaaggcccttcttggccagt

SEQ ID NO: 60570 - DNA, 25 bp, Homo sapien
tacaccgatctgtgaaggagtaagg

SEQ ID NO: 60571 - DNA, 25 bp, Homo sapien
caaatttatgcgaccagggcagagg

SEQ ID NO: 60572 - DNA, 25 bp, Homo sapien
gccaaacggtgaatccggctctcta

SEQ ID NO: 60573 - DNA, 25 bp, Homo sapien
agggaggactcgcttggtcttataa

SEQ ID NO: 60574 - DNA, 25 bp, Homo sapien
gagcatgcatgcgacccatgatggc

SEQ ID NO: 60575 - DNA, 25 bp, Homo sapien
ttagaatcagacggaatttagcatc

SEQ ID NO: 60576 - DNA, 25 bp, Homo sapien
taaatggtagagatcttcaggaaga

SEQ ID NO: 60577 - DNA, 25 bp, Homo sapien
tacaccgatctgtgaaggagtaagg

SEQ ID NO: 60578 - DNA, 25 bp, Homo sapien
aggagtaaggcccttcttggccagt

SEQ ID NO: 60579 - DNA, 25 bp, Homo sapien
caaatttatgcgaccagggcagagg

SEQ ID NO: 60580 - DNA, 25 bp, Homo sapien
ttataatatcgagccaaacggtgaa

SEQ ID NO: 60581 - DNA, 25 bp, Homo sapien
gcagaggctgtagatgattcatatt

SEQ ID NO: 60582 - DNA, 25 bp, Homo sapien
ccttcacgtcgtcagatgtcaactt

SEQ ID NO: 60583 - DNA, 25 bp, Homo sapien
aggagtaaggcccttcttggccagt

SEQ ID NO: 60584 - DNA, 25 bp, Homo sapien
tacaccgatctgtgaaggagtaagg

SEQ ID NO: 60585 - DNA, 25 bp, Homo sapien
taaatggtagagatcttcaggaaga

SEQ ID NO: 60586 - DNA, 25 bp, Homo sapien
ttagaatcagacggaatttagcatc

SEQ ID NO: 60587 - DNA, 25 bp, Homo sapien
gccaaacggtgaatccggctctcta

SEQ ID NO: 60588 - DNA, 25 bp, Homo sapien
ttataatatcgagccaaacggtgaa

SEQ ID NO: 60589 - DNA, 25 bp, Homo sapien
agggaggactcgcttggtcttataa

SEQ ID NO: 60590 - DNA, 25 bp, Homo sapien
gcagaggctgtagatgattcatatt

SEQ ID NO: 60591 - DNA, 25 bp, Homo sapien
caaatttatgcgaccagggcagagg

SEQ ID NO: 60592 - DNA, 25 bp, Homo sapien
gagcatgcatgcgacccatgatggc

SEQ ID NO: 60593 - DNA, 25 bp, Homo sapien
ccttcacgtcgtcagatgtcaactt

SEQ ID NO: 60594 - DNA, 25 bp, Homo sapien
tacaccgatctgtgaaggagtaagg

SEQ ID NO: 60595 - DNA, 25 bp, Homo sapien
aggagtaaggcccttcttggccagt

SEQ ID NO: 60596 - DNA, 25 bp, Homo sapien
gcagaggctgtagatgattcatatt

SEQ ID NO: 60597 - DNA, 25 bp, Homo sapien
gagcatgcatgcgacccatgatggc

SEQ ID NO: 60598 - DNA, 25 bp, Homo sapien
ttagaatcagacggaatttagcatc

SEQ ID NO: 60599 - DNA, 25 bp, Homo sapien
ttataatatcgagccaaacggtgaa

SEQ ID NO: 60600 - DNA, 25 bp, Homo sapien
agggaggactcgcttggtcttataa

SEQ ID NO: 60601 - DNA, 25 bp, Homo sapien
taaatggtagagatcttcaggaaga

SEQ ID NO: 60602 - DNA, 25 bp, Homo sapien
caaatttatgcgaccagggcagagg

SEQ ID NO: 60603 - DNA, 25 bp, Homo sapien
gccaaacggtgaatccggctctcta

SEQ ID NO: 60604 - DNA, 25 bp, Homo sapien
ccttcacgtcgtcagatgtcaactt

SEQ ID NO: 60605 - DNA, 25 bp, Homo sapien
gagcatgcatgcgacccatgatggc

SEQ ID NO: 60606 - DNA, 25 bp, Homo sapien
ccttcacgtcgtcagatgtcaactt

SEQ ID NO: 60607 - DNA, 25 bp, Homo sapien
aggagtaaggcccttcttggccagt

SEQ ID NO: 60608 - DNA, 25 bp, Homo sapien
tacaccgatctgtgaaggagtaagg

SEQ ID NO: 60609 - DNA, 25 bp, Homo sapien
taaatggtagagatcttcaggaaga

SEQ ID NO: 60610 - DNA, 25 bp, Homo sapien
ttagaatcagacggaatttagcatc

SEQ ID NO: 60611 - DNA, 25 bp, Homo sapien
gccaaacggtgaatccggctctcta

SEQ ID NO: 60612 - DNA, 25 bp, Homo sapien
ttataatatcgagccaaacggtgaa

SEQ ID NO: 60613 - DNA, 25 bp, Homo sapien
agggaggactcgcttggtcttataa

SEQ ID NO: 60614 - DNA, 25 bp, Homo sapien
gcagaggctgtagatgattcatatt

SEQ ID NO: 60615 - DNA, 25 bp, Homo sapien
caaatttatgcgaccagggcagagg

SEQ ID NO: 60616 - DNA, 25 bp, Homo sapien
gccaaacggtgaatccggctctcta

SEQ ID NO: 60617 - DNA, 25 bp, Homo sapien
gcagaggctgtagatgattcatatt

SEQ ID NO: 60618 - DNA, 25 bp, Homo sapien
ttagaatcagacggaatttagcatc

SEQ ID NO: 60619 - DNA, 25 bp, Homo sapien
caaatttatgcgaccagggcagagg

SEQ ID NO: 60620 - DNA, 25 bp, Homo sapien
taaatggtagagatcttcaggaaga

SEQ ID NO: 60621 - DNA, 25 bp, Homo sapien
gagcatgcatgcgacccatgatggc

SEQ ID NO: 60622 - DNA, 25 bp, Homo sapien
ttataatatcgagccaaacggtgaa

SEQ ID NO: 60623 - DNA, 25 bp, Homo sapien
ccttcacgtcgtcagatgtcaactt

SEQ ID NO: 60624 - DNA, 25 bp, Homo sapien
aggagtaaggcccttcttggccagt

SEQ ID NO: 60625 - DNA, 25 bp, Homo sapien
agggaggactcgcttggtcttataa

SEQ ID NO: 60626 - DNA, 25 bp, Homo sapien
tacaccgatctgtgaaggagtaagg

SEQ ID NO: 60627 - DNA, 25 bp, Homo sapien
aggagtaaggcccttcttggccagt

SEQ ID NO: 60628 - DNA, 25 bp, Homo sapien
tacaccgatctgtgaaggagtaagg

SEQ ID NO: 60629 - DNA, 25 bp, Homo sapien
taaatggtagagatcttcaggaaga

SEQ ID NO: 60630 - DNA, 25 bp, Homo sapien
ttagaatcagacggaatttagcatc

SEQ ID NO: 60631 - DNA, 25 bp, Homo sapien
gccaaacggtgaatccggctctcta

SEQ ID NO: 60632 - DNA, 25 bp, Homo sapien
ttataatatcgagccaaacggtgaa

SEQ ID NO: 60633 - DNA, 25 bp, Homo sapien
agggaggactcgcttggtcttataa

SEQ ID NO: 60634 - DNA, 25 bp, Homo sapien
gcagaggctgtagatgattcatatt

SEQ ID NO: 60635 - DNA, 25 bp, Homo sapien
caaatttatgcgaccagggcagagg

SEQ ID NO: 60636 - DNA, 25 bp, Homo sapien
gagcatgcatgcgacccatgatggc

SEQ ID NO: 60637 - DNA, 25 bp, Homo sapien
ccttcacgtcgtcagatgtcaactt

SEQ ID NO: 60638 - DNA, 25 bp, Homo sapien
aggagtaaggcccttcttggccagt

SEQ ID NO: 60639 - DNA, 25 bp, Homo sapien
gccaaacggtgaatccggctctcta

SEQ ID NO: 60640 - DNA, 25 bp, Homo sapien
ttataatatcgagccaaacggtgaa

SEQ ID NO: 60641 - DNA, 25 bp, Homo sapien
caaatttatgcgaccagggcagagg

SEQ ID NO: 60642 - DNA, 25 bp, Homo sapien
ccttcacgtcgtcagatgtcaactt

SEQ ID NO: 60643 - DNA, 25 bp, Homo sapien
tacaccgatctgtgaaggagtaagg

SEQ ID NO: 60644 - DNA, 25 bp, Homo sapien
taaatggtagagatcttcaggaaga

SEQ ID NO: 60645 - DNA, 25 bp, Homo sapien
agggaggactcgcttggtcttataa

SEQ ID NO: 60646 - DNA, 25 bp, Homo sapien
gcagaggctgtagatgattcatatt

SEQ ID NO: 60647 - DNA, 25 bp, Homo sapien
ttagaatcagacggaatttagcatc

SEQ ID NO: 60648 - DNA, 25 bp, Homo sapien
gagcatgcatgcgacccatgatggc

SEQ ID NO: 60649 - DNA, 25 bp, Homo sapien
aggagtaaggcccttcttggccagt

SEQ ID NO: 60650 - DNA, 25 bp, Homo sapien
tacaccgatctgtgaaggagtaagg

SEQ ID NO: 60651 - DNA, 25 bp, Homo sapien
taaatggtagagatcttcaggaaga

SEQ ID NO: 60652 - DNA, 25 bp, Homo sapien
ttagaatcagacggaatttagcatc

SEQ ID NO: 60653 - DNA, 25 bp, Homo sapien
gccaaacggtgaatccggctctcta

SEQ ID NO: 60654 - DNA, 25 bp, Homo sapien
ttataatatcgagccaaacggtgaa

SEQ ID NO: 60655 - DNA, 25 bp, Homo sapien
agggaggactcgcttggtcttataa

SEQ ID NO: 60656 - DNA, 25 bp, Homo sapien
gcagaggctgtagatgattcatatt

SEQ ID NO: 60657 - DNA, 25 bp, Homo sapien
caaatttatgcgaccagggcagagg

SEQ ID NO: 60658 - DNA, 25 bp, Homo sapien
gagcatgcatgcgacccatgatggc

SEQ ID NO: 60659 - DNA, 25 bp, Homo sapien
ccttcacgtcgtcagatgtcaactt

SEQ ID NO: 60660 - DNA, 25 bp, Homo sapien
caaatttatgcgaccagggcagagg

SEQ ID NO: 60661 - DNA, 25 bp, Homo sapien
agggaggactcgcttggtcttataa

SEQ ID NO: 60662 - DNA, 25 bp, Homo sapien
ccttcacgtcgtcagatgtcaactt

SEQ ID NO: 60663 - DNA, 25 bp, Homo sapien
gcagaggctgtagatgattcatatt

SEQ ID NO: 60664 - DNA, 25 bp, Homo sapien
aggagtaaggcccttcttggccagt

SEQ ID NO: 60665 - DNA, 25 bp, Homo sapien
gagcatgcatgcgacccatgatggc

SEQ ID NO: 60666 - DNA, 25 bp, Homo sapien
ttagaatcagacggaatttagcatc

SEQ ID NO: 60667 - DNA, 25 bp, Homo sapien
tacaccgatctgtgaaggagtaagg

SEQ ID NO: 60668 - DNA, 25 bp, Homo sapien
gccaaacggtgaatccggctctcta

SEQ ID NO: 60669 - DNA, 25 bp, Homo sapien
ttataatatcgagccaaacggtgaa

SEQ ID NO: 60670 - DNA, 25 bp, Homo sapien
taaatggtagagatcttcaggaaga

SEQ ID NO: 60671 - DNA, 25 bp, Homo sapien
aggagtaaggcccttcttggccagt

SEQ ID NO: 60672 - DNA, 25 bp, Homo sapien
tacaccgatctgtgaaggagtaagg

SEQ ID NO: 60673 - DNA, 25 bp, Homo sapien
taaatggtagagatcttcaggaaga

SEQ ID NO: 60674 - DNA, 25 bp, Homo sapien
ttagaatcagacggaatttagcatc

SEQ ID NO: 60675 - DNA, 25 bp, Homo sapien
gccaaacggtgaatccggctctcta

SEQ ID NO: 60676 - DNA, 25 bp, Homo sapien
ttataatatcgagccaaacggtgaa

SEQ ID NO: 60677 - DNA, 25 bp, Homo sapien
agggaggactcgcttggtcttataa

SEQ ID NO: 60678 - DNA, 25 bp, Homo sapien
gcagaggctgtagatgattcatatt

SEQ ID NO: 60679 - DNA, 25 bp, Homo sapien
caaatttatgcgaccagggcagagg

SEQ ID NO: 60680 - DNA, 25 bp, Homo sapien
gagcatgcatgcgacccatgatggc

SEQ ID NO: 60681 - DNA, 25 bp, Homo sapien
ccttcacgtcgtcagatgtcaactt

SEQ ID NO: 60682 - DNA, 25 bp, Homo sapien
gcagaggctgtagatgattcatatt

SEQ ID NO: 60683 - DNA, 25 bp, Homo sapien
gagcatgcatgcgacccatgatggc

SEQ ID NO: 60684 - DNA, 25 bp, Homo sapien
ttagaatcagacggaatttagcatc

SEQ ID NO: 60685 - DNA, 25 bp, Homo sapien
taaatggtagagatcttcaggaaga

SEQ ID NO: 60686 - DNA, 25 bp, Homo sapien
ccttcacgtcgtcagatgtcaactt

SEQ ID NO: 60687 - DNA, 25 bp, Homo sapien
tacaccgatctgtgaaggagtaagg

SEQ ID NO: 60688 - DNA, 25 bp, Homo sapien
ttataatatcgagccaaacggtgaa

SEQ ID NO: 60689 - DNA, 25 bp, Homo sapien
aggagtaaggcccttcttggccagt

SEQ ID NO: 60690 - DNA, 25 bp, Homo sapien
gccaaacggtgaatccggctctcta

SEQ ID NO: 60691 - DNA, 25 bp, Homo sapien
caaatttatgcgaccagggcagagg

SEQ ID NO: 60692 - DNA, 25 bp, Homo sapien
agggaggactcgcttggtcttataa

SEQ ID NO: 60693 - DNA, 25 bp, Homo sapien
aggagtaaggcccttcttggccagt

SEQ ID NO: 60694 - DNA, 25 bp, Homo sapien
tacaccgatctgtgaaggagtaagg

SEQ ID NO: 60695 - DNA, 25 bp, Homo sapien
taaatggtagagatcttcaggaaga

SEQ ID NO: 60696 - DNA, 25 bp, Homo sapien
ttagaatcagacggaatttagcatc

SEQ ID NO: 60697 - DNA, 25 bp, Homo sapien
gccaaacggtgaatccggctctcta

SEQ ID NO: 60698 - DNA, 25 bp, Homo sapien
ttataatatcgagccaaacggtgaa

SEQ ID NO: 60699 - DNA, 25 bp, Homo sapien
agggaggactcgcttggtcttataa

SEQ ID NO: 60700 - DNA, 25 bp, Homo sapien
gcagaggctgtagatgattcatatt

SEQ ID NO: 60701 - DNA, 25 bp, Homo sapien
caaatttatgcgaccagggcagagg

SEQ ID NO: 60702 - DNA, 25 bp, Homo sapien
gagcatgcatgcgacccatgatggc

SEQ ID NO: 60703 - DNA, 25 bp, Homo sapien
ccttcacgtcgtcagatgtcaactt

SEQ ID NO: 60704 - DNA, 25 bp, Homo sapien
aggagtaaggcccttcttggccagt

SEQ ID NO: 60705 - DNA, 25 bp, Homo sapien
tacaccgatctgtgaaggagtaagg

SEQ ID NO: 60706 - DNA, 25 bp, Homo sapien
taaatggtagagatcttcaggaaga

SEQ ID NO: 60707 - DNA, 25 bp, Homo sapien
ttagaatcagacggaatttagcatc

SEQ ID NO: 60708 - DNA, 25 bp, Homo sapien
gccaaacggtgaatccggctctcta

SEQ ID NO: 60709 - DNA, 25 bp, Homo sapien
ttataatatcgagccaaacggtgaa

SEQ ID NO: 60710 - DNA, 25 bp, Homo sapien
agggaggactcgcttggtcttataa

SEQ ID NO: 60711 - DNA, 25 bp, Homo sapien
gcagaggctgtagatgattcatatt

SEQ ID NO: 60712 - DNA, 25 bp, Homo sapien
caaatttatgcgaccagggcagagg

SEQ ID NO: 60713 - DNA, 25 bp, Homo sapien
gagcatgcatgcgacccatgatggc

SEQ ID NO: 60714 - DNA, 25 bp, Homo sapien
ccttcacgtcgtcagatgtcaactt

SEQ ID NO: 60715 - DNA, 25 bp, Homo sapien
aggagtaaggcccttcttggccagt

SEQ ID NO: 60716 - DNA, 25 bp, Homo sapien
caaatttatgcgaccagggcagagg

SEQ ID NO: 60717 - DNA, 25 bp, Homo sapien
gagcatgcatgcgacccatgatggc

SEQ ID NO: 60718 - DNA, 25 bp, Homo sapien
taaatggtagagatcttcaggaaga

SEQ ID NO: 60719 - DNA, 25 bp, Homo sapien
gccaaacggtgaatccggctctcta

SEQ ID NO: 60720 - DNA, 25 bp, Homo sapien
ttataatatcgagccaaacggtgaa

SEQ ID NO: 60721 - DNA, 25 bp, Homo sapien
gcagaggctgtagatgattcatatt

SEQ ID NO: 60722 - DNA, 25 bp, Homo sapien
agggaggactcgcttggtcttataa

SEQ ID NO: 60723 - DNA, 25 bp, Homo sapien
ttagaatcagacggaatttagcatc

SEQ ID NO: 60724 - DNA, 25 bp, Homo sapien
ccttcacgtcgtcagatgtcaactt

SEQ ID NO: 60725 - DNA, 25 bp, Homo sapien
tacaccgatctgtgaaggagtaagg

SEQ ID NO: 60726 - DNA, 25 bp, Homo sapien
aggagtaaggcccttcttggccagt

SEQ ID NO: 60727 - DNA, 25 bp, Homo sapien
tacaccgatctgtgaaggagtaagg

SEQ ID NO: 60728 - DNA, 25 bp, Homo sapien
taaatggtagagatcttcaggaaga

SEQ ID NO: 60729 - DNA, 25 bp, Homo sapien
ttagaatcagacggaatttagcatc

SEQ ID NO: 60730 - DNA, 25 bp, Homo sapien
gccaaacggtgaatccggctctcta

SEQ ID NO: 60731 - DNA, 25 bp, Homo sapien
ttataatatcgagccaaacggtgaa

SEQ ID NO: 60732 - DNA, 25 bp, Homo sapien
agggaggactcgcttggtcttataa

SEQ ID NO: 60733 - DNA, 25 bp, Homo sapien
gcagaggctgtagatgattcatatt

SEQ ID NO: 60734 - DNA, 25 bp, Homo sapien
caaatttatgcgaccagggcagagg

SEQ ID NO: 60735 - DNA, 25 bp, Homo sapien
gagcatgcatgcgacccatgatggc

SEQ ID NO: 60736 - DNA, 25 bp, Homo sapien
ccttcacgtcgtcagatgtcaactt

SEQ ID NO: 60737 - DNA, 25 bp, Homo sapien
aggagtaaggcccttcttggccagt

SEQ ID NO: 60738 - DNA, 25 bp, Homo sapien
gagcatgcatgcgacccatgatggc

SEQ ID NO: 60739 - DNA, 25 bp, Homo sapien
agggaggactcgcttggtcttataa

SEQ ID NO: 60740 - DNA, 25 bp, Homo sapien
tacaccgatctgtgaaggagtaagg

SEQ ID NO: 60741 - DNA, 25 bp, Homo sapien
ccttcacgtcgtcagatgtcaactt

SEQ ID NO: 60742 - DNA, 25 bp, Homo sapien
gcagaggctgtagatgattcatatt

SEQ ID NO: 60743 - DNA, 25 bp, Homo sapien
ttataatatcgagccaaacggtgaa

SEQ ID NO: 60744 - DNA, 25 bp, Homo sapien
gccaaacggtgaatccggctctcta

SEQ ID NO: 60745 - DNA, 25 bp, Homo sapien
taaatggtagagatcttcaggaaga

SEQ ID NO: 60746 - DNA, 25 bp, Homo sapien
ttagaatcagacggaatttagcatc

SEQ ID NO: 60747 - DNA, 25 bp, Homo sapien
caaatttatgcgaccagggcagagg

SEQ ID NO: 60748 - DNA, 25 bp, Homo sapien
aggagtaaggcccttcttggccagt

SEQ ID NO: 60749 - DNA, 25 bp, Homo sapien
tacaccgatctgtgaaggagtaagg

SEQ ID NO: 60750 - DNA, 25 bp, Homo sapien
taaatggtagagatcttcaggaaga

SEQ ID NO: 60751 - DNA, 25 bp, Homo sapien
ttagaatcagacggaatttagcatc

SEQ ID NO: 60752 - DNA, 25 bp, Homo sapien
gccaaacggtgaatccggctctcta

SEQ ID NO: 60753 - DNA, 25 bp, Homo sapien
ttataatatcgagccaaacggtgaa

SEQ ID NO: 60754 - DNA, 25 bp, Homo sapien
agggaggactcgcttggtcttataa

SEQ ID NO: 60755 - DNA, 25 bp, Homo sapien
gcagaggctgtagatgattcatatt

SEQ ID NO: 60756 - DNA, 25 bp, Homo sapien
caaatttatgcgaccagggcagagg

SEQ ID NO: 60757 - DNA, 25 bp, Homo sapien
gagcatgcatgcgacccatgatggc

SEQ ID NO: 60758 - DNA, 25 bp, Homo sapien
ccttcacgtcgtcagatgtcaactt

SEQ ID NO: 60759 - DNA, 25 bp, Homo sapien
agggaggactcgcttggtcttataa

SEQ ID NO: 60760 - DNA, 25 bp, Homo sapien
taaatggtagagatcttcaggaaga

SEQ ID NO: 60761 - DNA, 25 bp, Homo sapien
caaatttatgcgaccagggcagagg

SEQ ID NO: 60762 - DNA, 25 bp, Homo sapien
tacaccgatctgtgaaggagtaagg

SEQ ID NO: 60763 - DNA, 25 bp, Homo sapien
gagcatgcatgcgacccatgatggc

SEQ ID NO: 60764 - DNA, 25 bp, Homo sapien
ccttcacgtcgtcagatgtcaactt

SEQ ID NO: 60765 - DNA, 25 bp, Homo sapien
aggagtaaggcccttcttggccagt

SEQ ID NO: 60766 - DNA, 25 bp, Homo sapien
ttagaatcagacggaatttagcatc

SEQ ID NO: 60767 - DNA, 25 bp, Homo sapien
gccaaacggtgaatccggctctcta

SEQ ID NO: 60768 - DNA, 25 bp, Homo sapien
ttataatatcgagccaaacggtgaa

SEQ ID NO: 60769 - DNA, 25 bp, Homo sapien
gcagaggctgtagatgattcatatt

SEQ ID NO: 60770 - DNA, 25 bp, Homo sapien
aggagtaaggcccttcttggccagt

SEQ ID NO: 60771 - DNA, 25 bp, Homo sapien
tacaccgatctgtgaaggagtaagg

SEQ ID NO: 60772 - DNA, 25 bp, Homo sapien
taaatggtagagatcttcaggaaga

SEQ ID NO: 60773 - DNA, 25 bp, Homo sapien
ttagaatcagacggaatttagcatc

SEQ ID NO: 60774 - DNA, 25 bp, Homo sapien
gccaaacggtgaatccggctctcta

SEQ ID NO: 60775 - DNA, 25 bp, Homo sapien
ttataatatcgagccaaacggtgaa

SEQ ID NO: 60776 - DNA, 25 bp, Homo sapien
agggaggactcgcttggtcttataa

SEQ ID NO: 60777 - DNA, 25 bp, Homo sapien
gcagaggctgtagatgattcatatt

SEQ ID NO: 60778 - DNA, 25 bp, Homo sapien
caaatttatgcgaccagggcagagg

SEQ ID NO: 60779 - DNA, 25 bp, Homo sapien
gagcatgcatgcgacccatgatggc

SEQ ID NO: 60780 - DNA, 25 bp, Homo sapien
ccttcacgtcgtcagatgtcaactt

SEQ ID NO: 60781 - DNA, 25 bp, Homo sapien
gccaaacggtgaatccggctctcta

SEQ ID NO: 60782 - DNA, 25 bp, Homo sapien
tacaccgatctgtgaaggagtaagg

SEQ ID NO: 60783 - DNA, 25 bp, Homo sapien
ccttcacgtcgtcagatgtcaactt

SEQ ID NO: 60784 - DNA, 25 bp, Homo sapien
caaatttatgcgaccagggcagagg

SEQ ID NO: 60785 - DNA, 25 bp, Homo sapien
taaatggtagagatcttcaggaaga

SEQ ID NO: 60786 - DNA, 25 bp, Homo sapien
gagcatgcatgcgacccatgatggc

SEQ ID NO: 60787 - DNA, 25 bp, Homo sapien
ttataatatcgagccaaacggtgaa

SEQ ID NO: 60788 - DNA, 25 bp, Homo sapien
agggaggactcgcttggtcttataa

SEQ ID NO: 60789 - DNA, 25 bp, Homo sapien
ttagaatcagacggaatttagcatc

SEQ ID NO: 60790 - DNA, 25 bp, Homo sapien
aggagtaaggcccttcttggccagt

SEQ ID NO: 60791 - DNA, 25 bp, Homo sapien
gcagaggctgtagatgattcatatt

SEQ ID NO: 60792 - DNA, 25 bp, Homo sapien
aggagtaaggcccttcttggccagt

SEQ ID NO: 60793 - DNA, 25 bp, Homo sapien
tacaccgatctgtgaaggagtaagg

SEQ ID NO: 60794 - DNA, 25 bp, Homo sapien
taaatggtagagatcttcaggaaga

SEQ ID NO: 60795 - DNA, 25 bp, Homo sapien
ttagaatcagacggaatttagcatc

SEQ ID NO: 60796 - DNA, 25 bp, Homo sapien
gccaaacggtgaatccggctctcta

SEQ ID NO: 60797 - DNA, 25 bp, Homo sapien
ttataatatcgagccaaacggtgaa

SEQ ID NO: 60798 - DNA, 25 bp, Homo sapien
agggaggactcgcttggtcttataa

SEQ ID NO: 60799 - DNA, 25 bp, Homo sapien
gcagaggctgtagatgattcatatt

SEQ ID NO: 60800 - DNA, 25 bp, Homo sapien
caaatttatgcgaccagggcagagg

SEQ ID NO: 60801 - DNA, 25 bp, Homo sapien
gagcatgcatgcgacccatgatggc

SEQ ID NO: 60802 - DNA, 25 bp, Homo sapien
ccttcacgtcgtcagatgtcaactt

SEQ ID NO: 60803 - DNA, 25 bp, Homo sapien
gcagaggctgtagatgattcatatt

SEQ ID NO: 60804 - DNA, 25 bp, Homo sapien
gccaaacggtgaatccggctctcta

SEQ ID NO: 60805 - DNA, 25 bp, Homo sapien
ttataatatcgagccaaacggtgaa

SEQ ID NO: 60806 - DNA, 25 bp, Homo sapien
tacaccgatctgtgaaggagtaagg

SEQ ID NO: 60807 - DNA, 25 bp, Homo sapien
caaatttatgcgaccagggcagagg

SEQ ID NO: 60808 - DNA, 25 bp, Homo sapien
ttagaatcagacggaatttagcatc

SEQ ID NO: 60809 - DNA, 25 bp, Homo sapien
taaatggtagagatcttcaggaaga

SEQ ID NO: 60810 - DNA, 25 bp, Homo sapien
aggagtaaggcccttcttggccagt

SEQ ID NO: 60811 - DNA, 25 bp, Homo sapien
gagcatgcatgcgacccatgatggc

SEQ ID NO: 60812 - DNA, 25 bp, Homo sapien
agggaggactcgcttggtcttataa

SEQ ID NO: 60813 - DNA, 25 bp, Homo sapien
ccttcacgtcgtcagatgtcaactt

SEQ ID NO: 60814 - DNA, 25 bp, Homo sapien
ccttcacgtcgtcagatgtcaactt

SEQ ID NO: 60815 - DNA, 25 bp, Homo sapien
taaatggtagagatcttcaggaaga

SEQ ID NO: 60816 - DNA, 25 bp, Homo sapien
caaatttatgcgaccagggcagagg

SEQ ID NO: 60817 - DNA, 25 bp, Homo sapien
aggagtaaggcccttcttggccagt

SEQ ID NO: 60818 - DNA, 25 bp, Homo sapien
ttataatatcgagccaaacggtgaa

SEQ ID NO: 60819 - DNA, 25 bp, Homo sapien
gagcatgcatgcgacccatgatggc

SEQ ID NO: 60820 - DNA, 25 bp, Homo sapien
ttagaatcagacggaatttagcatc

SEQ ID NO: 60821 - DNA, 25 bp, Homo sapien
tacaccgatctgtgaaggagtaagg

SEQ ID NO: 60822 - DNA, 25 bp, Homo sapien
agggaggactcgcttggtcttataa

SEQ ID NO: 60823 - DNA, 25 bp, Homo sapien
gcagaggctgtagatgattcatatt

SEQ ID NO: 60824 - DNA, 25 bp, Homo sapien
gccaaacggtgaatccggctctcta

SEQ ID NO: 60825 - DNA, 25 bp, Homo sapien
aggagtaaggcccttcttggccagt

SEQ ID NO: 60826 - DNA, 25 bp, Homo sapien
tacaccgatctgtgaaggagtaagg

SEQ ID NO: 60827 - DNA, 25 bp, Homo sapien
taaatggtagagatcttcaggaaga

SEQ ID NO: 60828 - DNA, 25 bp, Homo sapien
ttagaatcagacggaatttagcatc

SEQ ID NO: 60829 - DNA, 25 bp, Homo sapien
gccaaacggtgaatccggctctcta

SEQ ID NO: 60830 - DNA, 25 bp, Homo sapien
ttataatatcgagccaaacggtgaa

SEQ ID NO: 60831 - DNA, 25 bp, Homo sapien
agggaggactcgcttggtcttataa

SEQ ID NO: 60832 - DNA, 25 bp, Homo sapien
gcagaggctgtagatgattcatatt

SEQ ID NO: 60833 - DNA, 25 bp, Homo sapien
caaatttatgcgaccagggcagagg

SEQ ID NO: 60834 - DNA, 25 bp, Homo sapien
gagcatgcatgcgacccatgatggc

SEQ ID NO: 60835 - DNA, 25 bp, Homo sapien
ccttcacgtcgtcagatgtcaactt

SEQ ID NO: 60836 - DNA, 25 bp, Homo sapien
taaatggtagagatcttcaggaaga

SEQ ID NO: 60837 - DNA, 25 bp, Homo sapien
ccttcacgtcgtcagatgtcaactt

SEQ ID NO: 60838 - DNA, 25 bp, Homo sapien
ttagaatcagacggaatttagcatc

SEQ ID NO: 60839 - DNA, 25 bp, Homo sapien
gagcatgcatgcgacccatgatggc

SEQ ID NO: 60840 - DNA, 25 bp, Homo sapien
caaatttatgcgaccagggcagagg

SEQ ID NO: 60841 - DNA, 25 bp, Homo sapien
agggaggactcgcttggtcttataa

SEQ ID NO: 60842 - DNA, 25 bp, Homo sapien
aggagtaaggcccttcttggccagt

SEQ ID NO: 60843 - DNA, 25 bp, Homo sapien
gccaaacggtgaatccggctctcta

SEQ ID NO: 60844 - DNA, 25 bp, Homo sapien
ttataatatcgagccaaacggtgaa

SEQ ID NO: 60845 - DNA, 25 bp, Homo sapien
tacaccgatctgtgaaggagtaagg

SEQ ID NO: 60846 - DNA, 25 bp, Homo sapien
gcagaggctgtagatgattcatatt

SEQ ID NO: 60847 - DNA, 25 bp, Homo sapien
aggagtaaggcccttcttggccagt

SEQ ID NO: 60848 - DNA, 25 bp, Homo sapien
tacaccgatctgtgaaggagtaagg

SEQ ID NO: 60849 - DNA, 25 bp, Homo sapien
taaatggtagagatcttcaggaaga

SEQ ID NO: 60850 - DNA, 25 bp, Homo sapien
ttagaatcagacggaatttagcatc

SEQ ID NO: 60851 - DNA, 25 bp, Homo sapien
gccaaacggtgaatccggctctcta

SEQ ID NO: 60852 - DNA, 25 bp, Homo sapien
ttataatatcgagccaaacggtgaa

SEQ ID NO: 60853 - DNA, 25 bp, Homo sapien
agggaggactcgcttggtcttataa

SEQ ID NO: 60854 - DNA, 25 bp, Homo sapien
gcagaggctgtagatgattcatatt

SEQ ID NO: 60855 - DNA, 25 bp, Homo sapien
caaatttatgcgaccagggcagagg

SEQ ID NO: 60856 - DNA, 25 bp, Homo sapien
gagcatgcatgcgacccatgatggc

SEQ ID NO: 60857 - DNA, 25 bp, Homo sapien
ccttcacgtcgtcagatgtcaactt

SEQ ID NO: 60858 - DNA, 25 bp, Homo sapien
ttagaatcagacggaatttagcatc

SEQ ID NO: 60859 - DNA, 25 bp, Homo sapien
gccaaacggtgaatccggctctcta

SEQ ID NO: 60860 - DNA, 25 bp, Homo sapien
tacaccgatctgtgaaggagtaagg

SEQ ID NO: 60861 - DNA, 25 bp, Homo sapien
caaatttatgcgaccagggcagagg

SEQ ID NO: 60862 - DNA, 25 bp, Homo sapien
taaatggtagagatcttcaggaaga

SEQ ID NO: 60863 - DNA, 25 bp, Homo sapien
ttataatatcgagccaaacggtgaa

SEQ ID NO: 60864 - DNA, 25 bp, Homo sapien
agggaggactcgcttggtcttataa

SEQ ID NO: 60865 - DNA, 25 bp, Homo sapien
gcagaggctgtagatgattcatatt

SEQ ID NO: 60866 - DNA, 25 bp, Homo sapien
ccttcacgtcgtcagatgtcaactt

SEQ ID NO: 60867 - DNA, 25 bp, Homo sapien
gagcatgcatgcgacccatgatggc

SEQ ID NO: 60868 - DNA, 25 bp, Homo sapien
aggagtaaggcccttcttggccagt

SEQ ID NO: 60869 - DNA, 25 bp, Homo sapien
aggagtaaggcccttcttggccagt

SEQ ID NO: 60870 - DNA, 25 bp, Homo sapien
tacaccgatctgtgaaggagtaagg

SEQ ID NO: 60871 - DNA, 25 bp, Homo sapien
taaatggtagagatcttcaggaaga

SEQ ID NO: 60872 - DNA, 25 bp, Homo sapien
ttagaatcagacggaatttagcatc

SEQ ID NO: 60873 - DNA, 25 bp, Homo sapien
gccaaacggtgaatccggctctcta

SEQ ID NO: 60874 - DNA, 25 bp, Homo sapien
ttataatatcgagccaaacggtgaa

SEQ ID NO: 60875 - DNA, 25 bp, Homo sapien
agggaggactcgcttggtcttataa

SEQ ID NO: 60876 - DNA, 25 bp, Homo sapien
gcagaggctgtagatgattcatatt

SEQ ID NO: 60877 - DNA, 25 bp, Homo sapien
caaatttatgcgaccagggcagagg

SEQ ID NO: 60878 - DNA, 25 bp, Homo sapien
gagcatgcatgcgacccatgatggc

SEQ ID NO: 60879 - DNA, 25 bp, Homo sapien
ccttcacgtcgtcagatgtcaactt

SEQ ID NO: 60880 - DNA, 25 bp, Homo sapien
gccaggagcacgacttgatcttccg

SEQ ID NO: 60881 - DNA, 25 bp, Homo sapien
cacaacgttgacaaagcgccggttg

SEQ ID NO: 60882 - DNA, 25 bp, Homo sapien
cgccggttgtactgcatccgccgct

SEQ ID NO: 60883 - DNA, 25 bp, Homo sapien
cgccgcttagcccgacctgtcttct

SEQ ID NO: 60884 - DNA, 25 bp, Homo sapien
ggtcacctcgaaggtgtgtagctcc

SEQ ID NO: 60885 - DNA, 25 bp, Homo sapien
cttcttgccaaaggtgggcacaacg

SEQ ID NO: 60886 - DNA, 25 bp, Homo sapien
ctgctacttccagggtagtcagggc

SEQ ID NO: 60887 - DNA, 25 bp, Homo sapien
ttggccaccttaggagtctgacctc

SEQ ID NO: 60888 - DNA, 25 bp, Homo sapien
cagtgaggctacatgagccttgatc

SEQ ID NO: 60889 - DNA, 25 bp, Homo sapien
acctccaagcatgcggcctgctact

SEQ ID NO: 60890 - DNA, 25 bp, Homo sapien
gggcaatgccctccagtgaggctac

SEQ ID NO: 60891 - DNA, 25 bp, Homo sapien
ggtcacctcgaaggtgtgtagctcc

SEQ ID NO: 60892 - DNA, 25 bp, Homo sapien
cagtgaggctacatgagccttgatc

SEQ ID NO: 60893 - DNA, 25 bp, Homo sapien
gggcaatgccctccagtgaggctac

SEQ ID NO: 60894 - DNA, 25 bp, Homo sapien
gccaggagcacgacttgatcttccg

SEQ ID NO: 60895 - DNA, 25 bp, Homo sapien
ctgctacttccagggtagtcagggc

SEQ ID NO: 60896 - DNA, 25 bp, Homo sapien
acctccaagcatgcggcctgctact

SEQ ID NO: 60897 - DNA, 25 bp, Homo sapien
ttggccaccttaggagtctgacctc

SEQ ID NO: 60898 - DNA, 25 bp, Homo sapien
cgccgcttagcccgacctgtcttct

SEQ ID NO: 60899 - DNA, 25 bp, Homo sapien
cgccggttgtactgcatccgccgct

SEQ ID NO: 60900 - DNA, 25 bp, Homo sapien
cacaacgttgacaaagcgccggttg

SEQ ID NO: 60901 - DNA, 25 bp, Homo sapien
cttcttgccaaaggtgggcacaacg

SEQ ID NO: 60902 - DNA, 25 bp, Homo sapien
ggtcacctcgaaggtgtgtagctcc

SEQ ID NO: 60903 - DNA, 25 bp, Homo sapien
gccaggagcacgacttgatcttccg

SEQ ID NO: 60904 - DNA, 25 bp, Homo sapien
cttcttgccaaaggtgggcacaacg

SEQ ID NO: 60905 - DNA, 25 bp, Homo sapien
cgccggttgtactgcatccgccgct

SEQ ID NO: 60906 - DNA, 25 bp, Homo sapien
ctgctacttccagggtagtcagggc

SEQ ID NO: 60907 - DNA, 25 bp, Homo sapien
ttggccaccttaggagtctgacctc

SEQ ID NO: 60908 - DNA, 25 bp, Homo sapien
cagtgaggctacatgagccttgatc

SEQ ID NO: 60909 - DNA, 25 bp, Homo sapien
acctccaagcatgcggcctgctact

SEQ ID NO: 60910 - DNA, 25 bp, Homo sapien
gggcaatgccctccagtgaggctac

SEQ ID NO: 60911 - DNA, 25 bp, Homo sapien
cgccgcttagcccgacctgtcttct

SEQ ID NO: 60912 - DNA, 25 bp, Homo sapien
cacaacgttgacaaagcgccggttg

SEQ ID NO: 60913 - DNA, 25 bp, Homo sapien
cgccgcttagcccgacctgtcttct

SEQ ID NO: 60914 - DNA, 25 bp, Homo sapien
cgccggttgtactgcatccgccgct

SEQ ID NO: 60915 - DNA, 25 bp, Homo sapien
cacaacgttgacaaagcgccggttg

SEQ ID NO: 60916 - DNA, 25 bp, Homo sapien
cttcttgccaaaggtgggcacaacg

SEQ ID NO: 60917 - DNA, 25 bp, Homo sapien
ggtcacctcgaaggtgtgtagctcc

SEQ ID NO: 60918 - DNA, 25 bp, Homo sapien
cagtgaggctacatgagccttgatc

SEQ ID NO: 60919 - DNA, 25 bp, Homo sapien
gggcaatgccctccagtgaggctac

SEQ ID NO: 60920 - DNA, 25 bp, Homo sapien
gccaggagcacgacttgatcttccg

SEQ ID NO: 60921 - DNA, 25 bp, Homo sapien
ctgctacttccagggtagtcagggc

SEQ ID NO: 60922 - DNA, 25 bp, Homo sapien
acctccaagcatgcggcctgctact

SEQ ID NO: 60923 - DNA, 25 bp, Homo sapien
ttggccaccttaggagtctgacctc

SEQ ID NO: 60924 - DNA, 25 bp, Homo sapien
ggtcacctcgaaggtgtgtagctcc

SEQ ID NO: 60925 - DNA, 25 bp, Homo sapien
ctgctacttccagggtagtcagggc

SEQ ID NO: 60926 - DNA, 25 bp, Homo sapien
gggcaatgccctccagtgaggctac

SEQ ID NO: 60927 - DNA, 25 bp, Homo sapien
cgccgcttagcccgacctgtcttct

SEQ ID NO: 60928 - DNA, 25 bp, Homo sapien
cgccggttgtactgcatccgccgct

SEQ ID NO: 60929 - DNA, 25 bp, Homo sapien
cttcttgccaaaggtgggcacaacg

SEQ ID NO: 60930 - DNA, 25 bp, Homo sapien
cacaacgttgacaaagcgccggttg

SEQ ID NO: 60931 - DNA, 25 bp, Homo sapien
gccaggagcacgacttgatcttccg

SEQ ID NO: 60932 - DNA, 25 bp, Homo sapien
cagtgaggctacatgagccttgatc

SEQ ID NO: 60933 - DNA, 25 bp, Homo sapien
acctccaagcatgcggcctgctact

SEQ ID NO: 60934 - DNA, 25 bp, Homo sapien
ttggccaccttaggagtctgacctc

SEQ ID NO: 60935 - DNA, 25 bp, Homo sapien
ggtcacctcgaaggtgtgtagctcc

SEQ ID NO: 60936 - DNA, 25 bp, Homo sapien
cagtgaggctacatgagccttgatc

SEQ ID NO: 60937 - DNA, 25 bp, Homo sapien
gggcaatgccctccagtgaggctac

SEQ ID NO: 60938 - DNA, 25 bp, Homo sapien
gccaggagcacgacttgatcttccg

SEQ ID NO: 60939 - DNA, 25 bp, Homo sapien
ctgctacttccagggtagtcagggc

SEQ ID NO: 60940 - DNA, 25 bp, Homo sapien
acctccaagcatgcggcctgctact

SEQ ID NO: 60941 - DNA, 25 bp, Homo sapien
ttggccaccttaggagtctgacctc

SEQ ID NO: 60942 - DNA, 25 bp, Homo sapien
cgccgcttagcccgacctgtcttct

SEQ ID NO: 60943 - DNA, 25 bp, Homo sapien
cgccggttgtactgcatccgccgct

SEQ ID NO: 60944 - DNA, 25 bp, Homo sapien
cacaacgttgacaaagcgccggttg

SEQ ID NO: 60945 - DNA, 25 bp, Homo sapien
cttcttgccaaaggtgggcacaacg

SEQ ID NO: 60946 - DNA, 25 bp, Homo sapien
ggtcacctcgaaggtgtgtagctcc

SEQ ID NO: 60947 - DNA, 25 bp, Homo sapien
cagtgaggctacatgagccttgatc

SEQ ID NO: 60948 - DNA, 25 bp, Homo sapien
gggcaatgccctccagtgaggctac

SEQ ID NO: 60949 - DNA, 25 bp, Homo sapien
gccaggagcacgacttgatcttccg

SEQ ID NO: 60950 - DNA, 25 bp, Homo sapien
ctgctacttccagggtagtcagggc

SEQ ID NO: 60951 - DNA, 25 bp, Homo sapien
acctccaagcatgcggcctgctact

SEQ ID NO: 60952 - DNA, 25 bp, Homo sapien
ttggccaccttaggagtctgacctc

SEQ ID NO: 60953 - DNA, 25 bp, Homo sapien
cgccgcttagcccgacctgtcttct

SEQ ID NO: 60954 - DNA, 25 bp, Homo sapien
cgccggttgtactgcatccgccgct

SEQ ID NO: 60955 - DNA, 25 bp, Homo sapien
cacaacgttgacaaagcgccggttg

SEQ ID NO: 60956 - DNA, 25 bp, Homo sapien
cttcttgccaaaggtgggcacaacg

SEQ ID NO: 60957 - DNA, 25 bp, Homo sapien
ctgctacttccagggtagtcagggc

SEQ ID NO: 60958 - DNA, 25 bp, Homo sapien
cgccgcttagcccgacctgtcttct

SEQ ID NO: 60959 - DNA, 25 bp, Homo sapien
gccaggagcacgacttgatcttccg

SEQ ID NO: 60960 - DNA, 25 bp, Homo sapien
cgccggttgtactgcatccgccgct

SEQ ID NO: 60961 - DNA, 25 bp, Homo sapien
cagtgaggctacatgagccttgatc

SEQ ID NO: 60962 - DNA, 25 bp, Homo sapien
gggcaatgccctccagtgaggctac

SEQ ID NO: 60963 - DNA, 25 bp, Homo sapien
ttggccaccttaggagtctgacctc

SEQ ID NO: 60964 - DNA, 25 bp, Homo sapien
ggtcacctcgaaggtgtgtagctcc

SEQ ID NO: 60965 - DNA, 25 bp, Homo sapien
cttcttgccaaaggtgggcacaacg

SEQ ID NO: 60966 - DNA, 25 bp, Homo sapien
acctccaagcatgcggcctgctact

SEQ ID NO: 60967 - DNA, 25 bp, Homo sapien
cacaacgttgacaaagcgccggttg

SEQ ID NO: 60968 - DNA, 25 bp, Homo sapien
ggtcacctcgaaggtgtgtagctcc

SEQ ID NO: 60969 - DNA, 25 bp, Homo sapien
cagtgaggctacatgagccttgatc

SEQ ID NO: 60970 - DNA, 25 bp, Homo sapien
gggcaatgccctccagtgaggctac

SEQ ID NO: 60971 - DNA, 25 bp, Homo sapien
gccaggagcacgacttgatcttccg

SEQ ID NO: 60972 - DNA, 25 bp, Homo sapien
ctgctacttccagggtagtcagggc

SEQ ID NO: 60973 - DNA, 25 bp, Homo sapien
acctccaagcatgcggcctgctact

SEQ ID NO: 60974 - DNA, 25 bp, Homo sapien
ttggccaccttaggagtctgacctc

SEQ ID NO: 60975 - DNA, 25 bp, Homo sapien
cgccgcttagcccgacctgtcttct

SEQ ID NO: 60976 - DNA, 25 bp, Homo sapien
cgccggttgtactgcatccgccgct

SEQ ID NO: 60977 - DNA, 25 bp, Homo sapien
cacaacgttgacaaagcgccggttg

SEQ ID NO: 60978 - DNA, 25 bp, Homo sapien
cttcttgccaaaggtgggcacaacg

SEQ ID NO: 60979 - DNA, 25 bp, Homo sapien
gccaggagcacgacttgatcttccg

SEQ ID NO: 60980 - DNA, 25 bp, Homo sapien
ttggccaccttaggagtctgacctc

SEQ ID NO: 60981 - DNA, 25 bp, Homo sapien
ctgctacttccagggtagtcagggc

SEQ ID NO: 60982 - DNA, 25 bp, Homo sapien
gggcaatgccctccagtgaggctac

SEQ ID NO: 60983 - DNA, 25 bp, Homo sapien
ggtcacctcgaaggtgtgtagctcc

SEQ ID NO: 60984 - DNA, 25 bp, Homo sapien
cacaacgttgacaaagcgccggttg

SEQ ID NO: 60985 - DNA, 25 bp, Homo sapien
cagtgaggctacatgagccttgatc

SEQ ID NO: 60986 - DNA, 25 bp, Homo sapien
cttcttgccaaaggtgggcacaacg

SEQ ID NO: 60987 - DNA, 25 bp, Homo sapien
acctccaagcatgcggcctgctact

SEQ ID NO: 60988 - DNA, 25 bp, Homo sapien
cgccggttgtactgcatccgccgct

SEQ ID NO: 60989 - DNA, 25 bp, Homo sapien
cgccgcttagcccgacctgtcttct

SEQ ID NO: 60990 - DNA, 25 bp, Homo sapien
ggtcacctcgaaggtgtgtagctcc

SEQ ID NO: 60991 - DNA, 25 bp, Homo sapien
cagtgaggctacatgagccttgatc

SEQ ID NO: 60992 - DNA, 25 bp, Homo sapien
gggcaatgccctccagtgaggctac

SEQ ID NO: 60993 - DNA, 25 bp, Homo sapien
gccaggagcacgacttgatcttccg

SEQ ID NO: 60994 - DNA, 25 bp, Homo sapien
ctgctacttccagggtagtcagggc

SEQ ID NO: 60995 - DNA, 25 bp, Homo sapien
acctccaagcatgcggcctgctact

SEQ ID NO: 60996 - DNA, 25 bp, Homo sapien
ttggccaccttaggagtctgacctc

SEQ ID NO: 60997 - DNA, 25 bp, Homo sapien
cgccgcttagcccgacctgtcttct

SEQ ID NO: 60998 - DNA, 25 bp, Homo sapien
cgccggttgtactgcatccgccgct

SEQ ID NO: 60999 - DNA, 25 bp, Homo sapien
cacaacgttgacaaagcgccggttg

SEQ ID NO: 61000 - DNA, 25 bp, Homo sapien
cttcttgccaaaggtgggcacaacg

SEQ ID NO: 61001 - DNA, 25 bp, Homo sapien
gggcaatgccctccagtgaggctac

SEQ ID NO: 61002 - DNA, 25 bp, Homo sapien
cagtgaggctacatgagccttgatc

SEQ ID NO: 61003 - DNA, 25 bp, Homo sapien
cttcttgccaaaggtgggcacaacg

SEQ ID NO: 61004 - DNA, 25 bp, Homo sapien
acctccaagcatgcggcctgctact

SEQ ID NO: 61005 - DNA, 25 bp, Homo sapien
ggtcacctcgaaggtgtgtagctcc

SEQ ID NO: 61006 - DNA, 25 bp, Homo sapien
cacaacgttgacaaagcgccggttg

SEQ ID NO: 61007 - DNA, 25 bp, Homo sapien
cgccggttgtactgcatccgccgct

SEQ ID NO: 61008 - DNA, 25 bp, Homo sapien
ctgctacttccagggtagtcagggc

SEQ ID NO: 61009 - DNA, 25 bp, Homo sapien
cgccgcttagcccgacctgtcttct

SEQ ID NO: 61010 - DNA, 25 bp, Homo sapien
ttggccaccttaggagtctgacctc

SEQ ID NO: 61011 - DNA, 25 bp, Homo sapien
gccaggagcacgacttgatcttccg

SEQ ID NO: 61012 - DNA, 25 bp, Homo sapien
ggtcacctcgaaggtgtgtagctcc

SEQ ID NO: 61013 - DNA, 25 bp, Homo sapien
cagtgaggctacatgagccttgatc

SEQ ID NO: 61014 - DNA, 25 bp, Homo sapien
gggcaatgccctccagtgaggctac

SEQ ID NO: 61015 - DNA, 25 bp, Homo sapien
gccaggagcacgacttgatcttccg

SEQ ID NO: 61016 - DNA, 25 bp, Homo sapien
ctgctacttccagggtagtcagggc

SEQ ID NO: 61017 - DNA, 25 bp, Homo sapien
acctccaagcatgcggcctgctact

SEQ ID NO: 61018 - DNA, 25 bp, Homo sapien
ttggccaccttaggagtctgacctc

SEQ ID NO: 61019 - DNA, 25 bp, Homo sapien
cgccgcttagcccgacctgtcttct

SEQ ID NO: 61020 - DNA, 25 bp, Homo sapien
cgccggttgtactgcatccgccgct

SEQ ID NO: 61021 - DNA, 25 bp, Homo sapien
cacaacgttgacaaagcgccggttg

SEQ ID NO: 61022 - DNA, 25 bp, Homo sapien
cttcttgccaaaggtgggcacaacg

SEQ ID NO: 61023 - DNA, 25 bp, Homo sapien
cagtgaggctacatgagccttgatc

SEQ ID NO: 61024 - DNA, 25 bp, Homo sapien
gggcaatgccctccagtgaggctac

SEQ ID NO: 61025 - DNA, 25 bp, Homo sapien
cgccgcttagcccgacctgtcttct

SEQ ID NO: 61026 - DNA, 25 bp, Homo sapien
ctgctacttccagggtagtcagggc

SEQ ID NO: 61027 - DNA, 25 bp, Homo sapien
acctccaagcatgcggcctgctact

SEQ ID NO: 61028 - DNA, 25 bp, Homo sapien
cgccggttgtactgcatccgccgct

SEQ ID NO: 61029 - DNA, 25 bp, Homo sapien
gccaggagcacgacttgatcttccg

SEQ ID NO: 61030 - DNA, 25 bp, Homo sapien
cttcttgccaaaggtgggcacaacg

SEQ ID NO: 61031 - DNA, 25 bp, Homo sapien
ggtcacctcgaaggtgtgtagctcc

SEQ ID NO: 61032 - DNA, 25 bp, Homo sapien
ttggccaccttaggagtctgacctc

SEQ ID NO: 61033 - DNA, 25 bp, Homo sapien
cacaacgttgacaaagcgccggttg

SEQ ID NO: 61034 - DNA, 25 bp, Homo sapien
ggtcacctcgaaggtgtgtagctcc

SEQ ID NO: 61035 - DNA, 25 bp, Homo sapien
cagtgaggctacatgagccttgatc

SEQ ID NO: 61036 - DNA, 25 bp, Homo sapien
gggcaatgccctccagtgaggctac

SEQ ID NO: 61037 - DNA, 25 bp, Homo sapien
gccaggagcacgacttgatcttccg

SEQ ID NO: 61038 - DNA, 25 bp, Homo sapien
ctgctacttccagggtagtcagggc

SEQ ID NO: 61039 - DNA, 25 bp, Homo sapien
acctccaagcatgcggcctgctact

SEQ ID NO: 61040 - DNA, 25 bp, Homo sapien
ttggccaccttaggagtctgacctc

SEQ ID NO: 61041 - DNA, 25 bp, Homo sapien
cgccgcttagcccgacctgtcttct

SEQ ID NO: 61042 - DNA, 25 bp, Homo sapien
cgccggttgtactgcatccgccgct

SEQ ID NO: 61043 - DNA, 25 bp, Homo sapien
cacaacgttgacaaagcgccggttg

SEQ ID NO: 61044 - DNA, 25 bp, Homo sapien
cttcttgccaaaggtgggcacaacg

SEQ ID NO: 61045 - DNA, 25 bp, Homo sapien
cagtgaggctacatgagccttgatc

SEQ ID NO: 61046 - DNA, 25 bp, Homo sapien
acctccaagcatgcggcctgctact

SEQ ID NO: 61047 - DNA, 25 bp, Homo sapien
cgccggttgtactgcatccgccgct

SEQ ID NO: 61048 - DNA, 25 bp, Homo sapien
gccaggagcacgacttgatcttccg

SEQ ID NO: 61049 - DNA, 25 bp, Homo sapien
cgccgcttagcccgacctgtcttct

SEQ ID NO: 61050 - DNA, 25 bp, Homo sapien
cttcttgccaaaggtgggcacaacg

SEQ ID NO: 61051 - DNA, 25 bp, Homo sapien
cacaacgttgacaaagcgccggttg

SEQ ID NO: 61052 - DNA, 25 bp, Homo sapien
gggcaatgccctccagtgaggctac

SEQ ID NO: 61053 - DNA, 25 bp, Homo sapien
ggtcacctcgaaggtgtgtagctcc

SEQ ID NO: 61054 - DNA, 25 bp, Homo sapien
ttggccaccttaggagtctgacctc

SEQ ID NO: 61055 - DNA, 25 bp, Homo sapien
ctgctacttccagggtagtcagggc

SEQ ID NO: 61056 - DNA, 25 bp, Homo sapien
cgccggttgtactgcatccgccgct

SEQ ID NO: 61057 - DNA, 25 bp, Homo sapien
cttcttgccaaaggtgggcacaacg

SEQ ID NO: 61058 - DNA, 25 bp, Homo sapien
gccaggagcacgacttgatcttccg

SEQ ID NO: 61059 - DNA, 25 bp, Homo sapien
acctccaagcatgcggcctgctact

SEQ ID NO: 61060 - DNA, 25 bp, Homo sapien
cagtgaggctacatgagccttgatc

SEQ ID NO: 61061 - DNA, 25 bp, Homo sapien
gggcaatgccctccagtgaggctac

SEQ ID NO: 61062 - DNA, 25 bp, Homo sapien
ttggccaccttaggagtctgacctc

SEQ ID NO: 61063 - DNA, 25 bp, Homo sapien
ggtcacctcgaaggtgtgtagctcc

SEQ ID NO: 61064 - DNA, 25 bp, Homo sapien
ctgctacttccagggtagtcagggc

SEQ ID NO: 61065 - DNA, 25 bp, Homo sapien
cacaacgttgacaaagcgccggttg

SEQ ID NO: 61066 - DNA, 25 bp, Homo sapien
cgccgcttagcccgacctgtcttct

SEQ ID NO: 61067 - DNA, 25 bp, Homo sapien
ggtcacctcgaaggtgtgtagctcc

SEQ ID NO: 61068 - DNA, 25 bp, Homo sapien
cagtgaggctacatgagccttgatc

SEQ ID NO: 61069 - DNA, 25 bp, Homo sapien
gggcaatgccctccagtgaggctac

SEQ ID NO: 61070 - DNA, 25 bp, Homo sapien
gccaggagcacgacttgatcttccg

SEQ ID NO: 61071 - DNA, 25 bp, Homo sapien
ctgctacttccagggtagtcagggc

SEQ ID NO: 61072 - DNA, 25 bp, Homo sapien
acctccaagcatgcggcctgctact

SEQ ID NO: 61073 - DNA, 25 bp, Homo sapien
ttggccaccttaggagtctgacctc

SEQ ID NO: 61074 - DNA, 25 bp, Homo sapien
cgccgcttagcccgacctgtcttct

SEQ ID NO: 61075 - DNA, 25 bp, Homo sapien
cgccggttgtactgcatccgccgct

SEQ ID NO: 61076 - DNA, 25 bp, Homo sapien
cacaacgttgacaaagcgccggttg

SEQ ID NO: 61077 - DNA, 25 bp, Homo sapien
cttcttgccaaaggtgggcacaacg

SEQ ID NO: 61078 - DNA, 25 bp, Homo sapien
cgccgcttagcccgacctgtcttct

SEQ ID NO: 61079 - DNA, 25 bp, Homo sapien
ggtcacctcgaaggtgtgtagctcc

SEQ ID NO: 61080 - DNA, 25 bp, Homo sapien
cagtgaggctacatgagccttgatc

SEQ ID NO: 61081 - DNA, 25 bp, Homo sapien
acctccaagcatgcggcctgctact

SEQ ID NO: 61082 - DNA, 25 bp, Homo sapien
cttcttgccaaaggtgggcacaacg

SEQ ID NO: 61083 - DNA, 25 bp, Homo sapien
cacaacgttgacaaagcgccggttg

SEQ ID NO: 61084 - DNA, 25 bp, Homo sapien
gccaggagcacgacttgatcttccg

SEQ ID NO: 61085 - DNA, 25 bp, Homo sapien
ctgctacttccagggtagtcagggc

SEQ ID NO: 61086 - DNA, 25 bp, Homo sapien
gggcaatgccctccagtgaggctac

SEQ ID NO: 61087 - DNA, 25 bp, Homo sapien
ttggccaccttaggagtctgacctc

SEQ ID NO: 61088 - DNA, 25 bp, Homo sapien
cgccggttgtactgcatccgccgct

SEQ ID NO: 61089 - DNA, 25 bp, Homo sapien
ggtcacctcgaaggtgtgtagctcc

SEQ ID NO: 61090 - DNA, 25 bp, Homo sapien
cagtgaggctacatgagccttgatc

SEQ ID NO: 61091 - DNA, 25 bp, Homo sapien
gggcaatgccctccagtgaggctac

SEQ ID NO: 61092 - DNA, 25 bp, Homo sapien
gccaggagcacgacttgatcttccg

SEQ ID NO: 61093 - DNA, 25 bp, Homo sapien
ctgctacttccagggtagtcagggc

SEQ ID NO: 61094 - DNA, 25 bp, Homo sapien
acctccaagcatgcggcctgctact

SEQ ID NO: 61095 - DNA, 25 bp, Homo sapien
ttggccaccttaggagtctgacctc

SEQ ID NO: 61096 - DNA, 25 bp, Homo sapien
cgccgcttagcccgacctgtcttct

SEQ ID NO: 61097 - DNA, 25 bp, Homo sapien
cgccggttgtactgcatccgccgct

SEQ ID NO: 61098 - DNA, 25 bp, Homo sapien
cacaacgttgacaaagcgccggttg

SEQ ID NO: 61099 - DNA, 25 bp, Homo sapien
cttcttgccaaaggtgggcacaacg

SEQ ID NO: 61100 - DNA, 25 bp, Homo sapien
gggcaatgccctccagtgaggctac

SEQ ID NO: 61101 - DNA, 25 bp, Homo sapien
cgccggttgtactgcatccgccgct

SEQ ID NO: 61102 - DNA, 25 bp, Homo sapien
ggtcacctcgaaggtgtgtagctcc

SEQ ID NO: 61103 - DNA, 25 bp, Homo sapien
cacaacgttgacaaagcgccggttg

SEQ ID NO: 61104 - DNA, 25 bp, Homo sapien
ctgctacttccagggtagtcagggc

SEQ ID NO: 61105 - DNA, 25 bp, Homo sapien
acctccaagcatgcggcctgctact

SEQ ID NO: 61106 - DNA, 25 bp, Homo sapien
ttggccaccttaggagtctgacctc

SEQ ID NO: 61107 - DNA, 25 bp, Homo sapien
cagtgaggctacatgagccttgatc

SEQ ID NO: 61108 - DNA, 25 bp, Homo sapien
cttcttgccaaaggtgggcacaacg

SEQ ID NO: 61109 - DNA, 25 bp, Homo sapien
gccaggagcacgacttgatcttccg

SEQ ID NO: 61110 - DNA, 25 bp, Homo sapien
cgccgcttagcccgacctgtcttct

SEQ ID NO: 61111 - DNA, 25 bp, Homo sapien
ggtcacctcgaaggtgtgtagctcc

SEQ ID NO: 61112 - DNA, 25 bp, Homo sapien
cagtgaggctacatgagccttgatc

SEQ ID NO: 61113 - DNA, 25 bp, Homo sapien
gggcaatgccctccagtgaggctac

SEQ ID NO: 61114 - DNA, 25 bp, Homo sapien
gccaggagcacgacttgatcttccg

SEQ ID NO: 61115 - DNA, 25 bp, Homo sapien
ctgctacttccagggtagtcagggc

SEQ ID NO: 61116 - DNA, 25 bp, Homo sapien
acctccaagcatgcggcctgctact

SEQ ID NO: 61117 - DNA, 25 bp, Homo sapien
ttggccaccttaggagtctgacctc

SEQ ID NO: 61118 - DNA, 25 bp, Homo sapien
cgccgcttagcccgacctgtcttct

SEQ ID NO: 61119 - DNA, 25 bp, Homo sapien
cgccggttgtactgcatccgccgct

SEQ ID NO: 61120 - DNA, 25 bp, Homo sapien
cacaacgttgacaaagcgccggttg

SEQ ID NO: 61121 - DNA, 25 bp, Homo sapien
cttcttgccaaaggtgggcacaacg

SEQ ID NO: 61122 - DNA, 25 bp, Homo sapien
cttcttgccaaaggtgggcacaacg

SEQ ID NO: 61123 - DNA, 25 bp, Homo sapien
ctgctacttccagggtagtcagggc

SEQ ID NO: 61124 - DNA, 25 bp, Homo sapien
gccaggagcacgacttgatcttccg

SEQ ID NO: 61125 - DNA, 25 bp, Homo sapien
cgccgcttagcccgacctgtcttct

SEQ ID NO: 61126 - DNA, 25 bp, Homo sapien
acctccaagcatgcggcctgctact

SEQ ID NO: 61127 - DNA, 25 bp, Homo sapien
ttggccaccttaggagtctgacctc

SEQ ID NO: 61128 - DNA, 25 bp, Homo sapien
gggcaatgccctccagtgaggctac

SEQ ID NO: 61129 - DNA, 25 bp, Homo sapien
ggtcacctcgaaggtgtgtagctcc

SEQ ID NO: 61130 - DNA, 25 bp, Homo sapien
cagtgaggctacatgagccttgatc

SEQ ID NO: 61131 - DNA, 25 bp, Homo sapien
cacaacgttgacaaagcgccggttg

SEQ ID NO: 61132 - DNA, 25 bp, Homo sapien
cgccggttgtactgcatccgccgct

SEQ ID NO: 61133 - DNA, 25 bp, Homo sapien
ggtcacctcgaaggtgtgtagctcc

SEQ ID NO: 61134 - DNA, 25 bp, Homo sapien
cagtgaggctacatgagccttgatc

SEQ ID NO: 61135 - DNA, 25 bp, Homo sapien
gggcaatgccctccagtgaggctac

SEQ ID NO: 61136 - DNA, 25 bp, Homo sapien
gccaggagcacgacttgatcttccg

SEQ ID NO: 61137 - DNA, 25 bp, Homo sapien
ctgctacttccagggtagtcagggc

SEQ ID NO: 61138 - DNA, 25 bp, Homo sapien
acctccaagcatgcggcctgctact

SEQ ID NO: 61139 - DNA, 25 bp, Homo sapien
ttggccaccttaggagtctgacctc

SEQ ID NO: 61140 - DNA, 25 bp, Homo sapien
cgccgcttagcccgacctgtcttct

SEQ ID NO: 61141 - DNA, 25 bp, Homo sapien
cgccggttgtactgcatccgccgct

SEQ ID NO: 61142 - DNA, 25 bp, Homo sapien
cacaacgttgacaaagcgccggttg

SEQ ID NO: 61143 - DNA, 25 bp, Homo sapien
cttcttgccaaaggtgggcacaacg

SEQ ID NO: 61144 - DNA, 25 bp, Homo sapien
cagtgaggctacatgagccttgatc

SEQ ID NO: 61145 - DNA, 25 bp, Homo sapien
cgccggttgtactgcatccgccgct

SEQ ID NO: 61146 - DNA, 25 bp, Homo sapien
cgccgcttagcccgacctgtcttct

SEQ ID NO: 61147 - DNA, 25 bp, Homo sapien
gccaggagcacgacttgatcttccg

SEQ ID NO: 61148 - DNA, 25 bp, Homo sapien
gggcaatgccctccagtgaggctac

SEQ ID NO: 61149 - DNA, 25 bp, Homo sapien
ggtcacctcgaaggtgtgtagctcc

SEQ ID NO: 61150 - DNA, 25 bp, Homo sapien
cttcttgccaaaggtgggcacaacg

SEQ ID NO: 61151 - DNA, 25 bp, Homo sapien
ttggccaccttaggagtctgacctc

SEQ ID NO: 61152 - DNA, 25 bp, Homo sapien
cacaacgttgacaaagcgccggttg

SEQ ID NO: 61153 - DNA, 25 bp, Homo sapien
acctccaagcatgcggcctgctact

SEQ ID NO: 61154 - DNA, 25 bp, Homo sapien
ctgctacttccagggtagtcagggc

SEQ ID NO: 61155 - DNA, 25 bp, Homo sapien
ggtcacctcgaaggtgtgtagctcc

SEQ ID NO: 61156 - DNA, 25 bp, Homo sapien
cagtgaggctacatgagccttgatc

SEQ ID NO: 61157 - DNA, 25 bp, Homo sapien
gggcaatgccctccagtgaggctac

SEQ ID NO: 61158 - DNA, 25 bp, Homo sapien
gccaggagcacgacttgatcttccg

SEQ ID NO: 61159 - DNA, 25 bp, Homo sapien
ctgctacttccagggtagtcagggc

SEQ ID NO: 61160 - DNA, 25 bp, Homo sapien
acctccaagcatgcggcctgctact

SEQ ID NO: 61161 - DNA, 25 bp, Homo sapien
ttggccaccttaggagtctgacctc

SEQ ID NO: 61162 - DNA, 25 bp, Homo sapien
cgccgcttagcccgacctgtcttct

SEQ ID NO: 61163 - DNA, 25 bp, Homo sapien
cgccggttgtactgcatccgccgct

SEQ ID NO: 61164 - DNA, 25 bp, Homo sapien
cacaacgttgacaaagcgccggttg

SEQ ID NO: 61165 - DNA, 25 bp, Homo sapien
cttcttgccaaaggtgggcacaacg

SEQ ID NO: 61166 - DNA, 25 bp, Homo sapien
ggtcacctcgaaggtgtgtagctcc

SEQ ID NO: 61167 - DNA, 25 bp, Homo sapien
gggcaatgccctccagtgaggctac

SEQ ID NO: 61168 - DNA, 25 bp, Homo sapien
cgccggttgtactgcatccgccgct

SEQ ID NO: 61169 - DNA, 25 bp, Homo sapien
cagtgaggctacatgagccttgatc

SEQ ID NO: 61170 - DNA, 25 bp, Homo sapien
cttcttgccaaaggtgggcacaacg

SEQ ID NO: 61171 - DNA, 25 bp, Homo sapien
gccaggagcacgacttgatcttccg

SEQ ID NO: 61172 - DNA, 25 bp, Homo sapien
cacaacgttgacaaagcgccggttg

SEQ ID NO: 61173 - DNA, 25 bp, Homo sapien
ttggccaccttaggagtctgacctc

SEQ ID NO: 61174 - DNA, 25 bp, Homo sapien
ctgctacttccagggtagtcagggc

SEQ ID NO: 61175 - DNA, 25 bp, Homo sapien
cgccgcttagcccgacctgtcttct

SEQ ID NO: 61176 - DNA, 25 bp, Homo sapien
acctccaagcatgcggcctgctact

SEQ ID NO: 61177 - DNA, 25 bp, Homo sapien
ggtcacctcgaaggtgtgtagctcc

SEQ ID NO: 61178 - DNA, 25 bp, Homo sapien
cagtgaggctacatgagccttgatc

SEQ ID NO: 61179 - DNA, 25 bp, Homo sapien
gggcaatgccctccagtgaggctac

SEQ ID NO: 61180 - DNA, 25 bp, Homo sapien
gccaggagcacgacttgatcttccg

SEQ ID NO: 61181 - DNA, 25 bp, Homo sapien
ctgctacttccagggtagtcagggc

SEQ ID NO: 61182 - DNA, 25 bp, Homo sapien
acctccaagcatgcggcctgctact

SEQ ID NO: 61183 - DNA, 25 bp, Homo sapien
ttggccaccttaggagtctgacctc

SEQ ID NO: 61184 - DNA, 25 bp, Homo sapien
cgccgcttagcccgacctgtcttct

SEQ ID NO: 61185 - DNA, 25 bp, Homo sapien
cgccggttgtactgcatccgccgct

SEQ ID NO: 61186 - DNA, 25 bp, Homo sapien
cacaacgttgacaaagcgccggttg

SEQ ID NO: 61187 - DNA, 25 bp, Homo sapien
cttcttgccaaaggtgggcacaacg

SEQ ID NO: 61188 - DNA, 25 bp, Homo sapien
ggtcacctcgaaggtgtgtagctcc

SEQ ID NO: 61189 - DNA, 25 bp, Homo sapien
cagtgaggctacatgagccttgatc

SEQ ID NO: 61190 - DNA, 25 bp, Homo sapien
gggcaatgccctccagtgaggctac

SEQ ID NO: 61191 - DNA, 25 bp, Homo sapien
gccaggagcacgacttgatcttccg

SEQ ID NO: 61192 - DNA, 25 bp, Homo sapien
ctgctacttccagggtagtcagggc

SEQ ID NO: 61193 - DNA, 25 bp, Homo sapien
acctccaagcatgcggcctgctact

SEQ ID NO: 61194 - DNA, 25 bp, Homo sapien
ttggccaccttaggagtctgacctc

SEQ ID NO: 61195 - DNA, 25 bp, Homo sapien
cgccgcttagcccgacctgtcttct

SEQ ID NO: 61196 - DNA, 25 bp, Homo sapien
cgccggttgtactgcatccgccgct

SEQ ID NO: 61197 - DNA, 25 bp, Homo sapien
cacaacgttgacaaagcgccggttg

SEQ ID NO: 61198 - DNA, 25 bp, Homo sapien
cttcttgccaaaggtgggcacaacg

SEQ ID NO: 61199 - DNA, 25 bp, Homo sapien
gccaggagcacgacttgatcttccg

SEQ ID NO: 61200 - DNA, 25 bp, Homo sapien
ttggccaccttaggagtctgacctc

SEQ ID NO: 61201 - DNA, 25 bp, Homo sapien
cgccggttgtactgcatccgccgct

SEQ ID NO: 61202 - DNA, 25 bp, Homo sapien
cacaacgttgacaaagcgccggttg

SEQ ID NO: 61203 - DNA, 25 bp, Homo sapien
cttcttgccaaaggtgggcacaacg

SEQ ID NO: 61204 - DNA, 25 bp, Homo sapien
cagtgaggctacatgagccttgatc

SEQ ID NO: 61205 - DNA, 25 bp, Homo sapien
gggcaatgccctccagtgaggctac

SEQ ID NO: 61206 - DNA, 25 bp, Homo sapien
ctgctacttccagggtagtcagggc

SEQ ID NO: 61207 - DNA, 25 bp, Homo sapien
cgccgcttagcccgacctgtcttct

SEQ ID NO: 61208 - DNA, 25 bp, Homo sapien
ggtcacctcgaaggtgtgtagctcc

SEQ ID NO: 61209 - DNA, 25 bp, Homo sapien
acctccaagcatgcggcctgctact

SEQ ID NO: 61210 - DNA, 25 bp, Homo sapien
gccaggagcacgacttgatcttccg

SEQ ID NO: 61211 - DNA, 25 bp, Homo sapien
ttggccaccttaggagtctgacctc

SEQ ID NO: 61212 - DNA, 25 bp, Homo sapien
cacaacgttgacaaagcgccggttg

SEQ ID NO: 61213 - DNA, 25 bp, Homo sapien
cttcttgccaaaggtgggcacaacg

SEQ ID NO: 61214 - DNA, 25 bp, Homo sapien
cagtgaggctacatgagccttgatc

SEQ ID NO: 61215 - DNA, 25 bp, Homo sapien
cgccggttgtactgcatccgccgct

SEQ ID NO: 61216 - DNA, 25 bp, Homo sapien
gggcaatgccctccagtgaggctac

SEQ ID NO: 61217 - DNA, 25 bp, Homo sapien
cgccgcttagcccgacctgtcttct

SEQ ID NO: 61218 - DNA, 25 bp, Homo sapien
ctgctacttccagggtagtcagggc

SEQ ID NO: 61219 - DNA, 25 bp, Homo sapien
ggtcacctcgaaggtgtgtagctcc

SEQ ID NO: 61220 - DNA, 25 bp, Homo sapien
acctccaagcatgcggcctgctact

SEQ ID NO: 61221 - DNA, 25 bp, Homo sapien
gccaggagcacgacttgatcttccg

SEQ ID NO: 61222 - DNA, 25 bp, Homo sapien
ttggccaccttaggagtctgacctc

SEQ ID NO: 61223 - DNA, 25 bp, Homo sapien
cacaacgttgacaaagcgccggttg

SEQ ID NO: 61224 - DNA, 25 bp, Homo sapien
cgccggttgtactgcatccgccgct

SEQ ID NO: 61225 - DNA, 25 bp, Homo sapien
cttcttgccaaaggtgggcacaacg

SEQ ID NO: 61226 - DNA, 25 bp, Homo sapien
cagtgaggctacatgagccttgatc

SEQ ID NO: 61227 - DNA, 25 bp, Homo sapien
ctgctacttccagggtagtcagggc

SEQ ID NO: 61228 - DNA, 25 bp, Homo sapien
gggcaatgccctccagtgaggctac

SEQ ID NO: 61229 - DNA, 25 bp, Homo sapien
ggtcacctcgaaggtgtgtagctcc

SEQ ID NO: 61230 - DNA, 25 bp, Homo sapien
cgccgcttagcccgacctgtcttct

SEQ ID NO: 61231 - DNA, 25 bp, Homo sapien
acctccaagcatgcggcctgctact

SEQ ID NO: 61232 - DNA, 25 bp, Homo sapien
gccaggagcacgacttgatcttccg

SEQ ID NO: 61233 - DNA, 25 bp, Homo sapien
ttggccaccttaggagtctgacctc

SEQ ID NO: 61234 - DNA, 25 bp, Homo sapien
cacaacgttgacaaagcgccggttg

SEQ ID NO: 61235 - DNA, 25 bp, Homo sapien
cgccggttgtactgcatccgccgct

SEQ ID NO: 61236 - DNA, 25 bp, Homo sapien
cttcttgccaaaggtgggcacaacg

SEQ ID NO: 61237 - DNA, 25 bp, Homo sapien
cagtgaggctacatgagccttgatc

SEQ ID NO: 61238 - DNA, 25 bp, Homo sapien
gggcaatgccctccagtgaggctac

SEQ ID NO: 61239 - DNA, 25 bp, Homo sapien
ctgctacttccagggtagtcagggc

SEQ ID NO: 61240 - DNA, 25 bp, Homo sapien
ggtcacctcgaaggtgtgtagctcc

SEQ ID NO: 61241 - DNA, 25 bp, Homo sapien
cgccgcttagcccgacctgtcttct

SEQ ID NO: 61242 - DNA, 25 bp, Homo sapien
acctccaagcatgcggcctgctact

SEQ ID NO: 61243 - DNA, 25 bp, Homo sapien
gccaggagcacgacttgatcttccg

SEQ ID NO: 61244 - DNA, 25 bp, Homo sapien
ttggccaccttaggagtctgacctc

SEQ ID NO: 61245 - DNA, 25 bp, Homo sapien
cagtgaggctacatgagccttgatc

SEQ ID NO: 61246 - DNA, 25 bp, Homo sapien
cacaacgttgacaaagcgccggttg

SEQ ID NO: 61247 - DNA, 25 bp, Homo sapien
cttcttgccaaaggtgggcacaacg

SEQ ID NO: 61248 - DNA, 25 bp, Homo sapien
gggcaatgccctccagtgaggctac

SEQ ID NO: 61249 - DNA, 25 bp, Homo sapien
cgccggttgtactgcatccgccgct

SEQ ID NO: 61250 - DNA, 25 bp, Homo sapien
ctgctacttccagggtagtcagggc

SEQ ID NO: 61251 - DNA, 25 bp, Homo sapien
ggtcacctcgaaggtgtgtagctcc

SEQ ID NO: 61252 - DNA, 25 bp, Homo sapien
cgccgcttagcccgacctgtcttct

SEQ ID NO: 61253 - DNA, 25 bp, Homo sapien
acctccaagcatgcggcctgctact

SEQ ID NO: 61254 - DNA, 25 bp, Homo sapien
gccaggagcacgacttgatcttccg

SEQ ID NO: 61255 - DNA, 25 bp, Homo sapien
ttggccaccttaggagtctgacctc

SEQ ID NO: 61256 - DNA, 25 bp, Homo sapien
cacaacgttgacaaagcgccggttg

SEQ ID NO: 61257 - DNA, 25 bp, Homo sapien
cttcttgccaaaggtgggcacaacg

SEQ ID NO: 61258 - DNA, 25 bp, Homo sapien
cagtgaggctacatgagccttgatc

SEQ ID NO: 61259 - DNA, 25 bp, Homo sapien
gggcaatgccctccagtgaggctac

SEQ ID NO: 61260 - DNA, 25 bp, Homo sapien
ctgctacttccagggtagtcagggc

SEQ ID NO: 61261 - DNA, 25 bp, Homo sapien
ggtcacctcgaaggtgtgtagctcc

SEQ ID NO: 61262 - DNA, 25 bp, Homo sapien
cgccgcttagcccgacctgtcttct

SEQ ID NO: 61263 - DNA, 25 bp, Homo sapien
cgccggttgtactgcatccgccgct

SEQ ID NO: 61264 - DNA, 25 bp, Homo sapien
acctccaagcatgcggcctgctact

SEQ ID NO: 61265 - DNA, 25 bp, Homo sapien
gccaggagcacgacttgatcttccg

SEQ ID NO: 61266 - DNA, 25 bp, Homo sapien
ttggccaccttaggagtctgacctc

SEQ ID NO: 61267 - DNA, 25 bp, Homo sapien
cacaacgttgacaaagcgccggttg

SEQ ID NO: 61268 - DNA, 25 bp, Homo sapien
cttcttgccaaaggtgggcacaacg

SEQ ID NO: 61269 - DNA, 25 bp, Homo sapien
cagtgaggctacatgagccttgatc

SEQ ID NO: 61270 - DNA, 25 bp, Homo sapien
ctgctacttccagggtagtcagggc

SEQ ID NO: 61271 - DNA, 25 bp, Homo sapien
gggcaatgccctccagtgaggctac

SEQ ID NO: 61272 - DNA, 25 bp, Homo sapien
ggtcacctcgaaggtgtgtagctcc

SEQ ID NO: 61273 - DNA, 25 bp, Homo sapien
cgccgcttagcccgacctgtcttct

SEQ ID NO: 61274 - DNA, 25 bp, Homo sapien
cgccggttgtactgcatccgccgct

SEQ ID NO: 61275 - DNA, 25 bp, Homo sapien
acctccaagcatgcggcctgctact

SEQ ID NO: 61276 - DNA, 25 bp, Homo sapien
gccaggagcacgacttgatcttccg

SEQ ID NO: 61277 - DNA, 25 bp, Homo sapien
ttggccaccttaggagtctgacctc

SEQ ID NO: 61278 - DNA, 25 bp, Homo sapien
cacaacgttgacaaagcgccggttg

SEQ ID NO: 61279 - DNA, 25 bp, Homo sapien
cttcttgccaaaggtgggcacaacg

SEQ ID NO: 61280 - DNA, 25 bp, Homo sapien
cagtgaggctacatgagccttgatc

SEQ ID NO: 61281 - DNA, 25 bp, Homo sapien
gggcaatgccctccagtgaggctac

SEQ ID NO: 61282 - DNA, 25 bp, Homo sapien
ctgctacttccagggtagtcagggc

SEQ ID NO: 61283 - DNA, 25 bp, Homo sapien
ggtcacctcgaaggtgtgtagctcc

SEQ ID NO: 61284 - DNA, 25 bp, Homo sapien
cgccggttgtactgcatccgccgct

SEQ ID NO: 61285 - DNA, 25 bp, Homo sapien
cgccgcttagcccgacctgtcttct

SEQ ID NO: 61286 - DNA, 25 bp, Homo sapien
acctccaagcatgcggcctgctact

SEQ ID NO: 61287 - DNA, 25 bp, Homo sapien
cgccggttgtactgcatccgccgct

SEQ ID NO: 61288 - DNA, 25 bp, Homo sapien
gccaggagcacgacttgatcttccg

SEQ ID NO: 61289 - DNA, 25 bp, Homo sapien
ttggccaccttaggagtctgacctc

SEQ ID NO: 61290 - DNA, 25 bp, Homo sapien
cacaacgttgacaaagcgccggttg

SEQ ID NO: 61291 - DNA, 25 bp, Homo sapien
cttcttgccaaaggtgggcacaacg

SEQ ID NO: 61292 - DNA, 25 bp, Homo sapien
cagtgaggctacatgagccttgatc

SEQ ID NO: 61293 - DNA, 25 bp, Homo sapien
gggcaatgccctccagtgaggctac

SEQ ID NO: 61294 - DNA, 25 bp, Homo sapien
ctgctacttccagggtagtcagggc

SEQ ID NO: 61295 - DNA, 25 bp, Homo sapien
ggtcacctcgaaggtgtgtagctcc

SEQ ID NO: 61296 - DNA, 25 bp, Homo sapien
cgccgcttagcccgacctgtcttct

SEQ ID NO: 61297 - DNA, 25 bp, Homo sapien
acctccaagcatgcggcctgctact

SEQ ID NO: 61298 - DNA, 25 bp, Homo sapien
ctgctacttccagggtagtcagggc

SEQ ID NO: 61299 - DNA, 25 bp, Homo sapien
cttcttgccaaaggtgggcacaacg

SEQ ID NO: 61300 - DNA, 25 bp, Homo sapien
cgccggttgtactgcatccgccgct

SEQ ID NO: 61301 - DNA, 25 bp, Homo sapien
cgccgcttagcccgacctgtcttct

SEQ ID NO: 61302 - DNA, 25 bp, Homo sapien
cagtgaggctacatgagccttgatc

SEQ ID NO: 61303 - DNA, 25 bp, Homo sapien
gggcaatgccctccagtgaggctac

SEQ ID NO: 61304 - DNA, 25 bp, Homo sapien
cacaacgttgacaaagcgccggttg

SEQ ID NO: 61305 - DNA, 25 bp, Homo sapien
gccaggagcacgacttgatcttccg

SEQ ID NO: 61306 - DNA, 25 bp, Homo sapien
acctccaagcatgcggcctgctact

SEQ ID NO: 61307 - DNA, 25 bp, Homo sapien
ttggccaccttaggagtctgacctc

SEQ ID NO: 61308 - DNA, 25 bp, Homo sapien
ggtcacctcgaaggtgtgtagctcc

SEQ ID NO: 61309 - DNA, 25 bp, Homo sapien
cgccggttgtactgcatccgccgct

SEQ ID NO: 61310 - DNA, 25 bp, Homo sapien
gccaggagcacgacttgatcttccg

SEQ ID NO: 61311 - DNA, 25 bp, Homo sapien
ttggccaccttaggagtctgacctc

SEQ ID NO: 61312 - DNA, 25 bp, Homo sapien
cacaacgttgacaaagcgccggttg

SEQ ID NO: 61313 - DNA, 25 bp, Homo sapien
cttcttgccaaaggtgggcacaacg

SEQ ID NO: 61314 - DNA, 25 bp, Homo sapien
cagtgaggctacatgagccttgatc

SEQ ID NO: 61315 - DNA, 25 bp, Homo sapien
gggcaatgccctccagtgaggctac

SEQ ID NO: 61316 - DNA, 25 bp, Homo sapien
ggtcacctcgaaggtgtgtagctcc

SEQ ID NO: 61317 - DNA, 25 bp, Homo sapien
ctgctacttccagggtagtcagggc

SEQ ID NO: 61318 - DNA, 25 bp, Homo sapien
cgccgcttagcccgacctgtcttct

SEQ ID NO: 61319 - DNA, 25 bp, Homo sapien
acctccaagcatgcggcctgctact

SEQ ID NO: 61320 - DNA, 25 bp, Homo sapien
ggtcacctcgaaggtgtgtagctcc

SEQ ID NO: 61321 - DNA, 25 bp, Homo sapien
cagtgaggctacatgagccttgatc

SEQ ID NO: 61322 - DNA, 25 bp, Homo sapien
gggcaatgccctccagtgaggctac

SEQ ID NO: 61323 - DNA, 25 bp, Homo sapien
gccaggagcacgacttgatcttccg

SEQ ID NO: 61324 - DNA, 25 bp, Homo sapien
ctgctacttccagggtagtcagggc

SEQ ID NO: 61325 - DNA, 25 bp, Homo sapien
acctccaagcatgcggcctgctact

SEQ ID NO: 61326 - DNA, 25 bp, Homo sapien
ttggccaccttaggagtctgacctc

SEQ ID NO: 61327 - DNA, 25 bp, Homo sapien
cgccgcttagcccgacctgtcttct

SEQ ID NO: 61328 - DNA, 25 bp, Homo sapien
cgccggttgtactgcatccgccgct

SEQ ID NO: 61329 - DNA, 25 bp, Homo sapien
cacaacgttgacaaagcgccggttg

SEQ ID NO: 61330 - DNA, 25 bp, Homo sapien
cttcttgccaaaggtgggcacaacg

SEQ ID NO: 61331 - DNA, 25 bp, Homo sapien
cgttgtgcccacctttggcaagaag

SEQ ID NO: 61332 - DNA, 25 bp, Homo sapien
agcggcggatgcagtacaaccggcg

SEQ ID NO: 61333 - DNA, 25 bp, Homo sapien
gccctgactaccctggaagtagcag

SEQ ID NO: 61334 - DNA, 25 bp, Homo sapien
gaggtcagactcctaaggtggccaa

SEQ ID NO: 61335 - DNA, 25 bp, Homo sapien
agtagcaggccgcatgcttggaggt

SEQ ID NO: 61336 - DNA, 25 bp, Homo sapien
cggaagatcaagtcgtgctcctggc

SEQ ID NO: 61337 - DNA, 25 bp, Homo sapien
ggagctacacaccttcgaggtgacc

SEQ ID NO: 61338 - DNA, 25 bp, Homo sapien
gtagcctcactggagggcattgccc

SEQ ID NO: 61339 - DNA, 25 bp, Homo sapien
gatcaaggctcatgtagcctcactg

SEQ ID NO: 61340 - DNA, 25 bp, Homo sapien
agaagacaggtcgggctaagcggcg

SEQ ID NO: 61341 - DNA, 25 bp, Homo sapien
caaccggcgctttgtcaacgttgtg

SEQ ID NO: 61342 - DNA, 25 bp, Homo sapien
gccaggagcacgacttgatcttccg

SEQ ID NO: 61343 - DNA, 25 bp, Homo sapien
ttggccaccttaggagtctgacctc

SEQ ID NO: 61344 - DNA, 25 bp, Homo sapien
cacaacgttgacaaagcgccggttg

SEQ ID NO: 61345 - DNA, 25 bp, Homo sapien
cttcttgccaaaggtgggcacaacg

SEQ ID NO: 61346 - DNA, 25 bp, Homo sapien
cgccggttgtactgcatccgccgct

SEQ ID NO: 61347 - DNA, 25 bp, Homo sapien
cagtgaggctacatgagccttgatc

SEQ ID NO: 61348 - DNA, 25 bp, Homo sapien
gggcaatgccctccagtgaggctac

SEQ ID NO: 61349 - DNA, 25 bp, Homo sapien
cgccgcttagcccgacctgtcttct

SEQ ID NO: 61350 - DNA, 25 bp, Homo sapien
ctgctacttccagggtagtcagggc

SEQ ID NO: 61351 - DNA, 25 bp, Homo sapien
ggtcacctcgaaggtgtgtagctcc

SEQ ID NO: 61352 - DNA, 25 bp, Homo sapien
acctccaagcatgcggcctgctact

SEQ ID NO: 61353 - DNA, 25 bp, Homo sapien
acctccaagcatgcggcctgctact

SEQ ID NO: 61354 - DNA, 25 bp, Homo sapien
ggtcacctcgaaggtgtgtagctcc

SEQ ID NO: 61355 - DNA, 25 bp, Homo sapien
gccaggagcacgacttgatcttccg

SEQ ID NO: 61356 - DNA, 25 bp, Homo sapien
ttggccaccttaggagtctgacctc

SEQ ID NO: 61357 - DNA, 25 bp, Homo sapien
gggcaatgccctccagtgaggctac

SEQ ID NO: 61358 - DNA, 25 bp, Homo sapien
ctgctacttccagggtagtcagggc

SEQ ID NO: 61359 - DNA, 25 bp, Homo sapien
cacaacgttgacaaagcgccggttg

SEQ ID NO: 61360 - DNA, 25 bp, Homo sapien
cgccgcttagcccgacctgtcttct

SEQ ID NO: 61361 - DNA, 25 bp, Homo sapien
cagtgaggctacatgagccttgatc

SEQ ID NO: 61362 - DNA, 25 bp, Homo sapien
cgccggttgtactgcatccgccgct

SEQ ID NO: 61363 - DNA, 25 bp, Homo sapien
cttcttgccaaaggtgggcacaacg

SEQ ID NO: 61364 - DNA, 25 bp, Homo sapien
ggtcacctcgaaggtgtgtagctcc

SEQ ID NO: 61365 - DNA, 25 bp, Homo sapien
cagtgaggctacatgagccttgatc

SEQ ID NO: 61366 - DNA, 25 bp, Homo sapien
gggcaatgccctccagtgaggctac

SEQ ID NO: 61367 - DNA, 25 bp, Homo sapien
gccaggagcacgacttgatcttccg

SEQ ID NO: 61368 - DNA, 25 bp, Homo sapien
ctgctacttccagggtagtcagggc

SEQ ID NO: 61369 - DNA, 25 bp, Homo sapien
acctccaagcatgcggcctgctact

SEQ ID NO: 61370 - DNA, 25 bp, Homo sapien
ttggccaccttaggagtctgacctc

SEQ ID NO: 61371 - DNA, 25 bp, Homo sapien
cgccgcttagcccgacctgtcttct

SEQ ID NO: 61372 - DNA, 25 bp, Homo sapien
cgccggttgtactgcatccgccgct

SEQ ID NO: 61373 - DNA, 25 bp, Homo sapien
cacaacgttgacaaagcgccggttg

SEQ ID NO: 61374 - DNA, 25 bp, Homo sapien
cttcttgccaaaggtgggcacaacg

SEQ ID NO: 61375 - DNA, 25 bp, Homo sapien
ctgctacttccagggtagtcagggc

SEQ ID NO: 61376 - DNA, 25 bp, Homo sapien
acctccaagcatgcggcctgctact

SEQ ID NO: 61377 - DNA, 25 bp, Homo sapien
cacaacgttgacaaagcgccggttg

SEQ ID NO: 61378 - DNA, 25 bp, Homo sapien
cgccgcttagcccgacctgtcttct

SEQ ID NO: 61379 - DNA, 25 bp, Homo sapien
gggcaatgccctccagtgaggctac

SEQ ID NO: 61380 - DNA, 25 bp, Homo sapien
ggtcacctcgaaggtgtgtagctcc

SEQ ID NO: 61381 - DNA, 25 bp, Homo sapien
cagtgaggctacatgagccttgatc

SEQ ID NO: 61382 - DNA, 25 bp, Homo sapien
gccaggagcacgacttgatcttccg

SEQ ID NO: 61383 - DNA, 25 bp, Homo sapien
cgccggttgtactgcatccgccgct

SEQ ID NO: 61384 - DNA, 25 bp, Homo sapien
cttcttgccaaaggtgggcacaacg

SEQ ID NO: 61385 - DNA, 25 bp, Homo sapien
ttggccaccttaggagtctgacctc

SEQ ID NO: 61386 - DNA, 25 bp, Homo sapien
ggtcacctcgaaggtgtgtagctcc

SEQ ID NO: 61387 - DNA, 25 bp, Homo sapien
cagtgaggctacatgagccttgatc

SEQ ID NO: 61388 - DNA, 25 bp, Homo sapien
gggcaatgccctccagtgaggctac

SEQ ID NO: 61389 - DNA, 25 bp, Homo sapien
gccaggagcacgacttgatcttccg

SEQ ID NO: 61390 - DNA, 25 bp, Homo sapien
ctgctacttccagggtagtcagggc

SEQ ID NO: 61391 - DNA, 25 bp, Homo sapien
acctccaagcatgcggcctgctact

SEQ ID NO: 61392 - DNA, 25 bp, Homo sapien
ttggccaccttaggagtctgacctc

SEQ ID NO: 61393 - DNA, 25 bp, Homo sapien
cgccgcttagcccgacctgtcttct

SEQ ID NO: 61394 - DNA, 25 bp, Homo sapien
cgccggttgtactgcatccgccgct

SEQ ID NO: 61395 - DNA, 25 bp, Homo sapien
cacaacgttgacaaagcgccggttg

SEQ ID NO: 61396 - DNA, 25 bp, Homo sapien
cttcttgccaaaggtgggcacaacg

SEQ ID NO: 61397 - DNA, 25 bp, Homo sapien
cagtgaggctacatgagccttgatc

SEQ ID NO: 61398 - DNA, 25 bp, Homo sapien
cgccgcttagcccgacctgtcttct

SEQ ID NO: 61399 - DNA, 25 bp, Homo sapien
ctgctacttccagggtagtcagggc

SEQ ID NO: 61400 - DNA, 25 bp, Homo sapien
ttggccaccttaggagtctgacctc

SEQ ID NO: 61401 - DNA, 25 bp, Homo sapien
acctccaagcatgcggcctgctact

SEQ ID NO: 61402 - DNA, 25 bp, Homo sapien
cttcttgccaaaggtgggcacaacg

SEQ ID NO: 61403 - DNA, 25 bp, Homo sapien
ggtcacctcgaaggtgtgtagctcc

SEQ ID NO: 61404 - DNA, 25 bp, Homo sapien
gccaggagcacgacttgatcttccg

SEQ ID NO: 61405 - DNA, 25 bp, Homo sapien
cacaacgttgacaaagcgccggttg

SEQ ID NO: 61406 - DNA, 25 bp, Homo sapien
cgccggttgtactgcatccgccgct

SEQ ID NO: 61407 - DNA, 25 bp, Homo sapien
gggcaatgccctccagtgaggctac

SEQ ID NO: 61408 - DNA, 25 bp, Homo sapien
cgccgcttagcccgacctgtcttct

SEQ ID NO: 61409 - DNA, 25 bp, Homo sapien
cgccggttgtactgcatccgccgct

SEQ ID NO: 61410 - DNA, 25 bp, Homo sapien
cacaacgttgacaaagcgccggttg

SEQ ID NO: 61411 - DNA, 25 bp, Homo sapien
cttcttgccaaaggtgggcacaacg

SEQ ID NO: 61412 - DNA, 25 bp, Homo sapien
ggtcacctcgaaggtgtgtagctcc

SEQ ID NO: 61413 - DNA, 25 bp, Homo sapien
cagtgaggctacatgagccttgatc

SEQ ID NO: 61414 - DNA, 25 bp, Homo sapien
gggcaatgccctccagtgaggctac

SEQ ID NO: 61415 - DNA, 25 bp, Homo sapien
gccaggagcacgacttgatcttccg

SEQ ID NO: 61416 - DNA, 25 bp, Homo sapien
ctgctacttccagggtagtcagggc

SEQ ID NO: 61417 - DNA, 25 bp, Homo sapien
acctccaagcatgcggcctgctact

SEQ ID NO: 61418 - DNA, 25 bp, Homo sapien
ttggccaccttaggagtctgacctc

SEQ ID NO: 61419 - DNA, 25 bp, Homo sapien
ggtcacctcgaaggtgtgtagctcc

SEQ ID NO: 61420 - DNA, 25 bp, Homo sapien
cagtgaggctacatgagccttgatc

SEQ ID NO: 61421 - DNA, 25 bp, Homo sapien
gggcaatgccctccagtgaggctac

SEQ ID NO: 61422 - DNA, 25 bp, Homo sapien
gccaggagcacgacttgatcttccg

SEQ ID NO: 61423 - DNA, 25 bp, Homo sapien
ctgctacttccagggtagtcagggc

SEQ ID NO: 61424 - DNA, 25 bp, Homo sapien
acctccaagcatgcggcctgctact

SEQ ID NO: 61425 - DNA, 25 bp, Homo sapien
ttggccaccttaggagtctgacctc

SEQ ID NO: 61426 - DNA, 25 bp, Homo sapien
cgccgcttagcccgacctgtcttct

SEQ ID NO: 61427 - DNA, 25 bp, Homo sapien
cgccggttgtactgcatccgccgct

SEQ ID NO: 61428 - DNA, 25 bp, Homo sapien
cacaacgttgacaaagcgccggttg

SEQ ID NO: 61429 - DNA, 25 bp, Homo sapien
cttcttgccaaaggtgggcacaacg

SEQ ID NO: 61430 - DNA, 25 bp, Homo sapien
gccaggagcacgacttgatcttccg

SEQ ID NO: 61431 - DNA, 25 bp, Homo sapien
acctccaagcatgcggcctgctact

SEQ ID NO: 61432 - DNA, 25 bp, Homo sapien
cagtgaggctacatgagccttgatc

SEQ ID NO: 61433 - DNA, 25 bp, Homo sapien
cgccgcttagcccgacctgtcttct

SEQ ID NO: 61434 - DNA, 25 bp, Homo sapien
gggcaatgccctccagtgaggctac

SEQ ID NO: 61435 - DNA, 25 bp, Homo sapien
ggtcacctcgaaggtgtgtagctcc

SEQ ID NO: 61436 - DNA, 25 bp, Homo sapien
ttggccaccttaggagtctgacctc

SEQ ID NO: 61437 - DNA, 25 bp, Homo sapien
cacaacgttgacaaagcgccggttg

SEQ ID NO: 61438 - DNA, 25 bp, Homo sapien
ctgctacttccagggtagtcagggc

SEQ ID NO: 61439 - DNA, 25 bp, Homo sapien
cgccggttgtactgcatccgccgct

SEQ ID NO: 61440 - DNA, 25 bp, Homo sapien
cttcttgccaaaggtgggcacaacg

SEQ ID NO: 61441 - DNA, 25 bp, Homo sapien
ggtcacctcgaaggtgtgtagctcc

SEQ ID NO: 61442 - DNA, 25 bp, Homo sapien
cagtgaggctacatgagccttgatc

SEQ ID NO: 61443 - DNA, 25 bp, Homo sapien
gggcaatgccctccagtgaggctac

SEQ ID NO: 61444 - DNA, 25 bp, Homo sapien
gccaggagcacgacttgatcttccg

SEQ ID NO: 61445 - DNA, 25 bp, Homo sapien
ctgctacttccagggtagtcagggc

SEQ ID NO: 61446 - DNA, 25 bp, Homo sapien
acctccaagcatgcggcctgctact

SEQ ID NO: 61447 - DNA, 25 bp, Homo sapien
ttggccaccttaggagtctgacctc

SEQ ID NO: 61448 - DNA, 25 bp, Homo sapien
cgccgcttagcccgacctgtcttct

SEQ ID NO: 61449 - DNA, 25 bp, Homo sapien
cgccggttgtactgcatccgccgct

SEQ ID NO: 61450 - DNA, 25 bp, Homo sapien
cacaacgttgacaaagcgccggttg

SEQ ID NO: 61451 - DNA, 25 bp, Homo sapien
cttcttgccaaaggtgggcacaacg

SEQ ID NO: 61452 - DNA, 25 bp, Homo sapien
acctccaagcatgcggcctgctact

SEQ ID NO: 61453 - DNA, 25 bp, Homo sapien
ttggccaccttaggagtctgacctc

SEQ ID NO: 61454 - DNA, 25 bp, Homo sapien
cagtgaggctacatgagccttgatc

SEQ ID NO: 61455 - DNA, 25 bp, Homo sapien
ggtcacctcgaaggtgtgtagctcc

SEQ ID NO: 61456 - DNA, 25 bp, Homo sapien
ctgctacttccagggtagtcagggc

SEQ ID NO: 61457 - DNA, 25 bp, Homo sapien
gggcaatgccctccagtgaggctac

SEQ ID NO: 61458 - DNA, 25 bp, Homo sapien
cacaacgttgacaaagcgccggttg

SEQ ID NO: 61459 - DNA, 25 bp, Homo sapien
cgccggttgtactgcatccgccgct

SEQ ID NO: 61460 - DNA, 25 bp, Homo sapien
cttcttgccaaaggtgggcacaacg

SEQ ID NO: 61461 - DNA, 25 bp, Homo sapien
cgccgcttagcccgacctgtcttct

SEQ ID NO: 61462 - DNA, 25 bp, Homo sapien
gccaggagcacgacttgatcttccg

SEQ ID NO: 61463 - DNA, 25 bp, Homo sapien
ggtcacctcgaaggtgtgtagctcc

SEQ ID NO: 61464 - DNA, 25 bp, Homo sapien
cagtgaggctacatgagccttgatc

SEQ ID NO: 61465 - DNA, 25 bp, Homo sapien
gggcaatgccctccagtgaggctac

SEQ ID NO: 61466 - DNA, 25 bp, Homo sapien
gccaggagcacgacttgatcttccg

SEQ ID NO: 61467 - DNA, 25 bp, Homo sapien
ctgctacttccagggtagtcagggc

SEQ ID NO: 61468 - DNA, 25 bp, Homo sapien
acctccaagcatgcggcctgctact

SEQ ID NO: 61469 - DNA, 25 bp, Homo sapien
ttggccaccttaggagtctgacctc

SEQ ID NO: 61470 - DNA, 25 bp, Homo sapien
cgccgcttagcccgacctgtcttct

SEQ ID NO: 61471 - DNA, 25 bp, Homo sapien
cgccggttgtactgcatccgccgct

SEQ ID NO: 61472 - DNA, 25 bp, Homo sapien
cacaacgttgacaaagcgccggttg

SEQ ID NO: 61473 - DNA, 25 bp, Homo sapien
cttcttgccaaaggtgggcacaacg

SEQ ID NO: 61474 - DNA, 25 bp, Homo sapien
cgccggttgtactgcatccgccgct

SEQ ID NO: 61475 - DNA, 25 bp, Homo sapien
cgccgcttagcccgacctgtcttct

SEQ ID NO: 61476 - DNA, 25 bp, Homo sapien
cagtgaggctacatgagccttgatc

SEQ ID NO: 61477 - DNA, 25 bp, Homo sapien
acctccaagcatgcggcctgctact

SEQ ID NO: 61478 - DNA, 25 bp, Homo sapien
ctgctacttccagggtagtcagggc

SEQ ID NO: 61479 - DNA, 25 bp, Homo sapien
ttggccaccttaggagtctgacctc

SEQ ID NO: 61480 - DNA, 25 bp, Homo sapien
gggcaatgccctccagtgaggctac

SEQ ID NO: 61481 - DNA, 25 bp, Homo sapien
gccaggagcacgacttgatcttccg

SEQ ID NO: 61482 - DNA, 25 bp, Homo sapien
cacaacgttgacaaagcgccggttg

SEQ ID NO: 61483 - DNA, 25 bp, Homo sapien
cttcttgccaaaggtgggcacaacg

SEQ ID NO: 61484 - DNA, 25 bp, Homo sapien
ggtcacctcgaaggtgtgtagctcc

SEQ ID NO: 61485 - DNA, 25 bp, Homo sapien
ggtcacctcgaaggtgtgtagctcc

SEQ ID NO: 61486 - DNA, 25 bp, Homo sapien
cagtgaggctacatgagccttgatc

SEQ ID NO: 61487 - DNA, 25 bp, Homo sapien
gggcaatgccctccagtgaggctac

SEQ ID NO: 61488 - DNA, 25 bp, Homo sapien
gccaggagcacgacttgatcttccg

SEQ ID NO: 61489 - DNA, 25 bp, Homo sapien
ctgctacttccagggtagtcagggc

SEQ ID NO: 61490 - DNA, 25 bp, Homo sapien
acctccaagcatgcggcctgctact

SEQ ID NO: 61491 - DNA, 25 bp, Homo sapien
ttggccaccttaggagtctgacctc

SEQ ID NO: 61492 - DNA, 25 bp, Homo sapien
cgccgcttagcccgacctgtcttct

SEQ ID NO: 61493 - DNA, 25 bp, Homo sapien
cgccggttgtactgcatccgccgct

SEQ ID NO: 61494 - DNA, 25 bp, Homo sapien
cacaacgttgacaaagcgccggttg

SEQ ID NO: 61495 - DNA, 25 bp, Homo sapien
cttcttgccaaaggtgggcacaacg

SEQ ID NO: 61496 - DNA, 25 bp, Homo sapien
acctccaagcatgcggcctgctact

SEQ ID NO: 61497 - DNA, 25 bp, Homo sapien
ggtcacctcgaaggtgtgtagctcc

SEQ ID NO: 61498 - DNA, 25 bp, Homo sapien
gccaggagcacgacttgatcttccg

SEQ ID NO: 61499 - DNA, 25 bp, Homo sapien
cgccggttgtactgcatccgccgct

SEQ ID NO: 61500 - DNA, 25 bp, Homo sapien
cagtgaggctacatgagccttgatc

SEQ ID NO: 61501 - DNA, 25 bp, Homo sapien
gggcaatgccctccagtgaggctac

SEQ ID NO: 61502 - DNA, 25 bp, Homo sapien
ctgctacttccagggtagtcagggc

SEQ ID NO: 61503 - DNA, 25 bp, Homo sapien
ttggccaccttaggagtctgacctc

SEQ ID NO: 61504 - DNA, 25 bp, Homo sapien
cacaacgttgacaaagcgccggttg

SEQ ID NO: 61505 - DNA, 25 bp, Homo sapien
cgccgcttagcccgacctgtcttct

SEQ ID NO: 61506 - DNA, 25 bp, Homo sapien
cttcttgccaaaggtgggcacaacg

SEQ ID NO: 61507 - DNA, 25 bp, Homo sapien
ggtcacctcgaaggtgtgtagctcc

SEQ ID NO: 61508 - DNA, 25 bp, Homo sapien
cagtgaggctacatgagccttgatc

SEQ ID NO: 61509 - DNA, 25 bp, Homo sapien
gggcaatgccctccagtgaggctac

SEQ ID NO: 61510 - DNA, 25 bp, Homo sapien
gccaggagcacgacttgatcttccg

SEQ ID NO: 61511 - DNA, 25 bp, Homo sapien
ctgctacttccagggtagtcagggc

SEQ ID NO: 61512 - DNA, 25 bp, Homo sapien
acctccaagcatgcggcctgctact

SEQ ID NO: 61513 - DNA, 25 bp, Homo sapien
ttggccaccttaggagtctgacctc

SEQ ID NO: 61514 - DNA, 25 bp, Homo sapien
cgccgcttagcccgacctgtcttct

SEQ ID NO: 61515 - DNA, 25 bp, Homo sapien
cgccggttgtactgcatccgccgct

SEQ ID NO: 61516 - DNA, 25 bp, Homo sapien
cacaacgttgacaaagcgccggttg

SEQ ID NO: 61517 - DNA, 25 bp, Homo sapien
cttcttgccaaaggtgggcacaacg

SEQ ID NO: 61518 - DNA, 25 bp, Homo sapien
cttcttgccaaaggtgggcacaacg

SEQ ID NO: 61519 - DNA, 25 bp, Homo sapien
gggcaatgccctccagtgaggctac

SEQ ID NO: 61520 - DNA, 25 bp, Homo sapien
cgccgcttagcccgacctgtcttct

SEQ ID NO: 61521 - DNA, 25 bp, Homo sapien
acctccaagcatgcggcctgctact

SEQ ID NO: 61522 - DNA, 25 bp, Homo sapien
gccaggagcacgacttgatcttccg

SEQ ID NO: 61523 - DNA, 25 bp, Homo sapien
ctgctacttccagggtagtcagggc

SEQ ID NO: 61524 - DNA, 25 bp, Homo sapien
cagtgaggctacatgagccttgatc

SEQ ID NO: 61525 - DNA, 25 bp, Homo sapien
ttggccaccttaggagtctgacctc

SEQ ID NO: 61526 - DNA, 25 bp, Homo sapien
cacaacgttgacaaagcgccggttg

SEQ ID NO: 61527 - DNA, 25 bp, Homo sapien
cgccggttgtactgcatccgccgct

SEQ ID NO: 61528 - DNA, 25 bp, Homo sapien
ggtcacctcgaaggtgtgtagctcc

SEQ ID NO: 61529 - DNA, 25 bp, Homo sapien
cgccggttgtactgcatccgccgct

SEQ ID NO: 61530 - DNA, 25 bp, Homo sapien
gggcaatgccctccagtgaggctac

SEQ ID NO: 61531 - DNA, 25 bp, Homo sapien
cacaacgttgacaaagcgccggttg

SEQ ID NO: 61532 - DNA, 25 bp, Homo sapien
ctgctacttccagggtagtcagggc

SEQ ID NO: 61533 - DNA, 25 bp, Homo sapien
ttggccaccttaggagtctgacctc

SEQ ID NO: 61534 - DNA, 25 bp, Homo sapien
cttcttgccaaaggtgggcacaacg

SEQ ID NO: 61535 - DNA, 25 bp, Homo sapien
cagtgaggctacatgagccttgatc

SEQ ID NO: 61536 - DNA, 25 bp, Homo sapien
gccaggagcacgacttgatcttccg

SEQ ID NO: 61537 - DNA, 25 bp, Homo sapien
acctccaagcatgcggcctgctact

SEQ ID NO: 61538 - DNA, 25 bp, Homo sapien
cgccgcttagcccgacctgtcttct

SEQ ID NO: 61539 - DNA, 25 bp, Homo sapien
ggtcacctcgaaggtgtgtagctcc

SEQ ID NO: 61540 - DNA, 25 bp, Homo sapien
ggtcacctcgaaggtgtgtagctcc

SEQ ID NO: 61541 - DNA, 25 bp, Homo sapien
cagtgaggctacatgagccttgatc

SEQ ID NO: 61542 - DNA, 25 bp, Homo sapien
gggcaatgccctccagtgaggctac

SEQ ID NO: 61543 - DNA, 25 bp, Homo sapien
gccaggagcacgacttgatcttccg

SEQ ID NO: 61544 - DNA, 25 bp, Homo sapien
ctgctacttccagggtagtcagggc

SEQ ID NO: 61545 - DNA, 25 bp, Homo sapien
acctccaagcatgcggcctgctact

SEQ ID NO: 61546 - DNA, 25 bp, Homo sapien
ttggccaccttaggagtctgacctc

SEQ ID NO: 61547 - DNA, 25 bp, Homo sapien
cgccgcttagcccgacctgtcttct

SEQ ID NO: 61548 - DNA, 25 bp, Homo sapien
cgccggttgtactgcatccgccgct

SEQ ID NO: 61549 - DNA, 25 bp, Homo sapien
cacaacgttgacaaagcgccggttg

SEQ ID NO: 61550 - DNA, 25 bp, Homo sapien
cttcttgccaaaggtgggcacaacg

SEQ ID NO: 61551 - DNA, 25 bp, Homo sapien
cagtgaggctacatgagccttgatc

SEQ ID NO: 61552 - DNA, 25 bp, Homo sapien
ttggccaccttaggagtctgacctc

SEQ ID NO: 61553 - DNA, 25 bp, Homo sapien
ggtcacctcgaaggtgtgtagctcc

SEQ ID NO: 61554 - DNA, 25 bp, Homo sapien
acctccaagcatgcggcctgctact

SEQ ID NO: 61555 - DNA, 25 bp, Homo sapien
cgccgcttagcccgacctgtcttct

SEQ ID NO: 61556 - DNA, 25 bp, Homo sapien
cttcttgccaaaggtgggcacaacg

SEQ ID NO: 61557 - DNA, 25 bp, Homo sapien
ctgctacttccagggtagtcagggc

SEQ ID NO: 61558 - DNA, 25 bp, Homo sapien
gccaggagcacgacttgatcttccg

SEQ ID NO: 61559 - DNA, 25 bp, Homo sapien
cacaacgttgacaaagcgccggttg

SEQ ID NO: 61560 - DNA, 25 bp, Homo sapien
cgccggttgtactgcatccgccgct

SEQ ID NO: 61561 - DNA, 25 bp, Homo sapien
gggcaatgccctccagtgaggctac

SEQ ID NO: 61562 - DNA, 25 bp, Homo sapien
cgccgcttagcccgacctgtcttct

SEQ ID NO: 61563 - DNA, 25 bp, Homo sapien
cgccggttgtactgcatccgccgct

SEQ ID NO: 61564 - DNA, 25 bp, Homo sapien
cacaacgttgacaaagcgccggttg

SEQ ID NO: 61565 - DNA, 25 bp, Homo sapien
cttcttgccaaaggtgggcacaacg

SEQ ID NO: 61566 - DNA, 25 bp, Homo sapien
ggtcacctcgaaggtgtgtagctcc

SEQ ID NO: 61567 - DNA, 25 bp, Homo sapien
cagtgaggctacatgagccttgatc

SEQ ID NO: 61568 - DNA, 25 bp, Homo sapien
gggcaatgccctccagtgaggctac

SEQ ID NO: 61569 - DNA, 25 bp, Homo sapien
gccaggagcacgacttgatcttccg

SEQ ID NO: 61570 - DNA, 25 bp, Homo sapien
ctgctacttccagggtagtcagggc

SEQ ID NO: 61571 - DNA, 25 bp, Homo sapien
acctccaagcatgcggcctgctact

SEQ ID NO: 61572 - DNA, 25 bp, Homo sapien
ttggccaccttaggagtctgacctc

SEQ ID NO: 61573 - DNA, 25 bp, Homo sapien
ttggccaccttaggagtctgacctc

SEQ ID NO: 61574 - DNA, 25 bp, Homo sapien
cagtgaggctacatgagccttgatc

SEQ ID NO: 61575 - DNA, 25 bp, Homo sapien
gccaggagcacgacttgatcttccg

SEQ ID NO: 61576 - DNA, 25 bp, Homo sapien
acctccaagcatgcggcctgctact

SEQ ID NO: 61577 - DNA, 25 bp, Homo sapien
cgccgcttagcccgacctgtcttct

SEQ ID NO: 61578 - DNA, 25 bp, Homo sapien
ggtcacctcgaaggtgtgtagctcc

SEQ ID NO: 61579 - DNA, 25 bp, Homo sapien
ctgctacttccagggtagtcagggc

SEQ ID NO: 61580 - DNA, 25 bp, Homo sapien
cttcttgccaaaggtgggcacaacg

SEQ ID NO: 61581 - DNA, 25 bp, Homo sapien
cacaacgttgacaaagcgccggttg

SEQ ID NO: 61582 - DNA, 25 bp, Homo sapien
cgccggttgtactgcatccgccgct

SEQ ID NO: 61583 - DNA, 25 bp, Homo sapien
gggcaatgccctccagtgaggctac

SEQ ID NO: 61584 - DNA, 25 bp, Homo sapien
ggtcacctcgaaggtgtgtagctcc

SEQ ID NO: 61585 - DNA, 25 bp, Homo sapien
cagtgaggctacatgagccttgatc

SEQ ID NO: 61586 - DNA, 25 bp, Homo sapien
gggcaatgccctccagtgaggctac

SEQ ID NO: 61587 - DNA, 25 bp, Homo sapien
gccaggagcacgacttgatcttccg

SEQ ID NO: 61588 - DNA, 25 bp, Homo sapien
ctgctacttccagggtagtcagggc

SEQ ID NO: 61589 - DNA, 25 bp, Homo sapien
acctccaagcatgcggcctgctact

SEQ ID NO: 61590 - DNA, 25 bp, Homo sapien
ttggccaccttaggagtctgacctc

SEQ ID NO: 61591 - DNA, 25 bp, Homo sapien
cgccgcttagcccgacctgtcttct

SEQ ID NO: 61592 - DNA, 25 bp, Homo sapien
cgccggttgtactgcatccgccgct

SEQ ID NO: 61593 - DNA, 25 bp, Homo sapien
cacaacgttgacaaagcgccggttg

SEQ ID NO: 61594 - DNA, 25 bp, Homo sapien
cttcttgccaaaggtgggcacaacg

SEQ ID NO: 61595 - DNA, 25 bp, Homo sapien
cgccggttgtactgcatccgccgct

SEQ ID NO: 61596 - DNA, 25 bp, Homo sapien
gccaggagcacgacttgatcttccg

SEQ ID NO: 61597 - DNA, 25 bp, Homo sapien
cagtgaggctacatgagccttgatc

SEQ ID NO: 61598 - DNA, 25 bp, Homo sapien
ttggccaccttaggagtctgacctc

SEQ ID NO: 61599 - DNA, 25 bp, Homo sapien
gggcaatgccctccagtgaggctac

SEQ ID NO: 61600 - DNA, 25 bp, Homo sapien
ctgctacttccagggtagtcagggc

SEQ ID NO: 61601 - DNA, 25 bp, Homo sapien
acctccaagcatgcggcctgctact

SEQ ID NO: 61602 - DNA, 25 bp, Homo sapien
cgccgcttagcccgacctgtcttct

SEQ ID NO: 61603 - DNA, 25 bp, Homo sapien
cacaacgttgacaaagcgccggttg

SEQ ID NO: 61604 - DNA, 25 bp, Homo sapien
ggtcacctcgaaggtgtgtagctcc

SEQ ID NO: 61605 - DNA, 25 bp, Homo sapien
cttcttgccaaaggtgggcacaacg

SEQ ID NO: 61606 - DNA, 25 bp, Homo sapien
ggtcacctcgaaggtgtgtagctcc

SEQ ID NO: 61607 - DNA, 25 bp, Homo sapien
cagtgaggctacatgagccttgatc

SEQ ID NO: 61608 - DNA, 25 bp, Homo sapien
gggcaatgccctccagtgaggctac

SEQ ID NO: 61609 - DNA, 25 bp, Homo sapien
gccaggagcacgacttgatcttccg

SEQ ID NO: 61610 - DNA, 25 bp, Homo sapien
ctgctacttccagggtagtcagggc

SEQ ID NO: 61611 - DNA, 25 bp, Homo sapien
acctccaagcatgcggcctgctact

SEQ ID NO: 61612 - DNA, 25 bp, Homo sapien
ttggccaccttaggagtctgacctc

SEQ ID NO: 61613 - DNA, 25 bp, Homo sapien
cgccgcttagcccgacctgtcttct

SEQ ID NO: 61614 - DNA, 25 bp, Homo sapien
cgccggttgtactgcatccgccgct

SEQ ID NO: 61615 - DNA, 25 bp, Homo sapien
cacaacgttgacaaagcgccggttg

SEQ ID NO: 61616 - DNA, 25 bp, Homo sapien
cttcttgccaaaggtgggcacaacg

SEQ ID NO: 61617 - DNA, 25 bp, Homo sapien
gggcaatgccctccagtgaggctac

SEQ ID NO: 61618 - DNA, 25 bp, Homo sapien
cgccggttgtactgcatccgccgct

SEQ ID NO: 61619 - DNA, 25 bp, Homo sapien
gccaggagcacgacttgatcttccg

SEQ ID NO: 61620 - DNA, 25 bp, Homo sapien
cacaacgttgacaaagcgccggttg

SEQ ID NO: 61621 - DNA, 25 bp, Homo sapien
ttggccaccttaggagtctgacctc

SEQ ID NO: 61622 - DNA, 25 bp, Homo sapien
ggtcacctcgaaggtgtgtagctcc

SEQ ID NO: 61623 - DNA, 25 bp, Homo sapien
cagtgaggctacatgagccttgatc

SEQ ID NO: 61624 - DNA, 25 bp, Homo sapien
cttcttgccaaaggtgggcacaacg

SEQ ID NO: 61625 - DNA, 25 bp, Homo sapien
ctgctacttccagggtagtcagggc

SEQ ID NO: 61626 - DNA, 25 bp, Homo sapien
acctccaagcatgcggcctgctact

SEQ ID NO: 61627 - DNA, 25 bp, Homo sapien
cgccgcttagcccgacctgtcttct

SEQ ID NO: 61628 - DNA, 25 bp, Homo sapien
ggtcacctcgaaggtgtgtagctcc

SEQ ID NO: 61629 - DNA, 25 bp, Homo sapien
cagtgaggctacatgagccttgatc

SEQ ID NO: 61630 - DNA, 25 bp, Homo sapien
gggcaatgccctccagtgaggctac

SEQ ID NO: 61631 - DNA, 25 bp, Homo sapien
gccaggagcacgacttgatcttccg

SEQ ID NO: 61632 - DNA, 25 bp, Homo sapien
ctgctacttccagggtagtcagggc

SEQ ID NO: 61633 - DNA, 25 bp, Homo sapien
acctccaagcatgcggcctgctact

SEQ ID NO: 61634 - DNA, 25 bp, Homo sapien
ttggccaccttaggagtctgacctc

SEQ ID NO: 61635 - DNA, 25 bp, Homo sapien
cgccgcttagcccgacctgtcttct

SEQ ID NO: 61636 - DNA, 25 bp, Homo sapien
cgccggttgtactgcatccgccgct

SEQ ID NO: 61637 - DNA, 25 bp, Homo sapien
cacaacgttgacaaagcgccggttg

SEQ ID NO: 61638 - DNA, 25 bp, Homo sapien
cttcttgccaaaggtgggcacaacg

SEQ ID NO: 61639 - DNA, 25 bp, Homo sapien
ggtcacctcgaaggtgtgtagctcc

SEQ ID NO: 61640 - DNA, 25 bp, Homo sapien
ctgctacttccagggtagtcagggc

SEQ ID NO: 61641 - DNA, 25 bp, Homo sapien
cagtgaggctacatgagccttgatc

SEQ ID NO: 61642 - DNA, 25 bp, Homo sapien
cacaacgttgacaaagcgccggttg

SEQ ID NO: 61643 - DNA, 25 bp, Homo sapien
cgccgcttagcccgacctgtcttct

SEQ ID NO: 61644 - DNA, 25 bp, Homo sapien
acctccaagcatgcggcctgctact

SEQ ID NO: 61645 - DNA, 25 bp, Homo sapien
cttcttgccaaaggtgggcacaacg

SEQ ID NO: 61646 - DNA, 25 bp, Homo sapien
ttggccaccttaggagtctgacctc

SEQ ID NO: 61647 - DNA, 25 bp, Homo sapien
cgccggttgtactgcatccgccgct

SEQ ID NO: 61648 - DNA, 25 bp, Homo sapien
gccaggagcacgacttgatcttccg

SEQ ID NO: 61649 - DNA, 25 bp, Homo sapien
gggcaatgccctccagtgaggctac

SEQ ID NO: 61650 - DNA, 25 bp, Homo sapien
ggtcacctcgaaggtgtgtagctcc

SEQ ID NO: 61651 - DNA, 25 bp, Homo sapien
cagtgaggctacatgagccttgatc

SEQ ID NO: 61652 - DNA, 25 bp, Homo sapien
gggcaatgccctccagtgaggctac

SEQ ID NO: 61653 - DNA, 25 bp, Homo sapien
gccaggagcacgacttgatcttccg

SEQ ID NO: 61654 - DNA, 25 bp, Homo sapien
ctgctacttccagggtagtcagggc

SEQ ID NO: 61655 - DNA, 25 bp, Homo sapien
acctccaagcatgcggcctgctact

SEQ ID NO: 61656 - DNA, 25 bp, Homo sapien
ttggccaccttaggagtctgacctc

SEQ ID NO: 61657 - DNA, 25 bp, Homo sapien
cgccgcttagcccgacctgtcttct

SEQ ID NO: 61658 - DNA, 25 bp, Homo sapien
cgccggttgtactgcatccgccgct

SEQ ID NO: 61659 - DNA, 25 bp, Homo sapien
cacaacgttgacaaagcgccggttg

SEQ ID NO: 61660 - DNA, 25 bp, Homo sapien
cttcttgccaaaggtgggcacaacg

SEQ ID NO: 61661 - DNA, 25 bp, Homo sapien
ggtcacctcgaaggtgtgtagctcc

SEQ ID NO: 61662 - DNA, 25 bp, Homo sapien
cagtgaggctacatgagccttgatc

SEQ ID NO: 61663 - DNA, 25 bp, Homo sapien
gggcaatgccctccagtgaggctac

SEQ ID NO: 61664 - DNA, 25 bp, Homo sapien
gccaggagcacgacttgatcttccg

SEQ ID NO: 61665 - DNA, 25 bp, Homo sapien
ctgctacttccagggtagtcagggc

SEQ ID NO: 61666 - DNA, 25 bp, Homo sapien
acctccaagcatgcggcctgctact

SEQ ID NO: 61667 - DNA, 25 bp, Homo sapien
ttggccaccttaggagtctgacctc

SEQ ID NO: 61668 - DNA, 25 bp, Homo sapien
cgccgcttagcccgacctgtcttct

SEQ ID NO: 61669 - DNA, 25 bp, Homo sapien
cgccggttgtactgcatccgccgct

SEQ ID NO: 61670 - DNA, 25 bp, Homo sapien
cacaacgttgacaaagcgccggttg

SEQ ID NO: 61671 - DNA, 25 bp, Homo sapien
cttcttgccaaaggtgggcacaacg

SEQ ID NO: 61672 - DNA, 25 bp, Homo sapien
cacaacgttgacaaagcgccggttg

SEQ ID NO: 61673 - DNA, 25 bp, Homo sapien
acctccaagcatgcggcctgctact

SEQ ID NO: 61674 - DNA, 25 bp, Homo sapien
gccaggagcacgacttgatcttccg

SEQ ID NO: 61675 - DNA, 25 bp, Homo sapien
cgccggttgtactgcatccgccgct

SEQ ID NO: 61676 - DNA, 25 bp, Homo sapien
cagtgaggctacatgagccttgatc

SEQ ID NO: 61677 - DNA, 25 bp, Homo sapien
cgccgcttagcccgacctgtcttct

SEQ ID NO: 61678 - DNA, 25 bp, Homo sapien
ctgctacttccagggtagtcagggc

SEQ ID NO: 61679 - DNA, 25 bp, Homo sapien
ttggccaccttaggagtctgacctc

SEQ ID NO: 61680 - DNA, 25 bp, Homo sapien
ggtcacctcgaaggtgtgtagctcc

SEQ ID NO: 61681 - DNA, 25 bp, Homo sapien
cttcttgccaaaggtgggcacaacg

SEQ ID NO: 61682 - DNA, 25 bp, Homo sapien
gggcaatgccctccagtgaggctac

SEQ ID NO: 61683 - DNA, 25 bp, Homo sapien
ggtcacctcgaaggtgtgtagctcc

SEQ ID NO: 61684 - DNA, 25 bp, Homo sapien
cagtgaggctacatgagccttgatc

SEQ ID NO: 61685 - DNA, 25 bp, Homo sapien
gggcaatgccctccagtgaggctac

SEQ ID NO: 61686 - DNA, 25 bp, Homo sapien
gccaggagcacgacttgatcttccg

SEQ ID NO: 61687 - DNA, 25 bp, Homo sapien
ctgctacttccagggtagtcagggc

SEQ ID NO: 61688 - DNA, 25 bp, Homo sapien
acctccaagcatgcggcctgctact

SEQ ID NO: 61689 - DNA, 25 bp, Homo sapien
ttggccaccttaggagtctgacctc

SEQ ID NO: 61690 - DNA, 25 bp, Homo sapien
cgccgcttagcccgacctgtcttct

SEQ ID NO: 61691 - DNA, 25 bp, Homo sapien
cgccggttgtactgcatccgccgct

SEQ ID NO: 61692 - DNA, 25 bp, Homo sapien
cacaacgttgacaaagcgccggttg

SEQ ID NO: 61693 - DNA, 25 bp, Homo sapien
cttcttgccaaaggtgggcacaacg

SEQ ID NO: 61694 - DNA, 25 bp, Homo sapien
cacaacgttgacaaagcgccggttg

SEQ ID NO: 61695 - DNA, 25 bp, Homo sapien
cagtgaggctacatgagccttgatc

SEQ ID NO: 61696 - DNA, 25 bp, Homo sapien
gggcaatgccctccagtgaggctac

SEQ ID NO: 61697 - DNA, 25 bp, Homo sapien
gccaggagcacgacttgatcttccg

SEQ ID NO: 61698 - DNA, 25 bp, Homo sapien
cgccggttgtactgcatccgccgct

SEQ ID NO: 61699 - DNA, 25 bp, Homo sapien
acctccaagcatgcggcctgctact

SEQ ID NO: 61700 - DNA, 25 bp, Homo sapien
cgccgcttagcccgacctgtcttct

SEQ ID NO: 61701 - DNA, 25 bp, Homo sapien
ttggccaccttaggagtctgacctc

SEQ ID NO: 61702 - DNA, 25 bp, Homo sapien
ctgctacttccagggtagtcagggc

SEQ ID NO: 61703 - DNA, 25 bp, Homo sapien
cttcttgccaaaggtgggcacaacg

SEQ ID NO: 61704 - DNA, 25 bp, Homo sapien
ggtcacctcgaaggtgtgtagctcc

SEQ ID NO: 61705 - DNA, 25 bp, Homo sapien
ggtcacctcgaaggtgtgtagctcc

SEQ ID NO: 61706 - DNA, 25 bp, Homo sapien
cagtgaggctacatgagccttgatc

SEQ ID NO: 61707 - DNA, 25 bp, Homo sapien
gggcaatgccctccagtgaggctac

SEQ ID NO: 61708 - DNA, 25 bp, Homo sapien
gccaggagcacgacttgatcttccg

SEQ ID NO: 61709 - DNA, 25 bp, Homo sapien
ctgctacttccagggtagtcagggc

SEQ ID NO: 61710 - DNA, 25 bp, Homo sapien
acctccaagcatgcggcctgctact

SEQ ID NO: 61711 - DNA, 25 bp, Homo sapien
ttggccaccttaggagtctgacctc

SEQ ID NO: 61712 - DNA, 25 bp, Homo sapien
cgccgcttagcccgacctgtcttct

SEQ ID NO: 61713 - DNA, 25 bp, Homo sapien
cgccggttgtactgcatccgccgct

SEQ ID NO: 61714 - DNA, 25 bp, Homo sapien
cacaacgttgacaaagcgccggttg

SEQ ID NO: 61715 - DNA, 25 bp, Homo sapien
cttcttgccaaaggtgggcacaacg

SEQ ID NO: 61716 - DNA, 25 bp, Homo sapien
ttggccaccttaggagtctgacctc

SEQ ID NO: 61717 - DNA, 25 bp, Homo sapien
cgccgcttagcccgacctgtcttct

SEQ ID NO: 61718 - DNA, 25 bp, Homo sapien
cagtgaggctacatgagccttgatc

SEQ ID NO: 61719 - DNA, 25 bp, Homo sapien
cacaacgttgacaaagcgccggttg

SEQ ID NO: 61720 - DNA, 25 bp, Homo sapien
ctgctacttccagggtagtcagggc

SEQ ID NO: 61721 - DNA, 25 bp, Homo sapien
acctccaagcatgcggcctgctact

SEQ ID NO: 61722 - DNA, 25 bp, Homo sapien
gggcaatgccctccagtgaggctac

SEQ ID NO: 61723 - DNA, 25 bp, Homo sapien
ggtcacctcgaaggtgtgtagctcc

SEQ ID NO: 61724 - DNA, 25 bp, Homo sapien
gccaggagcacgacttgatcttccg

SEQ ID NO: 61725 - DNA, 25 bp, Homo sapien
cgccggttgtactgcatccgccgct

SEQ ID NO: 61726 - DNA, 25 bp, Homo sapien
cttcttgccaaaggtgggcacaacg

SEQ ID NO: 61727 - DNA, 25 bp, Homo sapien
ggtcacctcgaaggtgtgtagctcc

SEQ ID NO: 61728 - DNA, 25 bp, Homo sapien
cagtgaggctacatgagccttgatc

SEQ ID NO: 61729 - DNA, 25 bp, Homo sapien
gggcaatgccctccagtgaggctac

SEQ ID NO: 61730 - DNA, 25 bp, Homo sapien
gccaggagcacgacttgatcttccg

SEQ ID NO: 61731 - DNA, 25 bp, Homo sapien
ctgctacttccagggtagtcagggc

SEQ ID NO: 61732 - DNA, 25 bp, Homo sapien
acctccaagcatgcggcctgctact

SEQ ID NO: 61733 - DNA, 25 bp, Homo sapien
ttggccaccttaggagtctgacctc

SEQ ID NO: 61734 - DNA, 25 bp, Homo sapien
cgccgcttagcccgacctgtcttct

SEQ ID NO: 61735 - DNA, 25 bp, Homo sapien
cgccggttgtactgcatccgccgct

SEQ ID NO: 61736 - DNA, 25 bp, Homo sapien
cacaacgttgacaaagcgccggttg

SEQ ID NO: 61737 - DNA, 25 bp, Homo sapien
cttcttgccaaaggtgggcacaacg

SEQ ID NO: 61738 - DNA, 25 bp, Homo sapien
cacaacgttgacaaagcgccggttg

SEQ ID NO: 61739 - DNA, 25 bp, Homo sapien
acctccaagcatgcggcctgctact

SEQ ID NO: 61740 - DNA, 25 bp, Homo sapien
gccaggagcacgacttgatcttccg

SEQ ID NO: 61741 - DNA, 25 bp, Homo sapien
ctgctacttccagggtagtcagggc

SEQ ID NO: 61742 - DNA, 25 bp, Homo sapien
cgccgcttagcccgacctgtcttct

SEQ ID NO: 61743 - DNA, 25 bp, Homo sapien
cagtgaggctacatgagccttgatc

SEQ ID NO: 61744 - DNA, 25 bp, Homo sapien
ttggccaccttaggagtctgacctc

SEQ ID NO: 61745 - DNA, 25 bp, Homo sapien
cgccggttgtactgcatccgccgct

SEQ ID NO: 61746 - DNA, 25 bp, Homo sapien
cttcttgccaaaggtgggcacaacg

SEQ ID NO: 61747 - DNA, 25 bp, Homo sapien
gggcaatgccctccagtgaggctac

SEQ ID NO: 61748 - DNA, 25 bp, Homo sapien
ggtcacctcgaaggtgtgtagctcc

SEQ ID NO: 61749 - DNA, 25 bp, Homo sapien
ggtcacctcgaaggtgtgtagctcc

SEQ ID NO: 61750 - DNA, 25 bp, Homo sapien
cagtgaggctacatgagccttgatc

SEQ ID NO: 61751 - DNA, 25 bp, Homo sapien
gggcaatgccctccagtgaggctac

SEQ ID NO: 61752 - DNA, 25 bp, Homo sapien
gccaggagcacgacttgatcttccg

SEQ ID NO: 61753 - DNA, 25 bp, Homo sapien
ctgctacttccagggtagtcagggc

SEQ ID NO: 61754 - DNA, 25 bp, Homo sapien
acctccaagcatgcggcctgctact

SEQ ID NO: 61755 - DNA, 25 bp, Homo sapien
ttggccaccttaggagtctgacctc

SEQ ID NO: 61756 - DNA, 25 bp, Homo sapien
cgccgcttagcccgacctgtcttct

SEQ ID NO: 61757 - DNA, 25 bp, Homo sapien
cgccggttgtactgcatccgccgct

SEQ ID NO: 61758 - DNA, 25 bp, Homo sapien
cacaacgttgacaaagcgccggttg

SEQ ID NO: 61759 - DNA, 25 bp, Homo sapien
cttcttgccaaaggtgggcacaacg

SEQ ID NO: 61760 - DNA, 25 bp, Homo sapien
ctgctacttccagggtagtcagggc

SEQ ID NO: 61761 - DNA, 25 bp, Homo sapien
acctccaagcatgcggcctgctact

SEQ ID NO: 61762 - DNA, 25 bp, Homo sapien
cagtgaggctacatgagccttgatc

SEQ ID NO: 61763 - DNA, 25 bp, Homo sapien
cgccggttgtactgcatccgccgct

SEQ ID NO: 61764 - DNA, 25 bp, Homo sapien
cacaacgttgacaaagcgccggttg

SEQ ID NO: 61765 - DNA, 25 bp, Homo sapien
gggcaatgccctccagtgaggctac

SEQ ID NO: 61766 - DNA, 25 bp, Homo sapien
ggtcacctcgaaggtgtgtagctcc

SEQ ID NO: 61767 - DNA, 25 bp, Homo sapien
cgccgcttagcccgacctgtcttct

SEQ ID NO: 61768 - DNA, 25 bp, Homo sapien
gccaggagcacgacttgatcttccg

SEQ ID NO: 61769 - DNA, 25 bp, Homo sapien
cttcttgccaaaggtgggcacaacg

SEQ ID NO: 61770 - DNA, 25 bp, Homo sapien
ttggccaccttaggagtctgacctc

SEQ ID NO: 61771 - DNA, 25 bp, Homo sapien
ctgctacttccagggtagtcagggc

SEQ ID NO: 61772 - DNA, 25 bp, Homo sapien
cgccgcttagcccgacctgtcttct

SEQ ID NO: 61773 - DNA, 25 bp, Homo sapien
gggcaatgccctccagtgaggctac

SEQ ID NO: 61774 - DNA, 25 bp, Homo sapien
gccaggagcacgacttgatcttccg

SEQ ID NO: 61775 - DNA, 25 bp, Homo sapien
cagtgaggctacatgagccttgatc

SEQ ID NO: 61776 - DNA, 25 bp, Homo sapien
cgccggttgtactgcatccgccgct

SEQ ID NO: 61777 - DNA, 25 bp, Homo sapien
cacaacgttgacaaagcgccggttg

SEQ ID NO: 61778 - DNA, 25 bp, Homo sapien
ggtcacctcgaaggtgtgtagctcc

SEQ ID NO: 61779 - DNA, 25 bp, Homo sapien
cttcttgccaaaggtgggcacaacg

SEQ ID NO: 61780 - DNA, 25 bp, Homo sapien
ttggccaccttaggagtctgacctc

SEQ ID NO: 61781 - DNA, 25 bp, Homo sapien
acctccaagcatgcggcctgctact

SEQ ID NO: 61782 - DNA, 25 bp, Homo sapien
ggtcacctcgaaggtgtgtagctcc

SEQ ID NO: 61783 - DNA, 25 bp, Homo sapien
cagtgaggctacatgagccttgatc

SEQ ID NO: 61784 - DNA, 25 bp, Homo sapien
gggcaatgccctccagtgaggctac

SEQ ID NO: 61785 - DNA, 25 bp, Homo sapien
gccaggagcacgacttgatcttccg

SEQ ID NO: 61786 - DNA, 25 bp, Homo sapien
ctgctacttccagggtagtcagggc

SEQ ID NO: 61787 - DNA, 25 bp, Homo sapien
acctccaagcatgcggcctgctact

SEQ ID NO: 61788 - DNA, 25 bp, Homo sapien
ttggccaccttaggagtctgacctc

SEQ ID NO: 61789 - DNA, 25 bp, Homo sapien
cgccgcttagcccgacctgtcttct

SEQ ID NO: 61790 - DNA, 25 bp, Homo sapien
cgccggttgtactgcatccgccgct

SEQ ID NO: 61791 - DNA, 25 bp, Homo sapien
cacaacgttgacaaagcgccggttg

SEQ ID NO: 61792 - DNA, 25 bp, Homo sapien
cttcttgccaaaggtgggcacaacg

SEQ ID NO: 61793 - DNA, 25 bp, Homo sapien
gggcaatgccctccagtgaggctac

SEQ ID NO: 61794 - DNA, 25 bp, Homo sapien
cgccggttgtactgcatccgccgct

SEQ ID NO: 61795 - DNA, 25 bp, Homo sapien
cacaacgttgacaaagcgccggttg

SEQ ID NO: 61796 - DNA, 25 bp, Homo sapien
ctgctacttccagggtagtcagggc

SEQ ID NO: 61797 - DNA, 25 bp, Homo sapien
ttggccaccttaggagtctgacctc

SEQ ID NO: 61798 - DNA, 25 bp, Homo sapien
acctccaagcatgcggcctgctact

SEQ ID NO: 61799 - DNA, 25 bp, Homo sapien
cagtgaggctacatgagccttgatc

SEQ ID NO: 61800 - DNA, 25 bp, Homo sapien
ggtcacctcgaaggtgtgtagctcc

SEQ ID NO: 61801 - DNA, 25 bp, Homo sapien
cgccgcttagcccgacctgtcttct

SEQ ID NO: 61802 - DNA, 25 bp, Homo sapien
cttcttgccaaaggtgggcacaacg

SEQ ID NO: 61803 - DNA, 25 bp, Homo sapien
gccaggagcacgacttgatcttccg

SEQ ID NO: 61804 - DNA, 25 bp, Homo sapien
ggtcacctcgaaggtgtgtagctcc

SEQ ID NO: 61805 - DNA, 25 bp, Homo sapien
cagtgaggctacatgagccttgatc

SEQ ID NO: 61806 - DNA, 25 bp, Homo sapien
gggcaatgccctccagtgaggctac

SEQ ID NO: 61807 - DNA, 25 bp, Homo sapien
gccaggagcacgacttgatcttccg

SEQ ID NO: 61808 - DNA, 25 bp, Homo sapien
ctgctacttccagggtagtcagggc

SEQ ID NO: 61809 - DNA, 25 bp, Homo sapien
acctccaagcatgcggcctgctact

SEQ ID NO: 61810 - DNA, 25 bp, Homo sapien
ttggccaccttaggagtctgacctc

SEQ ID NO: 61811 - DNA, 25 bp, Homo sapien
cgccgcttagcccgacctgtcttct

SEQ ID NO: 61812 - DNA, 25 bp, Homo sapien
cgccggttgtactgcatccgccgct

SEQ ID NO: 61813 - DNA, 25 bp, Homo sapien
cacaacgttgacaaagcgccggttg

SEQ ID NO: 61814 - DNA, 25 bp, Homo sapien
cttcttgccaaaggtgggcacaacg

SEQ ID NO: 61815 - DNA, 25 bp, Homo sapien
ggtcacctcgaaggtgtgtagctcc

SEQ ID NO: 61816 - DNA, 25 bp, Homo sapien
gccaggagcacgacttgatcttccg

SEQ ID NO: 61817 - DNA, 25 bp, Homo sapien
ctgctacttccagggtagtcagggc

SEQ ID NO: 61818 - DNA, 25 bp, Homo sapien
acctccaagcatgcggcctgctact

SEQ ID NO: 61819 - DNA, 25 bp, Homo sapien
gggcaatgccctccagtgaggctac

SEQ ID NO: 61820 - DNA, 25 bp, Homo sapien
cagtgaggctacatgagccttgatc

SEQ ID NO: 61821 - DNA, 25 bp, Homo sapien
cttcttgccaaaggtgggcacaacg

SEQ ID NO: 61822 - DNA, 25 bp, Homo sapien
cacaacgttgacaaagcgccggttg

SEQ ID NO: 61823 - DNA, 25 bp, Homo sapien
ttggccaccttaggagtctgacctc

SEQ ID NO: 61824 - DNA, 25 bp, Homo sapien
cgccgcttagcccgacctgtcttct

SEQ ID NO: 61825 - DNA, 25 bp, Homo sapien
cgccggttgtactgcatccgccgct

SEQ ID NO: 61826 - DNA, 25 bp, Homo sapien
ggtcacctcgaaggtgtgtagctcc

SEQ ID NO: 61827 - DNA, 25 bp, Homo sapien
cagtgaggctacatgagccttgatc

SEQ ID NO: 61828 - DNA, 25 bp, Homo sapien
gggcaatgccctccagtgaggctac

SEQ ID NO: 61829 - DNA, 25 bp, Homo sapien
gccaggagcacgacttgatcttccg

SEQ ID NO: 61830 - DNA, 25 bp, Homo sapien
ctgctacttccagggtagtcagggc

SEQ ID NO: 61831 - DNA, 25 bp, Homo sapien
acctccaagcatgcggcctgctact

SEQ ID NO: 61832 - DNA, 25 bp, Homo sapien
ttggccaccttaggagtctgacctc

SEQ ID NO: 61833 - DNA, 25 bp, Homo sapien
cgccgcttagcccgacctgtcttct

SEQ ID NO: 61834 - DNA, 25 bp, Homo sapien
cgccggttgtactgcatccgccgct

SEQ ID NO: 61835 - DNA, 25 bp, Homo sapien
cacaacgttgacaaagcgccggttg

SEQ ID NO: 61836 - DNA, 25 bp, Homo sapien
cttcttgccaaaggtgggcacaacg

SEQ ID NO: 61837 - DNA, 25 bp, Homo sapien
gcaaagcacaccacaagctcagtcc

SEQ ID NO: 61838 - DNA, 25 bp, Homo sapien
agagaacacacaccatacagcattc

SEQ ID NO: 61839 - DNA, 25 bp, Homo sapien
caggattgagagacacatctcgcca

SEQ ID NO: 61840 - DNA, 25 bp, Homo sapien
cagaactgcagcaaacagcattctt

SEQ ID NO: 61841 - DNA, 25 bp, Homo sapien
acagcattcacagcagttgacaaag

SEQ ID NO: 61842 - DNA, 25 bp, Homo sapien
tagggggagtacaagtatcatttca

SEQ ID NO: 61843 - DNA, 25 bp, Homo sapien
acctgagctcactggtgaactctgc

SEQ ID NO: 61844 - DNA, 25 bp, Homo sapien
atgggtagctaacagacattagaac

SEQ ID NO: 61845 - DNA, 25 bp, Homo sapien
tcaccaaagccacaggattgagaga

SEQ ID NO: 61846 - DNA, 25 bp, Homo sapien
atgtgggttatctaagaacaaaaac

SEQ ID NO: 61847 - DNA, 25 bp, Homo sapien
ccaccaagtctctgcacgcgctctc

SEQ ID NO: 61848 - DNA, 25 bp, Homo sapien
ccaccaagtctctgcacgcgctctc

SEQ ID NO: 61849 - DNA, 25 bp, Homo sapien
caggattgagagacacatctcgcca

SEQ ID NO: 61850 - DNA, 25 bp, Homo sapien
tcaccaaagccacaggattgagaga

SEQ ID NO: 61851 - DNA, 25 bp, Homo sapien
atgtgggttatctaagaacaaaaac

SEQ ID NO: 61852 - DNA, 25 bp, Homo sapien
tagggggagtacaagtatcatttca

SEQ ID NO: 61853 - DNA, 25 bp, Homo sapien
acagcattcacagcagttgacaaag

SEQ ID NO: 61854 - DNA, 25 bp, Homo sapien
agagaacacacaccatacagcattc

SEQ ID NO: 61855 - DNA, 25 bp, Homo sapien
gcaaagcacaccacaagctcagtcc

SEQ ID NO: 61856 - DNA, 25 bp, Homo sapien
acctgagctcactggtgaactctgc

SEQ ID NO: 61857 - DNA, 25 bp, Homo sapien
atgggtagctaacagacattagaac

SEQ ID NO: 61858 - DNA, 25 bp, Homo sapien
cagaactgcagcaaacagcattctt

SEQ ID NO: 61859 - DNA, 25 bp, Homo sapien
atgtgggttatctaagaacaaaaac

SEQ ID NO: 61860 - DNA, 25 bp, Homo sapien
acagcattcacagcagttgacaaag

SEQ ID NO: 61861 - DNA, 25 bp, Homo sapien
ccaccaagtctctgcacgcgctctc

SEQ ID NO: 61862 - DNA, 25 bp, Homo sapien
caggattgagagacacatctcgcca

SEQ ID NO: 61863 - DNA, 25 bp, Homo sapien
tagggggagtacaagtatcatttca

SEQ ID NO: 61864 - DNA, 25 bp, Homo sapien
cagaactgcagcaaacagcattctt

SEQ ID NO: 61865 - DNA, 25 bp, Homo sapien
acctgagctcactggtgaactctgc

SEQ ID NO: 61866 - DNA, 25 bp, Homo sapien
agagaacacacaccatacagcattc

SEQ ID NO: 61867 - DNA, 25 bp, Homo sapien
atgggtagctaacagacattagaac

SEQ ID NO: 61868 - DNA, 25 bp, Homo sapien
tcaccaaagccacaggattgagaga

SEQ ID NO: 61869 - DNA, 25 bp, Homo sapien
gcaaagcacaccacaagctcagtcc

SEQ ID NO: 61870 - DNA, 25 bp, Homo sapien
ccaccaagtctctgcacgcgctctc

SEQ ID NO: 61871 - DNA, 25 bp, Homo sapien
caggattgagagacacatctcgcca

SEQ ID NO: 61872 - DNA, 25 bp, Homo sapien
tcaccaaagccacaggattgagaga

SEQ ID NO: 61873 - DNA, 25 bp, Homo sapien
atgtgggttatctaagaacaaaaac

SEQ ID NO: 61874 - DNA, 25 bp, Homo sapien
tagggggagtacaagtatcatttca

SEQ ID NO: 61875 - DNA, 25 bp, Homo sapien
acagcattcacagcagttgacaaag

SEQ ID NO: 61876 - DNA, 25 bp, Homo sapien
agagaacacacaccatacagcattc

SEQ ID NO: 61877 - DNA, 25 bp, Homo sapien
gcaaagcacaccacaagctcagtcc

SEQ ID NO: 61878 - DNA, 25 bp, Homo sapien
acctgagctcactggtgaactctgc

SEQ ID NO: 61879 - DNA, 25 bp, Homo sapien
atgggtagctaacagacattagaac

SEQ ID NO: 61880 - DNA, 25 bp, Homo sapien
cagaactgcagcaaacagcattctt

SEQ ID NO: 61881 - DNA, 25 bp, Homo sapien
tagggggagtacaagtatcatttca

SEQ ID NO: 61882 - DNA, 25 bp, Homo sapien
caggattgagagacacatctcgcca

SEQ ID NO: 61883 - DNA, 25 bp, Homo sapien
acagcattcacagcagttgacaaag

SEQ ID NO: 61884 - DNA, 25 bp, Homo sapien
cagaactgcagcaaacagcattctt

SEQ ID NO: 61885 - DNA, 25 bp, Homo sapien
tcaccaaagccacaggattgagaga

SEQ ID NO: 61886 - DNA, 25 bp, Homo sapien
atgggtagctaacagacattagaac

SEQ ID NO: 61887 - DNA, 25 bp, Homo sapien
agagaacacacaccatacagcattc

SEQ ID NO: 61888 - DNA, 25 bp, Homo sapien
atgtgggttatctaagaacaaaaac

SEQ ID NO: 61889 - DNA, 25 bp, Homo sapien
ccaccaagtctctgcacgcgctctc

SEQ ID NO: 61890 - DNA, 25 bp, Homo sapien
acctgagctcactggtgaactctgc

SEQ ID NO: 61891 - DNA, 25 bp, Homo sapien
gcaaagcacaccacaagctcagtcc

SEQ ID NO: 61892 - DNA, 25 bp, Homo sapien
ccaccaagtctctgcacgcgctctc

SEQ ID NO: 61893 - DNA, 25 bp, Homo sapien
caggattgagagacacatctcgcca

SEQ ID NO: 61894 - DNA, 25 bp, Homo sapien
tcaccaaagccacaggattgagaga

SEQ ID NO: 61895 - DNA, 25 bp, Homo sapien
atgtgggttatctaagaacaaaaac

SEQ ID NO: 61896 - DNA, 25 bp, Homo sapien
tagggggagtacaagtatcatttca

SEQ ID NO: 61897 - DNA, 25 bp, Homo sapien
acagcattcacagcagttgacaaag

SEQ ID NO: 61898 - DNA, 25 bp, Homo sapien
agagaacacacaccatacagcattc

SEQ ID NO: 61899 - DNA, 25 bp, Homo sapien
gcaaagcacaccacaagctcagtcc

SEQ ID NO: 61900 - DNA, 25 bp, Homo sapien
acctgagctcactggtgaactctgc

SEQ ID NO: 61901 - DNA, 25 bp, Homo sapien
atgggtagctaacagacattagaac

SEQ ID NO: 61902 - DNA, 25 bp, Homo sapien
cagaactgcagcaaacagcattctt

SEQ ID NO: 61903 - DNA, 25 bp, Homo sapien
ccaccaagtctctgcacgcgctctc

SEQ ID NO: 61904 - DNA, 25 bp, Homo sapien
caggattgagagacacatctcgcca

SEQ ID NO: 61905 - DNA, 25 bp, Homo sapien
tcaccaaagccacaggattgagaga

SEQ ID NO: 61906 - DNA, 25 bp, Homo sapien
atgtgggttatctaagaacaaaaac

SEQ ID NO: 61907 - DNA, 25 bp, Homo sapien
tagggggagtacaagtatcatttca

SEQ ID NO: 61908 - DNA, 25 bp, Homo sapien
acagcattcacagcagttgacaaag

SEQ ID NO: 61909 - DNA, 25 bp, Homo sapien
agagaacacacaccatacagcattc

SEQ ID NO: 61910 - DNA, 25 bp, Homo sapien
gcaaagcacaccacaagctcagtcc

SEQ ID NO: 61911 - DNA, 25 bp, Homo sapien
acctgagctcactggtgaactctgc

SEQ ID NO: 61912 - DNA, 25 bp, Homo sapien
atgggtagctaacagacattagaac

SEQ ID NO: 61913 - DNA, 25 bp, Homo sapien
cagaactgcagcaaacagcattctt

SEQ ID NO: 61914 - DNA, 25 bp, Homo sapien
tagggggagtacaagtatcatttca

SEQ ID NO: 61915 - DNA, 25 bp, Homo sapien
agagaacacacaccatacagcattc

SEQ ID NO: 61916 - DNA, 25 bp, Homo sapien
gcaaagcacaccacaagctcagtcc

SEQ ID NO: 61917 - DNA, 25 bp, Homo sapien
tcaccaaagccacaggattgagaga

SEQ ID NO: 61918 - DNA, 25 bp, Homo sapien
cagaactgcagcaaacagcattctt

SEQ ID NO: 61919 - DNA, 25 bp, Homo sapien
acctgagctcactggtgaactctgc

SEQ ID NO: 61920 - DNA, 25 bp, Homo sapien
acagcattcacagcagttgacaaag

SEQ ID NO: 61921 - DNA, 25 bp, Homo sapien
atgtgggttatctaagaacaaaaac

SEQ ID NO: 61922 - DNA, 25 bp, Homo sapien
caggattgagagacacatctcgcca

SEQ ID NO: 61923 - DNA, 25 bp, Homo sapien
ccaccaagtctctgcacgcgctctc

SEQ ID NO: 61924 - DNA, 25 bp, Homo sapien
atgggtagctaacagacattagaac

SEQ ID NO: 61925 - DNA, 25 bp, Homo sapien
ccaccaagtctctgcacgcgctctc

SEQ ID NO: 61926 - DNA, 25 bp, Homo sapien
caggattgagagacacatctcgcca

SEQ ID NO: 61927 - DNA, 25 bp, Homo sapien
tcaccaaagccacaggattgagaga

SEQ ID NO: 61928 - DNA, 25 bp, Homo sapien
atgtgggttatctaagaacaaaaac

SEQ ID NO: 61929 - DNA, 25 bp, Homo sapien
tagggggagtacaagtatcatttca

SEQ ID NO: 61930 - DNA, 25 bp, Homo sapien
acagcattcacagcagttgacaaag

SEQ ID NO: 61931 - DNA, 25 bp, Homo sapien
agagaacacacaccatacagcattc

SEQ ID NO: 61932 - DNA, 25 bp, Homo sapien
gcaaagcacaccacaagctcagtcc

SEQ ID NO: 61933 - DNA, 25 bp, Homo sapien
acctgagctcactggtgaactctgc

SEQ ID NO: 61934 - DNA, 25 bp, Homo sapien
atgggtagctaacagacattagaac

SEQ ID NO: 61935 - DNA, 25 bp, Homo sapien
cagaactgcagcaaacagcattctt

SEQ ID NO: 61936 - DNA, 25 bp, Homo sapien
caggattgagagacacatctcgcca

SEQ ID NO: 61937 - DNA, 25 bp, Homo sapien
acagcattcacagcagttgacaaag

SEQ ID NO: 61938 - DNA, 25 bp, Homo sapien
cagaactgcagcaaacagcattctt

SEQ ID NO: 61939 - DNA, 25 bp, Homo sapien
tagggggagtacaagtatcatttca

SEQ ID NO: 61940 - DNA, 25 bp, Homo sapien
acctgagctcactggtgaactctgc

SEQ ID NO: 61941 - DNA, 25 bp, Homo sapien
tcaccaaagccacaggattgagaga

SEQ ID NO: 61942 - DNA, 25 bp, Homo sapien
agagaacacacaccatacagcattc

SEQ ID NO: 61943 - DNA, 25 bp, Homo sapien
ccaccaagtctctgcacgcgctctc

SEQ ID NO: 61944 - DNA, 25 bp, Homo sapien
gcaaagcacaccacaagctcagtcc

SEQ ID NO: 61945 - DNA, 25 bp, Homo sapien
atgtgggttatctaagaacaaaaac

SEQ ID NO: 61946 - DNA, 25 bp, Homo sapien
atgggtagctaacagacattagaac

SEQ ID NO: 61947 - DNA, 25 bp, Homo sapien
ccaccaagtctctgcacgcgctctc

SEQ ID NO: 61948 - DNA, 25 bp, Homo sapien
caggattgagagacacatctcgcca

SEQ ID NO: 61949 - DNA, 25 bp, Homo sapien
tcaccaaagccacaggattgagaga

SEQ ID NO: 61950 - DNA, 25 bp, Homo sapien
atgtgggttatctaagaacaaaaac

SEQ ID NO: 61951 - DNA, 25 bp, Homo sapien
tagggggagtacaagtatcatttca

SEQ ID NO: 61952 - DNA, 25 bp, Homo sapien
acagcattcacagcagttgacaaag

SEQ ID NO: 61953 - DNA, 25 bp, Homo sapien
agagaacacacaccatacagcattc

SEQ ID NO: 61954 - DNA, 25 bp, Homo sapien
gcaaagcacaccacaagctcagtcc

SEQ ID NO: 61955 - DNA, 25 bp, Homo sapien
acctgagctcactggtgaactctgc

SEQ ID NO: 61956 - DNA, 25 bp, Homo sapien
atgggtagctaacagacattagaac

SEQ ID NO: 61957 - DNA, 25 bp, Homo sapien
cagaactgcagcaaacagcattctt

SEQ ID NO: 61958 - DNA, 25 bp, Homo sapien
atgggtagctaacagacattagaac

SEQ ID NO: 61959 - DNA, 25 bp, Homo sapien
acagcattcacagcagttgacaaag

SEQ ID NO: 61960 - DNA, 25 bp, Homo sapien
tagggggagtacaagtatcatttca

SEQ ID NO: 61961 - DNA, 25 bp, Homo sapien
cagaactgcagcaaacagcattctt

SEQ ID NO: 61962 - DNA, 25 bp, Homo sapien
caggattgagagacacatctcgcca

SEQ ID NO: 61963 - DNA, 25 bp, Homo sapien
acctgagctcactggtgaactctgc

SEQ ID NO: 61964 - DNA, 25 bp, Homo sapien
agagaacacacaccatacagcattc

SEQ ID NO: 61965 - DNA, 25 bp, Homo sapien
ccaccaagtctctgcacgcgctctc

SEQ ID NO: 61966 - DNA, 25 bp, Homo sapien
tcaccaaagccacaggattgagaga

SEQ ID NO: 61967 - DNA, 25 bp, Homo sapien
atgtgggttatctaagaacaaaaac

SEQ ID NO: 61968 - DNA, 25 bp, Homo sapien
gcaaagcacaccacaagctcagtcc

SEQ ID NO: 61969 - DNA, 25 bp, Homo sapien
ccaccaagtctctgcacgcgctctc

SEQ ID NO: 61970 - DNA, 25 bp, Homo sapien
caggattgagagacacatctcgcca

SEQ ID NO: 61971 - DNA, 25 bp, Homo sapien
tcaccaaagccacaggattgagaga

SEQ ID NO: 61972 - DNA, 25 bp, Homo sapien
atgtgggttatctaagaacaaaaac

SEQ ID NO: 61973 - DNA, 25 bp, Homo sapien
tagggggagtacaagtatcatttca

SEQ ID NO: 61974 - DNA, 25 bp, Homo sapien
acagcattcacagcagttgacaaag

SEQ ID NO: 61975 - DNA, 25 bp, Homo sapien
agagaacacacaccatacagcattc

SEQ ID NO: 61976 - DNA, 25 bp, Homo sapien
gcaaagcacaccacaagctcagtcc

SEQ ID NO: 61977 - DNA, 25 bp, Homo sapien
acctgagctcactggtgaactctgc

SEQ ID NO: 61978 - DNA, 25 bp, Homo sapien
atgggtagctaacagacattagaac

SEQ ID NO: 61979 - DNA, 25 bp, Homo sapien
cagaactgcagcaaacagcattctt

SEQ ID NO: 61980 - DNA, 25 bp, Homo sapien
caggattgagagacacatctcgcca

SEQ ID NO: 61981 - DNA, 25 bp, Homo sapien
atgtgggttatctaagaacaaaaac

SEQ ID NO: 61982 - DNA, 25 bp, Homo sapien
agagaacacacaccatacagcattc

SEQ ID NO: 61983 - DNA, 25 bp, Homo sapien
ccaccaagtctctgcacgcgctctc

SEQ ID NO: 61984 - DNA, 25 bp, Homo sapien
cagaactgcagcaaacagcattctt

SEQ ID NO: 61985 - DNA, 25 bp, Homo sapien
tcaccaaagccacaggattgagaga

SEQ ID NO: 61986 - DNA, 25 bp, Homo sapien
atgggtagctaacagacattagaac

SEQ ID NO: 61987 - DNA, 25 bp, Homo sapien
tagggggagtacaagtatcatttca

SEQ ID NO: 61988 - DNA, 25 bp, Homo sapien
acctgagctcactggtgaactctgc

SEQ ID NO: 61989 - DNA, 25 bp, Homo sapien
gcaaagcacaccacaagctcagtcc

SEQ ID NO: 61990 - DNA, 25 bp, Homo sapien
acagcattcacagcagttgacaaag

SEQ ID NO: 61991 - DNA, 25 bp, Homo sapien
ccaccaagtctctgcacgcgctctc

SEQ ID NO: 61992 - DNA, 25 bp, Homo sapien
caggattgagagacacatctcgcca

SEQ ID NO: 61993 - DNA, 25 bp, Homo sapien
tcaccaaagccacaggattgagaga

SEQ ID NO: 61994 - DNA, 25 bp, Homo sapien
atgtgggttatctaagaacaaaaac

SEQ ID NO: 61995 - DNA, 25 bp, Homo sapien
tagggggagtacaagtatcatttca

SEQ ID NO: 61996 - DNA, 25 bp, Homo sapien
acagcattcacagcagttgacaaag

SEQ ID NO: 61997 - DNA, 25 bp, Homo sapien
agagaacacacaccatacagcattc

SEQ ID NO: 61998 - DNA, 25 bp, Homo sapien
gcaaagcacaccacaagctcagtcc

SEQ ID NO: 61999 - DNA, 25 bp, Homo sapien
acctgagctcactggtgaactctgc

SEQ ID NO: 62000 - DNA, 25 bp, Homo sapien
atgggtagctaacagacattagaac

SEQ ID NO: 62001 - DNA, 25 bp, Homo sapien
cagaactgcagcaaacagcattctt

SEQ ID NO: 62002 - DNA, 25 bp, Homo sapien
acagcattcacagcagttgacaaag

SEQ ID NO: 62003 - DNA, 25 bp, Homo sapien
cagaactgcagcaaacagcattctt

SEQ ID NO: 62004 - DNA, 25 bp, Homo sapien
tcaccaaagccacaggattgagaga

SEQ ID NO: 62005 - DNA, 25 bp, Homo sapien
acctgagctcactggtgaactctgc

SEQ ID NO: 62006 - DNA, 25 bp, Homo sapien
gcaaagcacaccacaagctcagtcc

SEQ ID NO: 62007 - DNA, 25 bp, Homo sapien
caggattgagagacacatctcgcca

SEQ ID NO: 62008 - DNA, 25 bp, Homo sapien
tagggggagtacaagtatcatttca

SEQ ID NO: 62009 - DNA, 25 bp, Homo sapien
ccaccaagtctctgcacgcgctctc

SEQ ID NO: 62010 - DNA, 25 bp, Homo sapien
agagaacacacaccatacagcattc

SEQ ID NO: 62011 - DNA, 25 bp, Homo sapien
atgggtagctaacagacattagaac

SEQ ID NO: 62012 - DNA, 25 bp, Homo sapien
atgtgggttatctaagaacaaaaac

SEQ ID NO: 62013 - DNA, 25 bp, Homo sapien
atgtgggttatctaagaacaaaaac

SEQ ID NO: 62014 - DNA, 25 bp, Homo sapien
acagcattcacagcagttgacaaag

SEQ ID NO: 62015 - DNA, 25 bp, Homo sapien
tcaccaaagccacaggattgagaga

SEQ ID NO: 62016 - DNA, 25 bp, Homo sapien
cagaactgcagcaaacagcattctt

SEQ ID NO: 62017 - DNA, 25 bp, Homo sapien
acctgagctcactggtgaactctgc

SEQ ID NO: 62018 - DNA, 25 bp, Homo sapien
agagaacacacaccatacagcattc

SEQ ID NO: 62019 - DNA, 25 bp, Homo sapien
ccaccaagtctctgcacgcgctctc

SEQ ID NO: 62020 - DNA, 25 bp, Homo sapien
gcaaagcacaccacaagctcagtcc

SEQ ID NO: 62021 - DNA, 25 bp, Homo sapien
tagggggagtacaagtatcatttca

SEQ ID NO: 62022 - DNA, 25 bp, Homo sapien
caggattgagagacacatctcgcca

SEQ ID NO: 62023 - DNA, 25 bp, Homo sapien
atgggtagctaacagacattagaac

SEQ ID NO: 62024 - DNA, 25 bp, Homo sapien
ccaccaagtctctgcacgcgctctc

SEQ ID NO: 62025 - DNA, 25 bp, Homo sapien
caggattgagagacacatctcgcca

SEQ ID NO: 62026 - DNA, 25 bp, Homo sapien
tcaccaaagccacaggattgagaga

SEQ ID NO: 62027 - DNA, 25 bp, Homo sapien
atgtgggttatctaagaacaaaaac

SEQ ID NO: 62028 - DNA, 25 bp, Homo sapien
tagggggagtacaagtatcatttca

SEQ ID NO: 62029 - DNA, 25 bp, Homo sapien
acagcattcacagcagttgacaaag

SEQ ID NO: 62030 - DNA, 25 bp, Homo sapien
agagaacacacaccatacagcattc

SEQ ID NO: 62031 - DNA, 25 bp, Homo sapien
gcaaagcacaccacaagctcagtcc

SEQ ID NO: 62032 - DNA, 25 bp, Homo sapien
acctgagctcactggtgaactctgc

SEQ ID NO: 62033 - DNA, 25 bp, Homo sapien
atgggtagctaacagacattagaac

SEQ ID NO: 62034 - DNA, 25 bp, Homo sapien
cagaactgcagcaaacagcattctt

SEQ ID NO: 62035 - DNA, 25 bp, Homo sapien
tcaccaaagccacaggattgagaga

SEQ ID NO: 62036 - DNA, 25 bp, Homo sapien
gcaaagcacaccacaagctcagtcc

SEQ ID NO: 62037 - DNA, 25 bp, Homo sapien
acagcattcacagcagttgacaaag

SEQ ID NO: 62038 - DNA, 25 bp, Homo sapien
ccaccaagtctctgcacgcgctctc

SEQ ID NO: 62039 - DNA, 25 bp, Homo sapien
cagaactgcagcaaacagcattctt

SEQ ID NO: 62040 - DNA, 25 bp, Homo sapien
tagggggagtacaagtatcatttca

SEQ ID NO: 62041 - DNA, 25 bp, Homo sapien
atgtgggttatctaagaacaaaaac

SEQ ID NO: 62042 - DNA, 25 bp, Homo sapien
atgggtagctaacagacattagaac

SEQ ID NO: 62043 - DNA, 25 bp, Homo sapien
agagaacacacaccatacagcattc

SEQ ID NO: 62044 - DNA, 25 bp, Homo sapien
acctgagctcactggtgaactctgc

SEQ ID NO: 62045 - DNA, 25 bp, Homo sapien
caggattgagagacacatctcgcca

SEQ ID NO: 62046 - DNA, 25 bp, Homo sapien
ccaccaagtctctgcacgcgctctc

SEQ ID NO: 62047 - DNA, 25 bp, Homo sapien
caggattgagagacacatctcgcca

SEQ ID NO: 62048 - DNA, 25 bp, Homo sapien
tcaccaaagccacaggattgagaga

SEQ ID NO: 62049 - DNA, 25 bp, Homo sapien
atgtgggttatctaagaacaaaaac

SEQ ID NO: 62050 - DNA, 25 bp, Homo sapien
tagggggagtacaagtatcatttca

SEQ ID NO: 62051 - DNA, 25 bp, Homo sapien
acagcattcacagcagttgacaaag

SEQ ID NO: 62052 - DNA, 25 bp, Homo sapien
agagaacacacaccatacagcattc

SEQ ID NO: 62053 - DNA, 25 bp, Homo sapien
gcaaagcacaccacaagctcagtcc

SEQ ID NO: 62054 - DNA, 25 bp, Homo sapien
acctgagctcactggtgaactctgc

SEQ ID NO: 62055 - DNA, 25 bp, Homo sapien
atgggtagctaacagacattagaac

SEQ ID NO: 62056 - DNA, 25 bp, Homo sapien
cagaactgcagcaaacagcattctt

SEQ ID NO: 62057 - DNA, 25 bp, Homo sapien
gcaaagcacaccacaagctcagtcc

SEQ ID NO: 62058 - DNA, 25 bp, Homo sapien
ccaccaagtctctgcacgcgctctc

SEQ ID NO: 62059 - DNA, 25 bp, Homo sapien
cagaactgcagcaaacagcattctt

SEQ ID NO: 62060 - DNA, 25 bp, Homo sapien
tcaccaaagccacaggattgagaga

SEQ ID NO: 62061 - DNA, 25 bp, Homo sapien
tagggggagtacaagtatcatttca

SEQ ID NO: 62062 - DNA, 25 bp, Homo sapien
acctgagctcactggtgaactctgc

SEQ ID NO: 62063 - DNA, 25 bp, Homo sapien
acagcattcacagcagttgacaaag

SEQ ID NO: 62064 - DNA, 25 bp, Homo sapien
agagaacacacaccatacagcattc

SEQ ID NO: 62065 - DNA, 25 bp, Homo sapien
atgggtagctaacagacattagaac

SEQ ID NO: 62066 - DNA, 25 bp, Homo sapien
caggattgagagacacatctcgcca

SEQ ID NO: 62067 - DNA, 25 bp, Homo sapien
atgtgggttatctaagaacaaaaac

SEQ ID NO: 62068 - DNA, 25 bp, Homo sapien
ccaccaagtctctgcacgcgctctc

SEQ ID NO: 62069 - DNA, 25 bp, Homo sapien
caggattgagagacacatctcgcca

SEQ ID NO: 62070 - DNA, 25 bp, Homo sapien
tcaccaaagccacaggattgagaga

SEQ ID NO: 62071 - DNA, 25 bp, Homo sapien
atgtgggttatctaagaacaaaaac

SEQ ID NO: 62072 - DNA, 25 bp, Homo sapien
tagggggagtacaagtatcatttca

SEQ ID NO: 62073 - DNA, 25 bp, Homo sapien
acagcattcacagcagttgacaaag

SEQ ID NO: 62074 - DNA, 25 bp, Homo sapien
agagaacacacaccatacagcattc

SEQ ID NO: 62075 - DNA, 25 bp, Homo sapien
gcaaagcacaccacaagctcagtcc

SEQ ID NO: 62076 - DNA, 25 bp, Homo sapien
acctgagctcactggtgaactctgc

SEQ ID NO: 62077 - DNA, 25 bp, Homo sapien
atgggtagctaacagacattagaac

SEQ ID NO: 62078 - DNA, 25 bp, Homo sapien
cagaactgcagcaaacagcattctt

SEQ ID NO: 62079 - DNA, 25 bp, Homo sapien
gcaaagcacaccacaagctcagtcc

SEQ ID NO: 62080 - DNA, 25 bp, Homo sapien
caggattgagagacacatctcgcca

SEQ ID NO: 62081 - DNA, 25 bp, Homo sapien
tcaccaaagccacaggattgagaga

SEQ ID NO: 62082 - DNA, 25 bp, Homo sapien
ccaccaagtctctgcacgcgctctc

SEQ ID NO: 62083 - DNA, 25 bp, Homo sapien
agagaacacacaccatacagcattc

SEQ ID NO: 62084 - DNA, 25 bp, Homo sapien
atgtgggttatctaagaacaaaaac

SEQ ID NO: 62085 - DNA, 25 bp, Homo sapien
cagaactgcagcaaacagcattctt

SEQ ID NO: 62086 - DNA, 25 bp, Homo sapien
acagcattcacagcagttgacaaag

SEQ ID NO: 62087 - DNA, 25 bp, Homo sapien
acctgagctcactggtgaactctgc

SEQ ID NO: 62088 - DNA, 25 bp, Homo sapien
atgggtagctaacagacattagaac

SEQ ID NO: 62089 - DNA, 25 bp, Homo sapien
tagggggagtacaagtatcatttca

SEQ ID NO: 62090 - DNA, 25 bp, Homo sapien
ccaccaagtctctgcacgcgctctc

SEQ ID NO: 62091 - DNA, 25 bp, Homo sapien
caggattgagagacacatctcgcca

SEQ ID NO: 62092 - DNA, 25 bp, Homo sapien
tcaccaaagccacaggattgagaga

SEQ ID NO: 62093 - DNA, 25 bp, Homo sapien
atgtgggttatctaagaacaaaaac

SEQ ID NO: 62094 - DNA, 25 bp, Homo sapien
tagggggagtacaagtatcatttca

SEQ ID NO: 62095 - DNA, 25 bp, Homo sapien
acagcattcacagcagttgacaaag

SEQ ID NO: 62096 - DNA, 25 bp, Homo sapien
agagaacacacaccatacagcattc

SEQ ID NO: 62097 - DNA, 25 bp, Homo sapien
gcaaagcacaccacaagctcagtcc

SEQ ID NO: 62098 - DNA, 25 bp, Homo sapien
acctgagctcactggtgaactctgc

SEQ ID NO: 62099 - DNA, 25 bp, Homo sapien
atgggtagctaacagacattagaac

SEQ ID NO: 62100 - DNA, 25 bp, Homo sapien
cagaactgcagcaaacagcattctt

SEQ ID NO: 62101 - DNA, 25 bp, Homo sapien
atgtgggttatctaagaacaaaaac

SEQ ID NO: 62102 - DNA, 25 bp, Homo sapien
gcaaagcacaccacaagctcagtcc

SEQ ID NO: 62103 - DNA, 25 bp, Homo sapien
tagggggagtacaagtatcatttca

SEQ ID NO: 62104 - DNA, 25 bp, Homo sapien
caggattgagagacacatctcgcca

SEQ ID NO: 62105 - DNA, 25 bp, Homo sapien
agagaacacacaccatacagcattc

SEQ ID NO: 62106 - DNA, 25 bp, Homo sapien
atgggtagctaacagacattagaac

SEQ ID NO: 62107 - DNA, 25 bp, Homo sapien
tcaccaaagccacaggattgagaga

SEQ ID NO: 62108 - DNA, 25 bp, Homo sapien
cagaactgcagcaaacagcattctt

SEQ ID NO: 62109 - DNA, 25 bp, Homo sapien
acagcattcacagcagttgacaaag

SEQ ID NO: 62110 - DNA, 25 bp, Homo sapien
acctgagctcactggtgaactctgc

SEQ ID NO: 62111 - DNA, 25 bp, Homo sapien
ccaccaagtctctgcacgcgctctc

SEQ ID NO: 62112 - DNA, 25 bp, Homo sapien
ccaccaagtctctgcacgcgctctc

SEQ ID NO: 62113 - DNA, 25 bp, Homo sapien
caggattgagagacacatctcgcca

SEQ ID NO: 62114 - DNA, 25 bp, Homo sapien
tcaccaaagccacaggattgagaga

SEQ ID NO: 62115 - DNA, 25 bp, Homo sapien
atgtgggttatctaagaacaaaaac

SEQ ID NO: 62116 - DNA, 25 bp, Homo sapien
tagggggagtacaagtatcatttca

SEQ ID NO: 62117 - DNA, 25 bp, Homo sapien
acagcattcacagcagttgacaaag

SEQ ID NO: 62118 - DNA, 25 bp, Homo sapien
agagaacacacaccatacagcattc

SEQ ID NO: 62119 - DNA, 25 bp, Homo sapien
gcaaagcacaccacaagctcagtcc

SEQ ID NO: 62120 - DNA, 25 bp, Homo sapien
acctgagctcactggtgaactctgc

SEQ ID NO: 62121 - DNA, 25 bp, Homo sapien
atgggtagctaacagacattagaac

SEQ ID NO: 62122 - DNA, 25 bp, Homo sapien
cagaactgcagcaaacagcattctt

SEQ ID NO: 62123 - DNA, 25 bp, Homo sapien
atgtgggttatctaagaacaaaaac

SEQ ID NO: 62124 - DNA, 25 bp, Homo sapien
acctgagctcactggtgaactctgc

SEQ ID NO: 62125 - DNA, 25 bp, Homo sapien
tagggggagtacaagtatcatttca

SEQ ID NO: 62126 - DNA, 25 bp, Homo sapien
atgggtagctaacagacattagaac

SEQ ID NO: 62127 - DNA, 25 bp, Homo sapien
cagaactgcagcaaacagcattctt

SEQ ID NO: 62128 - DNA, 25 bp, Homo sapien
acagcattcacagcagttgacaaag

SEQ ID NO: 62129 - DNA, 25 bp, Homo sapien
ccaccaagtctctgcacgcgctctc

SEQ ID NO: 62130 - DNA, 25 bp, Homo sapien
tcaccaaagccacaggattgagaga

SEQ ID NO: 62131 - DNA, 25 bp, Homo sapien
agagaacacacaccatacagcattc

SEQ ID NO: 62132 - DNA, 25 bp, Homo sapien
caggattgagagacacatctcgcca

SEQ ID NO: 62133 - DNA, 25 bp, Homo sapien
gcaaagcacaccacaagctcagtcc

SEQ ID NO: 62134 - DNA, 25 bp, Homo sapien
ccaccaagtctctgcacgcgctctc

SEQ ID NO: 62135 - DNA, 25 bp, Homo sapien
caggattgagagacacatctcgcca

SEQ ID NO: 62136 - DNA, 25 bp, Homo sapien
tcaccaaagccacaggattgagaga

SEQ ID NO: 62137 - DNA, 25 bp, Homo sapien
atgtgggttatctaagaacaaaaac

SEQ ID NO: 62138 - DNA, 25 bp, Homo sapien
tagggggagtacaagtatcatttca

SEQ ID NO: 62139 - DNA, 25 bp, Homo sapien
acagcattcacagcagttgacaaag

SEQ ID NO: 62140 - DNA, 25 bp, Homo sapien
agagaacacacaccatacagcattc

SEQ ID NO: 62141 - DNA, 25 bp, Homo sapien
gcaaagcacaccacaagctcagtcc

SEQ ID NO: 62142 - DNA, 25 bp, Homo sapien
acctgagctcactggtgaactctgc

SEQ ID NO: 62143 - DNA, 25 bp, Homo sapien
atgggtagctaacagacattagaac

SEQ ID NO: 62144 - DNA, 25 bp, Homo sapien
cagaactgcagcaaacagcattctt

SEQ ID NO: 62145 - DNA, 25 bp, Homo sapien
ccaccaagtctctgcacgcgctctc

SEQ ID NO: 62146 - DNA, 25 bp, Homo sapien
caggattgagagacacatctcgcca

SEQ ID NO: 62147 - DNA, 25 bp, Homo sapien
tcaccaaagccacaggattgagaga

SEQ ID NO: 62148 - DNA, 25 bp, Homo sapien
atgtgggttatctaagaacaaaaac

SEQ ID NO: 62149 - DNA, 25 bp, Homo sapien
tagggggagtacaagtatcatttca

SEQ ID NO: 62150 - DNA, 25 bp, Homo sapien
acagcattcacagcagttgacaaag

SEQ ID NO: 62151 - DNA, 25 bp, Homo sapien
agagaacacacaccatacagcattc

SEQ ID NO: 62152 - DNA, 25 bp, Homo sapien
gcaaagcacaccacaagctcagtcc

SEQ ID NO: 62153 - DNA, 25 bp, Homo sapien
acctgagctcactggtgaactctgc

SEQ ID NO: 62154 - DNA, 25 bp, Homo sapien
atgggtagctaacagacattagaac

SEQ ID NO: 62155 - DNA, 25 bp, Homo sapien
cagaactgcagcaaacagcattctt

SEQ ID NO: 62156 - DNA, 25 bp, Homo sapien
caggattgagagacacatctcgcca

SEQ ID NO: 62157 - DNA, 25 bp, Homo sapien
gcaaagcacaccacaagctcagtcc

SEQ ID NO: 62158 - DNA, 25 bp, Homo sapien
acctgagctcactggtgaactctgc

SEQ ID NO: 62159 - DNA, 25 bp, Homo sapien
tagggggagtacaagtatcatttca

SEQ ID NO: 62160 - DNA, 25 bp, Homo sapien
tcaccaaagccacaggattgagaga

SEQ ID NO: 62161 - DNA, 25 bp, Homo sapien
atgggtagctaacagacattagaac

SEQ ID NO: 62162 - DNA, 25 bp, Homo sapien
ccaccaagtctctgcacgcgctctc

SEQ ID NO: 62163 - DNA, 25 bp, Homo sapien
agagaacacacaccatacagcattc

SEQ ID NO: 62164 - DNA, 25 bp, Homo sapien
acagcattcacagcagttgacaaag

SEQ ID NO: 62165 - DNA, 25 bp, Homo sapien
cagaactgcagcaaacagcattctt

SEQ ID NO: 62166 - DNA, 25 bp, Homo sapien
atgtgggttatctaagaacaaaaac

SEQ ID NO: 62167 - DNA, 25 bp, Homo sapien
gcaaagcacaccacaagctcagtcc

SEQ ID NO: 62168 - DNA, 25 bp, Homo sapien
caggattgagagacacatctcgcca

SEQ ID NO: 62169 - DNA, 25 bp, Homo sapien
acctgagctcactggtgaactctgc

SEQ ID NO: 62170 - DNA, 25 bp, Homo sapien
tcaccaaagccacaggattgagaga

SEQ ID NO: 62171 - DNA, 25 bp, Homo sapien
tagggggagtacaagtatcatttca

SEQ ID NO: 62172 - DNA, 25 bp, Homo sapien
ccaccaagtctctgcacgcgctctc

SEQ ID NO: 62173 - DNA, 25 bp, Homo sapien
agagaacacacaccatacagcattc

SEQ ID NO: 62174 - DNA, 25 bp, Homo sapien
acagcattcacagcagttgacaaag

SEQ ID NO: 62175 - DNA, 25 bp, Homo sapien
cagaactgcagcaaacagcattctt

SEQ ID NO: 62176 - DNA, 25 bp, Homo sapien
atgggtagctaacagacattagaac

SEQ ID NO: 62177 - DNA, 25 bp, Homo sapien
atgtgggttatctaagaacaaaaac

SEQ ID NO: 62178 - DNA, 25 bp, Homo sapien
gcaaagcacaccacaagctcagtcc

SEQ ID NO: 62179 - DNA, 25 bp, Homo sapien
caggattgagagacacatctcgcca

SEQ ID NO: 62180 - DNA, 25 bp, Homo sapien
acctgagctcactggtgaactctgc

SEQ ID NO: 62181 - DNA, 25 bp, Homo sapien
tcaccaaagccacaggattgagaga

SEQ ID NO: 62182 - DNA, 25 bp, Homo sapien
tagggggagtacaagtatcatttca

SEQ ID NO: 62183 - DNA, 25 bp, Homo sapien
ccaccaagtctctgcacgcgctctc

SEQ ID NO: 62184 - DNA, 25 bp, Homo sapien
agagaacacacaccatacagcattc

SEQ ID NO: 62185 - DNA, 25 bp, Homo sapien
acagcattcacagcagttgacaaag

SEQ ID NO: 62186 - DNA, 25 bp, Homo sapien
atgggtagctaacagacattagaac

SEQ ID NO: 62187 - DNA, 25 bp, Homo sapien
cagaactgcagcaaacagcattctt

SEQ ID NO: 62188 - DNA, 25 bp, Homo sapien
atgtgggttatctaagaacaaaaac

SEQ ID NO: 62189 - DNA, 25 bp, Homo sapien
atgggtagctaacagacattagaac

SEQ ID NO: 62190 - DNA, 25 bp, Homo sapien
gcaaagcacaccacaagctcagtcc

SEQ ID NO: 62191 - DNA, 25 bp, Homo sapien
caggattgagagacacatctcgcca

SEQ ID NO: 62192 - DNA, 25 bp, Homo sapien
acctgagctcactggtgaactctgc

SEQ ID NO: 62193 - DNA, 25 bp, Homo sapien
tcaccaaagccacaggattgagaga

SEQ ID NO: 62194 - DNA, 25 bp, Homo sapien
tagggggagtacaagtatcatttca

SEQ ID NO: 62195 - DNA, 25 bp, Homo sapien
ccaccaagtctctgcacgcgctctc

SEQ ID NO: 62196 - DNA, 25 bp, Homo sapien
agagaacacacaccatacagcattc

SEQ ID NO: 62197 - DNA, 25 bp, Homo sapien
acagcattcacagcagttgacaaag

SEQ ID NO: 62198 - DNA, 25 bp, Homo sapien
cagaactgcagcaaacagcattctt

SEQ ID NO: 62199 - DNA, 25 bp, Homo sapien
atgtgggttatctaagaacaaaaac

SEQ ID NO: 62200 - DNA, 25 bp, Homo sapien
caggattgagagacacatctcgcca

SEQ ID NO: 62201 - DNA, 25 bp, Homo sapien
gcaaagcacaccacaagctcagtcc

SEQ ID NO: 62202 - DNA, 25 bp, Homo sapien
atgggtagctaacagacattagaac

SEQ ID NO: 62203 - DNA, 25 bp, Homo sapien
acctgagctcactggtgaactctgc

SEQ ID NO: 62204 - DNA, 25 bp, Homo sapien
tcaccaaagccacaggattgagaga

SEQ ID NO: 62205 - DNA, 25 bp, Homo sapien
tagggggagtacaagtatcatttca

SEQ ID NO: 62206 - DNA, 25 bp, Homo sapien
ccaccaagtctctgcacgcgctctc

SEQ ID NO: 62207 - DNA, 25 bp, Homo sapien
agagaacacacaccatacagcattc

SEQ ID NO: 62208 - DNA, 25 bp, Homo sapien
acagcattcacagcagttgacaaag

SEQ ID NO: 62209 - DNA, 25 bp, Homo sapien
cagaactgcagcaaacagcattctt

SEQ ID NO: 62210 - DNA, 25 bp, Homo sapien
atgtgggttatctaagaacaaaaac

SEQ ID NO: 62211 - DNA, 25 bp, Homo sapien
atgtgggttatctaagaacaaaaac

SEQ ID NO: 62212 - DNA, 25 bp, Homo sapien
gcaaagcacaccacaagctcagtcc

SEQ ID NO: 62213 - DNA, 25 bp, Homo sapien
caggattgagagacacatctcgcca

SEQ ID NO: 62214 - DNA, 25 bp, Homo sapien
acctgagctcactggtgaactctgc

SEQ ID NO: 62215 - DNA, 25 bp, Homo sapien
tcaccaaagccacaggattgagaga

SEQ ID NO: 62216 - DNA, 25 bp, Homo sapien
tagggggagtacaagtatcatttca

SEQ ID NO: 62217 - DNA, 25 bp, Homo sapien
ccaccaagtctctgcacgcgctctc

SEQ ID NO: 62218 - DNA, 25 bp, Homo sapien
agagaacacacaccatacagcattc

SEQ ID NO: 62219 - DNA, 25 bp, Homo sapien
acagcattcacagcagttgacaaag

SEQ ID NO: 62220 - DNA, 25 bp, Homo sapien
cagaactgcagcaaacagcattctt

SEQ ID NO: 62221 - DNA, 25 bp, Homo sapien
atgggtagctaacagacattagaac

SEQ ID NO: 62222 - DNA, 25 bp, Homo sapien
gcaaagcacaccacaagctcagtcc

SEQ ID NO: 62223 - DNA, 25 bp, Homo sapien
acctgagctcactggtgaactctgc

SEQ ID NO: 62224 - DNA, 25 bp, Homo sapien
caggattgagagacacatctcgcca

SEQ ID NO: 62225 - DNA, 25 bp, Homo sapien
atgggtagctaacagacattagaac

SEQ ID NO: 62226 - DNA, 25 bp, Homo sapien
tcaccaaagccacaggattgagaga

SEQ ID NO: 62227 - DNA, 25 bp, Homo sapien
tagggggagtacaagtatcatttca

SEQ ID NO: 62228 - DNA, 25 bp, Homo sapien
ccaccaagtctctgcacgcgctctc

SEQ ID NO: 62229 - DNA, 25 bp, Homo sapien
agagaacacacaccatacagcattc

SEQ ID NO: 62230 - DNA, 25 bp, Homo sapien
acagcattcacagcagttgacaaag

SEQ ID NO: 62231 - DNA, 25 bp, Homo sapien
cagaactgcagcaaacagcattctt

SEQ ID NO: 62232 - DNA, 25 bp, Homo sapien
atgtgggttatctaagaacaaaaac

SEQ ID NO: 62233 - DNA, 25 bp, Homo sapien
caggattgagagacacatctcgcca

SEQ ID NO: 62234 - DNA, 25 bp, Homo sapien
gcaaagcacaccacaagctcagtcc

SEQ ID NO: 62235 - DNA, 25 bp, Homo sapien
atgggtagctaacagacattagaac

SEQ ID NO: 62236 - DNA, 25 bp, Homo sapien
acctgagctcactggtgaactctgc

SEQ ID NO: 62237 - DNA, 25 bp, Homo sapien
tcaccaaagccacaggattgagaga

SEQ ID NO: 62238 - DNA, 25 bp, Homo sapien
tagggggagtacaagtatcatttca

SEQ ID NO: 62239 - DNA, 25 bp, Homo sapien
ccaccaagtctctgcacgcgctctc

SEQ ID NO: 62240 - DNA, 25 bp, Homo sapien
agagaacacacaccatacagcattc

SEQ ID NO: 62241 - DNA, 25 bp, Homo sapien
acagcattcacagcagttgacaaag

SEQ ID NO: 62242 - DNA, 25 bp, Homo sapien
cagaactgcagcaaacagcattctt

SEQ ID NO: 62243 - DNA, 25 bp, Homo sapien
atgtgggttatctaagaacaaaaac

SEQ ID NO: 62244 - DNA, 25 bp, Homo sapien
atgggtagctaacagacattagaac

SEQ ID NO: 62245 - DNA, 25 bp, Homo sapien
caggattgagagacacatctcgcca

SEQ ID NO: 62246 - DNA, 25 bp, Homo sapien
gcaaagcacaccacaagctcagtcc

SEQ ID NO: 62247 - DNA, 25 bp, Homo sapien
acctgagctcactggtgaactctgc

SEQ ID NO: 62248 - DNA, 25 bp, Homo sapien
tcaccaaagccacaggattgagaga

SEQ ID NO: 62249 - DNA, 25 bp, Homo sapien
tagggggagtacaagtatcatttca

SEQ ID NO: 62250 - DNA, 25 bp, Homo sapien
ccaccaagtctctgcacgcgctctc

SEQ ID NO: 62251 - DNA, 25 bp, Homo sapien
agagaacacacaccatacagcattc

SEQ ID NO: 62252 - DNA, 25 bp, Homo sapien
acagcattcacagcagttgacaaag

SEQ ID NO: 62253 - DNA, 25 bp, Homo sapien
cagaactgcagcaaacagcattctt

SEQ ID NO: 62254 - DNA, 25 bp, Homo sapien
atgtgggttatctaagaacaaaaac

SEQ ID NO: 62255 - DNA, 25 bp, Homo sapien
tcaccaaagccacaggattgagaga

SEQ ID NO: 62256 - DNA, 25 bp, Homo sapien
cagaactgcagcaaacagcattctt

SEQ ID NO: 62257 - DNA, 25 bp, Homo sapien
ccaccaagtctctgcacgcgctctc

SEQ ID NO: 62258 - DNA, 25 bp, Homo sapien
atgtgggttatctaagaacaaaaac

SEQ ID NO: 62259 - DNA, 25 bp, Homo sapien
acagcattcacagcagttgacaaag

SEQ ID NO: 62260 - DNA, 25 bp, Homo sapien
gcaaagcacaccacaagctcagtcc

SEQ ID NO: 62261 - DNA, 25 bp, Homo sapien
acctgagctcactggtgaactctgc

SEQ ID NO: 62262 - DNA, 25 bp, Homo sapien
tagggggagtacaagtatcatttca

SEQ ID NO: 62263 - DNA, 25 bp, Homo sapien
caggattgagagacacatctcgcca

SEQ ID NO: 62264 - DNA, 25 bp, Homo sapien
atgggtagctaacagacattagaac

SEQ ID NO: 62265 - DNA, 25 bp, Homo sapien
agagaacacacaccatacagcattc

SEQ ID NO: 62266 - DNA, 25 bp, Homo sapien
caggattgagagacacatctcgcca

SEQ ID NO: 62267 - DNA, 25 bp, Homo sapien
gcaaagcacaccacaagctcagtcc

SEQ ID NO: 62268 - DNA, 25 bp, Homo sapien
acctgagctcactggtgaactctgc

SEQ ID NO: 62269 - DNA, 25 bp, Homo sapien
tcaccaaagccacaggattgagaga

SEQ ID NO: 62270 - DNA, 25 bp, Homo sapien
tagggggagtacaagtatcatttca

SEQ ID NO: 62271 - DNA, 25 bp, Homo sapien
ccaccaagtctctgcacgcgctctc

SEQ ID NO: 62272 - DNA, 25 bp, Homo sapien
agagaacacacaccatacagcattc

SEQ ID NO: 62273 - DNA, 25 bp, Homo sapien
atgggtagctaacagacattagaac

SEQ ID NO: 62274 - DNA, 25 bp, Homo sapien
acagcattcacagcagttgacaaag

SEQ ID NO: 62275 - DNA, 25 bp, Homo sapien
cagaactgcagcaaacagcattctt

SEQ ID NO: 62276 - DNA, 25 bp, Homo sapien
atgtgggttatctaagaacaaaaac

SEQ ID NO: 62277 - DNA, 25 bp, Homo sapien
ccaccaagtctctgcacgcgctctc

SEQ ID NO: 62278 - DNA, 25 bp, Homo sapien
caggattgagagacacatctcgcca

SEQ ID NO: 62279 - DNA, 25 bp, Homo sapien
tcaccaaagccacaggattgagaga

SEQ ID NO: 62280 - DNA, 25 bp, Homo sapien
atgtgggttatctaagaacaaaaac

SEQ ID NO: 62281 - DNA, 25 bp, Homo sapien
tagggggagtacaagtatcatttca

SEQ ID NO: 62282 - DNA, 25 bp, Homo sapien
acagcattcacagcagttgacaaag

SEQ ID NO: 62283 - DNA, 25 bp, Homo sapien
agagaacacacaccatacagcattc

SEQ ID NO: 62284 - DNA, 25 bp, Homo sapien
gcaaagcacaccacaagctcagtcc

SEQ ID NO: 62285 - DNA, 25 bp, Homo sapien
acctgagctcactggtgaactctgc

SEQ ID NO: 62286 - DNA, 25 bp, Homo sapien
atgggtagctaacagacattagaac

SEQ ID NO: 62287 - DNA, 25 bp, Homo sapien
cagaactgcagcaaacagcattctt

SEQ ID NO: 62288 - DNA, 25 bp, Homo sapien
tgaaatgatacttgtactcccccta

SEQ ID NO: 62289 - DNA, 25 bp, Homo sapien
ggactgagcttgtggtgtgctttgc

SEQ ID NO: 62290 - DNA, 25 bp, Homo sapien
gaatgctgtatggtgtgtgttctct

SEQ ID NO: 62291 - DNA, 25 bp, Homo sapien
gcagagttcaccagtgagctcaggt

SEQ ID NO: 62292 - DNA, 25 bp, Homo sapien
tggcgagatgtgtctctcaatcctg

SEQ ID NO: 62293 - DNA, 25 bp, Homo sapien
tctctcaatcctgtggctttggtga

SEQ ID NO: 62294 - DNA, 25 bp, Homo sapien
gtttttgttcttagataacccacat

SEQ ID NO: 62295 - DNA, 25 bp, Homo sapien
ctttgtcaactgctgtgaatgctgt

SEQ ID NO: 62296 - DNA, 25 bp, Homo sapien
aagaatgctgtttgctgcagttctg

SEQ ID NO: 62297 - DNA, 25 bp, Homo sapien
gagagcgcgtgcagagacttggtgg

SEQ ID NO: 62298 - DNA, 25 bp, Homo sapien
gttctaatgtctgttagctacccat

SEQ ID NO: 62299 - DNA, 25 bp, Homo sapien
caggattgagagacacatctcgcca

SEQ ID NO: 62300 - DNA, 25 bp, Homo sapien
gcaaagcacaccacaagctcagtcc

SEQ ID NO: 62301 - DNA, 25 bp, Homo sapien
acctgagctcactggtgaactctgc

SEQ ID NO: 62302 - DNA, 25 bp, Homo sapien
tcaccaaagccacaggattgagaga

SEQ ID NO: 62303 - DNA, 25 bp, Homo sapien
tagggggagtacaagtatcatttca

SEQ ID NO: 62304 - DNA, 25 bp, Homo sapien
ccaccaagtctctgcacgcgctctc

SEQ ID NO: 62305 - DNA, 25 bp, Homo sapien
agagaacacacaccatacagcattc

SEQ ID NO: 62306 - DNA, 25 bp, Homo sapien
acagcattcacagcagttgacaaag

SEQ ID NO: 62307 - DNA, 25 bp, Homo sapien
cagaactgcagcaaacagcattctt

SEQ ID NO: 62308 - DNA, 25 bp, Homo sapien
atgggtagctaacagacattagaac

SEQ ID NO: 62309 - DNA, 25 bp, Homo sapien
atgtgggttatctaagaacaaaaac

SEQ ID NO: 62310 - DNA, 25 bp, Homo sapien
atgggtagctaacagacattagaac

SEQ ID NO: 62311 - DNA, 25 bp, Homo sapien
cagaactgcagcaaacagcattctt

SEQ ID NO: 62312 - DNA, 25 bp, Homo sapien
ccaccaagtctctgcacgcgctctc

SEQ ID NO: 62313 - DNA, 25 bp, Homo sapien
gcaaagcacaccacaagctcagtcc

SEQ ID NO: 62314 - DNA, 25 bp, Homo sapien
agagaacacacaccatacagcattc

SEQ ID NO: 62315 - DNA, 25 bp, Homo sapien
atgtgggttatctaagaacaaaaac

SEQ ID NO: 62316 - DNA, 25 bp, Homo sapien
tagggggagtacaagtatcatttca

SEQ ID NO: 62317 - DNA, 25 bp, Homo sapien
caggattgagagacacatctcgcca

SEQ ID NO: 62318 - DNA, 25 bp, Homo sapien
acctgagctcactggtgaactctgc

SEQ ID NO: 62319 - DNA, 25 bp, Homo sapien
acagcattcacagcagttgacaaag

SEQ ID NO: 62320 - DNA, 25 bp, Homo sapien
tcaccaaagccacaggattgagaga

SEQ ID NO: 62321 - DNA, 25 bp, Homo sapien
ccaccaagtctctgcacgcgctctc

SEQ ID NO: 62322 - DNA, 25 bp, Homo sapien
caggattgagagacacatctcgcca

SEQ ID NO: 62323 - DNA, 25 bp, Homo sapien
tcaccaaagccacaggattgagaga

SEQ ID NO: 62324 - DNA, 25 bp, Homo sapien
atgtgggttatctaagaacaaaaac

SEQ ID NO: 62325 - DNA, 25 bp, Homo sapien
tagggggagtacaagtatcatttca

SEQ ID NO: 62326 - DNA, 25 bp, Homo sapien
acagcattcacagcagttgacaaag

SEQ ID NO: 62327 - DNA, 25 bp, Homo sapien
agagaacacacaccatacagcattc

SEQ ID NO: 62328 - DNA, 25 bp, Homo sapien
gcaaagcacaccacaagctcagtcc

SEQ ID NO: 62329 - DNA, 25 bp, Homo sapien
acctgagctcactggtgaactctgc

SEQ ID NO: 62330 - DNA, 25 bp, Homo sapien
atgggtagctaacagacattagaac

SEQ ID NO: 62331 - DNA, 25 bp, Homo sapien
cagaactgcagcaaacagcattctt

SEQ ID NO: 62332 - DNA, 25 bp, Homo sapien
tagggggagtacaagtatcatttca

SEQ ID NO: 62333 - DNA, 25 bp, Homo sapien
cagaactgcagcaaacagcattctt

SEQ ID NO: 62334 - DNA, 25 bp, Homo sapien
tcaccaaagccacaggattgagaga

SEQ ID NO: 62335 - DNA, 25 bp, Homo sapien
gcaaagcacaccacaagctcagtcc

SEQ ID NO: 62336 - DNA, 25 bp, Homo sapien
ccaccaagtctctgcacgcgctctc

SEQ ID NO: 62337 - DNA, 25 bp, Homo sapien
acagcattcacagcagttgacaaag

SEQ ID NO: 62338 - DNA, 25 bp, Homo sapien
agagaacacacaccatacagcattc

SEQ ID NO: 62339 - DNA, 25 bp, Homo sapien
caggattgagagacacatctcgcca

SEQ ID NO: 62340 - DNA, 25 bp, Homo sapien
atgggtagctaacagacattagaac

SEQ ID NO: 62341 - DNA, 25 bp, Homo sapien
atgtgggttatctaagaacaaaaac

SEQ ID NO: 62342 - DNA, 25 bp, Homo sapien
acctgagctcactggtgaactctgc

SEQ ID NO: 62343 - DNA, 25 bp, Homo sapien
ccaccaagtctctgcacgcgctctc

SEQ ID NO: 62344 - DNA, 25 bp, Homo sapien
caggattgagagacacatctcgcca

SEQ ID NO: 62345 - DNA, 25 bp, Homo sapien
tcaccaaagccacaggattgagaga

SEQ ID NO: 62346 - DNA, 25 bp, Homo sapien
atgtgggttatctaagaacaaaaac

SEQ ID NO: 62347 - DNA, 25 bp, Homo sapien
tagggggagtacaagtatcatttca

SEQ ID NO: 62348 - DNA, 25 bp, Homo sapien
acagcattcacagcagttgacaaag

SEQ ID NO: 62349 - DNA, 25 bp, Homo sapien
agagaacacacaccatacagcattc

SEQ ID NO: 62350 - DNA, 25 bp, Homo sapien
gcaaagcacaccacaagctcagtcc

SEQ ID NO: 62351 - DNA, 25 bp, Homo sapien
acctgagctcactggtgaactctgc

SEQ ID NO: 62352 - DNA, 25 bp, Homo sapien
atgggtagctaacagacattagaac

SEQ ID NO: 62353 - DNA, 25 bp, Homo sapien
cagaactgcagcaaacagcattctt

SEQ ID NO: 62354 - DNA, 25 bp, Homo sapien
tagggggagtacaagtatcatttca

SEQ ID NO: 62355 - DNA, 25 bp, Homo sapien
acagcattcacagcagttgacaaag

SEQ ID NO: 62356 - DNA, 25 bp, Homo sapien
tcaccaaagccacaggattgagaga

SEQ ID NO: 62357 - DNA, 25 bp, Homo sapien
atgtgggttatctaagaacaaaaac

SEQ ID NO: 62358 - DNA, 25 bp, Homo sapien
ccaccaagtctctgcacgcgctctc

SEQ ID NO: 62359 - DNA, 25 bp, Homo sapien
acctgagctcactggtgaactctgc

SEQ ID NO: 62360 - DNA, 25 bp, Homo sapien
gcaaagcacaccacaagctcagtcc

SEQ ID NO: 62361 - DNA, 25 bp, Homo sapien
atgggtagctaacagacattagaac

SEQ ID NO: 62362 - DNA, 25 bp, Homo sapien
caggattgagagacacatctcgcca

SEQ ID NO: 62363 - DNA, 25 bp, Homo sapien
cagaactgcagcaaacagcattctt

SEQ ID NO: 62364 - DNA, 25 bp, Homo sapien
agagaacacacaccatacagcattc

SEQ ID NO: 62365 - DNA, 25 bp, Homo sapien
ccaccaagtctctgcacgcgctctc

SEQ ID NO: 62366 - DNA, 25 bp, Homo sapien
caggattgagagacacatctcgcca

SEQ ID NO: 62367 - DNA, 25 bp, Homo sapien
tcaccaaagccacaggattgagaga

SEQ ID NO: 62368 - DNA, 25 bp, Homo sapien
atgtgggttatctaagaacaaaaac

SEQ ID NO: 62369 - DNA, 25 bp, Homo sapien
tagggggagtacaagtatcatttca

SEQ ID NO: 62370 - DNA, 25 bp, Homo sapien
acagcattcacagcagttgacaaag

SEQ ID NO: 62371 - DNA, 25 bp, Homo sapien
agagaacacacaccatacagcattc

SEQ ID NO: 62372 - DNA, 25 bp, Homo sapien
gcaaagcacaccacaagctcagtcc

SEQ ID NO: 62373 - DNA, 25 bp, Homo sapien
acctgagctcactggtgaactctgc

SEQ ID NO: 62374 - DNA, 25 bp, Homo sapien
atgggtagctaacagacattagaac

SEQ ID NO: 62375 - DNA, 25 bp, Homo sapien
cagaactgcagcaaacagcattctt

SEQ ID NO: 62376 - DNA, 25 bp, Homo sapien
ccaccaagtctctgcacgcgctctc

SEQ ID NO: 62377 - DNA, 25 bp, Homo sapien
caggattgagagacacatctcgcca

SEQ ID NO: 62378 - DNA, 25 bp, Homo sapien
tcaccaaagccacaggattgagaga

SEQ ID NO: 62379 - DNA, 25 bp, Homo sapien
atgtgggttatctaagaacaaaaac

SEQ ID NO: 62380 - DNA, 25 bp, Homo sapien
tagggggagtacaagtatcatttca

SEQ ID NO: 62381 - DNA, 25 bp, Homo sapien
acagcattcacagcagttgacaaag

SEQ ID NO: 62382 - DNA, 25 bp, Homo sapien
agagaacacacaccatacagcattc

SEQ ID NO: 62383 - DNA, 25 bp, Homo sapien
gcaaagcacaccacaagctcagtcc

SEQ ID NO: 62384 - DNA, 25 bp, Homo sapien
acctgagctcactggtgaactctgc

SEQ ID NO: 62385 - DNA, 25 bp, Homo sapien
atgggtagctaacagacattagaac

SEQ ID NO: 62386 - DNA, 25 bp, Homo sapien
cagaactgcagcaaacagcattctt

SEQ ID NO: 62387 - DNA, 25 bp, Homo sapien
gcaaagcacaccacaagctcagtcc

SEQ ID NO: 62388 - DNA, 25 bp, Homo sapien
agagaacacacaccatacagcattc

SEQ ID NO: 62389 - DNA, 25 bp, Homo sapien
tagggggagtacaagtatcatttca

SEQ ID NO: 62390 - DNA, 25 bp, Homo sapien
tcaccaaagccacaggattgagaga

SEQ ID NO: 62391 - DNA, 25 bp, Homo sapien
atgggtagctaacagacattagaac

SEQ ID NO: 62392 - DNA, 25 bp, Homo sapien
acctgagctcactggtgaactctgc

SEQ ID NO: 62393 - DNA, 25 bp, Homo sapien
acagcattcacagcagttgacaaag

SEQ ID NO: 62394 - DNA, 25 bp, Homo sapien
ccaccaagtctctgcacgcgctctc

SEQ ID NO: 62395 - DNA, 25 bp, Homo sapien
caggattgagagacacatctcgcca

SEQ ID NO: 62396 - DNA, 25 bp, Homo sapien
atgtgggttatctaagaacaaaaac

SEQ ID NO: 62397 - DNA, 25 bp, Homo sapien
cagaactgcagcaaacagcattctt

SEQ ID NO: 62398 - DNA, 25 bp, Homo sapien
ccaccaagtctctgcacgcgctctc

SEQ ID NO: 62399 - DNA, 25 bp, Homo sapien
caggattgagagacacatctcgcca

SEQ ID NO: 62400 - DNA, 25 bp, Homo sapien
tcaccaaagccacaggattgagaga

SEQ ID NO: 62401 - DNA, 25 bp, Homo sapien
atgtgggttatctaagaacaaaaac

SEQ ID NO: 62402 - DNA, 25 bp, Homo sapien
tagggggagtacaagtatcatttca

SEQ ID NO: 62403 - DNA, 25 bp, Homo sapien
acagcattcacagcagttgacaaag

SEQ ID NO: 62404 - DNA, 25 bp, Homo sapien
agagaacacacaccatacagcattc

SEQ ID NO: 62405 - DNA, 25 bp, Homo sapien
gcaaagcacaccacaagctcagtcc

SEQ ID NO: 62406 - DNA, 25 bp, Homo sapien
acctgagctcactggtgaactctgc

SEQ ID NO: 62407 - DNA, 25 bp, Homo sapien
atgggtagctaacagacattagaac

SEQ ID NO: 62408 - DNA, 25 bp, Homo sapien
cagaactgcagcaaacagcattctt

SEQ ID NO: 62409 - DNA, 25 bp, Homo sapien
tcaccaaagccacaggattgagaga

SEQ ID NO: 62410 - DNA, 25 bp, Homo sapien
cagaactgcagcaaacagcattctt

SEQ ID NO: 62411 - DNA, 25 bp, Homo sapien
gcaaagcacaccacaagctcagtcc

SEQ ID NO: 62412 - DNA, 25 bp, Homo sapien
caggattgagagacacatctcgcca

SEQ ID NO: 62413 - DNA, 25 bp, Homo sapien
acagcattcacagcagttgacaaag

SEQ ID NO: 62414 - DNA, 25 bp, Homo sapien
atgtgggttatctaagaacaaaaac

SEQ ID NO: 62415 - DNA, 25 bp, Homo sapien
atgggtagctaacagacattagaac

SEQ ID NO: 62416 - DNA, 25 bp, Homo sapien
acctgagctcactggtgaactctgc

SEQ ID NO: 62417 - DNA, 25 bp, Homo sapien
agagaacacacaccatacagcattc

SEQ ID NO: 62418 - DNA, 25 bp, Homo sapien
ccaccaagtctctgcacgcgctctc

SEQ ID NO: 62419 - DNA, 25 bp, Homo sapien
tagggggagtacaagtatcatttca

SEQ ID NO: 62420 - DNA, 25 bp, Homo sapien
ccaccaagtctctgcacgcgctctc

SEQ ID NO: 62421 - DNA, 25 bp, Homo sapien
caggattgagagacacatctcgcca

SEQ ID NO: 62422 - DNA, 25 bp, Homo sapien
tcaccaaagccacaggattgagaga

SEQ ID NO: 62423 - DNA, 25 bp, Homo sapien
atgtgggttatctaagaacaaaaac

SEQ ID NO: 62424 - DNA, 25 bp, Homo sapien
tagggggagtacaagtatcatttca

SEQ ID NO: 62425 - DNA, 25 bp, Homo sapien
acagcattcacagcagttgacaaag

SEQ ID NO: 62426 - DNA, 25 bp, Homo sapien
agagaacacacaccatacagcattc

SEQ ID NO: 62427 - DNA, 25 bp, Homo sapien
gcaaagcacaccacaagctcagtcc

SEQ ID NO: 62428 - DNA, 25 bp, Homo sapien
acctgagctcactggtgaactctgc

SEQ ID NO: 62429 - DNA, 25 bp, Homo sapien
atgggtagctaacagacattagaac

SEQ ID NO: 62430 - DNA, 25 bp, Homo sapien
cagaactgcagcaaacagcattctt

SEQ ID NO: 62431 - DNA, 25 bp, Homo sapien
tcaccaaagccacaggattgagaga

SEQ ID NO: 62432 - DNA, 25 bp, Homo sapien
atgggtagctaacagacattagaac

SEQ ID NO: 62433 - DNA, 25 bp, Homo sapien
acctgagctcactggtgaactctgc

SEQ ID NO: 62434 - DNA, 25 bp, Homo sapien
cagaactgcagcaaacagcattctt

SEQ ID NO: 62435 - DNA, 25 bp, Homo sapien
atgtgggttatctaagaacaaaaac

SEQ ID NO: 62436 - DNA, 25 bp, Homo sapien
ccaccaagtctctgcacgcgctctc

SEQ ID NO: 62437 - DNA, 25 bp, Homo sapien
caggattgagagacacatctcgcca

SEQ ID NO: 62438 - DNA, 25 bp, Homo sapien
acagcattcacagcagttgacaaag

SEQ ID NO: 62439 - DNA, 25 bp, Homo sapien
gcaaagcacaccacaagctcagtcc

SEQ ID NO: 62440 - DNA, 25 bp, Homo sapien
agagaacacacaccatacagcattc

SEQ ID NO: 62441 - DNA, 25 bp, Homo sapien
tagggggagtacaagtatcatttca

SEQ ID NO: 62442 - DNA, 25 bp, Homo sapien
ccaccaagtctctgcacgcgctctc

SEQ ID NO: 62443 - DNA, 25 bp, Homo sapien
caggattgagagacacatctcgcca

SEQ ID NO: 62444 - DNA, 25 bp, Homo sapien
tcaccaaagccacaggattgagaga

SEQ ID NO: 62445 - DNA, 25 bp, Homo sapien
atgtgggttatctaagaacaaaaac

SEQ ID NO: 62446 - DNA, 25 bp, Homo sapien
tagggggagtacaagtatcatttca

SEQ ID NO: 62447 - DNA, 25 bp, Homo sapien
acagcattcacagcagttgacaaag

SEQ ID NO: 62448 - DNA, 25 bp, Homo sapien
agagaacacacaccatacagcattc

SEQ ID NO: 62449 - DNA, 25 bp, Homo sapien
gcaaagcacaccacaagctcagtcc

SEQ ID NO: 62450 - DNA, 25 bp, Homo sapien
acctgagctcactggtgaactctgc

SEQ ID NO: 62451 - DNA, 25 bp, Homo sapien
atgggtagctaacagacattagaac

SEQ ID NO: 62452 - DNA, 25 bp, Homo sapien
cagaactgcagcaaacagcattctt

SEQ ID NO: 62453 - DNA, 25 bp, Homo sapien
atgggtagctaacagacattagaac

SEQ ID NO: 62454 - DNA, 25 bp, Homo sapien
atgtgggttatctaagaacaaaaac

SEQ ID NO: 62455 - DNA, 25 bp, Homo sapien
gcaaagcacaccacaagctcagtcc

SEQ ID NO: 62456 - DNA, 25 bp, Homo sapien
agagaacacacaccatacagcattc

SEQ ID NO: 62457 - DNA, 25 bp, Homo sapien
ccaccaagtctctgcacgcgctctc

SEQ ID NO: 62458 - DNA, 25 bp, Homo sapien
caggattgagagacacatctcgcca

SEQ ID NO: 62459 - DNA, 25 bp, Homo sapien
cagaactgcagcaaacagcattctt

SEQ ID NO: 62460 - DNA, 25 bp, Homo sapien
tcaccaaagccacaggattgagaga

SEQ ID NO: 62461 - DNA, 25 bp, Homo sapien
acagcattcacagcagttgacaaag

SEQ ID NO: 62462 - DNA, 25 bp, Homo sapien
tagggggagtacaagtatcatttca

SEQ ID NO: 62463 - DNA, 25 bp, Homo sapien
acctgagctcactggtgaactctgc

SEQ ID NO: 62464 - DNA, 25 bp, Homo sapien
ccaccaagtctctgcacgcgctctc

SEQ ID NO: 62465 - DNA, 25 bp, Homo sapien
caggattgagagacacatctcgcca

SEQ ID NO: 62466 - DNA, 25 bp, Homo sapien
tcaccaaagccacaggattgagaga

SEQ ID NO: 62467 - DNA, 25 bp, Homo sapien
atgtgggttatctaagaacaaaaac

SEQ ID NO: 62468 - DNA, 25 bp, Homo sapien
tagggggagtacaagtatcatttca

SEQ ID NO: 62469 - DNA, 25 bp, Homo sapien
acagcattcacagcagttgacaaag

SEQ ID NO: 62470 - DNA, 25 bp, Homo sapien
agagaacacacaccatacagcattc

SEQ ID NO: 62471 - DNA, 25 bp, Homo sapien
gcaaagcacaccacaagctcagtcc

SEQ ID NO: 62472 - DNA, 25 bp, Homo sapien
acctgagctcactggtgaactctgc

SEQ ID NO: 62473 - DNA, 25 bp, Homo sapien
atgggtagctaacagacattagaac

SEQ ID NO: 62474 - DNA, 25 bp, Homo sapien
cagaactgcagcaaacagcattctt

SEQ ID NO: 62475 - DNA, 25 bp, Homo sapien
cagaactgcagcaaacagcattctt

SEQ ID NO: 62476 - DNA, 25 bp, Homo sapien
ccaccaagtctctgcacgcgctctc

SEQ ID NO: 62477 - DNA, 25 bp, Homo sapien
acagcattcacagcagttgacaaag

SEQ ID NO: 62478 - DNA, 25 bp, Homo sapien
gcaaagcacaccacaagctcagtcc

SEQ ID NO: 62479 - DNA, 25 bp, Homo sapien
tcaccaaagccacaggattgagaga

SEQ ID NO: 62480 - DNA, 25 bp, Homo sapien
tagggggagtacaagtatcatttca

SEQ ID NO: 62481 - DNA, 25 bp, Homo sapien
caggattgagagacacatctcgcca

SEQ ID NO: 62482 - DNA, 25 bp, Homo sapien
acctgagctcactggtgaactctgc

SEQ ID NO: 62483 - DNA, 25 bp, Homo sapien
agagaacacacaccatacagcattc

SEQ ID NO: 62484 - DNA, 25 bp, Homo sapien
atgggtagctaacagacattagaac

SEQ ID NO: 62485 - DNA, 25 bp, Homo sapien
atgtgggttatctaagaacaaaaac

SEQ ID NO: 62486 - DNA, 25 bp, Homo sapien
tagggggagtacaagtatcatttca

SEQ ID NO: 62487 - DNA, 25 bp, Homo sapien
agagaacacacaccatacagcattc

SEQ ID NO: 62488 - DNA, 25 bp, Homo sapien
tcaccaaagccacaggattgagaga

SEQ ID NO: 62489 - DNA, 25 bp, Homo sapien
atgggtagctaacagacattagaac

SEQ ID NO: 62490 - DNA, 25 bp, Homo sapien
acctgagctcactggtgaactctgc

SEQ ID NO: 62491 - DNA, 25 bp, Homo sapien
caggattgagagacacatctcgcca

SEQ ID NO: 62492 - DNA, 25 bp, Homo sapien
gcaaagcacaccacaagctcagtcc

SEQ ID NO: 62493 - DNA, 25 bp, Homo sapien
atgtgggttatctaagaacaaaaac

SEQ ID NO: 62494 - DNA, 25 bp, Homo sapien
cagaactgcagcaaacagcattctt

SEQ ID NO: 62495 - DNA, 25 bp, Homo sapien
ccaccaagtctctgcacgcgctctc

SEQ ID NO: 62496 - DNA, 25 bp, Homo sapien
acagcattcacagcagttgacaaag

SEQ ID NO: 62497 - DNA, 25 bp, Homo sapien
ccaccaagtctctgcacgcgctctc

SEQ ID NO: 62498 - DNA, 25 bp, Homo sapien
caggattgagagacacatctcgcca

SEQ ID NO: 62499 - DNA, 25 bp, Homo sapien
tcaccaaagccacaggattgagaga

SEQ ID NO: 62500 - DNA, 25 bp, Homo sapien
atgtgggttatctaagaacaaaaac

SEQ ID NO: 62501 - DNA, 25 bp, Homo sapien
tagggggagtacaagtatcatttca

SEQ ID NO: 62502 - DNA, 25 bp, Homo sapien
acagcattcacagcagttgacaaag

SEQ ID NO: 62503 - DNA, 25 bp, Homo sapien
agagaacacacaccatacagcattc

SEQ ID NO: 62504 - DNA, 25 bp, Homo sapien
gcaaagcacaccacaagctcagtcc

SEQ ID NO: 62505 - DNA, 25 bp, Homo sapien
acctgagctcactggtgaactctgc

SEQ ID NO: 62506 - DNA, 25 bp, Homo sapien
atgggtagctaacagacattagaac

SEQ ID NO: 62507 - DNA, 25 bp, Homo sapien
cagaactgcagcaaacagcattctt

SEQ ID NO: 62508 - DNA, 25 bp, Homo sapien
caggattgagagacacatctcgcca

SEQ ID NO: 62509 - DNA, 25 bp, Homo sapien
tagggggagtacaagtatcatttca

SEQ ID NO: 62510 - DNA, 25 bp, Homo sapien
atgggtagctaacagacattagaac

SEQ ID NO: 62511 - DNA, 25 bp, Homo sapien
acctgagctcactggtgaactctgc

SEQ ID NO: 62512 - DNA, 25 bp, Homo sapien
acagcattcacagcagttgacaaag

SEQ ID NO: 62513 - DNA, 25 bp, Homo sapien
cagaactgcagcaaacagcattctt

SEQ ID NO: 62514 - DNA, 25 bp, Homo sapien
gcaaagcacaccacaagctcagtcc

SEQ ID NO: 62515 - DNA, 25 bp, Homo sapien
tcaccaaagccacaggattgagaga

SEQ ID NO: 62516 - DNA, 25 bp, Homo sapien
atgtgggttatctaagaacaaaaac

SEQ ID NO: 62517 - DNA, 25 bp, Homo sapien
agagaacacacaccatacagcattc

SEQ ID NO: 62518 - DNA, 25 bp, Homo sapien
ccaccaagtctctgcacgcgctctc

SEQ ID NO: 62519 - DNA, 25 bp, Homo sapien
ccaccaagtctctgcacgcgctctc

SEQ ID NO: 62520 - DNA, 25 bp, Homo sapien
caggattgagagacacatctcgcca

SEQ ID NO: 62521 - DNA, 25 bp, Homo sapien
tcaccaaagccacaggattgagaga

SEQ ID NO: 62522 - DNA, 25 bp, Homo sapien
atgtgggttatctaagaacaaaaac

SEQ ID NO: 62523 - DNA, 25 bp, Homo sapien
tagggggagtacaagtatcatttca

SEQ ID NO: 62524 - DNA, 25 bp, Homo sapien
acagcattcacagcagttgacaaag

SEQ ID NO: 62525 - DNA, 25 bp, Homo sapien
agagaacacacaccatacagcattc

SEQ ID NO: 62526 - DNA, 25 bp, Homo sapien
gcaaagcacaccacaagctcagtcc

SEQ ID NO: 62527 - DNA, 25 bp, Homo sapien
acctgagctcactggtgaactctgc

SEQ ID NO: 62528 - DNA, 25 bp, Homo sapien
atgggtagctaacagacattagaac

SEQ ID NO: 62529 - DNA, 25 bp, Homo sapien
cagaactgcagcaaacagcattctt

SEQ ID NO: 62530 - DNA, 25 bp, Homo sapien
agagaacacacaccatacagcattc

SEQ ID NO: 62531 - DNA, 25 bp, Homo sapien
caggattgagagacacatctcgcca

SEQ ID NO: 62532 - DNA, 25 bp, Homo sapien
gcaaagcacaccacaagctcagtcc

SEQ ID NO: 62533 - DNA, 25 bp, Homo sapien
atgtgggttatctaagaacaaaaac

SEQ ID NO: 62534 - DNA, 25 bp, Homo sapien
tcaccaaagccacaggattgagaga

SEQ ID NO: 62535 - DNA, 25 bp, Homo sapien
tagggggagtacaagtatcatttca

SEQ ID NO: 62536 - DNA, 25 bp, Homo sapien
atgggtagctaacagacattagaac

SEQ ID NO: 62537 - DNA, 25 bp, Homo sapien
acctgagctcactggtgaactctgc

SEQ ID NO: 62538 - DNA, 25 bp, Homo sapien
cagaactgcagcaaacagcattctt

SEQ ID NO: 62539 - DNA, 25 bp, Homo sapien
acagcattcacagcagttgacaaag

SEQ ID NO: 62540 - DNA, 25 bp, Homo sapien
ccaccaagtctctgcacgcgctctc

SEQ ID NO: 62541 - DNA, 25 bp, Homo sapien
ccaccaagtctctgcacgcgctctc

SEQ ID NO: 62542 - DNA, 25 bp, Homo sapien
caggattgagagacacatctcgcca

SEQ ID NO: 62543 - DNA, 25 bp, Homo sapien
tcaccaaagccacaggattgagaga

SEQ ID NO: 62544 - DNA, 25 bp, Homo sapien
atgtgggttatctaagaacaaaaac

SEQ ID NO: 62545 - DNA, 25 bp, Homo sapien
tagggggagtacaagtatcatttca

SEQ ID NO: 62546 - DNA, 25 bp, Homo sapien
acagcattcacagcagttgacaaag

SEQ ID NO: 62547 - DNA, 25 bp, Homo sapien
agagaacacacaccatacagcattc

SEQ ID NO: 62548 - DNA, 25 bp, Homo sapien
gcaaagcacaccacaagctcagtcc

SEQ ID NO: 62549 - DNA, 25 bp, Homo sapien
acctgagctcactggtgaactctgc

SEQ ID NO: 62550 - DNA, 25 bp, Homo sapien
atgggtagctaacagacattagaac

SEQ ID NO: 62551 - DNA, 25 bp, Homo sapien
cagaactgcagcaaacagcattctt

SEQ ID NO: 62552 - DNA, 25 bp, Homo sapien
cagaactgcagcaaacagcattctt

SEQ ID NO: 62553 - DNA, 25 bp, Homo sapien
acctgagctcactggtgaactctgc

SEQ ID NO: 62554 - DNA, 25 bp, Homo sapien
caggattgagagacacatctcgcca

SEQ ID NO: 62555 - DNA, 25 bp, Homo sapien
gcaaagcacaccacaagctcagtcc

SEQ ID NO: 62556 - DNA, 25 bp, Homo sapien
atgggtagctaacagacattagaac

SEQ ID NO: 62557 - DNA, 25 bp, Homo sapien
agagaacacacaccatacagcattc

SEQ ID NO: 62558 - DNA, 25 bp, Homo sapien
acagcattcacagcagttgacaaag

SEQ ID NO: 62559 - DNA, 25 bp, Homo sapien
atgtgggttatctaagaacaaaaac

SEQ ID NO: 62560 - DNA, 25 bp, Homo sapien
tcaccaaagccacaggattgagaga

SEQ ID NO: 62561 - DNA, 25 bp, Homo sapien
tagggggagtacaagtatcatttca

SEQ ID NO: 62562 - DNA, 25 bp, Homo sapien
ccaccaagtctctgcacgcgctctc

SEQ ID NO: 62563 - DNA, 25 bp, Homo sapien
ccaccaagtctctgcacgcgctctc

SEQ ID NO: 62564 - DNA, 25 bp, Homo sapien
caggattgagagacacatctcgcca

SEQ ID NO: 62565 - DNA, 25 bp, Homo sapien
tcaccaaagccacaggattgagaga

SEQ ID NO: 62566 - DNA, 25 bp, Homo sapien
atgtgggttatctaagaacaaaaac

SEQ ID NO: 62567 - DNA, 25 bp, Homo sapien
tagggggagtacaagtatcatttca

SEQ ID NO: 62568 - DNA, 25 bp, Homo sapien
acagcattcacagcagttgacaaag

SEQ ID NO: 62569 - DNA, 25 bp, Homo sapien
agagaacacacaccatacagcattc

SEQ ID NO: 62570 - DNA, 25 bp, Homo sapien
gcaaagcacaccacaagctcagtcc

SEQ ID NO: 62571 - DNA, 25 bp, Homo sapien
acctgagctcactggtgaactctgc

SEQ ID NO: 62572 - DNA, 25 bp, Homo sapien
atgggtagctaacagacattagaac

SEQ ID NO: 62573 - DNA, 25 bp, Homo sapien
cagaactgcagcaaacagcattctt

SEQ ID NO: 62574 - DNA, 25 bp, Homo sapien
gcaaagcacaccacaagctcagtcc

SEQ ID NO: 62575 - DNA, 25 bp, Homo sapien
caggattgagagacacatctcgcca

SEQ ID NO: 62576 - DNA, 25 bp, Homo sapien
atgtgggttatctaagaacaaaaac

SEQ ID NO: 62577 - DNA, 25 bp, Homo sapien
ccaccaagtctctgcacgcgctctc

SEQ ID NO: 62578 - DNA, 25 bp, Homo sapien
atgggtagctaacagacattagaac

SEQ ID NO: 62579 - DNA, 25 bp, Homo sapien
cagaactgcagcaaacagcattctt

SEQ ID NO: 62580 - DNA, 25 bp, Homo sapien
acagcattcacagcagttgacaaag

SEQ ID NO: 62581 - DNA, 25 bp, Homo sapien
tcaccaaagccacaggattgagaga

SEQ ID NO: 62582 - DNA, 25 bp, Homo sapien
tagggggagtacaagtatcatttca

SEQ ID NO: 62583 - DNA, 25 bp, Homo sapien
agagaacacacaccatacagcattc

SEQ ID NO: 62584 - DNA, 25 bp, Homo sapien
acctgagctcactggtgaactctgc

SEQ ID NO: 62585 - DNA, 25 bp, Homo sapien
ccaccaagtctctgcacgcgctctc

SEQ ID NO: 62586 - DNA, 25 bp, Homo sapien
caggattgagagacacatctcgcca

SEQ ID NO: 62587 - DNA, 25 bp, Homo sapien
tcaccaaagccacaggattgagaga

SEQ ID NO: 62588 - DNA, 25 bp, Homo sapien
atgtgggttatctaagaacaaaaac

SEQ ID NO: 62589 - DNA, 25 bp, Homo sapien
tagggggagtacaagtatcatttca

SEQ ID NO: 62590 - DNA, 25 bp, Homo sapien
acagcattcacagcagttgacaaag

SEQ ID NO: 62591 - DNA, 25 bp, Homo sapien
agagaacacacaccatacagcattc

SEQ ID NO: 62592 - DNA, 25 bp, Homo sapien
gcaaagcacaccacaagctcagtcc

SEQ ID NO: 62593 - DNA, 25 bp, Homo sapien
acctgagctcactggtgaactctgc

SEQ ID NO: 62594 - DNA, 25 bp, Homo sapien
atgggtagctaacagacattagaac

SEQ ID NO: 62595 - DNA, 25 bp, Homo sapien
cagaactgcagcaaacagcattctt

SEQ ID NO: 62596 - DNA, 25 bp, Homo sapien
atgtgggttatctaagaacaaaaac

SEQ ID NO: 62597 - DNA, 25 bp, Homo sapien
acctgagctcactggtgaactctgc

SEQ ID NO: 62598 - DNA, 25 bp, Homo sapien
tcaccaaagccacaggattgagaga

SEQ ID NO: 62599 - DNA, 25 bp, Homo sapien
agagaacacacaccatacagcattc

SEQ ID NO: 62600 - DNA, 25 bp, Homo sapien
ccaccaagtctctgcacgcgctctc

SEQ ID NO: 62601 - DNA, 25 bp, Homo sapien
acagcattcacagcagttgacaaag

SEQ ID NO: 62602 - DNA, 25 bp, Homo sapien
caggattgagagacacatctcgcca

SEQ ID NO: 62603 - DNA, 25 bp, Homo sapien
gcaaagcacaccacaagctcagtcc

SEQ ID NO: 62604 - DNA, 25 bp, Homo sapien
cagaactgcagcaaacagcattctt

SEQ ID NO: 62605 - DNA, 25 bp, Homo sapien
atgggtagctaacagacattagaac

SEQ ID NO: 62606 - DNA, 25 bp, Homo sapien
tagggggagtacaagtatcatttca

SEQ ID NO: 62607 - DNA, 25 bp, Homo sapien
ccaccaagtctctgcacgcgctctc

SEQ ID NO: 62608 - DNA, 25 bp, Homo sapien
caggattgagagacacatctcgcca

SEQ ID NO: 62609 - DNA, 25 bp, Homo sapien
tcaccaaagccacaggattgagaga

SEQ ID NO: 62610 - DNA, 25 bp, Homo sapien
atgtgggttatctaagaacaaaaac

SEQ ID NO: 62611 - DNA, 25 bp, Homo sapien
tagggggagtacaagtatcatttca

SEQ ID NO: 62612 - DNA, 25 bp, Homo sapien
acagcattcacagcagttgacaaag

SEQ ID NO: 62613 - DNA, 25 bp, Homo sapien
agagaacacacaccatacagcattc

SEQ ID NO: 62614 - DNA, 25 bp, Homo sapien
gcaaagcacaccacaagctcagtcc

SEQ ID NO: 62615 - DNA, 25 bp, Homo sapien
acctgagctcactggtgaactctgc

SEQ ID NO: 62616 - DNA, 25 bp, Homo sapien
atgggtagctaacagacattagaac

SEQ ID NO: 62617 - DNA, 25 bp, Homo sapien
cagaactgcagcaaacagcattctt

SEQ ID NO: 62618 - DNA, 25 bp, Homo sapien
ccaccaagtctctgcacgcgctctc

SEQ ID NO: 62619 - DNA, 25 bp, Homo sapien
caggattgagagacacatctcgcca

SEQ ID NO: 62620 - DNA, 25 bp, Homo sapien
tcaccaaagccacaggattgagaga

SEQ ID NO: 62621 - DNA, 25 bp, Homo sapien
atgtgggttatctaagaacaaaaac

SEQ ID NO: 62622 - DNA, 25 bp, Homo sapien
tagggggagtacaagtatcatttca

SEQ ID NO: 62623 - DNA, 25 bp, Homo sapien
acagcattcacagcagttgacaaag

SEQ ID NO: 62624 - DNA, 25 bp, Homo sapien
agagaacacacaccatacagcattc

SEQ ID NO: 62625 - DNA, 25 bp, Homo sapien
gcaaagcacaccacaagctcagtcc

SEQ ID NO: 62626 - DNA, 25 bp, Homo sapien
acctgagctcactggtgaactctgc

SEQ ID NO: 62627 - DNA, 25 bp, Homo sapien
atgggtagctaacagacattagaac

SEQ ID NO: 62628 - DNA, 25 bp, Homo sapien
cagaactgcagcaaacagcattctt

SEQ ID NO: 62629 - DNA, 25 bp, Homo sapien
gcaaagcacaccacaagctcagtcc

SEQ ID NO: 62630 - DNA, 25 bp, Homo sapien
tagggggagtacaagtatcatttca

SEQ ID NO: 62631 - DNA, 25 bp, Homo sapien
atgtgggttatctaagaacaaaaac

SEQ ID NO: 62632 - DNA, 25 bp, Homo sapien
tcaccaaagccacaggattgagaga

SEQ ID NO: 62633 - DNA, 25 bp, Homo sapien
agagaacacacaccatacagcattc

SEQ ID NO: 62634 - DNA, 25 bp, Homo sapien
cagaactgcagcaaacagcattctt

SEQ ID NO: 62635 - DNA, 25 bp, Homo sapien
atgggtagctaacagacattagaac

SEQ ID NO: 62636 - DNA, 25 bp, Homo sapien
acctgagctcactggtgaactctgc

SEQ ID NO: 62637 - DNA, 25 bp, Homo sapien
ccaccaagtctctgcacgcgctctc

SEQ ID NO: 62638 - DNA, 25 bp, Homo sapien
acagcattcacagcagttgacaaag

SEQ ID NO: 62639 - DNA, 25 bp, Homo sapien
caggattgagagacacatctcgcca

SEQ ID NO: 62640 - DNA, 25 bp, Homo sapien
ccaccaagtctctgcacgcgctctc

SEQ ID NO: 62641 - DNA, 25 bp, Homo sapien
caggattgagagacacatctcgcca

SEQ ID NO: 62642 - DNA, 25 bp, Homo sapien
tcaccaaagccacaggattgagaga

SEQ ID NO: 62643 - DNA, 25 bp, Homo sapien
atgtgggttatctaagaacaaaaac

SEQ ID NO: 62644 - DNA, 25 bp, Homo sapien
tagggggagtacaagtatcatttca

SEQ ID NO: 62645 - DNA, 25 bp, Homo sapien
acagcattcacagcagttgacaaag

SEQ ID NO: 62646 - DNA, 25 bp, Homo sapien
agagaacacacaccatacagcattc

SEQ ID NO: 62647 - DNA, 25 bp, Homo sapien
gcaaagcacaccacaagctcagtcc

SEQ ID NO: 62648 - DNA, 25 bp, Homo sapien
acctgagctcactggtgaactctgc

SEQ ID NO: 62649 - DNA, 25 bp, Homo sapien
atgggtagctaacagacattagaac

SEQ ID NO: 62650 - DNA, 25 bp, Homo sapien
cagaactgcagcaaacagcattctt

SEQ ID NO: 62651 - DNA, 25 bp, Homo sapien
tcaccaaagccacaggattgagaga

SEQ ID NO: 62652 - DNA, 25 bp, Homo sapien
atgggtagctaacagacattagaac

SEQ ID NO: 62653 - DNA, 25 bp, Homo sapien
gcaaagcacaccacaagctcagtcc

SEQ ID NO: 62654 - DNA, 25 bp, Homo sapien
tagggggagtacaagtatcatttca

SEQ ID NO: 62655 - DNA, 25 bp, Homo sapien
agagaacacacaccatacagcattc

SEQ ID NO: 62656 - DNA, 25 bp, Homo sapien
acagcattcacagcagttgacaaag

SEQ ID NO: 62657 - DNA, 25 bp, Homo sapien
caggattgagagacacatctcgcca

SEQ ID NO: 62658 - DNA, 25 bp, Homo sapien
ccaccaagtctctgcacgcgctctc

SEQ ID NO: 62659 - DNA, 25 bp, Homo sapien
atgtgggttatctaagaacaaaaac

SEQ ID NO: 62660 - DNA, 25 bp, Homo sapien
acctgagctcactggtgaactctgc

SEQ ID NO: 62661 - DNA, 25 bp, Homo sapien
cagaactgcagcaaacagcattctt

SEQ ID NO: 62662 - DNA, 25 bp, Homo sapien
ccaccaagtctctgcacgcgctctc

SEQ ID NO: 62663 - DNA, 25 bp, Homo sapien
caggattgagagacacatctcgcca

SEQ ID NO: 62664 - DNA, 25 bp, Homo sapien
tcaccaaagccacaggattgagaga

SEQ ID NO: 62665 - DNA, 25 bp, Homo sapien
atgtgggttatctaagaacaaaaac

SEQ ID NO: 62666 - DNA, 25 bp, Homo sapien
tagggggagtacaagtatcatttca

SEQ ID NO: 62667 - DNA, 25 bp, Homo sapien
acagcattcacagcagttgacaaag

SEQ ID NO: 62668 - DNA, 25 bp, Homo sapien
agagaacacacaccatacagcattc

SEQ ID NO: 62669 - DNA, 25 bp, Homo sapien
gcaaagcacaccacaagctcagtcc

SEQ ID NO: 62670 - DNA, 25 bp, Homo sapien
acctgagctcactggtgaactctgc

SEQ ID NO: 62671 - DNA, 25 bp, Homo sapien
atgggtagctaacagacattagaac

SEQ ID NO: 62672 - DNA, 25 bp, Homo sapien
cagaactgcagcaaacagcattctt

SEQ ID NO: 62673 - DNA, 25 bp, Homo sapien
cagaactgcagcaaacagcattctt

SEQ ID NO: 62674 - DNA, 25 bp, Homo sapien
tagggggagtacaagtatcatttca

SEQ ID NO: 62675 - DNA, 25 bp, Homo sapien
agagaacacacaccatacagcattc

SEQ ID NO: 62676 - DNA, 25 bp, Homo sapien
ccaccaagtctctgcacgcgctctc

SEQ ID NO: 62677 - DNA, 25 bp, Homo sapien
atgtgggttatctaagaacaaaaac

SEQ ID NO: 62678 - DNA, 25 bp, Homo sapien
acagcattcacagcagttgacaaag

SEQ ID NO: 62679 - DNA, 25 bp, Homo sapien
acctgagctcactggtgaactctgc

SEQ ID NO: 62680 - DNA, 25 bp, Homo sapien
tcaccaaagccacaggattgagaga

SEQ ID NO: 62681 - DNA, 25 bp, Homo sapien
gcaaagcacaccacaagctcagtcc

SEQ ID NO: 62682 - DNA, 25 bp, Homo sapien
atgggtagctaacagacattagaac

SEQ ID NO: 62683 - DNA, 25 bp, Homo sapien
caggattgagagacacatctcgcca

SEQ ID NO: 62684 - DNA, 25 bp, Homo sapien
ccaccaagtctctgcacgcgctctc

SEQ ID NO: 62685 - DNA, 25 bp, Homo sapien
caggattgagagacacatctcgcca

SEQ ID NO: 62686 - DNA, 25 bp, Homo sapien
tcaccaaagccacaggattgagaga

SEQ ID NO: 62687 - DNA, 25 bp, Homo sapien
atgtgggttatctaagaacaaaaac

SEQ ID NO: 62688 - DNA, 25 bp, Homo sapien
tagggggagtacaagtatcatttca

SEQ ID NO: 62689 - DNA, 25 bp, Homo sapien
acagcattcacagcagttgacaaag

SEQ ID NO: 62690 - DNA, 25 bp, Homo sapien
agagaacacacaccatacagcattc

SEQ ID NO: 62691 - DNA, 25 bp, Homo sapien
gcaaagcacaccacaagctcagtcc

SEQ ID NO: 62692 - DNA, 25 bp, Homo sapien
acctgagctcactggtgaactctgc

SEQ ID NO: 62693 - DNA, 25 bp, Homo sapien
atgggtagctaacagacattagaac

SEQ ID NO: 62694 - DNA, 25 bp, Homo sapien
cagaactgcagcaaacagcattctt

SEQ ID NO: 62695 - DNA, 25 bp, Homo sapien
tcaccaaagccacaggattgagaga

SEQ ID NO: 62696 - DNA, 25 bp, Homo sapien
ccaccaagtctctgcacgcgctctc

SEQ ID NO: 62697 - DNA, 25 bp, Homo sapien
cagaactgcagcaaacagcattctt

SEQ ID NO: 62698 - DNA, 25 bp, Homo sapien
acagcattcacagcagttgacaaag

SEQ ID NO: 62699 - DNA, 25 bp, Homo sapien
caggattgagagacacatctcgcca

SEQ ID NO: 62700 - DNA, 25 bp, Homo sapien
atgggtagctaacagacattagaac

SEQ ID NO: 62701 - DNA, 25 bp, Homo sapien
tagggggagtacaagtatcatttca

SEQ ID NO: 62702 - DNA, 25 bp, Homo sapien
atgtgggttatctaagaacaaaaac

SEQ ID NO: 62703 - DNA, 25 bp, Homo sapien
acctgagctcactggtgaactctgc

SEQ ID NO: 62704 - DNA, 25 bp, Homo sapien
gcaaagcacaccacaagctcagtcc

SEQ ID NO: 62705 - DNA, 25 bp, Homo sapien
agagaacacacaccatacagcattc

SEQ ID NO: 62706 - DNA, 25 bp, Homo sapien
ccaccaagtctctgcacgcgctctc

SEQ ID NO: 62707 - DNA, 25 bp, Homo sapien
caggattgagagacacatctcgcca

SEQ ID NO: 62708 - DNA, 25 bp, Homo sapien
tcaccaaagccacaggattgagaga

SEQ ID NO: 62709 - DNA, 25 bp, Homo sapien
atgtgggttatctaagaacaaaaac

SEQ ID NO: 62710 - DNA, 25 bp, Homo sapien
tagggggagtacaagtatcatttca

SEQ ID NO: 62711 - DNA, 25 bp, Homo sapien
acagcattcacagcagttgacaaag

SEQ ID NO: 62712 - DNA, 25 bp, Homo sapien
agagaacacacaccatacagcattc

SEQ ID NO: 62713 - DNA, 25 bp, Homo sapien
gcaaagcacaccacaagctcagtcc

SEQ ID NO: 62714 - DNA, 25 bp, Homo sapien
acctgagctcactggtgaactctgc

SEQ ID NO: 62715 - DNA, 25 bp, Homo sapien
atgggtagctaacagacattagaac

SEQ ID NO: 62716 - DNA, 25 bp, Homo sapien
cagaactgcagcaaacagcattctt

SEQ ID NO: 62717 - DNA, 25 bp, Homo sapien
ccaccaagtctctgcacgcgctctc

SEQ ID NO: 62718 - DNA, 25 bp, Homo sapien
cagaactgcagcaaacagcattctt

SEQ ID NO: 62719 - DNA, 25 bp, Homo sapien
acctgagctcactggtgaactctgc

SEQ ID NO: 62720 - DNA, 25 bp, Homo sapien
tagggggagtacaagtatcatttca

SEQ ID NO: 62721 - DNA, 25 bp, Homo sapien
gcaaagcacaccacaagctcagtcc

SEQ ID NO: 62722 - DNA, 25 bp, Homo sapien
agagaacacacaccatacagcattc

SEQ ID NO: 62723 - DNA, 25 bp, Homo sapien
acagcattcacagcagttgacaaag

SEQ ID NO: 62724 - DNA, 25 bp, Homo sapien
caggattgagagacacatctcgcca

SEQ ID NO: 62725 - DNA, 25 bp, Homo sapien
atgggtagctaacagacattagaac

SEQ ID NO: 62726 - DNA, 25 bp, Homo sapien
tcaccaaagccacaggattgagaga

SEQ ID NO: 62727 - DNA, 25 bp, Homo sapien
atgtgggttatctaagaacaaaaac

SEQ ID NO: 62728 - DNA, 25 bp, Homo sapien
cagaactgcagcaaacagcattctt

SEQ ID NO: 62729 - DNA, 25 bp, Homo sapien
acctgagctcactggtgaactctgc

SEQ ID NO: 62730 - DNA, 25 bp, Homo sapien
atgtgggttatctaagaacaaaaac

SEQ ID NO: 62731 - DNA, 25 bp, Homo sapien
caggattgagagacacatctcgcca

SEQ ID NO: 62732 - DNA, 25 bp, Homo sapien
atgggtagctaacagacattagaac

SEQ ID NO: 62733 - DNA, 25 bp, Homo sapien
ccaccaagtctctgcacgcgctctc

SEQ ID NO: 62734 - DNA, 25 bp, Homo sapien
tagggggagtacaagtatcatttca

SEQ ID NO: 62735 - DNA, 25 bp, Homo sapien
gcaaagcacaccacaagctcagtcc

SEQ ID NO: 62736 - DNA, 25 bp, Homo sapien
tcaccaaagccacaggattgagaga

SEQ ID NO: 62737 - DNA, 25 bp, Homo sapien
agagaacacacaccatacagcattc

SEQ ID NO: 62738 - DNA, 25 bp, Homo sapien
acagcattcacagcagttgacaaag

SEQ ID NO: 62739 - DNA, 25 bp, Homo sapien
ccaccaagtctctgcacgcgctctc

SEQ ID NO: 62740 - DNA, 25 bp, Homo sapien
caggattgagagacacatctcgcca

SEQ ID NO: 62741 - DNA, 25 bp, Homo sapien
tcaccaaagccacaggattgagaga

SEQ ID NO: 62742 - DNA, 25 bp, Homo sapien
atgtgggttatctaagaacaaaaac

SEQ ID NO: 62743 - DNA, 25 bp, Homo sapien
tagggggagtacaagtatcatttca

SEQ ID NO: 62744 - DNA, 25 bp, Homo sapien
acagcattcacagcagttgacaaag

SEQ ID NO: 62745 - DNA, 25 bp, Homo sapien
agagaacacacaccatacagcattc

SEQ ID NO: 62746 - DNA, 25 bp, Homo sapien
gcaaagcacaccacaagctcagtcc

SEQ ID NO: 62747 - DNA, 25 bp, Homo sapien
acctgagctcactggtgaactctgc

SEQ ID NO: 62748 - DNA, 25 bp, Homo sapien
atgggtagctaacagacattagaac

SEQ ID NO: 62749 - DNA, 25 bp, Homo sapien
cagaactgcagcaaacagcattctt

SEQ ID NO: 62750 - DNA, 25 bp, Homo sapien
tcaccaaagccacaggattgagaga

SEQ ID NO: 62751 - DNA, 25 bp, Homo sapien
acctgagctcactggtgaactctgc

SEQ ID NO: 62752 - DNA, 25 bp, Homo sapien
tagggggagtacaagtatcatttca

SEQ ID NO: 62753 - DNA, 25 bp, Homo sapien
acagcattcacagcagttgacaaag

SEQ ID NO: 62754 - DNA, 25 bp, Homo sapien
gcaaagcacaccacaagctcagtcc

SEQ ID NO: 62755 - DNA, 25 bp, Homo sapien
agagaacacacaccatacagcattc

SEQ ID NO: 62756 - DNA, 25 bp, Homo sapien
caggattgagagacacatctcgcca

SEQ ID NO: 62757 - DNA, 25 bp, Homo sapien
ccaccaagtctctgcacgcgctctc

SEQ ID NO: 62758 - DNA, 25 bp, Homo sapien
atgggtagctaacagacattagaac

SEQ ID NO: 62759 - DNA, 25 bp, Homo sapien
cagaactgcagcaaacagcattctt

SEQ ID NO: 62760 - DNA, 25 bp, Homo sapien
atgtgggttatctaagaacaaaaac

SEQ ID NO: 62761 - DNA, 25 bp, Homo sapien
ccaccaagtctctgcacgcgctctc

SEQ ID NO: 62762 - DNA, 25 bp, Homo sapien
caggattgagagacacatctcgcca

SEQ ID NO: 62763 - DNA, 25 bp, Homo sapien
tcaccaaagccacaggattgagaga

SEQ ID NO: 62764 - DNA, 25 bp, Homo sapien
atgtgggttatctaagaacaaaaac

SEQ ID NO: 62765 - DNA, 25 bp, Homo sapien
tagggggagtacaagtatcatttca

SEQ ID NO: 62766 - DNA, 25 bp, Homo sapien
acagcattcacagcagttgacaaag

SEQ ID NO: 62767 - DNA, 25 bp, Homo sapien
agagaacacacaccatacagcattc

SEQ ID NO: 62768 - DNA, 25 bp, Homo sapien
gcaaagcacaccacaagctcagtcc

SEQ ID NO: 62769 - DNA, 25 bp, Homo sapien
acctgagctcactggtgaactctgc

SEQ ID NO: 62770 - DNA, 25 bp, Homo sapien
atgggtagctaacagacattagaac

SEQ ID NO: 62771 - DNA, 25 bp, Homo sapien
cagaactgcagcaaacagcattctt

SEQ ID NO: 62772 - DNA, 25 bp, Homo sapien
agagaacacacaccatacagcattc

SEQ ID NO: 62773 - DNA, 25 bp, Homo sapien
ccaccaagtctctgcacgcgctctc

SEQ ID NO: 62774 - DNA, 25 bp, Homo sapien
atgtgggttatctaagaacaaaaac

SEQ ID NO: 62775 - DNA, 25 bp, Homo sapien
tagggggagtacaagtatcatttca

SEQ ID NO: 62776 - DNA, 25 bp, Homo sapien
acagcattcacagcagttgacaaag

SEQ ID NO: 62777 - DNA, 25 bp, Homo sapien
acctgagctcactggtgaactctgc

SEQ ID NO: 62778 - DNA, 25 bp, Homo sapien
tcaccaaagccacaggattgagaga

SEQ ID NO: 62779 - DNA, 25 bp, Homo sapien
caggattgagagacacatctcgcca

SEQ ID NO: 62780 - DNA, 25 bp, Homo sapien
atgggtagctaacagacattagaac

SEQ ID NO: 62781 - DNA, 25 bp, Homo sapien
cagaactgcagcaaacagcattctt

SEQ ID NO: 62782 - DNA, 25 bp, Homo sapien
gcaaagcacaccacaagctcagtcc

SEQ ID NO: 62783 - DNA, 25 bp, Homo sapien
ccaccaagtctctgcacgcgctctc

SEQ ID NO: 62784 - DNA, 25 bp, Homo sapien
caggattgagagacacatctcgcca

SEQ ID NO: 62785 - DNA, 25 bp, Homo sapien
tcaccaaagccacaggattgagaga

SEQ ID NO: 62786 - DNA, 25 bp, Homo sapien
atgtgggttatctaagaacaaaaac

SEQ ID NO: 62787 - DNA, 25 bp, Homo sapien
tagggggagtacaagtatcatttca

SEQ ID NO: 62788 - DNA, 25 bp, Homo sapien
acagcattcacagcagttgacaaag

SEQ ID NO: 62789 - DNA, 25 bp, Homo sapien
agagaacacacaccatacagcattc

SEQ ID NO: 62790 - DNA, 25 bp, Homo sapien
gcaaagcacaccacaagctcagtcc

SEQ ID NO: 62791 - DNA, 25 bp, Homo sapien
acctgagctcactggtgaactctgc

SEQ ID NO: 62792 - DNA, 25 bp, Homo sapien
atgggtagctaacagacattagaac

SEQ ID NO: 62793 - DNA, 25 bp, Homo sapien
cagaactgcagcaaacagcattctt

SEQ ID NO: 62794 - DNA, 25 bp, Homo sapien
attgcctccccctgctgggatcccc

SEQ ID NO: 62795 - DNA, 25 bp, Homo sapien
caaaggcttgccctccagggagatg

SEQ ID NO: 62796 - DNA, 25 bp, Homo sapien
gtcactattgcggttagaagttggc

SEQ ID NO: 62797 - DNA, 25 bp, Homo sapien
ggtctgcttcagcccaagaggaatc

SEQ ID NO: 62798 - DNA, 25 bp, Homo sapien
tgaagggattgcctccccctgctgg

SEQ ID NO: 62799 - DNA, 25 bp, Homo sapien
acaagcacagagtcactattgcggt

SEQ ID NO: 62800 - DNA, 25 bp, Homo sapien
ttcagcccaagaggaatcaaaagat

SEQ ID NO: 62801 - DNA, 25 bp, Homo sapien
tattgcggttagaagttggcagcat

SEQ ID NO: 62802 - DNA, 25 bp, Homo sapien
actattgcggttagaagttggcagc

SEQ ID NO: 62803 - DNA, 25 bp, Homo sapien
aacagacaagcacagagtcactatt

SEQ ID NO: 62804 - DNA, 25 bp, Homo sapien
ctaaacagacaagcacagagtcact

SEQ ID NO: 62805 - DNA, 25 bp, Homo sapien
aacagacaagcacagagtcactatt

SEQ ID NO: 62806 - DNA, 25 bp, Homo sapien
ctaaacagacaagcacagagtcact

SEQ ID NO: 62807 - DNA, 25 bp, Homo sapien
caaaggcttgccctccagggagatg

SEQ ID NO: 62808 - DNA, 25 bp, Homo sapien
attgcctccccctgctgggatcccc

SEQ ID NO: 62809 - DNA, 25 bp, Homo sapien
tgaagggattgcctccccctgctgg

SEQ ID NO: 62810 - DNA, 25 bp, Homo sapien
ttcagcccaagaggaatcaaaagat

SEQ ID NO: 62811 - DNA, 25 bp, Homo sapien
ggtctgcttcagcccaagaggaatc

SEQ ID NO: 62812 - DNA, 25 bp, Homo sapien
tattgcggttagaagttggcagcat

SEQ ID NO: 62813 - DNA, 25 bp, Homo sapien
actattgcggttagaagttggcagc

SEQ ID NO: 62814 - DNA, 25 bp, Homo sapien
gtcactattgcggttagaagttggc

SEQ ID NO: 62815 - DNA, 25 bp, Homo sapien
acaagcacagagtcactattgcggt

SEQ ID NO: 62816 - DNA, 25 bp, Homo sapien
ggtctgcttcagcccaagaggaatc

SEQ ID NO: 62817 - DNA, 25 bp, Homo sapien
tgaagggattgcctccccctgctgg

SEQ ID NO: 62818 - DNA, 25 bp, Homo sapien
aacagacaagcacagagtcactatt

SEQ ID NO: 62819 - DNA, 25 bp, Homo sapien
ctaaacagacaagcacagagtcact

SEQ ID NO: 62820 - DNA, 25 bp, Homo sapien
caaaggcttgccctccagggagatg

SEQ ID NO: 62821 - DNA, 25 bp, Homo sapien
acaagcacagagtcactattgcggt

SEQ ID NO: 62822 - DNA, 25 bp, Homo sapien
actattgcggttagaagttggcagc

SEQ ID NO: 62823 - DNA, 25 bp, Homo sapien
tattgcggttagaagttggcagcat

SEQ ID NO: 62824 - DNA, 25 bp, Homo sapien
attgcctccccctgctgggatcccc

SEQ ID NO: 62825 - DNA, 25 bp, Homo sapien
ttcagcccaagaggaatcaaaagat

SEQ ID NO: 62826 - DNA, 25 bp, Homo sapien
gtcactattgcggttagaagttggc

SEQ ID NO: 62827 - DNA, 25 bp, Homo sapien
caaaggcttgccctccagggagatg

SEQ ID NO: 62828 - DNA, 25 bp, Homo sapien
attgcctccccctgctgggatcccc

SEQ ID NO: 62829 - DNA, 25 bp, Homo sapien
tgaagggattgcctccccctgctgg

SEQ ID NO: 62830 - DNA, 25 bp, Homo sapien
ttcagcccaagaggaatcaaaagat

SEQ ID NO: 62831 - DNA, 25 bp, Homo sapien
ggtctgcttcagcccaagaggaatc

SEQ ID NO: 62832 - DNA, 25 bp, Homo sapien
tattgcggttagaagttggcagcat

SEQ ID NO: 62833 - DNA, 25 bp, Homo sapien
actattgcggttagaagttggcagc

SEQ ID NO: 62834 - DNA, 25 bp, Homo sapien
gtcactattgcggttagaagttggc

SEQ ID NO: 62835 - DNA, 25 bp, Homo sapien
acaagcacagagtcactattgcggt

SEQ ID NO: 62836 - DNA, 25 bp, Homo sapien
aacagacaagcacagagtcactatt

SEQ ID NO: 62837 - DNA, 25 bp, Homo sapien
ctaaacagacaagcacagagtcact

SEQ ID NO: 62838 - DNA, 25 bp, Homo sapien
ttcagcccaagaggaatcaaaagat

SEQ ID NO: 62839 - DNA, 25 bp, Homo sapien
ctaaacagacaagcacagagtcact

SEQ ID NO: 62840 - DNA, 25 bp, Homo sapien
tgaagggattgcctccccctgctgg

SEQ ID NO: 62841 - DNA, 25 bp, Homo sapien
acaagcacagagtcactattgcggt

SEQ ID NO: 62842 - DNA, 25 bp, Homo sapien
actattgcggttagaagttggcagc

SEQ ID NO: 62843 - DNA, 25 bp, Homo sapien
ggtctgcttcagcccaagaggaatc

SEQ ID NO: 62844 - DNA, 25 bp, Homo sapien
aacagacaagcacagagtcactatt

SEQ ID NO: 62845 - DNA, 25 bp, Homo sapien
tattgcggttagaagttggcagcat

SEQ ID NO: 62846 - DNA, 25 bp, Homo sapien
gtcactattgcggttagaagttggc

SEQ ID NO: 62847 - DNA, 25 bp, Homo sapien
attgcctccccctgctgggatcccc

SEQ ID NO: 62848 - DNA, 25 bp, Homo sapien
caaaggcttgccctccagggagatg

SEQ ID NO: 62849 - DNA, 25 bp, Homo sapien
aacagacaagcacagagtcactatt

SEQ ID NO: 62850 - DNA, 25 bp, Homo sapien
ctaaacagacaagcacagagtcact

SEQ ID NO: 62851 - DNA, 25 bp, Homo sapien
caaaggcttgccctccagggagatg

SEQ ID NO: 62852 - DNA, 25 bp, Homo sapien
attgcctccccctgctgggatcccc

SEQ ID NO: 62853 - DNA, 25 bp, Homo sapien
tgaagggattgcctccccctgctgg

SEQ ID NO: 62854 - DNA, 25 bp, Homo sapien
ttcagcccaagaggaatcaaaagat

SEQ ID NO: 62855 - DNA, 25 bp, Homo sapien
ggtctgcttcagcccaagaggaatc

SEQ ID NO: 62856 - DNA, 25 bp, Homo sapien
tattgcggttagaagttggcagcat

SEQ ID NO: 62857 - DNA, 25 bp, Homo sapien
actattgcggttagaagttggcagc

SEQ ID NO: 62858 - DNA, 25 bp, Homo sapien
gtcactattgcggttagaagttggc

SEQ ID NO: 62859 - DNA, 25 bp, Homo sapien
acaagcacagagtcactattgcggt

SEQ ID NO: 62860 - DNA, 25 bp, Homo sapien
aacagacaagcacagagtcactatt

SEQ ID NO: 62861 - DNA, 25 bp, Homo sapien
ctaaacagacaagcacagagtcact

SEQ ID NO: 62862 - DNA, 25 bp, Homo sapien
caaaggcttgccctccagggagatg

SEQ ID NO: 62863 - DNA, 25 bp, Homo sapien
attgcctccccctgctgggatcccc

SEQ ID NO: 62864 - DNA, 25 bp, Homo sapien
tgaagggattgcctccccctgctgg

SEQ ID NO: 62865 - DNA, 25 bp, Homo sapien
ttcagcccaagaggaatcaaaagat

SEQ ID NO: 62866 - DNA, 25 bp, Homo sapien
ggtctgcttcagcccaagaggaatc

SEQ ID NO: 62867 - DNA, 25 bp, Homo sapien
tattgcggttagaagttggcagcat

SEQ ID NO: 62868 - DNA, 25 bp, Homo sapien
actattgcggttagaagttggcagc

SEQ ID NO: 62869 - DNA, 25 bp, Homo sapien
gtcactattgcggttagaagttggc

SEQ ID NO: 62870 - DNA, 25 bp, Homo sapien
acaagcacagagtcactattgcggt

SEQ ID NO: 62871 - DNA, 25 bp, Homo sapien
ctaaacagacaagcacagagtcact

SEQ ID NO: 62872 - DNA, 25 bp, Homo sapien
caaaggcttgccctccagggagatg

SEQ ID NO: 62873 - DNA, 25 bp, Homo sapien
ggtctgcttcagcccaagaggaatc

SEQ ID NO: 62874 - DNA, 25 bp, Homo sapien
acaagcacagagtcactattgcggt

SEQ ID NO: 62875 - DNA, 25 bp, Homo sapien
tattgcggttagaagttggcagcat

SEQ ID NO: 62876 - DNA, 25 bp, Homo sapien
tgaagggattgcctccccctgctgg

SEQ ID NO: 62877 - DNA, 25 bp, Homo sapien
actattgcggttagaagttggcagc

SEQ ID NO: 62878 - DNA, 25 bp, Homo sapien
ttcagcccaagaggaatcaaaagat

SEQ ID NO: 62879 - DNA, 25 bp, Homo sapien
attgcctccccctgctgggatcccc

SEQ ID NO: 62880 - DNA, 25 bp, Homo sapien
gtcactattgcggttagaagttggc

SEQ ID NO: 62881 - DNA, 25 bp, Homo sapien
aacagacaagcacagagtcactatt

SEQ ID NO: 62882 - DNA, 25 bp, Homo sapien
aacagacaagcacagagtcactatt

SEQ ID NO: 62883 - DNA, 25 bp, Homo sapien
ctaaacagacaagcacagagtcact

SEQ ID NO: 62884 - DNA, 25 bp, Homo sapien
caaaggcttgccctccagggagatg

SEQ ID NO: 62885 - DNA, 25 bp, Homo sapien
attgcctccccctgctgggatcccc

SEQ ID NO: 62886 - DNA, 25 bp, Homo sapien
tgaagggattgcctccccctgctgg

SEQ ID NO: 62887 - DNA, 25 bp, Homo sapien
ttcagcccaagaggaatcaaaagat

SEQ ID NO: 62888 - DNA, 25 bp, Homo sapien
ggtctgcttcagcccaagaggaatc

SEQ ID NO: 62889 - DNA, 25 bp, Homo sapien
tattgcggttagaagttggcagcat

SEQ ID NO: 62890 - DNA, 25 bp, Homo sapien
actattgcggttagaagttggcagc

SEQ ID NO: 62891 - DNA, 25 bp, Homo sapien
gtcactattgcggttagaagttggc

SEQ ID NO: 62892 - DNA, 25 bp, Homo sapien
acaagcacagagtcactattgcggt

SEQ ID NO: 62893 - DNA, 25 bp, Homo sapien
ggtctgcttcagcccaagaggaatc

SEQ ID NO: 62894 - DNA, 25 bp, Homo sapien
acaagcacagagtcactattgcggt

SEQ ID NO: 62895 - DNA, 25 bp, Homo sapien
ctaaacagacaagcacagagtcact

SEQ ID NO: 62896 - DNA, 25 bp, Homo sapien
ttcagcccaagaggaatcaaaagat

SEQ ID NO: 62897 - DNA, 25 bp, Homo sapien
actattgcggttagaagttggcagc

SEQ ID NO: 62898 - DNA, 25 bp, Homo sapien
gtcactattgcggttagaagttggc

SEQ ID NO: 62899 - DNA, 25 bp, Homo sapien
caaaggcttgccctccagggagatg

SEQ ID NO: 62900 - DNA, 25 bp, Homo sapien
aacagacaagcacagagtcactatt

SEQ ID NO: 62901 - DNA, 25 bp, Homo sapien
tgaagggattgcctccccctgctgg

SEQ ID NO: 62902 - DNA, 25 bp, Homo sapien
tattgcggttagaagttggcagcat

SEQ ID NO: 62903 - DNA, 25 bp, Homo sapien
attgcctccccctgctgggatcccc

SEQ ID NO: 62904 - DNA, 25 bp, Homo sapien
aacagacaagcacagagtcactatt

SEQ ID NO: 62905 - DNA, 25 bp, Homo sapien
ctaaacagacaagcacagagtcact

SEQ ID NO: 62906 - DNA, 25 bp, Homo sapien
caaaggcttgccctccagggagatg

SEQ ID NO: 62907 - DNA, 25 bp, Homo sapien
attgcctccccctgctgggatcccc

SEQ ID NO: 62908 - DNA, 25 bp, Homo sapien
tgaagggattgcctccccctgctgg

SEQ ID NO: 62909 - DNA, 25 bp, Homo sapien
ttcagcccaagaggaatcaaaagat

SEQ ID NO: 62910 - DNA, 25 bp, Homo sapien
ggtctgcttcagcccaagaggaatc

SEQ ID NO: 62911 - DNA, 25 bp, Homo sapien
tattgcggttagaagttggcagcat

SEQ ID NO: 62912 - DNA, 25 bp, Homo sapien
actattgcggttagaagttggcagc

SEQ ID NO: 62913 - DNA, 25 bp, Homo sapien
gtcactattgcggttagaagttggc

SEQ ID NO: 62914 - DNA, 25 bp, Homo sapien
acaagcacagagtcactattgcggt

SEQ ID NO: 62915 - DNA, 25 bp, Homo sapien
aacagacaagcacagagtcactatt

SEQ ID NO: 62916 - DNA, 25 bp, Homo sapien
caaaggcttgccctccagggagatg

SEQ ID NO: 62917 - DNA, 25 bp, Homo sapien
actattgcggttagaagttggcagc

SEQ ID NO: 62918 - DNA, 25 bp, Homo sapien
acaagcacagagtcactattgcggt

SEQ ID NO: 62919 - DNA, 25 bp, Homo sapien
ggtctgcttcagcccaagaggaatc

SEQ ID NO: 62920 - DNA, 25 bp, Homo sapien
ttcagcccaagaggaatcaaaagat

SEQ ID NO: 62921 - DNA, 25 bp, Homo sapien
gtcactattgcggttagaagttggc

SEQ ID NO: 62922 - DNA, 25 bp, Homo sapien
tattgcggttagaagttggcagcat

SEQ ID NO: 62923 - DNA, 25 bp, Homo sapien
ctaaacagacaagcacagagtcact

SEQ ID NO: 62924 - DNA, 25 bp, Homo sapien
tgaagggattgcctccccctgctgg

SEQ ID NO: 62925 - DNA, 25 bp, Homo sapien
attgcctccccctgctgggatcccc

SEQ ID NO: 62926 - DNA, 25 bp, Homo sapien
aacagacaagcacagagtcactatt

SEQ ID NO: 62927 - DNA, 25 bp, Homo sapien
ctaaacagacaagcacagagtcact

SEQ ID NO: 62928 - DNA, 25 bp, Homo sapien
caaaggcttgccctccagggagatg

SEQ ID NO: 62929 - DNA, 25 bp, Homo sapien
attgcctccccctgctgggatcccc

SEQ ID NO: 62930 - DNA, 25 bp, Homo sapien
tgaagggattgcctccccctgctgg

SEQ ID NO: 62931 - DNA, 25 bp, Homo sapien
ttcagcccaagaggaatcaaaagat

SEQ ID NO: 62932 - DNA, 25 bp, Homo sapien
ggtctgcttcagcccaagaggaatc

SEQ ID NO: 62933 - DNA, 25 bp, Homo sapien
tattgcggttagaagttggcagcat

SEQ ID NO: 62934 - DNA, 25 bp, Homo sapien
actattgcggttagaagttggcagc

SEQ ID NO: 62935 - DNA, 25 bp, Homo sapien
gtcactattgcggttagaagttggc

SEQ ID NO: 62936 - DNA, 25 bp, Homo sapien
acaagcacagagtcactattgcggt

SEQ ID NO: 62937 - DNA, 25 bp, Homo sapien
caaaggcttgccctccagggagatg

SEQ ID NO: 62938 - DNA, 25 bp, Homo sapien
ttcagcccaagaggaatcaaaagat

SEQ ID NO: 62939 - DNA, 25 bp, Homo sapien
ctaaacagacaagcacagagtcact

SEQ ID NO: 62940 - DNA, 25 bp, Homo sapien
gtcactattgcggttagaagttggc

SEQ ID NO: 62941 - DNA, 25 bp, Homo sapien
aacagacaagcacagagtcactatt

SEQ ID NO: 62942 - DNA, 25 bp, Homo sapien
attgcctccccctgctgggatcccc

SEQ ID NO: 62943 - DNA, 25 bp, Homo sapien
tattgcggttagaagttggcagcat

SEQ ID NO: 62944 - DNA, 25 bp, Homo sapien
tgaagggattgcctccccctgctgg

SEQ ID NO: 62945 - DNA, 25 bp, Homo sapien
actattgcggttagaagttggcagc

SEQ ID NO: 62946 - DNA, 25 bp, Homo sapien
acaagcacagagtcactattgcggt

SEQ ID NO: 62947 - DNA, 25 bp, Homo sapien
ggtctgcttcagcccaagaggaatc

SEQ ID NO: 62948 - DNA, 25 bp, Homo sapien
aacagacaagcacagagtcactatt

SEQ ID NO: 62949 - DNA, 25 bp, Homo sapien
ctaaacagacaagcacagagtcact

SEQ ID NO: 62950 - DNA, 25 bp, Homo sapien
caaaggcttgccctccagggagatg

SEQ ID NO: 62951 - DNA, 25 bp, Homo sapien
attgcctccccctgctgggatcccc

SEQ ID NO: 62952 - DNA, 25 bp, Homo sapien
tgaagggattgcctccccctgctgg

SEQ ID NO: 62953 - DNA, 25 bp, Homo sapien
ttcagcccaagaggaatcaaaagat

SEQ ID NO: 62954 - DNA, 25 bp, Homo sapien
ggtctgcttcagcccaagaggaatc

SEQ ID NO: 62955 - DNA, 25 bp, Homo sapien
tattgcggttagaagttggcagcat

SEQ ID NO: 62956 - DNA, 25 bp, Homo sapien
actattgcggttagaagttggcagc

SEQ ID NO: 62957 - DNA, 25 bp, Homo sapien
gtcactattgcggttagaagttggc

SEQ ID NO: 62958 - DNA, 25 bp, Homo sapien
acaagcacagagtcactattgcggt

SEQ ID NO: 62959 - DNA, 25 bp, Homo sapien
tgaagggattgcctccccctgctgg

SEQ ID NO: 62960 - DNA, 25 bp, Homo sapien
tattgcggttagaagttggcagcat

SEQ ID NO: 62961 - DNA, 25 bp, Homo sapien
ttcagcccaagaggaatcaaaagat

SEQ ID NO: 62962 - DNA, 25 bp, Homo sapien
attgcctccccctgctgggatcccc

SEQ ID NO: 62963 - DNA, 25 bp, Homo sapien
aacagacaagcacagagtcactatt

SEQ ID NO: 62964 - DNA, 25 bp, Homo sapien
acaagcacagagtcactattgcggt

SEQ ID NO: 62965 - DNA, 25 bp, Homo sapien
ctaaacagacaagcacagagtcact

SEQ ID NO: 62966 - DNA, 25 bp, Homo sapien
gtcactattgcggttagaagttggc

SEQ ID NO: 62967 - DNA, 25 bp, Homo sapien
caaaggcttgccctccagggagatg

SEQ ID NO: 62968 - DNA, 25 bp, Homo sapien
actattgcggttagaagttggcagc

SEQ ID NO: 62969 - DNA, 25 bp, Homo sapien
ggtctgcttcagcccaagaggaatc

SEQ ID NO: 62970 - DNA, 25 bp, Homo sapien
ttcagcccaagaggaatcaaaagat

SEQ ID NO: 62971 - DNA, 25 bp, Homo sapien
ctaaacagacaagcacagagtcact

SEQ ID NO: 62972 - DNA, 25 bp, Homo sapien
tgaagggattgcctccccctgctgg

SEQ ID NO: 62973 - DNA, 25 bp, Homo sapien
aacagacaagcacagagtcactatt

SEQ ID NO: 62974 - DNA, 25 bp, Homo sapien
gtcactattgcggttagaagttggc

SEQ ID NO: 62975 - DNA, 25 bp, Homo sapien
actattgcggttagaagttggcagc

SEQ ID NO: 62976 - DNA, 25 bp, Homo sapien
caaaggcttgccctccagggagatg

SEQ ID NO: 62977 - DNA, 25 bp, Homo sapien
attgcctccccctgctgggatcccc

SEQ ID NO: 62978 - DNA, 25 bp, Homo sapien
ggtctgcttcagcccaagaggaatc

SEQ ID NO: 62979 - DNA, 25 bp, Homo sapien
tattgcggttagaagttggcagcat

SEQ ID NO: 62980 - DNA, 25 bp, Homo sapien
acaagcacagagtcactattgcggt

SEQ ID NO: 62981 - DNA, 25 bp, Homo sapien
aacagacaagcacagagtcactatt

SEQ ID NO: 62982 - DNA, 25 bp, Homo sapien
ctaaacagacaagcacagagtcact

SEQ ID NO: 62983 - DNA, 25 bp, Homo sapien
caaaggcttgccctccagggagatg

SEQ ID NO: 62984 - DNA, 25 bp, Homo sapien
attgcctccccctgctgggatcccc

SEQ ID NO: 62985 - DNA, 25 bp, Homo sapien
tgaagggattgcctccccctgctgg

SEQ ID NO: 62986 - DNA, 25 bp, Homo sapien
ttcagcccaagaggaatcaaaagat

SEQ ID NO: 62987 - DNA, 25 bp, Homo sapien
ggtctgcttcagcccaagaggaatc

SEQ ID NO: 62988 - DNA, 25 bp, Homo sapien
tattgcggttagaagttggcagcat

SEQ ID NO: 62989 - DNA, 25 bp, Homo sapien
actattgcggttagaagttggcagc

SEQ ID NO: 62990 - DNA, 25 bp, Homo sapien
gtcactattgcggttagaagttggc

SEQ ID NO: 62991 - DNA, 25 bp, Homo sapien
acaagcacagagtcactattgcggt

SEQ ID NO: 62992 - DNA, 25 bp, Homo sapien
ttcagcccaagaggaatcaaaagat

SEQ ID NO: 62993 - DNA, 25 bp, Homo sapien
tgaagggattgcctccccctgctgg

SEQ ID NO: 62994 - DNA, 25 bp, Homo sapien
ctaaacagacaagcacagagtcact

SEQ ID NO: 62995 - DNA, 25 bp, Homo sapien
aacagacaagcacagagtcactatt

SEQ ID NO: 62996 - DNA, 25 bp, Homo sapien
ggtctgcttcagcccaagaggaatc

SEQ ID NO: 62997 - DNA, 25 bp, Homo sapien
actattgcggttagaagttggcagc

SEQ ID NO: 62998 - DNA, 25 bp, Homo sapien
caaaggcttgccctccagggagatg

SEQ ID NO: 62999 - DNA, 25 bp, Homo sapien
gtcactattgcggttagaagttggc

SEQ ID NO: 63000 - DNA, 25 bp, Homo sapien
acaagcacagagtcactattgcggt

SEQ ID NO: 63001 - DNA, 25 bp, Homo sapien
tattgcggttagaagttggcagcat

SEQ ID NO: 63002 - DNA, 25 bp, Homo sapien
attgcctccccctgctgggatcccc

SEQ ID NO: 63003 - DNA, 25 bp, Homo sapien
aacagacaagcacagagtcactatt

SEQ ID NO: 63004 - DNA, 25 bp, Homo sapien
ctaaacagacaagcacagagtcact

SEQ ID NO: 63005 - DNA, 25 bp, Homo sapien
caaaggcttgccctccagggagatg

SEQ ID NO: 63006 - DNA, 25 bp, Homo sapien
attgcctccccctgctgggatcccc

SEQ ID NO: 63007 - DNA, 25 bp, Homo sapien
tgaagggattgcctccccctgctgg

SEQ ID NO: 63008 - DNA, 25 bp, Homo sapien
ttcagcccaagaggaatcaaaagat

SEQ ID NO: 63009 - DNA, 25 bp, Homo sapien
ggtctgcttcagcccaagaggaatc

SEQ ID NO: 63010 - DNA, 25 bp, Homo sapien
tattgcggttagaagttggcagcat

SEQ ID NO: 63011 - DNA, 25 bp, Homo sapien
actattgcggttagaagttggcagc

SEQ ID NO: 63012 - DNA, 25 bp, Homo sapien
gtcactattgcggttagaagttggc

SEQ ID NO: 63013 - DNA, 25 bp, Homo sapien
acaagcacagagtcactattgcggt

SEQ ID NO: 63014 - DNA, 25 bp, Homo sapien
gtcactattgcggttagaagttggc

SEQ ID NO: 63015 - DNA, 25 bp, Homo sapien
tattgcggttagaagttggcagcat

SEQ ID NO: 63016 - DNA, 25 bp, Homo sapien
tgaagggattgcctccccctgctgg

SEQ ID NO: 63017 - DNA, 25 bp, Homo sapien
ggtctgcttcagcccaagaggaatc

SEQ ID NO: 63018 - DNA, 25 bp, Homo sapien
actattgcggttagaagttggcagc

SEQ ID NO: 63019 - DNA, 25 bp, Homo sapien
aacagacaagcacagagtcactatt

SEQ ID NO: 63020 - DNA, 25 bp, Homo sapien
attgcctccccctgctgggatcccc

SEQ ID NO: 63021 - DNA, 25 bp, Homo sapien
acaagcacagagtcactattgcggt

SEQ ID NO: 63022 - DNA, 25 bp, Homo sapien
caaaggcttgccctccagggagatg

SEQ ID NO: 63023 - DNA, 25 bp, Homo sapien
ctaaacagacaagcacagagtcact

SEQ ID NO: 63024 - DNA, 25 bp, Homo sapien
ttcagcccaagaggaatcaaaagat

SEQ ID NO: 63025 - DNA, 25 bp, Homo sapien
aacagacaagcacagagtcactatt

SEQ ID NO: 63026 - DNA, 25 bp, Homo sapien
ctaaacagacaagcacagagtcact

SEQ ID NO: 63027 - DNA, 25 bp, Homo sapien
caaaggcttgccctccagggagatg

SEQ ID NO: 63028 - DNA, 25 bp, Homo sapien
attgcctccccctgctgggatcccc

SEQ ID NO: 63029 - DNA, 25 bp, Homo sapien
tgaagggattgcctccccctgctgg

SEQ ID NO: 63030 - DNA, 25 bp, Homo sapien
ttcagcccaagaggaatcaaaagat

SEQ ID NO: 63031 - DNA, 25 bp, Homo sapien
ggtctgcttcagcccaagaggaatc

SEQ ID NO: 63032 - DNA, 25 bp, Homo sapien
tattgcggttagaagttggcagcat

SEQ ID NO: 63033 - DNA, 25 bp, Homo sapien
actattgcggttagaagttggcagc

SEQ ID NO: 63034 - DNA, 25 bp, Homo sapien
gtcactattgcggttagaagttggc

SEQ ID NO: 63035 - DNA, 25 bp, Homo sapien
acaagcacagagtcactattgcggt

SEQ ID NO: 63036 - DNA, 25 bp, Homo sapien
ttcagcccaagaggaatcaaaagat

SEQ ID NO: 63037 - DNA, 25 bp, Homo sapien
caaaggcttgccctccagggagatg

SEQ ID NO: 63038 - DNA, 25 bp, Homo sapien
actattgcggttagaagttggcagc

SEQ ID NO: 63039 - DNA, 25 bp, Homo sapien
tgaagggattgcctccccctgctgg

SEQ ID NO: 63040 - DNA, 25 bp, Homo sapien
attgcctccccctgctgggatcccc

SEQ ID NO: 63041 - DNA, 25 bp, Homo sapien
ctaaacagacaagcacagagtcact

SEQ ID NO: 63042 - DNA, 25 bp, Homo sapien
tattgcggttagaagttggcagcat

SEQ ID NO: 63043 - DNA, 25 bp, Homo sapien
ggtctgcttcagcccaagaggaatc

SEQ ID NO: 63044 - DNA, 25 bp, Homo sapien
acaagcacagagtcactattgcggt

SEQ ID NO: 63045 - DNA, 25 bp, Homo sapien
aacagacaagcacagagtcactatt

SEQ ID NO: 63046 - DNA, 25 bp, Homo sapien
gtcactattgcggttagaagttggc

SEQ ID NO: 63047 - DNA, 25 bp, Homo sapien
aacagacaagcacagagtcactatt

SEQ ID NO: 63048 - DNA, 25 bp, Homo sapien
ctaaacagacaagcacagagtcact

SEQ ID NO: 63049 - DNA, 25 bp, Homo sapien
caaaggcttgccctccagggagatg

SEQ ID NO: 63050 - DNA, 25 bp, Homo sapien
attgcctccccctgctgggatcccc

SEQ ID NO: 63051 - DNA, 25 bp, Homo sapien
tgaagggattgcctccccctgctgg

SEQ ID NO: 63052 - DNA, 25 bp, Homo sapien
ttcagcccaagaggaatcaaaagat

SEQ ID NO: 63053 - DNA, 25 bp, Homo sapien
ggtctgcttcagcccaagaggaatc

SEQ ID NO: 63054 - DNA, 25 bp, Homo sapien
tattgcggttagaagttggcagcat

SEQ ID NO: 63055 - DNA, 25 bp, Homo sapien
actattgcggttagaagttggcagc

SEQ ID NO: 63056 - DNA, 25 bp, Homo sapien
gtcactattgcggttagaagttggc

SEQ ID NO: 63057 - DNA, 25 bp, Homo sapien
acaagcacagagtcactattgcggt

SEQ ID NO: 63058 - DNA, 25 bp, Homo sapien
tattgcggttagaagttggcagcat

SEQ ID NO: 63059 - DNA, 25 bp, Homo sapien
gtcactattgcggttagaagttggc

SEQ ID NO: 63060 - DNA, 25 bp, Homo sapien
caaaggcttgccctccagggagatg

SEQ ID NO: 63061 - DNA, 25 bp, Homo sapien
ttcagcccaagaggaatcaaaagat

SEQ ID NO: 63062 - DNA, 25 bp, Homo sapien
tgaagggattgcctccccctgctgg

SEQ ID NO: 63063 - DNA, 25 bp, Homo sapien
acaagcacagagtcactattgcggt

SEQ ID NO: 63064 - DNA, 25 bp, Homo sapien
attgcctccccctgctgggatcccc

SEQ ID NO: 63065 - DNA, 25 bp, Homo sapien
ggtctgcttcagcccaagaggaatc

SEQ ID NO: 63066 - DNA, 25 bp, Homo sapien
ctaaacagacaagcacagagtcact

SEQ ID NO: 63067 - DNA, 25 bp, Homo sapien
aacagacaagcacagagtcactatt

SEQ ID NO: 63068 - DNA, 25 bp, Homo sapien
actattgcggttagaagttggcagc

SEQ ID NO: 63069 - DNA, 25 bp, Homo sapien
aacagacaagcacagagtcactatt

SEQ ID NO: 63070 - DNA, 25 bp, Homo sapien
ctaaacagacaagcacagagtcact

SEQ ID NO: 63071 - DNA, 25 bp, Homo sapien
caaaggcttgccctccagggagatg

SEQ ID NO: 63072 - DNA, 25 bp, Homo sapien
attgcctccccctgctgggatcccc

SEQ ID NO: 63073 - DNA, 25 bp, Homo sapien
tgaagggattgcctccccctgctgg

SEQ ID NO: 63074 - DNA, 25 bp, Homo sapien
ttcagcccaagaggaatcaaaagat

SEQ ID NO: 63075 - DNA, 25 bp, Homo sapien
ggtctgcttcagcccaagaggaatc

SEQ ID NO: 63076 - DNA, 25 bp, Homo sapien
tattgcggttagaagttggcagcat

SEQ ID NO: 63077 - DNA, 25 bp, Homo sapien
actattgcggttagaagttggcagc

SEQ ID NO: 63078 - DNA, 25 bp, Homo sapien
gtcactattgcggttagaagttggc

SEQ ID NO: 63079 - DNA, 25 bp, Homo sapien
acaagcacagagtcactattgcggt

SEQ ID NO: 63080 - DNA, 25 bp, Homo sapien
ggtctgcttcagcccaagaggaatc

SEQ ID NO: 63081 - DNA, 25 bp, Homo sapien
attgcctccccctgctgggatcccc

SEQ ID NO: 63082 - DNA, 25 bp, Homo sapien
ctaaacagacaagcacagagtcact

SEQ ID NO: 63083 - DNA, 25 bp, Homo sapien
ttcagcccaagaggaatcaaaagat

SEQ ID NO: 63084 - DNA, 25 bp, Homo sapien
acaagcacagagtcactattgcggt

SEQ ID NO: 63085 - DNA, 25 bp, Homo sapien
tattgcggttagaagttggcagcat

SEQ ID NO: 63086 - DNA, 25 bp, Homo sapien
tgaagggattgcctccccctgctgg

SEQ ID NO: 63087 - DNA, 25 bp, Homo sapien
aacagacaagcacagagtcactatt

SEQ ID NO: 63088 - DNA, 25 bp, Homo sapien
caaaggcttgccctccagggagatg

SEQ ID NO: 63089 - DNA, 25 bp, Homo sapien
gtcactattgcggttagaagttggc

SEQ ID NO: 63090 - DNA, 25 bp, Homo sapien
actattgcggttagaagttggcagc

SEQ ID NO: 63091 - DNA, 25 bp, Homo sapien
aacagacaagcacagagtcactatt

SEQ ID NO: 63092 - DNA, 25 bp, Homo sapien
ctaaacagacaagcacagagtcact

SEQ ID NO: 63093 - DNA, 25 bp, Homo sapien
caaaggcttgccctccagggagatg

SEQ ID NO: 63094 - DNA, 25 bp, Homo sapien
attgcctccccctgctgggatcccc

SEQ ID NO: 63095 - DNA, 25 bp, Homo sapien
tgaagggattgcctccccctgctgg

SEQ ID NO: 63096 - DNA, 25 bp, Homo sapien
ttcagcccaagaggaatcaaaagat

SEQ ID NO: 63097 - DNA, 25 bp, Homo sapien
ggtctgcttcagcccaagaggaatc

SEQ ID NO: 63098 - DNA, 25 bp, Homo sapien
tattgcggttagaagttggcagcat

SEQ ID NO: 63099 - DNA, 25 bp, Homo sapien
actattgcggttagaagttggcagc

SEQ ID NO: 63100 - DNA, 25 bp, Homo sapien
gtcactattgcggttagaagttggc

SEQ ID NO: 63101 - DNA, 25 bp, Homo sapien
acaagcacagagtcactattgcggt

SEQ ID NO: 63102 - DNA, 25 bp, Homo sapien
aacagacaagcacagagtcactatt

SEQ ID NO: 63103 - DNA, 25 bp, Homo sapien
ctaaacagacaagcacagagtcact

SEQ ID NO: 63104 - DNA, 25 bp, Homo sapien
caaaggcttgccctccagggagatg

SEQ ID NO: 63105 - DNA, 25 bp, Homo sapien
attgcctccccctgctgggatcccc

SEQ ID NO: 63106 - DNA, 25 bp, Homo sapien
tgaagggattgcctccccctgctgg

SEQ ID NO: 63107 - DNA, 25 bp, Homo sapien
ttcagcccaagaggaatcaaaagat

SEQ ID NO: 63108 - DNA, 25 bp, Homo sapien
ggtctgcttcagcccaagaggaatc

SEQ ID NO: 63109 - DNA, 25 bp, Homo sapien
tattgcggttagaagttggcagcat

SEQ ID NO: 63110 - DNA, 25 bp, Homo sapien
actattgcggttagaagttggcagc

SEQ ID NO: 63111 - DNA, 25 bp, Homo sapien
gtcactattgcggttagaagttggc

SEQ ID NO: 63112 - DNA, 25 bp, Homo sapien
acaagcacagagtcactattgcggt

SEQ ID NO: 63113 - DNA, 25 bp, Homo sapien
aacagacaagcacagagtcactatt

SEQ ID NO: 63114 - DNA, 25 bp, Homo sapien
ggtctgcttcagcccaagaggaatc

SEQ ID NO: 63115 - DNA, 25 bp, Homo sapien
ctaaacagacaagcacagagtcact

SEQ ID NO: 63116 - DNA, 25 bp, Homo sapien
gtcactattgcggttagaagttggc

SEQ ID NO: 63117 - DNA, 25 bp, Homo sapien
attgcctccccctgctgggatcccc

SEQ ID NO: 63118 - DNA, 25 bp, Homo sapien
tgaagggattgcctccccctgctgg

SEQ ID NO: 63119 - DNA, 25 bp, Homo sapien
ttcagcccaagaggaatcaaaagat

SEQ ID NO: 63120 - DNA, 25 bp, Homo sapien
acaagcacagagtcactattgcggt

SEQ ID NO: 63121 - DNA, 25 bp, Homo sapien
tattgcggttagaagttggcagcat

SEQ ID NO: 63122 - DNA, 25 bp, Homo sapien
actattgcggttagaagttggcagc

SEQ ID NO: 63123 - DNA, 25 bp, Homo sapien
caaaggcttgccctccagggagatg

SEQ ID NO: 63124 - DNA, 25 bp, Homo sapien
ggtctgcttcagcccaagaggaatc

SEQ ID NO: 63125 - DNA, 25 bp, Homo sapien
gtcactattgcggttagaagttggc

SEQ ID NO: 63126 - DNA, 25 bp, Homo sapien
attgcctccccctgctgggatcccc

SEQ ID NO: 63127 - DNA, 25 bp, Homo sapien
ctaaacagacaagcacagagtcact

SEQ ID NO: 63128 - DNA, 25 bp, Homo sapien
tgaagggattgcctccccctgctgg

SEQ ID NO: 63129 - DNA, 25 bp, Homo sapien
ttcagcccaagaggaatcaaaagat

SEQ ID NO: 63130 - DNA, 25 bp, Homo sapien
acaagcacagagtcactattgcggt

SEQ ID NO: 63131 - DNA, 25 bp, Homo sapien
tattgcggttagaagttggcagcat

SEQ ID NO: 63132 - DNA, 25 bp, Homo sapien
aacagacaagcacagagtcactatt

SEQ ID NO: 63133 - DNA, 25 bp, Homo sapien
actattgcggttagaagttggcagc

SEQ ID NO: 63134 - DNA, 25 bp, Homo sapien
caaaggcttgccctccagggagatg

SEQ ID NO: 63135 - DNA, 25 bp, Homo sapien
ggtctgcttcagcccaagaggaatc

SEQ ID NO: 63136 - DNA, 25 bp, Homo sapien
gtcactattgcggttagaagttggc

SEQ ID NO: 63137 - DNA, 25 bp, Homo sapien
attgcctccccctgctgggatcccc

SEQ ID NO: 63138 - DNA, 25 bp, Homo sapien
tgaagggattgcctccccctgctgg

SEQ ID NO: 63139 - DNA, 25 bp, Homo sapien
ttcagcccaagaggaatcaaaagat

SEQ ID NO: 63140 - DNA, 25 bp, Homo sapien
acaagcacagagtcactattgcggt

SEQ ID NO: 63141 - DNA, 25 bp, Homo sapien
actattgcggttagaagttggcagc

SEQ ID NO: 63142 - DNA, 25 bp, Homo sapien
tattgcggttagaagttggcagcat

SEQ ID NO: 63143 - DNA, 25 bp, Homo sapien
ctaaacagacaagcacagagtcact

SEQ ID NO: 63144 - DNA, 25 bp, Homo sapien
aacagacaagcacagagtcactatt

SEQ ID NO: 63145 - DNA, 25 bp, Homo sapien
caaaggcttgccctccagggagatg

SEQ ID NO: 63146 - DNA, 25 bp, Homo sapien
ggtctgcttcagcccaagaggaatc

SEQ ID NO: 63147 - DNA, 25 bp, Homo sapien
gtcactattgcggttagaagttggc

SEQ ID NO: 63148 - DNA, 25 bp, Homo sapien
attgcctccccctgctgggatcccc

SEQ ID NO: 63149 - DNA, 25 bp, Homo sapien
tgaagggattgcctccccctgctgg

SEQ ID NO: 63150 - DNA, 25 bp, Homo sapien
ttcagcccaagaggaatcaaaagat

SEQ ID NO: 63151 - DNA, 25 bp, Homo sapien
acaagcacagagtcactattgcggt

SEQ ID NO: 63152 - DNA, 25 bp, Homo sapien
actattgcggttagaagttggcagc

SEQ ID NO: 63153 - DNA, 25 bp, Homo sapien
tattgcggttagaagttggcagcat

SEQ ID NO: 63154 - DNA, 25 bp, Homo sapien
aacagacaagcacagagtcactatt

SEQ ID NO: 63155 - DNA, 25 bp, Homo sapien
ctaaacagacaagcacagagtcact

SEQ ID NO: 63156 - DNA, 25 bp, Homo sapien
caaaggcttgccctccagggagatg

SEQ ID NO: 63157 - DNA, 25 bp, Homo sapien
aacagacaagcacagagtcactatt

SEQ ID NO: 63158 - DNA, 25 bp, Homo sapien
ggtctgcttcagcccaagaggaatc

SEQ ID NO: 63159 - DNA, 25 bp, Homo sapien
gtcactattgcggttagaagttggc

SEQ ID NO: 63160 - DNA, 25 bp, Homo sapien
ctaaacagacaagcacagagtcact

SEQ ID NO: 63161 - DNA, 25 bp, Homo sapien
attgcctccccctgctgggatcccc

SEQ ID NO: 63162 - DNA, 25 bp, Homo sapien
tgaagggattgcctccccctgctgg

SEQ ID NO: 63163 - DNA, 25 bp, Homo sapien
ttcagcccaagaggaatcaaaagat

SEQ ID NO: 63164 - DNA, 25 bp, Homo sapien
acaagcacagagtcactattgcggt

SEQ ID NO: 63165 - DNA, 25 bp, Homo sapien
tattgcggttagaagttggcagcat

SEQ ID NO: 63166 - DNA, 25 bp, Homo sapien
actattgcggttagaagttggcagc

SEQ ID NO: 63167 - DNA, 25 bp, Homo sapien
caaaggcttgccctccagggagatg

SEQ ID NO: 63168 - DNA, 25 bp, Homo sapien
ctaaacagacaagcacagagtcact

SEQ ID NO: 63169 - DNA, 25 bp, Homo sapien
ggtctgcttcagcccaagaggaatc

SEQ ID NO: 63170 - DNA, 25 bp, Homo sapien
gtcactattgcggttagaagttggc

SEQ ID NO: 63171 - DNA, 25 bp, Homo sapien
attgcctccccctgctgggatcccc

SEQ ID NO: 63172 - DNA, 25 bp, Homo sapien
tgaagggattgcctccccctgctgg

SEQ ID NO: 63173 - DNA, 25 bp, Homo sapien
ttcagcccaagaggaatcaaaagat

SEQ ID NO: 63174 - DNA, 25 bp, Homo sapien
aacagacaagcacagagtcactatt

SEQ ID NO: 63175 - DNA, 25 bp, Homo sapien
tattgcggttagaagttggcagcat

SEQ ID NO: 63176 - DNA, 25 bp, Homo sapien
acaagcacagagtcactattgcggt

SEQ ID NO: 63177 - DNA, 25 bp, Homo sapien
actattgcggttagaagttggcagc

SEQ ID NO: 63178 - DNA, 25 bp, Homo sapien
caaaggcttgccctccagggagatg

SEQ ID NO: 63179 - DNA, 25 bp, Homo sapien
ggtctgcttcagcccaagaggaatc

SEQ ID NO: 63180 - DNA, 25 bp, Homo sapien
gtcactattgcggttagaagttggc

SEQ ID NO: 63181 - DNA, 25 bp, Homo sapien
attgcctccccctgctgggatcccc

SEQ ID NO: 63182 - DNA, 25 bp, Homo sapien
ctaaacagacaagcacagagtcact

SEQ ID NO: 63183 - DNA, 25 bp, Homo sapien
tgaagggattgcctccccctgctgg

SEQ ID NO: 63184 - DNA, 25 bp, Homo sapien
ttcagcccaagaggaatcaaaagat

SEQ ID NO: 63185 - DNA, 25 bp, Homo sapien
acaagcacagagtcactattgcggt

SEQ ID NO: 63186 - DNA, 25 bp, Homo sapien
actattgcggttagaagttggcagc

SEQ ID NO: 63187 - DNA, 25 bp, Homo sapien
tattgcggttagaagttggcagcat

SEQ ID NO: 63188 - DNA, 25 bp, Homo sapien
aacagacaagcacagagtcactatt

SEQ ID NO: 63189 - DNA, 25 bp, Homo sapien
caaaggcttgccctccagggagatg

SEQ ID NO: 63190 - DNA, 25 bp, Homo sapien
ggtctgcttcagcccaagaggaatc

SEQ ID NO: 63191 - DNA, 25 bp, Homo sapien
gtcactattgcggttagaagttggc

SEQ ID NO: 63192 - DNA, 25 bp, Homo sapien
attgcctccccctgctgggatcccc

SEQ ID NO: 63193 - DNA, 25 bp, Homo sapien
tgaagggattgcctccccctgctgg

SEQ ID NO: 63194 - DNA, 25 bp, Homo sapien
ctaaacagacaagcacagagtcact

SEQ ID NO: 63195 - DNA, 25 bp, Homo sapien
ttcagcccaagaggaatcaaaagat

SEQ ID NO: 63196 - DNA, 25 bp, Homo sapien
acaagcacagagtcactattgcggt

SEQ ID NO: 63197 - DNA, 25 bp, Homo sapien
actattgcggttagaagttggcagc

SEQ ID NO: 63198 - DNA, 25 bp, Homo sapien
tattgcggttagaagttggcagcat

SEQ ID NO: 63199 - DNA, 25 bp, Homo sapien
aacagacaagcacagagtcactatt

SEQ ID NO: 63200 - DNA, 25 bp, Homo sapien
caaaggcttgccctccagggagatg

SEQ ID NO: 63201 - DNA, 25 bp, Homo sapien
ggtctgcttcagcccaagaggaatc

SEQ ID NO: 63202 - DNA, 25 bp, Homo sapien
attgcctccccctgctgggatcccc

SEQ ID NO: 63203 - DNA, 25 bp, Homo sapien
gtcactattgcggttagaagttggc

SEQ ID NO: 63204 - DNA, 25 bp, Homo sapien
tgaagggattgcctccccctgctgg

SEQ ID NO: 63205 - DNA, 25 bp, Homo sapien
ttcagcccaagaggaatcaaaagat

SEQ ID NO: 63206 - DNA, 25 bp, Homo sapien
ctaaacagacaagcacagagtcact

SEQ ID NO: 63207 - DNA, 25 bp, Homo sapien
acaagcacagagtcactattgcggt

SEQ ID NO: 63208 - DNA, 25 bp, Homo sapien
aacagacaagcacagagtcactatt

SEQ ID NO: 63209 - DNA, 25 bp, Homo sapien
tattgcggttagaagttggcagcat

SEQ ID NO: 63210 - DNA, 25 bp, Homo sapien
actattgcggttagaagttggcagc

SEQ ID NO: 63211 - DNA, 25 bp, Homo sapien
caaaggcttgccctccagggagatg

SEQ ID NO: 63212 - DNA, 25 bp, Homo sapien
ctaaacagacaagcacagagtcact

SEQ ID NO: 63213 - DNA, 25 bp, Homo sapien
gtcactattgcggttagaagttggc

SEQ ID NO: 63214 - DNA, 25 bp, Homo sapien
actattgcggttagaagttggcagc

SEQ ID NO: 63215 - DNA, 25 bp, Homo sapien
aacagacaagcacagagtcactatt

SEQ ID NO: 63216 - DNA, 25 bp, Homo sapien
tattgcggttagaagttggcagcat

SEQ ID NO: 63217 - DNA, 25 bp, Homo sapien
ggtctgcttcagcccaagaggaatc

SEQ ID NO: 63218 - DNA, 25 bp, Homo sapien
acaagcacagagtcactattgcggt

SEQ ID NO: 63219 - DNA, 25 bp, Homo sapien
caaaggcttgccctccagggagatg

SEQ ID NO: 63220 - DNA, 25 bp, Homo sapien
tgaagggattgcctccccctgctgg

SEQ ID NO: 63221 - DNA, 25 bp, Homo sapien
attgcctccccctgctgggatcccc

SEQ ID NO: 63222 - DNA, 25 bp, Homo sapien
ttcagcccaagaggaatcaaaagat

SEQ ID NO: 63223 - DNA, 25 bp, Homo sapien
ggtctgcttcagcccaagaggaatc

SEQ ID NO: 63224 - DNA, 25 bp, Homo sapien
gtcactattgcggttagaagttggc

SEQ ID NO: 63225 - DNA, 25 bp, Homo sapien
attgcctccccctgctgggatcccc

SEQ ID NO: 63226 - DNA, 25 bp, Homo sapien
ctaaacagacaagcacagagtcact

SEQ ID NO: 63227 - DNA, 25 bp, Homo sapien
tgaagggattgcctccccctgctgg

SEQ ID NO: 63228 - DNA, 25 bp, Homo sapien
ttcagcccaagaggaatcaaaagat

SEQ ID NO: 63229 - DNA, 25 bp, Homo sapien
acaagcacagagtcactattgcggt

SEQ ID NO: 63230 - DNA, 25 bp, Homo sapien
tattgcggttagaagttggcagcat

SEQ ID NO: 63231 - DNA, 25 bp, Homo sapien
actattgcggttagaagttggcagc

SEQ ID NO: 63232 - DNA, 25 bp, Homo sapien
aacagacaagcacagagtcactatt

SEQ ID NO: 63233 - DNA, 25 bp, Homo sapien
caaaggcttgccctccagggagatg

SEQ ID NO: 63234 - DNA, 25 bp, Homo sapien
aacagacaagcacagagtcactatt

SEQ ID NO: 63235 - DNA, 25 bp, Homo sapien
ctaaacagacaagcacagagtcact

SEQ ID NO: 63236 - DNA, 25 bp, Homo sapien
caaaggcttgccctccagggagatg

SEQ ID NO: 63237 - DNA, 25 bp, Homo sapien
attgcctccccctgctgggatcccc

SEQ ID NO: 63238 - DNA, 25 bp, Homo sapien
tgaagggattgcctccccctgctgg

SEQ ID NO: 63239 - DNA, 25 bp, Homo sapien
ttcagcccaagaggaatcaaaagat

SEQ ID NO: 63240 - DNA, 25 bp, Homo sapien
ggtctgcttcagcccaagaggaatc

SEQ ID NO: 63241 - DNA, 25 bp, Homo sapien
tattgcggttagaagttggcagcat

SEQ ID NO: 63242 - DNA, 25 bp, Homo sapien
actattgcggttagaagttggcagc

SEQ ID NO: 63243 - DNA, 25 bp, Homo sapien
gtcactattgcggttagaagttggc

SEQ ID NO: 63244 - DNA, 25 bp, Homo sapien
acaagcacagagtcactattgcggt

SEQ ID NO: 63245 - DNA, 25 bp, Homo sapien
atgctgccaacttctaaccgcaata

SEQ ID NO: 63246 - DNA, 25 bp, Homo sapien
aatagtgactctgtgcttgtctgtt

SEQ ID NO: 63247 - DNA, 25 bp, Homo sapien
ggggatcccagcagggggaggcaat

SEQ ID NO: 63248 - DNA, 25 bp, Homo sapien
catctccctggagggcaagcctttg

SEQ ID NO: 63249 - DNA, 25 bp, Homo sapien
atcttttgattcctcttgggctgaa

SEQ ID NO: 63250 - DNA, 25 bp, Homo sapien
gccaacttctaaccgcaatagtgac

SEQ ID NO: 63251 - DNA, 25 bp, Homo sapien
gattcctcttgggctgaagcagacc

SEQ ID NO: 63252 - DNA, 25 bp, Homo sapien
gctgccaacttctaaccgcaatagt

SEQ ID NO: 63253 - DNA, 25 bp, Homo sapien
accgcaatagtgactctgtgcttgt

SEQ ID NO: 63254 - DNA, 25 bp, Homo sapien
ccagcagggggaggcaatcccttca

SEQ ID NO: 63255 - DNA, 25 bp, Homo sapien
agtgactctgtgcttgtctgtttag

SEQ ID NO: 63256 - DNA, 25 bp, Homo sapien
ctaaacagacaagcacagagtcact

SEQ ID NO: 63257 - DNA, 25 bp, Homo sapien
gtcactattgcggttagaagttggc

SEQ ID NO: 63258 - DNA, 25 bp, Homo sapien
ggtctgcttcagcccaagaggaatc

SEQ ID NO: 63259 - DNA, 25 bp, Homo sapien
attgcctccccctgctgggatcccc

SEQ ID NO: 63260 - DNA, 25 bp, Homo sapien
tgaagggattgcctccccctgctgg

SEQ ID NO: 63261 - DNA, 25 bp, Homo sapien
ttcagcccaagaggaatcaaaagat

SEQ ID NO: 63262 - DNA, 25 bp, Homo sapien
tattgcggttagaagttggcagcat

SEQ ID NO: 63263 - DNA, 25 bp, Homo sapien
acaagcacagagtcactattgcggt

SEQ ID NO: 63264 - DNA, 25 bp, Homo sapien
actattgcggttagaagttggcagc

SEQ ID NO: 63265 - DNA, 25 bp, Homo sapien
aacagacaagcacagagtcactatt

SEQ ID NO: 63266 - DNA, 25 bp, Homo sapien
caaaggcttgccctccagggagatg

SEQ ID NO: 63267 - DNA, 25 bp, Homo sapien
aacagacaagcacagagtcactatt

SEQ ID NO: 63268 - DNA, 25 bp, Homo sapien
ctaaacagacaagcacagagtcact

SEQ ID NO: 63269 - DNA, 25 bp, Homo sapien
caaaggcttgccctccagggagatg

SEQ ID NO: 63270 - DNA, 25 bp, Homo sapien
ttcagcccaagaggaatcaaaagat

SEQ ID NO: 63271 - DNA, 25 bp, Homo sapien
tattgcggttagaagttggcagcat

SEQ ID NO: 63272 - DNA, 25 bp, Homo sapien
ggtctgcttcagcccaagaggaatc

SEQ ID NO: 63273 - DNA, 25 bp, Homo sapien
tgaagggattgcctccccctgctgg

SEQ ID NO: 63274 - DNA, 25 bp, Homo sapien
acaagcacagagtcactattgcggt

SEQ ID NO: 63275 - DNA, 25 bp, Homo sapien
gtcactattgcggttagaagttggc

SEQ ID NO: 63276 - DNA, 25 bp, Homo sapien
attgcctccccctgctgggatcccc

SEQ ID NO: 63277 - DNA, 25 bp, Homo sapien
actattgcggttagaagttggcagc

SEQ ID NO: 63278 - DNA, 25 bp, Homo sapien
aacagacaagcacagagtcactatt

SEQ ID NO: 63279 - DNA, 25 bp, Homo sapien
ctaaacagacaagcacagagtcact

SEQ ID NO: 63280 - DNA, 25 bp, Homo sapien
caaaggcttgccctccagggagatg

SEQ ID NO: 63281 - DNA, 25 bp, Homo sapien
attgcctccccctgctgggatcccc

SEQ ID NO: 63282 - DNA, 25 bp, Homo sapien
tgaagggattgcctccccctgctgg

SEQ ID NO: 63283 - DNA, 25 bp, Homo sapien
ttcagcccaagaggaatcaaaagat

SEQ ID NO: 63284 - DNA, 25 bp, Homo sapien
ggtctgcttcagcccaagaggaatc

SEQ ID NO: 63285 - DNA, 25 bp, Homo sapien
tattgcggttagaagttggcagcat

SEQ ID NO: 63286 - DNA, 25 bp, Homo sapien
actattgcggttagaagttggcagc

SEQ ID NO: 63287 - DNA, 25 bp, Homo sapien
gtcactattgcggttagaagttggc

SEQ ID NO: 63288 - DNA, 25 bp, Homo sapien
acaagcacagagtcactattgcggt

SEQ ID NO: 63289 - DNA, 25 bp, Homo sapien
caaaggcttgccctccagggagatg

SEQ ID NO: 63290 - DNA, 25 bp, Homo sapien
attgcctccccctgctgggatcccc

SEQ ID NO: 63291 - DNA, 25 bp, Homo sapien
actattgcggttagaagttggcagc

SEQ ID NO: 63292 - DNA, 25 bp, Homo sapien
gtcactattgcggttagaagttggc

SEQ ID NO: 63293 - DNA, 25 bp, Homo sapien
ggtctgcttcagcccaagaggaatc

SEQ ID NO: 63294 - DNA, 25 bp, Homo sapien
ttcagcccaagaggaatcaaaagat

SEQ ID NO: 63295 - DNA, 25 bp, Homo sapien
aacagacaagcacagagtcactatt

SEQ ID NO: 63296 - DNA, 25 bp, Homo sapien
tgaagggattgcctccccctgctgg

SEQ ID NO: 63297 - DNA, 25 bp, Homo sapien
tattgcggttagaagttggcagcat

SEQ ID NO: 63298 - DNA, 25 bp, Homo sapien
acaagcacagagtcactattgcggt

SEQ ID NO: 63299 - DNA, 25 bp, Homo sapien
ctaaacagacaagcacagagtcact

SEQ ID NO: 63300 - DNA, 25 bp, Homo sapien
aacagacaagcacagagtcactatt

SEQ ID NO: 63301 - DNA, 25 bp, Homo sapien
ctaaacagacaagcacagagtcact

SEQ ID NO: 63302 - DNA, 25 bp, Homo sapien
caaaggcttgccctccagggagatg

SEQ ID NO: 63303 - DNA, 25 bp, Homo sapien
attgcctccccctgctgggatcccc

SEQ ID NO: 63304 - DNA, 25 bp, Homo sapien
tgaagggattgcctccccctgctgg

SEQ ID NO: 63305 - DNA, 25 bp, Homo sapien
ttcagcccaagaggaatcaaaagat

SEQ ID NO: 63306 - DNA, 25 bp, Homo sapien
ggtctgcttcagcccaagaggaatc

SEQ ID NO: 63307 - DNA, 25 bp, Homo sapien
tattgcggttagaagttggcagcat

SEQ ID NO: 63308 - DNA, 25 bp, Homo sapien
actattgcggttagaagttggcagc

SEQ ID NO: 63309 - DNA, 25 bp, Homo sapien
gtcactattgcggttagaagttggc

SEQ ID NO: 63310 - DNA, 25 bp, Homo sapien
acaagcacagagtcactattgcggt

SEQ ID NO: 63311 - DNA, 25 bp, Homo sapien
attgcctccccctgctgggatcccc

SEQ ID NO: 63312 - DNA, 25 bp, Homo sapien
actattgcggttagaagttggcagc

SEQ ID NO: 63313 - DNA, 25 bp, Homo sapien
gtcactattgcggttagaagttggc

SEQ ID NO: 63314 - DNA, 25 bp, Homo sapien
ggtctgcttcagcccaagaggaatc

SEQ ID NO: 63315 - DNA, 25 bp, Homo sapien
tattgcggttagaagttggcagcat

SEQ ID NO: 63316 - DNA, 25 bp, Homo sapien
aacagacaagcacagagtcactatt

SEQ ID NO: 63317 - DNA, 25 bp, Homo sapien
ctaaacagacaagcacagagtcact

SEQ ID NO: 63318 - DNA, 25 bp, Homo sapien
acaagcacagagtcactattgcggt

SEQ ID NO: 63319 - DNA, 25 bp, Homo sapien
caaaggcttgccctccagggagatg

SEQ ID NO: 63320 - DNA, 25 bp, Homo sapien
tgaagggattgcctccccctgctgg

SEQ ID NO: 63321 - DNA, 25 bp, Homo sapien
ttcagcccaagaggaatcaaaagat

SEQ ID NO: 63322 - DNA, 25 bp, Homo sapien
caaaggcttgccctccagggagatg

SEQ ID NO: 63323 - DNA, 25 bp, Homo sapien
attgcctccccctgctgggatcccc

SEQ ID NO: 63324 - DNA, 25 bp, Homo sapien
tgaagggattgcctccccctgctgg

SEQ ID NO: 63325 - DNA, 25 bp, Homo sapien
ttcagcccaagaggaatcaaaagat

SEQ ID NO: 63326 - DNA, 25 bp, Homo sapien
ggtctgcttcagcccaagaggaatc

SEQ ID NO: 63327 - DNA, 25 bp, Homo sapien
tattgcggttagaagttggcagcat

SEQ ID NO: 63328 - DNA, 25 bp, Homo sapien
actattgcggttagaagttggcagc

SEQ ID NO: 63329 - DNA, 25 bp, Homo sapien
gtcactattgcggttagaagttggc

SEQ ID NO: 63330 - DNA, 25 bp, Homo sapien
acaagcacagagtcactattgcggt

SEQ ID NO: 63331 - DNA, 25 bp, Homo sapien
aacagacaagcacagagtcactatt

SEQ ID NO: 63332 - DNA, 25 bp, Homo sapien
ctaaacagacaagcacagagtcact

SEQ ID NO: 63333 - DNA, 25 bp, Homo sapien
aacagacaagcacagagtcactatt

SEQ ID NO: 63334 - DNA, 25 bp, Homo sapien
ctaaacagacaagcacagagtcact

SEQ ID NO: 63335 - DNA, 25 bp, Homo sapien
caaaggcttgccctccagggagatg

SEQ ID NO: 63336 - DNA, 25 bp, Homo sapien
attgcctccccctgctgggatcccc

SEQ ID NO: 63337 - DNA, 25 bp, Homo sapien
tgaagggattgcctccccctgctgg

SEQ ID NO: 63338 - DNA, 25 bp, Homo sapien
ttcagcccaagaggaatcaaaagat

SEQ ID NO: 63339 - DNA, 25 bp, Homo sapien
ggtctgcttcagcccaagaggaatc

SEQ ID NO: 63340 - DNA, 25 bp, Homo sapien
tattgcggttagaagttggcagcat

SEQ ID NO: 63341 - DNA, 25 bp, Homo sapien
actattgcggttagaagttggcagc

SEQ ID NO: 63342 - DNA, 25 bp, Homo sapien
gtcactattgcggttagaagttggc

SEQ ID NO: 63343 - DNA, 25 bp, Homo sapien
acaagcacagagtcactattgcggt

SEQ ID NO: 63344 - DNA, 25 bp, Homo sapien
aacagacaagcacagagtcactatt

SEQ ID NO: 63345 - DNA, 25 bp, Homo sapien
attgcctccccctgctgggatcccc

SEQ ID NO: 63346 - DNA, 25 bp, Homo sapien
ctaaacagacaagcacagagtcact

SEQ ID NO: 63347 - DNA, 25 bp, Homo sapien
actattgcggttagaagttggcagc

SEQ ID NO: 63348 - DNA, 25 bp, Homo sapien
gtcactattgcggttagaagttggc

SEQ ID NO: 63349 - DNA, 25 bp, Homo sapien
acaagcacagagtcactattgcggt

SEQ ID NO: 63350 - DNA, 25 bp, Homo sapien
tattgcggttagaagttggcagcat

SEQ ID NO: 63351 - DNA, 25 bp, Homo sapien
caaaggcttgccctccagggagatg

SEQ ID NO: 63352 - DNA, 25 bp, Homo sapien
ggtctgcttcagcccaagaggaatc

SEQ ID NO: 63353 - DNA, 25 bp, Homo sapien
ttcagcccaagaggaatcaaaagat

SEQ ID NO: 63354 - DNA, 25 bp, Homo sapien
tgaagggattgcctccccctgctgg

SEQ ID NO: 63355 - DNA, 25 bp, Homo sapien
aacagacaagcacagagtcactatt

SEQ ID NO: 63356 - DNA, 25 bp, Homo sapien
ctaaacagacaagcacagagtcact

SEQ ID NO: 63357 - DNA, 25 bp, Homo sapien
caaaggcttgccctccagggagatg

SEQ ID NO: 63358 - DNA, 25 bp, Homo sapien
attgcctccccctgctgggatcccc

SEQ ID NO: 63359 - DNA, 25 bp, Homo sapien
tgaagggattgcctccccctgctgg

SEQ ID NO: 63360 - DNA, 25 bp, Homo sapien
ttcagcccaagaggaatcaaaagat

SEQ ID NO: 63361 - DNA, 25 bp, Homo sapien
ggtctgcttcagcccaagaggaatc

SEQ ID NO: 63362 - DNA, 25 bp, Homo sapien
tattgcggttagaagttggcagcat

SEQ ID NO: 63363 - DNA, 25 bp, Homo sapien
actattgcggttagaagttggcagc

SEQ ID NO: 63364 - DNA, 25 bp, Homo sapien
gtcactattgcggttagaagttggc

SEQ ID NO: 63365 - DNA, 25 bp, Homo sapien
acaagcacagagtcactattgcggt

SEQ ID NO: 63366 - DNA, 25 bp, Homo sapien
caaaggcttgccctccagggagatg

SEQ ID NO: 63367 - DNA, 25 bp, Homo sapien
acaagcacagagtcactattgcggt

SEQ ID NO: 63368 - DNA, 25 bp, Homo sapien
ggtctgcttcagcccaagaggaatc

SEQ ID NO: 63369 - DNA, 25 bp, Homo sapien
attgcctccccctgctgggatcccc

SEQ ID NO: 63370 - DNA, 25 bp, Homo sapien
tgaagggattgcctccccctgctgg

SEQ ID NO: 63371 - DNA, 25 bp, Homo sapien
gtcactattgcggttagaagttggc

SEQ ID NO: 63372 - DNA, 25 bp, Homo sapien
tattgcggttagaagttggcagcat

SEQ ID NO: 63373 - DNA, 25 bp, Homo sapien
ttcagcccaagaggaatcaaaagat

SEQ ID NO: 63374 - DNA, 25 bp, Homo sapien
actattgcggttagaagttggcagc

SEQ ID NO: 63375 - DNA, 25 bp, Homo sapien
ctaaacagacaagcacagagtcact

SEQ ID NO: 63376 - DNA, 25 bp, Homo sapien
aacagacaagcacagagtcactatt

SEQ ID NO: 63377 - DNA, 25 bp, Homo sapien
aacagacaagcacagagtcactatt

SEQ ID NO: 63378 - DNA, 25 bp, Homo sapien
ctaaacagacaagcacagagtcact

SEQ ID NO: 63379 - DNA, 25 bp, Homo sapien
caaaggcttgccctccagggagatg

SEQ ID NO: 63380 - DNA, 25 bp, Homo sapien
attgcctccccctgctgggatcccc

SEQ ID NO: 63381 - DNA, 25 bp, Homo sapien
tgaagggattgcctccccctgctgg

SEQ ID NO: 63382 - DNA, 25 bp, Homo sapien
ttcagcccaagaggaatcaaaagat

SEQ ID NO: 63383 - DNA, 25 bp, Homo sapien
ggtctgcttcagcccaagaggaatc

SEQ ID NO: 63384 - DNA, 25 bp, Homo sapien
tattgcggttagaagttggcagcat

SEQ ID NO: 63385 - DNA, 25 bp, Homo sapien
actattgcggttagaagttggcagc

SEQ ID NO: 63386 - DNA, 25 bp, Homo sapien
gtcactattgcggttagaagttggc

SEQ ID NO: 63387 - DNA, 25 bp, Homo sapien
acaagcacagagtcactattgcggt

SEQ ID NO: 63388 - DNA, 25 bp, Homo sapien
ttcagcccaagaggaatcaaaagat

SEQ ID NO: 63389 - DNA, 25 bp, Homo sapien
attgcctccccctgctgggatcccc

SEQ ID NO: 63390 - DNA, 25 bp, Homo sapien
tgaagggattgcctccccctgctgg

SEQ ID NO: 63391 - DNA, 25 bp, Homo sapien
tattgcggttagaagttggcagcat

SEQ ID NO: 63392 - DNA, 25 bp, Homo sapien
aacagacaagcacagagtcactatt

SEQ ID NO: 63393 - DNA, 25 bp, Homo sapien
gtcactattgcggttagaagttggc

SEQ ID NO: 63394 - DNA, 25 bp, Homo sapien
ggtctgcttcagcccaagaggaatc

SEQ ID NO: 63395 - DNA, 25 bp, Homo sapien
caaaggcttgccctccagggagatg

SEQ ID NO: 63396 - DNA, 25 bp, Homo sapien
ctaaacagacaagcacagagtcact

SEQ ID NO: 63397 - DNA, 25 bp, Homo sapien
acaagcacagagtcactattgcggt

SEQ ID NO: 63398 - DNA, 25 bp, Homo sapien
actattgcggttagaagttggcagc

SEQ ID NO: 63399 - DNA, 25 bp, Homo sapien
aacagacaagcacagagtcactatt

SEQ ID NO: 63400 - DNA, 25 bp, Homo sapien
ctaaacagacaagcacagagtcact

SEQ ID NO: 63401 - DNA, 25 bp, Homo sapien
caaaggcttgccctccagggagatg

SEQ ID NO: 63402 - DNA, 25 bp, Homo sapien
attgcctccccctgctgggatcccc

SEQ ID NO: 63403 - DNA, 25 bp, Homo sapien
tgaagggattgcctccccctgctgg

SEQ ID NO: 63404 - DNA, 25 bp, Homo sapien
ttcagcccaagaggaatcaaaagat

SEQ ID NO: 63405 - DNA, 25 bp, Homo sapien
ggtctgcttcagcccaagaggaatc

SEQ ID NO: 63406 - DNA, 25 bp, Homo sapien
tattgcggttagaagttggcagcat

SEQ ID NO: 63407 - DNA, 25 bp, Homo sapien
actattgcggttagaagttggcagc

SEQ ID NO: 63408 - DNA, 25 bp, Homo sapien
gtcactattgcggttagaagttggc

SEQ ID NO: 63409 - DNA, 25 bp, Homo sapien
acaagcacagagtcactattgcggt

SEQ ID NO: 63410 - DNA, 25 bp, Homo sapien
gtcactattgcggttagaagttggc

SEQ ID NO: 63411 - DNA, 25 bp, Homo sapien
ggtctgcttcagcccaagaggaatc

SEQ ID NO: 63412 - DNA, 25 bp, Homo sapien
tattgcggttagaagttggcagcat

SEQ ID NO: 63413 - DNA, 25 bp, Homo sapien
aacagacaagcacagagtcactatt

SEQ ID NO: 63414 - DNA, 25 bp, Homo sapien
tgaagggattgcctccccctgctgg

SEQ ID NO: 63415 - DNA, 25 bp, Homo sapien
ttcagcccaagaggaatcaaaagat

SEQ ID NO: 63416 - DNA, 25 bp, Homo sapien
caaaggcttgccctccagggagatg

SEQ ID NO: 63417 - DNA, 25 bp, Homo sapien
attgcctccccctgctgggatcccc

SEQ ID NO: 63418 - DNA, 25 bp, Homo sapien
actattgcggttagaagttggcagc

SEQ ID NO: 63419 - DNA, 25 bp, Homo sapien
acaagcacagagtcactattgcggt

SEQ ID NO: 63420 - DNA, 25 bp, Homo sapien
ctaaacagacaagcacagagtcact

SEQ ID NO: 63421 - DNA, 25 bp, Homo sapien
aacagacaagcacagagtcactatt

SEQ ID NO: 63422 - DNA, 25 bp, Homo sapien
ctaaacagacaagcacagagtcact

SEQ ID NO: 63423 - DNA, 25 bp, Homo sapien
caaaggcttgccctccagggagatg

SEQ ID NO: 63424 - DNA, 25 bp, Homo sapien
attgcctccccctgctgggatcccc

SEQ ID NO: 63425 - DNA, 25 bp, Homo sapien
tgaagggattgcctccccctgctgg

SEQ ID NO: 63426 - DNA, 25 bp, Homo sapien
ttcagcccaagaggaatcaaaagat

SEQ ID NO: 63427 - DNA, 25 bp, Homo sapien
ggtctgcttcagcccaagaggaatc

SEQ ID NO: 63428 - DNA, 25 bp, Homo sapien
tattgcggttagaagttggcagcat

SEQ ID NO: 63429 - DNA, 25 bp, Homo sapien
actattgcggttagaagttggcagc

SEQ ID NO: 63430 - DNA, 25 bp, Homo sapien
gtcactattgcggttagaagttggc

SEQ ID NO: 63431 - DNA, 25 bp, Homo sapien
acaagcacagagtcactattgcggt

SEQ ID NO: 63432 - DNA, 25 bp, Homo sapien
ggtctgcttcagcccaagaggaatc

SEQ ID NO: 63433 - DNA, 25 bp, Homo sapien
tgaagggattgcctccccctgctgg

SEQ ID NO: 63434 - DNA, 25 bp, Homo sapien
actattgcggttagaagttggcagc

SEQ ID NO: 63435 - DNA, 25 bp, Homo sapien
attgcctccccctgctgggatcccc

SEQ ID NO: 63436 - DNA, 25 bp, Homo sapien
tattgcggttagaagttggcagcat

SEQ ID NO: 63437 - DNA, 25 bp, Homo sapien
ttcagcccaagaggaatcaaaagat

SEQ ID NO: 63438 - DNA, 25 bp, Homo sapien
gtcactattgcggttagaagttggc

SEQ ID NO: 63439 - DNA, 25 bp, Homo sapien
acaagcacagagtcactattgcggt

SEQ ID NO: 63440 - DNA, 25 bp, Homo sapien
aacagacaagcacagagtcactatt

SEQ ID NO: 63441 - DNA, 25 bp, Homo sapien
ctaaacagacaagcacagagtcact

SEQ ID NO: 63442 - DNA, 25 bp, Homo sapien
caaaggcttgccctccagggagatg

SEQ ID NO: 63443 - DNA, 25 bp, Homo sapien
aacagacaagcacagagtcactatt

SEQ ID NO: 63444 - DNA, 25 bp, Homo sapien
tgaagggattgcctccccctgctgg

SEQ ID NO: 63445 - DNA, 25 bp, Homo sapien
actattgcggttagaagttggcagc

SEQ ID NO: 63446 - DNA, 25 bp, Homo sapien
attgcctccccctgctgggatcccc

SEQ ID NO: 63447 - DNA, 25 bp, Homo sapien
ctaaacagacaagcacagagtcact

SEQ ID NO: 63448 - DNA, 25 bp, Homo sapien
tattgcggttagaagttggcagcat

SEQ ID NO: 63449 - DNA, 25 bp, Homo sapien
ggtctgcttcagcccaagaggaatc

SEQ ID NO: 63450 - DNA, 25 bp, Homo sapien
acaagcacagagtcactattgcggt

SEQ ID NO: 63451 - DNA, 25 bp, Homo sapien
gtcactattgcggttagaagttggc

SEQ ID NO: 63452 - DNA, 25 bp, Homo sapien
caaaggcttgccctccagggagatg

SEQ ID NO: 63453 - DNA, 25 bp, Homo sapien
ttcagcccaagaggaatcaaaagat

SEQ ID NO: 63454 - DNA, 25 bp, Homo sapien
aacagacaagcacagagtcactatt

SEQ ID NO: 63455 - DNA, 25 bp, Homo sapien
ctaaacagacaagcacagagtcact

SEQ ID NO: 63456 - DNA, 25 bp, Homo sapien
caaaggcttgccctccagggagatg

SEQ ID NO: 63457 - DNA, 25 bp, Homo sapien
attgcctccccctgctgggatcccc

SEQ ID NO: 63458 - DNA, 25 bp, Homo sapien
tgaagggattgcctccccctgctgg

SEQ ID NO: 63459 - DNA, 25 bp, Homo sapien
ttcagcccaagaggaatcaaaagat

SEQ ID NO: 63460 - DNA, 25 bp, Homo sapien
ggtctgcttcagcccaagaggaatc

SEQ ID NO: 63461 - DNA, 25 bp, Homo sapien
tattgcggttagaagttggcagcat

SEQ ID NO: 63462 - DNA, 25 bp, Homo sapien
actattgcggttagaagttggcagc

SEQ ID NO: 63463 - DNA, 25 bp, Homo sapien
gtcactattgcggttagaagttggc

SEQ ID NO: 63464 - DNA, 25 bp, Homo sapien
acaagcacagagtcactattgcggt

SEQ ID NO: 63465 - DNA, 25 bp, Homo sapien
gtcactattgcggttagaagttggc

SEQ ID NO: 63466 - DNA, 25 bp, Homo sapien
tattgcggttagaagttggcagcat

SEQ ID NO: 63467 - DNA, 25 bp, Homo sapien
ttcagcccaagaggaatcaaaagat

SEQ ID NO: 63468 - DNA, 25 bp, Homo sapien
ctaaacagacaagcacagagtcact

SEQ ID NO: 63469 - DNA, 25 bp, Homo sapien
caaaggcttgccctccagggagatg

SEQ ID NO: 63470 - DNA, 25 bp, Homo sapien
attgcctccccctgctgggatcccc

SEQ ID NO: 63471 - DNA, 25 bp, Homo sapien
acaagcacagagtcactattgcggt

SEQ ID NO: 63472 - DNA, 25 bp, Homo sapien
actattgcggttagaagttggcagc

SEQ ID NO: 63473 - DNA, 25 bp, Homo sapien
ggtctgcttcagcccaagaggaatc

SEQ ID NO: 63474 - DNA, 25 bp, Homo sapien
aacagacaagcacagagtcactatt

SEQ ID NO: 63475 - DNA, 25 bp, Homo sapien
tgaagggattgcctccccctgctgg

SEQ ID NO: 63476 - DNA, 25 bp, Homo sapien
caaaggcttgccctccagggagatg

SEQ ID NO: 63477 - DNA, 25 bp, Homo sapien
attgcctccccctgctgggatcccc

SEQ ID NO: 63478 - DNA, 25 bp, Homo sapien
tgaagggattgcctccccctgctgg

SEQ ID NO: 63479 - DNA, 25 bp, Homo sapien
ttcagcccaagaggaatcaaaagat

SEQ ID NO: 63480 - DNA, 25 bp, Homo sapien
ggtctgcttcagcccaagaggaatc

SEQ ID NO: 63481 - DNA, 25 bp, Homo sapien
tattgcggttagaagttggcagcat

SEQ ID NO: 63482 - DNA, 25 bp, Homo sapien
actattgcggttagaagttggcagc

SEQ ID NO: 63483 - DNA, 25 bp, Homo sapien
gtcactattgcggttagaagttggc

SEQ ID NO: 63484 - DNA, 25 bp, Homo sapien
acaagcacagagtcactattgcggt

SEQ ID NO: 63485 - DNA, 25 bp, Homo sapien
aacagacaagcacagagtcactatt

SEQ ID NO: 63486 - DNA, 25 bp, Homo sapien
ctaaacagacaagcacagagtcact

SEQ ID NO: 63487 - DNA, 25 bp, Homo sapien
actattgcggttagaagttggcagc

SEQ ID NO: 63488 - DNA, 25 bp, Homo sapien
ttcagcccaagaggaatcaaaagat

SEQ ID NO: 63489 - DNA, 25 bp, Homo sapien
attgcctccccctgctgggatcccc

SEQ ID NO: 63490 - DNA, 25 bp, Homo sapien
aacagacaagcacagagtcactatt

SEQ ID NO: 63491 - DNA, 25 bp, Homo sapien
ctaaacagacaagcacagagtcact

SEQ ID NO: 63492 - DNA, 25 bp, Homo sapien
tgaagggattgcctccccctgctgg

SEQ ID NO: 63493 - DNA, 25 bp, Homo sapien
ggtctgcttcagcccaagaggaatc

SEQ ID NO: 63494 - DNA, 25 bp, Homo sapien
acaagcacagagtcactattgcggt

SEQ ID NO: 63495 - DNA, 25 bp, Homo sapien
caaaggcttgccctccagggagatg

SEQ ID NO: 63496 - DNA, 25 bp, Homo sapien
gtcactattgcggttagaagttggc

SEQ ID NO: 63497 - DNA, 25 bp, Homo sapien
tattgcggttagaagttggcagcat

SEQ ID NO: 63498 - DNA, 25 bp, Homo sapien
aacagacaagcacagagtcactatt

SEQ ID NO: 63499 - DNA, 25 bp, Homo sapien
ctaaacagacaagcacagagtcact

SEQ ID NO: 63500 - DNA, 25 bp, Homo sapien
caaaggcttgccctccagggagatg

SEQ ID NO: 63501 - DNA, 25 bp, Homo sapien
attgcctccccctgctgggatcccc

SEQ ID NO: 63502 - DNA, 25 bp, Homo sapien
tgaagggattgcctccccctgctgg

SEQ ID NO: 63503 - DNA, 25 bp, Homo sapien
ttcagcccaagaggaatcaaaagat

SEQ ID NO: 63504 - DNA, 25 bp, Homo sapien
ggtctgcttcagcccaagaggaatc

SEQ ID NO: 63505 - DNA, 25 bp, Homo sapien
tattgcggttagaagttggcagcat

SEQ ID NO: 63506 - DNA, 25 bp, Homo sapien
actattgcggttagaagttggcagc

SEQ ID NO: 63507 - DNA, 25 bp, Homo sapien
gtcactattgcggttagaagttggc

SEQ ID NO: 63508 - DNA, 25 bp, Homo sapien
acaagcacagagtcactattgcggt

SEQ ID NO: 63509 - DNA, 25 bp, Homo sapien
caaaggcttgccctccagggagatg

SEQ ID NO: 63510 - DNA, 25 bp, Homo sapien
tattgcggttagaagttggcagcat

SEQ ID NO: 63511 - DNA, 25 bp, Homo sapien
tgaagggattgcctccccctgctgg

SEQ ID NO: 63512 - DNA, 25 bp, Homo sapien
acaagcacagagtcactattgcggt

SEQ ID NO: 63513 - DNA, 25 bp, Homo sapien
ctaaacagacaagcacagagtcact

SEQ ID NO: 63514 - DNA, 25 bp, Homo sapien
aacagacaagcacagagtcactatt

SEQ ID NO: 63515 - DNA, 25 bp, Homo sapien
gtcactattgcggttagaagttggc

SEQ ID NO: 63516 - DNA, 25 bp, Homo sapien
attgcctccccctgctgggatcccc

SEQ ID NO: 63517 - DNA, 25 bp, Homo sapien
actattgcggttagaagttggcagc

SEQ ID NO: 63518 - DNA, 25 bp, Homo sapien
ggtctgcttcagcccaagaggaatc

SEQ ID NO: 63519 - DNA, 25 bp, Homo sapien
ttcagcccaagaggaatcaaaagat

SEQ ID NO: 63520 - DNA, 25 bp, Homo sapien
aacagacaagcacagagtcactatt

SEQ ID NO: 63521 - DNA, 25 bp, Homo sapien
ctaaacagacaagcacagagtcact

SEQ ID NO: 63522 - DNA, 25 bp, Homo sapien
caaaggcttgccctccagggagatg

SEQ ID NO: 63523 - DNA, 25 bp, Homo sapien
attgcctccccctgctgggatcccc

SEQ ID NO: 63524 - DNA, 25 bp, Homo sapien
tgaagggattgcctccccctgctgg

SEQ ID NO: 63525 - DNA, 25 bp, Homo sapien
ttcagcccaagaggaatcaaaagat

SEQ ID NO: 63526 - DNA, 25 bp, Homo sapien
ggtctgcttcagcccaagaggaatc

SEQ ID NO: 63527 - DNA, 25 bp, Homo sapien
tattgcggttagaagttggcagcat

SEQ ID NO: 63528 - DNA, 25 bp, Homo sapien
actattgcggttagaagttggcagc

SEQ ID NO: 63529 - DNA, 25 bp, Homo sapien
gtcactattgcggttagaagttggc

SEQ ID NO: 63530 - DNA, 25 bp, Homo sapien
acaagcacagagtcactattgcggt

SEQ ID NO: 63531 - DNA, 25 bp, Homo sapien
ggtctgcttcagcccaagaggaatc

SEQ ID NO: 63532 - DNA, 25 bp, Homo sapien
tgaagggattgcctccccctgctgg

SEQ ID NO: 63533 - DNA, 25 bp, Homo sapien
gtcactattgcggttagaagttggc

SEQ ID NO: 63534 - DNA, 25 bp, Homo sapien
actattgcggttagaagttggcagc

SEQ ID NO: 63535 - DNA, 25 bp, Homo sapien
acaagcacagagtcactattgcggt

SEQ ID NO: 63536 - DNA, 25 bp, Homo sapien
aacagacaagcacagagtcactatt

SEQ ID NO: 63537 - DNA, 25 bp, Homo sapien
caaaggcttgccctccagggagatg

SEQ ID NO: 63538 - DNA, 25 bp, Homo sapien
ctaaacagacaagcacagagtcact

SEQ ID NO: 63539 - DNA, 25 bp, Homo sapien
attgcctccccctgctgggatcccc

SEQ ID NO: 63540 - DNA, 25 bp, Homo sapien
tattgcggttagaagttggcagcat

SEQ ID NO: 63541 - DNA, 25 bp, Homo sapien
ttcagcccaagaggaatcaaaagat

SEQ ID NO: 63542 - DNA, 25 bp, Homo sapien
aacagacaagcacagagtcactatt

SEQ ID NO: 63543 - DNA, 25 bp, Homo sapien
ctaaacagacaagcacagagtcact

SEQ ID NO: 63544 - DNA, 25 bp, Homo sapien
caaaggcttgccctccagggagatg

SEQ ID NO: 63545 - DNA, 25 bp, Homo sapien
attgcctccccctgctgggatcccc

SEQ ID NO: 63546 - DNA, 25 bp, Homo sapien
tgaagggattgcctccccctgctgg

SEQ ID NO: 63547 - DNA, 25 bp, Homo sapien
ttcagcccaagaggaatcaaaagat

SEQ ID NO: 63548 - DNA, 25 bp, Homo sapien
ggtctgcttcagcccaagaggaatc

SEQ ID NO: 63549 - DNA, 25 bp, Homo sapien
tattgcggttagaagttggcagcat

SEQ ID NO: 63550 - DNA, 25 bp, Homo sapien
actattgcggttagaagttggcagc

SEQ ID NO: 63551 - DNA, 25 bp, Homo sapien
gtcactattgcggttagaagttggc

SEQ ID NO: 63552 - DNA, 25 bp, Homo sapien
acaagcacagagtcactattgcggt

SEQ ID NO: 63553 - DNA, 25 bp, Homo sapien
ggtctgcttcagcccaagaggaatc

SEQ ID NO: 63554 - DNA, 25 bp, Homo sapien
ctaaacagacaagcacagagtcact

SEQ ID NO: 63555 - DNA, 25 bp, Homo sapien
tattgcggttagaagttggcagcat

SEQ ID NO: 63556 - DNA, 25 bp, Homo sapien
ttcagcccaagaggaatcaaaagat

SEQ ID NO: 63557 - DNA, 25 bp, Homo sapien
tgaagggattgcctccccctgctgg

SEQ ID NO: 63558 - DNA, 25 bp, Homo sapien
caaaggcttgccctccagggagatg

SEQ ID NO: 63559 - DNA, 25 bp, Homo sapien
attgcctccccctgctgggatcccc

SEQ ID NO: 63560 - DNA, 25 bp, Homo sapien
actattgcggttagaagttggcagc

SEQ ID NO: 63561 - DNA, 25 bp, Homo sapien
acaagcacagagtcactattgcggt

SEQ ID NO: 63562 - DNA, 25 bp, Homo sapien
aacagacaagcacagagtcactatt

SEQ ID NO: 63563 - DNA, 25 bp, Homo sapien
gtcactattgcggttagaagttggc

SEQ ID NO: 63564 - DNA, 25 bp, Homo sapien
aacagacaagcacagagtcactatt

SEQ ID NO: 63565 - DNA, 25 bp, Homo sapien
ctaaacagacaagcacagagtcact

SEQ ID NO: 63566 - DNA, 25 bp, Homo sapien
caaaggcttgccctccagggagatg

SEQ ID NO: 63567 - DNA, 25 bp, Homo sapien
attgcctccccctgctgggatcccc

SEQ ID NO: 63568 - DNA, 25 bp, Homo sapien
tgaagggattgcctccccctgctgg

SEQ ID NO: 63569 - DNA, 25 bp, Homo sapien
ttcagcccaagaggaatcaaaagat

SEQ ID NO: 63570 - DNA, 25 bp, Homo sapien
ggtctgcttcagcccaagaggaatc

SEQ ID NO: 63571 - DNA, 25 bp, Homo sapien
tattgcggttagaagttggcagcat

SEQ ID NO: 63572 - DNA, 25 bp, Homo sapien
actattgcggttagaagttggcagc

SEQ ID NO: 63573 - DNA, 25 bp, Homo sapien
gtcactattgcggttagaagttggc

SEQ ID NO: 63574 - DNA, 25 bp, Homo sapien
acaagcacagagtcactattgcggt

SEQ ID NO: 63575 - DNA, 25 bp, Homo sapien
aacagacaagcacagagtcactatt

SEQ ID NO: 63576 - DNA, 25 bp, Homo sapien
ctaaacagacaagcacagagtcact

SEQ ID NO: 63577 - DNA, 25 bp, Homo sapien
caaaggcttgccctccagggagatg

SEQ ID NO: 63578 - DNA, 25 bp, Homo sapien
attgcctccccctgctgggatcccc

SEQ ID NO: 63579 - DNA, 25 bp, Homo sapien
tgaagggattgcctccccctgctgg

SEQ ID NO: 63580 - DNA, 25 bp, Homo sapien
ttcagcccaagaggaatcaaaagat

SEQ ID NO: 63581 - DNA, 25 bp, Homo sapien
ggtctgcttcagcccaagaggaatc

SEQ ID NO: 63582 - DNA, 25 bp, Homo sapien
tattgcggttagaagttggcagcat

SEQ ID NO: 63583 - DNA, 25 bp, Homo sapien
actattgcggttagaagttggcagc

SEQ ID NO: 63584 - DNA, 25 bp, Homo sapien
gtcactattgcggttagaagttggc

SEQ ID NO: 63585 - DNA, 25 bp, Homo sapien
acaagcacagagtcactattgcggt

SEQ ID NO: 63586 - DNA, 25 bp, Homo sapien
tgaagggattgcctccccctgctgg

SEQ ID NO: 63587 - DNA, 25 bp, Homo sapien
tattgcggttagaagttggcagcat

SEQ ID NO: 63588 - DNA, 25 bp, Homo sapien
attgcctccccctgctgggatcccc

SEQ ID NO: 63589 - DNA, 25 bp, Homo sapien
actattgcggttagaagttggcagc

SEQ ID NO: 63590 - DNA, 25 bp, Homo sapien
acaagcacagagtcactattgcggt

SEQ ID NO: 63591 - DNA, 25 bp, Homo sapien
ggtctgcttcagcccaagaggaatc

SEQ ID NO: 63592 - DNA, 25 bp, Homo sapien
gtcactattgcggttagaagttggc

SEQ ID NO: 63593 - DNA, 25 bp, Homo sapien
aacagacaagcacagagtcactatt

SEQ ID NO: 63594 - DNA, 25 bp, Homo sapien
caaaggcttgccctccagggagatg

SEQ ID NO: 63595 - DNA, 25 bp, Homo sapien
ctaaacagacaagcacagagtcact

SEQ ID NO: 63596 - DNA, 25 bp, Homo sapien
ttcagcccaagaggaatcaaaagat

SEQ ID NO: 63597 - DNA, 25 bp, Homo sapien
aacagacaagcacagagtcactatt

SEQ ID NO: 63598 - DNA, 25 bp, Homo sapien
ctaaacagacaagcacagagtcact

SEQ ID NO: 63599 - DNA, 25 bp, Homo sapien
caaaggcttgccctccagggagatg

SEQ ID NO: 63600 - DNA, 25 bp, Homo sapien
attgcctccccctgctgggatcccc

SEQ ID NO: 63601 - DNA, 25 bp, Homo sapien
tgaagggattgcctccccctgctgg

SEQ ID NO: 63602 - DNA, 25 bp, Homo sapien
ttcagcccaagaggaatcaaaagat

SEQ ID NO: 63603 - DNA, 25 bp, Homo sapien
ggtctgcttcagcccaagaggaatc

SEQ ID NO: 63604 - DNA, 25 bp, Homo sapien
tattgcggttagaagttggcagcat

SEQ ID NO: 63605 - DNA, 25 bp, Homo sapien
actattgcggttagaagttggcagc

SEQ ID NO: 63606 - DNA, 25 bp, Homo sapien
gtcactattgcggttagaagttggc

SEQ ID NO: 63607 - DNA, 25 bp, Homo sapien
acaagcacagagtcactattgcggt

SEQ ID NO: 63608 - DNA, 25 bp, Homo sapien
caaaggcttgccctccagggagatg

SEQ ID NO: 63609 - DNA, 25 bp, Homo sapien
ctaaacagacaagcacagagtcact

SEQ ID NO: 63610 - DNA, 25 bp, Homo sapien
actattgcggttagaagttggcagc

SEQ ID NO: 63611 - DNA, 25 bp, Homo sapien
gtcactattgcggttagaagttggc

SEQ ID NO: 63612 - DNA, 25 bp, Homo sapien
tgaagggattgcctccccctgctgg

SEQ ID NO: 63613 - DNA, 25 bp, Homo sapien
attgcctccccctgctgggatcccc

SEQ ID NO: 63614 - DNA, 25 bp, Homo sapien
acaagcacagagtcactattgcggt

SEQ ID NO: 63615 - DNA, 25 bp, Homo sapien
aacagacaagcacagagtcactatt

SEQ ID NO: 63616 - DNA, 25 bp, Homo sapien
tattgcggttagaagttggcagcat

SEQ ID NO: 63617 - DNA, 25 bp, Homo sapien
ggtctgcttcagcccaagaggaatc

SEQ ID NO: 63618 - DNA, 25 bp, Homo sapien
ttcagcccaagaggaatcaaaagat

SEQ ID NO: 63619 - DNA, 25 bp, Homo sapien
aacagacaagcacagagtcactatt

SEQ ID NO: 63620 - DNA, 25 bp, Homo sapien
ctaaacagacaagcacagagtcact

SEQ ID NO: 63621 - DNA, 25 bp, Homo sapien
caaaggcttgccctccagggagatg

SEQ ID NO: 63622 - DNA, 25 bp, Homo sapien
attgcctccccctgctgggatcccc

SEQ ID NO: 63623 - DNA, 25 bp, Homo sapien
tgaagggattgcctccccctgctgg

SEQ ID NO: 63624 - DNA, 25 bp, Homo sapien
ttcagcccaagaggaatcaaaagat

SEQ ID NO: 63625 - DNA, 25 bp, Homo sapien
ggtctgcttcagcccaagaggaatc

SEQ ID NO: 63626 - DNA, 25 bp, Homo sapien
tattgcggttagaagttggcagcat

SEQ ID NO: 63627 - DNA, 25 bp, Homo sapien
actattgcggttagaagttggcagc

SEQ ID NO: 63628 - DNA, 25 bp, Homo sapien
gtcactattgcggttagaagttggc

SEQ ID NO: 63629 - DNA, 25 bp, Homo sapien
acaagcacagagtcactattgcggt

SEQ ID NO: 63630 - DNA, 25 bp, Homo sapien
tattgcggttagaagttggcagcat

SEQ ID NO: 63631 - DNA, 25 bp, Homo sapien
tgaagggattgcctccccctgctgg

SEQ ID NO: 63632 - DNA, 25 bp, Homo sapien
ctaaacagacaagcacagagtcact

SEQ ID NO: 63633 - DNA, 25 bp, Homo sapien
acaagcacagagtcactattgcggt

SEQ ID NO: 63634 - DNA, 25 bp, Homo sapien
attgcctccccctgctgggatcccc

SEQ ID NO: 63635 - DNA, 25 bp, Homo sapien
aacagacaagcacagagtcactatt

SEQ ID NO: 63636 - DNA, 25 bp, Homo sapien
gtcactattgcggttagaagttggc

SEQ ID NO: 63637 - DNA, 25 bp, Homo sapien
actattgcggttagaagttggcagc

SEQ ID NO: 63638 - DNA, 25 bp, Homo sapien
ggtctgcttcagcccaagaggaatc

SEQ ID NO: 63639 - DNA, 25 bp, Homo sapien
caaaggcttgccctccagggagatg

SEQ ID NO: 63640 - DNA, 25 bp, Homo sapien
ttcagcccaagaggaatcaaaagat

SEQ ID NO: 63641 - DNA, 25 bp, Homo sapien
aacagacaagcacagagtcactatt

SEQ ID NO: 63642 - DNA, 25 bp, Homo sapien
ctaaacagacaagcacagagtcact

SEQ ID NO: 63643 - DNA, 25 bp, Homo sapien
caaaggcttgccctccagggagatg

SEQ ID NO: 63644 - DNA, 25 bp, Homo sapien
attgcctccccctgctgggatcccc

SEQ ID NO: 63645 - DNA, 25 bp, Homo sapien
tgaagggattgcctccccctgctgg

SEQ ID NO: 63646 - DNA, 25 bp, Homo sapien
ttcagcccaagaggaatcaaaagat

SEQ ID NO: 63647 - DNA, 25 bp, Homo sapien
ggtctgcttcagcccaagaggaatc

SEQ ID NO: 63648 - DNA, 25 bp, Homo sapien
tattgcggttagaagttggcagcat

SEQ ID NO: 63649 - DNA, 25 bp, Homo sapien
actattgcggttagaagttggcagc

SEQ ID NO: 63650 - DNA, 25 bp, Homo sapien
gtcactattgcggttagaagttggc

SEQ ID NO: 63651 - DNA, 25 bp, Homo sapien
acaagcacagagtcactattgcggt

SEQ ID NO: 63652 - DNA, 25 bp, Homo sapien
tgaagggattgcctccccctgctgg

SEQ ID NO: 63653 - DNA, 25 bp, Homo sapien
acaagcacagagtcactattgcggt

SEQ ID NO: 63654 - DNA, 25 bp, Homo sapien
gtcactattgcggttagaagttggc

SEQ ID NO: 63655 - DNA, 25 bp, Homo sapien
actattgcggttagaagttggcagc

SEQ ID NO: 63656 - DNA, 25 bp, Homo sapien
caaaggcttgccctccagggagatg

SEQ ID NO: 63657 - DNA, 25 bp, Homo sapien
attgcctccccctgctgggatcccc

SEQ ID NO: 63658 - DNA, 25 bp, Homo sapien
aacagacaagcacagagtcactatt

SEQ ID NO: 63659 - DNA, 25 bp, Homo sapien
ttcagcccaagaggaatcaaaagat

SEQ ID NO: 63660 - DNA, 25 bp, Homo sapien
ctaaacagacaagcacagagtcact

SEQ ID NO: 63661 - DNA, 25 bp, Homo sapien
tattgcggttagaagttggcagcat

SEQ ID NO: 63662 - DNA, 25 bp, Homo sapien
ggtctgcttcagcccaagaggaatc

SEQ ID NO: 63663 - DNA, 25 bp, Homo sapien
aacagacaagcacagagtcactatt

SEQ ID NO: 63664 - DNA, 25 bp, Homo sapien
ctaaacagacaagcacagagtcact

SEQ ID NO: 63665 - DNA, 25 bp, Homo sapien
caaaggcttgccctccagggagatg

SEQ ID NO: 63666 - DNA, 25 bp, Homo sapien
attgcctccccctgctgggatcccc

SEQ ID NO: 63667 - DNA, 25 bp, Homo sapien
tgaagggattgcctccccctgctgg

SEQ ID NO: 63668 - DNA, 25 bp, Homo sapien
ttcagcccaagaggaatcaaaagat

SEQ ID NO: 63669 - DNA, 25 bp, Homo sapien
ggtctgcttcagcccaagaggaatc

SEQ ID NO: 63670 - DNA, 25 bp, Homo sapien
tattgcggttagaagttggcagcat

SEQ ID NO: 63671 - DNA, 25 bp, Homo sapien
actattgcggttagaagttggcagc

SEQ ID NO: 63672 - DNA, 25 bp, Homo sapien
gtcactattgcggttagaagttggc

SEQ ID NO: 63673 - DNA, 25 bp, Homo sapien
acaagcacagagtcactattgcggt

SEQ ID NO: 63674 - DNA, 25 bp, Homo sapien
actattgcggttagaagttggcagc

SEQ ID NO: 63675 - DNA, 25 bp, Homo sapien
tattgcggttagaagttggcagcat

SEQ ID NO: 63676 - DNA, 25 bp, Homo sapien
acaagcacagagtcactattgcggt

SEQ ID NO: 63677 - DNA, 25 bp, Homo sapien
gtcactattgcggttagaagttggc

SEQ ID NO: 63678 - DNA, 25 bp, Homo sapien
ggtctgcttcagcccaagaggaatc

SEQ ID NO: 63679 - DNA, 25 bp, Homo sapien
ttcagcccaagaggaatcaaaagat

SEQ ID NO: 63680 - DNA, 25 bp, Homo sapien
ctaaacagacaagcacagagtcact

SEQ ID NO: 63681 - DNA, 25 bp, Homo sapien
caaaggcttgccctccagggagatg

SEQ ID NO: 63682 - DNA, 25 bp, Homo sapien
tgaagggattgcctccccctgctgg

SEQ ID NO: 63683 - DNA, 25 bp, Homo sapien
aacagacaagcacagagtcactatt

SEQ ID NO: 63684 - DNA, 25 bp, Homo sapien
attgcctccccctgctgggatcccc

SEQ ID NO: 63685 - DNA, 25 bp, Homo sapien
acaagcacagagtcactattgcggt

SEQ ID NO: 63686 - DNA, 25 bp, Homo sapien
actattgcggttagaagttggcagc

SEQ ID NO: 63687 - DNA, 25 bp, Homo sapien
ggtctgcttcagcccaagaggaatc

SEQ ID NO: 63688 - DNA, 25 bp, Homo sapien
tgaagggattgcctccccctgctgg

SEQ ID NO: 63689 - DNA, 25 bp, Homo sapien
caaaggcttgccctccagggagatg

SEQ ID NO: 63690 - DNA, 25 bp, Homo sapien
gtcactattgcggttagaagttggc

SEQ ID NO: 63691 - DNA, 25 bp, Homo sapien
aacagacaagcacagagtcactatt

SEQ ID NO: 63692 - DNA, 25 bp, Homo sapien
tattgcggttagaagttggcagcat

SEQ ID NO: 63693 - DNA, 25 bp, Homo sapien
ctaaacagacaagcacagagtcact

SEQ ID NO: 63694 - DNA, 25 bp, Homo sapien
ttcagcccaagaggaatcaaaagat

SEQ ID NO: 63695 - DNA, 25 bp, Homo sapien
attgcctccccctgctgggatcccc

SEQ ID NO: 63696 - DNA, 25 bp, Homo sapien
aacagacaagcacagagtcactatt

SEQ ID NO: 63697 - DNA, 25 bp, Homo sapien
ctaaacagacaagcacagagtcact

SEQ ID NO: 63698 - DNA, 25 bp, Homo sapien
caaaggcttgccctccagggagatg

SEQ ID NO: 63699 - DNA, 25 bp, Homo sapien
attgcctccccctgctgggatcccc

SEQ ID NO: 63700 - DNA, 25 bp, Homo sapien
tgaagggattgcctccccctgctgg

SEQ ID NO: 63701 - DNA, 25 bp, Homo sapien
ttcagcccaagaggaatcaaaagat

SEQ ID NO: 63702 - DNA, 25 bp, Homo sapien
ggtctgcttcagcccaagaggaatc

SEQ ID NO: 63703 - DNA, 25 bp, Homo sapien
tattgcggttagaagttggcagcat

SEQ ID NO: 63704 - DNA, 25 bp, Homo sapien
actattgcggttagaagttggcagc

SEQ ID NO: 63705 - DNA, 25 bp, Homo sapien
gtcactattgcggttagaagttggc

SEQ ID NO: 63706 - DNA, 25 bp, Homo sapien
acaagcacagagtcactattgcggt

SEQ ID NO: 63707 - DNA, 25 bp, Homo sapien
aacagacaagcacagagtcactatt

SEQ ID NO: 63708 - DNA, 25 bp, Homo sapien
actattgcggttagaagttggcagc

SEQ ID NO: 63709 - DNA, 25 bp, Homo sapien
tattgcggttagaagttggcagcat

SEQ ID NO: 63710 - DNA, 25 bp, Homo sapien
attgcctccccctgctgggatcccc

SEQ ID NO: 63711 - DNA, 25 bp, Homo sapien
gtcactattgcggttagaagttggc

SEQ ID NO: 63712 - DNA, 25 bp, Homo sapien
caaaggcttgccctccagggagatg

SEQ ID NO: 63713 - DNA, 25 bp, Homo sapien
ttcagcccaagaggaatcaaaagat

SEQ ID NO: 63714 - DNA, 25 bp, Homo sapien
ctaaacagacaagcacagagtcact

SEQ ID NO: 63715 - DNA, 25 bp, Homo sapien
ggtctgcttcagcccaagaggaatc

SEQ ID NO: 63716 - DNA, 25 bp, Homo sapien
tgaagggattgcctccccctgctgg

SEQ ID NO: 63717 - DNA, 25 bp, Homo sapien
acaagcacagagtcactattgcggt

SEQ ID NO: 63718 - DNA, 25 bp, Homo sapien
aacagacaagcacagagtcactatt

SEQ ID NO: 63719 - DNA, 25 bp, Homo sapien
ctaaacagacaagcacagagtcact

SEQ ID NO: 63720 - DNA, 25 bp, Homo sapien
caaaggcttgccctccagggagatg

SEQ ID NO: 63721 - DNA, 25 bp, Homo sapien
attgcctccccctgctgggatcccc

SEQ ID NO: 63722 - DNA, 25 bp, Homo sapien
tgaagggattgcctccccctgctgg

SEQ ID NO: 63723 - DNA, 25 bp, Homo sapien
ttcagcccaagaggaatcaaaagat

SEQ ID NO: 63724 - DNA, 25 bp, Homo sapien
ggtctgcttcagcccaagaggaatc

SEQ ID NO: 63725 - DNA, 25 bp, Homo sapien
tattgcggttagaagttggcagcat

SEQ ID NO: 63726 - DNA, 25 bp, Homo sapien
actattgcggttagaagttggcagc

SEQ ID NO: 63727 - DNA, 25 bp, Homo sapien
gtcactattgcggttagaagttggc

SEQ ID NO: 63728 - DNA, 25 bp, Homo sapien
acaagcacagagtcactattgcggt

SEQ ID NO: 63729 - DNA, 25 bp, Homo sapien
gtcactattgcggttagaagttggc

SEQ ID NO: 63730 - DNA, 25 bp, Homo sapien
tgaagggattgcctccccctgctgg

SEQ ID NO: 63731 - DNA, 25 bp, Homo sapien
tattgcggttagaagttggcagcat

SEQ ID NO: 63732 - DNA, 25 bp, Homo sapien
caaaggcttgccctccagggagatg

SEQ ID NO: 63733 - DNA, 25 bp, Homo sapien
acaagcacagagtcactattgcggt

SEQ ID NO: 63734 - DNA, 25 bp, Homo sapien
attgcctccccctgctgggatcccc

SEQ ID NO: 63735 - DNA, 25 bp, Homo sapien
aacagacaagcacagagtcactatt

SEQ ID NO: 63736 - DNA, 25 bp, Homo sapien
ggtctgcttcagcccaagaggaatc

SEQ ID NO: 63737 - DNA, 25 bp, Homo sapien
ttcagcccaagaggaatcaaaagat

SEQ ID NO: 63738 - DNA, 25 bp, Homo sapien
ctaaacagacaagcacagagtcact

SEQ ID NO: 63739 - DNA, 25 bp, Homo sapien
actattgcggttagaagttggcagc

SEQ ID NO: 63740 - DNA, 25 bp, Homo sapien
aacagacaagcacagagtcactatt

SEQ ID NO: 63741 - DNA, 25 bp, Homo sapien
ctaaacagacaagcacagagtcact

SEQ ID NO: 63742 - DNA, 25 bp, Homo sapien
caaaggcttgccctccagggagatg

SEQ ID NO: 63743 - DNA, 25 bp, Homo sapien
attgcctccccctgctgggatcccc

SEQ ID NO: 63744 - DNA, 25 bp, Homo sapien
tgaagggattgcctccccctgctgg

SEQ ID NO: 63745 - DNA, 25 bp, Homo sapien
ttcagcccaagaggaatcaaaagat

SEQ ID NO: 63746 - DNA, 25 bp, Homo sapien
ggtctgcttcagcccaagaggaatc

SEQ ID NO: 63747 - DNA, 25 bp, Homo sapien
tattgcggttagaagttggcagcat

SEQ ID NO: 63748 - DNA, 25 bp, Homo sapien
actattgcggttagaagttggcagc

SEQ ID NO: 63749 - DNA, 25 bp, Homo sapien
gtcactattgcggttagaagttggc

SEQ ID NO: 63750 - DNA, 25 bp, Homo sapien
acaagcacagagtcactattgcggt

SEQ ID NO: 63751 - DNA, 25 bp, Homo sapien
gtacctcctgaacccgcacatcatc

SEQ ID NO: 63752 - DNA, 25 bp, Homo sapien
cttgttttcccggccaggaagcttc

SEQ ID NO: 63753 - DNA, 25 bp, Homo sapien
ccggttggtgcgactcataaacaac

SEQ ID NO: 63754 - DNA, 25 bp, Homo sapien
gccttgccgaaatgccggtacacct

SEQ ID NO: 63755 - DNA, 25 bp, Homo sapien
ttgggctccttgcgccgaacctttc

SEQ ID NO: 63756 - DNA, 25 bp, Homo sapien
ttccggatcatccgggaaagggaca

SEQ ID NO: 63757 - DNA, 25 bp, Homo sapien
aacctggttgaatgtggagttggtt

SEQ ID NO: 63758 - DNA, 25 bp, Homo sapien
acacctctcggcccttgcgaggacc

SEQ ID NO: 63759 - DNA, 25 bp, Homo sapien
ggagttggttcttctggccagaaac

SEQ ID NO: 63760 - DNA, 25 bp, Homo sapien
acgcgcagtgcacataccttcagtt

SEQ ID NO: 63761 - DNA, 25 bp, Homo sapien
gaccaacagcctcaggtagatatcc

SEQ ID NO: 63762 - DNA, 25 bp, Homo sapien
ttgggctccttgcgccgaacctttc

SEQ ID NO: 63763 - DNA, 25 bp, Homo sapien
gaccaacagcctcaggtagatatcc

SEQ ID NO: 63764 - DNA, 25 bp, Homo sapien
ggagttggttcttctggccagaaac

SEQ ID NO: 63765 - DNA, 25 bp, Homo sapien
aacctggttgaatgtggagttggtt

SEQ ID NO: 63766 - DNA, 25 bp, Homo sapien
ccggttggtgcgactcataaacaac

SEQ ID NO: 63767 - DNA, 25 bp, Homo sapien
ttccggatcatccgggaaagggaca

SEQ ID NO: 63768 - DNA, 25 bp, Homo sapien
cttgttttcccggccaggaagcttc

SEQ ID NO: 63769 - DNA, 25 bp, Homo sapien
gtacctcctgaacccgcacatcatc

SEQ ID NO: 63770 - DNA, 25 bp, Homo sapien
acgcgcagtgcacataccttcagtt

SEQ ID NO: 63771 - DNA, 25 bp, Homo sapien
acacctctcggcccttgcgaggacc

SEQ ID NO: 63772 - DNA, 25 bp, Homo sapien
gccttgccgaaatgccggtacacct

SEQ ID NO: 63773 - DNA, 25 bp, Homo sapien
acacctctcggcccttgcgaggacc

SEQ ID NO: 63774 - DNA, 25 bp, Homo sapien
acgcgcagtgcacataccttcagtt

SEQ ID NO: 63775 - DNA, 25 bp, Homo sapien
gaccaacagcctcaggtagatatcc

SEQ ID NO: 63776 - DNA, 25 bp, Homo sapien
gtacctcctgaacccgcacatcatc

SEQ ID NO: 63777 - DNA, 25 bp, Homo sapien
aacctggttgaatgtggagttggtt

SEQ ID NO: 63778 - DNA, 25 bp, Homo sapien
ttccggatcatccgggaaagggaca

SEQ ID NO: 63779 - DNA, 25 bp, Homo sapien
gccttgccgaaatgccggtacacct

SEQ ID NO: 63780 - DNA, 25 bp, Homo sapien
ttgggctccttgcgccgaacctttc

SEQ ID NO: 63781 - DNA, 25 bp, Homo sapien
ggagttggttcttctggccagaaac

SEQ ID NO: 63782 - DNA, 25 bp, Homo sapien
ccggttggtgcgactcataaacaac

SEQ ID NO: 63783 - DNA, 25 bp, Homo sapien
cttgttttcccggccaggaagcttc

SEQ ID NO: 63784 - DNA, 25 bp, Homo sapien
ttgggctccttgcgccgaacctttc

SEQ ID NO: 63785 - DNA, 25 bp, Homo sapien
gaccaacagcctcaggtagatatcc

SEQ ID NO: 63786 - DNA, 25 bp, Homo sapien
ggagttggttcttctggccagaaac

SEQ ID NO: 63787 - DNA, 25 bp, Homo sapien
aacctggttgaatgtggagttggtt

SEQ ID NO: 63788 - DNA, 25 bp, Homo sapien
ccggttggtgcgactcataaacaac

SEQ ID NO: 63789 - DNA, 25 bp, Homo sapien
ttccggatcatccgggaaagggaca

SEQ ID NO: 63790 - DNA, 25 bp, Homo sapien
cttgttttcccggccaggaagcttc

SEQ ID NO: 63791 - DNA, 25 bp, Homo sapien
gtacctcctgaacccgcacatcatc

SEQ ID NO: 63792 - DNA, 25 bp, Homo sapien
acgcgcagtgcacataccttcagtt

SEQ ID NO: 63793 - DNA, 25 bp, Homo sapien
acacctctcggcccttgcgaggacc

SEQ ID NO: 63794 - DNA, 25 bp, Homo sapien
gccttgccgaaatgccggtacacct

SEQ ID NO: 63795 - DNA, 25 bp, Homo sapien
gaccaacagcctcaggtagatatcc

SEQ ID NO: 63796 - DNA, 25 bp, Homo sapien
acacctctcggcccttgcgaggacc

SEQ ID NO: 63797 - DNA, 25 bp, Homo sapien
ccggttggtgcgactcataaacaac

SEQ ID NO: 63798 - DNA, 25 bp, Homo sapien
ttgggctccttgcgccgaacctttc

SEQ ID NO: 63799 - DNA, 25 bp, Homo sapien
ttccggatcatccgggaaagggaca

SEQ ID NO: 63800 - DNA, 25 bp, Homo sapien
ggagttggttcttctggccagaaac

SEQ ID NO: 63801 - DNA, 25 bp, Homo sapien
acgcgcagtgcacataccttcagtt

SEQ ID NO: 63802 - DNA, 25 bp, Homo sapien
cttgttttcccggccaggaagcttc

SEQ ID NO: 63803 - DNA, 25 bp, Homo sapien
gtacctcctgaacccgcacatcatc

SEQ ID NO: 63804 - DNA, 25 bp, Homo sapien
gccttgccgaaatgccggtacacct

SEQ ID NO: 63805 - DNA, 25 bp, Homo sapien
aacctggttgaatgtggagttggtt

SEQ ID NO: 63806 - DNA, 25 bp, Homo sapien
ttgggctccttgcgccgaacctttc

SEQ ID NO: 63807 - DNA, 25 bp, Homo sapien
gaccaacagcctcaggtagatatcc

SEQ ID NO: 63808 - DNA, 25 bp, Homo sapien
ggagttggttcttctggccagaaac

SEQ ID NO: 63809 - DNA, 25 bp, Homo sapien
aacctggttgaatgtggagttggtt

SEQ ID NO: 63810 - DNA, 25 bp, Homo sapien
ccggttggtgcgactcataaacaac

SEQ ID NO: 63811 - DNA, 25 bp, Homo sapien
ttccggatcatccgggaaagggaca

SEQ ID NO: 63812 - DNA, 25 bp, Homo sapien
cttgttttcccggccaggaagcttc

SEQ ID NO: 63813 - DNA, 25 bp, Homo sapien
gtacctcctgaacccgcacatcatc

SEQ ID NO: 63814 - DNA, 25 bp, Homo sapien
acgcgcagtgcacataccttcagtt

SEQ ID NO: 63815 - DNA, 25 bp, Homo sapien
acacctctcggcccttgcgaggacc

SEQ ID NO: 63816 - DNA, 25 bp, Homo sapien
gccttgccgaaatgccggtacacct

SEQ ID NO: 63817 - DNA, 25 bp, Homo sapien
ttgggctccttgcgccgaacctttc

SEQ ID NO: 63818 - DNA, 25 bp, Homo sapien
gaccaacagcctcaggtagatatcc

SEQ ID NO: 63819 - DNA, 25 bp, Homo sapien
ggagttggttcttctggccagaaac

SEQ ID NO: 63820 - DNA, 25 bp, Homo sapien
aacctggttgaatgtggagttggtt

SEQ ID NO: 63821 - DNA, 25 bp, Homo sapien
ccggttggtgcgactcataaacaac

SEQ ID NO: 63822 - DNA, 25 bp, Homo sapien
ttccggatcatccgggaaagggaca

SEQ ID NO: 63823 - DNA, 25 bp, Homo sapien
cttgttttcccggccaggaagcttc

SEQ ID NO: 63824 - DNA, 25 bp, Homo sapien
gtacctcctgaacccgcacatcatc

SEQ ID NO: 63825 - DNA, 25 bp, Homo sapien
acgcgcagtgcacataccttcagtt

SEQ ID NO: 63826 - DNA, 25 bp, Homo sapien
acacctctcggcccttgcgaggacc

SEQ ID NO: 63827 - DNA, 25 bp, Homo sapien
gccttgccgaaatgccggtacacct

SEQ ID NO: 63828 - DNA, 25 bp, Homo sapien
gccttgccgaaatgccggtacacct

SEQ ID NO: 63829 - DNA, 25 bp, Homo sapien
cttgttttcccggccaggaagcttc

SEQ ID NO: 63830 - DNA, 25 bp, Homo sapien
ttgggctccttgcgccgaacctttc

SEQ ID NO: 63831 - DNA, 25 bp, Homo sapien
ttccggatcatccgggaaagggaca

SEQ ID NO: 63832 - DNA, 25 bp, Homo sapien
gaccaacagcctcaggtagatatcc

SEQ ID NO: 63833 - DNA, 25 bp, Homo sapien
aacctggttgaatgtggagttggtt

SEQ ID NO: 63834 - DNA, 25 bp, Homo sapien
ccggttggtgcgactcataaacaac

SEQ ID NO: 63835 - DNA, 25 bp, Homo sapien
acgcgcagtgcacataccttcagtt

SEQ ID NO: 63836 - DNA, 25 bp, Homo sapien
ggagttggttcttctggccagaaac

SEQ ID NO: 63837 - DNA, 25 bp, Homo sapien
gtacctcctgaacccgcacatcatc

SEQ ID NO: 63838 - DNA, 25 bp, Homo sapien
acacctctcggcccttgcgaggacc

SEQ ID NO: 63839 - DNA, 25 bp, Homo sapien
ttgggctccttgcgccgaacctttc

SEQ ID NO: 63840 - DNA, 25 bp, Homo sapien
gaccaacagcctcaggtagatatcc

SEQ ID NO: 63841 - DNA, 25 bp, Homo sapien
ggagttggttcttctggccagaaac

SEQ ID NO: 63842 - DNA, 25 bp, Homo sapien
aacctggttgaatgtggagttggtt

SEQ ID NO: 63843 - DNA, 25 bp, Homo sapien
ccggttggtgcgactcataaacaac

SEQ ID NO: 63844 - DNA, 25 bp, Homo sapien
ttccggatcatccgggaaagggaca

SEQ ID NO: 63845 - DNA, 25 bp, Homo sapien
cttgttttcccggccaggaagcttc

SEQ ID NO: 63846 - DNA, 25 bp, Homo sapien
gtacctcctgaacccgcacatcatc

SEQ ID NO: 63847 - DNA, 25 bp, Homo sapien
acgcgcagtgcacataccttcagtt

SEQ ID NO: 63848 - DNA, 25 bp, Homo sapien
acacctctcggcccttgcgaggacc

SEQ ID NO: 63849 - DNA, 25 bp, Homo sapien
gccttgccgaaatgccggtacacct

SEQ ID NO: 63850 - DNA, 25 bp, Homo sapien
ggagttggttcttctggccagaaac

SEQ ID NO: 63851 - DNA, 25 bp, Homo sapien
acgcgcagtgcacataccttcagtt

SEQ ID NO: 63852 - DNA, 25 bp, Homo sapien
ttccggatcatccgggaaagggaca

SEQ ID NO: 63853 - DNA, 25 bp, Homo sapien
gccttgccgaaatgccggtacacct

SEQ ID NO: 63854 - DNA, 25 bp, Homo sapien
gtacctcctgaacccgcacatcatc

SEQ ID NO: 63855 - DNA, 25 bp, Homo sapien
gaccaacagcctcaggtagatatcc

SEQ ID NO: 63856 - DNA, 25 bp, Homo sapien
ttgggctccttgcgccgaacctttc

SEQ ID NO: 63857 - DNA, 25 bp, Homo sapien
aacctggttgaatgtggagttggtt

SEQ ID NO: 63858 - DNA, 25 bp, Homo sapien
ccggttggtgcgactcataaacaac

SEQ ID NO: 63859 - DNA, 25 bp, Homo sapien
cttgttttcccggccaggaagcttc

SEQ ID NO: 63860 - DNA, 25 bp, Homo sapien
acacctctcggcccttgcgaggacc

SEQ ID NO: 63861 - DNA, 25 bp, Homo sapien
ttgggctccttgcgccgaacctttc

SEQ ID NO: 63862 - DNA, 25 bp, Homo sapien
gaccaacagcctcaggtagatatcc

SEQ ID NO: 63863 - DNA, 25 bp, Homo sapien
ggagttggttcttctggccagaaac

SEQ ID NO: 63864 - DNA, 25 bp, Homo sapien
aacctggttgaatgtggagttggtt

SEQ ID NO: 63865 - DNA, 25 bp, Homo sapien
ccggttggtgcgactcataaacaac

SEQ ID NO: 63866 - DNA, 25 bp, Homo sapien
ttccggatcatccgggaaagggaca

SEQ ID NO: 63867 - DNA, 25 bp, Homo sapien
cttgttttcccggccaggaagcttc

SEQ ID NO: 63868 - DNA, 25 bp, Homo sapien
gtacctcctgaacccgcacatcatc

SEQ ID NO: 63869 - DNA, 25 bp, Homo sapien
acgcgcagtgcacataccttcagtt

SEQ ID NO: 63870 - DNA, 25 bp, Homo sapien
acacctctcggcccttgcgaggacc

SEQ ID NO: 63871 - DNA, 25 bp, Homo sapien
gccttgccgaaatgccggtacacct

SEQ ID NO: 63872 - DNA, 25 bp, Homo sapien
gccttgccgaaatgccggtacacct

SEQ ID NO: 63873 - DNA, 25 bp, Homo sapien
gaccaacagcctcaggtagatatcc

SEQ ID NO: 63874 - DNA, 25 bp, Homo sapien
ttgggctccttgcgccgaacctttc

SEQ ID NO: 63875 - DNA, 25 bp, Homo sapien
gtacctcctgaacccgcacatcatc

SEQ ID NO: 63876 - DNA, 25 bp, Homo sapien
aacctggttgaatgtggagttggtt

SEQ ID NO: 63877 - DNA, 25 bp, Homo sapien
acacctctcggcccttgcgaggacc

SEQ ID NO: 63878 - DNA, 25 bp, Homo sapien
ccggttggtgcgactcataaacaac

SEQ ID NO: 63879 - DNA, 25 bp, Homo sapien
ttccggatcatccgggaaagggaca

SEQ ID NO: 63880 - DNA, 25 bp, Homo sapien
acgcgcagtgcacataccttcagtt

SEQ ID NO: 63881 - DNA, 25 bp, Homo sapien
ggagttggttcttctggccagaaac

SEQ ID NO: 63882 - DNA, 25 bp, Homo sapien
cttgttttcccggccaggaagcttc

SEQ ID NO: 63883 - DNA, 25 bp, Homo sapien
ttgggctccttgcgccgaacctttc

SEQ ID NO: 63884 - DNA, 25 bp, Homo sapien
gaccaacagcctcaggtagatatcc

SEQ ID NO: 63885 - DNA, 25 bp, Homo sapien
ggagttggttcttctggccagaaac

SEQ ID NO: 63886 - DNA, 25 bp, Homo sapien
aacctggttgaatgtggagttggtt

SEQ ID NO: 63887 - DNA, 25 bp, Homo sapien
ccggttggtgcgactcataaacaac

SEQ ID NO: 63888 - DNA, 25 bp, Homo sapien
ttccggatcatccgggaaagggaca

SEQ ID NO: 63889 - DNA, 25 bp, Homo sapien
cttgttttcccggccaggaagcttc

SEQ ID NO: 63890 - DNA, 25 bp, Homo sapien
gtacctcctgaacccgcacatcatc

SEQ ID NO: 63891 - DNA, 25 bp, Homo sapien
acgcgcagtgcacataccttcagtt

SEQ ID NO: 63892 - DNA, 25 bp, Homo sapien
acacctctcggcccttgcgaggacc

SEQ ID NO: 63893 - DNA, 25 bp, Homo sapien
gccttgccgaaatgccggtacacct

SEQ ID NO: 63894 - DNA, 25 bp, Homo sapien
ggagttggttcttctggccagaaac

SEQ ID NO: 63895 - DNA, 25 bp, Homo sapien
ttccggatcatccgggaaagggaca

SEQ ID NO: 63896 - DNA, 25 bp, Homo sapien
acgcgcagtgcacataccttcagtt

SEQ ID NO: 63897 - DNA, 25 bp, Homo sapien
ttgggctccttgcgccgaacctttc

SEQ ID NO: 63898 - DNA, 25 bp, Homo sapien
cttgttttcccggccaggaagcttc

SEQ ID NO: 63899 - DNA, 25 bp, Homo sapien
gtacctcctgaacccgcacatcatc

SEQ ID NO: 63900 - DNA, 25 bp, Homo sapien
ccggttggtgcgactcataaacaac

SEQ ID NO: 63901 - DNA, 25 bp, Homo sapien
acacctctcggcccttgcgaggacc

SEQ ID NO: 63902 - DNA, 25 bp, Homo sapien
gccttgccgaaatgccggtacacct

SEQ ID NO: 63903 - DNA, 25 bp, Homo sapien
gaccaacagcctcaggtagatatcc

SEQ ID NO: 63904 - DNA, 25 bp, Homo sapien
aacctggttgaatgtggagttggtt

SEQ ID NO: 63905 - DNA, 25 bp, Homo sapien
ttgggctccttgcgccgaacctttc

SEQ ID NO: 63906 - DNA, 25 bp, Homo sapien
gaccaacagcctcaggtagatatcc

SEQ ID NO: 63907 - DNA, 25 bp, Homo sapien
ggagttggttcttctggccagaaac

SEQ ID NO: 63908 - DNA, 25 bp, Homo sapien
aacctggttgaatgtggagttggtt

SEQ ID NO: 63909 - DNA, 25 bp, Homo sapien
ccggttggtgcgactcataaacaac

SEQ ID NO: 63910 - DNA, 25 bp, Homo sapien
ttccggatcatccgggaaagggaca

SEQ ID NO: 63911 - DNA, 25 bp, Homo sapien
cttgttttcccggccaggaagcttc

SEQ ID NO: 63912 - DNA, 25 bp, Homo sapien
gtacctcctgaacccgcacatcatc

SEQ ID NO: 63913 - DNA, 25 bp, Homo sapien
acgcgcagtgcacataccttcagtt

SEQ ID NO: 63914 - DNA, 25 bp, Homo sapien
acacctctcggcccttgcgaggacc

SEQ ID NO: 63915 - DNA, 25 bp, Homo sapien
gccttgccgaaatgccggtacacct

SEQ ID NO: 63916 - DNA, 25 bp, Homo sapien
gtacctcctgaacccgcacatcatc

SEQ ID NO: 63917 - DNA, 25 bp, Homo sapien
ccggttggtgcgactcataaacaac

SEQ ID NO: 63918 - DNA, 25 bp, Homo sapien
cttgttttcccggccaggaagcttc

SEQ ID NO: 63919 - DNA, 25 bp, Homo sapien
ttccggatcatccgggaaagggaca

SEQ ID NO: 63920 - DNA, 25 bp, Homo sapien
ggagttggttcttctggccagaaac

SEQ ID NO: 63921 - DNA, 25 bp, Homo sapien
acacctctcggcccttgcgaggacc

SEQ ID NO: 63922 - DNA, 25 bp, Homo sapien
acgcgcagtgcacataccttcagtt

SEQ ID NO: 63923 - DNA, 25 bp, Homo sapien
gaccaacagcctcaggtagatatcc

SEQ ID NO: 63924 - DNA, 25 bp, Homo sapien
ttgggctccttgcgccgaacctttc

SEQ ID NO: 63925 - DNA, 25 bp, Homo sapien
aacctggttgaatgtggagttggtt

SEQ ID NO: 63926 - DNA, 25 bp, Homo sapien
gccttgccgaaatgccggtacacct

SEQ ID NO: 63927 - DNA, 25 bp, Homo sapien
ttccggatcatccgggaaagggaca

SEQ ID NO: 63928 - DNA, 25 bp, Homo sapien
ggagttggttcttctggccagaaac

SEQ ID NO: 63929 - DNA, 25 bp, Homo sapien
gtacctcctgaacccgcacatcatc

SEQ ID NO: 63930 - DNA, 25 bp, Homo sapien
acgcgcagtgcacataccttcagtt

SEQ ID NO: 63931 - DNA, 25 bp, Homo sapien
gccttgccgaaatgccggtacacct

SEQ ID NO: 63932 - DNA, 25 bp, Homo sapien
ttgggctccttgcgccgaacctttc

SEQ ID NO: 63933 - DNA, 25 bp, Homo sapien
cttgttttcccggccaggaagcttc

SEQ ID NO: 63934 - DNA, 25 bp, Homo sapien
aacctggttgaatgtggagttggtt

SEQ ID NO: 63935 - DNA, 25 bp, Homo sapien
gaccaacagcctcaggtagatatcc

SEQ ID NO: 63936 - DNA, 25 bp, Homo sapien
ccggttggtgcgactcataaacaac

SEQ ID NO: 63937 - DNA, 25 bp, Homo sapien
acacctctcggcccttgcgaggacc

SEQ ID NO: 63938 - DNA, 25 bp, Homo sapien
ttgggctccttgcgccgaacctttc

SEQ ID NO: 63939 - DNA, 25 bp, Homo sapien
gaccaacagcctcaggtagatatcc

SEQ ID NO: 63940 - DNA, 25 bp, Homo sapien
ggagttggttcttctggccagaaac

SEQ ID NO: 63941 - DNA, 25 bp, Homo sapien
aacctggttgaatgtggagttggtt

SEQ ID NO: 63942 - DNA, 25 bp, Homo sapien
ccggttggtgcgactcataaacaac

SEQ ID NO: 63943 - DNA, 25 bp, Homo sapien
ttccggatcatccgggaaagggaca

SEQ ID NO: 63944 - DNA, 25 bp, Homo sapien
cttgttttcccggccaggaagcttc

SEQ ID NO: 63945 - DNA, 25 bp, Homo sapien
gtacctcctgaacccgcacatcatc

SEQ ID NO: 63946 - DNA, 25 bp, Homo sapien
acgcgcagtgcacataccttcagtt

SEQ ID NO: 63947 - DNA, 25 bp, Homo sapien
acacctctcggcccttgcgaggacc

SEQ ID NO: 63948 - DNA, 25 bp, Homo sapien
gccttgccgaaatgccggtacacct

SEQ ID NO: 63949 - DNA, 25 bp, Homo sapien
ttgggctccttgcgccgaacctttc

SEQ ID NO: 63950 - DNA, 25 bp, Homo sapien
ttccggatcatccgggaaagggaca

SEQ ID NO: 63951 - DNA, 25 bp, Homo sapien
gccttgccgaaatgccggtacacct

SEQ ID NO: 63952 - DNA, 25 bp, Homo sapien
acgcgcagtgcacataccttcagtt

SEQ ID NO: 63953 - DNA, 25 bp, Homo sapien
gtacctcctgaacccgcacatcatc

SEQ ID NO: 63954 - DNA, 25 bp, Homo sapien
cttgttttcccggccaggaagcttc

SEQ ID NO: 63955 - DNA, 25 bp, Homo sapien
aacctggttgaatgtggagttggtt

SEQ ID NO: 63956 - DNA, 25 bp, Homo sapien
acacctctcggcccttgcgaggacc

SEQ ID NO: 63957 - DNA, 25 bp, Homo sapien
ggagttggttcttctggccagaaac

SEQ ID NO: 63958 - DNA, 25 bp, Homo sapien
gaccaacagcctcaggtagatatcc

SEQ ID NO: 63959 - DNA, 25 bp, Homo sapien
ccggttggtgcgactcataaacaac

SEQ ID NO: 63960 - DNA, 25 bp, Homo sapien
ttgggctccttgcgccgaacctttc

SEQ ID NO: 63961 - DNA, 25 bp, Homo sapien
gaccaacagcctcaggtagatatcc

SEQ ID NO: 63962 - DNA, 25 bp, Homo sapien
ggagttggttcttctggccagaaac

SEQ ID NO: 63963 - DNA, 25 bp, Homo sapien
aacctggttgaatgtggagttggtt

SEQ ID NO: 63964 - DNA, 25 bp, Homo sapien
ccggttggtgcgactcataaacaac

SEQ ID NO: 63965 - DNA, 25 bp, Homo sapien
ttccggatcatccgggaaagggaca

SEQ ID NO: 63966 - DNA, 25 bp, Homo sapien
cttgttttcccggccaggaagcttc

SEQ ID NO: 63967 - DNA, 25 bp, Homo sapien
gtacctcctgaacccgcacatcatc

SEQ ID NO: 63968 - DNA, 25 bp, Homo sapien
acgcgcagtgcacataccttcagtt

SEQ ID NO: 63969 - DNA, 25 bp, Homo sapien
acacctctcggcccttgcgaggacc

SEQ ID NO: 63970 - DNA, 25 bp, Homo sapien
gccttgccgaaatgccggtacacct

SEQ ID NO: 63971 - DNA, 25 bp, Homo sapien
ttgggctccttgcgccgaacctttc

SEQ ID NO: 63972 - DNA, 25 bp, Homo sapien
aacctggttgaatgtggagttggtt

SEQ ID NO: 63973 - DNA, 25 bp, Homo sapien
gtacctcctgaacccgcacatcatc

SEQ ID NO: 63974 - DNA, 25 bp, Homo sapien
gaccaacagcctcaggtagatatcc

SEQ ID NO: 63975 - DNA, 25 bp, Homo sapien
ttccggatcatccgggaaagggaca

SEQ ID NO: 63976 - DNA, 25 bp, Homo sapien
ccggttggtgcgactcataaacaac

SEQ ID NO: 63977 - DNA, 25 bp, Homo sapien
cttgttttcccggccaggaagcttc

SEQ ID NO: 63978 - DNA, 25 bp, Homo sapien
acacctctcggcccttgcgaggacc

SEQ ID NO: 63979 - DNA, 25 bp, Homo sapien
acgcgcagtgcacataccttcagtt

SEQ ID NO: 63980 - DNA, 25 bp, Homo sapien
ggagttggttcttctggccagaaac

SEQ ID NO: 63981 - DNA, 25 bp, Homo sapien
gccttgccgaaatgccggtacacct

SEQ ID NO: 63982 - DNA, 25 bp, Homo sapien
ttgggctccttgcgccgaacctttc

SEQ ID NO: 63983 - DNA, 25 bp, Homo sapien
gaccaacagcctcaggtagatatcc

SEQ ID NO: 63984 - DNA, 25 bp, Homo sapien
ggagttggttcttctggccagaaac

SEQ ID NO: 63985 - DNA, 25 bp, Homo sapien
aacctggttgaatgtggagttggtt

SEQ ID NO: 63986 - DNA, 25 bp, Homo sapien
ccggttggtgcgactcataaacaac

SEQ ID NO: 63987 - DNA, 25 bp, Homo sapien
ttccggatcatccgggaaagggaca

SEQ ID NO: 63988 - DNA, 25 bp, Homo sapien
cttgttttcccggccaggaagcttc

SEQ ID NO: 63989 - DNA, 25 bp, Homo sapien
gtacctcctgaacccgcacatcatc

SEQ ID NO: 63990 - DNA, 25 bp, Homo sapien
acgcgcagtgcacataccttcagtt

SEQ ID NO: 63991 - DNA, 25 bp, Homo sapien
acacctctcggcccttgcgaggacc

SEQ ID NO: 63992 - DNA, 25 bp, Homo sapien
gccttgccgaaatgccggtacacct

SEQ ID NO: 63993 - DNA, 25 bp, Homo sapien
ggagttggttcttctggccagaaac

SEQ ID NO: 63994 - DNA, 25 bp, Homo sapien
gccttgccgaaatgccggtacacct

SEQ ID NO: 63995 - DNA, 25 bp, Homo sapien
aacctggttgaatgtggagttggtt

SEQ ID NO: 63996 - DNA, 25 bp, Homo sapien
gaccaacagcctcaggtagatatcc

SEQ ID NO: 63997 - DNA, 25 bp, Homo sapien
ccggttggtgcgactcataaacaac

SEQ ID NO: 63998 - DNA, 25 bp, Homo sapien
acacctctcggcccttgcgaggacc

SEQ ID NO: 63999 - DNA, 25 bp, Homo sapien
ttgggctccttgcgccgaacctttc

SEQ ID NO: 64000 - DNA, 25 bp, Homo sapien
ttccggatcatccgggaaagggaca

SEQ ID NO: 64001 - DNA, 25 bp, Homo sapien
gtacctcctgaacccgcacatcatc

SEQ ID NO: 64002 - DNA, 25 bp, Homo sapien
acgcgcagtgcacataccttcagtt

SEQ ID NO: 64003 - DNA, 25 bp, Homo sapien
cttgttttcccggccaggaagcttc

SEQ ID NO: 64004 - DNA, 25 bp, Homo sapien
ttgggctccttgcgccgaacctttc

SEQ ID NO: 64005 - DNA, 25 bp, Homo sapien
gaccaacagcctcaggtagatatcc

SEQ ID NO: 64006 - DNA, 25 bp, Homo sapien
ggagttggttcttctggccagaaac

SEQ ID NO: 64007 - DNA, 25 bp, Homo sapien
aacctggttgaatgtggagttggtt

SEQ ID NO: 64008 - DNA, 25 bp, Homo sapien
ccggttggtgcgactcataaacaac

SEQ ID NO: 64009 - DNA, 25 bp, Homo sapien
ttccggatcatccgggaaagggaca

SEQ ID NO: 64010 - DNA, 25 bp, Homo sapien
cttgttttcccggccaggaagcttc

SEQ ID NO: 64011 - DNA, 25 bp, Homo sapien
gtacctcctgaacccgcacatcatc

SEQ ID NO: 64012 - DNA, 25 bp, Homo sapien
acgcgcagtgcacataccttcagtt

SEQ ID NO: 64013 - DNA, 25 bp, Homo sapien
acacctctcggcccttgcgaggacc

SEQ ID NO: 64014 - DNA, 25 bp, Homo sapien
gccttgccgaaatgccggtacacct

SEQ ID NO: 64015 - DNA, 25 bp, Homo sapien
cttgttttcccggccaggaagcttc

SEQ ID NO: 64016 - DNA, 25 bp, Homo sapien
acacctctcggcccttgcgaggacc

SEQ ID NO: 64017 - DNA, 25 bp, Homo sapien
ccggttggtgcgactcataaacaac

SEQ ID NO: 64018 - DNA, 25 bp, Homo sapien
gaccaacagcctcaggtagatatcc

SEQ ID NO: 64019 - DNA, 25 bp, Homo sapien
acgcgcagtgcacataccttcagtt

SEQ ID NO: 64020 - DNA, 25 bp, Homo sapien
gtacctcctgaacccgcacatcatc

SEQ ID NO: 64021 - DNA, 25 bp, Homo sapien
gccttgccgaaatgccggtacacct

SEQ ID NO: 64022 - DNA, 25 bp, Homo sapien
aacctggttgaatgtggagttggtt

SEQ ID NO: 64023 - DNA, 25 bp, Homo sapien
ttccggatcatccgggaaagggaca

SEQ ID NO: 64024 - DNA, 25 bp, Homo sapien
ttgggctccttgcgccgaacctttc

SEQ ID NO: 64025 - DNA, 25 bp, Homo sapien
ggagttggttcttctggccagaaac

SEQ ID NO: 64026 - DNA, 25 bp, Homo sapien
ttgggctccttgcgccgaacctttc

SEQ ID NO: 64027 - DNA, 25 bp, Homo sapien
gaccaacagcctcaggtagatatcc

SEQ ID NO: 64028 - DNA, 25 bp, Homo sapien
ggagttggttcttctggccagaaac

SEQ ID NO: 64029 - DNA, 25 bp, Homo sapien
aacctggttgaatgtggagttggtt

SEQ ID NO: 64030 - DNA, 25 bp, Homo sapien
ccggttggtgcgactcataaacaac

SEQ ID NO: 64031 - DNA, 25 bp, Homo sapien
ttccggatcatccgggaaagggaca

SEQ ID NO: 64032 - DNA, 25 bp, Homo sapien
cttgttttcccggccaggaagcttc

SEQ ID NO: 64033 - DNA, 25 bp, Homo sapien
gtacctcctgaacccgcacatcatc

SEQ ID NO: 64034 - DNA, 25 bp, Homo sapien
acgcgcagtgcacataccttcagtt

SEQ ID NO: 64035 - DNA, 25 bp, Homo sapien
acacctctcggcccttgcgaggacc

SEQ ID NO: 64036 - DNA, 25 bp, Homo sapien
gccttgccgaaatgccggtacacct

SEQ ID NO: 64037 - DNA, 25 bp, Homo sapien
acgcgcagtgcacataccttcagtt

SEQ ID NO: 64038 - DNA, 25 bp, Homo sapien
acacctctcggcccttgcgaggacc

SEQ ID NO: 64039 - DNA, 25 bp, Homo sapien
gaccaacagcctcaggtagatatcc

SEQ ID NO: 64040 - DNA, 25 bp, Homo sapien
cttgttttcccggccaggaagcttc

SEQ ID NO: 64041 - DNA, 25 bp, Homo sapien
ccggttggtgcgactcataaacaac

SEQ ID NO: 64042 - DNA, 25 bp, Homo sapien
ttccggatcatccgggaaagggaca

SEQ ID NO: 64043 - DNA, 25 bp, Homo sapien
ggagttggttcttctggccagaaac

SEQ ID NO: 64044 - DNA, 25 bp, Homo sapien
gccttgccgaaatgccggtacacct

SEQ ID NO: 64045 - DNA, 25 bp, Homo sapien
ttgggctccttgcgccgaacctttc

SEQ ID NO: 64046 - DNA, 25 bp, Homo sapien
gtacctcctgaacccgcacatcatc

SEQ ID NO: 64047 - DNA, 25 bp, Homo sapien
aacctggttgaatgtggagttggtt

SEQ ID NO: 64048 - DNA, 25 bp, Homo sapien
ttgggctccttgcgccgaacctttc

SEQ ID NO: 64049 - DNA, 25 bp, Homo sapien
gaccaacagcctcaggtagatatcc

SEQ ID NO: 64050 - DNA, 25 bp, Homo sapien
ggagttggttcttctggccagaaac

SEQ ID NO: 64051 - DNA, 25 bp, Homo sapien
aacctggttgaatgtggagttggtt

SEQ ID NO: 64052 - DNA, 25 bp, Homo sapien
ccggttggtgcgactcataaacaac

SEQ ID NO: 64053 - DNA, 25 bp, Homo sapien
ttccggatcatccgggaaagggaca

SEQ ID NO: 64054 - DNA, 25 bp, Homo sapien
cttgttttcccggccaggaagcttc

SEQ ID NO: 64055 - DNA, 25 bp, Homo sapien
gtacctcctgaacccgcacatcatc

SEQ ID NO: 64056 - DNA, 25 bp, Homo sapien
acgcgcagtgcacataccttcagtt

SEQ ID NO: 64057 - DNA, 25 bp, Homo sapien
acacctctcggcccttgcgaggacc

SEQ ID NO: 64058 - DNA, 25 bp, Homo sapien
gccttgccgaaatgccggtacacct

SEQ ID NO: 64059 - DNA, 25 bp, Homo sapien
ttgggctccttgcgccgaacctttc

SEQ ID NO: 64060 - DNA, 25 bp, Homo sapien
gaccaacagcctcaggtagatatcc

SEQ ID NO: 64061 - DNA, 25 bp, Homo sapien
ggagttggttcttctggccagaaac

SEQ ID NO: 64062 - DNA, 25 bp, Homo sapien
aacctggttgaatgtggagttggtt

SEQ ID NO: 64063 - DNA, 25 bp, Homo sapien
ccggttggtgcgactcataaacaac

SEQ ID NO: 64064 - DNA, 25 bp, Homo sapien
ttccggatcatccgggaaagggaca

SEQ ID NO: 64065 - DNA, 25 bp, Homo sapien
cttgttttcccggccaggaagcttc

SEQ ID NO: 64066 - DNA, 25 bp, Homo sapien
gtacctcctgaacccgcacatcatc

SEQ ID NO: 64067 - DNA, 25 bp, Homo sapien
acgcgcagtgcacataccttcagtt

SEQ ID NO: 64068 - DNA, 25 bp, Homo sapien
acacctctcggcccttgcgaggacc

SEQ ID NO: 64069 - DNA, 25 bp, Homo sapien
gccttgccgaaatgccggtacacct

SEQ ID NO: 64070 - DNA, 25 bp, Homo sapien
ccggttggtgcgactcataaacaac

SEQ ID NO: 64071 - DNA, 25 bp, Homo sapien
acgcgcagtgcacataccttcagtt

SEQ ID NO: 64072 - DNA, 25 bp, Homo sapien
acacctctcggcccttgcgaggacc

SEQ ID NO: 64073 - DNA, 25 bp, Homo sapien
ttccggatcatccgggaaagggaca

SEQ ID NO: 64074 - DNA, 25 bp, Homo sapien
ggagttggttcttctggccagaaac

SEQ ID NO: 64075 - DNA, 25 bp, Homo sapien
gaccaacagcctcaggtagatatcc

SEQ ID NO: 64076 - DNA, 25 bp, Homo sapien
gccttgccgaaatgccggtacacct

SEQ ID NO: 64077 - DNA, 25 bp, Homo sapien
ttgggctccttgcgccgaacctttc

SEQ ID NO: 64078 - DNA, 25 bp, Homo sapien
cttgttttcccggccaggaagcttc

SEQ ID NO: 64079 - DNA, 25 bp, Homo sapien
aacctggttgaatgtggagttggtt

SEQ ID NO: 64080 - DNA, 25 bp, Homo sapien
gtacctcctgaacccgcacatcatc

SEQ ID NO: 64081 - DNA, 25 bp, Homo sapien
gtacctcctgaacccgcacatcatc

SEQ ID NO: 64082 - DNA, 25 bp, Homo sapien
ccggttggtgcgactcataaacaac

SEQ ID NO: 64083 - DNA, 25 bp, Homo sapien
acacctctcggcccttgcgaggacc

SEQ ID NO: 64084 - DNA, 25 bp, Homo sapien
acgcgcagtgcacataccttcagtt

SEQ ID NO: 64085 - DNA, 25 bp, Homo sapien
ttccggatcatccgggaaagggaca

SEQ ID NO: 64086 - DNA, 25 bp, Homo sapien
ggagttggttcttctggccagaaac

SEQ ID NO: 64087 - DNA, 25 bp, Homo sapien
gaccaacagcctcaggtagatatcc

SEQ ID NO: 64088 - DNA, 25 bp, Homo sapien
gccttgccgaaatgccggtacacct

SEQ ID NO: 64089 - DNA, 25 bp, Homo sapien
ttgggctccttgcgccgaacctttc

SEQ ID NO: 64090 - DNA, 25 bp, Homo sapien
cttgttttcccggccaggaagcttc

SEQ ID NO: 64091 - DNA, 25 bp, Homo sapien
aacctggttgaatgtggagttggtt

SEQ ID NO: 64092 - DNA, 25 bp, Homo sapien
ccggttggtgcgactcataaacaac

SEQ ID NO: 64093 - DNA, 25 bp, Homo sapien
acacctctcggcccttgcgaggacc

SEQ ID NO: 64094 - DNA, 25 bp, Homo sapien
acgcgcagtgcacataccttcagtt

SEQ ID NO: 64095 - DNA, 25 bp, Homo sapien
ttccggatcatccgggaaagggaca

SEQ ID NO: 64096 - DNA, 25 bp, Homo sapien
ggagttggttcttctggccagaaac

SEQ ID NO: 64097 - DNA, 25 bp, Homo sapien
gaccaacagcctcaggtagatatcc

SEQ ID NO: 64098 - DNA, 25 bp, Homo sapien
gccttgccgaaatgccggtacacct

SEQ ID NO: 64099 - DNA, 25 bp, Homo sapien
ttgggctccttgcgccgaacctttc

SEQ ID NO: 64100 - DNA, 25 bp, Homo sapien
cttgttttcccggccaggaagcttc

SEQ ID NO: 64101 - DNA, 25 bp, Homo sapien
aacctggttgaatgtggagttggtt

SEQ ID NO: 64102 - DNA, 25 bp, Homo sapien
gtacctcctgaacccgcacatcatc

SEQ ID NO: 64103 - DNA, 25 bp, Homo sapien
ccggttggtgcgactcataaacaac

SEQ ID NO: 64104 - DNA, 25 bp, Homo sapien
acacctctcggcccttgcgaggacc

SEQ ID NO: 64105 - DNA, 25 bp, Homo sapien
acgcgcagtgcacataccttcagtt

SEQ ID NO: 64106 - DNA, 25 bp, Homo sapien
ttccggatcatccgggaaagggaca

SEQ ID NO: 64107 - DNA, 25 bp, Homo sapien
ggagttggttcttctggccagaaac

SEQ ID NO: 64108 - DNA, 25 bp, Homo sapien
gccttgccgaaatgccggtacacct

SEQ ID NO: 64109 - DNA, 25 bp, Homo sapien
gaccaacagcctcaggtagatatcc

SEQ ID NO: 64110 - DNA, 25 bp, Homo sapien
ttgggctccttgcgccgaacctttc

SEQ ID NO: 64111 - DNA, 25 bp, Homo sapien
cttgttttcccggccaggaagcttc

SEQ ID NO: 64112 - DNA, 25 bp, Homo sapien
aacctggttgaatgtggagttggtt

SEQ ID NO: 64113 - DNA, 25 bp, Homo sapien
gtacctcctgaacccgcacatcatc

SEQ ID NO: 64114 - DNA, 25 bp, Homo sapien
ccggttggtgcgactcataaacaac

SEQ ID NO: 64115 - DNA, 25 bp, Homo sapien
acacctctcggcccttgcgaggacc

SEQ ID NO: 64116 - DNA, 25 bp, Homo sapien
acgcgcagtgcacataccttcagtt

SEQ ID NO: 64117 - DNA, 25 bp, Homo sapien
ttccggatcatccgggaaagggaca

SEQ ID NO: 64118 - DNA, 25 bp, Homo sapien
ggagttggttcttctggccagaaac

SEQ ID NO: 64119 - DNA, 25 bp, Homo sapien
gaccaacagcctcaggtagatatcc

SEQ ID NO: 64120 - DNA, 25 bp, Homo sapien
gccttgccgaaatgccggtacacct

SEQ ID NO: 64121 - DNA, 25 bp, Homo sapien
ttgggctccttgcgccgaacctttc

SEQ ID NO: 64122 - DNA, 25 bp, Homo sapien
cttgttttcccggccaggaagcttc

SEQ ID NO: 64123 - DNA, 25 bp, Homo sapien
aacctggttgaatgtggagttggtt

SEQ ID NO: 64124 - DNA, 25 bp, Homo sapien
gtacctcctgaacccgcacatcatc

SEQ ID NO: 64125 - DNA, 25 bp, Homo sapien
ccggttggtgcgactcataaacaac

SEQ ID NO: 64126 - DNA, 25 bp, Homo sapien
acgcgcagtgcacataccttcagtt

SEQ ID NO: 64127 - DNA, 25 bp, Homo sapien
acacctctcggcccttgcgaggacc

SEQ ID NO: 64128 - DNA, 25 bp, Homo sapien
ttccggatcatccgggaaagggaca

SEQ ID NO: 64129 - DNA, 25 bp, Homo sapien
ggagttggttcttctggccagaaac

SEQ ID NO: 64130 - DNA, 25 bp, Homo sapien
gccttgccgaaatgccggtacacct

SEQ ID NO: 64131 - DNA, 25 bp, Homo sapien
gaccaacagcctcaggtagatatcc

SEQ ID NO: 64132 - DNA, 25 bp, Homo sapien
ttgggctccttgcgccgaacctttc

SEQ ID NO: 64133 - DNA, 25 bp, Homo sapien
cttgttttcccggccaggaagcttc

SEQ ID NO: 64134 - DNA, 25 bp, Homo sapien
aacctggttgaatgtggagttggtt

SEQ ID NO: 64135 - DNA, 25 bp, Homo sapien
gtacctcctgaacccgcacatcatc

SEQ ID NO: 64136 - DNA, 25 bp, Homo sapien
gtacctcctgaacccgcacatcatc

SEQ ID NO: 64137 - DNA, 25 bp, Homo sapien
ccggttggtgcgactcataaacaac

SEQ ID NO: 64138 - DNA, 25 bp, Homo sapien
acacctctcggcccttgcgaggacc

SEQ ID NO: 64139 - DNA, 25 bp, Homo sapien
acgcgcagtgcacataccttcagtt

SEQ ID NO: 64140 - DNA, 25 bp, Homo sapien
ttccggatcatccgggaaagggaca

SEQ ID NO: 64141 - DNA, 25 bp, Homo sapien
ggagttggttcttctggccagaaac

SEQ ID NO: 64142 - DNA, 25 bp, Homo sapien
gaccaacagcctcaggtagatatcc

SEQ ID NO: 64143 - DNA, 25 bp, Homo sapien
gccttgccgaaatgccggtacacct

SEQ ID NO: 64144 - DNA, 25 bp, Homo sapien
ttgggctccttgcgccgaacctttc

SEQ ID NO: 64145 - DNA, 25 bp, Homo sapien
cttgttttcccggccaggaagcttc

SEQ ID NO: 64146 - DNA, 25 bp, Homo sapien
aacctggttgaatgtggagttggtt

SEQ ID NO: 64147 - DNA, 25 bp, Homo sapien
ccggttggtgcgactcataaacaac

SEQ ID NO: 64148 - DNA, 25 bp, Homo sapien
acgcgcagtgcacataccttcagtt

SEQ ID NO: 64149 - DNA, 25 bp, Homo sapien
acacctctcggcccttgcgaggacc

SEQ ID NO: 64150 - DNA, 25 bp, Homo sapien
ttccggatcatccgggaaagggaca

SEQ ID NO: 64151 - DNA, 25 bp, Homo sapien
ggagttggttcttctggccagaaac

SEQ ID NO: 64152 - DNA, 25 bp, Homo sapien
gaccaacagcctcaggtagatatcc

SEQ ID NO: 64153 - DNA, 25 bp, Homo sapien
gccttgccgaaatgccggtacacct

SEQ ID NO: 64154 - DNA, 25 bp, Homo sapien
ttgggctccttgcgccgaacctttc

SEQ ID NO: 64155 - DNA, 25 bp, Homo sapien
cttgttttcccggccaggaagcttc

SEQ ID NO: 64156 - DNA, 25 bp, Homo sapien
aacctggttgaatgtggagttggtt

SEQ ID NO: 64157 - DNA, 25 bp, Homo sapien
gtacctcctgaacccgcacatcatc

SEQ ID NO: 64158 - DNA, 25 bp, Homo sapien
ccggttggtgcgactcataaacaac

SEQ ID NO: 64159 - DNA, 25 bp, Homo sapien
acgcgcagtgcacataccttcagtt

SEQ ID NO: 64160 - DNA, 25 bp, Homo sapien
acacctctcggcccttgcgaggacc

SEQ ID NO: 64161 - DNA, 25 bp, Homo sapien
ttccggatcatccgggaaagggaca

SEQ ID NO: 64162 - DNA, 25 bp, Homo sapien
ggagttggttcttctggccagaaac

SEQ ID NO: 64163 - DNA, 25 bp, Homo sapien
gaccaacagcctcaggtagatatcc

SEQ ID NO: 64164 - DNA, 25 bp, Homo sapien
gccttgccgaaatgccggtacacct

SEQ ID NO: 64165 - DNA, 25 bp, Homo sapien
ttgggctccttgcgccgaacctttc

SEQ ID NO: 64166 - DNA, 25 bp, Homo sapien
cttgttttcccggccaggaagcttc

SEQ ID NO: 64167 - DNA, 25 bp, Homo sapien
aacctggttgaatgtggagttggtt

SEQ ID NO: 64168 - DNA, 25 bp, Homo sapien
gtacctcctgaacccgcacatcatc

SEQ ID NO: 64169 - DNA, 25 bp, Homo sapien
ttccggatcatccgggaaagggaca

SEQ ID NO: 64170 - DNA, 25 bp, Homo sapien
ccggttggtgcgactcataaacaac

SEQ ID NO: 64171 - DNA, 25 bp, Homo sapien
acgcgcagtgcacataccttcagtt

SEQ ID NO: 64172 - DNA, 25 bp, Homo sapien
acacctctcggcccttgcgaggacc

SEQ ID NO: 64173 - DNA, 25 bp, Homo sapien
gtacctcctgaacccgcacatcatc

SEQ ID NO: 64174 - DNA, 25 bp, Homo sapien
ttgggctccttgcgccgaacctttc

SEQ ID NO: 64175 - DNA, 25 bp, Homo sapien
gaccaacagcctcaggtagatatcc

SEQ ID NO: 64176 - DNA, 25 bp, Homo sapien
cttgttttcccggccaggaagcttc

SEQ ID NO: 64177 - DNA, 25 bp, Homo sapien
aacctggttgaatgtggagttggtt

SEQ ID NO: 64178 - DNA, 25 bp, Homo sapien
ggagttggttcttctggccagaaac

SEQ ID NO: 64179 - DNA, 25 bp, Homo sapien
gccttgccgaaatgccggtacacct

SEQ ID NO: 64180 - DNA, 25 bp, Homo sapien
ccggttggtgcgactcataaacaac

SEQ ID NO: 64181 - DNA, 25 bp, Homo sapien
acgcgcagtgcacataccttcagtt

SEQ ID NO: 64182 - DNA, 25 bp, Homo sapien
acacctctcggcccttgcgaggacc

SEQ ID NO: 64183 - DNA, 25 bp, Homo sapien
ttccggatcatccgggaaagggaca

SEQ ID NO: 64184 - DNA, 25 bp, Homo sapien
ggagttggttcttctggccagaaac

SEQ ID NO: 64185 - DNA, 25 bp, Homo sapien
gaccaacagcctcaggtagatatcc

SEQ ID NO: 64186 - DNA, 25 bp, Homo sapien
gccttgccgaaatgccggtacacct

SEQ ID NO: 64187 - DNA, 25 bp, Homo sapien
ttgggctccttgcgccgaacctttc

SEQ ID NO: 64188 - DNA, 25 bp, Homo sapien
cttgttttcccggccaggaagcttc

SEQ ID NO: 64189 - DNA, 25 bp, Homo sapien
aacctggttgaatgtggagttggtt

SEQ ID NO: 64190 - DNA, 25 bp, Homo sapien
gtacctcctgaacccgcacatcatc

SEQ ID NO: 64191 - DNA, 25 bp, Homo sapien
ttgggctccttgcgccgaacctttc

SEQ ID NO: 64192 - DNA, 25 bp, Homo sapien
gaccaacagcctcaggtagatatcc

SEQ ID NO: 64193 - DNA, 25 bp, Homo sapien
ggagttggttcttctggccagaaac

SEQ ID NO: 64194 - DNA, 25 bp, Homo sapien
aacctggttgaatgtggagttggtt

SEQ ID NO: 64195 - DNA, 25 bp, Homo sapien
ccggttggtgcgactcataaacaac

SEQ ID NO: 64196 - DNA, 25 bp, Homo sapien
ttccggatcatccgggaaagggaca

SEQ ID NO: 64197 - DNA, 25 bp, Homo sapien
cttgttttcccggccaggaagcttc

SEQ ID NO: 64198 - DNA, 25 bp, Homo sapien
gtacctcctgaacccgcacatcatc

SEQ ID NO: 64199 - DNA, 25 bp, Homo sapien
acgcgcagtgcacataccttcagtt

SEQ ID NO: 64200 - DNA, 25 bp, Homo sapien
acacctctcggcccttgcgaggacc

SEQ ID NO: 64201 - DNA, 25 bp, Homo sapien
gccttgccgaaatgccggtacacct

SEQ ID NO: 64202 - DNA, 25 bp, Homo sapien
ggatatctacctgaggctgttggtc

SEQ ID NO: 64203 - DNA, 25 bp, Homo sapien
aactgaaggtatgtgcactgcgcgt

SEQ ID NO: 64204 - DNA, 25 bp, Homo sapien
gaagcttcctggccgggaaaacaag

SEQ ID NO: 64205 - DNA, 25 bp, Homo sapien
ggtcctcgcaagggccgagaggtgt

SEQ ID NO: 64206 - DNA, 25 bp, Homo sapien
gaaaggttcggcgcaaggagcccaa

SEQ ID NO: 64207 - DNA, 25 bp, Homo sapien
gttgtttatgagtcgcaccaaccgg

SEQ ID NO: 64208 - DNA, 25 bp, Homo sapien
gtttctggccagaagaaccaactcc

SEQ ID NO: 64209 - DNA, 25 bp, Homo sapien
aggtgtaccggcatttcggcaaggc

SEQ ID NO: 64210 - DNA, 25 bp, Homo sapien
gatgatgtgcgggttcaggaggtac

SEQ ID NO: 64211 - DNA, 25 bp, Homo sapien
aaccaactccacattcaaccaggtt

SEQ ID NO: 64212 - DNA, 25 bp, Homo sapien
tgtccctttcccggatgatccggaa

SEQ ID NO: 64213 - DNA, 25 bp, Homo sapien
ccggttggtgcgactcataaacaac

SEQ ID NO: 64214 - DNA, 25 bp, Homo sapien
acgcgcagtgcacataccttcagtt

SEQ ID NO: 64215 - DNA, 25 bp, Homo sapien
acacctctcggcccttgcgaggacc

SEQ ID NO: 64216 - DNA, 25 bp, Homo sapien
ttccggatcatccgggaaagggaca

SEQ ID NO: 64217 - DNA, 25 bp, Homo sapien
ggagttggttcttctggccagaaac

SEQ ID NO: 64218 - DNA, 25 bp, Homo sapien
gaccaacagcctcaggtagatatcc

SEQ ID NO: 64219 - DNA, 25 bp, Homo sapien
ttgggctccttgcgccgaacctttc

SEQ ID NO: 64220 - DNA, 25 bp, Homo sapien
gccttgccgaaatgccggtacacct

SEQ ID NO: 64221 - DNA, 25 bp, Homo sapien
cttgttttcccggccaggaagcttc

SEQ ID NO: 64222 - DNA, 25 bp, Homo sapien
aacctggttgaatgtggagttggtt

SEQ ID NO: 64223 - DNA, 25 bp, Homo sapien
gtacctcctgaacccgcacatcatc

SEQ ID NO: 64224 - DNA, 25 bp, Homo sapien
ttccggatcatccgggaaagggaca

SEQ ID NO: 64225 - DNA, 25 bp, Homo sapien
ggagttggttcttctggccagaaac

SEQ ID NO: 64226 - DNA, 25 bp, Homo sapien
gccttgccgaaatgccggtacacct

SEQ ID NO: 64227 - DNA, 25 bp, Homo sapien
aacctggttgaatgtggagttggtt

SEQ ID NO: 64228 - DNA, 25 bp, Homo sapien
gtacctcctgaacccgcacatcatc

SEQ ID NO: 64229 - DNA, 25 bp, Homo sapien
ccggttggtgcgactcataaacaac

SEQ ID NO: 64230 - DNA, 25 bp, Homo sapien
acacctctcggcccttgcgaggacc

SEQ ID NO: 64231 - DNA, 25 bp, Homo sapien
gaccaacagcctcaggtagatatcc

SEQ ID NO: 64232 - DNA, 25 bp, Homo sapien
ttgggctccttgcgccgaacctttc

SEQ ID NO: 64233 - DNA, 25 bp, Homo sapien
cttgttttcccggccaggaagcttc

SEQ ID NO: 64234 - DNA, 25 bp, Homo sapien
acgcgcagtgcacataccttcagtt

SEQ ID NO: 64235 - DNA, 25 bp, Homo sapien
ttgggctccttgcgccgaacctttc

SEQ ID NO: 64236 - DNA, 25 bp, Homo sapien
gaccaacagcctcaggtagatatcc

SEQ ID NO: 64237 - DNA, 25 bp, Homo sapien
ggagttggttcttctggccagaaac

SEQ ID NO: 64238 - DNA, 25 bp, Homo sapien
aacctggttgaatgtggagttggtt

SEQ ID NO: 64239 - DNA, 25 bp, Homo sapien
ccggttggtgcgactcataaacaac

SEQ ID NO: 64240 - DNA, 25 bp, Homo sapien
ttccggatcatccgggaaagggaca

SEQ ID NO: 64241 - DNA, 25 bp, Homo sapien
cttgttttcccggccaggaagcttc

SEQ ID NO: 64242 - DNA, 25 bp, Homo sapien
gtacctcctgaacccgcacatcatc

SEQ ID NO: 64243 - DNA, 25 bp, Homo sapien
acgcgcagtgcacataccttcagtt

SEQ ID NO: 64244 - DNA, 25 bp, Homo sapien
acacctctcggcccttgcgaggacc

SEQ ID NO: 64245 - DNA, 25 bp, Homo sapien
gccttgccgaaatgccggtacacct

SEQ ID NO: 64246 - DNA, 25 bp, Homo sapien
acacctctcggcccttgcgaggacc

SEQ ID NO: 64247 - DNA, 25 bp, Homo sapien
acgcgcagtgcacataccttcagtt

SEQ ID NO: 64248 - DNA, 25 bp, Homo sapien
gtacctcctgaacccgcacatcatc

SEQ ID NO: 64249 - DNA, 25 bp, Homo sapien
gccttgccgaaatgccggtacacct

SEQ ID NO: 64250 - DNA, 25 bp, Homo sapien
gaccaacagcctcaggtagatatcc

SEQ ID NO: 64251 - DNA, 25 bp, Homo sapien
ccggttggtgcgactcataaacaac

SEQ ID NO: 64252 - DNA, 25 bp, Homo sapien
aacctggttgaatgtggagttggtt

SEQ ID NO: 64253 - DNA, 25 bp, Homo sapien
ttgggctccttgcgccgaacctttc

SEQ ID NO: 64254 - DNA, 25 bp, Homo sapien
cttgttttcccggccaggaagcttc

SEQ ID NO: 64255 - DNA, 25 bp, Homo sapien
ggagttggttcttctggccagaaac

SEQ ID NO: 64256 - DNA, 25 bp, Homo sapien
ttccggatcatccgggaaagggaca

SEQ ID NO: 64257 - DNA, 25 bp, Homo sapien
ttgggctccttgcgccgaacctttc

SEQ ID NO: 64258 - DNA, 25 bp, Homo sapien
gaccaacagcctcaggtagatatcc

SEQ ID NO: 64259 - DNA, 25 bp, Homo sapien
ggagttggttcttctggccagaaac

SEQ ID NO: 64260 - DNA, 25 bp, Homo sapien
aacctggttgaatgtggagttggtt

SEQ ID NO: 64261 - DNA, 25 bp, Homo sapien
ccggttggtgcgactcataaacaac

SEQ ID NO: 64262 - DNA, 25 bp, Homo sapien
ttccggatcatccgggaaagggaca

SEQ ID NO: 64263 - DNA, 25 bp, Homo sapien
cttgttttcccggccaggaagcttc

SEQ ID NO: 64264 - DNA, 25 bp, Homo sapien
gtacctcctgaacccgcacatcatc

SEQ ID NO: 64265 - DNA, 25 bp, Homo sapien
acgcgcagtgcacataccttcagtt

SEQ ID NO: 64266 - DNA, 25 bp, Homo sapien
acacctctcggcccttgcgaggacc

SEQ ID NO: 64267 - DNA, 25 bp, Homo sapien
gccttgccgaaatgccggtacacct

SEQ ID NO: 64268 - DNA, 25 bp, Homo sapien
gtacctcctgaacccgcacatcatc

SEQ ID NO: 64269 - DNA, 25 bp, Homo sapien
cttgttttcccggccaggaagcttc

SEQ ID NO: 64270 - DNA, 25 bp, Homo sapien
gccttgccgaaatgccggtacacct

SEQ ID NO: 64271 - DNA, 25 bp, Homo sapien
gaccaacagcctcaggtagatatcc

SEQ ID NO: 64272 - DNA, 25 bp, Homo sapien
ccggttggtgcgactcataaacaac

SEQ ID NO: 64273 - DNA, 25 bp, Homo sapien
ttgggctccttgcgccgaacctttc

SEQ ID NO: 64274 - DNA, 25 bp, Homo sapien
aacctggttgaatgtggagttggtt

SEQ ID NO: 64275 - DNA, 25 bp, Homo sapien
acgcgcagtgcacataccttcagtt

SEQ ID NO: 64276 - DNA, 25 bp, Homo sapien
ggagttggttcttctggccagaaac

SEQ ID NO: 64277 - DNA, 25 bp, Homo sapien
acacctctcggcccttgcgaggacc

SEQ ID NO: 64278 - DNA, 25 bp, Homo sapien
ttccggatcatccgggaaagggaca

SEQ ID NO: 64279 - DNA, 25 bp, Homo sapien
ttgggctccttgcgccgaacctttc

SEQ ID NO: 64280 - DNA, 25 bp, Homo sapien
gaccaacagcctcaggtagatatcc

SEQ ID NO: 64281 - DNA, 25 bp, Homo sapien
ggagttggttcttctggccagaaac

SEQ ID NO: 64282 - DNA, 25 bp, Homo sapien
aacctggttgaatgtggagttggtt

SEQ ID NO: 64283 - DNA, 25 bp, Homo sapien
ccggttggtgcgactcataaacaac

SEQ ID NO: 64284 - DNA, 25 bp, Homo sapien
ttccggatcatccgggaaagggaca

SEQ ID NO: 64285 - DNA, 25 bp, Homo sapien
cttgttttcccggccaggaagcttc

SEQ ID NO: 64286 - DNA, 25 bp, Homo sapien
gtacctcctgaacccgcacatcatc

SEQ ID NO: 64287 - DNA, 25 bp, Homo sapien
acgcgcagtgcacataccttcagtt

SEQ ID NO: 64288 - DNA, 25 bp, Homo sapien
acacctctcggcccttgcgaggacc

SEQ ID NO: 64289 - DNA, 25 bp, Homo sapien
gccttgccgaaatgccggtacacct

SEQ ID NO: 64290 - DNA, 25 bp, Homo sapien
ttgggctccttgcgccgaacctttc

SEQ ID NO: 64291 - DNA, 25 bp, Homo sapien
gaccaacagcctcaggtagatatcc

SEQ ID NO: 64292 - DNA, 25 bp, Homo sapien
ggagttggttcttctggccagaaac

SEQ ID NO: 64293 - DNA, 25 bp, Homo sapien
aacctggttgaatgtggagttggtt

SEQ ID NO: 64294 - DNA, 25 bp, Homo sapien
ccggttggtgcgactcataaacaac

SEQ ID NO: 64295 - DNA, 25 bp, Homo sapien
ttccggatcatccgggaaagggaca

SEQ ID NO: 64296 - DNA, 25 bp, Homo sapien
cttgttttcccggccaggaagcttc

SEQ ID NO: 64297 - DNA, 25 bp, Homo sapien
gtacctcctgaacccgcacatcatc

SEQ ID NO: 64298 - DNA, 25 bp, Homo sapien
acgcgcagtgcacataccttcagtt

SEQ ID NO: 64299 - DNA, 25 bp, Homo sapien
acacctctcggcccttgcgaggacc

SEQ ID NO: 64300 - DNA, 25 bp, Homo sapien
gccttgccgaaatgccggtacacct

SEQ ID NO: 64301 - DNA, 25 bp, Homo sapien
acacctctcggcccttgcgaggacc

SEQ ID NO: 64302 - DNA, 25 bp, Homo sapien
ttccggatcatccgggaaagggaca

SEQ ID NO: 64303 - DNA, 25 bp, Homo sapien
ttgggctccttgcgccgaacctttc

SEQ ID NO: 64304 - DNA, 25 bp, Homo sapien
cttgttttcccggccaggaagcttc

SEQ ID NO: 64305 - DNA, 25 bp, Homo sapien
gaccaacagcctcaggtagatatcc

SEQ ID NO: 64306 - DNA, 25 bp, Homo sapien
gtacctcctgaacccgcacatcatc

SEQ ID NO: 64307 - DNA, 25 bp, Homo sapien
acgcgcagtgcacataccttcagtt

SEQ ID NO: 64308 - DNA, 25 bp, Homo sapien
aacctggttgaatgtggagttggtt

SEQ ID NO: 64309 - DNA, 25 bp, Homo sapien
ccggttggtgcgactcataaacaac

SEQ ID NO: 64310 - DNA, 25 bp, Homo sapien
ggagttggttcttctggccagaaac

SEQ ID NO: 64311 - DNA, 25 bp, Homo sapien
gccttgccgaaatgccggtacacct

SEQ ID NO: 64312 - DNA, 25 bp, Homo sapien
ttgggctccttgcgccgaacctttc

SEQ ID NO: 64313 - DNA, 25 bp, Homo sapien
gaccaacagcctcaggtagatatcc

SEQ ID NO: 64314 - DNA, 25 bp, Homo sapien
ggagttggttcttctggccagaaac

SEQ ID NO: 64315 - DNA, 25 bp, Homo sapien
aacctggttgaatgtggagttggtt

SEQ ID NO: 64316 - DNA, 25 bp, Homo sapien
ccggttggtgcgactcataaacaac

SEQ ID NO: 64317 - DNA, 25 bp, Homo sapien
ttccggatcatccgggaaagggaca

SEQ ID NO: 64318 - DNA, 25 bp, Homo sapien
cttgttttcccggccaggaagcttc

SEQ ID NO: 64319 - DNA, 25 bp, Homo sapien
gtacctcctgaacccgcacatcatc

SEQ ID NO: 64320 - DNA, 25 bp, Homo sapien
acgcgcagtgcacataccttcagtt

SEQ ID NO: 64321 - DNA, 25 bp, Homo sapien
acacctctcggcccttgcgaggacc

SEQ ID NO: 64322 - DNA, 25 bp, Homo sapien
gccttgccgaaatgccggtacacct

SEQ ID NO: 64323 - DNA, 25 bp, Homo sapien
ttgggctccttgcgccgaacctttc

SEQ ID NO: 64324 - DNA, 25 bp, Homo sapien
acgcgcagtgcacataccttcagtt

SEQ ID NO: 64325 - DNA, 25 bp, Homo sapien
gtacctcctgaacccgcacatcatc

SEQ ID NO: 64326 - DNA, 25 bp, Homo sapien
cttgttttcccggccaggaagcttc

SEQ ID NO: 64327 - DNA, 25 bp, Homo sapien
ccggttggtgcgactcataaacaac

SEQ ID NO: 64328 - DNA, 25 bp, Homo sapien
ttccggatcatccgggaaagggaca

SEQ ID NO: 64329 - DNA, 25 bp, Homo sapien
aacctggttgaatgtggagttggtt

SEQ ID NO: 64330 - DNA, 25 bp, Homo sapien
gaccaacagcctcaggtagatatcc

SEQ ID NO: 64331 - DNA, 25 bp, Homo sapien
ggagttggttcttctggccagaaac

SEQ ID NO: 64332 - DNA, 25 bp, Homo sapien
gccttgccgaaatgccggtacacct

SEQ ID NO: 64333 - DNA, 25 bp, Homo sapien
acacctctcggcccttgcgaggacc

SEQ ID NO: 64334 - DNA, 25 bp, Homo sapien
ttgggctccttgcgccgaacctttc

SEQ ID NO: 64335 - DNA, 25 bp, Homo sapien
gaccaacagcctcaggtagatatcc

SEQ ID NO: 64336 - DNA, 25 bp, Homo sapien
ggagttggttcttctggccagaaac

SEQ ID NO: 64337 - DNA, 25 bp, Homo sapien
aacctggttgaatgtggagttggtt

SEQ ID NO: 64338 - DNA, 25 bp, Homo sapien
ccggttggtgcgactcataaacaac

SEQ ID NO: 64339 - DNA, 25 bp, Homo sapien
ttccggatcatccgggaaagggaca

SEQ ID NO: 64340 - DNA, 25 bp, Homo sapien
cttgttttcccggccaggaagcttc

SEQ ID NO: 64341 - DNA, 25 bp, Homo sapien
gtacctcctgaacccgcacatcatc

SEQ ID NO: 64342 - DNA, 25 bp, Homo sapien
acgcgcagtgcacataccttcagtt

SEQ ID NO: 64343 - DNA, 25 bp, Homo sapien
acacctctcggcccttgcgaggacc

SEQ ID NO: 64344 - DNA, 25 bp, Homo sapien
gccttgccgaaatgccggtacacct

SEQ ID NO: 64345 - DNA, 25 bp, Homo sapien
cttgttttcccggccaggaagcttc

SEQ ID NO: 64346 - DNA, 25 bp, Homo sapien
acgcgcagtgcacataccttcagtt

SEQ ID NO: 64347 - DNA, 25 bp, Homo sapien
gtacctcctgaacccgcacatcatc

SEQ ID NO: 64348 - DNA, 25 bp, Homo sapien
ttgggctccttgcgccgaacctttc

SEQ ID NO: 64349 - DNA, 25 bp, Homo sapien
ggagttggttcttctggccagaaac

SEQ ID NO: 64350 - DNA, 25 bp, Homo sapien
ccggttggtgcgactcataaacaac

SEQ ID NO: 64351 - DNA, 25 bp, Homo sapien
acacctctcggcccttgcgaggacc

SEQ ID NO: 64352 - DNA, 25 bp, Homo sapien
gccttgccgaaatgccggtacacct

SEQ ID NO: 64353 - DNA, 25 bp, Homo sapien
gaccaacagcctcaggtagatatcc

SEQ ID NO: 64354 - DNA, 25 bp, Homo sapien
aacctggttgaatgtggagttggtt

SEQ ID NO: 64355 - DNA, 25 bp, Homo sapien
ttccggatcatccgggaaagggaca

SEQ ID NO: 64356 - DNA, 25 bp, Homo sapien
ttgggctccttgcgccgaacctttc

SEQ ID NO: 64357 - DNA, 25 bp, Homo sapien
gaccaacagcctcaggtagatatcc

SEQ ID NO: 64358 - DNA, 25 bp, Homo sapien
ggagttggttcttctggccagaaac

SEQ ID NO: 64359 - DNA, 25 bp, Homo sapien
aacctggttgaatgtggagttggtt

SEQ ID NO: 64360 - DNA, 25 bp, Homo sapien
ccggttggtgcgactcataaacaac

SEQ ID NO: 64361 - DNA, 25 bp, Homo sapien
ttccggatcatccgggaaagggaca

SEQ ID NO: 64362 - DNA, 25 bp, Homo sapien
cttgttttcccggccaggaagcttc

SEQ ID NO: 64363 - DNA, 25 bp, Homo sapien
gtacctcctgaacccgcacatcatc

SEQ ID NO: 64364 - DNA, 25 bp, Homo sapien
acgcgcagtgcacataccttcagtt

SEQ ID NO: 64365 - DNA, 25 bp, Homo sapien
acacctctcggcccttgcgaggacc

SEQ ID NO: 64366 - DNA, 25 bp, Homo sapien
gccttgccgaaatgccggtacacct

SEQ ID NO: 64367 - DNA, 25 bp, Homo sapien
aacctggttgaatgtggagttggtt

SEQ ID NO: 64368 - DNA, 25 bp, Homo sapien
ttgggctccttgcgccgaacctttc

SEQ ID NO: 64369 - DNA, 25 bp, Homo sapien
gaccaacagcctcaggtagatatcc

SEQ ID NO: 64370 - DNA, 25 bp, Homo sapien
ttccggatcatccgggaaagggaca

SEQ ID NO: 64371 - DNA, 25 bp, Homo sapien
acgcgcagtgcacataccttcagtt

SEQ ID NO: 64372 - DNA, 25 bp, Homo sapien
gtacctcctgaacccgcacatcatc

SEQ ID NO: 64373 - DNA, 25 bp, Homo sapien
ccggttggtgcgactcataaacaac

SEQ ID NO: 64374 - DNA, 25 bp, Homo sapien
cttgttttcccggccaggaagcttc

SEQ ID NO: 64375 - DNA, 25 bp, Homo sapien
gccttgccgaaatgccggtacacct

SEQ ID NO: 64376 - DNA, 25 bp, Homo sapien
acacctctcggcccttgcgaggacc

SEQ ID NO: 64377 - DNA, 25 bp, Homo sapien
ggagttggttcttctggccagaaac

SEQ ID NO: 64378 - DNA, 25 bp, Homo sapien
ttgggctccttgcgccgaacctttc

SEQ ID NO: 64379 - DNA, 25 bp, Homo sapien
gaccaacagcctcaggtagatatcc

SEQ ID NO: 64380 - DNA, 25 bp, Homo sapien
ggagttggttcttctggccagaaac

SEQ ID NO: 64381 - DNA, 25 bp, Homo sapien
aacctggttgaatgtggagttggtt

SEQ ID NO: 64382 - DNA, 25 bp, Homo sapien
ccggttggtgcgactcataaacaac

SEQ ID NO: 64383 - DNA, 25 bp, Homo sapien
ttccggatcatccgggaaagggaca

SEQ ID NO: 64384 - DNA, 25 bp, Homo sapien
cttgttttcccggccaggaagcttc

SEQ ID NO: 64385 - DNA, 25 bp, Homo sapien
gtacctcctgaacccgcacatcatc

SEQ ID NO: 64386 - DNA, 25 bp, Homo sapien
acgcgcagtgcacataccttcagtt

SEQ ID NO: 64387 - DNA, 25 bp, Homo sapien
acacctctcggcccttgcgaggacc

SEQ ID NO: 64388 - DNA, 25 bp, Homo sapien
gccttgccgaaatgccggtacacct

SEQ ID NO: 64389 - DNA, 25 bp, Homo sapien
ggagttggttcttctggccagaaac

SEQ ID NO: 64390 - DNA, 25 bp, Homo sapien
gtacctcctgaacccgcacatcatc

SEQ ID NO: 64391 - DNA, 25 bp, Homo sapien
acacctctcggcccttgcgaggacc

SEQ ID NO: 64392 - DNA, 25 bp, Homo sapien
ccggttggtgcgactcataaacaac

SEQ ID NO: 64393 - DNA, 25 bp, Homo sapien
cttgttttcccggccaggaagcttc

SEQ ID NO: 64394 - DNA, 25 bp, Homo sapien
ttccggatcatccgggaaagggaca

SEQ ID NO: 64395 - DNA, 25 bp, Homo sapien
acgcgcagtgcacataccttcagtt

SEQ ID NO: 64396 - DNA, 25 bp, Homo sapien
ttgggctccttgcgccgaacctttc

SEQ ID NO: 64397 - DNA, 25 bp, Homo sapien
gccttgccgaaatgccggtacacct

SEQ ID NO: 64398 - DNA, 25 bp, Homo sapien
aacctggttgaatgtggagttggtt

SEQ ID NO: 64399 - DNA, 25 bp, Homo sapien
gaccaacagcctcaggtagatatcc

SEQ ID NO: 64400 - DNA, 25 bp, Homo sapien
gccttgccgaaatgccggtacacct

SEQ ID NO: 64401 - DNA, 25 bp, Homo sapien
ggagttggttcttctggccagaaac

SEQ ID NO: 64402 - DNA, 25 bp, Homo sapien
ttgggctccttgcgccgaacctttc

SEQ ID NO: 64403 - DNA, 25 bp, Homo sapien
gtacctcctgaacccgcacatcatc

SEQ ID NO: 64404 - DNA, 25 bp, Homo sapien
cttgttttcccggccaggaagcttc

SEQ ID NO: 64405 - DNA, 25 bp, Homo sapien
acacctctcggcccttgcgaggacc

SEQ ID NO: 64406 - DNA, 25 bp, Homo sapien
aacctggttgaatgtggagttggtt

SEQ ID NO: 64407 - DNA, 25 bp, Homo sapien
ccggttggtgcgactcataaacaac

SEQ ID NO: 64408 - DNA, 25 bp, Homo sapien
ttccggatcatccgggaaagggaca

SEQ ID NO: 64409 - DNA, 25 bp, Homo sapien
acgcgcagtgcacataccttcagtt

SEQ ID NO: 64410 - DNA, 25 bp, Homo sapien
gaccaacagcctcaggtagatatcc

SEQ ID NO: 64411 - DNA, 25 bp, Homo sapien
ttgggctccttgcgccgaacctttc

SEQ ID NO: 64412 - DNA, 25 bp, Homo sapien
gaccaacagcctcaggtagatatcc

SEQ ID NO: 64413 - DNA, 25 bp, Homo sapien
ggagttggttcttctggccagaaac

SEQ ID NO: 64414 - DNA, 25 bp, Homo sapien
aacctggttgaatgtggagttggtt

SEQ ID NO: 64415 - DNA, 25 bp, Homo sapien
ccggttggtgcgactcataaacaac

SEQ ID NO: 64416 - DNA, 25 bp, Homo sapien
ttccggatcatccgggaaagggaca

SEQ ID NO: 64417 - DNA, 25 bp, Homo sapien
cttgttttcccggccaggaagcttc

SEQ ID NO: 64418 - DNA, 25 bp, Homo sapien
gtacctcctgaacccgcacatcatc

SEQ ID NO: 64419 - DNA, 25 bp, Homo sapien
acgcgcagtgcacataccttcagtt

SEQ ID NO: 64420 - DNA, 25 bp, Homo sapien
acacctctcggcccttgcgaggacc

SEQ ID NO: 64421 - DNA, 25 bp, Homo sapien
gccttgccgaaatgccggtacacct

SEQ ID NO: 64422 - DNA, 25 bp, Homo sapien
acgcgcagtgcacataccttcagtt

SEQ ID NO: 64423 - DNA, 25 bp, Homo sapien
gtacctcctgaacccgcacatcatc

SEQ ID NO: 64424 - DNA, 25 bp, Homo sapien
cttgttttcccggccaggaagcttc

SEQ ID NO: 64425 - DNA, 25 bp, Homo sapien
ccggttggtgcgactcataaacaac

SEQ ID NO: 64426 - DNA, 25 bp, Homo sapien
gccttgccgaaatgccggtacacct

SEQ ID NO: 64427 - DNA, 25 bp, Homo sapien
ttgggctccttgcgccgaacctttc

SEQ ID NO: 64428 - DNA, 25 bp, Homo sapien
gaccaacagcctcaggtagatatcc

SEQ ID NO: 64429 - DNA, 25 bp, Homo sapien
ggagttggttcttctggccagaaac

SEQ ID NO: 64430 - DNA, 25 bp, Homo sapien
ttccggatcatccgggaaagggaca

SEQ ID NO: 64431 - DNA, 25 bp, Homo sapien
acacctctcggcccttgcgaggacc

SEQ ID NO: 64432 - DNA, 25 bp, Homo sapien
aacctggttgaatgtggagttggtt

SEQ ID NO: 64433 - DNA, 25 bp, Homo sapien
ttgggctccttgcgccgaacctttc

SEQ ID NO: 64434 - DNA, 25 bp, Homo sapien
gaccaacagcctcaggtagatatcc

SEQ ID NO: 64435 - DNA, 25 bp, Homo sapien
ggagttggttcttctggccagaaac

SEQ ID NO: 64436 - DNA, 25 bp, Homo sapien
aacctggttgaatgtggagttggtt

SEQ ID NO: 64437 - DNA, 25 bp, Homo sapien
ccggttggtgcgactcataaacaac

SEQ ID NO: 64438 - DNA, 25 bp, Homo sapien
ttccggatcatccgggaaagggaca

SEQ ID NO: 64439 - DNA, 25 bp, Homo sapien
cttgttttcccggccaggaagcttc

SEQ ID NO: 64440 - DNA, 25 bp, Homo sapien
gtacctcctgaacccgcacatcatc

SEQ ID NO: 64441 - DNA, 25 bp, Homo sapien
acgcgcagtgcacataccttcagtt

SEQ ID NO: 64442 - DNA, 25 bp, Homo sapien
acacctctcggcccttgcgaggacc

SEQ ID NO: 64443 - DNA, 25 bp, Homo sapien
gccttgccgaaatgccggtacacct

SEQ ID NO: 64444 - DNA, 25 bp, Homo sapien
acgcgcagtgcacataccttcagtt

SEQ ID NO: 64445 - DNA, 25 bp, Homo sapien
ggagttggttcttctggccagaaac

SEQ ID NO: 64446 - DNA, 25 bp, Homo sapien
cttgttttcccggccaggaagcttc

SEQ ID NO: 64447 - DNA, 25 bp, Homo sapien
ttgggctccttgcgccgaacctttc

SEQ ID NO: 64448 - DNA, 25 bp, Homo sapien
ttccggatcatccgggaaagggaca

SEQ ID NO: 64449 - DNA, 25 bp, Homo sapien
gccttgccgaaatgccggtacacct

SEQ ID NO: 64450 - DNA, 25 bp, Homo sapien
gaccaacagcctcaggtagatatcc

SEQ ID NO: 64451 - DNA, 25 bp, Homo sapien
gtacctcctgaacccgcacatcatc

SEQ ID NO: 64452 - DNA, 25 bp, Homo sapien
aacctggttgaatgtggagttggtt

SEQ ID NO: 64453 - DNA, 25 bp, Homo sapien
acacctctcggcccttgcgaggacc

SEQ ID NO: 64454 - DNA, 25 bp, Homo sapien
ccggttggtgcgactcataaacaac

SEQ ID NO: 64455 - DNA, 25 bp, Homo sapien
ttgggctccttgcgccgaacctttc

SEQ ID NO: 64456 - DNA, 25 bp, Homo sapien
gaccaacagcctcaggtagatatcc

SEQ ID NO: 64457 - DNA, 25 bp, Homo sapien
ggagttggttcttctggccagaaac

SEQ ID NO: 64458 - DNA, 25 bp, Homo sapien
aacctggttgaatgtggagttggtt

SEQ ID NO: 64459 - DNA, 25 bp, Homo sapien
ccggttggtgcgactcataaacaac

SEQ ID NO: 64460 - DNA, 25 bp, Homo sapien
ttccggatcatccgggaaagggaca

SEQ ID NO: 64461 - DNA, 25 bp, Homo sapien
cttgttttcccggccaggaagcttc

SEQ ID NO: 64462 - DNA, 25 bp, Homo sapien
gtacctcctgaacccgcacatcatc

SEQ ID NO: 64463 - DNA, 25 bp, Homo sapien
acgcgcagtgcacataccttcagtt

SEQ ID NO: 64464 - DNA, 25 bp, Homo sapien
acacctctcggcccttgcgaggacc

SEQ ID NO: 64465 - DNA, 25 bp, Homo sapien
gccttgccgaaatgccggtacacct

SEQ ID NO: 64466 - DNA, 25 bp, Homo sapien
gaccaacagcctcaggtagatatcc

SEQ ID NO: 64467 - DNA, 25 bp, Homo sapien
cttgttttcccggccaggaagcttc

SEQ ID NO: 64468 - DNA, 25 bp, Homo sapien
gccttgccgaaatgccggtacacct

SEQ ID NO: 64469 - DNA, 25 bp, Homo sapien
acgcgcagtgcacataccttcagtt

SEQ ID NO: 64470 - DNA, 25 bp, Homo sapien
ttccggatcatccgggaaagggaca

SEQ ID NO: 64471 - DNA, 25 bp, Homo sapien
acacctctcggcccttgcgaggacc

SEQ ID NO: 64472 - DNA, 25 bp, Homo sapien
aacctggttgaatgtggagttggtt

SEQ ID NO: 64473 - DNA, 25 bp, Homo sapien
ttgggctccttgcgccgaacctttc

SEQ ID NO: 64474 - DNA, 25 bp, Homo sapien
ggagttggttcttctggccagaaac

SEQ ID NO: 64475 - DNA, 25 bp, Homo sapien
gtacctcctgaacccgcacatcatc

SEQ ID NO: 64476 - DNA, 25 bp, Homo sapien
ccggttggtgcgactcataaacaac

SEQ ID NO: 64477 - DNA, 25 bp, Homo sapien
ttgggctccttgcgccgaacctttc

SEQ ID NO: 64478 - DNA, 25 bp, Homo sapien
gaccaacagcctcaggtagatatcc

SEQ ID NO: 64479 - DNA, 25 bp, Homo sapien
ggagttggttcttctggccagaaac

SEQ ID NO: 64480 - DNA, 25 bp, Homo sapien
aacctggttgaatgtggagttggtt

SEQ ID NO: 64481 - DNA, 25 bp, Homo sapien
ccggttggtgcgactcataaacaac

SEQ ID NO: 64482 - DNA, 25 bp, Homo sapien
ttccggatcatccgggaaagggaca

SEQ ID NO: 64483 - DNA, 25 bp, Homo sapien
cttgttttcccggccaggaagcttc

SEQ ID NO: 64484 - DNA, 25 bp, Homo sapien
gtacctcctgaacccgcacatcatc

SEQ ID NO: 64485 - DNA, 25 bp, Homo sapien
acgcgcagtgcacataccttcagtt

SEQ ID NO: 64486 - DNA, 25 bp, Homo sapien
acacctctcggcccttgcgaggacc

SEQ ID NO: 64487 - DNA, 25 bp, Homo sapien
gccttgccgaaatgccggtacacct

SEQ ID NO: 64488 - DNA, 25 bp, Homo sapien
acgcgcagtgcacataccttcagtt

SEQ ID NO: 64489 - DNA, 25 bp, Homo sapien
ttgggctccttgcgccgaacctttc

SEQ ID NO: 64490 - DNA, 25 bp, Homo sapien
gaccaacagcctcaggtagatatcc

SEQ ID NO: 64491 - DNA, 25 bp, Homo sapien
ggagttggttcttctggccagaaac

SEQ ID NO: 64492 - DNA, 25 bp, Homo sapien
ccggttggtgcgactcataaacaac

SEQ ID NO: 64493 - DNA, 25 bp, Homo sapien
acacctctcggcccttgcgaggacc

SEQ ID NO: 64494 - DNA, 25 bp, Homo sapien
aacctggttgaatgtggagttggtt

SEQ ID NO: 64495 - DNA, 25 bp, Homo sapien
ttccggatcatccgggaaagggaca

SEQ ID NO: 64496 - DNA, 25 bp, Homo sapien
gtacctcctgaacccgcacatcatc

SEQ ID NO: 64497 - DNA, 25 bp, Homo sapien
cttgttttcccggccaggaagcttc

SEQ ID NO: 64498 - DNA, 25 bp, Homo sapien
gccttgccgaaatgccggtacacct

SEQ ID NO: 64499 - DNA, 25 bp, Homo sapien
ttgggctccttgcgccgaacctttc

SEQ ID NO: 64500 - DNA, 25 bp, Homo sapien
gaccaacagcctcaggtagatatcc

SEQ ID NO: 64501 - DNA, 25 bp, Homo sapien
ggagttggttcttctggccagaaac

SEQ ID NO: 64502 - DNA, 25 bp, Homo sapien
aacctggttgaatgtggagttggtt

SEQ ID NO: 64503 - DNA, 25 bp, Homo sapien
ccggttggtgcgactcataaacaac

SEQ ID NO: 64504 - DNA, 25 bp, Homo sapien
ttccggatcatccgggaaagggaca

SEQ ID NO: 64505 - DNA, 25 bp, Homo sapien
cttgttttcccggccaggaagcttc

SEQ ID NO: 64506 - DNA, 25 bp, Homo sapien
gtacctcctgaacccgcacatcatc

SEQ ID NO: 64507 - DNA, 25 bp, Homo sapien
acgcgcagtgcacataccttcagtt

SEQ ID NO: 64508 - DNA, 25 bp, Homo sapien
acacctctcggcccttgcgaggacc

SEQ ID NO: 64509 - DNA, 25 bp, Homo sapien
gccttgccgaaatgccggtacacct

SEQ ID NO: 64510 - DNA, 25 bp, Homo sapien
gccttgccgaaatgccggtacacct

SEQ ID NO: 64511 - DNA, 25 bp, Homo sapien
acacctctcggcccttgcgaggacc

SEQ ID NO: 64512 - DNA, 25 bp, Homo sapien
ccggttggtgcgactcataaacaac

SEQ ID NO: 64513 - DNA, 25 bp, Homo sapien
ttccggatcatccgggaaagggaca

SEQ ID NO: 64514 - DNA, 25 bp, Homo sapien
gaccaacagcctcaggtagatatcc

SEQ ID NO: 64515 - DNA, 25 bp, Homo sapien
aacctggttgaatgtggagttggtt

SEQ ID NO: 64516 - DNA, 25 bp, Homo sapien
ttgggctccttgcgccgaacctttc

SEQ ID NO: 64517 - DNA, 25 bp, Homo sapien
cttgttttcccggccaggaagcttc

SEQ ID NO: 64518 - DNA, 25 bp, Homo sapien
gtacctcctgaacccgcacatcatc

SEQ ID NO: 64519 - DNA, 25 bp, Homo sapien
ggagttggttcttctggccagaaac

SEQ ID NO: 64520 - DNA, 25 bp, Homo sapien
acgcgcagtgcacataccttcagtt

SEQ ID NO: 64521 - DNA, 25 bp, Homo sapien
ttgggctccttgcgccgaacctttc

SEQ ID NO: 64522 - DNA, 25 bp, Homo sapien
gaccaacagcctcaggtagatatcc

SEQ ID NO: 64523 - DNA, 25 bp, Homo sapien
ggagttggttcttctggccagaaac

SEQ ID NO: 64524 - DNA, 25 bp, Homo sapien
aacctggttgaatgtggagttggtt

SEQ ID NO: 64525 - DNA, 25 bp, Homo sapien
ccggttggtgcgactcataaacaac

SEQ ID NO: 64526 - DNA, 25 bp, Homo sapien
ttccggatcatccgggaaagggaca

SEQ ID NO: 64527 - DNA, 25 bp, Homo sapien
cttgttttcccggccaggaagcttc

SEQ ID NO: 64528 - DNA, 25 bp, Homo sapien
gtacctcctgaacccgcacatcatc

SEQ ID NO: 64529 - DNA, 25 bp, Homo sapien
acgcgcagtgcacataccttcagtt

SEQ ID NO: 64530 - DNA, 25 bp, Homo sapien
acacctctcggcccttgcgaggacc

SEQ ID NO: 64531 - DNA, 25 bp, Homo sapien
gccttgccgaaatgccggtacacct

SEQ ID NO: 64532 - DNA, 25 bp, Homo sapien
ttgggctccttgcgccgaacctttc

SEQ ID NO: 64533 - DNA, 25 bp, Homo sapien
gaccaacagcctcaggtagatatcc

SEQ ID NO: 64534 - DNA, 25 bp, Homo sapien
ggagttggttcttctggccagaaac

SEQ ID NO: 64535 - DNA, 25 bp, Homo sapien
aacctggttgaatgtggagttggtt

SEQ ID NO: 64536 - DNA, 25 bp, Homo sapien
ccggttggtgcgactcataaacaac

SEQ ID NO: 64537 - DNA, 25 bp, Homo sapien
ttccggatcatccgggaaagggaca

SEQ ID NO: 64538 - DNA, 25 bp, Homo sapien
cttgttttcccggccaggaagcttc

SEQ ID NO: 64539 - DNA, 25 bp, Homo sapien
gtacctcctgaacccgcacatcatc

SEQ ID NO: 64540 - DNA, 25 bp, Homo sapien
acgcgcagtgcacataccttcagtt

SEQ ID NO: 64541 - DNA, 25 bp, Homo sapien
acacctctcggcccttgcgaggacc

SEQ ID NO: 64542 - DNA, 25 bp, Homo sapien
gccttgccgaaatgccggtacacct

SEQ ID NO: 64543 - DNA, 25 bp, Homo sapien
acacctctcggcccttgcgaggacc

SEQ ID NO: 64544 - DNA, 25 bp, Homo sapien
ttccggatcatccgggaaagggaca

SEQ ID NO: 64545 - DNA, 25 bp, Homo sapien
gaccaacagcctcaggtagatatcc

SEQ ID NO: 64546 - DNA, 25 bp, Homo sapien
ccggttggtgcgactcataaacaac

SEQ ID NO: 64547 - DNA, 25 bp, Homo sapien
cttgttttcccggccaggaagcttc

SEQ ID NO: 64548 - DNA, 25 bp, Homo sapien
ttgggctccttgcgccgaacctttc

SEQ ID NO: 64549 - DNA, 25 bp, Homo sapien
gccttgccgaaatgccggtacacct

SEQ ID NO: 64550 - DNA, 25 bp, Homo sapien
gtacctcctgaacccgcacatcatc

SEQ ID NO: 64551 - DNA, 25 bp, Homo sapien
ggagttggttcttctggccagaaac

SEQ ID NO: 64552 - DNA, 25 bp, Homo sapien
acgcgcagtgcacataccttcagtt

SEQ ID NO: 64553 - DNA, 25 bp, Homo sapien
aacctggttgaatgtggagttggtt

SEQ ID NO: 64554 - DNA, 25 bp, Homo sapien
ttgggctccttgcgccgaacctttc

SEQ ID NO: 64555 - DNA, 25 bp, Homo sapien
gaccaacagcctcaggtagatatcc

SEQ ID NO: 64556 - DNA, 25 bp, Homo sapien
ggagttggttcttctggccagaaac

SEQ ID NO: 64557 - DNA, 25 bp, Homo sapien
aacctggttgaatgtggagttggtt

SEQ ID NO: 64558 - DNA, 25 bp, Homo sapien
ccggttggtgcgactcataaacaac

SEQ ID NO: 64559 - DNA, 25 bp, Homo sapien
ttccggatcatccgggaaagggaca

SEQ ID NO: 64560 - DNA, 25 bp, Homo sapien
cttgttttcccggccaggaagcttc

SEQ ID NO: 64561 - DNA, 25 bp, Homo sapien
gtacctcctgaacccgcacatcatc

SEQ ID NO: 64562 - DNA, 25 bp, Homo sapien
acgcgcagtgcacataccttcagtt

SEQ ID NO: 64563 - DNA, 25 bp, Homo sapien
acacctctcggcccttgcgaggacc

SEQ ID NO: 64564 - DNA, 25 bp, Homo sapien
gccttgccgaaatgccggtacacct

SEQ ID NO: 64565 - DNA, 25 bp, Homo sapien
gccttgccgaaatgccggtacacct

SEQ ID NO: 64566 - DNA, 25 bp, Homo sapien
ggagttggttcttctggccagaaac

SEQ ID NO: 64567 - DNA, 25 bp, Homo sapien
gtacctcctgaacccgcacatcatc

SEQ ID NO: 64568 - DNA, 25 bp, Homo sapien
aacctggttgaatgtggagttggtt

SEQ ID NO: 64569 - DNA, 25 bp, Homo sapien
cttgttttcccggccaggaagcttc

SEQ ID NO: 64570 - DNA, 25 bp, Homo sapien
ttgggctccttgcgccgaacctttc

SEQ ID NO: 64571 - DNA, 25 bp, Homo sapien
ccggttggtgcgactcataaacaac

SEQ ID NO: 64572 - DNA, 25 bp, Homo sapien
gaccaacagcctcaggtagatatcc

SEQ ID NO: 64573 - DNA, 25 bp, Homo sapien
acgcgcagtgcacataccttcagtt

SEQ ID NO: 64574 - DNA, 25 bp, Homo sapien
ttccggatcatccgggaaagggaca

SEQ ID NO: 64575 - DNA, 25 bp, Homo sapien
acacctctcggcccttgcgaggacc

SEQ ID NO: 64576 - DNA, 25 bp, Homo sapien
ttgggctccttgcgccgaacctttc

SEQ ID NO: 64577 - DNA, 25 bp, Homo sapien
gaccaacagcctcaggtagatatcc

SEQ ID NO: 64578 - DNA, 25 bp, Homo sapien
ggagttggttcttctggccagaaac

SEQ ID NO: 64579 - DNA, 25 bp, Homo sapien
aacctggttgaatgtggagttggtt

SEQ ID NO: 64580 - DNA, 25 bp, Homo sapien
ccggttggtgcgactcataaacaac

SEQ ID NO: 64581 - DNA, 25 bp, Homo sapien
ttccggatcatccgggaaagggaca

SEQ ID NO: 64582 - DNA, 25 bp, Homo sapien
cttgttttcccggccaggaagcttc

SEQ ID NO: 64583 - DNA, 25 bp, Homo sapien
gtacctcctgaacccgcacatcatc

SEQ ID NO: 64584 - DNA, 25 bp, Homo sapien
acgcgcagtgcacataccttcagtt

SEQ ID NO: 64585 - DNA, 25 bp, Homo sapien
acacctctcggcccttgcgaggacc

SEQ ID NO: 64586 - DNA, 25 bp, Homo sapien
gccttgccgaaatgccggtacacct

SEQ ID NO: 64587 - DNA, 25 bp, Homo sapien
gccttgccgaaatgccggtacacct

SEQ ID NO: 64588 - DNA, 25 bp, Homo sapien
ggagttggttcttctggccagaaac

SEQ ID NO: 64589 - DNA, 25 bp, Homo sapien
cttgttttcccggccaggaagcttc

SEQ ID NO: 64590 - DNA, 25 bp, Homo sapien
aacctggttgaatgtggagttggtt

SEQ ID NO: 64591 - DNA, 25 bp, Homo sapien
gtacctcctgaacccgcacatcatc

SEQ ID NO: 64592 - DNA, 25 bp, Homo sapien
acacctctcggcccttgcgaggacc

SEQ ID NO: 64593 - DNA, 25 bp, Homo sapien
ttgggctccttgcgccgaacctttc

SEQ ID NO: 64594 - DNA, 25 bp, Homo sapien
gaccaacagcctcaggtagatatcc

SEQ ID NO: 64595 - DNA, 25 bp, Homo sapien
acgcgcagtgcacataccttcagtt

SEQ ID NO: 64596 - DNA, 25 bp, Homo sapien
ccggttggtgcgactcataaacaac

SEQ ID NO: 64597 - DNA, 25 bp, Homo sapien
ttccggatcatccgggaaagggaca

SEQ ID NO: 64598 - DNA, 25 bp, Homo sapien
ttgggctccttgcgccgaacctttc

SEQ ID NO: 64599 - DNA, 25 bp, Homo sapien
gaccaacagcctcaggtagatatcc

SEQ ID NO: 64600 - DNA, 25 bp, Homo sapien
ggagttggttcttctggccagaaac

SEQ ID NO: 64601 - DNA, 25 bp, Homo sapien
aacctggttgaatgtggagttggtt

SEQ ID NO: 64602 - DNA, 25 bp, Homo sapien
ccggttggtgcgactcataaacaac

SEQ ID NO: 64603 - DNA, 25 bp, Homo sapien
ttccggatcatccgggaaagggaca

SEQ ID NO: 64604 - DNA, 25 bp, Homo sapien
cttgttttcccggccaggaagcttc

SEQ ID NO: 64605 - DNA, 25 bp, Homo sapien
gtacctcctgaacccgcacatcatc

SEQ ID NO: 64606 - DNA, 25 bp, Homo sapien
acgcgcagtgcacataccttcagtt

SEQ ID NO: 64607 - DNA, 25 bp, Homo sapien
acacctctcggcccttgcgaggacc

SEQ ID NO: 64608 - DNA, 25 bp, Homo sapien
gccttgccgaaatgccggtacacct

SEQ ID NO: 64609 - DNA, 25 bp, Homo sapien
aacctggttgaatgtggagttggtt

SEQ ID NO: 64610 - DNA, 25 bp, Homo sapien
cttgttttcccggccaggaagcttc

SEQ ID NO: 64611 - DNA, 25 bp, Homo sapien
ttccggatcatccgggaaagggaca

SEQ ID NO: 64612 - DNA, 25 bp, Homo sapien
ttgggctccttgcgccgaacctttc

SEQ ID NO: 64613 - DNA, 25 bp, Homo sapien
ggagttggttcttctggccagaaac

SEQ ID NO: 64614 - DNA, 25 bp, Homo sapien
gccttgccgaaatgccggtacacct

SEQ ID NO: 64615 - DNA, 25 bp, Homo sapien
gtacctcctgaacccgcacatcatc

SEQ ID NO: 64616 - DNA, 25 bp, Homo sapien
acgcgcagtgcacataccttcagtt

SEQ ID NO: 64617 - DNA, 25 bp, Homo sapien
acacctctcggcccttgcgaggacc

SEQ ID NO: 64618 - DNA, 25 bp, Homo sapien
gaccaacagcctcaggtagatatcc

SEQ ID NO: 64619 - DNA, 25 bp, Homo sapien
ccggttggtgcgactcataaacaac

SEQ ID NO: 64620 - DNA, 25 bp, Homo sapien
ttgggctccttgcgccgaacctttc

SEQ ID NO: 64621 - DNA, 25 bp, Homo sapien
gaccaacagcctcaggtagatatcc

SEQ ID NO: 64622 - DNA, 25 bp, Homo sapien
ggagttggttcttctggccagaaac

SEQ ID NO: 64623 - DNA, 25 bp, Homo sapien
aacctggttgaatgtggagttggtt

SEQ ID NO: 64624 - DNA, 25 bp, Homo sapien
ccggttggtgcgactcataaacaac

SEQ ID NO: 64625 - DNA, 25 bp, Homo sapien
ttccggatcatccgggaaagggaca

SEQ ID NO: 64626 - DNA, 25 bp, Homo sapien
cttgttttcccggccaggaagcttc

SEQ ID NO: 64627 - DNA, 25 bp, Homo sapien
gtacctcctgaacccgcacatcatc

SEQ ID NO: 64628 - DNA, 25 bp, Homo sapien
acgcgcagtgcacataccttcagtt

SEQ ID NO: 64629 - DNA, 25 bp, Homo sapien
acacctctcggcccttgcgaggacc

SEQ ID NO: 64630 - DNA, 25 bp, Homo sapien
gccttgccgaaatgccggtacacct

SEQ ID NO: 64631 - DNA, 25 bp, Homo sapien
ggagttggttcttctggccagaaac

SEQ ID NO: 64632 - DNA, 25 bp, Homo sapien
gccttgccgaaatgccggtacacct

SEQ ID NO: 64633 - DNA, 25 bp, Homo sapien
aacctggttgaatgtggagttggtt

SEQ ID NO: 64634 - DNA, 25 bp, Homo sapien
cttgttttcccggccaggaagcttc

SEQ ID NO: 64635 - DNA, 25 bp, Homo sapien
gtacctcctgaacccgcacatcatc

SEQ ID NO: 64636 - DNA, 25 bp, Homo sapien
ccggttggtgcgactcataaacaac

SEQ ID NO: 64637 - DNA, 25 bp, Homo sapien
ttgggctccttgcgccgaacctttc

SEQ ID NO: 64638 - DNA, 25 bp, Homo sapien
acgcgcagtgcacataccttcagtt

SEQ ID NO: 64639 - DNA, 25 bp, Homo sapien
gaccaacagcctcaggtagatatcc

SEQ ID NO: 64640 - DNA, 25 bp, Homo sapien
ttccggatcatccgggaaagggaca

SEQ ID NO: 64641 - DNA, 25 bp, Homo sapien
acacctctcggcccttgcgaggacc

SEQ ID NO: 64642 - DNA, 25 bp, Homo sapien
ttccggatcatccgggaaagggaca

SEQ ID NO: 64643 - DNA, 25 bp, Homo sapien
gaccaacagcctcaggtagatatcc

SEQ ID NO: 64644 - DNA, 25 bp, Homo sapien
gtacctcctgaacccgcacatcatc

SEQ ID NO: 64645 - DNA, 25 bp, Homo sapien
gccttgccgaaatgccggtacacct

SEQ ID NO: 64646 - DNA, 25 bp, Homo sapien
aacctggttgaatgtggagttggtt

SEQ ID NO: 64647 - DNA, 25 bp, Homo sapien
ttgggctccttgcgccgaacctttc

SEQ ID NO: 64648 - DNA, 25 bp, Homo sapien
cttgttttcccggccaggaagcttc

SEQ ID NO: 64649 - DNA, 25 bp, Homo sapien
ccggttggtgcgactcataaacaac

SEQ ID NO: 64650 - DNA, 25 bp, Homo sapien
acacctctcggcccttgcgaggacc

SEQ ID NO: 64651 - DNA, 25 bp, Homo sapien
acgcgcagtgcacataccttcagtt

SEQ ID NO: 64652 - DNA, 25 bp, Homo sapien
ggagttggttcttctggccagaaac

SEQ ID NO: 64653 - DNA, 25 bp, Homo sapien
ttgggctccttgcgccgaacctttc

SEQ ID NO: 64654 - DNA, 25 bp, Homo sapien
gaccaacagcctcaggtagatatcc

SEQ ID NO: 64655 - DNA, 25 bp, Homo sapien
ggagttggttcttctggccagaaac

SEQ ID NO: 64656 - DNA, 25 bp, Homo sapien
aacctggttgaatgtggagttggtt

SEQ ID NO: 64657 - DNA, 25 bp, Homo sapien
ccggttggtgcgactcataaacaac

SEQ ID NO: 64658 - DNA, 25 bp, Homo sapien
ttccggatcatccgggaaagggaca

SEQ ID NO: 64659 - DNA, 25 bp, Homo sapien
cttgttttcccggccaggaagcttc

SEQ ID NO: 64660 - DNA, 25 bp, Homo sapien
gtacctcctgaacccgcacatcatc

SEQ ID NO: 64661 - DNA, 25 bp, Homo sapien
acgcgcagtgcacataccttcagtt

SEQ ID NO: 64662 - DNA, 25 bp, Homo sapien
acacctctcggcccttgcgaggacc

SEQ ID NO: 64663 - DNA, 25 bp, Homo sapien
gccttgccgaaatgccggtacacct

SEQ ID NO: 64664 - DNA, 25 bp, Homo sapien
ttccggatcatccgggaaagggaca

SEQ ID NO: 64665 - DNA, 25 bp, Homo sapien
gtacctcctgaacccgcacatcatc

SEQ ID NO: 64666 - DNA, 25 bp, Homo sapien
acgcgcagtgcacataccttcagtt

SEQ ID NO: 64667 - DNA, 25 bp, Homo sapien
gaccaacagcctcaggtagatatcc

SEQ ID NO: 64668 - DNA, 25 bp, Homo sapien
aacctggttgaatgtggagttggtt

SEQ ID NO: 64669 - DNA, 25 bp, Homo sapien
ggagttggttcttctggccagaaac

SEQ ID NO: 64670 - DNA, 25 bp, Homo sapien
cttgttttcccggccaggaagcttc

SEQ ID NO: 64671 - DNA, 25 bp, Homo sapien
gccttgccgaaatgccggtacacct

SEQ ID NO: 64672 - DNA, 25 bp, Homo sapien
acacctctcggcccttgcgaggacc

SEQ ID NO: 64673 - DNA, 25 bp, Homo sapien
ttgggctccttgcgccgaacctttc

SEQ ID NO: 64674 - DNA, 25 bp, Homo sapien
ccggttggtgcgactcataaacaac

SEQ ID NO: 64675 - DNA, 25 bp, Homo sapien
ttgggctccttgcgccgaacctttc

SEQ ID NO: 64676 - DNA, 25 bp, Homo sapien
gaccaacagcctcaggtagatatcc

SEQ ID NO: 64677 - DNA, 25 bp, Homo sapien
ggagttggttcttctggccagaaac

SEQ ID NO: 64678 - DNA, 25 bp, Homo sapien
aacctggttgaatgtggagttggtt

SEQ ID NO: 64679 - DNA, 25 bp, Homo sapien
ccggttggtgcgactcataaacaac

SEQ ID NO: 64680 - DNA, 25 bp, Homo sapien
ttccggatcatccgggaaagggaca

SEQ ID NO: 64681 - DNA, 25 bp, Homo sapien
cttgttttcccggccaggaagcttc

SEQ ID NO: 64682 - DNA, 25 bp, Homo sapien
gtacctcctgaacccgcacatcatc

SEQ ID NO: 64683 - DNA, 25 bp, Homo sapien
acgcgcagtgcacataccttcagtt

SEQ ID NO: 64684 - DNA, 25 bp, Homo sapien
acacctctcggcccttgcgaggacc

SEQ ID NO: 64685 - DNA, 25 bp, Homo sapien
gccttgccgaaatgccggtacacct

SEQ ID NO: 64686 - DNA, 25 bp, Homo sapien
gccttgccgaaatgccggtacacct

SEQ ID NO: 64687 - DNA, 25 bp, Homo sapien
ccggttggtgcgactcataaacaac

SEQ ID NO: 64688 - DNA, 25 bp, Homo sapien
gtacctcctgaacccgcacatcatc

SEQ ID NO: 64689 - DNA, 25 bp, Homo sapien
acacctctcggcccttgcgaggacc

SEQ ID NO: 64690 - DNA, 25 bp, Homo sapien
ggagttggttcttctggccagaaac

SEQ ID NO: 64691 - DNA, 25 bp, Homo sapien
ttccggatcatccgggaaagggaca

SEQ ID NO: 64692 - DNA, 25 bp, Homo sapien
aacctggttgaatgtggagttggtt

SEQ ID NO: 64693 - DNA, 25 bp, Homo sapien
cttgttttcccggccaggaagcttc

SEQ ID NO: 64694 - DNA, 25 bp, Homo sapien
ttgggctccttgcgccgaacctttc

SEQ ID NO: 64695 - DNA, 25 bp, Homo sapien
acgcgcagtgcacataccttcagtt

SEQ ID NO: 64696 - DNA, 25 bp, Homo sapien
gaccaacagcctcaggtagatatcc

SEQ ID NO: 64697 - DNA, 25 bp, Homo sapien
ttgggctccttgcgccgaacctttc

SEQ ID NO: 64698 - DNA, 25 bp, Homo sapien
gaccaacagcctcaggtagatatcc

SEQ ID NO: 64699 - DNA, 25 bp, Homo sapien
ggagttggttcttctggccagaaac

SEQ ID NO: 64700 - DNA, 25 bp, Homo sapien
aacctggttgaatgtggagttggtt

SEQ ID NO: 64701 - DNA, 25 bp, Homo sapien
ccggttggtgcgactcataaacaac

SEQ ID NO: 64702 - DNA, 25 bp, Homo sapien
ttccggatcatccgggaaagggaca

SEQ ID NO: 64703 - DNA, 25 bp, Homo sapien
cttgttttcccggccaggaagcttc

SEQ ID NO: 64704 - DNA, 25 bp, Homo sapien
gtacctcctgaacccgcacatcatc

SEQ ID NO: 64705 - DNA, 25 bp, Homo sapien
acgcgcagtgcacataccttcagtt

SEQ ID NO: 64706 - DNA, 25 bp, Homo sapien
acacctctcggcccttgcgaggacc

SEQ ID NO: 64707 - DNA, 25 bp, Homo sapien
gccttgccgaaatgccggtacacct

SEQ ID NO: 64708 - DNA, 25 bp, Homo sapien
tcagaggcgtgaacatcactcccat

SEQ ID NO: 64709 - DNA, 25 bp, Homo sapien
ccgatgcgttcagtgtcgtagtacg

SEQ ID NO: 64710 - DNA, 25 bp, Homo sapien
tgatcaggtcaactccgatgcgttc

SEQ ID NO: 64711 - DNA, 25 bp, Homo sapien
gtgaacatcactcccatggtcctcc

SEQ ID NO: 64712 - DNA, 25 bp, Homo sapien
tggggtccattcacaggtttacaag

SEQ ID NO: 64713 - DNA, 25 bp, Homo sapien
ggccaggtaggtcaccatcaaaagg

SEQ ID NO: 64714 - DNA, 25 bp, Homo sapien
atacctagaccagcaagtgtactgc

SEQ ID NO: 64715 - DNA, 25 bp, Homo sapien
gggttaatacctagaccagcaagtg

SEQ ID NO: 64716 - DNA, 25 bp, Homo sapien
ttccagacagtacatcctctgcata

SEQ ID NO: 64717 - DNA, 25 bp, Homo sapien
attgcaacactgtactcagggcatc

SEQ ID NO: 64718 - DNA, 25 bp, Homo sapien
agcaagtgtactgcttggggtccat

SEQ ID NO: 64719 - DNA, 25 bp, Homo sapien
gtgaacatcactcccatggtcctcc

SEQ ID NO: 64720 - DNA, 25 bp, Homo sapien
tcagaggcgtgaacatcactcccat

SEQ ID NO: 64721 - DNA, 25 bp, Homo sapien
ccgatgcgttcagtgtcgtagtacg

SEQ ID NO: 64722 - DNA, 25 bp, Homo sapien
tgatcaggtcaactccgatgcgttc

SEQ ID NO: 64723 - DNA, 25 bp, Homo sapien
attgcaacactgtactcagggcatc

SEQ ID NO: 64724 - DNA, 25 bp, Homo sapien
ttccagacagtacatcctctgcata

SEQ ID NO: 64725 - DNA, 25 bp, Homo sapien
ggccaggtaggtcaccatcaaaagg

SEQ ID NO: 64726 - DNA, 25 bp, Homo sapien
tggggtccattcacaggtttacaag

SEQ ID NO: 64727 - DNA, 25 bp, Homo sapien
agcaagtgtactgcttggggtccat

SEQ ID NO: 64728 - DNA, 25 bp, Homo sapien
atacctagaccagcaagtgtactgc

SEQ ID NO: 64729 - DNA, 25 bp, Homo sapien
gggttaatacctagaccagcaagtg

SEQ ID NO: 64730 - DNA, 25 bp, Homo sapien
tggggtccattcacaggtttacaag

SEQ ID NO: 64731 - DNA, 25 bp, Homo sapien
gtgaacatcactcccatggtcctcc

SEQ ID NO: 64732 - DNA, 25 bp, Homo sapien
ccgatgcgttcagtgtcgtagtacg

SEQ ID NO: 64733 - DNA, 25 bp, Homo sapien
atacctagaccagcaagtgtactgc

SEQ ID NO: 64734 - DNA, 25 bp, Homo sapien
agcaagtgtactgcttggggtccat

SEQ ID NO: 64735 - DNA, 25 bp, Homo sapien
gggttaatacctagaccagcaagtg

SEQ ID NO: 64736 - DNA, 25 bp, Homo sapien
tcagaggcgtgaacatcactcccat

SEQ ID NO: 64737 - DNA, 25 bp, Homo sapien
tgatcaggtcaactccgatgcgttc

SEQ ID NO: 64738 - DNA, 25 bp, Homo sapien
ttccagacagtacatcctctgcata

SEQ ID NO: 64739 - DNA, 25 bp, Homo sapien
attgcaacactgtactcagggcatc

SEQ ID NO: 64740 - DNA, 25 bp, Homo sapien
ggccaggtaggtcaccatcaaaagg

SEQ ID NO: 64741 - DNA, 25 bp, Homo sapien
tgatcaggtcaactccgatgcgttc

SEQ ID NO: 64742 - DNA, 25 bp, Homo sapien
attgcaacactgtactcagggcatc

SEQ ID NO: 64743 - DNA, 25 bp, Homo sapien
ttccagacagtacatcctctgcata

SEQ ID NO: 64744 - DNA, 25 bp, Homo sapien
ggccaggtaggtcaccatcaaaagg

SEQ ID NO: 64745 - DNA, 25 bp, Homo sapien
tggggtccattcacaggtttacaag

SEQ ID NO: 64746 - DNA, 25 bp, Homo sapien
agcaagtgtactgcttggggtccat

SEQ ID NO: 64747 - DNA, 25 bp, Homo sapien
atacctagaccagcaagtgtactgc

SEQ ID NO: 64748 - DNA, 25 bp, Homo sapien
gggttaatacctagaccagcaagtg

SEQ ID NO: 64749 - DNA, 25 bp, Homo sapien
gtgaacatcactcccatggtcctcc

SEQ ID NO: 64750 - DNA, 25 bp, Homo sapien
tcagaggcgtgaacatcactcccat

SEQ ID NO: 64751 - DNA, 25 bp, Homo sapien
ccgatgcgttcagtgtcgtagtacg

SEQ ID NO: 64752 - DNA, 25 bp, Homo sapien
gtgaacatcactcccatggtcctcc

SEQ ID NO: 64753 - DNA, 25 bp, Homo sapien
tcagaggcgtgaacatcactcccat

SEQ ID NO: 64754 - DNA, 25 bp, Homo sapien
ttccagacagtacatcctctgcata

SEQ ID NO: 64755 - DNA, 25 bp, Homo sapien
agcaagtgtactgcttggggtccat

SEQ ID NO: 64756 - DNA, 25 bp, Homo sapien
gggttaatacctagaccagcaagtg

SEQ ID NO: 64757 - DNA, 25 bp, Homo sapien
tggggtccattcacaggtttacaag

SEQ ID NO: 64758 - DNA, 25 bp, Homo sapien
tgatcaggtcaactccgatgcgttc

SEQ ID NO: 64759 - DNA, 25 bp, Homo sapien
ccgatgcgttcagtgtcgtagtacg

SEQ ID NO: 64760 - DNA, 25 bp, Homo sapien
attgcaacactgtactcagggcatc

SEQ ID NO: 64761 - DNA, 25 bp, Homo sapien
ggccaggtaggtcaccatcaaaagg

SEQ ID NO: 64762 - DNA, 25 bp, Homo sapien
atacctagaccagcaagtgtactgc

SEQ ID NO: 64763 - DNA, 25 bp, Homo sapien
gtgaacatcactcccatggtcctcc

SEQ ID NO: 64764 - DNA, 25 bp, Homo sapien
tcagaggcgtgaacatcactcccat

SEQ ID NO: 64765 - DNA, 25 bp, Homo sapien
ccgatgcgttcagtgtcgtagtacg

SEQ ID NO: 64766 - DNA, 25 bp, Homo sapien
tgatcaggtcaactccgatgcgttc

SEQ ID NO: 64767 - DNA, 25 bp, Homo sapien
attgcaacactgtactcagggcatc

SEQ ID NO: 64768 - DNA, 25 bp, Homo sapien
ttccagacagtacatcctctgcata

SEQ ID NO: 64769 - DNA, 25 bp, Homo sapien
ggccaggtaggtcaccatcaaaagg

SEQ ID NO: 64770 - DNA, 25 bp, Homo sapien
tggggtccattcacaggtttacaag

SEQ ID NO: 64771 - DNA, 25 bp, Homo sapien
agcaagtgtactgcttggggtccat

SEQ ID NO: 64772 - DNA, 25 bp, Homo sapien
atacctagaccagcaagtgtactgc

SEQ ID NO: 64773 - DNA, 25 bp, Homo sapien
gggttaatacctagaccagcaagtg

SEQ ID NO: 64774 - DNA, 25 bp, Homo sapien
gtgaacatcactcccatggtcctcc

SEQ ID NO: 64775 - DNA, 25 bp, Homo sapien
tcagaggcgtgaacatcactcccat

SEQ ID NO: 64776 - DNA, 25 bp, Homo sapien
ccgatgcgttcagtgtcgtagtacg

SEQ ID NO: 64777 - DNA, 25 bp, Homo sapien
tgatcaggtcaactccgatgcgttc

SEQ ID NO: 64778 - DNA, 25 bp, Homo sapien
attgcaacactgtactcagggcatc

SEQ ID NO: 64779 - DNA, 25 bp, Homo sapien
ttccagacagtacatcctctgcata

SEQ ID NO: 64780 - DNA, 25 bp, Homo sapien
ggccaggtaggtcaccatcaaaagg

SEQ ID NO: 64781 - DNA, 25 bp, Homo sapien
tggggtccattcacaggtttacaag

SEQ ID NO: 64782 - DNA, 25 bp, Homo sapien
agcaagtgtactgcttggggtccat

SEQ ID NO: 64783 - DNA, 25 bp, Homo sapien
atacctagaccagcaagtgtactgc

SEQ ID NO: 64784 - DNA, 25 bp, Homo sapien
gggttaatacctagaccagcaagtg

SEQ ID NO: 64785 - DNA, 25 bp, Homo sapien
gtgaacatcactcccatggtcctcc

SEQ ID NO: 64786 - DNA, 25 bp, Homo sapien
ggccaggtaggtcaccatcaaaagg

SEQ ID NO: 64787 - DNA, 25 bp, Homo sapien
ccgatgcgttcagtgtcgtagtacg

SEQ ID NO: 64788 - DNA, 25 bp, Homo sapien
gggttaatacctagaccagcaagtg

SEQ ID NO: 64789 - DNA, 25 bp, Homo sapien
tcagaggcgtgaacatcactcccat

SEQ ID NO: 64790 - DNA, 25 bp, Homo sapien
ttccagacagtacatcctctgcata

SEQ ID NO: 64791 - DNA, 25 bp, Homo sapien
atacctagaccagcaagtgtactgc

SEQ ID NO: 64792 - DNA, 25 bp, Homo sapien
tgatcaggtcaactccgatgcgttc

SEQ ID NO: 64793 - DNA, 25 bp, Homo sapien
agcaagtgtactgcttggggtccat

SEQ ID NO: 64794 - DNA, 25 bp, Homo sapien
attgcaacactgtactcagggcatc

SEQ ID NO: 64795 - DNA, 25 bp, Homo sapien
tggggtccattcacaggtttacaag

SEQ ID NO: 64796 - DNA, 25 bp, Homo sapien
gtgaacatcactcccatggtcctcc

SEQ ID NO: 64797 - DNA, 25 bp, Homo sapien
tcagaggcgtgaacatcactcccat

SEQ ID NO: 64798 - DNA, 25 bp, Homo sapien
ccgatgcgttcagtgtcgtagtacg

SEQ ID NO: 64799 - DNA, 25 bp, Homo sapien
tgatcaggtcaactccgatgcgttc

SEQ ID NO: 64800 - DNA, 25 bp, Homo sapien
attgcaacactgtactcagggcatc

SEQ ID NO: 64801 - DNA, 25 bp, Homo sapien
ttccagacagtacatcctctgcata

SEQ ID NO: 64802 - DNA, 25 bp, Homo sapien
ggccaggtaggtcaccatcaaaagg

SEQ ID NO: 64803 - DNA, 25 bp, Homo sapien
tggggtccattcacaggtttacaag

SEQ ID NO: 64804 - DNA, 25 bp, Homo sapien
agcaagtgtactgcttggggtccat

SEQ ID NO: 64805 - DNA, 25 bp, Homo sapien
atacctagaccagcaagtgtactgc

SEQ ID NO: 64806 - DNA, 25 bp, Homo sapien
gggttaatacctagaccagcaagtg

SEQ ID NO: 64807 - DNA, 25 bp, Homo sapien
tcagaggcgtgaacatcactcccat

SEQ ID NO: 64808 - DNA, 25 bp, Homo sapien
gggttaatacctagaccagcaagtg

SEQ ID NO: 64809 - DNA, 25 bp, Homo sapien
atacctagaccagcaagtgtactgc

SEQ ID NO: 64810 - DNA, 25 bp, Homo sapien
attgcaacactgtactcagggcatc

SEQ ID NO: 64811 - DNA, 25 bp, Homo sapien
ttccagacagtacatcctctgcata

SEQ ID NO: 64812 - DNA, 25 bp, Homo sapien
gtgaacatcactcccatggtcctcc

SEQ ID NO: 64813 - DNA, 25 bp, Homo sapien
ccgatgcgttcagtgtcgtagtacg

SEQ ID NO: 64814 - DNA, 25 bp, Homo sapien
tggggtccattcacaggtttacaag

SEQ ID NO: 64815 - DNA, 25 bp, Homo sapien
tgatcaggtcaactccgatgcgttc

SEQ ID NO: 64816 - DNA, 25 bp, Homo sapien
agcaagtgtactgcttggggtccat

SEQ ID NO: 64817 - DNA, 25 bp, Homo sapien
ggccaggtaggtcaccatcaaaagg

SEQ ID NO: 64818 - DNA, 25 bp, Homo sapien
gtgaacatcactcccatggtcctcc

SEQ ID NO: 64819 - DNA, 25 bp, Homo sapien
tcagaggcgtgaacatcactcccat

SEQ ID NO: 64820 - DNA, 25 bp, Homo sapien
ccgatgcgttcagtgtcgtagtacg

SEQ ID NO: 64821 - DNA, 25 bp, Homo sapien
tgatcaggtcaactccgatgcgttc

SEQ ID NO: 64822 - DNA, 25 bp, Homo sapien
attgcaacactgtactcagggcatc

SEQ ID NO: 64823 - DNA, 25 bp, Homo sapien
ttccagacagtacatcctctgcata

SEQ ID NO: 64824 - DNA, 25 bp, Homo sapien
ggccaggtaggtcaccatcaaaagg

SEQ ID NO: 64825 - DNA, 25 bp, Homo sapien
tggggtccattcacaggtttacaag

SEQ ID NO: 64826 - DNA, 25 bp, Homo sapien
agcaagtgtactgcttggggtccat

SEQ ID NO: 64827 - DNA, 25 bp, Homo sapien
atacctagaccagcaagtgtactgc

SEQ ID NO: 64828 - DNA, 25 bp, Homo sapien
gggttaatacctagaccagcaagtg

SEQ ID NO: 64829 - DNA, 25 bp, Homo sapien
gtgaacatcactcccatggtcctcc

SEQ ID NO: 64830 - DNA, 25 bp, Homo sapien
agcaagtgtactgcttggggtccat

SEQ ID NO: 64831 - DNA, 25 bp, Homo sapien
ccgatgcgttcagtgtcgtagtacg

SEQ ID NO: 64832 - DNA, 25 bp, Homo sapien
tcagaggcgtgaacatcactcccat

SEQ ID NO: 64833 - DNA, 25 bp, Homo sapien
atacctagaccagcaagtgtactgc

SEQ ID NO: 64834 - DNA, 25 bp, Homo sapien
tggggtccattcacaggtttacaag

SEQ ID NO: 64835 - DNA, 25 bp, Homo sapien
tgatcaggtcaactccgatgcgttc

SEQ ID NO: 64836 - DNA, 25 bp, Homo sapien
ggccaggtaggtcaccatcaaaagg

SEQ ID NO: 64837 - DNA, 25 bp, Homo sapien
ttccagacagtacatcctctgcata

SEQ ID NO: 64838 - DNA, 25 bp, Homo sapien
gggttaatacctagaccagcaagtg

SEQ ID NO: 64839 - DNA, 25 bp, Homo sapien
attgcaacactgtactcagggcatc

SEQ ID NO: 64840 - DNA, 25 bp, Homo sapien
gtgaacatcactcccatggtcctcc

SEQ ID NO: 64841 - DNA, 25 bp, Homo sapien
tcagaggcgtgaacatcactcccat

SEQ ID NO: 64842 - DNA, 25 bp, Homo sapien
ccgatgcgttcagtgtcgtagtacg

SEQ ID NO: 64843 - DNA, 25 bp, Homo sapien
tgatcaggtcaactccgatgcgttc

SEQ ID NO: 64844 - DNA, 25 bp, Homo sapien
attgcaacactgtactcagggcatc

SEQ ID NO: 64845 - DNA, 25 bp, Homo sapien
ttccagacagtacatcctctgcata

SEQ ID NO: 64846 - DNA, 25 bp, Homo sapien
ggccaggtaggtcaccatcaaaagg

SEQ ID NO: 64847 - DNA, 25 bp, Homo sapien
tggggtccattcacaggtttacaag

SEQ ID NO: 64848 - DNA, 25 bp, Homo sapien
agcaagtgtactgcttggggtccat

SEQ ID NO: 64849 - DNA, 25 bp, Homo sapien
atacctagaccagcaagtgtactgc

SEQ ID NO: 64850 - DNA, 25 bp, Homo sapien
gggttaatacctagaccagcaagtg

SEQ ID NO: 64851 - DNA, 25 bp, Homo sapien
tgatcaggtcaactccgatgcgttc

SEQ ID NO: 64852 - DNA, 25 bp, Homo sapien
ttccagacagtacatcctctgcata

SEQ ID NO: 64853 - DNA, 25 bp, Homo sapien
ggccaggtaggtcaccatcaaaagg

SEQ ID NO: 64854 - DNA, 25 bp, Homo sapien
tggggtccattcacaggtttacaag

SEQ ID NO: 64855 - DNA, 25 bp, Homo sapien
tcagaggcgtgaacatcactcccat

SEQ ID NO: 64856 - DNA, 25 bp, Homo sapien
gtgaacatcactcccatggtcctcc

SEQ ID NO: 64857 - DNA, 25 bp, Homo sapien
agcaagtgtactgcttggggtccat

SEQ ID NO: 64858 - DNA, 25 bp, Homo sapien
attgcaacactgtactcagggcatc

SEQ ID NO: 64859 - DNA, 25 bp, Homo sapien
gggttaatacctagaccagcaagtg

SEQ ID NO: 64860 - DNA, 25 bp, Homo sapien
ccgatgcgttcagtgtcgtagtacg

SEQ ID NO: 64861 - DNA, 25 bp, Homo sapien
atacctagaccagcaagtgtactgc

SEQ ID NO: 64862 - DNA, 25 bp, Homo sapien
gtgaacatcactcccatggtcctcc

SEQ ID NO: 64863 - DNA, 25 bp, Homo sapien
tcagaggcgtgaacatcactcccat

SEQ ID NO: 64864 - DNA, 25 bp, Homo sapien
ccgatgcgttcagtgtcgtagtacg

SEQ ID NO: 64865 - DNA, 25 bp, Homo sapien
tgatcaggtcaactccgatgcgttc

SEQ ID NO: 64866 - DNA, 25 bp, Homo sapien
attgcaacactgtactcagggcatc

SEQ ID NO: 64867 - DNA, 25 bp, Homo sapien
ttccagacagtacatcctctgcata

SEQ ID NO: 64868 - DNA, 25 bp, Homo sapien
ggccaggtaggtcaccatcaaaagg

SEQ ID NO: 64869 - DNA, 25 bp, Homo sapien
tggggtccattcacaggtttacaag

SEQ ID NO: 64870 - DNA, 25 bp, Homo sapien
agcaagtgtactgcttggggtccat

SEQ ID NO: 64871 - DNA, 25 bp, Homo sapien
atacctagaccagcaagtgtactgc

SEQ ID NO: 64872 - DNA, 25 bp, Homo sapien
gggttaatacctagaccagcaagtg

SEQ ID NO: 64873 - DNA, 25 bp, Homo sapien
attgcaacactgtactcagggcatc

SEQ ID NO: 64874 - DNA, 25 bp, Homo sapien
tcagaggcgtgaacatcactcccat

SEQ ID NO: 64875 - DNA, 25 bp, Homo sapien
gtgaacatcactcccatggtcctcc

SEQ ID NO: 64876 - DNA, 25 bp, Homo sapien
atacctagaccagcaagtgtactgc

SEQ ID NO: 64877 - DNA, 25 bp, Homo sapien
tggggtccattcacaggtttacaag

SEQ ID NO: 64878 - DNA, 25 bp, Homo sapien
ccgatgcgttcagtgtcgtagtacg

SEQ ID NO: 64879 - DNA, 25 bp, Homo sapien
tgatcaggtcaactccgatgcgttc

SEQ ID NO: 64880 - DNA, 25 bp, Homo sapien
agcaagtgtactgcttggggtccat

SEQ ID NO: 64881 - DNA, 25 bp, Homo sapien
ggccaggtaggtcaccatcaaaagg

SEQ ID NO: 64882 - DNA, 25 bp, Homo sapien
ttccagacagtacatcctctgcata

SEQ ID NO: 64883 - DNA, 25 bp, Homo sapien
gggttaatacctagaccagcaagtg

SEQ ID NO: 64884 - DNA, 25 bp, Homo sapien
ccgatgcgttcagtgtcgtagtacg

SEQ ID NO: 64885 - DNA, 25 bp, Homo sapien
tcagaggcgtgaacatcactcccat

SEQ ID NO: 64886 - DNA, 25 bp, Homo sapien
gggttaatacctagaccagcaagtg

SEQ ID NO: 64887 - DNA, 25 bp, Homo sapien
tgatcaggtcaactccgatgcgttc

SEQ ID NO: 64888 - DNA, 25 bp, Homo sapien
attgcaacactgtactcagggcatc

SEQ ID NO: 64889 - DNA, 25 bp, Homo sapien
atacctagaccagcaagtgtactgc

SEQ ID NO: 64890 - DNA, 25 bp, Homo sapien
tggggtccattcacaggtttacaag

SEQ ID NO: 64891 - DNA, 25 bp, Homo sapien
gtgaacatcactcccatggtcctcc

SEQ ID NO: 64892 - DNA, 25 bp, Homo sapien
agcaagtgtactgcttggggtccat

SEQ ID NO: 64893 - DNA, 25 bp, Homo sapien
ttccagacagtacatcctctgcata

SEQ ID NO: 64894 - DNA, 25 bp, Homo sapien
ggccaggtaggtcaccatcaaaagg

SEQ ID NO: 64895 - DNA, 25 bp, Homo sapien
gtgaacatcactcccatggtcctcc

SEQ ID NO: 64896 - DNA, 25 bp, Homo sapien
tcagaggcgtgaacatcactcccat

SEQ ID NO: 64897 - DNA, 25 bp, Homo sapien
ccgatgcgttcagtgtcgtagtacg

SEQ ID NO: 64898 - DNA, 25 bp, Homo sapien
tgatcaggtcaactccgatgcgttc

SEQ ID NO: 64899 - DNA, 25 bp, Homo sapien
attgcaacactgtactcagggcatc

SEQ ID NO: 64900 - DNA, 25 bp, Homo sapien
ttccagacagtacatcctctgcata

SEQ ID NO: 64901 - DNA, 25 bp, Homo sapien
ggccaggtaggtcaccatcaaaagg

SEQ ID NO: 64902 - DNA, 25 bp, Homo sapien
tggggtccattcacaggtttacaag

SEQ ID NO: 64903 - DNA, 25 bp, Homo sapien
agcaagtgtactgcttggggtccat

SEQ ID NO: 64904 - DNA, 25 bp, Homo sapien
atacctagaccagcaagtgtactgc

SEQ ID NO: 64905 - DNA, 25 bp, Homo sapien
gggttaatacctagaccagcaagtg

SEQ ID NO: 64906 - DNA, 25 bp, Homo sapien
gtgaacatcactcccatggtcctcc

SEQ ID NO: 64907 - DNA, 25 bp, Homo sapien
atacctagaccagcaagtgtactgc

SEQ ID NO: 64908 - DNA, 25 bp, Homo sapien
ggccaggtaggtcaccatcaaaagg

SEQ ID NO: 64909 - DNA, 25 bp, Homo sapien
tcagaggcgtgaacatcactcccat

SEQ ID NO: 64910 - DNA, 25 bp, Homo sapien
tgatcaggtcaactccgatgcgttc

SEQ ID NO: 64911 - DNA, 25 bp, Homo sapien
ccgatgcgttcagtgtcgtagtacg

SEQ ID NO: 64912 - DNA, 25 bp, Homo sapien
attgcaacactgtactcagggcatc

SEQ ID NO: 64913 - DNA, 25 bp, Homo sapien
gggttaatacctagaccagcaagtg

SEQ ID NO: 64914 - DNA, 25 bp, Homo sapien
ttccagacagtacatcctctgcata

SEQ ID NO: 64915 - DNA, 25 bp, Homo sapien
tggggtccattcacaggtttacaag

SEQ ID NO: 64916 - DNA, 25 bp, Homo sapien
agcaagtgtactgcttggggtccat

SEQ ID NO: 64917 - DNA, 25 bp, Homo sapien
gtgaacatcactcccatggtcctcc

SEQ ID NO: 64918 - DNA, 25 bp, Homo sapien
tcagaggcgtgaacatcactcccat

SEQ ID NO: 64919 - DNA, 25 bp, Homo sapien
ccgatgcgttcagtgtcgtagtacg

SEQ ID NO: 64920 - DNA, 25 bp, Homo sapien
tgatcaggtcaactccgatgcgttc

SEQ ID NO: 64921 - DNA, 25 bp, Homo sapien
attgcaacactgtactcagggcatc

SEQ ID NO: 64922 - DNA, 25 bp, Homo sapien
ttccagacagtacatcctctgcata

SEQ ID NO: 64923 - DNA, 25 bp, Homo sapien
ggccaggtaggtcaccatcaaaagg

SEQ ID NO: 64924 - DNA, 25 bp, Homo sapien
tggggtccattcacaggtttacaag

SEQ ID NO: 64925 - DNA, 25 bp, Homo sapien
agcaagtgtactgcttggggtccat

SEQ ID NO: 64926 - DNA, 25 bp, Homo sapien
atacctagaccagcaagtgtactgc

SEQ ID NO: 64927 - DNA, 25 bp, Homo sapien
gggttaatacctagaccagcaagtg

SEQ ID NO: 64928 - DNA, 25 bp, Homo sapien
tcagaggcgtgaacatcactcccat

SEQ ID NO: 64929 - DNA, 25 bp, Homo sapien
gtgaacatcactcccatggtcctcc

SEQ ID NO: 64930 - DNA, 25 bp, Homo sapien
tgatcaggtcaactccgatgcgttc

SEQ ID NO: 64931 - DNA, 25 bp, Homo sapien
agcaagtgtactgcttggggtccat

SEQ ID NO: 64932 - DNA, 25 bp, Homo sapien
ttccagacagtacatcctctgcata

SEQ ID NO: 64933 - DNA, 25 bp, Homo sapien
attgcaacactgtactcagggcatc

SEQ ID NO: 64934 - DNA, 25 bp, Homo sapien
ccgatgcgttcagtgtcgtagtacg

SEQ ID NO: 64935 - DNA, 25 bp, Homo sapien
tggggtccattcacaggtttacaag

SEQ ID NO: 64936 - DNA, 25 bp, Homo sapien
atacctagaccagcaagtgtactgc

SEQ ID NO: 64937 - DNA, 25 bp, Homo sapien
gggttaatacctagaccagcaagtg

SEQ ID NO: 64938 - DNA, 25 bp, Homo sapien
ggccaggtaggtcaccatcaaaagg

SEQ ID NO: 64939 - DNA, 25 bp, Homo sapien
gtgaacatcactcccatggtcctcc

SEQ ID NO: 64940 - DNA, 25 bp, Homo sapien
tcagaggcgtgaacatcactcccat

SEQ ID NO: 64941 - DNA, 25 bp, Homo sapien
ccgatgcgttcagtgtcgtagtacg

SEQ ID NO: 64942 - DNA, 25 bp, Homo sapien
tgatcaggtcaactccgatgcgttc

SEQ ID NO: 64943 - DNA, 25 bp, Homo sapien
attgcaacactgtactcagggcatc

SEQ ID NO: 64944 - DNA, 25 bp, Homo sapien
ttccagacagtacatcctctgcata

SEQ ID NO: 64945 - DNA, 25 bp, Homo sapien
ggccaggtaggtcaccatcaaaagg

SEQ ID NO: 64946 - DNA, 25 bp, Homo sapien
tggggtccattcacaggtttacaag

SEQ ID NO: 64947 - DNA, 25 bp, Homo sapien
agcaagtgtactgcttggggtccat

SEQ ID NO: 64948 - DNA, 25 bp, Homo sapien
atacctagaccagcaagtgtactgc

SEQ ID NO: 64949 - DNA, 25 bp, Homo sapien
gggttaatacctagaccagcaagtg

SEQ ID NO: 64950 - DNA, 25 bp, Homo sapien
tggggtccattcacaggtttacaag

SEQ ID NO: 64951 - DNA, 25 bp, Homo sapien
atacctagaccagcaagtgtactgc

SEQ ID NO: 64952 - DNA, 25 bp, Homo sapien
gggttaatacctagaccagcaagtg

SEQ ID NO: 64953 - DNA, 25 bp, Homo sapien
tgatcaggtcaactccgatgcgttc

SEQ ID NO: 64954 - DNA, 25 bp, Homo sapien
tcagaggcgtgaacatcactcccat

SEQ ID NO: 64955 - DNA, 25 bp, Homo sapien
ggccaggtaggtcaccatcaaaagg

SEQ ID NO: 64956 - DNA, 25 bp, Homo sapien
agcaagtgtactgcttggggtccat

SEQ ID NO: 64957 - DNA, 25 bp, Homo sapien
gtgaacatcactcccatggtcctcc

SEQ ID NO: 64958 - DNA, 25 bp, Homo sapien
ttccagacagtacatcctctgcata

SEQ ID NO: 64959 - DNA, 25 bp, Homo sapien
attgcaacactgtactcagggcatc

SEQ ID NO: 64960 - DNA, 25 bp, Homo sapien
ccgatgcgttcagtgtcgtagtacg

SEQ ID NO: 64961 - DNA, 25 bp, Homo sapien
gtgaacatcactcccatggtcctcc

SEQ ID NO: 64962 - DNA, 25 bp, Homo sapien
tcagaggcgtgaacatcactcccat

SEQ ID NO: 64963 - DNA, 25 bp, Homo sapien
ccgatgcgttcagtgtcgtagtacg

SEQ ID NO: 64964 - DNA, 25 bp, Homo sapien
tgatcaggtcaactccgatgcgttc

SEQ ID NO: 64965 - DNA, 25 bp, Homo sapien
attgcaacactgtactcagggcatc

SEQ ID NO: 64966 - DNA, 25 bp, Homo sapien
ttccagacagtacatcctctgcata

SEQ ID NO: 64967 - DNA, 25 bp, Homo sapien
ggccaggtaggtcaccatcaaaagg

SEQ ID NO: 64968 - DNA, 25 bp, Homo sapien
tggggtccattcacaggtttacaag

SEQ ID NO: 64969 - DNA, 25 bp, Homo sapien
agcaagtgtactgcttggggtccat

SEQ ID NO: 64970 - DNA, 25 bp, Homo sapien
atacctagaccagcaagtgtactgc

SEQ ID NO: 64971 - DNA, 25 bp, Homo sapien
gggttaatacctagaccagcaagtg

SEQ ID NO: 64972 - DNA, 25 bp, Homo sapien
attgcaacactgtactcagggcatc

SEQ ID NO: 64973 - DNA, 25 bp, Homo sapien
gtgaacatcactcccatggtcctcc

SEQ ID NO: 64974 - DNA, 25 bp, Homo sapien
tggggtccattcacaggtttacaag

SEQ ID NO: 64975 - DNA, 25 bp, Homo sapien
tgatcaggtcaactccgatgcgttc

SEQ ID NO: 64976 - DNA, 25 bp, Homo sapien
ttccagacagtacatcctctgcata

SEQ ID NO: 64977 - DNA, 25 bp, Homo sapien
atacctagaccagcaagtgtactgc

SEQ ID NO: 64978 - DNA, 25 bp, Homo sapien
ggccaggtaggtcaccatcaaaagg

SEQ ID NO: 64979 - DNA, 25 bp, Homo sapien
ccgatgcgttcagtgtcgtagtacg

SEQ ID NO: 64980 - DNA, 25 bp, Homo sapien
agcaagtgtactgcttggggtccat

SEQ ID NO: 64981 - DNA, 25 bp, Homo sapien
tcagaggcgtgaacatcactcccat

SEQ ID NO: 64982 - DNA, 25 bp, Homo sapien
gggttaatacctagaccagcaagtg

SEQ ID NO: 64983 - DNA, 25 bp, Homo sapien
gtgaacatcactcccatggtcctcc

SEQ ID NO: 64984 - DNA, 25 bp, Homo sapien
tcagaggcgtgaacatcactcccat

SEQ ID NO: 64985 - DNA, 25 bp, Homo sapien
ccgatgcgttcagtgtcgtagtacg

SEQ ID NO: 64986 - DNA, 25 bp, Homo sapien
tgatcaggtcaactccgatgcgttc

SEQ ID NO: 64987 - DNA, 25 bp, Homo sapien
attgcaacactgtactcagggcatc

SEQ ID NO: 64988 - DNA, 25 bp, Homo sapien
ttccagacagtacatcctctgcata

SEQ ID NO: 64989 - DNA, 25 bp, Homo sapien
ggccaggtaggtcaccatcaaaagg

SEQ ID NO: 64990 - DNA, 25 bp, Homo sapien
tggggtccattcacaggtttacaag

SEQ ID NO: 64991 - DNA, 25 bp, Homo sapien
agcaagtgtactgcttggggtccat

SEQ ID NO: 64992 - DNA, 25 bp, Homo sapien
atacctagaccagcaagtgtactgc

SEQ ID NO: 64993 - DNA, 25 bp, Homo sapien
gggttaatacctagaccagcaagtg

SEQ ID NO: 64994 - DNA, 25 bp, Homo sapien
atacctagaccagcaagtgtactgc

SEQ ID NO: 64995 - DNA, 25 bp, Homo sapien
gtgaacatcactcccatggtcctcc

SEQ ID NO: 64996 - DNA, 25 bp, Homo sapien
tcagaggcgtgaacatcactcccat

SEQ ID NO: 64997 - DNA, 25 bp, Homo sapien
attgcaacactgtactcagggcatc

SEQ ID NO: 64998 - DNA, 25 bp, Homo sapien
tggggtccattcacaggtttacaag

SEQ ID NO: 64999 - DNA, 25 bp, Homo sapien
gggttaatacctagaccagcaagtg

SEQ ID NO: 65000 - DNA, 25 bp, Homo sapien
ccgatgcgttcagtgtcgtagtacg

SEQ ID NO: 65001 - DNA, 25 bp, Homo sapien
agcaagtgtactgcttggggtccat

SEQ ID NO: 65002 - DNA, 25 bp, Homo sapien
tgatcaggtcaactccgatgcgttc

SEQ ID NO: 65003 - DNA, 25 bp, Homo sapien
ttccagacagtacatcctctgcata

SEQ ID NO: 65004 - DNA, 25 bp, Homo sapien
ggccaggtaggtcaccatcaaaagg

SEQ ID NO: 65005 - DNA, 25 bp, Homo sapien
gtgaacatcactcccatggtcctcc

SEQ ID NO: 65006 - DNA, 25 bp, Homo sapien
tcagaggcgtgaacatcactcccat

SEQ ID NO: 65007 - DNA, 25 bp, Homo sapien
ccgatgcgttcagtgtcgtagtacg

SEQ ID NO: 65008 - DNA, 25 bp, Homo sapien
tgatcaggtcaactccgatgcgttc

SEQ ID NO: 65009 - DNA, 25 bp, Homo sapien
attgcaacactgtactcagggcatc

SEQ ID NO: 65010 - DNA, 25 bp, Homo sapien
ttccagacagtacatcctctgcata

SEQ ID NO: 65011 - DNA, 25 bp, Homo sapien
ggccaggtaggtcaccatcaaaagg

SEQ ID NO: 65012 - DNA, 25 bp, Homo sapien
tggggtccattcacaggtttacaag

SEQ ID NO: 65013 - DNA, 25 bp, Homo sapien
agcaagtgtactgcttggggtccat

SEQ ID NO: 65014 - DNA, 25 bp, Homo sapien
atacctagaccagcaagtgtactgc

SEQ ID NO: 65015 - DNA, 25 bp, Homo sapien
gggttaatacctagaccagcaagtg

SEQ ID NO: 65016 - DNA, 25 bp, Homo sapien
gtgaacatcactcccatggtcctcc

SEQ ID NO: 65017 - DNA, 25 bp, Homo sapien
tcagaggcgtgaacatcactcccat

SEQ ID NO: 65018 - DNA, 25 bp, Homo sapien
ccgatgcgttcagtgtcgtagtacg

SEQ ID NO: 65019 - DNA, 25 bp, Homo sapien
tgatcaggtcaactccgatgcgttc

SEQ ID NO: 65020 - DNA, 25 bp, Homo sapien
attgcaacactgtactcagggcatc

SEQ ID NO: 65021 - DNA, 25 bp, Homo sapien
ttccagacagtacatcctctgcata

SEQ ID NO: 65022 - DNA, 25 bp, Homo sapien
ggccaggtaggtcaccatcaaaagg

SEQ ID NO: 65023 - DNA, 25 bp, Homo sapien
tggggtccattcacaggtttacaag

SEQ ID NO: 65024 - DNA, 25 bp, Homo sapien
agcaagtgtactgcttggggtccat

SEQ ID NO: 65025 - DNA, 25 bp, Homo sapien
atacctagaccagcaagtgtactgc

SEQ ID NO: 65026 - DNA, 25 bp, Homo sapien
gggttaatacctagaccagcaagtg

SEQ ID NO: 65027 - DNA, 25 bp, Homo sapien
attgcaacactgtactcagggcatc

SEQ ID NO: 65028 - DNA, 25 bp, Homo sapien
ggccaggtaggtcaccatcaaaagg

SEQ ID NO: 65029 - DNA, 25 bp, Homo sapien
ttccagacagtacatcctctgcata

SEQ ID NO: 65030 - DNA, 25 bp, Homo sapien
ccgatgcgttcagtgtcgtagtacg

SEQ ID NO: 65031 - DNA, 25 bp, Homo sapien
tgatcaggtcaactccgatgcgttc

SEQ ID NO: 65032 - DNA, 25 bp, Homo sapien
tcagaggcgtgaacatcactcccat

SEQ ID NO: 65033 - DNA, 25 bp, Homo sapien
tggggtccattcacaggtttacaag

SEQ ID NO: 65034 - DNA, 25 bp, Homo sapien
gggttaatacctagaccagcaagtg

SEQ ID NO: 65035 - DNA, 25 bp, Homo sapien
agcaagtgtactgcttggggtccat

SEQ ID NO: 65036 - DNA, 25 bp, Homo sapien
gtgaacatcactcccatggtcctcc

SEQ ID NO: 65037 - DNA, 25 bp, Homo sapien
atacctagaccagcaagtgtactgc

SEQ ID NO: 65038 - DNA, 25 bp, Homo sapien
ggccaggtaggtcaccatcaaaagg

SEQ ID NO: 65039 - DNA, 25 bp, Homo sapien
attgcaacactgtactcagggcatc

SEQ ID NO: 65040 - DNA, 25 bp, Homo sapien
ttccagacagtacatcctctgcata

SEQ ID NO: 65041 - DNA, 25 bp, Homo sapien
agcaagtgtactgcttggggtccat

SEQ ID NO: 65042 - DNA, 25 bp, Homo sapien
ccgatgcgttcagtgtcgtagtacg

SEQ ID NO: 65043 - DNA, 25 bp, Homo sapien
tgatcaggtcaactccgatgcgttc

SEQ ID NO: 65044 - DNA, 25 bp, Homo sapien
tcagaggcgtgaacatcactcccat

SEQ ID NO: 65045 - DNA, 25 bp, Homo sapien
tggggtccattcacaggtttacaag

SEQ ID NO: 65046 - DNA, 25 bp, Homo sapien
gggttaatacctagaccagcaagtg

SEQ ID NO: 65047 - DNA, 25 bp, Homo sapien
gtgaacatcactcccatggtcctcc

SEQ ID NO: 65048 - DNA, 25 bp, Homo sapien
atacctagaccagcaagtgtactgc

SEQ ID NO: 65049 - DNA, 25 bp, Homo sapien
ggccaggtaggtcaccatcaaaagg

SEQ ID NO: 65050 - DNA, 25 bp, Homo sapien
attgcaacactgtactcagggcatc

SEQ ID NO: 65051 - DNA, 25 bp, Homo sapien
ttccagacagtacatcctctgcata

SEQ ID NO: 65052 - DNA, 25 bp, Homo sapien
ccgatgcgttcagtgtcgtagtacg

SEQ ID NO: 65053 - DNA, 25 bp, Homo sapien
tgatcaggtcaactccgatgcgttc

SEQ ID NO: 65054 - DNA, 25 bp, Homo sapien
agcaagtgtactgcttggggtccat

SEQ ID NO: 65055 - DNA, 25 bp, Homo sapien
tcagaggcgtgaacatcactcccat

SEQ ID NO: 65056 - DNA, 25 bp, Homo sapien
tggggtccattcacaggtttacaag

SEQ ID NO: 65057 - DNA, 25 bp, Homo sapien
gggttaatacctagaccagcaagtg

SEQ ID NO: 65058 - DNA, 25 bp, Homo sapien
gtgaacatcactcccatggtcctcc

SEQ ID NO: 65059 - DNA, 25 bp, Homo sapien
atacctagaccagcaagtgtactgc

SEQ ID NO: 65060 - DNA, 25 bp, Homo sapien
ggccaggtaggtcaccatcaaaagg

SEQ ID NO: 65061 - DNA, 25 bp, Homo sapien
attgcaacactgtactcagggcatc

SEQ ID NO: 65062 - DNA, 25 bp, Homo sapien
agcaagtgtactgcttggggtccat

SEQ ID NO: 65063 - DNA, 25 bp, Homo sapien
ttccagacagtacatcctctgcata

SEQ ID NO: 65064 - DNA, 25 bp, Homo sapien
ccgatgcgttcagtgtcgtagtacg

SEQ ID NO: 65065 - DNA, 25 bp, Homo sapien
tgatcaggtcaactccgatgcgttc

SEQ ID NO: 65066 - DNA, 25 bp, Homo sapien
tcagaggcgtgaacatcactcccat

SEQ ID NO: 65067 - DNA, 25 bp, Homo sapien
tggggtccattcacaggtttacaag

SEQ ID NO: 65068 - DNA, 25 bp, Homo sapien
gtgaacatcactcccatggtcctcc

SEQ ID NO: 65069 - DNA, 25 bp, Homo sapien
gggttaatacctagaccagcaagtg

SEQ ID NO: 65070 - DNA, 25 bp, Homo sapien
atacctagaccagcaagtgtactgc

SEQ ID NO: 65071 - DNA, 25 bp, Homo sapien
attgcaacactgtactcagggcatc

SEQ ID NO: 65072 - DNA, 25 bp, Homo sapien
ggccaggtaggtcaccatcaaaagg

SEQ ID NO: 65073 - DNA, 25 bp, Homo sapien
ttccagacagtacatcctctgcata

SEQ ID NO: 65074 - DNA, 25 bp, Homo sapien
ccgatgcgttcagtgtcgtagtacg

SEQ ID NO: 65075 - DNA, 25 bp, Homo sapien
tgatcaggtcaactccgatgcgttc

SEQ ID NO: 65076 - DNA, 25 bp, Homo sapien
tcagaggcgtgaacatcactcccat

SEQ ID NO: 65077 - DNA, 25 bp, Homo sapien
tggggtccattcacaggtttacaag

SEQ ID NO: 65078 - DNA, 25 bp, Homo sapien
agcaagtgtactgcttggggtccat

SEQ ID NO: 65079 - DNA, 25 bp, Homo sapien
gtgaacatcactcccatggtcctcc

SEQ ID NO: 65080 - DNA, 25 bp, Homo sapien
gggttaatacctagaccagcaagtg

SEQ ID NO: 65081 - DNA, 25 bp, Homo sapien
atacctagaccagcaagtgtactgc

SEQ ID NO: 65082 - DNA, 25 bp, Homo sapien
attgcaacactgtactcagggcatc

SEQ ID NO: 65083 - DNA, 25 bp, Homo sapien
ggccaggtaggtcaccatcaaaagg

SEQ ID NO: 65084 - DNA, 25 bp, Homo sapien
agcaagtgtactgcttggggtccat

SEQ ID NO: 65085 - DNA, 25 bp, Homo sapien
ttccagacagtacatcctctgcata

SEQ ID NO: 65086 - DNA, 25 bp, Homo sapien
tgatcaggtcaactccgatgcgttc

SEQ ID NO: 65087 - DNA, 25 bp, Homo sapien
ccgatgcgttcagtgtcgtagtacg

SEQ ID NO: 65088 - DNA, 25 bp, Homo sapien
tcagaggcgtgaacatcactcccat

SEQ ID NO: 65089 - DNA, 25 bp, Homo sapien
tggggtccattcacaggtttacaag

SEQ ID NO: 65090 - DNA, 25 bp, Homo sapien
gggttaatacctagaccagcaagtg

SEQ ID NO: 65091 - DNA, 25 bp, Homo sapien
gtgaacatcactcccatggtcctcc

SEQ ID NO: 65092 - DNA, 25 bp, Homo sapien
atacctagaccagcaagtgtactgc

SEQ ID NO: 65093 - DNA, 25 bp, Homo sapien
ggccaggtaggtcaccatcaaaagg

SEQ ID NO: 65094 - DNA, 25 bp, Homo sapien
attgcaacactgtactcagggcatc

SEQ ID NO: 65095 - DNA, 25 bp, Homo sapien
ttccagacagtacatcctctgcata

SEQ ID NO: 65096 - DNA, 25 bp, Homo sapien
ccgatgcgttcagtgtcgtagtacg

SEQ ID NO: 65097 - DNA, 25 bp, Homo sapien
tgatcaggtcaactccgatgcgttc

SEQ ID NO: 65098 - DNA, 25 bp, Homo sapien
agcaagtgtactgcttggggtccat

SEQ ID NO: 65099 - DNA, 25 bp, Homo sapien
tcagaggcgtgaacatcactcccat

SEQ ID NO: 65100 - DNA, 25 bp, Homo sapien
tggggtccattcacaggtttacaag

SEQ ID NO: 65101 - DNA, 25 bp, Homo sapien
gtgaacatcactcccatggtcctcc

SEQ ID NO: 65102 - DNA, 25 bp, Homo sapien
gggttaatacctagaccagcaagtg

SEQ ID NO: 65103 - DNA, 25 bp, Homo sapien
atacctagaccagcaagtgtactgc

SEQ ID NO: 65104 - DNA, 25 bp, Homo sapien
attgcaacactgtactcagggcatc

SEQ ID NO: 65105 - DNA, 25 bp, Homo sapien
ggccaggtaggtcaccatcaaaagg

SEQ ID NO: 65106 - DNA, 25 bp, Homo sapien
ttccagacagtacatcctctgcata

SEQ ID NO: 65107 - DNA, 25 bp, Homo sapien
ccgatgcgttcagtgtcgtagtacg

SEQ ID NO: 65108 - DNA, 25 bp, Homo sapien
tgatcaggtcaactccgatgcgttc

SEQ ID NO: 65109 - DNA, 25 bp, Homo sapien
tcagaggcgtgaacatcactcccat

SEQ ID NO: 65110 - DNA, 25 bp, Homo sapien
tggggtccattcacaggtttacaag

SEQ ID NO: 65111 - DNA, 25 bp, Homo sapien
agcaagtgtactgcttggggtccat

SEQ ID NO: 65112 - DNA, 25 bp, Homo sapien
gtgaacatcactcccatggtcctcc

SEQ ID NO: 65113 - DNA, 25 bp, Homo sapien
gggttaatacctagaccagcaagtg

SEQ ID NO: 65114 - DNA, 25 bp, Homo sapien
atacctagaccagcaagtgtactgc

SEQ ID NO: 65115 - DNA, 25 bp, Homo sapien
ggccaggtaggtcaccatcaaaagg

SEQ ID NO: 65116 - DNA, 25 bp, Homo sapien
attgcaacactgtactcagggcatc

SEQ ID NO: 65117 - DNA, 25 bp, Homo sapien
ttccagacagtacatcctctgcata

SEQ ID NO: 65118 - DNA, 25 bp, Homo sapien
ccgatgcgttcagtgtcgtagtacg

SEQ ID NO: 65119 - DNA, 25 bp, Homo sapien
tgatcaggtcaactccgatgcgttc

SEQ ID NO: 65120 - DNA, 25 bp, Homo sapien
tcagaggcgtgaacatcactcccat

SEQ ID NO: 65121 - DNA, 25 bp, Homo sapien
tggggtccattcacaggtttacaag

SEQ ID NO: 65122 - DNA, 25 bp, Homo sapien
agcaagtgtactgcttggggtccat

SEQ ID NO: 65123 - DNA, 25 bp, Homo sapien
gtgaacatcactcccatggtcctcc

SEQ ID NO: 65124 - DNA, 25 bp, Homo sapien
gggttaatacctagaccagcaagtg

SEQ ID NO: 65125 - DNA, 25 bp, Homo sapien
atacctagaccagcaagtgtactgc

SEQ ID NO: 65126 - DNA, 25 bp, Homo sapien
gggttaatacctagaccagcaagtg

SEQ ID NO: 65127 - DNA, 25 bp, Homo sapien
tgatcaggtcaactccgatgcgttc

SEQ ID NO: 65128 - DNA, 25 bp, Homo sapien
ccgatgcgttcagtgtcgtagtacg

SEQ ID NO: 65129 - DNA, 25 bp, Homo sapien
tggggtccattcacaggtttacaag

SEQ ID NO: 65130 - DNA, 25 bp, Homo sapien
attgcaacactgtactcagggcatc

SEQ ID NO: 65131 - DNA, 25 bp, Homo sapien
gtgaacatcactcccatggtcctcc

SEQ ID NO: 65132 - DNA, 25 bp, Homo sapien
tcagaggcgtgaacatcactcccat

SEQ ID NO: 65133 - DNA, 25 bp, Homo sapien
ttccagacagtacatcctctgcata

SEQ ID NO: 65134 - DNA, 25 bp, Homo sapien
atacctagaccagcaagtgtactgc

SEQ ID NO: 65135 - DNA, 25 bp, Homo sapien
agcaagtgtactgcttggggtccat

SEQ ID NO: 65136 - DNA, 25 bp, Homo sapien
ggccaggtaggtcaccatcaaaagg

SEQ ID NO: 65137 - DNA, 25 bp, Homo sapien
attgcaacactgtactcagggcatc

SEQ ID NO: 65138 - DNA, 25 bp, Homo sapien
ggccaggtaggtcaccatcaaaagg

SEQ ID NO: 65139 - DNA, 25 bp, Homo sapien
ttccagacagtacatcctctgcata

SEQ ID NO: 65140 - DNA, 25 bp, Homo sapien
ccgatgcgttcagtgtcgtagtacg

SEQ ID NO: 65141 - DNA, 25 bp, Homo sapien
agcaagtgtactgcttggggtccat

SEQ ID NO: 65142 - DNA, 25 bp, Homo sapien
tgatcaggtcaactccgatgcgttc

SEQ ID NO: 65143 - DNA, 25 bp, Homo sapien
tcagaggcgtgaacatcactcccat

SEQ ID NO: 65144 - DNA, 25 bp, Homo sapien
tggggtccattcacaggtttacaag

SEQ ID NO: 65145 - DNA, 25 bp, Homo sapien
gggttaatacctagaccagcaagtg

SEQ ID NO: 65146 - DNA, 25 bp, Homo sapien
gtgaacatcactcccatggtcctcc

SEQ ID NO: 65147 - DNA, 25 bp, Homo sapien
atacctagaccagcaagtgtactgc

SEQ ID NO: 65148 - DNA, 25 bp, Homo sapien
gtgaacatcactcccatggtcctcc

SEQ ID NO: 65149 - DNA, 25 bp, Homo sapien
tcagaggcgtgaacatcactcccat

SEQ ID NO: 65150 - DNA, 25 bp, Homo sapien
ccgatgcgttcagtgtcgtagtacg

SEQ ID NO: 65151 - DNA, 25 bp, Homo sapien
tgatcaggtcaactccgatgcgttc

SEQ ID NO: 65152 - DNA, 25 bp, Homo sapien
attgcaacactgtactcagggcatc

SEQ ID NO: 65153 - DNA, 25 bp, Homo sapien
ttccagacagtacatcctctgcata

SEQ ID NO: 65154 - DNA, 25 bp, Homo sapien
ggccaggtaggtcaccatcaaaagg

SEQ ID NO: 65155 - DNA, 25 bp, Homo sapien
tggggtccattcacaggtttacaag

SEQ ID NO: 65156 - DNA, 25 bp, Homo sapien
agcaagtgtactgcttggggtccat

SEQ ID NO: 65157 - DNA, 25 bp, Homo sapien
atacctagaccagcaagtgtactgc

SEQ ID NO: 65158 - DNA, 25 bp, Homo sapien
gggttaatacctagaccagcaagtg

SEQ ID NO: 65159 - DNA, 25 bp, Homo sapien
cgtactacgacactgaacgcatcgg

SEQ ID NO: 65160 - DNA, 25 bp, Homo sapien
tatgcagaggatgtactgtctggaa

SEQ ID NO: 65161 - DNA, 25 bp, Homo sapien
cttgtaaacctgtgaatggacccca

SEQ ID NO: 65162 - DNA, 25 bp, Homo sapien
gaacgcatcggagttgacctgatca

SEQ ID NO: 65163 - DNA, 25 bp, Homo sapien
ggaggaccatgggagtgatgttcac

SEQ ID NO: 65164 - DNA, 25 bp, Homo sapien
atgggagtgatgttcacgcctctga

SEQ ID NO: 65165 - DNA, 25 bp, Homo sapien
gcagtacacttgctggtctaggtat

SEQ ID NO: 65166 - DNA, 25 bp, Homo sapien
gatgccctgagtacagtgttgcaat

SEQ ID NO: 65167 - DNA, 25 bp, Homo sapien
ccttttgatggtgacctacctggcc

SEQ ID NO: 65168 - DNA, 25 bp, Homo sapien
cacttgctggtctaggtattaaccc

SEQ ID NO: 65169 - DNA, 25 bp, Homo sapien
atggaccccaagcagtacacttgct

SEQ ID NO: 65170 - DNA, 25 bp, Homo sapien
attgcaacactgtactcagggcatc

SEQ ID NO: 65171 - DNA, 25 bp, Homo sapien
ttccagacagtacatcctctgcata

SEQ ID NO: 65172 - DNA, 25 bp, Homo sapien
ccgatgcgttcagtgtcgtagtacg

SEQ ID NO: 65173 - DNA, 25 bp, Homo sapien
tgatcaggtcaactccgatgcgttc

SEQ ID NO: 65174 - DNA, 25 bp, Homo sapien
agcaagtgtactgcttggggtccat

SEQ ID NO: 65175 - DNA, 25 bp, Homo sapien
tcagaggcgtgaacatcactcccat

SEQ ID NO: 65176 - DNA, 25 bp, Homo sapien
tggggtccattcacaggtttacaag

SEQ ID NO: 65177 - DNA, 25 bp, Homo sapien
gtgaacatcactcccatggtcctcc

SEQ ID NO: 65178 - DNA, 25 bp, Homo sapien
gggttaatacctagaccagcaagtg

SEQ ID NO: 65179 - DNA, 25 bp, Homo sapien
atacctagaccagcaagtgtactgc

SEQ ID NO: 65180 - DNA, 25 bp, Homo sapien
ggccaggtaggtcaccatcaaaagg

SEQ ID NO: 65181 - DNA, 25 bp, Homo sapien
attgcaacactgtactcagggcatc

SEQ ID NO: 65182 - DNA, 25 bp, Homo sapien
tggggtccattcacaggtttacaag

SEQ ID NO: 65183 - DNA, 25 bp, Homo sapien
ccgatgcgttcagtgtcgtagtacg

SEQ ID NO: 65184 - DNA, 25 bp, Homo sapien
agcaagtgtactgcttggggtccat

SEQ ID NO: 65185 - DNA, 25 bp, Homo sapien
gtgaacatcactcccatggtcctcc

SEQ ID NO: 65186 - DNA, 25 bp, Homo sapien
atacctagaccagcaagtgtactgc

SEQ ID NO: 65187 - DNA, 25 bp, Homo sapien
tgatcaggtcaactccgatgcgttc

SEQ ID NO: 65188 - DNA, 25 bp, Homo sapien
tcagaggcgtgaacatcactcccat

SEQ ID NO: 65189 - DNA, 25 bp, Homo sapien
gggttaatacctagaccagcaagtg

SEQ ID NO: 65190 - DNA, 25 bp, Homo sapien
ggccaggtaggtcaccatcaaaagg

SEQ ID NO: 65191 - DNA, 25 bp, Homo sapien
ttccagacagtacatcctctgcata

SEQ ID NO: 65192 - DNA, 25 bp, Homo sapien
gtgaacatcactcccatggtcctcc

SEQ ID NO: 65193 - DNA, 25 bp, Homo sapien
tcagaggcgtgaacatcactcccat

SEQ ID NO: 65194 - DNA, 25 bp, Homo sapien
ccgatgcgttcagtgtcgtagtacg

SEQ ID NO: 65195 - DNA, 25 bp, Homo sapien
tgatcaggtcaactccgatgcgttc

SEQ ID NO: 65196 - DNA, 25 bp, Homo sapien
attgcaacactgtactcagggcatc

SEQ ID NO: 65197 - DNA, 25 bp, Homo sapien
ttccagacagtacatcctctgcata

SEQ ID NO: 65198 - DNA, 25 bp, Homo sapien
ggccaggtaggtcaccatcaaaagg

SEQ ID NO: 65199 - DNA, 25 bp, Homo sapien
tggggtccattcacaggtttacaag

SEQ ID NO: 65200 - DNA, 25 bp, Homo sapien
agcaagtgtactgcttggggtccat

SEQ ID NO: 65201 - DNA, 25 bp, Homo sapien
atacctagaccagcaagtgtactgc

SEQ ID NO: 65202 - DNA, 25 bp, Homo sapien
gggttaatacctagaccagcaagtg

SEQ ID NO: 65203 - DNA, 25 bp, Homo sapien
ttccagacagtacatcctctgcata

SEQ ID NO: 65204 - DNA, 25 bp, Homo sapien
tcagaggcgtgaacatcactcccat

SEQ ID NO: 65205 - DNA, 25 bp, Homo sapien
tgatcaggtcaactccgatgcgttc

SEQ ID NO: 65206 - DNA, 25 bp, Homo sapien
ccgatgcgttcagtgtcgtagtacg

SEQ ID NO: 65207 - DNA, 25 bp, Homo sapien
tggggtccattcacaggtttacaag

SEQ ID NO: 65208 - DNA, 25 bp, Homo sapien
gtgaacatcactcccatggtcctcc

SEQ ID NO: 65209 - DNA, 25 bp, Homo sapien
atacctagaccagcaagtgtactgc

SEQ ID NO: 65210 - DNA, 25 bp, Homo sapien
gggttaatacctagaccagcaagtg

SEQ ID NO: 65211 - DNA, 25 bp, Homo sapien
ggccaggtaggtcaccatcaaaagg

SEQ ID NO: 65212 - DNA, 25 bp, Homo sapien
agcaagtgtactgcttggggtccat

SEQ ID NO: 65213 - DNA, 25 bp, Homo sapien
attgcaacactgtactcagggcatc

SEQ ID NO: 65214 - DNA, 25 bp, Homo sapien
gtgaacatcactcccatggtcctcc

SEQ ID NO: 65215 - DNA, 25 bp, Homo sapien
tcagaggcgtgaacatcactcccat

SEQ ID NO: 65216 - DNA, 25 bp, Homo sapien
ccgatgcgttcagtgtcgtagtacg

SEQ ID NO: 65217 - DNA, 25 bp, Homo sapien
tgatcaggtcaactccgatgcgttc

SEQ ID NO: 65218 - DNA, 25 bp, Homo sapien
attgcaacactgtactcagggcatc

SEQ ID NO: 65219 - DNA, 25 bp, Homo sapien
ttccagacagtacatcctctgcata

SEQ ID NO: 65220 - DNA, 25 bp, Homo sapien
ggccaggtaggtcaccatcaaaagg

SEQ ID NO: 65221 - DNA, 25 bp, Homo sapien
tggggtccattcacaggtttacaag

SEQ ID NO: 65222 - DNA, 25 bp, Homo sapien
agcaagtgtactgcttggggtccat

SEQ ID NO: 65223 - DNA, 25 bp, Homo sapien
atacctagaccagcaagtgtactgc

SEQ ID NO: 65224 - DNA, 25 bp, Homo sapien
gggttaatacctagaccagcaagtg

SEQ ID NO: 65225 - DNA, 25 bp, Homo sapien
agcaagtgtactgcttggggtccat

SEQ ID NO: 65226 - DNA, 25 bp, Homo sapien
tggggtccattcacaggtttacaag

SEQ ID NO: 65227 - DNA, 25 bp, Homo sapien
atacctagaccagcaagtgtactgc

SEQ ID NO: 65228 - DNA, 25 bp, Homo sapien
ttccagacagtacatcctctgcata

SEQ ID NO: 65229 - DNA, 25 bp, Homo sapien
tgatcaggtcaactccgatgcgttc

SEQ ID NO: 65230 - DNA, 25 bp, Homo sapien
ccgatgcgttcagtgtcgtagtacg

SEQ ID NO: 65231 - DNA, 25 bp, Homo sapien
ggccaggtaggtcaccatcaaaagg

SEQ ID NO: 65232 - DNA, 25 bp, Homo sapien
attgcaacactgtactcagggcatc

SEQ ID NO: 65233 - DNA, 25 bp, Homo sapien
gggttaatacctagaccagcaagtg

SEQ ID NO: 65234 - DNA, 25 bp, Homo sapien
gtgaacatcactcccatggtcctcc

SEQ ID NO: 65235 - DNA, 25 bp, Homo sapien
tcagaggcgtgaacatcactcccat

SEQ ID NO: 65236 - DNA, 25 bp, Homo sapien
tgatcaggtcaactccgatgcgttc

SEQ ID NO: 65237 - DNA, 25 bp, Homo sapien
attgcaacactgtactcagggcatc

SEQ ID NO: 65238 - DNA, 25 bp, Homo sapien
ttccagacagtacatcctctgcata

SEQ ID NO: 65239 - DNA, 25 bp, Homo sapien
ggccaggtaggtcaccatcaaaagg

SEQ ID NO: 65240 - DNA, 25 bp, Homo sapien
tggggtccattcacaggtttacaag

SEQ ID NO: 65241 - DNA, 25 bp, Homo sapien
agcaagtgtactgcttggggtccat

SEQ ID NO: 65242 - DNA, 25 bp, Homo sapien
atacctagaccagcaagtgtactgc

SEQ ID NO: 65243 - DNA, 25 bp, Homo sapien
gggttaatacctagaccagcaagtg

SEQ ID NO: 65244 - DNA, 25 bp, Homo sapien
gtgaacatcactcccatggtcctcc

SEQ ID NO: 65245 - DNA, 25 bp, Homo sapien
tcagaggcgtgaacatcactcccat

SEQ ID NO: 65246 - DNA, 25 bp, Homo sapien
ccgatgcgttcagtgtcgtagtacg

SEQ ID NO: 65247 - DNA, 25 bp, Homo sapien
gtgaacatcactcccatggtcctcc

SEQ ID NO: 65248 - DNA, 25 bp, Homo sapien
tcagaggcgtgaacatcactcccat

SEQ ID NO: 65249 - DNA, 25 bp, Homo sapien
ccgatgcgttcagtgtcgtagtacg

SEQ ID NO: 65250 - DNA, 25 bp, Homo sapien
tgatcaggtcaactccgatgcgttc

SEQ ID NO: 65251 - DNA, 25 bp, Homo sapien
attgcaacactgtactcagggcatc

SEQ ID NO: 65252 - DNA, 25 bp, Homo sapien
ttccagacagtacatcctctgcata

SEQ ID NO: 65253 - DNA, 25 bp, Homo sapien
ggccaggtaggtcaccatcaaaagg

SEQ ID NO: 65254 - DNA, 25 bp, Homo sapien
tggggtccattcacaggtttacaag

SEQ ID NO: 65255 - DNA, 25 bp, Homo sapien
agcaagtgtactgcttggggtccat

SEQ ID NO: 65256 - DNA, 25 bp, Homo sapien
atacctagaccagcaagtgtactgc

SEQ ID NO: 65257 - DNA, 25 bp, Homo sapien
gggttaatacctagaccagcaagtg

SEQ ID NO: 65258 - DNA, 25 bp, Homo sapien
ttccagacagtacatcctctgcata

SEQ ID NO: 65259 - DNA, 25 bp, Homo sapien
tgatcaggtcaactccgatgcgttc

SEQ ID NO: 65260 - DNA, 25 bp, Homo sapien
ggccaggtaggtcaccatcaaaagg

SEQ ID NO: 65261 - DNA, 25 bp, Homo sapien
tcagaggcgtgaacatcactcccat

SEQ ID NO: 65262 - DNA, 25 bp, Homo sapien
ccgatgcgttcagtgtcgtagtacg

SEQ ID NO: 65263 - DNA, 25 bp, Homo sapien
gtgaacatcactcccatggtcctcc

SEQ ID NO: 65264 - DNA, 25 bp, Homo sapien
attgcaacactgtactcagggcatc

SEQ ID NO: 65265 - DNA, 25 bp, Homo sapien
gggttaatacctagaccagcaagtg

SEQ ID NO: 65266 - DNA, 25 bp, Homo sapien
atacctagaccagcaagtgtactgc

SEQ ID NO: 65267 - DNA, 25 bp, Homo sapien
agcaagtgtactgcttggggtccat

SEQ ID NO: 65268 - DNA, 25 bp, Homo sapien
tggggtccattcacaggtttacaag

SEQ ID NO: 65269 - DNA, 25 bp, Homo sapien
gtgaacatcactcccatggtcctcc

SEQ ID NO: 65270 - DNA, 25 bp, Homo sapien
tcagaggcgtgaacatcactcccat

SEQ ID NO: 65271 - DNA, 25 bp, Homo sapien
ccgatgcgttcagtgtcgtagtacg

SEQ ID NO: 65272 - DNA, 25 bp, Homo sapien
tgatcaggtcaactccgatgcgttc

SEQ ID NO: 65273 - DNA, 25 bp, Homo sapien
attgcaacactgtactcagggcatc

SEQ ID NO: 65274 - DNA, 25 bp, Homo sapien
ttccagacagtacatcctctgcata

SEQ ID NO: 65275 - DNA, 25 bp, Homo sapien
ggccaggtaggtcaccatcaaaagg

SEQ ID NO: 65276 - DNA, 25 bp, Homo sapien
tggggtccattcacaggtttacaag

SEQ ID NO: 65277 - DNA, 25 bp, Homo sapien
agcaagtgtactgcttggggtccat

SEQ ID NO: 65278 - DNA, 25 bp, Homo sapien
atacctagaccagcaagtgtactgc

SEQ ID NO: 65279 - DNA, 25 bp, Homo sapien
gggttaatacctagaccagcaagtg

SEQ ID NO: 65280 - DNA, 25 bp, Homo sapien
ccgatgcgttcagtgtcgtagtacg

SEQ ID NO: 65281 - DNA, 25 bp, Homo sapien
tgatcaggtcaactccgatgcgttc

SEQ ID NO: 65282 - DNA, 25 bp, Homo sapien
gggttaatacctagaccagcaagtg

SEQ ID NO: 65283 - DNA, 25 bp, Homo sapien
ttccagacagtacatcctctgcata

SEQ ID NO: 65284 - DNA, 25 bp, Homo sapien
agcaagtgtactgcttggggtccat

SEQ ID NO: 65285 - DNA, 25 bp, Homo sapien
gtgaacatcactcccatggtcctcc

SEQ ID NO: 65286 - DNA, 25 bp, Homo sapien
ggccaggtaggtcaccatcaaaagg

SEQ ID NO: 65287 - DNA, 25 bp, Homo sapien
tcagaggcgtgaacatcactcccat

SEQ ID NO: 65288 - DNA, 25 bp, Homo sapien
tggggtccattcacaggtttacaag

SEQ ID NO: 65289 - DNA, 25 bp, Homo sapien
attgcaacactgtactcagggcatc

SEQ ID NO: 65290 - DNA, 25 bp, Homo sapien
atacctagaccagcaagtgtactgc

SEQ ID NO: 65291 - DNA, 25 bp, Homo sapien
gtgaacatcactcccatggtcctcc

SEQ ID NO: 65292 - DNA, 25 bp, Homo sapien
tcagaggcgtgaacatcactcccat

SEQ ID NO: 65293 - DNA, 25 bp, Homo sapien
ccgatgcgttcagtgtcgtagtacg

SEQ ID NO: 65294 - DNA, 25 bp, Homo sapien
tgatcaggtcaactccgatgcgttc

SEQ ID NO: 65295 - DNA, 25 bp, Homo sapien
attgcaacactgtactcagggcatc

SEQ ID NO: 65296 - DNA, 25 bp, Homo sapien
ttccagacagtacatcctctgcata

SEQ ID NO: 65297 - DNA, 25 bp, Homo sapien
ggccaggtaggtcaccatcaaaagg

SEQ ID NO: 65298 - DNA, 25 bp, Homo sapien
tggggtccattcacaggtttacaag

SEQ ID NO: 65299 - DNA, 25 bp, Homo sapien
agcaagtgtactgcttggggtccat

SEQ ID NO: 65300 - DNA, 25 bp, Homo sapien
atacctagaccagcaagtgtactgc

SEQ ID NO: 65301 - DNA, 25 bp, Homo sapien
gggttaatacctagaccagcaagtg

SEQ ID NO: 65302 - DNA, 25 bp, Homo sapien
attgcaacactgtactcagggcatc

SEQ ID NO: 65303 - DNA, 25 bp, Homo sapien
atacctagaccagcaagtgtactgc

SEQ ID NO: 65304 - DNA, 25 bp, Homo sapien
tgatcaggtcaactccgatgcgttc

SEQ ID NO: 65305 - DNA, 25 bp, Homo sapien
agcaagtgtactgcttggggtccat

SEQ ID NO: 65306 - DNA, 25 bp, Homo sapien
tggggtccattcacaggtttacaag

SEQ ID NO: 65307 - DNA, 25 bp, Homo sapien
gtgaacatcactcccatggtcctcc

SEQ ID NO: 65308 - DNA, 25 bp, Homo sapien
tcagaggcgtgaacatcactcccat

SEQ ID NO: 65309 - DNA, 25 bp, Homo sapien
ttccagacagtacatcctctgcata

SEQ ID NO: 65310 - DNA, 25 bp, Homo sapien
gggttaatacctagaccagcaagtg

SEQ ID NO: 65311 - DNA, 25 bp, Homo sapien
ggccaggtaggtcaccatcaaaagg

SEQ ID NO: 65312 - DNA, 25 bp, Homo sapien
ccgatgcgttcagtgtcgtagtacg

SEQ ID NO: 65313 - DNA, 25 bp, Homo sapien
gtgaacatcactcccatggtcctcc

SEQ ID NO: 65314 - DNA, 25 bp, Homo sapien
tcagaggcgtgaacatcactcccat

SEQ ID NO: 65315 - DNA, 25 bp, Homo sapien
ccgatgcgttcagtgtcgtagtacg

SEQ ID NO: 65316 - DNA, 25 bp, Homo sapien
tgatcaggtcaactccgatgcgttc

SEQ ID NO: 65317 - DNA, 25 bp, Homo sapien
attgcaacactgtactcagggcatc

SEQ ID NO: 65318 - DNA, 25 bp, Homo sapien
ttccagacagtacatcctctgcata

SEQ ID NO: 65319 - DNA, 25 bp, Homo sapien
ggccaggtaggtcaccatcaaaagg

SEQ ID NO: 65320 - DNA, 25 bp, Homo sapien
tggggtccattcacaggtttacaag

SEQ ID NO: 65321 - DNA, 25 bp, Homo sapien
agcaagtgtactgcttggggtccat

SEQ ID NO: 65322 - DNA, 25 bp, Homo sapien
atacctagaccagcaagtgtactgc

SEQ ID NO: 65323 - DNA, 25 bp, Homo sapien
gggttaatacctagaccagcaagtg

SEQ ID NO: 65324 - DNA, 25 bp, Homo sapien
atacctagaccagcaagtgtactgc

SEQ ID NO: 65325 - DNA, 25 bp, Homo sapien
agcaagtgtactgcttggggtccat

SEQ ID NO: 65326 - DNA, 25 bp, Homo sapien
gtgaacatcactcccatggtcctcc

SEQ ID NO: 65327 - DNA, 25 bp, Homo sapien
tcagaggcgtgaacatcactcccat

SEQ ID NO: 65328 - DNA, 25 bp, Homo sapien
ccgatgcgttcagtgtcgtagtacg

SEQ ID NO: 65329 - DNA, 25 bp, Homo sapien
gggttaatacctagaccagcaagtg

SEQ ID NO: 65330 - DNA, 25 bp, Homo sapien
tgatcaggtcaactccgatgcgttc

SEQ ID NO: 65331 - DNA, 25 bp, Homo sapien
attgcaacactgtactcagggcatc

SEQ ID NO: 65332 - DNA, 25 bp, Homo sapien
tggggtccattcacaggtttacaag

SEQ ID NO: 65333 - DNA, 25 bp, Homo sapien
ttccagacagtacatcctctgcata

SEQ ID NO: 65334 - DNA, 25 bp, Homo sapien
ggccaggtaggtcaccatcaaaagg

SEQ ID NO: 65335 - DNA, 25 bp, Homo sapien
gtgaacatcactcccatggtcctcc

SEQ ID NO: 65336 - DNA, 25 bp, Homo sapien
tcagaggcgtgaacatcactcccat

SEQ ID NO: 65337 - DNA, 25 bp, Homo sapien
ccgatgcgttcagtgtcgtagtacg

SEQ ID NO: 65338 - DNA, 25 bp, Homo sapien
tgatcaggtcaactccgatgcgttc

SEQ ID NO: 65339 - DNA, 25 bp, Homo sapien
attgcaacactgtactcagggcatc

SEQ ID NO: 65340 - DNA, 25 bp, Homo sapien
ttccagacagtacatcctctgcata

SEQ ID NO: 65341 - DNA, 25 bp, Homo sapien
ggccaggtaggtcaccatcaaaagg

SEQ ID NO: 65342 - DNA, 25 bp, Homo sapien
tggggtccattcacaggtttacaag

SEQ ID NO: 65343 - DNA, 25 bp, Homo sapien
agcaagtgtactgcttggggtccat

SEQ ID NO: 65344 - DNA, 25 bp, Homo sapien
atacctagaccagcaagtgtactgc

SEQ ID NO: 65345 - DNA, 25 bp, Homo sapien
gggttaatacctagaccagcaagtg

SEQ ID NO: 65346 - DNA, 25 bp, Homo sapien
tgatcaggtcaactccgatgcgttc

SEQ ID NO: 65347 - DNA, 25 bp, Homo sapien
ccgatgcgttcagtgtcgtagtacg

SEQ ID NO: 65348 - DNA, 25 bp, Homo sapien
ttccagacagtacatcctctgcata

SEQ ID NO: 65349 - DNA, 25 bp, Homo sapien
ggccaggtaggtcaccatcaaaagg

SEQ ID NO: 65350 - DNA, 25 bp, Homo sapien
tcagaggcgtgaacatcactcccat

SEQ ID NO: 65351 - DNA, 25 bp, Homo sapien
gtgaacatcactcccatggtcctcc

SEQ ID NO: 65352 - DNA, 25 bp, Homo sapien
tggggtccattcacaggtttacaag

SEQ ID NO: 65353 - DNA, 25 bp, Homo sapien
attgcaacactgtactcagggcatc

SEQ ID NO: 65354 - DNA, 25 bp, Homo sapien
atacctagaccagcaagtgtactgc

SEQ ID NO: 65355 - DNA, 25 bp, Homo sapien
gggttaatacctagaccagcaagtg

SEQ ID NO: 65356 - DNA, 25 bp, Homo sapien
agcaagtgtactgcttggggtccat

SEQ ID NO: 65357 - DNA, 25 bp, Homo sapien
agcaagtgtactgcttggggtccat

SEQ ID NO: 65358 - DNA, 25 bp, Homo sapien
tcagaggcgtgaacatcactcccat

SEQ ID NO: 65359 - DNA, 25 bp, Homo sapien
ccgatgcgttcagtgtcgtagtacg

SEQ ID NO: 65360 - DNA, 25 bp, Homo sapien
gggttaatacctagaccagcaagtg

SEQ ID NO: 65361 - DNA, 25 bp, Homo sapien
attgcaacactgtactcagggcatc

SEQ ID NO: 65362 - DNA, 25 bp, Homo sapien
gtgaacatcactcccatggtcctcc

SEQ ID NO: 65363 - DNA, 25 bp, Homo sapien
ttccagacagtacatcctctgcata

SEQ ID NO: 65364 - DNA, 25 bp, Homo sapien
tgatcaggtcaactccgatgcgttc

SEQ ID NO: 65365 - DNA, 25 bp, Homo sapien
tggggtccattcacaggtttacaag

SEQ ID NO: 65366 - DNA, 25 bp, Homo sapien
ggccaggtaggtcaccatcaaaagg

SEQ ID NO: 65367 - DNA, 25 bp, Homo sapien
atacctagaccagcaagtgtactgc

SEQ ID NO: 65368 - DNA, 25 bp, Homo sapien
gtgaacatcactcccatggtcctcc

SEQ ID NO: 65369 - DNA, 25 bp, Homo sapien
tcagaggcgtgaacatcactcccat

SEQ ID NO: 65370 - DNA, 25 bp, Homo sapien
ccgatgcgttcagtgtcgtagtacg

SEQ ID NO: 65371 - DNA, 25 bp, Homo sapien
tgatcaggtcaactccgatgcgttc

SEQ ID NO: 65372 - DNA, 25 bp, Homo sapien
attgcaacactgtactcagggcatc

SEQ ID NO: 65373 - DNA, 25 bp, Homo sapien
ttccagacagtacatcctctgcata

SEQ ID NO: 65374 - DNA, 25 bp, Homo sapien
ggccaggtaggtcaccatcaaaagg

SEQ ID NO: 65375 - DNA, 25 bp, Homo sapien
tggggtccattcacaggtttacaag

SEQ ID NO: 65376 - DNA, 25 bp, Homo sapien
agcaagtgtactgcttggggtccat

SEQ ID NO: 65377 - DNA, 25 bp, Homo sapien
atacctagaccagcaagtgtactgc

SEQ ID NO: 65378 - DNA, 25 bp, Homo sapien
gggttaatacctagaccagcaagtg

SEQ ID NO: 65379 - DNA, 25 bp, Homo sapien
atacctagaccagcaagtgtactgc

SEQ ID NO: 65380 - DNA, 25 bp, Homo sapien
ggccaggtaggtcaccatcaaaagg

SEQ ID NO: 65381 - DNA, 25 bp, Homo sapien
tcagaggcgtgaacatcactcccat

SEQ ID NO: 65382 - DNA, 25 bp, Homo sapien
ccgatgcgttcagtgtcgtagtacg

SEQ ID NO: 65383 - DNA, 25 bp, Homo sapien
gtgaacatcactcccatggtcctcc

SEQ ID NO: 65384 - DNA, 25 bp, Homo sapien
ttccagacagtacatcctctgcata

SEQ ID NO: 65385 - DNA, 25 bp, Homo sapien
tgatcaggtcaactccgatgcgttc

SEQ ID NO: 65386 - DNA, 25 bp, Homo sapien
tggggtccattcacaggtttacaag

SEQ ID NO: 65387 - DNA, 25 bp, Homo sapien
attgcaacactgtactcagggcatc

SEQ ID NO: 65388 - DNA, 25 bp, Homo sapien
agcaagtgtactgcttggggtccat

SEQ ID NO: 65389 - DNA, 25 bp, Homo sapien
gggttaatacctagaccagcaagtg

SEQ ID NO: 65390 - DNA, 25 bp, Homo sapien
tgatcaggtcaactccgatgcgttc

SEQ ID NO: 65391 - DNA, 25 bp, Homo sapien
attgcaacactgtactcagggcatc

SEQ ID NO: 65392 - DNA, 25 bp, Homo sapien
ttccagacagtacatcctctgcata

SEQ ID NO: 65393 - DNA, 25 bp, Homo sapien
ggccaggtaggtcaccatcaaaagg

SEQ ID NO: 65394 - DNA, 25 bp, Homo sapien
tggggtccattcacaggtttacaag

SEQ ID NO: 65395 - DNA, 25 bp, Homo sapien
agcaagtgtactgcttggggtccat

SEQ ID NO: 65396 - DNA, 25 bp, Homo sapien
atacctagaccagcaagtgtactgc

SEQ ID NO: 65397 - DNA, 25 bp, Homo sapien
gggttaatacctagaccagcaagtg

SEQ ID NO: 65398 - DNA, 25 bp, Homo sapien
gtgaacatcactcccatggtcctcc

SEQ ID NO: 65399 - DNA, 25 bp, Homo sapien
tcagaggcgtgaacatcactcccat

SEQ ID NO: 65400 - DNA, 25 bp, Homo sapien
ccgatgcgttcagtgtcgtagtacg

SEQ ID NO: 65401 - DNA, 25 bp, Homo sapien
ggccaggtaggtcaccatcaaaagg

SEQ ID NO: 65402 - DNA, 25 bp, Homo sapien
gtgaacatcactcccatggtcctcc

SEQ ID NO: 65403 - DNA, 25 bp, Homo sapien
tgatcaggtcaactccgatgcgttc

SEQ ID NO: 65404 - DNA, 25 bp, Homo sapien
tcagaggcgtgaacatcactcccat

SEQ ID NO: 65405 - DNA, 25 bp, Homo sapien
atacctagaccagcaagtgtactgc

SEQ ID NO: 65406 - DNA, 25 bp, Homo sapien
gggttaatacctagaccagcaagtg

SEQ ID NO: 65407 - DNA, 25 bp, Homo sapien
tggggtccattcacaggtttacaag

SEQ ID NO: 65408 - DNA, 25 bp, Homo sapien
agcaagtgtactgcttggggtccat

SEQ ID NO: 65409 - DNA, 25 bp, Homo sapien
ttccagacagtacatcctctgcata

SEQ ID NO: 65410 - DNA, 25 bp, Homo sapien
ccgatgcgttcagtgtcgtagtacg

SEQ ID NO: 65411 - DNA, 25 bp, Homo sapien
attgcaacactgtactcagggcatc

SEQ ID NO: 65412 - DNA, 25 bp, Homo sapien
gtgaacatcactcccatggtcctcc

SEQ ID NO: 65413 - DNA, 25 bp, Homo sapien
tcagaggcgtgaacatcactcccat

SEQ ID NO: 65414 - DNA, 25 bp, Homo sapien
ccgatgcgttcagtgtcgtagtacg

SEQ ID NO: 65415 - DNA, 25 bp, Homo sapien
tgatcaggtcaactccgatgcgttc

SEQ ID NO: 65416 - DNA, 25 bp, Homo sapien
attgcaacactgtactcagggcatc

SEQ ID NO: 65417 - DNA, 25 bp, Homo sapien
ttccagacagtacatcctctgcata

SEQ ID NO: 65418 - DNA, 25 bp, Homo sapien
ggccaggtaggtcaccatcaaaagg

SEQ ID NO: 65419 - DNA, 25 bp, Homo sapien
tggggtccattcacaggtttacaag

SEQ ID NO: 65420 - DNA, 25 bp, Homo sapien
agcaagtgtactgcttggggtccat

SEQ ID NO: 65421 - DNA, 25 bp, Homo sapien
atacctagaccagcaagtgtactgc

SEQ ID NO: 65422 - DNA, 25 bp, Homo sapien
gggttaatacctagaccagcaagtg

SEQ ID NO: 65423 - DNA, 25 bp, Homo sapien
ccgatgcgttcagtgtcgtagtacg

SEQ ID NO: 65424 - DNA, 25 bp, Homo sapien
ttccagacagtacatcctctgcata

SEQ ID NO: 65425 - DNA, 25 bp, Homo sapien
gtgaacatcactcccatggtcctcc

SEQ ID NO: 65426 - DNA, 25 bp, Homo sapien
tcagaggcgtgaacatcactcccat

SEQ ID NO: 65427 - DNA, 25 bp, Homo sapien
tggggtccattcacaggtttacaag

SEQ ID NO: 65428 - DNA, 25 bp, Homo sapien
atacctagaccagcaagtgtactgc

SEQ ID NO: 65429 - DNA, 25 bp, Homo sapien
attgcaacactgtactcagggcatc

SEQ ID NO: 65430 - DNA, 25 bp, Homo sapien
tgatcaggtcaactccgatgcgttc

SEQ ID NO: 65431 - DNA, 25 bp, Homo sapien
gggttaatacctagaccagcaagtg

SEQ ID NO: 65432 - DNA, 25 bp, Homo sapien
agcaagtgtactgcttggggtccat

SEQ ID NO: 65433 - DNA, 25 bp, Homo sapien
ggccaggtaggtcaccatcaaaagg

SEQ ID NO: 65434 - DNA, 25 bp, Homo sapien
gtgaacatcactcccatggtcctcc

SEQ ID NO: 65435 - DNA, 25 bp, Homo sapien
tcagaggcgtgaacatcactcccat

SEQ ID NO: 65436 - DNA, 25 bp, Homo sapien
ccgatgcgttcagtgtcgtagtacg

SEQ ID NO: 65437 - DNA, 25 bp, Homo sapien
tgatcaggtcaactccgatgcgttc

SEQ ID NO: 65438 - DNA, 25 bp, Homo sapien
attgcaacactgtactcagggcatc

SEQ ID NO: 65439 - DNA, 25 bp, Homo sapien
ttccagacagtacatcctctgcata

SEQ ID NO: 65440 - DNA, 25 bp, Homo sapien
ggccaggtaggtcaccatcaaaagg

SEQ ID NO: 65441 - DNA, 25 bp, Homo sapien
tggggtccattcacaggtttacaag

SEQ ID NO: 65442 - DNA, 25 bp, Homo sapien
agcaagtgtactgcttggggtccat

SEQ ID NO: 65443 - DNA, 25 bp, Homo sapien
atacctagaccagcaagtgtactgc

SEQ ID NO: 65444 - DNA, 25 bp, Homo sapien
gggttaatacctagaccagcaagtg

SEQ ID NO: 65445 - DNA, 25 bp, Homo sapien
agcaagtgtactgcttggggtccat

SEQ ID NO: 65446 - DNA, 25 bp, Homo sapien
gtgaacatcactcccatggtcctcc

SEQ ID NO: 65447 - DNA, 25 bp, Homo sapien
tggggtccattcacaggtttacaag

SEQ ID NO: 65448 - DNA, 25 bp, Homo sapien
ccgatgcgttcagtgtcgtagtacg

SEQ ID NO: 65449 - DNA, 25 bp, Homo sapien
tcagaggcgtgaacatcactcccat

SEQ ID NO: 65450 - DNA, 25 bp, Homo sapien
ggccaggtaggtcaccatcaaaagg

SEQ ID NO: 65451 - DNA, 25 bp, Homo sapien
tgatcaggtcaactccgatgcgttc

SEQ ID NO: 65452 - DNA, 25 bp, Homo sapien
atacctagaccagcaagtgtactgc

SEQ ID NO: 65453 - DNA, 25 bp, Homo sapien
gggttaatacctagaccagcaagtg

SEQ ID NO: 65454 - DNA, 25 bp, Homo sapien
attgcaacactgtactcagggcatc

SEQ ID NO: 65455 - DNA, 25 bp, Homo sapien
ttccagacagtacatcctctgcata

SEQ ID NO: 65456 - DNA, 25 bp, Homo sapien
gtgaacatcactcccatggtcctcc

SEQ ID NO: 65457 - DNA, 25 bp, Homo sapien
tcagaggcgtgaacatcactcccat

SEQ ID NO: 65458 - DNA, 25 bp, Homo sapien
ccgatgcgttcagtgtcgtagtacg

SEQ ID NO: 65459 - DNA, 25 bp, Homo sapien
tgatcaggtcaactccgatgcgttc

SEQ ID NO: 65460 - DNA, 25 bp, Homo sapien
attgcaacactgtactcagggcatc

SEQ ID NO: 65461 - DNA, 25 bp, Homo sapien
ttccagacagtacatcctctgcata

SEQ ID NO: 65462 - DNA, 25 bp, Homo sapien
ggccaggtaggtcaccatcaaaagg

SEQ ID NO: 65463 - DNA, 25 bp, Homo sapien
tggggtccattcacaggtttacaag

SEQ ID NO: 65464 - DNA, 25 bp, Homo sapien
agcaagtgtactgcttggggtccat

SEQ ID NO: 65465 - DNA, 25 bp, Homo sapien
atacctagaccagcaagtgtactgc

SEQ ID NO: 65466 - DNA, 25 bp, Homo sapien
gggttaatacctagaccagcaagtg

SEQ ID NO: 65467 - DNA, 25 bp, Homo sapien
ccgatgcgttcagtgtcgtagtacg

SEQ ID NO: 65468 - DNA, 25 bp, Homo sapien
tggggtccattcacaggtttacaag

SEQ ID NO: 65469 - DNA, 25 bp, Homo sapien
atacctagaccagcaagtgtactgc

SEQ ID NO: 65470 - DNA, 25 bp, Homo sapien
attgcaacactgtactcagggcatc

SEQ ID NO: 65471 - DNA, 25 bp, Homo sapien
tgatcaggtcaactccgatgcgttc

SEQ ID NO: 65472 - DNA, 25 bp, Homo sapien
ggccaggtaggtcaccatcaaaagg

SEQ ID NO: 65473 - DNA, 25 bp, Homo sapien
gggttaatacctagaccagcaagtg

SEQ ID NO: 65474 - DNA, 25 bp, Homo sapien
gtgaacatcactcccatggtcctcc

SEQ ID NO: 65475 - DNA, 25 bp, Homo sapien
tcagaggcgtgaacatcactcccat

SEQ ID NO: 65476 - DNA, 25 bp, Homo sapien
agcaagtgtactgcttggggtccat

SEQ ID NO: 65477 - DNA, 25 bp, Homo sapien
ttccagacagtacatcctctgcata

SEQ ID NO: 65478 - DNA, 25 bp, Homo sapien
gtgaacatcactcccatggtcctcc

SEQ ID NO: 65479 - DNA, 25 bp, Homo sapien
tcagaggcgtgaacatcactcccat

SEQ ID NO: 65480 - DNA, 25 bp, Homo sapien
ccgatgcgttcagtgtcgtagtacg

SEQ ID NO: 65481 - DNA, 25 bp, Homo sapien
tgatcaggtcaactccgatgcgttc

SEQ ID NO: 65482 - DNA, 25 bp, Homo sapien
attgcaacactgtactcagggcatc

SEQ ID NO: 65483 - DNA, 25 bp, Homo sapien
ttccagacagtacatcctctgcata

SEQ ID NO: 65484 - DNA, 25 bp, Homo sapien
ggccaggtaggtcaccatcaaaagg

SEQ ID NO: 65485 - DNA, 25 bp, Homo sapien
tggggtccattcacaggtttacaag

SEQ ID NO: 65486 - DNA, 25 bp, Homo sapien
agcaagtgtactgcttggggtccat

SEQ ID NO: 65487 - DNA, 25 bp, Homo sapien
atacctagaccagcaagtgtactgc

SEQ ID NO: 65488 - DNA, 25 bp, Homo sapien
gggttaatacctagaccagcaagtg

SEQ ID NO: 65489 - DNA, 25 bp, Homo sapien
gtgaacatcactcccatggtcctcc

SEQ ID NO: 65490 - DNA, 25 bp, Homo sapien
tcagaggcgtgaacatcactcccat

SEQ ID NO: 65491 - DNA, 25 bp, Homo sapien
ccgatgcgttcagtgtcgtagtacg

SEQ ID NO: 65492 - DNA, 25 bp, Homo sapien
tgatcaggtcaactccgatgcgttc

SEQ ID NO: 65493 - DNA, 25 bp, Homo sapien
attgcaacactgtactcagggcatc

SEQ ID NO: 65494 - DNA, 25 bp, Homo sapien
ttccagacagtacatcctctgcata

SEQ ID NO: 65495 - DNA, 25 bp, Homo sapien
ggccaggtaggtcaccatcaaaagg

SEQ ID NO: 65496 - DNA, 25 bp, Homo sapien
tggggtccattcacaggtttacaag

SEQ ID NO: 65497 - DNA, 25 bp, Homo sapien
agcaagtgtactgcttggggtccat

SEQ ID NO: 65498 - DNA, 25 bp, Homo sapien
atacctagaccagcaagtgtactgc

SEQ ID NO: 65499 - DNA, 25 bp, Homo sapien
gggttaatacctagaccagcaagtg

SEQ ID NO: 65500 - DNA, 25 bp, Homo sapien
ttccagacagtacatcctctgcata

SEQ ID NO: 65501 - DNA, 25 bp, Homo sapien
tgatcaggtcaactccgatgcgttc

SEQ ID NO: 65502 - DNA, 25 bp, Homo sapien
tggggtccattcacaggtttacaag

SEQ ID NO: 65503 - DNA, 25 bp, Homo sapien
ggccaggtaggtcaccatcaaaagg

SEQ ID NO: 65504 - DNA, 25 bp, Homo sapien
ccgatgcgttcagtgtcgtagtacg

SEQ ID NO: 65505 - DNA, 25 bp, Homo sapien
atacctagaccagcaagtgtactgc

SEQ ID NO: 65506 - DNA, 25 bp, Homo sapien
tcagaggcgtgaacatcactcccat

SEQ ID NO: 65507 - DNA, 25 bp, Homo sapien
agcaagtgtactgcttggggtccat

SEQ ID NO: 65508 - DNA, 25 bp, Homo sapien
gtgaacatcactcccatggtcctcc

SEQ ID NO: 65509 - DNA, 25 bp, Homo sapien
gggttaatacctagaccagcaagtg

SEQ ID NO: 65510 - DNA, 25 bp, Homo sapien
attgcaacactgtactcagggcatc

SEQ ID NO: 65511 - DNA, 25 bp, Homo sapien
gtgaacatcactcccatggtcctcc

SEQ ID NO: 65512 - DNA, 25 bp, Homo sapien
tcagaggcgtgaacatcactcccat

SEQ ID NO: 65513 - DNA, 25 bp, Homo sapien
ccgatgcgttcagtgtcgtagtacg

SEQ ID NO: 65514 - DNA, 25 bp, Homo sapien
tgatcaggtcaactccgatgcgttc

SEQ ID NO: 65515 - DNA, 25 bp, Homo sapien
attgcaacactgtactcagggcatc

SEQ ID NO: 65516 - DNA, 25 bp, Homo sapien
ttccagacagtacatcctctgcata

SEQ ID NO: 65517 - DNA, 25 bp, Homo sapien
ggccaggtaggtcaccatcaaaagg

SEQ ID NO: 65518 - DNA, 25 bp, Homo sapien
tggggtccattcacaggtttacaag

SEQ ID NO: 65519 - DNA, 25 bp, Homo sapien
agcaagtgtactgcttggggtccat

SEQ ID NO: 65520 - DNA, 25 bp, Homo sapien
atacctagaccagcaagtgtactgc

SEQ ID NO: 65521 - DNA, 25 bp, Homo sapien
gggttaatacctagaccagcaagtg

SEQ ID NO: 65522 - DNA, 25 bp, Homo sapien
attgcaacactgtactcagggcatc

SEQ ID NO: 65523 - DNA, 25 bp, Homo sapien
ttccagacagtacatcctctgcata

SEQ ID NO: 65524 - DNA, 25 bp, Homo sapien
gtgaacatcactcccatggtcctcc

SEQ ID NO: 65525 - DNA, 25 bp, Homo sapien
agcaagtgtactgcttggggtccat

SEQ ID NO: 65526 - DNA, 25 bp, Homo sapien
tggggtccattcacaggtttacaag

SEQ ID NO: 65527 - DNA, 25 bp, Homo sapien
atacctagaccagcaagtgtactgc

SEQ ID NO: 65528 - DNA, 25 bp, Homo sapien
ggccaggtaggtcaccatcaaaagg

SEQ ID NO: 65529 - DNA, 25 bp, Homo sapien
gggttaatacctagaccagcaagtg

SEQ ID NO: 65530 - DNA, 25 bp, Homo sapien
tgatcaggtcaactccgatgcgttc

SEQ ID NO: 65531 - DNA, 25 bp, Homo sapien
tcagaggcgtgaacatcactcccat

SEQ ID NO: 65532 - DNA, 25 bp, Homo sapien
ccgatgcgttcagtgtcgtagtacg

SEQ ID NO: 65533 - DNA, 25 bp, Homo sapien
gtgaacatcactcccatggtcctcc

SEQ ID NO: 65534 - DNA, 25 bp, Homo sapien
tcagaggcgtgaacatcactcccat

SEQ ID NO: 65535 - DNA, 25 bp, Homo sapien
ccgatgcgttcagtgtcgtagtacg

SEQ ID NO: 65536 - DNA, 25 bp, Homo sapien
tgatcaggtcaactccgatgcgttc

SEQ ID NO: 65537 - DNA, 25 bp, Homo sapien
attgcaacactgtactcagggcatc

SEQ ID NO: 65538 - DNA, 25 bp, Homo sapien
ttccagacagtacatcctctgcata

SEQ ID NO: 65539 - DNA, 25 bp, Homo sapien
ggccaggtaggtcaccatcaaaagg

SEQ ID NO: 65540 - DNA, 25 bp, Homo sapien
tggggtccattcacaggtttacaag

SEQ ID NO: 65541 - DNA, 25 bp, Homo sapien
agcaagtgtactgcttggggtccat

SEQ ID NO: 65542 - DNA, 25 bp, Homo sapien
atacctagaccagcaagtgtactgc

SEQ ID NO: 65543 - DNA, 25 bp, Homo sapien
gggttaatacctagaccagcaagtg

SEQ ID NO: 65544 - DNA, 25 bp, Homo sapien
gggttaatacctagaccagcaagtg

SEQ ID NO: 65545 - DNA, 25 bp, Homo sapien
ttccagacagtacatcctctgcata

SEQ ID NO: 65546 - DNA, 25 bp, Homo sapien
agcaagtgtactgcttggggtccat

SEQ ID NO: 65547 - DNA, 25 bp, Homo sapien
ggccaggtaggtcaccatcaaaagg

SEQ ID NO: 65548 - DNA, 25 bp, Homo sapien
atacctagaccagcaagtgtactgc

SEQ ID NO: 65549 - DNA, 25 bp, Homo sapien
gtgaacatcactcccatggtcctcc

SEQ ID NO: 65550 - DNA, 25 bp, Homo sapien
tcagaggcgtgaacatcactcccat

SEQ ID NO: 65551 - DNA, 25 bp, Homo sapien
ccgatgcgttcagtgtcgtagtacg

SEQ ID NO: 65552 - DNA, 25 bp, Homo sapien
tgatcaggtcaactccgatgcgttc

SEQ ID NO: 65553 - DNA, 25 bp, Homo sapien
tggggtccattcacaggtttacaag

SEQ ID NO: 65554 - DNA, 25 bp, Homo sapien
attgcaacactgtactcagggcatc

SEQ ID NO: 65555 - DNA, 25 bp, Homo sapien
gtgaacatcactcccatggtcctcc

SEQ ID NO: 65556 - DNA, 25 bp, Homo sapien
tcagaggcgtgaacatcactcccat

SEQ ID NO: 65557 - DNA, 25 bp, Homo sapien
ccgatgcgttcagtgtcgtagtacg

SEQ ID NO: 65558 - DNA, 25 bp, Homo sapien
tgatcaggtcaactccgatgcgttc

SEQ ID NO: 65559 - DNA, 25 bp, Homo sapien
attgcaacactgtactcagggcatc

SEQ ID NO: 65560 - DNA, 25 bp, Homo sapien
ttccagacagtacatcctctgcata

SEQ ID NO: 65561 - DNA, 25 bp, Homo sapien
ggccaggtaggtcaccatcaaaagg

SEQ ID NO: 65562 - DNA, 25 bp, Homo sapien
tggggtccattcacaggtttacaag

SEQ ID NO: 65563 - DNA, 25 bp, Homo sapien
agcaagtgtactgcttggggtccat

SEQ ID NO: 65564 - DNA, 25 bp, Homo sapien
atacctagaccagcaagtgtactgc

SEQ ID NO: 65565 - DNA, 25 bp, Homo sapien
gggttaatacctagaccagcaagtg

SEQ ID NO: 65566 - DNA, 25 bp, Homo sapien
attgcaacactgtactcagggcatc

SEQ ID NO: 65567 - DNA, 25 bp, Homo sapien
tgatcaggtcaactccgatgcgttc

SEQ ID NO: 65568 - DNA, 25 bp, Homo sapien
ttccagacagtacatcctctgcata

SEQ ID NO: 65569 - DNA, 25 bp, Homo sapien
tggggtccattcacaggtttacaag

SEQ ID NO: 65570 - DNA, 25 bp, Homo sapien
atacctagaccagcaagtgtactgc

SEQ ID NO: 65571 - DNA, 25 bp, Homo sapien
gggttaatacctagaccagcaagtg

SEQ ID NO: 65572 - DNA, 25 bp, Homo sapien
ggccaggtaggtcaccatcaaaagg

SEQ ID NO: 65573 - DNA, 25 bp, Homo sapien
gtgaacatcactcccatggtcctcc

SEQ ID NO: 65574 - DNA, 25 bp, Homo sapien
tcagaggcgtgaacatcactcccat

SEQ ID NO: 65575 - DNA, 25 bp, Homo sapien
ccgatgcgttcagtgtcgtagtacg

SEQ ID NO: 65576 - DNA, 25 bp, Homo sapien
agcaagtgtactgcttggggtccat

SEQ ID NO: 65577 - DNA, 25 bp, Homo sapien
gtgaacatcactcccatggtcctcc

SEQ ID NO: 65578 - DNA, 25 bp, Homo sapien
tcagaggcgtgaacatcactcccat

SEQ ID NO: 65579 - DNA, 25 bp, Homo sapien
ccgatgcgttcagtgtcgtagtacg

SEQ ID NO: 65580 - DNA, 25 bp, Homo sapien
tgatcaggtcaactccgatgcgttc

SEQ ID NO: 65581 - DNA, 25 bp, Homo sapien
attgcaacactgtactcagggcatc

SEQ ID NO: 65582 - DNA, 25 bp, Homo sapien
ttccagacagtacatcctctgcata

SEQ ID NO: 65583 - DNA, 25 bp, Homo sapien
ggccaggtaggtcaccatcaaaagg

SEQ ID NO: 65584 - DNA, 25 bp, Homo sapien
tggggtccattcacaggtttacaag

SEQ ID NO: 65585 - DNA, 25 bp, Homo sapien
agcaagtgtactgcttggggtccat

SEQ ID NO: 65586 - DNA, 25 bp, Homo sapien
atacctagaccagcaagtgtactgc

SEQ ID NO: 65587 - DNA, 25 bp, Homo sapien
gggttaatacctagaccagcaagtg

SEQ ID NO: 65588 - DNA, 25 bp, Homo sapien
ccgatgcgttcagtgtcgtagtacg

SEQ ID NO: 65589 - DNA, 25 bp, Homo sapien
gtgaacatcactcccatggtcctcc

SEQ ID NO: 65590 - DNA, 25 bp, Homo sapien
ttccagacagtacatcctctgcata

SEQ ID NO: 65591 - DNA, 25 bp, Homo sapien
tggggtccattcacaggtttacaag

SEQ ID NO: 65592 - DNA, 25 bp, Homo sapien
gggttaatacctagaccagcaagtg

SEQ ID NO: 65593 - DNA, 25 bp, Homo sapien
ggccaggtaggtcaccatcaaaagg

SEQ ID NO: 65594 - DNA, 25 bp, Homo sapien
tcagaggcgtgaacatcactcccat

SEQ ID NO: 65595 - DNA, 25 bp, Homo sapien
atacctagaccagcaagtgtactgc

SEQ ID NO: 65596 - DNA, 25 bp, Homo sapien
tgatcaggtcaactccgatgcgttc

SEQ ID NO: 65597 - DNA, 25 bp, Homo sapien
attgcaacactgtactcagggcatc

SEQ ID NO: 65598 - DNA, 25 bp, Homo sapien
agcaagtgtactgcttggggtccat

SEQ ID NO: 65599 - DNA, 25 bp, Homo sapien
ccgatgcgttcagtgtcgtagtacg

SEQ ID NO: 65600 - DNA, 25 bp, Homo sapien
tcagaggcgtgaacatcactcccat

SEQ ID NO: 65601 - DNA, 25 bp, Homo sapien
ggccaggtaggtcaccatcaaaagg

SEQ ID NO: 65602 - DNA, 25 bp, Homo sapien
gggttaatacctagaccagcaagtg

SEQ ID NO: 65603 - DNA, 25 bp, Homo sapien
ttccagacagtacatcctctgcata

SEQ ID NO: 65604 - DNA, 25 bp, Homo sapien
gtgaacatcactcccatggtcctcc

SEQ ID NO: 65605 - DNA, 25 bp, Homo sapien
attgcaacactgtactcagggcatc

SEQ ID NO: 65606 - DNA, 25 bp, Homo sapien
tggggtccattcacaggtttacaag

SEQ ID NO: 65607 - DNA, 25 bp, Homo sapien
tgatcaggtcaactccgatgcgttc

SEQ ID NO: 65608 - DNA, 25 bp, Homo sapien
atacctagaccagcaagtgtactgc

SEQ ID NO: 65609 - DNA, 25 bp, Homo sapien
agcaagtgtactgcttggggtccat

SEQ ID NO: 65610 - DNA, 25 bp, Homo sapien
gtgaacatcactcccatggtcctcc

SEQ ID NO: 65611 - DNA, 25 bp, Homo sapien
tcagaggcgtgaacatcactcccat

SEQ ID NO: 65612 - DNA, 25 bp, Homo sapien
ccgatgcgttcagtgtcgtagtacg

SEQ ID NO: 65613 - DNA, 25 bp, Homo sapien
tgatcaggtcaactccgatgcgttc

SEQ ID NO: 65614 - DNA, 25 bp, Homo sapien
attgcaacactgtactcagggcatc

SEQ ID NO: 65615 - DNA, 25 bp, Homo sapien
ttccagacagtacatcctctgcata

SEQ ID NO: 65616 - DNA, 25 bp, Homo sapien
ggccaggtaggtcaccatcaaaagg

SEQ ID NO: 65617 - DNA, 25 bp, Homo sapien
tggggtccattcacaggtttacaag

SEQ ID NO: 65618 - DNA, 25 bp, Homo sapien
agcaagtgtactgcttggggtccat

SEQ ID NO: 65619 - DNA, 25 bp, Homo sapien
atacctagaccagcaagtgtactgc

SEQ ID NO: 65620 - DNA, 25 bp, Homo sapien
gggttaatacctagaccagcaagtg

SEQ ID NO: 65621 - DNA, 25 bp, Homo sapien
agcaagtgtactgcttggggtccat

SEQ ID NO: 65622 - DNA, 25 bp, Homo sapien
gtgaacatcactcccatggtcctcc

SEQ ID NO: 65623 - DNA, 25 bp, Homo sapien
atacctagaccagcaagtgtactgc

SEQ ID NO: 65624 - DNA, 25 bp, Homo sapien
ccgatgcgttcagtgtcgtagtacg

SEQ ID NO: 65625 - DNA, 25 bp, Homo sapien
tcagaggcgtgaacatcactcccat

SEQ ID NO: 65626 - DNA, 25 bp, Homo sapien
gggttaatacctagaccagcaagtg

SEQ ID NO: 65627 - DNA, 25 bp, Homo sapien
ggccaggtaggtcaccatcaaaagg

SEQ ID NO: 65628 - DNA, 25 bp, Homo sapien
tgatcaggtcaactccgatgcgttc

SEQ ID NO: 65629 - DNA, 25 bp, Homo sapien
ttccagacagtacatcctctgcata

SEQ ID NO: 65630 - DNA, 25 bp, Homo sapien
attgcaacactgtactcagggcatc

SEQ ID NO: 65631 - DNA, 25 bp, Homo sapien
tggggtccattcacaggtttacaag

SEQ ID NO: 65632 - DNA, 25 bp, Homo sapien
gtgaacatcactcccatggtcctcc

SEQ ID NO: 65633 - DNA, 25 bp, Homo sapien
tcagaggcgtgaacatcactcccat

SEQ ID NO: 65634 - DNA, 25 bp, Homo sapien
ccgatgcgttcagtgtcgtagtacg

SEQ ID NO: 65635 - DNA, 25 bp, Homo sapien
tgatcaggtcaactccgatgcgttc

SEQ ID NO: 65636 - DNA, 25 bp, Homo sapien
attgcaacactgtactcagggcatc

SEQ ID NO: 65637 - DNA, 25 bp, Homo sapien
ttccagacagtacatcctctgcata

SEQ ID NO: 65638 - DNA, 25 bp, Homo sapien
ggccaggtaggtcaccatcaaaagg

SEQ ID NO: 65639 - DNA, 25 bp, Homo sapien
tggggtccattcacaggtttacaag

SEQ ID NO: 65640 - DNA, 25 bp, Homo sapien
agcaagtgtactgcttggggtccat

SEQ ID NO: 65641 - DNA, 25 bp, Homo sapien
atacctagaccagcaagtgtactgc

SEQ ID NO: 65642 - DNA, 25 bp, Homo sapien
gggttaatacctagaccagcaagtg

SEQ ID NO: 65643 - DNA, 25 bp, Homo sapien
atacctagaccagcaagtgtactgc

SEQ ID NO: 65644 - DNA, 25 bp, Homo sapien
tgatcaggtcaactccgatgcgttc

SEQ ID NO: 65645 - DNA, 25 bp, Homo sapien
attgcaacactgtactcagggcatc

SEQ ID NO: 65646 - DNA, 25 bp, Homo sapien
ccgatgcgttcagtgtcgtagtacg

SEQ ID NO: 65647 - DNA, 25 bp, Homo sapien
tggggtccattcacaggtttacaag

SEQ ID NO: 65648 - DNA, 25 bp, Homo sapien
agcaagtgtactgcttggggtccat

SEQ ID NO: 65649 - DNA, 25 bp, Homo sapien
gggttaatacctagaccagcaagtg

SEQ ID NO: 65650 - DNA, 25 bp, Homo sapien
ttccagacagtacatcctctgcata

SEQ ID NO: 65651 - DNA, 25 bp, Homo sapien
gtgaacatcactcccatggtcctcc

SEQ ID NO: 65652 - DNA, 25 bp, Homo sapien
ggccaggtaggtcaccatcaaaagg

SEQ ID NO: 65653 - DNA, 25 bp, Homo sapien
tcagaggcgtgaacatcactcccat

SEQ ID NO: 65654 - DNA, 25 bp, Homo sapien
gtgaacatcactcccatggtcctcc

SEQ ID NO: 65655 - DNA, 25 bp, Homo sapien
tcagaggcgtgaacatcactcccat

SEQ ID NO: 65656 - DNA, 25 bp, Homo sapien
ccgatgcgttcagtgtcgtagtacg

SEQ ID NO: 65657 - DNA, 25 bp, Homo sapien
tgatcaggtcaactccgatgcgttc

SEQ ID NO: 65658 - DNA, 25 bp, Homo sapien
attgcaacactgtactcagggcatc

SEQ ID NO: 65659 - DNA, 25 bp, Homo sapien
ttccagacagtacatcctctgcata

SEQ ID NO: 65660 - DNA, 25 bp, Homo sapien
ggccaggtaggtcaccatcaaaagg

SEQ ID NO: 65661 - DNA, 25 bp, Homo sapien
tggggtccattcacaggtttacaag

SEQ ID NO: 65662 - DNA, 25 bp, Homo sapien
agcaagtgtactgcttggggtccat

SEQ ID NO: 65663 - DNA, 25 bp, Homo sapien
atacctagaccagcaagtgtactgc

SEQ ID NO: 65664 - DNA, 25 bp, Homo sapien
gggttaatacctagaccagcaagtg

SEQ ID NO: 65665 - DNA, 25 bp, Homo sapien
ggcgctccacaatgggacactgagc

SEQ ID NO: 65666 - DNA, 25 bp, Homo sapien
ttcttgccgttgttgcggccgtgca

SEQ ID NO: 65667 - DNA, 25 bp, Homo sapien
cgtgagcaggtgtatgatctcgaag

SEQ ID NO: 65668 - DNA, 25 bp, Homo sapien
gggaccactgttgatgatggcgttc

SEQ ID NO: 65669 - DNA, 25 bp, Homo sapien
gatctcgaaggcatgcttgacgatg

SEQ ID NO: 65670 - DNA, 25 bp, Homo sapien
agctggaaaatcagcggttggactt

SEQ ID NO: 65671 - DNA, 25 bp, Homo sapien
gcatcatcatggagttagtgaggcg

SEQ ID NO: 65672 - DNA, 25 bp, Homo sapien
ataccgccctgcactgtgagggagg

SEQ ID NO: 65673 - DNA, 25 bp, Homo sapien
tcagcaatggtcttaatgttccgga

SEQ ID NO: 65674 - DNA, 25 bp, Homo sapien
gacactgagctttgcggaaagcgtt

SEQ ID NO: 65675 - DNA, 25 bp, Homo sapien
ggaaagcgtttgcggcataccgccc

SEQ ID NO: 65676 - DNA, 25 bp, Homo sapien
ataccgccctgcactgtgagggagg

SEQ ID NO: 65677 - DNA, 25 bp, Homo sapien
ggaaagcgtttgcggcataccgccc

SEQ ID NO: 65678 - DNA, 25 bp, Homo sapien
gacactgagctttgcggaaagcgtt

SEQ ID NO: 65679 - DNA, 25 bp, Homo sapien
ggcgctccacaatgggacactgagc

SEQ ID NO: 65680 - DNA, 25 bp, Homo sapien
gcatcatcatggagttagtgaggcg

SEQ ID NO: 65681 - DNA, 25 bp, Homo sapien
ttcttgccgttgttgcggccgtgca

SEQ ID NO: 65682 - DNA, 25 bp, Homo sapien
gatctcgaaggcatgcttgacgatg

SEQ ID NO: 65683 - DNA, 25 bp, Homo sapien
cgtgagcaggtgtatgatctcgaag

SEQ ID NO: 65684 - DNA, 25 bp, Homo sapien
gggaccactgttgatgatggcgttc

SEQ ID NO: 65685 - DNA, 25 bp, Homo sapien
tcagcaatggtcttaatgttccgga

SEQ ID NO: 65686 - DNA, 25 bp, Homo sapien
agctggaaaatcagcggttggactt

SEQ ID NO: 65687 - DNA, 25 bp, Homo sapien
ataccgccctgcactgtgagggagg

SEQ ID NO: 65688 - DNA, 25 bp, Homo sapien
gacactgagctttgcggaaagcgtt

SEQ ID NO: 65689 - DNA, 25 bp, Homo sapien
gatctcgaaggcatgcttgacgatg

SEQ ID NO: 65690 - DNA, 25 bp, Homo sapien
ggcgctccacaatgggacactgagc

SEQ ID NO: 65691 - DNA, 25 bp, Homo sapien
gcatcatcatggagttagtgaggcg

SEQ ID NO: 65692 - DNA, 25 bp, Homo sapien
ggaaagcgtttgcggcataccgccc

SEQ ID NO: 65693 - DNA, 25 bp, Homo sapien
agctggaaaatcagcggttggactt

SEQ ID NO: 65694 - DNA, 25 bp, Homo sapien
gggaccactgttgatgatggcgttc

SEQ ID NO: 65695 - DNA, 25 bp, Homo sapien
cgtgagcaggtgtatgatctcgaag

SEQ ID NO: 65696 - DNA, 25 bp, Homo sapien
tcagcaatggtcttaatgttccgga

SEQ ID NO: 65697 - DNA, 25 bp, Homo sapien
ttcttgccgttgttgcggccgtgca

SEQ ID NO: 65698 - DNA, 25 bp, Homo sapien
ataccgccctgcactgtgagggagg

SEQ ID NO: 65699 - DNA, 25 bp, Homo sapien
ggaaagcgtttgcggcataccgccc

SEQ ID NO: 65700 - DNA, 25 bp, Homo sapien
gacactgagctttgcggaaagcgtt

SEQ ID NO: 65701 - DNA, 25 bp, Homo sapien
ggcgctccacaatgggacactgagc

SEQ ID NO: 65702 - DNA, 25 bp, Homo sapien
gcatcatcatggagttagtgaggcg

SEQ ID NO: 65703 - DNA, 25 bp, Homo sapien
ttcttgccgttgttgcggccgtgca

SEQ ID NO: 65704 - DNA, 25 bp, Homo sapien
gatctcgaaggcatgcttgacgatg

SEQ ID NO: 65705 - DNA, 25 bp, Homo sapien
cgtgagcaggtgtatgatctcgaag

SEQ ID NO: 65706 - DNA, 25 bp, Homo sapien
gggaccactgttgatgatggcgttc

SEQ ID NO: 65707 - DNA, 25 bp, Homo sapien
tcagcaatggtcttaatgttccgga

SEQ ID NO: 65708 - DNA, 25 bp, Homo sapien
agctggaaaatcagcggttggactt

SEQ ID NO: 65709 - DNA, 25 bp, Homo sapien
gacactgagctttgcggaaagcgtt

SEQ ID NO: 65710 - DNA, 25 bp, Homo sapien
gatctcgaaggcatgcttgacgatg

SEQ ID NO: 65711 - DNA, 25 bp, Homo sapien
ggcgctccacaatgggacactgagc

SEQ ID NO: 65712 - DNA, 25 bp, Homo sapien
tcagcaatggtcttaatgttccgga

SEQ ID NO: 65713 - DNA, 25 bp, Homo sapien
ataccgccctgcactgtgagggagg

SEQ ID NO: 65714 - DNA, 25 bp, Homo sapien
gcatcatcatggagttagtgaggcg

SEQ ID NO: 65715 - DNA, 25 bp, Homo sapien
cgtgagcaggtgtatgatctcgaag

SEQ ID NO: 65716 - DNA, 25 bp, Homo sapien
ttcttgccgttgttgcggccgtgca

SEQ ID NO: 65717 - DNA, 25 bp, Homo sapien
ggaaagcgtttgcggcataccgccc

SEQ ID NO: 65718 - DNA, 25 bp, Homo sapien
agctggaaaatcagcggttggactt

SEQ ID NO: 65719 - DNA, 25 bp, Homo sapien
gggaccactgttgatgatggcgttc

SEQ ID NO: 65720 - DNA, 25 bp, Homo sapien
ataccgccctgcactgtgagggagg

SEQ ID NO: 65721 - DNA, 25 bp, Homo sapien
ggaaagcgtttgcggcataccgccc

SEQ ID NO: 65722 - DNA, 25 bp, Homo sapien
gacactgagctttgcggaaagcgtt

SEQ ID NO: 65723 - DNA, 25 bp, Homo sapien
ggcgctccacaatgggacactgagc

SEQ ID NO: 65724 - DNA, 25 bp, Homo sapien
gcatcatcatggagttagtgaggcg

SEQ ID NO: 65725 - DNA, 25 bp, Homo sapien
ttcttgccgttgttgcggccgtgca

SEQ ID NO: 65726 - DNA, 25 bp, Homo sapien
gatctcgaaggcatgcttgacgatg

SEQ ID NO: 65727 - DNA, 25 bp, Homo sapien
cgtgagcaggtgtatgatctcgaag

SEQ ID NO: 65728 - DNA, 25 bp, Homo sapien
gggaccactgttgatgatggcgttc

SEQ ID NO: 65729 - DNA, 25 bp, Homo sapien
tcagcaatggtcttaatgttccgga

SEQ ID NO: 65730 - DNA, 25 bp, Homo sapien
agctggaaaatcagcggttggactt

SEQ ID NO: 65731 - DNA, 25 bp, Homo sapien
ataccgccctgcactgtgagggagg

SEQ ID NO: 65732 - DNA, 25 bp, Homo sapien
ggaaagcgtttgcggcataccgccc

SEQ ID NO: 65733 - DNA, 25 bp, Homo sapien
gacactgagctttgcggaaagcgtt

SEQ ID NO: 65734 - DNA, 25 bp, Homo sapien
ggcgctccacaatgggacactgagc

SEQ ID NO: 65735 - DNA, 25 bp, Homo sapien
gcatcatcatggagttagtgaggcg

SEQ ID NO: 65736 - DNA, 25 bp, Homo sapien
ttcttgccgttgttgcggccgtgca

SEQ ID NO: 65737 - DNA, 25 bp, Homo sapien
gatctcgaaggcatgcttgacgatg

SEQ ID NO: 65738 - DNA, 25 bp, Homo sapien
cgtgagcaggtgtatgatctcgaag

SEQ ID NO: 65739 - DNA, 25 bp, Homo sapien
gggaccactgttgatgatggcgttc

SEQ ID NO: 65740 - DNA, 25 bp, Homo sapien
tcagcaatggtcttaatgttccgga

SEQ ID NO: 65741 - DNA, 25 bp, Homo sapien
agctggaaaatcagcggttggactt

SEQ ID NO: 65742 - DNA, 25 bp, Homo sapien
cgtgagcaggtgtatgatctcgaag

SEQ ID NO: 65743 - DNA, 25 bp, Homo sapien
tcagcaatggtcttaatgttccgga

SEQ ID NO: 65744 - DNA, 25 bp, Homo sapien
gacactgagctttgcggaaagcgtt

SEQ ID NO: 65745 - DNA, 25 bp, Homo sapien
ggcgctccacaatgggacactgagc

SEQ ID NO: 65746 - DNA, 25 bp, Homo sapien
gcatcatcatggagttagtgaggcg

SEQ ID NO: 65747 - DNA, 25 bp, Homo sapien
gatctcgaaggcatgcttgacgatg

SEQ ID NO: 65748 - DNA, 25 bp, Homo sapien
gggaccactgttgatgatggcgttc

SEQ ID NO: 65749 - DNA, 25 bp, Homo sapien
ataccgccctgcactgtgagggagg

SEQ ID NO: 65750 - DNA, 25 bp, Homo sapien
ttcttgccgttgttgcggccgtgca

SEQ ID NO: 65751 - DNA, 25 bp, Homo sapien
agctggaaaatcagcggttggactt

SEQ ID NO: 65752 - DNA, 25 bp, Homo sapien
ggaaagcgtttgcggcataccgccc

SEQ ID NO: 65753 - DNA, 25 bp, Homo sapien
ataccgccctgcactgtgagggagg

SEQ ID NO: 65754 - DNA, 25 bp, Homo sapien
ggaaagcgtttgcggcataccgccc

SEQ ID NO: 65755 - DNA, 25 bp, Homo sapien
gacactgagctttgcggaaagcgtt

SEQ ID NO: 65756 - DNA, 25 bp, Homo sapien
ggcgctccacaatgggacactgagc

SEQ ID NO: 65757 - DNA, 25 bp, Homo sapien
gcatcatcatggagttagtgaggcg

SEQ ID NO: 65758 - DNA, 25 bp, Homo sapien
ttcttgccgttgttgcggccgtgca

SEQ ID NO: 65759 - DNA, 25 bp, Homo sapien
gatctcgaaggcatgcttgacgatg

SEQ ID NO: 65760 - DNA, 25 bp, Homo sapien
cgtgagcaggtgtatgatctcgaag

SEQ ID NO: 65761 - DNA, 25 bp, Homo sapien
gggaccactgttgatgatggcgttc

SEQ ID NO: 65762 - DNA, 25 bp, Homo sapien
tcagcaatggtcttaatgttccgga

SEQ ID NO: 65763 - DNA, 25 bp, Homo sapien
agctggaaaatcagcggttggactt

SEQ ID NO: 65764 - DNA, 25 bp, Homo sapien
ggcgctccacaatgggacactgagc

SEQ ID NO: 65765 - DNA, 25 bp, Homo sapien
gggaccactgttgatgatggcgttc

SEQ ID NO: 65766 - DNA, 25 bp, Homo sapien
ataccgccctgcactgtgagggagg

SEQ ID NO: 65767 - DNA, 25 bp, Homo sapien
gcatcatcatggagttagtgaggcg

SEQ ID NO: 65768 - DNA, 25 bp, Homo sapien
gacactgagctttgcggaaagcgtt

SEQ ID NO: 65769 - DNA, 25 bp, Homo sapien
ggaaagcgtttgcggcataccgccc

SEQ ID NO: 65770 - DNA, 25 bp, Homo sapien
agctggaaaatcagcggttggactt

SEQ ID NO: 65771 - DNA, 25 bp, Homo sapien
gatctcgaaggcatgcttgacgatg

SEQ ID NO: 65772 - DNA, 25 bp, Homo sapien
cgtgagcaggtgtatgatctcgaag

SEQ ID NO: 65773 - DNA, 25 bp, Homo sapien
tcagcaatggtcttaatgttccgga

SEQ ID NO: 65774 - DNA, 25 bp, Homo sapien
ttcttgccgttgttgcggccgtgca

SEQ ID NO: 65775 - DNA, 25 bp, Homo sapien
ataccgccctgcactgtgagggagg

SEQ ID NO: 65776 - DNA, 25 bp, Homo sapien
ggaaagcgtttgcggcataccgccc

SEQ ID NO: 65777 - DNA, 25 bp, Homo sapien
gacactgagctttgcggaaagcgtt

SEQ ID NO: 65778 - DNA, 25 bp, Homo sapien
ggcgctccacaatgggacactgagc

SEQ ID NO: 65779 - DNA, 25 bp, Homo sapien
gcatcatcatggagttagtgaggcg

SEQ ID NO: 65780 - DNA, 25 bp, Homo sapien
ttcttgccgttgttgcggccgtgca

SEQ ID NO: 65781 - DNA, 25 bp, Homo sapien
gatctcgaaggcatgcttgacgatg

SEQ ID NO: 65782 - DNA, 25 bp, Homo sapien
cgtgagcaggtgtatgatctcgaag

SEQ ID NO: 65783 - DNA, 25 bp, Homo sapien
gggaccactgttgatgatggcgttc

SEQ ID NO: 65784 - DNA, 25 bp, Homo sapien
tcagcaatggtcttaatgttccgga

SEQ ID NO: 65785 - DNA, 25 bp, Homo sapien
agctggaaaatcagcggttggactt

SEQ ID NO: 65786 - DNA, 25 bp, Homo sapien
gggaccactgttgatgatggcgttc

SEQ ID NO: 65787 - DNA, 25 bp, Homo sapien
cgtgagcaggtgtatgatctcgaag

SEQ ID NO: 65788 - DNA, 25 bp, Homo sapien
ttcttgccgttgttgcggccgtgca

SEQ ID NO: 65789 - DNA, 25 bp, Homo sapien
ggcgctccacaatgggacactgagc

SEQ ID NO: 65790 - DNA, 25 bp, Homo sapien
ggaaagcgtttgcggcataccgccc

SEQ ID NO: 65791 - DNA, 25 bp, Homo sapien
ataccgccctgcactgtgagggagg

SEQ ID NO: 65792 - DNA, 25 bp, Homo sapien
gacactgagctttgcggaaagcgtt

SEQ ID NO: 65793 - DNA, 25 bp, Homo sapien
tcagcaatggtcttaatgttccgga

SEQ ID NO: 65794 - DNA, 25 bp, Homo sapien
gatctcgaaggcatgcttgacgatg

SEQ ID NO: 65795 - DNA, 25 bp, Homo sapien
gcatcatcatggagttagtgaggcg

SEQ ID NO: 65796 - DNA, 25 bp, Homo sapien
agctggaaaatcagcggttggactt

SEQ ID NO: 65797 - DNA, 25 bp, Homo sapien
ataccgccctgcactgtgagggagg

SEQ ID NO: 65798 - DNA, 25 bp, Homo sapien
ggaaagcgtttgcggcataccgccc

SEQ ID NO: 65799 - DNA, 25 bp, Homo sapien
gacactgagctttgcggaaagcgtt

SEQ ID NO: 65800 - DNA, 25 bp, Homo sapien
ggcgctccacaatgggacactgagc

SEQ ID NO: 65801 - DNA, 25 bp, Homo sapien
gcatcatcatggagttagtgaggcg

SEQ ID NO: 65802 - DNA, 25 bp, Homo sapien
ttcttgccgttgttgcggccgtgca

SEQ ID NO: 65803 - DNA, 25 bp, Homo sapien
gatctcgaaggcatgcttgacgatg

SEQ ID NO: 65804 - DNA, 25 bp, Homo sapien
cgtgagcaggtgtatgatctcgaag

SEQ ID NO: 65805 - DNA, 25 bp, Homo sapien
gggaccactgttgatgatggcgttc

SEQ ID NO: 65806 - DNA, 25 bp, Homo sapien
tcagcaatggtcttaatgttccgga

SEQ ID NO: 65807 - DNA, 25 bp, Homo sapien
agctggaaaatcagcggttggactt

SEQ ID NO: 65808 - DNA, 25 bp, Homo sapien
ttcttgccgttgttgcggccgtgca

SEQ ID NO: 65809 - DNA, 25 bp, Homo sapien
ggaaagcgtttgcggcataccgccc

SEQ ID NO: 65810 - DNA, 25 bp, Homo sapien
agctggaaaatcagcggttggactt

SEQ ID NO: 65811 - DNA, 25 bp, Homo sapien
gacactgagctttgcggaaagcgtt

SEQ ID NO: 65812 - DNA, 25 bp, Homo sapien
gatctcgaaggcatgcttgacgatg

SEQ ID NO: 65813 - DNA, 25 bp, Homo sapien
ataccgccctgcactgtgagggagg

SEQ ID NO: 65814 - DNA, 25 bp, Homo sapien
gcatcatcatggagttagtgaggcg

SEQ ID NO: 65815 - DNA, 25 bp, Homo sapien
tcagcaatggtcttaatgttccgga

SEQ ID NO: 65816 - DNA, 25 bp, Homo sapien
gggaccactgttgatgatggcgttc

SEQ ID NO: 65817 - DNA, 25 bp, Homo sapien
ggcgctccacaatgggacactgagc

SEQ ID NO: 65818 - DNA, 25 bp, Homo sapien
cgtgagcaggtgtatgatctcgaag

SEQ ID NO: 65819 - DNA, 25 bp, Homo sapien
ataccgccctgcactgtgagggagg

SEQ ID NO: 65820 - DNA, 25 bp, Homo sapien
ggaaagcgtttgcggcataccgccc

SEQ ID NO: 65821 - DNA, 25 bp, Homo sapien
gacactgagctttgcggaaagcgtt

SEQ ID NO: 65822 - DNA, 25 bp, Homo sapien
ggcgctccacaatgggacactgagc

SEQ ID NO: 65823 - DNA, 25 bp, Homo sapien
gcatcatcatggagttagtgaggcg

SEQ ID NO: 65824 - DNA, 25 bp, Homo sapien
ttcttgccgttgttgcggccgtgca

SEQ ID NO: 65825 - DNA, 25 bp, Homo sapien
gatctcgaaggcatgcttgacgatg

SEQ ID NO: 65826 - DNA, 25 bp, Homo sapien
cgtgagcaggtgtatgatctcgaag

SEQ ID NO: 65827 - DNA, 25 bp, Homo sapien
gggaccactgttgatgatggcgttc

SEQ ID NO: 65828 - DNA, 25 bp, Homo sapien
tcagcaatggtcttaatgttccgga

SEQ ID NO: 65829 - DNA, 25 bp, Homo sapien
agctggaaaatcagcggttggactt

SEQ ID NO: 65830 - DNA, 25 bp, Homo sapien
tcagcaatggtcttaatgttccgga

SEQ ID NO: 65831 - DNA, 25 bp, Homo sapien
gggaccactgttgatgatggcgttc

SEQ ID NO: 65832 - DNA, 25 bp, Homo sapien
agctggaaaatcagcggttggactt

SEQ ID NO: 65833 - DNA, 25 bp, Homo sapien
cgtgagcaggtgtatgatctcgaag

SEQ ID NO: 65834 - DNA, 25 bp, Homo sapien
ggcgctccacaatgggacactgagc

SEQ ID NO: 65835 - DNA, 25 bp, Homo sapien
ataccgccctgcactgtgagggagg

SEQ ID NO: 65836 - DNA, 25 bp, Homo sapien
ttcttgccgttgttgcggccgtgca

SEQ ID NO: 65837 - DNA, 25 bp, Homo sapien
gacactgagctttgcggaaagcgtt

SEQ ID NO: 65838 - DNA, 25 bp, Homo sapien
gatctcgaaggcatgcttgacgatg

SEQ ID NO: 65839 - DNA, 25 bp, Homo sapien
ggaaagcgtttgcggcataccgccc

SEQ ID NO: 65840 - DNA, 25 bp, Homo sapien
gcatcatcatggagttagtgaggcg

SEQ ID NO: 65841 - DNA, 25 bp, Homo sapien
gcatcatcatggagttagtgaggcg

SEQ ID NO: 65842 - DNA, 25 bp, Homo sapien
agctggaaaatcagcggttggactt

SEQ ID NO: 65843 - DNA, 25 bp, Homo sapien
gacactgagctttgcggaaagcgtt

SEQ ID NO: 65844 - DNA, 25 bp, Homo sapien
gggaccactgttgatgatggcgttc

SEQ ID NO: 65845 - DNA, 25 bp, Homo sapien
ggcgctccacaatgggacactgagc

SEQ ID NO: 65846 - DNA, 25 bp, Homo sapien
ataccgccctgcactgtgagggagg

SEQ ID NO: 65847 - DNA, 25 bp, Homo sapien
tcagcaatggtcttaatgttccgga

SEQ ID NO: 65848 - DNA, 25 bp, Homo sapien
cgtgagcaggtgtatgatctcgaag

SEQ ID NO: 65849 - DNA, 25 bp, Homo sapien
gatctcgaaggcatgcttgacgatg

SEQ ID NO: 65850 - DNA, 25 bp, Homo sapien
ggaaagcgtttgcggcataccgccc

SEQ ID NO: 65851 - DNA, 25 bp, Homo sapien
ttcttgccgttgttgcggccgtgca

SEQ ID NO: 65852 - DNA, 25 bp, Homo sapien
ataccgccctgcactgtgagggagg

SEQ ID NO: 65853 - DNA, 25 bp, Homo sapien
ggaaagcgtttgcggcataccgccc

SEQ ID NO: 65854 - DNA, 25 bp, Homo sapien
gacactgagctttgcggaaagcgtt

SEQ ID NO: 65855 - DNA, 25 bp, Homo sapien
ggcgctccacaatgggacactgagc

SEQ ID NO: 65856 - DNA, 25 bp, Homo sapien
gcatcatcatggagttagtgaggcg

SEQ ID NO: 65857 - DNA, 25 bp, Homo sapien
ttcttgccgttgttgcggccgtgca

SEQ ID NO: 65858 - DNA, 25 bp, Homo sapien
gatctcgaaggcatgcttgacgatg

SEQ ID NO: 65859 - DNA, 25 bp, Homo sapien
cgtgagcaggtgtatgatctcgaag

SEQ ID NO: 65860 - DNA, 25 bp, Homo sapien
gggaccactgttgatgatggcgttc

SEQ ID NO: 65861 - DNA, 25 bp, Homo sapien
tcagcaatggtcttaatgttccgga

SEQ ID NO: 65862 - DNA, 25 bp, Homo sapien
agctggaaaatcagcggttggactt

SEQ ID NO: 65863 - DNA, 25 bp, Homo sapien
gacactgagctttgcggaaagcgtt

SEQ ID NO: 65864 - DNA, 25 bp, Homo sapien
ttcttgccgttgttgcggccgtgca

SEQ ID NO: 65865 - DNA, 25 bp, Homo sapien
gcatcatcatggagttagtgaggcg

SEQ ID NO: 65866 - DNA, 25 bp, Homo sapien
gggaccactgttgatgatggcgttc

SEQ ID NO: 65867 - DNA, 25 bp, Homo sapien
ggcgctccacaatgggacactgagc

SEQ ID NO: 65868 - DNA, 25 bp, Homo sapien
agctggaaaatcagcggttggactt

SEQ ID NO: 65869 - DNA, 25 bp, Homo sapien
ataccgccctgcactgtgagggagg

SEQ ID NO: 65870 - DNA, 25 bp, Homo sapien
cgtgagcaggtgtatgatctcgaag

SEQ ID NO: 65871 - DNA, 25 bp, Homo sapien
tcagcaatggtcttaatgttccgga

SEQ ID NO: 65872 - DNA, 25 bp, Homo sapien
gatctcgaaggcatgcttgacgatg

SEQ ID NO: 65873 - DNA, 25 bp, Homo sapien
ggaaagcgtttgcggcataccgccc

SEQ ID NO: 65874 - DNA, 25 bp, Homo sapien
ataccgccctgcactgtgagggagg

SEQ ID NO: 65875 - DNA, 25 bp, Homo sapien
ggaaagcgtttgcggcataccgccc

SEQ ID NO: 65876 - DNA, 25 bp, Homo sapien
gacactgagctttgcggaaagcgtt

SEQ ID NO: 65877 - DNA, 25 bp, Homo sapien
ggcgctccacaatgggacactgagc

SEQ ID NO: 65878 - DNA, 25 bp, Homo sapien
gcatcatcatggagttagtgaggcg

SEQ ID NO: 65879 - DNA, 25 bp, Homo sapien
ttcttgccgttgttgcggccgtgca

SEQ ID NO: 65880 - DNA, 25 bp, Homo sapien
gatctcgaaggcatgcttgacgatg

SEQ ID NO: 65881 - DNA, 25 bp, Homo sapien
cgtgagcaggtgtatgatctcgaag

SEQ ID NO: 65882 - DNA, 25 bp, Homo sapien
gggaccactgttgatgatggcgttc

SEQ ID NO: 65883 - DNA, 25 bp, Homo sapien
tcagcaatggtcttaatgttccgga

SEQ ID NO: 65884 - DNA, 25 bp, Homo sapien
agctggaaaatcagcggttggactt

SEQ ID NO: 65885 - DNA, 25 bp, Homo sapien
cgtgagcaggtgtatgatctcgaag

SEQ ID NO: 65886 - DNA, 25 bp, Homo sapien
gacactgagctttgcggaaagcgtt

SEQ ID NO: 65887 - DNA, 25 bp, Homo sapien
ggaaagcgtttgcggcataccgccc

SEQ ID NO: 65888 - DNA, 25 bp, Homo sapien
tcagcaatggtcttaatgttccgga

SEQ ID NO: 65889 - DNA, 25 bp, Homo sapien
ataccgccctgcactgtgagggagg

SEQ ID NO: 65890 - DNA, 25 bp, Homo sapien
ttcttgccgttgttgcggccgtgca

SEQ ID NO: 65891 - DNA, 25 bp, Homo sapien
ggcgctccacaatgggacactgagc

SEQ ID NO: 65892 - DNA, 25 bp, Homo sapien
gggaccactgttgatgatggcgttc

SEQ ID NO: 65893 - DNA, 25 bp, Homo sapien
gatctcgaaggcatgcttgacgatg

SEQ ID NO: 65894 - DNA, 25 bp, Homo sapien
gcatcatcatggagttagtgaggcg

SEQ ID NO: 65895 - DNA, 25 bp, Homo sapien
agctggaaaatcagcggttggactt

SEQ ID NO: 65896 - DNA, 25 bp, Homo sapien
ataccgccctgcactgtgagggagg

SEQ ID NO: 65897 - DNA, 25 bp, Homo sapien
ggaaagcgtttgcggcataccgccc

SEQ ID NO: 65898 - DNA, 25 bp, Homo sapien
gacactgagctttgcggaaagcgtt

SEQ ID NO: 65899 - DNA, 25 bp, Homo sapien
ggcgctccacaatgggacactgagc

SEQ ID NO: 65900 - DNA, 25 bp, Homo sapien
gcatcatcatggagttagtgaggcg

SEQ ID NO: 65901 - DNA, 25 bp, Homo sapien
ttcttgccgttgttgcggccgtgca

SEQ ID NO: 65902 - DNA, 25 bp, Homo sapien
gatctcgaaggcatgcttgacgatg

SEQ ID NO: 65903 - DNA, 25 bp, Homo sapien
cgtgagcaggtgtatgatctcgaag

SEQ ID NO: 65904 - DNA, 25 bp, Homo sapien
gggaccactgttgatgatggcgttc

SEQ ID NO: 65905 - DNA, 25 bp, Homo sapien
tcagcaatggtcttaatgttccgga

SEQ ID NO: 65906 - DNA, 25 bp, Homo sapien
agctggaaaatcagcggttggactt

SEQ ID NO: 65907 - DNA, 25 bp, Homo sapien
gggaccactgttgatgatggcgttc

SEQ ID NO: 65908 - DNA, 25 bp, Homo sapien
ttcttgccgttgttgcggccgtgca

SEQ ID NO: 65909 - DNA, 25 bp, Homo sapien
ataccgccctgcactgtgagggagg

SEQ ID NO: 65910 - DNA, 25 bp, Homo sapien
gcatcatcatggagttagtgaggcg

SEQ ID NO: 65911 - DNA, 25 bp, Homo sapien
tcagcaatggtcttaatgttccgga

SEQ ID NO: 65912 - DNA, 25 bp, Homo sapien
agctggaaaatcagcggttggactt

SEQ ID NO: 65913 - DNA, 25 bp, Homo sapien
gacactgagctttgcggaaagcgtt

SEQ ID NO: 65914 - DNA, 25 bp, Homo sapien
ggaaagcgtttgcggcataccgccc

SEQ ID NO: 65915 - DNA, 25 bp, Homo sapien
gatctcgaaggcatgcttgacgatg

SEQ ID NO: 65916 - DNA, 25 bp, Homo sapien
ggcgctccacaatgggacactgagc

SEQ ID NO: 65917 - DNA, 25 bp, Homo sapien
cgtgagcaggtgtatgatctcgaag

SEQ ID NO: 65918 - DNA, 25 bp, Homo sapien
ataccgccctgcactgtgagggagg

SEQ ID NO: 65919 - DNA, 25 bp, Homo sapien
ggaaagcgtttgcggcataccgccc

SEQ ID NO: 65920 - DNA, 25 bp, Homo sapien
gacactgagctttgcggaaagcgtt

SEQ ID NO: 65921 - DNA, 25 bp, Homo sapien
ggcgctccacaatgggacactgagc

SEQ ID NO: 65922 - DNA, 25 bp, Homo sapien
gcatcatcatggagttagtgaggcg

SEQ ID NO: 65923 - DNA, 25 bp, Homo sapien
ttcttgccgttgttgcggccgtgca

SEQ ID NO: 65924 - DNA, 25 bp, Homo sapien
gatctcgaaggcatgcttgacgatg

SEQ ID NO: 65925 - DNA, 25 bp, Homo sapien
cgtgagcaggtgtatgatctcgaag

SEQ ID NO: 65926 - DNA, 25 bp, Homo sapien
gggaccactgttgatgatggcgttc

SEQ ID NO: 65927 - DNA, 25 bp, Homo sapien
tcagcaatggtcttaatgttccgga

SEQ ID NO: 65928 - DNA, 25 bp, Homo sapien
agctggaaaatcagcggttggactt

SEQ ID NO: 65929 - DNA, 25 bp, Homo sapien
ggcgctccacaatgggacactgagc

SEQ ID NO: 65930 - DNA, 25 bp, Homo sapien
ataccgccctgcactgtgagggagg

SEQ ID NO: 65931 - DNA, 25 bp, Homo sapien
gcatcatcatggagttagtgaggcg

SEQ ID NO: 65932 - DNA, 25 bp, Homo sapien
tcagcaatggtcttaatgttccgga

SEQ ID NO: 65933 - DNA, 25 bp, Homo sapien
gacactgagctttgcggaaagcgtt

SEQ ID NO: 65934 - DNA, 25 bp, Homo sapien
gatctcgaaggcatgcttgacgatg

SEQ ID NO: 65935 - DNA, 25 bp, Homo sapien
ttcttgccgttgttgcggccgtgca

SEQ ID NO: 65936 - DNA, 25 bp, Homo sapien
gggaccactgttgatgatggcgttc

SEQ ID NO: 65937 - DNA, 25 bp, Homo sapien
cgtgagcaggtgtatgatctcgaag

SEQ ID NO: 65938 - DNA, 25 bp, Homo sapien
ggaaagcgtttgcggcataccgccc

SEQ ID NO: 65939 - DNA, 25 bp, Homo sapien
agctggaaaatcagcggttggactt

SEQ ID NO: 65940 - DNA, 25 bp, Homo sapien
ataccgccctgcactgtgagggagg

SEQ ID NO: 65941 - DNA, 25 bp, Homo sapien
ggaaagcgtttgcggcataccgccc

SEQ ID NO: 65942 - DNA, 25 bp, Homo sapien
gacactgagctttgcggaaagcgtt

SEQ ID NO: 65943 - DNA, 25 bp, Homo sapien
ggcgctccacaatgggacactgagc

SEQ ID NO: 65944 - DNA, 25 bp, Homo sapien
gcatcatcatggagttagtgaggcg

SEQ ID NO: 65945 - DNA, 25 bp, Homo sapien
ttcttgccgttgttgcggccgtgca

SEQ ID NO: 65946 - DNA, 25 bp, Homo sapien
gatctcgaaggcatgcttgacgatg

SEQ ID NO: 65947 - DNA, 25 bp, Homo sapien
cgtgagcaggtgtatgatctcgaag

SEQ ID NO: 65948 - DNA, 25 bp, Homo sapien
gggaccactgttgatgatggcgttc

SEQ ID NO: 65949 - DNA, 25 bp, Homo sapien
tcagcaatggtcttaatgttccgga

SEQ ID NO: 65950 - DNA, 25 bp, Homo sapien
agctggaaaatcagcggttggactt

SEQ ID NO: 65951 - DNA, 25 bp, Homo sapien
ttcttgccgttgttgcggccgtgca

SEQ ID NO: 65952 - DNA, 25 bp, Homo sapien
ggcgctccacaatgggacactgagc

SEQ ID NO: 65953 - DNA, 25 bp, Homo sapien
gatctcgaaggcatgcttgacgatg

SEQ ID NO: 65954 - DNA, 25 bp, Homo sapien
cgtgagcaggtgtatgatctcgaag

SEQ ID NO: 65955 - DNA, 25 bp, Homo sapien
tcagcaatggtcttaatgttccgga

SEQ ID NO: 65956 - DNA, 25 bp, Homo sapien
ggaaagcgtttgcggcataccgccc

SEQ ID NO: 65957 - DNA, 25 bp, Homo sapien
agctggaaaatcagcggttggactt

SEQ ID NO: 65958 - DNA, 25 bp, Homo sapien
gggaccactgttgatgatggcgttc

SEQ ID NO: 65959 - DNA, 25 bp, Homo sapien
gacactgagctttgcggaaagcgtt

SEQ ID NO: 65960 - DNA, 25 bp, Homo sapien
gcatcatcatggagttagtgaggcg

SEQ ID NO: 65961 - DNA, 25 bp, Homo sapien
ataccgccctgcactgtgagggagg

SEQ ID NO: 65962 - DNA, 25 bp, Homo sapien
ataccgccctgcactgtgagggagg

SEQ ID NO: 65963 - DNA, 25 bp, Homo sapien
ggaaagcgtttgcggcataccgccc

SEQ ID NO: 65964 - DNA, 25 bp, Homo sapien
gacactgagctttgcggaaagcgtt

SEQ ID NO: 65965 - DNA, 25 bp, Homo sapien
ggcgctccacaatgggacactgagc

SEQ ID NO: 65966 - DNA, 25 bp, Homo sapien
gcatcatcatggagttagtgaggcg

SEQ ID NO: 65967 - DNA, 25 bp, Homo sapien
ttcttgccgttgttgcggccgtgca

SEQ ID NO: 65968 - DNA, 25 bp, Homo sapien
gatctcgaaggcatgcttgacgatg

SEQ ID NO: 65969 - DNA, 25 bp, Homo sapien
cgtgagcaggtgtatgatctcgaag

SEQ ID NO: 65970 - DNA, 25 bp, Homo sapien
gggaccactgttgatgatggcgttc

SEQ ID NO: 65971 - DNA, 25 bp, Homo sapien
tcagcaatggtcttaatgttccgga

SEQ ID NO: 65972 - DNA, 25 bp, Homo sapien
agctggaaaatcagcggttggactt

SEQ ID NO: 65973 - DNA, 25 bp, Homo sapien
ataccgccctgcactgtgagggagg

SEQ ID NO: 65974 - DNA, 25 bp, Homo sapien
ggaaagcgtttgcggcataccgccc

SEQ ID NO: 65975 - DNA, 25 bp, Homo sapien
gacactgagctttgcggaaagcgtt

SEQ ID NO: 65976 - DNA, 25 bp, Homo sapien
ggcgctccacaatgggacactgagc

SEQ ID NO: 65977 - DNA, 25 bp, Homo sapien
gcatcatcatggagttagtgaggcg

SEQ ID NO: 65978 - DNA, 25 bp, Homo sapien
ttcttgccgttgttgcggccgtgca

SEQ ID NO: 65979 - DNA, 25 bp, Homo sapien
gatctcgaaggcatgcttgacgatg

SEQ ID NO: 65980 - DNA, 25 bp, Homo sapien
cgtgagcaggtgtatgatctcgaag

SEQ ID NO: 65981 - DNA, 25 bp, Homo sapien
gggaccactgttgatgatggcgttc

SEQ ID NO: 65982 - DNA, 25 bp, Homo sapien
tcagcaatggtcttaatgttccgga

SEQ ID NO: 65983 - DNA, 25 bp, Homo sapien
agctggaaaatcagcggttggactt

SEQ ID NO: 65984 - DNA, 25 bp, Homo sapien
gacactgagctttgcggaaagcgtt

SEQ ID NO: 65985 - DNA, 25 bp, Homo sapien
ggaaagcgtttgcggcataccgccc

SEQ ID NO: 65986 - DNA, 25 bp, Homo sapien
gggaccactgttgatgatggcgttc

SEQ ID NO: 65987 - DNA, 25 bp, Homo sapien
ataccgccctgcactgtgagggagg

SEQ ID NO: 65988 - DNA, 25 bp, Homo sapien
agctggaaaatcagcggttggactt

SEQ ID NO: 65989 - DNA, 25 bp, Homo sapien
ttcttgccgttgttgcggccgtgca

SEQ ID NO: 65990 - DNA, 25 bp, Homo sapien
gcatcatcatggagttagtgaggcg

SEQ ID NO: 65991 - DNA, 25 bp, Homo sapien
ggcgctccacaatgggacactgagc

SEQ ID NO: 65992 - DNA, 25 bp, Homo sapien
gatctcgaaggcatgcttgacgatg

SEQ ID NO: 65993 - DNA, 25 bp, Homo sapien
cgtgagcaggtgtatgatctcgaag

SEQ ID NO: 65994 - DNA, 25 bp, Homo sapien
tcagcaatggtcttaatgttccgga

SEQ ID NO: 65995 - DNA, 25 bp, Homo sapien
ggaaagcgtttgcggcataccgccc

SEQ ID NO: 65996 - DNA, 25 bp, Homo sapien
gacactgagctttgcggaaagcgtt

SEQ ID NO: 65997 - DNA, 25 bp, Homo sapien
gggaccactgttgatgatggcgttc

SEQ ID NO: 65998 - DNA, 25 bp, Homo sapien
ataccgccctgcactgtgagggagg

SEQ ID NO: 65999 - DNA, 25 bp, Homo sapien
agctggaaaatcagcggttggactt

SEQ ID NO: 66000 - DNA, 25 bp, Homo sapien
ttcttgccgttgttgcggccgtgca

SEQ ID NO: 66001 - DNA, 25 bp, Homo sapien
gcatcatcatggagttagtgaggcg

SEQ ID NO: 66002 - DNA, 25 bp, Homo sapien
ggcgctccacaatgggacactgagc

SEQ ID NO: 66003 - DNA, 25 bp, Homo sapien
gatctcgaaggcatgcttgacgatg

SEQ ID NO: 66004 - DNA, 25 bp, Homo sapien
cgtgagcaggtgtatgatctcgaag

SEQ ID NO: 66005 - DNA, 25 bp, Homo sapien
tcagcaatggtcttaatgttccgga

SEQ ID NO: 66006 - DNA, 25 bp, Homo sapien
ggaaagcgtttgcggcataccgccc

SEQ ID NO: 66007 - DNA, 25 bp, Homo sapien
gacactgagctttgcggaaagcgtt

SEQ ID NO: 66008 - DNA, 25 bp, Homo sapien
gggaccactgttgatgatggcgttc

SEQ ID NO: 66009 - DNA, 25 bp, Homo sapien
ataccgccctgcactgtgagggagg

SEQ ID NO: 66010 - DNA, 25 bp, Homo sapien
agctggaaaatcagcggttggactt

SEQ ID NO: 66011 - DNA, 25 bp, Homo sapien
ttcttgccgttgttgcggccgtgca

SEQ ID NO: 66012 - DNA, 25 bp, Homo sapien
ggcgctccacaatgggacactgagc

SEQ ID NO: 66013 - DNA, 25 bp, Homo sapien
gcatcatcatggagttagtgaggcg

SEQ ID NO: 66014 - DNA, 25 bp, Homo sapien
gatctcgaaggcatgcttgacgatg

SEQ ID NO: 66015 - DNA, 25 bp, Homo sapien
cgtgagcaggtgtatgatctcgaag

SEQ ID NO: 66016 - DNA, 25 bp, Homo sapien
tcagcaatggtcttaatgttccgga

SEQ ID NO: 66017 - DNA, 25 bp, Homo sapien
ggaaagcgtttgcggcataccgccc

SEQ ID NO: 66018 - DNA, 25 bp, Homo sapien
gacactgagctttgcggaaagcgtt

SEQ ID NO: 66019 - DNA, 25 bp, Homo sapien
gggaccactgttgatgatggcgttc

SEQ ID NO: 66020 - DNA, 25 bp, Homo sapien
ataccgccctgcactgtgagggagg

SEQ ID NO: 66021 - DNA, 25 bp, Homo sapien
agctggaaaatcagcggttggactt

SEQ ID NO: 66022 - DNA, 25 bp, Homo sapien
ttcttgccgttgttgcggccgtgca

SEQ ID NO: 66023 - DNA, 25 bp, Homo sapien
gcatcatcatggagttagtgaggcg

SEQ ID NO: 66024 - DNA, 25 bp, Homo sapien
ggcgctccacaatgggacactgagc

SEQ ID NO: 66025 - DNA, 25 bp, Homo sapien
gatctcgaaggcatgcttgacgatg

SEQ ID NO: 66026 - DNA, 25 bp, Homo sapien
tcagcaatggtcttaatgttccgga

SEQ ID NO: 66027 - DNA, 25 bp, Homo sapien
cgtgagcaggtgtatgatctcgaag

SEQ ID NO: 66028 - DNA, 25 bp, Homo sapien
ggaaagcgtttgcggcataccgccc

SEQ ID NO: 66029 - DNA, 25 bp, Homo sapien
gacactgagctttgcggaaagcgtt

SEQ ID NO: 66030 - DNA, 25 bp, Homo sapien
gggaccactgttgatgatggcgttc

SEQ ID NO: 66031 - DNA, 25 bp, Homo sapien
ataccgccctgcactgtgagggagg

SEQ ID NO: 66032 - DNA, 25 bp, Homo sapien
agctggaaaatcagcggttggactt

SEQ ID NO: 66033 - DNA, 25 bp, Homo sapien
ttcttgccgttgttgcggccgtgca

SEQ ID NO: 66034 - DNA, 25 bp, Homo sapien
ggcgctccacaatgggacactgagc

SEQ ID NO: 66035 - DNA, 25 bp, Homo sapien
gcatcatcatggagttagtgaggcg

SEQ ID NO: 66036 - DNA, 25 bp, Homo sapien
gatctcgaaggcatgcttgacgatg

SEQ ID NO: 66037 - DNA, 25 bp, Homo sapien
tcagcaatggtcttaatgttccgga

SEQ ID NO: 66038 - DNA, 25 bp, Homo sapien
cgtgagcaggtgtatgatctcgaag

SEQ ID NO: 66039 - DNA, 25 bp, Homo sapien
gcatcatcatggagttagtgaggcg

SEQ ID NO: 66040 - DNA, 25 bp, Homo sapien
ggaaagcgtttgcggcataccgccc

SEQ ID NO: 66041 - DNA, 25 bp, Homo sapien
gacactgagctttgcggaaagcgtt

SEQ ID NO: 66042 - DNA, 25 bp, Homo sapien
gggaccactgttgatgatggcgttc

SEQ ID NO: 66043 - DNA, 25 bp, Homo sapien
ataccgccctgcactgtgagggagg

SEQ ID NO: 66044 - DNA, 25 bp, Homo sapien
agctggaaaatcagcggttggactt

SEQ ID NO: 66045 - DNA, 25 bp, Homo sapien
ttcttgccgttgttgcggccgtgca

SEQ ID NO: 66046 - DNA, 25 bp, Homo sapien
ggcgctccacaatgggacactgagc

SEQ ID NO: 66047 - DNA, 25 bp, Homo sapien
gatctcgaaggcatgcttgacgatg

SEQ ID NO: 66048 - DNA, 25 bp, Homo sapien
cgtgagcaggtgtatgatctcgaag

SEQ ID NO: 66049 - DNA, 25 bp, Homo sapien
tcagcaatggtcttaatgttccgga

SEQ ID NO: 66050 - DNA, 25 bp, Homo sapien
gacactgagctttgcggaaagcgtt

SEQ ID NO: 66051 - DNA, 25 bp, Homo sapien
gggaccactgttgatgatggcgttc

SEQ ID NO: 66052 - DNA, 25 bp, Homo sapien
ataccgccctgcactgtgagggagg

SEQ ID NO: 66053 - DNA, 25 bp, Homo sapien
agctggaaaatcagcggttggactt

SEQ ID NO: 66054 - DNA, 25 bp, Homo sapien
ttcttgccgttgttgcggccgtgca

SEQ ID NO: 66055 - DNA, 25 bp, Homo sapien
ggcgctccacaatgggacactgagc

SEQ ID NO: 66056 - DNA, 25 bp, Homo sapien
gcatcatcatggagttagtgaggcg

SEQ ID NO: 66057 - DNA, 25 bp, Homo sapien
gatctcgaaggcatgcttgacgatg

SEQ ID NO: 66058 - DNA, 25 bp, Homo sapien
cgtgagcaggtgtatgatctcgaag

SEQ ID NO: 66059 - DNA, 25 bp, Homo sapien
tcagcaatggtcttaatgttccgga

SEQ ID NO: 66060 - DNA, 25 bp, Homo sapien
ggaaagcgtttgcggcataccgccc

SEQ ID NO: 66061 - DNA, 25 bp, Homo sapien
ggaaagcgtttgcggcataccgccc

SEQ ID NO: 66062 - DNA, 25 bp, Homo sapien
gacactgagctttgcggaaagcgtt

SEQ ID NO: 66063 - DNA, 25 bp, Homo sapien
gggaccactgttgatgatggcgttc

SEQ ID NO: 66064 - DNA, 25 bp, Homo sapien
ataccgccctgcactgtgagggagg

SEQ ID NO: 66065 - DNA, 25 bp, Homo sapien
gcatcatcatggagttagtgaggcg

SEQ ID NO: 66066 - DNA, 25 bp, Homo sapien
agctggaaaatcagcggttggactt

SEQ ID NO: 66067 - DNA, 25 bp, Homo sapien
ttcttgccgttgttgcggccgtgca

SEQ ID NO: 66068 - DNA, 25 bp, Homo sapien
ggcgctccacaatgggacactgagc

SEQ ID NO: 66069 - DNA, 25 bp, Homo sapien
gatctcgaaggcatgcttgacgatg

SEQ ID NO: 66070 - DNA, 25 bp, Homo sapien
tcagcaatggtcttaatgttccgga

SEQ ID NO: 66071 - DNA, 25 bp, Homo sapien
cgtgagcaggtgtatgatctcgaag

SEQ ID NO: 66072 - DNA, 25 bp, Homo sapien
ggaaagcgtttgcggcataccgccc

SEQ ID NO: 66073 - DNA, 25 bp, Homo sapien
gacactgagctttgcggaaagcgtt

SEQ ID NO: 66074 - DNA, 25 bp, Homo sapien
gggaccactgttgatgatggcgttc

SEQ ID NO: 66075 - DNA, 25 bp, Homo sapien
ataccgccctgcactgtgagggagg

SEQ ID NO: 66076 - DNA, 25 bp, Homo sapien
agctggaaaatcagcggttggactt

SEQ ID NO: 66077 - DNA, 25 bp, Homo sapien
ggcgctccacaatgggacactgagc

SEQ ID NO: 66078 - DNA, 25 bp, Homo sapien
ttcttgccgttgttgcggccgtgca

SEQ ID NO: 66079 - DNA, 25 bp, Homo sapien
gcatcatcatggagttagtgaggcg

SEQ ID NO: 66080 - DNA, 25 bp, Homo sapien
gatctcgaaggcatgcttgacgatg

SEQ ID NO: 66081 - DNA, 25 bp, Homo sapien
tcagcaatggtcttaatgttccgga

SEQ ID NO: 66082 - DNA, 25 bp, Homo sapien
cgtgagcaggtgtatgatctcgaag

SEQ ID NO: 66083 - DNA, 25 bp, Homo sapien
tcagcaatggtcttaatgttccgga

SEQ ID NO: 66084 - DNA, 25 bp, Homo sapien
ggcgctccacaatgggacactgagc

SEQ ID NO: 66085 - DNA, 25 bp, Homo sapien
gggaccactgttgatgatggcgttc

SEQ ID NO: 66086 - DNA, 25 bp, Homo sapien
agctggaaaatcagcggttggactt

SEQ ID NO: 66087 - DNA, 25 bp, Homo sapien
gcatcatcatggagttagtgaggcg

SEQ ID NO: 66088 - DNA, 25 bp, Homo sapien
ggaaagcgtttgcggcataccgccc

SEQ ID NO: 66089 - DNA, 25 bp, Homo sapien
gacactgagctttgcggaaagcgtt

SEQ ID NO: 66090 - DNA, 25 bp, Homo sapien
ataccgccctgcactgtgagggagg

SEQ ID NO: 66091 - DNA, 25 bp, Homo sapien
gatctcgaaggcatgcttgacgatg

SEQ ID NO: 66092 - DNA, 25 bp, Homo sapien
cgtgagcaggtgtatgatctcgaag

SEQ ID NO: 66093 - DNA, 25 bp, Homo sapien
ttcttgccgttgttgcggccgtgca

SEQ ID NO: 66094 - DNA, 25 bp, Homo sapien
gcatcatcatggagttagtgaggcg

SEQ ID NO: 66095 - DNA, 25 bp, Homo sapien
ggaaagcgtttgcggcataccgccc

SEQ ID NO: 66096 - DNA, 25 bp, Homo sapien
gacactgagctttgcggaaagcgtt

SEQ ID NO: 66097 - DNA, 25 bp, Homo sapien
gggaccactgttgatgatggcgttc

SEQ ID NO: 66098 - DNA, 25 bp, Homo sapien
ataccgccctgcactgtgagggagg

SEQ ID NO: 66099 - DNA, 25 bp, Homo sapien
agctggaaaatcagcggttggactt

SEQ ID NO: 66100 - DNA, 25 bp, Homo sapien
ttcttgccgttgttgcggccgtgca

SEQ ID NO: 66101 - DNA, 25 bp, Homo sapien
ggcgctccacaatgggacactgagc

SEQ ID NO: 66102 - DNA, 25 bp, Homo sapien
gatctcgaaggcatgcttgacgatg

SEQ ID NO: 66103 - DNA, 25 bp, Homo sapien
cgtgagcaggtgtatgatctcgaag

SEQ ID NO: 66104 - DNA, 25 bp, Homo sapien
tcagcaatggtcttaatgttccgga

SEQ ID NO: 66105 - DNA, 25 bp, Homo sapien
ataccgccctgcactgtgagggagg

SEQ ID NO: 66106 - DNA, 25 bp, Homo sapien
ggaaagcgtttgcggcataccgccc

SEQ ID NO: 66107 - DNA, 25 bp, Homo sapien
gacactgagctttgcggaaagcgtt

SEQ ID NO: 66108 - DNA, 25 bp, Homo sapien
ggcgctccacaatgggacactgagc

SEQ ID NO: 66109 - DNA, 25 bp, Homo sapien
gcatcatcatggagttagtgaggcg

SEQ ID NO: 66110 - DNA, 25 bp, Homo sapien
ttcttgccgttgttgcggccgtgca

SEQ ID NO: 66111 - DNA, 25 bp, Homo sapien
gatctcgaaggcatgcttgacgatg

SEQ ID NO: 66112 - DNA, 25 bp, Homo sapien
cgtgagcaggtgtatgatctcgaag

SEQ ID NO: 66113 - DNA, 25 bp, Homo sapien
gggaccactgttgatgatggcgttc

SEQ ID NO: 66114 - DNA, 25 bp, Homo sapien
tcagcaatggtcttaatgttccgga

SEQ ID NO: 66115 - DNA, 25 bp, Homo sapien
agctggaaaatcagcggttggactt

SEQ ID NO: 66116 - DNA, 25 bp, Homo sapien
gctcagtgtcccattgtggagcgcc

SEQ ID NO: 66117 - DNA, 25 bp, Homo sapien
tccggaacattaagaccattgctga

SEQ ID NO: 66118 - DNA, 25 bp, Homo sapien
cctccctcacagtgcagggcggtat

SEQ ID NO: 66119 - DNA, 25 bp, Homo sapien
gaacgccatcatcaacagtggtccc

SEQ ID NO: 66120 - DNA, 25 bp, Homo sapien
aagtccaaccgctgattttccagct

SEQ ID NO: 66121 - DNA, 25 bp, Homo sapien
catcgtcaagcatgccttcgagatc

SEQ ID NO: 66122 - DNA, 25 bp, Homo sapien
tgcacggccgcaacaacggcaagaa

SEQ ID NO: 66123 - DNA, 25 bp, Homo sapien
aacgctttccgcaaagctcagtgtc

SEQ ID NO: 66124 - DNA, 25 bp, Homo sapien
gggcggtatgccgcaaacgctttcc

SEQ ID NO: 66125 - DNA, 25 bp, Homo sapien
cttcgagatcatacacctgctcacg

SEQ ID NO: 66126 - DNA, 25 bp, Homo sapien
cgcctcactaactccatgatgatgc

SEQ ID NO: 66127 - DNA, 25 bp, Homo sapien
ggaaagcgtttgcggcataccgccc

SEQ ID NO: 66128 - DNA, 25 bp, Homo sapien
gacactgagctttgcggaaagcgtt

SEQ ID NO: 66129 - DNA, 25 bp, Homo sapien
gggaccactgttgatgatggcgttc

SEQ ID NO: 66130 - DNA, 25 bp, Homo sapien
ataccgccctgcactgtgagggagg

SEQ ID NO: 66131 - DNA, 25 bp, Homo sapien
agctggaaaatcagcggttggactt

SEQ ID NO: 66132 - DNA, 25 bp, Homo sapien
ttcttgccgttgttgcggccgtgca

SEQ ID NO: 66133 - DNA, 25 bp, Homo sapien
gcatcatcatggagttagtgaggcg

SEQ ID NO: 66134 - DNA, 25 bp, Homo sapien
ggcgctccacaatgggacactgagc

SEQ ID NO: 66135 - DNA, 25 bp, Homo sapien
gatctcgaaggcatgcttgacgatg

SEQ ID NO: 66136 - DNA, 25 bp, Homo sapien
cgtgagcaggtgtatgatctcgaag

SEQ ID NO: 66137 - DNA, 25 bp, Homo sapien
tcagcaatggtcttaatgttccgga

SEQ ID NO: 66138 - DNA, 25 bp, Homo sapien
cgtgagcaggtgtatgatctcgaag

SEQ ID NO: 66139 - DNA, 25 bp, Homo sapien
ggcgctccacaatgggacactgagc

SEQ ID NO: 66140 - DNA, 25 bp, Homo sapien
ataccgccctgcactgtgagggagg

SEQ ID NO: 66141 - DNA, 25 bp, Homo sapien
gatctcgaaggcatgcttgacgatg

SEQ ID NO: 66142 - DNA, 25 bp, Homo sapien
ttcttgccgttgttgcggccgtgca

SEQ ID NO: 66143 - DNA, 25 bp, Homo sapien
tcagcaatggtcttaatgttccgga

SEQ ID NO: 66144 - DNA, 25 bp, Homo sapien
gggaccactgttgatgatggcgttc

SEQ ID NO: 66145 - DNA, 25 bp, Homo sapien
gacactgagctttgcggaaagcgtt

SEQ ID NO: 66146 - DNA, 25 bp, Homo sapien
ggaaagcgtttgcggcataccgccc

SEQ ID NO: 66147 - DNA, 25 bp, Homo sapien
gcatcatcatggagttagtgaggcg

SEQ ID NO: 66148 - DNA, 25 bp, Homo sapien
agctggaaaatcagcggttggactt

SEQ ID NO: 66149 - DNA, 25 bp, Homo sapien
ataccgccctgcactgtgagggagg

SEQ ID NO: 66150 - DNA, 25 bp, Homo sapien
ggaaagcgtttgcggcataccgccc

SEQ ID NO: 66151 - DNA, 25 bp, Homo sapien
gacactgagctttgcggaaagcgtt

SEQ ID NO: 66152 - DNA, 25 bp, Homo sapien
ggcgctccacaatgggacactgagc

SEQ ID NO: 66153 - DNA, 25 bp, Homo sapien
gcatcatcatggagttagtgaggcg

SEQ ID NO: 66154 - DNA, 25 bp, Homo sapien
ttcttgccgttgttgcggccgtgca

SEQ ID NO: 66155 - DNA, 25 bp, Homo sapien
gatctcgaaggcatgcttgacgatg

SEQ ID NO: 66156 - DNA, 25 bp, Homo sapien
cgtgagcaggtgtatgatctcgaag

SEQ ID NO: 66157 - DNA, 25 bp, Homo sapien
gggaccactgttgatgatggcgttc

SEQ ID NO: 66158 - DNA, 25 bp, Homo sapien
tcagcaatggtcttaatgttccgga

SEQ ID NO: 66159 - DNA, 25 bp, Homo sapien
agctggaaaatcagcggttggactt

SEQ ID NO: 66160 - DNA, 25 bp, Homo sapien
ataccgccctgcactgtgagggagg

SEQ ID NO: 66161 - DNA, 25 bp, Homo sapien
ggaaagcgtttgcggcataccgccc

SEQ ID NO: 66162 - DNA, 25 bp, Homo sapien
cgtgagcaggtgtatgatctcgaag

SEQ ID NO: 66163 - DNA, 25 bp, Homo sapien
agctggaaaatcagcggttggactt

SEQ ID NO: 66164 - DNA, 25 bp, Homo sapien
ttcttgccgttgttgcggccgtgca

SEQ ID NO: 66165 - DNA, 25 bp, Homo sapien
tcagcaatggtcttaatgttccgga

SEQ ID NO: 66166 - DNA, 25 bp, Homo sapien
ggcgctccacaatgggacactgagc

SEQ ID NO: 66167 - DNA, 25 bp, Homo sapien
gcatcatcatggagttagtgaggcg

SEQ ID NO: 66168 - DNA, 25 bp, Homo sapien
gatctcgaaggcatgcttgacgatg

SEQ ID NO: 66169 - DNA, 25 bp, Homo sapien
gacactgagctttgcggaaagcgtt

SEQ ID NO: 66170 - DNA, 25 bp, Homo sapien
gggaccactgttgatgatggcgttc

SEQ ID NO: 66171 - DNA, 25 bp, Homo sapien
ataccgccctgcactgtgagggagg

SEQ ID NO: 66172 - DNA, 25 bp, Homo sapien
ggaaagcgtttgcggcataccgccc

SEQ ID NO: 66173 - DNA, 25 bp, Homo sapien
gacactgagctttgcggaaagcgtt

SEQ ID NO: 66174 - DNA, 25 bp, Homo sapien
ggcgctccacaatgggacactgagc

SEQ ID NO: 66175 - DNA, 25 bp, Homo sapien
gcatcatcatggagttagtgaggcg

SEQ ID NO: 66176 - DNA, 25 bp, Homo sapien
ttcttgccgttgttgcggccgtgca

SEQ ID NO: 66177 - DNA, 25 bp, Homo sapien
gatctcgaaggcatgcttgacgatg

SEQ ID NO: 66178 - DNA, 25 bp, Homo sapien
cgtgagcaggtgtatgatctcgaag

SEQ ID NO: 66179 - DNA, 25 bp, Homo sapien
gggaccactgttgatgatggcgttc

SEQ ID NO: 66180 - DNA, 25 bp, Homo sapien
tcagcaatggtcttaatgttccgga

SEQ ID NO: 66181 - DNA, 25 bp, Homo sapien
agctggaaaatcagcggttggactt

SEQ ID NO: 66182 - DNA, 25 bp, Homo sapien
gcatcatcatggagttagtgaggcg

SEQ ID NO: 66183 - DNA, 25 bp, Homo sapien
ataccgccctgcactgtgagggagg

SEQ ID NO: 66184 - DNA, 25 bp, Homo sapien
gatctcgaaggcatgcttgacgatg

SEQ ID NO: 66185 - DNA, 25 bp, Homo sapien
ggcgctccacaatgggacactgagc

SEQ ID NO: 66186 - DNA, 25 bp, Homo sapien
gacactgagctttgcggaaagcgtt

SEQ ID NO: 66187 - DNA, 25 bp, Homo sapien
cgtgagcaggtgtatgatctcgaag

SEQ ID NO: 66188 - DNA, 25 bp, Homo sapien
agctggaaaatcagcggttggactt

SEQ ID NO: 66189 - DNA, 25 bp, Homo sapien
tcagcaatggtcttaatgttccgga

SEQ ID NO: 66190 - DNA, 25 bp, Homo sapien
ttcttgccgttgttgcggccgtgca

SEQ ID NO: 66191 - DNA, 25 bp, Homo sapien
gggaccactgttgatgatggcgttc

SEQ ID NO: 66192 - DNA, 25 bp, Homo sapien
ggaaagcgtttgcggcataccgccc

SEQ ID NO: 66193 - DNA, 25 bp, Homo sapien
ataccgccctgcactgtgagggagg

SEQ ID NO: 66194 - DNA, 25 bp, Homo sapien
ggaaagcgtttgcggcataccgccc

SEQ ID NO: 66195 - DNA, 25 bp, Homo sapien
gacactgagctttgcggaaagcgtt

SEQ ID NO: 66196 - DNA, 25 bp, Homo sapien
ggcgctccacaatgggacactgagc

SEQ ID NO: 66197 - DNA, 25 bp, Homo sapien
gcatcatcatggagttagtgaggcg

SEQ ID NO: 66198 - DNA, 25 bp, Homo sapien
ttcttgccgttgttgcggccgtgca

SEQ ID NO: 66199 - DNA, 25 bp, Homo sapien
gatctcgaaggcatgcttgacgatg

SEQ ID NO: 66200 - DNA, 25 bp, Homo sapien
cgtgagcaggtgtatgatctcgaag

SEQ ID NO: 66201 - DNA, 25 bp, Homo sapien
gggaccactgttgatgatggcgttc

SEQ ID NO: 66202 - DNA, 25 bp, Homo sapien
tcagcaatggtcttaatgttccgga

SEQ ID NO: 66203 - DNA, 25 bp, Homo sapien
agctggaaaatcagcggttggactt

SEQ ID NO: 66204 - DNA, 25 bp, Homo sapien
ataccgccctgcactgtgagggagg

SEQ ID NO: 66205 - DNA, 25 bp, Homo sapien
ggaaagcgtttgcggcataccgccc

SEQ ID NO: 66206 - DNA, 25 bp, Homo sapien
gacactgagctttgcggaaagcgtt

SEQ ID NO: 66207 - DNA, 25 bp, Homo sapien
ggcgctccacaatgggacactgagc

SEQ ID NO: 66208 - DNA, 25 bp, Homo sapien
gcatcatcatggagttagtgaggcg

SEQ ID NO: 66209 - DNA, 25 bp, Homo sapien
ttcttgccgttgttgcggccgtgca

SEQ ID NO: 66210 - DNA, 25 bp, Homo sapien
gatctcgaaggcatgcttgacgatg

SEQ ID NO: 66211 - DNA, 25 bp, Homo sapien
cgtgagcaggtgtatgatctcgaag

SEQ ID NO: 66212 - DNA, 25 bp, Homo sapien
gggaccactgttgatgatggcgttc

SEQ ID NO: 66213 - DNA, 25 bp, Homo sapien
tcagcaatggtcttaatgttccgga

SEQ ID NO: 66214 - DNA, 25 bp, Homo sapien
agctggaaaatcagcggttggactt

SEQ ID NO: 66215 - DNA, 25 bp, Homo sapien
gggaccactgttgatgatggcgttc

SEQ ID NO: 66216 - DNA, 25 bp, Homo sapien
gacactgagctttgcggaaagcgtt

SEQ ID NO: 66217 - DNA, 25 bp, Homo sapien
ataccgccctgcactgtgagggagg

SEQ ID NO: 66218 - DNA, 25 bp, Homo sapien
ggcgctccacaatgggacactgagc

SEQ ID NO: 66219 - DNA, 25 bp, Homo sapien
agctggaaaatcagcggttggactt

SEQ ID NO: 66220 - DNA, 25 bp, Homo sapien
ttcttgccgttgttgcggccgtgca

SEQ ID NO: 66221 - DNA, 25 bp, Homo sapien
gatctcgaaggcatgcttgacgatg

SEQ ID NO: 66222 - DNA, 25 bp, Homo sapien
cgtgagcaggtgtatgatctcgaag

SEQ ID NO: 66223 - DNA, 25 bp, Homo sapien
gcatcatcatggagttagtgaggcg

SEQ ID NO: 66224 - DNA, 25 bp, Homo sapien
tcagcaatggtcttaatgttccgga

SEQ ID NO: 66225 - DNA, 25 bp, Homo sapien
ggaaagcgtttgcggcataccgccc

SEQ ID NO: 66226 - DNA, 25 bp, Homo sapien
ataccgccctgcactgtgagggagg

SEQ ID NO: 66227 - DNA, 25 bp, Homo sapien
ggaaagcgtttgcggcataccgccc

SEQ ID NO: 66228 - DNA, 25 bp, Homo sapien
gacactgagctttgcggaaagcgtt

SEQ ID NO: 66229 - DNA, 25 bp, Homo sapien
ggcgctccacaatgggacactgagc

SEQ ID NO: 66230 - DNA, 25 bp, Homo sapien
gcatcatcatggagttagtgaggcg

SEQ ID NO: 66231 - DNA, 25 bp, Homo sapien
ttcttgccgttgttgcggccgtgca

SEQ ID NO: 66232 - DNA, 25 bp, Homo sapien
gatctcgaaggcatgcttgacgatg

SEQ ID NO: 66233 - DNA, 25 bp, Homo sapien
cgtgagcaggtgtatgatctcgaag

SEQ ID NO: 66234 - DNA, 25 bp, Homo sapien
gggaccactgttgatgatggcgttc

SEQ ID NO: 66235 - DNA, 25 bp, Homo sapien
tcagcaatggtcttaatgttccgga

SEQ ID NO: 66236 - DNA, 25 bp, Homo sapien
agctggaaaatcagcggttggactt

SEQ ID NO: 66237 - DNA, 25 bp, Homo sapien
ggaaagcgtttgcggcataccgccc

SEQ ID NO: 66238 - DNA, 25 bp, Homo sapien
cgtgagcaggtgtatgatctcgaag

SEQ ID NO: 66239 - DNA, 25 bp, Homo sapien
gatctcgaaggcatgcttgacgatg

SEQ ID NO: 66240 - DNA, 25 bp, Homo sapien
tcagcaatggtcttaatgttccgga

SEQ ID NO: 66241 - DNA, 25 bp, Homo sapien
gggaccactgttgatgatggcgttc

SEQ ID NO: 66242 - DNA, 25 bp, Homo sapien
agctggaaaatcagcggttggactt

SEQ ID NO: 66243 - DNA, 25 bp, Homo sapien
ttcttgccgttgttgcggccgtgca

SEQ ID NO: 66244 - DNA, 25 bp, Homo sapien
ggcgctccacaatgggacactgagc

SEQ ID NO: 66245 - DNA, 25 bp, Homo sapien
gcatcatcatggagttagtgaggcg

SEQ ID NO: 66246 - DNA, 25 bp, Homo sapien
gacactgagctttgcggaaagcgtt

SEQ ID NO: 66247 - DNA, 25 bp, Homo sapien
ataccgccctgcactgtgagggagg

SEQ ID NO: 66248 - DNA, 25 bp, Homo sapien
ataccgccctgcactgtgagggagg

SEQ ID NO: 66249 - DNA, 25 bp, Homo sapien
ggaaagcgtttgcggcataccgccc

SEQ ID NO: 66250 - DNA, 25 bp, Homo sapien
gacactgagctttgcggaaagcgtt

SEQ ID NO: 66251 - DNA, 25 bp, Homo sapien
ggcgctccacaatgggacactgagc

SEQ ID NO: 66252 - DNA, 25 bp, Homo sapien
gcatcatcatggagttagtgaggcg

SEQ ID NO: 66253 - DNA, 25 bp, Homo sapien
ttcttgccgttgttgcggccgtgca

SEQ ID NO: 66254 - DNA, 25 bp, Homo sapien
gatctcgaaggcatgcttgacgatg

SEQ ID NO: 66255 - DNA, 25 bp, Homo sapien
cgtgagcaggtgtatgatctcgaag

SEQ ID NO: 66256 - DNA, 25 bp, Homo sapien
gggaccactgttgatgatggcgttc

SEQ ID NO: 66257 - DNA, 25 bp, Homo sapien
tcagcaatggtcttaatgttccgga

SEQ ID NO: 66258 - DNA, 25 bp, Homo sapien
agctggaaaatcagcggttggactt

SEQ ID NO: 66259 - DNA, 25 bp, Homo sapien
cgtgagcaggtgtatgatctcgaag

SEQ ID NO: 66260 - DNA, 25 bp, Homo sapien
gcatcatcatggagttagtgaggcg

SEQ ID NO: 66261 - DNA, 25 bp, Homo sapien
ttcttgccgttgttgcggccgtgca

SEQ ID NO: 66262 - DNA, 25 bp, Homo sapien
gatctcgaaggcatgcttgacgatg

SEQ ID NO: 66263 - DNA, 25 bp, Homo sapien
tcagcaatggtcttaatgttccgga

SEQ ID NO: 66264 - DNA, 25 bp, Homo sapien
ataccgccctgcactgtgagggagg

SEQ ID NO: 66265 - DNA, 25 bp, Homo sapien
ggaaagcgtttgcggcataccgccc

SEQ ID NO: 66266 - DNA, 25 bp, Homo sapien
gacactgagctttgcggaaagcgtt

SEQ ID NO: 66267 - DNA, 25 bp, Homo sapien
ggcgctccacaatgggacactgagc

SEQ ID NO: 66268 - DNA, 25 bp, Homo sapien
agctggaaaatcagcggttggactt

SEQ ID NO: 66269 - DNA, 25 bp, Homo sapien
gggaccactgttgatgatggcgttc

SEQ ID NO: 66270 - DNA, 25 bp, Homo sapien
ataccgccctgcactgtgagggagg

SEQ ID NO: 66271 - DNA, 25 bp, Homo sapien
ggaaagcgtttgcggcataccgccc

SEQ ID NO: 66272 - DNA, 25 bp, Homo sapien
gacactgagctttgcggaaagcgtt

SEQ ID NO: 66273 - DNA, 25 bp, Homo sapien
ggcgctccacaatgggacactgagc

SEQ ID NO: 66274 - DNA, 25 bp, Homo sapien
gcatcatcatggagttagtgaggcg

SEQ ID NO: 66275 - DNA, 25 bp, Homo sapien
ttcttgccgttgttgcggccgtgca

SEQ ID NO: 66276 - DNA, 25 bp, Homo sapien
gatctcgaaggcatgcttgacgatg

SEQ ID NO: 66277 - DNA, 25 bp, Homo sapien
cgtgagcaggtgtatgatctcgaag

SEQ ID NO: 66278 - DNA, 25 bp, Homo sapien
gggaccactgttgatgatggcgttc

SEQ ID NO: 66279 - DNA, 25 bp, Homo sapien
tcagcaatggtcttaatgttccgga

SEQ ID NO: 66280 - DNA, 25 bp, Homo sapien
agctggaaaatcagcggttggactt

SEQ ID NO: 66281 - DNA, 25 bp, Homo sapien
ggaaagcgtttgcggcataccgccc

SEQ ID NO: 66282 - DNA, 25 bp, Homo sapien
gcatcatcatggagttagtgaggcg

SEQ ID NO: 66283 - DNA, 25 bp, Homo sapien
agctggaaaatcagcggttggactt

SEQ ID NO: 66284 - DNA, 25 bp, Homo sapien
gggaccactgttgatgatggcgttc

SEQ ID NO: 66285 - DNA, 25 bp, Homo sapien
ggcgctccacaatgggacactgagc

SEQ ID NO: 66286 - DNA, 25 bp, Homo sapien
ataccgccctgcactgtgagggagg

SEQ ID NO: 66287 - DNA, 25 bp, Homo sapien
gacactgagctttgcggaaagcgtt

SEQ ID NO: 66288 - DNA, 25 bp, Homo sapien
cgtgagcaggtgtatgatctcgaag

SEQ ID NO: 66289 - DNA, 25 bp, Homo sapien
gatctcgaaggcatgcttgacgatg

SEQ ID NO: 66290 - DNA, 25 bp, Homo sapien
tcagcaatggtcttaatgttccgga

SEQ ID NO: 66291 - DNA, 25 bp, Homo sapien
ttcttgccgttgttgcggccgtgca

SEQ ID NO: 66292 - DNA, 25 bp, Homo sapien
ataccgccctgcactgtgagggagg

SEQ ID NO: 66293 - DNA, 25 bp, Homo sapien
ggaaagcgtttgcggcataccgccc

SEQ ID NO: 66294 - DNA, 25 bp, Homo sapien
gacactgagctttgcggaaagcgtt

SEQ ID NO: 66295 - DNA, 25 bp, Homo sapien
ggcgctccacaatgggacactgagc

SEQ ID NO: 66296 - DNA, 25 bp, Homo sapien
gcatcatcatggagttagtgaggcg

SEQ ID NO: 66297 - DNA, 25 bp, Homo sapien
ttcttgccgttgttgcggccgtgca

SEQ ID NO: 66298 - DNA, 25 bp, Homo sapien
gatctcgaaggcatgcttgacgatg

SEQ ID NO: 66299 - DNA, 25 bp, Homo sapien
cgtgagcaggtgtatgatctcgaag

SEQ ID NO: 66300 - DNA, 25 bp, Homo sapien
gggaccactgttgatgatggcgttc

SEQ ID NO: 66301 - DNA, 25 bp, Homo sapien
tcagcaatggtcttaatgttccgga

SEQ ID NO: 66302 - DNA, 25 bp, Homo sapien
agctggaaaatcagcggttggactt

SEQ ID NO: 66303 - DNA, 25 bp, Homo sapien
gatctcgaaggcatgcttgacgatg

SEQ ID NO: 66304 - DNA, 25 bp, Homo sapien
ataccgccctgcactgtgagggagg

SEQ ID NO: 66305 - DNA, 25 bp, Homo sapien
cgtgagcaggtgtatgatctcgaag

SEQ ID NO: 66306 - DNA, 25 bp, Homo sapien
ggaaagcgtttgcggcataccgccc

SEQ ID NO: 66307 - DNA, 25 bp, Homo sapien
gggaccactgttgatgatggcgttc

SEQ ID NO: 66308 - DNA, 25 bp, Homo sapien
agctggaaaatcagcggttggactt

SEQ ID NO: 66309 - DNA, 25 bp, Homo sapien
gacactgagctttgcggaaagcgtt

SEQ ID NO: 66310 - DNA, 25 bp, Homo sapien
tcagcaatggtcttaatgttccgga

SEQ ID NO: 66311 - DNA, 25 bp, Homo sapien
ttcttgccgttgttgcggccgtgca

SEQ ID NO: 66312 - DNA, 25 bp, Homo sapien
gcatcatcatggagttagtgaggcg

SEQ ID NO: 66313 - DNA, 25 bp, Homo sapien
ggcgctccacaatgggacactgagc

SEQ ID NO: 66314 - DNA, 25 bp, Homo sapien
gggaccactgttgatgatggcgttc

SEQ ID NO: 66315 - DNA, 25 bp, Homo sapien
gacactgagctttgcggaaagcgtt

SEQ ID NO: 66316 - DNA, 25 bp, Homo sapien
gatctcgaaggcatgcttgacgatg

SEQ ID NO: 66317 - DNA, 25 bp, Homo sapien
agctggaaaatcagcggttggactt

SEQ ID NO: 66318 - DNA, 25 bp, Homo sapien
gcatcatcatggagttagtgaggcg

SEQ ID NO: 66319 - DNA, 25 bp, Homo sapien
tcagcaatggtcttaatgttccgga

SEQ ID NO: 66320 - DNA, 25 bp, Homo sapien
cgtgagcaggtgtatgatctcgaag

SEQ ID NO: 66321 - DNA, 25 bp, Homo sapien
ggaaagcgtttgcggcataccgccc

SEQ ID NO: 66322 - DNA, 25 bp, Homo sapien
ggcgctccacaatgggacactgagc

SEQ ID NO: 66323 - DNA, 25 bp, Homo sapien
ataccgccctgcactgtgagggagg

SEQ ID NO: 66324 - DNA, 25 bp, Homo sapien
ttcttgccgttgttgcggccgtgca

SEQ ID NO: 66325 - DNA, 25 bp, Homo sapien
ataccgccctgcactgtgagggagg

SEQ ID NO: 66326 - DNA, 25 bp, Homo sapien
ggaaagcgtttgcggcataccgccc

SEQ ID NO: 66327 - DNA, 25 bp, Homo sapien
gacactgagctttgcggaaagcgtt

SEQ ID NO: 66328 - DNA, 25 bp, Homo sapien
ggcgctccacaatgggacactgagc

SEQ ID NO: 66329 - DNA, 25 bp, Homo sapien
gcatcatcatggagttagtgaggcg

SEQ ID NO: 66330 - DNA, 25 bp, Homo sapien
ttcttgccgttgttgcggccgtgca

SEQ ID NO: 66331 - DNA, 25 bp, Homo sapien
gatctcgaaggcatgcttgacgatg

SEQ ID NO: 66332 - DNA, 25 bp, Homo sapien
cgtgagcaggtgtatgatctcgaag

SEQ ID NO: 66333 - DNA, 25 bp, Homo sapien
gggaccactgttgatgatggcgttc

SEQ ID NO: 66334 - DNA, 25 bp, Homo sapien
tcagcaatggtcttaatgttccgga

SEQ ID NO: 66335 - DNA, 25 bp, Homo sapien
agctggaaaatcagcggttggactt

SEQ ID NO: 66336 - DNA, 25 bp, Homo sapien
ttcttgccgttgttgcggccgtgca

SEQ ID NO: 66337 - DNA, 25 bp, Homo sapien
gggaccactgttgatgatggcgttc

SEQ ID NO: 66338 - DNA, 25 bp, Homo sapien
tcagcaatggtcttaatgttccgga

SEQ ID NO: 66339 - DNA, 25 bp, Homo sapien
gatctcgaaggcatgcttgacgatg

SEQ ID NO: 66340 - DNA, 25 bp, Homo sapien
ataccgccctgcactgtgagggagg

SEQ ID NO: 66341 - DNA, 25 bp, Homo sapien
cgtgagcaggtgtatgatctcgaag

SEQ ID NO: 66342 - DNA, 25 bp, Homo sapien
gacactgagctttgcggaaagcgtt

SEQ ID NO: 66343 - DNA, 25 bp, Homo sapien
gcatcatcatggagttagtgaggcg

SEQ ID NO: 66344 - DNA, 25 bp, Homo sapien
ggcgctccacaatgggacactgagc

SEQ ID NO: 66345 - DNA, 25 bp, Homo sapien
ggaaagcgtttgcggcataccgccc

SEQ ID NO: 66346 - DNA, 25 bp, Homo sapien
agctggaaaatcagcggttggactt

SEQ ID NO: 66347 - DNA, 25 bp, Homo sapien
ataccgccctgcactgtgagggagg

SEQ ID NO: 66348 - DNA, 25 bp, Homo sapien
ggaaagcgtttgcggcataccgccc

SEQ ID NO: 66349 - DNA, 25 bp, Homo sapien
gacactgagctttgcggaaagcgtt

SEQ ID NO: 66350 - DNA, 25 bp, Homo sapien
ggcgctccacaatgggacactgagc

SEQ ID NO: 66351 - DNA, 25 bp, Homo sapien
gcatcatcatggagttagtgaggcg

SEQ ID NO: 66352 - DNA, 25 bp, Homo sapien
ttcttgccgttgttgcggccgtgca

SEQ ID NO: 66353 - DNA, 25 bp, Homo sapien
gatctcgaaggcatgcttgacgatg

SEQ ID NO: 66354 - DNA, 25 bp, Homo sapien
cgtgagcaggtgtatgatctcgaag

SEQ ID NO: 66355 - DNA, 25 bp, Homo sapien
gggaccactgttgatgatggcgttc

SEQ ID NO: 66356 - DNA, 25 bp, Homo sapien
tcagcaatggtcttaatgttccgga

SEQ ID NO: 66357 - DNA, 25 bp, Homo sapien
agctggaaaatcagcggttggactt

SEQ ID NO: 66358 - DNA, 25 bp, Homo sapien
gacactgagctttgcggaaagcgtt

SEQ ID NO: 66359 - DNA, 25 bp, Homo sapien
gcatcatcatggagttagtgaggcg

SEQ ID NO: 66360 - DNA, 25 bp, Homo sapien
tcagcaatggtcttaatgttccgga

SEQ ID NO: 66361 - DNA, 25 bp, Homo sapien
ggaaagcgtttgcggcataccgccc

SEQ ID NO: 66362 - DNA, 25 bp, Homo sapien
gatctcgaaggcatgcttgacgatg

SEQ ID NO: 66363 - DNA, 25 bp, Homo sapien
ggcgctccacaatgggacactgagc

SEQ ID NO: 66364 - DNA, 25 bp, Homo sapien
cgtgagcaggtgtatgatctcgaag

SEQ ID NO: 66365 - DNA, 25 bp, Homo sapien
ttcttgccgttgttgcggccgtgca

SEQ ID NO: 66366 - DNA, 25 bp, Homo sapien
agctggaaaatcagcggttggactt

SEQ ID NO: 66367 - DNA, 25 bp, Homo sapien
gggaccactgttgatgatggcgttc

SEQ ID NO: 66368 - DNA, 25 bp, Homo sapien
ataccgccctgcactgtgagggagg

SEQ ID NO: 66369 - DNA, 25 bp, Homo sapien
ataccgccctgcactgtgagggagg

SEQ ID NO: 66370 - DNA, 25 bp, Homo sapien
ggaaagcgtttgcggcataccgccc

SEQ ID NO: 66371 - DNA, 25 bp, Homo sapien
gacactgagctttgcggaaagcgtt

SEQ ID NO: 66372 - DNA, 25 bp, Homo sapien
ggcgctccacaatgggacactgagc

SEQ ID NO: 66373 - DNA, 25 bp, Homo sapien
gcatcatcatggagttagtgaggcg

SEQ ID NO: 66374 - DNA, 25 bp, Homo sapien
ttcttgccgttgttgcggccgtgca

SEQ ID NO: 66375 - DNA, 25 bp, Homo sapien
gatctcgaaggcatgcttgacgatg

SEQ ID NO: 66376 - DNA, 25 bp, Homo sapien
cgtgagcaggtgtatgatctcgaag

SEQ ID NO: 66377 - DNA, 25 bp, Homo sapien
gggaccactgttgatgatggcgttc

SEQ ID NO: 66378 - DNA, 25 bp, Homo sapien
tcagcaatggtcttaatgttccgga

SEQ ID NO: 66379 - DNA, 25 bp, Homo sapien
agctggaaaatcagcggttggactt

SEQ ID NO: 66380 - DNA, 25 bp, Homo sapien
tcagcaatggtcttaatgttccgga

SEQ ID NO: 66381 - DNA, 25 bp, Homo sapien
ttcttgccgttgttgcggccgtgca

SEQ ID NO: 66382 - DNA, 25 bp, Homo sapien
gcatcatcatggagttagtgaggcg

SEQ ID NO: 66383 - DNA, 25 bp, Homo sapien
ataccgccctgcactgtgagggagg

SEQ ID NO: 66384 - DNA, 25 bp, Homo sapien
agctggaaaatcagcggttggactt

SEQ ID NO: 66385 - DNA, 25 bp, Homo sapien
gatctcgaaggcatgcttgacgatg

SEQ ID NO: 66386 - DNA, 25 bp, Homo sapien
gggaccactgttgatgatggcgttc

SEQ ID NO: 66387 - DNA, 25 bp, Homo sapien
ggcgctccacaatgggacactgagc

SEQ ID NO: 66388 - DNA, 25 bp, Homo sapien
gacactgagctttgcggaaagcgtt

SEQ ID NO: 66389 - DNA, 25 bp, Homo sapien
ggaaagcgtttgcggcataccgccc

SEQ ID NO: 66390 - DNA, 25 bp, Homo sapien
cgtgagcaggtgtatgatctcgaag

SEQ ID NO: 66391 - DNA, 25 bp, Homo sapien
ataccgccctgcactgtgagggagg

SEQ ID NO: 66392 - DNA, 25 bp, Homo sapien
ggaaagcgtttgcggcataccgccc

SEQ ID NO: 66393 - DNA, 25 bp, Homo sapien
gacactgagctttgcggaaagcgtt

SEQ ID NO: 66394 - DNA, 25 bp, Homo sapien
ggcgctccacaatgggacactgagc

SEQ ID NO: 66395 - DNA, 25 bp, Homo sapien
gcatcatcatggagttagtgaggcg

SEQ ID NO: 66396 - DNA, 25 bp, Homo sapien
ttcttgccgttgttgcggccgtgca

SEQ ID NO: 66397 - DNA, 25 bp, Homo sapien
gatctcgaaggcatgcttgacgatg

SEQ ID NO: 66398 - DNA, 25 bp, Homo sapien
cgtgagcaggtgtatgatctcgaag

SEQ ID NO: 66399 - DNA, 25 bp, Homo sapien
gggaccactgttgatgatggcgttc

SEQ ID NO: 66400 - DNA, 25 bp, Homo sapien
tcagcaatggtcttaatgttccgga

SEQ ID NO: 66401 - DNA, 25 bp, Homo sapien
agctggaaaatcagcggttggactt

SEQ ID NO: 66402 - DNA, 25 bp, Homo sapien
gcatcatcatggagttagtgaggcg

SEQ ID NO: 66403 - DNA, 25 bp, Homo sapien
tcagcaatggtcttaatgttccgga

SEQ ID NO: 66404 - DNA, 25 bp, Homo sapien
ggaaagcgtttgcggcataccgccc

SEQ ID NO: 66405 - DNA, 25 bp, Homo sapien
agctggaaaatcagcggttggactt

SEQ ID NO: 66406 - DNA, 25 bp, Homo sapien
ttcttgccgttgttgcggccgtgca

SEQ ID NO: 66407 - DNA, 25 bp, Homo sapien
gggaccactgttgatgatggcgttc

SEQ ID NO: 66408 - DNA, 25 bp, Homo sapien
ataccgccctgcactgtgagggagg

SEQ ID NO: 66409 - DNA, 25 bp, Homo sapien
cgtgagcaggtgtatgatctcgaag

SEQ ID NO: 66410 - DNA, 25 bp, Homo sapien
gacactgagctttgcggaaagcgtt

SEQ ID NO: 66411 - DNA, 25 bp, Homo sapien
gatctcgaaggcatgcttgacgatg

SEQ ID NO: 66412 - DNA, 25 bp, Homo sapien
ggcgctccacaatgggacactgagc

SEQ ID NO: 66413 - DNA, 25 bp, Homo sapien
ataccgccctgcactgtgagggagg

SEQ ID NO: 66414 - DNA, 25 bp, Homo sapien
ggaaagcgtttgcggcataccgccc

SEQ ID NO: 66415 - DNA, 25 bp, Homo sapien
gacactgagctttgcggaaagcgtt

SEQ ID NO: 66416 - DNA, 25 bp, Homo sapien
ggcgctccacaatgggacactgagc

SEQ ID NO: 66417 - DNA, 25 bp, Homo sapien
gcatcatcatggagttagtgaggcg

SEQ ID NO: 66418 - DNA, 25 bp, Homo sapien
ttcttgccgttgttgcggccgtgca

SEQ ID NO: 66419 - DNA, 25 bp, Homo sapien
gatctcgaaggcatgcttgacgatg

SEQ ID NO: 66420 - DNA, 25 bp, Homo sapien
cgtgagcaggtgtatgatctcgaag

SEQ ID NO: 66421 - DNA, 25 bp, Homo sapien
gggaccactgttgatgatggcgttc

SEQ ID NO: 66422 - DNA, 25 bp, Homo sapien
tcagcaatggtcttaatgttccgga

SEQ ID NO: 66423 - DNA, 25 bp, Homo sapien
agctggaaaatcagcggttggactt

SEQ ID NO: 66424 - DNA, 25 bp, Homo sapien
ttcttgccgttgttgcggccgtgca

SEQ ID NO: 66425 - DNA, 25 bp, Homo sapien
agctggaaaatcagcggttggactt

SEQ ID NO: 66426 - DNA, 25 bp, Homo sapien
gatctcgaaggcatgcttgacgatg

SEQ ID NO: 66427 - DNA, 25 bp, Homo sapien
gcatcatcatggagttagtgaggcg

SEQ ID NO: 66428 - DNA, 25 bp, Homo sapien
gggaccactgttgatgatggcgttc

SEQ ID NO: 66429 - DNA, 25 bp, Homo sapien
gacactgagctttgcggaaagcgtt

SEQ ID NO: 66430 - DNA, 25 bp, Homo sapien
ggaaagcgtttgcggcataccgccc

SEQ ID NO: 66431 - DNA, 25 bp, Homo sapien
cgtgagcaggtgtatgatctcgaag

SEQ ID NO: 66432 - DNA, 25 bp, Homo sapien
tcagcaatggtcttaatgttccgga

SEQ ID NO: 66433 - DNA, 25 bp, Homo sapien
ataccgccctgcactgtgagggagg

SEQ ID NO: 66434 - DNA, 25 bp, Homo sapien
ggcgctccacaatgggacactgagc

SEQ ID NO: 66435 - DNA, 25 bp, Homo sapien
ataccgccctgcactgtgagggagg

SEQ ID NO: 66436 - DNA, 25 bp, Homo sapien
ggaaagcgtttgcggcataccgccc

SEQ ID NO: 66437 - DNA, 25 bp, Homo sapien
gacactgagctttgcggaaagcgtt

SEQ ID NO: 66438 - DNA, 25 bp, Homo sapien
ggcgctccacaatgggacactgagc

SEQ ID NO: 66439 - DNA, 25 bp, Homo sapien
gcatcatcatggagttagtgaggcg

SEQ ID NO: 66440 - DNA, 25 bp, Homo sapien
ttcttgccgttgttgcggccgtgca

SEQ ID NO: 66441 - DNA, 25 bp, Homo sapien
gatctcgaaggcatgcttgacgatg

SEQ ID NO: 66442 - DNA, 25 bp, Homo sapien
cgtgagcaggtgtatgatctcgaag

SEQ ID NO: 66443 - DNA, 25 bp, Homo sapien
gggaccactgttgatgatggcgttc

SEQ ID NO: 66444 - DNA, 25 bp, Homo sapien
tcagcaatggtcttaatgttccgga

SEQ ID NO: 66445 - DNA, 25 bp, Homo sapien
agctggaaaatcagcggttggactt

SEQ ID NO: 66446 - DNA, 25 bp, Homo sapien
ataccgccctgcactgtgagggagg

SEQ ID NO: 66447 - DNA, 25 bp, Homo sapien
ggaaagcgtttgcggcataccgccc

SEQ ID NO: 66448 - DNA, 25 bp, Homo sapien
gacactgagctttgcggaaagcgtt

SEQ ID NO: 66449 - DNA, 25 bp, Homo sapien
ggcgctccacaatgggacactgagc

SEQ ID NO: 66450 - DNA, 25 bp, Homo sapien
gcatcatcatggagttagtgaggcg

SEQ ID NO: 66451 - DNA, 25 bp, Homo sapien
ttcttgccgttgttgcggccgtgca

SEQ ID NO: 66452 - DNA, 25 bp, Homo sapien
gatctcgaaggcatgcttgacgatg

SEQ ID NO: 66453 - DNA, 25 bp, Homo sapien
cgtgagcaggtgtatgatctcgaag

SEQ ID NO: 66454 - DNA, 25 bp, Homo sapien
gggaccactgttgatgatggcgttc

SEQ ID NO: 66455 - DNA, 25 bp, Homo sapien
tcagcaatggtcttaatgttccgga

SEQ ID NO: 66456 - DNA, 25 bp, Homo sapien
agctggaaaatcagcggttggactt

SEQ ID NO: 66457 - DNA, 25 bp, Homo sapien
ttcttgccgttgttgcggccgtgca

SEQ ID NO: 66458 - DNA, 25 bp, Homo sapien
cgtgagcaggtgtatgatctcgaag

SEQ ID NO: 66459 - DNA, 25 bp, Homo sapien
gacactgagctttgcggaaagcgtt

SEQ ID NO: 66460 - DNA, 25 bp, Homo sapien
gcatcatcatggagttagtgaggcg

SEQ ID NO: 66461 - DNA, 25 bp, Homo sapien
gggaccactgttgatgatggcgttc

SEQ ID NO: 66462 - DNA, 25 bp, Homo sapien
tcagcaatggtcttaatgttccgga

SEQ ID NO: 66463 - DNA, 25 bp, Homo sapien
agctggaaaatcagcggttggactt

SEQ ID NO: 66464 - DNA, 25 bp, Homo sapien
ataccgccctgcactgtgagggagg

SEQ ID NO: 66465 - DNA, 25 bp, Homo sapien
gatctcgaaggcatgcttgacgatg

SEQ ID NO: 66466 - DNA, 25 bp, Homo sapien
ggaaagcgtttgcggcataccgccc

SEQ ID NO: 66467 - DNA, 25 bp, Homo sapien
ggcgctccacaatgggacactgagc

SEQ ID NO: 66468 - DNA, 25 bp, Homo sapien
ataccgccctgcactgtgagggagg

SEQ ID NO: 66469 - DNA, 25 bp, Homo sapien
ggaaagcgtttgcggcataccgccc

SEQ ID NO: 66470 - DNA, 25 bp, Homo sapien
gacactgagctttgcggaaagcgtt

SEQ ID NO: 66471 - DNA, 25 bp, Homo sapien
ggcgctccacaatgggacactgagc

SEQ ID NO: 66472 - DNA, 25 bp, Homo sapien
gcatcatcatggagttagtgaggcg

SEQ ID NO: 66473 - DNA, 25 bp, Homo sapien
ttcttgccgttgttgcggccgtgca

SEQ ID NO: 66474 - DNA, 25 bp, Homo sapien
gatctcgaaggcatgcttgacgatg

SEQ ID NO: 66475 - DNA, 25 bp, Homo sapien
cgtgagcaggtgtatgatctcgaag

SEQ ID NO: 66476 - DNA, 25 bp, Homo sapien
gggaccactgttgatgatggcgttc

SEQ ID NO: 66477 - DNA, 25 bp, Homo sapien
tcagcaatggtcttaatgttccgga

SEQ ID NO: 66478 - DNA, 25 bp, Homo sapien
agctggaaaatcagcggttggactt

SEQ ID NO: 66479 - DNA, 25 bp, Homo sapien
gacactgagctttgcggaaagcgtt

SEQ ID NO: 66480 - DNA, 25 bp, Homo sapien
ggcgctccacaatgggacactgagc

SEQ ID NO: 66481 - DNA, 25 bp, Homo sapien
gcatcatcatggagttagtgaggcg

SEQ ID NO: 66482 - DNA, 25 bp, Homo sapien
ataccgccctgcactgtgagggagg

SEQ ID NO: 66483 - DNA, 25 bp, Homo sapien
agctggaaaatcagcggttggactt

SEQ ID NO: 66484 - DNA, 25 bp, Homo sapien
ggaaagcgtttgcggcataccgccc

SEQ ID NO: 66485 - DNA, 25 bp, Homo sapien
cgtgagcaggtgtatgatctcgaag

SEQ ID NO: 66486 - DNA, 25 bp, Homo sapien
gggaccactgttgatgatggcgttc

SEQ ID NO: 66487 - DNA, 25 bp, Homo sapien
ttcttgccgttgttgcggccgtgca

SEQ ID NO: 66488 - DNA, 25 bp, Homo sapien
tcagcaatggtcttaatgttccgga

SEQ ID NO: 66489 - DNA, 25 bp, Homo sapien
gatctcgaaggcatgcttgacgatg

SEQ ID NO: 66490 - DNA, 25 bp, Homo sapien
ataccgccctgcactgtgagggagg

SEQ ID NO: 66491 - DNA, 25 bp, Homo sapien
ggaaagcgtttgcggcataccgccc

SEQ ID NO: 66492 - DNA, 25 bp, Homo sapien
gacactgagctttgcggaaagcgtt

SEQ ID NO: 66493 - DNA, 25 bp, Homo sapien
ggcgctccacaatgggacactgagc

SEQ ID NO: 66494 - DNA, 25 bp, Homo sapien
gcatcatcatggagttagtgaggcg

SEQ ID NO: 66495 - DNA, 25 bp, Homo sapien
ttcttgccgttgttgcggccgtgca

SEQ ID NO: 66496 - DNA, 25 bp, Homo sapien
gatctcgaaggcatgcttgacgatg

SEQ ID NO: 66497 - DNA, 25 bp, Homo sapien
cgtgagcaggtgtatgatctcgaag

SEQ ID NO: 66498 - DNA, 25 bp, Homo sapien
gggaccactgttgatgatggcgttc

SEQ ID NO: 66499 - DNA, 25 bp, Homo sapien
tcagcaatggtcttaatgttccgga

SEQ ID NO: 66500 - DNA, 25 bp, Homo sapien
agctggaaaatcagcggttggactt

SEQ ID NO: 66501 - DNA, 25 bp, Homo sapien
tcagcaatggtcttaatgttccgga

SEQ ID NO: 66502 - DNA, 25 bp, Homo sapien
ggaaagcgtttgcggcataccgccc

SEQ ID NO: 66503 - DNA, 25 bp, Homo sapien
ttcttgccgttgttgcggccgtgca

SEQ ID NO: 66504 - DNA, 25 bp, Homo sapien
agctggaaaatcagcggttggactt

SEQ ID NO: 66505 - DNA, 25 bp, Homo sapien
gggaccactgttgatgatggcgttc

SEQ ID NO: 66506 - DNA, 25 bp, Homo sapien
cgtgagcaggtgtatgatctcgaag

SEQ ID NO: 66507 - DNA, 25 bp, Homo sapien
gcatcatcatggagttagtgaggcg

SEQ ID NO: 66508 - DNA, 25 bp, Homo sapien
gatctcgaaggcatgcttgacgatg

SEQ ID NO: 66509 - DNA, 25 bp, Homo sapien
ataccgccctgcactgtgagggagg

SEQ ID NO: 66510 - DNA, 25 bp, Homo sapien
gacactgagctttgcggaaagcgtt

SEQ ID NO: 66511 - DNA, 25 bp, Homo sapien
ggcgctccacaatgggacactgagc

SEQ ID NO: 66512 - DNA, 25 bp, Homo sapien
ataccgccctgcactgtgagggagg

SEQ ID NO: 66513 - DNA, 25 bp, Homo sapien
ggaaagcgtttgcggcataccgccc

SEQ ID NO: 66514 - DNA, 25 bp, Homo sapien
gacactgagctttgcggaaagcgtt

SEQ ID NO: 66515 - DNA, 25 bp, Homo sapien
ggcgctccacaatgggacactgagc

SEQ ID NO: 66516 - DNA, 25 bp, Homo sapien
gcatcatcatggagttagtgaggcg

SEQ ID NO: 66517 - DNA, 25 bp, Homo sapien
ttcttgccgttgttgcggccgtgca

SEQ ID NO: 66518 - DNA, 25 bp, Homo sapien
gatctcgaaggcatgcttgacgatg

SEQ ID NO: 66519 - DNA, 25 bp, Homo sapien
cgtgagcaggtgtatgatctcgaag

SEQ ID NO: 66520 - DNA, 25 bp, Homo sapien
gggaccactgttgatgatggcgttc

SEQ ID NO: 66521 - DNA, 25 bp, Homo sapien
tcagcaatggtcttaatgttccgga

SEQ ID NO: 66522 - DNA, 25 bp, Homo sapien
agctggaaaatcagcggttggactt

SEQ ID NO: 66523 - DNA, 25 bp, Homo sapien
gcatcatcatggagttagtgaggcg

SEQ ID NO: 66524 - DNA, 25 bp, Homo sapien
gacactgagctttgcggaaagcgtt

SEQ ID NO: 66525 - DNA, 25 bp, Homo sapien
tcagcaatggtcttaatgttccgga

SEQ ID NO: 66526 - DNA, 25 bp, Homo sapien
ggaaagcgtttgcggcataccgccc

SEQ ID NO: 66527 - DNA, 25 bp, Homo sapien
ataccgccctgcactgtgagggagg

SEQ ID NO: 66528 - DNA, 25 bp, Homo sapien
agctggaaaatcagcggttggactt

SEQ ID NO: 66529 - DNA, 25 bp, Homo sapien
gatctcgaaggcatgcttgacgatg

SEQ ID NO: 66530 - DNA, 25 bp, Homo sapien
cgtgagcaggtgtatgatctcgaag

SEQ ID NO: 66531 - DNA, 25 bp, Homo sapien
gggaccactgttgatgatggcgttc

SEQ ID NO: 66532 - DNA, 25 bp, Homo sapien
ggcgctccacaatgggacactgagc

SEQ ID NO: 66533 - DNA, 25 bp, Homo sapien
ttcttgccgttgttgcggccgtgca

SEQ ID NO: 66534 - DNA, 25 bp, Homo sapien
ataccgccctgcactgtgagggagg

SEQ ID NO: 66535 - DNA, 25 bp, Homo sapien
ggaaagcgtttgcggcataccgccc

SEQ ID NO: 66536 - DNA, 25 bp, Homo sapien
gacactgagctttgcggaaagcgtt

SEQ ID NO: 66537 - DNA, 25 bp, Homo sapien
ggcgctccacaatgggacactgagc

SEQ ID NO: 66538 - DNA, 25 bp, Homo sapien
gcatcatcatggagttagtgaggcg

SEQ ID NO: 66539 - DNA, 25 bp, Homo sapien
ttcttgccgttgttgcggccgtgca

SEQ ID NO: 66540 - DNA, 25 bp, Homo sapien
gatctcgaaggcatgcttgacgatg

SEQ ID NO: 66541 - DNA, 25 bp, Homo sapien
cgtgagcaggtgtatgatctcgaag

SEQ ID NO: 66542 - DNA, 25 bp, Homo sapien
gggaccactgttgatgatggcgttc

SEQ ID NO: 66543 - DNA, 25 bp, Homo sapien
tcagcaatggtcttaatgttccgga

SEQ ID NO: 66544 - DNA, 25 bp, Homo sapien
agctggaaaatcagcggttggactt

SEQ ID NO: 66545 - DNA, 25 bp, Homo sapien
gggaccactgttgatgatggcgttc

SEQ ID NO: 66546 - DNA, 25 bp, Homo sapien
ataccgccctgcactgtgagggagg

SEQ ID NO: 66547 - DNA, 25 bp, Homo sapien
gcatcatcatggagttagtgaggcg

SEQ ID NO: 66548 - DNA, 25 bp, Homo sapien
ggaaagcgtttgcggcataccgccc

SEQ ID NO: 66549 - DNA, 25 bp, Homo sapien
ttcttgccgttgttgcggccgtgca

SEQ ID NO: 66550 - DNA, 25 bp, Homo sapien
gatctcgaaggcatgcttgacgatg

SEQ ID NO: 66551 - DNA, 25 bp, Homo sapien
ggcgctccacaatgggacactgagc

SEQ ID NO: 66552 - DNA, 25 bp, Homo sapien
agctggaaaatcagcggttggactt

SEQ ID NO: 66553 - DNA, 25 bp, Homo sapien
gacactgagctttgcggaaagcgtt

SEQ ID NO: 66554 - DNA, 25 bp, Homo sapien
tcagcaatggtcttaatgttccgga

SEQ ID NO: 66555 - DNA, 25 bp, Homo sapien
cgtgagcaggtgtatgatctcgaag

SEQ ID NO: 66556 - DNA, 25 bp, Homo sapien
gacactgagctttgcggaaagcgtt

SEQ ID NO: 66557 - DNA, 25 bp, Homo sapien
agctggaaaatcagcggttggactt

SEQ ID NO: 66558 - DNA, 25 bp, Homo sapien
gcatcatcatggagttagtgaggcg

SEQ ID NO: 66559 - DNA, 25 bp, Homo sapien
cgtgagcaggtgtatgatctcgaag

SEQ ID NO: 66560 - DNA, 25 bp, Homo sapien
ggaaagcgtttgcggcataccgccc

SEQ ID NO: 66561 - DNA, 25 bp, Homo sapien
gatctcgaaggcatgcttgacgatg

SEQ ID NO: 66562 - DNA, 25 bp, Homo sapien
ggcgctccacaatgggacactgagc

SEQ ID NO: 66563 - DNA, 25 bp, Homo sapien
ttcttgccgttgttgcggccgtgca

SEQ ID NO: 66564 - DNA, 25 bp, Homo sapien
tcagcaatggtcttaatgttccgga

SEQ ID NO: 66565 - DNA, 25 bp, Homo sapien
gggaccactgttgatgatggcgttc

SEQ ID NO: 66566 - DNA, 25 bp, Homo sapien
ataccgccctgcactgtgagggagg

SEQ ID NO: 66567 - DNA, 25 bp, Homo sapien
ataccgccctgcactgtgagggagg

SEQ ID NO: 66568 - DNA, 25 bp, Homo sapien
ggaaagcgtttgcggcataccgccc

SEQ ID NO: 66569 - DNA, 25 bp, Homo sapien
gacactgagctttgcggaaagcgtt

SEQ ID NO: 66570 - DNA, 25 bp, Homo sapien
ggcgctccacaatgggacactgagc

SEQ ID NO: 66571 - DNA, 25 bp, Homo sapien
gcatcatcatggagttagtgaggcg

SEQ ID NO: 66572 - DNA, 25 bp, Homo sapien
ttcttgccgttgttgcggccgtgca

SEQ ID NO: 66573 - DNA, 25 bp, Homo sapien
gatctcgaaggcatgcttgacgatg

SEQ ID NO: 66574 - DNA, 25 bp, Homo sapien
cgtgagcaggtgtatgatctcgaag

SEQ ID NO: 66575 - DNA, 25 bp, Homo sapien
gggaccactgttgatgatggcgttc

SEQ ID NO: 66576 - DNA, 25 bp, Homo sapien
tcagcaatggtcttaatgttccgga

SEQ ID NO: 66577 - DNA, 25 bp, Homo sapien
agctggaaaatcagcggttggactt

SEQ ID NO: 66578 - DNA, 25 bp, Homo sapien
gacactgagctttgcggaaagcgtt

SEQ ID NO: 66579 - DNA, 25 bp, Homo sapien
ttcttgccgttgttgcggccgtgca

SEQ ID NO: 66580 - DNA, 25 bp, Homo sapien
gggaccactgttgatgatggcgttc

SEQ ID NO: 66581 - DNA, 25 bp, Homo sapien
tcagcaatggtcttaatgttccgga

SEQ ID NO: 66582 - DNA, 25 bp, Homo sapien
agctggaaaatcagcggttggactt

SEQ ID NO: 66583 - DNA, 25 bp, Homo sapien
gatctcgaaggcatgcttgacgatg

SEQ ID NO: 66584 - DNA, 25 bp, Homo sapien
ataccgccctgcactgtgagggagg

SEQ ID NO: 66585 - DNA, 25 bp, Homo sapien
gcatcatcatggagttagtgaggcg

SEQ ID NO: 66586 - DNA, 25 bp, Homo sapien
ggcgctccacaatgggacactgagc

SEQ ID NO: 66587 - DNA, 25 bp, Homo sapien
cgtgagcaggtgtatgatctcgaag

SEQ ID NO: 66588 - DNA, 25 bp, Homo sapien
ggaaagcgtttgcggcataccgccc

SEQ ID NO: 66589 - DNA, 25 bp, Homo sapien
ataccgccctgcactgtgagggagg

SEQ ID NO: 66590 - DNA, 25 bp, Homo sapien
ggaaagcgtttgcggcataccgccc

SEQ ID NO: 66591 - DNA, 25 bp, Homo sapien
gacactgagctttgcggaaagcgtt

SEQ ID NO: 66592 - DNA, 25 bp, Homo sapien
ggcgctccacaatgggacactgagc

SEQ ID NO: 66593 - DNA, 25 bp, Homo sapien
gcatcatcatggagttagtgaggcg

SEQ ID NO: 66594 - DNA, 25 bp, Homo sapien
ttcttgccgttgttgcggccgtgca

SEQ ID NO: 66595 - DNA, 25 bp, Homo sapien
gatctcgaaggcatgcttgacgatg

SEQ ID NO: 66596 - DNA, 25 bp, Homo sapien
cgtgagcaggtgtatgatctcgaag

SEQ ID NO: 66597 - DNA, 25 bp, Homo sapien
gggaccactgttgatgatggcgttc

SEQ ID NO: 66598 - DNA, 25 bp, Homo sapien
tcagcaatggtcttaatgttccgga

SEQ ID NO: 66599 - DNA, 25 bp, Homo sapien
agctggaaaatcagcggttggactt

SEQ ID NO: 66600 - DNA, 25 bp, Homo sapien
cgtgagcaggtgtatgatctcgaag

SEQ ID NO: 66601 - DNA, 25 bp, Homo sapien
gcatcatcatggagttagtgaggcg

SEQ ID NO: 66602 - DNA, 25 bp, Homo sapien
gatctcgaaggcatgcttgacgatg

SEQ ID NO: 66603 - DNA, 25 bp, Homo sapien
ggaaagcgtttgcggcataccgccc

SEQ ID NO: 66604 - DNA, 25 bp, Homo sapien
agctggaaaatcagcggttggactt

SEQ ID NO: 66605 - DNA, 25 bp, Homo sapien
ttcttgccgttgttgcggccgtgca

SEQ ID NO: 66606 - DNA, 25 bp, Homo sapien
ggcgctccacaatgggacactgagc

SEQ ID NO: 66607 - DNA, 25 bp, Homo sapien
gggaccactgttgatgatggcgttc

SEQ ID NO: 66608 - DNA, 25 bp, Homo sapien
gacactgagctttgcggaaagcgtt

SEQ ID NO: 66609 - DNA, 25 bp, Homo sapien
tcagcaatggtcttaatgttccgga

SEQ ID NO: 66610 - DNA, 25 bp, Homo sapien
ataccgccctgcactgtgagggagg

SEQ ID NO: 66611 - DNA, 25 bp, Homo sapien
ataccgccctgcactgtgagggagg

SEQ ID NO: 66612 - DNA, 25 bp, Homo sapien
ggaaagcgtttgcggcataccgccc

SEQ ID NO: 66613 - DNA, 25 bp, Homo sapien
gacactgagctttgcggaaagcgtt

SEQ ID NO: 66614 - DNA, 25 bp, Homo sapien
ggcgctccacaatgggacactgagc

SEQ ID NO: 66615 - DNA, 25 bp, Homo sapien
gcatcatcatggagttagtgaggcg

SEQ ID NO: 66616 - DNA, 25 bp, Homo sapien
ttcttgccgttgttgcggccgtgca

SEQ ID NO: 66617 - DNA, 25 bp, Homo sapien
gatctcgaaggcatgcttgacgatg

SEQ ID NO: 66618 - DNA, 25 bp, Homo sapien
cgtgagcaggtgtatgatctcgaag

SEQ ID NO: 66619 - DNA, 25 bp, Homo sapien
gggaccactgttgatgatggcgttc

SEQ ID NO: 66620 - DNA, 25 bp, Homo sapien
tcagcaatggtcttaatgttccgga

SEQ ID NO: 66621 - DNA, 25 bp, Homo sapien
agctggaaaatcagcggttggactt

SEQ ID NO: 66622 - DNA, 25 bp, Homo sapien
aggggatatccacagagtaccttgt

SEQ ID NO: 66623 - DNA, 25 bp, Homo sapien
aagagcaggatctctgaagacatcc

SEQ ID NO: 66624 - DNA, 25 bp, Homo sapien
tttgtccaaggggatatccacagag

SEQ ID NO: 66625 - DNA, 25 bp, Homo sapien
cgacagttttgtccaaggggatatc

SEQ ID NO: 66626 - DNA, 25 bp, Homo sapien
aaccacttgttcttgcctgtcttgt

SEQ ID NO: 66627 - DNA, 25 bp, Homo sapien
gaagacatccttattgacgacagtt

SEQ ID NO: 66628 - DNA, 25 bp, Homo sapien
accgcagtttctggaagaaccactt

SEQ ID NO: 66629 - DNA, 25 bp, Homo sapien
gggcgatctgaggtgccatcatcaa

SEQ ID NO: 66630 - DNA, 25 bp, Homo sapien
ggtagcggtcaattccagccaccag

SEQ ID NO: 66631 - DNA, 25 bp, Homo sapien
acaaagcatctaaaaccgcagtttc

SEQ ID NO: 66632 - DNA, 25 bp, Homo sapien
ttgcgtttaagagcaggatctctga

SEQ ID NO: 66633 - DNA, 25 bp, Homo sapien
gaagacatccttattgacgacagtt

SEQ ID NO: 66634 - DNA, 25 bp, Homo sapien
aagagcaggatctctgaagacatcc

SEQ ID NO: 66635 - DNA, 25 bp, Homo sapien
ttgcgtttaagagcaggatctctga

SEQ ID NO: 66636 - DNA, 25 bp, Homo sapien
aaccacttgttcttgcctgtcttgt

SEQ ID NO: 66637 - DNA, 25 bp, Homo sapien
accgcagtttctggaagaaccactt

SEQ ID NO: 66638 - DNA, 25 bp, Homo sapien
acaaagcatctaaaaccgcagtttc

SEQ ID NO: 66639 - DNA, 25 bp, Homo sapien
gggcgatctgaggtgccatcatcaa

SEQ ID NO: 66640 - DNA, 25 bp, Homo sapien
ggtagcggtcaattccagccaccag

SEQ ID NO: 66641 - DNA, 25 bp, Homo sapien
aggggatatccacagagtaccttgt

SEQ ID NO: 66642 - DNA, 25 bp, Homo sapien
tttgtccaaggggatatccacagag

SEQ ID NO: 66643 - DNA, 25 bp, Homo sapien
cgacagttttgtccaaggggatatc

SEQ ID NO: 66644 - DNA, 25 bp, Homo sapien
acaaagcatctaaaaccgcagtttc

SEQ ID NO: 66645 - DNA, 25 bp, Homo sapien
aggggatatccacagagtaccttgt

SEQ ID NO: 66646 - DNA, 25 bp, Homo sapien
aaccacttgttcttgcctgtcttgt

SEQ ID NO: 66647 - DNA, 25 bp, Homo sapien
gggcgatctgaggtgccatcatcaa

SEQ ID NO: 66648 - DNA, 25 bp, Homo sapien
aagagcaggatctctgaagacatcc

SEQ ID NO: 66649 - DNA, 25 bp, Homo sapien
ttgcgtttaagagcaggatctctga

SEQ ID NO: 66650 - DNA, 25 bp, Homo sapien
tttgtccaaggggatatccacagag

SEQ ID NO: 66651 - DNA, 25 bp, Homo sapien
cgacagttttgtccaaggggatatc

SEQ ID NO: 66652 - DNA, 25 bp, Homo sapien
gaagacatccttattgacgacagtt

SEQ ID NO: 66653 - DNA, 25 bp, Homo sapien
accgcagtttctggaagaaccactt

SEQ ID NO: 66654 - DNA, 25 bp, Homo sapien
ggtagcggtcaattccagccaccag

SEQ ID NO: 66655 - DNA, 25 bp, Homo sapien
gggcgatctgaggtgccatcatcaa

SEQ ID NO: 66656 - DNA, 25 bp, Homo sapien
ggtagcggtcaattccagccaccag

SEQ ID NO: 66657 - DNA, 25 bp, Homo sapien
aggggatatccacagagtaccttgt

SEQ ID NO: 66658 - DNA, 25 bp, Homo sapien
tttgtccaaggggatatccacagag

SEQ ID NO: 66659 - DNA, 25 bp, Homo sapien
cgacagttttgtccaaggggatatc

SEQ ID NO: 66660 - DNA, 25 bp, Homo sapien
gaagacatccttattgacgacagtt

SEQ ID NO: 66661 - DNA, 25 bp, Homo sapien
aagagcaggatctctgaagacatcc

SEQ ID NO: 66662 - DNA, 25 bp, Homo sapien
ttgcgtttaagagcaggatctctga

SEQ ID NO: 66663 - DNA, 25 bp, Homo sapien
aaccacttgttcttgcctgtcttgt

SEQ ID NO: 66664 - DNA, 25 bp, Homo sapien
accgcagtttctggaagaaccactt

SEQ ID NO: 66665 - DNA, 25 bp, Homo sapien
acaaagcatctaaaaccgcagtttc

SEQ ID NO: 66666 - DNA, 25 bp, Homo sapien
gaagacatccttattgacgacagtt

SEQ ID NO: 66667 - DNA, 25 bp, Homo sapien
cgacagttttgtccaaggggatatc

SEQ ID NO: 66668 - DNA, 25 bp, Homo sapien
acaaagcatctaaaaccgcagtttc

SEQ ID NO: 66669 - DNA, 25 bp, Homo sapien
gggcgatctgaggtgccatcatcaa

SEQ ID NO: 66670 - DNA, 25 bp, Homo sapien
accgcagtttctggaagaaccactt

SEQ ID NO: 66671 - DNA, 25 bp, Homo sapien
ggtagcggtcaattccagccaccag

SEQ ID NO: 66672 - DNA, 25 bp, Homo sapien
aggggatatccacagagtaccttgt

SEQ ID NO: 66673 - DNA, 25 bp, Homo sapien
ttgcgtttaagagcaggatctctga

SEQ ID NO: 66674 - DNA, 25 bp, Homo sapien
aagagcaggatctctgaagacatcc

SEQ ID NO: 66675 - DNA, 25 bp, Homo sapien
tttgtccaaggggatatccacagag

SEQ ID NO: 66676 - DNA, 25 bp, Homo sapien
aaccacttgttcttgcctgtcttgt

SEQ ID NO: 66677 - DNA, 25 bp, Homo sapien
gaagacatccttattgacgacagtt

SEQ ID NO: 66678 - DNA, 25 bp, Homo sapien
aagagcaggatctctgaagacatcc

SEQ ID NO: 66679 - DNA, 25 bp, Homo sapien
ttgcgtttaagagcaggatctctga

SEQ ID NO: 66680 - DNA, 25 bp, Homo sapien
aaccacttgttcttgcctgtcttgt

SEQ ID NO: 66681 - DNA, 25 bp, Homo sapien
accgcagtttctggaagaaccactt

SEQ ID NO: 66682 - DNA, 25 bp, Homo sapien
acaaagcatctaaaaccgcagtttc

SEQ ID NO: 66683 - DNA, 25 bp, Homo sapien
gggcgatctgaggtgccatcatcaa

SEQ ID NO: 66684 - DNA, 25 bp, Homo sapien
ggtagcggtcaattccagccaccag

SEQ ID NO: 66685 - DNA, 25 bp, Homo sapien
aggggatatccacagagtaccttgt

SEQ ID NO: 66686 - DNA, 25 bp, Homo sapien
tttgtccaaggggatatccacagag

SEQ ID NO: 66687 - DNA, 25 bp, Homo sapien
cgacagttttgtccaaggggatatc

SEQ ID NO: 66688 - DNA, 25 bp, Homo sapien
gaagacatccttattgacgacagtt

SEQ ID NO: 66689 - DNA, 25 bp, Homo sapien
aagagcaggatctctgaagacatcc

SEQ ID NO: 66690 - DNA, 25 bp, Homo sapien
ttgcgtttaagagcaggatctctga

SEQ ID NO: 66691 - DNA, 25 bp, Homo sapien
aaccacttgttcttgcctgtcttgt

SEQ ID NO: 66692 - DNA, 25 bp, Homo sapien
accgcagtttctggaagaaccactt

SEQ ID NO: 66693 - DNA, 25 bp, Homo sapien
acaaagcatctaaaaccgcagtttc

SEQ ID NO: 66694 - DNA, 25 bp, Homo sapien
gggcgatctgaggtgccatcatcaa

SEQ ID NO: 66695 - DNA, 25 bp, Homo sapien
ggtagcggtcaattccagccaccag

SEQ ID NO: 66696 - DNA, 25 bp, Homo sapien
aggggatatccacagagtaccttgt

SEQ ID NO: 66697 - DNA, 25 bp, Homo sapien
tttgtccaaggggatatccacagag

SEQ ID NO: 66698 - DNA, 25 bp, Homo sapien
cgacagttttgtccaaggggatatc

SEQ ID NO: 66699 - DNA, 25 bp, Homo sapien
gggcgatctgaggtgccatcatcaa

SEQ ID NO: 66700 - DNA, 25 bp, Homo sapien
acaaagcatctaaaaccgcagtttc

SEQ ID NO: 66701 - DNA, 25 bp, Homo sapien
cgacagttttgtccaaggggatatc

SEQ ID NO: 66702 - DNA, 25 bp, Homo sapien
aggggatatccacagagtaccttgt

SEQ ID NO: 66703 - DNA, 25 bp, Homo sapien
ggtagcggtcaattccagccaccag

SEQ ID NO: 66704 - DNA, 25 bp, Homo sapien
gaagacatccttattgacgacagtt

SEQ ID NO: 66705 - DNA, 25 bp, Homo sapien
tttgtccaaggggatatccacagag

SEQ ID NO: 66706 - DNA, 25 bp, Homo sapien
accgcagtttctggaagaaccactt

SEQ ID NO: 66707 - DNA, 25 bp, Homo sapien
aaccacttgttcttgcctgtcttgt

SEQ ID NO: 66708 - DNA, 25 bp, Homo sapien
ttgcgtttaagagcaggatctctga

SEQ ID NO: 66709 - DNA, 25 bp, Homo sapien
aagagcaggatctctgaagacatcc

SEQ ID NO: 66710 - DNA, 25 bp, Homo sapien
gaagacatccttattgacgacagtt

SEQ ID NO: 66711 - DNA, 25 bp, Homo sapien
aagagcaggatctctgaagacatcc

SEQ ID NO: 66712 - DNA, 25 bp, Homo sapien
ttgcgtttaagagcaggatctctga

SEQ ID NO: 66713 - DNA, 25 bp, Homo sapien
aaccacttgttcttgcctgtcttgt

SEQ ID NO: 66714 - DNA, 25 bp, Homo sapien
accgcagtttctggaagaaccactt

SEQ ID NO: 66715 - DNA, 25 bp, Homo sapien
acaaagcatctaaaaccgcagtttc

SEQ ID NO: 66716 - DNA, 25 bp, Homo sapien
gggcgatctgaggtgccatcatcaa

SEQ ID NO: 66717 - DNA, 25 bp, Homo sapien
ggtagcggtcaattccagccaccag

SEQ ID NO: 66718 - DNA, 25 bp, Homo sapien
aggggatatccacagagtaccttgt

SEQ ID NO: 66719 - DNA, 25 bp, Homo sapien
tttgtccaaggggatatccacagag

SEQ ID NO: 66720 - DNA, 25 bp, Homo sapien
cgacagttttgtccaaggggatatc

SEQ ID NO: 66721 - DNA, 25 bp, Homo sapien
tttgtccaaggggatatccacagag

SEQ ID NO: 66722 - DNA, 25 bp, Homo sapien
aggggatatccacagagtaccttgt

SEQ ID NO: 66723 - DNA, 25 bp, Homo sapien
acaaagcatctaaaaccgcagtttc

SEQ ID NO: 66724 - DNA, 25 bp, Homo sapien
ttgcgtttaagagcaggatctctga

SEQ ID NO: 66725 - DNA, 25 bp, Homo sapien
gaagacatccttattgacgacagtt

SEQ ID NO: 66726 - DNA, 25 bp, Homo sapien
aaccacttgttcttgcctgtcttgt

SEQ ID NO: 66727 - DNA, 25 bp, Homo sapien
cgacagttttgtccaaggggatatc

SEQ ID NO: 66728 - DNA, 25 bp, Homo sapien
accgcagtttctggaagaaccactt

SEQ ID NO: 66729 - DNA, 25 bp, Homo sapien
gggcgatctgaggtgccatcatcaa

SEQ ID NO: 66730 - DNA, 25 bp, Homo sapien
aagagcaggatctctgaagacatcc

SEQ ID NO: 66731 - DNA, 25 bp, Homo sapien
ggtagcggtcaattccagccaccag

SEQ ID NO: 66732 - DNA, 25 bp, Homo sapien
gaagacatccttattgacgacagtt

SEQ ID NO: 66733 - DNA, 25 bp, Homo sapien
aagagcaggatctctgaagacatcc

SEQ ID NO: 66734 - DNA, 25 bp, Homo sapien
ttgcgtttaagagcaggatctctga

SEQ ID NO: 66735 - DNA, 25 bp, Homo sapien
aaccacttgttcttgcctgtcttgt

SEQ ID NO: 66736 - DNA, 25 bp, Homo sapien
accgcagtttctggaagaaccactt

SEQ ID NO: 66737 - DNA, 25 bp, Homo sapien
acaaagcatctaaaaccgcagtttc

SEQ ID NO: 66738 - DNA, 25 bp, Homo sapien
gggcgatctgaggtgccatcatcaa

SEQ ID NO: 66739 - DNA, 25 bp, Homo sapien
ggtagcggtcaattccagccaccag

SEQ ID NO: 66740 - DNA, 25 bp, Homo sapien
aggggatatccacagagtaccttgt

SEQ ID NO: 66741 - DNA, 25 bp, Homo sapien
tttgtccaaggggatatccacagag

SEQ ID NO: 66742 - DNA, 25 bp, Homo sapien
cgacagttttgtccaaggggatatc

SEQ ID NO: 66743 - DNA, 25 bp, Homo sapien
gggcgatctgaggtgccatcatcaa

SEQ ID NO: 66744 - DNA, 25 bp, Homo sapien
aaccacttgttcttgcctgtcttgt

SEQ ID NO: 66745 - DNA, 25 bp, Homo sapien
accgcagtttctggaagaaccactt

SEQ ID NO: 66746 - DNA, 25 bp, Homo sapien
aagagcaggatctctgaagacatcc

SEQ ID NO: 66747 - DNA, 25 bp, Homo sapien
ttgcgtttaagagcaggatctctga

SEQ ID NO: 66748 - DNA, 25 bp, Homo sapien
cgacagttttgtccaaggggatatc

SEQ ID NO: 66749 - DNA, 25 bp, Homo sapien
gaagacatccttattgacgacagtt

SEQ ID NO: 66750 - DNA, 25 bp, Homo sapien
aggggatatccacagagtaccttgt

SEQ ID NO: 66751 - DNA, 25 bp, Homo sapien
acaaagcatctaaaaccgcagtttc

SEQ ID NO: 66752 - DNA, 25 bp, Homo sapien
tttgtccaaggggatatccacagag

SEQ ID NO: 66753 - DNA, 25 bp, Homo sapien
ggtagcggtcaattccagccaccag

SEQ ID NO: 66754 - DNA, 25 bp, Homo sapien
gaagacatccttattgacgacagtt

SEQ ID NO: 66755 - DNA, 25 bp, Homo sapien
aagagcaggatctctgaagacatcc

SEQ ID NO: 66756 - DNA, 25 bp, Homo sapien
ttgcgtttaagagcaggatctctga

SEQ ID NO: 66757 - DNA, 25 bp, Homo sapien
aaccacttgttcttgcctgtcttgt

SEQ ID NO: 66758 - DNA, 25 bp, Homo sapien
accgcagtttctggaagaaccactt

SEQ ID NO: 66759 - DNA, 25 bp, Homo sapien
acaaagcatctaaaaccgcagtttc

SEQ ID NO: 66760 - DNA, 25 bp, Homo sapien
gggcgatctgaggtgccatcatcaa

SEQ ID NO: 66761 - DNA, 25 bp, Homo sapien
ggtagcggtcaattccagccaccag

SEQ ID NO: 66762 - DNA, 25 bp, Homo sapien
aggggatatccacagagtaccttgt

SEQ ID NO: 66763 - DNA, 25 bp, Homo sapien
tttgtccaaggggatatccacagag

SEQ ID NO: 66764 - DNA, 25 bp, Homo sapien
cgacagttttgtccaaggggatatc

SEQ ID NO: 66765 - DNA, 25 bp, Homo sapien
aagagcaggatctctgaagacatcc

SEQ ID NO: 66766 - DNA, 25 bp, Homo sapien
accgcagtttctggaagaaccactt

SEQ ID NO: 66767 - DNA, 25 bp, Homo sapien
ggtagcggtcaattccagccaccag

SEQ ID NO: 66768 - DNA, 25 bp, Homo sapien
aaccacttgttcttgcctgtcttgt

SEQ ID NO: 66769 - DNA, 25 bp, Homo sapien
gggcgatctgaggtgccatcatcaa

SEQ ID NO: 66770 - DNA, 25 bp, Homo sapien
acaaagcatctaaaaccgcagtttc

SEQ ID NO: 66771 - DNA, 25 bp, Homo sapien
cgacagttttgtccaaggggatatc

SEQ ID NO: 66772 - DNA, 25 bp, Homo sapien
ttgcgtttaagagcaggatctctga

SEQ ID NO: 66773 - DNA, 25 bp, Homo sapien
aggggatatccacagagtaccttgt

SEQ ID NO: 66774 - DNA, 25 bp, Homo sapien
tttgtccaaggggatatccacagag

SEQ ID NO: 66775 - DNA, 25 bp, Homo sapien
gaagacatccttattgacgacagtt

SEQ ID NO: 66776 - DNA, 25 bp, Homo sapien
gaagacatccttattgacgacagtt

SEQ ID NO: 66777 - DNA, 25 bp, Homo sapien
aagagcaggatctctgaagacatcc

SEQ ID NO: 66778 - DNA, 25 bp, Homo sapien
ttgcgtttaagagcaggatctctga

SEQ ID NO: 66779 - DNA, 25 bp, Homo sapien
aaccacttgttcttgcctgtcttgt

SEQ ID NO: 66780 - DNA, 25 bp, Homo sapien
accgcagtttctggaagaaccactt

SEQ ID NO: 66781 - DNA, 25 bp, Homo sapien
acaaagcatctaaaaccgcagtttc

SEQ ID NO: 66782 - DNA, 25 bp, Homo sapien
gggcgatctgaggtgccatcatcaa

SEQ ID NO: 66783 - DNA, 25 bp, Homo sapien
ggtagcggtcaattccagccaccag

SEQ ID NO: 66784 - DNA, 25 bp, Homo sapien
aggggatatccacagagtaccttgt

SEQ ID NO: 66785 - DNA, 25 bp, Homo sapien
tttgtccaaggggatatccacagag

SEQ ID NO: 66786 - DNA, 25 bp, Homo sapien
cgacagttttgtccaaggggatatc

SEQ ID NO: 66787 - DNA, 25 bp, Homo sapien
ggtagcggtcaattccagccaccag

SEQ ID NO: 66788 - DNA, 25 bp, Homo sapien
tttgtccaaggggatatccacagag

SEQ ID NO: 66789 - DNA, 25 bp, Homo sapien
aaccacttgttcttgcctgtcttgt

SEQ ID NO: 66790 - DNA, 25 bp, Homo sapien
gaagacatccttattgacgacagtt

SEQ ID NO: 66791 - DNA, 25 bp, Homo sapien
ttgcgtttaagagcaggatctctga

SEQ ID NO: 66792 - DNA, 25 bp, Homo sapien
accgcagtttctggaagaaccactt

SEQ ID NO: 66793 - DNA, 25 bp, Homo sapien
aggggatatccacagagtaccttgt

SEQ ID NO: 66794 - DNA, 25 bp, Homo sapien
cgacagttttgtccaaggggatatc

SEQ ID NO: 66795 - DNA, 25 bp, Homo sapien
aagagcaggatctctgaagacatcc

SEQ ID NO: 66796 - DNA, 25 bp, Homo sapien
gggcgatctgaggtgccatcatcaa

SEQ ID NO: 66797 - DNA, 25 bp, Homo sapien
acaaagcatctaaaaccgcagtttc

SEQ ID NO: 66798 - DNA, 25 bp, Homo sapien
aaccacttgttcttgcctgtcttgt

SEQ ID NO: 66799 - DNA, 25 bp, Homo sapien
gggcgatctgaggtgccatcatcaa

SEQ ID NO: 66800 - DNA, 25 bp, Homo sapien
aggggatatccacagagtaccttgt

SEQ ID NO: 66801 - DNA, 25 bp, Homo sapien
gaagacatccttattgacgacagtt

SEQ ID NO: 66802 - DNA, 25 bp, Homo sapien
aagagcaggatctctgaagacatcc

SEQ ID NO: 66803 - DNA, 25 bp, Homo sapien
tttgtccaaggggatatccacagag

SEQ ID NO: 66804 - DNA, 25 bp, Homo sapien
ttgcgtttaagagcaggatctctga

SEQ ID NO: 66805 - DNA, 25 bp, Homo sapien
acaaagcatctaaaaccgcagtttc

SEQ ID NO: 66806 - DNA, 25 bp, Homo sapien
accgcagtttctggaagaaccactt

SEQ ID NO: 66807 - DNA, 25 bp, Homo sapien
cgacagttttgtccaaggggatatc

SEQ ID NO: 66808 - DNA, 25 bp, Homo sapien
ggtagcggtcaattccagccaccag

SEQ ID NO: 66809 - DNA, 25 bp, Homo sapien
gaagacatccttattgacgacagtt

SEQ ID NO: 66810 - DNA, 25 bp, Homo sapien
aagagcaggatctctgaagacatcc

SEQ ID NO: 66811 - DNA, 25 bp, Homo sapien
ttgcgtttaagagcaggatctctga

SEQ ID NO: 66812 - DNA, 25 bp, Homo sapien
aaccacttgttcttgcctgtcttgt

SEQ ID NO: 66813 - DNA, 25 bp, Homo sapien
accgcagtttctggaagaaccactt

SEQ ID NO: 66814 - DNA, 25 bp, Homo sapien
acaaagcatctaaaaccgcagtttc

SEQ ID NO: 66815 - DNA, 25 bp, Homo sapien
gggcgatctgaggtgccatcatcaa

SEQ ID NO: 66816 - DNA, 25 bp, Homo sapien
ggtagcggtcaattccagccaccag

SEQ ID NO: 66817 - DNA, 25 bp, Homo sapien
aggggatatccacagagtaccttgt

SEQ ID NO: 66818 - DNA, 25 bp, Homo sapien
tttgtccaaggggatatccacagag

SEQ ID NO: 66819 - DNA, 25 bp, Homo sapien
cgacagttttgtccaaggggatatc

SEQ ID NO: 66820 - DNA, 25 bp, Homo sapien
acaaagcatctaaaaccgcagtttc

SEQ ID NO: 66821 - DNA, 25 bp, Homo sapien
aaccacttgttcttgcctgtcttgt

SEQ ID NO: 66822 - DNA, 25 bp, Homo sapien
cgacagttttgtccaaggggatatc

SEQ ID NO: 66823 - DNA, 25 bp, Homo sapien
tttgtccaaggggatatccacagag

SEQ ID NO: 66824 - DNA, 25 bp, Homo sapien
gggcgatctgaggtgccatcatcaa

SEQ ID NO: 66825 - DNA, 25 bp, Homo sapien
ggtagcggtcaattccagccaccag

SEQ ID NO: 66826 - DNA, 25 bp, Homo sapien
ttgcgtttaagagcaggatctctga

SEQ ID NO: 66827 - DNA, 25 bp, Homo sapien
aagagcaggatctctgaagacatcc

SEQ ID NO: 66828 - DNA, 25 bp, Homo sapien
aggggatatccacagagtaccttgt

SEQ ID NO: 66829 - DNA, 25 bp, Homo sapien
gaagacatccttattgacgacagtt

SEQ ID NO: 66830 - DNA, 25 bp, Homo sapien
accgcagtttctggaagaaccactt

SEQ ID NO: 66831 - DNA, 25 bp, Homo sapien
gaagacatccttattgacgacagtt

SEQ ID NO: 66832 - DNA, 25 bp, Homo sapien
aagagcaggatctctgaagacatcc

SEQ ID NO: 66833 - DNA, 25 bp, Homo sapien
ttgcgtttaagagcaggatctctga

SEQ ID NO: 66834 - DNA, 25 bp, Homo sapien
aaccacttgttcttgcctgtcttgt

SEQ ID NO: 66835 - DNA, 25 bp, Homo sapien
accgcagtttctggaagaaccactt

SEQ ID NO: 66836 - DNA, 25 bp, Homo sapien
acaaagcatctaaaaccgcagtttc

SEQ ID NO: 66837 - DNA, 25 bp, Homo sapien
gggcgatctgaggtgccatcatcaa

SEQ ID NO: 66838 - DNA, 25 bp, Homo sapien
ggtagcggtcaattccagccaccag

SEQ ID NO: 66839 - DNA, 25 bp, Homo sapien
aggggatatccacagagtaccttgt

SEQ ID NO: 66840 - DNA, 25 bp, Homo sapien
tttgtccaaggggatatccacagag

SEQ ID NO: 66841 - DNA, 25 bp, Homo sapien
cgacagttttgtccaaggggatatc

SEQ ID NO: 66842 - DNA, 25 bp, Homo sapien
aaccacttgttcttgcctgtcttgt

SEQ ID NO: 66843 - DNA, 25 bp, Homo sapien
gggcgatctgaggtgccatcatcaa

SEQ ID NO: 66844 - DNA, 25 bp, Homo sapien
aagagcaggatctctgaagacatcc

SEQ ID NO: 66845 - DNA, 25 bp, Homo sapien
tttgtccaaggggatatccacagag

SEQ ID NO: 66846 - DNA, 25 bp, Homo sapien
acaaagcatctaaaaccgcagtttc

SEQ ID NO: 66847 - DNA, 25 bp, Homo sapien
ttgcgtttaagagcaggatctctga

SEQ ID NO: 66848 - DNA, 25 bp, Homo sapien
gaagacatccttattgacgacagtt

SEQ ID NO: 66849 - DNA, 25 bp, Homo sapien
aggggatatccacagagtaccttgt

SEQ ID NO: 66850 - DNA, 25 bp, Homo sapien
accgcagtttctggaagaaccactt

SEQ ID NO: 66851 - DNA, 25 bp, Homo sapien
ggtagcggtcaattccagccaccag

SEQ ID NO: 66852 - DNA, 25 bp, Homo sapien
cgacagttttgtccaaggggatatc

SEQ ID NO: 66853 - DNA, 25 bp, Homo sapien
gaagacatccttattgacgacagtt

SEQ ID NO: 66854 - DNA, 25 bp, Homo sapien
aagagcaggatctctgaagacatcc

SEQ ID NO: 66855 - DNA, 25 bp, Homo sapien
ttgcgtttaagagcaggatctctga

SEQ ID NO: 66856 - DNA, 25 bp, Homo sapien
aaccacttgttcttgcctgtcttgt

SEQ ID NO: 66857 - DNA, 25 bp, Homo sapien
accgcagtttctggaagaaccactt

SEQ ID NO: 66858 - DNA, 25 bp, Homo sapien
acaaagcatctaaaaccgcagtttc

SEQ ID NO: 66859 - DNA, 25 bp, Homo sapien
gggcgatctgaggtgccatcatcaa

SEQ ID NO: 66860 - DNA, 25 bp, Homo sapien
ggtagcggtcaattccagccaccag

SEQ ID NO: 66861 - DNA, 25 bp, Homo sapien
aggggatatccacagagtaccttgt

SEQ ID NO: 66862 - DNA, 25 bp, Homo sapien
tttgtccaaggggatatccacagag

SEQ ID NO: 66863 - DNA, 25 bp, Homo sapien
cgacagttttgtccaaggggatatc

SEQ ID NO: 66864 - DNA, 25 bp, Homo sapien
tttgtccaaggggatatccacagag

SEQ ID NO: 66865 - DNA, 25 bp, Homo sapien
ggtagcggtcaattccagccaccag

SEQ ID NO: 66866 - DNA, 25 bp, Homo sapien
ttgcgtttaagagcaggatctctga

SEQ ID NO: 66867 - DNA, 25 bp, Homo sapien
acaaagcatctaaaaccgcagtttc

SEQ ID NO: 66868 - DNA, 25 bp, Homo sapien
accgcagtttctggaagaaccactt

SEQ ID NO: 66869 - DNA, 25 bp, Homo sapien
cgacagttttgtccaaggggatatc

SEQ ID NO: 66870 - DNA, 25 bp, Homo sapien
gaagacatccttattgacgacagtt

SEQ ID NO: 66871 - DNA, 25 bp, Homo sapien
gggcgatctgaggtgccatcatcaa

SEQ ID NO: 66872 - DNA, 25 bp, Homo sapien
aggggatatccacagagtaccttgt

SEQ ID NO: 66873 - DNA, 25 bp, Homo sapien
aagagcaggatctctgaagacatcc

SEQ ID NO: 66874 - DNA, 25 bp, Homo sapien
aaccacttgttcttgcctgtcttgt

SEQ ID NO: 66875 - DNA, 25 bp, Homo sapien
gaagacatccttattgacgacagtt

SEQ ID NO: 66876 - DNA, 25 bp, Homo sapien
aagagcaggatctctgaagacatcc

SEQ ID NO: 66877 - DNA, 25 bp, Homo sapien
ttgcgtttaagagcaggatctctga

SEQ ID NO: 66878 - DNA, 25 bp, Homo sapien
aaccacttgttcttgcctgtcttgt

SEQ ID NO: 66879 - DNA, 25 bp, Homo sapien
accgcagtttctggaagaaccactt

SEQ ID NO: 66880 - DNA, 25 bp, Homo sapien
acaaagcatctaaaaccgcagtttc

SEQ ID NO: 66881 - DNA, 25 bp, Homo sapien
gggcgatctgaggtgccatcatcaa

SEQ ID NO: 66882 - DNA, 25 bp, Homo sapien
ggtagcggtcaattccagccaccag

SEQ ID NO: 66883 - DNA, 25 bp, Homo sapien
aggggatatccacagagtaccttgt

SEQ ID NO: 66884 - DNA, 25 bp, Homo sapien
tttgtccaaggggatatccacagag

SEQ ID NO: 66885 - DNA, 25 bp, Homo sapien
cgacagttttgtccaaggggatatc

SEQ ID NO: 66886 - DNA, 25 bp, Homo sapien
gggcgatctgaggtgccatcatcaa

SEQ ID NO: 66887 - DNA, 25 bp, Homo sapien
aggggatatccacagagtaccttgt

SEQ ID NO: 66888 - DNA, 25 bp, Homo sapien
tttgtccaaggggatatccacagag

SEQ ID NO: 66889 - DNA, 25 bp, Homo sapien
ttgcgtttaagagcaggatctctga

SEQ ID NO: 66890 - DNA, 25 bp, Homo sapien
aagagcaggatctctgaagacatcc

SEQ ID NO: 66891 - DNA, 25 bp, Homo sapien
cgacagttttgtccaaggggatatc

SEQ ID NO: 66892 - DNA, 25 bp, Homo sapien
ggtagcggtcaattccagccaccag

SEQ ID NO: 66893 - DNA, 25 bp, Homo sapien
accgcagtttctggaagaaccactt

SEQ ID NO: 66894 - DNA, 25 bp, Homo sapien
aaccacttgttcttgcctgtcttgt

SEQ ID NO: 66895 - DNA, 25 bp, Homo sapien
acaaagcatctaaaaccgcagtttc

SEQ ID NO: 66896 - DNA, 25 bp, Homo sapien
gaagacatccttattgacgacagtt

SEQ ID NO: 66897 - DNA, 25 bp, Homo sapien
gaagacatccttattgacgacagtt

SEQ ID NO: 66898 - DNA, 25 bp, Homo sapien
aagagcaggatctctgaagacatcc

SEQ ID NO: 66899 - DNA, 25 bp, Homo sapien
ttgcgtttaagagcaggatctctga

SEQ ID NO: 66900 - DNA, 25 bp, Homo sapien
aaccacttgttcttgcctgtcttgt

SEQ ID NO: 66901 - DNA, 25 bp, Homo sapien
accgcagtttctggaagaaccactt

SEQ ID NO: 66902 - DNA, 25 bp, Homo sapien
acaaagcatctaaaaccgcagtttc

SEQ ID NO: 66903 - DNA, 25 bp, Homo sapien
gggcgatctgaggtgccatcatcaa

SEQ ID NO: 66904 - DNA, 25 bp, Homo sapien
ggtagcggtcaattccagccaccag

SEQ ID NO: 66905 - DNA, 25 bp, Homo sapien
aggggatatccacagagtaccttgt

SEQ ID NO: 66906 - DNA, 25 bp, Homo sapien
tttgtccaaggggatatccacagag

SEQ ID NO: 66907 - DNA, 25 bp, Homo sapien
cgacagttttgtccaaggggatatc

SEQ ID NO: 66908 - DNA, 25 bp, Homo sapien
cgacagttttgtccaaggggatatc

SEQ ID NO: 66909 - DNA, 25 bp, Homo sapien
aggggatatccacagagtaccttgt

SEQ ID NO: 66910 - DNA, 25 bp, Homo sapien
ttgcgtttaagagcaggatctctga

SEQ ID NO: 66911 - DNA, 25 bp, Homo sapien
gaagacatccttattgacgacagtt

SEQ ID NO: 66912 - DNA, 25 bp, Homo sapien
ggtagcggtcaattccagccaccag

SEQ ID NO: 66913 - DNA, 25 bp, Homo sapien
aaccacttgttcttgcctgtcttgt

SEQ ID NO: 66914 - DNA, 25 bp, Homo sapien
acaaagcatctaaaaccgcagtttc

SEQ ID NO: 66915 - DNA, 25 bp, Homo sapien
gggcgatctgaggtgccatcatcaa

SEQ ID NO: 66916 - DNA, 25 bp, Homo sapien
accgcagtttctggaagaaccactt

SEQ ID NO: 66917 - DNA, 25 bp, Homo sapien
tttgtccaaggggatatccacagag

SEQ ID NO: 66918 - DNA, 25 bp, Homo sapien
aagagcaggatctctgaagacatcc

SEQ ID NO: 66919 - DNA, 25 bp, Homo sapien
gaagacatccttattgacgacagtt

SEQ ID NO: 66920 - DNA, 25 bp, Homo sapien
aagagcaggatctctgaagacatcc

SEQ ID NO: 66921 - DNA, 25 bp, Homo sapien
ttgcgtttaagagcaggatctctga

SEQ ID NO: 66922 - DNA, 25 bp, Homo sapien
aaccacttgttcttgcctgtcttgt

SEQ ID NO: 66923 - DNA, 25 bp, Homo sapien
accgcagtttctggaagaaccactt

SEQ ID NO: 66924 - DNA, 25 bp, Homo sapien
acaaagcatctaaaaccgcagtttc

SEQ ID NO: 66925 - DNA, 25 bp, Homo sapien
gggcgatctgaggtgccatcatcaa

SEQ ID NO: 66926 - DNA, 25 bp, Homo sapien
ggtagcggtcaattccagccaccag

SEQ ID NO: 66927 - DNA, 25 bp, Homo sapien
aggggatatccacagagtaccttgt

SEQ ID NO: 66928 - DNA, 25 bp, Homo sapien
tttgtccaaggggatatccacagag

SEQ ID NO: 66929 - DNA, 25 bp, Homo sapien
cgacagttttgtccaaggggatatc

SEQ ID NO: 66930 - DNA, 25 bp, Homo sapien
gaagacatccttattgacgacagtt

SEQ ID NO: 66931 - DNA, 25 bp, Homo sapien
aagagcaggatctctgaagacatcc

SEQ ID NO: 66932 - DNA, 25 bp, Homo sapien
ttgcgtttaagagcaggatctctga

SEQ ID NO: 66933 - DNA, 25 bp, Homo sapien
aaccacttgttcttgcctgtcttgt

SEQ ID NO: 66934 - DNA, 25 bp, Homo sapien
accgcagtttctggaagaaccactt

SEQ ID NO: 66935 - DNA, 25 bp, Homo sapien
acaaagcatctaaaaccgcagtttc

SEQ ID NO: 66936 - DNA, 25 bp, Homo sapien
gggcgatctgaggtgccatcatcaa

SEQ ID NO: 66937 - DNA, 25 bp, Homo sapien
ggtagcggtcaattccagccaccag

SEQ ID NO: 66938 - DNA, 25 bp, Homo sapien
aggggatatccacagagtaccttgt

SEQ ID NO: 66939 - DNA, 25 bp, Homo sapien
tttgtccaaggggatatccacagag

SEQ ID NO: 66940 - DNA, 25 bp, Homo sapien
cgacagttttgtccaaggggatatc

SEQ ID NO: 66941 - DNA, 25 bp, Homo sapien
gggcgatctgaggtgccatcatcaa

SEQ ID NO: 66942 - DNA, 25 bp, Homo sapien
aggggatatccacagagtaccttgt

SEQ ID NO: 66943 - DNA, 25 bp, Homo sapien
cgacagttttgtccaaggggatatc

SEQ ID NO: 66944 - DNA, 25 bp, Homo sapien
aagagcaggatctctgaagacatcc

SEQ ID NO: 66945 - DNA, 25 bp, Homo sapien
ggtagcggtcaattccagccaccag

SEQ ID NO: 66946 - DNA, 25 bp, Homo sapien
gaagacatccttattgacgacagtt

SEQ ID NO: 66947 - DNA, 25 bp, Homo sapien
acaaagcatctaaaaccgcagtttc

SEQ ID NO: 66948 - DNA, 25 bp, Homo sapien
ttgcgtttaagagcaggatctctga

SEQ ID NO: 66949 - DNA, 25 bp, Homo sapien
accgcagtttctggaagaaccactt

SEQ ID NO: 66950 - DNA, 25 bp, Homo sapien
tttgtccaaggggatatccacagag

SEQ ID NO: 66951 - DNA, 25 bp, Homo sapien
aaccacttgttcttgcctgtcttgt

SEQ ID NO: 66952 - DNA, 25 bp, Homo sapien
gggcgatctgaggtgccatcatcaa

SEQ ID NO: 66953 - DNA, 25 bp, Homo sapien
aggggatatccacagagtaccttgt

SEQ ID NO: 66954 - DNA, 25 bp, Homo sapien
aagagcaggatctctgaagacatcc

SEQ ID NO: 66955 - DNA, 25 bp, Homo sapien
cgacagttttgtccaaggggatatc

SEQ ID NO: 66956 - DNA, 25 bp, Homo sapien
accgcagtttctggaagaaccactt

SEQ ID NO: 66957 - DNA, 25 bp, Homo sapien
ggtagcggtcaattccagccaccag

SEQ ID NO: 66958 - DNA, 25 bp, Homo sapien
gaagacatccttattgacgacagtt

SEQ ID NO: 66959 - DNA, 25 bp, Homo sapien
acaaagcatctaaaaccgcagtttc

SEQ ID NO: 66960 - DNA, 25 bp, Homo sapien
ttgcgtttaagagcaggatctctga

SEQ ID NO: 66961 - DNA, 25 bp, Homo sapien
tttgtccaaggggatatccacagag

SEQ ID NO: 66962 - DNA, 25 bp, Homo sapien
aaccacttgttcttgcctgtcttgt

SEQ ID NO: 66963 - DNA, 25 bp, Homo sapien
gggcgatctgaggtgccatcatcaa

SEQ ID NO: 66964 - DNA, 25 bp, Homo sapien
aggggatatccacagagtaccttgt

SEQ ID NO: 66965 - DNA, 25 bp, Homo sapien
cgacagttttgtccaaggggatatc

SEQ ID NO: 66966 - DNA, 25 bp, Homo sapien
aagagcaggatctctgaagacatcc

SEQ ID NO: 66967 - DNA, 25 bp, Homo sapien
ggtagcggtcaattccagccaccag

SEQ ID NO: 66968 - DNA, 25 bp, Homo sapien
gaagacatccttattgacgacagtt

SEQ ID NO: 66969 - DNA, 25 bp, Homo sapien
acaaagcatctaaaaccgcagtttc

SEQ ID NO: 66970 - DNA, 25 bp, Homo sapien
ttgcgtttaagagcaggatctctga

SEQ ID NO: 66971 - DNA, 25 bp, Homo sapien
tttgtccaaggggatatccacagag

SEQ ID NO: 66972 - DNA, 25 bp, Homo sapien
accgcagtttctggaagaaccactt

SEQ ID NO: 66973 - DNA, 25 bp, Homo sapien
aaccacttgttcttgcctgtcttgt

SEQ ID NO: 66974 - DNA, 25 bp, Homo sapien
gggcgatctgaggtgccatcatcaa

SEQ ID NO: 66975 - DNA, 25 bp, Homo sapien
aggggatatccacagagtaccttgt

SEQ ID NO: 66976 - DNA, 25 bp, Homo sapien
aagagcaggatctctgaagacatcc

SEQ ID NO: 66977 - DNA, 25 bp, Homo sapien
cgacagttttgtccaaggggatatc

SEQ ID NO: 66978 - DNA, 25 bp, Homo sapien
ggtagcggtcaattccagccaccag

SEQ ID NO: 66979 - DNA, 25 bp, Homo sapien
gaagacatccttattgacgacagtt

SEQ ID NO: 66980 - DNA, 25 bp, Homo sapien
acaaagcatctaaaaccgcagtttc

SEQ ID NO: 66981 - DNA, 25 bp, Homo sapien
ttgcgtttaagagcaggatctctga

SEQ ID NO: 66982 - DNA, 25 bp, Homo sapien
accgcagtttctggaagaaccactt

SEQ ID NO: 66983 - DNA, 25 bp, Homo sapien
tttgtccaaggggatatccacagag

SEQ ID NO: 66984 - DNA, 25 bp, Homo sapien
aaccacttgttcttgcctgtcttgt

SEQ ID NO: 66985 - DNA, 25 bp, Homo sapien
gggcgatctgaggtgccatcatcaa

SEQ ID NO: 66986 - DNA, 25 bp, Homo sapien
aggggatatccacagagtaccttgt

SEQ ID NO: 66987 - DNA, 25 bp, Homo sapien
cgacagttttgtccaaggggatatc

SEQ ID NO: 66988 - DNA, 25 bp, Homo sapien
aagagcaggatctctgaagacatcc

SEQ ID NO: 66989 - DNA, 25 bp, Homo sapien
ggtagcggtcaattccagccaccag

SEQ ID NO: 66990 - DNA, 25 bp, Homo sapien
gaagacatccttattgacgacagtt

SEQ ID NO: 66991 - DNA, 25 bp, Homo sapien
acaaagcatctaaaaccgcagtttc

SEQ ID NO: 66992 - DNA, 25 bp, Homo sapien
tttgtccaaggggatatccacagag

SEQ ID NO: 66993 - DNA, 25 bp, Homo sapien
ttgcgtttaagagcaggatctctga

SEQ ID NO: 66994 - DNA, 25 bp, Homo sapien
accgcagtttctggaagaaccactt

SEQ ID NO: 66995 - DNA, 25 bp, Homo sapien
aaccacttgttcttgcctgtcttgt

SEQ ID NO: 66996 - DNA, 25 bp, Homo sapien
gggcgatctgaggtgccatcatcaa

SEQ ID NO: 66997 - DNA, 25 bp, Homo sapien
aggggatatccacagagtaccttgt

SEQ ID NO: 66998 - DNA, 25 bp, Homo sapien
cgacagttttgtccaaggggatatc

SEQ ID NO: 66999 - DNA, 25 bp, Homo sapien
aagagcaggatctctgaagacatcc

SEQ ID NO: 67000 - DNA, 25 bp, Homo sapien
ggtagcggtcaattccagccaccag

SEQ ID NO: 67001 - DNA, 25 bp, Homo sapien
gaagacatccttattgacgacagtt

SEQ ID NO: 67002 - DNA, 25 bp, Homo sapien
acaaagcatctaaaaccgcagtttc

SEQ ID NO: 67003 - DNA, 25 bp, Homo sapien
ttgcgtttaagagcaggatctctga

SEQ ID NO: 67004 - DNA, 25 bp, Homo sapien
tttgtccaaggggatatccacagag

SEQ ID NO: 67005 - DNA, 25 bp, Homo sapien
accgcagtttctggaagaaccactt

SEQ ID NO: 67006 - DNA, 25 bp, Homo sapien
aaccacttgttcttgcctgtcttgt

SEQ ID NO: 67007 - DNA, 25 bp, Homo sapien
gggcgatctgaggtgccatcatcaa

SEQ ID NO: 67008 - DNA, 25 bp, Homo sapien
aggggatatccacagagtaccttgt

SEQ ID NO: 67009 - DNA, 25 bp, Homo sapien
cgacagttttgtccaaggggatatc

SEQ ID NO: 67010 - DNA, 25 bp, Homo sapien
aagagcaggatctctgaagacatcc

SEQ ID NO: 67011 - DNA, 25 bp, Homo sapien
ggtagcggtcaattccagccaccag

SEQ ID NO: 67012 - DNA, 25 bp, Homo sapien
gaagacatccttattgacgacagtt

SEQ ID NO: 67013 - DNA, 25 bp, Homo sapien
acaaagcatctaaaaccgcagtttc

SEQ ID NO: 67014 - DNA, 25 bp, Homo sapien
ttgcgtttaagagcaggatctctga

SEQ ID NO: 67015 - DNA, 25 bp, Homo sapien
tttgtccaaggggatatccacagag

SEQ ID NO: 67016 - DNA, 25 bp, Homo sapien
accgcagtttctggaagaaccactt

SEQ ID NO: 67017 - DNA, 25 bp, Homo sapien
aaccacttgttcttgcctgtcttgt

SEQ ID NO: 67018 - DNA, 25 bp, Homo sapien
gggcgatctgaggtgccatcatcaa

SEQ ID NO: 67019 - DNA, 25 bp, Homo sapien
aggggatatccacagagtaccttgt

SEQ ID NO: 67020 - DNA, 25 bp, Homo sapien
cgacagttttgtccaaggggatatc

SEQ ID NO: 67021 - DNA, 25 bp, Homo sapien
aagagcaggatctctgaagacatcc

SEQ ID NO: 67022 - DNA, 25 bp, Homo sapien
ggtagcggtcaattccagccaccag

SEQ ID NO: 67023 - DNA, 25 bp, Homo sapien
gaagacatccttattgacgacagtt

SEQ ID NO: 67024 - DNA, 25 bp, Homo sapien
acaaagcatctaaaaccgcagtttc

SEQ ID NO: 67025 - DNA, 25 bp, Homo sapien
ttgcgtttaagagcaggatctctga

SEQ ID NO: 67026 - DNA, 25 bp, Homo sapien
tttgtccaaggggatatccacagag

SEQ ID NO: 67027 - DNA, 25 bp, Homo sapien
aaccacttgttcttgcctgtcttgt

SEQ ID NO: 67028 - DNA, 25 bp, Homo sapien
accgcagtttctggaagaaccactt

SEQ ID NO: 67029 - DNA, 25 bp, Homo sapien
gggcgatctgaggtgccatcatcaa

SEQ ID NO: 67030 - DNA, 25 bp, Homo sapien
aggggatatccacagagtaccttgt

SEQ ID NO: 67031 - DNA, 25 bp, Homo sapien
cgacagttttgtccaaggggatatc

SEQ ID NO: 67032 - DNA, 25 bp, Homo sapien
aagagcaggatctctgaagacatcc

SEQ ID NO: 67033 - DNA, 25 bp, Homo sapien
ggtagcggtcaattccagccaccag

SEQ ID NO: 67034 - DNA, 25 bp, Homo sapien
gaagacatccttattgacgacagtt

SEQ ID NO: 67035 - DNA, 25 bp, Homo sapien
acaaagcatctaaaaccgcagtttc

SEQ ID NO: 67036 - DNA, 25 bp, Homo sapien
accgcagtttctggaagaaccactt

SEQ ID NO: 67037 - DNA, 25 bp, Homo sapien
ttgcgtttaagagcaggatctctga

SEQ ID NO: 67038 - DNA, 25 bp, Homo sapien
tttgtccaaggggatatccacagag

SEQ ID NO: 67039 - DNA, 25 bp, Homo sapien
aaccacttgttcttgcctgtcttgt

SEQ ID NO: 67040 - DNA, 25 bp, Homo sapien
aagagcaggatctctgaagacatcc

SEQ ID NO: 67041 - DNA, 25 bp, Homo sapien
tttgtccaaggggatatccacagag

SEQ ID NO: 67042 - DNA, 25 bp, Homo sapien
ttgcgtttaagagcaggatctctga

SEQ ID NO: 67043 - DNA, 25 bp, Homo sapien
gggcgatctgaggtgccatcatcaa

SEQ ID NO: 67044 - DNA, 25 bp, Homo sapien
ggtagcggtcaattccagccaccag

SEQ ID NO: 67045 - DNA, 25 bp, Homo sapien
cgacagttttgtccaaggggatatc

SEQ ID NO: 67046 - DNA, 25 bp, Homo sapien
aggggatatccacagagtaccttgt

SEQ ID NO: 67047 - DNA, 25 bp, Homo sapien
accgcagtttctggaagaaccactt

SEQ ID NO: 67048 - DNA, 25 bp, Homo sapien
aaccacttgttcttgcctgtcttgt

SEQ ID NO: 67049 - DNA, 25 bp, Homo sapien
gaagacatccttattgacgacagtt

SEQ ID NO: 67050 - DNA, 25 bp, Homo sapien
acaaagcatctaaaaccgcagtttc

SEQ ID NO: 67051 - DNA, 25 bp, Homo sapien
gggcgatctgaggtgccatcatcaa

SEQ ID NO: 67052 - DNA, 25 bp, Homo sapien
aggggatatccacagagtaccttgt

SEQ ID NO: 67053 - DNA, 25 bp, Homo sapien
cgacagttttgtccaaggggatatc

SEQ ID NO: 67054 - DNA, 25 bp, Homo sapien
aagagcaggatctctgaagacatcc

SEQ ID NO: 67055 - DNA, 25 bp, Homo sapien
ggtagcggtcaattccagccaccag

SEQ ID NO: 67056 - DNA, 25 bp, Homo sapien
gaagacatccttattgacgacagtt

SEQ ID NO: 67057 - DNA, 25 bp, Homo sapien
acaaagcatctaaaaccgcagtttc

SEQ ID NO: 67058 - DNA, 25 bp, Homo sapien
ttgcgtttaagagcaggatctctga

SEQ ID NO: 67059 - DNA, 25 bp, Homo sapien
tttgtccaaggggatatccacagag

SEQ ID NO: 67060 - DNA, 25 bp, Homo sapien
aaccacttgttcttgcctgtcttgt

SEQ ID NO: 67061 - DNA, 25 bp, Homo sapien
accgcagtttctggaagaaccactt

SEQ ID NO: 67062 - DNA, 25 bp, Homo sapien
gaagacatccttattgacgacagtt

SEQ ID NO: 67063 - DNA, 25 bp, Homo sapien
aagagcaggatctctgaagacatcc

SEQ ID NO: 67064 - DNA, 25 bp, Homo sapien
ttgcgtttaagagcaggatctctga

SEQ ID NO: 67065 - DNA, 25 bp, Homo sapien
aaccacttgttcttgcctgtcttgt

SEQ ID NO: 67066 - DNA, 25 bp, Homo sapien
accgcagtttctggaagaaccactt

SEQ ID NO: 67067 - DNA, 25 bp, Homo sapien
acaaagcatctaaaaccgcagtttc

SEQ ID NO: 67068 - DNA, 25 bp, Homo sapien
gggcgatctgaggtgccatcatcaa

SEQ ID NO: 67069 - DNA, 25 bp, Homo sapien
ggtagcggtcaattccagccaccag

SEQ ID NO: 67070 - DNA, 25 bp, Homo sapien
aggggatatccacagagtaccttgt

SEQ ID NO: 67071 - DNA, 25 bp, Homo sapien
tttgtccaaggggatatccacagag

SEQ ID NO: 67072 - DNA, 25 bp, Homo sapien
cgacagttttgtccaaggggatatc

SEQ ID NO: 67073 - DNA, 25 bp, Homo sapien
gaaactgcggttttagatgctttgt

SEQ ID NO: 67074 - DNA, 25 bp, Homo sapien
aagtggttcttccagaaactgcggt

SEQ ID NO: 67075 - DNA, 25 bp, Homo sapien
ctctgtggatatccccttggacaaa

SEQ ID NO: 67076 - DNA, 25 bp, Homo sapien
tcagagatcctgctcttaaacgcaa

SEQ ID NO: 67077 - DNA, 25 bp, Homo sapien
gatatccccttggacaaaactgtcg

SEQ ID NO: 67078 - DNA, 25 bp, Homo sapien
acaagacaggcaagaacaagtggtt

SEQ ID NO: 67079 - DNA, 25 bp, Homo sapien
aactgtcgtcaataaggatgtcttc

SEQ ID NO: 67080 - DNA, 25 bp, Homo sapien
ggatgtcttcagagatcctgctctt

SEQ ID NO: 67081 - DNA, 25 bp, Homo sapien
acaaggtactctgtggatatcccct

SEQ ID NO: 67082 - DNA, 25 bp, Homo sapien
ttgatgatggcacctcagatcgccc

SEQ ID NO: 67083 - DNA, 25 bp, Homo sapien
ctggtggctggaattgaccgctacc

SEQ ID NO: 67084 - DNA, 25 bp, Homo sapien
gggcgatctgaggtgccatcatcaa

SEQ ID NO: 67085 - DNA, 25 bp, Homo sapien
aggggatatccacagagtaccttgt

SEQ ID NO: 67086 - DNA, 25 bp, Homo sapien
cgacagttttgtccaaggggatatc

SEQ ID NO: 67087 - DNA, 25 bp, Homo sapien
aagagcaggatctctgaagacatcc

SEQ ID NO: 67088 - DNA, 25 bp, Homo sapien
ggtagcggtcaattccagccaccag

SEQ ID NO: 67089 - DNA, 25 bp, Homo sapien
gaagacatccttattgacgacagtt

SEQ ID NO: 67090 - DNA, 25 bp, Homo sapien
acaaagcatctaaaaccgcagtttc

SEQ ID NO: 67091 - DNA, 25 bp, Homo sapien
ttgcgtttaagagcaggatctctga

SEQ ID NO: 67092 - DNA, 25 bp, Homo sapien
tttgtccaaggggatatccacagag

SEQ ID NO: 67093 - DNA, 25 bp, Homo sapien
accgcagtttctggaagaaccactt

SEQ ID NO: 67094 - DNA, 25 bp, Homo sapien
aaccacttgttcttgcctgtcttgt

SEQ ID NO: 67095 - DNA, 25 bp, Homo sapien
acaaagcatctaaaaccgcagtttc

SEQ ID NO: 67096 - DNA, 25 bp, Homo sapien
gggcgatctgaggtgccatcatcaa

SEQ ID NO: 67097 - DNA, 25 bp, Homo sapien
gaagacatccttattgacgacagtt

SEQ ID NO: 67098 - DNA, 25 bp, Homo sapien
cgacagttttgtccaaggggatatc

SEQ ID NO: 67099 - DNA, 25 bp, Homo sapien
aagagcaggatctctgaagacatcc

SEQ ID NO: 67100 - DNA, 25 bp, Homo sapien
accgcagtttctggaagaaccactt

SEQ ID NO: 67101 - DNA, 25 bp, Homo sapien
aaccacttgttcttgcctgtcttgt

SEQ ID NO: 67102 - DNA, 25 bp, Homo sapien
tttgtccaaggggatatccacagag

SEQ ID NO: 67103 - DNA, 25 bp, Homo sapien
ttgcgtttaagagcaggatctctga

SEQ ID NO: 67104 - DNA, 25 bp, Homo sapien
ggtagcggtcaattccagccaccag

SEQ ID NO: 67105 - DNA, 25 bp, Homo sapien
aggggatatccacagagtaccttgt

SEQ ID NO: 67106 - DNA, 25 bp, Homo sapien
gaagacatccttattgacgacagtt

SEQ ID NO: 67107 - DNA, 25 bp, Homo sapien
aagagcaggatctctgaagacatcc

SEQ ID NO: 67108 - DNA, 25 bp, Homo sapien
ttgcgtttaagagcaggatctctga

SEQ ID NO: 67109 - DNA, 25 bp, Homo sapien
aaccacttgttcttgcctgtcttgt

SEQ ID NO: 67110 - DNA, 25 bp, Homo sapien
accgcagtttctggaagaaccactt

SEQ ID NO: 67111 - DNA, 25 bp, Homo sapien
acaaagcatctaaaaccgcagtttc

SEQ ID NO: 67112 - DNA, 25 bp, Homo sapien
gggcgatctgaggtgccatcatcaa

SEQ ID NO: 67113 - DNA, 25 bp, Homo sapien
ggtagcggtcaattccagccaccag

SEQ ID NO: 67114 - DNA, 25 bp, Homo sapien
aggggatatccacagagtaccttgt

SEQ ID NO: 67115 - DNA, 25 bp, Homo sapien
tttgtccaaggggatatccacagag

SEQ ID NO: 67116 - DNA, 25 bp, Homo sapien
cgacagttttgtccaaggggatatc

SEQ ID NO: 67117 - DNA, 25 bp, Homo sapien
ttgcgtttaagagcaggatctctga

SEQ ID NO: 67118 - DNA, 25 bp, Homo sapien
cgacagttttgtccaaggggatatc

SEQ ID NO: 67119 - DNA, 25 bp, Homo sapien
aaccacttgttcttgcctgtcttgt

SEQ ID NO: 67120 - DNA, 25 bp, Homo sapien
gaagacatccttattgacgacagtt

SEQ ID NO: 67121 - DNA, 25 bp, Homo sapien
aggggatatccacagagtaccttgt

SEQ ID NO: 67122 - DNA, 25 bp, Homo sapien
aagagcaggatctctgaagacatcc

SEQ ID NO: 67123 - DNA, 25 bp, Homo sapien
accgcagtttctggaagaaccactt

SEQ ID NO: 67124 - DNA, 25 bp, Homo sapien
gggcgatctgaggtgccatcatcaa

SEQ ID NO: 67125 - DNA, 25 bp, Homo sapien
ggtagcggtcaattccagccaccag

SEQ ID NO: 67126 - DNA, 25 bp, Homo sapien
tttgtccaaggggatatccacagag

SEQ ID NO: 67127 - DNA, 25 bp, Homo sapien
acaaagcatctaaaaccgcagtttc

SEQ ID NO: 67128 - DNA, 25 bp, Homo sapien
gaagacatccttattgacgacagtt

SEQ ID NO: 67129 - DNA, 25 bp, Homo sapien
aagagcaggatctctgaagacatcc

SEQ ID NO: 67130 - DNA, 25 bp, Homo sapien
ttgcgtttaagagcaggatctctga

SEQ ID NO: 67131 - DNA, 25 bp, Homo sapien
aaccacttgttcttgcctgtcttgt

SEQ ID NO: 67132 - DNA, 25 bp, Homo sapien
accgcagtttctggaagaaccactt

SEQ ID NO: 67133 - DNA, 25 bp, Homo sapien
acaaagcatctaaaaccgcagtttc

SEQ ID NO: 67134 - DNA, 25 bp, Homo sapien
gggcgatctgaggtgccatcatcaa

SEQ ID NO: 67135 - DNA, 25 bp, Homo sapien
ggtagcggtcaattccagccaccag

SEQ ID NO: 67136 - DNA, 25 bp, Homo sapien
aggggatatccacagagtaccttgt

SEQ ID NO: 67137 - DNA, 25 bp, Homo sapien
tttgtccaaggggatatccacagag

SEQ ID NO: 67138 - DNA, 25 bp, Homo sapien
cgacagttttgtccaaggggatatc

SEQ ID NO: 67139 - DNA, 25 bp, Homo sapien
aggggatatccacagagtaccttgt

SEQ ID NO: 67140 - DNA, 25 bp, Homo sapien
acaaagcatctaaaaccgcagtttc

SEQ ID NO: 67141 - DNA, 25 bp, Homo sapien
gaagacatccttattgacgacagtt

SEQ ID NO: 67142 - DNA, 25 bp, Homo sapien
tttgtccaaggggatatccacagag

SEQ ID NO: 67143 - DNA, 25 bp, Homo sapien
aagagcaggatctctgaagacatcc

SEQ ID NO: 67144 - DNA, 25 bp, Homo sapien
ttgcgtttaagagcaggatctctga

SEQ ID NO: 67145 - DNA, 25 bp, Homo sapien
ggtagcggtcaattccagccaccag

SEQ ID NO: 67146 - DNA, 25 bp, Homo sapien
cgacagttttgtccaaggggatatc

SEQ ID NO: 67147 - DNA, 25 bp, Homo sapien
aaccacttgttcttgcctgtcttgt

SEQ ID NO: 67148 - DNA, 25 bp, Homo sapien
gggcgatctgaggtgccatcatcaa

SEQ ID NO: 67149 - DNA, 25 bp, Homo sapien
accgcagtttctggaagaaccactt

SEQ ID NO: 67150 - DNA, 25 bp, Homo sapien
gggcgatctgaggtgccatcatcaa

SEQ ID NO: 67151 - DNA, 25 bp, Homo sapien
ggtagcggtcaattccagccaccag

SEQ ID NO: 67152 - DNA, 25 bp, Homo sapien
aggggatatccacagagtaccttgt

SEQ ID NO: 67153 - DNA, 25 bp, Homo sapien
tttgtccaaggggatatccacagag

SEQ ID NO: 67154 - DNA, 25 bp, Homo sapien
cgacagttttgtccaaggggatatc

SEQ ID NO: 67155 - DNA, 25 bp, Homo sapien
gaagacatccttattgacgacagtt

SEQ ID NO: 67156 - DNA, 25 bp, Homo sapien
aagagcaggatctctgaagacatcc

SEQ ID NO: 67157 - DNA, 25 bp, Homo sapien
ttgcgtttaagagcaggatctctga

SEQ ID NO: 67158 - DNA, 25 bp, Homo sapien
aaccacttgttcttgcctgtcttgt

SEQ ID NO: 67159 - DNA, 25 bp, Homo sapien
accgcagtttctggaagaaccactt

SEQ ID NO: 67160 - DNA, 25 bp, Homo sapien
acaaagcatctaaaaccgcagtttc

SEQ ID NO: 67161 - DNA, 25 bp, Homo sapien
gaagacatccttattgacgacagtt

SEQ ID NO: 67162 - DNA, 25 bp, Homo sapien
aagagcaggatctctgaagacatcc

SEQ ID NO: 67163 - DNA, 25 bp, Homo sapien
ttgcgtttaagagcaggatctctga

SEQ ID NO: 67164 - DNA, 25 bp, Homo sapien
aaccacttgttcttgcctgtcttgt

SEQ ID NO: 67165 - DNA, 25 bp, Homo sapien
accgcagtttctggaagaaccactt

SEQ ID NO: 67166 - DNA, 25 bp, Homo sapien
acaaagcatctaaaaccgcagtttc

SEQ ID NO: 67167 - DNA, 25 bp, Homo sapien
gggcgatctgaggtgccatcatcaa

SEQ ID NO: 67168 - DNA, 25 bp, Homo sapien
ggtagcggtcaattccagccaccag

SEQ ID NO: 67169 - DNA, 25 bp, Homo sapien
aggggatatccacagagtaccttgt

SEQ ID NO: 67170 - DNA, 25 bp, Homo sapien
tttgtccaaggggatatccacagag

SEQ ID NO: 67171 - DNA, 25 bp, Homo sapien
cgacagttttgtccaaggggatatc

SEQ ID NO: 67172 - DNA, 25 bp, Homo sapien
gggcgatctgaggtgccatcatcaa

SEQ ID NO: 67173 - DNA, 25 bp, Homo sapien
aaccacttgttcttgcctgtcttgt

SEQ ID NO: 67174 - DNA, 25 bp, Homo sapien
cgacagttttgtccaaggggatatc

SEQ ID NO: 67175 - DNA, 25 bp, Homo sapien
aagagcaggatctctgaagacatcc

SEQ ID NO: 67176 - DNA, 25 bp, Homo sapien
acaaagcatctaaaaccgcagtttc

SEQ ID NO: 67177 - DNA, 25 bp, Homo sapien
tttgtccaaggggatatccacagag

SEQ ID NO: 67178 - DNA, 25 bp, Homo sapien
aggggatatccacagagtaccttgt

SEQ ID NO: 67179 - DNA, 25 bp, Homo sapien
accgcagtttctggaagaaccactt

SEQ ID NO: 67180 - DNA, 25 bp, Homo sapien
ggtagcggtcaattccagccaccag

SEQ ID NO: 67181 - DNA, 25 bp, Homo sapien
gaagacatccttattgacgacagtt

SEQ ID NO: 67182 - DNA, 25 bp, Homo sapien
ttgcgtttaagagcaggatctctga

SEQ ID NO: 67183 - DNA, 25 bp, Homo sapien
gaagacatccttattgacgacagtt

SEQ ID NO: 67184 - DNA, 25 bp, Homo sapien
aagagcaggatctctgaagacatcc

SEQ ID NO: 67185 - DNA, 25 bp, Homo sapien
ttgcgtttaagagcaggatctctga

SEQ ID NO: 67186 - DNA, 25 bp, Homo sapien
aaccacttgttcttgcctgtcttgt

SEQ ID NO: 67187 - DNA, 25 bp, Homo sapien
accgcagtttctggaagaaccactt

SEQ ID NO: 67188 - DNA, 25 bp, Homo sapien
acaaagcatctaaaaccgcagtttc

SEQ ID NO: 67189 - DNA, 25 bp, Homo sapien
gggcgatctgaggtgccatcatcaa

SEQ ID NO: 67190 - DNA, 25 bp, Homo sapien
ggtagcggtcaattccagccaccag

SEQ ID NO: 67191 - DNA, 25 bp, Homo sapien
aggggatatccacagagtaccttgt

SEQ ID NO: 67192 - DNA, 25 bp, Homo sapien
tttgtccaaggggatatccacagag

SEQ ID NO: 67193 - DNA, 25 bp, Homo sapien
cgacagttttgtccaaggggatatc

SEQ ID NO: 67194 - DNA, 25 bp, Homo sapien
gaagacatccttattgacgacagtt

SEQ ID NO: 67195 - DNA, 25 bp, Homo sapien
aagagcaggatctctgaagacatcc

SEQ ID NO: 67196 - DNA, 25 bp, Homo sapien
ggtagcggtcaattccagccaccag

SEQ ID NO: 67197 - DNA, 25 bp, Homo sapien
aaccacttgttcttgcctgtcttgt

SEQ ID NO: 67198 - DNA, 25 bp, Homo sapien
acaaagcatctaaaaccgcagtttc

SEQ ID NO: 67199 - DNA, 25 bp, Homo sapien
cgacagttttgtccaaggggatatc

SEQ ID NO: 67200 - DNA, 25 bp, Homo sapien
gggcgatctgaggtgccatcatcaa

SEQ ID NO: 67201 - DNA, 25 bp, Homo sapien
accgcagtttctggaagaaccactt

SEQ ID NO: 67202 - DNA, 25 bp, Homo sapien
tttgtccaaggggatatccacagag

SEQ ID NO: 67203 - DNA, 25 bp, Homo sapien
ttgcgtttaagagcaggatctctga

SEQ ID NO: 67204 - DNA, 25 bp, Homo sapien
aggggatatccacagagtaccttgt

SEQ ID NO: 67205 - DNA, 25 bp, Homo sapien
gaagacatccttattgacgacagtt

SEQ ID NO: 67206 - DNA, 25 bp, Homo sapien
aagagcaggatctctgaagacatcc

SEQ ID NO: 67207 - DNA, 25 bp, Homo sapien
ttgcgtttaagagcaggatctctga

SEQ ID NO: 67208 - DNA, 25 bp, Homo sapien
aaccacttgttcttgcctgtcttgt

SEQ ID NO: 67209 - DNA, 25 bp, Homo sapien
accgcagtttctggaagaaccactt

SEQ ID NO: 67210 - DNA, 25 bp, Homo sapien
acaaagcatctaaaaccgcagtttc

SEQ ID NO: 67211 - DNA, 25 bp, Homo sapien
gggcgatctgaggtgccatcatcaa

SEQ ID NO: 67212 - DNA, 25 bp, Homo sapien
ggtagcggtcaattccagccaccag

SEQ ID NO: 67213 - DNA, 25 bp, Homo sapien
aggggatatccacagagtaccttgt

SEQ ID NO: 67214 - DNA, 25 bp, Homo sapien
tttgtccaaggggatatccacagag

SEQ ID NO: 67215 - DNA, 25 bp, Homo sapien
cgacagttttgtccaaggggatatc

SEQ ID NO: 67216 - DNA, 25 bp, Homo sapien
gaagacatccttattgacgacagtt

SEQ ID NO: 67217 - DNA, 25 bp, Homo sapien
acaaagcatctaaaaccgcagtttc

SEQ ID NO: 67218 - DNA, 25 bp, Homo sapien
aaccacttgttcttgcctgtcttgt

SEQ ID NO: 67219 - DNA, 25 bp, Homo sapien
gggcgatctgaggtgccatcatcaa

SEQ ID NO: 67220 - DNA, 25 bp, Homo sapien
ttgcgtttaagagcaggatctctga

SEQ ID NO: 67221 - DNA, 25 bp, Homo sapien
aagagcaggatctctgaagacatcc

SEQ ID NO: 67222 - DNA, 25 bp, Homo sapien
aggggatatccacagagtaccttgt

SEQ ID NO: 67223 - DNA, 25 bp, Homo sapien
accgcagtttctggaagaaccactt

SEQ ID NO: 67224 - DNA, 25 bp, Homo sapien
ggtagcggtcaattccagccaccag

SEQ ID NO: 67225 - DNA, 25 bp, Homo sapien
tttgtccaaggggatatccacagag

SEQ ID NO: 67226 - DNA, 25 bp, Homo sapien
cgacagttttgtccaaggggatatc

SEQ ID NO: 67227 - DNA, 25 bp, Homo sapien
gaagacatccttattgacgacagtt

SEQ ID NO: 67228 - DNA, 25 bp, Homo sapien
aagagcaggatctctgaagacatcc

SEQ ID NO: 67229 - DNA, 25 bp, Homo sapien
ttgcgtttaagagcaggatctctga

SEQ ID NO: 67230 - DNA, 25 bp, Homo sapien
aaccacttgttcttgcctgtcttgt

SEQ ID NO: 67231 - DNA, 25 bp, Homo sapien
accgcagtttctggaagaaccactt

SEQ ID NO: 67232 - DNA, 25 bp, Homo sapien
acaaagcatctaaaaccgcagtttc

SEQ ID NO: 67233 - DNA, 25 bp, Homo sapien
gggcgatctgaggtgccatcatcaa

SEQ ID NO: 67234 - DNA, 25 bp, Homo sapien
ggtagcggtcaattccagccaccag

SEQ ID NO: 67235 - DNA, 25 bp, Homo sapien
aggggatatccacagagtaccttgt

SEQ ID NO: 67236 - DNA, 25 bp, Homo sapien
tttgtccaaggggatatccacagag

SEQ ID NO: 67237 - DNA, 25 bp, Homo sapien
cgacagttttgtccaaggggatatc

SEQ ID NO: 67238 - DNA, 25 bp, Homo sapien
cgacagttttgtccaaggggatatc

SEQ ID NO: 67239 - DNA, 25 bp, Homo sapien
aagagcaggatctctgaagacatcc

SEQ ID NO: 67240 - DNA, 25 bp, Homo sapien
gaagacatccttattgacgacagtt

SEQ ID NO: 67241 - DNA, 25 bp, Homo sapien
aggggatatccacagagtaccttgt

SEQ ID NO: 67242 - DNA, 25 bp, Homo sapien
accgcagtttctggaagaaccactt

SEQ ID NO: 67243 - DNA, 25 bp, Homo sapien
gggcgatctgaggtgccatcatcaa

SEQ ID NO: 67244 - DNA, 25 bp, Homo sapien
tttgtccaaggggatatccacagag

SEQ ID NO: 67245 - DNA, 25 bp, Homo sapien
acaaagcatctaaaaccgcagtttc

SEQ ID NO: 67246 - DNA, 25 bp, Homo sapien
aaccacttgttcttgcctgtcttgt

SEQ ID NO: 67247 - DNA, 25 bp, Homo sapien
ttgcgtttaagagcaggatctctga

SEQ ID NO: 67248 - DNA, 25 bp, Homo sapien
ggtagcggtcaattccagccaccag

SEQ ID NO: 67249 - DNA, 25 bp, Homo sapien
gaagacatccttattgacgacagtt

SEQ ID NO: 67250 - DNA, 25 bp, Homo sapien
aagagcaggatctctgaagacatcc

SEQ ID NO: 67251 - DNA, 25 bp, Homo sapien
ttgcgtttaagagcaggatctctga

SEQ ID NO: 67252 - DNA, 25 bp, Homo sapien
aaccacttgttcttgcctgtcttgt

SEQ ID NO: 67253 - DNA, 25 bp, Homo sapien
accgcagtttctggaagaaccactt

SEQ ID NO: 67254 - DNA, 25 bp, Homo sapien
acaaagcatctaaaaccgcagtttc

SEQ ID NO: 67255 - DNA, 25 bp, Homo sapien
gggcgatctgaggtgccatcatcaa

SEQ ID NO: 67256 - DNA, 25 bp, Homo sapien
ggtagcggtcaattccagccaccag

SEQ ID NO: 67257 - DNA, 25 bp, Homo sapien
aggggatatccacagagtaccttgt

SEQ ID NO: 67258 - DNA, 25 bp, Homo sapien
tttgtccaaggggatatccacagag

SEQ ID NO: 67259 - DNA, 25 bp, Homo sapien
cgacagttttgtccaaggggatatc

SEQ ID NO: 67260 - DNA, 25 bp, Homo sapien
acaaagcatctaaaaccgcagtttc

SEQ ID NO: 67261 - DNA, 25 bp, Homo sapien
aagagcaggatctctgaagacatcc

SEQ ID NO: 67262 - DNA, 25 bp, Homo sapien
ggtagcggtcaattccagccaccag

SEQ ID NO: 67263 - DNA, 25 bp, Homo sapien
gggcgatctgaggtgccatcatcaa

SEQ ID NO: 67264 - DNA, 25 bp, Homo sapien
ttgcgtttaagagcaggatctctga

SEQ ID NO: 67265 - DNA, 25 bp, Homo sapien
aaccacttgttcttgcctgtcttgt

SEQ ID NO: 67266 - DNA, 25 bp, Homo sapien
accgcagtttctggaagaaccactt

SEQ ID NO: 67267 - DNA, 25 bp, Homo sapien
cgacagttttgtccaaggggatatc

SEQ ID NO: 67268 - DNA, 25 bp, Homo sapien
tttgtccaaggggatatccacagag

SEQ ID NO: 67269 - DNA, 25 bp, Homo sapien
aggggatatccacagagtaccttgt

SEQ ID NO: 67270 - DNA, 25 bp, Homo sapien
gaagacatccttattgacgacagtt

SEQ ID NO: 67271 - DNA, 25 bp, Homo sapien
aaccacttgttcttgcctgtcttgt

SEQ ID NO: 67272 - DNA, 25 bp, Homo sapien
aggggatatccacagagtaccttgt

SEQ ID NO: 67273 - DNA, 25 bp, Homo sapien
aagagcaggatctctgaagacatcc

SEQ ID NO: 67274 - DNA, 25 bp, Homo sapien
tttgtccaaggggatatccacagag

SEQ ID NO: 67275 - DNA, 25 bp, Homo sapien
acaaagcatctaaaaccgcagtttc

SEQ ID NO: 67276 - DNA, 25 bp, Homo sapien
ttgcgtttaagagcaggatctctga

SEQ ID NO: 67277 - DNA, 25 bp, Homo sapien
cgacagttttgtccaaggggatatc

SEQ ID NO: 67278 - DNA, 25 bp, Homo sapien
gggcgatctgaggtgccatcatcaa

SEQ ID NO: 67279 - DNA, 25 bp, Homo sapien
ggtagcggtcaattccagccaccag

SEQ ID NO: 67280 - DNA, 25 bp, Homo sapien
gaagacatccttattgacgacagtt

SEQ ID NO: 67281 - DNA, 25 bp, Homo sapien
accgcagtttctggaagaaccactt

SEQ ID NO: 67282 - DNA, 25 bp, Homo sapien
gaagacatccttattgacgacagtt

SEQ ID NO: 67283 - DNA, 25 bp, Homo sapien
aagagcaggatctctgaagacatcc

SEQ ID NO: 67284 - DNA, 25 bp, Homo sapien
ttgcgtttaagagcaggatctctga

SEQ ID NO: 67285 - DNA, 25 bp, Homo sapien
aaccacttgttcttgcctgtcttgt

SEQ ID NO: 67286 - DNA, 25 bp, Homo sapien
accgcagtttctggaagaaccactt

SEQ ID NO: 67287 - DNA, 25 bp, Homo sapien
acaaagcatctaaaaccgcagtttc

SEQ ID NO: 67288 - DNA, 25 bp, Homo sapien
gggcgatctgaggtgccatcatcaa

SEQ ID NO: 67289 - DNA, 25 bp, Homo sapien
ggtagcggtcaattccagccaccag

SEQ ID NO: 67290 - DNA, 25 bp, Homo sapien
aggggatatccacagagtaccttgt

SEQ ID NO: 67291 - DNA, 25 bp, Homo sapien
tttgtccaaggggatatccacagag

SEQ ID NO: 67292 - DNA, 25 bp, Homo sapien
cgacagttttgtccaaggggatatc

SEQ ID NO: 67293 - DNA, 25 bp, Homo sapien
gaagacatccttattgacgacagtt

SEQ ID NO: 67294 - DNA, 25 bp, Homo sapien
cgacagttttgtccaaggggatatc

SEQ ID NO: 67295 - DNA, 25 bp, Homo sapien
acaaagcatctaaaaccgcagtttc

SEQ ID NO: 67296 - DNA, 25 bp, Homo sapien
aagagcaggatctctgaagacatcc

SEQ ID NO: 67297 - DNA, 25 bp, Homo sapien
aaccacttgttcttgcctgtcttgt

SEQ ID NO: 67298 - DNA, 25 bp, Homo sapien
ttgcgtttaagagcaggatctctga

SEQ ID NO: 67299 - DNA, 25 bp, Homo sapien
aggggatatccacagagtaccttgt

SEQ ID NO: 67300 - DNA, 25 bp, Homo sapien
tttgtccaaggggatatccacagag

SEQ ID NO: 67301 - DNA, 25 bp, Homo sapien
gggcgatctgaggtgccatcatcaa

SEQ ID NO: 67302 - DNA, 25 bp, Homo sapien
accgcagtttctggaagaaccactt

SEQ ID NO: 67303 - DNA, 25 bp, Homo sapien
ggtagcggtcaattccagccaccag

SEQ ID NO: 67304 - DNA, 25 bp, Homo sapien
gggcgatctgaggtgccatcatcaa

SEQ ID NO: 67305 - DNA, 25 bp, Homo sapien
ggtagcggtcaattccagccaccag

SEQ ID NO: 67306 - DNA, 25 bp, Homo sapien
aggggatatccacagagtaccttgt

SEQ ID NO: 67307 - DNA, 25 bp, Homo sapien
tttgtccaaggggatatccacagag

SEQ ID NO: 67308 - DNA, 25 bp, Homo sapien
cgacagttttgtccaaggggatatc

SEQ ID NO: 67309 - DNA, 25 bp, Homo sapien
gaagacatccttattgacgacagtt

SEQ ID NO: 67310 - DNA, 25 bp, Homo sapien
aagagcaggatctctgaagacatcc

SEQ ID NO: 67311 - DNA, 25 bp, Homo sapien
ttgcgtttaagagcaggatctctga

SEQ ID NO: 67312 - DNA, 25 bp, Homo sapien
aaccacttgttcttgcctgtcttgt

SEQ ID NO: 67313 - DNA, 25 bp, Homo sapien
accgcagtttctggaagaaccactt

SEQ ID NO: 67314 - DNA, 25 bp, Homo sapien
acaaagcatctaaaaccgcagtttc

SEQ ID NO: 67315 - DNA, 25 bp, Homo sapien
gggcgatctgaggtgccatcatcaa

SEQ ID NO: 67316 - DNA, 25 bp, Homo sapien
aagagcaggatctctgaagacatcc

SEQ ID NO: 67317 - DNA, 25 bp, Homo sapien
aggggatatccacagagtaccttgt

SEQ ID NO: 67318 - DNA, 25 bp, Homo sapien
acaaagcatctaaaaccgcagtttc

SEQ ID NO: 67319 - DNA, 25 bp, Homo sapien
ggtagcggtcaattccagccaccag

SEQ ID NO: 67320 - DNA, 25 bp, Homo sapien
ttgcgtttaagagcaggatctctga

SEQ ID NO: 67321 - DNA, 25 bp, Homo sapien
tttgtccaaggggatatccacagag

SEQ ID NO: 67322 - DNA, 25 bp, Homo sapien
accgcagtttctggaagaaccactt

SEQ ID NO: 67323 - DNA, 25 bp, Homo sapien
cgacagttttgtccaaggggatatc

SEQ ID NO: 67324 - DNA, 25 bp, Homo sapien
gaagacatccttattgacgacagtt

SEQ ID NO: 67325 - DNA, 25 bp, Homo sapien
aaccacttgttcttgcctgtcttgt

SEQ ID NO: 67326 - DNA, 25 bp, Homo sapien
gaagacatccttattgacgacagtt

SEQ ID NO: 67327 - DNA, 25 bp, Homo sapien
aagagcaggatctctgaagacatcc

SEQ ID NO: 67328 - DNA, 25 bp, Homo sapien
ttgcgtttaagagcaggatctctga

SEQ ID NO: 67329 - DNA, 25 bp, Homo sapien
aaccacttgttcttgcctgtcttgt

SEQ ID NO: 67330 - DNA, 25 bp, Homo sapien
accgcagtttctggaagaaccactt

SEQ ID NO: 67331 - DNA, 25 bp, Homo sapien
acaaagcatctaaaaccgcagtttc

SEQ ID NO: 67332 - DNA, 25 bp, Homo sapien
gggcgatctgaggtgccatcatcaa

SEQ ID NO: 67333 - DNA, 25 bp, Homo sapien
ggtagcggtcaattccagccaccag

SEQ ID NO: 67334 - DNA, 25 bp, Homo sapien
aggggatatccacagagtaccttgt

SEQ ID NO: 67335 - DNA, 25 bp, Homo sapien
tttgtccaaggggatatccacagag

SEQ ID NO: 67336 - DNA, 25 bp, Homo sapien
cgacagttttgtccaaggggatatc

SEQ ID NO: 67337 - DNA, 25 bp, Homo sapien
tttgtccaaggggatatccacagag

SEQ ID NO: 67338 - DNA, 25 bp, Homo sapien
acaaagcatctaaaaccgcagtttc

SEQ ID NO: 67339 - DNA, 25 bp, Homo sapien
gaagacatccttattgacgacagtt

SEQ ID NO: 67340 - DNA, 25 bp, Homo sapien
ggtagcggtcaattccagccaccag

SEQ ID NO: 67341 - DNA, 25 bp, Homo sapien
accgcagtttctggaagaaccactt

SEQ ID NO: 67342 - DNA, 25 bp, Homo sapien
aaccacttgttcttgcctgtcttgt

SEQ ID NO: 67343 - DNA, 25 bp, Homo sapien
cgacagttttgtccaaggggatatc

SEQ ID NO: 67344 - DNA, 25 bp, Homo sapien
aagagcaggatctctgaagacatcc

SEQ ID NO: 67345 - DNA, 25 bp, Homo sapien
aggggatatccacagagtaccttgt

SEQ ID NO: 67346 - DNA, 25 bp, Homo sapien
gggcgatctgaggtgccatcatcaa

SEQ ID NO: 67347 - DNA, 25 bp, Homo sapien
ttgcgtttaagagcaggatctctga

SEQ ID NO: 67348 - DNA, 25 bp, Homo sapien
gaagacatccttattgacgacagtt

SEQ ID NO: 67349 - DNA, 25 bp, Homo sapien
aagagcaggatctctgaagacatcc

SEQ ID NO: 67350 - DNA, 25 bp, Homo sapien
ttgcgtttaagagcaggatctctga

SEQ ID NO: 67351 - DNA, 25 bp, Homo sapien
aaccacttgttcttgcctgtcttgt

SEQ ID NO: 67352 - DNA, 25 bp, Homo sapien
accgcagtttctggaagaaccactt

SEQ ID NO: 67353 - DNA, 25 bp, Homo sapien
acaaagcatctaaaaccgcagtttc

SEQ ID NO: 67354 - DNA, 25 bp, Homo sapien
gggcgatctgaggtgccatcatcaa

SEQ ID NO: 67355 - DNA, 25 bp, Homo sapien
ggtagcggtcaattccagccaccag

SEQ ID NO: 67356 - DNA, 25 bp, Homo sapien
aggggatatccacagagtaccttgt

SEQ ID NO: 67357 - DNA, 25 bp, Homo sapien
tttgtccaaggggatatccacagag

SEQ ID NO: 67358 - DNA, 25 bp, Homo sapien
cgacagttttgtccaaggggatatc

SEQ ID NO: 67359 - DNA, 25 bp, Homo sapien
cgacagttttgtccaaggggatatc

SEQ ID NO: 67360 - DNA, 25 bp, Homo sapien
ggtagcggtcaattccagccaccag

SEQ ID NO: 67361 - DNA, 25 bp, Homo sapien
acaaagcatctaaaaccgcagtttc

SEQ ID NO: 67362 - DNA, 25 bp, Homo sapien
tttgtccaaggggatatccacagag

SEQ ID NO: 67363 - DNA, 25 bp, Homo sapien
aaccacttgttcttgcctgtcttgt

SEQ ID NO: 67364 - DNA, 25 bp, Homo sapien
gggcgatctgaggtgccatcatcaa

SEQ ID NO: 67365 - DNA, 25 bp, Homo sapien
aggggatatccacagagtaccttgt

SEQ ID NO: 67366 - DNA, 25 bp, Homo sapien
aagagcaggatctctgaagacatcc

SEQ ID NO: 67367 - DNA, 25 bp, Homo sapien
ttgcgtttaagagcaggatctctga

SEQ ID NO: 67368 - DNA, 25 bp, Homo sapien
accgcagtttctggaagaaccactt

SEQ ID NO: 67369 - DNA, 25 bp, Homo sapien
gaagacatccttattgacgacagtt

SEQ ID NO: 67370 - DNA, 25 bp, Homo sapien
gaagacatccttattgacgacagtt

SEQ ID NO: 67371 - DNA, 25 bp, Homo sapien
aagagcaggatctctgaagacatcc

SEQ ID NO: 67372 - DNA, 25 bp, Homo sapien
ttgcgtttaagagcaggatctctga

SEQ ID NO: 67373 - DNA, 25 bp, Homo sapien
aaccacttgttcttgcctgtcttgt

SEQ ID NO: 67374 - DNA, 25 bp, Homo sapien
accgcagtttctggaagaaccactt

SEQ ID NO: 67375 - DNA, 25 bp, Homo sapien
acaaagcatctaaaaccgcagtttc

SEQ ID NO: 67376 - DNA, 25 bp, Homo sapien
gggcgatctgaggtgccatcatcaa

SEQ ID NO: 67377 - DNA, 25 bp, Homo sapien
ggtagcggtcaattccagccaccag

SEQ ID NO: 67378 - DNA, 25 bp, Homo sapien
aggggatatccacagagtaccttgt

SEQ ID NO: 67379 - DNA, 25 bp, Homo sapien
tttgtccaaggggatatccacagag

SEQ ID NO: 67380 - DNA, 25 bp, Homo sapien
cgacagttttgtccaaggggatatc

SEQ ID NO: 67381 - DNA, 25 bp, Homo sapien
aagagcaggatctctgaagacatcc

SEQ ID NO: 67382 - DNA, 25 bp, Homo sapien
aaccacttgttcttgcctgtcttgt

SEQ ID NO: 67383 - DNA, 25 bp, Homo sapien
gggcgatctgaggtgccatcatcaa

SEQ ID NO: 67384 - DNA, 25 bp, Homo sapien
gaagacatccttattgacgacagtt

SEQ ID NO: 67385 - DNA, 25 bp, Homo sapien
aggggatatccacagagtaccttgt

SEQ ID NO: 67386 - DNA, 25 bp, Homo sapien
cgacagttttgtccaaggggatatc

SEQ ID NO: 67387 - DNA, 25 bp, Homo sapien
ggtagcggtcaattccagccaccag

SEQ ID NO: 67388 - DNA, 25 bp, Homo sapien
accgcagtttctggaagaaccactt

SEQ ID NO: 67389 - DNA, 25 bp, Homo sapien
acaaagcatctaaaaccgcagtttc

SEQ ID NO: 67390 - DNA, 25 bp, Homo sapien
ttgcgtttaagagcaggatctctga

SEQ ID NO: 67391 - DNA, 25 bp, Homo sapien
tttgtccaaggggatatccacagag

SEQ ID NO: 67392 - DNA, 25 bp, Homo sapien
gaagacatccttattgacgacagtt

SEQ ID NO: 67393 - DNA, 25 bp, Homo sapien
aagagcaggatctctgaagacatcc

SEQ ID NO: 67394 - DNA, 25 bp, Homo sapien
ttgcgtttaagagcaggatctctga

SEQ ID NO: 67395 - DNA, 25 bp, Homo sapien
aaccacttgttcttgcctgtcttgt

SEQ ID NO: 67396 - DNA, 25 bp, Homo sapien
accgcagtttctggaagaaccactt

SEQ ID NO: 67397 - DNA, 25 bp, Homo sapien
acaaagcatctaaaaccgcagtttc

SEQ ID NO: 67398 - DNA, 25 bp, Homo sapien
gggcgatctgaggtgccatcatcaa

SEQ ID NO: 67399 - DNA, 25 bp, Homo sapien
ggtagcggtcaattccagccaccag

SEQ ID NO: 67400 - DNA, 25 bp, Homo sapien
aggggatatccacagagtaccttgt

SEQ ID NO: 67401 - DNA, 25 bp, Homo sapien
tttgtccaaggggatatccacagag

SEQ ID NO: 67402 - DNA, 25 bp, Homo sapien
cgacagttttgtccaaggggatatc

SEQ ID NO: 67403 - DNA, 25 bp, Homo sapien
gaagacatccttattgacgacagtt

SEQ ID NO: 67404 - DNA, 25 bp, Homo sapien
aagagcaggatctctgaagacatcc

SEQ ID NO: 67405 - DNA, 25 bp, Homo sapien
ttgcgtttaagagcaggatctctga

SEQ ID NO: 67406 - DNA, 25 bp, Homo sapien
aaccacttgttcttgcctgtcttgt

SEQ ID NO: 67407 - DNA, 25 bp, Homo sapien
accgcagtttctggaagaaccactt

SEQ ID NO: 67408 - DNA, 25 bp, Homo sapien
acaaagcatctaaaaccgcagtttc

SEQ ID NO: 67409 - DNA, 25 bp, Homo sapien
gggcgatctgaggtgccatcatcaa

SEQ ID NO: 67410 - DNA, 25 bp, Homo sapien
ggtagcggtcaattccagccaccag

SEQ ID NO: 67411 - DNA, 25 bp, Homo sapien
aggggatatccacagagtaccttgt

SEQ ID NO: 67412 - DNA, 25 bp, Homo sapien
tttgtccaaggggatatccacagag

SEQ ID NO: 67413 - DNA, 25 bp, Homo sapien
cgacagttttgtccaaggggatatc

SEQ ID NO: 67414 - DNA, 25 bp, Homo sapien
tttgtccaaggggatatccacagag

SEQ ID NO: 67415 - DNA, 25 bp, Homo sapien
ttgcgtttaagagcaggatctctga

SEQ ID NO: 67416 - DNA, 25 bp, Homo sapien
gggcgatctgaggtgccatcatcaa

SEQ ID NO: 67417 - DNA, 25 bp, Homo sapien
aaccacttgttcttgcctgtcttgt

SEQ ID NO: 67418 - DNA, 25 bp, Homo sapien
aggggatatccacagagtaccttgt

SEQ ID NO: 67419 - DNA, 25 bp, Homo sapien
aagagcaggatctctgaagacatcc

SEQ ID NO: 67420 - DNA, 25 bp, Homo sapien
accgcagtttctggaagaaccactt

SEQ ID NO: 67421 - DNA, 25 bp, Homo sapien
ggtagcggtcaattccagccaccag

SEQ ID NO: 67422 - DNA, 25 bp, Homo sapien
cgacagttttgtccaaggggatatc

SEQ ID NO: 67423 - DNA, 25 bp, Homo sapien
acaaagcatctaaaaccgcagtttc

SEQ ID NO: 67424 - DNA, 25 bp, Homo sapien
gaagacatccttattgacgacagtt

SEQ ID NO: 67425 - DNA, 25 bp, Homo sapien
gaagacatccttattgacgacagtt

SEQ ID NO: 67426 - DNA, 25 bp, Homo sapien
aagagcaggatctctgaagacatcc

SEQ ID NO: 67427 - DNA, 25 bp, Homo sapien
ttgcgtttaagagcaggatctctga

SEQ ID NO: 67428 - DNA, 25 bp, Homo sapien
aaccacttgttcttgcctgtcttgt

SEQ ID NO: 67429 - DNA, 25 bp, Homo sapien
accgcagtttctggaagaaccactt

SEQ ID NO: 67430 - DNA, 25 bp, Homo sapien
acaaagcatctaaaaccgcagtttc

SEQ ID NO: 67431 - DNA, 25 bp, Homo sapien
gggcgatctgaggtgccatcatcaa

SEQ ID NO: 67432 - DNA, 25 bp, Homo sapien
ggtagcggtcaattccagccaccag

SEQ ID NO: 67433 - DNA, 25 bp, Homo sapien
aggggatatccacagagtaccttgt

SEQ ID NO: 67434 - DNA, 25 bp, Homo sapien
tttgtccaaggggatatccacagag

SEQ ID NO: 67435 - DNA, 25 bp, Homo sapien
cgacagttttgtccaaggggatatc

SEQ ID NO: 67436 - DNA, 25 bp, Homo sapien
gaagacatccttattgacgacagtt

SEQ ID NO: 67437 - DNA, 25 bp, Homo sapien
acaaagcatctaaaaccgcagtttc

SEQ ID NO: 67438 - DNA, 25 bp, Homo sapien
ggtagcggtcaattccagccaccag

SEQ ID NO: 67439 - DNA, 25 bp, Homo sapien
ttgcgtttaagagcaggatctctga

SEQ ID NO: 67440 - DNA, 25 bp, Homo sapien
tttgtccaaggggatatccacagag

SEQ ID NO: 67441 - DNA, 25 bp, Homo sapien
cgacagttttgtccaaggggatatc

SEQ ID NO: 67442 - DNA, 25 bp, Homo sapien
aggggatatccacagagtaccttgt

SEQ ID NO: 67443 - DNA, 25 bp, Homo sapien
gggcgatctgaggtgccatcatcaa

SEQ ID NO: 67444 - DNA, 25 bp, Homo sapien
aagagcaggatctctgaagacatcc

SEQ ID NO: 67445 - DNA, 25 bp, Homo sapien
accgcagtttctggaagaaccactt

SEQ ID NO: 67446 - DNA, 25 bp, Homo sapien
aaccacttgttcttgcctgtcttgt

SEQ ID NO: 67447 - DNA, 25 bp, Homo sapien
gaagacatccttattgacgacagtt

SEQ ID NO: 67448 - DNA, 25 bp, Homo sapien
aagagcaggatctctgaagacatcc

SEQ ID NO: 67449 - DNA, 25 bp, Homo sapien
ttgcgtttaagagcaggatctctga

SEQ ID NO: 67450 - DNA, 25 bp, Homo sapien
aaccacttgttcttgcctgtcttgt

SEQ ID NO: 67451 - DNA, 25 bp, Homo sapien
accgcagtttctggaagaaccactt

SEQ ID NO: 67452 - DNA, 25 bp, Homo sapien
acaaagcatctaaaaccgcagtttc

SEQ ID NO: 67453 - DNA, 25 bp, Homo sapien
gggcgatctgaggtgccatcatcaa

SEQ ID NO: 67454 - DNA, 25 bp, Homo sapien
ggtagcggtcaattccagccaccag

SEQ ID NO: 67455 - DNA, 25 bp, Homo sapien
aggggatatccacagagtaccttgt

SEQ ID NO: 67456 - DNA, 25 bp, Homo sapien
tttgtccaaggggatatccacagag

SEQ ID NO: 67457 - DNA, 25 bp, Homo sapien
cgacagttttgtccaaggggatatc

SEQ ID NO: 67458 - DNA, 25 bp, Homo sapien
aaccacttgttcttgcctgtcttgt

SEQ ID NO: 67459 - DNA, 25 bp, Homo sapien
ttgcgtttaagagcaggatctctga

SEQ ID NO: 67460 - DNA, 25 bp, Homo sapien
cgacagttttgtccaaggggatatc

SEQ ID NO: 67461 - DNA, 25 bp, Homo sapien
gaagacatccttattgacgacagtt

SEQ ID NO: 67462 - DNA, 25 bp, Homo sapien
ggtagcggtcaattccagccaccag

SEQ ID NO: 67463 - DNA, 25 bp, Homo sapien
aagagcaggatctctgaagacatcc

SEQ ID NO: 67464 - DNA, 25 bp, Homo sapien
accgcagtttctggaagaaccactt

SEQ ID NO: 67465 - DNA, 25 bp, Homo sapien
acaaagcatctaaaaccgcagtttc

SEQ ID NO: 67466 - DNA, 25 bp, Homo sapien
gggcgatctgaggtgccatcatcaa

SEQ ID NO: 67467 - DNA, 25 bp, Homo sapien
tttgtccaaggggatatccacagag

SEQ ID NO: 67468 - DNA, 25 bp, Homo sapien
aggggatatccacagagtaccttgt

SEQ ID NO: 67469 - DNA, 25 bp, Homo sapien
gaagacatccttattgacgacagtt

SEQ ID NO: 67470 - DNA, 25 bp, Homo sapien
aagagcaggatctctgaagacatcc

SEQ ID NO: 67471 - DNA, 25 bp, Homo sapien
ttgcgtttaagagcaggatctctga

SEQ ID NO: 67472 - DNA, 25 bp, Homo sapien
aaccacttgttcttgcctgtcttgt

SEQ ID NO: 67473 - DNA, 25 bp, Homo sapien
accgcagtttctggaagaaccactt

SEQ ID NO: 67474 - DNA, 25 bp, Homo sapien
acaaagcatctaaaaccgcagtttc

SEQ ID NO: 67475 - DNA, 25 bp, Homo sapien
gggcgatctgaggtgccatcatcaa

SEQ ID NO: 67476 - DNA, 25 bp, Homo sapien
ggtagcggtcaattccagccaccag

SEQ ID NO: 67477 - DNA, 25 bp, Homo sapien
aggggatatccacagagtaccttgt

SEQ ID NO: 67478 - DNA, 25 bp, Homo sapien
tttgtccaaggggatatccacagag

SEQ ID NO: 67479 - DNA, 25 bp, Homo sapien
cgacagttttgtccaaggggatatc

SEQ ID NO: 67480 - DNA, 25 bp, Homo sapien
acaaagcatctaaaaccgcagtttc

SEQ ID NO: 67481 - DNA, 25 bp, Homo sapien
tttgtccaaggggatatccacagag

SEQ ID NO: 67482 - DNA, 25 bp, Homo sapien
ggtagcggtcaattccagccaccag

SEQ ID NO: 67483 - DNA, 25 bp, Homo sapien
aaccacttgttcttgcctgtcttgt

SEQ ID NO: 67484 - DNA, 25 bp, Homo sapien
gggcgatctgaggtgccatcatcaa

SEQ ID NO: 67485 - DNA, 25 bp, Homo sapien
ttgcgtttaagagcaggatctctga

SEQ ID NO: 67486 - DNA, 25 bp, Homo sapien
aagagcaggatctctgaagacatcc

SEQ ID NO: 67487 - DNA, 25 bp, Homo sapien
cgacagttttgtccaaggggatatc

SEQ ID NO: 67488 - DNA, 25 bp, Homo sapien
accgcagtttctggaagaaccactt

SEQ ID NO: 67489 - DNA, 25 bp, Homo sapien
aggggatatccacagagtaccttgt

SEQ ID NO: 67490 - DNA, 25 bp, Homo sapien
gaagacatccttattgacgacagtt

SEQ ID NO: 67491 - DNA, 25 bp, Homo sapien
gaagacatccttattgacgacagtt

SEQ ID NO: 67492 - DNA, 25 bp, Homo sapien
aagagcaggatctctgaagacatcc

SEQ ID NO: 67493 - DNA, 25 bp, Homo sapien
ttgcgtttaagagcaggatctctga

SEQ ID NO: 67494 - DNA, 25 bp, Homo sapien
aaccacttgttcttgcctgtcttgt

SEQ ID NO: 67495 - DNA, 25 bp, Homo sapien
accgcagtttctggaagaaccactt

SEQ ID NO: 67496 - DNA, 25 bp, Homo sapien
acaaagcatctaaaaccgcagtttc

SEQ ID NO: 67497 - DNA, 25 bp, Homo sapien
gggcgatctgaggtgccatcatcaa

SEQ ID NO: 67498 - DNA, 25 bp, Homo sapien
ggtagcggtcaattccagccaccag

SEQ ID NO: 67499 - DNA, 25 bp, Homo sapien
aggggatatccacagagtaccttgt

SEQ ID NO: 67500 - DNA, 25 bp, Homo sapien
tttgtccaaggggatatccacagag

SEQ ID NO: 67501 - DNA, 25 bp, Homo sapien
cgacagttttgtccaaggggatatc

SEQ ID NO: 67502 - DNA, 25 bp, Homo sapien
cgacagttttgtccaaggggatatc

SEQ ID NO: 67503 - DNA, 25 bp, Homo sapien
aagagcaggatctctgaagacatcc

SEQ ID NO: 67504 - DNA, 25 bp, Homo sapien
ggtagcggtcaattccagccaccag

SEQ ID NO: 67505 - DNA, 25 bp, Homo sapien
acaaagcatctaaaaccgcagtttc

SEQ ID NO: 67506 - DNA, 25 bp, Homo sapien
aggggatatccacagagtaccttgt

SEQ ID NO: 67507 - DNA, 25 bp, Homo sapien
tttgtccaaggggatatccacagag

SEQ ID NO: 67508 - DNA, 25 bp, Homo sapien
gaagacatccttattgacgacagtt

SEQ ID NO: 67509 - DNA, 25 bp, Homo sapien
aaccacttgttcttgcctgtcttgt

SEQ ID NO: 67510 - DNA, 25 bp, Homo sapien
gggcgatctgaggtgccatcatcaa

SEQ ID NO: 67511 - DNA, 25 bp, Homo sapien
ttgcgtttaagagcaggatctctga

SEQ ID NO: 67512 - DNA, 25 bp, Homo sapien
accgcagtttctggaagaaccactt

SEQ ID NO: 67513 - DNA, 25 bp, Homo sapien
ttgcgtttaagagcaggatctctga

SEQ ID NO: 67514 - DNA, 25 bp, Homo sapien
aaccacttgttcttgcctgtcttgt

SEQ ID NO: 67515 - DNA, 25 bp, Homo sapien
gggcgatctgaggtgccatcatcaa

SEQ ID NO: 67516 - DNA, 25 bp, Homo sapien
aggggatatccacagagtaccttgt

SEQ ID NO: 67517 - DNA, 25 bp, Homo sapien
accgcagtttctggaagaaccactt

SEQ ID NO: 67518 - DNA, 25 bp, Homo sapien
ggtagcggtcaattccagccaccag

SEQ ID NO: 67519 - DNA, 25 bp, Homo sapien
aagagcaggatctctgaagacatcc

SEQ ID NO: 67520 - DNA, 25 bp, Homo sapien
acaaagcatctaaaaccgcagtttc

SEQ ID NO: 67521 - DNA, 25 bp, Homo sapien
tttgtccaaggggatatccacagag

SEQ ID NO: 67522 - DNA, 25 bp, Homo sapien
gaagacatccttattgacgacagtt

SEQ ID NO: 67523 - DNA, 25 bp, Homo sapien
cgacagttttgtccaaggggatatc

SEQ ID NO: 67524 - DNA, 25 bp, Homo sapien
gaagacatccttattgacgacagtt

SEQ ID NO: 67525 - DNA, 25 bp, Homo sapien
aagagcaggatctctgaagacatcc

SEQ ID NO: 67526 - DNA, 25 bp, Homo sapien
ttgcgtttaagagcaggatctctga

SEQ ID NO: 67527 - DNA, 25 bp, Homo sapien
aaccacttgttcttgcctgtcttgt

SEQ ID NO: 67528 - DNA, 25 bp, Homo sapien
accgcagtttctggaagaaccactt

SEQ ID NO: 67529 - DNA, 25 bp, Homo sapien
acaaagcatctaaaaccgcagtttc

SEQ ID NO: 67530 - DNA, 25 bp, Homo sapien
gggcgatctgaggtgccatcatcaa

SEQ ID NO: 67531 - DNA, 25 bp, Homo sapien
ggtagcggtcaattccagccaccag

SEQ ID NO: 67532 - DNA, 25 bp, Homo sapien
aggggatatccacagagtaccttgt

SEQ ID NO: 67533 - DNA, 25 bp, Homo sapien
tttgtccaaggggatatccacagag

SEQ ID NO: 67534 - DNA, 25 bp, Homo sapien
cgacagttttgtccaaggggatatc

SEQ ID NO: 67535 - DNA, 25 bp, Homo sapien
ggtagcggtcaattccagccaccag

SEQ ID NO: 67536 - DNA, 25 bp, Homo sapien
gaagacatccttattgacgacagtt

SEQ ID NO: 67537 - DNA, 25 bp, Homo sapien
ttgcgtttaagagcaggatctctga

SEQ ID NO: 67538 - DNA, 25 bp, Homo sapien
tttgtccaaggggatatccacagag

SEQ ID NO: 67539 - DNA, 25 bp, Homo sapien
cgacagttttgtccaaggggatatc

SEQ ID NO: 67540 - DNA, 25 bp, Homo sapien
gggcgatctgaggtgccatcatcaa

SEQ ID NO: 67541 - DNA, 25 bp, Homo sapien
acaaagcatctaaaaccgcagtttc

SEQ ID NO: 67542 - DNA, 25 bp, Homo sapien
accgcagtttctggaagaaccactt

SEQ ID NO: 67543 - DNA, 25 bp, Homo sapien
aagagcaggatctctgaagacatcc

SEQ ID NO: 67544 - DNA, 25 bp, Homo sapien
aaccacttgttcttgcctgtcttgt

SEQ ID NO: 67545 - DNA, 25 bp, Homo sapien
aggggatatccacagagtaccttgt

SEQ ID NO: 67546 - DNA, 25 bp, Homo sapien
gaagacatccttattgacgacagtt

SEQ ID NO: 67547 - DNA, 25 bp, Homo sapien
aagagcaggatctctgaagacatcc

SEQ ID NO: 67548 - DNA, 25 bp, Homo sapien
ttgcgtttaagagcaggatctctga

SEQ ID NO: 67549 - DNA, 25 bp, Homo sapien
aaccacttgttcttgcctgtcttgt

SEQ ID NO: 67550 - DNA, 25 bp, Homo sapien
accgcagtttctggaagaaccactt

SEQ ID NO: 67551 - DNA, 25 bp, Homo sapien
acaaagcatctaaaaccgcagtttc

SEQ ID NO: 67552 - DNA, 25 bp, Homo sapien
gggcgatctgaggtgccatcatcaa

SEQ ID NO: 67553 - DNA, 25 bp, Homo sapien
ggtagcggtcaattccagccaccag

SEQ ID NO: 67554 - DNA, 25 bp, Homo sapien
aggggatatccacagagtaccttgt

SEQ ID NO: 67555 - DNA, 25 bp, Homo sapien
tttgtccaaggggatatccacagag

SEQ ID NO: 67556 - DNA, 25 bp, Homo sapien
cgacagttttgtccaaggggatatc

SEQ ID NO: 67557 - DNA, 25 bp, Homo sapien
acaaagcatctaaaaccgcagtttc

SEQ ID NO: 67558 - DNA, 25 bp, Homo sapien
aggggatatccacagagtaccttgt

SEQ ID NO: 67559 - DNA, 25 bp, Homo sapien
accgcagtttctggaagaaccactt

SEQ ID NO: 67560 - DNA, 25 bp, Homo sapien
aagagcaggatctctgaagacatcc

SEQ ID NO: 67561 - DNA, 25 bp, Homo sapien
gaagacatccttattgacgacagtt

SEQ ID NO: 67562 - DNA, 25 bp, Homo sapien
gggcgatctgaggtgccatcatcaa

SEQ ID NO: 67563 - DNA, 25 bp, Homo sapien
ggtagcggtcaattccagccaccag

SEQ ID NO: 67564 - DNA, 25 bp, Homo sapien
aaccacttgttcttgcctgtcttgt

SEQ ID NO: 67565 - DNA, 25 bp, Homo sapien
ttgcgtttaagagcaggatctctga

SEQ ID NO: 67566 - DNA, 25 bp, Homo sapien
tttgtccaaggggatatccacagag

SEQ ID NO: 67567 - DNA, 25 bp, Homo sapien
cgacagttttgtccaaggggatatc

SEQ ID NO: 67568 - DNA, 25 bp, Homo sapien
gaagacatccttattgacgacagtt

SEQ ID NO: 67569 - DNA, 25 bp, Homo sapien
aagagcaggatctctgaagacatcc

SEQ ID NO: 67570 - DNA, 25 bp, Homo sapien
ttgcgtttaagagcaggatctctga

SEQ ID NO: 67571 - DNA, 25 bp, Homo sapien
aaccacttgttcttgcctgtcttgt

SEQ ID NO: 67572 - DNA, 25 bp, Homo sapien
accgcagtttctggaagaaccactt

SEQ ID NO: 67573 - DNA, 25 bp, Homo sapien
acaaagcatctaaaaccgcagtttc

SEQ ID NO: 67574 - DNA, 25 bp, Homo sapien
gggcgatctgaggtgccatcatcaa

SEQ ID NO: 67575 - DNA, 25 bp, Homo sapien
ggtagcggtcaattccagccaccag

SEQ ID NO: 67576 - DNA, 25 bp, Homo sapien
aggggatatccacagagtaccttgt

SEQ ID NO: 67577 - DNA, 25 bp, Homo sapien
tttgtccaaggggatatccacagag

SEQ ID NO: 67578 - DNA, 25 bp, Homo sapien
cgacagttttgtccaaggggatatc

SEQ ID NO: 67579 - DNA, 25 bp, Homo sapien
cctgtcacgaacacatttagcacac

SEQ ID NO: 67580 - DNA, 25 bp, Homo sapien
accataggccctgctgacatgtttc

SEQ ID NO: 67581 - DNA, 25 bp, Homo sapien
cctcgaagtttgcctgggcacacac

SEQ ID NO: 67582 - DNA, 25 bp, Homo sapien
gtcggtatgtcaaacgctggaccat

SEQ ID NO: 67583 - DNA, 25 bp, Homo sapien
taaggaaagcacgcttgatcctgtc

SEQ ID NO: 67584 - DNA, 25 bp, Homo sapien
cgaacccctcgaagtttgcctgggc

SEQ ID NO: 67585 - DNA, 25 bp, Homo sapien
aagaactttaggtcttacaggacga

SEQ ID NO: 67586 - DNA, 25 bp, Homo sapien
aggtcttacaggacgaacccctcga

SEQ ID NO: 67587 - DNA, 25 bp, Homo sapien
catttagcacacatggaaccaccat

SEQ ID NO: 67588 - DNA, 25 bp, Homo sapien
cgctggaccattctgagtgcctgca

SEQ ID NO: 67589 - DNA, 25 bp, Homo sapien
aagcacgcttgatcctgtcacgaac

SEQ ID NO: 67590 - DNA, 25 bp, Homo sapien
cgctggaccattctgagtgcctgca

SEQ ID NO: 67591 - DNA, 25 bp, Homo sapien
gtcggtatgtcaaacgctggaccat

SEQ ID NO: 67592 - DNA, 25 bp, Homo sapien
cctcgaagtttgcctgggcacacac

SEQ ID NO: 67593 - DNA, 25 bp, Homo sapien
cgaacccctcgaagtttgcctgggc

SEQ ID NO: 67594 - DNA, 25 bp, Homo sapien
aggtcttacaggacgaacccctcga

SEQ ID NO: 67595 - DNA, 25 bp, Homo sapien
aagaactttaggtcttacaggacga

SEQ ID NO: 67596 - DNA, 25 bp, Homo sapien
accataggccctgctgacatgtttc

SEQ ID NO: 67597 - DNA, 25 bp, Homo sapien
catttagcacacatggaaccaccat

SEQ ID NO: 67598 - DNA, 25 bp, Homo sapien
cctgtcacgaacacatttagcacac

SEQ ID NO: 67599 - DNA, 25 bp, Homo sapien
aagcacgcttgatcctgtcacgaac

SEQ ID NO: 67600 - DNA, 25 bp, Homo sapien
taaggaaagcacgcttgatcctgtc

SEQ ID NO: 67601 - DNA, 25 bp, Homo sapien
catttagcacacatggaaccaccat

SEQ ID NO: 67602 - DNA, 25 bp, Homo sapien
cctgtcacgaacacatttagcacac

SEQ ID NO: 67603 - DNA, 25 bp, Homo sapien
gtcggtatgtcaaacgctggaccat

SEQ ID NO: 67604 - DNA, 25 bp, Homo sapien
taaggaaagcacgcttgatcctgtc

SEQ ID NO: 67605 - DNA, 25 bp, Homo sapien
cgaacccctcgaagtttgcctgggc

SEQ ID NO: 67606 - DNA, 25 bp, Homo sapien
aagaactttaggtcttacaggacga

SEQ ID NO: 67607 - DNA, 25 bp, Homo sapien
aggtcttacaggacgaacccctcga

SEQ ID NO: 67608 - DNA, 25 bp, Homo sapien
accataggccctgctgacatgtttc

SEQ ID NO: 67609 - DNA, 25 bp, Homo sapien
cctcgaagtttgcctgggcacacac

SEQ ID NO: 67610 - DNA, 25 bp, Homo sapien
aagcacgcttgatcctgtcacgaac

SEQ ID NO: 67611 - DNA, 25 bp, Homo sapien
cgctggaccattctgagtgcctgca

SEQ ID NO: 67612 - DNA, 25 bp, Homo sapien
taaggaaagcacgcttgatcctgtc

SEQ ID NO: 67613 - DNA, 25 bp, Homo sapien
cgctggaccattctgagtgcctgca

SEQ ID NO: 67614 - DNA, 25 bp, Homo sapien
gtcggtatgtcaaacgctggaccat

SEQ ID NO: 67615 - DNA, 25 bp, Homo sapien
cctcgaagtttgcctgggcacacac

SEQ ID NO: 67616 - DNA, 25 bp, Homo sapien
cgaacccctcgaagtttgcctgggc

SEQ ID NO: 67617 - DNA, 25 bp, Homo sapien
aggtcttacaggacgaacccctcga

SEQ ID NO: 67618 - DNA, 25 bp, Homo sapien
aagaactttaggtcttacaggacga

SEQ ID NO: 67619 - DNA, 25 bp, Homo sapien
accataggccctgctgacatgtttc

SEQ ID NO: 67620 - DNA, 25 bp, Homo sapien
catttagcacacatggaaccaccat

SEQ ID NO: 67621 - DNA, 25 bp, Homo sapien
cctgtcacgaacacatttagcacac

SEQ ID NO: 67622 - DNA, 25 bp, Homo sapien
aagcacgcttgatcctgtcacgaac

SEQ ID NO: 67623 - DNA, 25 bp, Homo sapien
aagaactttaggtcttacaggacga

SEQ ID NO: 67624 - DNA, 25 bp, Homo sapien
aagcacgcttgatcctgtcacgaac

SEQ ID NO: 67625 - DNA, 25 bp, Homo sapien
catttagcacacatggaaccaccat

SEQ ID NO: 67626 - DNA, 25 bp, Homo sapien
cctgtcacgaacacatttagcacac

SEQ ID NO: 67627 - DNA, 25 bp, Homo sapien
cgaacccctcgaagtttgcctgggc

SEQ ID NO: 67628 - DNA, 25 bp, Homo sapien
cgctggaccattctgagtgcctgca

SEQ ID NO: 67629 - DNA, 25 bp, Homo sapien
cctcgaagtttgcctgggcacacac

SEQ ID NO: 67630 - DNA, 25 bp, Homo sapien
taaggaaagcacgcttgatcctgtc

SEQ ID NO: 67631 - DNA, 25 bp, Homo sapien
gtcggtatgtcaaacgctggaccat

SEQ ID NO: 67632 - DNA, 25 bp, Homo sapien
aggtcttacaggacgaacccctcga

SEQ ID NO: 67633 - DNA, 25 bp, Homo sapien
accataggccctgctgacatgtttc

SEQ ID NO: 67634 - DNA, 25 bp, Homo sapien
cgctggaccattctgagtgcctgca

SEQ ID NO: 67635 - DNA, 25 bp, Homo sapien
gtcggtatgtcaaacgctggaccat

SEQ ID NO: 67636 - DNA, 25 bp, Homo sapien
cctcgaagtttgcctgggcacacac

SEQ ID NO: 67637 - DNA, 25 bp, Homo sapien
cgaacccctcgaagtttgcctgggc

SEQ ID NO: 67638 - DNA, 25 bp, Homo sapien
aggtcttacaggacgaacccctcga

SEQ ID NO: 67639 - DNA, 25 bp, Homo sapien
aagaactttaggtcttacaggacga

SEQ ID NO: 67640 - DNA, 25 bp, Homo sapien
accataggccctgctgacatgtttc

SEQ ID NO: 67641 - DNA, 25 bp, Homo sapien
catttagcacacatggaaccaccat

SEQ ID NO: 67642 - DNA, 25 bp, Homo sapien
cctgtcacgaacacatttagcacac

SEQ ID NO: 67643 - DNA, 25 bp, Homo sapien
aagcacgcttgatcctgtcacgaac

SEQ ID NO: 67644 - DNA, 25 bp, Homo sapien
taaggaaagcacgcttgatcctgtc

SEQ ID NO: 67645 - DNA, 25 bp, Homo sapien
cgctggaccattctgagtgcctgca

SEQ ID NO: 67646 - DNA, 25 bp, Homo sapien
gtcggtatgtcaaacgctggaccat

SEQ ID NO: 67647 - DNA, 25 bp, Homo sapien
cctcgaagtttgcctgggcacacac

SEQ ID NO: 67648 - DNA, 25 bp, Homo sapien
cgaacccctcgaagtttgcctgggc

SEQ ID NO: 67649 - DNA, 25 bp, Homo sapien
aggtcttacaggacgaacccctcga

SEQ ID NO: 67650 - DNA, 25 bp, Homo sapien
aagaactttaggtcttacaggacga

SEQ ID NO: 67651 - DNA, 25 bp, Homo sapien
accataggccctgctgacatgtttc

SEQ ID NO: 67652 - DNA, 25 bp, Homo sapien
catttagcacacatggaaccaccat

SEQ ID NO: 67653 - DNA, 25 bp, Homo sapien
cctgtcacgaacacatttagcacac

SEQ ID NO: 67654 - DNA, 25 bp, Homo sapien
aagcacgcttgatcctgtcacgaac

SEQ ID NO: 67655 - DNA, 25 bp, Homo sapien
taaggaaagcacgcttgatcctgtc

SEQ ID NO: 67656 - DNA, 25 bp, Homo sapien
cctgtcacgaacacatttagcacac

SEQ ID NO: 67657 - DNA, 25 bp, Homo sapien
gtcggtatgtcaaacgctggaccat

SEQ ID NO: 67658 - DNA, 25 bp, Homo sapien
accataggccctgctgacatgtttc

SEQ ID NO: 67659 - DNA, 25 bp, Homo sapien
cgaacccctcgaagtttgcctgggc

SEQ ID NO: 67660 - DNA, 25 bp, Homo sapien
aggtcttacaggacgaacccctcga

SEQ ID NO: 67661 - DNA, 25 bp, Homo sapien
aagaactttaggtcttacaggacga

SEQ ID NO: 67662 - DNA, 25 bp, Homo sapien
catttagcacacatggaaccaccat

SEQ ID NO: 67663 - DNA, 25 bp, Homo sapien
taaggaaagcacgcttgatcctgtc

SEQ ID NO: 67664 - DNA, 25 bp, Homo sapien
cgctggaccattctgagtgcctgca

SEQ ID NO: 67665 - DNA, 25 bp, Homo sapien
aagcacgcttgatcctgtcacgaac

SEQ ID NO: 67666 - DNA, 25 bp, Homo sapien
cctcgaagtttgcctgggcacacac

SEQ ID NO: 67667 - DNA, 25 bp, Homo sapien
cgctggaccattctgagtgcctgca

SEQ ID NO: 67668 - DNA, 25 bp, Homo sapien
gtcggtatgtcaaacgctggaccat

SEQ ID NO: 67669 - DNA, 25 bp, Homo sapien
cctcgaagtttgcctgggcacacac

SEQ ID NO: 67670 - DNA, 25 bp, Homo sapien
cgaacccctcgaagtttgcctgggc

SEQ ID NO: 67671 - DNA, 25 bp, Homo sapien
aggtcttacaggacgaacccctcga

SEQ ID NO: 67672 - DNA, 25 bp, Homo sapien
aagaactttaggtcttacaggacga

SEQ ID NO: 67673 - DNA, 25 bp, Homo sapien
accataggccctgctgacatgtttc

SEQ ID NO: 67674 - DNA, 25 bp, Homo sapien
catttagcacacatggaaccaccat

SEQ ID NO: 67675 - DNA, 25 bp, Homo sapien
cctgtcacgaacacatttagcacac

SEQ ID NO: 67676 - DNA, 25 bp, Homo sapien
aagcacgcttgatcctgtcacgaac

SEQ ID NO: 67677 - DNA, 25 bp, Homo sapien
taaggaaagcacgcttgatcctgtc

SEQ ID NO: 67678 - DNA, 25 bp, Homo sapien
cctcgaagtttgcctgggcacacac

SEQ ID NO: 67679 - DNA, 25 bp, Homo sapien
cgaacccctcgaagtttgcctgggc

SEQ ID NO: 67680 - DNA, 25 bp, Homo sapien
accataggccctgctgacatgtttc

SEQ ID NO: 67681 - DNA, 25 bp, Homo sapien
catttagcacacatggaaccaccat

SEQ ID NO: 67682 - DNA, 25 bp, Homo sapien
cctgtcacgaacacatttagcacac

SEQ ID NO: 67683 - DNA, 25 bp, Homo sapien
aggtcttacaggacgaacccctcga

SEQ ID NO: 67684 - DNA, 25 bp, Homo sapien
gtcggtatgtcaaacgctggaccat

SEQ ID NO: 67685 - DNA, 25 bp, Homo sapien
aagaactttaggtcttacaggacga

SEQ ID NO: 67686 - DNA, 25 bp, Homo sapien
aagcacgcttgatcctgtcacgaac

SEQ ID NO: 67687 - DNA, 25 bp, Homo sapien
cgctggaccattctgagtgcctgca

SEQ ID NO: 67688 - DNA, 25 bp, Homo sapien
taaggaaagcacgcttgatcctgtc

SEQ ID NO: 67689 - DNA, 25 bp, Homo sapien
cgctggaccattctgagtgcctgca

SEQ ID NO: 67690 - DNA, 25 bp, Homo sapien
gtcggtatgtcaaacgctggaccat

SEQ ID NO: 67691 - DNA, 25 bp, Homo sapien
cctcgaagtttgcctgggcacacac

SEQ ID NO: 67692 - DNA, 25 bp, Homo sapien
cgaacccctcgaagtttgcctgggc

SEQ ID NO: 67693 - DNA, 25 bp, Homo sapien
aggtcttacaggacgaacccctcga

SEQ ID NO: 67694 - DNA, 25 bp, Homo sapien
aagaactttaggtcttacaggacga

SEQ ID NO: 67695 - DNA, 25 bp, Homo sapien
accataggccctgctgacatgtttc

SEQ ID NO: 67696 - DNA, 25 bp, Homo sapien
catttagcacacatggaaccaccat

SEQ ID NO: 67697 - DNA, 25 bp, Homo sapien
cctgtcacgaacacatttagcacac

SEQ ID NO: 67698 - DNA, 25 bp, Homo sapien
aagcacgcttgatcctgtcacgaac

SEQ ID NO: 67699 - DNA, 25 bp, Homo sapien
taaggaaagcacgcttgatcctgtc

SEQ ID NO: 67700 - DNA, 25 bp, Homo sapien
cgctggaccattctgagtgcctgca

SEQ ID NO: 67701 - DNA, 25 bp, Homo sapien
cctgtcacgaacacatttagcacac

SEQ ID NO: 67702 - DNA, 25 bp, Homo sapien
aagcacgcttgatcctgtcacgaac

SEQ ID NO: 67703 - DNA, 25 bp, Homo sapien
catttagcacacatggaaccaccat

SEQ ID NO: 67704 - DNA, 25 bp, Homo sapien
gtcggtatgtcaaacgctggaccat

SEQ ID NO: 67705 - DNA, 25 bp, Homo sapien
cctcgaagtttgcctgggcacacac

SEQ ID NO: 67706 - DNA, 25 bp, Homo sapien
aggtcttacaggacgaacccctcga

SEQ ID NO: 67707 - DNA, 25 bp, Homo sapien
aagaactttaggtcttacaggacga

SEQ ID NO: 67708 - DNA, 25 bp, Homo sapien
taaggaaagcacgcttgatcctgtc

SEQ ID NO: 67709 - DNA, 25 bp, Homo sapien
cgaacccctcgaagtttgcctgggc

SEQ ID NO: 67710 - DNA, 25 bp, Homo sapien
accataggccctgctgacatgtttc

SEQ ID NO: 67711 - DNA, 25 bp, Homo sapien
cgctggaccattctgagtgcctgca

SEQ ID NO: 67712 - DNA, 25 bp, Homo sapien
gtcggtatgtcaaacgctggaccat

SEQ ID NO: 67713 - DNA, 25 bp, Homo sapien
cctcgaagtttgcctgggcacacac

SEQ ID NO: 67714 - DNA, 25 bp, Homo sapien
cgaacccctcgaagtttgcctgggc

SEQ ID NO: 67715 - DNA, 25 bp, Homo sapien
aggtcttacaggacgaacccctcga

SEQ ID NO: 67716 - DNA, 25 bp, Homo sapien
aagaactttaggtcttacaggacga

SEQ ID NO: 67717 - DNA, 25 bp, Homo sapien
accataggccctgctgacatgtttc

SEQ ID NO: 67718 - DNA, 25 bp, Homo sapien
catttagcacacatggaaccaccat

SEQ ID NO: 67719 - DNA, 25 bp, Homo sapien
cctgtcacgaacacatttagcacac

SEQ ID NO: 67720 - DNA, 25 bp, Homo sapien
aagcacgcttgatcctgtcacgaac

SEQ ID NO: 67721 - DNA, 25 bp, Homo sapien
taaggaaagcacgcttgatcctgtc

SEQ ID NO: 67722 - DNA, 25 bp, Homo sapien
gtcggtatgtcaaacgctggaccat

SEQ ID NO: 67723 - DNA, 25 bp, Homo sapien
cctgtcacgaacacatttagcacac

SEQ ID NO: 67724 - DNA, 25 bp, Homo sapien
aagaactttaggtcttacaggacga

SEQ ID NO: 67725 - DNA, 25 bp, Homo sapien
aagcacgcttgatcctgtcacgaac

SEQ ID NO: 67726 - DNA, 25 bp, Homo sapien
cgctggaccattctgagtgcctgca

SEQ ID NO: 67727 - DNA, 25 bp, Homo sapien
aggtcttacaggacgaacccctcga

SEQ ID NO: 67728 - DNA, 25 bp, Homo sapien
cgaacccctcgaagtttgcctgggc

SEQ ID NO: 67729 - DNA, 25 bp, Homo sapien
taaggaaagcacgcttgatcctgtc

SEQ ID NO: 67730 - DNA, 25 bp, Homo sapien
cctcgaagtttgcctgggcacacac

SEQ ID NO: 67731 - DNA, 25 bp, Homo sapien
catttagcacacatggaaccaccat

SEQ ID NO: 67732 - DNA, 25 bp, Homo sapien
accataggccctgctgacatgtttc

SEQ ID NO: 67733 - DNA, 25 bp, Homo sapien
cgctggaccattctgagtgcctgca

SEQ ID NO: 67734 - DNA, 25 bp, Homo sapien
gtcggtatgtcaaacgctggaccat

SEQ ID NO: 67735 - DNA, 25 bp, Homo sapien
cctcgaagtttgcctgggcacacac

SEQ ID NO: 67736 - DNA, 25 bp, Homo sapien
cgaacccctcgaagtttgcctgggc

SEQ ID NO: 67737 - DNA, 25 bp, Homo sapien
aggtcttacaggacgaacccctcga

SEQ ID NO: 67738 - DNA, 25 bp, Homo sapien
aagaactttaggtcttacaggacga

SEQ ID NO: 67739 - DNA, 25 bp, Homo sapien
accataggccctgctgacatgtttc

SEQ ID NO: 67740 - DNA, 25 bp, Homo sapien
catttagcacacatggaaccaccat

SEQ ID NO: 67741 - DNA, 25 bp, Homo sapien
cctgtcacgaacacatttagcacac

SEQ ID NO: 67742 - DNA, 25 bp, Homo sapien
aagcacgcttgatcctgtcacgaac

SEQ ID NO: 67743 - DNA, 25 bp, Homo sapien
taaggaaagcacgcttgatcctgtc

SEQ ID NO: 67744 - DNA, 25 bp, Homo sapien
cctgtcacgaacacatttagcacac

SEQ ID NO: 67745 - DNA, 25 bp, Homo sapien
catttagcacacatggaaccaccat

SEQ ID NO: 67746 - DNA, 25 bp, Homo sapien
accataggccctgctgacatgtttc

SEQ ID NO: 67747 - DNA, 25 bp, Homo sapien
cgctggaccattctgagtgcctgca

SEQ ID NO: 67748 - DNA, 25 bp, Homo sapien
taaggaaagcacgcttgatcctgtc

SEQ ID NO: 67749 - DNA, 25 bp, Homo sapien
gtcggtatgtcaaacgctggaccat

SEQ ID NO: 67750 - DNA, 25 bp, Homo sapien
aggtcttacaggacgaacccctcga

SEQ ID NO: 67751 - DNA, 25 bp, Homo sapien
cctcgaagtttgcctgggcacacac

SEQ ID NO: 67752 - DNA, 25 bp, Homo sapien
aagcacgcttgatcctgtcacgaac

SEQ ID NO: 67753 - DNA, 25 bp, Homo sapien
cgaacccctcgaagtttgcctgggc

SEQ ID NO: 67754 - DNA, 25 bp, Homo sapien
aagaactttaggtcttacaggacga

SEQ ID NO: 67755 - DNA, 25 bp, Homo sapien
accataggccctgctgacatgtttc

SEQ ID NO: 67756 - DNA, 25 bp, Homo sapien
catttagcacacatggaaccaccat

SEQ ID NO: 67757 - DNA, 25 bp, Homo sapien
aggtcttacaggacgaacccctcga

SEQ ID NO: 67758 - DNA, 25 bp, Homo sapien
aagcacgcttgatcctgtcacgaac

SEQ ID NO: 67759 - DNA, 25 bp, Homo sapien
cgctggaccattctgagtgcctgca

SEQ ID NO: 67760 - DNA, 25 bp, Homo sapien
taaggaaagcacgcttgatcctgtc

SEQ ID NO: 67761 - DNA, 25 bp, Homo sapien
cctgtcacgaacacatttagcacac

SEQ ID NO: 67762 - DNA, 25 bp, Homo sapien
aagaactttaggtcttacaggacga

SEQ ID NO: 67763 - DNA, 25 bp, Homo sapien
gtcggtatgtcaaacgctggaccat

SEQ ID NO: 67764 - DNA, 25 bp, Homo sapien
cgaacccctcgaagtttgcctgggc

SEQ ID NO: 67765 - DNA, 25 bp, Homo sapien
cctcgaagtttgcctgggcacacac

SEQ ID NO: 67766 - DNA, 25 bp, Homo sapien
cgctggaccattctgagtgcctgca

SEQ ID NO: 67767 - DNA, 25 bp, Homo sapien
gtcggtatgtcaaacgctggaccat

SEQ ID NO: 67768 - DNA, 25 bp, Homo sapien
cctcgaagtttgcctgggcacacac

SEQ ID NO: 67769 - DNA, 25 bp, Homo sapien
cgaacccctcgaagtttgcctgggc

SEQ ID NO: 67770 - DNA, 25 bp, Homo sapien
aggtcttacaggacgaacccctcga

SEQ ID NO: 67771 - DNA, 25 bp, Homo sapien
aagaactttaggtcttacaggacga

SEQ ID NO: 67772 - DNA, 25 bp, Homo sapien
accataggccctgctgacatgtttc

SEQ ID NO: 67773 - DNA, 25 bp, Homo sapien
catttagcacacatggaaccaccat

SEQ ID NO: 67774 - DNA, 25 bp, Homo sapien
cctgtcacgaacacatttagcacac

SEQ ID NO: 67775 - DNA, 25 bp, Homo sapien
aagcacgcttgatcctgtcacgaac

SEQ ID NO: 67776 - DNA, 25 bp, Homo sapien
taaggaaagcacgcttgatcctgtc

SEQ ID NO: 67777 - DNA, 25 bp, Homo sapien
aggtcttacaggacgaacccctcga

SEQ ID NO: 67778 - DNA, 25 bp, Homo sapien
aagcacgcttgatcctgtcacgaac

SEQ ID NO: 67779 - DNA, 25 bp, Homo sapien
accataggccctgctgacatgtttc

SEQ ID NO: 67780 - DNA, 25 bp, Homo sapien
gtcggtatgtcaaacgctggaccat

SEQ ID NO: 67781 - DNA, 25 bp, Homo sapien
cgaacccctcgaagtttgcctgggc

SEQ ID NO: 67782 - DNA, 25 bp, Homo sapien
taaggaaagcacgcttgatcctgtc

SEQ ID NO: 67783 - DNA, 25 bp, Homo sapien
catttagcacacatggaaccaccat

SEQ ID NO: 67784 - DNA, 25 bp, Homo sapien
cctgtcacgaacacatttagcacac

SEQ ID NO: 67785 - DNA, 25 bp, Homo sapien
cctcgaagtttgcctgggcacacac

SEQ ID NO: 67786 - DNA, 25 bp, Homo sapien
cgctggaccattctgagtgcctgca

SEQ ID NO: 67787 - DNA, 25 bp, Homo sapien
aagaactttaggtcttacaggacga

SEQ ID NO: 67788 - DNA, 25 bp, Homo sapien
cgctggaccattctgagtgcctgca

SEQ ID NO: 67789 - DNA, 25 bp, Homo sapien
gtcggtatgtcaaacgctggaccat

SEQ ID NO: 67790 - DNA, 25 bp, Homo sapien
cctcgaagtttgcctgggcacacac

SEQ ID NO: 67791 - DNA, 25 bp, Homo sapien
cgaacccctcgaagtttgcctgggc

SEQ ID NO: 67792 - DNA, 25 bp, Homo sapien
aggtcttacaggacgaacccctcga

SEQ ID NO: 67793 - DNA, 25 bp, Homo sapien
aagaactttaggtcttacaggacga

SEQ ID NO: 67794 - DNA, 25 bp, Homo sapien
accataggccctgctgacatgtttc

SEQ ID NO: 67795 - DNA, 25 bp, Homo sapien
catttagcacacatggaaccaccat

SEQ ID NO: 67796 - DNA, 25 bp, Homo sapien
cctgtcacgaacacatttagcacac

SEQ ID NO: 67797 - DNA, 25 bp, Homo sapien
aagcacgcttgatcctgtcacgaac

SEQ ID NO: 67798 - DNA, 25 bp, Homo sapien
taaggaaagcacgcttgatcctgtc

SEQ ID NO: 67799 - DNA, 25 bp, Homo sapien
aagcacgcttgatcctgtcacgaac

SEQ ID NO: 67800 - DNA, 25 bp, Homo sapien
gtcggtatgtcaaacgctggaccat

SEQ ID NO: 67801 - DNA, 25 bp, Homo sapien
taaggaaagcacgcttgatcctgtc

SEQ ID NO: 67802 - DNA, 25 bp, Homo sapien
cgctggaccattctgagtgcctgca

SEQ ID NO: 67803 - DNA, 25 bp, Homo sapien
aggtcttacaggacgaacccctcga

SEQ ID NO: 67804 - DNA, 25 bp, Homo sapien
cgaacccctcgaagtttgcctgggc

SEQ ID NO: 67805 - DNA, 25 bp, Homo sapien
aagaactttaggtcttacaggacga

SEQ ID NO: 67806 - DNA, 25 bp, Homo sapien
catttagcacacatggaaccaccat

SEQ ID NO: 67807 - DNA, 25 bp, Homo sapien
cctgtcacgaacacatttagcacac

SEQ ID NO: 67808 - DNA, 25 bp, Homo sapien
accataggccctgctgacatgtttc

SEQ ID NO: 67809 - DNA, 25 bp, Homo sapien
cctcgaagtttgcctgggcacacac

SEQ ID NO: 67810 - DNA, 25 bp, Homo sapien
cgctggaccattctgagtgcctgca

SEQ ID NO: 67811 - DNA, 25 bp, Homo sapien
gtcggtatgtcaaacgctggaccat

SEQ ID NO: 67812 - DNA, 25 bp, Homo sapien
cctcgaagtttgcctgggcacacac

SEQ ID NO: 67813 - DNA, 25 bp, Homo sapien
cgaacccctcgaagtttgcctgggc

SEQ ID NO: 67814 - DNA, 25 bp, Homo sapien
aggtcttacaggacgaacccctcga

SEQ ID NO: 67815 - DNA, 25 bp, Homo sapien
aagaactttaggtcttacaggacga

SEQ ID NO: 67816 - DNA, 25 bp, Homo sapien
accataggccctgctgacatgtttc

SEQ ID NO: 67817 - DNA, 25 bp, Homo sapien
catttagcacacatggaaccaccat

SEQ ID NO: 67818 - DNA, 25 bp, Homo sapien
cctgtcacgaacacatttagcacac

SEQ ID NO: 67819 - DNA, 25 bp, Homo sapien
aagcacgcttgatcctgtcacgaac

SEQ ID NO: 67820 - DNA, 25 bp, Homo sapien
taaggaaagcacgcttgatcctgtc

SEQ ID NO: 67821 - DNA, 25 bp, Homo sapien
aggtcttacaggacgaacccctcga

SEQ ID NO: 67822 - DNA, 25 bp, Homo sapien
cgctggaccattctgagtgcctgca

SEQ ID NO: 67823 - DNA, 25 bp, Homo sapien
cctcgaagtttgcctgggcacacac

SEQ ID NO: 67824 - DNA, 25 bp, Homo sapien
cgaacccctcgaagtttgcctgggc

SEQ ID NO: 67825 - DNA, 25 bp, Homo sapien
cctgtcacgaacacatttagcacac

SEQ ID NO: 67826 - DNA, 25 bp, Homo sapien
aagcacgcttgatcctgtcacgaac

SEQ ID NO: 67827 - DNA, 25 bp, Homo sapien
accataggccctgctgacatgtttc

SEQ ID NO: 67828 - DNA, 25 bp, Homo sapien
catttagcacacatggaaccaccat

SEQ ID NO: 67829 - DNA, 25 bp, Homo sapien
taaggaaagcacgcttgatcctgtc

SEQ ID NO: 67830 - DNA, 25 bp, Homo sapien
gtcggtatgtcaaacgctggaccat

SEQ ID NO: 67831 - DNA, 25 bp, Homo sapien
aagaactttaggtcttacaggacga

SEQ ID NO: 67832 - DNA, 25 bp, Homo sapien
cgctggaccattctgagtgcctgca

SEQ ID NO: 67833 - DNA, 25 bp, Homo sapien
gtcggtatgtcaaacgctggaccat

SEQ ID NO: 67834 - DNA, 25 bp, Homo sapien
cctcgaagtttgcctgggcacacac

SEQ ID NO: 67835 - DNA, 25 bp, Homo sapien
cgaacccctcgaagtttgcctgggc

SEQ ID NO: 67836 - DNA, 25 bp, Homo sapien
aggtcttacaggacgaacccctcga

SEQ ID NO: 67837 - DNA, 25 bp, Homo sapien
aagaactttaggtcttacaggacga

SEQ ID NO: 67838 - DNA, 25 bp, Homo sapien
accataggccctgctgacatgtttc

SEQ ID NO: 67839 - DNA, 25 bp, Homo sapien
catttagcacacatggaaccaccat

SEQ ID NO: 67840 - DNA, 25 bp, Homo sapien
cctgtcacgaacacatttagcacac

SEQ ID NO: 67841 - DNA, 25 bp, Homo sapien
aagcacgcttgatcctgtcacgaac

SEQ ID NO: 67842 - DNA, 25 bp, Homo sapien
taaggaaagcacgcttgatcctgtc

SEQ ID NO: 67843 - DNA, 25 bp, Homo sapien
aagcacgcttgatcctgtcacgaac

SEQ ID NO: 67844 - DNA, 25 bp, Homo sapien
catttagcacacatggaaccaccat

SEQ ID NO: 67845 - DNA, 25 bp, Homo sapien
accataggccctgctgacatgtttc

SEQ ID NO: 67846 - DNA, 25 bp, Homo sapien
taaggaaagcacgcttgatcctgtc

SEQ ID NO: 67847 - DNA, 25 bp, Homo sapien
cctcgaagtttgcctgggcacacac

SEQ ID NO: 67848 - DNA, 25 bp, Homo sapien
cgaacccctcgaagtttgcctgggc

SEQ ID NO: 67849 - DNA, 25 bp, Homo sapien
aggtcttacaggacgaacccctcga

SEQ ID NO: 67850 - DNA, 25 bp, Homo sapien
aagaactttaggtcttacaggacga

SEQ ID NO: 67851 - DNA, 25 bp, Homo sapien
cgctggaccattctgagtgcctgca

SEQ ID NO: 67852 - DNA, 25 bp, Homo sapien
cctgtcacgaacacatttagcacac

SEQ ID NO: 67853 - DNA, 25 bp, Homo sapien
gtcggtatgtcaaacgctggaccat

SEQ ID NO: 67854 - DNA, 25 bp, Homo sapien
cgctggaccattctgagtgcctgca

SEQ ID NO: 67855 - DNA, 25 bp, Homo sapien
gtcggtatgtcaaacgctggaccat

SEQ ID NO: 67856 - DNA, 25 bp, Homo sapien
cctcgaagtttgcctgggcacacac

SEQ ID NO: 67857 - DNA, 25 bp, Homo sapien
cgaacccctcgaagtttgcctgggc

SEQ ID NO: 67858 - DNA, 25 bp, Homo sapien
aggtcttacaggacgaacccctcga

SEQ ID NO: 67859 - DNA, 25 bp, Homo sapien
aagaactttaggtcttacaggacga

SEQ ID NO: 67860 - DNA, 25 bp, Homo sapien
accataggccctgctgacatgtttc

SEQ ID NO: 67861 - DNA, 25 bp, Homo sapien
catttagcacacatggaaccaccat

SEQ ID NO: 67862 - DNA, 25 bp, Homo sapien
cctgtcacgaacacatttagcacac

SEQ ID NO: 67863 - DNA, 25 bp, Homo sapien
aagcacgcttgatcctgtcacgaac

SEQ ID NO: 67864 - DNA, 25 bp, Homo sapien
taaggaaagcacgcttgatcctgtc

SEQ ID NO: 67865 - DNA, 25 bp, Homo sapien
gtcggtatgtcaaacgctggaccat

SEQ ID NO: 67866 - DNA, 25 bp, Homo sapien
cctgtcacgaacacatttagcacac

SEQ ID NO: 67867 - DNA, 25 bp, Homo sapien
cctcgaagtttgcctgggcacacac

SEQ ID NO: 67868 - DNA, 25 bp, Homo sapien
taaggaaagcacgcttgatcctgtc

SEQ ID NO: 67869 - DNA, 25 bp, Homo sapien
catttagcacacatggaaccaccat

SEQ ID NO: 67870 - DNA, 25 bp, Homo sapien
cgaacccctcgaagtttgcctgggc

SEQ ID NO: 67871 - DNA, 25 bp, Homo sapien
aggtcttacaggacgaacccctcga

SEQ ID NO: 67872 - DNA, 25 bp, Homo sapien
accataggccctgctgacatgtttc

SEQ ID NO: 67873 - DNA, 25 bp, Homo sapien
aagcacgcttgatcctgtcacgaac

SEQ ID NO: 67874 - DNA, 25 bp, Homo sapien
aagaactttaggtcttacaggacga

SEQ ID NO: 67875 - DNA, 25 bp, Homo sapien
cgctggaccattctgagtgcctgca

SEQ ID NO: 67876 - DNA, 25 bp, Homo sapien
cgctggaccattctgagtgcctgca

SEQ ID NO: 67877 - DNA, 25 bp, Homo sapien
gtcggtatgtcaaacgctggaccat

SEQ ID NO: 67878 - DNA, 25 bp, Homo sapien
cctcgaagtttgcctgggcacacac

SEQ ID NO: 67879 - DNA, 25 bp, Homo sapien
cgaacccctcgaagtttgcctgggc

SEQ ID NO: 67880 - DNA, 25 bp, Homo sapien
aggtcttacaggacgaacccctcga

SEQ ID NO: 67881 - DNA, 25 bp, Homo sapien
aagaactttaggtcttacaggacga

SEQ ID NO: 67882 - DNA, 25 bp, Homo sapien
accataggccctgctgacatgtttc

SEQ ID NO: 67883 - DNA, 25 bp, Homo sapien
catttagcacacatggaaccaccat

SEQ ID NO: 67884 - DNA, 25 bp, Homo sapien
cctgtcacgaacacatttagcacac

SEQ ID NO: 67885 - DNA, 25 bp, Homo sapien
aagcacgcttgatcctgtcacgaac

SEQ ID NO: 67886 - DNA, 25 bp, Homo sapien
taaggaaagcacgcttgatcctgtc

SEQ ID NO: 67887 - DNA, 25 bp, Homo sapien
cgctggaccattctgagtgcctgca

SEQ ID NO: 67888 - DNA, 25 bp, Homo sapien
gtcggtatgtcaaacgctggaccat

SEQ ID NO: 67889 - DNA, 25 bp, Homo sapien
cctcgaagtttgcctgggcacacac

SEQ ID NO: 67890 - DNA, 25 bp, Homo sapien
cgaacccctcgaagtttgcctgggc

SEQ ID NO: 67891 - DNA, 25 bp, Homo sapien
aggtcttacaggacgaacccctcga

SEQ ID NO: 67892 - DNA, 25 bp, Homo sapien
aagaactttaggtcttacaggacga

SEQ ID NO: 67893 - DNA, 25 bp, Homo sapien
accataggccctgctgacatgtttc

SEQ ID NO: 67894 - DNA, 25 bp, Homo sapien
catttagcacacatggaaccaccat

SEQ ID NO: 67895 - DNA, 25 bp, Homo sapien
cctgtcacgaacacatttagcacac

SEQ ID NO: 67896 - DNA, 25 bp, Homo sapien
aagcacgcttgatcctgtcacgaac

SEQ ID NO: 67897 - DNA, 25 bp, Homo sapien
taaggaaagcacgcttgatcctgtc

SEQ ID NO: 67898 - DNA, 25 bp, Homo sapien
catttagcacacatggaaccaccat

SEQ ID NO: 67899 - DNA, 25 bp, Homo sapien
cgctggaccattctgagtgcctgca

SEQ ID NO: 67900 - DNA, 25 bp, Homo sapien
aagcacgcttgatcctgtcacgaac

SEQ ID NO: 67901 - DNA, 25 bp, Homo sapien
gtcggtatgtcaaacgctggaccat

SEQ ID NO: 67902 - DNA, 25 bp, Homo sapien
cctgtcacgaacacatttagcacac

SEQ ID NO: 67903 - DNA, 25 bp, Homo sapien
taaggaaagcacgcttgatcctgtc

SEQ ID NO: 67904 - DNA, 25 bp, Homo sapien
aggtcttacaggacgaacccctcga

SEQ ID NO: 67905 - DNA, 25 bp, Homo sapien
cgaacccctcgaagtttgcctgggc

SEQ ID NO: 67906 - DNA, 25 bp, Homo sapien
aagaactttaggtcttacaggacga

SEQ ID NO: 67907 - DNA, 25 bp, Homo sapien
cctcgaagtttgcctgggcacacac

SEQ ID NO: 67908 - DNA, 25 bp, Homo sapien
accataggccctgctgacatgtttc

SEQ ID NO: 67909 - DNA, 25 bp, Homo sapien
catttagcacacatggaaccaccat

SEQ ID NO: 67910 - DNA, 25 bp, Homo sapien
cgctggaccattctgagtgcctgca

SEQ ID NO: 67911 - DNA, 25 bp, Homo sapien
gtcggtatgtcaaacgctggaccat

SEQ ID NO: 67912 - DNA, 25 bp, Homo sapien
aagcacgcttgatcctgtcacgaac

SEQ ID NO: 67913 - DNA, 25 bp, Homo sapien
cctcgaagtttgcctgggcacacac

SEQ ID NO: 67914 - DNA, 25 bp, Homo sapien
cctgtcacgaacacatttagcacac

SEQ ID NO: 67915 - DNA, 25 bp, Homo sapien
taaggaaagcacgcttgatcctgtc

SEQ ID NO: 67916 - DNA, 25 bp, Homo sapien
aggtcttacaggacgaacccctcga

SEQ ID NO: 67917 - DNA, 25 bp, Homo sapien
cgaacccctcgaagtttgcctgggc

SEQ ID NO: 67918 - DNA, 25 bp, Homo sapien
aagaactttaggtcttacaggacga

SEQ ID NO: 67919 - DNA, 25 bp, Homo sapien
accataggccctgctgacatgtttc

SEQ ID NO: 67920 - DNA, 25 bp, Homo sapien
catttagcacacatggaaccaccat

SEQ ID NO: 67921 - DNA, 25 bp, Homo sapien
cgctggaccattctgagtgcctgca

SEQ ID NO: 67922 - DNA, 25 bp, Homo sapien
aagcacgcttgatcctgtcacgaac

SEQ ID NO: 67923 - DNA, 25 bp, Homo sapien
gtcggtatgtcaaacgctggaccat

SEQ ID NO: 67924 - DNA, 25 bp, Homo sapien
cctcgaagtttgcctgggcacacac

SEQ ID NO: 67925 - DNA, 25 bp, Homo sapien
cctgtcacgaacacatttagcacac

SEQ ID NO: 67926 - DNA, 25 bp, Homo sapien
taaggaaagcacgcttgatcctgtc

SEQ ID NO: 67927 - DNA, 25 bp, Homo sapien
aggtcttacaggacgaacccctcga

SEQ ID NO: 67928 - DNA, 25 bp, Homo sapien
cgaacccctcgaagtttgcctgggc

SEQ ID NO: 67929 - DNA, 25 bp, Homo sapien
aagaactttaggtcttacaggacga

SEQ ID NO: 67930 - DNA, 25 bp, Homo sapien
accataggccctgctgacatgtttc

SEQ ID NO: 67931 - DNA, 25 bp, Homo sapien
catttagcacacatggaaccaccat

SEQ ID NO: 67932 - DNA, 25 bp, Homo sapien
cgctggaccattctgagtgcctgca

SEQ ID NO: 67933 - DNA, 25 bp, Homo sapien
cctcgaagtttgcctgggcacacac

SEQ ID NO: 67934 - DNA, 25 bp, Homo sapien
gtcggtatgtcaaacgctggaccat

SEQ ID NO: 67935 - DNA, 25 bp, Homo sapien
cctgtcacgaacacatttagcacac

SEQ ID NO: 67936 - DNA, 25 bp, Homo sapien
aagcacgcttgatcctgtcacgaac

SEQ ID NO: 67937 - DNA, 25 bp, Homo sapien
taaggaaagcacgcttgatcctgtc

SEQ ID NO: 67938 - DNA, 25 bp, Homo sapien
aggtcttacaggacgaacccctcga

SEQ ID NO: 67939 - DNA, 25 bp, Homo sapien
cgaacccctcgaagtttgcctgggc

SEQ ID NO: 67940 - DNA, 25 bp, Homo sapien
aagaactttaggtcttacaggacga

SEQ ID NO: 67941 - DNA, 25 bp, Homo sapien
accataggccctgctgacatgtttc

SEQ ID NO: 67942 - DNA, 25 bp, Homo sapien
catttagcacacatggaaccaccat

SEQ ID NO: 67943 - DNA, 25 bp, Homo sapien
cgctggaccattctgagtgcctgca

SEQ ID NO: 67944 - DNA, 25 bp, Homo sapien
gtcggtatgtcaaacgctggaccat

SEQ ID NO: 67945 - DNA, 25 bp, Homo sapien
aagcacgcttgatcctgtcacgaac

SEQ ID NO: 67946 - DNA, 25 bp, Homo sapien
cctgtcacgaacacatttagcacac

SEQ ID NO: 67947 - DNA, 25 bp, Homo sapien
taaggaaagcacgcttgatcctgtc

SEQ ID NO: 67948 - DNA, 25 bp, Homo sapien
aggtcttacaggacgaacccctcga

SEQ ID NO: 67949 - DNA, 25 bp, Homo sapien
cctcgaagtttgcctgggcacacac

SEQ ID NO: 67950 - DNA, 25 bp, Homo sapien
cgaacccctcgaagtttgcctgggc

SEQ ID NO: 67951 - DNA, 25 bp, Homo sapien
aagaactttaggtcttacaggacga

SEQ ID NO: 67952 - DNA, 25 bp, Homo sapien
accataggccctgctgacatgtttc

SEQ ID NO: 67953 - DNA, 25 bp, Homo sapien
catttagcacacatggaaccaccat

SEQ ID NO: 67954 - DNA, 25 bp, Homo sapien
cctcgaagtttgcctgggcacacac

SEQ ID NO: 67955 - DNA, 25 bp, Homo sapien
cgctggaccattctgagtgcctgca

SEQ ID NO: 67956 - DNA, 25 bp, Homo sapien
aagcacgcttgatcctgtcacgaac

SEQ ID NO: 67957 - DNA, 25 bp, Homo sapien
gtcggtatgtcaaacgctggaccat

SEQ ID NO: 67958 - DNA, 25 bp, Homo sapien
cctgtcacgaacacatttagcacac

SEQ ID NO: 67959 - DNA, 25 bp, Homo sapien
taaggaaagcacgcttgatcctgtc

SEQ ID NO: 67960 - DNA, 25 bp, Homo sapien
aggtcttacaggacgaacccctcga

SEQ ID NO: 67961 - DNA, 25 bp, Homo sapien
cgaacccctcgaagtttgcctgggc

SEQ ID NO: 67962 - DNA, 25 bp, Homo sapien
aagaactttaggtcttacaggacga

SEQ ID NO: 67963 - DNA, 25 bp, Homo sapien
accataggccctgctgacatgtttc

SEQ ID NO: 67964 - DNA, 25 bp, Homo sapien
catttagcacacatggaaccaccat

SEQ ID NO: 67965 - DNA, 25 bp, Homo sapien
cgctggaccattctgagtgcctgca

SEQ ID NO: 67966 - DNA, 25 bp, Homo sapien
gtcggtatgtcaaacgctggaccat

SEQ ID NO: 67967 - DNA, 25 bp, Homo sapien
cctcgaagtttgcctgggcacacac

SEQ ID NO: 67968 - DNA, 25 bp, Homo sapien
aagcacgcttgatcctgtcacgaac

SEQ ID NO: 67969 - DNA, 25 bp, Homo sapien
cctgtcacgaacacatttagcacac

SEQ ID NO: 67970 - DNA, 25 bp, Homo sapien
taaggaaagcacgcttgatcctgtc

SEQ ID NO: 67971 - DNA, 25 bp, Homo sapien
aggtcttacaggacgaacccctcga

SEQ ID NO: 67972 - DNA, 25 bp, Homo sapien
cgaacccctcgaagtttgcctgggc

SEQ ID NO: 67973 - DNA, 25 bp, Homo sapien
aagaactttaggtcttacaggacga

SEQ ID NO: 67974 - DNA, 25 bp, Homo sapien
accataggccctgctgacatgtttc

SEQ ID NO: 67975 - DNA, 25 bp, Homo sapien
catttagcacacatggaaccaccat

SEQ ID NO: 67976 - DNA, 25 bp, Homo sapien
cgctggaccattctgagtgcctgca

SEQ ID NO: 67977 - DNA, 25 bp, Homo sapien
aagcacgcttgatcctgtcacgaac

SEQ ID NO: 67978 - DNA, 25 bp, Homo sapien
gtcggtatgtcaaacgctggaccat

SEQ ID NO: 67979 - DNA, 25 bp, Homo sapien
cctgtcacgaacacatttagcacac

SEQ ID NO: 67980 - DNA, 25 bp, Homo sapien
taaggaaagcacgcttgatcctgtc

SEQ ID NO: 67981 - DNA, 25 bp, Homo sapien
aggtcttacaggacgaacccctcga

SEQ ID NO: 67982 - DNA, 25 bp, Homo sapien
cctcgaagtttgcctgggcacacac

SEQ ID NO: 67983 - DNA, 25 bp, Homo sapien
cgaacccctcgaagtttgcctgggc

SEQ ID NO: 67984 - DNA, 25 bp, Homo sapien
aagaactttaggtcttacaggacga

SEQ ID NO: 67985 - DNA, 25 bp, Homo sapien
accataggccctgctgacatgtttc

SEQ ID NO: 67986 - DNA, 25 bp, Homo sapien
catttagcacacatggaaccaccat

SEQ ID NO: 67987 - DNA, 25 bp, Homo sapien
aagcacgcttgatcctgtcacgaac

SEQ ID NO: 67988 - DNA, 25 bp, Homo sapien
cgctggaccattctgagtgcctgca

SEQ ID NO: 67989 - DNA, 25 bp, Homo sapien
gtcggtatgtcaaacgctggaccat

SEQ ID NO: 67990 - DNA, 25 bp, Homo sapien
cctgtcacgaacacatttagcacac

SEQ ID NO: 67991 - DNA, 25 bp, Homo sapien
cctcgaagtttgcctgggcacacac

SEQ ID NO: 67992 - DNA, 25 bp, Homo sapien
taaggaaagcacgcttgatcctgtc

SEQ ID NO: 67993 - DNA, 25 bp, Homo sapien
aggtcttacaggacgaacccctcga

SEQ ID NO: 67994 - DNA, 25 bp, Homo sapien
cgaacccctcgaagtttgcctgggc

SEQ ID NO: 67995 - DNA, 25 bp, Homo sapien
aagaactttaggtcttacaggacga

SEQ ID NO: 67996 - DNA, 25 bp, Homo sapien
accataggccctgctgacatgtttc

SEQ ID NO: 67997 - DNA, 25 bp, Homo sapien
catttagcacacatggaaccaccat

SEQ ID NO: 67998 - DNA, 25 bp, Homo sapien
cgctggaccattctgagtgcctgca

SEQ ID NO: 67999 - DNA, 25 bp, Homo sapien
taaggaaagcacgcttgatcctgtc

SEQ ID NO: 68000 - DNA, 25 bp, Homo sapien
accataggccctgctgacatgtttc

SEQ ID NO: 68001 - DNA, 25 bp, Homo sapien
aagcacgcttgatcctgtcacgaac

SEQ ID NO: 68002 - DNA, 25 bp, Homo sapien
cctgtcacgaacacatttagcacac

SEQ ID NO: 68003 - DNA, 25 bp, Homo sapien
cgaacccctcgaagtttgcctgggc

SEQ ID NO: 68004 - DNA, 25 bp, Homo sapien
aggtcttacaggacgaacccctcga

SEQ ID NO: 68005 - DNA, 25 bp, Homo sapien
gtcggtatgtcaaacgctggaccat

SEQ ID NO: 68006 - DNA, 25 bp, Homo sapien
aagaactttaggtcttacaggacga

SEQ ID NO: 68007 - DNA, 25 bp, Homo sapien
cctcgaagtttgcctgggcacacac

SEQ ID NO: 68008 - DNA, 25 bp, Homo sapien
catttagcacacatggaaccaccat

SEQ ID NO: 68009 - DNA, 25 bp, Homo sapien
cgctggaccattctgagtgcctgca

SEQ ID NO: 68010 - DNA, 25 bp, Homo sapien
aagcacgcttgatcctgtcacgaac

SEQ ID NO: 68011 - DNA, 25 bp, Homo sapien
gtcggtatgtcaaacgctggaccat

SEQ ID NO: 68012 - DNA, 25 bp, Homo sapien
cctgtcacgaacacatttagcacac

SEQ ID NO: 68013 - DNA, 25 bp, Homo sapien
cctcgaagtttgcctgggcacacac

SEQ ID NO: 68014 - DNA, 25 bp, Homo sapien
taaggaaagcacgcttgatcctgtc

SEQ ID NO: 68015 - DNA, 25 bp, Homo sapien
aggtcttacaggacgaacccctcga

SEQ ID NO: 68016 - DNA, 25 bp, Homo sapien
cgaacccctcgaagtttgcctgggc

SEQ ID NO: 68017 - DNA, 25 bp, Homo sapien
aagaactttaggtcttacaggacga

SEQ ID NO: 68018 - DNA, 25 bp, Homo sapien
accataggccctgctgacatgtttc

SEQ ID NO: 68019 - DNA, 25 bp, Homo sapien
cgctggaccattctgagtgcctgca

SEQ ID NO: 68020 - DNA, 25 bp, Homo sapien
gtcggtatgtcaaacgctggaccat

SEQ ID NO: 68021 - DNA, 25 bp, Homo sapien
cctcgaagtttgcctgggcacacac

SEQ ID NO: 68022 - DNA, 25 bp, Homo sapien
cgaacccctcgaagtttgcctgggc

SEQ ID NO: 68023 - DNA, 25 bp, Homo sapien
aggtcttacaggacgaacccctcga

SEQ ID NO: 68024 - DNA, 25 bp, Homo sapien
aagaactttaggtcttacaggacga

SEQ ID NO: 68025 - DNA, 25 bp, Homo sapien
accataggccctgctgacatgtttc

SEQ ID NO: 68026 - DNA, 25 bp, Homo sapien
catttagcacacatggaaccaccat

SEQ ID NO: 68027 - DNA, 25 bp, Homo sapien
cctgtcacgaacacatttagcacac

SEQ ID NO: 68028 - DNA, 25 bp, Homo sapien
aagcacgcttgatcctgtcacgaac

SEQ ID NO: 68029 - DNA, 25 bp, Homo sapien
taaggaaagcacgcttgatcctgtc

SEQ ID NO: 68030 - DNA, 25 bp, Homo sapien
gtgtgctaaatgtgttcgtgacagg

SEQ ID NO: 68031 - DNA, 25 bp, Homo sapien
atggtggttccatgtgtgctaaatg

SEQ ID NO: 68032 - DNA, 25 bp, Homo sapien
tcgaggggttcgtcctgtaagacct

SEQ ID NO: 68033 - DNA, 25 bp, Homo sapien
atggtccagcgtttgacataccgac

SEQ ID NO: 68034 - DNA, 25 bp, Homo sapien
tgcaggcactcagaatggtccagcg

SEQ ID NO: 68035 - DNA, 25 bp, Homo sapien
gacaggatcaagcgtgctttcctta

SEQ ID NO: 68036 - DNA, 25 bp, Homo sapien
gaaacatgtcagcagggcctatggt

SEQ ID NO: 68037 - DNA, 25 bp, Homo sapien
gtgtgtgcccaggcaaacttcgagg

SEQ ID NO: 68038 - DNA, 25 bp, Homo sapien
tcgtcctgtaagacctaaagttctt

SEQ ID NO: 68039 - DNA, 25 bp, Homo sapien
gcccaggcaaacttcgaggggttcg

SEQ ID NO: 68040 - DNA, 25 bp, Homo sapien
gttcgtgacaggatcaagcgtgctt

SEQ ID NO: 68041 - DNA, 25 bp, Homo sapien
catttagcacacatggaaccaccat

SEQ ID NO: 68042 - DNA, 25 bp, Homo sapien
cgctggaccattctgagtgcctgca

SEQ ID NO: 68043 - DNA, 25 bp, Homo sapien
aagcacgcttgatcctgtcacgaac

SEQ ID NO: 68044 - DNA, 25 bp, Homo sapien
gtcggtatgtcaaacgctggaccat

SEQ ID NO: 68045 - DNA, 25 bp, Homo sapien
cctgtcacgaacacatttagcacac

SEQ ID NO: 68046 - DNA, 25 bp, Homo sapien
cctcgaagtttgcctgggcacacac

SEQ ID NO: 68047 - DNA, 25 bp, Homo sapien
taaggaaagcacgcttgatcctgtc

SEQ ID NO: 68048 - DNA, 25 bp, Homo sapien
aggtcttacaggacgaacccctcga

SEQ ID NO: 68049 - DNA, 25 bp, Homo sapien
cgaacccctcgaagtttgcctgggc

SEQ ID NO: 68050 - DNA, 25 bp, Homo sapien
aagaactttaggtcttacaggacga

SEQ ID NO: 68051 - DNA, 25 bp, Homo sapien
accataggccctgctgacatgtttc

SEQ ID NO: 68052 - DNA, 25 bp, Homo sapien
gtcggtatgtcaaacgctggaccat

SEQ ID NO: 68053 - DNA, 25 bp, Homo sapien
cctgtcacgaacacatttagcacac

SEQ ID NO: 68054 - DNA, 25 bp, Homo sapien
aagcacgcttgatcctgtcacgaac

SEQ ID NO: 68055 - DNA, 25 bp, Homo sapien
taaggaaagcacgcttgatcctgtc

SEQ ID NO: 68056 - DNA, 25 bp, Homo sapien
cgaacccctcgaagtttgcctgggc

SEQ ID NO: 68057 - DNA, 25 bp, Homo sapien
aggtcttacaggacgaacccctcga

SEQ ID NO: 68058 - DNA, 25 bp, Homo sapien
catttagcacacatggaaccaccat

SEQ ID NO: 68059 - DNA, 25 bp, Homo sapien
cctcgaagtttgcctgggcacacac

SEQ ID NO: 68060 - DNA, 25 bp, Homo sapien
aagaactttaggtcttacaggacga

SEQ ID NO: 68061 - DNA, 25 bp, Homo sapien
cgctggaccattctgagtgcctgca

SEQ ID NO: 68062 - DNA, 25 bp, Homo sapien
accataggccctgctgacatgtttc

SEQ ID NO: 68063 - DNA, 25 bp, Homo sapien
cgctggaccattctgagtgcctgca

SEQ ID NO: 68064 - DNA, 25 bp, Homo sapien
gtcggtatgtcaaacgctggaccat

SEQ ID NO: 68065 - DNA, 25 bp, Homo sapien
cctcgaagtttgcctgggcacacac

SEQ ID NO: 68066 - DNA, 25 bp, Homo sapien
cgaacccctcgaagtttgcctgggc

SEQ ID NO: 68067 - DNA, 25 bp, Homo sapien
aggtcttacaggacgaacccctcga

SEQ ID NO: 68068 - DNA, 25 bp, Homo sapien
aagaactttaggtcttacaggacga

SEQ ID NO: 68069 - DNA, 25 bp, Homo sapien
accataggccctgctgacatgtttc

SEQ ID NO: 68070 - DNA, 25 bp, Homo sapien
catttagcacacatggaaccaccat

SEQ ID NO: 68071 - DNA, 25 bp, Homo sapien
cctgtcacgaacacatttagcacac

SEQ ID NO: 68072 - DNA, 25 bp, Homo sapien
aagcacgcttgatcctgtcacgaac

SEQ ID NO: 68073 - DNA, 25 bp, Homo sapien
taaggaaagcacgcttgatcctgtc

SEQ ID NO: 68074 - DNA, 25 bp, Homo sapien
aagcacgcttgatcctgtcacgaac

SEQ ID NO: 68075 - DNA, 25 bp, Homo sapien
taaggaaagcacgcttgatcctgtc

SEQ ID NO: 68076 - DNA, 25 bp, Homo sapien
cgaacccctcgaagtttgcctgggc

SEQ ID NO: 68077 - DNA, 25 bp, Homo sapien
accataggccctgctgacatgtttc

SEQ ID NO: 68078 - DNA, 25 bp, Homo sapien
aagaactttaggtcttacaggacga

SEQ ID NO: 68079 - DNA, 25 bp, Homo sapien
gtcggtatgtcaaacgctggaccat

SEQ ID NO: 68080 - DNA, 25 bp, Homo sapien
aggtcttacaggacgaacccctcga

SEQ ID NO: 68081 - DNA, 25 bp, Homo sapien
catttagcacacatggaaccaccat

SEQ ID NO: 68082 - DNA, 25 bp, Homo sapien
cctgtcacgaacacatttagcacac

SEQ ID NO: 68083 - DNA, 25 bp, Homo sapien
cctcgaagtttgcctgggcacacac

SEQ ID NO: 68084 - DNA, 25 bp, Homo sapien
cgctggaccattctgagtgcctgca

SEQ ID NO: 68085 - DNA, 25 bp, Homo sapien
cgctggaccattctgagtgcctgca

SEQ ID NO: 68086 - DNA, 25 bp, Homo sapien
gtcggtatgtcaaacgctggaccat

SEQ ID NO: 68087 - DNA, 25 bp, Homo sapien
cctcgaagtttgcctgggcacacac

SEQ ID NO: 68088 - DNA, 25 bp, Homo sapien
cgaacccctcgaagtttgcctgggc

SEQ ID NO: 68089 - DNA, 25 bp, Homo sapien
aggtcttacaggacgaacccctcga

SEQ ID NO: 68090 - DNA, 25 bp, Homo sapien
aagaactttaggtcttacaggacga

SEQ ID NO: 68091 - DNA, 25 bp, Homo sapien
accataggccctgctgacatgtttc

SEQ ID NO: 68092 - DNA, 25 bp, Homo sapien
catttagcacacatggaaccaccat

SEQ ID NO: 68093 - DNA, 25 bp, Homo sapien
cctgtcacgaacacatttagcacac

SEQ ID NO: 68094 - DNA, 25 bp, Homo sapien
aagcacgcttgatcctgtcacgaac

SEQ ID NO: 68095 - DNA, 25 bp, Homo sapien
taaggaaagcacgcttgatcctgtc

SEQ ID NO: 68096 - DNA, 25 bp, Homo sapien
cgctggaccattctgagtgcctgca

SEQ ID NO: 68097 - DNA, 25 bp, Homo sapien
cgaacccctcgaagtttgcctgggc

SEQ ID NO: 68098 - DNA, 25 bp, Homo sapien
aggtcttacaggacgaacccctcga

SEQ ID NO: 68099 - DNA, 25 bp, Homo sapien
catttagcacacatggaaccaccat

SEQ ID NO: 68100 - DNA, 25 bp, Homo sapien
cctgtcacgaacacatttagcacac

SEQ ID NO: 68101 - DNA, 25 bp, Homo sapien
taaggaaagcacgcttgatcctgtc

SEQ ID NO: 68102 - DNA, 25 bp, Homo sapien
cctcgaagtttgcctgggcacacac

SEQ ID NO: 68103 - DNA, 25 bp, Homo sapien
gtcggtatgtcaaacgctggaccat

SEQ ID NO: 68104 - DNA, 25 bp, Homo sapien
accataggccctgctgacatgtttc

SEQ ID NO: 68105 - DNA, 25 bp, Homo sapien
aagcacgcttgatcctgtcacgaac

SEQ ID NO: 68106 - DNA, 25 bp, Homo sapien
aagaactttaggtcttacaggacga

SEQ ID NO: 68107 - DNA, 25 bp, Homo sapien
taaggaaagcacgcttgatcctgtc

SEQ ID NO: 68108 - DNA, 25 bp, Homo sapien
cgctggaccattctgagtgcctgca

SEQ ID NO: 68109 - DNA, 25 bp, Homo sapien
gtcggtatgtcaaacgctggaccat

SEQ ID NO: 68110 - DNA, 25 bp, Homo sapien
cctcgaagtttgcctgggcacacac

SEQ ID NO: 68111 - DNA, 25 bp, Homo sapien
cgaacccctcgaagtttgcctgggc

SEQ ID NO: 68112 - DNA, 25 bp, Homo sapien
aggtcttacaggacgaacccctcga

SEQ ID NO: 68113 - DNA, 25 bp, Homo sapien
aagaactttaggtcttacaggacga

SEQ ID NO: 68114 - DNA, 25 bp, Homo sapien
accataggccctgctgacatgtttc

SEQ ID NO: 68115 - DNA, 25 bp, Homo sapien
catttagcacacatggaaccaccat

SEQ ID NO: 68116 - DNA, 25 bp, Homo sapien
cctgtcacgaacacatttagcacac

SEQ ID NO: 68117 - DNA, 25 bp, Homo sapien
aagcacgcttgatcctgtcacgaac

SEQ ID NO: 68118 - DNA, 25 bp, Homo sapien
cgctggaccattctgagtgcctgca

SEQ ID NO: 68119 - DNA, 25 bp, Homo sapien
gtcggtatgtcaaacgctggaccat

SEQ ID NO: 68120 - DNA, 25 bp, Homo sapien
cctcgaagtttgcctgggcacacac

SEQ ID NO: 68121 - DNA, 25 bp, Homo sapien
cgaacccctcgaagtttgcctgggc

SEQ ID NO: 68122 - DNA, 25 bp, Homo sapien
aggtcttacaggacgaacccctcga

SEQ ID NO: 68123 - DNA, 25 bp, Homo sapien
aagaactttaggtcttacaggacga

SEQ ID NO: 68124 - DNA, 25 bp, Homo sapien
accataggccctgctgacatgtttc

SEQ ID NO: 68125 - DNA, 25 bp, Homo sapien
catttagcacacatggaaccaccat

SEQ ID NO: 68126 - DNA, 25 bp, Homo sapien
cctgtcacgaacacatttagcacac

SEQ ID NO: 68127 - DNA, 25 bp, Homo sapien
aagcacgcttgatcctgtcacgaac

SEQ ID NO: 68128 - DNA, 25 bp, Homo sapien
taaggaaagcacgcttgatcctgtc

SEQ ID NO: 68129 - DNA, 25 bp, Homo sapien
aagaactttaggtcttacaggacga

SEQ ID NO: 68130 - DNA, 25 bp, Homo sapien
cctcgaagtttgcctgggcacacac

SEQ ID NO: 68131 - DNA, 25 bp, Homo sapien
catttagcacacatggaaccaccat

SEQ ID NO: 68132 - DNA, 25 bp, Homo sapien
accataggccctgctgacatgtttc

SEQ ID NO: 68133 - DNA, 25 bp, Homo sapien
aagcacgcttgatcctgtcacgaac

SEQ ID NO: 68134 - DNA, 25 bp, Homo sapien
cgctggaccattctgagtgcctgca

SEQ ID NO: 68135 - DNA, 25 bp, Homo sapien
cctgtcacgaacacatttagcacac

SEQ ID NO: 68136 - DNA, 25 bp, Homo sapien
gtcggtatgtcaaacgctggaccat

SEQ ID NO: 68137 - DNA, 25 bp, Homo sapien
cgaacccctcgaagtttgcctgggc

SEQ ID NO: 68138 - DNA, 25 bp, Homo sapien
aggtcttacaggacgaacccctcga

SEQ ID NO: 68139 - DNA, 25 bp, Homo sapien
taaggaaagcacgcttgatcctgtc

SEQ ID NO: 68140 - DNA, 25 bp, Homo sapien
cgctggaccattctgagtgcctgca

SEQ ID NO: 68141 - DNA, 25 bp, Homo sapien
gtcggtatgtcaaacgctggaccat

SEQ ID NO: 68142 - DNA, 25 bp, Homo sapien
cctcgaagtttgcctgggcacacac

SEQ ID NO: 68143 - DNA, 25 bp, Homo sapien
cgaacccctcgaagtttgcctgggc

SEQ ID NO: 68144 - DNA, 25 bp, Homo sapien
aggtcttacaggacgaacccctcga

SEQ ID NO: 68145 - DNA, 25 bp, Homo sapien
aagaactttaggtcttacaggacga

SEQ ID NO: 68146 - DNA, 25 bp, Homo sapien
accataggccctgctgacatgtttc

SEQ ID NO: 68147 - DNA, 25 bp, Homo sapien
catttagcacacatggaaccaccat

SEQ ID NO: 68148 - DNA, 25 bp, Homo sapien
cctgtcacgaacacatttagcacac

SEQ ID NO: 68149 - DNA, 25 bp, Homo sapien
aagcacgcttgatcctgtcacgaac

SEQ ID NO: 68150 - DNA, 25 bp, Homo sapien
taaggaaagcacgcttgatcctgtc

SEQ ID NO: 68151 - DNA, 25 bp, Homo sapien
aagcacgcttgatcctgtcacgaac

SEQ ID NO: 68152 - DNA, 25 bp, Homo sapien
cctcgaagtttgcctgggcacacac

SEQ ID NO: 68153 - DNA, 25 bp, Homo sapien
gtcggtatgtcaaacgctggaccat

SEQ ID NO: 68154 - DNA, 25 bp, Homo sapien
cgaacccctcgaagtttgcctgggc

SEQ ID NO: 68155 - DNA, 25 bp, Homo sapien
aagaactttaggtcttacaggacga

SEQ ID NO: 68156 - DNA, 25 bp, Homo sapien
catttagcacacatggaaccaccat

SEQ ID NO: 68157 - DNA, 25 bp, Homo sapien
cctgtcacgaacacatttagcacac

SEQ ID NO: 68158 - DNA, 25 bp, Homo sapien
aggtcttacaggacgaacccctcga

SEQ ID NO: 68159 - DNA, 25 bp, Homo sapien
accataggccctgctgacatgtttc

SEQ ID NO: 68160 - DNA, 25 bp, Homo sapien
taaggaaagcacgcttgatcctgtc

SEQ ID NO: 68161 - DNA, 25 bp, Homo sapien
cgctggaccattctgagtgcctgca

SEQ ID NO: 68162 - DNA, 25 bp, Homo sapien
cgctggaccattctgagtgcctgca

SEQ ID NO: 68163 - DNA, 25 bp, Homo sapien
gtcggtatgtcaaacgctggaccat

SEQ ID NO: 68164 - DNA, 25 bp, Homo sapien
cctcgaagtttgcctgggcacacac

SEQ ID NO: 68165 - DNA, 25 bp, Homo sapien
cgaacccctcgaagtttgcctgggc

SEQ ID NO: 68166 - DNA, 25 bp, Homo sapien
aggtcttacaggacgaacccctcga

SEQ ID NO: 68167 - DNA, 25 bp, Homo sapien
aagaactttaggtcttacaggacga

SEQ ID NO: 68168 - DNA, 25 bp, Homo sapien
accataggccctgctgacatgtttc

SEQ ID NO: 68169 - DNA, 25 bp, Homo sapien
catttagcacacatggaaccaccat

SEQ ID NO: 68170 - DNA, 25 bp, Homo sapien
cctgtcacgaacacatttagcacac

SEQ ID NO: 68171 - DNA, 25 bp, Homo sapien
aagcacgcttgatcctgtcacgaac

SEQ ID NO: 68172 - DNA, 25 bp, Homo sapien
taaggaaagcacgcttgatcctgtc

SEQ ID NO: 68173 - DNA, 25 bp, Homo sapien
cctgtcacgaacacatttagcacac

SEQ ID NO: 68174 - DNA, 25 bp, Homo sapien
gtcggtatgtcaaacgctggaccat

SEQ ID NO: 68175 - DNA, 25 bp, Homo sapien
aagcacgcttgatcctgtcacgaac

SEQ ID NO: 68176 - DNA, 25 bp, Homo sapien
cctcgaagtttgcctgggcacacac

SEQ ID NO: 68177 - DNA, 25 bp, Homo sapien
accataggccctgctgacatgtttc

SEQ ID NO: 68178 - DNA, 25 bp, Homo sapien
catttagcacacatggaaccaccat

SEQ ID NO: 68179 - DNA, 25 bp, Homo sapien
cgaacccctcgaagtttgcctgggc

SEQ ID NO: 68180 - DNA, 25 bp, Homo sapien
aagaactttaggtcttacaggacga

SEQ ID NO: 68181 - DNA, 25 bp, Homo sapien
cgctggaccattctgagtgcctgca

SEQ ID NO: 68182 - DNA, 25 bp, Homo sapien
taaggaaagcacgcttgatcctgtc

SEQ ID NO: 68183 - DNA, 25 bp, Homo sapien
aggtcttacaggacgaacccctcga

SEQ ID NO: 68184 - DNA, 25 bp, Homo sapien
cgctggaccattctgagtgcctgca

SEQ ID NO: 68185 - DNA, 25 bp, Homo sapien
gtcggtatgtcaaacgctggaccat

SEQ ID NO: 68186 - DNA, 25 bp, Homo sapien
cctcgaagtttgcctgggcacacac

SEQ ID NO: 68187 - DNA, 25 bp, Homo sapien
cgaacccctcgaagtttgcctgggc

SEQ ID NO: 68188 - DNA, 25 bp, Homo sapien
aggtcttacaggacgaacccctcga

SEQ ID NO: 68189 - DNA, 25 bp, Homo sapien
aagaactttaggtcttacaggacga

SEQ ID NO: 68190 - DNA, 25 bp, Homo sapien
accataggccctgctgacatgtttc

SEQ ID NO: 68191 - DNA, 25 bp, Homo sapien
catttagcacacatggaaccaccat

SEQ ID NO: 68192 - DNA, 25 bp, Homo sapien
cctgtcacgaacacatttagcacac

SEQ ID NO: 68193 - DNA, 25 bp, Homo sapien
aagcacgcttgatcctgtcacgaac

SEQ ID NO: 68194 - DNA, 25 bp, Homo sapien
taaggaaagcacgcttgatcctgtc

SEQ ID NO: 68195 - DNA, 25 bp, Homo sapien
catttagcacacatggaaccaccat

SEQ ID NO: 68196 - DNA, 25 bp, Homo sapien
cctcgaagtttgcctgggcacacac

SEQ ID NO: 68197 - DNA, 25 bp, Homo sapien
aagcacgcttgatcctgtcacgaac

SEQ ID NO: 68198 - DNA, 25 bp, Homo sapien
cgaacccctcgaagtttgcctgggc

SEQ ID NO: 68199 - DNA, 25 bp, Homo sapien
cctgtcacgaacacatttagcacac

SEQ ID NO: 68200 - DNA, 25 bp, Homo sapien
taaggaaagcacgcttgatcctgtc

SEQ ID NO: 68201 - DNA, 25 bp, Homo sapien
accataggccctgctgacatgtttc

SEQ ID NO: 68202 - DNA, 25 bp, Homo sapien
gtcggtatgtcaaacgctggaccat

SEQ ID NO: 68203 - DNA, 25 bp, Homo sapien
aggtcttacaggacgaacccctcga

SEQ ID NO: 68204 - DNA, 25 bp, Homo sapien
aagaactttaggtcttacaggacga

SEQ ID NO: 68205 - DNA, 25 bp, Homo sapien
cgctggaccattctgagtgcctgca

SEQ ID NO: 68206 - DNA, 25 bp, Homo sapien
cgctggaccattctgagtgcctgca

SEQ ID NO: 68207 - DNA, 25 bp, Homo sapien
gtcggtatgtcaaacgctggaccat

SEQ ID NO: 68208 - DNA, 25 bp, Homo sapien
cctcgaagtttgcctgggcacacac

SEQ ID NO: 68209 - DNA, 25 bp, Homo sapien
cgaacccctcgaagtttgcctgggc

SEQ ID NO: 68210 - DNA, 25 bp, Homo sapien
aggtcttacaggacgaacccctcga

SEQ ID NO: 68211 - DNA, 25 bp, Homo sapien
aagaactttaggtcttacaggacga

SEQ ID NO: 68212 - DNA, 25 bp, Homo sapien
accataggccctgctgacatgtttc

SEQ ID NO: 68213 - DNA, 25 bp, Homo sapien
catttagcacacatggaaccaccat

SEQ ID NO: 68214 - DNA, 25 bp, Homo sapien
cctgtcacgaacacatttagcacac

SEQ ID NO: 68215 - DNA, 25 bp, Homo sapien
aagcacgcttgatcctgtcacgaac

SEQ ID NO: 68216 - DNA, 25 bp, Homo sapien
taaggaaagcacgcttgatcctgtc

SEQ ID NO: 68217 - DNA, 25 bp, Homo sapien
aagcacgcttgatcctgtcacgaac

SEQ ID NO: 68218 - DNA, 25 bp, Homo sapien
cgctggaccattctgagtgcctgca

SEQ ID NO: 68219 - DNA, 25 bp, Homo sapien
cgaacccctcgaagtttgcctgggc

SEQ ID NO: 68220 - DNA, 25 bp, Homo sapien
cctgtcacgaacacatttagcacac

SEQ ID NO: 68221 - DNA, 25 bp, Homo sapien
gtcggtatgtcaaacgctggaccat

SEQ ID NO: 68222 - DNA, 25 bp, Homo sapien
accataggccctgctgacatgtttc

SEQ ID NO: 68223 - DNA, 25 bp, Homo sapien
aggtcttacaggacgaacccctcga

SEQ ID NO: 68224 - DNA, 25 bp, Homo sapien
catttagcacacatggaaccaccat

SEQ ID NO: 68225 - DNA, 25 bp, Homo sapien
cctcgaagtttgcctgggcacacac

SEQ ID NO: 68226 - DNA, 25 bp, Homo sapien
aagaactttaggtcttacaggacga

SEQ ID NO: 68227 - DNA, 25 bp, Homo sapien
taaggaaagcacgcttgatcctgtc

SEQ ID NO: 68228 - DNA, 25 bp, Homo sapien
accataggccctgctgacatgtttc

SEQ ID NO: 68229 - DNA, 25 bp, Homo sapien
aagaactttaggtcttacaggacga

SEQ ID NO: 68230 - DNA, 25 bp, Homo sapien
gtcggtatgtcaaacgctggaccat

SEQ ID NO: 68231 - DNA, 25 bp, Homo sapien
aagcacgcttgatcctgtcacgaac

SEQ ID NO: 68232 - DNA, 25 bp, Homo sapien
cgctggaccattctgagtgcctgca

SEQ ID NO: 68233 - DNA, 25 bp, Homo sapien
cctcgaagtttgcctgggcacacac

SEQ ID NO: 68234 - DNA, 25 bp, Homo sapien
cgaacccctcgaagtttgcctgggc

SEQ ID NO: 68235 - DNA, 25 bp, Homo sapien
aggtcttacaggacgaacccctcga

SEQ ID NO: 68236 - DNA, 25 bp, Homo sapien
catttagcacacatggaaccaccat

SEQ ID NO: 68237 - DNA, 25 bp, Homo sapien
taaggaaagcacgcttgatcctgtc

SEQ ID NO: 68238 - DNA, 25 bp, Homo sapien
cctgtcacgaacacatttagcacac

SEQ ID NO: 68239 - DNA, 25 bp, Homo sapien
cgctggaccattctgagtgcctgca

SEQ ID NO: 68240 - DNA, 25 bp, Homo sapien
gtcggtatgtcaaacgctggaccat

SEQ ID NO: 68241 - DNA, 25 bp, Homo sapien
cctcgaagtttgcctgggcacacac

SEQ ID NO: 68242 - DNA, 25 bp, Homo sapien
cgaacccctcgaagtttgcctgggc

SEQ ID NO: 68243 - DNA, 25 bp, Homo sapien
aggtcttacaggacgaacccctcga

SEQ ID NO: 68244 - DNA, 25 bp, Homo sapien
aagaactttaggtcttacaggacga

SEQ ID NO: 68245 - DNA, 25 bp, Homo sapien
accataggccctgctgacatgtttc

SEQ ID NO: 68246 - DNA, 25 bp, Homo sapien
catttagcacacatggaaccaccat

SEQ ID NO: 68247 - DNA, 25 bp, Homo sapien
cctgtcacgaacacatttagcacac

SEQ ID NO: 68248 - DNA, 25 bp, Homo sapien
aagcacgcttgatcctgtcacgaac

SEQ ID NO: 68249 - DNA, 25 bp, Homo sapien
taaggaaagcacgcttgatcctgtc

SEQ ID NO: 68250 - DNA, 25 bp, Homo sapien
catttagcacacatggaaccaccat

SEQ ID NO: 68251 - DNA, 25 bp, Homo sapien
aagaactttaggtcttacaggacga

SEQ ID NO: 68252 - DNA, 25 bp, Homo sapien
accataggccctgctgacatgtttc

SEQ ID NO: 68253 - DNA, 25 bp, Homo sapien
aagcacgcttgatcctgtcacgaac

SEQ ID NO: 68254 - DNA, 25 bp, Homo sapien
cgctggaccattctgagtgcctgca

SEQ ID NO: 68255 - DNA, 25 bp, Homo sapien
gtcggtatgtcaaacgctggaccat

SEQ ID NO: 68256 - DNA, 25 bp, Homo sapien
cgaacccctcgaagtttgcctgggc

SEQ ID NO: 68257 - DNA, 25 bp, Homo sapien
aggtcttacaggacgaacccctcga

SEQ ID NO: 68258 - DNA, 25 bp, Homo sapien
cctgtcacgaacacatttagcacac

SEQ ID NO: 68259 - DNA, 25 bp, Homo sapien
taaggaaagcacgcttgatcctgtc

SEQ ID NO: 68260 - DNA, 25 bp, Homo sapien
cctcgaagtttgcctgggcacacac

SEQ ID NO: 68261 - DNA, 25 bp, Homo sapien
taaggaaagcacgcttgatcctgtc

SEQ ID NO: 68262 - DNA, 25 bp, Homo sapien
cgctggaccattctgagtgcctgca

SEQ ID NO: 68263 - DNA, 25 bp, Homo sapien
gtcggtatgtcaaacgctggaccat

SEQ ID NO: 68264 - DNA, 25 bp, Homo sapien
cctcgaagtttgcctgggcacacac

SEQ ID NO: 68265 - DNA, 25 bp, Homo sapien
cgaacccctcgaagtttgcctgggc

SEQ ID NO: 68266 - DNA, 25 bp, Homo sapien
aggtcttacaggacgaacccctcga

SEQ ID NO: 68267 - DNA, 25 bp, Homo sapien
aagaactttaggtcttacaggacga

SEQ ID NO: 68268 - DNA, 25 bp, Homo sapien
accataggccctgctgacatgtttc

SEQ ID NO: 68269 - DNA, 25 bp, Homo sapien
catttagcacacatggaaccaccat

SEQ ID NO: 68270 - DNA, 25 bp, Homo sapien
cctgtcacgaacacatttagcacac

SEQ ID NO: 68271 - DNA, 25 bp, Homo sapien
aagcacgcttgatcctgtcacgaac

SEQ ID NO: 68272 - DNA, 25 bp, Homo sapien
aagaactttaggtcttacaggacga

SEQ ID NO: 68273 - DNA, 25 bp, Homo sapien
cgctggaccattctgagtgcctgca

SEQ ID NO: 68274 - DNA, 25 bp, Homo sapien
aggtcttacaggacgaacccctcga

SEQ ID NO: 68275 - DNA, 25 bp, Homo sapien
cgaacccctcgaagtttgcctgggc

SEQ ID NO: 68276 - DNA, 25 bp, Homo sapien
cctgtcacgaacacatttagcacac

SEQ ID NO: 68277 - DNA, 25 bp, Homo sapien
accataggccctgctgacatgtttc

SEQ ID NO: 68278 - DNA, 25 bp, Homo sapien
taaggaaagcacgcttgatcctgtc

SEQ ID NO: 68279 - DNA, 25 bp, Homo sapien
cctcgaagtttgcctgggcacacac

SEQ ID NO: 68280 - DNA, 25 bp, Homo sapien
gtcggtatgtcaaacgctggaccat

SEQ ID NO: 68281 - DNA, 25 bp, Homo sapien
aagcacgcttgatcctgtcacgaac

SEQ ID NO: 68282 - DNA, 25 bp, Homo sapien
catttagcacacatggaaccaccat

SEQ ID NO: 68283 - DNA, 25 bp, Homo sapien
cgctggaccattctgagtgcctgca

SEQ ID NO: 68284 - DNA, 25 bp, Homo sapien
gtcggtatgtcaaacgctggaccat

SEQ ID NO: 68285 - DNA, 25 bp, Homo sapien
cctcgaagtttgcctgggcacacac

SEQ ID NO: 68286 - DNA, 25 bp, Homo sapien
cgaacccctcgaagtttgcctgggc

SEQ ID NO: 68287 - DNA, 25 bp, Homo sapien
aggtcttacaggacgaacccctcga

SEQ ID NO: 68288 - DNA, 25 bp, Homo sapien
aagaactttaggtcttacaggacga

SEQ ID NO: 68289 - DNA, 25 bp, Homo sapien
accataggccctgctgacatgtttc

SEQ ID NO: 68290 - DNA, 25 bp, Homo sapien
catttagcacacatggaaccaccat

SEQ ID NO: 68291 - DNA, 25 bp, Homo sapien
cctgtcacgaacacatttagcacac

SEQ ID NO: 68292 - DNA, 25 bp, Homo sapien
aagcacgcttgatcctgtcacgaac

SEQ ID NO: 68293 - DNA, 25 bp, Homo sapien
taaggaaagcacgcttgatcctgtc

SEQ ID NO: 68294 - DNA, 25 bp, Homo sapien
aagaactttaggtcttacaggacga

SEQ ID NO: 68295 - DNA, 25 bp, Homo sapien
cgctggaccattctgagtgcctgca

SEQ ID NO: 68296 - DNA, 25 bp, Homo sapien
cctcgaagtttgcctgggcacacac

SEQ ID NO: 68297 - DNA, 25 bp, Homo sapien
catttagcacacatggaaccaccat

SEQ ID NO: 68298 - DNA, 25 bp, Homo sapien
aagcacgcttgatcctgtcacgaac

SEQ ID NO: 68299 - DNA, 25 bp, Homo sapien
aggtcttacaggacgaacccctcga

SEQ ID NO: 68300 - DNA, 25 bp, Homo sapien
accataggccctgctgacatgtttc

SEQ ID NO: 68301 - DNA, 25 bp, Homo sapien
cctgtcacgaacacatttagcacac

SEQ ID NO: 68302 - DNA, 25 bp, Homo sapien
cgaacccctcgaagtttgcctgggc

SEQ ID NO: 68303 - DNA, 25 bp, Homo sapien
gtcggtatgtcaaacgctggaccat

SEQ ID NO: 68304 - DNA, 25 bp, Homo sapien
taaggaaagcacgcttgatcctgtc

SEQ ID NO: 68305 - DNA, 25 bp, Homo sapien
cgctggaccattctgagtgcctgca

SEQ ID NO: 68306 - DNA, 25 bp, Homo sapien
gtcggtatgtcaaacgctggaccat

SEQ ID NO: 68307 - DNA, 25 bp, Homo sapien
cctcgaagtttgcctgggcacacac

SEQ ID NO: 68308 - DNA, 25 bp, Homo sapien
cgaacccctcgaagtttgcctgggc

SEQ ID NO: 68309 - DNA, 25 bp, Homo sapien
aggtcttacaggacgaacccctcga

SEQ ID NO: 68310 - DNA, 25 bp, Homo sapien
aagaactttaggtcttacaggacga

SEQ ID NO: 68311 - DNA, 25 bp, Homo sapien
accataggccctgctgacatgtttc

SEQ ID NO: 68312 - DNA, 25 bp, Homo sapien
catttagcacacatggaaccaccat

SEQ ID NO: 68313 - DNA, 25 bp, Homo sapien
cctgtcacgaacacatttagcacac

SEQ ID NO: 68314 - DNA, 25 bp, Homo sapien
aagcacgcttgatcctgtcacgaac

SEQ ID NO: 68315 - DNA, 25 bp, Homo sapien
taaggaaagcacgcttgatcctgtc

SEQ ID NO: 68316 - DNA, 25 bp, Homo sapien
aagaactttaggtcttacaggacga

SEQ ID NO: 68317 - DNA, 25 bp, Homo sapien
aggtcttacaggacgaacccctcga

SEQ ID NO: 68318 - DNA, 25 bp, Homo sapien
gtcggtatgtcaaacgctggaccat

SEQ ID NO: 68319 - DNA, 25 bp, Homo sapien
taaggaaagcacgcttgatcctgtc

SEQ ID NO: 68320 - DNA, 25 bp, Homo sapien
aagcacgcttgatcctgtcacgaac

SEQ ID NO: 68321 - DNA, 25 bp, Homo sapien
accataggccctgctgacatgtttc

SEQ ID NO: 68322 - DNA, 25 bp, Homo sapien
cgctggaccattctgagtgcctgca

SEQ ID NO: 68323 - DNA, 25 bp, Homo sapien
cctgtcacgaacacatttagcacac

SEQ ID NO: 68324 - DNA, 25 bp, Homo sapien
cgaacccctcgaagtttgcctgggc

SEQ ID NO: 68325 - DNA, 25 bp, Homo sapien
cctcgaagtttgcctgggcacacac

SEQ ID NO: 68326 - DNA, 25 bp, Homo sapien
catttagcacacatggaaccaccat

SEQ ID NO: 68327 - DNA, 25 bp, Homo sapien
cgctggaccattctgagtgcctgca

SEQ ID NO: 68328 - DNA, 25 bp, Homo sapien
gtcggtatgtcaaacgctggaccat

SEQ ID NO: 68329 - DNA, 25 bp, Homo sapien
cctcgaagtttgcctgggcacacac

SEQ ID NO: 68330 - DNA, 25 bp, Homo sapien
cgaacccctcgaagtttgcctgggc

SEQ ID NO: 68331 - DNA, 25 bp, Homo sapien
aggtcttacaggacgaacccctcga

SEQ ID NO: 68332 - DNA, 25 bp, Homo sapien
aagaactttaggtcttacaggacga

SEQ ID NO: 68333 - DNA, 25 bp, Homo sapien
accataggccctgctgacatgtttc

SEQ ID NO: 68334 - DNA, 25 bp, Homo sapien
catttagcacacatggaaccaccat

SEQ ID NO: 68335 - DNA, 25 bp, Homo sapien
cctgtcacgaacacatttagcacac

SEQ ID NO: 68336 - DNA, 25 bp, Homo sapien
aagcacgcttgatcctgtcacgaac

SEQ ID NO: 68337 - DNA, 25 bp, Homo sapien
taaggaaagcacgcttgatcctgtc

SEQ ID NO: 68338 - DNA, 25 bp, Homo sapien
taaggaaagcacgcttgatcctgtc

SEQ ID NO: 68339 - DNA, 25 bp, Homo sapien
aagcacgcttgatcctgtcacgaac

SEQ ID NO: 68340 - DNA, 25 bp, Homo sapien
cctgtcacgaacacatttagcacac

SEQ ID NO: 68341 - DNA, 25 bp, Homo sapien
catttagcacacatggaaccaccat

SEQ ID NO: 68342 - DNA, 25 bp, Homo sapien
gtcggtatgtcaaacgctggaccat

SEQ ID NO: 68343 - DNA, 25 bp, Homo sapien
accataggccctgctgacatgtttc

SEQ ID NO: 68344 - DNA, 25 bp, Homo sapien
aggtcttacaggacgaacccctcga

SEQ ID NO: 68345 - DNA, 25 bp, Homo sapien
cgaacccctcgaagtttgcctgggc

SEQ ID NO: 68346 - DNA, 25 bp, Homo sapien
aagaactttaggtcttacaggacga

SEQ ID NO: 68347 - DNA, 25 bp, Homo sapien
cctcgaagtttgcctgggcacacac

SEQ ID NO: 68348 - DNA, 25 bp, Homo sapien
cgctggaccattctgagtgcctgca

SEQ ID NO: 68349 - DNA, 25 bp, Homo sapien
cgctggaccattctgagtgcctgca

SEQ ID NO: 68350 - DNA, 25 bp, Homo sapien
gtcggtatgtcaaacgctggaccat

SEQ ID NO: 68351 - DNA, 25 bp, Homo sapien
cctcgaagtttgcctgggcacacac

SEQ ID NO: 68352 - DNA, 25 bp, Homo sapien
cgaacccctcgaagtttgcctgggc

SEQ ID NO: 68353 - DNA, 25 bp, Homo sapien
aggtcttacaggacgaacccctcga

SEQ ID NO: 68354 - DNA, 25 bp, Homo sapien
aagaactttaggtcttacaggacga

SEQ ID NO: 68355 - DNA, 25 bp, Homo sapien
accataggccctgctgacatgtttc

SEQ ID NO: 68356 - DNA, 25 bp, Homo sapien
catttagcacacatggaaccaccat

SEQ ID NO: 68357 - DNA, 25 bp, Homo sapien
cctgtcacgaacacatttagcacac

SEQ ID NO: 68358 - DNA, 25 bp, Homo sapien
aagcacgcttgatcctgtcacgaac

SEQ ID NO: 68359 - DNA, 25 bp, Homo sapien
taaggaaagcacgcttgatcctgtc

SEQ ID NO: 68360 - DNA, 25 bp, Homo sapien
cgctggaccattctgagtgcctgca

SEQ ID NO: 68361 - DNA, 25 bp, Homo sapien
gtcggtatgtcaaacgctggaccat

SEQ ID NO: 68362 - DNA, 25 bp, Homo sapien
cctcgaagtttgcctgggcacacac

SEQ ID NO: 68363 - DNA, 25 bp, Homo sapien
cgaacccctcgaagtttgcctgggc

SEQ ID NO: 68364 - DNA, 25 bp, Homo sapien
aggtcttacaggacgaacccctcga

SEQ ID NO: 68365 - DNA, 25 bp, Homo sapien
aagaactttaggtcttacaggacga

SEQ ID NO: 68366 - DNA, 25 bp, Homo sapien
accataggccctgctgacatgtttc

SEQ ID NO: 68367 - DNA, 25 bp, Homo sapien
catttagcacacatggaaccaccat

SEQ ID NO: 68368 - DNA, 25 bp, Homo sapien
cctgtcacgaacacatttagcacac

SEQ ID NO: 68369 - DNA, 25 bp, Homo sapien
aagcacgcttgatcctgtcacgaac

SEQ ID NO: 68370 - DNA, 25 bp, Homo sapien
taaggaaagcacgcttgatcctgtc

SEQ ID NO: 68371 - DNA, 25 bp, Homo sapien
accataggccctgctgacatgtttc

SEQ ID NO: 68372 - DNA, 25 bp, Homo sapien
aggtcttacaggacgaacccctcga

SEQ ID NO: 68373 - DNA, 25 bp, Homo sapien
aagcacgcttgatcctgtcacgaac

SEQ ID NO: 68374 - DNA, 25 bp, Homo sapien
cgaacccctcgaagtttgcctgggc

SEQ ID NO: 68375 - DNA, 25 bp, Homo sapien
cgctggaccattctgagtgcctgca

SEQ ID NO: 68376 - DNA, 25 bp, Homo sapien
aagaactttaggtcttacaggacga

SEQ ID NO: 68377 - DNA, 25 bp, Homo sapien
taaggaaagcacgcttgatcctgtc

SEQ ID NO: 68378 - DNA, 25 bp, Homo sapien
gtcggtatgtcaaacgctggaccat

SEQ ID NO: 68379 - DNA, 25 bp, Homo sapien
catttagcacacatggaaccaccat

SEQ ID NO: 68380 - DNA, 25 bp, Homo sapien
cctcgaagtttgcctgggcacacac

SEQ ID NO: 68381 - DNA, 25 bp, Homo sapien
cctgtcacgaacacatttagcacac

SEQ ID NO: 68382 - DNA, 25 bp, Homo sapien
cgctggaccattctgagtgcctgca

SEQ ID NO: 68383 - DNA, 25 bp, Homo sapien
gtcggtatgtcaaacgctggaccat

SEQ ID NO: 68384 - DNA, 25 bp, Homo sapien
cctcgaagtttgcctgggcacacac

SEQ ID NO: 68385 - DNA, 25 bp, Homo sapien
cgaacccctcgaagtttgcctgggc

SEQ ID NO: 68386 - DNA, 25 bp, Homo sapien
aggtcttacaggacgaacccctcga

SEQ ID NO: 68387 - DNA, 25 bp, Homo sapien
aagaactttaggtcttacaggacga

SEQ ID NO: 68388 - DNA, 25 bp, Homo sapien
accataggccctgctgacatgtttc

SEQ ID NO: 68389 - DNA, 25 bp, Homo sapien
catttagcacacatggaaccaccat

SEQ ID NO: 68390 - DNA, 25 bp, Homo sapien
cctgtcacgaacacatttagcacac

SEQ ID NO: 68391 - DNA, 25 bp, Homo sapien
aagcacgcttgatcctgtcacgaac

SEQ ID NO: 68392 - DNA, 25 bp, Homo sapien
taaggaaagcacgcttgatcctgtc

SEQ ID NO: 68393 - DNA, 25 bp, Homo sapien
gtcggtatgtcaaacgctggaccat

SEQ ID NO: 68394 - DNA, 25 bp, Homo sapien
cgctggaccattctgagtgcctgca

SEQ ID NO: 68395 - DNA, 25 bp, Homo sapien
taaggaaagcacgcttgatcctgtc

SEQ ID NO: 68396 - DNA, 25 bp, Homo sapien
catttagcacacatggaaccaccat

SEQ ID NO: 68397 - DNA, 25 bp, Homo sapien
aagaactttaggtcttacaggacga

SEQ ID NO: 68398 - DNA, 25 bp, Homo sapien
aggtcttacaggacgaacccctcga

SEQ ID NO: 68399 - DNA, 25 bp, Homo sapien
aagcacgcttgatcctgtcacgaac

SEQ ID NO: 68400 - DNA, 25 bp, Homo sapien
accataggccctgctgacatgtttc

SEQ ID NO: 68401 - DNA, 25 bp, Homo sapien
cctgtcacgaacacatttagcacac

SEQ ID NO: 68402 - DNA, 25 bp, Homo sapien
cgaacccctcgaagtttgcctgggc

SEQ ID NO: 68403 - DNA, 25 bp, Homo sapien
cctcgaagtttgcctgggcacacac

SEQ ID NO: 68404 - DNA, 25 bp, Homo sapien
cgctggaccattctgagtgcctgca

SEQ ID NO: 68405 - DNA, 25 bp, Homo sapien
gtcggtatgtcaaacgctggaccat

SEQ ID NO: 68406 - DNA, 25 bp, Homo sapien
cctcgaagtttgcctgggcacacac

SEQ ID NO: 68407 - DNA, 25 bp, Homo sapien
cgaacccctcgaagtttgcctgggc

SEQ ID NO: 68408 - DNA, 25 bp, Homo sapien
aggtcttacaggacgaacccctcga

SEQ ID NO: 68409 - DNA, 25 bp, Homo sapien
aagaactttaggtcttacaggacga

SEQ ID NO: 68410 - DNA, 25 bp, Homo sapien
accataggccctgctgacatgtttc

SEQ ID NO: 68411 - DNA, 25 bp, Homo sapien
catttagcacacatggaaccaccat

SEQ ID NO: 68412 - DNA, 25 bp, Homo sapien
cctgtcacgaacacatttagcacac

SEQ ID NO: 68413 - DNA, 25 bp, Homo sapien
aagcacgcttgatcctgtcacgaac

SEQ ID NO: 68414 - DNA, 25 bp, Homo sapien
taaggaaagcacgcttgatcctgtc

SEQ ID NO: 68415 - DNA, 25 bp, Homo sapien
aagaactttaggtcttacaggacga

SEQ ID NO: 68416 - DNA, 25 bp, Homo sapien
cgctggaccattctgagtgcctgca

SEQ ID NO: 68417 - DNA, 25 bp, Homo sapien
cgaacccctcgaagtttgcctgggc

SEQ ID NO: 68418 - DNA, 25 bp, Homo sapien
aggtcttacaggacgaacccctcga

SEQ ID NO: 68419 - DNA, 25 bp, Homo sapien
aagcacgcttgatcctgtcacgaac

SEQ ID NO: 68420 - DNA, 25 bp, Homo sapien
cctcgaagtttgcctgggcacacac

SEQ ID NO: 68421 - DNA, 25 bp, Homo sapien
catttagcacacatggaaccaccat

SEQ ID NO: 68422 - DNA, 25 bp, Homo sapien
gtcggtatgtcaaacgctggaccat

SEQ ID NO: 68423 - DNA, 25 bp, Homo sapien
accataggccctgctgacatgtttc

SEQ ID NO: 68424 - DNA, 25 bp, Homo sapien
taaggaaagcacgcttgatcctgtc

SEQ ID NO: 68425 - DNA, 25 bp, Homo sapien
cctgtcacgaacacatttagcacac

SEQ ID NO: 68426 - DNA, 25 bp, Homo sapien
cgctggaccattctgagtgcctgca

SEQ ID NO: 68427 - DNA, 25 bp, Homo sapien
gtcggtatgtcaaacgctggaccat

SEQ ID NO: 68428 - DNA, 25 bp, Homo sapien
cctcgaagtttgcctgggcacacac

SEQ ID NO: 68429 - DNA, 25 bp, Homo sapien
cgaacccctcgaagtttgcctgggc

SEQ ID NO: 68430 - DNA, 25 bp, Homo sapien
aggtcttacaggacgaacccctcga

SEQ ID NO: 68431 - DNA, 25 bp, Homo sapien
aagaactttaggtcttacaggacga

SEQ ID NO: 68432 - DNA, 25 bp, Homo sapien
accataggccctgctgacatgtttc

SEQ ID NO: 68433 - DNA, 25 bp, Homo sapien
catttagcacacatggaaccaccat

SEQ ID NO: 68434 - DNA, 25 bp, Homo sapien
cctgtcacgaacacatttagcacac

SEQ ID NO: 68435 - DNA, 25 bp, Homo sapien
aagcacgcttgatcctgtcacgaac

SEQ ID NO: 68436 - DNA, 25 bp, Homo sapien
taaggaaagcacgcttgatcctgtc

SEQ ID NO: 68437 - DNA, 25 bp, Homo sapien
gtcggtatgtcaaacgctggaccat

SEQ ID NO: 68438 - DNA, 25 bp, Homo sapien
cctcgaagtttgcctgggcacacac

SEQ ID NO: 68439 - DNA, 25 bp, Homo sapien
accataggccctgctgacatgtttc

SEQ ID NO: 68440 - DNA, 25 bp, Homo sapien
catttagcacacatggaaccaccat

SEQ ID NO: 68441 - DNA, 25 bp, Homo sapien
aggtcttacaggacgaacccctcga

SEQ ID NO: 68442 - DNA, 25 bp, Homo sapien
cgctggaccattctgagtgcctgca

SEQ ID NO: 68443 - DNA, 25 bp, Homo sapien
cgaacccctcgaagtttgcctgggc

SEQ ID NO: 68444 - DNA, 25 bp, Homo sapien
cctgtcacgaacacatttagcacac

SEQ ID NO: 68445 - DNA, 25 bp, Homo sapien
aagcacgcttgatcctgtcacgaac

SEQ ID NO: 68446 - DNA, 25 bp, Homo sapien
aagaactttaggtcttacaggacga

SEQ ID NO: 68447 - DNA, 25 bp, Homo sapien
taaggaaagcacgcttgatcctgtc

SEQ ID NO: 68448 - DNA, 25 bp, Homo sapien
cgctggaccattctgagtgcctgca

SEQ ID NO: 68449 - DNA, 25 bp, Homo sapien
gtcggtatgtcaaacgctggaccat

SEQ ID NO: 68450 - DNA, 25 bp, Homo sapien
cctcgaagtttgcctgggcacacac

SEQ ID NO: 68451 - DNA, 25 bp, Homo sapien
cgaacccctcgaagtttgcctgggc

SEQ ID NO: 68452 - DNA, 25 bp, Homo sapien
aggtcttacaggacgaacccctcga

SEQ ID NO: 68453 - DNA, 25 bp, Homo sapien
aagaactttaggtcttacaggacga

SEQ ID NO: 68454 - DNA, 25 bp, Homo sapien
accataggccctgctgacatgtttc

SEQ ID NO: 68455 - DNA, 25 bp, Homo sapien
catttagcacacatggaaccaccat

SEQ ID NO: 68456 - DNA, 25 bp, Homo sapien
cctgtcacgaacacatttagcacac

SEQ ID NO: 68457 - DNA, 25 bp, Homo sapien
aagcacgcttgatcctgtcacgaac

SEQ ID NO: 68458 - DNA, 25 bp, Homo sapien
taaggaaagcacgcttgatcctgtc

SEQ ID NO: 68459 - DNA, 25 bp, Homo sapien
accataggccctgctgacatgtttc

SEQ ID NO: 68460 - DNA, 25 bp, Homo sapien
cgctggaccattctgagtgcctgca

SEQ ID NO: 68461 - DNA, 25 bp, Homo sapien
aggtcttacaggacgaacccctcga

SEQ ID NO: 68462 - DNA, 25 bp, Homo sapien
taaggaaagcacgcttgatcctgtc

SEQ ID NO: 68463 - DNA, 25 bp, Homo sapien
aagcacgcttgatcctgtcacgaac

SEQ ID NO: 68464 - DNA, 25 bp, Homo sapien
aagaactttaggtcttacaggacga

SEQ ID NO: 68465 - DNA, 25 bp, Homo sapien
catttagcacacatggaaccaccat

SEQ ID NO: 68466 - DNA, 25 bp, Homo sapien
cctgtcacgaacacatttagcacac

SEQ ID NO: 68467 - DNA, 25 bp, Homo sapien
cctcgaagtttgcctgggcacacac

SEQ ID NO: 68468 - DNA, 25 bp, Homo sapien
cgaacccctcgaagtttgcctgggc

SEQ ID NO: 68469 - DNA, 25 bp, Homo sapien
gtcggtatgtcaaacgctggaccat

SEQ ID NO: 68470 - DNA, 25 bp, Homo sapien
cgaacccctcgaagtttgcctgggc

SEQ ID NO: 68471 - DNA, 25 bp, Homo sapien
cctcgaagtttgcctgggcacacac

SEQ ID NO: 68472 - DNA, 25 bp, Homo sapien
aagcacgcttgatcctgtcacgaac

SEQ ID NO: 68473 - DNA, 25 bp, Homo sapien
aagaactttaggtcttacaggacga

SEQ ID NO: 68474 - DNA, 25 bp, Homo sapien
gtcggtatgtcaaacgctggaccat

SEQ ID NO: 68475 - DNA, 25 bp, Homo sapien
aggtcttacaggacgaacccctcga

SEQ ID NO: 68476 - DNA, 25 bp, Homo sapien
cgctggaccattctgagtgcctgca

SEQ ID NO: 68477 - DNA, 25 bp, Homo sapien
accataggccctgctgacatgtttc

SEQ ID NO: 68478 - DNA, 25 bp, Homo sapien
taaggaaagcacgcttgatcctgtc

SEQ ID NO: 68479 - DNA, 25 bp, Homo sapien
catttagcacacatggaaccaccat

SEQ ID NO: 68480 - DNA, 25 bp, Homo sapien
cctgtcacgaacacatttagcacac

SEQ ID NO: 68481 - DNA, 25 bp, Homo sapien
cgctggaccattctgagtgcctgca

SEQ ID NO: 68482 - DNA, 25 bp, Homo sapien
gtcggtatgtcaaacgctggaccat

SEQ ID NO: 68483 - DNA, 25 bp, Homo sapien
cctcgaagtttgcctgggcacacac

SEQ ID NO: 68484 - DNA, 25 bp, Homo sapien
cgaacccctcgaagtttgcctgggc

SEQ ID NO: 68485 - DNA, 25 bp, Homo sapien
aggtcttacaggacgaacccctcga

SEQ ID NO: 68486 - DNA, 25 bp, Homo sapien
aagaactttaggtcttacaggacga

SEQ ID NO: 68487 - DNA, 25 bp, Homo sapien
accataggccctgctgacatgtttc

SEQ ID NO: 68488 - DNA, 25 bp, Homo sapien
catttagcacacatggaaccaccat

SEQ ID NO: 68489 - DNA, 25 bp, Homo sapien
cctgtcacgaacacatttagcacac

SEQ ID NO: 68490 - DNA, 25 bp, Homo sapien
aagcacgcttgatcctgtcacgaac

SEQ ID NO: 68491 - DNA, 25 bp, Homo sapien
taaggaaagcacgcttgatcctgtc

SEQ ID NO: 68492 - DNA, 25 bp, Homo sapien
cgctggaccattctgagtgcctgca

SEQ ID NO: 68493 - DNA, 25 bp, Homo sapien
aagcacgcttgatcctgtcacgaac

SEQ ID NO: 68494 - DNA, 25 bp, Homo sapien
aagaactttaggtcttacaggacga

SEQ ID NO: 68495 - DNA, 25 bp, Homo sapien
cctcgaagtttgcctgggcacacac

SEQ ID NO: 68496 - DNA, 25 bp, Homo sapien
cctgtcacgaacacatttagcacac

SEQ ID NO: 68497 - DNA, 25 bp, Homo sapien
cgaacccctcgaagtttgcctgggc

SEQ ID NO: 68498 - DNA, 25 bp, Homo sapien
gtcggtatgtcaaacgctggaccat

SEQ ID NO: 68499 - DNA, 25 bp, Homo sapien
accataggccctgctgacatgtttc

SEQ ID NO: 68500 - DNA, 25 bp, Homo sapien
aggtcttacaggacgaacccctcga

SEQ ID NO: 68501 - DNA, 25 bp, Homo sapien
taaggaaagcacgcttgatcctgtc

SEQ ID NO: 68502 - DNA, 25 bp, Homo sapien
catttagcacacatggaaccaccat

SEQ ID NO: 68503 - DNA, 25 bp, Homo sapien
cgctggaccattctgagtgcctgca

SEQ ID NO: 68504 - DNA, 25 bp, Homo sapien
gtcggtatgtcaaacgctggaccat

SEQ ID NO: 68505 - DNA, 25 bp, Homo sapien
cctcgaagtttgcctgggcacacac

SEQ ID NO: 68506 - DNA, 25 bp, Homo sapien
cgaacccctcgaagtttgcctgggc

SEQ ID NO: 68507 - DNA, 25 bp, Homo sapien
aggtcttacaggacgaacccctcga

SEQ ID NO: 68508 - DNA, 25 bp, Homo sapien
aagaactttaggtcttacaggacga

SEQ ID NO: 68509 - DNA, 25 bp, Homo sapien
accataggccctgctgacatgtttc

SEQ ID NO: 68510 - DNA, 25 bp, Homo sapien
catttagcacacatggaaccaccat

SEQ ID NO: 68511 - DNA, 25 bp, Homo sapien
cctgtcacgaacacatttagcacac

SEQ ID NO: 68512 - DNA, 25 bp, Homo sapien
aagcacgcttgatcctgtcacgaac

SEQ ID NO: 68513 - DNA, 25 bp, Homo sapien
taaggaaagcacgcttgatcctgtc

SEQ ID NO: 68514 - DNA, 25 bp, Homo sapien
catttagcacacatggaaccaccat

SEQ ID NO: 68515 - DNA, 25 bp, Homo sapien
taaggaaagcacgcttgatcctgtc

SEQ ID NO: 68516 - DNA, 25 bp, Homo sapien
accataggccctgctgacatgtttc

SEQ ID NO: 68517 - DNA, 25 bp, Homo sapien
cctcgaagtttgcctgggcacacac

SEQ ID NO: 68518 - DNA, 25 bp, Homo sapien
cgctggaccattctgagtgcctgca

SEQ ID NO: 68519 - DNA, 25 bp, Homo sapien
cgaacccctcgaagtttgcctgggc

SEQ ID NO: 68520 - DNA, 25 bp, Homo sapien
gtcggtatgtcaaacgctggaccat

SEQ ID NO: 68521 - DNA, 25 bp, Homo sapien
aagaactttaggtcttacaggacga

SEQ ID NO: 68522 - DNA, 25 bp, Homo sapien
aagcacgcttgatcctgtcacgaac

SEQ ID NO: 68523 - DNA, 25 bp, Homo sapien
aggtcttacaggacgaacccctcga

SEQ ID NO: 68524 - DNA, 25 bp, Homo sapien
cctgtcacgaacacatttagcacac

SEQ ID NO: 68525 - DNA, 25 bp, Homo sapien
cgctggaccattctgagtgcctgca

SEQ ID NO: 68526 - DNA, 25 bp, Homo sapien
gtcggtatgtcaaacgctggaccat

SEQ ID NO: 68527 - DNA, 25 bp, Homo sapien
cctcgaagtttgcctgggcacacac

SEQ ID NO: 68528 - DNA, 25 bp, Homo sapien
cgaacccctcgaagtttgcctgggc

SEQ ID NO: 68529 - DNA, 25 bp, Homo sapien
aggtcttacaggacgaacccctcga

SEQ ID NO: 68530 - DNA, 25 bp, Homo sapien
aagaactttaggtcttacaggacga

SEQ ID NO: 68531 - DNA, 25 bp, Homo sapien
accataggccctgctgacatgtttc

SEQ ID NO: 68532 - DNA, 25 bp, Homo sapien
catttagcacacatggaaccaccat

SEQ ID NO: 68533 - DNA, 25 bp, Homo sapien
cctgtcacgaacacatttagcacac

SEQ ID NO: 68534 - DNA, 25 bp, Homo sapien
aagcacgcttgatcctgtcacgaac

SEQ ID NO: 68535 - DNA, 25 bp, Homo sapien
taaggaaagcacgcttgatcctgtc

SEQ ID NO: 68536 - DNA, 25 bp, Homo sapien
agcctattgagaatacatgacatgc

SEQ ID NO: 68537 - DNA, 25 bp, Homo sapien
ctaagagggatactgtgaatcacta

SEQ ID NO: 68538 - DNA, 25 bp, Homo sapien
gcctgctgtgagttaataaggtagc

SEQ ID NO: 68539 - DNA, 25 bp, Homo sapien
gcagctaagcagagttagaaaagat

SEQ ID NO: 68540 - DNA, 25 bp, Homo sapien
gaaagagggaaaatcaatctgcctc

SEQ ID NO: 68541 - DNA, 25 bp, Homo sapien
ttggtggagaaatcaactaaatctg

SEQ ID NO: 68542 - DNA, 25 bp, Homo sapien
ctatgcctcaggattattagcagct

SEQ ID NO: 68543 - DNA, 25 bp, Homo sapien
ttaaattaatgctaagagggatact

SEQ ID NO: 68544 - DNA, 25 bp, Homo sapien
agattagatctaaggacatggtggg

SEQ ID NO: 68545 - DNA, 25 bp, Homo sapien
aataaggtagcacagattagatcta

SEQ ID NO: 68546 - DNA, 25 bp, Homo sapien
tgaagccattcagtaagcctgctgt

SEQ ID NO: 68547 - DNA, 25 bp, Homo sapien
gcagctaagcagagttagaaaagat

SEQ ID NO: 68548 - DNA, 25 bp, Homo sapien
ctatgcctcaggattattagcagct

SEQ ID NO: 68549 - DNA, 25 bp, Homo sapien
ctaagagggatactgtgaatcacta

SEQ ID NO: 68550 - DNA, 25 bp, Homo sapien
ttaaattaatgctaagagggatact

SEQ ID NO: 68551 - DNA, 25 bp, Homo sapien
gaaagagggaaaatcaatctgcctc

SEQ ID NO: 68552 - DNA, 25 bp, Homo sapien
agattagatctaaggacatggtggg

SEQ ID NO: 68553 - DNA, 25 bp, Homo sapien
aataaggtagcacagattagatcta

SEQ ID NO: 68554 - DNA, 25 bp, Homo sapien
gcctgctgtgagttaataaggtagc

SEQ ID NO: 68555 - DNA, 25 bp, Homo sapien
tgaagccattcagtaagcctgctgt

SEQ ID NO: 68556 - DNA, 25 bp, Homo sapien
ttggtggagaaatcaactaaatctg

SEQ ID NO: 68557 - DNA, 25 bp, Homo sapien
agcctattgagaatacatgacatgc

SEQ ID NO: 68558 - DNA, 25 bp, Homo sapien
gcagctaagcagagttagaaaagat

SEQ ID NO: 68559 - DNA, 25 bp, Homo sapien
gaaagagggaaaatcaatctgcctc

SEQ ID NO: 68560 - DNA, 25 bp, Homo sapien
aataaggtagcacagattagatcta

SEQ ID NO: 68561 - DNA, 25 bp, Homo sapien
ctatgcctcaggattattagcagct

SEQ ID NO: 68562 - DNA, 25 bp, Homo sapien
agattagatctaaggacatggtggg

SEQ ID NO: 68563 - DNA, 25 bp, Homo sapien
ttggtggagaaatcaactaaatctg

SEQ ID NO: 68564 - DNA, 25 bp, Homo sapien
agcctattgagaatacatgacatgc

SEQ ID NO: 68565 - DNA, 25 bp, Homo sapien
tgaagccattcagtaagcctgctgt

SEQ ID NO: 68566 - DNA, 25 bp, Homo sapien
gcctgctgtgagttaataaggtagc

SEQ ID NO: 68567 - DNA, 25 bp, Homo sapien
ctaagagggatactgtgaatcacta

SEQ ID NO: 68568 - DNA, 25 bp, Homo sapien
ttaaattaatgctaagagggatact

SEQ ID NO: 68569 - DNA, 25 bp, Homo sapien
gcagctaagcagagttagaaaagat

SEQ ID NO: 68570 - DNA, 25 bp, Homo sapien
ctatgcctcaggattattagcagct

SEQ ID NO: 68571 - DNA, 25 bp, Homo sapien
ctaagagggatactgtgaatcacta

SEQ ID NO: 68572 - DNA, 25 bp, Homo sapien
ttaaattaatgctaagagggatact

SEQ ID NO: 68573 - DNA, 25 bp, Homo sapien
gaaagagggaaaatcaatctgcctc

SEQ ID NO: 68574 - DNA, 25 bp, Homo sapien
agattagatctaaggacatggtggg

SEQ ID NO: 68575 - DNA, 25 bp, Homo sapien
aataaggtagcacagattagatcta

SEQ ID NO: 68576 - DNA, 25 bp, Homo sapien
gcctgctgtgagttaataaggtagc

SEQ ID NO: 68577 - DNA, 25 bp, Homo sapien
tgaagccattcagtaagcctgctgt

SEQ ID NO: 68578 - DNA, 25 bp, Homo sapien
ttggtggagaaatcaactaaatctg

SEQ ID NO: 68579 - DNA, 25 bp, Homo sapien
agcctattgagaatacatgacatgc

SEQ ID NO: 68580 - DNA, 25 bp, Homo sapien
ttggtggagaaatcaactaaatctg

SEQ ID NO: 68581 - DNA, 25 bp, Homo sapien
agattagatctaaggacatggtggg

SEQ ID NO: 68582 - DNA, 25 bp, Homo sapien
gcctgctgtgagttaataaggtagc

SEQ ID NO: 68583 - DNA, 25 bp, Homo sapien
ctatgcctcaggattattagcagct

SEQ ID NO: 68584 - DNA, 25 bp, Homo sapien
ctaagagggatactgtgaatcacta

SEQ ID NO: 68585 - DNA, 25 bp, Homo sapien
ttaaattaatgctaagagggatact

SEQ ID NO: 68586 - DNA, 25 bp, Homo sapien
tgaagccattcagtaagcctgctgt

SEQ ID NO: 68587 - DNA, 25 bp, Homo sapien
gcagctaagcagagttagaaaagat

SEQ ID NO: 68588 - DNA, 25 bp, Homo sapien
gaaagagggaaaatcaatctgcctc

SEQ ID NO: 68589 - DNA, 25 bp, Homo sapien
agcctattgagaatacatgacatgc

SEQ ID NO: 68590 - DNA, 25 bp, Homo sapien
aataaggtagcacagattagatcta

SEQ ID NO: 68591 - DNA, 25 bp, Homo sapien
gcagctaagcagagttagaaaagat

SEQ ID NO: 68592 - DNA, 25 bp, Homo sapien
ctatgcctcaggattattagcagct

SEQ ID NO: 68593 - DNA, 25 bp, Homo sapien
ctaagagggatactgtgaatcacta

SEQ ID NO: 68594 - DNA, 25 bp, Homo sapien
ttaaattaatgctaagagggatact

SEQ ID NO: 68595 - DNA, 25 bp, Homo sapien
gaaagagggaaaatcaatctgcctc

SEQ ID NO: 68596 - DNA, 25 bp, Homo sapien
agattagatctaaggacatggtggg

SEQ ID NO: 68597 - DNA, 25 bp, Homo sapien
aataaggtagcacagattagatcta

SEQ ID NO: 68598 - DNA, 25 bp, Homo sapien
gcctgctgtgagttaataaggtagc

SEQ ID NO: 68599 - DNA, 25 bp, Homo sapien
tgaagccattcagtaagcctgctgt

SEQ ID NO: 68600 - DNA, 25 bp, Homo sapien
ttggtggagaaatcaactaaatctg

SEQ ID NO: 68601 - DNA, 25 bp, Homo sapien
agcctattgagaatacatgacatgc

SEQ ID NO: 68602 - DNA, 25 bp, Homo sapien
gcagctaagcagagttagaaaagat

SEQ ID NO: 68603 - DNA, 25 bp, Homo sapien
ctatgcctcaggattattagcagct

SEQ ID NO: 68604 - DNA, 25 bp, Homo sapien
ctaagagggatactgtgaatcacta

SEQ ID NO: 68605 - DNA, 25 bp, Homo sapien
ttaaattaatgctaagagggatact

SEQ ID NO: 68606 - DNA, 25 bp, Homo sapien
gaaagagggaaaatcaatctgcctc

SEQ ID NO: 68607 - DNA, 25 bp, Homo sapien
agattagatctaaggacatggtggg

SEQ ID NO: 68608 - DNA, 25 bp, Homo sapien
aataaggtagcacagattagatcta

SEQ ID NO: 68609 - DNA, 25 bp, Homo sapien
gcctgctgtgagttaataaggtagc

SEQ ID NO: 68610 - DNA, 25 bp, Homo sapien
tgaagccattcagtaagcctgctgt

SEQ ID NO: 68611 - DNA, 25 bp, Homo sapien
ttggtggagaaatcaactaaatctg

SEQ ID NO: 68612 - DNA, 25 bp, Homo sapien
agcctattgagaatacatgacatgc

SEQ ID NO: 68613 - DNA, 25 bp, Homo sapien
ctaagagggatactgtgaatcacta

SEQ ID NO: 68614 - DNA, 25 bp, Homo sapien
gcctgctgtgagttaataaggtagc

SEQ ID NO: 68615 - DNA, 25 bp, Homo sapien
ctatgcctcaggattattagcagct

SEQ ID NO: 68616 - DNA, 25 bp, Homo sapien
tgaagccattcagtaagcctgctgt

SEQ ID NO: 68617 - DNA, 25 bp, Homo sapien
ttggtggagaaatcaactaaatctg

SEQ ID NO: 68618 - DNA, 25 bp, Homo sapien
aataaggtagcacagattagatcta

SEQ ID NO: 68619 - DNA, 25 bp, Homo sapien
gaaagagggaaaatcaatctgcctc

SEQ ID NO: 68620 - DNA, 25 bp, Homo sapien
agcctattgagaatacatgacatgc

SEQ ID NO: 68621 - DNA, 25 bp, Homo sapien
gcagctaagcagagttagaaaagat

SEQ ID NO: 68622 - DNA, 25 bp, Homo sapien
ttaaattaatgctaagagggatact

SEQ ID NO: 68623 - DNA, 25 bp, Homo sapien
agattagatctaaggacatggtggg

SEQ ID NO: 68624 - DNA, 25 bp, Homo sapien
gcagctaagcagagttagaaaagat

SEQ ID NO: 68625 - DNA, 25 bp, Homo sapien
ctatgcctcaggattattagcagct

SEQ ID NO: 68626 - DNA, 25 bp, Homo sapien
ctaagagggatactgtgaatcacta

SEQ ID NO: 68627 - DNA, 25 bp, Homo sapien
ttaaattaatgctaagagggatact

SEQ ID NO: 68628 - DNA, 25 bp, Homo sapien
gaaagagggaaaatcaatctgcctc

SEQ ID NO: 68629 - DNA, 25 bp, Homo sapien
agattagatctaaggacatggtggg

SEQ ID NO: 68630 - DNA, 25 bp, Homo sapien
aataaggtagcacagattagatcta

SEQ ID NO: 68631 - DNA, 25 bp, Homo sapien
gcctgctgtgagttaataaggtagc

SEQ ID NO: 68632 - DNA, 25 bp, Homo sapien
tgaagccattcagtaagcctgctgt

SEQ ID NO: 68633 - DNA, 25 bp, Homo sapien
ttggtggagaaatcaactaaatctg

SEQ ID NO: 68634 - DNA, 25 bp, Homo sapien
agcctattgagaatacatgacatgc

SEQ ID NO: 68635 - DNA, 25 bp, Homo sapien
ctatgcctcaggattattagcagct

SEQ ID NO: 68636 - DNA, 25 bp, Homo sapien
agattagatctaaggacatggtggg

SEQ ID NO: 68637 - DNA, 25 bp, Homo sapien
tgaagccattcagtaagcctgctgt

SEQ ID NO: 68638 - DNA, 25 bp, Homo sapien
ttaaattaatgctaagagggatact

SEQ ID NO: 68639 - DNA, 25 bp, Homo sapien
ttggtggagaaatcaactaaatctg

SEQ ID NO: 68640 - DNA, 25 bp, Homo sapien
gcagctaagcagagttagaaaagat

SEQ ID NO: 68641 - DNA, 25 bp, Homo sapien
gaaagagggaaaatcaatctgcctc

SEQ ID NO: 68642 - DNA, 25 bp, Homo sapien
agcctattgagaatacatgacatgc

SEQ ID NO: 68643 - DNA, 25 bp, Homo sapien
gcctgctgtgagttaataaggtagc

SEQ ID NO: 68644 - DNA, 25 bp, Homo sapien
aataaggtagcacagattagatcta

SEQ ID NO: 68645 - DNA, 25 bp, Homo sapien
ctaagagggatactgtgaatcacta

SEQ ID NO: 68646 - DNA, 25 bp, Homo sapien
gcagctaagcagagttagaaaagat

SEQ ID NO: 68647 - DNA, 25 bp, Homo sapien
ctatgcctcaggattattagcagct

SEQ ID NO: 68648 - DNA, 25 bp, Homo sapien
ctaagagggatactgtgaatcacta

SEQ ID NO: 68649 - DNA, 25 bp, Homo sapien
ttaaattaatgctaagagggatact

SEQ ID NO: 68650 - DNA, 25 bp, Homo sapien
gaaagagggaaaatcaatctgcctc

SEQ ID NO: 68651 - DNA, 25 bp, Homo sapien
agattagatctaaggacatggtggg

SEQ ID NO: 68652 - DNA, 25 bp, Homo sapien
aataaggtagcacagattagatcta

SEQ ID NO: 68653 - DNA, 25 bp, Homo sapien
gcctgctgtgagttaataaggtagc

SEQ ID NO: 68654 - DNA, 25 bp, Homo sapien
tgaagccattcagtaagcctgctgt

SEQ ID NO: 68655 - DNA, 25 bp, Homo sapien
ttggtggagaaatcaactaaatctg

SEQ ID NO: 68656 - DNA, 25 bp, Homo sapien
agcctattgagaatacatgacatgc

SEQ ID NO: 68657 - DNA, 25 bp, Homo sapien
gaaagagggaaaatcaatctgcctc

SEQ ID NO: 68658 - DNA, 25 bp, Homo sapien
agcctattgagaatacatgacatgc

SEQ ID NO: 68659 - DNA, 25 bp, Homo sapien
agattagatctaaggacatggtggg

SEQ ID NO: 68660 - DNA, 25 bp, Homo sapien
ctaagagggatactgtgaatcacta

SEQ ID NO: 68661 - DNA, 25 bp, Homo sapien
gcagctaagcagagttagaaaagat

SEQ ID NO: 68662 - DNA, 25 bp, Homo sapien
ctatgcctcaggattattagcagct

SEQ ID NO: 68663 - DNA, 25 bp, Homo sapien
ttaaattaatgctaagagggatact

SEQ ID NO: 68664 - DNA, 25 bp, Homo sapien
gcctgctgtgagttaataaggtagc

SEQ ID NO: 68665 - DNA, 25 bp, Homo sapien
tgaagccattcagtaagcctgctgt

SEQ ID NO: 68666 - DNA, 25 bp, Homo sapien
ttggtggagaaatcaactaaatctg

SEQ ID NO: 68667 - DNA, 25 bp, Homo sapien
aataaggtagcacagattagatcta

SEQ ID NO: 68668 - DNA, 25 bp, Homo sapien
gcagctaagcagagttagaaaagat

SEQ ID NO: 68669 - DNA, 25 bp, Homo sapien
ctatgcctcaggattattagcagct

SEQ ID NO: 68670 - DNA, 25 bp, Homo sapien
ctaagagggatactgtgaatcacta

SEQ ID NO: 68671 - DNA, 25 bp, Homo sapien
ttaaattaatgctaagagggatact

SEQ ID NO: 68672 - DNA, 25 bp, Homo sapien
gaaagagggaaaatcaatctgcctc

SEQ ID NO: 68673 - DNA, 25 bp, Homo sapien
agattagatctaaggacatggtggg

SEQ ID NO: 68674 - DNA, 25 bp, Homo sapien
aataaggtagcacagattagatcta

SEQ ID NO: 68675 - DNA, 25 bp, Homo sapien
gcctgctgtgagttaataaggtagc

SEQ ID NO: 68676 - DNA, 25 bp, Homo sapien
tgaagccattcagtaagcctgctgt

SEQ ID NO: 68677 - DNA, 25 bp, Homo sapien
ttggtggagaaatcaactaaatctg

SEQ ID NO: 68678 - DNA, 25 bp, Homo sapien
agcctattgagaatacatgacatgc

SEQ ID NO: 68679 - DNA, 25 bp, Homo sapien
gcagctaagcagagttagaaaagat

SEQ ID NO: 68680 - DNA, 25 bp, Homo sapien
agcctattgagaatacatgacatgc

SEQ ID NO: 68681 - DNA, 25 bp, Homo sapien
gaaagagggaaaatcaatctgcctc

SEQ ID NO: 68682 - DNA, 25 bp, Homo sapien
ttggtggagaaatcaactaaatctg

SEQ ID NO: 68683 - DNA, 25 bp, Homo sapien
ctatgcctcaggattattagcagct

SEQ ID NO: 68684 - DNA, 25 bp, Homo sapien
tgaagccattcagtaagcctgctgt

SEQ ID NO: 68685 - DNA, 25 bp, Homo sapien
agattagatctaaggacatggtggg

SEQ ID NO: 68686 - DNA, 25 bp, Homo sapien
gcctgctgtgagttaataaggtagc

SEQ ID NO: 68687 - DNA, 25 bp, Homo sapien
aataaggtagcacagattagatcta

SEQ ID NO: 68688 - DNA, 25 bp, Homo sapien
ttaaattaatgctaagagggatact

SEQ ID NO: 68689 - DNA, 25 bp, Homo sapien
ctaagagggatactgtgaatcacta

SEQ ID NO: 68690 - DNA, 25 bp, Homo sapien
gcagctaagcagagttagaaaagat

SEQ ID NO: 68691 - DNA, 25 bp, Homo sapien
ctatgcctcaggattattagcagct

SEQ ID NO: 68692 - DNA, 25 bp, Homo sapien
ctaagagggatactgtgaatcacta

SEQ ID NO: 68693 - DNA, 25 bp, Homo sapien
ttaaattaatgctaagagggatact

SEQ ID NO: 68694 - DNA, 25 bp, Homo sapien
gaaagagggaaaatcaatctgcctc

SEQ ID NO: 68695 - DNA, 25 bp, Homo sapien
agattagatctaaggacatggtggg

SEQ ID NO: 68696 - DNA, 25 bp, Homo sapien
aataaggtagcacagattagatcta

SEQ ID NO: 68697 - DNA, 25 bp, Homo sapien
gcctgctgtgagttaataaggtagc

SEQ ID NO: 68698 - DNA, 25 bp, Homo sapien
tgaagccattcagtaagcctgctgt

SEQ ID NO: 68699 - DNA, 25 bp, Homo sapien
ttggtggagaaatcaactaaatctg

SEQ ID NO: 68700 - DNA, 25 bp, Homo sapien
agcctattgagaatacatgacatgc

SEQ ID NO: 68701 - DNA, 25 bp, Homo sapien
aataaggtagcacagattagatcta

SEQ ID NO: 68702 - DNA, 25 bp, Homo sapien
ctatgcctcaggattattagcagct

SEQ ID NO: 68703 - DNA, 25 bp, Homo sapien
ctaagagggatactgtgaatcacta

SEQ ID NO: 68704 - DNA, 25 bp, Homo sapien
agcctattgagaatacatgacatgc

SEQ ID NO: 68705 - DNA, 25 bp, Homo sapien
ttggtggagaaatcaactaaatctg

SEQ ID NO: 68706 - DNA, 25 bp, Homo sapien
tgaagccattcagtaagcctgctgt

SEQ ID NO: 68707 - DNA, 25 bp, Homo sapien
gaaagagggaaaatcaatctgcctc

SEQ ID NO: 68708 - DNA, 25 bp, Homo sapien
gcagctaagcagagttagaaaagat

SEQ ID NO: 68709 - DNA, 25 bp, Homo sapien
agattagatctaaggacatggtggg

SEQ ID NO: 68710 - DNA, 25 bp, Homo sapien
gcctgctgtgagttaataaggtagc

SEQ ID NO: 68711 - DNA, 25 bp, Homo sapien
ttaaattaatgctaagagggatact

SEQ ID NO: 68712 - DNA, 25 bp, Homo sapien
tgaagccattcagtaagcctgctgt

SEQ ID NO: 68713 - DNA, 25 bp, Homo sapien
gcctgctgtgagttaataaggtagc

SEQ ID NO: 68714 - DNA, 25 bp, Homo sapien
ctaagagggatactgtgaatcacta

SEQ ID NO: 68715 - DNA, 25 bp, Homo sapien
gcagctaagcagagttagaaaagat

SEQ ID NO: 68716 - DNA, 25 bp, Homo sapien
agcctattgagaatacatgacatgc

SEQ ID NO: 68717 - DNA, 25 bp, Homo sapien
ttggtggagaaatcaactaaatctg

SEQ ID NO: 68718 - DNA, 25 bp, Homo sapien
agattagatctaaggacatggtggg

SEQ ID NO: 68719 - DNA, 25 bp, Homo sapien
aataaggtagcacagattagatcta

SEQ ID NO: 68720 - DNA, 25 bp, Homo sapien
ttaaattaatgctaagagggatact

SEQ ID NO: 68721 - DNA, 25 bp, Homo sapien
ctatgcctcaggattattagcagct

SEQ ID NO: 68722 - DNA, 25 bp, Homo sapien
gaaagagggaaaatcaatctgcctc

SEQ ID NO: 68723 - DNA, 25 bp, Homo sapien
gcagctaagcagagttagaaaagat

SEQ ID NO: 68724 - DNA, 25 bp, Homo sapien
ctatgcctcaggattattagcagct

SEQ ID NO: 68725 - DNA, 25 bp, Homo sapien
ctaagagggatactgtgaatcacta

SEQ ID NO: 68726 - DNA, 25 bp, Homo sapien
ttaaattaatgctaagagggatact

SEQ ID NO: 68727 - DNA, 25 bp, Homo sapien
gaaagagggaaaatcaatctgcctc

SEQ ID NO: 68728 - DNA, 25 bp, Homo sapien
agattagatctaaggacatggtggg

SEQ ID NO: 68729 - DNA, 25 bp, Homo sapien
aataaggtagcacagattagatcta

SEQ ID NO: 68730 - DNA, 25 bp, Homo sapien
gcctgctgtgagttaataaggtagc

SEQ ID NO: 68731 - DNA, 25 bp, Homo sapien
tgaagccattcagtaagcctgctgt

SEQ ID NO: 68732 - DNA, 25 bp, Homo sapien
ttggtggagaaatcaactaaatctg

SEQ ID NO: 68733 - DNA, 25 bp, Homo sapien
agcctattgagaatacatgacatgc

SEQ ID NO: 68734 - DNA, 25 bp, Homo sapien
gcctgctgtgagttaataaggtagc

SEQ ID NO: 68735 - DNA, 25 bp, Homo sapien
ttggtggagaaatcaactaaatctg

SEQ ID NO: 68736 - DNA, 25 bp, Homo sapien
ctaagagggatactgtgaatcacta

SEQ ID NO: 68737 - DNA, 25 bp, Homo sapien
ttaaattaatgctaagagggatact

SEQ ID NO: 68738 - DNA, 25 bp, Homo sapien
agattagatctaaggacatggtggg

SEQ ID NO: 68739 - DNA, 25 bp, Homo sapien
aataaggtagcacagattagatcta

SEQ ID NO: 68740 - DNA, 25 bp, Homo sapien
agcctattgagaatacatgacatgc

SEQ ID NO: 68741 - DNA, 25 bp, Homo sapien
gaaagagggaaaatcaatctgcctc

SEQ ID NO: 68742 - DNA, 25 bp, Homo sapien
ctatgcctcaggattattagcagct

SEQ ID NO: 68743 - DNA, 25 bp, Homo sapien
tgaagccattcagtaagcctgctgt

SEQ ID NO: 68744 - DNA, 25 bp, Homo sapien
gcagctaagcagagttagaaaagat

SEQ ID NO: 68745 - DNA, 25 bp, Homo sapien
gcagctaagcagagttagaaaagat

SEQ ID NO: 68746 - DNA, 25 bp, Homo sapien
ctatgcctcaggattattagcagct

SEQ ID NO: 68747 - DNA, 25 bp, Homo sapien
ctaagagggatactgtgaatcacta

SEQ ID NO: 68748 - DNA, 25 bp, Homo sapien
ttaaattaatgctaagagggatact

SEQ ID NO: 68749 - DNA, 25 bp, Homo sapien
gaaagagggaaaatcaatctgcctc

SEQ ID NO: 68750 - DNA, 25 bp, Homo sapien
agattagatctaaggacatggtggg

SEQ ID NO: 68751 - DNA, 25 bp, Homo sapien
aataaggtagcacagattagatcta

SEQ ID NO: 68752 - DNA, 25 bp, Homo sapien
gcctgctgtgagttaataaggtagc

SEQ ID NO: 68753 - DNA, 25 bp, Homo sapien
tgaagccattcagtaagcctgctgt

SEQ ID NO: 68754 - DNA, 25 bp, Homo sapien
ttggtggagaaatcaactaaatctg

SEQ ID NO: 68755 - DNA, 25 bp, Homo sapien
agcctattgagaatacatgacatgc

SEQ ID NO: 68756 - DNA, 25 bp, Homo sapien
ctaagagggatactgtgaatcacta

SEQ ID NO: 68757 - DNA, 25 bp, Homo sapien
aataaggtagcacagattagatcta

SEQ ID NO: 68758 - DNA, 25 bp, Homo sapien
ttggtggagaaatcaactaaatctg

SEQ ID NO: 68759 - DNA, 25 bp, Homo sapien
ctatgcctcaggattattagcagct

SEQ ID NO: 68760 - DNA, 25 bp, Homo sapien
tgaagccattcagtaagcctgctgt

SEQ ID NO: 68761 - DNA, 25 bp, Homo sapien
gaaagagggaaaatcaatctgcctc

SEQ ID NO: 68762 - DNA, 25 bp, Homo sapien
agattagatctaaggacatggtggg

SEQ ID NO: 68763 - DNA, 25 bp, Homo sapien
ttaaattaatgctaagagggatact

SEQ ID NO: 68764 - DNA, 25 bp, Homo sapien
agcctattgagaatacatgacatgc

SEQ ID NO: 68765 - DNA, 25 bp, Homo sapien
gcctgctgtgagttaataaggtagc

SEQ ID NO: 68766 - DNA, 25 bp, Homo sapien
gcagctaagcagagttagaaaagat

SEQ ID NO: 68767 - DNA, 25 bp, Homo sapien
gcagctaagcagagttagaaaagat

SEQ ID NO: 68768 - DNA, 25 bp, Homo sapien
ctatgcctcaggattattagcagct

SEQ ID NO: 68769 - DNA, 25 bp, Homo sapien
ctaagagggatactgtgaatcacta

SEQ ID NO: 68770 - DNA, 25 bp, Homo sapien
ttaaattaatgctaagagggatact

SEQ ID NO: 68771 - DNA, 25 bp, Homo sapien
gaaagagggaaaatcaatctgcctc

SEQ ID NO: 68772 - DNA, 25 bp, Homo sapien
agattagatctaaggacatggtggg

SEQ ID NO: 68773 - DNA, 25 bp, Homo sapien
aataaggtagcacagattagatcta

SEQ ID NO: 68774 - DNA, 25 bp, Homo sapien
gcctgctgtgagttaataaggtagc

SEQ ID NO: 68775 - DNA, 25 bp, Homo sapien
tgaagccattcagtaagcctgctgt

SEQ ID NO: 68776 - DNA, 25 bp, Homo sapien
ttggtggagaaatcaactaaatctg

SEQ ID NO: 68777 - DNA, 25 bp, Homo sapien
agcctattgagaatacatgacatgc

SEQ ID NO: 68778 - DNA, 25 bp, Homo sapien
gcagctaagcagagttagaaaagat

SEQ ID NO: 68779 - DNA, 25 bp, Homo sapien
gcctgctgtgagttaataaggtagc

SEQ ID NO: 68780 - DNA, 25 bp, Homo sapien
agcctattgagaatacatgacatgc

SEQ ID NO: 68781 - DNA, 25 bp, Homo sapien
ttaaattaatgctaagagggatact

SEQ ID NO: 68782 - DNA, 25 bp, Homo sapien
tgaagccattcagtaagcctgctgt

SEQ ID NO: 68783 - DNA, 25 bp, Homo sapien
ctaagagggatactgtgaatcacta

SEQ ID NO: 68784 - DNA, 25 bp, Homo sapien
gaaagagggaaaatcaatctgcctc

SEQ ID NO: 68785 - DNA, 25 bp, Homo sapien
ctatgcctcaggattattagcagct

SEQ ID NO: 68786 - DNA, 25 bp, Homo sapien
agattagatctaaggacatggtggg

SEQ ID NO: 68787 - DNA, 25 bp, Homo sapien
ttggtggagaaatcaactaaatctg

SEQ ID NO: 68788 - DNA, 25 bp, Homo sapien
aataaggtagcacagattagatcta

SEQ ID NO: 68789 - DNA, 25 bp, Homo sapien
gcagctaagcagagttagaaaagat

SEQ ID NO: 68790 - DNA, 25 bp, Homo sapien
ctatgcctcaggattattagcagct

SEQ ID NO: 68791 - DNA, 25 bp, Homo sapien
ctaagagggatactgtgaatcacta

SEQ ID NO: 68792 - DNA, 25 bp, Homo sapien
ttaaattaatgctaagagggatact

SEQ ID NO: 68793 - DNA, 25 bp, Homo sapien
gaaagagggaaaatcaatctgcctc

SEQ ID NO: 68794 - DNA, 25 bp, Homo sapien
agattagatctaaggacatggtggg

SEQ ID NO: 68795 - DNA, 25 bp, Homo sapien
aataaggtagcacagattagatcta

SEQ ID NO: 68796 - DNA, 25 bp, Homo sapien
gcctgctgtgagttaataaggtagc

SEQ ID NO: 68797 - DNA, 25 bp, Homo sapien
tgaagccattcagtaagcctgctgt

SEQ ID NO: 68798 - DNA, 25 bp, Homo sapien
ttggtggagaaatcaactaaatctg

SEQ ID NO: 68799 - DNA, 25 bp, Homo sapien
agcctattgagaatacatgacatgc

SEQ ID NO: 68800 - DNA, 25 bp, Homo sapien
ttaaattaatgctaagagggatact

SEQ ID NO: 68801 - DNA, 25 bp, Homo sapien
tgaagccattcagtaagcctgctgt

SEQ ID NO: 68802 - DNA, 25 bp, Homo sapien
ttggtggagaaatcaactaaatctg

SEQ ID NO: 68803 - DNA, 25 bp, Homo sapien
ctaagagggatactgtgaatcacta

SEQ ID NO: 68804 - DNA, 25 bp, Homo sapien
ctatgcctcaggattattagcagct

SEQ ID NO: 68805 - DNA, 25 bp, Homo sapien
agattagatctaaggacatggtggg

SEQ ID NO: 68806 - DNA, 25 bp, Homo sapien
gaaagagggaaaatcaatctgcctc

SEQ ID NO: 68807 - DNA, 25 bp, Homo sapien
gcagctaagcagagttagaaaagat

SEQ ID NO: 68808 - DNA, 25 bp, Homo sapien
aataaggtagcacagattagatcta

SEQ ID NO: 68809 - DNA, 25 bp, Homo sapien
gcctgctgtgagttaataaggtagc

SEQ ID NO: 68810 - DNA, 25 bp, Homo sapien
agcctattgagaatacatgacatgc

SEQ ID NO: 68811 - DNA, 25 bp, Homo sapien
gcagctaagcagagttagaaaagat

SEQ ID NO: 68812 - DNA, 25 bp, Homo sapien
ctatgcctcaggattattagcagct

SEQ ID NO: 68813 - DNA, 25 bp, Homo sapien
ctaagagggatactgtgaatcacta

SEQ ID NO: 68814 - DNA, 25 bp, Homo sapien
ttaaattaatgctaagagggatact

SEQ ID NO: 68815 - DNA, 25 bp, Homo sapien
gaaagagggaaaatcaatctgcctc

SEQ ID NO: 68816 - DNA, 25 bp, Homo sapien
agattagatctaaggacatggtggg

SEQ ID NO: 68817 - DNA, 25 bp, Homo sapien
aataaggtagcacagattagatcta

SEQ ID NO: 68818 - DNA, 25 bp, Homo sapien
gcctgctgtgagttaataaggtagc

SEQ ID NO: 68819 - DNA, 25 bp, Homo sapien
tgaagccattcagtaagcctgctgt

SEQ ID NO: 68820 - DNA, 25 bp, Homo sapien
ttggtggagaaatcaactaaatctg

SEQ ID NO: 68821 - DNA, 25 bp, Homo sapien
agcctattgagaatacatgacatgc

SEQ ID NO: 68822 - DNA, 25 bp, Homo sapien
gaaagagggaaaatcaatctgcctc

SEQ ID NO: 68823 - DNA, 25 bp, Homo sapien
agattagatctaaggacatggtggg

SEQ ID NO: 68824 - DNA, 25 bp, Homo sapien
agcctattgagaatacatgacatgc

SEQ ID NO: 68825 - DNA, 25 bp, Homo sapien
ttggtggagaaatcaactaaatctg

SEQ ID NO: 68826 - DNA, 25 bp, Homo sapien
aataaggtagcacagattagatcta

SEQ ID NO: 68827 - DNA, 25 bp, Homo sapien
ttaaattaatgctaagagggatact

SEQ ID NO: 68828 - DNA, 25 bp, Homo sapien
gcagctaagcagagttagaaaagat

SEQ ID NO: 68829 - DNA, 25 bp, Homo sapien
ctatgcctcaggattattagcagct

SEQ ID NO: 68830 - DNA, 25 bp, Homo sapien
tgaagccattcagtaagcctgctgt

SEQ ID NO: 68831 - DNA, 25 bp, Homo sapien
ctaagagggatactgtgaatcacta

SEQ ID NO: 68832 - DNA, 25 bp, Homo sapien
gcctgctgtgagttaataaggtagc

SEQ ID NO: 68833 - DNA, 25 bp, Homo sapien
gcagctaagcagagttagaaaagat

SEQ ID NO: 68834 - DNA, 25 bp, Homo sapien
ctatgcctcaggattattagcagct

SEQ ID NO: 68835 - DNA, 25 bp, Homo sapien
ctaagagggatactgtgaatcacta

SEQ ID NO: 68836 - DNA, 25 bp, Homo sapien
ttaaattaatgctaagagggatact

SEQ ID NO: 68837 - DNA, 25 bp, Homo sapien
gaaagagggaaaatcaatctgcctc

SEQ ID NO: 68838 - DNA, 25 bp, Homo sapien
agattagatctaaggacatggtggg

SEQ ID NO: 68839 - DNA, 25 bp, Homo sapien
aataaggtagcacagattagatcta

SEQ ID NO: 68840 - DNA, 25 bp, Homo sapien
gcctgctgtgagttaataaggtagc

SEQ ID NO: 68841 - DNA, 25 bp, Homo sapien
tgaagccattcagtaagcctgctgt

SEQ ID NO: 68842 - DNA, 25 bp, Homo sapien
ttggtggagaaatcaactaaatctg

SEQ ID NO: 68843 - DNA, 25 bp, Homo sapien
agcctattgagaatacatgacatgc

SEQ ID NO: 68844 - DNA, 25 bp, Homo sapien
gcagctaagcagagttagaaaagat

SEQ ID NO: 68845 - DNA, 25 bp, Homo sapien
ctatgcctcaggattattagcagct

SEQ ID NO: 68846 - DNA, 25 bp, Homo sapien
ctaagagggatactgtgaatcacta

SEQ ID NO: 68847 - DNA, 25 bp, Homo sapien
ttaaattaatgctaagagggatact

SEQ ID NO: 68848 - DNA, 25 bp, Homo sapien
gaaagagggaaaatcaatctgcctc

SEQ ID NO: 68849 - DNA, 25 bp, Homo sapien
agattagatctaaggacatggtggg

SEQ ID NO: 68850 - DNA, 25 bp, Homo sapien
aataaggtagcacagattagatcta

SEQ ID NO: 68851 - DNA, 25 bp, Homo sapien
gcctgctgtgagttaataaggtagc

SEQ ID NO: 68852 - DNA, 25 bp, Homo sapien
tgaagccattcagtaagcctgctgt

SEQ ID NO: 68853 - DNA, 25 bp, Homo sapien
ttggtggagaaatcaactaaatctg

SEQ ID NO: 68854 - DNA, 25 bp, Homo sapien
agcctattgagaatacatgacatgc

SEQ ID NO: 68855 - DNA, 25 bp, Homo sapien
gaaagagggaaaatcaatctgcctc

SEQ ID NO: 68856 - DNA, 25 bp, Homo sapien
ctaagagggatactgtgaatcacta

SEQ ID NO: 68857 - DNA, 25 bp, Homo sapien
tgaagccattcagtaagcctgctgt

SEQ ID NO: 68858 - DNA, 25 bp, Homo sapien
ttaaattaatgctaagagggatact

SEQ ID NO: 68859 - DNA, 25 bp, Homo sapien
gcagctaagcagagttagaaaagat

SEQ ID NO: 68860 - DNA, 25 bp, Homo sapien
gcctgctgtgagttaataaggtagc

SEQ ID NO: 68861 - DNA, 25 bp, Homo sapien
ttggtggagaaatcaactaaatctg

SEQ ID NO: 68862 - DNA, 25 bp, Homo sapien
agcctattgagaatacatgacatgc

SEQ ID NO: 68863 - DNA, 25 bp, Homo sapien
aataaggtagcacagattagatcta

SEQ ID NO: 68864 - DNA, 25 bp, Homo sapien
agattagatctaaggacatggtggg

SEQ ID NO: 68865 - DNA, 25 bp, Homo sapien
ctatgcctcaggattattagcagct

SEQ ID NO: 68866 - DNA, 25 bp, Homo sapien
gaaagagggaaaatcaatctgcctc

SEQ ID NO: 68867 - DNA, 25 bp, Homo sapien
ttaaattaatgctaagagggatact

SEQ ID NO: 68868 - DNA, 25 bp, Homo sapien
tgaagccattcagtaagcctgctgt

SEQ ID NO: 68869 - DNA, 25 bp, Homo sapien
ctaagagggatactgtgaatcacta

SEQ ID NO: 68870 - DNA, 25 bp, Homo sapien
gcagctaagcagagttagaaaagat

SEQ ID NO: 68871 - DNA, 25 bp, Homo sapien
gcctgctgtgagttaataaggtagc

SEQ ID NO: 68872 - DNA, 25 bp, Homo sapien
ttggtggagaaatcaactaaatctg

SEQ ID NO: 68873 - DNA, 25 bp, Homo sapien
aataaggtagcacagattagatcta

SEQ ID NO: 68874 - DNA, 25 bp, Homo sapien
agattagatctaaggacatggtggg

SEQ ID NO: 68875 - DNA, 25 bp, Homo sapien
agcctattgagaatacatgacatgc

SEQ ID NO: 68876 - DNA, 25 bp, Homo sapien
ctatgcctcaggattattagcagct

SEQ ID NO: 68877 - DNA, 25 bp, Homo sapien
gaaagagggaaaatcaatctgcctc

SEQ ID NO: 68878 - DNA, 25 bp, Homo sapien
tgaagccattcagtaagcctgctgt

SEQ ID NO: 68879 - DNA, 25 bp, Homo sapien
ttaaattaatgctaagagggatact

SEQ ID NO: 68880 - DNA, 25 bp, Homo sapien
ctaagagggatactgtgaatcacta

SEQ ID NO: 68881 - DNA, 25 bp, Homo sapien
gcagctaagcagagttagaaaagat

SEQ ID NO: 68882 - DNA, 25 bp, Homo sapien
gcctgctgtgagttaataaggtagc

SEQ ID NO: 68883 - DNA, 25 bp, Homo sapien
ttggtggagaaatcaactaaatctg

SEQ ID NO: 68884 - DNA, 25 bp, Homo sapien
aataaggtagcacagattagatcta

SEQ ID NO: 68885 - DNA, 25 bp, Homo sapien
agattagatctaaggacatggtggg

SEQ ID NO: 68886 - DNA, 25 bp, Homo sapien
agcctattgagaatacatgacatgc

SEQ ID NO: 68887 - DNA, 25 bp, Homo sapien
ctatgcctcaggattattagcagct

SEQ ID NO: 68888 - DNA, 25 bp, Homo sapien
gaaagagggaaaatcaatctgcctc

SEQ ID NO: 68889 - DNA, 25 bp, Homo sapien
tgaagccattcagtaagcctgctgt

SEQ ID NO: 68890 - DNA, 25 bp, Homo sapien
ttaaattaatgctaagagggatact

SEQ ID NO: 68891 - DNA, 25 bp, Homo sapien
ctaagagggatactgtgaatcacta

SEQ ID NO: 68892 - DNA, 25 bp, Homo sapien
gcagctaagcagagttagaaaagat

SEQ ID NO: 68893 - DNA, 25 bp, Homo sapien
gcctgctgtgagttaataaggtagc

SEQ ID NO: 68894 - DNA, 25 bp, Homo sapien
ttggtggagaaatcaactaaatctg

SEQ ID NO: 68895 - DNA, 25 bp, Homo sapien
aataaggtagcacagattagatcta

SEQ ID NO: 68896 - DNA, 25 bp, Homo sapien
agattagatctaaggacatggtggg

SEQ ID NO: 68897 - DNA, 25 bp, Homo sapien
agcctattgagaatacatgacatgc

SEQ ID NO: 68898 - DNA, 25 bp, Homo sapien
ctatgcctcaggattattagcagct

SEQ ID NO: 68899 - DNA, 25 bp, Homo sapien
gaaagagggaaaatcaatctgcctc

SEQ ID NO: 68900 - DNA, 25 bp, Homo sapien
ctaagagggatactgtgaatcacta

SEQ ID NO: 68901 - DNA, 25 bp, Homo sapien
ttaaattaatgctaagagggatact

SEQ ID NO: 68902 - DNA, 25 bp, Homo sapien
tgaagccattcagtaagcctgctgt

SEQ ID NO: 68903 - DNA, 25 bp, Homo sapien
gcagctaagcagagttagaaaagat

SEQ ID NO: 68904 - DNA, 25 bp, Homo sapien
gcctgctgtgagttaataaggtagc

SEQ ID NO: 68905 - DNA, 25 bp, Homo sapien
ttggtggagaaatcaactaaatctg

SEQ ID NO: 68906 - DNA, 25 bp, Homo sapien
aataaggtagcacagattagatcta

SEQ ID NO: 68907 - DNA, 25 bp, Homo sapien
agattagatctaaggacatggtggg

SEQ ID NO: 68908 - DNA, 25 bp, Homo sapien
agcctattgagaatacatgacatgc

SEQ ID NO: 68909 - DNA, 25 bp, Homo sapien
ctatgcctcaggattattagcagct

SEQ ID NO: 68910 - DNA, 25 bp, Homo sapien
gaaagagggaaaatcaatctgcctc

SEQ ID NO: 68911 - DNA, 25 bp, Homo sapien
ttaaattaatgctaagagggatact

SEQ ID NO: 68912 - DNA, 25 bp, Homo sapien
tgaagccattcagtaagcctgctgt

SEQ ID NO: 68913 - DNA, 25 bp, Homo sapien
ctaagagggatactgtgaatcacta

SEQ ID NO: 68914 - DNA, 25 bp, Homo sapien
gcagctaagcagagttagaaaagat

SEQ ID NO: 68915 - DNA, 25 bp, Homo sapien
gcctgctgtgagttaataaggtagc

SEQ ID NO: 68916 - DNA, 25 bp, Homo sapien
ttggtggagaaatcaactaaatctg

SEQ ID NO: 68917 - DNA, 25 bp, Homo sapien
aataaggtagcacagattagatcta

SEQ ID NO: 68918 - DNA, 25 bp, Homo sapien
agcctattgagaatacatgacatgc

SEQ ID NO: 68919 - DNA, 25 bp, Homo sapien
agattagatctaaggacatggtggg

SEQ ID NO: 68920 - DNA, 25 bp, Homo sapien
ctatgcctcaggattattagcagct

SEQ ID NO: 68921 - DNA, 25 bp, Homo sapien
gaaagagggaaaatcaatctgcctc

SEQ ID NO: 68922 - DNA, 25 bp, Homo sapien
ttaaattaatgctaagagggatact

SEQ ID NO: 68923 - DNA, 25 bp, Homo sapien
tgaagccattcagtaagcctgctgt

SEQ ID NO: 68924 - DNA, 25 bp, Homo sapien
ctaagagggatactgtgaatcacta

SEQ ID NO: 68925 - DNA, 25 bp, Homo sapien
gcagctaagcagagttagaaaagat

SEQ ID NO: 68926 - DNA, 25 bp, Homo sapien
gcctgctgtgagttaataaggtagc

SEQ ID NO: 68927 - DNA, 25 bp, Homo sapien
ttggtggagaaatcaactaaatctg

SEQ ID NO: 68928 - DNA, 25 bp, Homo sapien
aataaggtagcacagattagatcta

SEQ ID NO: 68929 - DNA, 25 bp, Homo sapien
agcctattgagaatacatgacatgc

SEQ ID NO: 68930 - DNA, 25 bp, Homo sapien
agattagatctaaggacatggtggg

SEQ ID NO: 68931 - DNA, 25 bp, Homo sapien
ctatgcctcaggattattagcagct

SEQ ID NO: 68932 - DNA, 25 bp, Homo sapien
gaaagagggaaaatcaatctgcctc

SEQ ID NO: 68933 - DNA, 25 bp, Homo sapien
tgaagccattcagtaagcctgctgt

SEQ ID NO: 68934 - DNA, 25 bp, Homo sapien
ttaaattaatgctaagagggatact

SEQ ID NO: 68935 - DNA, 25 bp, Homo sapien
ctaagagggatactgtgaatcacta

SEQ ID NO: 68936 - DNA, 25 bp, Homo sapien
gcagctaagcagagttagaaaagat

SEQ ID NO: 68937 - DNA, 25 bp, Homo sapien
gcctgctgtgagttaataaggtagc

SEQ ID NO: 68938 - DNA, 25 bp, Homo sapien
ttggtggagaaatcaactaaatctg

SEQ ID NO: 68939 - DNA, 25 bp, Homo sapien
agattagatctaaggacatggtggg

SEQ ID NO: 68940 - DNA, 25 bp, Homo sapien
aataaggtagcacagattagatcta

SEQ ID NO: 68941 - DNA, 25 bp, Homo sapien
agcctattgagaatacatgacatgc

SEQ ID NO: 68942 - DNA, 25 bp, Homo sapien
ctatgcctcaggattattagcagct

SEQ ID NO: 68943 - DNA, 25 bp, Homo sapien
gaaagagggaaaatcaatctgcctc

SEQ ID NO: 68944 - DNA, 25 bp, Homo sapien
ttaaattaatgctaagagggatact

SEQ ID NO: 68945 - DNA, 25 bp, Homo sapien
tgaagccattcagtaagcctgctgt

SEQ ID NO: 68946 - DNA, 25 bp, Homo sapien
ctaagagggatactgtgaatcacta

SEQ ID NO: 68947 - DNA, 25 bp, Homo sapien
gcagctaagcagagttagaaaagat

SEQ ID NO: 68948 - DNA, 25 bp, Homo sapien
gcctgctgtgagttaataaggtagc

SEQ ID NO: 68949 - DNA, 25 bp, Homo sapien
ttggtggagaaatcaactaaatctg

SEQ ID NO: 68950 - DNA, 25 bp, Homo sapien
aataaggtagcacagattagatcta

SEQ ID NO: 68951 - DNA, 25 bp, Homo sapien
agattagatctaaggacatggtggg

SEQ ID NO: 68952 - DNA, 25 bp, Homo sapien
agcctattgagaatacatgacatgc

SEQ ID NO: 68953 - DNA, 25 bp, Homo sapien
ctatgcctcaggattattagcagct

SEQ ID NO: 68954 - DNA, 25 bp, Homo sapien
tgaagccattcagtaagcctgctgt

SEQ ID NO: 68955 - DNA, 25 bp, Homo sapien
ttggtggagaaatcaactaaatctg

SEQ ID NO: 68956 - DNA, 25 bp, Homo sapien
gaaagagggaaaatcaatctgcctc

SEQ ID NO: 68957 - DNA, 25 bp, Homo sapien
aataaggtagcacagattagatcta

SEQ ID NO: 68958 - DNA, 25 bp, Homo sapien
ctatgcctcaggattattagcagct

SEQ ID NO: 68959 - DNA, 25 bp, Homo sapien
gcctgctgtgagttaataaggtagc

SEQ ID NO: 68960 - DNA, 25 bp, Homo sapien
ctaagagggatactgtgaatcacta

SEQ ID NO: 68961 - DNA, 25 bp, Homo sapien
gcagctaagcagagttagaaaagat

SEQ ID NO: 68962 - DNA, 25 bp, Homo sapien
ttaaattaatgctaagagggatact

SEQ ID NO: 68963 - DNA, 25 bp, Homo sapien
agattagatctaaggacatggtggg

SEQ ID NO: 68964 - DNA, 25 bp, Homo sapien
agcctattgagaatacatgacatgc

SEQ ID NO: 68965 - DNA, 25 bp, Homo sapien
gaaagagggaaaatcaatctgcctc

SEQ ID NO: 68966 - DNA, 25 bp, Homo sapien
ttaaattaatgctaagagggatact

SEQ ID NO: 68967 - DNA, 25 bp, Homo sapien
ctaagagggatactgtgaatcacta

SEQ ID NO: 68968 - DNA, 25 bp, Homo sapien
tgaagccattcagtaagcctgctgt

SEQ ID NO: 68969 - DNA, 25 bp, Homo sapien
gcagctaagcagagttagaaaagat

SEQ ID NO: 68970 - DNA, 25 bp, Homo sapien
gcctgctgtgagttaataaggtagc

SEQ ID NO: 68971 - DNA, 25 bp, Homo sapien
ttggtggagaaatcaactaaatctg

SEQ ID NO: 68972 - DNA, 25 bp, Homo sapien
aataaggtagcacagattagatcta

SEQ ID NO: 68973 - DNA, 25 bp, Homo sapien
agattagatctaaggacatggtggg

SEQ ID NO: 68974 - DNA, 25 bp, Homo sapien
agcctattgagaatacatgacatgc

SEQ ID NO: 68975 - DNA, 25 bp, Homo sapien
ctatgcctcaggattattagcagct

SEQ ID NO: 68976 - DNA, 25 bp, Homo sapien
gcagctaagcagagttagaaaagat

SEQ ID NO: 68977 - DNA, 25 bp, Homo sapien
ctatgcctcaggattattagcagct

SEQ ID NO: 68978 - DNA, 25 bp, Homo sapien
ctaagagggatactgtgaatcacta

SEQ ID NO: 68979 - DNA, 25 bp, Homo sapien
ttaaattaatgctaagagggatact

SEQ ID NO: 68980 - DNA, 25 bp, Homo sapien
gaaagagggaaaatcaatctgcctc

SEQ ID NO: 68981 - DNA, 25 bp, Homo sapien
agattagatctaaggacatggtggg

SEQ ID NO: 68982 - DNA, 25 bp, Homo sapien
aataaggtagcacagattagatcta

SEQ ID NO: 68983 - DNA, 25 bp, Homo sapien
gcctgctgtgagttaataaggtagc

SEQ ID NO: 68984 - DNA, 25 bp, Homo sapien
tgaagccattcagtaagcctgctgt

SEQ ID NO: 68985 - DNA, 25 bp, Homo sapien
ttggtggagaaatcaactaaatctg

SEQ ID NO: 68986 - DNA, 25 bp, Homo sapien
agcctattgagaatacatgacatgc

SEQ ID NO: 68987 - DNA, 25 bp, Homo sapien
agctgctaataatcctgaggcatag

SEQ ID NO: 68988 - DNA, 25 bp, Homo sapien
cagatttagttgatttctccaccaa

SEQ ID NO: 68989 - DNA, 25 bp, Homo sapien
gcatgtcatgtattctcaataggct

SEQ ID NO: 68990 - DNA, 25 bp, Homo sapien
gaggcagattgattttccctctttc

SEQ ID NO: 68991 - DNA, 25 bp, Homo sapien
acagcaggcttactgaatggcttca

SEQ ID NO: 68992 - DNA, 25 bp, Homo sapien
atcttttctaactctgcttagctgc

SEQ ID NO: 68993 - DNA, 25 bp, Homo sapien
gctaccttattaactcacagcaggc

SEQ ID NO: 68994 - DNA, 25 bp, Homo sapien
tagatctaatctgtgctaccttatt

SEQ ID NO: 68995 - DNA, 25 bp, Homo sapien
cccaccatgtccttagatctaatct

SEQ ID NO: 68996 - DNA, 25 bp, Homo sapien
agtatccctcttagcattaatttaa

SEQ ID NO: 68997 - DNA, 25 bp, Homo sapien
tagtgattcacagtatccctcttag

SEQ ID NO: 68998 - DNA, 25 bp, Homo sapien
gaaagagggaaaatcaatctgcctc

SEQ ID NO: 68999 - DNA, 25 bp, Homo sapien
tgaagccattcagtaagcctgctgt

SEQ ID NO: 69000 - DNA, 25 bp, Homo sapien
ttaaattaatgctaagagggatact

SEQ ID NO: 69001 - DNA, 25 bp, Homo sapien
ctaagagggatactgtgaatcacta

SEQ ID NO: 69002 - DNA, 25 bp, Homo sapien
gcagctaagcagagttagaaaagat

SEQ ID NO: 69003 - DNA, 25 bp, Homo sapien
gcctgctgtgagttaataaggtagc

SEQ ID NO: 69004 - DNA, 25 bp, Homo sapien
ttggtggagaaatcaactaaatctg

SEQ ID NO: 69005 - DNA, 25 bp, Homo sapien
aataaggtagcacagattagatcta

SEQ ID NO: 69006 - DNA, 25 bp, Homo sapien
agattagatctaaggacatggtggg

SEQ ID NO: 69007 - DNA, 25 bp, Homo sapien
agcctattgagaatacatgacatgc

SEQ ID NO: 69008 - DNA, 25 bp, Homo sapien
ctatgcctcaggattattagcagct

SEQ ID NO: 69009 - DNA, 25 bp, Homo sapien
ttaaattaatgctaagagggatact

SEQ ID NO: 69010 - DNA, 25 bp, Homo sapien
aataaggtagcacagattagatcta

SEQ ID NO: 69011 - DNA, 25 bp, Homo sapien
ctatgcctcaggattattagcagct

SEQ ID NO: 69012 - DNA, 25 bp, Homo sapien
gcagctaagcagagttagaaaagat

SEQ ID NO: 69013 - DNA, 25 bp, Homo sapien
ctaagagggatactgtgaatcacta

SEQ ID NO: 69014 - DNA, 25 bp, Homo sapien
ttggtggagaaatcaactaaatctg

SEQ ID NO: 69015 - DNA, 25 bp, Homo sapien
agcctattgagaatacatgacatgc

SEQ ID NO: 69016 - DNA, 25 bp, Homo sapien
gcctgctgtgagttaataaggtagc

SEQ ID NO: 69017 - DNA, 25 bp, Homo sapien
agattagatctaaggacatggtggg

SEQ ID NO: 69018 - DNA, 25 bp, Homo sapien
tgaagccattcagtaagcctgctgt

SEQ ID NO: 69019 - DNA, 25 bp, Homo sapien
gaaagagggaaaatcaatctgcctc

SEQ ID NO: 69020 - DNA, 25 bp, Homo sapien
gcagctaagcagagttagaaaagat

SEQ ID NO: 69021 - DNA, 25 bp, Homo sapien
ctatgcctcaggattattagcagct

SEQ ID NO: 69022 - DNA, 25 bp, Homo sapien
ctaagagggatactgtgaatcacta

SEQ ID NO: 69023 - DNA, 25 bp, Homo sapien
ttaaattaatgctaagagggatact

SEQ ID NO: 69024 - DNA, 25 bp, Homo sapien
gaaagagggaaaatcaatctgcctc

SEQ ID NO: 69025 - DNA, 25 bp, Homo sapien
agattagatctaaggacatggtggg

SEQ ID NO: 69026 - DNA, 25 bp, Homo sapien
aataaggtagcacagattagatcta

SEQ ID NO: 69027 - DNA, 25 bp, Homo sapien
gcctgctgtgagttaataaggtagc

SEQ ID NO: 69028 - DNA, 25 bp, Homo sapien
tgaagccattcagtaagcctgctgt

SEQ ID NO: 69029 - DNA, 25 bp, Homo sapien
ttggtggagaaatcaactaaatctg

SEQ ID NO: 69030 - DNA, 25 bp, Homo sapien
agcctattgagaatacatgacatgc

SEQ ID NO: 69031 - DNA, 25 bp, Homo sapien
gaaagagggaaaatcaatctgcctc

SEQ ID NO: 69032 - DNA, 25 bp, Homo sapien
aataaggtagcacagattagatcta

SEQ ID NO: 69033 - DNA, 25 bp, Homo sapien
agcctattgagaatacatgacatgc

SEQ ID NO: 69034 - DNA, 25 bp, Homo sapien
ctatgcctcaggattattagcagct

SEQ ID NO: 69035 - DNA, 25 bp, Homo sapien
tgaagccattcagtaagcctgctgt

SEQ ID NO: 69036 - DNA, 25 bp, Homo sapien
ctaagagggatactgtgaatcacta

SEQ ID NO: 69037 - DNA, 25 bp, Homo sapien
ttaaattaatgctaagagggatact

SEQ ID NO: 69038 - DNA, 25 bp, Homo sapien
gcctgctgtgagttaataaggtagc

SEQ ID NO: 69039 - DNA, 25 bp, Homo sapien
gcagctaagcagagttagaaaagat

SEQ ID NO: 69040 - DNA, 25 bp, Homo sapien
ttggtggagaaatcaactaaatctg

SEQ ID NO: 69041 - DNA, 25 bp, Homo sapien
agattagatctaaggacatggtggg

SEQ ID NO: 69042 - DNA, 25 bp, Homo sapien
gcagctaagcagagttagaaaagat

SEQ ID NO: 69043 - DNA, 25 bp, Homo sapien
ctatgcctcaggattattagcagct

SEQ ID NO: 69044 - DNA, 25 bp, Homo sapien
ctaagagggatactgtgaatcacta

SEQ ID NO: 69045 - DNA, 25 bp, Homo sapien
ttaaattaatgctaagagggatact

SEQ ID NO: 69046 - DNA, 25 bp, Homo sapien
gaaagagggaaaatcaatctgcctc

SEQ ID NO: 69047 - DNA, 25 bp, Homo sapien
agattagatctaaggacatggtggg

SEQ ID NO: 69048 - DNA, 25 bp, Homo sapien
aataaggtagcacagattagatcta

SEQ ID NO: 69049 - DNA, 25 bp, Homo sapien
gcctgctgtgagttaataaggtagc

SEQ ID NO: 69050 - DNA, 25 bp, Homo sapien
tgaagccattcagtaagcctgctgt

SEQ ID NO: 69051 - DNA, 25 bp, Homo sapien
ttggtggagaaatcaactaaatctg

SEQ ID NO: 69052 - DNA, 25 bp, Homo sapien
agcctattgagaatacatgacatgc

SEQ ID NO: 69053 - DNA, 25 bp, Homo sapien
gcagctaagcagagttagaaaagat

SEQ ID NO: 69054 - DNA, 25 bp, Homo sapien
agcctattgagaatacatgacatgc

SEQ ID NO: 69055 - DNA, 25 bp, Homo sapien
ctaagagggatactgtgaatcacta

SEQ ID NO: 69056 - DNA, 25 bp, Homo sapien
ttggtggagaaatcaactaaatctg

SEQ ID NO: 69057 - DNA, 25 bp, Homo sapien
gcctgctgtgagttaataaggtagc

SEQ ID NO: 69058 - DNA, 25 bp, Homo sapien
tgaagccattcagtaagcctgctgt

SEQ ID NO: 69059 - DNA, 25 bp, Homo sapien
agattagatctaaggacatggtggg

SEQ ID NO: 69060 - DNA, 25 bp, Homo sapien
ctatgcctcaggattattagcagct

SEQ ID NO: 69061 - DNA, 25 bp, Homo sapien
ttaaattaatgctaagagggatact

SEQ ID NO: 69062 - DNA, 25 bp, Homo sapien
aataaggtagcacagattagatcta

SEQ ID NO: 69063 - DNA, 25 bp, Homo sapien
gaaagagggaaaatcaatctgcctc

SEQ ID NO: 69064 - DNA, 25 bp, Homo sapien
gcagctaagcagagttagaaaagat

SEQ ID NO: 69065 - DNA, 25 bp, Homo sapien
ctatgcctcaggattattagcagct

SEQ ID NO: 69066 - DNA, 25 bp, Homo sapien
ctaagagggatactgtgaatcacta

SEQ ID NO: 69067 - DNA, 25 bp, Homo sapien
ttaaattaatgctaagagggatact

SEQ ID NO: 69068 - DNA, 25 bp, Homo sapien
gaaagagggaaaatcaatctgcctc

SEQ ID NO: 69069 - DNA, 25 bp, Homo sapien
agattagatctaaggacatggtggg

SEQ ID NO: 69070 - DNA, 25 bp, Homo sapien
aataaggtagcacagattagatcta

SEQ ID NO: 69071 - DNA, 25 bp, Homo sapien
gcctgctgtgagttaataaggtagc

SEQ ID NO: 69072 - DNA, 25 bp, Homo sapien
tgaagccattcagtaagcctgctgt

SEQ ID NO: 69073 - DNA, 25 bp, Homo sapien
ttggtggagaaatcaactaaatctg

SEQ ID NO: 69074 - DNA, 25 bp, Homo sapien
agcctattgagaatacatgacatgc

SEQ ID NO: 69075 - DNA, 25 bp, Homo sapien
gcagctaagcagagttagaaaagat

SEQ ID NO: 69076 - DNA, 25 bp, Homo sapien
ctatgcctcaggattattagcagct

SEQ ID NO: 69077 - DNA, 25 bp, Homo sapien
ctaagagggatactgtgaatcacta

SEQ ID NO: 69078 - DNA, 25 bp, Homo sapien
ttaaattaatgctaagagggatact

SEQ ID NO: 69079 - DNA, 25 bp, Homo sapien
gaaagagggaaaatcaatctgcctc

SEQ ID NO: 69080 - DNA, 25 bp, Homo sapien
agattagatctaaggacatggtggg

SEQ ID NO: 69081 - DNA, 25 bp, Homo sapien
aataaggtagcacagattagatcta

SEQ ID NO: 69082 - DNA, 25 bp, Homo sapien
gcctgctgtgagttaataaggtagc

SEQ ID NO: 69083 - DNA, 25 bp, Homo sapien
tgaagccattcagtaagcctgctgt

SEQ ID NO: 69084 - DNA, 25 bp, Homo sapien
ttggtggagaaatcaactaaatctg

SEQ ID NO: 69085 - DNA, 25 bp, Homo sapien
agcctattgagaatacatgacatgc

SEQ ID NO: 69086 - DNA, 25 bp, Homo sapien
ctaagagggatactgtgaatcacta

SEQ ID NO: 69087 - DNA, 25 bp, Homo sapien
tgaagccattcagtaagcctgctgt

SEQ ID NO: 69088 - DNA, 25 bp, Homo sapien
gcctgctgtgagttaataaggtagc

SEQ ID NO: 69089 - DNA, 25 bp, Homo sapien
agcctattgagaatacatgacatgc

SEQ ID NO: 69090 - DNA, 25 bp, Homo sapien
ctatgcctcaggattattagcagct

SEQ ID NO: 69091 - DNA, 25 bp, Homo sapien
gaaagagggaaaatcaatctgcctc

SEQ ID NO: 69092 - DNA, 25 bp, Homo sapien
aataaggtagcacagattagatcta

SEQ ID NO: 69093 - DNA, 25 bp, Homo sapien
gcagctaagcagagttagaaaagat

SEQ ID NO: 69094 - DNA, 25 bp, Homo sapien
ttggtggagaaatcaactaaatctg

SEQ ID NO: 69095 - DNA, 25 bp, Homo sapien
ttaaattaatgctaagagggatact

SEQ ID NO: 69096 - DNA, 25 bp, Homo sapien
agattagatctaaggacatggtggg

SEQ ID NO: 69097 - DNA, 25 bp, Homo sapien
gcagctaagcagagttagaaaagat

SEQ ID NO: 69098 - DNA, 25 bp, Homo sapien
ctatgcctcaggattattagcagct

SEQ ID NO: 69099 - DNA, 25 bp, Homo sapien
ctaagagggatactgtgaatcacta

SEQ ID NO: 69100 - DNA, 25 bp, Homo sapien
ttaaattaatgctaagagggatact

SEQ ID NO: 69101 - DNA, 25 bp, Homo sapien
gaaagagggaaaatcaatctgcctc

SEQ ID NO: 69102 - DNA, 25 bp, Homo sapien
agattagatctaaggacatggtggg

SEQ ID NO: 69103 - DNA, 25 bp, Homo sapien
aataaggtagcacagattagatcta

SEQ ID NO: 69104 - DNA, 25 bp, Homo sapien
gcctgctgtgagttaataaggtagc

SEQ ID NO: 69105 - DNA, 25 bp, Homo sapien
tgaagccattcagtaagcctgctgt

SEQ ID NO: 69106 - DNA, 25 bp, Homo sapien
ttggtggagaaatcaactaaatctg

SEQ ID NO: 69107 - DNA, 25 bp, Homo sapien
agcctattgagaatacatgacatgc

SEQ ID NO: 69108 - DNA, 25 bp, Homo sapien
tgaagccattcagtaagcctgctgt

SEQ ID NO: 69109 - DNA, 25 bp, Homo sapien
ttaaattaatgctaagagggatact

SEQ ID NO: 69110 - DNA, 25 bp, Homo sapien
ctaagagggatactgtgaatcacta

SEQ ID NO: 69111 - DNA, 25 bp, Homo sapien
gaaagagggaaaatcaatctgcctc

SEQ ID NO: 69112 - DNA, 25 bp, Homo sapien
ttggtggagaaatcaactaaatctg

SEQ ID NO: 69113 - DNA, 25 bp, Homo sapien
gcagctaagcagagttagaaaagat

SEQ ID NO: 69114 - DNA, 25 bp, Homo sapien
agattagatctaaggacatggtggg

SEQ ID NO: 69115 - DNA, 25 bp, Homo sapien
aataaggtagcacagattagatcta

SEQ ID NO: 69116 - DNA, 25 bp, Homo sapien
gcctgctgtgagttaataaggtagc

SEQ ID NO: 69117 - DNA, 25 bp, Homo sapien
agcctattgagaatacatgacatgc

SEQ ID NO: 69118 - DNA, 25 bp, Homo sapien
ctatgcctcaggattattagcagct

SEQ ID NO: 69119 - DNA, 25 bp, Homo sapien
gcagctaagcagagttagaaaagat

SEQ ID NO: 69120 - DNA, 25 bp, Homo sapien
ctatgcctcaggattattagcagct

SEQ ID NO: 69121 - DNA, 25 bp, Homo sapien
ctaagagggatactgtgaatcacta

SEQ ID NO: 69122 - DNA, 25 bp, Homo sapien
ttaaattaatgctaagagggatact

SEQ ID NO: 69123 - DNA, 25 bp, Homo sapien
gaaagagggaaaatcaatctgcctc

SEQ ID NO: 69124 - DNA, 25 bp, Homo sapien
agattagatctaaggacatggtggg

SEQ ID NO: 69125 - DNA, 25 bp, Homo sapien
aataaggtagcacagattagatcta

SEQ ID NO: 69126 - DNA, 25 bp, Homo sapien
gcctgctgtgagttaataaggtagc

SEQ ID NO: 69127 - DNA, 25 bp, Homo sapien
tgaagccattcagtaagcctgctgt

SEQ ID NO: 69128 - DNA, 25 bp, Homo sapien
ttggtggagaaatcaactaaatctg

SEQ ID NO: 69129 - DNA, 25 bp, Homo sapien
agcctattgagaatacatgacatgc

SEQ ID NO: 69130 - DNA, 25 bp, Homo sapien
aataaggtagcacagattagatcta

SEQ ID NO: 69131 - DNA, 25 bp, Homo sapien
ctatgcctcaggattattagcagct

SEQ ID NO: 69132 - DNA, 25 bp, Homo sapien
ttaaattaatgctaagagggatact

SEQ ID NO: 69133 - DNA, 25 bp, Homo sapien
agattagatctaaggacatggtggg

SEQ ID NO: 69134 - DNA, 25 bp, Homo sapien
gcctgctgtgagttaataaggtagc

SEQ ID NO: 69135 - DNA, 25 bp, Homo sapien
tgaagccattcagtaagcctgctgt

SEQ ID NO: 69136 - DNA, 25 bp, Homo sapien
agcctattgagaatacatgacatgc

SEQ ID NO: 69137 - DNA, 25 bp, Homo sapien
ctaagagggatactgtgaatcacta

SEQ ID NO: 69138 - DNA, 25 bp, Homo sapien
ttggtggagaaatcaactaaatctg

SEQ ID NO: 69139 - DNA, 25 bp, Homo sapien
gaaagagggaaaatcaatctgcctc

SEQ ID NO: 69140 - DNA, 25 bp, Homo sapien
gcagctaagcagagttagaaaagat

SEQ ID NO: 69141 - DNA, 25 bp, Homo sapien
gcagctaagcagagttagaaaagat

SEQ ID NO: 69142 - DNA, 25 bp, Homo sapien
ctatgcctcaggattattagcagct

SEQ ID NO: 69143 - DNA, 25 bp, Homo sapien
ctaagagggatactgtgaatcacta

SEQ ID NO: 69144 - DNA, 25 bp, Homo sapien
ttaaattaatgctaagagggatact

SEQ ID NO: 69145 - DNA, 25 bp, Homo sapien
gaaagagggaaaatcaatctgcctc

SEQ ID NO: 69146 - DNA, 25 bp, Homo sapien
agattagatctaaggacatggtggg

SEQ ID NO: 69147 - DNA, 25 bp, Homo sapien
aataaggtagcacagattagatcta

SEQ ID NO: 69148 - DNA, 25 bp, Homo sapien
gcctgctgtgagttaataaggtagc

SEQ ID NO: 69149 - DNA, 25 bp, Homo sapien
tgaagccattcagtaagcctgctgt

SEQ ID NO: 69150 - DNA, 25 bp, Homo sapien
ttggtggagaaatcaactaaatctg

SEQ ID NO: 69151 - DNA, 25 bp, Homo sapien
agcctattgagaatacatgacatgc

SEQ ID NO: 69152 - DNA, 25 bp, Homo sapien
ctatgcctcaggattattagcagct

SEQ ID NO: 69153 - DNA, 25 bp, Homo sapien
gcagctaagcagagttagaaaagat

SEQ ID NO: 69154 - DNA, 25 bp, Homo sapien
agcctattgagaatacatgacatgc

SEQ ID NO: 69155 - DNA, 25 bp, Homo sapien
tgaagccattcagtaagcctgctgt

SEQ ID NO: 69156 - DNA, 25 bp, Homo sapien
ctaagagggatactgtgaatcacta

SEQ ID NO: 69157 - DNA, 25 bp, Homo sapien
ttaaattaatgctaagagggatact

SEQ ID NO: 69158 - DNA, 25 bp, Homo sapien
gcctgctgtgagttaataaggtagc

SEQ ID NO: 69159 - DNA, 25 bp, Homo sapien
ttggtggagaaatcaactaaatctg

SEQ ID NO: 69160 - DNA, 25 bp, Homo sapien
gaaagagggaaaatcaatctgcctc

SEQ ID NO: 69161 - DNA, 25 bp, Homo sapien
aataaggtagcacagattagatcta

SEQ ID NO: 69162 - DNA, 25 bp, Homo sapien
agattagatctaaggacatggtggg

SEQ ID NO: 69163 - DNA, 25 bp, Homo sapien
gcagctaagcagagttagaaaagat

SEQ ID NO: 69164 - DNA, 25 bp, Homo sapien
ctatgcctcaggattattagcagct

SEQ ID NO: 69165 - DNA, 25 bp, Homo sapien
ctaagagggatactgtgaatcacta

SEQ ID NO: 69166 - DNA, 25 bp, Homo sapien
ttaaattaatgctaagagggatact

SEQ ID NO: 69167 - DNA, 25 bp, Homo sapien
gaaagagggaaaatcaatctgcctc

SEQ ID NO: 69168 - DNA, 25 bp, Homo sapien
agattagatctaaggacatggtggg

SEQ ID NO: 69169 - DNA, 25 bp, Homo sapien
aataaggtagcacagattagatcta

SEQ ID NO: 69170 - DNA, 25 bp, Homo sapien
gcctgctgtgagttaataaggtagc

SEQ ID NO: 69171 - DNA, 25 bp, Homo sapien
tgaagccattcagtaagcctgctgt

SEQ ID NO: 69172 - DNA, 25 bp, Homo sapien
ttggtggagaaatcaactaaatctg

SEQ ID NO: 69173 - DNA, 25 bp, Homo sapien
agcctattgagaatacatgacatgc

SEQ ID NO: 69174 - DNA, 25 bp, Homo sapien
ttggtggagaaatcaactaaatctg

SEQ ID NO: 69175 - DNA, 25 bp, Homo sapien
aataaggtagcacagattagatcta

SEQ ID NO: 69176 - DNA, 25 bp, Homo sapien
ctaagagggatactgtgaatcacta

SEQ ID NO: 69177 - DNA, 25 bp, Homo sapien
agcctattgagaatacatgacatgc

SEQ ID NO: 69178 - DNA, 25 bp, Homo sapien
ttaaattaatgctaagagggatact

SEQ ID NO: 69179 - DNA, 25 bp, Homo sapien
gaaagagggaaaatcaatctgcctc

SEQ ID NO: 69180 - DNA, 25 bp, Homo sapien
tgaagccattcagtaagcctgctgt

SEQ ID NO: 69181 - DNA, 25 bp, Homo sapien
gcctgctgtgagttaataaggtagc

SEQ ID NO: 69182 - DNA, 25 bp, Homo sapien
ctatgcctcaggattattagcagct

SEQ ID NO: 69183 - DNA, 25 bp, Homo sapien
agattagatctaaggacatggtggg

SEQ ID NO: 69184 - DNA, 25 bp, Homo sapien
gcagctaagcagagttagaaaagat

SEQ ID NO: 69185 - DNA, 25 bp, Homo sapien
ctaagagggatactgtgaatcacta

SEQ ID NO: 69186 - DNA, 25 bp, Homo sapien
tgaagccattcagtaagcctgctgt

SEQ ID NO: 69187 - DNA, 25 bp, Homo sapien
ttaaattaatgctaagagggatact

SEQ ID NO: 69188 - DNA, 25 bp, Homo sapien
ctatgcctcaggattattagcagct

SEQ ID NO: 69189 - DNA, 25 bp, Homo sapien
gaaagagggaaaatcaatctgcctc

SEQ ID NO: 69190 - DNA, 25 bp, Homo sapien
gcagctaagcagagttagaaaagat

SEQ ID NO: 69191 - DNA, 25 bp, Homo sapien
gcctgctgtgagttaataaggtagc

SEQ ID NO: 69192 - DNA, 25 bp, Homo sapien
agcctattgagaatacatgacatgc

SEQ ID NO: 69193 - DNA, 25 bp, Homo sapien
ttggtggagaaatcaactaaatctg

SEQ ID NO: 69194 - DNA, 25 bp, Homo sapien
agattagatctaaggacatggtggg

SEQ ID NO: 69195 - DNA, 25 bp, Homo sapien
aataaggtagcacagattagatcta

SEQ ID NO: 69196 - DNA, 25 bp, Homo sapien
gcagctaagcagagttagaaaagat

SEQ ID NO: 69197 - DNA, 25 bp, Homo sapien
ctatgcctcaggattattagcagct

SEQ ID NO: 69198 - DNA, 25 bp, Homo sapien
ctaagagggatactgtgaatcacta

SEQ ID NO: 69199 - DNA, 25 bp, Homo sapien
ttaaattaatgctaagagggatact

SEQ ID NO: 69200 - DNA, 25 bp, Homo sapien
gaaagagggaaaatcaatctgcctc

SEQ ID NO: 69201 - DNA, 25 bp, Homo sapien
agattagatctaaggacatggtggg

SEQ ID NO: 69202 - DNA, 25 bp, Homo sapien
aataaggtagcacagattagatcta

SEQ ID NO: 69203 - DNA, 25 bp, Homo sapien
gcctgctgtgagttaataaggtagc

SEQ ID NO: 69204 - DNA, 25 bp, Homo sapien
tgaagccattcagtaagcctgctgt

SEQ ID NO: 69205 - DNA, 25 bp, Homo sapien
ttggtggagaaatcaactaaatctg

SEQ ID NO: 69206 - DNA, 25 bp, Homo sapien
agcctattgagaatacatgacatgc

SEQ ID NO: 69207 - DNA, 25 bp, Homo sapien
ctatgcctcaggattattagcagct

SEQ ID NO: 69208 - DNA, 25 bp, Homo sapien
ctaagagggatactgtgaatcacta

SEQ ID NO: 69209 - DNA, 25 bp, Homo sapien
gaaagagggaaaatcaatctgcctc

SEQ ID NO: 69210 - DNA, 25 bp, Homo sapien
ttggtggagaaatcaactaaatctg

SEQ ID NO: 69211 - DNA, 25 bp, Homo sapien
gcagctaagcagagttagaaaagat

SEQ ID NO: 69212 - DNA, 25 bp, Homo sapien
ttaaattaatgctaagagggatact

SEQ ID NO: 69213 - DNA, 25 bp, Homo sapien
aataaggtagcacagattagatcta

SEQ ID NO: 69214 - DNA, 25 bp, Homo sapien
agattagatctaaggacatggtggg

SEQ ID NO: 69215 - DNA, 25 bp, Homo sapien
tgaagccattcagtaagcctgctgt

SEQ ID NO: 69216 - DNA, 25 bp, Homo sapien
gcctgctgtgagttaataaggtagc

SEQ ID NO: 69217 - DNA, 25 bp, Homo sapien
agcctattgagaatacatgacatgc

SEQ ID NO: 69218 - DNA, 25 bp, Homo sapien
gcagctaagcagagttagaaaagat

SEQ ID NO: 69219 - DNA, 25 bp, Homo sapien
ctatgcctcaggattattagcagct

SEQ ID NO: 69220 - DNA, 25 bp, Homo sapien
ctaagagggatactgtgaatcacta

SEQ ID NO: 69221 - DNA, 25 bp, Homo sapien
ttaaattaatgctaagagggatact

SEQ ID NO: 69222 - DNA, 25 bp, Homo sapien
gaaagagggaaaatcaatctgcctc

SEQ ID NO: 69223 - DNA, 25 bp, Homo sapien
agattagatctaaggacatggtggg

SEQ ID NO: 69224 - DNA, 25 bp, Homo sapien
aataaggtagcacagattagatcta

SEQ ID NO: 69225 - DNA, 25 bp, Homo sapien
gcctgctgtgagttaataaggtagc

SEQ ID NO: 69226 - DNA, 25 bp, Homo sapien
tgaagccattcagtaagcctgctgt

SEQ ID NO: 69227 - DNA, 25 bp, Homo sapien
ttggtggagaaatcaactaaatctg

SEQ ID NO: 69228 - DNA, 25 bp, Homo sapien
agcctattgagaatacatgacatgc

SEQ ID NO: 69229 - DNA, 25 bp, Homo sapien
ttaaattaatgctaagagggatact

SEQ ID NO: 69230 - DNA, 25 bp, Homo sapien
ctaagagggatactgtgaatcacta

SEQ ID NO: 69231 - DNA, 25 bp, Homo sapien
aataaggtagcacagattagatcta

SEQ ID NO: 69232 - DNA, 25 bp, Homo sapien
gaaagagggaaaatcaatctgcctc

SEQ ID NO: 69233 - DNA, 25 bp, Homo sapien
ctatgcctcaggattattagcagct

SEQ ID NO: 69234 - DNA, 25 bp, Homo sapien
tgaagccattcagtaagcctgctgt

SEQ ID NO: 69235 - DNA, 25 bp, Homo sapien
ttggtggagaaatcaactaaatctg

SEQ ID NO: 69236 - DNA, 25 bp, Homo sapien
gcagctaagcagagttagaaaagat

SEQ ID NO: 69237 - DNA, 25 bp, Homo sapien
agcctattgagaatacatgacatgc

SEQ ID NO: 69238 - DNA, 25 bp, Homo sapien
gcctgctgtgagttaataaggtagc

SEQ ID NO: 69239 - DNA, 25 bp, Homo sapien
agattagatctaaggacatggtggg

SEQ ID NO: 69240 - DNA, 25 bp, Homo sapien
gcagctaagcagagttagaaaagat

SEQ ID NO: 69241 - DNA, 25 bp, Homo sapien
ctatgcctcaggattattagcagct

SEQ ID NO: 69242 - DNA, 25 bp, Homo sapien
ctaagagggatactgtgaatcacta

SEQ ID NO: 69243 - DNA, 25 bp, Homo sapien
ttaaattaatgctaagagggatact

SEQ ID NO: 69244 - DNA, 25 bp, Homo sapien
gaaagagggaaaatcaatctgcctc

SEQ ID NO: 69245 - DNA, 25 bp, Homo sapien
agattagatctaaggacatggtggg

SEQ ID NO: 69246 - DNA, 25 bp, Homo sapien
aataaggtagcacagattagatcta

SEQ ID NO: 69247 - DNA, 25 bp, Homo sapien
gcctgctgtgagttaataaggtagc

SEQ ID NO: 69248 - DNA, 25 bp, Homo sapien
tgaagccattcagtaagcctgctgt

SEQ ID NO: 69249 - DNA, 25 bp, Homo sapien
ttggtggagaaatcaactaaatctg

SEQ ID NO: 69250 - DNA, 25 bp, Homo sapien
agcctattgagaatacatgacatgc

SEQ ID NO: 69251 - DNA, 25 bp, Homo sapien
ctaagagggatactgtgaatcacta

SEQ ID NO: 69252 - DNA, 25 bp, Homo sapien
ttggtggagaaatcaactaaatctg

SEQ ID NO: 69253 - DNA, 25 bp, Homo sapien
gaaagagggaaaatcaatctgcctc

SEQ ID NO: 69254 - DNA, 25 bp, Homo sapien
ctatgcctcaggattattagcagct

SEQ ID NO: 69255 - DNA, 25 bp, Homo sapien
gcctgctgtgagttaataaggtagc

SEQ ID NO: 69256 - DNA, 25 bp, Homo sapien
tgaagccattcagtaagcctgctgt

SEQ ID NO: 69257 - DNA, 25 bp, Homo sapien
ttaaattaatgctaagagggatact

SEQ ID NO: 69258 - DNA, 25 bp, Homo sapien
agcctattgagaatacatgacatgc

SEQ ID NO: 69259 - DNA, 25 bp, Homo sapien
gcagctaagcagagttagaaaagat

SEQ ID NO: 69260 - DNA, 25 bp, Homo sapien
aataaggtagcacagattagatcta

SEQ ID NO: 69261 - DNA, 25 bp, Homo sapien
agattagatctaaggacatggtggg

SEQ ID NO: 69262 - DNA, 25 bp, Homo sapien
gcagctaagcagagttagaaaagat

SEQ ID NO: 69263 - DNA, 25 bp, Homo sapien
ctatgcctcaggattattagcagct

SEQ ID NO: 69264 - DNA, 25 bp, Homo sapien
ctaagagggatactgtgaatcacta

SEQ ID NO: 69265 - DNA, 25 bp, Homo sapien
ttaaattaatgctaagagggatact

SEQ ID NO: 69266 - DNA, 25 bp, Homo sapien
gaaagagggaaaatcaatctgcctc

SEQ ID NO: 69267 - DNA, 25 bp, Homo sapien
agattagatctaaggacatggtggg

SEQ ID NO: 69268 - DNA, 25 bp, Homo sapien
aataaggtagcacagattagatcta

SEQ ID NO: 69269 - DNA, 25 bp, Homo sapien
gcctgctgtgagttaataaggtagc

SEQ ID NO: 69270 - DNA, 25 bp, Homo sapien
tgaagccattcagtaagcctgctgt

SEQ ID NO: 69271 - DNA, 25 bp, Homo sapien
ttggtggagaaatcaactaaatctg

SEQ ID NO: 69272 - DNA, 25 bp, Homo sapien
agcctattgagaatacatgacatgc

SEQ ID NO: 69273 - DNA, 25 bp, Homo sapien
tgaagccattcagtaagcctgctgt

SEQ ID NO: 69274 - DNA, 25 bp, Homo sapien
ctaagagggatactgtgaatcacta

SEQ ID NO: 69275 - DNA, 25 bp, Homo sapien
aataaggtagcacagattagatcta

SEQ ID NO: 69276 - DNA, 25 bp, Homo sapien
agattagatctaaggacatggtggg

SEQ ID NO: 69277 - DNA, 25 bp, Homo sapien
ttaaattaatgctaagagggatact

SEQ ID NO: 69278 - DNA, 25 bp, Homo sapien
gaaagagggaaaatcaatctgcctc

SEQ ID NO: 69279 - DNA, 25 bp, Homo sapien
gcagctaagcagagttagaaaagat

SEQ ID NO: 69280 - DNA, 25 bp, Homo sapien
ttggtggagaaatcaactaaatctg

SEQ ID NO: 69281 - DNA, 25 bp, Homo sapien
ctatgcctcaggattattagcagct

SEQ ID NO: 69282 - DNA, 25 bp, Homo sapien
agcctattgagaatacatgacatgc

SEQ ID NO: 69283 - DNA, 25 bp, Homo sapien
gcctgctgtgagttaataaggtagc

SEQ ID NO: 69284 - DNA, 25 bp, Homo sapien
gcagctaagcagagttagaaaagat

SEQ ID NO: 69285 - DNA, 25 bp, Homo sapien
ctatgcctcaggattattagcagct

SEQ ID NO: 69286 - DNA, 25 bp, Homo sapien
ctaagagggatactgtgaatcacta

SEQ ID NO: 69287 - DNA, 25 bp, Homo sapien
ttaaattaatgctaagagggatact

SEQ ID NO: 69288 - DNA, 25 bp, Homo sapien
gaaagagggaaaatcaatctgcctc

SEQ ID NO: 69289 - DNA, 25 bp, Homo sapien
agattagatctaaggacatggtggg

SEQ ID NO: 69290 - DNA, 25 bp, Homo sapien
aataaggtagcacagattagatcta

SEQ ID NO: 69291 - DNA, 25 bp, Homo sapien
gcctgctgtgagttaataaggtagc

SEQ ID NO: 69292 - DNA, 25 bp, Homo sapien
tgaagccattcagtaagcctgctgt

SEQ ID NO: 69293 - DNA, 25 bp, Homo sapien
ttggtggagaaatcaactaaatctg

SEQ ID NO: 69294 - DNA, 25 bp, Homo sapien
agcctattgagaatacatgacatgc

SEQ ID NO: 69295 - DNA, 25 bp, Homo sapien
ctatgcctcaggattattagcagct

SEQ ID NO: 69296 - DNA, 25 bp, Homo sapien
ctaagagggatactgtgaatcacta

SEQ ID NO: 69297 - DNA, 25 bp, Homo sapien
tgaagccattcagtaagcctgctgt

SEQ ID NO: 69298 - DNA, 25 bp, Homo sapien
agattagatctaaggacatggtggg

SEQ ID NO: 69299 - DNA, 25 bp, Homo sapien
gcagctaagcagagttagaaaagat

SEQ ID NO: 69300 - DNA, 25 bp, Homo sapien
gaaagagggaaaatcaatctgcctc

SEQ ID NO: 69301 - DNA, 25 bp, Homo sapien
gcctgctgtgagttaataaggtagc

SEQ ID NO: 69302 - DNA, 25 bp, Homo sapien
aataaggtagcacagattagatcta

SEQ ID NO: 69303 - DNA, 25 bp, Homo sapien
ttggtggagaaatcaactaaatctg

SEQ ID NO: 69304 - DNA, 25 bp, Homo sapien
ttaaattaatgctaagagggatact

SEQ ID NO: 69305 - DNA, 25 bp, Homo sapien
agcctattgagaatacatgacatgc

SEQ ID NO: 69306 - DNA, 25 bp, Homo sapien
gcagctaagcagagttagaaaagat

SEQ ID NO: 69307 - DNA, 25 bp, Homo sapien
ctatgcctcaggattattagcagct

SEQ ID NO: 69308 - DNA, 25 bp, Homo sapien
ctaagagggatactgtgaatcacta

SEQ ID NO: 69309 - DNA, 25 bp, Homo sapien
ttaaattaatgctaagagggatact

SEQ ID NO: 69310 - DNA, 25 bp, Homo sapien
gaaagagggaaaatcaatctgcctc

SEQ ID NO: 69311 - DNA, 25 bp, Homo sapien
agattagatctaaggacatggtggg

SEQ ID NO: 69312 - DNA, 25 bp, Homo sapien
aataaggtagcacagattagatcta

SEQ ID NO: 69313 - DNA, 25 bp, Homo sapien
gcctgctgtgagttaataaggtagc

SEQ ID NO: 69314 - DNA, 25 bp, Homo sapien
tgaagccattcagtaagcctgctgt

SEQ ID NO: 69315 - DNA, 25 bp, Homo sapien
ttggtggagaaatcaactaaatctg

SEQ ID NO: 69316 - DNA, 25 bp, Homo sapien
agcctattgagaatacatgacatgc

SEQ ID NO: 69317 - DNA, 25 bp, Homo sapien
gcagctaagcagagttagaaaagat

SEQ ID NO: 69318 - DNA, 25 bp, Homo sapien
ctatgcctcaggattattagcagct

SEQ ID NO: 69319 - DNA, 25 bp, Homo sapien
ctaagagggatactgtgaatcacta

SEQ ID NO: 69320 - DNA, 25 bp, Homo sapien
ttaaattaatgctaagagggatact

SEQ ID NO: 69321 - DNA, 25 bp, Homo sapien
gaaagagggaaaatcaatctgcctc

SEQ ID NO: 69322 - DNA, 25 bp, Homo sapien
agattagatctaaggacatggtggg

SEQ ID NO: 69323 - DNA, 25 bp, Homo sapien
aataaggtagcacagattagatcta

SEQ ID NO: 69324 - DNA, 25 bp, Homo sapien
gcctgctgtgagttaataaggtagc

SEQ ID NO: 69325 - DNA, 25 bp, Homo sapien
tgaagccattcagtaagcctgctgt

SEQ ID NO: 69326 - DNA, 25 bp, Homo sapien
ttggtggagaaatcaactaaatctg

SEQ ID NO: 69327 - DNA, 25 bp, Homo sapien
agcctattgagaatacatgacatgc

SEQ ID NO: 69328 - DNA, 25 bp, Homo sapien
gcctgctgtgagttaataaggtagc

SEQ ID NO: 69329 - DNA, 25 bp, Homo sapien
gaaagagggaaaatcaatctgcctc

SEQ ID NO: 69330 - DNA, 25 bp, Homo sapien
ctatgcctcaggattattagcagct

SEQ ID NO: 69331 - DNA, 25 bp, Homo sapien
gcagctaagcagagttagaaaagat

SEQ ID NO: 69332 - DNA, 25 bp, Homo sapien
ctaagagggatactgtgaatcacta

SEQ ID NO: 69333 - DNA, 25 bp, Homo sapien
aataaggtagcacagattagatcta

SEQ ID NO: 69334 - DNA, 25 bp, Homo sapien
tgaagccattcagtaagcctgctgt

SEQ ID NO: 69335 - DNA, 25 bp, Homo sapien
ttaaattaatgctaagagggatact

SEQ ID NO: 69336 - DNA, 25 bp, Homo sapien
ttggtggagaaatcaactaaatctg

SEQ ID NO: 69337 - DNA, 25 bp, Homo sapien
agattagatctaaggacatggtggg

SEQ ID NO: 69338 - DNA, 25 bp, Homo sapien
agcctattgagaatacatgacatgc

SEQ ID NO: 69339 - DNA, 25 bp, Homo sapien
gcagctaagcagagttagaaaagat

SEQ ID NO: 69340 - DNA, 25 bp, Homo sapien
ctatgcctcaggattattagcagct

SEQ ID NO: 69341 - DNA, 25 bp, Homo sapien
ctaagagggatactgtgaatcacta

SEQ ID NO: 69342 - DNA, 25 bp, Homo sapien
ttaaattaatgctaagagggatact

SEQ ID NO: 69343 - DNA, 25 bp, Homo sapien
gaaagagggaaaatcaatctgcctc

SEQ ID NO: 69344 - DNA, 25 bp, Homo sapien
agattagatctaaggacatggtggg

SEQ ID NO: 69345 - DNA, 25 bp, Homo sapien
aataaggtagcacagattagatcta

SEQ ID NO: 69346 - DNA, 25 bp, Homo sapien
gcctgctgtgagttaataaggtagc

SEQ ID NO: 69347 - DNA, 25 bp, Homo sapien
tgaagccattcagtaagcctgctgt

SEQ ID NO: 69348 - DNA, 25 bp, Homo sapien
ttggtggagaaatcaactaaatctg

SEQ ID NO: 69349 - DNA, 25 bp, Homo sapien
agcctattgagaatacatgacatgc

SEQ ID NO: 69350 - DNA, 25 bp, Homo sapien
aataaggtagcacagattagatcta

SEQ ID NO: 69351 - DNA, 25 bp, Homo sapien
ctaagagggatactgtgaatcacta

SEQ ID NO: 69352 - DNA, 25 bp, Homo sapien
ctatgcctcaggattattagcagct

SEQ ID NO: 69353 - DNA, 25 bp, Homo sapien
ttggtggagaaatcaactaaatctg

SEQ ID NO: 69354 - DNA, 25 bp, Homo sapien
gaaagagggaaaatcaatctgcctc

SEQ ID NO: 69355 - DNA, 25 bp, Homo sapien
agcctattgagaatacatgacatgc

SEQ ID NO: 69356 - DNA, 25 bp, Homo sapien
tgaagccattcagtaagcctgctgt

SEQ ID NO: 69357 - DNA, 25 bp, Homo sapien
agattagatctaaggacatggtggg

SEQ ID NO: 69358 - DNA, 25 bp, Homo sapien
ttaaattaatgctaagagggatact

SEQ ID NO: 69359 - DNA, 25 bp, Homo sapien
gcagctaagcagagttagaaaagat

SEQ ID NO: 69360 - DNA, 25 bp, Homo sapien
gcctgctgtgagttaataaggtagc

SEQ ID NO: 69361 - DNA, 25 bp, Homo sapien
gcagctaagcagagttagaaaagat

SEQ ID NO: 69362 - DNA, 25 bp, Homo sapien
ctatgcctcaggattattagcagct

SEQ ID NO: 69363 - DNA, 25 bp, Homo sapien
ctaagagggatactgtgaatcacta

SEQ ID NO: 69364 - DNA, 25 bp, Homo sapien
ttaaattaatgctaagagggatact

SEQ ID NO: 69365 - DNA, 25 bp, Homo sapien
gaaagagggaaaatcaatctgcctc

SEQ ID NO: 69366 - DNA, 25 bp, Homo sapien
agattagatctaaggacatggtggg

SEQ ID NO: 69367 - DNA, 25 bp, Homo sapien
aataaggtagcacagattagatcta

SEQ ID NO: 69368 - DNA, 25 bp, Homo sapien
gcctgctgtgagttaataaggtagc

SEQ ID NO: 69369 - DNA, 25 bp, Homo sapien
tgaagccattcagtaagcctgctgt

SEQ ID NO: 69370 - DNA, 25 bp, Homo sapien
ttggtggagaaatcaactaaatctg

SEQ ID NO: 69371 - DNA, 25 bp, Homo sapien
agcctattgagaatacatgacatgc

SEQ ID NO: 69372 - DNA, 25 bp, Homo sapien
ctaagagggatactgtgaatcacta

SEQ ID NO: 69373 - DNA, 25 bp, Homo sapien
gcagctaagcagagttagaaaagat

SEQ ID NO: 69374 - DNA, 25 bp, Homo sapien
aataaggtagcacagattagatcta

SEQ ID NO: 69375 - DNA, 25 bp, Homo sapien
ttaaattaatgctaagagggatact

SEQ ID NO: 69376 - DNA, 25 bp, Homo sapien
tgaagccattcagtaagcctgctgt

SEQ ID NO: 69377 - DNA, 25 bp, Homo sapien
ttggtggagaaatcaactaaatctg

SEQ ID NO: 69378 - DNA, 25 bp, Homo sapien
gcctgctgtgagttaataaggtagc

SEQ ID NO: 69379 - DNA, 25 bp, Homo sapien
agcctattgagaatacatgacatgc

SEQ ID NO: 69380 - DNA, 25 bp, Homo sapien
ctatgcctcaggattattagcagct

SEQ ID NO: 69381 - DNA, 25 bp, Homo sapien
gaaagagggaaaatcaatctgcctc

SEQ ID NO: 69382 - DNA, 25 bp, Homo sapien
agattagatctaaggacatggtggg

SEQ ID NO: 69383 - DNA, 25 bp, Homo sapien
gcagctaagcagagttagaaaagat

SEQ ID NO: 69384 - DNA, 25 bp, Homo sapien
ctatgcctcaggattattagcagct

SEQ ID NO: 69385 - DNA, 25 bp, Homo sapien
ctaagagggatactgtgaatcacta

SEQ ID NO: 69386 - DNA, 25 bp, Homo sapien
ttaaattaatgctaagagggatact

SEQ ID NO: 69387 - DNA, 25 bp, Homo sapien
gaaagagggaaaatcaatctgcctc

SEQ ID NO: 69388 - DNA, 25 bp, Homo sapien
agattagatctaaggacatggtggg

SEQ ID NO: 69389 - DNA, 25 bp, Homo sapien
aataaggtagcacagattagatcta

SEQ ID NO: 69390 - DNA, 25 bp, Homo sapien
gcctgctgtgagttaataaggtagc

SEQ ID NO: 69391 - DNA, 25 bp, Homo sapien
tgaagccattcagtaagcctgctgt

SEQ ID NO: 69392 - DNA, 25 bp, Homo sapien
ttggtggagaaatcaactaaatctg

SEQ ID NO: 69393 - DNA, 25 bp, Homo sapien
agcctattgagaatacatgacatgc

SEQ ID NO: 69394 - DNA, 25 bp, Homo sapien
agcctattgagaatacatgacatgc

SEQ ID NO: 69395 - DNA, 25 bp, Homo sapien
ctaagagggatactgtgaatcacta

SEQ ID NO: 69396 - DNA, 25 bp, Homo sapien
gcagctaagcagagttagaaaagat

SEQ ID NO: 69397 - DNA, 25 bp, Homo sapien
agattagatctaaggacatggtggg

SEQ ID NO: 69398 - DNA, 25 bp, Homo sapien
ttaaattaatgctaagagggatact

SEQ ID NO: 69399 - DNA, 25 bp, Homo sapien
gcctgctgtgagttaataaggtagc

SEQ ID NO: 69400 - DNA, 25 bp, Homo sapien
gaaagagggaaaatcaatctgcctc

SEQ ID NO: 69401 - DNA, 25 bp, Homo sapien
aataaggtagcacagattagatcta

SEQ ID NO: 69402 - DNA, 25 bp, Homo sapien
tgaagccattcagtaagcctgctgt

SEQ ID NO: 69403 - DNA, 25 bp, Homo sapien
ctatgcctcaggattattagcagct

SEQ ID NO: 69404 - DNA, 25 bp, Homo sapien
ttggtggagaaatcaactaaatctg

SEQ ID NO: 69405 - DNA, 25 bp, Homo sapien
gcagctaagcagagttagaaaagat

SEQ ID NO: 69406 - DNA, 25 bp, Homo sapien
ctatgcctcaggattattagcagct

SEQ ID NO: 69407 - DNA, 25 bp, Homo sapien
ctaagagggatactgtgaatcacta

SEQ ID NO: 69408 - DNA, 25 bp, Homo sapien
ttaaattaatgctaagagggatact

SEQ ID NO: 69409 - DNA, 25 bp, Homo sapien
gaaagagggaaaatcaatctgcctc

SEQ ID NO: 69410 - DNA, 25 bp, Homo sapien
agattagatctaaggacatggtggg

SEQ ID NO: 69411 - DNA, 25 bp, Homo sapien
aataaggtagcacagattagatcta

SEQ ID NO: 69412 - DNA, 25 bp, Homo sapien
gcctgctgtgagttaataaggtagc

SEQ ID NO: 69413 - DNA, 25 bp, Homo sapien
tgaagccattcagtaagcctgctgt

SEQ ID NO: 69414 - DNA, 25 bp, Homo sapien
ttggtggagaaatcaactaaatctg

SEQ ID NO: 69415 - DNA, 25 bp, Homo sapien
agcctattgagaatacatgacatgc

SEQ ID NO: 69416 - DNA, 25 bp, Homo sapien
agattagatctaaggacatggtggg

SEQ ID NO: 69417 - DNA, 25 bp, Homo sapien
agcctattgagaatacatgacatgc

SEQ ID NO: 69418 - DNA, 25 bp, Homo sapien
aataaggtagcacagattagatcta

SEQ ID NO: 69419 - DNA, 25 bp, Homo sapien
gcctgctgtgagttaataaggtagc

SEQ ID NO: 69420 - DNA, 25 bp, Homo sapien
ctatgcctcaggattattagcagct

SEQ ID NO: 69421 - DNA, 25 bp, Homo sapien
ttaaattaatgctaagagggatact

SEQ ID NO: 69422 - DNA, 25 bp, Homo sapien
tgaagccattcagtaagcctgctgt

SEQ ID NO: 69423 - DNA, 25 bp, Homo sapien
ttggtggagaaatcaactaaatctg

SEQ ID NO: 69424 - DNA, 25 bp, Homo sapien
gcagctaagcagagttagaaaagat

SEQ ID NO: 69425 - DNA, 25 bp, Homo sapien
ctaagagggatactgtgaatcacta

SEQ ID NO: 69426 - DNA, 25 bp, Homo sapien
gaaagagggaaaatcaatctgcctc

SEQ ID NO: 69427 - DNA, 25 bp, Homo sapien
tgaagccattcagtaagcctgctgt

SEQ ID NO: 69428 - DNA, 25 bp, Homo sapien
ttggtggagaaatcaactaaatctg

SEQ ID NO: 69429 - DNA, 25 bp, Homo sapien
aataaggtagcacagattagatcta

SEQ ID NO: 69430 - DNA, 25 bp, Homo sapien
ctaagagggatactgtgaatcacta

SEQ ID NO: 69431 - DNA, 25 bp, Homo sapien
ttaaattaatgctaagagggatact

SEQ ID NO: 69432 - DNA, 25 bp, Homo sapien
gaaagagggaaaatcaatctgcctc

SEQ ID NO: 69433 - DNA, 25 bp, Homo sapien
ctatgcctcaggattattagcagct

SEQ ID NO: 69434 - DNA, 25 bp, Homo sapien
gcagctaagcagagttagaaaagat

SEQ ID NO: 69435 - DNA, 25 bp, Homo sapien
gcctgctgtgagttaataaggtagc

SEQ ID NO: 69436 - DNA, 25 bp, Homo sapien
agattagatctaaggacatggtggg

SEQ ID NO: 69437 - DNA, 25 bp, Homo sapien
agcctattgagaatacatgacatgc

SEQ ID NO: 69438 - DNA, 25 bp, Homo sapien
gcagctaagcagagttagaaaagat

SEQ ID NO: 69439 - DNA, 25 bp, Homo sapien
ctatgcctcaggattattagcagct

SEQ ID NO: 69440 - DNA, 25 bp, Homo sapien
ctaagagggatactgtgaatcacta

SEQ ID NO: 69441 - DNA, 25 bp, Homo sapien
ttaaattaatgctaagagggatact

SEQ ID NO: 69442 - DNA, 25 bp, Homo sapien
gaaagagggaaaatcaatctgcctc

SEQ ID NO: 69443 - DNA, 25 bp, Homo sapien
agattagatctaaggacatggtggg

SEQ ID NO: 69444 - DNA, 25 bp, Homo sapien
aataaggtagcacagattagatcta

SEQ ID NO: 69445 - DNA, 25 bp, Homo sapien
gcctgctgtgagttaataaggtagc

SEQ ID NO: 69446 - DNA, 25 bp, Homo sapien
tgaagccattcagtaagcctgctgt

SEQ ID NO: 69447 - DNA, 25 bp, Homo sapien
ttggtggagaaatcaactaaatctg

SEQ ID NO: 69448 - DNA, 25 bp, Homo sapien
agcctattgagaatacatgacatgc

SEQ ID NO: 69449 - DNA, 25 bp, Homo sapien
gcctgctgtgagttaataaggtagc

SEQ ID NO: 69450 - DNA, 25 bp, Homo sapien
ttggtggagaaatcaactaaatctg

SEQ ID NO: 69451 - DNA, 25 bp, Homo sapien
agcctattgagaatacatgacatgc

SEQ ID NO: 69452 - DNA, 25 bp, Homo sapien
aataaggtagcacagattagatcta

SEQ ID NO: 69453 - DNA, 25 bp, Homo sapien
ttaaattaatgctaagagggatact

SEQ ID NO: 69454 - DNA, 25 bp, Homo sapien
gcagctaagcagagttagaaaagat

SEQ ID NO: 69455 - DNA, 25 bp, Homo sapien
gaaagagggaaaatcaatctgcctc

SEQ ID NO: 69456 - DNA, 25 bp, Homo sapien
ctatgcctcaggattattagcagct

SEQ ID NO: 69457 - DNA, 25 bp, Homo sapien
tgaagccattcagtaagcctgctgt

SEQ ID NO: 69458 - DNA, 25 bp, Homo sapien
agattagatctaaggacatggtggg

SEQ ID NO: 69459 - DNA, 25 bp, Homo sapien
ctaagagggatactgtgaatcacta

SEQ ID NO: 69460 - DNA, 25 bp, Homo sapien
gcagctaagcagagttagaaaagat

SEQ ID NO: 69461 - DNA, 25 bp, Homo sapien
ctatgcctcaggattattagcagct

SEQ ID NO: 69462 - DNA, 25 bp, Homo sapien
ctaagagggatactgtgaatcacta

SEQ ID NO: 69463 - DNA, 25 bp, Homo sapien
ttaaattaatgctaagagggatact

SEQ ID NO: 69464 - DNA, 25 bp, Homo sapien
gaaagagggaaaatcaatctgcctc

SEQ ID NO: 69465 - DNA, 25 bp, Homo sapien
agattagatctaaggacatggtggg

SEQ ID NO: 69466 - DNA, 25 bp, Homo sapien
aataaggtagcacagattagatcta

SEQ ID NO: 69467 - DNA, 25 bp, Homo sapien
gcctgctgtgagttaataaggtagc

SEQ ID NO: 69468 - DNA, 25 bp, Homo sapien
tgaagccattcagtaagcctgctgt

SEQ ID NO: 69469 - DNA, 25 bp, Homo sapien
ttggtggagaaatcaactaaatctg

SEQ ID NO: 69470 - DNA, 25 bp, Homo sapien
agcctattgagaatacatgacatgc

SEQ ID NO: 69471 - DNA, 25 bp, Homo sapien
gaaagagggaaaatcaatctgcctc

SEQ ID NO: 69472 - DNA, 25 bp, Homo sapien
aataaggtagcacagattagatcta

SEQ ID NO: 69473 - DNA, 25 bp, Homo sapien
agcctattgagaatacatgacatgc

SEQ ID NO: 69474 - DNA, 25 bp, Homo sapien
ctaagagggatactgtgaatcacta

SEQ ID NO: 69475 - DNA, 25 bp, Homo sapien
ttggtggagaaatcaactaaatctg

SEQ ID NO: 69476 - DNA, 25 bp, Homo sapien
ttaaattaatgctaagagggatact

SEQ ID NO: 69477 - DNA, 25 bp, Homo sapien
gcagctaagcagagttagaaaagat

SEQ ID NO: 69478 - DNA, 25 bp, Homo sapien
tgaagccattcagtaagcctgctgt

SEQ ID NO: 69479 - DNA, 25 bp, Homo sapien
ctatgcctcaggattattagcagct

SEQ ID NO: 69480 - DNA, 25 bp, Homo sapien
gcctgctgtgagttaataaggtagc

SEQ ID NO: 69481 - DNA, 25 bp, Homo sapien
agattagatctaaggacatggtggg

SEQ ID NO: 69482 - DNA, 25 bp, Homo sapien
gcagctaagcagagttagaaaagat

SEQ ID NO: 69483 - DNA, 25 bp, Homo sapien
ctatgcctcaggattattagcagct

SEQ ID NO: 69484 - DNA, 25 bp, Homo sapien
ctaagagggatactgtgaatcacta

SEQ ID NO: 69485 - DNA, 25 bp, Homo sapien
ttaaattaatgctaagagggatact

SEQ ID NO: 69486 - DNA, 25 bp, Homo sapien
gaaagagggaaaatcaatctgcctc

SEQ ID NO: 69487 - DNA, 25 bp, Homo sapien
agattagatctaaggacatggtggg

SEQ ID NO: 69488 - DNA, 25 bp, Homo sapien
aataaggtagcacagattagatcta

SEQ ID NO: 69489 - DNA, 25 bp, Homo sapien
gcctgctgtgagttaataaggtagc

SEQ ID NO: 69490 - DNA, 25 bp, Homo sapien
tgaagccattcagtaagcctgctgt

SEQ ID NO: 69491 - DNA, 25 bp, Homo sapien
ttggtggagaaatcaactaaatctg

SEQ ID NO: 69492 - DNA, 25 bp, Homo sapien
agcctattgagaatacatgacatgc

SEQ ID NO: 69493 - DNA, 25 bp, Homo sapien
ctgtacagacagaccccaagtgcag

SEQ ID NO: 69494 - DNA, 25 bp, Homo sapien
gaagaagtaataaatgaaaagcagc

SEQ ID NO: 69495 - DNA, 25 bp, Homo sapien
atgtgtgtgcgctcgcagacgcaca

SEQ ID NO: 69496 - DNA, 25 bp, Homo sapien
tggggcagctacttccttggcacaa

SEQ ID NO: 69497 - DNA, 25 bp, Homo sapien
tgggactgctcgatgcatctctcct

SEQ ID NO: 69498 - DNA, 25 bp, Homo sapien
tcttccaacaatgacgcggagaagg

SEQ ID NO: 69499 - DNA, 25 bp, Homo sapien
attgccctaagtcagaacatggagc

SEQ ID NO: 69500 - DNA, 25 bp, Homo sapien
caatgacatgagtaactgtacagac

SEQ ID NO: 69501 - DNA, 25 bp, Homo sapien
ttgcaggtgctaagtttggacataa

SEQ ID NO: 69502 - DNA, 25 bp, Homo sapien
agaacatggagcaaccgcaactcct

SEQ ID NO: 69503 - DNA, 25 bp, Homo sapien
tctgtcaggtcctggaaagaagaag

SEQ ID NO: 69504 - DNA, 25 bp, Homo sapien
tggggcagctacttccttggcacaa

SEQ ID NO: 69505 - DNA, 25 bp, Homo sapien
tcttccaacaatgacgcggagaagg

SEQ ID NO: 69506 - DNA, 25 bp, Homo sapien
tgggactgctcgatgcatctctcct

SEQ ID NO: 69507 - DNA, 25 bp, Homo sapien
gaagaagtaataaatgaaaagcagc

SEQ ID NO: 69508 - DNA, 25 bp, Homo sapien
tctgtcaggtcctggaaagaagaag

SEQ ID NO: 69509 - DNA, 25 bp, Homo sapien
ttgcaggtgctaagtttggacataa

SEQ ID NO: 69510 - DNA, 25 bp, Homo sapien
atgtgtgtgcgctcgcagacgcaca

SEQ ID NO: 69511 - DNA, 25 bp, Homo sapien
agaacatggagcaaccgcaactcct

SEQ ID NO: 69512 - DNA, 25 bp, Homo sapien
attgccctaagtcagaacatggagc

SEQ ID NO: 69513 - DNA, 25 bp, Homo sapien
ctgtacagacagaccccaagtgcag

SEQ ID NO: 69514 - DNA, 25 bp, Homo sapien
caatgacatgagtaactgtacagac

SEQ ID NO: 69515 - DNA, 25 bp, Homo sapien
tgggactgctcgatgcatctctcct

SEQ ID NO: 69516 - DNA, 25 bp, Homo sapien
tggggcagctacttccttggcacaa

SEQ ID NO: 69517 - DNA, 25 bp, Homo sapien
caatgacatgagtaactgtacagac

SEQ ID NO: 69518 - DNA, 25 bp, Homo sapien
agaacatggagcaaccgcaactcct

SEQ ID NO: 69519 - DNA, 25 bp, Homo sapien
ctgtacagacagaccccaagtgcag

SEQ ID NO: 69520 - DNA, 25 bp, Homo sapien
tctgtcaggtcctggaaagaagaag

SEQ ID NO: 69521 - DNA, 25 bp, Homo sapien
ttgcaggtgctaagtttggacataa

SEQ ID NO: 69522 - DNA, 25 bp, Homo sapien
atgtgtgtgcgctcgcagacgcaca

SEQ ID NO: 69523 - DNA, 25 bp, Homo sapien
attgccctaagtcagaacatggagc

SEQ ID NO: 69524 - DNA, 25 bp, Homo sapien
gaagaagtaataaatgaaaagcagc

SEQ ID NO: 69525 - DNA, 25 bp, Homo sapien
tcttccaacaatgacgcggagaagg

SEQ ID NO: 69526 - DNA, 25 bp, Homo sapien
tggggcagctacttccttggcacaa

SEQ ID NO: 69527 - DNA, 25 bp, Homo sapien
tcttccaacaatgacgcggagaagg

SEQ ID NO: 69528 - DNA, 25 bp, Homo sapien
tgggactgctcgatgcatctctcct

SEQ ID NO: 69529 - DNA, 25 bp, Homo sapien
gaagaagtaataaatgaaaagcagc

SEQ ID NO: 69530 - DNA, 25 bp, Homo sapien
tctgtcaggtcctggaaagaagaag

SEQ ID NO: 69531 - DNA, 25 bp, Homo sapien
ttgcaggtgctaagtttggacataa

SEQ ID NO: 69532 - DNA, 25 bp, Homo sapien
atgtgtgtgcgctcgcagacgcaca

SEQ ID NO: 69533 - DNA, 25 bp, Homo sapien
agaacatggagcaaccgcaactcct

SEQ ID NO: 69534 - DNA, 25 bp, Homo sapien
attgccctaagtcagaacatggagc

SEQ ID NO: 69535 - DNA, 25 bp, Homo sapien
ctgtacagacagaccccaagtgcag

SEQ ID NO: 69536 - DNA, 25 bp, Homo sapien
caatgacatgagtaactgtacagac

SEQ ID NO: 69537 - DNA, 25 bp, Homo sapien
atgtgtgtgcgctcgcagacgcaca

SEQ ID NO: 69538 - DNA, 25 bp, Homo sapien
caatgacatgagtaactgtacagac

SEQ ID NO: 69539 - DNA, 25 bp, Homo sapien
tggggcagctacttccttggcacaa

SEQ ID NO: 69540 - DNA, 25 bp, Homo sapien
attgccctaagtcagaacatggagc

SEQ ID NO: 69541 - DNA, 25 bp, Homo sapien
agaacatggagcaaccgcaactcct

SEQ ID NO: 69542 - DNA, 25 bp, Homo sapien
gaagaagtaataaatgaaaagcagc

SEQ ID NO: 69543 - DNA, 25 bp, Homo sapien
ttgcaggtgctaagtttggacataa

SEQ ID NO: 69544 - DNA, 25 bp, Homo sapien
tcttccaacaatgacgcggagaagg

SEQ ID NO: 69545 - DNA, 25 bp, Homo sapien
ctgtacagacagaccccaagtgcag

SEQ ID NO: 69546 - DNA, 25 bp, Homo sapien
tgggactgctcgatgcatctctcct

SEQ ID NO: 69547 - DNA, 25 bp, Homo sapien
tctgtcaggtcctggaaagaagaag

SEQ ID NO: 69548 - DNA, 25 bp, Homo sapien
tggggcagctacttccttggcacaa

SEQ ID NO: 69549 - DNA, 25 bp, Homo sapien
tcttccaacaatgacgcggagaagg

SEQ ID NO: 69550 - DNA, 25 bp, Homo sapien
tgggactgctcgatgcatctctcct

SEQ ID NO: 69551 - DNA, 25 bp, Homo sapien
gaagaagtaataaatgaaaagcagc

SEQ ID NO: 69552 - DNA, 25 bp, Homo sapien
tctgtcaggtcctggaaagaagaag

SEQ ID NO: 69553 - DNA, 25 bp, Homo sapien
ttgcaggtgctaagtttggacataa

SEQ ID NO: 69554 - DNA, 25 bp, Homo sapien
atgtgtgtgcgctcgcagacgcaca

SEQ ID NO: 69555 - DNA, 25 bp, Homo sapien
agaacatggagcaaccgcaactcct

SEQ ID NO: 69556 - DNA, 25 bp, Homo sapien
attgccctaagtcagaacatggagc

SEQ ID NO: 69557 - DNA, 25 bp, Homo sapien
ctgtacagacagaccccaagtgcag

SEQ ID NO: 69558 - DNA, 25 bp, Homo sapien
caatgacatgagtaactgtacagac

SEQ ID NO: 69559 - DNA, 25 bp, Homo sapien
tggggcagctacttccttggcacaa

SEQ ID NO: 69560 - DNA, 25 bp, Homo sapien
tcttccaacaatgacgcggagaagg

SEQ ID NO: 69561 - DNA, 25 bp, Homo sapien
tgggactgctcgatgcatctctcct

SEQ ID NO: 69562 - DNA, 25 bp, Homo sapien
gaagaagtaataaatgaaaagcagc

SEQ ID NO: 69563 - DNA, 25 bp, Homo sapien
tctgtcaggtcctggaaagaagaag

SEQ ID NO: 69564 - DNA, 25 bp, Homo sapien
ttgcaggtgctaagtttggacataa

SEQ ID NO: 69565 - DNA, 25 bp, Homo sapien
atgtgtgtgcgctcgcagacgcaca

SEQ ID NO: 69566 - DNA, 25 bp, Homo sapien
agaacatggagcaaccgcaactcct

SEQ ID NO: 69567 - DNA, 25 bp, Homo sapien
attgccctaagtcagaacatggagc

SEQ ID NO: 69568 - DNA, 25 bp, Homo sapien
ctgtacagacagaccccaagtgcag

SEQ ID NO: 69569 - DNA, 25 bp, Homo sapien
caatgacatgagtaactgtacagac

SEQ ID NO: 69570 - DNA, 25 bp, Homo sapien
atgtgtgtgcgctcgcagacgcaca

SEQ ID NO: 69571 - DNA, 25 bp, Homo sapien
agaacatggagcaaccgcaactcct

SEQ ID NO: 69572 - DNA, 25 bp, Homo sapien
ctgtacagacagaccccaagtgcag

SEQ ID NO: 69573 - DNA, 25 bp, Homo sapien
ttgcaggtgctaagtttggacataa

SEQ ID NO: 69574 - DNA, 25 bp, Homo sapien
tgggactgctcgatgcatctctcct

SEQ ID NO: 69575 - DNA, 25 bp, Homo sapien
tcttccaacaatgacgcggagaagg

SEQ ID NO: 69576 - DNA, 25 bp, Homo sapien
gaagaagtaataaatgaaaagcagc

SEQ ID NO: 69577 - DNA, 25 bp, Homo sapien
caatgacatgagtaactgtacagac

SEQ ID NO: 69578 - DNA, 25 bp, Homo sapien
tctgtcaggtcctggaaagaagaag

SEQ ID NO: 69579 - DNA, 25 bp, Homo sapien
tggggcagctacttccttggcacaa

SEQ ID NO: 69580 - DNA, 25 bp, Homo sapien
attgccctaagtcagaacatggagc

SEQ ID NO: 69581 - DNA, 25 bp, Homo sapien
tggggcagctacttccttggcacaa

SEQ ID NO: 69582 - DNA, 25 bp, Homo sapien
tcttccaacaatgacgcggagaagg

SEQ ID NO: 69583 - DNA, 25 bp, Homo sapien
tgggactgctcgatgcatctctcct

SEQ ID NO: 69584 - DNA, 25 bp, Homo sapien
gaagaagtaataaatgaaaagcagc

SEQ ID NO: 69585 - DNA, 25 bp, Homo sapien
tctgtcaggtcctggaaagaagaag

SEQ ID NO: 69586 - DNA, 25 bp, Homo sapien
ttgcaggtgctaagtttggacataa

SEQ ID NO: 69587 - DNA, 25 bp, Homo sapien
atgtgtgtgcgctcgcagacgcaca

SEQ ID NO: 69588 - DNA, 25 bp, Homo sapien
agaacatggagcaaccgcaactcct

SEQ ID NO: 69589 - DNA, 25 bp, Homo sapien
attgccctaagtcagaacatggagc

SEQ ID NO: 69590 - DNA, 25 bp, Homo sapien
ctgtacagacagaccccaagtgcag

SEQ ID NO: 69591 - DNA, 25 bp, Homo sapien
caatgacatgagtaactgtacagac

SEQ ID NO: 69592 - DNA, 25 bp, Homo sapien
agaacatggagcaaccgcaactcct

SEQ ID NO: 69593 - DNA, 25 bp, Homo sapien
ctgtacagacagaccccaagtgcag

SEQ ID NO: 69594 - DNA, 25 bp, Homo sapien
atgtgtgtgcgctcgcagacgcaca

SEQ ID NO: 69595 - DNA, 25 bp, Homo sapien
ttgcaggtgctaagtttggacataa

SEQ ID NO: 69596 - DNA, 25 bp, Homo sapien
gaagaagtaataaatgaaaagcagc

SEQ ID NO: 69597 - DNA, 25 bp, Homo sapien
attgccctaagtcagaacatggagc

SEQ ID NO: 69598 - DNA, 25 bp, Homo sapien
caatgacatgagtaactgtacagac

SEQ ID NO: 69599 - DNA, 25 bp, Homo sapien
tctgtcaggtcctggaaagaagaag

SEQ ID NO: 69600 - DNA, 25 bp, Homo sapien
tgggactgctcgatgcatctctcct

SEQ ID NO: 69601 - DNA, 25 bp, Homo sapien
tcttccaacaatgacgcggagaagg

SEQ ID NO: 69602 - DNA, 25 bp, Homo sapien
tggggcagctacttccttggcacaa

SEQ ID NO: 69603 - DNA, 25 bp, Homo sapien
tggggcagctacttccttggcacaa

SEQ ID NO: 69604 - DNA, 25 bp, Homo sapien
tcttccaacaatgacgcggagaagg

SEQ ID NO: 69605 - DNA, 25 bp, Homo sapien
tgggactgctcgatgcatctctcct

SEQ ID NO: 69606 - DNA, 25 bp, Homo sapien
gaagaagtaataaatgaaaagcagc

SEQ ID NO: 69607 - DNA, 25 bp, Homo sapien
tctgtcaggtcctggaaagaagaag

SEQ ID NO: 69608 - DNA, 25 bp, Homo sapien
ttgcaggtgctaagtttggacataa

SEQ ID NO: 69609 - DNA, 25 bp, Homo sapien
atgtgtgtgcgctcgcagacgcaca

SEQ ID NO: 69610 - DNA, 25 bp, Homo sapien
agaacatggagcaaccgcaactcct

SEQ ID NO: 69611 - DNA, 25 bp, Homo sapien
attgccctaagtcagaacatggagc

SEQ ID NO: 69612 - DNA, 25 bp, Homo sapien
ctgtacagacagaccccaagtgcag

SEQ ID NO: 69613 - DNA, 25 bp, Homo sapien
caatgacatgagtaactgtacagac

SEQ ID NO: 69614 - DNA, 25 bp, Homo sapien
tcttccaacaatgacgcggagaagg

SEQ ID NO: 69615 - DNA, 25 bp, Homo sapien
atgtgtgtgcgctcgcagacgcaca

SEQ ID NO: 69616 - DNA, 25 bp, Homo sapien
ttgcaggtgctaagtttggacataa

SEQ ID NO: 69617 - DNA, 25 bp, Homo sapien
tggggcagctacttccttggcacaa

SEQ ID NO: 69618 - DNA, 25 bp, Homo sapien
caatgacatgagtaactgtacagac

SEQ ID NO: 69619 - DNA, 25 bp, Homo sapien
agaacatggagcaaccgcaactcct

SEQ ID NO: 69620 - DNA, 25 bp, Homo sapien
attgccctaagtcagaacatggagc

SEQ ID NO: 69621 - DNA, 25 bp, Homo sapien
tgggactgctcgatgcatctctcct

SEQ ID NO: 69622 - DNA, 25 bp, Homo sapien
ctgtacagacagaccccaagtgcag

SEQ ID NO: 69623 - DNA, 25 bp, Homo sapien
tctgtcaggtcctggaaagaagaag

SEQ ID NO: 69624 - DNA, 25 bp, Homo sapien
gaagaagtaataaatgaaaagcagc

SEQ ID NO: 69625 - DNA, 25 bp, Homo sapien
tggggcagctacttccttggcacaa

SEQ ID NO: 69626 - DNA, 25 bp, Homo sapien
tcttccaacaatgacgcggagaagg

SEQ ID NO: 69627 - DNA, 25 bp, Homo sapien
tgggactgctcgatgcatctctcct

SEQ ID NO: 69628 - DNA, 25 bp, Homo sapien
gaagaagtaataaatgaaaagcagc

SEQ ID NO: 69629 - DNA, 25 bp, Homo sapien
tctgtcaggtcctggaaagaagaag

SEQ ID NO: 69630 - DNA, 25 bp, Homo sapien
ttgcaggtgctaagtttggacataa

SEQ ID NO: 69631 - DNA, 25 bp, Homo sapien
atgtgtgtgcgctcgcagacgcaca

SEQ ID NO: 69632 - DNA, 25 bp, Homo sapien
agaacatggagcaaccgcaactcct

SEQ ID NO: 69633 - DNA, 25 bp, Homo sapien
attgccctaagtcagaacatggagc

SEQ ID NO: 69634 - DNA, 25 bp, Homo sapien
ctgtacagacagaccccaagtgcag

SEQ ID NO: 69635 - DNA, 25 bp, Homo sapien
caatgacatgagtaactgtacagac

SEQ ID NO: 69636 - DNA, 25 bp, Homo sapien
ttgcaggtgctaagtttggacataa

SEQ ID NO: 69637 - DNA, 25 bp, Homo sapien
attgccctaagtcagaacatggagc

SEQ ID NO: 69638 - DNA, 25 bp, Homo sapien
tggggcagctacttccttggcacaa

SEQ ID NO: 69639 - DNA, 25 bp, Homo sapien
gaagaagtaataaatgaaaagcagc

SEQ ID NO: 69640 - DNA, 25 bp, Homo sapien
agaacatggagcaaccgcaactcct

SEQ ID NO: 69641 - DNA, 25 bp, Homo sapien
atgtgtgtgcgctcgcagacgcaca

SEQ ID NO: 69642 - DNA, 25 bp, Homo sapien
tcttccaacaatgacgcggagaagg

SEQ ID NO: 69643 - DNA, 25 bp, Homo sapien
ctgtacagacagaccccaagtgcag

SEQ ID NO: 69644 - DNA, 25 bp, Homo sapien
tctgtcaggtcctggaaagaagaag

SEQ ID NO: 69645 - DNA, 25 bp, Homo sapien
tgggactgctcgatgcatctctcct

SEQ ID NO: 69646 - DNA, 25 bp, Homo sapien
caatgacatgagtaactgtacagac

SEQ ID NO: 69647 - DNA, 25 bp, Homo sapien
tggggcagctacttccttggcacaa

SEQ ID NO: 69648 - DNA, 25 bp, Homo sapien
tcttccaacaatgacgcggagaagg

SEQ ID NO: 69649 - DNA, 25 bp, Homo sapien
tgggactgctcgatgcatctctcct

SEQ ID NO: 69650 - DNA, 25 bp, Homo sapien
gaagaagtaataaatgaaaagcagc

SEQ ID NO: 69651 - DNA, 25 bp, Homo sapien
tctgtcaggtcctggaaagaagaag

SEQ ID NO: 69652 - DNA, 25 bp, Homo sapien
ttgcaggtgctaagtttggacataa

SEQ ID NO: 69653 - DNA, 25 bp, Homo sapien
atgtgtgtgcgctcgcagacgcaca

SEQ ID NO: 69654 - DNA, 25 bp, Homo sapien
agaacatggagcaaccgcaactcct

SEQ ID NO: 69655 - DNA, 25 bp, Homo sapien
attgccctaagtcagaacatggagc

SEQ ID NO: 69656 - DNA, 25 bp, Homo sapien
ctgtacagacagaccccaagtgcag

SEQ ID NO: 69657 - DNA, 25 bp, Homo sapien
caatgacatgagtaactgtacagac

SEQ ID NO: 69658 - DNA, 25 bp, Homo sapien
tctgtcaggtcctggaaagaagaag

SEQ ID NO: 69659 - DNA, 25 bp, Homo sapien
tcttccaacaatgacgcggagaagg

SEQ ID NO: 69660 - DNA, 25 bp, Homo sapien
caatgacatgagtaactgtacagac

SEQ ID NO: 69661 - DNA, 25 bp, Homo sapien
agaacatggagcaaccgcaactcct

SEQ ID NO: 69662 - DNA, 25 bp, Homo sapien
atgtgtgtgcgctcgcagacgcaca

SEQ ID NO: 69663 - DNA, 25 bp, Homo sapien
tggggcagctacttccttggcacaa

SEQ ID NO: 69664 - DNA, 25 bp, Homo sapien
tgggactgctcgatgcatctctcct

SEQ ID NO: 69665 - DNA, 25 bp, Homo sapien
ctgtacagacagaccccaagtgcag

SEQ ID NO: 69666 - DNA, 25 bp, Homo sapien
ttgcaggtgctaagtttggacataa

SEQ ID NO: 69667 - DNA, 25 bp, Homo sapien
attgccctaagtcagaacatggagc

SEQ ID NO: 69668 - DNA, 25 bp, Homo sapien
gaagaagtaataaatgaaaagcagc

SEQ ID NO: 69669 - DNA, 25 bp, Homo sapien
tcttccaacaatgacgcggagaagg

SEQ ID NO: 69670 - DNA, 25 bp, Homo sapien
caatgacatgagtaactgtacagac

SEQ ID NO: 69671 - DNA, 25 bp, Homo sapien
agaacatggagcaaccgcaactcct

SEQ ID NO: 69672 - DNA, 25 bp, Homo sapien
tgggactgctcgatgcatctctcct

SEQ ID NO: 69673 - DNA, 25 bp, Homo sapien
atgtgtgtgcgctcgcagacgcaca

SEQ ID NO: 69674 - DNA, 25 bp, Homo sapien
tctgtcaggtcctggaaagaagaag

SEQ ID NO: 69675 - DNA, 25 bp, Homo sapien
tggggcagctacttccttggcacaa

SEQ ID NO: 69676 - DNA, 25 bp, Homo sapien
gaagaagtaataaatgaaaagcagc

SEQ ID NO: 69677 - DNA, 25 bp, Homo sapien
attgccctaagtcagaacatggagc

SEQ ID NO: 69678 - DNA, 25 bp, Homo sapien
ctgtacagacagaccccaagtgcag

SEQ ID NO: 69679 - DNA, 25 bp, Homo sapien
ttgcaggtgctaagtttggacataa

SEQ ID NO: 69680 - DNA, 25 bp, Homo sapien
tggggcagctacttccttggcacaa

SEQ ID NO: 69681 - DNA, 25 bp, Homo sapien
tcttccaacaatgacgcggagaagg

SEQ ID NO: 69682 - DNA, 25 bp, Homo sapien
tgggactgctcgatgcatctctcct

SEQ ID NO: 69683 - DNA, 25 bp, Homo sapien
gaagaagtaataaatgaaaagcagc

SEQ ID NO: 69684 - DNA, 25 bp, Homo sapien
tctgtcaggtcctggaaagaagaag

SEQ ID NO: 69685 - DNA, 25 bp, Homo sapien
ttgcaggtgctaagtttggacataa

SEQ ID NO: 69686 - DNA, 25 bp, Homo sapien
atgtgtgtgcgctcgcagacgcaca

SEQ ID NO: 69687 - DNA, 25 bp, Homo sapien
agaacatggagcaaccgcaactcct

SEQ ID NO: 69688 - DNA, 25 bp, Homo sapien
attgccctaagtcagaacatggagc

SEQ ID NO: 69689 - DNA, 25 bp, Homo sapien
ctgtacagacagaccccaagtgcag

SEQ ID NO: 69690 - DNA, 25 bp, Homo sapien
caatgacatgagtaactgtacagac

SEQ ID NO: 69691 - DNA, 25 bp, Homo sapien
attgccctaagtcagaacatggagc

SEQ ID NO: 69692 - DNA, 25 bp, Homo sapien
ttgcaggtgctaagtttggacataa

SEQ ID NO: 69693 - DNA, 25 bp, Homo sapien
atgtgtgtgcgctcgcagacgcaca

SEQ ID NO: 69694 - DNA, 25 bp, Homo sapien
tcttccaacaatgacgcggagaagg

SEQ ID NO: 69695 - DNA, 25 bp, Homo sapien
tgggactgctcgatgcatctctcct

SEQ ID NO: 69696 - DNA, 25 bp, Homo sapien
ctgtacagacagaccccaagtgcag

SEQ ID NO: 69697 - DNA, 25 bp, Homo sapien
tggggcagctacttccttggcacaa

SEQ ID NO: 69698 - DNA, 25 bp, Homo sapien
tctgtcaggtcctggaaagaagaag

SEQ ID NO: 69699 - DNA, 25 bp, Homo sapien
caatgacatgagtaactgtacagac

SEQ ID NO: 69700 - DNA, 25 bp, Homo sapien
gaagaagtaataaatgaaaagcagc

SEQ ID NO: 69701 - DNA, 25 bp, Homo sapien
agaacatggagcaaccgcaactcct

SEQ ID NO: 69702 - DNA, 25 bp, Homo sapien
tggggcagctacttccttggcacaa

SEQ ID NO: 69703 - DNA, 25 bp, Homo sapien
tcttccaacaatgacgcggagaagg

SEQ ID NO: 69704 - DNA, 25 bp, Homo sapien
tgggactgctcgatgcatctctcct

SEQ ID NO: 69705 - DNA, 25 bp, Homo sapien
gaagaagtaataaatgaaaagcagc

SEQ ID NO: 69706 - DNA, 25 bp, Homo sapien
tctgtcaggtcctggaaagaagaag

SEQ ID NO: 69707 - DNA, 25 bp, Homo sapien
ttgcaggtgctaagtttggacataa

SEQ ID NO: 69708 - DNA, 25 bp, Homo sapien
atgtgtgtgcgctcgcagacgcaca

SEQ ID NO: 69709 - DNA, 25 bp, Homo sapien
agaacatggagcaaccgcaactcct

SEQ ID NO: 69710 - DNA, 25 bp, Homo sapien
attgccctaagtcagaacatggagc

SEQ ID NO: 69711 - DNA, 25 bp, Homo sapien
ctgtacagacagaccccaagtgcag

SEQ ID NO: 69712 - DNA, 25 bp, Homo sapien
caatgacatgagtaactgtacagac

SEQ ID NO: 69713 - DNA, 25 bp, Homo sapien
caatgacatgagtaactgtacagac

SEQ ID NO: 69714 - DNA, 25 bp, Homo sapien
agaacatggagcaaccgcaactcct

SEQ ID NO: 69715 - DNA, 25 bp, Homo sapien
tctgtcaggtcctggaaagaagaag

SEQ ID NO: 69716 - DNA, 25 bp, Homo sapien
tgggactgctcgatgcatctctcct

SEQ ID NO: 69717 - DNA, 25 bp, Homo sapien
attgccctaagtcagaacatggagc

SEQ ID NO: 69718 - DNA, 25 bp, Homo sapien
tggggcagctacttccttggcacaa

SEQ ID NO: 69719 - DNA, 25 bp, Homo sapien
ttgcaggtgctaagtttggacataa

SEQ ID NO: 69720 - DNA, 25 bp, Homo sapien
ctgtacagacagaccccaagtgcag

SEQ ID NO: 69721 - DNA, 25 bp, Homo sapien
tcttccaacaatgacgcggagaagg

SEQ ID NO: 69722 - DNA, 25 bp, Homo sapien
atgtgtgtgcgctcgcagacgcaca

SEQ ID NO: 69723 - DNA, 25 bp, Homo sapien
gaagaagtaataaatgaaaagcagc

SEQ ID NO: 69724 - DNA, 25 bp, Homo sapien
tggggcagctacttccttggcacaa

SEQ ID NO: 69725 - DNA, 25 bp, Homo sapien
tcttccaacaatgacgcggagaagg

SEQ ID NO: 69726 - DNA, 25 bp, Homo sapien
tgggactgctcgatgcatctctcct

SEQ ID NO: 69727 - DNA, 25 bp, Homo sapien
gaagaagtaataaatgaaaagcagc

SEQ ID NO: 69728 - DNA, 25 bp, Homo sapien
tctgtcaggtcctggaaagaagaag

SEQ ID NO: 69729 - DNA, 25 bp, Homo sapien
ttgcaggtgctaagtttggacataa

SEQ ID NO: 69730 - DNA, 25 bp, Homo sapien
atgtgtgtgcgctcgcagacgcaca

SEQ ID NO: 69731 - DNA, 25 bp, Homo sapien
agaacatggagcaaccgcaactcct

SEQ ID NO: 69732 - DNA, 25 bp, Homo sapien
attgccctaagtcagaacatggagc

SEQ ID NO: 69733 - DNA, 25 bp, Homo sapien
ctgtacagacagaccccaagtgcag

SEQ ID NO: 69734 - DNA, 25 bp, Homo sapien
caatgacatgagtaactgtacagac

SEQ ID NO: 69735 - DNA, 25 bp, Homo sapien
ttgcaggtgctaagtttggacataa

SEQ ID NO: 69736 - DNA, 25 bp, Homo sapien
tctgtcaggtcctggaaagaagaag

SEQ ID NO: 69737 - DNA, 25 bp, Homo sapien
tggggcagctacttccttggcacaa

SEQ ID NO: 69738 - DNA, 25 bp, Homo sapien
atgtgtgtgcgctcgcagacgcaca

SEQ ID NO: 69739 - DNA, 25 bp, Homo sapien
agaacatggagcaaccgcaactcct

SEQ ID NO: 69740 - DNA, 25 bp, Homo sapien
tcttccaacaatgacgcggagaagg

SEQ ID NO: 69741 - DNA, 25 bp, Homo sapien
attgccctaagtcagaacatggagc

SEQ ID NO: 69742 - DNA, 25 bp, Homo sapien
tgggactgctcgatgcatctctcct

SEQ ID NO: 69743 - DNA, 25 bp, Homo sapien
ctgtacagacagaccccaagtgcag

SEQ ID NO: 69744 - DNA, 25 bp, Homo sapien
caatgacatgagtaactgtacagac

SEQ ID NO: 69745 - DNA, 25 bp, Homo sapien
gaagaagtaataaatgaaaagcagc

SEQ ID NO: 69746 - DNA, 25 bp, Homo sapien
tggggcagctacttccttggcacaa

SEQ ID NO: 69747 - DNA, 25 bp, Homo sapien
tcttccaacaatgacgcggagaagg

SEQ ID NO: 69748 - DNA, 25 bp, Homo sapien
tgggactgctcgatgcatctctcct

SEQ ID NO: 69749 - DNA, 25 bp, Homo sapien
gaagaagtaataaatgaaaagcagc

SEQ ID NO: 69750 - DNA, 25 bp, Homo sapien
tctgtcaggtcctggaaagaagaag

SEQ ID NO: 69751 - DNA, 25 bp, Homo sapien
ttgcaggtgctaagtttggacataa

SEQ ID NO: 69752 - DNA, 25 bp, Homo sapien
atgtgtgtgcgctcgcagacgcaca

SEQ ID NO: 69753 - DNA, 25 bp, Homo sapien
agaacatggagcaaccgcaactcct

SEQ ID NO: 69754 - DNA, 25 bp, Homo sapien
attgccctaagtcagaacatggagc

SEQ ID NO: 69755 - DNA, 25 bp, Homo sapien
ctgtacagacagaccccaagtgcag

SEQ ID NO: 69756 - DNA, 25 bp, Homo sapien
caatgacatgagtaactgtacagac

SEQ ID NO: 69757 - DNA, 25 bp, Homo sapien
caatgacatgagtaactgtacagac

SEQ ID NO: 69758 - DNA, 25 bp, Homo sapien
attgccctaagtcagaacatggagc

SEQ ID NO: 69759 - DNA, 25 bp, Homo sapien
tcttccaacaatgacgcggagaagg

SEQ ID NO: 69760 - DNA, 25 bp, Homo sapien
tctgtcaggtcctggaaagaagaag

SEQ ID NO: 69761 - DNA, 25 bp, Homo sapien
tggggcagctacttccttggcacaa

SEQ ID NO: 69762 - DNA, 25 bp, Homo sapien
ctgtacagacagaccccaagtgcag

SEQ ID NO: 69763 - DNA, 25 bp, Homo sapien
atgtgtgtgcgctcgcagacgcaca

SEQ ID NO: 69764 - DNA, 25 bp, Homo sapien
agaacatggagcaaccgcaactcct

SEQ ID NO: 69765 - DNA, 25 bp, Homo sapien
gaagaagtaataaatgaaaagcagc

SEQ ID NO: 69766 - DNA, 25 bp, Homo sapien
tgggactgctcgatgcatctctcct

SEQ ID NO: 69767 - DNA, 25 bp, Homo sapien
ttgcaggtgctaagtttggacataa

SEQ ID NO: 69768 - DNA, 25 bp, Homo sapien
tggggcagctacttccttggcacaa

SEQ ID NO: 69769 - DNA, 25 bp, Homo sapien
tcttccaacaatgacgcggagaagg

SEQ ID NO: 69770 - DNA, 25 bp, Homo sapien
tgggactgctcgatgcatctctcct

SEQ ID NO: 69771 - DNA, 25 bp, Homo sapien
gaagaagtaataaatgaaaagcagc

SEQ ID NO: 69772 - DNA, 25 bp, Homo sapien
tctgtcaggtcctggaaagaagaag

SEQ ID NO: 69773 - DNA, 25 bp, Homo sapien
ttgcaggtgctaagtttggacataa

SEQ ID NO: 69774 - DNA, 25 bp, Homo sapien
atgtgtgtgcgctcgcagacgcaca

SEQ ID NO: 69775 - DNA, 25 bp, Homo sapien
agaacatggagcaaccgcaactcct

SEQ ID NO: 69776 - DNA, 25 bp, Homo sapien
attgccctaagtcagaacatggagc

SEQ ID NO: 69777 - DNA, 25 bp, Homo sapien
ctgtacagacagaccccaagtgcag

SEQ ID NO: 69778 - DNA, 25 bp, Homo sapien
caatgacatgagtaactgtacagac

SEQ ID NO: 69779 - DNA, 25 bp, Homo sapien
agaacatggagcaaccgcaactcct

SEQ ID NO: 69780 - DNA, 25 bp, Homo sapien
tcttccaacaatgacgcggagaagg

SEQ ID NO: 69781 - DNA, 25 bp, Homo sapien
tctgtcaggtcctggaaagaagaag

SEQ ID NO: 69782 - DNA, 25 bp, Homo sapien
attgccctaagtcagaacatggagc

SEQ ID NO: 69783 - DNA, 25 bp, Homo sapien
gaagaagtaataaatgaaaagcagc

SEQ ID NO: 69784 - DNA, 25 bp, Homo sapien
atgtgtgtgcgctcgcagacgcaca

SEQ ID NO: 69785 - DNA, 25 bp, Homo sapien
ttgcaggtgctaagtttggacataa

SEQ ID NO: 69786 - DNA, 25 bp, Homo sapien
ctgtacagacagaccccaagtgcag

SEQ ID NO: 69787 - DNA, 25 bp, Homo sapien
tggggcagctacttccttggcacaa

SEQ ID NO: 69788 - DNA, 25 bp, Homo sapien
tgggactgctcgatgcatctctcct

SEQ ID NO: 69789 - DNA, 25 bp, Homo sapien
caatgacatgagtaactgtacagac

SEQ ID NO: 69790 - DNA, 25 bp, Homo sapien
tggggcagctacttccttggcacaa

SEQ ID NO: 69791 - DNA, 25 bp, Homo sapien
tcttccaacaatgacgcggagaagg

SEQ ID NO: 69792 - DNA, 25 bp, Homo sapien
tgggactgctcgatgcatctctcct

SEQ ID NO: 69793 - DNA, 25 bp, Homo sapien
gaagaagtaataaatgaaaagcagc

SEQ ID NO: 69794 - DNA, 25 bp, Homo sapien
tctgtcaggtcctggaaagaagaag

SEQ ID NO: 69795 - DNA, 25 bp, Homo sapien
ttgcaggtgctaagtttggacataa

SEQ ID NO: 69796 - DNA, 25 bp, Homo sapien
atgtgtgtgcgctcgcagacgcaca

SEQ ID NO: 69797 - DNA, 25 bp, Homo sapien
agaacatggagcaaccgcaactcct

SEQ ID NO: 69798 - DNA, 25 bp, Homo sapien
attgccctaagtcagaacatggagc

SEQ ID NO: 69799 - DNA, 25 bp, Homo sapien
ctgtacagacagaccccaagtgcag

SEQ ID NO: 69800 - DNA, 25 bp, Homo sapien
caatgacatgagtaactgtacagac

SEQ ID NO: 69801 - DNA, 25 bp, Homo sapien
tggggcagctacttccttggcacaa

SEQ ID NO: 69802 - DNA, 25 bp, Homo sapien
tcttccaacaatgacgcggagaagg

SEQ ID NO: 69803 - DNA, 25 bp, Homo sapien
tgggactgctcgatgcatctctcct

SEQ ID NO: 69804 - DNA, 25 bp, Homo sapien
gaagaagtaataaatgaaaagcagc

SEQ ID NO: 69805 - DNA, 25 bp, Homo sapien
tctgtcaggtcctggaaagaagaag

SEQ ID NO: 69806 - DNA, 25 bp, Homo sapien
ttgcaggtgctaagtttggacataa

SEQ ID NO: 69807 - DNA, 25 bp, Homo sapien
atgtgtgtgcgctcgcagacgcaca

SEQ ID NO: 69808 - DNA, 25 bp, Homo sapien
agaacatggagcaaccgcaactcct

SEQ ID NO: 69809 - DNA, 25 bp, Homo sapien
attgccctaagtcagaacatggagc

SEQ ID NO: 69810 - DNA, 25 bp, Homo sapien
ctgtacagacagaccccaagtgcag

SEQ ID NO: 69811 - DNA, 25 bp, Homo sapien
caatgacatgagtaactgtacagac

SEQ ID NO: 69812 - DNA, 25 bp, Homo sapien
attgccctaagtcagaacatggagc

SEQ ID NO: 69813 - DNA, 25 bp, Homo sapien
ttgcaggtgctaagtttggacataa

SEQ ID NO: 69814 - DNA, 25 bp, Homo sapien
tgggactgctcgatgcatctctcct

SEQ ID NO: 69815 - DNA, 25 bp, Homo sapien
agaacatggagcaaccgcaactcct

SEQ ID NO: 69816 - DNA, 25 bp, Homo sapien
atgtgtgtgcgctcgcagacgcaca

SEQ ID NO: 69817 - DNA, 25 bp, Homo sapien
ctgtacagacagaccccaagtgcag

SEQ ID NO: 69818 - DNA, 25 bp, Homo sapien
caatgacatgagtaactgtacagac

SEQ ID NO: 69819 - DNA, 25 bp, Homo sapien
gaagaagtaataaatgaaaagcagc

SEQ ID NO: 69820 - DNA, 25 bp, Homo sapien
tcttccaacaatgacgcggagaagg

SEQ ID NO: 69821 - DNA, 25 bp, Homo sapien
tctgtcaggtcctggaaagaagaag

SEQ ID NO: 69822 - DNA, 25 bp, Homo sapien
tggggcagctacttccttggcacaa

SEQ ID NO: 69823 - DNA, 25 bp, Homo sapien
tgggactgctcgatgcatctctcct

SEQ ID NO: 69824 - DNA, 25 bp, Homo sapien
agaacatggagcaaccgcaactcct

SEQ ID NO: 69825 - DNA, 25 bp, Homo sapien
ctgtacagacagaccccaagtgcag

SEQ ID NO: 69826 - DNA, 25 bp, Homo sapien
atgtgtgtgcgctcgcagacgcaca

SEQ ID NO: 69827 - DNA, 25 bp, Homo sapien
caatgacatgagtaactgtacagac

SEQ ID NO: 69828 - DNA, 25 bp, Homo sapien
gaagaagtaataaatgaaaagcagc

SEQ ID NO: 69829 - DNA, 25 bp, Homo sapien
tcttccaacaatgacgcggagaagg

SEQ ID NO: 69830 - DNA, 25 bp, Homo sapien
ttgcaggtgctaagtttggacataa

SEQ ID NO: 69831 - DNA, 25 bp, Homo sapien
tctgtcaggtcctggaaagaagaag

SEQ ID NO: 69832 - DNA, 25 bp, Homo sapien
attgccctaagtcagaacatggagc

SEQ ID NO: 69833 - DNA, 25 bp, Homo sapien
tggggcagctacttccttggcacaa

SEQ ID NO: 69834 - DNA, 25 bp, Homo sapien
tgggactgctcgatgcatctctcct

SEQ ID NO: 69835 - DNA, 25 bp, Homo sapien
agaacatggagcaaccgcaactcct

SEQ ID NO: 69836 - DNA, 25 bp, Homo sapien
atgtgtgtgcgctcgcagacgcaca

SEQ ID NO: 69837 - DNA, 25 bp, Homo sapien
caatgacatgagtaactgtacagac

SEQ ID NO: 69838 - DNA, 25 bp, Homo sapien
ctgtacagacagaccccaagtgcag

SEQ ID NO: 69839 - DNA, 25 bp, Homo sapien
gaagaagtaataaatgaaaagcagc

SEQ ID NO: 69840 - DNA, 25 bp, Homo sapien
tcttccaacaatgacgcggagaagg

SEQ ID NO: 69841 - DNA, 25 bp, Homo sapien
ttgcaggtgctaagtttggacataa

SEQ ID NO: 69842 - DNA, 25 bp, Homo sapien
tctgtcaggtcctggaaagaagaag

SEQ ID NO: 69843 - DNA, 25 bp, Homo sapien
attgccctaagtcagaacatggagc

SEQ ID NO: 69844 - DNA, 25 bp, Homo sapien
tggggcagctacttccttggcacaa

SEQ ID NO: 69845 - DNA, 25 bp, Homo sapien
tgggactgctcgatgcatctctcct

SEQ ID NO: 69846 - DNA, 25 bp, Homo sapien
agaacatggagcaaccgcaactcct

SEQ ID NO: 69847 - DNA, 25 bp, Homo sapien
atgtgtgtgcgctcgcagacgcaca

SEQ ID NO: 69848 - DNA, 25 bp, Homo sapien
ctgtacagacagaccccaagtgcag

SEQ ID NO: 69849 - DNA, 25 bp, Homo sapien
caatgacatgagtaactgtacagac

SEQ ID NO: 69850 - DNA, 25 bp, Homo sapien
gaagaagtaataaatgaaaagcagc

SEQ ID NO: 69851 - DNA, 25 bp, Homo sapien
tcttccaacaatgacgcggagaagg

SEQ ID NO: 69852 - DNA, 25 bp, Homo sapien
ttgcaggtgctaagtttggacataa

SEQ ID NO: 69853 - DNA, 25 bp, Homo sapien
tctgtcaggtcctggaaagaagaag

SEQ ID NO: 69854 - DNA, 25 bp, Homo sapien
tggggcagctacttccttggcacaa

SEQ ID NO: 69855 - DNA, 25 bp, Homo sapien
attgccctaagtcagaacatggagc

SEQ ID NO: 69856 - DNA, 25 bp, Homo sapien
attgccctaagtcagaacatggagc

SEQ ID NO: 69857 - DNA, 25 bp, Homo sapien
tgggactgctcgatgcatctctcct

SEQ ID NO: 69858 - DNA, 25 bp, Homo sapien
ttgcaggtgctaagtttggacataa

SEQ ID NO: 69859 - DNA, 25 bp, Homo sapien
agaacatggagcaaccgcaactcct

SEQ ID NO: 69860 - DNA, 25 bp, Homo sapien
ctgtacagacagaccccaagtgcag

SEQ ID NO: 69861 - DNA, 25 bp, Homo sapien
atgtgtgtgcgctcgcagacgcaca

SEQ ID NO: 69862 - DNA, 25 bp, Homo sapien
caatgacatgagtaactgtacagac

SEQ ID NO: 69863 - DNA, 25 bp, Homo sapien
gaagaagtaataaatgaaaagcagc

SEQ ID NO: 69864 - DNA, 25 bp, Homo sapien
tcttccaacaatgacgcggagaagg

SEQ ID NO: 69865 - DNA, 25 bp, Homo sapien
tctgtcaggtcctggaaagaagaag

SEQ ID NO: 69866 - DNA, 25 bp, Homo sapien
tggggcagctacttccttggcacaa

SEQ ID NO: 69867 - DNA, 25 bp, Homo sapien
tggggcagctacttccttggcacaa

SEQ ID NO: 69868 - DNA, 25 bp, Homo sapien
ttgcaggtgctaagtttggacataa

SEQ ID NO: 69869 - DNA, 25 bp, Homo sapien
tgggactgctcgatgcatctctcct

SEQ ID NO: 69870 - DNA, 25 bp, Homo sapien
agaacatggagcaaccgcaactcct

SEQ ID NO: 69871 - DNA, 25 bp, Homo sapien
atgtgtgtgcgctcgcagacgcaca

SEQ ID NO: 69872 - DNA, 25 bp, Homo sapien
ctgtacagacagaccccaagtgcag

SEQ ID NO: 69873 - DNA, 25 bp, Homo sapien
gaagaagtaataaatgaaaagcagc

SEQ ID NO: 69874 - DNA, 25 bp, Homo sapien
caatgacatgagtaactgtacagac

SEQ ID NO: 69875 - DNA, 25 bp, Homo sapien
tcttccaacaatgacgcggagaagg

SEQ ID NO: 69876 - DNA, 25 bp, Homo sapien
tctgtcaggtcctggaaagaagaag

SEQ ID NO: 69877 - DNA, 25 bp, Homo sapien
attgccctaagtcagaacatggagc

SEQ ID NO: 69878 - DNA, 25 bp, Homo sapien
tggggcagctacttccttggcacaa

SEQ ID NO: 69879 - DNA, 25 bp, Homo sapien
tgggactgctcgatgcatctctcct

SEQ ID NO: 69880 - DNA, 25 bp, Homo sapien
agaacatggagcaaccgcaactcct

SEQ ID NO: 69881 - DNA, 25 bp, Homo sapien
ttgcaggtgctaagtttggacataa

SEQ ID NO: 69882 - DNA, 25 bp, Homo sapien
ctgtacagacagaccccaagtgcag

SEQ ID NO: 69883 - DNA, 25 bp, Homo sapien
atgtgtgtgcgctcgcagacgcaca

SEQ ID NO: 69884 - DNA, 25 bp, Homo sapien
caatgacatgagtaactgtacagac

SEQ ID NO: 69885 - DNA, 25 bp, Homo sapien
gaagaagtaataaatgaaaagcagc

SEQ ID NO: 69886 - DNA, 25 bp, Homo sapien
tcttccaacaatgacgcggagaagg

SEQ ID NO: 69887 - DNA, 25 bp, Homo sapien
attgccctaagtcagaacatggagc

SEQ ID NO: 69888 - DNA, 25 bp, Homo sapien
tctgtcaggtcctggaaagaagaag

SEQ ID NO: 69889 - DNA, 25 bp, Homo sapien
attgccctaagtcagaacatggagc

SEQ ID NO: 69890 - DNA, 25 bp, Homo sapien
tgggactgctcgatgcatctctcct

SEQ ID NO: 69891 - DNA, 25 bp, Homo sapien
agaacatggagcaaccgcaactcct

SEQ ID NO: 69892 - DNA, 25 bp, Homo sapien
ttgcaggtgctaagtttggacataa

SEQ ID NO: 69893 - DNA, 25 bp, Homo sapien
atgtgtgtgcgctcgcagacgcaca

SEQ ID NO: 69894 - DNA, 25 bp, Homo sapien
ctgtacagacagaccccaagtgcag

SEQ ID NO: 69895 - DNA, 25 bp, Homo sapien
gaagaagtaataaatgaaaagcagc

SEQ ID NO: 69896 - DNA, 25 bp, Homo sapien
caatgacatgagtaactgtacagac

SEQ ID NO: 69897 - DNA, 25 bp, Homo sapien
tcttccaacaatgacgcggagaagg

SEQ ID NO: 69898 - DNA, 25 bp, Homo sapien
tctgtcaggtcctggaaagaagaag

SEQ ID NO: 69899 - DNA, 25 bp, Homo sapien
tggggcagctacttccttggcacaa

SEQ ID NO: 69900 - DNA, 25 bp, Homo sapien
tggggcagctacttccttggcacaa

SEQ ID NO: 69901 - DNA, 25 bp, Homo sapien
ttgcaggtgctaagtttggacataa

SEQ ID NO: 69902 - DNA, 25 bp, Homo sapien
tgggactgctcgatgcatctctcct

SEQ ID NO: 69903 - DNA, 25 bp, Homo sapien
agaacatggagcaaccgcaactcct

SEQ ID NO: 69904 - DNA, 25 bp, Homo sapien
atgtgtgtgcgctcgcagacgcaca

SEQ ID NO: 69905 - DNA, 25 bp, Homo sapien
caatgacatgagtaactgtacagac

SEQ ID NO: 69906 - DNA, 25 bp, Homo sapien
ctgtacagacagaccccaagtgcag

SEQ ID NO: 69907 - DNA, 25 bp, Homo sapien
gaagaagtaataaatgaaaagcagc

SEQ ID NO: 69908 - DNA, 25 bp, Homo sapien
tcttccaacaatgacgcggagaagg

SEQ ID NO: 69909 - DNA, 25 bp, Homo sapien
attgccctaagtcagaacatggagc

SEQ ID NO: 69910 - DNA, 25 bp, Homo sapien
tctgtcaggtcctggaaagaagaag

SEQ ID NO: 69911 - DNA, 25 bp, Homo sapien
tctgtcaggtcctggaaagaagaag

SEQ ID NO: 69912 - DNA, 25 bp, Homo sapien
agaacatggagcaaccgcaactcct

SEQ ID NO: 69913 - DNA, 25 bp, Homo sapien
caatgacatgagtaactgtacagac

SEQ ID NO: 69914 - DNA, 25 bp, Homo sapien
ctgtacagacagaccccaagtgcag

SEQ ID NO: 69915 - DNA, 25 bp, Homo sapien
tggggcagctacttccttggcacaa

SEQ ID NO: 69916 - DNA, 25 bp, Homo sapien
gaagaagtaataaatgaaaagcagc

SEQ ID NO: 69917 - DNA, 25 bp, Homo sapien
ttgcaggtgctaagtttggacataa

SEQ ID NO: 69918 - DNA, 25 bp, Homo sapien
atgtgtgtgcgctcgcagacgcaca

SEQ ID NO: 69919 - DNA, 25 bp, Homo sapien
tcttccaacaatgacgcggagaagg

SEQ ID NO: 69920 - DNA, 25 bp, Homo sapien
tgggactgctcgatgcatctctcct

SEQ ID NO: 69921 - DNA, 25 bp, Homo sapien
attgccctaagtcagaacatggagc

SEQ ID NO: 69922 - DNA, 25 bp, Homo sapien
attgccctaagtcagaacatggagc

SEQ ID NO: 69923 - DNA, 25 bp, Homo sapien
tgggactgctcgatgcatctctcct

SEQ ID NO: 69924 - DNA, 25 bp, Homo sapien
agaacatggagcaaccgcaactcct

SEQ ID NO: 69925 - DNA, 25 bp, Homo sapien
atgtgtgtgcgctcgcagacgcaca

SEQ ID NO: 69926 - DNA, 25 bp, Homo sapien
ctgtacagacagaccccaagtgcag

SEQ ID NO: 69927 - DNA, 25 bp, Homo sapien
caatgacatgagtaactgtacagac

SEQ ID NO: 69928 - DNA, 25 bp, Homo sapien
gaagaagtaataaatgaaaagcagc

SEQ ID NO: 69929 - DNA, 25 bp, Homo sapien
tcttccaacaatgacgcggagaagg

SEQ ID NO: 69930 - DNA, 25 bp, Homo sapien
ttgcaggtgctaagtttggacataa

SEQ ID NO: 69931 - DNA, 25 bp, Homo sapien
tctgtcaggtcctggaaagaagaag

SEQ ID NO: 69932 - DNA, 25 bp, Homo sapien
tggggcagctacttccttggcacaa

SEQ ID NO: 69933 - DNA, 25 bp, Homo sapien
tggggcagctacttccttggcacaa

SEQ ID NO: 69934 - DNA, 25 bp, Homo sapien
tcttccaacaatgacgcggagaagg

SEQ ID NO: 69935 - DNA, 25 bp, Homo sapien
tgggactgctcgatgcatctctcct

SEQ ID NO: 69936 - DNA, 25 bp, Homo sapien
gaagaagtaataaatgaaaagcagc

SEQ ID NO: 69937 - DNA, 25 bp, Homo sapien
tctgtcaggtcctggaaagaagaag

SEQ ID NO: 69938 - DNA, 25 bp, Homo sapien
ttgcaggtgctaagtttggacataa

SEQ ID NO: 69939 - DNA, 25 bp, Homo sapien
atgtgtgtgcgctcgcagacgcaca

SEQ ID NO: 69940 - DNA, 25 bp, Homo sapien
agaacatggagcaaccgcaactcct

SEQ ID NO: 69941 - DNA, 25 bp, Homo sapien
attgccctaagtcagaacatggagc

SEQ ID NO: 69942 - DNA, 25 bp, Homo sapien
ctgtacagacagaccccaagtgcag

SEQ ID NO: 69943 - DNA, 25 bp, Homo sapien
caatgacatgagtaactgtacagac

SEQ ID NO: 69944 - DNA, 25 bp, Homo sapien
gctgcttttcatttattacttcttc

SEQ ID NO: 69945 - DNA, 25 bp, Homo sapien
cttcttctttccaggacctgacaga

SEQ ID NO: 69946 - DNA, 25 bp, Homo sapien
aggagagatgcatcgagcagtccca

SEQ ID NO: 69947 - DNA, 25 bp, Homo sapien
aggagttgcggttgctccatgttct

SEQ ID NO: 69948 - DNA, 25 bp, Homo sapien
ccttctccgcgtcattgttggaaga

SEQ ID NO: 69949 - DNA, 25 bp, Homo sapien
ttatgtccaaacttagcacctgcaa

SEQ ID NO: 69950 - DNA, 25 bp, Homo sapien
gctccatgttctgacttagggcaat

SEQ ID NO: 69951 - DNA, 25 bp, Homo sapien
gtctgtacagttactcatgtcattg

SEQ ID NO: 69952 - DNA, 25 bp, Homo sapien
ctgcacttggggtctgtctgtacag

SEQ ID NO: 69953 - DNA, 25 bp, Homo sapien
tgtgcgtctgcgagcgcacacacat

SEQ ID NO: 69954 - DNA, 25 bp, Homo sapien
ttgtgccaaggaagtagctgcccca

SEQ ID NO: 69955 - DNA, 25 bp, Homo sapien
ttgcaggtgctaagtttggacataa

SEQ ID NO: 69956 - DNA, 25 bp, Homo sapien
tggggcagctacttccttggcacaa

SEQ ID NO: 69957 - DNA, 25 bp, Homo sapien
tgggactgctcgatgcatctctcct

SEQ ID NO: 69958 - DNA, 25 bp, Homo sapien
agaacatggagcaaccgcaactcct

SEQ ID NO: 69959 - DNA, 25 bp, Homo sapien
atgtgtgtgcgctcgcagacgcaca

SEQ ID NO: 69960 - DNA, 25 bp, Homo sapien
caatgacatgagtaactgtacagac

SEQ ID NO: 69961 - DNA, 25 bp, Homo sapien
ctgtacagacagaccccaagtgcag

SEQ ID NO: 69962 - DNA, 25 bp, Homo sapien
gaagaagtaataaatgaaaagcagc

SEQ ID NO: 69963 - DNA, 25 bp, Homo sapien
tcttccaacaatgacgcggagaagg

SEQ ID NO: 69964 - DNA, 25 bp, Homo sapien
tctgtcaggtcctggaaagaagaag

SEQ ID NO: 69965 - DNA, 25 bp, Homo sapien
attgccctaagtcagaacatggagc

SEQ ID NO: 69966 - DNA, 25 bp, Homo sapien
gaagaagtaataaatgaaaagcagc

SEQ ID NO: 69967 - DNA, 25 bp, Homo sapien
caatgacatgagtaactgtacagac

SEQ ID NO: 69968 - DNA, 25 bp, Homo sapien
atgtgtgtgcgctcgcagacgcaca

SEQ ID NO: 69969 - DNA, 25 bp, Homo sapien
attgccctaagtcagaacatggagc

SEQ ID NO: 69970 - DNA, 25 bp, Homo sapien
tggggcagctacttccttggcacaa

SEQ ID NO: 69971 - DNA, 25 bp, Homo sapien
tctgtcaggtcctggaaagaagaag

SEQ ID NO: 69972 - DNA, 25 bp, Homo sapien
tgggactgctcgatgcatctctcct

SEQ ID NO: 69973 - DNA, 25 bp, Homo sapien
ctgtacagacagaccccaagtgcag

SEQ ID NO: 69974 - DNA, 25 bp, Homo sapien
agaacatggagcaaccgcaactcct

SEQ ID NO: 69975 - DNA, 25 bp, Homo sapien
ttgcaggtgctaagtttggacataa

SEQ ID NO: 69976 - DNA, 25 bp, Homo sapien
tcttccaacaatgacgcggagaagg

SEQ ID NO: 69977 - DNA, 25 bp, Homo sapien
tggggcagctacttccttggcacaa

SEQ ID NO: 69978 - DNA, 25 bp, Homo sapien
tcttccaacaatgacgcggagaagg

SEQ ID NO: 69979 - DNA, 25 bp, Homo sapien
tgggactgctcgatgcatctctcct

SEQ ID NO: 69980 - DNA, 25 bp, Homo sapien
gaagaagtaataaatgaaaagcagc

SEQ ID NO: 69981 - DNA, 25 bp, Homo sapien
tctgtcaggtcctggaaagaagaag

SEQ ID NO: 69982 - DNA, 25 bp, Homo sapien
ttgcaggtgctaagtttggacataa

SEQ ID NO: 69983 - DNA, 25 bp, Homo sapien
atgtgtgtgcgctcgcagacgcaca

SEQ ID NO: 69984 - DNA, 25 bp, Homo sapien
agaacatggagcaaccgcaactcct

SEQ ID NO: 69985 - DNA, 25 bp, Homo sapien
attgccctaagtcagaacatggagc

SEQ ID NO: 69986 - DNA, 25 bp, Homo sapien
ctgtacagacagaccccaagtgcag

SEQ ID NO: 69987 - DNA, 25 bp, Homo sapien
caatgacatgagtaactgtacagac

SEQ ID NO: 69988 - DNA, 25 bp, Homo sapien
ttgcaggtgctaagtttggacataa

SEQ ID NO: 69989 - DNA, 25 bp, Homo sapien
attgccctaagtcagaacatggagc

SEQ ID NO: 69990 - DNA, 25 bp, Homo sapien
caatgacatgagtaactgtacagac

SEQ ID NO: 69991 - DNA, 25 bp, Homo sapien
tcttccaacaatgacgcggagaagg

SEQ ID NO: 69992 - DNA, 25 bp, Homo sapien
tgggactgctcgatgcatctctcct

SEQ ID NO: 69993 - DNA, 25 bp, Homo sapien
tctgtcaggtcctggaaagaagaag

SEQ ID NO: 69994 - DNA, 25 bp, Homo sapien
ctgtacagacagaccccaagtgcag

SEQ ID NO: 69995 - DNA, 25 bp, Homo sapien
gaagaagtaataaatgaaaagcagc

SEQ ID NO: 69996 - DNA, 25 bp, Homo sapien
tggggcagctacttccttggcacaa

SEQ ID NO: 69997 - DNA, 25 bp, Homo sapien
agaacatggagcaaccgcaactcct

SEQ ID NO: 69998 - DNA, 25 bp, Homo sapien
atgtgtgtgcgctcgcagacgcaca

SEQ ID NO: 69999 - DNA, 25 bp, Homo sapien
tggggcagctacttccttggcacaa

SEQ ID NO: 70000 - DNA, 25 bp, Homo sapien
tcttccaacaatgacgcggagaagg

SEQ ID NO: 70001 - DNA, 25 bp, Homo sapien
tgggactgctcgatgcatctctcct

SEQ ID NO: 70002 - DNA, 25 bp, Homo sapien
gaagaagtaataaatgaaaagcagc

SEQ ID NO: 70003 - DNA, 25 bp, Homo sapien
tctgtcaggtcctggaaagaagaag

SEQ ID NO: 70004 - DNA, 25 bp, Homo sapien
ttgcaggtgctaagtttggacataa

SEQ ID NO: 70005 - DNA, 25 bp, Homo sapien
atgtgtgtgcgctcgcagacgcaca

SEQ ID NO: 70006 - DNA, 25 bp, Homo sapien
agaacatggagcaaccgcaactcct

SEQ ID NO: 70007 - DNA, 25 bp, Homo sapien
attgccctaagtcagaacatggagc

SEQ ID NO: 70008 - DNA, 25 bp, Homo sapien
ctgtacagacagaccccaagtgcag

SEQ ID NO: 70009 - DNA, 25 bp, Homo sapien
caatgacatgagtaactgtacagac

SEQ ID NO: 70010 - DNA, 25 bp, Homo sapien
attgccctaagtcagaacatggagc

SEQ ID NO: 70011 - DNA, 25 bp, Homo sapien
tcttccaacaatgacgcggagaagg

SEQ ID NO: 70012 - DNA, 25 bp, Homo sapien
atgtgtgtgcgctcgcagacgcaca

SEQ ID NO: 70013 - DNA, 25 bp, Homo sapien
ttgcaggtgctaagtttggacataa

SEQ ID NO: 70014 - DNA, 25 bp, Homo sapien
gaagaagtaataaatgaaaagcagc

SEQ ID NO: 70015 - DNA, 25 bp, Homo sapien
agaacatggagcaaccgcaactcct

SEQ ID NO: 70016 - DNA, 25 bp, Homo sapien
ctgtacagacagaccccaagtgcag

SEQ ID NO: 70017 - DNA, 25 bp, Homo sapien
tggggcagctacttccttggcacaa

SEQ ID NO: 70018 - DNA, 25 bp, Homo sapien
tgggactgctcgatgcatctctcct

SEQ ID NO: 70019 - DNA, 25 bp, Homo sapien
caatgacatgagtaactgtacagac

SEQ ID NO: 70020 - DNA, 25 bp, Homo sapien
tctgtcaggtcctggaaagaagaag

SEQ ID NO: 70021 - DNA, 25 bp, Homo sapien
tggggcagctacttccttggcacaa

SEQ ID NO: 70022 - DNA, 25 bp, Homo sapien
tcttccaacaatgacgcggagaagg

SEQ ID NO: 70023 - DNA, 25 bp, Homo sapien
tgggactgctcgatgcatctctcct

SEQ ID NO: 70024 - DNA, 25 bp, Homo sapien
gaagaagtaataaatgaaaagcagc

SEQ ID NO: 70025 - DNA, 25 bp, Homo sapien
tctgtcaggtcctggaaagaagaag

SEQ ID NO: 70026 - DNA, 25 bp, Homo sapien
ttgcaggtgctaagtttggacataa

SEQ ID NO: 70027 - DNA, 25 bp, Homo sapien
atgtgtgtgcgctcgcagacgcaca

SEQ ID NO: 70028 - DNA, 25 bp, Homo sapien
agaacatggagcaaccgcaactcct

SEQ ID NO: 70029 - DNA, 25 bp, Homo sapien
attgccctaagtcagaacatggagc

SEQ ID NO: 70030 - DNA, 25 bp, Homo sapien
ctgtacagacagaccccaagtgcag

SEQ ID NO: 70031 - DNA, 25 bp, Homo sapien
caatgacatgagtaactgtacagac

SEQ ID NO: 70032 - DNA, 25 bp, Homo sapien
tggggcagctacttccttggcacaa

SEQ ID NO: 70033 - DNA, 25 bp, Homo sapien
tcttccaacaatgacgcggagaagg

SEQ ID NO: 70034 - DNA, 25 bp, Homo sapien
tgggactgctcgatgcatctctcct

SEQ ID NO: 70035 - DNA, 25 bp, Homo sapien
gaagaagtaataaatgaaaagcagc

SEQ ID NO: 70036 - DNA, 25 bp, Homo sapien
tctgtcaggtcctggaaagaagaag

SEQ ID NO: 70037 - DNA, 25 bp, Homo sapien
ttgcaggtgctaagtttggacataa

SEQ ID NO: 70038 - DNA, 25 bp, Homo sapien
atgtgtgtgcgctcgcagacgcaca

SEQ ID NO: 70039 - DNA, 25 bp, Homo sapien
agaacatggagcaaccgcaactcct

SEQ ID NO: 70040 - DNA, 25 bp, Homo sapien
attgccctaagtcagaacatggagc

SEQ ID NO: 70041 - DNA, 25 bp, Homo sapien
ctgtacagacagaccccaagtgcag

SEQ ID NO: 70042 - DNA, 25 bp, Homo sapien
caatgacatgagtaactgtacagac

SEQ ID NO: 70043 - DNA, 25 bp, Homo sapien
agaacatggagcaaccgcaactcct

SEQ ID NO: 70044 - DNA, 25 bp, Homo sapien
caatgacatgagtaactgtacagac

SEQ ID NO: 70045 - DNA, 25 bp, Homo sapien
atgtgtgtgcgctcgcagacgcaca

SEQ ID NO: 70046 - DNA, 25 bp, Homo sapien
tggggcagctacttccttggcacaa

SEQ ID NO: 70047 - DNA, 25 bp, Homo sapien
attgccctaagtcagaacatggagc

SEQ ID NO: 70048 - DNA, 25 bp, Homo sapien
tctgtcaggtcctggaaagaagaag

SEQ ID NO: 70049 - DNA, 25 bp, Homo sapien
tgggactgctcgatgcatctctcct

SEQ ID NO: 70050 - DNA, 25 bp, Homo sapien
ctgtacagacagaccccaagtgcag

SEQ ID NO: 70051 - DNA, 25 bp, Homo sapien
gaagaagtaataaatgaaaagcagc

SEQ ID NO: 70052 - DNA, 25 bp, Homo sapien
tcttccaacaatgacgcggagaagg

SEQ ID NO: 70053 - DNA, 25 bp, Homo sapien
ttgcaggtgctaagtttggacataa

SEQ ID NO: 70054 - DNA, 25 bp, Homo sapien
tggggcagctacttccttggcacaa

SEQ ID NO: 70055 - DNA, 25 bp, Homo sapien
tcttccaacaatgacgcggagaagg

SEQ ID NO: 70056 - DNA, 25 bp, Homo sapien
tgggactgctcgatgcatctctcct

SEQ ID NO: 70057 - DNA, 25 bp, Homo sapien
gaagaagtaataaatgaaaagcagc

SEQ ID NO: 70058 - DNA, 25 bp, Homo sapien
tctgtcaggtcctggaaagaagaag

SEQ ID NO: 70059 - DNA, 25 bp, Homo sapien
ttgcaggtgctaagtttggacataa

SEQ ID NO: 70060 - DNA, 25 bp, Homo sapien
atgtgtgtgcgctcgcagacgcaca

SEQ ID NO: 70061 - DNA, 25 bp, Homo sapien
agaacatggagcaaccgcaactcct

SEQ ID NO: 70062 - DNA, 25 bp, Homo sapien
attgccctaagtcagaacatggagc

SEQ ID NO: 70063 - DNA, 25 bp, Homo sapien
ctgtacagacagaccccaagtgcag

SEQ ID NO: 70064 - DNA, 25 bp, Homo sapien
caatgacatgagtaactgtacagac

SEQ ID NO: 70065 - DNA, 25 bp, Homo sapien
caatgacatgagtaactgtacagac

SEQ ID NO: 70066 - DNA, 25 bp, Homo sapien
ttgcaggtgctaagtttggacataa

SEQ ID NO: 70067 - DNA, 25 bp, Homo sapien
tgggactgctcgatgcatctctcct

SEQ ID NO: 70068 - DNA, 25 bp, Homo sapien
gaagaagtaataaatgaaaagcagc

SEQ ID NO: 70069 - DNA, 25 bp, Homo sapien
ctgtacagacagaccccaagtgcag

SEQ ID NO: 70070 - DNA, 25 bp, Homo sapien
tcttccaacaatgacgcggagaagg

SEQ ID NO: 70071 - DNA, 25 bp, Homo sapien
atgtgtgtgcgctcgcagacgcaca

SEQ ID NO: 70072 - DNA, 25 bp, Homo sapien
attgccctaagtcagaacatggagc

SEQ ID NO: 70073 - DNA, 25 bp, Homo sapien
tggggcagctacttccttggcacaa

SEQ ID NO: 70074 - DNA, 25 bp, Homo sapien
agaacatggagcaaccgcaactcct

SEQ ID NO: 70075 - DNA, 25 bp, Homo sapien
tctgtcaggtcctggaaagaagaag

SEQ ID NO: 70076 - DNA, 25 bp, Homo sapien
tggggcagctacttccttggcacaa

SEQ ID NO: 70077 - DNA, 25 bp, Homo sapien
tcttccaacaatgacgcggagaagg

SEQ ID NO: 70078 - DNA, 25 bp, Homo sapien
tgggactgctcgatgcatctctcct

SEQ ID NO: 70079 - DNA, 25 bp, Homo sapien
gaagaagtaataaatgaaaagcagc

SEQ ID NO: 70080 - DNA, 25 bp, Homo sapien
tctgtcaggtcctggaaagaagaag

SEQ ID NO: 70081 - DNA, 25 bp, Homo sapien
ttgcaggtgctaagtttggacataa

SEQ ID NO: 70082 - DNA, 25 bp, Homo sapien
atgtgtgtgcgctcgcagacgcaca

SEQ ID NO: 70083 - DNA, 25 bp, Homo sapien
agaacatggagcaaccgcaactcct

SEQ ID NO: 70084 - DNA, 25 bp, Homo sapien
attgccctaagtcagaacatggagc

SEQ ID NO: 70085 - DNA, 25 bp, Homo sapien
ctgtacagacagaccccaagtgcag

SEQ ID NO: 70086 - DNA, 25 bp, Homo sapien
caatgacatgagtaactgtacagac

SEQ ID NO: 70087 - DNA, 25 bp, Homo sapien
gaagaagtaataaatgaaaagcagc

SEQ ID NO: 70088 - DNA, 25 bp, Homo sapien
tggggcagctacttccttggcacaa

SEQ ID NO: 70089 - DNA, 25 bp, Homo sapien
attgccctaagtcagaacatggagc

SEQ ID NO: 70090 - DNA, 25 bp, Homo sapien
caatgacatgagtaactgtacagac

SEQ ID NO: 70091 - DNA, 25 bp, Homo sapien
atgtgtgtgcgctcgcagacgcaca

SEQ ID NO: 70092 - DNA, 25 bp, Homo sapien
ttgcaggtgctaagtttggacataa

SEQ ID NO: 70093 - DNA, 25 bp, Homo sapien
ctgtacagacagaccccaagtgcag

SEQ ID NO: 70094 - DNA, 25 bp, Homo sapien
tctgtcaggtcctggaaagaagaag

SEQ ID NO: 70095 - DNA, 25 bp, Homo sapien
tcttccaacaatgacgcggagaagg

SEQ ID NO: 70096 - DNA, 25 bp, Homo sapien
tgggactgctcgatgcatctctcct

SEQ ID NO: 70097 - DNA, 25 bp, Homo sapien
agaacatggagcaaccgcaactcct

SEQ ID NO: 70098 - DNA, 25 bp, Homo sapien
tggggcagctacttccttggcacaa

SEQ ID NO: 70099 - DNA, 25 bp, Homo sapien
tcttccaacaatgacgcggagaagg

SEQ ID NO: 70100 - DNA, 25 bp, Homo sapien
tgggactgctcgatgcatctctcct

SEQ ID NO: 70101 - DNA, 25 bp, Homo sapien
gaagaagtaataaatgaaaagcagc

SEQ ID NO: 70102 - DNA, 25 bp, Homo sapien
tctgtcaggtcctggaaagaagaag

SEQ ID NO: 70103 - DNA, 25 bp, Homo sapien
ttgcaggtgctaagtttggacataa

SEQ ID NO: 70104 - DNA, 25 bp, Homo sapien
atgtgtgtgcgctcgcagacgcaca

SEQ ID NO: 70105 - DNA, 25 bp, Homo sapien
agaacatggagcaaccgcaactcct

SEQ ID NO: 70106 - DNA, 25 bp, Homo sapien
attgccctaagtcagaacatggagc

SEQ ID NO: 70107 - DNA, 25 bp, Homo sapien
ctgtacagacagaccccaagtgcag

SEQ ID NO: 70108 - DNA, 25 bp, Homo sapien
caatgacatgagtaactgtacagac

SEQ ID NO: 70109 - DNA, 25 bp, Homo sapien
atgtgtgtgcgctcgcagacgcaca

SEQ ID NO: 70110 - DNA, 25 bp, Homo sapien
tctgtcaggtcctggaaagaagaag

SEQ ID NO: 70111 - DNA, 25 bp, Homo sapien
ctgtacagacagaccccaagtgcag

SEQ ID NO: 70112 - DNA, 25 bp, Homo sapien
tgggactgctcgatgcatctctcct

SEQ ID NO: 70113 - DNA, 25 bp, Homo sapien
tcttccaacaatgacgcggagaagg

SEQ ID NO: 70114 - DNA, 25 bp, Homo sapien
ttgcaggtgctaagtttggacataa

SEQ ID NO: 70115 - DNA, 25 bp, Homo sapien
tggggcagctacttccttggcacaa

SEQ ID NO: 70116 - DNA, 25 bp, Homo sapien
agaacatggagcaaccgcaactcct

SEQ ID NO: 70117 - DNA, 25 bp, Homo sapien
gaagaagtaataaatgaaaagcagc

SEQ ID NO: 70118 - DNA, 25 bp, Homo sapien
caatgacatgagtaactgtacagac

SEQ ID NO: 70119 - DNA, 25 bp, Homo sapien
attgccctaagtcagaacatggagc

SEQ ID NO: 70120 - DNA, 25 bp, Homo sapien
tggggcagctacttccttggcacaa

SEQ ID NO: 70121 - DNA, 25 bp, Homo sapien
tcttccaacaatgacgcggagaagg

SEQ ID NO: 70122 - DNA, 25 bp, Homo sapien
tgggactgctcgatgcatctctcct

SEQ ID NO: 70123 - DNA, 25 bp, Homo sapien
gaagaagtaataaatgaaaagcagc

SEQ ID NO: 70124 - DNA, 25 bp, Homo sapien
tctgtcaggtcctggaaagaagaag

SEQ ID NO: 70125 - DNA, 25 bp, Homo sapien
ttgcaggtgctaagtttggacataa

SEQ ID NO: 70126 - DNA, 25 bp, Homo sapien
atgtgtgtgcgctcgcagacgcaca

SEQ ID NO: 70127 - DNA, 25 bp, Homo sapien
agaacatggagcaaccgcaactcct

SEQ ID NO: 70128 - DNA, 25 bp, Homo sapien
attgccctaagtcagaacatggagc

SEQ ID NO: 70129 - DNA, 25 bp, Homo sapien
ctgtacagacagaccccaagtgcag

SEQ ID NO: 70130 - DNA, 25 bp, Homo sapien
caatgacatgagtaactgtacagac

SEQ ID NO: 70131 - DNA, 25 bp, Homo sapien
gaagaagtaataaatgaaaagcagc

SEQ ID NO: 70132 - DNA, 25 bp, Homo sapien
atgtgtgtgcgctcgcagacgcaca

SEQ ID NO: 70133 - DNA, 25 bp, Homo sapien
caatgacatgagtaactgtacagac

SEQ ID NO: 70134 - DNA, 25 bp, Homo sapien
tggggcagctacttccttggcacaa

SEQ ID NO: 70135 - DNA, 25 bp, Homo sapien
ttgcaggtgctaagtttggacataa

SEQ ID NO: 70136 - DNA, 25 bp, Homo sapien
agaacatggagcaaccgcaactcct

SEQ ID NO: 70137 - DNA, 25 bp, Homo sapien
tgggactgctcgatgcatctctcct

SEQ ID NO: 70138 - DNA, 25 bp, Homo sapien
ctgtacagacagaccccaagtgcag

SEQ ID NO: 70139 - DNA, 25 bp, Homo sapien
tctgtcaggtcctggaaagaagaag

SEQ ID NO: 70140 - DNA, 25 bp, Homo sapien
tcttccaacaatgacgcggagaagg

SEQ ID NO: 70141 - DNA, 25 bp, Homo sapien
attgccctaagtcagaacatggagc

SEQ ID NO: 70142 - DNA, 25 bp, Homo sapien
agaacatggagcaaccgcaactcct

SEQ ID NO: 70143 - DNA, 25 bp, Homo sapien
ttgcaggtgctaagtttggacataa

SEQ ID NO: 70144 - DNA, 25 bp, Homo sapien
caatgacatgagtaactgtacagac

SEQ ID NO: 70145 - DNA, 25 bp, Homo sapien
tgggactgctcgatgcatctctcct

SEQ ID NO: 70146 - DNA, 25 bp, Homo sapien
tggggcagctacttccttggcacaa

SEQ ID NO: 70147 - DNA, 25 bp, Homo sapien
ctgtacagacagaccccaagtgcag

SEQ ID NO: 70148 - DNA, 25 bp, Homo sapien
atgtgtgtgcgctcgcagacgcaca

SEQ ID NO: 70149 - DNA, 25 bp, Homo sapien
attgccctaagtcagaacatggagc

SEQ ID NO: 70150 - DNA, 25 bp, Homo sapien
gaagaagtaataaatgaaaagcagc

SEQ ID NO: 70151 - DNA, 25 bp, Homo sapien
tctgtcaggtcctggaaagaagaag

SEQ ID NO: 70152 - DNA, 25 bp, Homo sapien
tcttccaacaatgacgcggagaagg

SEQ ID NO: 70153 - DNA, 25 bp, Homo sapien
tggggcagctacttccttggcacaa

SEQ ID NO: 70154 - DNA, 25 bp, Homo sapien
tcttccaacaatgacgcggagaagg

SEQ ID NO: 70155 - DNA, 25 bp, Homo sapien
tgggactgctcgatgcatctctcct

SEQ ID NO: 70156 - DNA, 25 bp, Homo sapien
gaagaagtaataaatgaaaagcagc

SEQ ID NO: 70157 - DNA, 25 bp, Homo sapien
tctgtcaggtcctggaaagaagaag

SEQ ID NO: 70158 - DNA, 25 bp, Homo sapien
ttgcaggtgctaagtttggacataa

SEQ ID NO: 70159 - DNA, 25 bp, Homo sapien
atgtgtgtgcgctcgcagacgcaca

SEQ ID NO: 70160 - DNA, 25 bp, Homo sapien
agaacatggagcaaccgcaactcct

SEQ ID NO: 70161 - DNA, 25 bp, Homo sapien
attgccctaagtcagaacatggagc

SEQ ID NO: 70162 - DNA, 25 bp, Homo sapien
ctgtacagacagaccccaagtgcag

SEQ ID NO: 70163 - DNA, 25 bp, Homo sapien
caatgacatgagtaactgtacagac

SEQ ID NO: 70164 - DNA, 25 bp, Homo sapien
caatgacatgagtaactgtacagac

SEQ ID NO: 70165 - DNA, 25 bp, Homo sapien
gaagaagtaataaatgaaaagcagc

SEQ ID NO: 70166 - DNA, 25 bp, Homo sapien
tggggcagctacttccttggcacaa

SEQ ID NO: 70167 - DNA, 25 bp, Homo sapien
ttgcaggtgctaagtttggacataa

SEQ ID NO: 70168 - DNA, 25 bp, Homo sapien
tctgtcaggtcctggaaagaagaag

SEQ ID NO: 70169 - DNA, 25 bp, Homo sapien
atgtgtgtgcgctcgcagacgcaca

SEQ ID NO: 70170 - DNA, 25 bp, Homo sapien
ctgtacagacagaccccaagtgcag

SEQ ID NO: 70171 - DNA, 25 bp, Homo sapien
agaacatggagcaaccgcaactcct

SEQ ID NO: 70172 - DNA, 25 bp, Homo sapien
attgccctaagtcagaacatggagc

SEQ ID NO: 70173 - DNA, 25 bp, Homo sapien
tgggactgctcgatgcatctctcct

SEQ ID NO: 70174 - DNA, 25 bp, Homo sapien
tcttccaacaatgacgcggagaagg

SEQ ID NO: 70175 - DNA, 25 bp, Homo sapien
tggggcagctacttccttggcacaa

SEQ ID NO: 70176 - DNA, 25 bp, Homo sapien
tcttccaacaatgacgcggagaagg

SEQ ID NO: 70177 - DNA, 25 bp, Homo sapien
tgggactgctcgatgcatctctcct

SEQ ID NO: 70178 - DNA, 25 bp, Homo sapien
gaagaagtaataaatgaaaagcagc

SEQ ID NO: 70179 - DNA, 25 bp, Homo sapien
tctgtcaggtcctggaaagaagaag

SEQ ID NO: 70180 - DNA, 25 bp, Homo sapien
ttgcaggtgctaagtttggacataa

SEQ ID NO: 70181 - DNA, 25 bp, Homo sapien
atgtgtgtgcgctcgcagacgcaca

SEQ ID NO: 70182 - DNA, 25 bp, Homo sapien
agaacatggagcaaccgcaactcct

SEQ ID NO: 70183 - DNA, 25 bp, Homo sapien
attgccctaagtcagaacatggagc

SEQ ID NO: 70184 - DNA, 25 bp, Homo sapien
ctgtacagacagaccccaagtgcag

SEQ ID NO: 70185 - DNA, 25 bp, Homo sapien
caatgacatgagtaactgtacagac

SEQ ID NO: 70186 - DNA, 25 bp, Homo sapien
atgtgtgtgcgctcgcagacgcaca

SEQ ID NO: 70187 - DNA, 25 bp, Homo sapien
ttgcaggtgctaagtttggacataa

SEQ ID NO: 70188 - DNA, 25 bp, Homo sapien
agaacatggagcaaccgcaactcct

SEQ ID NO: 70189 - DNA, 25 bp, Homo sapien
gaagaagtaataaatgaaaagcagc

SEQ ID NO: 70190 - DNA, 25 bp, Homo sapien
tcttccaacaatgacgcggagaagg

SEQ ID NO: 70191 - DNA, 25 bp, Homo sapien
attgccctaagtcagaacatggagc

SEQ ID NO: 70192 - DNA, 25 bp, Homo sapien
tggggcagctacttccttggcacaa

SEQ ID NO: 70193 - DNA, 25 bp, Homo sapien
tgggactgctcgatgcatctctcct

SEQ ID NO: 70194 - DNA, 25 bp, Homo sapien
caatgacatgagtaactgtacagac

SEQ ID NO: 70195 - DNA, 25 bp, Homo sapien
ctgtacagacagaccccaagtgcag

SEQ ID NO: 70196 - DNA, 25 bp, Homo sapien
tctgtcaggtcctggaaagaagaag

SEQ ID NO: 70197 - DNA, 25 bp, Homo sapien
tggggcagctacttccttggcacaa

SEQ ID NO: 70198 - DNA, 25 bp, Homo sapien
tcttccaacaatgacgcggagaagg

SEQ ID NO: 70199 - DNA, 25 bp, Homo sapien
tgggactgctcgatgcatctctcct

SEQ ID NO: 70200 - DNA, 25 bp, Homo sapien
gaagaagtaataaatgaaaagcagc

SEQ ID NO: 70201 - DNA, 25 bp, Homo sapien
tctgtcaggtcctggaaagaagaag

SEQ ID NO: 70202 - DNA, 25 bp, Homo sapien
ttgcaggtgctaagtttggacataa

SEQ ID NO: 70203 - DNA, 25 bp, Homo sapien
atgtgtgtgcgctcgcagacgcaca

SEQ ID NO: 70204 - DNA, 25 bp, Homo sapien
agaacatggagcaaccgcaactcct

SEQ ID NO: 70205 - DNA, 25 bp, Homo sapien
attgccctaagtcagaacatggagc

SEQ ID NO: 70206 - DNA, 25 bp, Homo sapien
ctgtacagacagaccccaagtgcag

SEQ ID NO: 70207 - DNA, 25 bp, Homo sapien
caatgacatgagtaactgtacagac

SEQ ID NO: 70208 - DNA, 25 bp, Homo sapien
agaacatggagcaaccgcaactcct

SEQ ID NO: 70209 - DNA, 25 bp, Homo sapien
gaagaagtaataaatgaaaagcagc

SEQ ID NO: 70210 - DNA, 25 bp, Homo sapien
tgggactgctcgatgcatctctcct

SEQ ID NO: 70211 - DNA, 25 bp, Homo sapien
atgtgtgtgcgctcgcagacgcaca

SEQ ID NO: 70212 - DNA, 25 bp, Homo sapien
tcttccaacaatgacgcggagaagg

SEQ ID NO: 70213 - DNA, 25 bp, Homo sapien
tctgtcaggtcctggaaagaagaag

SEQ ID NO: 70214 - DNA, 25 bp, Homo sapien
ttgcaggtgctaagtttggacataa

SEQ ID NO: 70215 - DNA, 25 bp, Homo sapien
tggggcagctacttccttggcacaa

SEQ ID NO: 70216 - DNA, 25 bp, Homo sapien
attgccctaagtcagaacatggagc

SEQ ID NO: 70217 - DNA, 25 bp, Homo sapien
ctgtacagacagaccccaagtgcag

SEQ ID NO: 70218 - DNA, 25 bp, Homo sapien
caatgacatgagtaactgtacagac

SEQ ID NO: 70219 - DNA, 25 bp, Homo sapien
tggggcagctacttccttggcacaa

SEQ ID NO: 70220 - DNA, 25 bp, Homo sapien
tcttccaacaatgacgcggagaagg

SEQ ID NO: 70221 - DNA, 25 bp, Homo sapien
tgggactgctcgatgcatctctcct

SEQ ID NO: 70222 - DNA, 25 bp, Homo sapien
gaagaagtaataaatgaaaagcagc

SEQ ID NO: 70223 - DNA, 25 bp, Homo sapien
tctgtcaggtcctggaaagaagaag

SEQ ID NO: 70224 - DNA, 25 bp, Homo sapien
ttgcaggtgctaagtttggacataa

SEQ ID NO: 70225 - DNA, 25 bp, Homo sapien
atgtgtgtgcgctcgcagacgcaca

SEQ ID NO: 70226 - DNA, 25 bp, Homo sapien
agaacatggagcaaccgcaactcct

SEQ ID NO: 70227 - DNA, 25 bp, Homo sapien
attgccctaagtcagaacatggagc

SEQ ID NO: 70228 - DNA, 25 bp, Homo sapien
ctgtacagacagaccccaagtgcag

SEQ ID NO: 70229 - DNA, 25 bp, Homo sapien
caatgacatgagtaactgtacagac

SEQ ID NO: 70230 - DNA, 25 bp, Homo sapien
tctgtcaggtcctggaaagaagaag

SEQ ID NO: 70231 - DNA, 25 bp, Homo sapien
tgggactgctcgatgcatctctcct

SEQ ID NO: 70232 - DNA, 25 bp, Homo sapien
ttgcaggtgctaagtttggacataa

SEQ ID NO: 70233 - DNA, 25 bp, Homo sapien
attgccctaagtcagaacatggagc

SEQ ID NO: 70234 - DNA, 25 bp, Homo sapien
ctgtacagacagaccccaagtgcag

SEQ ID NO: 70235 - DNA, 25 bp, Homo sapien
gaagaagtaataaatgaaaagcagc

SEQ ID NO: 70236 - DNA, 25 bp, Homo sapien
tggggcagctacttccttggcacaa

SEQ ID NO: 70237 - DNA, 25 bp, Homo sapien
agaacatggagcaaccgcaactcct

SEQ ID NO: 70238 - DNA, 25 bp, Homo sapien
caatgacatgagtaactgtacagac

SEQ ID NO: 70239 - DNA, 25 bp, Homo sapien
tcttccaacaatgacgcggagaagg

SEQ ID NO: 70240 - DNA, 25 bp, Homo sapien
atgtgtgtgcgctcgcagacgcaca

SEQ ID NO: 70241 - DNA, 25 bp, Homo sapien
tggggcagctacttccttggcacaa

SEQ ID NO: 70242 - DNA, 25 bp, Homo sapien
tcttccaacaatgacgcggagaagg

SEQ ID NO: 70243 - DNA, 25 bp, Homo sapien
tgggactgctcgatgcatctctcct

SEQ ID NO: 70244 - DNA, 25 bp, Homo sapien
gaagaagtaataaatgaaaagcagc

SEQ ID NO: 70245 - DNA, 25 bp, Homo sapien
tctgtcaggtcctggaaagaagaag

SEQ ID NO: 70246 - DNA, 25 bp, Homo sapien
ttgcaggtgctaagtttggacataa

SEQ ID NO: 70247 - DNA, 25 bp, Homo sapien
atgtgtgtgcgctcgcagacgcaca

SEQ ID NO: 70248 - DNA, 25 bp, Homo sapien
agaacatggagcaaccgcaactcct

SEQ ID NO: 70249 - DNA, 25 bp, Homo sapien
attgccctaagtcagaacatggagc

SEQ ID NO: 70250 - DNA, 25 bp, Homo sapien
ctgtacagacagaccccaagtgcag

SEQ ID NO: 70251 - DNA, 25 bp, Homo sapien
caatgacatgagtaactgtacagac

SEQ ID NO: 70252 - DNA, 25 bp, Homo sapien
tggggcagctacttccttggcacaa

SEQ ID NO: 70253 - DNA, 25 bp, Homo sapien
tctgtcaggtcctggaaagaagaag

SEQ ID NO: 70254 - DNA, 25 bp, Homo sapien
caatgacatgagtaactgtacagac

SEQ ID NO: 70255 - DNA, 25 bp, Homo sapien
tgggactgctcgatgcatctctcct

SEQ ID NO: 70256 - DNA, 25 bp, Homo sapien
ctgtacagacagaccccaagtgcag

SEQ ID NO: 70257 - DNA, 25 bp, Homo sapien
gaagaagtaataaatgaaaagcagc

SEQ ID NO: 70258 - DNA, 25 bp, Homo sapien
ttgcaggtgctaagtttggacataa

SEQ ID NO: 70259 - DNA, 25 bp, Homo sapien
attgccctaagtcagaacatggagc

SEQ ID NO: 70260 - DNA, 25 bp, Homo sapien
tcttccaacaatgacgcggagaagg

SEQ ID NO: 70261 - DNA, 25 bp, Homo sapien
agaacatggagcaaccgcaactcct

SEQ ID NO: 70262 - DNA, 25 bp, Homo sapien
atgtgtgtgcgctcgcagacgcaca

SEQ ID NO: 70263 - DNA, 25 bp, Homo sapien
tggggcagctacttccttggcacaa

SEQ ID NO: 70264 - DNA, 25 bp, Homo sapien
tcttccaacaatgacgcggagaagg

SEQ ID NO: 70265 - DNA, 25 bp, Homo sapien
tgggactgctcgatgcatctctcct

SEQ ID NO: 70266 - DNA, 25 bp, Homo sapien
gaagaagtaataaatgaaaagcagc

SEQ ID NO: 70267 - DNA, 25 bp, Homo sapien
tctgtcaggtcctggaaagaagaag

SEQ ID NO: 70268 - DNA, 25 bp, Homo sapien
ttgcaggtgctaagtttggacataa

SEQ ID NO: 70269 - DNA, 25 bp, Homo sapien
atgtgtgtgcgctcgcagacgcaca

SEQ ID NO: 70270 - DNA, 25 bp, Homo sapien
agaacatggagcaaccgcaactcct

SEQ ID NO: 70271 - DNA, 25 bp, Homo sapien
attgccctaagtcagaacatggagc

SEQ ID NO: 70272 - DNA, 25 bp, Homo sapien
ctgtacagacagaccccaagtgcag

SEQ ID NO: 70273 - DNA, 25 bp, Homo sapien
caatgacatgagtaactgtacagac

SEQ ID NO: 70274 - DNA, 25 bp, Homo sapien
tggggcagctacttccttggcacaa

SEQ ID NO: 70275 - DNA, 25 bp, Homo sapien
tcttccaacaatgacgcggagaagg

SEQ ID NO: 70276 - DNA, 25 bp, Homo sapien
tgggactgctcgatgcatctctcct

SEQ ID NO: 70277 - DNA, 25 bp, Homo sapien
gaagaagtaataaatgaaaagcagc

SEQ ID NO: 70278 - DNA, 25 bp, Homo sapien
tctgtcaggtcctggaaagaagaag

SEQ ID NO: 70279 - DNA, 25 bp, Homo sapien
ttgcaggtgctaagtttggacataa

SEQ ID NO: 70280 - DNA, 25 bp, Homo sapien
atgtgtgtgcgctcgcagacgcaca

SEQ ID NO: 70281 - DNA, 25 bp, Homo sapien
agaacatggagcaaccgcaactcct

SEQ ID NO: 70282 - DNA, 25 bp, Homo sapien
attgccctaagtcagaacatggagc

SEQ ID NO: 70283 - DNA, 25 bp, Homo sapien
ctgtacagacagaccccaagtgcag

SEQ ID NO: 70284 - DNA, 25 bp, Homo sapien
caatgacatgagtaactgtacagac

SEQ ID NO: 70285 - DNA, 25 bp, Homo sapien
tcttccaacaatgacgcggagaagg

SEQ ID NO: 70286 - DNA, 25 bp, Homo sapien
ctgtacagacagaccccaagtgcag

SEQ ID NO: 70287 - DNA, 25 bp, Homo sapien
ttgcaggtgctaagtttggacataa

SEQ ID NO: 70288 - DNA, 25 bp, Homo sapien
tctgtcaggtcctggaaagaagaag

SEQ ID NO: 70289 - DNA, 25 bp, Homo sapien
caatgacatgagtaactgtacagac

SEQ ID NO: 70290 - DNA, 25 bp, Homo sapien
gaagaagtaataaatgaaaagcagc

SEQ ID NO: 70291 - DNA, 25 bp, Homo sapien
atgtgtgtgcgctcgcagacgcaca

SEQ ID NO: 70292 - DNA, 25 bp, Homo sapien
tgggactgctcgatgcatctctcct

SEQ ID NO: 70293 - DNA, 25 bp, Homo sapien
agaacatggagcaaccgcaactcct

SEQ ID NO: 70294 - DNA, 25 bp, Homo sapien
tggggcagctacttccttggcacaa

SEQ ID NO: 70295 - DNA, 25 bp, Homo sapien
attgccctaagtcagaacatggagc

SEQ ID NO: 70296 - DNA, 25 bp, Homo sapien
tggggcagctacttccttggcacaa

SEQ ID NO: 70297 - DNA, 25 bp, Homo sapien
tcttccaacaatgacgcggagaagg

SEQ ID NO: 70298 - DNA, 25 bp, Homo sapien
tgggactgctcgatgcatctctcct

SEQ ID NO: 70299 - DNA, 25 bp, Homo sapien
gaagaagtaataaatgaaaagcagc

SEQ ID NO: 70300 - DNA, 25 bp, Homo sapien
tctgtcaggtcctggaaagaagaag

SEQ ID NO: 70301 - DNA, 25 bp, Homo sapien
ttgcaggtgctaagtttggacataa

SEQ ID NO: 70302 - DNA, 25 bp, Homo sapien
atgtgtgtgcgctcgcagacgcaca

SEQ ID NO: 70303 - DNA, 25 bp, Homo sapien
agaacatggagcaaccgcaactcct

SEQ ID NO: 70304 - DNA, 25 bp, Homo sapien
attgccctaagtcagaacatggagc

SEQ ID NO: 70305 - DNA, 25 bp, Homo sapien
ctgtacagacagaccccaagtgcag

SEQ ID NO: 70306 - DNA, 25 bp, Homo sapien
caatgacatgagtaactgtacagac

SEQ ID NO: 70307 - DNA, 25 bp, Homo sapien
tggggcagctacttccttggcacaa

SEQ ID NO: 70308 - DNA, 25 bp, Homo sapien
attgccctaagtcagaacatggagc

SEQ ID NO: 70309 - DNA, 25 bp, Homo sapien
tctgtcaggtcctggaaagaagaag

SEQ ID NO: 70310 - DNA, 25 bp, Homo sapien
atgtgtgtgcgctcgcagacgcaca

SEQ ID NO: 70311 - DNA, 25 bp, Homo sapien
gaagaagtaataaatgaaaagcagc

SEQ ID NO: 70312 - DNA, 25 bp, Homo sapien
tgggactgctcgatgcatctctcct

SEQ ID NO: 70313 - DNA, 25 bp, Homo sapien
tcttccaacaatgacgcggagaagg

SEQ ID NO: 70314 - DNA, 25 bp, Homo sapien
agaacatggagcaaccgcaactcct

SEQ ID NO: 70315 - DNA, 25 bp, Homo sapien
caatgacatgagtaactgtacagac

SEQ ID NO: 70316 - DNA, 25 bp, Homo sapien
ttgcaggtgctaagtttggacataa

SEQ ID NO: 70317 - DNA, 25 bp, Homo sapien
ctgtacagacagaccccaagtgcag

SEQ ID NO: 70318 - DNA, 25 bp, Homo sapien
tggggcagctacttccttggcacaa

SEQ ID NO: 70319 - DNA, 25 bp, Homo sapien
tcttccaacaatgacgcggagaagg

SEQ ID NO: 70320 - DNA, 25 bp, Homo sapien
tgggactgctcgatgcatctctcct

SEQ ID NO: 70321 - DNA, 25 bp, Homo sapien
gaagaagtaataaatgaaaagcagc

SEQ ID NO: 70322 - DNA, 25 bp, Homo sapien
tctgtcaggtcctggaaagaagaag

SEQ ID NO: 70323 - DNA, 25 bp, Homo sapien
ttgcaggtgctaagtttggacataa

SEQ ID NO: 70324 - DNA, 25 bp, Homo sapien
atgtgtgtgcgctcgcagacgcaca

SEQ ID NO: 70325 - DNA, 25 bp, Homo sapien
agaacatggagcaaccgcaactcct

SEQ ID NO: 70326 - DNA, 25 bp, Homo sapien
attgccctaagtcagaacatggagc

SEQ ID NO: 70327 - DNA, 25 bp, Homo sapien
ctgtacagacagaccccaagtgcag

SEQ ID NO: 70328 - DNA, 25 bp, Homo sapien
caatgacatgagtaactgtacagac

SEQ ID NO: 70329 - DNA, 25 bp, Homo sapien
ttgcaggtgctaagtttggacataa

SEQ ID NO: 70330 - DNA, 25 bp, Homo sapien
caatgacatgagtaactgtacagac

SEQ ID NO: 70331 - DNA, 25 bp, Homo sapien
gaagaagtaataaatgaaaagcagc

SEQ ID NO: 70332 - DNA, 25 bp, Homo sapien
tcttccaacaatgacgcggagaagg

SEQ ID NO: 70333 - DNA, 25 bp, Homo sapien
atgtgtgtgcgctcgcagacgcaca

SEQ ID NO: 70334 - DNA, 25 bp, Homo sapien
tctgtcaggtcctggaaagaagaag

SEQ ID NO: 70335 - DNA, 25 bp, Homo sapien
tgggactgctcgatgcatctctcct

SEQ ID NO: 70336 - DNA, 25 bp, Homo sapien
ctgtacagacagaccccaagtgcag

SEQ ID NO: 70337 - DNA, 25 bp, Homo sapien
agaacatggagcaaccgcaactcct

SEQ ID NO: 70338 - DNA, 25 bp, Homo sapien
tggggcagctacttccttggcacaa

SEQ ID NO: 70339 - DNA, 25 bp, Homo sapien
attgccctaagtcagaacatggagc

SEQ ID NO: 70340 - DNA, 25 bp, Homo sapien
tggggcagctacttccttggcacaa

SEQ ID NO: 70341 - DNA, 25 bp, Homo sapien
tcttccaacaatgacgcggagaagg

SEQ ID NO: 70342 - DNA, 25 bp, Homo sapien
tgggactgctcgatgcatctctcct

SEQ ID NO: 70343 - DNA, 25 bp, Homo sapien
gaagaagtaataaatgaaaagcagc

SEQ ID NO: 70344 - DNA, 25 bp, Homo sapien
tctgtcaggtcctggaaagaagaag

SEQ ID NO: 70345 - DNA, 25 bp, Homo sapien
ttgcaggtgctaagtttggacataa

SEQ ID NO: 70346 - DNA, 25 bp, Homo sapien
atgtgtgtgcgctcgcagacgcaca

SEQ ID NO: 70347 - DNA, 25 bp, Homo sapien
agaacatggagcaaccgcaactcct

SEQ ID NO: 70348 - DNA, 25 bp, Homo sapien
attgccctaagtcagaacatggagc

SEQ ID NO: 70349 - DNA, 25 bp, Homo sapien
ctgtacagacagaccccaagtgcag

SEQ ID NO: 70350 - DNA, 25 bp, Homo sapien
caatgacatgagtaactgtacagac

SEQ ID NO: 70351 - DNA, 25 bp, Homo sapien
tcttccaacaatgacgcggagaagg

SEQ ID NO: 70352 - DNA, 25 bp, Homo sapien
agaacatggagcaaccgcaactcct

SEQ ID NO: 70353 - DNA, 25 bp, Homo sapien
attgccctaagtcagaacatggagc

SEQ ID NO: 70354 - DNA, 25 bp, Homo sapien
caatgacatgagtaactgtacagac

SEQ ID NO: 70355 - DNA, 25 bp, Homo sapien
gaagaagtaataaatgaaaagcagc

SEQ ID NO: 70356 - DNA, 25 bp, Homo sapien
atgtgtgtgcgctcgcagacgcaca

SEQ ID NO: 70357 - DNA, 25 bp, Homo sapien
tggggcagctacttccttggcacaa

SEQ ID NO: 70358 - DNA, 25 bp, Homo sapien
ttgcaggtgctaagtttggacataa

SEQ ID NO: 70359 - DNA, 25 bp, Homo sapien
tctgtcaggtcctggaaagaagaag

SEQ ID NO: 70360 - DNA, 25 bp, Homo sapien
ctgtacagacagaccccaagtgcag

SEQ ID NO: 70361 - DNA, 25 bp, Homo sapien
tgggactgctcgatgcatctctcct

SEQ ID NO: 70362 - DNA, 25 bp, Homo sapien
tggggcagctacttccttggcacaa

SEQ ID NO: 70363 - DNA, 25 bp, Homo sapien
tcttccaacaatgacgcggagaagg

SEQ ID NO: 70364 - DNA, 25 bp, Homo sapien
tgggactgctcgatgcatctctcct

SEQ ID NO: 70365 - DNA, 25 bp, Homo sapien
gaagaagtaataaatgaaaagcagc

SEQ ID NO: 70366 - DNA, 25 bp, Homo sapien
tctgtcaggtcctggaaagaagaag

SEQ ID NO: 70367 - DNA, 25 bp, Homo sapien
ttgcaggtgctaagtttggacataa

SEQ ID NO: 70368 - DNA, 25 bp, Homo sapien
atgtgtgtgcgctcgcagacgcaca

SEQ ID NO: 70369 - DNA, 25 bp, Homo sapien
agaacatggagcaaccgcaactcct

SEQ ID NO: 70370 - DNA, 25 bp, Homo sapien
attgccctaagtcagaacatggagc

SEQ ID NO: 70371 - DNA, 25 bp, Homo sapien
ctgtacagacagaccccaagtgcag

SEQ ID NO: 70372 - DNA, 25 bp, Homo sapien
caatgacatgagtaactgtacagac

SEQ ID NO: 70373 - DNA, 25 bp, Homo sapien
ctgtacagacagaccccaagtgcag

SEQ ID NO: 70374 - DNA, 25 bp, Homo sapien
tctgtcaggtcctggaaagaagaag

SEQ ID NO: 70375 - DNA, 25 bp, Homo sapien
agaacatggagcaaccgcaactcct

SEQ ID NO: 70376 - DNA, 25 bp, Homo sapien
ttgcaggtgctaagtttggacataa

SEQ ID NO: 70377 - DNA, 25 bp, Homo sapien
tggggcagctacttccttggcacaa

SEQ ID NO: 70378 - DNA, 25 bp, Homo sapien
atgtgtgtgcgctcgcagacgcaca

SEQ ID NO: 70379 - DNA, 25 bp, Homo sapien
caatgacatgagtaactgtacagac

SEQ ID NO: 70380 - DNA, 25 bp, Homo sapien
tgggactgctcgatgcatctctcct

SEQ ID NO: 70381 - DNA, 25 bp, Homo sapien
attgccctaagtcagaacatggagc

SEQ ID NO: 70382 - DNA, 25 bp, Homo sapien
tcttccaacaatgacgcggagaagg

SEQ ID NO: 70383 - DNA, 25 bp, Homo sapien
gaagaagtaataaatgaaaagcagc

SEQ ID NO: 70384 - DNA, 25 bp, Homo sapien
tggggcagctacttccttggcacaa

SEQ ID NO: 70385 - DNA, 25 bp, Homo sapien
attgccctaagtcagaacatggagc

SEQ ID NO: 70386 - DNA, 25 bp, Homo sapien
ttgcaggtgctaagtttggacataa

SEQ ID NO: 70387 - DNA, 25 bp, Homo sapien
caatgacatgagtaactgtacagac

SEQ ID NO: 70388 - DNA, 25 bp, Homo sapien
atgtgtgtgcgctcgcagacgcaca

SEQ ID NO: 70389 - DNA, 25 bp, Homo sapien
gaagaagtaataaatgaaaagcagc

SEQ ID NO: 70390 - DNA, 25 bp, Homo sapien
tcttccaacaatgacgcggagaagg

SEQ ID NO: 70391 - DNA, 25 bp, Homo sapien
ctgtacagacagaccccaagtgcag

SEQ ID NO: 70392 - DNA, 25 bp, Homo sapien
tctgtcaggtcctggaaagaagaag

SEQ ID NO: 70393 - DNA, 25 bp, Homo sapien
tgggactgctcgatgcatctctcct

SEQ ID NO: 70394 - DNA, 25 bp, Homo sapien
agaacatggagcaaccgcaactcct

SEQ ID NO: 70395 - DNA, 25 bp, Homo sapien
tggggcagctacttccttggcacaa

SEQ ID NO: 70396 - DNA, 25 bp, Homo sapien
tcttccaacaatgacgcggagaagg

SEQ ID NO: 70397 - DNA, 25 bp, Homo sapien
tgggactgctcgatgcatctctcct

SEQ ID NO: 70398 - DNA, 25 bp, Homo sapien
gaagaagtaataaatgaaaagcagc

SEQ ID NO: 70399 - DNA, 25 bp, Homo sapien
tctgtcaggtcctggaaagaagaag

SEQ ID NO: 70400 - DNA, 25 bp, Homo sapien
ttgcaggtgctaagtttggacataa

SEQ ID NO: 70401 - DNA, 25 bp, Homo sapien
atgtgtgtgcgctcgcagacgcaca

SEQ ID NO: 70402 - DNA, 25 bp, Homo sapien
agaacatggagcaaccgcaactcct

SEQ ID NO: 70403 - DNA, 25 bp, Homo sapien
attgccctaagtcagaacatggagc

SEQ ID NO: 70404 - DNA, 25 bp, Homo sapien
ctgtacagacagaccccaagtgcag

SEQ ID NO: 70405 - DNA, 25 bp, Homo sapien
caatgacatgagtaactgtacagac

SEQ ID NO: 70406 - DNA, 25 bp, Homo sapien
ctgtacagacagaccccaagtgcag

SEQ ID NO: 70407 - DNA, 25 bp, Homo sapien
tctgtcaggtcctggaaagaagaag

SEQ ID NO: 70408 - DNA, 25 bp, Homo sapien
tgggactgctcgatgcatctctcct

SEQ ID NO: 70409 - DNA, 25 bp, Homo sapien
attgccctaagtcagaacatggagc

SEQ ID NO: 70410 - DNA, 25 bp, Homo sapien
caatgacatgagtaactgtacagac

SEQ ID NO: 70411 - DNA, 25 bp, Homo sapien
ttgcaggtgctaagtttggacataa

SEQ ID NO: 70412 - DNA, 25 bp, Homo sapien
agaacatggagcaaccgcaactcct

SEQ ID NO: 70413 - DNA, 25 bp, Homo sapien
tggggcagctacttccttggcacaa

SEQ ID NO: 70414 - DNA, 25 bp, Homo sapien
atgtgtgtgcgctcgcagacgcaca

SEQ ID NO: 70415 - DNA, 25 bp, Homo sapien
tcttccaacaatgacgcggagaagg

SEQ ID NO: 70416 - DNA, 25 bp, Homo sapien
gaagaagtaataaatgaaaagcagc

SEQ ID NO: 70417 - DNA, 25 bp, Homo sapien
tggggcagctacttccttggcacaa

SEQ ID NO: 70418 - DNA, 25 bp, Homo sapien
tcttccaacaatgacgcggagaagg

SEQ ID NO: 70419 - DNA, 25 bp, Homo sapien
tgggactgctcgatgcatctctcct

SEQ ID NO: 70420 - DNA, 25 bp, Homo sapien
gaagaagtaataaatgaaaagcagc

SEQ ID NO: 70421 - DNA, 25 bp, Homo sapien
tctgtcaggtcctggaaagaagaag

SEQ ID NO: 70422 - DNA, 25 bp, Homo sapien
ttgcaggtgctaagtttggacataa

SEQ ID NO: 70423 - DNA, 25 bp, Homo sapien
atgtgtgtgcgctcgcagacgcaca

SEQ ID NO: 70424 - DNA, 25 bp, Homo sapien
agaacatggagcaaccgcaactcct

SEQ ID NO: 70425 - DNA, 25 bp, Homo sapien
attgccctaagtcagaacatggagc

SEQ ID NO: 70426 - DNA, 25 bp, Homo sapien
ctgtacagacagaccccaagtgcag

SEQ ID NO: 70427 - DNA, 25 bp, Homo sapien
caatgacatgagtaactgtacagac

SEQ ID NO: 70428 - DNA, 25 bp, Homo sapien
tcttccaacaatgacgcggagaagg

SEQ ID NO: 70429 - DNA, 25 bp, Homo sapien
ttgcaggtgctaagtttggacataa

SEQ ID NO: 70430 - DNA, 25 bp, Homo sapien
gaagaagtaataaatgaaaagcagc

SEQ ID NO: 70431 - DNA, 25 bp, Homo sapien
ctgtacagacagaccccaagtgcag

SEQ ID NO: 70432 - DNA, 25 bp, Homo sapien
tggggcagctacttccttggcacaa

SEQ ID NO: 70433 - DNA, 25 bp, Homo sapien
tctgtcaggtcctggaaagaagaag

SEQ ID NO: 70434 - DNA, 25 bp, Homo sapien
atgtgtgtgcgctcgcagacgcaca

SEQ ID NO: 70435 - DNA, 25 bp, Homo sapien
agaacatggagcaaccgcaactcct

SEQ ID NO: 70436 - DNA, 25 bp, Homo sapien
tgggactgctcgatgcatctctcct

SEQ ID NO: 70437 - DNA, 25 bp, Homo sapien
attgccctaagtcagaacatggagc

SEQ ID NO: 70438 - DNA, 25 bp, Homo sapien
caatgacatgagtaactgtacagac

SEQ ID NO: 70439 - DNA, 25 bp, Homo sapien
tggggcagctacttccttggcacaa

SEQ ID NO: 70440 - DNA, 25 bp, Homo sapien
tcttccaacaatgacgcggagaagg

SEQ ID NO: 70441 - DNA, 25 bp, Homo sapien
tgggactgctcgatgcatctctcct

SEQ ID NO: 70442 - DNA, 25 bp, Homo sapien
gaagaagtaataaatgaaaagcagc

SEQ ID NO: 70443 - DNA, 25 bp, Homo sapien
tctgtcaggtcctggaaagaagaag

SEQ ID NO: 70444 - DNA, 25 bp, Homo sapien
ttgcaggtgctaagtttggacataa

SEQ ID NO: 70445 - DNA, 25 bp, Homo sapien
atgtgtgtgcgctcgcagacgcaca

SEQ ID NO: 70446 - DNA, 25 bp, Homo sapien
agaacatggagcaaccgcaactcct

SEQ ID NO: 70447 - DNA, 25 bp, Homo sapien
attgccctaagtcagaacatggagc

SEQ ID NO: 70448 - DNA, 25 bp, Homo sapien
ctgtacagacagaccccaagtgcag

SEQ ID NO: 70449 - DNA, 25 bp, Homo sapien
caatgacatgagtaactgtacagac

SEQ ID NO: 70450 - DNA, 25 bp, Homo sapien
gtgtcggaggactttcgccggacca

SEQ ID NO: 70451 - DNA, 25 bp, Homo sapien
tggtccggcgaaagtcctccgacac

SEQ ID NO: 70452 - DNA, 25 bp, Homo sapien
cttggtcttagacctgcgggcctca

SEQ ID NO: 70453 - DNA, 25 bp, Homo sapien
gcccatgtgcctgcccttccggcgg

SEQ ID NO: 70454 - DNA, 25 bp, Homo sapien
ttttccggcatcgagcccgggaatg

SEQ ID NO: 70455 - DNA, 25 bp, Homo sapien
gcagccggcgcaaaatcctcattct

SEQ ID NO: 70456 - DNA, 25 bp, Homo sapien
attcgggcattggctgtacccttcc

SEQ ID NO: 70457 - DNA, 25 bp, Homo sapien
cggtatcttctgagcagccggcgca

SEQ ID NO: 70458 - DNA, 25 bp, Homo sapien
gtgatacatgtggcgatcgatcttc

SEQ ID NO: 70459 - DNA, 25 bp, Homo sapien
gggagttggcattggcgatttcatt

SEQ ID NO: 70460 - DNA, 25 bp, Homo sapien
gaggccagtatgtacagacaaagtg

SEQ ID NO: 70461 - DNA, 25 bp, Homo sapien
gaccgtcacaggcttgcggatgatc

SEQ ID NO: 70462 - DNA, 25 bp, Homo sapien
ggaggcgctcttcacggcgcttgcg

SEQ ID NO: 70463 - DNA, 25 bp, Homo sapien
gaccgtcacaggcttgcggatgatc

SEQ ID NO: 70464 - DNA, 25 bp, Homo sapien
ttttccggcatcgagcccgggaatg

SEQ ID NO: 70465 - DNA, 25 bp, Homo sapien
gcccatgtgcctgcccttccggcgg

SEQ ID NO: 70466 - DNA, 25 bp, Homo sapien
attcgggcattggctgtacccttcc

SEQ ID NO: 70467 - DNA, 25 bp, Homo sapien
gcagccggcgcaaaatcctcattct

SEQ ID NO: 70468 - DNA, 25 bp, Homo sapien
cggtatcttctgagcagccggcgca

SEQ ID NO: 70469 - DNA, 25 bp, Homo sapien
gtgatacatgtggcgatcgatcttc

SEQ ID NO: 70470 - DNA, 25 bp, Homo sapien
cttggtcttagacctgcgggcctca

SEQ ID NO: 70471 - DNA, 25 bp, Homo sapien
ggaggcgctcttcacggcgcttgcg

SEQ ID NO: 70472 - DNA, 25 bp, Homo sapien
gaggccagtatgtacagacaaagtg

SEQ ID NO: 70473 - DNA, 25 bp, Homo sapien
gggagttggcattggcgatttcatt

SEQ ID NO: 70474 - DNA, 25 bp, Homo sapien
gcccatgtgcctgcccttccggcgg

SEQ ID NO: 70475 - DNA, 25 bp, Homo sapien
gaccgtcacaggcttgcggatgatc

SEQ ID NO: 70476 - DNA, 25 bp, Homo sapien
cttggtcttagacctgcgggcctca

SEQ ID NO: 70477 - DNA, 25 bp, Homo sapien
gggagttggcattggcgatttcatt

SEQ ID NO: 70478 - DNA, 25 bp, Homo sapien
attcgggcattggctgtacccttcc

SEQ ID NO: 70479 - DNA, 25 bp, Homo sapien
gcagccggcgcaaaatcctcattct

SEQ ID NO: 70480 - DNA, 25 bp, Homo sapien
gtgatacatgtggcgatcgatcttc

SEQ ID NO: 70481 - DNA, 25 bp, Homo sapien
gaggccagtatgtacagacaaagtg

SEQ ID NO: 70482 - DNA, 25 bp, Homo sapien
ggaggcgctcttcacggcgcttgcg

SEQ ID NO: 70483 - DNA, 25 bp, Homo sapien
ttttccggcatcgagcccgggaatg

SEQ ID NO: 70484 - DNA, 25 bp, Homo sapien
cggtatcttctgagcagccggcgca

SEQ ID NO: 70485 - DNA, 25 bp, Homo sapien
gggagttggcattggcgatttcatt

SEQ ID NO: 70486 - DNA, 25 bp, Homo sapien
gaccgtcacaggcttgcggatgatc

SEQ ID NO: 70487 - DNA, 25 bp, Homo sapien
ttttccggcatcgagcccgggaatg

SEQ ID NO: 70488 - DNA, 25 bp, Homo sapien
gcccatgtgcctgcccttccggcgg

SEQ ID NO: 70489 - DNA, 25 bp, Homo sapien
attcgggcattggctgtacccttcc

SEQ ID NO: 70490 - DNA, 25 bp, Homo sapien
gcagccggcgcaaaatcctcattct

SEQ ID NO: 70491 - DNA, 25 bp, Homo sapien
cggtatcttctgagcagccggcgca

SEQ ID NO: 70492 - DNA, 25 bp, Homo sapien
gtgatacatgtggcgatcgatcttc

SEQ ID NO: 70493 - DNA, 25 bp, Homo sapien
cttggtcttagacctgcgggcctca

SEQ ID NO: 70494 - DNA, 25 bp, Homo sapien
ggaggcgctcttcacggcgcttgcg

SEQ ID NO: 70495 - DNA, 25 bp, Homo sapien
gaggccagtatgtacagacaaagtg

SEQ ID NO: 70496 - DNA, 25 bp, Homo sapien
cggtatcttctgagcagccggcgca

SEQ ID NO: 70497 - DNA, 25 bp, Homo sapien
gggagttggcattggcgatttcatt

SEQ ID NO: 70498 - DNA, 25 bp, Homo sapien
gcagccggcgcaaaatcctcattct

SEQ ID NO: 70499 - DNA, 25 bp, Homo sapien
cttggtcttagacctgcgggcctca

SEQ ID NO: 70500 - DNA, 25 bp, Homo sapien
gaggccagtatgtacagacaaagtg

SEQ ID NO: 70501 - DNA, 25 bp, Homo sapien
ttttccggcatcgagcccgggaatg

SEQ ID NO: 70502 - DNA, 25 bp, Homo sapien
attcgggcattggctgtacccttcc

SEQ ID NO: 70503 - DNA, 25 bp, Homo sapien
gtgatacatgtggcgatcgatcttc

SEQ ID NO: 70504 - DNA, 25 bp, Homo sapien
gcccatgtgcctgcccttccggcgg

SEQ ID NO: 70505 - DNA, 25 bp, Homo sapien
ggaggcgctcttcacggcgcttgcg

SEQ ID NO: 70506 - DNA, 25 bp, Homo sapien
gaccgtcacaggcttgcggatgatc

SEQ ID NO: 70507 - DNA, 25 bp, Homo sapien
gaccgtcacaggcttgcggatgatc

SEQ ID NO: 70508 - DNA, 25 bp, Homo sapien
ttttccggcatcgagcccgggaatg

SEQ ID NO: 70509 - DNA, 25 bp, Homo sapien
gcccatgtgcctgcccttccggcgg

SEQ ID NO: 70510 - DNA, 25 bp, Homo sapien
attcgggcattggctgtacccttcc

SEQ ID NO: 70511 - DNA, 25 bp, Homo sapien
gcagccggcgcaaaatcctcattct

SEQ ID NO: 70512 - DNA, 25 bp, Homo sapien
cggtatcttctgagcagccggcgca

SEQ ID NO: 70513 - DNA, 25 bp, Homo sapien
gtgatacatgtggcgatcgatcttc

SEQ ID NO: 70514 - DNA, 25 bp, Homo sapien
cttggtcttagacctgcgggcctca

SEQ ID NO: 70515 - DNA, 25 bp, Homo sapien
ggaggcgctcttcacggcgcttgcg

SEQ ID NO: 70516 - DNA, 25 bp, Homo sapien
gaggccagtatgtacagacaaagtg

SEQ ID NO: 70517 - DNA, 25 bp, Homo sapien
gggagttggcattggcgatttcatt

SEQ ID NO: 70518 - DNA, 25 bp, Homo sapien
gaccgtcacaggcttgcggatgatc

SEQ ID NO: 70519 - DNA, 25 bp, Homo sapien
ttttccggcatcgagcccgggaatg

SEQ ID NO: 70520 - DNA, 25 bp, Homo sapien
gcccatgtgcctgcccttccggcgg

SEQ ID NO: 70521 - DNA, 25 bp, Homo sapien
attcgggcattggctgtacccttcc

SEQ ID NO: 70522 - DNA, 25 bp, Homo sapien
gcagccggcgcaaaatcctcattct

SEQ ID NO: 70523 - DNA, 25 bp, Homo sapien
cggtatcttctgagcagccggcgca

SEQ ID NO: 70524 - DNA, 25 bp, Homo sapien
gtgatacatgtggcgatcgatcttc

SEQ ID NO: 70525 - DNA, 25 bp, Homo sapien
cttggtcttagacctgcgggcctca

SEQ ID NO: 70526 - DNA, 25 bp, Homo sapien
ggaggcgctcttcacggcgcttgcg

SEQ ID NO: 70527 - DNA, 25 bp, Homo sapien
gaggccagtatgtacagacaaagtg

SEQ ID NO: 70528 - DNA, 25 bp, Homo sapien
gggagttggcattggcgatttcatt

SEQ ID NO: 70529 - DNA, 25 bp, Homo sapien
cttggtcttagacctgcgggcctca

SEQ ID NO: 70530 - DNA, 25 bp, Homo sapien
gcccatgtgcctgcccttccggcgg

SEQ ID NO: 70531 - DNA, 25 bp, Homo sapien
gtgatacatgtggcgatcgatcttc

SEQ ID NO: 70532 - DNA, 25 bp, Homo sapien
gggagttggcattggcgatttcatt

SEQ ID NO: 70533 - DNA, 25 bp, Homo sapien
gcagccggcgcaaaatcctcattct

SEQ ID NO: 70534 - DNA, 25 bp, Homo sapien
gaccgtcacaggcttgcggatgatc

SEQ ID NO: 70535 - DNA, 25 bp, Homo sapien
ggaggcgctcttcacggcgcttgcg

SEQ ID NO: 70536 - DNA, 25 bp, Homo sapien
ttttccggcatcgagcccgggaatg

SEQ ID NO: 70537 - DNA, 25 bp, Homo sapien
gaggccagtatgtacagacaaagtg

SEQ ID NO: 70538 - DNA, 25 bp, Homo sapien
attcgggcattggctgtacccttcc

SEQ ID NO: 70539 - DNA, 25 bp, Homo sapien
cggtatcttctgagcagccggcgca

SEQ ID NO: 70540 - DNA, 25 bp, Homo sapien
gaccgtcacaggcttgcggatgatc

SEQ ID NO: 70541 - DNA, 25 bp, Homo sapien
ttttccggcatcgagcccgggaatg

SEQ ID NO: 70542 - DNA, 25 bp, Homo sapien
gcccatgtgcctgcccttccggcgg

SEQ ID NO: 70543 - DNA, 25 bp, Homo sapien
attcgggcattggctgtacccttcc

SEQ ID NO: 70544 - DNA, 25 bp, Homo sapien
gcagccggcgcaaaatcctcattct

SEQ ID NO: 70545 - DNA, 25 bp, Homo sapien
cggtatcttctgagcagccggcgca

SEQ ID NO: 70546 - DNA, 25 bp, Homo sapien
gtgatacatgtggcgatcgatcttc

SEQ ID NO: 70547 - DNA, 25 bp, Homo sapien
cttggtcttagacctgcgggcctca

SEQ ID NO: 70548 - DNA, 25 bp, Homo sapien
ggaggcgctcttcacggcgcttgcg

SEQ ID NO: 70549 - DNA, 25 bp, Homo sapien
gaggccagtatgtacagacaaagtg

SEQ ID NO: 70550 - DNA, 25 bp, Homo sapien
gggagttggcattggcgatttcatt

SEQ ID NO: 70551 - DNA, 25 bp, Homo sapien
cttggtcttagacctgcgggcctca

SEQ ID NO: 70552 - DNA, 25 bp, Homo sapien
attcgggcattggctgtacccttcc

SEQ ID NO: 70553 - DNA, 25 bp, Homo sapien
cggtatcttctgagcagccggcgca

SEQ ID NO: 70554 - DNA, 25 bp, Homo sapien
gcagccggcgcaaaatcctcattct

SEQ ID NO: 70555 - DNA, 25 bp, Homo sapien
ttttccggcatcgagcccgggaatg

SEQ ID NO: 70556 - DNA, 25 bp, Homo sapien
gaccgtcacaggcttgcggatgatc

SEQ ID NO: 70557 - DNA, 25 bp, Homo sapien
ggaggcgctcttcacggcgcttgcg

SEQ ID NO: 70558 - DNA, 25 bp, Homo sapien
gggagttggcattggcgatttcatt

SEQ ID NO: 70559 - DNA, 25 bp, Homo sapien
gaggccagtatgtacagacaaagtg

SEQ ID NO: 70560 - DNA, 25 bp, Homo sapien
gtgatacatgtggcgatcgatcttc

SEQ ID NO: 70561 - DNA, 25 bp, Homo sapien
gcccatgtgcctgcccttccggcgg

SEQ ID NO: 70562 - DNA, 25 bp, Homo sapien
gaccgtcacaggcttgcggatgatc

SEQ ID NO: 70563 - DNA, 25 bp, Homo sapien
ttttccggcatcgagcccgggaatg

SEQ ID NO: 70564 - DNA, 25 bp, Homo sapien
gcccatgtgcctgcccttccggcgg

SEQ ID NO: 70565 - DNA, 25 bp, Homo sapien
attcgggcattggctgtacccttcc

SEQ ID NO: 70566 - DNA, 25 bp, Homo sapien
gcagccggcgcaaaatcctcattct

SEQ ID NO: 70567 - DNA, 25 bp, Homo sapien
cggtatcttctgagcagccggcgca

SEQ ID NO: 70568 - DNA, 25 bp, Homo sapien
gtgatacatgtggcgatcgatcttc

SEQ ID NO: 70569 - DNA, 25 bp, Homo sapien
cttggtcttagacctgcgggcctca

SEQ ID NO: 70570 - DNA, 25 bp, Homo sapien
ggaggcgctcttcacggcgcttgcg

SEQ ID NO: 70571 - DNA, 25 bp, Homo sapien
gaggccagtatgtacagacaaagtg

SEQ ID NO: 70572 - DNA, 25 bp, Homo sapien
gggagttggcattggcgatttcatt

SEQ ID NO: 70573 - DNA, 25 bp, Homo sapien
ggaggcgctcttcacggcgcttgcg

SEQ ID NO: 70574 - DNA, 25 bp, Homo sapien
gtgatacatgtggcgatcgatcttc

SEQ ID NO: 70575 - DNA, 25 bp, Homo sapien
gcagccggcgcaaaatcctcattct

SEQ ID NO: 70576 - DNA, 25 bp, Homo sapien
cttggtcttagacctgcgggcctca

SEQ ID NO: 70577 - DNA, 25 bp, Homo sapien
gggagttggcattggcgatttcatt

SEQ ID NO: 70578 - DNA, 25 bp, Homo sapien
gcccatgtgcctgcccttccggcgg

SEQ ID NO: 70579 - DNA, 25 bp, Homo sapien
cggtatcttctgagcagccggcgca

SEQ ID NO: 70580 - DNA, 25 bp, Homo sapien
gaccgtcacaggcttgcggatgatc

SEQ ID NO: 70581 - DNA, 25 bp, Homo sapien
ttttccggcatcgagcccgggaatg

SEQ ID NO: 70582 - DNA, 25 bp, Homo sapien
attcgggcattggctgtacccttcc

SEQ ID NO: 70583 - DNA, 25 bp, Homo sapien
gaggccagtatgtacagacaaagtg

SEQ ID NO: 70584 - DNA, 25 bp, Homo sapien
gaccgtcacaggcttgcggatgatc

SEQ ID NO: 70585 - DNA, 25 bp, Homo sapien
ttttccggcatcgagcccgggaatg

SEQ ID NO: 70586 - DNA, 25 bp, Homo sapien
gcccatgtgcctgcccttccggcgg

SEQ ID NO: 70587 - DNA, 25 bp, Homo sapien
attcgggcattggctgtacccttcc

SEQ ID NO: 70588 - DNA, 25 bp, Homo sapien
gcagccggcgcaaaatcctcattct

SEQ ID NO: 70589 - DNA, 25 bp, Homo sapien
cggtatcttctgagcagccggcgca

SEQ ID NO: 70590 - DNA, 25 bp, Homo sapien
gtgatacatgtggcgatcgatcttc

SEQ ID NO: 70591 - DNA, 25 bp, Homo sapien
cttggtcttagacctgcgggcctca

SEQ ID NO: 70592 - DNA, 25 bp, Homo sapien
ggaggcgctcttcacggcgcttgcg

SEQ ID NO: 70593 - DNA, 25 bp, Homo sapien
gaggccagtatgtacagacaaagtg

SEQ ID NO: 70594 - DNA, 25 bp, Homo sapien
gggagttggcattggcgatttcatt

SEQ ID NO: 70595 - DNA, 25 bp, Homo sapien
ttttccggcatcgagcccgggaatg

SEQ ID NO: 70596 - DNA, 25 bp, Homo sapien
gcagccggcgcaaaatcctcattct

SEQ ID NO: 70597 - DNA, 25 bp, Homo sapien
ggaggcgctcttcacggcgcttgcg

SEQ ID NO: 70598 - DNA, 25 bp, Homo sapien
gcccatgtgcctgcccttccggcgg

SEQ ID NO: 70599 - DNA, 25 bp, Homo sapien
gaccgtcacaggcttgcggatgatc

SEQ ID NO: 70600 - DNA, 25 bp, Homo sapien
cttggtcttagacctgcgggcctca

SEQ ID NO: 70601 - DNA, 25 bp, Homo sapien
gtgatacatgtggcgatcgatcttc

SEQ ID NO: 70602 - DNA, 25 bp, Homo sapien
cggtatcttctgagcagccggcgca

SEQ ID NO: 70603 - DNA, 25 bp, Homo sapien
gggagttggcattggcgatttcatt

SEQ ID NO: 70604 - DNA, 25 bp, Homo sapien
attcgggcattggctgtacccttcc

SEQ ID NO: 70605 - DNA, 25 bp, Homo sapien
gaggccagtatgtacagacaaagtg

SEQ ID NO: 70606 - DNA, 25 bp, Homo sapien
gaccgtcacaggcttgcggatgatc

SEQ ID NO: 70607 - DNA, 25 bp, Homo sapien
ttttccggcatcgagcccgggaatg

SEQ ID NO: 70608 - DNA, 25 bp, Homo sapien
gcccatgtgcctgcccttccggcgg

SEQ ID NO: 70609 - DNA, 25 bp, Homo sapien
attcgggcattggctgtacccttcc

SEQ ID NO: 70610 - DNA, 25 bp, Homo sapien
gcagccggcgcaaaatcctcattct

SEQ ID NO: 70611 - DNA, 25 bp, Homo sapien
cggtatcttctgagcagccggcgca

SEQ ID NO: 70612 - DNA, 25 bp, Homo sapien
gtgatacatgtggcgatcgatcttc

SEQ ID NO: 70613 - DNA, 25 bp, Homo sapien
cttggtcttagacctgcgggcctca

SEQ ID NO: 70614 - DNA, 25 bp, Homo sapien
ggaggcgctcttcacggcgcttgcg

SEQ ID NO: 70615 - DNA, 25 bp, Homo sapien
gaggccagtatgtacagacaaagtg

SEQ ID NO: 70616 - DNA, 25 bp, Homo sapien
gggagttggcattggcgatttcatt

SEQ ID NO: 70617 - DNA, 25 bp, Homo sapien
gggagttggcattggcgatttcatt

SEQ ID NO: 70618 - DNA, 25 bp, Homo sapien
cttggtcttagacctgcgggcctca

SEQ ID NO: 70619 - DNA, 25 bp, Homo sapien
gcccatgtgcctgcccttccggcgg

SEQ ID NO: 70620 - DNA, 25 bp, Homo sapien
gaggccagtatgtacagacaaagtg

SEQ ID NO: 70621 - DNA, 25 bp, Homo sapien
ggaggcgctcttcacggcgcttgcg

SEQ ID NO: 70622 - DNA, 25 bp, Homo sapien
attcgggcattggctgtacccttcc

SEQ ID NO: 70623 - DNA, 25 bp, Homo sapien
gtgatacatgtggcgatcgatcttc

SEQ ID NO: 70624 - DNA, 25 bp, Homo sapien
gaccgtcacaggcttgcggatgatc

SEQ ID NO: 70625 - DNA, 25 bp, Homo sapien
cggtatcttctgagcagccggcgca

SEQ ID NO: 70626 - DNA, 25 bp, Homo sapien
ttttccggcatcgagcccgggaatg

SEQ ID NO: 70627 - DNA, 25 bp, Homo sapien
gcagccggcgcaaaatcctcattct

SEQ ID NO: 70628 - DNA, 25 bp, Homo sapien
gcccatgtgcctgcccttccggcgg

SEQ ID NO: 70629 - DNA, 25 bp, Homo sapien
cggtatcttctgagcagccggcgca

SEQ ID NO: 70630 - DNA, 25 bp, Homo sapien
gggagttggcattggcgatttcatt

SEQ ID NO: 70631 - DNA, 25 bp, Homo sapien
cttggtcttagacctgcgggcctca

SEQ ID NO: 70632 - DNA, 25 bp, Homo sapien
gaccgtcacaggcttgcggatgatc

SEQ ID NO: 70633 - DNA, 25 bp, Homo sapien
gtgatacatgtggcgatcgatcttc

SEQ ID NO: 70634 - DNA, 25 bp, Homo sapien
gcagccggcgcaaaatcctcattct

SEQ ID NO: 70635 - DNA, 25 bp, Homo sapien
ttttccggcatcgagcccgggaatg

SEQ ID NO: 70636 - DNA, 25 bp, Homo sapien
gaggccagtatgtacagacaaagtg

SEQ ID NO: 70637 - DNA, 25 bp, Homo sapien
ggaggcgctcttcacggcgcttgcg

SEQ ID NO: 70638 - DNA, 25 bp, Homo sapien
attcgggcattggctgtacccttcc

SEQ ID NO: 70639 - DNA, 25 bp, Homo sapien
gaccgtcacaggcttgcggatgatc

SEQ ID NO: 70640 - DNA, 25 bp, Homo sapien
ttttccggcatcgagcccgggaatg

SEQ ID NO: 70641 - DNA, 25 bp, Homo sapien
gcccatgtgcctgcccttccggcgg

SEQ ID NO: 70642 - DNA, 25 bp, Homo sapien
attcgggcattggctgtacccttcc

SEQ ID NO: 70643 - DNA, 25 bp, Homo sapien
gcagccggcgcaaaatcctcattct

SEQ ID NO: 70644 - DNA, 25 bp, Homo sapien
cggtatcttctgagcagccggcgca

SEQ ID NO: 70645 - DNA, 25 bp, Homo sapien
gtgatacatgtggcgatcgatcttc

SEQ ID NO: 70646 - DNA, 25 bp, Homo sapien
cttggtcttagacctgcgggcctca

SEQ ID NO: 70647 - DNA, 25 bp, Homo sapien
ggaggcgctcttcacggcgcttgcg

SEQ ID NO: 70648 - DNA, 25 bp, Homo sapien
gaggccagtatgtacagacaaagtg

SEQ ID NO: 70649 - DNA, 25 bp, Homo sapien
gggagttggcattggcgatttcatt

SEQ ID NO: 70650 - DNA, 25 bp, Homo sapien
ttttccggcatcgagcccgggaatg

SEQ ID NO: 70651 - DNA, 25 bp, Homo sapien
cttggtcttagacctgcgggcctca

SEQ ID NO: 70652 - DNA, 25 bp, Homo sapien
cggtatcttctgagcagccggcgca

SEQ ID NO: 70653 - DNA, 25 bp, Homo sapien
gaccgtcacaggcttgcggatgatc

SEQ ID NO: 70654 - DNA, 25 bp, Homo sapien
gcccatgtgcctgcccttccggcgg

SEQ ID NO: 70655 - DNA, 25 bp, Homo sapien
gcagccggcgcaaaatcctcattct

SEQ ID NO: 70656 - DNA, 25 bp, Homo sapien
gaggccagtatgtacagacaaagtg

SEQ ID NO: 70657 - DNA, 25 bp, Homo sapien
ggaggcgctcttcacggcgcttgcg

SEQ ID NO: 70658 - DNA, 25 bp, Homo sapien
gggagttggcattggcgatttcatt

SEQ ID NO: 70659 - DNA, 25 bp, Homo sapien
attcgggcattggctgtacccttcc

SEQ ID NO: 70660 - DNA, 25 bp, Homo sapien
gtgatacatgtggcgatcgatcttc

SEQ ID NO: 70661 - DNA, 25 bp, Homo sapien
gaccgtcacaggcttgcggatgatc

SEQ ID NO: 70662 - DNA, 25 bp, Homo sapien
ttttccggcatcgagcccgggaatg

SEQ ID NO: 70663 - DNA, 25 bp, Homo sapien
gcccatgtgcctgcccttccggcgg

SEQ ID NO: 70664 - DNA, 25 bp, Homo sapien
attcgggcattggctgtacccttcc

SEQ ID NO: 70665 - DNA, 25 bp, Homo sapien
gcagccggcgcaaaatcctcattct

SEQ ID NO: 70666 - DNA, 25 bp, Homo sapien
cggtatcttctgagcagccggcgca

SEQ ID NO: 70667 - DNA, 25 bp, Homo sapien
gtgatacatgtggcgatcgatcttc

SEQ ID NO: 70668 - DNA, 25 bp, Homo sapien
cttggtcttagacctgcgggcctca

SEQ ID NO: 70669 - DNA, 25 bp, Homo sapien
ggaggcgctcttcacggcgcttgcg

SEQ ID NO: 70670 - DNA, 25 bp, Homo sapien
gaggccagtatgtacagacaaagtg

SEQ ID NO: 70671 - DNA, 25 bp, Homo sapien
gggagttggcattggcgatttcatt

SEQ ID NO: 70672 - DNA, 25 bp, Homo sapien
gtgatacatgtggcgatcgatcttc

SEQ ID NO: 70673 - DNA, 25 bp, Homo sapien
cttggtcttagacctgcgggcctca

SEQ ID NO: 70674 - DNA, 25 bp, Homo sapien
gaggccagtatgtacagacaaagtg

SEQ ID NO: 70675 - DNA, 25 bp, Homo sapien
attcgggcattggctgtacccttcc

SEQ ID NO: 70676 - DNA, 25 bp, Homo sapien
gcccatgtgcctgcccttccggcgg

SEQ ID NO: 70677 - DNA, 25 bp, Homo sapien
gaccgtcacaggcttgcggatgatc

SEQ ID NO: 70678 - DNA, 25 bp, Homo sapien
cggtatcttctgagcagccggcgca

SEQ ID NO: 70679 - DNA, 25 bp, Homo sapien
gcagccggcgcaaaatcctcattct

SEQ ID NO: 70680 - DNA, 25 bp, Homo sapien
ttttccggcatcgagcccgggaatg

SEQ ID NO: 70681 - DNA, 25 bp, Homo sapien
ggaggcgctcttcacggcgcttgcg

SEQ ID NO: 70682 - DNA, 25 bp, Homo sapien
gggagttggcattggcgatttcatt

SEQ ID NO: 70683 - DNA, 25 bp, Homo sapien
gaccgtcacaggcttgcggatgatc

SEQ ID NO: 70684 - DNA, 25 bp, Homo sapien
ttttccggcatcgagcccgggaatg

SEQ ID NO: 70685 - DNA, 25 bp, Homo sapien
gcccatgtgcctgcccttccggcgg

SEQ ID NO: 70686 - DNA, 25 bp, Homo sapien
attcgggcattggctgtacccttcc

SEQ ID NO: 70687 - DNA, 25 bp, Homo sapien
gcagccggcgcaaaatcctcattct

SEQ ID NO: 70688 - DNA, 25 bp, Homo sapien
cggtatcttctgagcagccggcgca

SEQ ID NO: 70689 - DNA, 25 bp, Homo sapien
gtgatacatgtggcgatcgatcttc

SEQ ID NO: 70690 - DNA, 25 bp, Homo sapien
cttggtcttagacctgcgggcctca

SEQ ID NO: 70691 - DNA, 25 bp, Homo sapien
ggaggcgctcttcacggcgcttgcg

SEQ ID NO: 70692 - DNA, 25 bp, Homo sapien
gaggccagtatgtacagacaaagtg

SEQ ID NO: 70693 - DNA, 25 bp, Homo sapien
gggagttggcattggcgatttcatt

SEQ ID NO: 70694 - DNA, 25 bp, Homo sapien
gcagccggcgcaaaatcctcattct

SEQ ID NO: 70695 - DNA, 25 bp, Homo sapien
cggtatcttctgagcagccggcgca

SEQ ID NO: 70696 - DNA, 25 bp, Homo sapien
attcgggcattggctgtacccttcc

SEQ ID NO: 70697 - DNA, 25 bp, Homo sapien
gcccatgtgcctgcccttccggcgg

SEQ ID NO: 70698 - DNA, 25 bp, Homo sapien
gggagttggcattggcgatttcatt

SEQ ID NO: 70699 - DNA, 25 bp, Homo sapien
ggaggcgctcttcacggcgcttgcg

SEQ ID NO: 70700 - DNA, 25 bp, Homo sapien
gaggccagtatgtacagacaaagtg

SEQ ID NO: 70701 - DNA, 25 bp, Homo sapien
gtgatacatgtggcgatcgatcttc

SEQ ID NO: 70702 - DNA, 25 bp, Homo sapien
ttttccggcatcgagcccgggaatg

SEQ ID NO: 70703 - DNA, 25 bp, Homo sapien
cttggtcttagacctgcgggcctca

SEQ ID NO: 70704 - DNA, 25 bp, Homo sapien
gaccgtcacaggcttgcggatgatc

SEQ ID NO: 70705 - DNA, 25 bp, Homo sapien
gaccgtcacaggcttgcggatgatc

SEQ ID NO: 70706 - DNA, 25 bp, Homo sapien
ttttccggcatcgagcccgggaatg

SEQ ID NO: 70707 - DNA, 25 bp, Homo sapien
gcccatgtgcctgcccttccggcgg

SEQ ID NO: 70708 - DNA, 25 bp, Homo sapien
attcgggcattggctgtacccttcc

SEQ ID NO: 70709 - DNA, 25 bp, Homo sapien
gcagccggcgcaaaatcctcattct

SEQ ID NO: 70710 - DNA, 25 bp, Homo sapien
cggtatcttctgagcagccggcgca

SEQ ID NO: 70711 - DNA, 25 bp, Homo sapien
gtgatacatgtggcgatcgatcttc

SEQ ID NO: 70712 - DNA, 25 bp, Homo sapien
cttggtcttagacctgcgggcctca

SEQ ID NO: 70713 - DNA, 25 bp, Homo sapien
ggaggcgctcttcacggcgcttgcg

SEQ ID NO: 70714 - DNA, 25 bp, Homo sapien
gaggccagtatgtacagacaaagtg

SEQ ID NO: 70715 - DNA, 25 bp, Homo sapien
gggagttggcattggcgatttcatt

SEQ ID NO: 70716 - DNA, 25 bp, Homo sapien
gaggccagtatgtacagacaaagtg

SEQ ID NO: 70717 - DNA, 25 bp, Homo sapien
cttggtcttagacctgcgggcctca

SEQ ID NO: 70718 - DNA, 25 bp, Homo sapien
gtgatacatgtggcgatcgatcttc

SEQ ID NO: 70719 - DNA, 25 bp, Homo sapien
ggaggcgctcttcacggcgcttgcg

SEQ ID NO: 70720 - DNA, 25 bp, Homo sapien
gcccatgtgcctgcccttccggcgg

SEQ ID NO: 70721 - DNA, 25 bp, Homo sapien
cggtatcttctgagcagccggcgca

SEQ ID NO: 70722 - DNA, 25 bp, Homo sapien
gcagccggcgcaaaatcctcattct

SEQ ID NO: 70723 - DNA, 25 bp, Homo sapien
gggagttggcattggcgatttcatt

SEQ ID NO: 70724 - DNA, 25 bp, Homo sapien
attcgggcattggctgtacccttcc

SEQ ID NO: 70725 - DNA, 25 bp, Homo sapien
gaccgtcacaggcttgcggatgatc

SEQ ID NO: 70726 - DNA, 25 bp, Homo sapien
ttttccggcatcgagcccgggaatg

SEQ ID NO: 70727 - DNA, 25 bp, Homo sapien
gaccgtcacaggcttgcggatgatc

SEQ ID NO: 70728 - DNA, 25 bp, Homo sapien
ttttccggcatcgagcccgggaatg

SEQ ID NO: 70729 - DNA, 25 bp, Homo sapien
gcccatgtgcctgcccttccggcgg

SEQ ID NO: 70730 - DNA, 25 bp, Homo sapien
attcgggcattggctgtacccttcc

SEQ ID NO: 70731 - DNA, 25 bp, Homo sapien
gcagccggcgcaaaatcctcattct

SEQ ID NO: 70732 - DNA, 25 bp, Homo sapien
cggtatcttctgagcagccggcgca

SEQ ID NO: 70733 - DNA, 25 bp, Homo sapien
gtgatacatgtggcgatcgatcttc

SEQ ID NO: 70734 - DNA, 25 bp, Homo sapien
cttggtcttagacctgcgggcctca

SEQ ID NO: 70735 - DNA, 25 bp, Homo sapien
ggaggcgctcttcacggcgcttgcg

SEQ ID NO: 70736 - DNA, 25 bp, Homo sapien
gaggccagtatgtacagacaaagtg

SEQ ID NO: 70737 - DNA, 25 bp, Homo sapien
gggagttggcattggcgatttcatt

SEQ ID NO: 70738 - DNA, 25 bp, Homo sapien
cttggtcttagacctgcgggcctca

SEQ ID NO: 70739 - DNA, 25 bp, Homo sapien
gtgatacatgtggcgatcgatcttc

SEQ ID NO: 70740 - DNA, 25 bp, Homo sapien
cggtatcttctgagcagccggcgca

SEQ ID NO: 70741 - DNA, 25 bp, Homo sapien
gggagttggcattggcgatttcatt

SEQ ID NO: 70742 - DNA, 25 bp, Homo sapien
ttttccggcatcgagcccgggaatg

SEQ ID NO: 70743 - DNA, 25 bp, Homo sapien
gaccgtcacaggcttgcggatgatc

SEQ ID NO: 70744 - DNA, 25 bp, Homo sapien
gcccatgtgcctgcccttccggcgg

SEQ ID NO: 70745 - DNA, 25 bp, Homo sapien
attcgggcattggctgtacccttcc

SEQ ID NO: 70746 - DNA, 25 bp, Homo sapien
ggaggcgctcttcacggcgcttgcg

SEQ ID NO: 70747 - DNA, 25 bp, Homo sapien
gcagccggcgcaaaatcctcattct

SEQ ID NO: 70748 - DNA, 25 bp, Homo sapien
gaggccagtatgtacagacaaagtg

SEQ ID NO: 70749 - DNA, 25 bp, Homo sapien
gaccgtcacaggcttgcggatgatc

SEQ ID NO: 70750 - DNA, 25 bp, Homo sapien
ttttccggcatcgagcccgggaatg

SEQ ID NO: 70751 - DNA, 25 bp, Homo sapien
gcccatgtgcctgcccttccggcgg

SEQ ID NO: 70752 - DNA, 25 bp, Homo sapien
attcgggcattggctgtacccttcc

SEQ ID NO: 70753 - DNA, 25 bp, Homo sapien
gcagccggcgcaaaatcctcattct

SEQ ID NO: 70754 - DNA, 25 bp, Homo sapien
cggtatcttctgagcagccggcgca

SEQ ID NO: 70755 - DNA, 25 bp, Homo sapien
gtgatacatgtggcgatcgatcttc

SEQ ID NO: 70756 - DNA, 25 bp, Homo sapien
cttggtcttagacctgcgggcctca

SEQ ID NO: 70757 - DNA, 25 bp, Homo sapien
ggaggcgctcttcacggcgcttgcg

SEQ ID NO: 70758 - DNA, 25 bp, Homo sapien
gaggccagtatgtacagacaaagtg

SEQ ID NO: 70759 - DNA, 25 bp, Homo sapien
gggagttggcattggcgatttcatt

SEQ ID NO: 70760 - DNA, 25 bp, Homo sapien
gaccgtcacaggcttgcggatgatc

SEQ ID NO: 70761 - DNA, 25 bp, Homo sapien
ttttccggcatcgagcccgggaatg

SEQ ID NO: 70762 - DNA, 25 bp, Homo sapien
gcccatgtgcctgcccttccggcgg

SEQ ID NO: 70763 - DNA, 25 bp, Homo sapien
attcgggcattggctgtacccttcc

SEQ ID NO: 70764 - DNA, 25 bp, Homo sapien
gcagccggcgcaaaatcctcattct

SEQ ID NO: 70765 - DNA, 25 bp, Homo sapien
cggtatcttctgagcagccggcgca

SEQ ID NO: 70766 - DNA, 25 bp, Homo sapien
gtgatacatgtggcgatcgatcttc

SEQ ID NO: 70767 - DNA, 25 bp, Homo sapien
cttggtcttagacctgcgggcctca

SEQ ID NO: 70768 - DNA, 25 bp, Homo sapien
ggaggcgctcttcacggcgcttgcg

SEQ ID NO: 70769 - DNA, 25 bp, Homo sapien
gaggccagtatgtacagacaaagtg

SEQ ID NO: 70770 - DNA, 25 bp, Homo sapien
gggagttggcattggcgatttcatt

SEQ ID NO: 70771 - DNA, 25 bp, Homo sapien
gaggccagtatgtacagacaaagtg

SEQ ID NO: 70772 - DNA, 25 bp, Homo sapien
gcagccggcgcaaaatcctcattct

SEQ ID NO: 70773 - DNA, 25 bp, Homo sapien
ggaggcgctcttcacggcgcttgcg

SEQ ID NO: 70774 - DNA, 25 bp, Homo sapien
cggtatcttctgagcagccggcgca

SEQ ID NO: 70775 - DNA, 25 bp, Homo sapien
gtgatacatgtggcgatcgatcttc

SEQ ID NO: 70776 - DNA, 25 bp, Homo sapien
gaccgtcacaggcttgcggatgatc

SEQ ID NO: 70777 - DNA, 25 bp, Homo sapien
ttttccggcatcgagcccgggaatg

SEQ ID NO: 70778 - DNA, 25 bp, Homo sapien
gggagttggcattggcgatttcatt

SEQ ID NO: 70779 - DNA, 25 bp, Homo sapien
cttggtcttagacctgcgggcctca

SEQ ID NO: 70780 - DNA, 25 bp, Homo sapien
gcccatgtgcctgcccttccggcgg

SEQ ID NO: 70781 - DNA, 25 bp, Homo sapien
attcgggcattggctgtacccttcc

SEQ ID NO: 70782 - DNA, 25 bp, Homo sapien
gaggccagtatgtacagacaaagtg

SEQ ID NO: 70783 - DNA, 25 bp, Homo sapien
gcagccggcgcaaaatcctcattct

SEQ ID NO: 70784 - DNA, 25 bp, Homo sapien
ggaggcgctcttcacggcgcttgcg

SEQ ID NO: 70785 - DNA, 25 bp, Homo sapien
gtgatacatgtggcgatcgatcttc

SEQ ID NO: 70786 - DNA, 25 bp, Homo sapien
gaccgtcacaggcttgcggatgatc

SEQ ID NO: 70787 - DNA, 25 bp, Homo sapien
ttttccggcatcgagcccgggaatg

SEQ ID NO: 70788 - DNA, 25 bp, Homo sapien
gggagttggcattggcgatttcatt

SEQ ID NO: 70789 - DNA, 25 bp, Homo sapien
cttggtcttagacctgcgggcctca

SEQ ID NO: 70790 - DNA, 25 bp, Homo sapien
gcccatgtgcctgcccttccggcgg

SEQ ID NO: 70791 - DNA, 25 bp, Homo sapien
attcgggcattggctgtacccttcc

SEQ ID NO: 70792 - DNA, 25 bp, Homo sapien
cggtatcttctgagcagccggcgca

SEQ ID NO: 70793 - DNA, 25 bp, Homo sapien
gcagccggcgcaaaatcctcattct

SEQ ID NO: 70794 - DNA, 25 bp, Homo sapien
ggaggcgctcttcacggcgcttgcg

SEQ ID NO: 70795 - DNA, 25 bp, Homo sapien
gtgatacatgtggcgatcgatcttc

SEQ ID NO: 70796 - DNA, 25 bp, Homo sapien
gaccgtcacaggcttgcggatgatc

SEQ ID NO: 70797 - DNA, 25 bp, Homo sapien
ttttccggcatcgagcccgggaatg

SEQ ID NO: 70798 - DNA, 25 bp, Homo sapien
cggtatcttctgagcagccggcgca

SEQ ID NO: 70799 - DNA, 25 bp, Homo sapien
gggagttggcattggcgatttcatt

SEQ ID NO: 70800 - DNA, 25 bp, Homo sapien
cttggtcttagacctgcgggcctca

SEQ ID NO: 70801 - DNA, 25 bp, Homo sapien
gcccatgtgcctgcccttccggcgg

SEQ ID NO: 70802 - DNA, 25 bp, Homo sapien
attcgggcattggctgtacccttcc

SEQ ID NO: 70803 - DNA, 25 bp, Homo sapien
gaggccagtatgtacagacaaagtg

SEQ ID NO: 70804 - DNA, 25 bp, Homo sapien
gaggccagtatgtacagacaaagtg

SEQ ID NO: 70805 - DNA, 25 bp, Homo sapien
gcagccggcgcaaaatcctcattct

SEQ ID NO: 70806 - DNA, 25 bp, Homo sapien
cggtatcttctgagcagccggcgca

SEQ ID NO: 70807 - DNA, 25 bp, Homo sapien
ggaggcgctcttcacggcgcttgcg

SEQ ID NO: 70808 - DNA, 25 bp, Homo sapien
gtgatacatgtggcgatcgatcttc

SEQ ID NO: 70809 - DNA, 25 bp, Homo sapien
gaccgtcacaggcttgcggatgatc

SEQ ID NO: 70810 - DNA, 25 bp, Homo sapien
ttttccggcatcgagcccgggaatg

SEQ ID NO: 70811 - DNA, 25 bp, Homo sapien
gggagttggcattggcgatttcatt

SEQ ID NO: 70812 - DNA, 25 bp, Homo sapien
cttggtcttagacctgcgggcctca

SEQ ID NO: 70813 - DNA, 25 bp, Homo sapien
gcccatgtgcctgcccttccggcgg

SEQ ID NO: 70814 - DNA, 25 bp, Homo sapien
attcgggcattggctgtacccttcc

SEQ ID NO: 70815 - DNA, 25 bp, Homo sapien
gaggccagtatgtacagacaaagtg

SEQ ID NO: 70816 - DNA, 25 bp, Homo sapien
gcagccggcgcaaaatcctcattct

SEQ ID NO: 70817 - DNA, 25 bp, Homo sapien
ggaggcgctcttcacggcgcttgcg

SEQ ID NO: 70818 - DNA, 25 bp, Homo sapien
gaccgtcacaggcttgcggatgatc

SEQ ID NO: 70819 - DNA, 25 bp, Homo sapien
cggtatcttctgagcagccggcgca

SEQ ID NO: 70820 - DNA, 25 bp, Homo sapien
gtgatacatgtggcgatcgatcttc

SEQ ID NO: 70821 - DNA, 25 bp, Homo sapien
ttttccggcatcgagcccgggaatg

SEQ ID NO: 70822 - DNA, 25 bp, Homo sapien
gggagttggcattggcgatttcatt

SEQ ID NO: 70823 - DNA, 25 bp, Homo sapien
cttggtcttagacctgcgggcctca

SEQ ID NO: 70824 - DNA, 25 bp, Homo sapien
gcccatgtgcctgcccttccggcgg

SEQ ID NO: 70825 - DNA, 25 bp, Homo sapien
attcgggcattggctgtacccttcc

SEQ ID NO: 70826 - DNA, 25 bp, Homo sapien
gcagccggcgcaaaatcctcattct

SEQ ID NO: 70827 - DNA, 25 bp, Homo sapien
ggaggcgctcttcacggcgcttgcg

SEQ ID NO: 70828 - DNA, 25 bp, Homo sapien
cggtatcttctgagcagccggcgca

SEQ ID NO: 70829 - DNA, 25 bp, Homo sapien
gtgatacatgtggcgatcgatcttc

SEQ ID NO: 70830 - DNA, 25 bp, Homo sapien
gaccgtcacaggcttgcggatgatc

SEQ ID NO: 70831 - DNA, 25 bp, Homo sapien
ttttccggcatcgagcccgggaatg

SEQ ID NO: 70832 - DNA, 25 bp, Homo sapien
gggagttggcattggcgatttcatt

SEQ ID NO: 70833 - DNA, 25 bp, Homo sapien
cttggtcttagacctgcgggcctca

SEQ ID NO: 70834 - DNA, 25 bp, Homo sapien
gcccatgtgcctgcccttccggcgg

SEQ ID NO: 70835 - DNA, 25 bp, Homo sapien
attcgggcattggctgtacccttcc

SEQ ID NO: 70836 - DNA, 25 bp, Homo sapien
gaggccagtatgtacagacaaagtg

SEQ ID NO: 70837 - DNA, 25 bp, Homo sapien
gaggccagtatgtacagacaaagtg

SEQ ID NO: 70838 - DNA, 25 bp, Homo sapien
gcagccggcgcaaaatcctcattct

SEQ ID NO: 70839 - DNA, 25 bp, Homo sapien
cggtatcttctgagcagccggcgca

SEQ ID NO: 70840 - DNA, 25 bp, Homo sapien
ggaggcgctcttcacggcgcttgcg

SEQ ID NO: 70841 - DNA, 25 bp, Homo sapien
gtgatacatgtggcgatcgatcttc

SEQ ID NO: 70842 - DNA, 25 bp, Homo sapien
gaccgtcacaggcttgcggatgatc

SEQ ID NO: 70843 - DNA, 25 bp, Homo sapien
ttttccggcatcgagcccgggaatg

SEQ ID NO: 70844 - DNA, 25 bp, Homo sapien
gggagttggcattggcgatttcatt

SEQ ID NO: 70845 - DNA, 25 bp, Homo sapien
cttggtcttagacctgcgggcctca

SEQ ID NO: 70846 - DNA, 25 bp, Homo sapien
gcccatgtgcctgcccttccggcgg

SEQ ID NO: 70847 - DNA, 25 bp, Homo sapien
attcgggcattggctgtacccttcc

SEQ ID NO: 70848 - DNA, 25 bp, Homo sapien
gcagccggcgcaaaatcctcattct

SEQ ID NO: 70849 - DNA, 25 bp, Homo sapien
ggaggcgctcttcacggcgcttgcg

SEQ ID NO: 70850 - DNA, 25 bp, Homo sapien
gtgatacatgtggcgatcgatcttc

SEQ ID NO: 70851 - DNA, 25 bp, Homo sapien
ttttccggcatcgagcccgggaatg

SEQ ID NO: 70852 - DNA, 25 bp, Homo sapien
gaccgtcacaggcttgcggatgatc

SEQ ID NO: 70853 - DNA, 25 bp, Homo sapien
gggagttggcattggcgatttcatt

SEQ ID NO: 70854 - DNA, 25 bp, Homo sapien
cttggtcttagacctgcgggcctca

SEQ ID NO: 70855 - DNA, 25 bp, Homo sapien
gcccatgtgcctgcccttccggcgg

SEQ ID NO: 70856 - DNA, 25 bp, Homo sapien
gaggccagtatgtacagacaaagtg

SEQ ID NO: 70857 - DNA, 25 bp, Homo sapien
attcgggcattggctgtacccttcc

SEQ ID NO: 70858 - DNA, 25 bp, Homo sapien
cggtatcttctgagcagccggcgca

SEQ ID NO: 70859 - DNA, 25 bp, Homo sapien
gcagccggcgcaaaatcctcattct

SEQ ID NO: 70860 - DNA, 25 bp, Homo sapien
ggaggcgctcttcacggcgcttgcg

SEQ ID NO: 70861 - DNA, 25 bp, Homo sapien
gtgatacatgtggcgatcgatcttc

SEQ ID NO: 70862 - DNA, 25 bp, Homo sapien
gaccgtcacaggcttgcggatgatc

SEQ ID NO: 70863 - DNA, 25 bp, Homo sapien
ttttccggcatcgagcccgggaatg

SEQ ID NO: 70864 - DNA, 25 bp, Homo sapien
cggtatcttctgagcagccggcgca

SEQ ID NO: 70865 - DNA, 25 bp, Homo sapien
gggagttggcattggcgatttcatt

SEQ ID NO: 70866 - DNA, 25 bp, Homo sapien
cttggtcttagacctgcgggcctca

SEQ ID NO: 70867 - DNA, 25 bp, Homo sapien
gcccatgtgcctgcccttccggcgg

SEQ ID NO: 70868 - DNA, 25 bp, Homo sapien
attcgggcattggctgtacccttcc

SEQ ID NO: 70869 - DNA, 25 bp, Homo sapien
gaggccagtatgtacagacaaagtg

SEQ ID NO: 70870 - DNA, 25 bp, Homo sapien
ggaggcgctcttcacggcgcttgcg

SEQ ID NO: 70871 - DNA, 25 bp, Homo sapien
ttttccggcatcgagcccgggaatg

SEQ ID NO: 70872 - DNA, 25 bp, Homo sapien
attcgggcattggctgtacccttcc

SEQ ID NO: 70873 - DNA, 25 bp, Homo sapien
gggagttggcattggcgatttcatt

SEQ ID NO: 70874 - DNA, 25 bp, Homo sapien
gcagccggcgcaaaatcctcattct

SEQ ID NO: 70875 - DNA, 25 bp, Homo sapien
gaccgtcacaggcttgcggatgatc

SEQ ID NO: 70876 - DNA, 25 bp, Homo sapien
gtgatacatgtggcgatcgatcttc

SEQ ID NO: 70877 - DNA, 25 bp, Homo sapien
cggtatcttctgagcagccggcgca

SEQ ID NO: 70878 - DNA, 25 bp, Homo sapien
gaggccagtatgtacagacaaagtg

SEQ ID NO: 70879 - DNA, 25 bp, Homo sapien
cttggtcttagacctgcgggcctca

SEQ ID NO: 70880 - DNA, 25 bp, Homo sapien
gcccatgtgcctgcccttccggcgg

SEQ ID NO: 70881 - DNA, 25 bp, Homo sapien
gcagccggcgcaaaatcctcattct

SEQ ID NO: 70882 - DNA, 25 bp, Homo sapien
ggaggcgctcttcacggcgcttgcg

SEQ ID NO: 70883 - DNA, 25 bp, Homo sapien
cggtatcttctgagcagccggcgca

SEQ ID NO: 70884 - DNA, 25 bp, Homo sapien
gtgatacatgtggcgatcgatcttc

SEQ ID NO: 70885 - DNA, 25 bp, Homo sapien
ttttccggcatcgagcccgggaatg

SEQ ID NO: 70886 - DNA, 25 bp, Homo sapien
gaccgtcacaggcttgcggatgatc

SEQ ID NO: 70887 - DNA, 25 bp, Homo sapien
gggagttggcattggcgatttcatt

SEQ ID NO: 70888 - DNA, 25 bp, Homo sapien
cttggtcttagacctgcgggcctca

SEQ ID NO: 70889 - DNA, 25 bp, Homo sapien
gcccatgtgcctgcccttccggcgg

SEQ ID NO: 70890 - DNA, 25 bp, Homo sapien
gaggccagtatgtacagacaaagtg

SEQ ID NO: 70891 - DNA, 25 bp, Homo sapien
attcgggcattggctgtacccttcc

SEQ ID NO: 70892 - DNA, 25 bp, Homo sapien
gaccgtcacaggcttgcggatgatc

SEQ ID NO: 70893 - DNA, 25 bp, Homo sapien
ttttccggcatcgagcccgggaatg

SEQ ID NO: 70894 - DNA, 25 bp, Homo sapien
gcccatgtgcctgcccttccggcgg

SEQ ID NO: 70895 - DNA, 25 bp, Homo sapien
attcgggcattggctgtacccttcc

SEQ ID NO: 70896 - DNA, 25 bp, Homo sapien
gcagccggcgcaaaatcctcattct

SEQ ID NO: 70897 - DNA, 25 bp, Homo sapien
cggtatcttctgagcagccggcgca

SEQ ID NO: 70898 - DNA, 25 bp, Homo sapien
gtgatacatgtggcgatcgatcttc

SEQ ID NO: 70899 - DNA, 25 bp, Homo sapien
cttggtcttagacctgcgggcctca

SEQ ID NO: 70900 - DNA, 25 bp, Homo sapien
ggaggcgctcttcacggcgcttgcg

SEQ ID NO: 70901 - DNA, 25 bp, Homo sapien
gaggccagtatgtacagacaaagtg

SEQ ID NO: 70902 - DNA, 25 bp, Homo sapien
gggagttggcattggcgatttcatt

SEQ ID NO: 70903 - DNA, 25 bp, Homo sapien
gatcatccgcaagcctgtgacggtc

SEQ ID NO: 70904 - DNA, 25 bp, Homo sapien
ggaagggtacagccaatgcccgaat

SEQ ID NO: 70905 - DNA, 25 bp, Homo sapien
gaagatcgatcgccacatgtatcac

SEQ ID NO: 70906 - DNA, 25 bp, Homo sapien
cgcaagcgccgtgaagagcgcctcc

SEQ ID NO: 70907 - DNA, 25 bp, Homo sapien
tgaggcccgcaggtctaagaccaag

SEQ ID NO: 70908 - DNA, 25 bp, Homo sapien
aatgaaatcgccaatgccaactccc

SEQ ID NO: 70909 - DNA, 25 bp, Homo sapien
cattcccgggctcgatgccggaaaa

SEQ ID NO: 70910 - DNA, 25 bp, Homo sapien
tgcgccggctgctcagaagataccg

SEQ ID NO: 70911 - DNA, 25 bp, Homo sapien
ccgccggaagggcaggcacatgggc

SEQ ID NO: 70912 - DNA, 25 bp, Homo sapien
cactttgtctgtacatactggcctc

SEQ ID NO: 70913 - DNA, 25 bp, Homo sapien
agaatgaggattttgcgccggctgc

SEQ ID NO: 70914 - DNA, 25 bp, Homo sapien
gcagccggcgcaaaatcctcattct

SEQ ID NO: 70915 - DNA, 25 bp, Homo sapien
ggaggcgctcttcacggcgcttgcg

SEQ ID NO: 70916 - DNA, 25 bp, Homo sapien
gtgatacatgtggcgatcgatcttc

SEQ ID NO: 70917 - DNA, 25 bp, Homo sapien
gaccgtcacaggcttgcggatgatc

SEQ ID NO: 70918 - DNA, 25 bp, Homo sapien
cggtatcttctgagcagccggcgca

SEQ ID NO: 70919 - DNA, 25 bp, Homo sapien
ttttccggcatcgagcccgggaatg

SEQ ID NO: 70920 - DNA, 25 bp, Homo sapien
gggagttggcattggcgatttcatt

SEQ ID NO: 70921 - DNA, 25 bp, Homo sapien
cttggtcttagacctgcgggcctca

SEQ ID NO: 70922 - DNA, 25 bp, Homo sapien
gcccatgtgcctgcccttccggcgg

SEQ ID NO: 70923 - DNA, 25 bp, Homo sapien
attcgggcattggctgtacccttcc

SEQ ID NO: 70924 - DNA, 25 bp, Homo sapien
gaggccagtatgtacagacaaagtg

SEQ ID NO: 70925 - DNA, 25 bp, Homo sapien
ggaggcgctcttcacggcgcttgcg

SEQ ID NO: 70926 - DNA, 25 bp, Homo sapien
ttttccggcatcgagcccgggaatg

SEQ ID NO: 70927 - DNA, 25 bp, Homo sapien
gtgatacatgtggcgatcgatcttc

SEQ ID NO: 70928 - DNA, 25 bp, Homo sapien
attcgggcattggctgtacccttcc

SEQ ID NO: 70929 - DNA, 25 bp, Homo sapien
gcagccggcgcaaaatcctcattct

SEQ ID NO: 70930 - DNA, 25 bp, Homo sapien
gaccgtcacaggcttgcggatgatc

SEQ ID NO: 70931 - DNA, 25 bp, Homo sapien
gcccatgtgcctgcccttccggcgg

SEQ ID NO: 70932 - DNA, 25 bp, Homo sapien
cggtatcttctgagcagccggcgca

SEQ ID NO: 70933 - DNA, 25 bp, Homo sapien
gaggccagtatgtacagacaaagtg

SEQ ID NO: 70934 - DNA, 25 bp, Homo sapien
gggagttggcattggcgatttcatt

SEQ ID NO: 70935 - DNA, 25 bp, Homo sapien
cttggtcttagacctgcgggcctca

SEQ ID NO: 70936 - DNA, 25 bp, Homo sapien
gaccgtcacaggcttgcggatgatc

SEQ ID NO: 70937 - DNA, 25 bp, Homo sapien
ttttccggcatcgagcccgggaatg

SEQ ID NO: 70938 - DNA, 25 bp, Homo sapien
gcccatgtgcctgcccttccggcgg

SEQ ID NO: 70939 - DNA, 25 bp, Homo sapien
attcgggcattggctgtacccttcc

SEQ ID NO: 70940 - DNA, 25 bp, Homo sapien
gcagccggcgcaaaatcctcattct

SEQ ID NO: 70941 - DNA, 25 bp, Homo sapien
cggtatcttctgagcagccggcgca

SEQ ID NO: 70942 - DNA, 25 bp, Homo sapien
gtgatacatgtggcgatcgatcttc

SEQ ID NO: 70943 - DNA, 25 bp, Homo sapien
cttggtcttagacctgcgggcctca

SEQ ID NO: 70944 - DNA, 25 bp, Homo sapien
ggaggcgctcttcacggcgcttgcg

SEQ ID NO: 70945 - DNA, 25 bp, Homo sapien
gaggccagtatgtacagacaaagtg

SEQ ID NO: 70946 - DNA, 25 bp, Homo sapien
gggagttggcattggcgatttcatt

SEQ ID NO: 70947 - DNA, 25 bp, Homo sapien
cttggtcttagacctgcgggcctca

SEQ ID NO: 70948 - DNA, 25 bp, Homo sapien
gcccatgtgcctgcccttccggcgg

SEQ ID NO: 70949 - DNA, 25 bp, Homo sapien
gtgatacatgtggcgatcgatcttc

SEQ ID NO: 70950 - DNA, 25 bp, Homo sapien
attcgggcattggctgtacccttcc

SEQ ID NO: 70951 - DNA, 25 bp, Homo sapien
ttttccggcatcgagcccgggaatg

SEQ ID NO: 70952 - DNA, 25 bp, Homo sapien
cggtatcttctgagcagccggcgca

SEQ ID NO: 70953 - DNA, 25 bp, Homo sapien
gggagttggcattggcgatttcatt

SEQ ID NO: 70954 - DNA, 25 bp, Homo sapien
ggaggcgctcttcacggcgcttgcg

SEQ ID NO: 70955 - DNA, 25 bp, Homo sapien
gcagccggcgcaaaatcctcattct

SEQ ID NO: 70956 - DNA, 25 bp, Homo sapien
gaggccagtatgtacagacaaagtg

SEQ ID NO: 70957 - DNA, 25 bp, Homo sapien
gaccgtcacaggcttgcggatgatc

SEQ ID NO: 70958 - DNA, 25 bp, Homo sapien
gaccgtcacaggcttgcggatgatc

SEQ ID NO: 70959 - DNA, 25 bp, Homo sapien
ttttccggcatcgagcccgggaatg

SEQ ID NO: 70960 - DNA, 25 bp, Homo sapien
gcccatgtgcctgcccttccggcgg

SEQ ID NO: 70961 - DNA, 25 bp, Homo sapien
attcgggcattggctgtacccttcc

SEQ ID NO: 70962 - DNA, 25 bp, Homo sapien
gcagccggcgcaaaatcctcattct

SEQ ID NO: 70963 - DNA, 25 bp, Homo sapien
cggtatcttctgagcagccggcgca

SEQ ID NO: 70964 - DNA, 25 bp, Homo sapien
gtgatacatgtggcgatcgatcttc

SEQ ID NO: 70965 - DNA, 25 bp, Homo sapien
cttggtcttagacctgcgggcctca

SEQ ID NO: 70966 - DNA, 25 bp, Homo sapien
ggaggcgctcttcacggcgcttgcg

SEQ ID NO: 70967 - DNA, 25 bp, Homo sapien
gaggccagtatgtacagacaaagtg

SEQ ID NO: 70968 - DNA, 25 bp, Homo sapien
gggagttggcattggcgatttcatt

SEQ ID NO: 70969 - DNA, 25 bp, Homo sapien
gggagttggcattggcgatttcatt

SEQ ID NO: 70970 - DNA, 25 bp, Homo sapien
ttttccggcatcgagcccgggaatg

SEQ ID NO: 70971 - DNA, 25 bp, Homo sapien
gcccatgtgcctgcccttccggcgg

SEQ ID NO: 70972 - DNA, 25 bp, Homo sapien
attcgggcattggctgtacccttcc

SEQ ID NO: 70973 - DNA, 25 bp, Homo sapien
gaccgtcacaggcttgcggatgatc

SEQ ID NO: 70974 - DNA, 25 bp, Homo sapien
gcagccggcgcaaaatcctcattct

SEQ ID NO: 70975 - DNA, 25 bp, Homo sapien
cggtatcttctgagcagccggcgca

SEQ ID NO: 70976 - DNA, 25 bp, Homo sapien
gtgatacatgtggcgatcgatcttc

SEQ ID NO: 70977 - DNA, 25 bp, Homo sapien
cttggtcttagacctgcgggcctca

SEQ ID NO: 70978 - DNA, 25 bp, Homo sapien
ggaggcgctcttcacggcgcttgcg

SEQ ID NO: 70979 - DNA, 25 bp, Homo sapien
gaggccagtatgtacagacaaagtg

SEQ ID NO: 70980 - DNA, 25 bp, Homo sapien
gggagttggcattggcgatttcatt

SEQ ID NO: 70981 - DNA, 25 bp, Homo sapien
gaccgtcacaggcttgcggatgatc

SEQ ID NO: 70982 - DNA, 25 bp, Homo sapien
ttttccggcatcgagcccgggaatg

SEQ ID NO: 70983 - DNA, 25 bp, Homo sapien
gcccatgtgcctgcccttccggcgg

SEQ ID NO: 70984 - DNA, 25 bp, Homo sapien
attcgggcattggctgtacccttcc

SEQ ID NO: 70985 - DNA, 25 bp, Homo sapien
gcagccggcgcaaaatcctcattct

SEQ ID NO: 70986 - DNA, 25 bp, Homo sapien
cggtatcttctgagcagccggcgca

SEQ ID NO: 70987 - DNA, 25 bp, Homo sapien
gtgatacatgtggcgatcgatcttc

SEQ ID NO: 70988 - DNA, 25 bp, Homo sapien
cttggtcttagacctgcgggcctca

SEQ ID NO: 70989 - DNA, 25 bp, Homo sapien
ggaggcgctcttcacggcgcttgcg

SEQ ID NO: 70990 - DNA, 25 bp, Homo sapien
gaggccagtatgtacagacaaagtg

SEQ ID NO: 70991 - DNA, 25 bp, Homo sapien
gaccgtcacaggcttgcggatgatc

SEQ ID NO: 70992 - DNA, 25 bp, Homo sapien
ttttccggcatcgagcccgggaatg

SEQ ID NO: 70993 - DNA, 25 bp, Homo sapien
gcccatgtgcctgcccttccggcgg

SEQ ID NO: 70994 - DNA, 25 bp, Homo sapien
attcgggcattggctgtacccttcc

SEQ ID NO: 70995 - DNA, 25 bp, Homo sapien
gcagccggcgcaaaatcctcattct

SEQ ID NO: 70996 - DNA, 25 bp, Homo sapien
cggtatcttctgagcagccggcgca

SEQ ID NO: 70997 - DNA, 25 bp, Homo sapien
gtgatacatgtggcgatcgatcttc

SEQ ID NO: 70998 - DNA, 25 bp, Homo sapien
cttggtcttagacctgcgggcctca

SEQ ID NO: 70999 - DNA, 25 bp, Homo sapien
ggaggcgctcttcacggcgcttgcg

SEQ ID NO: 71000 - DNA, 25 bp, Homo sapien
gaggccagtatgtacagacaaagtg

SEQ ID NO: 71001 - DNA, 25 bp, Homo sapien
gggagttggcattggcgatttcatt

SEQ ID NO: 71002 - DNA, 25 bp, Homo sapien
gcccatgtgcctgcccttccggcgg

SEQ ID NO: 71003 - DNA, 25 bp, Homo sapien
gggagttggcattggcgatttcatt

SEQ ID NO: 71004 - DNA, 25 bp, Homo sapien
cggtatcttctgagcagccggcgca

SEQ ID NO: 71005 - DNA, 25 bp, Homo sapien
ttttccggcatcgagcccgggaatg

SEQ ID NO: 71006 - DNA, 25 bp, Homo sapien
gaggccagtatgtacagacaaagtg

SEQ ID NO: 71007 - DNA, 25 bp, Homo sapien
attcgggcattggctgtacccttcc

SEQ ID NO: 71008 - DNA, 25 bp, Homo sapien
ggaggcgctcttcacggcgcttgcg

SEQ ID NO: 71009 - DNA, 25 bp, Homo sapien
gaccgtcacaggcttgcggatgatc

SEQ ID NO: 71010 - DNA, 25 bp, Homo sapien
gtgatacatgtggcgatcgatcttc

SEQ ID NO: 71011 - DNA, 25 bp, Homo sapien
gcagccggcgcaaaatcctcattct

SEQ ID NO: 71012 - DNA, 25 bp, Homo sapien
cttggtcttagacctgcgggcctca

SEQ ID NO: 71013 - DNA, 25 bp, Homo sapien
gaccgtcacaggcttgcggatgatc

SEQ ID NO: 71014 - DNA, 25 bp, Homo sapien
ttttccggcatcgagcccgggaatg

SEQ ID NO: 71015 - DNA, 25 bp, Homo sapien
gcccatgtgcctgcccttccggcgg

SEQ ID NO: 71016 - DNA, 25 bp, Homo sapien
attcgggcattggctgtacccttcc

SEQ ID NO: 71017 - DNA, 25 bp, Homo sapien
gcagccggcgcaaaatcctcattct

SEQ ID NO: 71018 - DNA, 25 bp, Homo sapien
cggtatcttctgagcagccggcgca

SEQ ID NO: 71019 - DNA, 25 bp, Homo sapien
gtgatacatgtggcgatcgatcttc

SEQ ID NO: 71020 - DNA, 25 bp, Homo sapien
cttggtcttagacctgcgggcctca

SEQ ID NO: 71021 - DNA, 25 bp, Homo sapien
ggaggcgctcttcacggcgcttgcg

SEQ ID NO: 71022 - DNA, 25 bp, Homo sapien
gaggccagtatgtacagacaaagtg

SEQ ID NO: 71023 - DNA, 25 bp, Homo sapien
gggagttggcattggcgatttcatt

SEQ ID NO: 71024 - DNA, 25 bp, Homo sapien
cggtatcttctgagcagccggcgca

SEQ ID NO: 71025 - DNA, 25 bp, Homo sapien
gcagccggcgcaaaatcctcattct

SEQ ID NO: 71026 - DNA, 25 bp, Homo sapien
attcgggcattggctgtacccttcc

SEQ ID NO: 71027 - DNA, 25 bp, Homo sapien
cttggtcttagacctgcgggcctca

SEQ ID NO: 71028 - DNA, 25 bp, Homo sapien
gggagttggcattggcgatttcatt

SEQ ID NO: 71029 - DNA, 25 bp, Homo sapien
gtgatacatgtggcgatcgatcttc

SEQ ID NO: 71030 - DNA, 25 bp, Homo sapien
ggaggcgctcttcacggcgcttgcg

SEQ ID NO: 71031 - DNA, 25 bp, Homo sapien
gaccgtcacaggcttgcggatgatc

SEQ ID NO: 71032 - DNA, 25 bp, Homo sapien
gcccatgtgcctgcccttccggcgg

SEQ ID NO: 71033 - DNA, 25 bp, Homo sapien
ttttccggcatcgagcccgggaatg

SEQ ID NO: 71034 - DNA, 25 bp, Homo sapien
gaggccagtatgtacagacaaagtg

SEQ ID NO: 71035 - DNA, 25 bp, Homo sapien
gaccgtcacaggcttgcggatgatc

SEQ ID NO: 71036 - DNA, 25 bp, Homo sapien
ttttccggcatcgagcccgggaatg

SEQ ID NO: 71037 - DNA, 25 bp, Homo sapien
gcccatgtgcctgcccttccggcgg

SEQ ID NO: 71038 - DNA, 25 bp, Homo sapien
attcgggcattggctgtacccttcc

SEQ ID NO: 71039 - DNA, 25 bp, Homo sapien
gcagccggcgcaaaatcctcattct

SEQ ID NO: 71040 - DNA, 25 bp, Homo sapien
cggtatcttctgagcagccggcgca

SEQ ID NO: 71041 - DNA, 25 bp, Homo sapien
gtgatacatgtggcgatcgatcttc

SEQ ID NO: 71042 - DNA, 25 bp, Homo sapien
cttggtcttagacctgcgggcctca

SEQ ID NO: 71043 - DNA, 25 bp, Homo sapien
ggaggcgctcttcacggcgcttgcg

SEQ ID NO: 71044 - DNA, 25 bp, Homo sapien
gaggccagtatgtacagacaaagtg

SEQ ID NO: 71045 - DNA, 25 bp, Homo sapien
gggagttggcattggcgatttcatt

SEQ ID NO: 71046 - DNA, 25 bp, Homo sapien
gcagccggcgcaaaatcctcattct

SEQ ID NO: 71047 - DNA, 25 bp, Homo sapien
gaggccagtatgtacagacaaagtg

SEQ ID NO: 71048 - DNA, 25 bp, Homo sapien
gcccatgtgcctgcccttccggcgg

SEQ ID NO: 71049 - DNA, 25 bp, Homo sapien
cttggtcttagacctgcgggcctca

SEQ ID NO: 71050 - DNA, 25 bp, Homo sapien
gaccgtcacaggcttgcggatgatc

SEQ ID NO: 71051 - DNA, 25 bp, Homo sapien
gtgatacatgtggcgatcgatcttc

SEQ ID NO: 71052 - DNA, 25 bp, Homo sapien
attcgggcattggctgtacccttcc

SEQ ID NO: 71053 - DNA, 25 bp, Homo sapien
cggtatcttctgagcagccggcgca

SEQ ID NO: 71054 - DNA, 25 bp, Homo sapien
ttttccggcatcgagcccgggaatg

SEQ ID NO: 71055 - DNA, 25 bp, Homo sapien
gggagttggcattggcgatttcatt

SEQ ID NO: 71056 - DNA, 25 bp, Homo sapien
ggaggcgctcttcacggcgcttgcg

SEQ ID NO: 71057 - DNA, 25 bp, Homo sapien
gaccgtcacaggcttgcggatgatc

SEQ ID NO: 71058 - DNA, 25 bp, Homo sapien
ttttccggcatcgagcccgggaatg

SEQ ID NO: 71059 - DNA, 25 bp, Homo sapien
gcccatgtgcctgcccttccggcgg

SEQ ID NO: 71060 - DNA, 25 bp, Homo sapien
attcgggcattggctgtacccttcc

SEQ ID NO: 71061 - DNA, 25 bp, Homo sapien
gcagccggcgcaaaatcctcattct

SEQ ID NO: 71062 - DNA, 25 bp, Homo sapien
cggtatcttctgagcagccggcgca

SEQ ID NO: 71063 - DNA, 25 bp, Homo sapien
gtgatacatgtggcgatcgatcttc

SEQ ID NO: 71064 - DNA, 25 bp, Homo sapien
cttggtcttagacctgcgggcctca

SEQ ID NO: 71065 - DNA, 25 bp, Homo sapien
ggaggcgctcttcacggcgcttgcg

SEQ ID NO: 71066 - DNA, 25 bp, Homo sapien
gaggccagtatgtacagacaaagtg

SEQ ID NO: 71067 - DNA, 25 bp, Homo sapien
gggagttggcattggcgatttcatt

SEQ ID NO: 71068 - DNA, 25 bp, Homo sapien
cttggtcttagacctgcgggcctca

SEQ ID NO: 71069 - DNA, 25 bp, Homo sapien
attcgggcattggctgtacccttcc

SEQ ID NO: 71070 - DNA, 25 bp, Homo sapien
gtgatacatgtggcgatcgatcttc

SEQ ID NO: 71071 - DNA, 25 bp, Homo sapien
ggaggcgctcttcacggcgcttgcg

SEQ ID NO: 71072 - DNA, 25 bp, Homo sapien
gaccgtcacaggcttgcggatgatc

SEQ ID NO: 71073 - DNA, 25 bp, Homo sapien
gcagccggcgcaaaatcctcattct

SEQ ID NO: 71074 - DNA, 25 bp, Homo sapien
gcccatgtgcctgcccttccggcgg

SEQ ID NO: 71075 - DNA, 25 bp, Homo sapien
gggagttggcattggcgatttcatt

SEQ ID NO: 71076 - DNA, 25 bp, Homo sapien
ttttccggcatcgagcccgggaatg

SEQ ID NO: 71077 - DNA, 25 bp, Homo sapien
gaggccagtatgtacagacaaagtg

SEQ ID NO: 71078 - DNA, 25 bp, Homo sapien
cggtatcttctgagcagccggcgca

SEQ ID NO: 71079 - DNA, 25 bp, Homo sapien
gaccgtcacaggcttgcggatgatc

SEQ ID NO: 71080 - DNA, 25 bp, Homo sapien
ttttccggcatcgagcccgggaatg

SEQ ID NO: 71081 - DNA, 25 bp, Homo sapien
gcccatgtgcctgcccttccggcgg

SEQ ID NO: 71082 - DNA, 25 bp, Homo sapien
attcgggcattggctgtacccttcc

SEQ ID NO: 71083 - DNA, 25 bp, Homo sapien
gcagccggcgcaaaatcctcattct

SEQ ID NO: 71084 - DNA, 25 bp, Homo sapien
cggtatcttctgagcagccggcgca

SEQ ID NO: 71085 - DNA, 25 bp, Homo sapien
gtgatacatgtggcgatcgatcttc

SEQ ID NO: 71086 - DNA, 25 bp, Homo sapien
cttggtcttagacctgcgggcctca

SEQ ID NO: 71087 - DNA, 25 bp, Homo sapien
ggaggcgctcttcacggcgcttgcg

SEQ ID NO: 71088 - DNA, 25 bp, Homo sapien
gaggccagtatgtacagacaaagtg

SEQ ID NO: 71089 - DNA, 25 bp, Homo sapien
gggagttggcattggcgatttcatt

SEQ ID NO: 71090 - DNA, 25 bp, Homo sapien
gcagccggcgcaaaatcctcattct

SEQ ID NO: 71091 - DNA, 25 bp, Homo sapien
gcccatgtgcctgcccttccggcgg

SEQ ID NO: 71092 - DNA, 25 bp, Homo sapien
cggtatcttctgagcagccggcgca

SEQ ID NO: 71093 - DNA, 25 bp, Homo sapien
gtgatacatgtggcgatcgatcttc

SEQ ID NO: 71094 - DNA, 25 bp, Homo sapien
gaccgtcacaggcttgcggatgatc

SEQ ID NO: 71095 - DNA, 25 bp, Homo sapien
ggaggcgctcttcacggcgcttgcg

SEQ ID NO: 71096 - DNA, 25 bp, Homo sapien
ttttccggcatcgagcccgggaatg

SEQ ID NO: 71097 - DNA, 25 bp, Homo sapien
attcgggcattggctgtacccttcc

SEQ ID NO: 71098 - DNA, 25 bp, Homo sapien
gggagttggcattggcgatttcatt

SEQ ID NO: 71099 - DNA, 25 bp, Homo sapien
gaggccagtatgtacagacaaagtg

SEQ ID NO: 71100 - DNA, 25 bp, Homo sapien
cttggtcttagacctgcgggcctca

SEQ ID NO: 71101 - DNA, 25 bp, Homo sapien
ttttccggcatcgagcccgggaatg

SEQ ID NO: 71102 - DNA, 25 bp, Homo sapien
gggagttggcattggcgatttcatt

SEQ ID NO: 71103 - DNA, 25 bp, Homo sapien
cttggtcttagacctgcgggcctca

SEQ ID NO: 71104 - DNA, 25 bp, Homo sapien
gaccgtcacaggcttgcggatgatc

SEQ ID NO: 71105 - DNA, 25 bp, Homo sapien
gcagccggcgcaaaatcctcattct

SEQ ID NO: 71106 - DNA, 25 bp, Homo sapien
ggaggcgctcttcacggcgcttgcg

SEQ ID NO: 71107 - DNA, 25 bp, Homo sapien
attcgggcattggctgtacccttcc

SEQ ID NO: 71108 - DNA, 25 bp, Homo sapien
gaggccagtatgtacagacaaagtg

SEQ ID NO: 71109 - DNA, 25 bp, Homo sapien
gtgatacatgtggcgatcgatcttc

SEQ ID NO: 71110 - DNA, 25 bp, Homo sapien
cggtatcttctgagcagccggcgca

SEQ ID NO: 71111 - DNA, 25 bp, Homo sapien
gcccatgtgcctgcccttccggcgg

SEQ ID NO: 71112 - DNA, 25 bp, Homo sapien
gaccgtcacaggcttgcggatgatc

SEQ ID NO: 71113 - DNA, 25 bp, Homo sapien
ttttccggcatcgagcccgggaatg

SEQ ID NO: 71114 - DNA, 25 bp, Homo sapien
gcccatgtgcctgcccttccggcgg

SEQ ID NO: 71115 - DNA, 25 bp, Homo sapien
attcgggcattggctgtacccttcc

SEQ ID NO: 71116 - DNA, 25 bp, Homo sapien
gcagccggcgcaaaatcctcattct

SEQ ID NO: 71117 - DNA, 25 bp, Homo sapien
cggtatcttctgagcagccggcgca

SEQ ID NO: 71118 - DNA, 25 bp, Homo sapien
gtgatacatgtggcgatcgatcttc

SEQ ID NO: 71119 - DNA, 25 bp, Homo sapien
cttggtcttagacctgcgggcctca

SEQ ID NO: 71120 - DNA, 25 bp, Homo sapien
ggaggcgctcttcacggcgcttgcg

SEQ ID NO: 71121 - DNA, 25 bp, Homo sapien
gaggccagtatgtacagacaaagtg

SEQ ID NO: 71122 - DNA, 25 bp, Homo sapien
gggagttggcattggcgatttcatt

SEQ ID NO: 71123 - DNA, 25 bp, Homo sapien
gaggccagtatgtacagacaaagtg

SEQ ID NO: 71124 - DNA, 25 bp, Homo sapien
gtgatacatgtggcgatcgatcttc

SEQ ID NO: 71125 - DNA, 25 bp, Homo sapien
cttggtcttagacctgcgggcctca

SEQ ID NO: 71126 - DNA, 25 bp, Homo sapien
gaccgtcacaggcttgcggatgatc

SEQ ID NO: 71127 - DNA, 25 bp, Homo sapien
ttttccggcatcgagcccgggaatg

SEQ ID NO: 71128 - DNA, 25 bp, Homo sapien
gcccatgtgcctgcccttccggcgg

SEQ ID NO: 71129 - DNA, 25 bp, Homo sapien
ggaggcgctcttcacggcgcttgcg

SEQ ID NO: 71130 - DNA, 25 bp, Homo sapien
gcagccggcgcaaaatcctcattct

SEQ ID NO: 71131 - DNA, 25 bp, Homo sapien
attcgggcattggctgtacccttcc

SEQ ID NO: 71132 - DNA, 25 bp, Homo sapien
cggtatcttctgagcagccggcgca

SEQ ID NO: 71133 - DNA, 25 bp, Homo sapien
gggagttggcattggcgatttcatt

SEQ ID NO: 71134 - DNA, 25 bp, Homo sapien
gggagttggcattggcgatttcatt

SEQ ID NO: 71135 - DNA, 25 bp, Homo sapien
gaccgtcacaggcttgcggatgatc

SEQ ID NO: 71136 - DNA, 25 bp, Homo sapien
ttttccggcatcgagcccgggaatg

SEQ ID NO: 71137 - DNA, 25 bp, Homo sapien
gcccatgtgcctgcccttccggcgg

SEQ ID NO: 71138 - DNA, 25 bp, Homo sapien
attcgggcattggctgtacccttcc

SEQ ID NO: 71139 - DNA, 25 bp, Homo sapien
gcagccggcgcaaaatcctcattct

SEQ ID NO: 71140 - DNA, 25 bp, Homo sapien
cggtatcttctgagcagccggcgca

SEQ ID NO: 71141 - DNA, 25 bp, Homo sapien
gtgatacatgtggcgatcgatcttc

SEQ ID NO: 71142 - DNA, 25 bp, Homo sapien
cttggtcttagacctgcgggcctca

SEQ ID NO: 71143 - DNA, 25 bp, Homo sapien
ggaggcgctcttcacggcgcttgcg

SEQ ID NO: 71144 - DNA, 25 bp, Homo sapien
gaggccagtatgtacagacaaagtg

SEQ ID NO: 71145 - DNA, 25 bp, Homo sapien
gcagccggcgcaaaatcctcattct

SEQ ID NO: 71146 - DNA, 25 bp, Homo sapien
gcccatgtgcctgcccttccggcgg

SEQ ID NO: 71147 - DNA, 25 bp, Homo sapien
gtgatacatgtggcgatcgatcttc

SEQ ID NO: 71148 - DNA, 25 bp, Homo sapien
gaccgtcacaggcttgcggatgatc

SEQ ID NO: 71149 - DNA, 25 bp, Homo sapien
gggagttggcattggcgatttcatt

SEQ ID NO: 71150 - DNA, 25 bp, Homo sapien
cttggtcttagacctgcgggcctca

SEQ ID NO: 71151 - DNA, 25 bp, Homo sapien
ttttccggcatcgagcccgggaatg

SEQ ID NO: 71152 - DNA, 25 bp, Homo sapien
cggtatcttctgagcagccggcgca

SEQ ID NO: 71153 - DNA, 25 bp, Homo sapien
ggaggcgctcttcacggcgcttgcg

SEQ ID NO: 71154 - DNA, 25 bp, Homo sapien
gaggccagtatgtacagacaaagtg

SEQ ID NO: 71155 - DNA, 25 bp, Homo sapien
attcgggcattggctgtacccttcc

SEQ ID NO: 71156 - DNA, 25 bp, Homo sapien
gaccgtcacaggcttgcggatgatc

SEQ ID NO: 71157 - DNA, 25 bp, Homo sapien
ttttccggcatcgagcccgggaatg

SEQ ID NO: 71158 - DNA, 25 bp, Homo sapien
gcccatgtgcctgcccttccggcgg

SEQ ID NO: 71159 - DNA, 25 bp, Homo sapien
attcgggcattggctgtacccttcc

SEQ ID NO: 71160 - DNA, 25 bp, Homo sapien
gcagccggcgcaaaatcctcattct

SEQ ID NO: 71161 - DNA, 25 bp, Homo sapien
cggtatcttctgagcagccggcgca

SEQ ID NO: 71162 - DNA, 25 bp, Homo sapien
gtgatacatgtggcgatcgatcttc

SEQ ID NO: 71163 - DNA, 25 bp, Homo sapien
cttggtcttagacctgcgggcctca

SEQ ID NO: 71164 - DNA, 25 bp, Homo sapien
ggaggcgctcttcacggcgcttgcg

SEQ ID NO: 71165 - DNA, 25 bp, Homo sapien
gaggccagtatgtacagacaaagtg

SEQ ID NO: 71166 - DNA, 25 bp, Homo sapien
gggagttggcattggcgatttcatt

SEQ ID NO: 71167 - DNA, 25 bp, Homo sapien
ttttccggcatcgagcccgggaatg

SEQ ID NO: 71168 - DNA, 25 bp, Homo sapien
gggagttggcattggcgatttcatt

SEQ ID NO: 71169 - DNA, 25 bp, Homo sapien
gcccatgtgcctgcccttccggcgg

SEQ ID NO: 71170 - DNA, 25 bp, Homo sapien
cttggtcttagacctgcgggcctca

SEQ ID NO: 71171 - DNA, 25 bp, Homo sapien
gcagccggcgcaaaatcctcattct

SEQ ID NO: 71172 - DNA, 25 bp, Homo sapien
gaccgtcacaggcttgcggatgatc

SEQ ID NO: 71173 - DNA, 25 bp, Homo sapien
attcgggcattggctgtacccttcc

SEQ ID NO: 71174 - DNA, 25 bp, Homo sapien
gtgatacatgtggcgatcgatcttc

SEQ ID NO: 71175 - DNA, 25 bp, Homo sapien
gaggccagtatgtacagacaaagtg

SEQ ID NO: 71176 - DNA, 25 bp, Homo sapien
cggtatcttctgagcagccggcgca

SEQ ID NO: 71177 - DNA, 25 bp, Homo sapien
ggaggcgctcttcacggcgcttgcg

SEQ ID NO: 71178 - DNA, 25 bp, Homo sapien
gaccgtcacaggcttgcggatgatc

SEQ ID NO: 71179 - DNA, 25 bp, Homo sapien
ttttccggcatcgagcccgggaatg

SEQ ID NO: 71180 - DNA, 25 bp, Homo sapien
gcccatgtgcctgcccttccggcgg

SEQ ID NO: 71181 - DNA, 25 bp, Homo sapien
attcgggcattggctgtacccttcc

SEQ ID NO: 71182 - DNA, 25 bp, Homo sapien
gcagccggcgcaaaatcctcattct

SEQ ID NO: 71183 - DNA, 25 bp, Homo sapien
cggtatcttctgagcagccggcgca

SEQ ID NO: 71184 - DNA, 25 bp, Homo sapien
gtgatacatgtggcgatcgatcttc

SEQ ID NO: 71185 - DNA, 25 bp, Homo sapien
cttggtcttagacctgcgggcctca

SEQ ID NO: 71186 - DNA, 25 bp, Homo sapien
ggaggcgctcttcacggcgcttgcg

SEQ ID NO: 71187 - DNA, 25 bp, Homo sapien
gaggccagtatgtacagacaaagtg

SEQ ID NO: 71188 - DNA, 25 bp, Homo sapien
gggagttggcattggcgatttcatt

SEQ ID NO: 71189 - DNA, 25 bp, Homo sapien
gcagccggcgcaaaatcctcattct

SEQ ID NO: 71190 - DNA, 25 bp, Homo sapien
gaccgtcacaggcttgcggatgatc

SEQ ID NO: 71191 - DNA, 25 bp, Homo sapien
ggaggcgctcttcacggcgcttgcg

SEQ ID NO: 71192 - DNA, 25 bp, Homo sapien
cttggtcttagacctgcgggcctca

SEQ ID NO: 71193 - DNA, 25 bp, Homo sapien
gaggccagtatgtacagacaaagtg

SEQ ID NO: 71194 - DNA, 25 bp, Homo sapien
gcccatgtgcctgcccttccggcgg

SEQ ID NO: 71195 - DNA, 25 bp, Homo sapien
cggtatcttctgagcagccggcgca

SEQ ID NO: 71196 - DNA, 25 bp, Homo sapien
gtgatacatgtggcgatcgatcttc

SEQ ID NO: 71197 - DNA, 25 bp, Homo sapien
attcgggcattggctgtacccttcc

SEQ ID NO: 71198 - DNA, 25 bp, Homo sapien
ttttccggcatcgagcccgggaatg

SEQ ID NO: 71199 - DNA, 25 bp, Homo sapien
gggagttggcattggcgatttcatt

SEQ ID NO: 71200 - DNA, 25 bp, Homo sapien
gaccgtcacaggcttgcggatgatc

SEQ ID NO: 71201 - DNA, 25 bp, Homo sapien
ttttccggcatcgagcccgggaatg

SEQ ID NO: 71202 - DNA, 25 bp, Homo sapien
gcccatgtgcctgcccttccggcgg

SEQ ID NO: 71203 - DNA, 25 bp, Homo sapien
attcgggcattggctgtacccttcc

SEQ ID NO: 71204 - DNA, 25 bp, Homo sapien
gcagccggcgcaaaatcctcattct

SEQ ID NO: 71205 - DNA, 25 bp, Homo sapien
cggtatcttctgagcagccggcgca

SEQ ID NO: 71206 - DNA, 25 bp, Homo sapien
gtgatacatgtggcgatcgatcttc

SEQ ID NO: 71207 - DNA, 25 bp, Homo sapien
cttggtcttagacctgcgggcctca

SEQ ID NO: 71208 - DNA, 25 bp, Homo sapien
ggaggcgctcttcacggcgcttgcg

SEQ ID NO: 71209 - DNA, 25 bp, Homo sapien
gaggccagtatgtacagacaaagtg

SEQ ID NO: 71210 - DNA, 25 bp, Homo sapien
gggagttggcattggcgatttcatt

SEQ ID NO: 71211 - DNA, 25 bp, Homo sapien
gcccatgtgcctgcccttccggcgg

SEQ ID NO: 71212 - DNA, 25 bp, Homo sapien
attcgggcattggctgtacccttcc

SEQ ID NO: 71213 - DNA, 25 bp, Homo sapien
gcagccggcgcaaaatcctcattct

SEQ ID NO: 71214 - DNA, 25 bp, Homo sapien
gggagttggcattggcgatttcatt

SEQ ID NO: 71215 - DNA, 25 bp, Homo sapien
gaggccagtatgtacagacaaagtg

SEQ ID NO: 71216 - DNA, 25 bp, Homo sapien
ttttccggcatcgagcccgggaatg

SEQ ID NO: 71217 - DNA, 25 bp, Homo sapien
cttggtcttagacctgcgggcctca

SEQ ID NO: 71218 - DNA, 25 bp, Homo sapien
gaccgtcacaggcttgcggatgatc

SEQ ID NO: 71219 - DNA, 25 bp, Homo sapien
ggaggcgctcttcacggcgcttgcg

SEQ ID NO: 71220 - DNA, 25 bp, Homo sapien
gtgatacatgtggcgatcgatcttc

SEQ ID NO: 71221 - DNA, 25 bp, Homo sapien
cggtatcttctgagcagccggcgca

SEQ ID NO: 71222 - DNA, 25 bp, Homo sapien
gaccgtcacaggcttgcggatgatc

SEQ ID NO: 71223 - DNA, 25 bp, Homo sapien
ttttccggcatcgagcccgggaatg

SEQ ID NO: 71224 - DNA, 25 bp, Homo sapien
gcccatgtgcctgcccttccggcgg

SEQ ID NO: 71225 - DNA, 25 bp, Homo sapien
attcgggcattggctgtacccttcc

SEQ ID NO: 71226 - DNA, 25 bp, Homo sapien
gcagccggcgcaaaatcctcattct

SEQ ID NO: 71227 - DNA, 25 bp, Homo sapien
cggtatcttctgagcagccggcgca

SEQ ID NO: 71228 - DNA, 25 bp, Homo sapien
gtgatacatgtggcgatcgatcttc

SEQ ID NO: 71229 - DNA, 25 bp, Homo sapien
cttggtcttagacctgcgggcctca

SEQ ID NO: 71230 - DNA, 25 bp, Homo sapien
ggaggcgctcttcacggcgcttgcg

SEQ ID NO: 71231 - DNA, 25 bp, Homo sapien
gaggccagtatgtacagacaaagtg

SEQ ID NO: 71232 - DNA, 25 bp, Homo sapien
gggagttggcattggcgatttcatt

SEQ ID NO: 71233 - DNA, 25 bp, Homo sapien
gaccgtcacaggcttgcggatgatc

SEQ ID NO: 71234 - DNA, 25 bp, Homo sapien
ttttccggcatcgagcccgggaatg

SEQ ID NO: 71235 - DNA, 25 bp, Homo sapien
gcccatgtgcctgcccttccggcgg

SEQ ID NO: 71236 - DNA, 25 bp, Homo sapien
attcgggcattggctgtacccttcc

SEQ ID NO: 71237 - DNA, 25 bp, Homo sapien
gcagccggcgcaaaatcctcattct

SEQ ID NO: 71238 - DNA, 25 bp, Homo sapien
cggtatcttctgagcagccggcgca

SEQ ID NO: 71239 - DNA, 25 bp, Homo sapien
gtgatacatgtggcgatcgatcttc

SEQ ID NO: 71240 - DNA, 25 bp, Homo sapien
cttggtcttagacctgcgggcctca

SEQ ID NO: 71241 - DNA, 25 bp, Homo sapien
ggaggcgctcttcacggcgcttgcg

SEQ ID NO: 71242 - DNA, 25 bp, Homo sapien
gaggccagtatgtacagacaaagtg

SEQ ID NO: 71243 - DNA, 25 bp, Homo sapien
gggagttggcattggcgatttcatt

SEQ ID NO: 71244 - DNA, 25 bp, Homo sapien
gtgatacatgtggcgatcgatcttc

SEQ ID NO: 71245 - DNA, 25 bp, Homo sapien
gcagccggcgcaaaatcctcattct

SEQ ID NO: 71246 - DNA, 25 bp, Homo sapien
ggaggcgctcttcacggcgcttgcg

SEQ ID NO: 71247 - DNA, 25 bp, Homo sapien
gggagttggcattggcgatttcatt

SEQ ID NO: 71248 - DNA, 25 bp, Homo sapien
gcccatgtgcctgcccttccggcgg

SEQ ID NO: 71249 - DNA, 25 bp, Homo sapien
gaggccagtatgtacagacaaagtg

SEQ ID NO: 71250 - DNA, 25 bp, Homo sapien
cggtatcttctgagcagccggcgca

SEQ ID NO: 71251 - DNA, 25 bp, Homo sapien
cttggtcttagacctgcgggcctca

SEQ ID NO: 71252 - DNA, 25 bp, Homo sapien
ttttccggcatcgagcccgggaatg

SEQ ID NO: 71253 - DNA, 25 bp, Homo sapien
gaccgtcacaggcttgcggatgatc

SEQ ID NO: 71254 - DNA, 25 bp, Homo sapien
attcgggcattggctgtacccttcc

SEQ ID NO: 71255 - DNA, 25 bp, Homo sapien
gaccgtcacaggcttgcggatgatc

SEQ ID NO: 71256 - DNA, 25 bp, Homo sapien
ttttccggcatcgagcccgggaatg

SEQ ID NO: 71257 - DNA, 25 bp, Homo sapien
gcccatgtgcctgcccttccggcgg

SEQ ID NO: 71258 - DNA, 25 bp, Homo sapien
attcgggcattggctgtacccttcc

SEQ ID NO: 71259 - DNA, 25 bp, Homo sapien
gcagccggcgcaaaatcctcattct

SEQ ID NO: 71260 - DNA, 25 bp, Homo sapien
cggtatcttctgagcagccggcgca

SEQ ID NO: 71261 - DNA, 25 bp, Homo sapien
gtgatacatgtggcgatcgatcttc

SEQ ID NO: 71262 - DNA, 25 bp, Homo sapien
cttggtcttagacctgcgggcctca

SEQ ID NO: 71263 - DNA, 25 bp, Homo sapien
ggaggcgctcttcacggcgcttgcg

SEQ ID NO: 71264 - DNA, 25 bp, Homo sapien
gaggccagtatgtacagacaaagtg

SEQ ID NO: 71265 - DNA, 25 bp, Homo sapien
gggagttggcattggcgatttcatt

SEQ ID NO: 71266 - DNA, 25 bp, Homo sapien
attcgggcattggctgtacccttcc

SEQ ID NO: 71267 - DNA, 25 bp, Homo sapien
gaccgtcacaggcttgcggatgatc

SEQ ID NO: 71268 - DNA, 25 bp, Homo sapien
cggtatcttctgagcagccggcgca

SEQ ID NO: 71269 - DNA, 25 bp, Homo sapien
gcccatgtgcctgcccttccggcgg

SEQ ID NO: 71270 - DNA, 25 bp, Homo sapien
cttggtcttagacctgcgggcctca

SEQ ID NO: 71271 - DNA, 25 bp, Homo sapien
ttttccggcatcgagcccgggaatg

SEQ ID NO: 71272 - DNA, 25 bp, Homo sapien
gaggccagtatgtacagacaaagtg

SEQ ID NO: 71273 - DNA, 25 bp, Homo sapien
ggaggcgctcttcacggcgcttgcg

SEQ ID NO: 71274 - DNA, 25 bp, Homo sapien
gggagttggcattggcgatttcatt

SEQ ID NO: 71275 - DNA, 25 bp, Homo sapien
gtgatacatgtggcgatcgatcttc

SEQ ID NO: 71276 - DNA, 25 bp, Homo sapien
gcagccggcgcaaaatcctcattct

SEQ ID NO: 71277 - DNA, 25 bp, Homo sapien
gaccgtcacaggcttgcggatgatc

SEQ ID NO: 71278 - DNA, 25 bp, Homo sapien
ttttccggcatcgagcccgggaatg

SEQ ID NO: 71279 - DNA, 25 bp, Homo sapien
gcccatgtgcctgcccttccggcgg

SEQ ID NO: 71280 - DNA, 25 bp, Homo sapien
attcgggcattggctgtacccttcc

SEQ ID NO: 71281 - DNA, 25 bp, Homo sapien
gcagccggcgcaaaatcctcattct

SEQ ID NO: 71282 - DNA, 25 bp, Homo sapien
cggtatcttctgagcagccggcgca

SEQ ID NO: 71283 - DNA, 25 bp, Homo sapien
gtgatacatgtggcgatcgatcttc

SEQ ID NO: 71284 - DNA, 25 bp, Homo sapien
cttggtcttagacctgcgggcctca

SEQ ID NO: 71285 - DNA, 25 bp, Homo sapien
ggaggcgctcttcacggcgcttgcg

SEQ ID NO: 71286 - DNA, 25 bp, Homo sapien
gaggccagtatgtacagacaaagtg

SEQ ID NO: 71287 - DNA, 25 bp, Homo sapien
gggagttggcattggcgatttcatt

SEQ ID NO: 71288 - DNA, 25 bp, Homo sapien
ttttccggcatcgagcccgggaatg

SEQ ID NO: 71289 - DNA, 25 bp, Homo sapien
cttggtcttagacctgcgggcctca

SEQ ID NO: 71290 - DNA, 25 bp, Homo sapien
gtgatacatgtggcgatcgatcttc

SEQ ID NO: 71291 - DNA, 25 bp, Homo sapien
attcgggcattggctgtacccttcc

SEQ ID NO: 71292 - DNA, 25 bp, Homo sapien
gaggccagtatgtacagacaaagtg

SEQ ID NO: 71293 - DNA, 25 bp, Homo sapien
cggtatcttctgagcagccggcgca

SEQ ID NO: 71294 - DNA, 25 bp, Homo sapien
gcccatgtgcctgcccttccggcgg

SEQ ID NO: 71295 - DNA, 25 bp, Homo sapien
gcagccggcgcaaaatcctcattct

SEQ ID NO: 71296 - DNA, 25 bp, Homo sapien
gaccgtcacaggcttgcggatgatc

SEQ ID NO: 71297 - DNA, 25 bp, Homo sapien
ggaggcgctcttcacggcgcttgcg

SEQ ID NO: 71298 - DNA, 25 bp, Homo sapien
gggagttggcattggcgatttcatt

SEQ ID NO: 71299 - DNA, 25 bp, Homo sapien
gaccgtcacaggcttgcggatgatc

SEQ ID NO: 71300 - DNA, 25 bp, Homo sapien
ttttccggcatcgagcccgggaatg

SEQ ID NO: 71301 - DNA, 25 bp, Homo sapien
gcccatgtgcctgcccttccggcgg

SEQ ID NO: 71302 - DNA, 25 bp, Homo sapien
attcgggcattggctgtacccttcc

SEQ ID NO: 71303 - DNA, 25 bp, Homo sapien
gcagccggcgcaaaatcctcattct

SEQ ID NO: 71304 - DNA, 25 bp, Homo sapien
cggtatcttctgagcagccggcgca

SEQ ID NO: 71305 - DNA, 25 bp, Homo sapien
gtgatacatgtggcgatcgatcttc

SEQ ID NO: 71306 - DNA, 25 bp, Homo sapien
cttggtcttagacctgcgggcctca

SEQ ID NO: 71307 - DNA, 25 bp, Homo sapien
ggaggcgctcttcacggcgcttgcg

SEQ ID NO: 71308 - DNA, 25 bp, Homo sapien
gaggccagtatgtacagacaaagtg

SEQ ID NO: 71309 - DNA, 25 bp, Homo sapien
gggagttggcattggcgatttcatt

SEQ ID NO: 71310 - DNA, 25 bp, Homo sapien
gggagttggcattggcgatttcatt

SEQ ID NO: 71311 - DNA, 25 bp, Homo sapien
ggaggcgctcttcacggcgcttgcg

SEQ ID NO: 71312 - DNA, 25 bp, Homo sapien
ttttccggcatcgagcccgggaatg

SEQ ID NO: 71313 - DNA, 25 bp, Homo sapien
gcagccggcgcaaaatcctcattct

SEQ ID NO: 71314 - DNA, 25 bp, Homo sapien
gtgatacatgtggcgatcgatcttc

SEQ ID NO: 71315 - DNA, 25 bp, Homo sapien
attcgggcattggctgtacccttcc

SEQ ID NO: 71316 - DNA, 25 bp, Homo sapien
gaggccagtatgtacagacaaagtg

SEQ ID NO: 71317 - DNA, 25 bp, Homo sapien
cttggtcttagacctgcgggcctca

SEQ ID NO: 71318 - DNA, 25 bp, Homo sapien
cggtatcttctgagcagccggcgca

SEQ ID NO: 71319 - DNA, 25 bp, Homo sapien
gcccatgtgcctgcccttccggcgg

SEQ ID NO: 71320 - DNA, 25 bp, Homo sapien
gaccgtcacaggcttgcggatgatc

SEQ ID NO: 71321 - DNA, 25 bp, Homo sapien
gaccgtcacaggcttgcggatgatc

SEQ ID NO: 71322 - DNA, 25 bp, Homo sapien
ttttccggcatcgagcccgggaatg

SEQ ID NO: 71323 - DNA, 25 bp, Homo sapien
gcccatgtgcctgcccttccggcgg

SEQ ID NO: 71324 - DNA, 25 bp, Homo sapien
attcgggcattggctgtacccttcc

SEQ ID NO: 71325 - DNA, 25 bp, Homo sapien
gcagccggcgcaaaatcctcattct

SEQ ID NO: 71326 - DNA, 25 bp, Homo sapien
cggtatcttctgagcagccggcgca

SEQ ID NO: 71327 - DNA, 25 bp, Homo sapien
gtgatacatgtggcgatcgatcttc

SEQ ID NO: 71328 - DNA, 25 bp, Homo sapien
cttggtcttagacctgcgggcctca

SEQ ID NO: 71329 - DNA, 25 bp, Homo sapien
ggaggcgctcttcacggcgcttgcg

SEQ ID NO: 71330 - DNA, 25 bp, Homo sapien
gaggccagtatgtacagacaaagtg

SEQ ID NO: 71331 - DNA, 25 bp, Homo sapien
gggagttggcattggcgatttcatt

SEQ ID NO: 71332 - DNA, 25 bp, Homo sapien
ggaggcgctcttcacggcgcttgcg

SEQ ID NO: 71333 - DNA, 25 bp, Homo sapien
cggtatcttctgagcagccggcgca

SEQ ID NO: 71334 - DNA, 25 bp, Homo sapien
gcagccggcgcaaaatcctcattct

SEQ ID NO: 71335 - DNA, 25 bp, Homo sapien
ttttccggcatcgagcccgggaatg

SEQ ID NO: 71336 - DNA, 25 bp, Homo sapien
cttggtcttagacctgcgggcctca

SEQ ID NO: 71337 - DNA, 25 bp, Homo sapien
gcccatgtgcctgcccttccggcgg

SEQ ID NO: 71338 - DNA, 25 bp, Homo sapien
gaccgtcacaggcttgcggatgatc

SEQ ID NO: 71339 - DNA, 25 bp, Homo sapien
attcgggcattggctgtacccttcc

SEQ ID NO: 71340 - DNA, 25 bp, Homo sapien
gggagttggcattggcgatttcatt

SEQ ID NO: 71341 - DNA, 25 bp, Homo sapien
gtgatacatgtggcgatcgatcttc

SEQ ID NO: 71342 - DNA, 25 bp, Homo sapien
gaggccagtatgtacagacaaagtg

SEQ ID NO: 71343 - DNA, 25 bp, Homo sapien
gggagttggcattggcgatttcatt

SEQ ID NO: 71344 - DNA, 25 bp, Homo sapien
cttggtcttagacctgcgggcctca

SEQ ID NO: 71345 - DNA, 25 bp, Homo sapien
gcccatgtgcctgcccttccggcgg

SEQ ID NO: 71346 - DNA, 25 bp, Homo sapien
gtgatacatgtggcgatcgatcttc

SEQ ID NO: 71347 - DNA, 25 bp, Homo sapien
gcagccggcgcaaaatcctcattct

SEQ ID NO: 71348 - DNA, 25 bp, Homo sapien
cggtatcttctgagcagccggcgca

SEQ ID NO: 71349 - DNA, 25 bp, Homo sapien
attcgggcattggctgtacccttcc

SEQ ID NO: 71350 - DNA, 25 bp, Homo sapien
ttttccggcatcgagcccgggaatg

SEQ ID NO: 71351 - DNA, 25 bp, Homo sapien
gaggccagtatgtacagacaaagtg

SEQ ID NO: 71352 - DNA, 25 bp, Homo sapien
gaccgtcacaggcttgcggatgatc

SEQ ID NO: 71353 - DNA, 25 bp, Homo sapien
ggaggcgctcttcacggcgcttgcg

SEQ ID NO: 71354 - DNA, 25 bp, Homo sapien
gaccgtcacaggcttgcggatgatc

SEQ ID NO: 71355 - DNA, 25 bp, Homo sapien
ttttccggcatcgagcccgggaatg

SEQ ID NO: 71356 - DNA, 25 bp, Homo sapien
gcccatgtgcctgcccttccggcgg

SEQ ID NO: 71357 - DNA, 25 bp, Homo sapien
attcgggcattggctgtacccttcc

SEQ ID NO: 71358 - DNA, 25 bp, Homo sapien
gcagccggcgcaaaatcctcattct

SEQ ID NO: 71359 - DNA, 25 bp, Homo sapien
cggtatcttctgagcagccggcgca

SEQ ID NO: 71360 - DNA, 25 bp, Homo sapien
gtgatacatgtggcgatcgatcttc

SEQ ID NO: 71361 - DNA, 25 bp, Homo sapien
cttggtcttagacctgcgggcctca

SEQ ID NO: 71362 - DNA, 25 bp, Homo sapien
ggaggcgctcttcacggcgcttgcg

SEQ ID NO: 71363 - DNA, 25 bp, Homo sapien
gaggccagtatgtacagacaaagtg

SEQ ID NO: 71364 - DNA, 25 bp, Homo sapien
gggagttggcattggcgatttcatt

SEQ ID NO: 71365 - DNA, 25 bp, Homo sapien
gcagccggcgcaaaatcctcattct

SEQ ID NO: 71366 - DNA, 25 bp, Homo sapien
ggaggcgctcttcacggcgcttgcg

SEQ ID NO: 71367 - DNA, 25 bp, Homo sapien
gggagttggcattggcgatttcatt

SEQ ID NO: 71368 - DNA, 25 bp, Homo sapien
ttttccggcatcgagcccgggaatg

SEQ ID NO: 71369 - DNA, 25 bp, Homo sapien
cttggtcttagacctgcgggcctca

SEQ ID NO: 71370 - DNA, 25 bp, Homo sapien
gaccgtcacaggcttgcggatgatc

SEQ ID NO: 71371 - DNA, 25 bp, Homo sapien
cggtatcttctgagcagccggcgca

SEQ ID NO: 71372 - DNA, 25 bp, Homo sapien
gaggccagtatgtacagacaaagtg

SEQ ID NO: 71373 - DNA, 25 bp, Homo sapien
gtgatacatgtggcgatcgatcttc

SEQ ID NO: 71374 - DNA, 25 bp, Homo sapien
gcccatgtgcctgcccttccggcgg

SEQ ID NO: 71375 - DNA, 25 bp, Homo sapien
attcgggcattggctgtacccttcc

SEQ ID NO: 71376 - DNA, 25 bp, Homo sapien
gaccgtcacaggcttgcggatgatc

SEQ ID NO: 71377 - DNA, 25 bp, Homo sapien
ttttccggcatcgagcccgggaatg

SEQ ID NO: 71378 - DNA, 25 bp, Homo sapien
gcccatgtgcctgcccttccggcgg

SEQ ID NO: 71379 - DNA, 25 bp, Homo sapien
attcgggcattggctgtacccttcc

SEQ ID NO: 71380 - DNA, 25 bp, Homo sapien
gcagccggcgcaaaatcctcattct

SEQ ID NO: 71381 - DNA, 25 bp, Homo sapien
cggtatcttctgagcagccggcgca

SEQ ID NO: 71382 - DNA, 25 bp, Homo sapien
gtgatacatgtggcgatcgatcttc

SEQ ID NO: 71383 - DNA, 25 bp, Homo sapien
cttggtcttagacctgcgggcctca

SEQ ID NO: 71384 - DNA, 25 bp, Homo sapien
ggaggcgctcttcacggcgcttgcg

SEQ ID NO: 71385 - DNA, 25 bp, Homo sapien
gaggccagtatgtacagacaaagtg

SEQ ID NO: 71386 - DNA, 25 bp, Homo sapien
gggagttggcattggcgatttcatt

SEQ ID NO: 71387 - DNA, 25 bp, Homo sapien
gaggccagtatgtacagacaaagtg

SEQ ID NO: 71388 - DNA, 25 bp, Homo sapien
cggtatcttctgagcagccggcgca

SEQ ID NO: 71389 - DNA, 25 bp, Homo sapien
attcgggcattggctgtacccttcc

SEQ ID NO: 71390 - DNA, 25 bp, Homo sapien
gggagttggcattggcgatttcatt

SEQ ID NO: 71391 - DNA, 25 bp, Homo sapien
ggaggcgctcttcacggcgcttgcg

SEQ ID NO: 71392 - DNA, 25 bp, Homo sapien
gtgatacatgtggcgatcgatcttc

SEQ ID NO: 71393 - DNA, 25 bp, Homo sapien
gcagccggcgcaaaatcctcattct

SEQ ID NO: 71394 - DNA, 25 bp, Homo sapien
ttttccggcatcgagcccgggaatg

SEQ ID NO: 71395 - DNA, 25 bp, Homo sapien
cttggtcttagacctgcgggcctca

SEQ ID NO: 71396 - DNA, 25 bp, Homo sapien
gaccgtcacaggcttgcggatgatc

SEQ ID NO: 71397 - DNA, 25 bp, Homo sapien
gcccatgtgcctgcccttccggcgg

SEQ ID NO: 71398 - DNA, 25 bp, Homo sapien
gaccgtcacaggcttgcggatgatc

SEQ ID NO: 71399 - DNA, 25 bp, Homo sapien
ttttccggcatcgagcccgggaatg

SEQ ID NO: 71400 - DNA, 25 bp, Homo sapien
gcccatgtgcctgcccttccggcgg

SEQ ID NO: 71401 - DNA, 25 bp, Homo sapien
attcgggcattggctgtacccttcc

SEQ ID NO: 71402 - DNA, 25 bp, Homo sapien
gcagccggcgcaaaatcctcattct

SEQ ID NO: 71403 - DNA, 25 bp, Homo sapien
cggtatcttctgagcagccggcgca

SEQ ID NO: 71404 - DNA, 25 bp, Homo sapien
gtgatacatgtggcgatcgatcttc

SEQ ID NO: 71405 - DNA, 25 bp, Homo sapien
cttggtcttagacctgcgggcctca

SEQ ID NO: 71406 - DNA, 25 bp, Homo sapien
ggaggcgctcttcacggcgcttgcg

SEQ ID NO: 71407 - DNA, 25 bp, Homo sapien
gaggccagtatgtacagacaaagtg

SEQ ID NO: 71408 - DNA, 25 bp, Homo sapien
gggagttggcattggcgatttcatt

SEQ ID NO: 71409 - DNA, 25 bp, Homo sapien
agtctcttgaggaccagagaagcac

SEQ ID NO: 71410 - DNA, 25 bp, Homo sapien
tcaacagtacgttcaaagcaggcga

SEQ ID NO: 71411 - DNA, 25 bp, Homo sapien
aagcaggcgaacttcatcatggtgt

SEQ ID NO: 71412 - DNA, 25 bp, Homo sapien
acagataccacagaatcagcagggt

SEQ ID NO: 71413 - DNA, 25 bp, Homo sapien
ggaccagagaagcactgctaccttt

SEQ ID NO: 71414 - DNA, 25 bp, Homo sapien
gaggaagtctgaagtagaccttcac

SEQ ID NO: 71415 - DNA, 25 bp, Homo sapien
tgaacattcactgcggggcttagga

SEQ ID NO: 71416 - DNA, 25 bp, Homo sapien
cttcacggagtcatagataaaccac

SEQ ID NO: 71417 - DNA, 25 bp, Homo sapien
ggcttaggaaccacaaacttgtaca

SEQ ID NO: 71418 - DNA, 25 bp, Homo sapien
aaccactgtagtgcagtcagggtac

SEQ ID NO: 71419 - DNA, 25 bp, Homo sapien
gcagtcagggtaccaatcatgatga

SEQ ID NO: 71420 - DNA, 25 bp, Homo sapien
aagcaggcgaacttcatcatggtgt

SEQ ID NO: 71421 - DNA, 25 bp, Homo sapien
tcaacagtacgttcaaagcaggcga

SEQ ID NO: 71422 - DNA, 25 bp, Homo sapien
ggcttaggaaccacaaacttgtaca

SEQ ID NO: 71423 - DNA, 25 bp, Homo sapien
tgaacattcactgcggggcttagga

SEQ ID NO: 71424 - DNA, 25 bp, Homo sapien
acagataccacagaatcagcagggt

SEQ ID NO: 71425 - DNA, 25 bp, Homo sapien
ggaccagagaagcactgctaccttt

SEQ ID NO: 71426 - DNA, 25 bp, Homo sapien
agtctcttgaggaccagagaagcac

SEQ ID NO: 71427 - DNA, 25 bp, Homo sapien
gcagtcagggtaccaatcatgatga

SEQ ID NO: 71428 - DNA, 25 bp, Homo sapien
aaccactgtagtgcagtcagggtac

SEQ ID NO: 71429 - DNA, 25 bp, Homo sapien
cttcacggagtcatagataaaccac

SEQ ID NO: 71430 - DNA, 25 bp, Homo sapien
gaggaagtctgaagtagaccttcac

SEQ ID NO: 71431 - DNA, 25 bp, Homo sapien
tgaacattcactgcggggcttagga

SEQ ID NO: 71432 - DNA, 25 bp, Homo sapien
acagataccacagaatcagcagggt

SEQ ID NO: 71433 - DNA, 25 bp, Homo sapien
cttcacggagtcatagataaaccac

SEQ ID NO: 71434 - DNA, 25 bp, Homo sapien
gcagtcagggtaccaatcatgatga

SEQ ID NO: 71435 - DNA, 25 bp, Homo sapien
ggcttaggaaccacaaacttgtaca

SEQ ID NO: 71436 - DNA, 25 bp, Homo sapien
aagcaggcgaacttcatcatggtgt

SEQ ID NO: 71437 - DNA, 25 bp, Homo sapien
ggaccagagaagcactgctaccttt

SEQ ID NO: 71438 - DNA, 25 bp, Homo sapien
aaccactgtagtgcagtcagggtac

SEQ ID NO: 71439 - DNA, 25 bp, Homo sapien
agtctcttgaggaccagagaagcac

SEQ ID NO: 71440 - DNA, 25 bp, Homo sapien
tcaacagtacgttcaaagcaggcga

SEQ ID NO: 71441 - DNA, 25 bp, Homo sapien
gaggaagtctgaagtagaccttcac

SEQ ID NO: 71442 - DNA, 25 bp, Homo sapien
agtctcttgaggaccagagaagcac

SEQ ID NO: 71443 - DNA, 25 bp, Homo sapien
gcagtcagggtaccaatcatgatga

SEQ ID NO: 71444 - DNA, 25 bp, Homo sapien
aaccactgtagtgcagtcagggtac

SEQ ID NO: 71445 - DNA, 25 bp, Homo sapien
cttcacggagtcatagataaaccac

SEQ ID NO: 71446 - DNA, 25 bp, Homo sapien
gaggaagtctgaagtagaccttcac

SEQ ID NO: 71447 - DNA, 25 bp, Homo sapien
aagcaggcgaacttcatcatggtgt

SEQ ID NO: 71448 - DNA, 25 bp, Homo sapien
tcaacagtacgttcaaagcaggcga

SEQ ID NO: 71449 - DNA, 25 bp, Homo sapien
ggcttaggaaccacaaacttgtaca

SEQ ID NO: 71450 - DNA, 25 bp, Homo sapien
tgaacattcactgcggggcttagga

SEQ ID NO: 71451 - DNA, 25 bp, Homo sapien
acagataccacagaatcagcagggt

SEQ ID NO: 71452 - DNA, 25 bp, Homo sapien
ggaccagagaagcactgctaccttt

SEQ ID NO: 71453 - DNA, 25 bp, Homo sapien
gcagtcagggtaccaatcatgatga

SEQ ID NO: 71454 - DNA, 25 bp, Homo sapien
aagcaggcgaacttcatcatggtgt

SEQ ID NO: 71455 - DNA, 25 bp, Homo sapien
ggaccagagaagcactgctaccttt

SEQ ID NO: 71456 - DNA, 25 bp, Homo sapien
aaccactgtagtgcagtcagggtac

SEQ ID NO: 71457 - DNA, 25 bp, Homo sapien
tcaacagtacgttcaaagcaggcga

SEQ ID NO: 71458 - DNA, 25 bp, Homo sapien
agtctcttgaggaccagagaagcac

SEQ ID NO: 71459 - DNA, 25 bp, Homo sapien
tgaacattcactgcggggcttagga

SEQ ID NO: 71460 - DNA, 25 bp, Homo sapien
acagataccacagaatcagcagggt

SEQ ID NO: 71461 - DNA, 25 bp, Homo sapien
ggcttaggaaccacaaacttgtaca

SEQ ID NO: 71462 - DNA, 25 bp, Homo sapien
gaggaagtctgaagtagaccttcac

SEQ ID NO: 71463 - DNA, 25 bp, Homo sapien
cttcacggagtcatagataaaccac

SEQ ID NO: 71464 - DNA, 25 bp, Homo sapien
aagcaggcgaacttcatcatggtgt

SEQ ID NO: 71465 - DNA, 25 bp, Homo sapien
tcaacagtacgttcaaagcaggcga

SEQ ID NO: 71466 - DNA, 25 bp, Homo sapien
ggcttaggaaccacaaacttgtaca

SEQ ID NO: 71467 - DNA, 25 bp, Homo sapien
tgaacattcactgcggggcttagga

SEQ ID NO: 71468 - DNA, 25 bp, Homo sapien
acagataccacagaatcagcagggt

SEQ ID NO: 71469 - DNA, 25 bp, Homo sapien
ggaccagagaagcactgctaccttt

SEQ ID NO: 71470 - DNA, 25 bp, Homo sapien
agtctcttgaggaccagagaagcac

SEQ ID NO: 71471 - DNA, 25 bp, Homo sapien
gcagtcagggtaccaatcatgatga

SEQ ID NO: 71472 - DNA, 25 bp, Homo sapien
aaccactgtagtgcagtcagggtac

SEQ ID NO: 71473 - DNA, 25 bp, Homo sapien
cttcacggagtcatagataaaccac

SEQ ID NO: 71474 - DNA, 25 bp, Homo sapien
gaggaagtctgaagtagaccttcac

SEQ ID NO: 71475 - DNA, 25 bp, Homo sapien
aagcaggcgaacttcatcatggtgt

SEQ ID NO: 71476 - DNA, 25 bp, Homo sapien
tcaacagtacgttcaaagcaggcga

SEQ ID NO: 71477 - DNA, 25 bp, Homo sapien
ggcttaggaaccacaaacttgtaca

SEQ ID NO: 71478 - DNA, 25 bp, Homo sapien
tgaacattcactgcggggcttagga

SEQ ID NO: 71479 - DNA, 25 bp, Homo sapien
acagataccacagaatcagcagggt

SEQ ID NO: 71480 - DNA, 25 bp, Homo sapien
ggaccagagaagcactgctaccttt

SEQ ID NO: 71481 - DNA, 25 bp, Homo sapien
agtctcttgaggaccagagaagcac

SEQ ID NO: 71482 - DNA, 25 bp, Homo sapien
gcagtcagggtaccaatcatgatga

SEQ ID NO: 71483 - DNA, 25 bp, Homo sapien
aaccactgtagtgcagtcagggtac

SEQ ID NO: 71484 - DNA, 25 bp, Homo sapien
cttcacggagtcatagataaaccac

SEQ ID NO: 71485 - DNA, 25 bp, Homo sapien
gaggaagtctgaagtagaccttcac

SEQ ID NO: 71486 - DNA, 25 bp, Homo sapien
acagataccacagaatcagcagggt

SEQ ID NO: 71487 - DNA, 25 bp, Homo sapien
agtctcttgaggaccagagaagcac

SEQ ID NO: 71488 - DNA, 25 bp, Homo sapien
gcagtcagggtaccaatcatgatga

SEQ ID NO: 71489 - DNA, 25 bp, Homo sapien
aaccactgtagtgcagtcagggtac

SEQ ID NO: 71490 - DNA, 25 bp, Homo sapien
ggcttaggaaccacaaacttgtaca

SEQ ID NO: 71491 - DNA, 25 bp, Homo sapien
ggaccagagaagcactgctaccttt

SEQ ID NO: 71492 - DNA, 25 bp, Homo sapien
aagcaggcgaacttcatcatggtgt

SEQ ID NO: 71493 - DNA, 25 bp, Homo sapien
gaggaagtctgaagtagaccttcac

SEQ ID NO: 71494 - DNA, 25 bp, Homo sapien
tgaacattcactgcggggcttagga

SEQ ID NO: 71495 - DNA, 25 bp, Homo sapien
tcaacagtacgttcaaagcaggcga

SEQ ID NO: 71496 - DNA, 25 bp, Homo sapien
cttcacggagtcatagataaaccac

SEQ ID NO: 71497 - DNA, 25 bp, Homo sapien
aagcaggcgaacttcatcatggtgt

SEQ ID NO: 71498 - DNA, 25 bp, Homo sapien
tcaacagtacgttcaaagcaggcga

SEQ ID NO: 71499 - DNA, 25 bp, Homo sapien
ggcttaggaaccacaaacttgtaca

SEQ ID NO: 71500 - DNA, 25 bp, Homo sapien
tgaacattcactgcggggcttagga

SEQ ID NO: 71501 - DNA, 25 bp, Homo sapien
acagataccacagaatcagcagggt

SEQ ID NO: 71502 - DNA, 25 bp, Homo sapien
ggaccagagaagcactgctaccttt

SEQ ID NO: 71503 - DNA, 25 bp, Homo sapien
agtctcttgaggaccagagaagcac

SEQ ID NO: 71504 - DNA, 25 bp, Homo sapien
gcagtcagggtaccaatcatgatga

SEQ ID NO: 71505 - DNA, 25 bp, Homo sapien
aaccactgtagtgcagtcagggtac

SEQ ID NO: 71506 - DNA, 25 bp, Homo sapien
cttcacggagtcatagataaaccac

SEQ ID NO: 71507 - DNA, 25 bp, Homo sapien
gaggaagtctgaagtagaccttcac

SEQ ID NO: 71508 - DNA, 25 bp, Homo sapien
agtctcttgaggaccagagaagcac

SEQ ID NO: 71509 - DNA, 25 bp, Homo sapien
acagataccacagaatcagcagggt

SEQ ID NO: 71510 - DNA, 25 bp, Homo sapien
tcaacagtacgttcaaagcaggcga

SEQ ID NO: 71511 - DNA, 25 bp, Homo sapien
ggaccagagaagcactgctaccttt

SEQ ID NO: 71512 - DNA, 25 bp, Homo sapien
aagcaggcgaacttcatcatggtgt

SEQ ID NO: 71513 - DNA, 25 bp, Homo sapien
tgaacattcactgcggggcttagga

SEQ ID NO: 71514 - DNA, 25 bp, Homo sapien
gaggaagtctgaagtagaccttcac

SEQ ID NO: 71515 - DNA, 25 bp, Homo sapien
cttcacggagtcatagataaaccac

SEQ ID NO: 71516 - DNA, 25 bp, Homo sapien
aaccactgtagtgcagtcagggtac

SEQ ID NO: 71517 - DNA, 25 bp, Homo sapien
ggcttaggaaccacaaacttgtaca

SEQ ID NO: 71518 - DNA, 25 bp, Homo sapien
gcagtcagggtaccaatcatgatga

SEQ ID NO: 71519 - DNA, 25 bp, Homo sapien
aagcaggcgaacttcatcatggtgt

SEQ ID NO: 71520 - DNA, 25 bp, Homo sapien
tcaacagtacgttcaaagcaggcga

SEQ ID NO: 71521 - DNA, 25 bp, Homo sapien
ggcttaggaaccacaaacttgtaca

SEQ ID NO: 71522 - DNA, 25 bp, Homo sapien
tgaacattcactgcggggcttagga

SEQ ID NO: 71523 - DNA, 25 bp, Homo sapien
acagataccacagaatcagcagggt

SEQ ID NO: 71524 - DNA, 25 bp, Homo sapien
ggaccagagaagcactgctaccttt

SEQ ID NO: 71525 - DNA, 25 bp, Homo sapien
agtctcttgaggaccagagaagcac

SEQ ID NO: 71526 - DNA, 25 bp, Homo sapien
gcagtcagggtaccaatcatgatga

SEQ ID NO: 71527 - DNA, 25 bp, Homo sapien
aaccactgtagtgcagtcagggtac

SEQ ID NO: 71528 - DNA, 25 bp, Homo sapien
cttcacggagtcatagataaaccac

SEQ ID NO: 71529 - DNA, 25 bp, Homo sapien
gaggaagtctgaagtagaccttcac

SEQ ID NO: 71530 - DNA, 25 bp, Homo sapien
gaggaagtctgaagtagaccttcac

SEQ ID NO: 71531 - DNA, 25 bp, Homo sapien
cttcacggagtcatagataaaccac

SEQ ID NO: 71532 - DNA, 25 bp, Homo sapien
aaccactgtagtgcagtcagggtac

SEQ ID NO: 71533 - DNA, 25 bp, Homo sapien
ggaccagagaagcactgctaccttt

SEQ ID NO: 71534 - DNA, 25 bp, Homo sapien
acagataccacagaatcagcagggt

SEQ ID NO: 71535 - DNA, 25 bp, Homo sapien
agtctcttgaggaccagagaagcac

SEQ ID NO: 71536 - DNA, 25 bp, Homo sapien
ggcttaggaaccacaaacttgtaca

SEQ ID NO: 71537 - DNA, 25 bp, Homo sapien
gcagtcagggtaccaatcatgatga

SEQ ID NO: 71538 - DNA, 25 bp, Homo sapien
aagcaggcgaacttcatcatggtgt

SEQ ID NO: 71539 - DNA, 25 bp, Homo sapien
tgaacattcactgcggggcttagga

SEQ ID NO: 71540 - DNA, 25 bp, Homo sapien
tcaacagtacgttcaaagcaggcga

SEQ ID NO: 71541 - DNA, 25 bp, Homo sapien
aagcaggcgaacttcatcatggtgt

SEQ ID NO: 71542 - DNA, 25 bp, Homo sapien
tcaacagtacgttcaaagcaggcga

SEQ ID NO: 71543 - DNA, 25 bp, Homo sapien
ggcttaggaaccacaaacttgtaca

SEQ ID NO: 71544 - DNA, 25 bp, Homo sapien
tgaacattcactgcggggcttagga

SEQ ID NO: 71545 - DNA, 25 bp, Homo sapien
acagataccacagaatcagcagggt

SEQ ID NO: 71546 - DNA, 25 bp, Homo sapien
ggaccagagaagcactgctaccttt

SEQ ID NO: 71547 - DNA, 25 bp, Homo sapien
agtctcttgaggaccagagaagcac

SEQ ID NO: 71548 - DNA, 25 bp, Homo sapien
gcagtcagggtaccaatcatgatga

SEQ ID NO: 71549 - DNA, 25 bp, Homo sapien
aaccactgtagtgcagtcagggtac

SEQ ID NO: 71550 - DNA, 25 bp, Homo sapien
cttcacggagtcatagataaaccac

SEQ ID NO: 71551 - DNA, 25 bp, Homo sapien
gaggaagtctgaagtagaccttcac

SEQ ID NO: 71552 - DNA, 25 bp, Homo sapien
gaggaagtctgaagtagaccttcac

SEQ ID NO: 71553 - DNA, 25 bp, Homo sapien
cttcacggagtcatagataaaccac

SEQ ID NO: 71554 - DNA, 25 bp, Homo sapien
ggcttaggaaccacaaacttgtaca

SEQ ID NO: 71555 - DNA, 25 bp, Homo sapien
agtctcttgaggaccagagaagcac

SEQ ID NO: 71556 - DNA, 25 bp, Homo sapien
tgaacattcactgcggggcttagga

SEQ ID NO: 71557 - DNA, 25 bp, Homo sapien
gcagtcagggtaccaatcatgatga

SEQ ID NO: 71558 - DNA, 25 bp, Homo sapien
aagcaggcgaacttcatcatggtgt

SEQ ID NO: 71559 - DNA, 25 bp, Homo sapien
aaccactgtagtgcagtcagggtac

SEQ ID NO: 71560 - DNA, 25 bp, Homo sapien
tcaacagtacgttcaaagcaggcga

SEQ ID NO: 71561 - DNA, 25 bp, Homo sapien
acagataccacagaatcagcagggt

SEQ ID NO: 71562 - DNA, 25 bp, Homo sapien
ggaccagagaagcactgctaccttt

SEQ ID NO: 71563 - DNA, 25 bp, Homo sapien
aagcaggcgaacttcatcatggtgt

SEQ ID NO: 71564 - DNA, 25 bp, Homo sapien
tcaacagtacgttcaaagcaggcga

SEQ ID NO: 71565 - DNA, 25 bp, Homo sapien
ggcttaggaaccacaaacttgtaca

SEQ ID NO: 71566 - DNA, 25 bp, Homo sapien
tgaacattcactgcggggcttagga

SEQ ID NO: 71567 - DNA, 25 bp, Homo sapien
acagataccacagaatcagcagggt

SEQ ID NO: 71568 - DNA, 25 bp, Homo sapien
ggaccagagaagcactgctaccttt

SEQ ID NO: 71569 - DNA, 25 bp, Homo sapien
agtctcttgaggaccagagaagcac

SEQ ID NO: 71570 - DNA, 25 bp, Homo sapien
gcagtcagggtaccaatcatgatga

SEQ ID NO: 71571 - DNA, 25 bp, Homo sapien
aaccactgtagtgcagtcagggtac

SEQ ID NO: 71572 - DNA, 25 bp, Homo sapien
cttcacggagtcatagataaaccac

SEQ ID NO: 71573 - DNA, 25 bp, Homo sapien
gaggaagtctgaagtagaccttcac

SEQ ID NO: 71574 - DNA, 25 bp, Homo sapien
acagataccacagaatcagcagggt

SEQ ID NO: 71575 - DNA, 25 bp, Homo sapien
ggaccagagaagcactgctaccttt

SEQ ID NO: 71576 - DNA, 25 bp, Homo sapien
gaggaagtctgaagtagaccttcac

SEQ ID NO: 71577 - DNA, 25 bp, Homo sapien
cttcacggagtcatagataaaccac

SEQ ID NO: 71578 - DNA, 25 bp, Homo sapien
ggcttaggaaccacaaacttgtaca

SEQ ID NO: 71579 - DNA, 25 bp, Homo sapien
aaccactgtagtgcagtcagggtac

SEQ ID NO: 71580 - DNA, 25 bp, Homo sapien
tgaacattcactgcggggcttagga

SEQ ID NO: 71581 - DNA, 25 bp, Homo sapien
aagcaggcgaacttcatcatggtgt

SEQ ID NO: 71582 - DNA, 25 bp, Homo sapien
tcaacagtacgttcaaagcaggcga

SEQ ID NO: 71583 - DNA, 25 bp, Homo sapien
agtctcttgaggaccagagaagcac

SEQ ID NO: 71584 - DNA, 25 bp, Homo sapien
gcagtcagggtaccaatcatgatga

SEQ ID NO: 71585 - DNA, 25 bp, Homo sapien
tgaacattcactgcggggcttagga

SEQ ID NO: 71586 - DNA, 25 bp, Homo sapien
ggaccagagaagcactgctaccttt

SEQ ID NO: 71587 - DNA, 25 bp, Homo sapien
cttcacggagtcatagataaaccac

SEQ ID NO: 71588 - DNA, 25 bp, Homo sapien
aaccactgtagtgcagtcagggtac

SEQ ID NO: 71589 - DNA, 25 bp, Homo sapien
ggcttaggaaccacaaacttgtaca

SEQ ID NO: 71590 - DNA, 25 bp, Homo sapien
aagcaggcgaacttcatcatggtgt

SEQ ID NO: 71591 - DNA, 25 bp, Homo sapien
agtctcttgaggaccagagaagcac

SEQ ID NO: 71592 - DNA, 25 bp, Homo sapien
acagataccacagaatcagcagggt

SEQ ID NO: 71593 - DNA, 25 bp, Homo sapien
gaggaagtctgaagtagaccttcac

SEQ ID NO: 71594 - DNA, 25 bp, Homo sapien
tcaacagtacgttcaaagcaggcga

SEQ ID NO: 71595 - DNA, 25 bp, Homo sapien
gcagtcagggtaccaatcatgatga

SEQ ID NO: 71596 - DNA, 25 bp, Homo sapien
aagcaggcgaacttcatcatggtgt

SEQ ID NO: 71597 - DNA, 25 bp, Homo sapien
tcaacagtacgttcaaagcaggcga

SEQ ID NO: 71598 - DNA, 25 bp, Homo sapien
ggcttaggaaccacaaacttgtaca

SEQ ID NO: 71599 - DNA, 25 bp, Homo sapien
tgaacattcactgcggggcttagga

SEQ ID NO: 71600 - DNA, 25 bp, Homo sapien
acagataccacagaatcagcagggt

SEQ ID NO: 71601 - DNA, 25 bp, Homo sapien
ggaccagagaagcactgctaccttt

SEQ ID NO: 71602 - DNA, 25 bp, Homo sapien
agtctcttgaggaccagagaagcac

SEQ ID NO: 71603 - DNA, 25 bp, Homo sapien
gcagtcagggtaccaatcatgatga

SEQ ID NO: 71604 - DNA, 25 bp, Homo sapien
aaccactgtagtgcagtcagggtac

SEQ ID NO: 71605 - DNA, 25 bp, Homo sapien
cttcacggagtcatagataaaccac

SEQ ID NO: 71606 - DNA, 25 bp, Homo sapien
gaggaagtctgaagtagaccttcac

SEQ ID NO: 71607 - DNA, 25 bp, Homo sapien
aagcaggcgaacttcatcatggtgt

SEQ ID NO: 71608 - DNA, 25 bp, Homo sapien
tgaacattcactgcggggcttagga

SEQ ID NO: 71609 - DNA, 25 bp, Homo sapien
tcaacagtacgttcaaagcaggcga

SEQ ID NO: 71610 - DNA, 25 bp, Homo sapien
cttcacggagtcatagataaaccac

SEQ ID NO: 71611 - DNA, 25 bp, Homo sapien
agtctcttgaggaccagagaagcac

SEQ ID NO: 71612 - DNA, 25 bp, Homo sapien
gcagtcagggtaccaatcatgatga

SEQ ID NO: 71613 - DNA, 25 bp, Homo sapien
ggcttaggaaccacaaacttgtaca

SEQ ID NO: 71614 - DNA, 25 bp, Homo sapien
acagataccacagaatcagcagggt

SEQ ID NO: 71615 - DNA, 25 bp, Homo sapien
ggaccagagaagcactgctaccttt

SEQ ID NO: 71616 - DNA, 25 bp, Homo sapien
aaccactgtagtgcagtcagggtac

SEQ ID NO: 71617 - DNA, 25 bp, Homo sapien
gaggaagtctgaagtagaccttcac

SEQ ID NO: 71618 - DNA, 25 bp, Homo sapien
aagcaggcgaacttcatcatggtgt

SEQ ID NO: 71619 - DNA, 25 bp, Homo sapien
tcaacagtacgttcaaagcaggcga

SEQ ID NO: 71620 - DNA, 25 bp, Homo sapien
ggcttaggaaccacaaacttgtaca

SEQ ID NO: 71621 - DNA, 25 bp, Homo sapien
tgaacattcactgcggggcttagga

SEQ ID NO: 71622 - DNA, 25 bp, Homo sapien
acagataccacagaatcagcagggt

SEQ ID NO: 71623 - DNA, 25 bp, Homo sapien
ggaccagagaagcactgctaccttt

SEQ ID NO: 71624 - DNA, 25 bp, Homo sapien
agtctcttgaggaccagagaagcac

SEQ ID NO: 71625 - DNA, 25 bp, Homo sapien
gcagtcagggtaccaatcatgatga

SEQ ID NO: 71626 - DNA, 25 bp, Homo sapien
aaccactgtagtgcagtcagggtac

SEQ ID NO: 71627 - DNA, 25 bp, Homo sapien
cttcacggagtcatagataaaccac

SEQ ID NO: 71628 - DNA, 25 bp, Homo sapien
gaggaagtctgaagtagaccttcac

SEQ ID NO: 71629 - DNA, 25 bp, Homo sapien
agtctcttgaggaccagagaagcac

SEQ ID NO: 71630 - DNA, 25 bp, Homo sapien
ggcttaggaaccacaaacttgtaca

SEQ ID NO: 71631 - DNA, 25 bp, Homo sapien
tcaacagtacgttcaaagcaggcga

SEQ ID NO: 71632 - DNA, 25 bp, Homo sapien
ggaccagagaagcactgctaccttt

SEQ ID NO: 71633 - DNA, 25 bp, Homo sapien
gcagtcagggtaccaatcatgatga

SEQ ID NO: 71634 - DNA, 25 bp, Homo sapien
acagataccacagaatcagcagggt

SEQ ID NO: 71635 - DNA, 25 bp, Homo sapien
aaccactgtagtgcagtcagggtac

SEQ ID NO: 71636 - DNA, 25 bp, Homo sapien
aagcaggcgaacttcatcatggtgt

SEQ ID NO: 71637 - DNA, 25 bp, Homo sapien
tgaacattcactgcggggcttagga

SEQ ID NO: 71638 - DNA, 25 bp, Homo sapien
cttcacggagtcatagataaaccac

SEQ ID NO: 71639 - DNA, 25 bp, Homo sapien
gaggaagtctgaagtagaccttcac

SEQ ID NO: 71640 - DNA, 25 bp, Homo sapien
aagcaggcgaacttcatcatggtgt

SEQ ID NO: 71641 - DNA, 25 bp, Homo sapien
tcaacagtacgttcaaagcaggcga

SEQ ID NO: 71642 - DNA, 25 bp, Homo sapien
ggcttaggaaccacaaacttgtaca

SEQ ID NO: 71643 - DNA, 25 bp, Homo sapien
tgaacattcactgcggggcttagga

SEQ ID NO: 71644 - DNA, 25 bp, Homo sapien
acagataccacagaatcagcagggt

SEQ ID NO: 71645 - DNA, 25 bp, Homo sapien
ggaccagagaagcactgctaccttt

SEQ ID NO: 71646 - DNA, 25 bp, Homo sapien
agtctcttgaggaccagagaagcac

SEQ ID NO: 71647 - DNA, 25 bp, Homo sapien
gcagtcagggtaccaatcatgatga

SEQ ID NO: 71648 - DNA, 25 bp, Homo sapien
aaccactgtagtgcagtcagggtac

SEQ ID NO: 71649 - DNA, 25 bp, Homo sapien
cttcacggagtcatagataaaccac

SEQ ID NO: 71650 - DNA, 25 bp, Homo sapien
gaggaagtctgaagtagaccttcac

SEQ ID NO: 71651 - DNA, 25 bp, Homo sapien
ggaccagagaagcactgctaccttt

SEQ ID NO: 71652 - DNA, 25 bp, Homo sapien
tcaacagtacgttcaaagcaggcga

SEQ ID NO: 71653 - DNA, 25 bp, Homo sapien
acagataccacagaatcagcagggt

SEQ ID NO: 71654 - DNA, 25 bp, Homo sapien
ggcttaggaaccacaaacttgtaca

SEQ ID NO: 71655 - DNA, 25 bp, Homo sapien
cttcacggagtcatagataaaccac

SEQ ID NO: 71656 - DNA, 25 bp, Homo sapien
agtctcttgaggaccagagaagcac

SEQ ID NO: 71657 - DNA, 25 bp, Homo sapien
aaccactgtagtgcagtcagggtac

SEQ ID NO: 71658 - DNA, 25 bp, Homo sapien
aagcaggcgaacttcatcatggtgt

SEQ ID NO: 71659 - DNA, 25 bp, Homo sapien
gcagtcagggtaccaatcatgatga

SEQ ID NO: 71660 - DNA, 25 bp, Homo sapien
gaggaagtctgaagtagaccttcac

SEQ ID NO: 71661 - DNA, 25 bp, Homo sapien
tgaacattcactgcggggcttagga

SEQ ID NO: 71662 - DNA, 25 bp, Homo sapien
aagcaggcgaacttcatcatggtgt

SEQ ID NO: 71663 - DNA, 25 bp, Homo sapien
tcaacagtacgttcaaagcaggcga

SEQ ID NO: 71664 - DNA, 25 bp, Homo sapien
ggcttaggaaccacaaacttgtaca

SEQ ID NO: 71665 - DNA, 25 bp, Homo sapien
tgaacattcactgcggggcttagga

SEQ ID NO: 71666 - DNA, 25 bp, Homo sapien
acagataccacagaatcagcagggt

SEQ ID NO: 71667 - DNA, 25 bp, Homo sapien
ggaccagagaagcactgctaccttt

SEQ ID NO: 71668 - DNA, 25 bp, Homo sapien
agtctcttgaggaccagagaagcac

SEQ ID NO: 71669 - DNA, 25 bp, Homo sapien
gcagtcagggtaccaatcatgatga

SEQ ID NO: 71670 - DNA, 25 bp, Homo sapien
aaccactgtagtgcagtcagggtac

SEQ ID NO: 71671 - DNA, 25 bp, Homo sapien
cttcacggagtcatagataaaccac

SEQ ID NO: 71672 - DNA, 25 bp, Homo sapien
gaggaagtctgaagtagaccttcac

SEQ ID NO: 71673 - DNA, 25 bp, Homo sapien
gaggaagtctgaagtagaccttcac

SEQ ID NO: 71674 - DNA, 25 bp, Homo sapien
ggaccagagaagcactgctaccttt

SEQ ID NO: 71675 - DNA, 25 bp, Homo sapien
gcagtcagggtaccaatcatgatga

SEQ ID NO: 71676 - DNA, 25 bp, Homo sapien
tcaacagtacgttcaaagcaggcga

SEQ ID NO: 71677 - DNA, 25 bp, Homo sapien
tgaacattcactgcggggcttagga

SEQ ID NO: 71678 - DNA, 25 bp, Homo sapien
acagataccacagaatcagcagggt

SEQ ID NO: 71679 - DNA, 25 bp, Homo sapien
cttcacggagtcatagataaaccac

SEQ ID NO: 71680 - DNA, 25 bp, Homo sapien
agtctcttgaggaccagagaagcac

SEQ ID NO: 71681 - DNA, 25 bp, Homo sapien
aaccactgtagtgcagtcagggtac

SEQ ID NO: 71682 - DNA, 25 bp, Homo sapien
aagcaggcgaacttcatcatggtgt

SEQ ID NO: 71683 - DNA, 25 bp, Homo sapien
ggcttaggaaccacaaacttgtaca

SEQ ID NO: 71684 - DNA, 25 bp, Homo sapien
aagcaggcgaacttcatcatggtgt

SEQ ID NO: 71685 - DNA, 25 bp, Homo sapien
tcaacagtacgttcaaagcaggcga

SEQ ID NO: 71686 - DNA, 25 bp, Homo sapien
ggcttaggaaccacaaacttgtaca

SEQ ID NO: 71687 - DNA, 25 bp, Homo sapien
tgaacattcactgcggggcttagga

SEQ ID NO: 71688 - DNA, 25 bp, Homo sapien
acagataccacagaatcagcagggt

SEQ ID NO: 71689 - DNA, 25 bp, Homo sapien
ggaccagagaagcactgctaccttt

SEQ ID NO: 71690 - DNA, 25 bp, Homo sapien
agtctcttgaggaccagagaagcac

SEQ ID NO: 71691 - DNA, 25 bp, Homo sapien
gcagtcagggtaccaatcatgatga

SEQ ID NO: 71692 - DNA, 25 bp, Homo sapien
aaccactgtagtgcagtcagggtac

SEQ ID NO: 71693 - DNA, 25 bp, Homo sapien
cttcacggagtcatagataaaccac

SEQ ID NO: 71694 - DNA, 25 bp, Homo sapien
gaggaagtctgaagtagaccttcac

SEQ ID NO: 71695 - DNA, 25 bp, Homo sapien
aagcaggcgaacttcatcatggtgt

SEQ ID NO: 71696 - DNA, 25 bp, Homo sapien
gaggaagtctgaagtagaccttcac

SEQ ID NO: 71697 - DNA, 25 bp, Homo sapien
agtctcttgaggaccagagaagcac

SEQ ID NO: 71698 - DNA, 25 bp, Homo sapien
ggcttaggaaccacaaacttgtaca

SEQ ID NO: 71699 - DNA, 25 bp, Homo sapien
aaccactgtagtgcagtcagggtac

SEQ ID NO: 71700 - DNA, 25 bp, Homo sapien
gcagtcagggtaccaatcatgatga

SEQ ID NO: 71701 - DNA, 25 bp, Homo sapien
acagataccacagaatcagcagggt

SEQ ID NO: 71702 - DNA, 25 bp, Homo sapien
tgaacattcactgcggggcttagga

SEQ ID NO: 71703 - DNA, 25 bp, Homo sapien
cttcacggagtcatagataaaccac

SEQ ID NO: 71704 - DNA, 25 bp, Homo sapien
tcaacagtacgttcaaagcaggcga

SEQ ID NO: 71705 - DNA, 25 bp, Homo sapien
ggaccagagaagcactgctaccttt

SEQ ID NO: 71706 - DNA, 25 bp, Homo sapien
aagcaggcgaacttcatcatggtgt

SEQ ID NO: 71707 - DNA, 25 bp, Homo sapien
tcaacagtacgttcaaagcaggcga

SEQ ID NO: 71708 - DNA, 25 bp, Homo sapien
ggcttaggaaccacaaacttgtaca

SEQ ID NO: 71709 - DNA, 25 bp, Homo sapien
tgaacattcactgcggggcttagga

SEQ ID NO: 71710 - DNA, 25 bp, Homo sapien
acagataccacagaatcagcagggt

SEQ ID NO: 71711 - DNA, 25 bp, Homo sapien
ggaccagagaagcactgctaccttt

SEQ ID NO: 71712 - DNA, 25 bp, Homo sapien
agtctcttgaggaccagagaagcac

SEQ ID NO: 71713 - DNA, 25 bp, Homo sapien
gcagtcagggtaccaatcatgatga

SEQ ID NO: 71714 - DNA, 25 bp, Homo sapien
aaccactgtagtgcagtcagggtac

SEQ ID NO: 71715 - DNA, 25 bp, Homo sapien
cttcacggagtcatagataaaccac

SEQ ID NO: 71716 - DNA, 25 bp, Homo sapien
gaggaagtctgaagtagaccttcac

SEQ ID NO: 71717 - DNA, 25 bp, Homo sapien
aagcaggcgaacttcatcatggtgt

SEQ ID NO: 71718 - DNA, 25 bp, Homo sapien
tcaacagtacgttcaaagcaggcga

SEQ ID NO: 71719 - DNA, 25 bp, Homo sapien
ggcttaggaaccacaaacttgtaca

SEQ ID NO: 71720 - DNA, 25 bp, Homo sapien
tgaacattcactgcggggcttagga

SEQ ID NO: 71721 - DNA, 25 bp, Homo sapien
acagataccacagaatcagcagggt

SEQ ID NO: 71722 - DNA, 25 bp, Homo sapien
ggaccagagaagcactgctaccttt

SEQ ID NO: 71723 - DNA, 25 bp, Homo sapien
agtctcttgaggaccagagaagcac

SEQ ID NO: 71724 - DNA, 25 bp, Homo sapien
gcagtcagggtaccaatcatgatga

SEQ ID NO: 71725 - DNA, 25 bp, Homo sapien
aaccactgtagtgcagtcagggtac

SEQ ID NO: 71726 - DNA, 25 bp, Homo sapien
cttcacggagtcatagataaaccac

SEQ ID NO: 71727 - DNA, 25 bp, Homo sapien
gaggaagtctgaagtagaccttcac

SEQ ID NO: 71728 - DNA, 25 bp, Homo sapien
tcaacagtacgttcaaagcaggcga

SEQ ID NO: 71729 - DNA, 25 bp, Homo sapien
gcagtcagggtaccaatcatgatga

SEQ ID NO: 71730 - DNA, 25 bp, Homo sapien
cttcacggagtcatagataaaccac

SEQ ID NO: 71731 - DNA, 25 bp, Homo sapien
ggaccagagaagcactgctaccttt

SEQ ID NO: 71732 - DNA, 25 bp, Homo sapien
ggcttaggaaccacaaacttgtaca

SEQ ID NO: 71733 - DNA, 25 bp, Homo sapien
tgaacattcactgcggggcttagga

SEQ ID NO: 71734 - DNA, 25 bp, Homo sapien
aaccactgtagtgcagtcagggtac

SEQ ID NO: 71735 - DNA, 25 bp, Homo sapien
acagataccacagaatcagcagggt

SEQ ID NO: 71736 - DNA, 25 bp, Homo sapien
agtctcttgaggaccagagaagcac

SEQ ID NO: 71737 - DNA, 25 bp, Homo sapien
gaggaagtctgaagtagaccttcac

SEQ ID NO: 71738 - DNA, 25 bp, Homo sapien
aagcaggcgaacttcatcatggtgt

SEQ ID NO: 71739 - DNA, 25 bp, Homo sapien
tcaacagtacgttcaaagcaggcga

SEQ ID NO: 71740 - DNA, 25 bp, Homo sapien
gcagtcagggtaccaatcatgatga

SEQ ID NO: 71741 - DNA, 25 bp, Homo sapien
gaggaagtctgaagtagaccttcac

SEQ ID NO: 71742 - DNA, 25 bp, Homo sapien
ggaccagagaagcactgctaccttt

SEQ ID NO: 71743 - DNA, 25 bp, Homo sapien
cttcacggagtcatagataaaccac

SEQ ID NO: 71744 - DNA, 25 bp, Homo sapien
ggcttaggaaccacaaacttgtaca

SEQ ID NO: 71745 - DNA, 25 bp, Homo sapien
tgaacattcactgcggggcttagga

SEQ ID NO: 71746 - DNA, 25 bp, Homo sapien
acagataccacagaatcagcagggt

SEQ ID NO: 71747 - DNA, 25 bp, Homo sapien
aaccactgtagtgcagtcagggtac

SEQ ID NO: 71748 - DNA, 25 bp, Homo sapien
agtctcttgaggaccagagaagcac

SEQ ID NO: 71749 - DNA, 25 bp, Homo sapien
aagcaggcgaacttcatcatggtgt

SEQ ID NO: 71750 - DNA, 25 bp, Homo sapien
tcaacagtacgttcaaagcaggcga

SEQ ID NO: 71751 - DNA, 25 bp, Homo sapien
gcagtcagggtaccaatcatgatga

SEQ ID NO: 71752 - DNA, 25 bp, Homo sapien
ggaccagagaagcactgctaccttt

SEQ ID NO: 71753 - DNA, 25 bp, Homo sapien
ggcttaggaaccacaaacttgtaca

SEQ ID NO: 71754 - DNA, 25 bp, Homo sapien
cttcacggagtcatagataaaccac

SEQ ID NO: 71755 - DNA, 25 bp, Homo sapien
tgaacattcactgcggggcttagga

SEQ ID NO: 71756 - DNA, 25 bp, Homo sapien
acagataccacagaatcagcagggt

SEQ ID NO: 71757 - DNA, 25 bp, Homo sapien
aaccactgtagtgcagtcagggtac

SEQ ID NO: 71758 - DNA, 25 bp, Homo sapien
gaggaagtctgaagtagaccttcac

SEQ ID NO: 71759 - DNA, 25 bp, Homo sapien
agtctcttgaggaccagagaagcac

SEQ ID NO: 71760 - DNA, 25 bp, Homo sapien
aagcaggcgaacttcatcatggtgt

SEQ ID NO: 71761 - DNA, 25 bp, Homo sapien
tcaacagtacgttcaaagcaggcga

SEQ ID NO: 71762 - DNA, 25 bp, Homo sapien
gcagtcagggtaccaatcatgatga

SEQ ID NO: 71763 - DNA, 25 bp, Homo sapien
ggcttaggaaccacaaacttgtaca

SEQ ID NO: 71764 - DNA, 25 bp, Homo sapien
cttcacggagtcatagataaaccac

SEQ ID NO: 71765 - DNA, 25 bp, Homo sapien
ggaccagagaagcactgctaccttt

SEQ ID NO: 71766 - DNA, 25 bp, Homo sapien
tgaacattcactgcggggcttagga

SEQ ID NO: 71767 - DNA, 25 bp, Homo sapien
acagataccacagaatcagcagggt

SEQ ID NO: 71768 - DNA, 25 bp, Homo sapien
gaggaagtctgaagtagaccttcac

SEQ ID NO: 71769 - DNA, 25 bp, Homo sapien
aaccactgtagtgcagtcagggtac

SEQ ID NO: 71770 - DNA, 25 bp, Homo sapien
agtctcttgaggaccagagaagcac

SEQ ID NO: 71771 - DNA, 25 bp, Homo sapien
aagcaggcgaacttcatcatggtgt

SEQ ID NO: 71772 - DNA, 25 bp, Homo sapien
gcagtcagggtaccaatcatgatga

SEQ ID NO: 71773 - DNA, 25 bp, Homo sapien
tcaacagtacgttcaaagcaggcga

SEQ ID NO: 71774 - DNA, 25 bp, Homo sapien
ggcttaggaaccacaaacttgtaca

SEQ ID NO: 71775 - DNA, 25 bp, Homo sapien
cttcacggagtcatagataaaccac

SEQ ID NO: 71776 - DNA, 25 bp, Homo sapien
ggaccagagaagcactgctaccttt

SEQ ID NO: 71777 - DNA, 25 bp, Homo sapien
tgaacattcactgcggggcttagga

SEQ ID NO: 71778 - DNA, 25 bp, Homo sapien
acagataccacagaatcagcagggt

SEQ ID NO: 71779 - DNA, 25 bp, Homo sapien
aaccactgtagtgcagtcagggtac

SEQ ID NO: 71780 - DNA, 25 bp, Homo sapien
gaggaagtctgaagtagaccttcac

SEQ ID NO: 71781 - DNA, 25 bp, Homo sapien
aagcaggcgaacttcatcatggtgt

SEQ ID NO: 71782 - DNA, 25 bp, Homo sapien
agtctcttgaggaccagagaagcac

SEQ ID NO: 71783 - DNA, 25 bp, Homo sapien
tcaacagtacgttcaaagcaggcga

SEQ ID NO: 71784 - DNA, 25 bp, Homo sapien
gcagtcagggtaccaatcatgatga

SEQ ID NO: 71785 - DNA, 25 bp, Homo sapien
ggcttaggaaccacaaacttgtaca

SEQ ID NO: 71786 - DNA, 25 bp, Homo sapien
ggaccagagaagcactgctaccttt

SEQ ID NO: 71787 - DNA, 25 bp, Homo sapien
cttcacggagtcatagataaaccac

SEQ ID NO: 71788 - DNA, 25 bp, Homo sapien
agtctcttgaggaccagagaagcac

SEQ ID NO: 71789 - DNA, 25 bp, Homo sapien
tgaacattcactgcggggcttagga

SEQ ID NO: 71790 - DNA, 25 bp, Homo sapien
acagataccacagaatcagcagggt

SEQ ID NO: 71791 - DNA, 25 bp, Homo sapien
aaccactgtagtgcagtcagggtac

SEQ ID NO: 71792 - DNA, 25 bp, Homo sapien
gaggaagtctgaagtagaccttcac

SEQ ID NO: 71793 - DNA, 25 bp, Homo sapien
aagcaggcgaacttcatcatggtgt

SEQ ID NO: 71794 - DNA, 25 bp, Homo sapien
gcagtcagggtaccaatcatgatga

SEQ ID NO: 71795 - DNA, 25 bp, Homo sapien
tcaacagtacgttcaaagcaggcga

SEQ ID NO: 71796 - DNA, 25 bp, Homo sapien
ggcttaggaaccacaaacttgtaca

SEQ ID NO: 71797 - DNA, 25 bp, Homo sapien
cttcacggagtcatagataaaccac

SEQ ID NO: 71798 - DNA, 25 bp, Homo sapien
ggaccagagaagcactgctaccttt

SEQ ID NO: 71799 - DNA, 25 bp, Homo sapien
tgaacattcactgcggggcttagga

SEQ ID NO: 71800 - DNA, 25 bp, Homo sapien
acagataccacagaatcagcagggt

SEQ ID NO: 71801 - DNA, 25 bp, Homo sapien
aaccactgtagtgcagtcagggtac

SEQ ID NO: 71802 - DNA, 25 bp, Homo sapien
gaggaagtctgaagtagaccttcac

SEQ ID NO: 71803 - DNA, 25 bp, Homo sapien
agtctcttgaggaccagagaagcac

SEQ ID NO: 71804 - DNA, 25 bp, Homo sapien
aagcaggcgaacttcatcatggtgt

SEQ ID NO: 71805 - DNA, 25 bp, Homo sapien
agtctcttgaggaccagagaagcac

SEQ ID NO: 71806 - DNA, 25 bp, Homo sapien
gcagtcagggtaccaatcatgatga

SEQ ID NO: 71807 - DNA, 25 bp, Homo sapien
tcaacagtacgttcaaagcaggcga

SEQ ID NO: 71808 - DNA, 25 bp, Homo sapien
ggcttaggaaccacaaacttgtaca

SEQ ID NO: 71809 - DNA, 25 bp, Homo sapien
cttcacggagtcatagataaaccac

SEQ ID NO: 71810 - DNA, 25 bp, Homo sapien
ggaccagagaagcactgctaccttt

SEQ ID NO: 71811 - DNA, 25 bp, Homo sapien
tgaacattcactgcggggcttagga

SEQ ID NO: 71812 - DNA, 25 bp, Homo sapien
aaccactgtagtgcagtcagggtac

SEQ ID NO: 71813 - DNA, 25 bp, Homo sapien
acagataccacagaatcagcagggt

SEQ ID NO: 71814 - DNA, 25 bp, Homo sapien
gaggaagtctgaagtagaccttcac

SEQ ID NO: 71815 - DNA, 25 bp, Homo sapien
aagcaggcgaacttcatcatggtgt

SEQ ID NO: 71816 - DNA, 25 bp, Homo sapien
gcagtcagggtaccaatcatgatga

SEQ ID NO: 71817 - DNA, 25 bp, Homo sapien
tcaacagtacgttcaaagcaggcga

SEQ ID NO: 71818 - DNA, 25 bp, Homo sapien
ggcttaggaaccacaaacttgtaca

SEQ ID NO: 71819 - DNA, 25 bp, Homo sapien
ggaccagagaagcactgctaccttt

SEQ ID NO: 71820 - DNA, 25 bp, Homo sapien
cttcacggagtcatagataaaccac

SEQ ID NO: 71821 - DNA, 25 bp, Homo sapien
tgaacattcactgcggggcttagga

SEQ ID NO: 71822 - DNA, 25 bp, Homo sapien
agtctcttgaggaccagagaagcac

SEQ ID NO: 71823 - DNA, 25 bp, Homo sapien
aaccactgtagtgcagtcagggtac

SEQ ID NO: 71824 - DNA, 25 bp, Homo sapien
gaggaagtctgaagtagaccttcac

SEQ ID NO: 71825 - DNA, 25 bp, Homo sapien
acagataccacagaatcagcagggt

SEQ ID NO: 71826 - DNA, 25 bp, Homo sapien
aagcaggcgaacttcatcatggtgt

SEQ ID NO: 71827 - DNA, 25 bp, Homo sapien
cttcacggagtcatagataaaccac

SEQ ID NO: 71828 - DNA, 25 bp, Homo sapien
gaggaagtctgaagtagaccttcac

SEQ ID NO: 71829 - DNA, 25 bp, Homo sapien
ggcttaggaaccacaaacttgtaca

SEQ ID NO: 71830 - DNA, 25 bp, Homo sapien
tcaacagtacgttcaaagcaggcga

SEQ ID NO: 71831 - DNA, 25 bp, Homo sapien
aaccactgtagtgcagtcagggtac

SEQ ID NO: 71832 - DNA, 25 bp, Homo sapien
agtctcttgaggaccagagaagcac

SEQ ID NO: 71833 - DNA, 25 bp, Homo sapien
gcagtcagggtaccaatcatgatga

SEQ ID NO: 71834 - DNA, 25 bp, Homo sapien
ggaccagagaagcactgctaccttt

SEQ ID NO: 71835 - DNA, 25 bp, Homo sapien
aagcaggcgaacttcatcatggtgt

SEQ ID NO: 71836 - DNA, 25 bp, Homo sapien
acagataccacagaatcagcagggt

SEQ ID NO: 71837 - DNA, 25 bp, Homo sapien
tgaacattcactgcggggcttagga

SEQ ID NO: 71838 - DNA, 25 bp, Homo sapien
gcagtcagggtaccaatcatgatga

SEQ ID NO: 71839 - DNA, 25 bp, Homo sapien
tcaacagtacgttcaaagcaggcga

SEQ ID NO: 71840 - DNA, 25 bp, Homo sapien
ggcttaggaaccacaaacttgtaca

SEQ ID NO: 71841 - DNA, 25 bp, Homo sapien
cttcacggagtcatagataaaccac

SEQ ID NO: 71842 - DNA, 25 bp, Homo sapien
ggaccagagaagcactgctaccttt

SEQ ID NO: 71843 - DNA, 25 bp, Homo sapien
tgaacattcactgcggggcttagga

SEQ ID NO: 71844 - DNA, 25 bp, Homo sapien
acagataccacagaatcagcagggt

SEQ ID NO: 71845 - DNA, 25 bp, Homo sapien
aaccactgtagtgcagtcagggtac

SEQ ID NO: 71846 - DNA, 25 bp, Homo sapien
agtctcttgaggaccagagaagcac

SEQ ID NO: 71847 - DNA, 25 bp, Homo sapien
aagcaggcgaacttcatcatggtgt

SEQ ID NO: 71848 - DNA, 25 bp, Homo sapien
gaggaagtctgaagtagaccttcac

SEQ ID NO: 71849 - DNA, 25 bp, Homo sapien
aagcaggcgaacttcatcatggtgt

SEQ ID NO: 71850 - DNA, 25 bp, Homo sapien
tcaacagtacgttcaaagcaggcga

SEQ ID NO: 71851 - DNA, 25 bp, Homo sapien
ggcttaggaaccacaaacttgtaca

SEQ ID NO: 71852 - DNA, 25 bp, Homo sapien
tgaacattcactgcggggcttagga

SEQ ID NO: 71853 - DNA, 25 bp, Homo sapien
acagataccacagaatcagcagggt

SEQ ID NO: 71854 - DNA, 25 bp, Homo sapien
ggaccagagaagcactgctaccttt

SEQ ID NO: 71855 - DNA, 25 bp, Homo sapien
agtctcttgaggaccagagaagcac

SEQ ID NO: 71856 - DNA, 25 bp, Homo sapien
gcagtcagggtaccaatcatgatga

SEQ ID NO: 71857 - DNA, 25 bp, Homo sapien
aaccactgtagtgcagtcagggtac

SEQ ID NO: 71858 - DNA, 25 bp, Homo sapien
cttcacggagtcatagataaaccac

SEQ ID NO: 71859 - DNA, 25 bp, Homo sapien
gaggaagtctgaagtagaccttcac

SEQ ID NO: 71860 - DNA, 25 bp, Homo sapien
tgtacaagtttgtggttcctaagcc

SEQ ID NO: 71861 - DNA, 25 bp, Homo sapien
tcatcatgattggtaccctgactgc

SEQ ID NO: 71862 - DNA, 25 bp, Homo sapien
tcgcctgctttgaacgtactgttga

SEQ ID NO: 71863 - DNA, 25 bp, Homo sapien
gtggtttatctatgactccgtgaag

SEQ ID NO: 71864 - DNA, 25 bp, Homo sapien
gtaccctgactgcactacagtggtt

SEQ ID NO: 71865 - DNA, 25 bp, Homo sapien
accctgctgattctgtggtatctgt

SEQ ID NO: 71866 - DNA, 25 bp, Homo sapien
gtgcttctctggtcctcaagagact

SEQ ID NO: 71867 - DNA, 25 bp, Homo sapien
tcctaagccccgcagtgaatgttca

SEQ ID NO: 71868 - DNA, 25 bp, Homo sapien
gtgaaggtctacttcagacttcctc

SEQ ID NO: 71869 - DNA, 25 bp, Homo sapien
aaaggtagcagtgcttctctggtcc

SEQ ID NO: 71870 - DNA, 25 bp, Homo sapien
acaccatgatgaagttcgcctgctt

SEQ ID NO: 71871 - DNA, 25 bp, Homo sapien
agtctcttgaggaccagagaagcac

SEQ ID NO: 71872 - DNA, 25 bp, Homo sapien
tcaacagtacgttcaaagcaggcga

SEQ ID NO: 71873 - DNA, 25 bp, Homo sapien
gcagtcagggtaccaatcatgatga

SEQ ID NO: 71874 - DNA, 25 bp, Homo sapien
ggcttaggaaccacaaacttgtaca

SEQ ID NO: 71875 - DNA, 25 bp, Homo sapien
cttcacggagtcatagataaaccac

SEQ ID NO: 71876 - DNA, 25 bp, Homo sapien
ggaccagagaagcactgctaccttt

SEQ ID NO: 71877 - DNA, 25 bp, Homo sapien
tgaacattcactgcggggcttagga

SEQ ID NO: 71878 - DNA, 25 bp, Homo sapien
acagataccacagaatcagcagggt

SEQ ID NO: 71879 - DNA, 25 bp, Homo sapien
aaccactgtagtgcagtcagggtac

SEQ ID NO: 71880 - DNA, 25 bp, Homo sapien
gaggaagtctgaagtagaccttcac

SEQ ID NO: 71881 - DNA, 25 bp, Homo sapien
aagcaggcgaacttcatcatggtgt

SEQ ID NO: 71882 - DNA, 25 bp, Homo sapien
gaggaagtctgaagtagaccttcac

SEQ ID NO: 71883 - DNA, 25 bp, Homo sapien
aagcaggcgaacttcatcatggtgt

SEQ ID NO: 71884 - DNA, 25 bp, Homo sapien
acagataccacagaatcagcagggt

SEQ ID NO: 71885 - DNA, 25 bp, Homo sapien
agtctcttgaggaccagagaagcac

SEQ ID NO: 71886 - DNA, 25 bp, Homo sapien
tgaacattcactgcggggcttagga

SEQ ID NO: 71887 - DNA, 25 bp, Homo sapien
ggcttaggaaccacaaacttgtaca

SEQ ID NO: 71888 - DNA, 25 bp, Homo sapien
cttcacggagtcatagataaaccac

SEQ ID NO: 71889 - DNA, 25 bp, Homo sapien
tcaacagtacgttcaaagcaggcga

SEQ ID NO: 71890 - DNA, 25 bp, Homo sapien
ggaccagagaagcactgctaccttt

SEQ ID NO: 71891 - DNA, 25 bp, Homo sapien
gcagtcagggtaccaatcatgatga

SEQ ID NO: 71892 - DNA, 25 bp, Homo sapien
aaccactgtagtgcagtcagggtac

SEQ ID NO: 71893 - DNA, 25 bp, Homo sapien
aagcaggcgaacttcatcatggtgt

SEQ ID NO: 71894 - DNA, 25 bp, Homo sapien
tcaacagtacgttcaaagcaggcga

SEQ ID NO: 71895 - DNA, 25 bp, Homo sapien
ggcttaggaaccacaaacttgtaca

SEQ ID NO: 71896 - DNA, 25 bp, Homo sapien
tgaacattcactgcggggcttagga

SEQ ID NO: 71897 - DNA, 25 bp, Homo sapien
acagataccacagaatcagcagggt

SEQ ID NO: 71898 - DNA, 25 bp, Homo sapien
ggaccagagaagcactgctaccttt

SEQ ID NO: 71899 - DNA, 25 bp, Homo sapien
agtctcttgaggaccagagaagcac

SEQ ID NO: 71900 - DNA, 25 bp, Homo sapien
gcagtcagggtaccaatcatgatga

SEQ ID NO: 71901 - DNA, 25 bp, Homo sapien
aaccactgtagtgcagtcagggtac

SEQ ID NO: 71902 - DNA, 25 bp, Homo sapien
cttcacggagtcatagataaaccac

SEQ ID NO: 71903 - DNA, 25 bp, Homo sapien
gaggaagtctgaagtagaccttcac

SEQ ID NO: 71904 - DNA, 25 bp, Homo sapien
gaggaagtctgaagtagaccttcac

SEQ ID NO: 71905 - DNA, 25 bp, Homo sapien
tcaacagtacgttcaaagcaggcga

SEQ ID NO: 71906 - DNA, 25 bp, Homo sapien
cttcacggagtcatagataaaccac

SEQ ID NO: 71907 - DNA, 25 bp, Homo sapien
ggaccagagaagcactgctaccttt

SEQ ID NO: 71908 - DNA, 25 bp, Homo sapien
aagcaggcgaacttcatcatggtgt

SEQ ID NO: 71909 - DNA, 25 bp, Homo sapien
acagataccacagaatcagcagggt

SEQ ID NO: 71910 - DNA, 25 bp, Homo sapien
agtctcttgaggaccagagaagcac

SEQ ID NO: 71911 - DNA, 25 bp, Homo sapien
tgaacattcactgcggggcttagga

SEQ ID NO: 71912 - DNA, 25 bp, Homo sapien
gcagtcagggtaccaatcatgatga

SEQ ID NO: 71913 - DNA, 25 bp, Homo sapien
ggcttaggaaccacaaacttgtaca

SEQ ID NO: 71914 - DNA, 25 bp, Homo sapien
aaccactgtagtgcagtcagggtac

SEQ ID NO: 71915 - DNA, 25 bp, Homo sapien
aagcaggcgaacttcatcatggtgt

SEQ ID NO: 71916 - DNA, 25 bp, Homo sapien
tcaacagtacgttcaaagcaggcga

SEQ ID NO: 71917 - DNA, 25 bp, Homo sapien
ggcttaggaaccacaaacttgtaca

SEQ ID NO: 71918 - DNA, 25 bp, Homo sapien
tgaacattcactgcggggcttagga

SEQ ID NO: 71919 - DNA, 25 bp, Homo sapien
acagataccacagaatcagcagggt

SEQ ID NO: 71920 - DNA, 25 bp, Homo sapien
ggaccagagaagcactgctaccttt

SEQ ID NO: 71921 - DNA, 25 bp, Homo sapien
agtctcttgaggaccagagaagcac

SEQ ID NO: 71922 - DNA, 25 bp, Homo sapien
gcagtcagggtaccaatcatgatga

SEQ ID NO: 71923 - DNA, 25 bp, Homo sapien
aaccactgtagtgcagtcagggtac

SEQ ID NO: 71924 - DNA, 25 bp, Homo sapien
cttcacggagtcatagataaaccac

SEQ ID NO: 71925 - DNA, 25 bp, Homo sapien
gaggaagtctgaagtagaccttcac

SEQ ID NO: 71926 - DNA, 25 bp, Homo sapien
tgaacattcactgcggggcttagga

SEQ ID NO: 71927 - DNA, 25 bp, Homo sapien
ggcttaggaaccacaaacttgtaca

SEQ ID NO: 71928 - DNA, 25 bp, Homo sapien
ggaccagagaagcactgctaccttt

SEQ ID NO: 71929 - DNA, 25 bp, Homo sapien
gaggaagtctgaagtagaccttcac

SEQ ID NO: 71930 - DNA, 25 bp, Homo sapien
cttcacggagtcatagataaaccac

SEQ ID NO: 71931 - DNA, 25 bp, Homo sapien
agtctcttgaggaccagagaagcac

SEQ ID NO: 71932 - DNA, 25 bp, Homo sapien
aagcaggcgaacttcatcatggtgt

SEQ ID NO: 71933 - DNA, 25 bp, Homo sapien
aaccactgtagtgcagtcagggtac

SEQ ID NO: 71934 - DNA, 25 bp, Homo sapien
gcagtcagggtaccaatcatgatga

SEQ ID NO: 71935 - DNA, 25 bp, Homo sapien
tcaacagtacgttcaaagcaggcga

SEQ ID NO: 71936 - DNA, 25 bp, Homo sapien
acagataccacagaatcagcagggt

SEQ ID NO: 71937 - DNA, 25 bp, Homo sapien
agtctcttgaggaccagagaagcac

SEQ ID NO: 71938 - DNA, 25 bp, Homo sapien
gcagtcagggtaccaatcatgatga

SEQ ID NO: 71939 - DNA, 25 bp, Homo sapien
aaccactgtagtgcagtcagggtac

SEQ ID NO: 71940 - DNA, 25 bp, Homo sapien
cttcacggagtcatagataaaccac

SEQ ID NO: 71941 - DNA, 25 bp, Homo sapien
gaggaagtctgaagtagaccttcac

SEQ ID NO: 71942 - DNA, 25 bp, Homo sapien
aagcaggcgaacttcatcatggtgt

SEQ ID NO: 71943 - DNA, 25 bp, Homo sapien
tcaacagtacgttcaaagcaggcga

SEQ ID NO: 71944 - DNA, 25 bp, Homo sapien
ggcttaggaaccacaaacttgtaca

SEQ ID NO: 71945 - DNA, 25 bp, Homo sapien
tgaacattcactgcggggcttagga

SEQ ID NO: 71946 - DNA, 25 bp, Homo sapien
acagataccacagaatcagcagggt

SEQ ID NO: 71947 - DNA, 25 bp, Homo sapien
ggaccagagaagcactgctaccttt

SEQ ID NO: 71948 - DNA, 25 bp, Homo sapien
aagcaggcgaacttcatcatggtgt

SEQ ID NO: 71949 - DNA, 25 bp, Homo sapien
tcaacagtacgttcaaagcaggcga

SEQ ID NO: 71950 - DNA, 25 bp, Homo sapien
ggcttaggaaccacaaacttgtaca

SEQ ID NO: 71951 - DNA, 25 bp, Homo sapien
tgaacattcactgcggggcttagga

SEQ ID NO: 71952 - DNA, 25 bp, Homo sapien
acagataccacagaatcagcagggt

SEQ ID NO: 71953 - DNA, 25 bp, Homo sapien
ggaccagagaagcactgctaccttt

SEQ ID NO: 71954 - DNA, 25 bp, Homo sapien
agtctcttgaggaccagagaagcac

SEQ ID NO: 71955 - DNA, 25 bp, Homo sapien
gcagtcagggtaccaatcatgatga

SEQ ID NO: 71956 - DNA, 25 bp, Homo sapien
aaccactgtagtgcagtcagggtac

SEQ ID NO: 71957 - DNA, 25 bp, Homo sapien
cttcacggagtcatagataaaccac

SEQ ID NO: 71958 - DNA, 25 bp, Homo sapien
gaggaagtctgaagtagaccttcac

SEQ ID NO: 71959 - DNA, 25 bp, Homo sapien
tcaacagtacgttcaaagcaggcga

SEQ ID NO: 71960 - DNA, 25 bp, Homo sapien
tgaacattcactgcggggcttagga

SEQ ID NO: 71961 - DNA, 25 bp, Homo sapien
gcagtcagggtaccaatcatgatga

SEQ ID NO: 71962 - DNA, 25 bp, Homo sapien
aagcaggcgaacttcatcatggtgt

SEQ ID NO: 71963 - DNA, 25 bp, Homo sapien
gaggaagtctgaagtagaccttcac

SEQ ID NO: 71964 - DNA, 25 bp, Homo sapien
acagataccacagaatcagcagggt

SEQ ID NO: 71965 - DNA, 25 bp, Homo sapien
aaccactgtagtgcagtcagggtac

SEQ ID NO: 71966 - DNA, 25 bp, Homo sapien
agtctcttgaggaccagagaagcac

SEQ ID NO: 71967 - DNA, 25 bp, Homo sapien
ggcttaggaaccacaaacttgtaca

SEQ ID NO: 71968 - DNA, 25 bp, Homo sapien
ggaccagagaagcactgctaccttt

SEQ ID NO: 71969 - DNA, 25 bp, Homo sapien
cttcacggagtcatagataaaccac

SEQ ID NO: 71970 - DNA, 25 bp, Homo sapien
aagcaggcgaacttcatcatggtgt

SEQ ID NO: 71971 - DNA, 25 bp, Homo sapien
tcaacagtacgttcaaagcaggcga

SEQ ID NO: 71972 - DNA, 25 bp, Homo sapien
ggcttaggaaccacaaacttgtaca

SEQ ID NO: 71973 - DNA, 25 bp, Homo sapien
tgaacattcactgcggggcttagga

SEQ ID NO: 71974 - DNA, 25 bp, Homo sapien
acagataccacagaatcagcagggt

SEQ ID NO: 71975 - DNA, 25 bp, Homo sapien
ggaccagagaagcactgctaccttt

SEQ ID NO: 71976 - DNA, 25 bp, Homo sapien
agtctcttgaggaccagagaagcac

SEQ ID NO: 71977 - DNA, 25 bp, Homo sapien
gcagtcagggtaccaatcatgatga

SEQ ID NO: 71978 - DNA, 25 bp, Homo sapien
aaccactgtagtgcagtcagggtac

SEQ ID NO: 71979 - DNA, 25 bp, Homo sapien
cttcacggagtcatagataaaccac

SEQ ID NO: 71980 - DNA, 25 bp, Homo sapien
gaggaagtctgaagtagaccttcac

SEQ ID NO: 71981 - DNA, 25 bp, Homo sapien
tgaacattcactgcggggcttagga

SEQ ID NO: 71982 - DNA, 25 bp, Homo sapien
gaggaagtctgaagtagaccttcac

SEQ ID NO: 71983 - DNA, 25 bp, Homo sapien
aaccactgtagtgcagtcagggtac

SEQ ID NO: 71984 - DNA, 25 bp, Homo sapien
gcagtcagggtaccaatcatgatga

SEQ ID NO: 71985 - DNA, 25 bp, Homo sapien
acagataccacagaatcagcagggt

SEQ ID NO: 71986 - DNA, 25 bp, Homo sapien
agtctcttgaggaccagagaagcac

SEQ ID NO: 71987 - DNA, 25 bp, Homo sapien
ggcttaggaaccacaaacttgtaca

SEQ ID NO: 71988 - DNA, 25 bp, Homo sapien
tcaacagtacgttcaaagcaggcga

SEQ ID NO: 71989 - DNA, 25 bp, Homo sapien
cttcacggagtcatagataaaccac

SEQ ID NO: 71990 - DNA, 25 bp, Homo sapien
aagcaggcgaacttcatcatggtgt

SEQ ID NO: 71991 - DNA, 25 bp, Homo sapien
ggaccagagaagcactgctaccttt

SEQ ID NO: 71992 - DNA, 25 bp, Homo sapien
aagcaggcgaacttcatcatggtgt

SEQ ID NO: 71993 - DNA, 25 bp, Homo sapien
tcaacagtacgttcaaagcaggcga

SEQ ID NO: 71994 - DNA, 25 bp, Homo sapien
ggcttaggaaccacaaacttgtaca

SEQ ID NO: 71995 - DNA, 25 bp, Homo sapien
tgaacattcactgcggggcttagga

SEQ ID NO: 71996 - DNA, 25 bp, Homo sapien
acagataccacagaatcagcagggt

SEQ ID NO: 71997 - DNA, 25 bp, Homo sapien
ggaccagagaagcactgctaccttt

SEQ ID NO: 71998 - DNA, 25 bp, Homo sapien
agtctcttgaggaccagagaagcac

SEQ ID NO: 71999 - DNA, 25 bp, Homo sapien
gcagtcagggtaccaatcatgatga

SEQ ID NO: 72000 - DNA, 25 bp, Homo sapien
aaccactgtagtgcagtcagggtac

SEQ ID NO: 72001 - DNA, 25 bp, Homo sapien
cttcacggagtcatagataaaccac

SEQ ID NO: 72002 - DNA, 25 bp, Homo sapien
gaggaagtctgaagtagaccttcac

SEQ ID NO: 72003 - DNA, 25 bp, Homo sapien
acagataccacagaatcagcagggt

SEQ ID NO: 72004 - DNA, 25 bp, Homo sapien
tcaacagtacgttcaaagcaggcga

SEQ ID NO: 72005 - DNA, 25 bp, Homo sapien
agtctcttgaggaccagagaagcac

SEQ ID NO: 72006 - DNA, 25 bp, Homo sapien
ggaccagagaagcactgctaccttt

SEQ ID NO: 72007 - DNA, 25 bp, Homo sapien
ggcttaggaaccacaaacttgtaca

SEQ ID NO: 72008 - DNA, 25 bp, Homo sapien
gcagtcagggtaccaatcatgatga

SEQ ID NO: 72009 - DNA, 25 bp, Homo sapien
aagcaggcgaacttcatcatggtgt

SEQ ID NO: 72010 - DNA, 25 bp, Homo sapien
tgaacattcactgcggggcttagga

SEQ ID NO: 72011 - DNA, 25 bp, Homo sapien
cttcacggagtcatagataaaccac

SEQ ID NO: 72012 - DNA, 25 bp, Homo sapien
gaggaagtctgaagtagaccttcac

SEQ ID NO: 72013 - DNA, 25 bp, Homo sapien
aaccactgtagtgcagtcagggtac

SEQ ID NO: 72014 - DNA, 25 bp, Homo sapien
aagcaggcgaacttcatcatggtgt

SEQ ID NO: 72015 - DNA, 25 bp, Homo sapien
tcaacagtacgttcaaagcaggcga

SEQ ID NO: 72016 - DNA, 25 bp, Homo sapien
ggcttaggaaccacaaacttgtaca

SEQ ID NO: 72017 - DNA, 25 bp, Homo sapien
tgaacattcactgcggggcttagga

SEQ ID NO: 72018 - DNA, 25 bp, Homo sapien
acagataccacagaatcagcagggt

SEQ ID NO: 72019 - DNA, 25 bp, Homo sapien
ggaccagagaagcactgctaccttt

SEQ ID NO: 72020 - DNA, 25 bp, Homo sapien
agtctcttgaggaccagagaagcac

SEQ ID NO: 72021 - DNA, 25 bp, Homo sapien
gcagtcagggtaccaatcatgatga

SEQ ID NO: 72022 - DNA, 25 bp, Homo sapien
aaccactgtagtgcagtcagggtac

SEQ ID NO: 72023 - DNA, 25 bp, Homo sapien
cttcacggagtcatagataaaccac

SEQ ID NO: 72024 - DNA, 25 bp, Homo sapien
gaggaagtctgaagtagaccttcac

SEQ ID NO: 72025 - DNA, 25 bp, Homo sapien
gcagtcagggtaccaatcatgatga

SEQ ID NO: 72026 - DNA, 25 bp, Homo sapien
gaggaagtctgaagtagaccttcac

SEQ ID NO: 72027 - DNA, 25 bp, Homo sapien
cttcacggagtcatagataaaccac

SEQ ID NO: 72028 - DNA, 25 bp, Homo sapien
ggaccagagaagcactgctaccttt

SEQ ID NO: 72029 - DNA, 25 bp, Homo sapien
agtctcttgaggaccagagaagcac

SEQ ID NO: 72030 - DNA, 25 bp, Homo sapien
aagcaggcgaacttcatcatggtgt

SEQ ID NO: 72031 - DNA, 25 bp, Homo sapien
tcaacagtacgttcaaagcaggcga

SEQ ID NO: 72032 - DNA, 25 bp, Homo sapien
tgaacattcactgcggggcttagga

SEQ ID NO: 72033 - DNA, 25 bp, Homo sapien
ggcttaggaaccacaaacttgtaca

SEQ ID NO: 72034 - DNA, 25 bp, Homo sapien
acagataccacagaatcagcagggt

SEQ ID NO: 72035 - DNA, 25 bp, Homo sapien
aaccactgtagtgcagtcagggtac

SEQ ID NO: 72036 - DNA, 25 bp, Homo sapien
aagcaggcgaacttcatcatggtgt

SEQ ID NO: 72037 - DNA, 25 bp, Homo sapien
tcaacagtacgttcaaagcaggcga

SEQ ID NO: 72038 - DNA, 25 bp, Homo sapien
ggcttaggaaccacaaacttgtaca

SEQ ID NO: 72039 - DNA, 25 bp, Homo sapien
tgaacattcactgcggggcttagga

SEQ ID NO: 72040 - DNA, 25 bp, Homo sapien
acagataccacagaatcagcagggt

SEQ ID NO: 72041 - DNA, 25 bp, Homo sapien
ggaccagagaagcactgctaccttt

SEQ ID NO: 72042 - DNA, 25 bp, Homo sapien
agtctcttgaggaccagagaagcac

SEQ ID NO: 72043 - DNA, 25 bp, Homo sapien
gcagtcagggtaccaatcatgatga

SEQ ID NO: 72044 - DNA, 25 bp, Homo sapien
aaccactgtagtgcagtcagggtac

SEQ ID NO: 72045 - DNA, 25 bp, Homo sapien
cttcacggagtcatagataaaccac

SEQ ID NO: 72046 - DNA, 25 bp, Homo sapien
gaggaagtctgaagtagaccttcac

SEQ ID NO: 72047 - DNA, 25 bp, Homo sapien
agtctcttgaggaccagagaagcac

SEQ ID NO: 72048 - DNA, 25 bp, Homo sapien
ggaccagagaagcactgctaccttt

SEQ ID NO: 72049 - DNA, 25 bp, Homo sapien
tcaacagtacgttcaaagcaggcga

SEQ ID NO: 72050 - DNA, 25 bp, Homo sapien
tgaacattcactgcggggcttagga

SEQ ID NO: 72051 - DNA, 25 bp, Homo sapien
aaccactgtagtgcagtcagggtac

SEQ ID NO: 72052 - DNA, 25 bp, Homo sapien
acagataccacagaatcagcagggt

SEQ ID NO: 72053 - DNA, 25 bp, Homo sapien
cttcacggagtcatagataaaccac

SEQ ID NO: 72054 - DNA, 25 bp, Homo sapien
aagcaggcgaacttcatcatggtgt

SEQ ID NO: 72055 - DNA, 25 bp, Homo sapien
gcagtcagggtaccaatcatgatga

SEQ ID NO: 72056 - DNA, 25 bp, Homo sapien
ggcttaggaaccacaaacttgtaca

SEQ ID NO: 72057 - DNA, 25 bp, Homo sapien
gaggaagtctgaagtagaccttcac

SEQ ID NO: 72058 - DNA, 25 bp, Homo sapien
aagcaggcgaacttcatcatggtgt

SEQ ID NO: 72059 - DNA, 25 bp, Homo sapien
tgaacattcactgcggggcttagga

SEQ ID NO: 72060 - DNA, 25 bp, Homo sapien
acagataccacagaatcagcagggt

SEQ ID NO: 72061 - DNA, 25 bp, Homo sapien
ggcttaggaaccacaaacttgtaca

SEQ ID NO: 72062 - DNA, 25 bp, Homo sapien
tcaacagtacgttcaaagcaggcga

SEQ ID NO: 72063 - DNA, 25 bp, Homo sapien
gaggaagtctgaagtagaccttcac

SEQ ID NO: 72064 - DNA, 25 bp, Homo sapien
aaccactgtagtgcagtcagggtac

SEQ ID NO: 72065 - DNA, 25 bp, Homo sapien
agtctcttgaggaccagagaagcac

SEQ ID NO: 72066 - DNA, 25 bp, Homo sapien
gcagtcagggtaccaatcatgatga

SEQ ID NO: 72067 - DNA, 25 bp, Homo sapien
ggaccagagaagcactgctaccttt

SEQ ID NO: 72068 - DNA, 25 bp, Homo sapien
cttcacggagtcatagataaaccac

SEQ ID NO: 72069 - DNA, 25 bp, Homo sapien
aagcaggcgaacttcatcatggtgt

SEQ ID NO: 72070 - DNA, 25 bp, Homo sapien
tcaacagtacgttcaaagcaggcga

SEQ ID NO: 72071 - DNA, 25 bp, Homo sapien
ggcttaggaaccacaaacttgtaca

SEQ ID NO: 72072 - DNA, 25 bp, Homo sapien
tgaacattcactgcggggcttagga

SEQ ID NO: 72073 - DNA, 25 bp, Homo sapien
acagataccacagaatcagcagggt

SEQ ID NO: 72074 - DNA, 25 bp, Homo sapien
ggaccagagaagcactgctaccttt

SEQ ID NO: 72075 - DNA, 25 bp, Homo sapien
agtctcttgaggaccagagaagcac

SEQ ID NO: 72076 - DNA, 25 bp, Homo sapien
gcagtcagggtaccaatcatgatga

SEQ ID NO: 72077 - DNA, 25 bp, Homo sapien
aaccactgtagtgcagtcagggtac

SEQ ID NO: 72078 - DNA, 25 bp, Homo sapien
cttcacggagtcatagataaaccac

SEQ ID NO: 72079 - DNA, 25 bp, Homo sapien
gaggaagtctgaagtagaccttcac

SEQ ID NO: 72080 - DNA, 25 bp, Homo sapien
tcaacagtacgttcaaagcaggcga

SEQ ID NO: 72081 - DNA, 25 bp, Homo sapien
gaggaagtctgaagtagaccttcac

SEQ ID NO: 72082 - DNA, 25 bp, Homo sapien
ggaccagagaagcactgctaccttt

SEQ ID NO: 72083 - DNA, 25 bp, Homo sapien
aagcaggcgaacttcatcatggtgt

SEQ ID NO: 72084 - DNA, 25 bp, Homo sapien
acagataccacagaatcagcagggt

SEQ ID NO: 72085 - DNA, 25 bp, Homo sapien
tgaacattcactgcggggcttagga

SEQ ID NO: 72086 - DNA, 25 bp, Homo sapien
agtctcttgaggaccagagaagcac

SEQ ID NO: 72087 - DNA, 25 bp, Homo sapien
cttcacggagtcatagataaaccac

SEQ ID NO: 72088 - DNA, 25 bp, Homo sapien
ggcttaggaaccacaaacttgtaca

SEQ ID NO: 72089 - DNA, 25 bp, Homo sapien
gcagtcagggtaccaatcatgatga

SEQ ID NO: 72090 - DNA, 25 bp, Homo sapien
aaccactgtagtgcagtcagggtac

SEQ ID NO: 72091 - DNA, 25 bp, Homo sapien
agtctcttgaggaccagagaagcac

SEQ ID NO: 72092 - DNA, 25 bp, Homo sapien
gcagtcagggtaccaatcatgatga

SEQ ID NO: 72093 - DNA, 25 bp, Homo sapien
aaccactgtagtgcagtcagggtac

SEQ ID NO: 72094 - DNA, 25 bp, Homo sapien
cttcacggagtcatagataaaccac

SEQ ID NO: 72095 - DNA, 25 bp, Homo sapien
gaggaagtctgaagtagaccttcac

SEQ ID NO: 72096 - DNA, 25 bp, Homo sapien
aagcaggcgaacttcatcatggtgt

SEQ ID NO: 72097 - DNA, 25 bp, Homo sapien
tcaacagtacgttcaaagcaggcga

SEQ ID NO: 72098 - DNA, 25 bp, Homo sapien
ggcttaggaaccacaaacttgtaca

SEQ ID NO: 72099 - DNA, 25 bp, Homo sapien
tgaacattcactgcggggcttagga

SEQ ID NO: 72100 - DNA, 25 bp, Homo sapien
acagataccacagaatcagcagggt

SEQ ID NO: 72101 - DNA, 25 bp, Homo sapien
ggaccagagaagcactgctaccttt

SEQ ID NO: 72102 - DNA, 25 bp, Homo sapien
tgaacattcactgcggggcttagga

SEQ ID NO: 72103 - DNA, 25 bp, Homo sapien
aagcaggcgaacttcatcatggtgt

SEQ ID NO: 72104 - DNA, 25 bp, Homo sapien
ggaccagagaagcactgctaccttt

SEQ ID NO: 72105 - DNA, 25 bp, Homo sapien
agtctcttgaggaccagagaagcac

SEQ ID NO: 72106 - DNA, 25 bp, Homo sapien
tcaacagtacgttcaaagcaggcga

SEQ ID NO: 72107 - DNA, 25 bp, Homo sapien
acagataccacagaatcagcagggt

SEQ ID NO: 72108 - DNA, 25 bp, Homo sapien
ggcttaggaaccacaaacttgtaca

SEQ ID NO: 72109 - DNA, 25 bp, Homo sapien
gcagtcagggtaccaatcatgatga

SEQ ID NO: 72110 - DNA, 25 bp, Homo sapien
cttcacggagtcatagataaaccac

SEQ ID NO: 72111 - DNA, 25 bp, Homo sapien
aaccactgtagtgcagtcagggtac

SEQ ID NO: 72112 - DNA, 25 bp, Homo sapien
gaggaagtctgaagtagaccttcac

SEQ ID NO: 72113 - DNA, 25 bp, Homo sapien
aagcaggcgaacttcatcatggtgt

SEQ ID NO: 72114 - DNA, 25 bp, Homo sapien
tcaacagtacgttcaaagcaggcga

SEQ ID NO: 72115 - DNA, 25 bp, Homo sapien
ggcttaggaaccacaaacttgtaca

SEQ ID NO: 72116 - DNA, 25 bp, Homo sapien
tgaacattcactgcggggcttagga

SEQ ID NO: 72117 - DNA, 25 bp, Homo sapien
acagataccacagaatcagcagggt

SEQ ID NO: 72118 - DNA, 25 bp, Homo sapien
ggaccagagaagcactgctaccttt

SEQ ID NO: 72119 - DNA, 25 bp, Homo sapien
agtctcttgaggaccagagaagcac

SEQ ID NO: 72120 - DNA, 25 bp, Homo sapien
gcagtcagggtaccaatcatgatga

SEQ ID NO: 72121 - DNA, 25 bp, Homo sapien
aaccactgtagtgcagtcagggtac

SEQ ID NO: 72122 - DNA, 25 bp, Homo sapien
cttcacggagtcatagataaaccac

SEQ ID NO: 72123 - DNA, 25 bp, Homo sapien
gaggaagtctgaagtagaccttcac

SEQ ID NO: 72124 - DNA, 25 bp, Homo sapien
ggcttaggaaccacaaacttgtaca

SEQ ID NO: 72125 - DNA, 25 bp, Homo sapien
cttcacggagtcatagataaaccac

SEQ ID NO: 72126 - DNA, 25 bp, Homo sapien
acagataccacagaatcagcagggt

SEQ ID NO: 72127 - DNA, 25 bp, Homo sapien
ggaccagagaagcactgctaccttt

SEQ ID NO: 72128 - DNA, 25 bp, Homo sapien
aagcaggcgaacttcatcatggtgt

SEQ ID NO: 72129 - DNA, 25 bp, Homo sapien
agtctcttgaggaccagagaagcac

SEQ ID NO: 72130 - DNA, 25 bp, Homo sapien
tgaacattcactgcggggcttagga

SEQ ID NO: 72131 - DNA, 25 bp, Homo sapien
tcaacagtacgttcaaagcaggcga

SEQ ID NO: 72132 - DNA, 25 bp, Homo sapien
aaccactgtagtgcagtcagggtac

SEQ ID NO: 72133 - DNA, 25 bp, Homo sapien
gaggaagtctgaagtagaccttcac

SEQ ID NO: 72134 - DNA, 25 bp, Homo sapien
gcagtcagggtaccaatcatgatga

SEQ ID NO: 72135 - DNA, 25 bp, Homo sapien
aagcaggcgaacttcatcatggtgt

SEQ ID NO: 72136 - DNA, 25 bp, Homo sapien
tcaacagtacgttcaaagcaggcga

SEQ ID NO: 72137 - DNA, 25 bp, Homo sapien
ggcttaggaaccacaaacttgtaca

SEQ ID NO: 72138 - DNA, 25 bp, Homo sapien
tgaacattcactgcggggcttagga

SEQ ID NO: 72139 - DNA, 25 bp, Homo sapien
acagataccacagaatcagcagggt

SEQ ID NO: 72140 - DNA, 25 bp, Homo sapien
ggaccagagaagcactgctaccttt

SEQ ID NO: 72141 - DNA, 25 bp, Homo sapien
agtctcttgaggaccagagaagcac

SEQ ID NO: 72142 - DNA, 25 bp, Homo sapien
gcagtcagggtaccaatcatgatga

SEQ ID NO: 72143 - DNA, 25 bp, Homo sapien
aaccactgtagtgcagtcagggtac

SEQ ID NO: 72144 - DNA, 25 bp, Homo sapien
cttcacggagtcatagataaaccac

SEQ ID NO: 72145 - DNA, 25 bp, Homo sapien
gaggaagtctgaagtagaccttcac

SEQ ID NO: 72146 - DNA, 25 bp, Homo sapien
aagcaggcgaacttcatcatggtgt

SEQ ID NO: 72147 - DNA, 25 bp, Homo sapien
ggaccagagaagcactgctaccttt

SEQ ID NO: 72148 - DNA, 25 bp, Homo sapien
gcagtcagggtaccaatcatgatga

SEQ ID NO: 72149 - DNA, 25 bp, Homo sapien
ggcttaggaaccacaaacttgtaca

SEQ ID NO: 72150 - DNA, 25 bp, Homo sapien
acagataccacagaatcagcagggt

SEQ ID NO: 72151 - DNA, 25 bp, Homo sapien
gaggaagtctgaagtagaccttcac

SEQ ID NO: 72152 - DNA, 25 bp, Homo sapien
aaccactgtagtgcagtcagggtac

SEQ ID NO: 72153 - DNA, 25 bp, Homo sapien
cttcacggagtcatagataaaccac

SEQ ID NO: 72154 - DNA, 25 bp, Homo sapien
tgaacattcactgcggggcttagga

SEQ ID NO: 72155 - DNA, 25 bp, Homo sapien
agtctcttgaggaccagagaagcac

SEQ ID NO: 72156 - DNA, 25 bp, Homo sapien
tcaacagtacgttcaaagcaggcga

SEQ ID NO: 72157 - DNA, 25 bp, Homo sapien
aagcaggcgaacttcatcatggtgt

SEQ ID NO: 72158 - DNA, 25 bp, Homo sapien
tcaacagtacgttcaaagcaggcga

SEQ ID NO: 72159 - DNA, 25 bp, Homo sapien
ggcttaggaaccacaaacttgtaca

SEQ ID NO: 72160 - DNA, 25 bp, Homo sapien
tgaacattcactgcggggcttagga

SEQ ID NO: 72161 - DNA, 25 bp, Homo sapien
acagataccacagaatcagcagggt

SEQ ID NO: 72162 - DNA, 25 bp, Homo sapien
ggaccagagaagcactgctaccttt

SEQ ID NO: 72163 - DNA, 25 bp, Homo sapien
agtctcttgaggaccagagaagcac

SEQ ID NO: 72164 - DNA, 25 bp, Homo sapien
gcagtcagggtaccaatcatgatga

SEQ ID NO: 72165 - DNA, 25 bp, Homo sapien
aaccactgtagtgcagtcagggtac

SEQ ID NO: 72166 - DNA, 25 bp, Homo sapien
cttcacggagtcatagataaaccac

SEQ ID NO: 72167 - DNA, 25 bp, Homo sapien
gaggaagtctgaagtagaccttcac

SEQ ID NO: 72168 - DNA, 25 bp, Homo sapien
tcaacagtacgttcaaagcaggcga

SEQ ID NO: 72169 - DNA, 25 bp, Homo sapien
ggaccagagaagcactgctaccttt

SEQ ID NO: 72170 - DNA, 25 bp, Homo sapien
aagcaggcgaacttcatcatggtgt

SEQ ID NO: 72171 - DNA, 25 bp, Homo sapien
gaggaagtctgaagtagaccttcac

SEQ ID NO: 72172 - DNA, 25 bp, Homo sapien
aaccactgtagtgcagtcagggtac

SEQ ID NO: 72173 - DNA, 25 bp, Homo sapien
tgaacattcactgcggggcttagga

SEQ ID NO: 72174 - DNA, 25 bp, Homo sapien
ggcttaggaaccacaaacttgtaca

SEQ ID NO: 72175 - DNA, 25 bp, Homo sapien
gcagtcagggtaccaatcatgatga

SEQ ID NO: 72176 - DNA, 25 bp, Homo sapien
agtctcttgaggaccagagaagcac

SEQ ID NO: 72177 - DNA, 25 bp, Homo sapien
cttcacggagtcatagataaaccac

SEQ ID NO: 72178 - DNA, 25 bp, Homo sapien
acagataccacagaatcagcagggt

SEQ ID NO: 72179 - DNA, 25 bp, Homo sapien
aagcaggcgaacttcatcatggtgt

SEQ ID NO: 72180 - DNA, 25 bp, Homo sapien
tcaacagtacgttcaaagcaggcga

SEQ ID NO: 72181 - DNA, 25 bp, Homo sapien
ggcttaggaaccacaaacttgtaca

SEQ ID NO: 72182 - DNA, 25 bp, Homo sapien
tgaacattcactgcggggcttagga

SEQ ID NO: 72183 - DNA, 25 bp, Homo sapien
acagataccacagaatcagcagggt

SEQ ID NO: 72184 - DNA, 25 bp, Homo sapien
ggaccagagaagcactgctaccttt

SEQ ID NO: 72185 - DNA, 25 bp, Homo sapien
agtctcttgaggaccagagaagcac

SEQ ID NO: 72186 - DNA, 25 bp, Homo sapien
gcagtcagggtaccaatcatgatga

SEQ ID NO: 72187 - DNA, 25 bp, Homo sapien
aaccactgtagtgcagtcagggtac

SEQ ID NO: 72188 - DNA, 25 bp, Homo sapien
cttcacggagtcatagataaaccac

SEQ ID NO: 72189 - DNA, 25 bp, Homo sapien
gaggaagtctgaagtagaccttcac

SEQ ID NO: 72190 - DNA, 25 bp, Homo sapien
aagcaggcgaacttcatcatggtgt

SEQ ID NO: 72191 - DNA, 25 bp, Homo sapien
tcaacagtacgttcaaagcaggcga

SEQ ID NO: 72192 - DNA, 25 bp, Homo sapien
ggcttaggaaccacaaacttgtaca

SEQ ID NO: 72193 - DNA, 25 bp, Homo sapien
tgaacattcactgcggggcttagga

SEQ ID NO: 72194 - DNA, 25 bp, Homo sapien
acagataccacagaatcagcagggt

SEQ ID NO: 72195 - DNA, 25 bp, Homo sapien
ggaccagagaagcactgctaccttt

SEQ ID NO: 72196 - DNA, 25 bp, Homo sapien
agtctcttgaggaccagagaagcac

SEQ ID NO: 72197 - DNA, 25 bp, Homo sapien
gcagtcagggtaccaatcatgatga

SEQ ID NO: 72198 - DNA, 25 bp, Homo sapien
aaccactgtagtgcagtcagggtac

SEQ ID NO: 72199 - DNA, 25 bp, Homo sapien
cttcacggagtcatagataaaccac

SEQ ID NO: 72200 - DNA, 25 bp, Homo sapien
gaggaagtctgaagtagaccttcac

SEQ ID NO: 72201 - DNA, 25 bp, Homo sapien
ggcttaggaaccacaaacttgtaca

SEQ ID NO: 72202 - DNA, 25 bp, Homo sapien
tcaacagtacgttcaaagcaggcga

SEQ ID NO: 72203 - DNA, 25 bp, Homo sapien
agtctcttgaggaccagagaagcac

SEQ ID NO: 72204 - DNA, 25 bp, Homo sapien
gaggaagtctgaagtagaccttcac

SEQ ID NO: 72205 - DNA, 25 bp, Homo sapien
aaccactgtagtgcagtcagggtac

SEQ ID NO: 72206 - DNA, 25 bp, Homo sapien
gcagtcagggtaccaatcatgatga

SEQ ID NO: 72207 - DNA, 25 bp, Homo sapien
tgaacattcactgcggggcttagga

SEQ ID NO: 72208 - DNA, 25 bp, Homo sapien
cttcacggagtcatagataaaccac

SEQ ID NO: 72209 - DNA, 25 bp, Homo sapien
aagcaggcgaacttcatcatggtgt

SEQ ID NO: 72210 - DNA, 25 bp, Homo sapien
ggaccagagaagcactgctaccttt

SEQ ID NO: 72211 - DNA, 25 bp, Homo sapien
acagataccacagaatcagcagggt

SEQ ID NO: 72212 - DNA, 25 bp, Homo sapien
aagcaggcgaacttcatcatggtgt

SEQ ID NO: 72213 - DNA, 25 bp, Homo sapien
tcaacagtacgttcaaagcaggcga

SEQ ID NO: 72214 - DNA, 25 bp, Homo sapien
ggcttaggaaccacaaacttgtaca

SEQ ID NO: 72215 - DNA, 25 bp, Homo sapien
tgaacattcactgcggggcttagga

SEQ ID NO: 72216 - DNA, 25 bp, Homo sapien
acagataccacagaatcagcagggt

SEQ ID NO: 72217 - DNA, 25 bp, Homo sapien
ggaccagagaagcactgctaccttt

SEQ ID NO: 72218 - DNA, 25 bp, Homo sapien
agtctcttgaggaccagagaagcac

SEQ ID NO: 72219 - DNA, 25 bp, Homo sapien
gcagtcagggtaccaatcatgatga

SEQ ID NO: 72220 - DNA, 25 bp, Homo sapien
aaccactgtagtgcagtcagggtac

SEQ ID NO: 72221 - DNA, 25 bp, Homo sapien
cttcacggagtcatagataaaccac

SEQ ID NO: 72222 - DNA, 25 bp, Homo sapien
gaggaagtctgaagtagaccttcac

SEQ ID NO: 72223 - DNA, 25 bp, Homo sapien
tcaacagtacgttcaaagcaggcga

SEQ ID NO: 72224 - DNA, 25 bp, Homo sapien
ggcttaggaaccacaaacttgtaca

SEQ ID NO: 72225 - DNA, 25 bp, Homo sapien
agtctcttgaggaccagagaagcac

SEQ ID NO: 72226 - DNA, 25 bp, Homo sapien
gcagtcagggtaccaatcatgatga

SEQ ID NO: 72227 - DNA, 25 bp, Homo sapien
cttcacggagtcatagataaaccac

SEQ ID NO: 72228 - DNA, 25 bp, Homo sapien
aagcaggcgaacttcatcatggtgt

SEQ ID NO: 72229 - DNA, 25 bp, Homo sapien
tgaacattcactgcggggcttagga

SEQ ID NO: 72230 - DNA, 25 bp, Homo sapien
acagataccacagaatcagcagggt

SEQ ID NO: 72231 - DNA, 25 bp, Homo sapien
gaggaagtctgaagtagaccttcac

SEQ ID NO: 72232 - DNA, 25 bp, Homo sapien
ggaccagagaagcactgctaccttt

SEQ ID NO: 72233 - DNA, 25 bp, Homo sapien
aaccactgtagtgcagtcagggtac

SEQ ID NO: 72234 - DNA, 25 bp, Homo sapien
aagcaggcgaacttcatcatggtgt

SEQ ID NO: 72235 - DNA, 25 bp, Homo sapien
tcaacagtacgttcaaagcaggcga

SEQ ID NO: 72236 - DNA, 25 bp, Homo sapien
ggcttaggaaccacaaacttgtaca

SEQ ID NO: 72237 - DNA, 25 bp, Homo sapien
tgaacattcactgcggggcttagga

SEQ ID NO: 72238 - DNA, 25 bp, Homo sapien
acagataccacagaatcagcagggt

SEQ ID NO: 72239 - DNA, 25 bp, Homo sapien
ggaccagagaagcactgctaccttt

SEQ ID NO: 72240 - DNA, 25 bp, Homo sapien
agtctcttgaggaccagagaagcac

SEQ ID NO: 72241 - DNA, 25 bp, Homo sapien
gcagtcagggtaccaatcatgatga

SEQ ID NO: 72242 - DNA, 25 bp, Homo sapien
aaccactgtagtgcagtcagggtac

SEQ ID NO: 72243 - DNA, 25 bp, Homo sapien
cttcacggagtcatagataaaccac

SEQ ID NO: 72244 - DNA, 25 bp, Homo sapien
gaggaagtctgaagtagaccttcac

SEQ ID NO: 72245 - DNA, 25 bp, Homo sapien
tgaacattcactgcggggcttagga

SEQ ID NO: 72246 - DNA, 25 bp, Homo sapien
ggcttaggaaccacaaacttgtaca

SEQ ID NO: 72247 - DNA, 25 bp, Homo sapien
tcaacagtacgttcaaagcaggcga

SEQ ID NO: 72248 - DNA, 25 bp, Homo sapien
agtctcttgaggaccagagaagcac

SEQ ID NO: 72249 - DNA, 25 bp, Homo sapien
acagataccacagaatcagcagggt

SEQ ID NO: 72250 - DNA, 25 bp, Homo sapien
ggaccagagaagcactgctaccttt

SEQ ID NO: 72251 - DNA, 25 bp, Homo sapien
aaccactgtagtgcagtcagggtac

SEQ ID NO: 72252 - DNA, 25 bp, Homo sapien
gaggaagtctgaagtagaccttcac

SEQ ID NO: 72253 - DNA, 25 bp, Homo sapien
aagcaggcgaacttcatcatggtgt

SEQ ID NO: 72254 - DNA, 25 bp, Homo sapien
gcagtcagggtaccaatcatgatga

SEQ ID NO: 72255 - DNA, 25 bp, Homo sapien
cttcacggagtcatagataaaccac

SEQ ID NO: 72256 - DNA, 25 bp, Homo sapien
aagcaggcgaacttcatcatggtgt

SEQ ID NO: 72257 - DNA, 25 bp, Homo sapien
tcaacagtacgttcaaagcaggcga

SEQ ID NO: 72258 - DNA, 25 bp, Homo sapien
ggcttaggaaccacaaacttgtaca

SEQ ID NO: 72259 - DNA, 25 bp, Homo sapien
tgaacattcactgcggggcttagga

SEQ ID NO: 72260 - DNA, 25 bp, Homo sapien
acagataccacagaatcagcagggt

SEQ ID NO: 72261 - DNA, 25 bp, Homo sapien
ggaccagagaagcactgctaccttt

SEQ ID NO: 72262 - DNA, 25 bp, Homo sapien
agtctcttgaggaccagagaagcac

SEQ ID NO: 72263 - DNA, 25 bp, Homo sapien
gcagtcagggtaccaatcatgatga

SEQ ID NO: 72264 - DNA, 25 bp, Homo sapien
aaccactgtagtgcagtcagggtac

SEQ ID NO: 72265 - DNA, 25 bp, Homo sapien
cttcacggagtcatagataaaccac

SEQ ID NO: 72266 - DNA, 25 bp, Homo sapien
gaggaagtctgaagtagaccttcac

SEQ ID NO: 72267 - DNA, 25 bp, Homo sapien
agtctcttgaggaccagagaagcac

SEQ ID NO: 72268 - DNA, 25 bp, Homo sapien
tcaacagtacgttcaaagcaggcga

SEQ ID NO: 72269 - DNA, 25 bp, Homo sapien
aagcaggcgaacttcatcatggtgt

SEQ ID NO: 72270 - DNA, 25 bp, Homo sapien
tgaacattcactgcggggcttagga

SEQ ID NO: 72271 - DNA, 25 bp, Homo sapien
acagataccacagaatcagcagggt

SEQ ID NO: 72272 - DNA, 25 bp, Homo sapien
gaggaagtctgaagtagaccttcac

SEQ ID NO: 72273 - DNA, 25 bp, Homo sapien
cttcacggagtcatagataaaccac

SEQ ID NO: 72274 - DNA, 25 bp, Homo sapien
ggcttaggaaccacaaacttgtaca

SEQ ID NO: 72275 - DNA, 25 bp, Homo sapien
ggaccagagaagcactgctaccttt

SEQ ID NO: 72276 - DNA, 25 bp, Homo sapien
gcagtcagggtaccaatcatgatga

SEQ ID NO: 72277 - DNA, 25 bp, Homo sapien
aaccactgtagtgcagtcagggtac

SEQ ID NO: 72278 - DNA, 25 bp, Homo sapien
aagcaggcgaacttcatcatggtgt

SEQ ID NO: 72279 - DNA, 25 bp, Homo sapien
tcaacagtacgttcaaagcaggcga

SEQ ID NO: 72280 - DNA, 25 bp, Homo sapien
ggcttaggaaccacaaacttgtaca

SEQ ID NO: 72281 - DNA, 25 bp, Homo sapien
tgaacattcactgcggggcttagga

SEQ ID NO: 72282 - DNA, 25 bp, Homo sapien
acagataccacagaatcagcagggt

SEQ ID NO: 72283 - DNA, 25 bp, Homo sapien
ggaccagagaagcactgctaccttt

SEQ ID NO: 72284 - DNA, 25 bp, Homo sapien
agtctcttgaggaccagagaagcac

SEQ ID NO: 72285 - DNA, 25 bp, Homo sapien
gcagtcagggtaccaatcatgatga

SEQ ID NO: 72286 - DNA, 25 bp, Homo sapien
aaccactgtagtgcagtcagggtac

SEQ ID NO: 72287 - DNA, 25 bp, Homo sapien
cttcacggagtcatagataaaccac

SEQ ID NO: 72288 - DNA, 25 bp, Homo sapien
gaggaagtctgaagtagaccttcac

SEQ ID NO: 72289 - DNA, 25 bp, Homo sapien
aaccactgtagtgcagtcagggtac

SEQ ID NO: 72290 - DNA, 25 bp, Homo sapien
gaggaagtctgaagtagaccttcac

SEQ ID NO: 72291 - DNA, 25 bp, Homo sapien
ggaccagagaagcactgctaccttt

SEQ ID NO: 72292 - DNA, 25 bp, Homo sapien
acagataccacagaatcagcagggt

SEQ ID NO: 72293 - DNA, 25 bp, Homo sapien
gcagtcagggtaccaatcatgatga

SEQ ID NO: 72294 - DNA, 25 bp, Homo sapien
ggcttaggaaccacaaacttgtaca

SEQ ID NO: 72295 - DNA, 25 bp, Homo sapien
tgaacattcactgcggggcttagga

SEQ ID NO: 72296 - DNA, 25 bp, Homo sapien
tcaacagtacgttcaaagcaggcga

SEQ ID NO: 72297 - DNA, 25 bp, Homo sapien
aagcaggcgaacttcatcatggtgt

SEQ ID NO: 72298 - DNA, 25 bp, Homo sapien
cttcacggagtcatagataaaccac

SEQ ID NO: 72299 - DNA, 25 bp, Homo sapien
agtctcttgaggaccagagaagcac

SEQ ID NO: 72300 - DNA, 25 bp, Homo sapien
agtctcttgaggaccagagaagcac

SEQ ID NO: 72301 - DNA, 25 bp, Homo sapien
ggaccagagaagcactgctaccttt

SEQ ID NO: 72302 - DNA, 25 bp, Homo sapien
ggcttaggaaccacaaacttgtaca

SEQ ID NO: 72303 - DNA, 25 bp, Homo sapien
aagcaggcgaacttcatcatggtgt

SEQ ID NO: 72304 - DNA, 25 bp, Homo sapien
acagataccacagaatcagcagggt

SEQ ID NO: 72305 - DNA, 25 bp, Homo sapien
cttcacggagtcatagataaaccac

SEQ ID NO: 72306 - DNA, 25 bp, Homo sapien
aaccactgtagtgcagtcagggtac

SEQ ID NO: 72307 - DNA, 25 bp, Homo sapien
gcagtcagggtaccaatcatgatga

SEQ ID NO: 72308 - DNA, 25 bp, Homo sapien
tcaacagtacgttcaaagcaggcga

SEQ ID NO: 72309 - DNA, 25 bp, Homo sapien
tgaacattcactgcggggcttagga

SEQ ID NO: 72310 - DNA, 25 bp, Homo sapien
gaggaagtctgaagtagaccttcac

SEQ ID NO: 72311 - DNA, 25 bp, Homo sapien
aagcaggcgaacttcatcatggtgt

SEQ ID NO: 72312 - DNA, 25 bp, Homo sapien
tcaacagtacgttcaaagcaggcga

SEQ ID NO: 72313 - DNA, 25 bp, Homo sapien
ggcttaggaaccacaaacttgtaca

SEQ ID NO: 72314 - DNA, 25 bp, Homo sapien
tgaacattcactgcggggcttagga

SEQ ID NO: 72315 - DNA, 25 bp, Homo sapien
acagataccacagaatcagcagggt

SEQ ID NO: 72316 - DNA, 25 bp, Homo sapien
ggaccagagaagcactgctaccttt

SEQ ID NO: 72317 - DNA, 25 bp, Homo sapien
agtctcttgaggaccagagaagcac

SEQ ID NO: 72318 - DNA, 25 bp, Homo sapien
gcagtcagggtaccaatcatgatga

SEQ ID NO: 72319 - DNA, 25 bp, Homo sapien
aaccactgtagtgcagtcagggtac

SEQ ID NO: 72320 - DNA, 25 bp, Homo sapien
cttcacggagtcatagataaaccac

SEQ ID NO: 72321 - DNA, 25 bp, Homo sapien
gaggaagtctgaagtagaccttcac

SEQ ID NO: 72322 - DNA, 25 bp, Homo sapien
agtctcttgaggaccagagaagcac

SEQ ID NO: 72323 - DNA, 25 bp, Homo sapien
ggaccagagaagcactgctaccttt

SEQ ID NO: 72324 - DNA, 25 bp, Homo sapien
cttcacggagtcatagataaaccac

SEQ ID NO: 72325 - DNA, 25 bp, Homo sapien
ggcttaggaaccacaaacttgtaca

SEQ ID NO: 72326 - DNA, 25 bp, Homo sapien
tcaacagtacgttcaaagcaggcga

SEQ ID NO: 72327 - DNA, 25 bp, Homo sapien
tgaacattcactgcggggcttagga

SEQ ID NO: 72328 - DNA, 25 bp, Homo sapien
aaccactgtagtgcagtcagggtac

SEQ ID NO: 72329 - DNA, 25 bp, Homo sapien
gaggaagtctgaagtagaccttcac

SEQ ID NO: 72330 - DNA, 25 bp, Homo sapien
aagcaggcgaacttcatcatggtgt

SEQ ID NO: 72331 - DNA, 25 bp, Homo sapien
gcagtcagggtaccaatcatgatga

SEQ ID NO: 72332 - DNA, 25 bp, Homo sapien
acagataccacagaatcagcagggt

SEQ ID NO: 72333 - DNA, 25 bp, Homo sapien
aagcaggcgaacttcatcatggtgt

SEQ ID NO: 72334 - DNA, 25 bp, Homo sapien
tcaacagtacgttcaaagcaggcga

SEQ ID NO: 72335 - DNA, 25 bp, Homo sapien
ggcttaggaaccacaaacttgtaca

SEQ ID NO: 72336 - DNA, 25 bp, Homo sapien
tgaacattcactgcggggcttagga

SEQ ID NO: 72337 - DNA, 25 bp, Homo sapien
acagataccacagaatcagcagggt

SEQ ID NO: 72338 - DNA, 25 bp, Homo sapien
ggaccagagaagcactgctaccttt

SEQ ID NO: 72339 - DNA, 25 bp, Homo sapien
agtctcttgaggaccagagaagcac

SEQ ID NO: 72340 - DNA, 25 bp, Homo sapien
gcagtcagggtaccaatcatgatga

SEQ ID NO: 72341 - DNA, 25 bp, Homo sapien
aaccactgtagtgcagtcagggtac

SEQ ID NO: 72342 - DNA, 25 bp, Homo sapien
cttcacggagtcatagataaaccac

SEQ ID NO: 72343 - DNA, 25 bp, Homo sapien
gaggaagtctgaagtagaccttcac

SEQ ID NO: 72344 - DNA, 25 bp, Homo sapien
agtctcttgaggaccagagaagcac

SEQ ID NO: 72345 - DNA, 25 bp, Homo sapien
acagataccacagaatcagcagggt

SEQ ID NO: 72346 - DNA, 25 bp, Homo sapien
aaccactgtagtgcagtcagggtac

SEQ ID NO: 72347 - DNA, 25 bp, Homo sapien
ggaccagagaagcactgctaccttt

SEQ ID NO: 72348 - DNA, 25 bp, Homo sapien
gcagtcagggtaccaatcatgatga

SEQ ID NO: 72349 - DNA, 25 bp, Homo sapien
gaggaagtctgaagtagaccttcac

SEQ ID NO: 72350 - DNA, 25 bp, Homo sapien
cttcacggagtcatagataaaccac

SEQ ID NO: 72351 - DNA, 25 bp, Homo sapien
ggcttaggaaccacaaacttgtaca

SEQ ID NO: 72352 - DNA, 25 bp, Homo sapien
aagcaggcgaacttcatcatggtgt

SEQ ID NO: 72353 - DNA, 25 bp, Homo sapien
tcaacagtacgttcaaagcaggcga

SEQ ID NO: 72354 - DNA, 25 bp, Homo sapien
tgaacattcactgcggggcttagga

SEQ ID NO: 72355 - DNA, 25 bp, Homo sapien
aagcaggcgaacttcatcatggtgt

SEQ ID NO: 72356 - DNA, 25 bp, Homo sapien
tcaacagtacgttcaaagcaggcga

SEQ ID NO: 72357 - DNA, 25 bp, Homo sapien
ggcttaggaaccacaaacttgtaca

SEQ ID NO: 72358 - DNA, 25 bp, Homo sapien
tgaacattcactgcggggcttagga

SEQ ID NO: 72359 - DNA, 25 bp, Homo sapien
acagataccacagaatcagcagggt

SEQ ID NO: 72360 - DNA, 25 bp, Homo sapien
ggaccagagaagcactgctaccttt

SEQ ID NO: 72361 - DNA, 25 bp, Homo sapien
agtctcttgaggaccagagaagcac

SEQ ID NO: 72362 - DNA, 25 bp, Homo sapien
gcagtcagggtaccaatcatgatga

SEQ ID NO: 72363 - DNA, 25 bp, Homo sapien
aaccactgtagtgcagtcagggtac

SEQ ID NO: 72364 - DNA, 25 bp, Homo sapien
cttcacggagtcatagataaaccac

SEQ ID NO: 72365 - DNA, 25 bp, Homo sapien
gaggaagtctgaagtagaccttcac

SEQ ID NO: 72366 - DNA, 25 bp, Homo sapien
cagatagtctcggcggatgacaatg

SEQ ID NO: 72367 - DNA, 25 bp, Homo sapien
gccctcaatagcctccttgggtgtc

SEQ ID NO: 72368 - DNA, 25 bp, Homo sapien
gcttttggtaggcacgctcagtctg

SEQ ID NO: 72369 - DNA, 25 bp, Homo sapien
acgctcagtctgaatgtccgccatc

SEQ ID NO: 72370 - DNA, 25 bp, Homo sapien
atggacacattaccagtgaaggggc

SEQ ID NO: 72371 - DNA, 25 bp, Homo sapien
ttgaaagatggtcggctgcttttgg

SEQ ID NO: 72372 - DNA, 25 bp, Homo sapien
cggcactcgcccactgtgacgatgt

SEQ ID NO: 72373 - DNA, 25 bp, Homo sapien
gcttctcgaagcggttgtacttgcg

SEQ ID NO: 72374 - DNA, 25 bp, Homo sapien
cagtgaaggggcatttcttgtcaat

SEQ ID NO: 72375 - DNA, 25 bp, Homo sapien
ggacaggtgtacagacatgttcttg

SEQ ID NO: 72376 - DNA, 25 bp, Homo sapien
agcacgttgaagcgcactgtcttgc

SEQ ID NO: 72377 - DNA, 25 bp, Homo sapien
acgctcagtctgaatgtccgccatc

SEQ ID NO: 72378 - DNA, 25 bp, Homo sapien
gcttttggtaggcacgctcagtctg

SEQ ID NO: 72379 - DNA, 25 bp, Homo sapien
ttgaaagatggtcggctgcttttgg

SEQ ID NO: 72380 - DNA, 25 bp, Homo sapien
gccctcaatagcctccttgggtgtc

SEQ ID NO: 72381 - DNA, 25 bp, Homo sapien
cagtgaaggggcatttcttgtcaat

SEQ ID NO: 72382 - DNA, 25 bp, Homo sapien
atggacacattaccagtgaaggggc

SEQ ID NO: 72383 - DNA, 25 bp, Homo sapien
cagatagtctcggcggatgacaatg

SEQ ID NO: 72384 - DNA, 25 bp, Homo sapien
gcttctcgaagcggttgtacttgcg

SEQ ID NO: 72385 - DNA, 25 bp, Homo sapien
ggacaggtgtacagacatgttcttg

SEQ ID NO: 72386 - DNA, 25 bp, Homo sapien
cggcactcgcccactgtgacgatgt

SEQ ID NO: 72387 - DNA, 25 bp, Homo sapien
agcacgttgaagcgcactgtcttgc

SEQ ID NO: 72388 - DNA, 25 bp, Homo sapien
cagatagtctcggcggatgacaatg

SEQ ID NO: 72389 - DNA, 25 bp, Homo sapien
ttgaaagatggtcggctgcttttgg

SEQ ID NO: 72390 - DNA, 25 bp, Homo sapien
ggacaggtgtacagacatgttcttg

SEQ ID NO: 72391 - DNA, 25 bp, Homo sapien
gcttctcgaagcggttgtacttgcg

SEQ ID NO: 72392 - DNA, 25 bp, Homo sapien
gccctcaatagcctccttgggtgtc

SEQ ID NO: 72393 - DNA, 25 bp, Homo sapien
acgctcagtctgaatgtccgccatc

SEQ ID NO: 72394 - DNA, 25 bp, Homo sapien
cagtgaaggggcatttcttgtcaat

SEQ ID NO: 72395 - DNA, 25 bp, Homo sapien
gcttttggtaggcacgctcagtctg

SEQ ID NO: 72396 - DNA, 25 bp, Homo sapien
atggacacattaccagtgaaggggc

SEQ ID NO: 72397 - DNA, 25 bp, Homo sapien
cggcactcgcccactgtgacgatgt

SEQ ID NO: 72398 - DNA, 25 bp, Homo sapien
agcacgttgaagcgcactgtcttgc

SEQ ID NO: 72399 - DNA, 25 bp, Homo sapien
acgctcagtctgaatgtccgccatc

SEQ ID NO: 72400 - DNA, 25 bp, Homo sapien
gcttttggtaggcacgctcagtctg

SEQ ID NO: 72401 - DNA, 25 bp, Homo sapien
ttgaaagatggtcggctgcttttgg

SEQ ID NO: 72402 - DNA, 25 bp, Homo sapien
gccctcaatagcctccttgggtgtc

SEQ ID NO: 72403 - DNA, 25 bp, Homo sapien
cagtgaaggggcatttcttgtcaat

SEQ ID NO: 72404 - DNA, 25 bp, Homo sapien
atggacacattaccagtgaaggggc

SEQ ID NO: 72405 - DNA, 25 bp, Homo sapien
cagatagtctcggcggatgacaatg

SEQ ID NO: 72406 - DNA, 25 bp, Homo sapien
gcttctcgaagcggttgtacttgcg

SEQ ID NO: 72407 - DNA, 25 bp, Homo sapien
ggacaggtgtacagacatgttcttg

SEQ ID NO: 72408 - DNA, 25 bp, Homo sapien
cggcactcgcccactgtgacgatgt

SEQ ID NO: 72409 - DNA, 25 bp, Homo sapien
agcacgttgaagcgcactgtcttgc

SEQ ID NO: 72410 - DNA, 25 bp, Homo sapien
atggacacattaccagtgaaggggc

SEQ ID NO: 72411 - DNA, 25 bp, Homo sapien
ggacaggtgtacagacatgttcttg

SEQ ID NO: 72412 - DNA, 25 bp, Homo sapien
cagtgaaggggcatttcttgtcaat

SEQ ID NO: 72413 - DNA, 25 bp, Homo sapien
ttgaaagatggtcggctgcttttgg

SEQ ID NO: 72414 - DNA, 25 bp, Homo sapien
gccctcaatagcctccttgggtgtc

SEQ ID NO: 72415 - DNA, 25 bp, Homo sapien
gcttttggtaggcacgctcagtctg

SEQ ID NO: 72416 - DNA, 25 bp, Homo sapien
cagatagtctcggcggatgacaatg

SEQ ID NO: 72417 - DNA, 25 bp, Homo sapien
acgctcagtctgaatgtccgccatc

SEQ ID NO: 72418 - DNA, 25 bp, Homo sapien
agcacgttgaagcgcactgtcttgc

SEQ ID NO: 72419 - DNA, 25 bp, Homo sapien
gcttctcgaagcggttgtacttgcg

SEQ ID NO: 72420 - DNA, 25 bp, Homo sapien
cggcactcgcccactgtgacgatgt

SEQ ID NO: 72421 - DNA, 25 bp, Homo sapien
acgctcagtctgaatgtccgccatc

SEQ ID NO: 72422 - DNA, 25 bp, Homo sapien
gcttttggtaggcacgctcagtctg

SEQ ID NO: 72423 - DNA, 25 bp, Homo sapien
ttgaaagatggtcggctgcttttgg

SEQ ID NO: 72424 - DNA, 25 bp, Homo sapien
gccctcaatagcctccttgggtgtc

SEQ ID NO: 72425 - DNA, 25 bp, Homo sapien
cagtgaaggggcatttcttgtcaat

SEQ ID NO: 72426 - DNA, 25 bp, Homo sapien
atggacacattaccagtgaaggggc

SEQ ID NO: 72427 - DNA, 25 bp, Homo sapien
cagatagtctcggcggatgacaatg

SEQ ID NO: 72428 - DNA, 25 bp, Homo sapien
gcttctcgaagcggttgtacttgcg

SEQ ID NO: 72429 - DNA, 25 bp, Homo sapien
ggacaggtgtacagacatgttcttg

SEQ ID NO: 72430 - DNA, 25 bp, Homo sapien
cggcactcgcccactgtgacgatgt

SEQ ID NO: 72431 - DNA, 25 bp, Homo sapien
agcacgttgaagcgcactgtcttgc

SEQ ID NO: 72432 - DNA, 25 bp, Homo sapien
acgctcagtctgaatgtccgccatc

SEQ ID NO: 72433 - DNA, 25 bp, Homo sapien
gcttttggtaggcacgctcagtctg

SEQ ID NO: 72434 - DNA, 25 bp, Homo sapien
ttgaaagatggtcggctgcttttgg

SEQ ID NO: 72435 - DNA, 25 bp, Homo sapien
gccctcaatagcctccttgggtgtc

SEQ ID NO: 72436 - DNA, 25 bp, Homo sapien
cagtgaaggggcatttcttgtcaat

SEQ ID NO: 72437 - DNA, 25 bp, Homo sapien
atggacacattaccagtgaaggggc

SEQ ID NO: 72438 - DNA, 25 bp, Homo sapien
cagatagtctcggcggatgacaatg

SEQ ID NO: 72439 - DNA, 25 bp, Homo sapien
gcttctcgaagcggttgtacttgcg

SEQ ID NO: 72440 - DNA, 25 bp, Homo sapien
ggacaggtgtacagacatgttcttg

SEQ ID NO: 72441 - DNA, 25 bp, Homo sapien
cggcactcgcccactgtgacgatgt

SEQ ID NO: 72442 - DNA, 25 bp, Homo sapien
agcacgttgaagcgcactgtcttgc

SEQ ID NO: 72443 - DNA, 25 bp, Homo sapien
gcttctcgaagcggttgtacttgcg

SEQ ID NO: 72444 - DNA, 25 bp, Homo sapien
atggacacattaccagtgaaggggc

SEQ ID NO: 72445 - DNA, 25 bp, Homo sapien
cggcactcgcccactgtgacgatgt

SEQ ID NO: 72446 - DNA, 25 bp, Homo sapien
ttgaaagatggtcggctgcttttgg

SEQ ID NO: 72447 - DNA, 25 bp, Homo sapien
cagtgaaggggcatttcttgtcaat

SEQ ID NO: 72448 - DNA, 25 bp, Homo sapien
ggacaggtgtacagacatgttcttg

SEQ ID NO: 72449 - DNA, 25 bp, Homo sapien
gccctcaatagcctccttgggtgtc

SEQ ID NO: 72450 - DNA, 25 bp, Homo sapien
acgctcagtctgaatgtccgccatc

SEQ ID NO: 72451 - DNA, 25 bp, Homo sapien
cagatagtctcggcggatgacaatg

SEQ ID NO: 72452 - DNA, 25 bp, Homo sapien
gcttttggtaggcacgctcagtctg

SEQ ID NO: 72453 - DNA, 25 bp, Homo sapien
agcacgttgaagcgcactgtcttgc

SEQ ID NO: 72454 - DNA, 25 bp, Homo sapien
acgctcagtctgaatgtccgccatc

SEQ ID NO: 72455 - DNA, 25 bp, Homo sapien
gcttttggtaggcacgctcagtctg

SEQ ID NO: 72456 - DNA, 25 bp, Homo sapien
ttgaaagatggtcggctgcttttgg

SEQ ID NO: 72457 - DNA, 25 bp, Homo sapien
gccctcaatagcctccttgggtgtc

SEQ ID NO: 72458 - DNA, 25 bp, Homo sapien
cagtgaaggggcatttcttgtcaat

SEQ ID NO: 72459 - DNA, 25 bp, Homo sapien
atggacacattaccagtgaaggggc

SEQ ID NO: 72460 - DNA, 25 bp, Homo sapien
cagatagtctcggcggatgacaatg

SEQ ID NO: 72461 - DNA, 25 bp, Homo sapien
gcttctcgaagcggttgtacttgcg

SEQ ID NO: 72462 - DNA, 25 bp, Homo sapien
ggacaggtgtacagacatgttcttg

SEQ ID NO: 72463 - DNA, 25 bp, Homo sapien
cggcactcgcccactgtgacgatgt

SEQ ID NO: 72464 - DNA, 25 bp, Homo sapien
agcacgttgaagcgcactgtcttgc

SEQ ID NO: 72465 - DNA, 25 bp, Homo sapien
atggacacattaccagtgaaggggc

SEQ ID NO: 72466 - DNA, 25 bp, Homo sapien
acgctcagtctgaatgtccgccatc

SEQ ID NO: 72467 - DNA, 25 bp, Homo sapien
cagatagtctcggcggatgacaatg

SEQ ID NO: 72468 - DNA, 25 bp, Homo sapien
gccctcaatagcctccttgggtgtc

SEQ ID NO: 72469 - DNA, 25 bp, Homo sapien
ggacaggtgtacagacatgttcttg

SEQ ID NO: 72470 - DNA, 25 bp, Homo sapien
cagtgaaggggcatttcttgtcaat

SEQ ID NO: 72471 - DNA, 25 bp, Homo sapien
gcttttggtaggcacgctcagtctg

SEQ ID NO: 72472 - DNA, 25 bp, Homo sapien
gcttctcgaagcggttgtacttgcg

SEQ ID NO: 72473 - DNA, 25 bp, Homo sapien
ttgaaagatggtcggctgcttttgg

SEQ ID NO: 72474 - DNA, 25 bp, Homo sapien
cggcactcgcccactgtgacgatgt

SEQ ID NO: 72475 - DNA, 25 bp, Homo sapien
agcacgttgaagcgcactgtcttgc

SEQ ID NO: 72476 - DNA, 25 bp, Homo sapien
acgctcagtctgaatgtccgccatc

SEQ ID NO: 72477 - DNA, 25 bp, Homo sapien
gcttttggtaggcacgctcagtctg

SEQ ID NO: 72478 - DNA, 25 bp, Homo sapien
ttgaaagatggtcggctgcttttgg

SEQ ID NO: 72479 - DNA, 25 bp, Homo sapien
gccctcaatagcctccttgggtgtc

SEQ ID NO: 72480 - DNA, 25 bp, Homo sapien
cagtgaaggggcatttcttgtcaat

SEQ ID NO: 72481 - DNA, 25 bp, Homo sapien
atggacacattaccagtgaaggggc

SEQ ID NO: 72482 - DNA, 25 bp, Homo sapien
cagatagtctcggcggatgacaatg

SEQ ID NO: 72483 - DNA, 25 bp, Homo sapien
gcttctcgaagcggttgtacttgcg

SEQ ID NO: 72484 - DNA, 25 bp, Homo sapien
ggacaggtgtacagacatgttcttg

SEQ ID NO: 72485 - DNA, 25 bp, Homo sapien
cggcactcgcccactgtgacgatgt

SEQ ID NO: 72486 - DNA, 25 bp, Homo sapien
agcacgttgaagcgcactgtcttgc

SEQ ID NO: 72487 - DNA, 25 bp, Homo sapien
atggacacattaccagtgaaggggc

SEQ ID NO: 72488 - DNA, 25 bp, Homo sapien
gccctcaatagcctccttgggtgtc

SEQ ID NO: 72489 - DNA, 25 bp, Homo sapien
acgctcagtctgaatgtccgccatc

SEQ ID NO: 72490 - DNA, 25 bp, Homo sapien
ttgaaagatggtcggctgcttttgg

SEQ ID NO: 72491 - DNA, 25 bp, Homo sapien
agcacgttgaagcgcactgtcttgc

SEQ ID NO: 72492 - DNA, 25 bp, Homo sapien
gcttctcgaagcggttgtacttgcg

SEQ ID NO: 72493 - DNA, 25 bp, Homo sapien
gcttttggtaggcacgctcagtctg

SEQ ID NO: 72494 - DNA, 25 bp, Homo sapien
cggcactcgcccactgtgacgatgt

SEQ ID NO: 72495 - DNA, 25 bp, Homo sapien
cagatagtctcggcggatgacaatg

SEQ ID NO: 72496 - DNA, 25 bp, Homo sapien
cagtgaaggggcatttcttgtcaat

SEQ ID NO: 72497 - DNA, 25 bp, Homo sapien
ggacaggtgtacagacatgttcttg

SEQ ID NO: 72498 - DNA, 25 bp, Homo sapien
acgctcagtctgaatgtccgccatc

SEQ ID NO: 72499 - DNA, 25 bp, Homo sapien
gcttttggtaggcacgctcagtctg

SEQ ID NO: 72500 - DNA, 25 bp, Homo sapien
ttgaaagatggtcggctgcttttgg

SEQ ID NO: 72501 - DNA, 25 bp, Homo sapien
gccctcaatagcctccttgggtgtc

SEQ ID NO: 72502 - DNA, 25 bp, Homo sapien
cagtgaaggggcatttcttgtcaat

SEQ ID NO: 72503 - DNA, 25 bp, Homo sapien
atggacacattaccagtgaaggggc

SEQ ID NO: 72504 - DNA, 25 bp, Homo sapien
cagatagtctcggcggatgacaatg

SEQ ID NO: 72505 - DNA, 25 bp, Homo sapien
gcttctcgaagcggttgtacttgcg

SEQ ID NO: 72506 - DNA, 25 bp, Homo sapien
ggacaggtgtacagacatgttcttg

SEQ ID NO: 72507 - DNA, 25 bp, Homo sapien
cggcactcgcccactgtgacgatgt

SEQ ID NO: 72508 - DNA, 25 bp, Homo sapien
agcacgttgaagcgcactgtcttgc

SEQ ID NO: 72509 - DNA, 25 bp, Homo sapien
ggacaggtgtacagacatgttcttg

SEQ ID NO: 72510 - DNA, 25 bp, Homo sapien
agcacgttgaagcgcactgtcttgc

SEQ ID NO: 72511 - DNA, 25 bp, Homo sapien
gcttctcgaagcggttgtacttgcg

SEQ ID NO: 72512 - DNA, 25 bp, Homo sapien
ttgaaagatggtcggctgcttttgg

SEQ ID NO: 72513 - DNA, 25 bp, Homo sapien
cagatagtctcggcggatgacaatg

SEQ ID NO: 72514 - DNA, 25 bp, Homo sapien
gcttttggtaggcacgctcagtctg

SEQ ID NO: 72515 - DNA, 25 bp, Homo sapien
gccctcaatagcctccttgggtgtc

SEQ ID NO: 72516 - DNA, 25 bp, Homo sapien
acgctcagtctgaatgtccgccatc

SEQ ID NO: 72517 - DNA, 25 bp, Homo sapien
cagtgaaggggcatttcttgtcaat

SEQ ID NO: 72518 - DNA, 25 bp, Homo sapien
atggacacattaccagtgaaggggc

SEQ ID NO: 72519 - DNA, 25 bp, Homo sapien
cggcactcgcccactgtgacgatgt

SEQ ID NO: 72520 - DNA, 25 bp, Homo sapien
acgctcagtctgaatgtccgccatc

SEQ ID NO: 72521 - DNA, 25 bp, Homo sapien
gcttttggtaggcacgctcagtctg

SEQ ID NO: 72522 - DNA, 25 bp, Homo sapien
ttgaaagatggtcggctgcttttgg

SEQ ID NO: 72523 - DNA, 25 bp, Homo sapien
gccctcaatagcctccttgggtgtc

SEQ ID NO: 72524 - DNA, 25 bp, Homo sapien
cagtgaaggggcatttcttgtcaat

SEQ ID NO: 72525 - DNA, 25 bp, Homo sapien
atggacacattaccagtgaaggggc

SEQ ID NO: 72526 - DNA, 25 bp, Homo sapien
cagatagtctcggcggatgacaatg

SEQ ID NO: 72527 - DNA, 25 bp, Homo sapien
gcttctcgaagcggttgtacttgcg

SEQ ID NO: 72528 - DNA, 25 bp, Homo sapien
ggacaggtgtacagacatgttcttg

SEQ ID NO: 72529 - DNA, 25 bp, Homo sapien
cggcactcgcccactgtgacgatgt

SEQ ID NO: 72530 - DNA, 25 bp, Homo sapien
agcacgttgaagcgcactgtcttgc

SEQ ID NO: 72531 - DNA, 25 bp, Homo sapien
agcacgttgaagcgcactgtcttgc

SEQ ID NO: 72532 - DNA, 25 bp, Homo sapien
cggcactcgcccactgtgacgatgt

SEQ ID NO: 72533 - DNA, 25 bp, Homo sapien
cagatagtctcggcggatgacaatg

SEQ ID NO: 72534 - DNA, 25 bp, Homo sapien
gcttttggtaggcacgctcagtctg

SEQ ID NO: 72535 - DNA, 25 bp, Homo sapien
gcttctcgaagcggttgtacttgcg

SEQ ID NO: 72536 - DNA, 25 bp, Homo sapien
gccctcaatagcctccttgggtgtc

SEQ ID NO: 72537 - DNA, 25 bp, Homo sapien
atggacacattaccagtgaaggggc

SEQ ID NO: 72538 - DNA, 25 bp, Homo sapien
cagtgaaggggcatttcttgtcaat

SEQ ID NO: 72539 - DNA, 25 bp, Homo sapien
ttgaaagatggtcggctgcttttgg

SEQ ID NO: 72540 - DNA, 25 bp, Homo sapien
ggacaggtgtacagacatgttcttg

SEQ ID NO: 72541 - DNA, 25 bp, Homo sapien
acgctcagtctgaatgtccgccatc

SEQ ID NO: 72542 - DNA, 25 bp, Homo sapien
gcttttggtaggcacgctcagtctg

SEQ ID NO: 72543 - DNA, 25 bp, Homo sapien
atggacacattaccagtgaaggggc

SEQ ID NO: 72544 - DNA, 25 bp, Homo sapien
cggcactcgcccactgtgacgatgt

SEQ ID NO: 72545 - DNA, 25 bp, Homo sapien
gcttctcgaagcggttgtacttgcg

SEQ ID NO: 72546 - DNA, 25 bp, Homo sapien
agcacgttgaagcgcactgtcttgc

SEQ ID NO: 72547 - DNA, 25 bp, Homo sapien
cagatagtctcggcggatgacaatg

SEQ ID NO: 72548 - DNA, 25 bp, Homo sapien
acgctcagtctgaatgtccgccatc

SEQ ID NO: 72549 - DNA, 25 bp, Homo sapien
cagtgaaggggcatttcttgtcaat

SEQ ID NO: 72550 - DNA, 25 bp, Homo sapien
ggacaggtgtacagacatgttcttg

SEQ ID NO: 72551 - DNA, 25 bp, Homo sapien
gccctcaatagcctccttgggtgtc

SEQ ID NO: 72552 - DNA, 25 bp, Homo sapien
ttgaaagatggtcggctgcttttgg

SEQ ID NO: 72553 - DNA, 25 bp, Homo sapien
acgctcagtctgaatgtccgccatc

SEQ ID NO: 72554 - DNA, 25 bp, Homo sapien
gcttttggtaggcacgctcagtctg

SEQ ID NO: 72555 - DNA, 25 bp, Homo sapien
ttgaaagatggtcggctgcttttgg

SEQ ID NO: 72556 - DNA, 25 bp, Homo sapien
gccctcaatagcctccttgggtgtc

SEQ ID NO: 72557 - DNA, 25 bp, Homo sapien
cagtgaaggggcatttcttgtcaat

SEQ ID NO: 72558 - DNA, 25 bp, Homo sapien
atggacacattaccagtgaaggggc

SEQ ID NO: 72559 - DNA, 25 bp, Homo sapien
cagatagtctcggcggatgacaatg

SEQ ID NO: 72560 - DNA, 25 bp, Homo sapien
gcttctcgaagcggttgtacttgcg

SEQ ID NO: 72561 - DNA, 25 bp, Homo sapien
ggacaggtgtacagacatgttcttg

SEQ ID NO: 72562 - DNA, 25 bp, Homo sapien
cggcactcgcccactgtgacgatgt

SEQ ID NO: 72563 - DNA, 25 bp, Homo sapien
agcacgttgaagcgcactgtcttgc

SEQ ID NO: 72564 - DNA, 25 bp, Homo sapien
cagtgaaggggcatttcttgtcaat

SEQ ID NO: 72565 - DNA, 25 bp, Homo sapien
gcttttggtaggcacgctcagtctg

SEQ ID NO: 72566 - DNA, 25 bp, Homo sapien
gccctcaatagcctccttgggtgtc

SEQ ID NO: 72567 - DNA, 25 bp, Homo sapien
agcacgttgaagcgcactgtcttgc

SEQ ID NO: 72568 - DNA, 25 bp, Homo sapien
cggcactcgcccactgtgacgatgt

SEQ ID NO: 72569 - DNA, 25 bp, Homo sapien
cagatagtctcggcggatgacaatg

SEQ ID NO: 72570 - DNA, 25 bp, Homo sapien
ttgaaagatggtcggctgcttttgg

SEQ ID NO: 72571 - DNA, 25 bp, Homo sapien
acgctcagtctgaatgtccgccatc

SEQ ID NO: 72572 - DNA, 25 bp, Homo sapien
atggacacattaccagtgaaggggc

SEQ ID NO: 72573 - DNA, 25 bp, Homo sapien
gcttctcgaagcggttgtacttgcg

SEQ ID NO: 72574 - DNA, 25 bp, Homo sapien
ggacaggtgtacagacatgttcttg

SEQ ID NO: 72575 - DNA, 25 bp, Homo sapien
acgctcagtctgaatgtccgccatc

SEQ ID NO: 72576 - DNA, 25 bp, Homo sapien
gcttttggtaggcacgctcagtctg

SEQ ID NO: 72577 - DNA, 25 bp, Homo sapien
ttgaaagatggtcggctgcttttgg

SEQ ID NO: 72578 - DNA, 25 bp, Homo sapien
gccctcaatagcctccttgggtgtc

SEQ ID NO: 72579 - DNA, 25 bp, Homo sapien
cagtgaaggggcatttcttgtcaat

SEQ ID NO: 72580 - DNA, 25 bp, Homo sapien
atggacacattaccagtgaaggggc

SEQ ID NO: 72581 - DNA, 25 bp, Homo sapien
cagatagtctcggcggatgacaatg

SEQ ID NO: 72582 - DNA, 25 bp, Homo sapien
gcttctcgaagcggttgtacttgcg

SEQ ID NO: 72583 - DNA, 25 bp, Homo sapien
ggacaggtgtacagacatgttcttg

SEQ ID NO: 72584 - DNA, 25 bp, Homo sapien
cggcactcgcccactgtgacgatgt

SEQ ID NO: 72585 - DNA, 25 bp, Homo sapien
agcacgttgaagcgcactgtcttgc

SEQ ID NO: 72586 - DNA, 25 bp, Homo sapien
gcttttggtaggcacgctcagtctg

SEQ ID NO: 72587 - DNA, 25 bp, Homo sapien
cggcactcgcccactgtgacgatgt

SEQ ID NO: 72588 - DNA, 25 bp, Homo sapien
cagatagtctcggcggatgacaatg

SEQ ID NO: 72589 - DNA, 25 bp, Homo sapien
agcacgttgaagcgcactgtcttgc

SEQ ID NO: 72590 - DNA, 25 bp, Homo sapien
ggacaggtgtacagacatgttcttg

SEQ ID NO: 72591 - DNA, 25 bp, Homo sapien
cagtgaaggggcatttcttgtcaat

SEQ ID NO: 72592 - DNA, 25 bp, Homo sapien
atggacacattaccagtgaaggggc

SEQ ID NO: 72593 - DNA, 25 bp, Homo sapien
gcttctcgaagcggttgtacttgcg

SEQ ID NO: 72594 - DNA, 25 bp, Homo sapien
gccctcaatagcctccttgggtgtc

SEQ ID NO: 72595 - DNA, 25 bp, Homo sapien
ttgaaagatggtcggctgcttttgg

SEQ ID NO: 72596 - DNA, 25 bp, Homo sapien
acgctcagtctgaatgtccgccatc

SEQ ID NO: 72597 - DNA, 25 bp, Homo sapien
acgctcagtctgaatgtccgccatc

SEQ ID NO: 72598 - DNA, 25 bp, Homo sapien
gcttttggtaggcacgctcagtctg

SEQ ID NO: 72599 - DNA, 25 bp, Homo sapien
ttgaaagatggtcggctgcttttgg

SEQ ID NO: 72600 - DNA, 25 bp, Homo sapien
gccctcaatagcctccttgggtgtc

SEQ ID NO: 72601 - DNA, 25 bp, Homo sapien
cagtgaaggggcatttcttgtcaat

SEQ ID NO: 72602 - DNA, 25 bp, Homo sapien
atggacacattaccagtgaaggggc

SEQ ID NO: 72603 - DNA, 25 bp, Homo sapien
cagatagtctcggcggatgacaatg

SEQ ID NO: 72604 - DNA, 25 bp, Homo sapien
gcttctcgaagcggttgtacttgcg

SEQ ID NO: 72605 - DNA, 25 bp, Homo sapien
ggacaggtgtacagacatgttcttg

SEQ ID NO: 72606 - DNA, 25 bp, Homo sapien
cggcactcgcccactgtgacgatgt

SEQ ID NO: 72607 - DNA, 25 bp, Homo sapien
agcacgttgaagcgcactgtcttgc

SEQ ID NO: 72608 - DNA, 25 bp, Homo sapien
ggacaggtgtacagacatgttcttg

SEQ ID NO: 72609 - DNA, 25 bp, Homo sapien
gcttctcgaagcggttgtacttgcg

SEQ ID NO: 72610 - DNA, 25 bp, Homo sapien
cagatagtctcggcggatgacaatg

SEQ ID NO: 72611 - DNA, 25 bp, Homo sapien
cagtgaaggggcatttcttgtcaat

SEQ ID NO: 72612 - DNA, 25 bp, Homo sapien
agcacgttgaagcgcactgtcttgc

SEQ ID NO: 72613 - DNA, 25 bp, Homo sapien
atggacacattaccagtgaaggggc

SEQ ID NO: 72614 - DNA, 25 bp, Homo sapien
cggcactcgcccactgtgacgatgt

SEQ ID NO: 72615 - DNA, 25 bp, Homo sapien
acgctcagtctgaatgtccgccatc

SEQ ID NO: 72616 - DNA, 25 bp, Homo sapien
gccctcaatagcctccttgggtgtc

SEQ ID NO: 72617 - DNA, 25 bp, Homo sapien
gcttttggtaggcacgctcagtctg

SEQ ID NO: 72618 - DNA, 25 bp, Homo sapien
ttgaaagatggtcggctgcttttgg

SEQ ID NO: 72619 - DNA, 25 bp, Homo sapien
acgctcagtctgaatgtccgccatc

SEQ ID NO: 72620 - DNA, 25 bp, Homo sapien
gcttttggtaggcacgctcagtctg

SEQ ID NO: 72621 - DNA, 25 bp, Homo sapien
ttgaaagatggtcggctgcttttgg

SEQ ID NO: 72622 - DNA, 25 bp, Homo sapien
gccctcaatagcctccttgggtgtc

SEQ ID NO: 72623 - DNA, 25 bp, Homo sapien
cagtgaaggggcatttcttgtcaat

SEQ ID NO: 72624 - DNA, 25 bp, Homo sapien
atggacacattaccagtgaaggggc

SEQ ID NO: 72625 - DNA, 25 bp, Homo sapien
cagatagtctcggcggatgacaatg

SEQ ID NO: 72626 - DNA, 25 bp, Homo sapien
gcttctcgaagcggttgtacttgcg

SEQ ID NO: 72627 - DNA, 25 bp, Homo sapien
ggacaggtgtacagacatgttcttg

SEQ ID NO: 72628 - DNA, 25 bp, Homo sapien
cggcactcgcccactgtgacgatgt

SEQ ID NO: 72629 - DNA, 25 bp, Homo sapien
agcacgttgaagcgcactgtcttgc

SEQ ID NO: 72630 - DNA, 25 bp, Homo sapien
cggcactcgcccactgtgacgatgt

SEQ ID NO: 72631 - DNA, 25 bp, Homo sapien
agcacgttgaagcgcactgtcttgc

SEQ ID NO: 72632 - DNA, 25 bp, Homo sapien
cagtgaaggggcatttcttgtcaat

SEQ ID NO: 72633 - DNA, 25 bp, Homo sapien
gcttttggtaggcacgctcagtctg

SEQ ID NO: 72634 - DNA, 25 bp, Homo sapien
cagatagtctcggcggatgacaatg

SEQ ID NO: 72635 - DNA, 25 bp, Homo sapien
atggacacattaccagtgaaggggc

SEQ ID NO: 72636 - DNA, 25 bp, Homo sapien
acgctcagtctgaatgtccgccatc

SEQ ID NO: 72637 - DNA, 25 bp, Homo sapien
gccctcaatagcctccttgggtgtc

SEQ ID NO: 72638 - DNA, 25 bp, Homo sapien
ttgaaagatggtcggctgcttttgg

SEQ ID NO: 72639 - DNA, 25 bp, Homo sapien
gcttctcgaagcggttgtacttgcg

SEQ ID NO: 72640 - DNA, 25 bp, Homo sapien
ggacaggtgtacagacatgttcttg

SEQ ID NO: 72641 - DNA, 25 bp, Homo sapien
acgctcagtctgaatgtccgccatc

SEQ ID NO: 72642 - DNA, 25 bp, Homo sapien
gcttttggtaggcacgctcagtctg

SEQ ID NO: 72643 - DNA, 25 bp, Homo sapien
ttgaaagatggtcggctgcttttgg

SEQ ID NO: 72644 - DNA, 25 bp, Homo sapien
gccctcaatagcctccttgggtgtc

SEQ ID NO: 72645 - DNA, 25 bp, Homo sapien
cagtgaaggggcatttcttgtcaat

SEQ ID NO: 72646 - DNA, 25 bp, Homo sapien
atggacacattaccagtgaaggggc

SEQ ID NO: 72647 - DNA, 25 bp, Homo sapien
cagatagtctcggcggatgacaatg

SEQ ID NO: 72648 - DNA, 25 bp, Homo sapien
gcttctcgaagcggttgtacttgcg

SEQ ID NO: 72649 - DNA, 25 bp, Homo sapien
ggacaggtgtacagacatgttcttg

SEQ ID NO: 72650 - DNA, 25 bp, Homo sapien
cggcactcgcccactgtgacgatgt

SEQ ID NO: 72651 - DNA, 25 bp, Homo sapien
agcacgttgaagcgcactgtcttgc

SEQ ID NO: 72652 - DNA, 25 bp, Homo sapien
ggacaggtgtacagacatgttcttg

SEQ ID NO: 72653 - DNA, 25 bp, Homo sapien
acgctcagtctgaatgtccgccatc

SEQ ID NO: 72654 - DNA, 25 bp, Homo sapien
cggcactcgcccactgtgacgatgt

SEQ ID NO: 72655 - DNA, 25 bp, Homo sapien
agcacgttgaagcgcactgtcttgc

SEQ ID NO: 72656 - DNA, 25 bp, Homo sapien
atggacacattaccagtgaaggggc

SEQ ID NO: 72657 - DNA, 25 bp, Homo sapien
gcttttggtaggcacgctcagtctg

SEQ ID NO: 72658 - DNA, 25 bp, Homo sapien
cagtgaaggggcatttcttgtcaat

SEQ ID NO: 72659 - DNA, 25 bp, Homo sapien
cagatagtctcggcggatgacaatg

SEQ ID NO: 72660 - DNA, 25 bp, Homo sapien
gccctcaatagcctccttgggtgtc

SEQ ID NO: 72661 - DNA, 25 bp, Homo sapien
gcttctcgaagcggttgtacttgcg

SEQ ID NO: 72662 - DNA, 25 bp, Homo sapien
ttgaaagatggtcggctgcttttgg

SEQ ID NO: 72663 - DNA, 25 bp, Homo sapien
acgctcagtctgaatgtccgccatc

SEQ ID NO: 72664 - DNA, 25 bp, Homo sapien
gcttttggtaggcacgctcagtctg

SEQ ID NO: 72665 - DNA, 25 bp, Homo sapien
ttgaaagatggtcggctgcttttgg

SEQ ID NO: 72666 - DNA, 25 bp, Homo sapien
gccctcaatagcctccttgggtgtc

SEQ ID NO: 72667 - DNA, 25 bp, Homo sapien
cagtgaaggggcatttcttgtcaat

SEQ ID NO: 72668 - DNA, 25 bp, Homo sapien
atggacacattaccagtgaaggggc

SEQ ID NO: 72669 - DNA, 25 bp, Homo sapien
cagatagtctcggcggatgacaatg

SEQ ID NO: 72670 - DNA, 25 bp, Homo sapien
gcttctcgaagcggttgtacttgcg

SEQ ID NO: 72671 - DNA, 25 bp, Homo sapien
ggacaggtgtacagacatgttcttg

SEQ ID NO: 72672 - DNA, 25 bp, Homo sapien
cggcactcgcccactgtgacgatgt

SEQ ID NO: 72673 - DNA, 25 bp, Homo sapien
agcacgttgaagcgcactgtcttgc

SEQ ID NO: 72674 - DNA, 25 bp, Homo sapien
acgctcagtctgaatgtccgccatc

SEQ ID NO: 72675 - DNA, 25 bp, Homo sapien
gcttttggtaggcacgctcagtctg

SEQ ID NO: 72676 - DNA, 25 bp, Homo sapien
ttgaaagatggtcggctgcttttgg

SEQ ID NO: 72677 - DNA, 25 bp, Homo sapien
gccctcaatagcctccttgggtgtc

SEQ ID NO: 72678 - DNA, 25 bp, Homo sapien
cagtgaaggggcatttcttgtcaat

SEQ ID NO: 72679 - DNA, 25 bp, Homo sapien
atggacacattaccagtgaaggggc

SEQ ID NO: 72680 - DNA, 25 bp, Homo sapien
cagatagtctcggcggatgacaatg

SEQ ID NO: 72681 - DNA, 25 bp, Homo sapien
gcttctcgaagcggttgtacttgcg

SEQ ID NO: 72682 - DNA, 25 bp, Homo sapien
ggacaggtgtacagacatgttcttg

SEQ ID NO: 72683 - DNA, 25 bp, Homo sapien
cggcactcgcccactgtgacgatgt

SEQ ID NO: 72684 - DNA, 25 bp, Homo sapien
agcacgttgaagcgcactgtcttgc

SEQ ID NO: 72685 - DNA, 25 bp, Homo sapien
atggacacattaccagtgaaggggc

SEQ ID NO: 72686 - DNA, 25 bp, Homo sapien
gcttctcgaagcggttgtacttgcg

SEQ ID NO: 72687 - DNA, 25 bp, Homo sapien
gcttttggtaggcacgctcagtctg

SEQ ID NO: 72688 - DNA, 25 bp, Homo sapien
acgctcagtctgaatgtccgccatc

SEQ ID NO: 72689 - DNA, 25 bp, Homo sapien
cagtgaaggggcatttcttgtcaat

SEQ ID NO: 72690 - DNA, 25 bp, Homo sapien
cagatagtctcggcggatgacaatg

SEQ ID NO: 72691 - DNA, 25 bp, Homo sapien
ggacaggtgtacagacatgttcttg

SEQ ID NO: 72692 - DNA, 25 bp, Homo sapien
agcacgttgaagcgcactgtcttgc

SEQ ID NO: 72693 - DNA, 25 bp, Homo sapien
ttgaaagatggtcggctgcttttgg

SEQ ID NO: 72694 - DNA, 25 bp, Homo sapien
gccctcaatagcctccttgggtgtc

SEQ ID NO: 72695 - DNA, 25 bp, Homo sapien
cggcactcgcccactgtgacgatgt

SEQ ID NO: 72696 - DNA, 25 bp, Homo sapien
atggacacattaccagtgaaggggc

SEQ ID NO: 72697 - DNA, 25 bp, Homo sapien
gcttctcgaagcggttgtacttgcg

SEQ ID NO: 72698 - DNA, 25 bp, Homo sapien
gcttttggtaggcacgctcagtctg

SEQ ID NO: 72699 - DNA, 25 bp, Homo sapien
acgctcagtctgaatgtccgccatc

SEQ ID NO: 72700 - DNA, 25 bp, Homo sapien
cagtgaaggggcatttcttgtcaat

SEQ ID NO: 72701 - DNA, 25 bp, Homo sapien
cagatagtctcggcggatgacaatg

SEQ ID NO: 72702 - DNA, 25 bp, Homo sapien
ggacaggtgtacagacatgttcttg

SEQ ID NO: 72703 - DNA, 25 bp, Homo sapien
ttgaaagatggtcggctgcttttgg

SEQ ID NO: 72704 - DNA, 25 bp, Homo sapien
agcacgttgaagcgcactgtcttgc

SEQ ID NO: 72705 - DNA, 25 bp, Homo sapien
gccctcaatagcctccttgggtgtc

SEQ ID NO: 72706 - DNA, 25 bp, Homo sapien
cggcactcgcccactgtgacgatgt

SEQ ID NO: 72707 - DNA, 25 bp, Homo sapien
gcttctcgaagcggttgtacttgcg

SEQ ID NO: 72708 - DNA, 25 bp, Homo sapien
atggacacattaccagtgaaggggc

SEQ ID NO: 72709 - DNA, 25 bp, Homo sapien
gcttttggtaggcacgctcagtctg

SEQ ID NO: 72710 - DNA, 25 bp, Homo sapien
acgctcagtctgaatgtccgccatc

SEQ ID NO: 72711 - DNA, 25 bp, Homo sapien
cagtgaaggggcatttcttgtcaat

SEQ ID NO: 72712 - DNA, 25 bp, Homo sapien
cagatagtctcggcggatgacaatg

SEQ ID NO: 72713 - DNA, 25 bp, Homo sapien
ggacaggtgtacagacatgttcttg

SEQ ID NO: 72714 - DNA, 25 bp, Homo sapien
agcacgttgaagcgcactgtcttgc

SEQ ID NO: 72715 - DNA, 25 bp, Homo sapien
ttgaaagatggtcggctgcttttgg

SEQ ID NO: 72716 - DNA, 25 bp, Homo sapien
gccctcaatagcctccttgggtgtc

SEQ ID NO: 72717 - DNA, 25 bp, Homo sapien
cggcactcgcccactgtgacgatgt

SEQ ID NO: 72718 - DNA, 25 bp, Homo sapien
gcttctcgaagcggttgtacttgcg

SEQ ID NO: 72719 - DNA, 25 bp, Homo sapien
atggacacattaccagtgaaggggc

SEQ ID NO: 72720 - DNA, 25 bp, Homo sapien
gcttttggtaggcacgctcagtctg

SEQ ID NO: 72721 - DNA, 25 bp, Homo sapien
acgctcagtctgaatgtccgccatc

SEQ ID NO: 72722 - DNA, 25 bp, Homo sapien
cagtgaaggggcatttcttgtcaat

SEQ ID NO: 72723 - DNA, 25 bp, Homo sapien
cagatagtctcggcggatgacaatg

SEQ ID NO: 72724 - DNA, 25 bp, Homo sapien
ggacaggtgtacagacatgttcttg

SEQ ID NO: 72725 - DNA, 25 bp, Homo sapien
ttgaaagatggtcggctgcttttgg

SEQ ID NO: 72726 - DNA, 25 bp, Homo sapien
agcacgttgaagcgcactgtcttgc

SEQ ID NO: 72727 - DNA, 25 bp, Homo sapien
gccctcaatagcctccttgggtgtc

SEQ ID NO: 72728 - DNA, 25 bp, Homo sapien
cggcactcgcccactgtgacgatgt

SEQ ID NO: 72729 - DNA, 25 bp, Homo sapien
gcttctcgaagcggttgtacttgcg

SEQ ID NO: 72730 - DNA, 25 bp, Homo sapien
atggacacattaccagtgaaggggc

SEQ ID NO: 72731 - DNA, 25 bp, Homo sapien
gcttttggtaggcacgctcagtctg

SEQ ID NO: 72732 - DNA, 25 bp, Homo sapien
acgctcagtctgaatgtccgccatc

SEQ ID NO: 72733 - DNA, 25 bp, Homo sapien
cagatagtctcggcggatgacaatg

SEQ ID NO: 72734 - DNA, 25 bp, Homo sapien
cagtgaaggggcatttcttgtcaat

SEQ ID NO: 72735 - DNA, 25 bp, Homo sapien
ggacaggtgtacagacatgttcttg

SEQ ID NO: 72736 - DNA, 25 bp, Homo sapien
agcacgttgaagcgcactgtcttgc

SEQ ID NO: 72737 - DNA, 25 bp, Homo sapien
ttgaaagatggtcggctgcttttgg

SEQ ID NO: 72738 - DNA, 25 bp, Homo sapien
gccctcaatagcctccttgggtgtc

SEQ ID NO: 72739 - DNA, 25 bp, Homo sapien
cggcactcgcccactgtgacgatgt

SEQ ID NO: 72740 - DNA, 25 bp, Homo sapien
gcttctcgaagcggttgtacttgcg

SEQ ID NO: 72741 - DNA, 25 bp, Homo sapien
atggacacattaccagtgaaggggc

SEQ ID NO: 72742 - DNA, 25 bp, Homo sapien
gcttttggtaggcacgctcagtctg

SEQ ID NO: 72743 - DNA, 25 bp, Homo sapien
acgctcagtctgaatgtccgccatc

SEQ ID NO: 72744 - DNA, 25 bp, Homo sapien
cagtgaaggggcatttcttgtcaat

SEQ ID NO: 72745 - DNA, 25 bp, Homo sapien
cagatagtctcggcggatgacaatg

SEQ ID NO: 72746 - DNA, 25 bp, Homo sapien
ggacaggtgtacagacatgttcttg

SEQ ID NO: 72747 - DNA, 25 bp, Homo sapien
agcacgttgaagcgcactgtcttgc

SEQ ID NO: 72748 - DNA, 25 bp, Homo sapien
ttgaaagatggtcggctgcttttgg

SEQ ID NO: 72749 - DNA, 25 bp, Homo sapien
gccctcaatagcctccttgggtgtc

SEQ ID NO: 72750 - DNA, 25 bp, Homo sapien
cggcactcgcccactgtgacgatgt

SEQ ID NO: 72751 - DNA, 25 bp, Homo sapien
gcttctcgaagcggttgtacttgcg

SEQ ID NO: 72752 - DNA, 25 bp, Homo sapien
atggacacattaccagtgaaggggc

SEQ ID NO: 72753 - DNA, 25 bp, Homo sapien
gcttttggtaggcacgctcagtctg

SEQ ID NO: 72754 - DNA, 25 bp, Homo sapien
acgctcagtctgaatgtccgccatc

SEQ ID NO: 72755 - DNA, 25 bp, Homo sapien
cagtgaaggggcatttcttgtcaat

SEQ ID NO: 72756 - DNA, 25 bp, Homo sapien
cagatagtctcggcggatgacaatg

SEQ ID NO: 72757 - DNA, 25 bp, Homo sapien
ggacaggtgtacagacatgttcttg

SEQ ID NO: 72758 - DNA, 25 bp, Homo sapien
agcacgttgaagcgcactgtcttgc

SEQ ID NO: 72759 - DNA, 25 bp, Homo sapien
ttgaaagatggtcggctgcttttgg

SEQ ID NO: 72760 - DNA, 25 bp, Homo sapien
gccctcaatagcctccttgggtgtc

SEQ ID NO: 72761 - DNA, 25 bp, Homo sapien
cggcactcgcccactgtgacgatgt

SEQ ID NO: 72762 - DNA, 25 bp, Homo sapien
gcttctcgaagcggttgtacttgcg

SEQ ID NO: 72763 - DNA, 25 bp, Homo sapien
atggacacattaccagtgaaggggc

SEQ ID NO: 72764 - DNA, 25 bp, Homo sapien
gcttttggtaggcacgctcagtctg

SEQ ID NO: 72765 - DNA, 25 bp, Homo sapien
acgctcagtctgaatgtccgccatc

SEQ ID NO: 72766 - DNA, 25 bp, Homo sapien
cagtgaaggggcatttcttgtcaat

SEQ ID NO: 72767 - DNA, 25 bp, Homo sapien
cagatagtctcggcggatgacaatg

SEQ ID NO: 72768 - DNA, 25 bp, Homo sapien
ggacaggtgtacagacatgttcttg

SEQ ID NO: 72769 - DNA, 25 bp, Homo sapien
agcacgttgaagcgcactgtcttgc

SEQ ID NO: 72770 - DNA, 25 bp, Homo sapien
ttgaaagatggtcggctgcttttgg

SEQ ID NO: 72771 - DNA, 25 bp, Homo sapien
cggcactcgcccactgtgacgatgt

SEQ ID NO: 72772 - DNA, 25 bp, Homo sapien
gccctcaatagcctccttgggtgtc

SEQ ID NO: 72773 - DNA, 25 bp, Homo sapien
gcttctcgaagcggttgtacttgcg

SEQ ID NO: 72774 - DNA, 25 bp, Homo sapien
atggacacattaccagtgaaggggc

SEQ ID NO: 72775 - DNA, 25 bp, Homo sapien
gcttttggtaggcacgctcagtctg

SEQ ID NO: 72776 - DNA, 25 bp, Homo sapien
acgctcagtctgaatgtccgccatc

SEQ ID NO: 72777 - DNA, 25 bp, Homo sapien
cagtgaaggggcatttcttgtcaat

SEQ ID NO: 72778 - DNA, 25 bp, Homo sapien
cagatagtctcggcggatgacaatg

SEQ ID NO: 72779 - DNA, 25 bp, Homo sapien
ggacaggtgtacagacatgttcttg

SEQ ID NO: 72780 - DNA, 25 bp, Homo sapien
agcacgttgaagcgcactgtcttgc

SEQ ID NO: 72781 - DNA, 25 bp, Homo sapien
ttgaaagatggtcggctgcttttgg

SEQ ID NO: 72782 - DNA, 25 bp, Homo sapien
gccctcaatagcctccttgggtgtc

SEQ ID NO: 72783 - DNA, 25 bp, Homo sapien
cggcactcgcccactgtgacgatgt

SEQ ID NO: 72784 - DNA, 25 bp, Homo sapien
acgctcagtctgaatgtccgccatc

SEQ ID NO: 72785 - DNA, 25 bp, Homo sapien
cagatagtctcggcggatgacaatg

SEQ ID NO: 72786 - DNA, 25 bp, Homo sapien
gcttctcgaagcggttgtacttgcg

SEQ ID NO: 72787 - DNA, 25 bp, Homo sapien
gccctcaatagcctccttgggtgtc

SEQ ID NO: 72788 - DNA, 25 bp, Homo sapien
cggcactcgcccactgtgacgatgt

SEQ ID NO: 72789 - DNA, 25 bp, Homo sapien
agcacgttgaagcgcactgtcttgc

SEQ ID NO: 72790 - DNA, 25 bp, Homo sapien
gcttttggtaggcacgctcagtctg

SEQ ID NO: 72791 - DNA, 25 bp, Homo sapien
atggacacattaccagtgaaggggc

SEQ ID NO: 72792 - DNA, 25 bp, Homo sapien
cagtgaaggggcatttcttgtcaat

SEQ ID NO: 72793 - DNA, 25 bp, Homo sapien
ggacaggtgtacagacatgttcttg

SEQ ID NO: 72794 - DNA, 25 bp, Homo sapien
ttgaaagatggtcggctgcttttgg

SEQ ID NO: 72795 - DNA, 25 bp, Homo sapien
gcttctcgaagcggttgtacttgcg

SEQ ID NO: 72796 - DNA, 25 bp, Homo sapien
atggacacattaccagtgaaggggc

SEQ ID NO: 72797 - DNA, 25 bp, Homo sapien
gcttttggtaggcacgctcagtctg

SEQ ID NO: 72798 - DNA, 25 bp, Homo sapien
acgctcagtctgaatgtccgccatc

SEQ ID NO: 72799 - DNA, 25 bp, Homo sapien
cagatagtctcggcggatgacaatg

SEQ ID NO: 72800 - DNA, 25 bp, Homo sapien
cagtgaaggggcatttcttgtcaat

SEQ ID NO: 72801 - DNA, 25 bp, Homo sapien
ggacaggtgtacagacatgttcttg

SEQ ID NO: 72802 - DNA, 25 bp, Homo sapien
ttgaaagatggtcggctgcttttgg

SEQ ID NO: 72803 - DNA, 25 bp, Homo sapien
agcacgttgaagcgcactgtcttgc

SEQ ID NO: 72804 - DNA, 25 bp, Homo sapien
gccctcaatagcctccttgggtgtc

SEQ ID NO: 72805 - DNA, 25 bp, Homo sapien
cggcactcgcccactgtgacgatgt

SEQ ID NO: 72806 - DNA, 25 bp, Homo sapien
acgctcagtctgaatgtccgccatc

SEQ ID NO: 72807 - DNA, 25 bp, Homo sapien
gcttttggtaggcacgctcagtctg

SEQ ID NO: 72808 - DNA, 25 bp, Homo sapien
ttgaaagatggtcggctgcttttgg

SEQ ID NO: 72809 - DNA, 25 bp, Homo sapien
gccctcaatagcctccttgggtgtc

SEQ ID NO: 72810 - DNA, 25 bp, Homo sapien
cagtgaaggggcatttcttgtcaat

SEQ ID NO: 72811 - DNA, 25 bp, Homo sapien
atggacacattaccagtgaaggggc

SEQ ID NO: 72812 - DNA, 25 bp, Homo sapien
cagatagtctcggcggatgacaatg

SEQ ID NO: 72813 - DNA, 25 bp, Homo sapien
gcttctcgaagcggttgtacttgcg

SEQ ID NO: 72814 - DNA, 25 bp, Homo sapien
ggacaggtgtacagacatgttcttg

SEQ ID NO: 72815 - DNA, 25 bp, Homo sapien
cggcactcgcccactgtgacgatgt

SEQ ID NO: 72816 - DNA, 25 bp, Homo sapien
agcacgttgaagcgcactgtcttgc

SEQ ID NO: 72817 - DNA, 25 bp, Homo sapien
gacacccaaggaggctattgagggc

SEQ ID NO: 72818 - DNA, 25 bp, Homo sapien
cattgtcatccgccgagactatctg

SEQ ID NO: 72819 - DNA, 25 bp, Homo sapien
caagaacatgtctgtacacctgtcc

SEQ ID NO: 72820 - DNA, 25 bp, Homo sapien
acatcgtcacagtgggcgagtgccg

SEQ ID NO: 72821 - DNA, 25 bp, Homo sapien
cagactgagcgtgcctaccaaaagc

SEQ ID NO: 72822 - DNA, 25 bp, Homo sapien
gatggcggacattcagactgagcgt

SEQ ID NO: 72823 - DNA, 25 bp, Homo sapien
attgacaagaaatgccccttcactg

SEQ ID NO: 72824 - DNA, 25 bp, Homo sapien
gccccttcactggtaatgtgtccat

SEQ ID NO: 72825 - DNA, 25 bp, Homo sapien
gcaagacagtgcgcttcaacgtgct

SEQ ID NO: 72826 - DNA, 25 bp, Homo sapien
ccaaaagcagccgaccatctttcaa

SEQ ID NO: 72827 - DNA, 25 bp, Homo sapien
cgcaagtacaaccgcttcgagaagc

SEQ ID NO: 72828 - DNA, 25 bp, Homo sapien
atggacacattaccagtgaaggggc

SEQ ID NO: 72829 - DNA, 25 bp, Homo sapien
gcttttggtaggcacgctcagtctg

SEQ ID NO: 72830 - DNA, 25 bp, Homo sapien
acgctcagtctgaatgtccgccatc

SEQ ID NO: 72831 - DNA, 25 bp, Homo sapien
cagtgaaggggcatttcttgtcaat

SEQ ID NO: 72832 - DNA, 25 bp, Homo sapien
cagatagtctcggcggatgacaatg

SEQ ID NO: 72833 - DNA, 25 bp, Homo sapien
ggacaggtgtacagacatgttcttg

SEQ ID NO: 72834 - DNA, 25 bp, Homo sapien
agcacgttgaagcgcactgtcttgc

SEQ ID NO: 72835 - DNA, 25 bp, Homo sapien
ttgaaagatggtcggctgcttttgg

SEQ ID NO: 72836 - DNA, 25 bp, Homo sapien
gccctcaatagcctccttgggtgtc

SEQ ID NO: 72837 - DNA, 25 bp, Homo sapien
cggcactcgcccactgtgacgatgt

SEQ ID NO: 72838 - DNA, 25 bp, Homo sapien
gcttctcgaagcggttgtacttgcg

SEQ ID NO: 72839 - DNA, 25 bp, Homo sapien
gcttctcgaagcggttgtacttgcg

SEQ ID NO: 72840 - DNA, 25 bp, Homo sapien
ggacaggtgtacagacatgttcttg

SEQ ID NO: 72841 - DNA, 25 bp, Homo sapien
ttgaaagatggtcggctgcttttgg

SEQ ID NO: 72842 - DNA, 25 bp, Homo sapien
agcacgttgaagcgcactgtcttgc

SEQ ID NO: 72843 - DNA, 25 bp, Homo sapien
gccctcaatagcctccttgggtgtc

SEQ ID NO: 72844 - DNA, 25 bp, Homo sapien
gcttttggtaggcacgctcagtctg

SEQ ID NO: 72845 - DNA, 25 bp, Homo sapien
cggcactcgcccactgtgacgatgt

SEQ ID NO: 72846 - DNA, 25 bp, Homo sapien
atggacacattaccagtgaaggggc

SEQ ID NO: 72847 - DNA, 25 bp, Homo sapien
cagatagtctcggcggatgacaatg

SEQ ID NO: 72848 - DNA, 25 bp, Homo sapien
cagtgaaggggcatttcttgtcaat

SEQ ID NO: 72849 - DNA, 25 bp, Homo sapien
acgctcagtctgaatgtccgccatc

SEQ ID NO: 72850 - DNA, 25 bp, Homo sapien
acgctcagtctgaatgtccgccatc

SEQ ID NO: 72851 - DNA, 25 bp, Homo sapien
gcttttggtaggcacgctcagtctg

SEQ ID NO: 72852 - DNA, 25 bp, Homo sapien
ttgaaagatggtcggctgcttttgg

SEQ ID NO: 72853 - DNA, 25 bp, Homo sapien
gccctcaatagcctccttgggtgtc

SEQ ID NO: 72854 - DNA, 25 bp, Homo sapien
cagtgaaggggcatttcttgtcaat

SEQ ID NO: 72855 - DNA, 25 bp, Homo sapien
atggacacattaccagtgaaggggc

SEQ ID NO: 72856 - DNA, 25 bp, Homo sapien
cagatagtctcggcggatgacaatg

SEQ ID NO: 72857 - DNA, 25 bp, Homo sapien
gcttctcgaagcggttgtacttgcg

SEQ ID NO: 72858 - DNA, 25 bp, Homo sapien
ggacaggtgtacagacatgttcttg

SEQ ID NO: 72859 - DNA, 25 bp, Homo sapien
cggcactcgcccactgtgacgatgt

SEQ ID NO: 72860 - DNA, 25 bp, Homo sapien
agcacgttgaagcgcactgtcttgc

SEQ ID NO: 72861 - DNA, 25 bp, Homo sapien
cagtgaaggggcatttcttgtcaat

SEQ ID NO: 72862 - DNA, 25 bp, Homo sapien
ttgaaagatggtcggctgcttttgg

SEQ ID NO: 72863 - DNA, 25 bp, Homo sapien
atggacacattaccagtgaaggggc

SEQ ID NO: 72864 - DNA, 25 bp, Homo sapien
gcttttggtaggcacgctcagtctg

SEQ ID NO: 72865 - DNA, 25 bp, Homo sapien
acgctcagtctgaatgtccgccatc

SEQ ID NO: 72866 - DNA, 25 bp, Homo sapien
agcacgttgaagcgcactgtcttgc

SEQ ID NO: 72867 - DNA, 25 bp, Homo sapien
gcttctcgaagcggttgtacttgcg

SEQ ID NO: 72868 - DNA, 25 bp, Homo sapien
gccctcaatagcctccttgggtgtc

SEQ ID NO: 72869 - DNA, 25 bp, Homo sapien
cggcactcgcccactgtgacgatgt

SEQ ID NO: 72870 - DNA, 25 bp, Homo sapien
ggacaggtgtacagacatgttcttg

SEQ ID NO: 72871 - DNA, 25 bp, Homo sapien
cagatagtctcggcggatgacaatg

SEQ ID NO: 72872 - DNA, 25 bp, Homo sapien
acgctcagtctgaatgtccgccatc

SEQ ID NO: 72873 - DNA, 25 bp, Homo sapien
gcttttggtaggcacgctcagtctg

SEQ ID NO: 72874 - DNA, 25 bp, Homo sapien
ttgaaagatggtcggctgcttttgg

SEQ ID NO: 72875 - DNA, 25 bp, Homo sapien
gccctcaatagcctccttgggtgtc

SEQ ID NO: 72876 - DNA, 25 bp, Homo sapien
cagtgaaggggcatttcttgtcaat

SEQ ID NO: 72877 - DNA, 25 bp, Homo sapien
atggacacattaccagtgaaggggc

SEQ ID NO: 72878 - DNA, 25 bp, Homo sapien
cagatagtctcggcggatgacaatg

SEQ ID NO: 72879 - DNA, 25 bp, Homo sapien
gcttctcgaagcggttgtacttgcg

SEQ ID NO: 72880 - DNA, 25 bp, Homo sapien
ggacaggtgtacagacatgttcttg

SEQ ID NO: 72881 - DNA, 25 bp, Homo sapien
cggcactcgcccactgtgacgatgt

SEQ ID NO: 72882 - DNA, 25 bp, Homo sapien
agcacgttgaagcgcactgtcttgc

SEQ ID NO: 72883 - DNA, 25 bp, Homo sapien
cagatagtctcggcggatgacaatg

SEQ ID NO: 72884 - DNA, 25 bp, Homo sapien
agcacgttgaagcgcactgtcttgc

SEQ ID NO: 72885 - DNA, 25 bp, Homo sapien
gccctcaatagcctccttgggtgtc

SEQ ID NO: 72886 - DNA, 25 bp, Homo sapien
ggacaggtgtacagacatgttcttg

SEQ ID NO: 72887 - DNA, 25 bp, Homo sapien
acgctcagtctgaatgtccgccatc

SEQ ID NO: 72888 - DNA, 25 bp, Homo sapien
gcttctcgaagcggttgtacttgcg

SEQ ID NO: 72889 - DNA, 25 bp, Homo sapien
ttgaaagatggtcggctgcttttgg

SEQ ID NO: 72890 - DNA, 25 bp, Homo sapien
cggcactcgcccactgtgacgatgt

SEQ ID NO: 72891 - DNA, 25 bp, Homo sapien
cagtgaaggggcatttcttgtcaat

SEQ ID NO: 72892 - DNA, 25 bp, Homo sapien
gcttttggtaggcacgctcagtctg

SEQ ID NO: 72893 - DNA, 25 bp, Homo sapien
atggacacattaccagtgaaggggc

SEQ ID NO: 72894 - DNA, 25 bp, Homo sapien
acgctcagtctgaatgtccgccatc

SEQ ID NO: 72895 - DNA, 25 bp, Homo sapien
gcttttggtaggcacgctcagtctg

SEQ ID NO: 72896 - DNA, 25 bp, Homo sapien
ttgaaagatggtcggctgcttttgg

SEQ ID NO: 72897 - DNA, 25 bp, Homo sapien
gccctcaatagcctccttgggtgtc

SEQ ID NO: 72898 - DNA, 25 bp, Homo sapien
cagtgaaggggcatttcttgtcaat

SEQ ID NO: 72899 - DNA, 25 bp, Homo sapien
atggacacattaccagtgaaggggc

SEQ ID NO: 72900 - DNA, 25 bp, Homo sapien
cagatagtctcggcggatgacaatg

SEQ ID NO: 72901 - DNA, 25 bp, Homo sapien
gcttctcgaagcggttgtacttgcg

SEQ ID NO: 72902 - DNA, 25 bp, Homo sapien
ggacaggtgtacagacatgttcttg

SEQ ID NO: 72903 - DNA, 25 bp, Homo sapien
cggcactcgcccactgtgacgatgt

SEQ ID NO: 72904 - DNA, 25 bp, Homo sapien
agcacgttgaagcgcactgtcttgc

SEQ ID NO: 72905 - DNA, 25 bp, Homo sapien
acgctcagtctgaatgtccgccatc

SEQ ID NO: 72906 - DNA, 25 bp, Homo sapien
gcttttggtaggcacgctcagtctg

SEQ ID NO: 72907 - DNA, 25 bp, Homo sapien
ttgaaagatggtcggctgcttttgg

SEQ ID NO: 72908 - DNA, 25 bp, Homo sapien
gccctcaatagcctccttgggtgtc

SEQ ID NO: 72909 - DNA, 25 bp, Homo sapien
cagtgaaggggcatttcttgtcaat

SEQ ID NO: 72910 - DNA, 25 bp, Homo sapien
atggacacattaccagtgaaggggc

SEQ ID NO: 72911 - DNA, 25 bp, Homo sapien
cagatagtctcggcggatgacaatg

SEQ ID NO: 72912 - DNA, 25 bp, Homo sapien
gcttctcgaagcggttgtacttgcg

SEQ ID NO: 72913 - DNA, 25 bp, Homo sapien
ggacaggtgtacagacatgttcttg

SEQ ID NO: 72914 - DNA, 25 bp, Homo sapien
cggcactcgcccactgtgacgatgt

SEQ ID NO: 72915 - DNA, 25 bp, Homo sapien
agcacgttgaagcgcactgtcttgc

SEQ ID NO: 72916 - DNA, 25 bp, Homo sapien
atggacacattaccagtgaaggggc

SEQ ID NO: 72917 - DNA, 25 bp, Homo sapien
cagtgaaggggcatttcttgtcaat

SEQ ID NO: 72918 - DNA, 25 bp, Homo sapien
ggacaggtgtacagacatgttcttg

SEQ ID NO: 72919 - DNA, 25 bp, Homo sapien
gcttttggtaggcacgctcagtctg

SEQ ID NO: 72920 - DNA, 25 bp, Homo sapien
gccctcaatagcctccttgggtgtc

SEQ ID NO: 72921 - DNA, 25 bp, Homo sapien
cggcactcgcccactgtgacgatgt

SEQ ID NO: 72922 - DNA, 25 bp, Homo sapien
agcacgttgaagcgcactgtcttgc

SEQ ID NO: 72923 - DNA, 25 bp, Homo sapien
gcttctcgaagcggttgtacttgcg

SEQ ID NO: 72924 - DNA, 25 bp, Homo sapien
ttgaaagatggtcggctgcttttgg

SEQ ID NO: 72925 - DNA, 25 bp, Homo sapien
acgctcagtctgaatgtccgccatc

SEQ ID NO: 72926 - DNA, 25 bp, Homo sapien
cagatagtctcggcggatgacaatg

SEQ ID NO: 72927 - DNA, 25 bp, Homo sapien
acgctcagtctgaatgtccgccatc

SEQ ID NO: 72928 - DNA, 25 bp, Homo sapien
gcttttggtaggcacgctcagtctg

SEQ ID NO: 72929 - DNA, 25 bp, Homo sapien
ttgaaagatggtcggctgcttttgg

SEQ ID NO: 72930 - DNA, 25 bp, Homo sapien
gccctcaatagcctccttgggtgtc

SEQ ID NO: 72931 - DNA, 25 bp, Homo sapien
cagtgaaggggcatttcttgtcaat

SEQ ID NO: 72932 - DNA, 25 bp, Homo sapien
atggacacattaccagtgaaggggc

SEQ ID NO: 72933 - DNA, 25 bp, Homo sapien
cagatagtctcggcggatgacaatg

SEQ ID NO: 72934 - DNA, 25 bp, Homo sapien
gcttctcgaagcggttgtacttgcg

SEQ ID NO: 72935 - DNA, 25 bp, Homo sapien
ggacaggtgtacagacatgttcttg

SEQ ID NO: 72936 - DNA, 25 bp, Homo sapien
cggcactcgcccactgtgacgatgt

SEQ ID NO: 72937 - DNA, 25 bp, Homo sapien
agcacgttgaagcgcactgtcttgc

SEQ ID NO: 72938 - DNA, 25 bp, Homo sapien
cggcactcgcccactgtgacgatgt

SEQ ID NO: 72939 - DNA, 25 bp, Homo sapien
gcttctcgaagcggttgtacttgcg

SEQ ID NO: 72940 - DNA, 25 bp, Homo sapien
acgctcagtctgaatgtccgccatc

SEQ ID NO: 72941 - DNA, 25 bp, Homo sapien
ttgaaagatggtcggctgcttttgg

SEQ ID NO: 72942 - DNA, 25 bp, Homo sapien
agcacgttgaagcgcactgtcttgc

SEQ ID NO: 72943 - DNA, 25 bp, Homo sapien
atggacacattaccagtgaaggggc

SEQ ID NO: 72944 - DNA, 25 bp, Homo sapien
ggacaggtgtacagacatgttcttg

SEQ ID NO: 72945 - DNA, 25 bp, Homo sapien
gccctcaatagcctccttgggtgtc

SEQ ID NO: 72946 - DNA, 25 bp, Homo sapien
cagatagtctcggcggatgacaatg

SEQ ID NO: 72947 - DNA, 25 bp, Homo sapien
gcttttggtaggcacgctcagtctg

SEQ ID NO: 72948 - DNA, 25 bp, Homo sapien
cagtgaaggggcatttcttgtcaat

SEQ ID NO: 72949 - DNA, 25 bp, Homo sapien
acgctcagtctgaatgtccgccatc

SEQ ID NO: 72950 - DNA, 25 bp, Homo sapien
gcttttggtaggcacgctcagtctg

SEQ ID NO: 72951 - DNA, 25 bp, Homo sapien
ttgaaagatggtcggctgcttttgg

SEQ ID NO: 72952 - DNA, 25 bp, Homo sapien
gccctcaatagcctccttgggtgtc

SEQ ID NO: 72953 - DNA, 25 bp, Homo sapien
cagtgaaggggcatttcttgtcaat

SEQ ID NO: 72954 - DNA, 25 bp, Homo sapien
atggacacattaccagtgaaggggc

SEQ ID NO: 72955 - DNA, 25 bp, Homo sapien
cagatagtctcggcggatgacaatg

SEQ ID NO: 72956 - DNA, 25 bp, Homo sapien
gcttctcgaagcggttgtacttgcg

SEQ ID NO: 72957 - DNA, 25 bp, Homo sapien
ggacaggtgtacagacatgttcttg

SEQ ID NO: 72958 - DNA, 25 bp, Homo sapien
cggcactcgcccactgtgacgatgt

SEQ ID NO: 72959 - DNA, 25 bp, Homo sapien
agcacgttgaagcgcactgtcttgc

SEQ ID NO: 72960 - DNA, 25 bp, Homo sapien
cagatagtctcggcggatgacaatg

SEQ ID NO: 72961 - DNA, 25 bp, Homo sapien
ggacaggtgtacagacatgttcttg

SEQ ID NO: 72962 - DNA, 25 bp, Homo sapien
atggacacattaccagtgaaggggc

SEQ ID NO: 72963 - DNA, 25 bp, Homo sapien
cggcactcgcccactgtgacgatgt

SEQ ID NO: 72964 - DNA, 25 bp, Homo sapien
gcttctcgaagcggttgtacttgcg

SEQ ID NO: 72965 - DNA, 25 bp, Homo sapien
agcacgttgaagcgcactgtcttgc

SEQ ID NO: 72966 - DNA, 25 bp, Homo sapien
ttgaaagatggtcggctgcttttgg

SEQ ID NO: 72967 - DNA, 25 bp, Homo sapien
gccctcaatagcctccttgggtgtc

SEQ ID NO: 72968 - DNA, 25 bp, Homo sapien
cagtgaaggggcatttcttgtcaat

SEQ ID NO: 72969 - DNA, 25 bp, Homo sapien
gcttttggtaggcacgctcagtctg

SEQ ID NO: 72970 - DNA, 25 bp, Homo sapien
acgctcagtctgaatgtccgccatc

SEQ ID NO: 72971 - DNA, 25 bp, Homo sapien
acgctcagtctgaatgtccgccatc

SEQ ID NO: 72972 - DNA, 25 bp, Homo sapien
gcttttggtaggcacgctcagtctg

SEQ ID NO: 72973 - DNA, 25 bp, Homo sapien
ttgaaagatggtcggctgcttttgg

SEQ ID NO: 72974 - DNA, 25 bp, Homo sapien
gccctcaatagcctccttgggtgtc

SEQ ID NO: 72975 - DNA, 25 bp, Homo sapien
cagtgaaggggcatttcttgtcaat

SEQ ID NO: 72976 - DNA, 25 bp, Homo sapien
atggacacattaccagtgaaggggc

SEQ ID NO: 72977 - DNA, 25 bp, Homo sapien
cagatagtctcggcggatgacaatg

SEQ ID NO: 72978 - DNA, 25 bp, Homo sapien
gcttctcgaagcggttgtacttgcg

SEQ ID NO: 72979 - DNA, 25 bp, Homo sapien
ggacaggtgtacagacatgttcttg

SEQ ID NO: 72980 - DNA, 25 bp, Homo sapien
cggcactcgcccactgtgacgatgt

SEQ ID NO: 72981 - DNA, 25 bp, Homo sapien
agcacgttgaagcgcactgtcttgc

SEQ ID NO: 72982 - DNA, 25 bp, Homo sapien
acgctcagtctgaatgtccgccatc

SEQ ID NO: 72983 - DNA, 25 bp, Homo sapien
gcttttggtaggcacgctcagtctg

SEQ ID NO: 72984 - DNA, 25 bp, Homo sapien
cggcactcgcccactgtgacgatgt

SEQ ID NO: 72985 - DNA, 25 bp, Homo sapien
agcacgttgaagcgcactgtcttgc

SEQ ID NO: 72986 - DNA, 25 bp, Homo sapien
atggacacattaccagtgaaggggc

SEQ ID NO: 72987 - DNA, 25 bp, Homo sapien
gccctcaatagcctccttgggtgtc

SEQ ID NO: 72988 - DNA, 25 bp, Homo sapien
ttgaaagatggtcggctgcttttgg

SEQ ID NO: 72989 - DNA, 25 bp, Homo sapien
gcttctcgaagcggttgtacttgcg

SEQ ID NO: 72990 - DNA, 25 bp, Homo sapien
cagtgaaggggcatttcttgtcaat

SEQ ID NO: 72991 - DNA, 25 bp, Homo sapien
cagatagtctcggcggatgacaatg

SEQ ID NO: 72992 - DNA, 25 bp, Homo sapien
ggacaggtgtacagacatgttcttg

SEQ ID NO: 72993 - DNA, 25 bp, Homo sapien
acgctcagtctgaatgtccgccatc

SEQ ID NO: 72994 - DNA, 25 bp, Homo sapien
gcttttggtaggcacgctcagtctg

SEQ ID NO: 72995 - DNA, 25 bp, Homo sapien
ttgaaagatggtcggctgcttttgg

SEQ ID NO: 72996 - DNA, 25 bp, Homo sapien
gccctcaatagcctccttgggtgtc

SEQ ID NO: 72997 - DNA, 25 bp, Homo sapien
cagtgaaggggcatttcttgtcaat

SEQ ID NO: 72998 - DNA, 25 bp, Homo sapien
atggacacattaccagtgaaggggc

SEQ ID NO: 72999 - DNA, 25 bp, Homo sapien
cagatagtctcggcggatgacaatg

SEQ ID NO: 73000 - DNA, 25 bp, Homo sapien
gcttctcgaagcggttgtacttgcg

SEQ ID NO: 73001 - DNA, 25 bp, Homo sapien
ggacaggtgtacagacatgttcttg

SEQ ID NO: 73002 - DNA, 25 bp, Homo sapien
cggcactcgcccactgtgacgatgt

SEQ ID NO: 73003 - DNA, 25 bp, Homo sapien
agcacgttgaagcgcactgtcttgc

SEQ ID NO: 73004 - DNA, 25 bp, Homo sapien
ggacaggtgtacagacatgttcttg

SEQ ID NO: 73005 - DNA, 25 bp, Homo sapien
gcttctcgaagcggttgtacttgcg

SEQ ID NO: 73006 - DNA, 25 bp, Homo sapien
atggacacattaccagtgaaggggc

SEQ ID NO: 73007 - DNA, 25 bp, Homo sapien
cagtgaaggggcatttcttgtcaat

SEQ ID NO: 73008 - DNA, 25 bp, Homo sapien
cggcactcgcccactgtgacgatgt

SEQ ID NO: 73009 - DNA, 25 bp, Homo sapien
gcttttggtaggcacgctcagtctg

SEQ ID NO: 73010 - DNA, 25 bp, Homo sapien
gccctcaatagcctccttgggtgtc

SEQ ID NO: 73011 - DNA, 25 bp, Homo sapien
cagatagtctcggcggatgacaatg

SEQ ID NO: 73012 - DNA, 25 bp, Homo sapien
ttgaaagatggtcggctgcttttgg

SEQ ID NO: 73013 - DNA, 25 bp, Homo sapien
acgctcagtctgaatgtccgccatc

SEQ ID NO: 73014 - DNA, 25 bp, Homo sapien
agcacgttgaagcgcactgtcttgc

SEQ ID NO: 73015 - DNA, 25 bp, Homo sapien
gcttctcgaagcggttgtacttgcg

SEQ ID NO: 73016 - DNA, 25 bp, Homo sapien
acgctcagtctgaatgtccgccatc

SEQ ID NO: 73017 - DNA, 25 bp, Homo sapien
cggcactcgcccactgtgacgatgt

SEQ ID NO: 73018 - DNA, 25 bp, Homo sapien
atggacacattaccagtgaaggggc

SEQ ID NO: 73019 - DNA, 25 bp, Homo sapien
cagatagtctcggcggatgacaatg

SEQ ID NO: 73020 - DNA, 25 bp, Homo sapien
cagtgaaggggcatttcttgtcaat

SEQ ID NO: 73021 - DNA, 25 bp, Homo sapien
ttgaaagatggtcggctgcttttgg

SEQ ID NO: 73022 - DNA, 25 bp, Homo sapien
gccctcaatagcctccttgggtgtc

SEQ ID NO: 73023 - DNA, 25 bp, Homo sapien
agcacgttgaagcgcactgtcttgc

SEQ ID NO: 73024 - DNA, 25 bp, Homo sapien
ggacaggtgtacagacatgttcttg

SEQ ID NO: 73025 - DNA, 25 bp, Homo sapien
gcttttggtaggcacgctcagtctg

SEQ ID NO: 73026 - DNA, 25 bp, Homo sapien
acgctcagtctgaatgtccgccatc

SEQ ID NO: 73027 - DNA, 25 bp, Homo sapien
gcttttggtaggcacgctcagtctg

SEQ ID NO: 73028 - DNA, 25 bp, Homo sapien
ttgaaagatggtcggctgcttttgg

SEQ ID NO: 73029 - DNA, 25 bp, Homo sapien
gccctcaatagcctccttgggtgtc

SEQ ID NO: 73030 - DNA, 25 bp, Homo sapien
cagtgaaggggcatttcttgtcaat

SEQ ID NO: 73031 - DNA, 25 bp, Homo sapien
atggacacattaccagtgaaggggc

SEQ ID NO: 73032 - DNA, 25 bp, Homo sapien
cagatagtctcggcggatgacaatg

SEQ ID NO: 73033 - DNA, 25 bp, Homo sapien
gcttctcgaagcggttgtacttgcg

SEQ ID NO: 73034 - DNA, 25 bp, Homo sapien
ggacaggtgtacagacatgttcttg

SEQ ID NO: 73035 - DNA, 25 bp, Homo sapien
cggcactcgcccactgtgacgatgt

SEQ ID NO: 73036 - DNA, 25 bp, Homo sapien
agcacgttgaagcgcactgtcttgc

SEQ ID NO: 73037 - DNA, 25 bp, Homo sapien
acgctcagtctgaatgtccgccatc

SEQ ID NO: 73038 - DNA, 25 bp, Homo sapien
ggacaggtgtacagacatgttcttg

SEQ ID NO: 73039 - DNA, 25 bp, Homo sapien
gccctcaatagcctccttgggtgtc

SEQ ID NO: 73040 - DNA, 25 bp, Homo sapien
cggcactcgcccactgtgacgatgt

SEQ ID NO: 73041 - DNA, 25 bp, Homo sapien
cagtgaaggggcatttcttgtcaat

SEQ ID NO: 73042 - DNA, 25 bp, Homo sapien
gcttctcgaagcggttgtacttgcg

SEQ ID NO: 73043 - DNA, 25 bp, Homo sapien
agcacgttgaagcgcactgtcttgc

SEQ ID NO: 73044 - DNA, 25 bp, Homo sapien
cagatagtctcggcggatgacaatg

SEQ ID NO: 73045 - DNA, 25 bp, Homo sapien
gcttttggtaggcacgctcagtctg

SEQ ID NO: 73046 - DNA, 25 bp, Homo sapien
atggacacattaccagtgaaggggc

SEQ ID NO: 73047 - DNA, 25 bp, Homo sapien
ttgaaagatggtcggctgcttttgg

SEQ ID NO: 73048 - DNA, 25 bp, Homo sapien
acgctcagtctgaatgtccgccatc

SEQ ID NO: 73049 - DNA, 25 bp, Homo sapien
gcttttggtaggcacgctcagtctg

SEQ ID NO: 73050 - DNA, 25 bp, Homo sapien
ttgaaagatggtcggctgcttttgg

SEQ ID NO: 73051 - DNA, 25 bp, Homo sapien
gccctcaatagcctccttgggtgtc

SEQ ID NO: 73052 - DNA, 25 bp, Homo sapien
cagtgaaggggcatttcttgtcaat

SEQ ID NO: 73053 - DNA, 25 bp, Homo sapien
atggacacattaccagtgaaggggc

SEQ ID NO: 73054 - DNA, 25 bp, Homo sapien
cagatagtctcggcggatgacaatg

SEQ ID NO: 73055 - DNA, 25 bp, Homo sapien
gcttctcgaagcggttgtacttgcg

SEQ ID NO: 73056 - DNA, 25 bp, Homo sapien
ggacaggtgtacagacatgttcttg

SEQ ID NO: 73057 - DNA, 25 bp, Homo sapien
cggcactcgcccactgtgacgatgt

SEQ ID NO: 73058 - DNA, 25 bp, Homo sapien
agcacgttgaagcgcactgtcttgc

SEQ ID NO: 73059 - DNA, 25 bp, Homo sapien
atggacacattaccagtgaaggggc

SEQ ID NO: 73060 - DNA, 25 bp, Homo sapien
gcttctcgaagcggttgtacttgcg

SEQ ID NO: 73061 - DNA, 25 bp, Homo sapien
ttgaaagatggtcggctgcttttgg

SEQ ID NO: 73062 - DNA, 25 bp, Homo sapien
gccctcaatagcctccttgggtgtc

SEQ ID NO: 73063 - DNA, 25 bp, Homo sapien
gcttttggtaggcacgctcagtctg

SEQ ID NO: 73064 - DNA, 25 bp, Homo sapien
ggacaggtgtacagacatgttcttg

SEQ ID NO: 73065 - DNA, 25 bp, Homo sapien
cagtgaaggggcatttcttgtcaat

SEQ ID NO: 73066 - DNA, 25 bp, Homo sapien
agcacgttgaagcgcactgtcttgc

SEQ ID NO: 73067 - DNA, 25 bp, Homo sapien
acgctcagtctgaatgtccgccatc

SEQ ID NO: 73068 - DNA, 25 bp, Homo sapien
cggcactcgcccactgtgacgatgt

SEQ ID NO: 73069 - DNA, 25 bp, Homo sapien
cagatagtctcggcggatgacaatg

SEQ ID NO: 73070 - DNA, 25 bp, Homo sapien
acgctcagtctgaatgtccgccatc

SEQ ID NO: 73071 - DNA, 25 bp, Homo sapien
gcttttggtaggcacgctcagtctg

SEQ ID NO: 73072 - DNA, 25 bp, Homo sapien
ttgaaagatggtcggctgcttttgg

SEQ ID NO: 73073 - DNA, 25 bp, Homo sapien
gccctcaatagcctccttgggtgtc

SEQ ID NO: 73074 - DNA, 25 bp, Homo sapien
cagtgaaggggcatttcttgtcaat

SEQ ID NO: 73075 - DNA, 25 bp, Homo sapien
atggacacattaccagtgaaggggc

SEQ ID NO: 73076 - DNA, 25 bp, Homo sapien
cagatagtctcggcggatgacaatg

SEQ ID NO: 73077 - DNA, 25 bp, Homo sapien
gcttctcgaagcggttgtacttgcg

SEQ ID NO: 73078 - DNA, 25 bp, Homo sapien
ggacaggtgtacagacatgttcttg

SEQ ID NO: 73079 - DNA, 25 bp, Homo sapien
cggcactcgcccactgtgacgatgt

SEQ ID NO: 73080 - DNA, 25 bp, Homo sapien
agcacgttgaagcgcactgtcttgc

SEQ ID NO: 73081 - DNA, 25 bp, Homo sapien
agcacgttgaagcgcactgtcttgc

SEQ ID NO: 73082 - DNA, 25 bp, Homo sapien
cagatagtctcggcggatgacaatg

SEQ ID NO: 73083 - DNA, 25 bp, Homo sapien
gcttctcgaagcggttgtacttgcg

SEQ ID NO: 73084 - DNA, 25 bp, Homo sapien
cagtgaaggggcatttcttgtcaat

SEQ ID NO: 73085 - DNA, 25 bp, Homo sapien
atggacacattaccagtgaaggggc

SEQ ID NO: 73086 - DNA, 25 bp, Homo sapien
gcttttggtaggcacgctcagtctg

SEQ ID NO: 73087 - DNA, 25 bp, Homo sapien
ggacaggtgtacagacatgttcttg

SEQ ID NO: 73088 - DNA, 25 bp, Homo sapien
cggcactcgcccactgtgacgatgt

SEQ ID NO: 73089 - DNA, 25 bp, Homo sapien
gccctcaatagcctccttgggtgtc

SEQ ID NO: 73090 - DNA, 25 bp, Homo sapien
ttgaaagatggtcggctgcttttgg

SEQ ID NO: 73091 - DNA, 25 bp, Homo sapien
acgctcagtctgaatgtccgccatc

SEQ ID NO: 73092 - DNA, 25 bp, Homo sapien
acgctcagtctgaatgtccgccatc

SEQ ID NO: 73093 - DNA, 25 bp, Homo sapien
gcttttggtaggcacgctcagtctg

SEQ ID NO: 73094 - DNA, 25 bp, Homo sapien
ttgaaagatggtcggctgcttttgg

SEQ ID NO: 73095 - DNA, 25 bp, Homo sapien
gccctcaatagcctccttgggtgtc

SEQ ID NO: 73096 - DNA, 25 bp, Homo sapien
cagtgaaggggcatttcttgtcaat

SEQ ID NO: 73097 - DNA, 25 bp, Homo sapien
atggacacattaccagtgaaggggc

SEQ ID NO: 73098 - DNA, 25 bp, Homo sapien
cagatagtctcggcggatgacaatg

SEQ ID NO: 73099 - DNA, 25 bp, Homo sapien
gcttctcgaagcggttgtacttgcg

SEQ ID NO: 73100 - DNA, 25 bp, Homo sapien
ggacaggtgtacagacatgttcttg

SEQ ID NO: 73101 - DNA, 25 bp, Homo sapien
cggcactcgcccactgtgacgatgt

SEQ ID NO: 73102 - DNA, 25 bp, Homo sapien
agcacgttgaagcgcactgtcttgc

SEQ ID NO: 73103 - DNA, 25 bp, Homo sapien
acgctcagtctgaatgtccgccatc

SEQ ID NO: 73104 - DNA, 25 bp, Homo sapien
ttgaaagatggtcggctgcttttgg

SEQ ID NO: 73105 - DNA, 25 bp, Homo sapien
agcacgttgaagcgcactgtcttgc

SEQ ID NO: 73106 - DNA, 25 bp, Homo sapien
gccctcaatagcctccttgggtgtc

SEQ ID NO: 73107 - DNA, 25 bp, Homo sapien
cagtgaaggggcatttcttgtcaat

SEQ ID NO: 73108 - DNA, 25 bp, Homo sapien
gcttttggtaggcacgctcagtctg

SEQ ID NO: 73109 - DNA, 25 bp, Homo sapien
ggacaggtgtacagacatgttcttg

SEQ ID NO: 73110 - DNA, 25 bp, Homo sapien
gcttctcgaagcggttgtacttgcg

SEQ ID NO: 73111 - DNA, 25 bp, Homo sapien
cagatagtctcggcggatgacaatg

SEQ ID NO: 73112 - DNA, 25 bp, Homo sapien
cggcactcgcccactgtgacgatgt

SEQ ID NO: 73113 - DNA, 25 bp, Homo sapien
atggacacattaccagtgaaggggc

SEQ ID NO: 73114 - DNA, 25 bp, Homo sapien
acgctcagtctgaatgtccgccatc

SEQ ID NO: 73115 - DNA, 25 bp, Homo sapien
gcttttggtaggcacgctcagtctg

SEQ ID NO: 73116 - DNA, 25 bp, Homo sapien
ttgaaagatggtcggctgcttttgg

SEQ ID NO: 73117 - DNA, 25 bp, Homo sapien
gccctcaatagcctccttgggtgtc

SEQ ID NO: 73118 - DNA, 25 bp, Homo sapien
cagtgaaggggcatttcttgtcaat

SEQ ID NO: 73119 - DNA, 25 bp, Homo sapien
atggacacattaccagtgaaggggc

SEQ ID NO: 73120 - DNA, 25 bp, Homo sapien
cagatagtctcggcggatgacaatg

SEQ ID NO: 73121 - DNA, 25 bp, Homo sapien
gcttctcgaagcggttgtacttgcg

SEQ ID NO: 73122 - DNA, 25 bp, Homo sapien
ggacaggtgtacagacatgttcttg

SEQ ID NO: 73123 - DNA, 25 bp, Homo sapien
cggcactcgcccactgtgacgatgt

SEQ ID NO: 73124 - DNA, 25 bp, Homo sapien
agcacgttgaagcgcactgtcttgc

SEQ ID NO: 73125 - DNA, 25 bp, Homo sapien
agcacgttgaagcgcactgtcttgc

SEQ ID NO: 73126 - DNA, 25 bp, Homo sapien
ttgaaagatggtcggctgcttttgg

SEQ ID NO: 73127 - DNA, 25 bp, Homo sapien
gcttctcgaagcggttgtacttgcg

SEQ ID NO: 73128 - DNA, 25 bp, Homo sapien
ggacaggtgtacagacatgttcttg

SEQ ID NO: 73129 - DNA, 25 bp, Homo sapien
gccctcaatagcctccttgggtgtc

SEQ ID NO: 73130 - DNA, 25 bp, Homo sapien
cagtgaaggggcatttcttgtcaat

SEQ ID NO: 73131 - DNA, 25 bp, Homo sapien
cggcactcgcccactgtgacgatgt

SEQ ID NO: 73132 - DNA, 25 bp, Homo sapien
cagatagtctcggcggatgacaatg

SEQ ID NO: 73133 - DNA, 25 bp, Homo sapien
gcttttggtaggcacgctcagtctg

SEQ ID NO: 73134 - DNA, 25 bp, Homo sapien
atggacacattaccagtgaaggggc

SEQ ID NO: 73135 - DNA, 25 bp, Homo sapien
acgctcagtctgaatgtccgccatc

SEQ ID NO: 73136 - DNA, 25 bp, Homo sapien
acgctcagtctgaatgtccgccatc

SEQ ID NO: 73137 - DNA, 25 bp, Homo sapien
gcttttggtaggcacgctcagtctg

SEQ ID NO: 73138 - DNA, 25 bp, Homo sapien
ttgaaagatggtcggctgcttttgg

SEQ ID NO: 73139 - DNA, 25 bp, Homo sapien
gccctcaatagcctccttgggtgtc

SEQ ID NO: 73140 - DNA, 25 bp, Homo sapien
cagtgaaggggcatttcttgtcaat

SEQ ID NO: 73141 - DNA, 25 bp, Homo sapien
atggacacattaccagtgaaggggc

SEQ ID NO: 73142 - DNA, 25 bp, Homo sapien
cagatagtctcggcggatgacaatg

SEQ ID NO: 73143 - DNA, 25 bp, Homo sapien
gcttctcgaagcggttgtacttgcg

SEQ ID NO: 73144 - DNA, 25 bp, Homo sapien
ggacaggtgtacagacatgttcttg

SEQ ID NO: 73145 - DNA, 25 bp, Homo sapien
cggcactcgcccactgtgacgatgt

SEQ ID NO: 73146 - DNA, 25 bp, Homo sapien
agcacgttgaagcgcactgtcttgc

SEQ ID NO: 73147 - DNA, 25 bp, Homo sapien
acgctcagtctgaatgtccgccatc

SEQ ID NO: 73148 - DNA, 25 bp, Homo sapien
gcttttggtaggcacgctcagtctg

SEQ ID NO: 73149 - DNA, 25 bp, Homo sapien
ttgaaagatggtcggctgcttttgg

SEQ ID NO: 73150 - DNA, 25 bp, Homo sapien
gccctcaatagcctccttgggtgtc

SEQ ID NO: 73151 - DNA, 25 bp, Homo sapien
cagtgaaggggcatttcttgtcaat

SEQ ID NO: 73152 - DNA, 25 bp, Homo sapien
atggacacattaccagtgaaggggc

SEQ ID NO: 73153 - DNA, 25 bp, Homo sapien
cagatagtctcggcggatgacaatg

SEQ ID NO: 73154 - DNA, 25 bp, Homo sapien
gcttctcgaagcggttgtacttgcg

SEQ ID NO: 73155 - DNA, 25 bp, Homo sapien
ggacaggtgtacagacatgttcttg

SEQ ID NO: 73156 - DNA, 25 bp, Homo sapien
cggcactcgcccactgtgacgatgt

SEQ ID NO: 73157 - DNA, 25 bp, Homo sapien
agcacgttgaagcgcactgtcttgc

SEQ ID NO: 73158 - DNA, 25 bp, Homo sapien
acgctcagtctgaatgtccgccatc

SEQ ID NO: 73159 - DNA, 25 bp, Homo sapien
gcttttggtaggcacgctcagtctg

SEQ ID NO: 73160 - DNA, 25 bp, Homo sapien
ttgaaagatggtcggctgcttttgg

SEQ ID NO: 73161 - DNA, 25 bp, Homo sapien
gcttctcgaagcggttgtacttgcg

SEQ ID NO: 73162 - DNA, 25 bp, Homo sapien
atggacacattaccagtgaaggggc

SEQ ID NO: 73163 - DNA, 25 bp, Homo sapien
cagatagtctcggcggatgacaatg

SEQ ID NO: 73164 - DNA, 25 bp, Homo sapien
gccctcaatagcctccttgggtgtc

SEQ ID NO: 73165 - DNA, 25 bp, Homo sapien
cggcactcgcccactgtgacgatgt

SEQ ID NO: 73166 - DNA, 25 bp, Homo sapien
agcacgttgaagcgcactgtcttgc

SEQ ID NO: 73167 - DNA, 25 bp, Homo sapien
cagtgaaggggcatttcttgtcaat

SEQ ID NO: 73168 - DNA, 25 bp, Homo sapien
ggacaggtgtacagacatgttcttg

SEQ ID NO: 73169 - DNA, 25 bp, Homo sapien
acgctcagtctgaatgtccgccatc

SEQ ID NO: 73170 - DNA, 25 bp, Homo sapien
gcttttggtaggcacgctcagtctg

SEQ ID NO: 73171 - DNA, 25 bp, Homo sapien
ttgaaagatggtcggctgcttttgg

SEQ ID NO: 73172 - DNA, 25 bp, Homo sapien
gccctcaatagcctccttgggtgtc

SEQ ID NO: 73173 - DNA, 25 bp, Homo sapien
cagtgaaggggcatttcttgtcaat

SEQ ID NO: 73174 - DNA, 25 bp, Homo sapien
atggacacattaccagtgaaggggc

SEQ ID NO: 73175 - DNA, 25 bp, Homo sapien
cagatagtctcggcggatgacaatg

SEQ ID NO: 73176 - DNA, 25 bp, Homo sapien
gcttctcgaagcggttgtacttgcg

SEQ ID NO: 73177 - DNA, 25 bp, Homo sapien
ggacaggtgtacagacatgttcttg

SEQ ID NO: 73178 - DNA, 25 bp, Homo sapien
cggcactcgcccactgtgacgatgt

SEQ ID NO: 73179 - DNA, 25 bp, Homo sapien
agcacgttgaagcgcactgtcttgc

SEQ ID NO: 73180 - DNA, 25 bp, Homo sapien
agcacgttgaagcgcactgtcttgc

SEQ ID NO: 73181 - DNA, 25 bp, Homo sapien
gcttctcgaagcggttgtacttgcg

SEQ ID NO: 73182 - DNA, 25 bp, Homo sapien
ttgaaagatggtcggctgcttttgg

SEQ ID NO: 73183 - DNA, 25 bp, Homo sapien
cggcactcgcccactgtgacgatgt

SEQ ID NO: 73184 - DNA, 25 bp, Homo sapien
atggacacattaccagtgaaggggc

SEQ ID NO: 73185 - DNA, 25 bp, Homo sapien
gccctcaatagcctccttgggtgtc

SEQ ID NO: 73186 - DNA, 25 bp, Homo sapien
cagtgaaggggcatttcttgtcaat

SEQ ID NO: 73187 - DNA, 25 bp, Homo sapien
ggacaggtgtacagacatgttcttg

SEQ ID NO: 73188 - DNA, 25 bp, Homo sapien
cagatagtctcggcggatgacaatg

SEQ ID NO: 73189 - DNA, 25 bp, Homo sapien
gcttttggtaggcacgctcagtctg

SEQ ID NO: 73190 - DNA, 25 bp, Homo sapien
acgctcagtctgaatgtccgccatc

SEQ ID NO: 73191 - DNA, 25 bp, Homo sapien
acgctcagtctgaatgtccgccatc

SEQ ID NO: 73192 - DNA, 25 bp, Homo sapien
gcttttggtaggcacgctcagtctg

SEQ ID NO: 73193 - DNA, 25 bp, Homo sapien
ttgaaagatggtcggctgcttttgg

SEQ ID NO: 73194 - DNA, 25 bp, Homo sapien
gccctcaatagcctccttgggtgtc

SEQ ID NO: 73195 - DNA, 25 bp, Homo sapien
cagtgaaggggcatttcttgtcaat

SEQ ID NO: 73196 - DNA, 25 bp, Homo sapien
atggacacattaccagtgaaggggc

SEQ ID NO: 73197 - DNA, 25 bp, Homo sapien
cagatagtctcggcggatgacaatg

SEQ ID NO: 73198 - DNA, 25 bp, Homo sapien
gcttctcgaagcggttgtacttgcg

SEQ ID NO: 73199 - DNA, 25 bp, Homo sapien
ggacaggtgtacagacatgttcttg

SEQ ID NO: 73200 - DNA, 25 bp, Homo sapien
cggcactcgcccactgtgacgatgt

SEQ ID NO: 73201 - DNA, 25 bp, Homo sapien
agcacgttgaagcgcactgtcttgc

SEQ ID NO: 73202 - DNA, 25 bp, Homo sapien
gccctcaatagcctccttgggtgtc

SEQ ID NO: 73203 - DNA, 25 bp, Homo sapien
gcttctcgaagcggttgtacttgcg

SEQ ID NO: 73204 - DNA, 25 bp, Homo sapien
agcacgttgaagcgcactgtcttgc

SEQ ID NO: 73205 - DNA, 25 bp, Homo sapien
cggcactcgcccactgtgacgatgt

SEQ ID NO: 73206 - DNA, 25 bp, Homo sapien
acgctcagtctgaatgtccgccatc

SEQ ID NO: 73207 - DNA, 25 bp, Homo sapien
cagatagtctcggcggatgacaatg

SEQ ID NO: 73208 - DNA, 25 bp, Homo sapien
ggacaggtgtacagacatgttcttg

SEQ ID NO: 73209 - DNA, 25 bp, Homo sapien
gcttttggtaggcacgctcagtctg

SEQ ID NO: 73210 - DNA, 25 bp, Homo sapien
atggacacattaccagtgaaggggc

SEQ ID NO: 73211 - DNA, 25 bp, Homo sapien
cagtgaaggggcatttcttgtcaat

SEQ ID NO: 73212 - DNA, 25 bp, Homo sapien
ttgaaagatggtcggctgcttttgg

SEQ ID NO: 73213 - DNA, 25 bp, Homo sapien
acgctcagtctgaatgtccgccatc

SEQ ID NO: 73214 - DNA, 25 bp, Homo sapien
gcttttggtaggcacgctcagtctg

SEQ ID NO: 73215 - DNA, 25 bp, Homo sapien
ttgaaagatggtcggctgcttttgg

SEQ ID NO: 73216 - DNA, 25 bp, Homo sapien
gccctcaatagcctccttgggtgtc

SEQ ID NO: 73217 - DNA, 25 bp, Homo sapien
cagtgaaggggcatttcttgtcaat

SEQ ID NO: 73218 - DNA, 25 bp, Homo sapien
atggacacattaccagtgaaggggc

SEQ ID NO: 73219 - DNA, 25 bp, Homo sapien
cagatagtctcggcggatgacaatg

SEQ ID NO: 73220 - DNA, 25 bp, Homo sapien
gcttctcgaagcggttgtacttgcg

SEQ ID NO: 73221 - DNA, 25 bp, Homo sapien
ggacaggtgtacagacatgttcttg

SEQ ID NO: 73222 - DNA, 25 bp, Homo sapien
cggcactcgcccactgtgacgatgt

SEQ ID NO: 73223 - DNA, 25 bp, Homo sapien
agcacgttgaagcgcactgtcttgc

SEQ ID NO: 73224 - DNA, 25 bp, Homo sapien
gcttttggtaggcacgctcagtctg

SEQ ID NO: 73225 - DNA, 25 bp, Homo sapien
gcttctcgaagcggttgtacttgcg

SEQ ID NO: 73226 - DNA, 25 bp, Homo sapien
cagtgaaggggcatttcttgtcaat

SEQ ID NO: 73227 - DNA, 25 bp, Homo sapien
gccctcaatagcctccttgggtgtc

SEQ ID NO: 73228 - DNA, 25 bp, Homo sapien
acgctcagtctgaatgtccgccatc

SEQ ID NO: 73229 - DNA, 25 bp, Homo sapien
ttgaaagatggtcggctgcttttgg

SEQ ID NO: 73230 - DNA, 25 bp, Homo sapien
atggacacattaccagtgaaggggc

SEQ ID NO: 73231 - DNA, 25 bp, Homo sapien
cagatagtctcggcggatgacaatg

SEQ ID NO: 73232 - DNA, 25 bp, Homo sapien
cggcactcgcccactgtgacgatgt

SEQ ID NO: 73233 - DNA, 25 bp, Homo sapien
ggacaggtgtacagacatgttcttg

SEQ ID NO: 73234 - DNA, 25 bp, Homo sapien
agcacgttgaagcgcactgtcttgc

SEQ ID NO: 73235 - DNA, 25 bp, Homo sapien
acgctcagtctgaatgtccgccatc

SEQ ID NO: 73236 - DNA, 25 bp, Homo sapien
gcttttggtaggcacgctcagtctg

SEQ ID NO: 73237 - DNA, 25 bp, Homo sapien
ttgaaagatggtcggctgcttttgg

SEQ ID NO: 73238 - DNA, 25 bp, Homo sapien
gccctcaatagcctccttgggtgtc

SEQ ID NO: 73239 - DNA, 25 bp, Homo sapien
cagtgaaggggcatttcttgtcaat

SEQ ID NO: 73240 - DNA, 25 bp, Homo sapien
atggacacattaccagtgaaggggc

SEQ ID NO: 73241 - DNA, 25 bp, Homo sapien
cagatagtctcggcggatgacaatg

SEQ ID NO: 73242 - DNA, 25 bp, Homo sapien
gcttctcgaagcggttgtacttgcg

SEQ ID NO: 73243 - DNA, 25 bp, Homo sapien
ggacaggtgtacagacatgttcttg

SEQ ID NO: 73244 - DNA, 25 bp, Homo sapien
cggcactcgcccactgtgacgatgt

SEQ ID NO: 73245 - DNA, 25 bp, Homo sapien
agcacgttgaagcgcactgtcttgc

SEQ ID NO: 73246 - DNA, 25 bp, Homo sapien
acgctcagtctgaatgtccgccatc

SEQ ID NO: 73247 - DNA, 25 bp, Homo sapien
atggacacattaccagtgaaggggc

SEQ ID NO: 73248 - DNA, 25 bp, Homo sapien
cagatagtctcggcggatgacaatg

SEQ ID NO: 73249 - DNA, 25 bp, Homo sapien
gcttctcgaagcggttgtacttgcg

SEQ ID NO: 73250 - DNA, 25 bp, Homo sapien
cagtgaaggggcatttcttgtcaat

SEQ ID NO: 73251 - DNA, 25 bp, Homo sapien
gccctcaatagcctccttgggtgtc

SEQ ID NO: 73252 - DNA, 25 bp, Homo sapien
ggacaggtgtacagacatgttcttg

SEQ ID NO: 73253 - DNA, 25 bp, Homo sapien
cggcactcgcccactgtgacgatgt

SEQ ID NO: 73254 - DNA, 25 bp, Homo sapien
agcacgttgaagcgcactgtcttgc

SEQ ID NO: 73255 - DNA, 25 bp, Homo sapien
ttgaaagatggtcggctgcttttgg

SEQ ID NO: 73256 - DNA, 25 bp, Homo sapien
gcttttggtaggcacgctcagtctg

SEQ ID NO: 73257 - DNA, 25 bp, Homo sapien
cggcactcgcccactgtgacgatgt

SEQ ID NO: 73258 - DNA, 25 bp, Homo sapien
gccctcaatagcctccttgggtgtc

SEQ ID NO: 73259 - DNA, 25 bp, Homo sapien
gcttctcgaagcggttgtacttgcg

SEQ ID NO: 73260 - DNA, 25 bp, Homo sapien
ttgaaagatggtcggctgcttttgg

SEQ ID NO: 73261 - DNA, 25 bp, Homo sapien
ggacaggtgtacagacatgttcttg

SEQ ID NO: 73262 - DNA, 25 bp, Homo sapien
cagatagtctcggcggatgacaatg

SEQ ID NO: 73263 - DNA, 25 bp, Homo sapien
acgctcagtctgaatgtccgccatc

SEQ ID NO: 73264 - DNA, 25 bp, Homo sapien
agcacgttgaagcgcactgtcttgc

SEQ ID NO: 73265 - DNA, 25 bp, Homo sapien
cagtgaaggggcatttcttgtcaat

SEQ ID NO: 73266 - DNA, 25 bp, Homo sapien
gcttttggtaggcacgctcagtctg

SEQ ID NO: 73267 - DNA, 25 bp, Homo sapien
atggacacattaccagtgaaggggc

SEQ ID NO: 73268 - DNA, 25 bp, Homo sapien
acgctcagtctgaatgtccgccatc

SEQ ID NO: 73269 - DNA, 25 bp, Homo sapien
gcttttggtaggcacgctcagtctg

SEQ ID NO: 73270 - DNA, 25 bp, Homo sapien
ttgaaagatggtcggctgcttttgg

SEQ ID NO: 73271 - DNA, 25 bp, Homo sapien
gccctcaatagcctccttgggtgtc

SEQ ID NO: 73272 - DNA, 25 bp, Homo sapien
cagtgaaggggcatttcttgtcaat

SEQ ID NO: 73273 - DNA, 25 bp, Homo sapien
atggacacattaccagtgaaggggc

SEQ ID NO: 73274 - DNA, 25 bp, Homo sapien
cagatagtctcggcggatgacaatg

SEQ ID NO: 73275 - DNA, 25 bp, Homo sapien
gcttctcgaagcggttgtacttgcg

SEQ ID NO: 73276 - DNA, 25 bp, Homo sapien
ggacaggtgtacagacatgttcttg

SEQ ID NO: 73277 - DNA, 25 bp, Homo sapien
cggcactcgcccactgtgacgatgt

SEQ ID NO: 73278 - DNA, 25 bp, Homo sapien
agcacgttgaagcgcactgtcttgc

SEQ ID NO: 73279 - DNA, 25 bp, Homo sapien
gcttttggtaggcacgctcagtctg

SEQ ID NO: 73280 - DNA, 25 bp, Homo sapien
ggacaggtgtacagacatgttcttg

SEQ ID NO: 73281 - DNA, 25 bp, Homo sapien
ttgaaagatggtcggctgcttttgg

SEQ ID NO: 73282 - DNA, 25 bp, Homo sapien
agcacgttgaagcgcactgtcttgc

SEQ ID NO: 73283 - DNA, 25 bp, Homo sapien
atggacacattaccagtgaaggggc

SEQ ID NO: 73284 - DNA, 25 bp, Homo sapien
gccctcaatagcctccttgggtgtc

SEQ ID NO: 73285 - DNA, 25 bp, Homo sapien
cagtgaaggggcatttcttgtcaat

SEQ ID NO: 73286 - DNA, 25 bp, Homo sapien
acgctcagtctgaatgtccgccatc

SEQ ID NO: 73287 - DNA, 25 bp, Homo sapien
gcttctcgaagcggttgtacttgcg

SEQ ID NO: 73288 - DNA, 25 bp, Homo sapien
cggcactcgcccactgtgacgatgt

SEQ ID NO: 73289 - DNA, 25 bp, Homo sapien
cagatagtctcggcggatgacaatg

SEQ ID NO: 73290 - DNA, 25 bp, Homo sapien
acgctcagtctgaatgtccgccatc

SEQ ID NO: 73291 - DNA, 25 bp, Homo sapien
gcttttggtaggcacgctcagtctg

SEQ ID NO: 73292 - DNA, 25 bp, Homo sapien
ttgaaagatggtcggctgcttttgg

SEQ ID NO: 73293 - DNA, 25 bp, Homo sapien
gccctcaatagcctccttgggtgtc

SEQ ID NO: 73294 - DNA, 25 bp, Homo sapien
cagtgaaggggcatttcttgtcaat

SEQ ID NO: 73295 - DNA, 25 bp, Homo sapien
atggacacattaccagtgaaggggc

SEQ ID NO: 73296 - DNA, 25 bp, Homo sapien
cagatagtctcggcggatgacaatg

SEQ ID NO: 73297 - DNA, 25 bp, Homo sapien
gcttctcgaagcggttgtacttgcg

SEQ ID NO: 73298 - DNA, 25 bp, Homo sapien
ggacaggtgtacagacatgttcttg

SEQ ID NO: 73299 - DNA, 25 bp, Homo sapien
cggcactcgcccactgtgacgatgt

SEQ ID NO: 73300 - DNA, 25 bp, Homo sapien
agcacgttgaagcgcactgtcttgc

SEQ ID NO: 73301 - DNA, 25 bp, Homo sapien
acgctcagtctgaatgtccgccatc

SEQ ID NO: 73302 - DNA, 25 bp, Homo sapien
cagatagtctcggcggatgacaatg

SEQ ID NO: 73303 - DNA, 25 bp, Homo sapien
gccctcaatagcctccttgggtgtc

SEQ ID NO: 73304 - DNA, 25 bp, Homo sapien
gcttttggtaggcacgctcagtctg

SEQ ID NO: 73305 - DNA, 25 bp, Homo sapien
atggacacattaccagtgaaggggc

SEQ ID NO: 73306 - DNA, 25 bp, Homo sapien
gcttctcgaagcggttgtacttgcg

SEQ ID NO: 73307 - DNA, 25 bp, Homo sapien
cggcactcgcccactgtgacgatgt

SEQ ID NO: 73308 - DNA, 25 bp, Homo sapien
ggacaggtgtacagacatgttcttg

SEQ ID NO: 73309 - DNA, 25 bp, Homo sapien
ttgaaagatggtcggctgcttttgg

SEQ ID NO: 73310 - DNA, 25 bp, Homo sapien
agcacgttgaagcgcactgtcttgc

SEQ ID NO: 73311 - DNA, 25 bp, Homo sapien
cagtgaaggggcatttcttgtcaat

SEQ ID NO: 73312 - DNA, 25 bp, Homo sapien
acgctcagtctgaatgtccgccatc

SEQ ID NO: 73313 - DNA, 25 bp, Homo sapien
gcttttggtaggcacgctcagtctg

SEQ ID NO: 73314 - DNA, 25 bp, Homo sapien
ttgaaagatggtcggctgcttttgg

SEQ ID NO: 73315 - DNA, 25 bp, Homo sapien
gccctcaatagcctccttgggtgtc

SEQ ID NO: 73316 - DNA, 25 bp, Homo sapien
cagtgaaggggcatttcttgtcaat

SEQ ID NO: 73317 - DNA, 25 bp, Homo sapien
atggacacattaccagtgaaggggc

SEQ ID NO: 73318 - DNA, 25 bp, Homo sapien
cagatagtctcggcggatgacaatg

SEQ ID NO: 73319 - DNA, 25 bp, Homo sapien
gcttctcgaagcggttgtacttgcg

SEQ ID NO: 73320 - DNA, 25 bp, Homo sapien
ggacaggtgtacagacatgttcttg

SEQ ID NO: 73321 - DNA, 25 bp, Homo sapien
cggcactcgcccactgtgacgatgt

SEQ ID NO: 73322 - DNA, 25 bp, Homo sapien
agcacgttgaagcgcactgtcttgc

SEQ ID NO: 73323 - DNA, 25 bp, Homo sapien
attgatgtgattgaagtccctccgc

SEQ ID NO: 73324 - DNA, 25 bp, Homo sapien
ccaccatttgtcaacccggagcctc

SEQ ID NO: 73325 - DNA, 25 bp, Homo sapien
tctgtagccaggtaactcttagatc

SEQ ID NO: 73326 - DNA, 25 bp, Homo sapien
agtccctccgcagggttcctctggg

SEQ ID NO: 73327 - DNA, 25 bp, Homo sapien
tttctgggcttgagatactgaacaa

SEQ ID NO: 73328 - DNA, 25 bp, Homo sapien
acaaatagtccgaacggtagccagt

SEQ ID NO: 73329 - DNA, 25 bp, Homo sapien
atcttgtaacggaagcccagtgtaa

SEQ ID NO: 73330 - DNA, 25 bp, Homo sapien
tcctggataacaacgttgatgggga

SEQ ID NO: 73331 - DNA, 25 bp, Homo sapien
aagtaggtcttaagtgtcatctggc

SEQ ID NO: 73332 - DNA, 25 bp, Homo sapien
aaggctgagttctacattgatgtga

SEQ ID NO: 73333 - DNA, 25 bp, Homo sapien
taactgttgtggcttgctgaatcaa

SEQ ID NO: 73334 - DNA, 25 bp, Homo sapien
taactgttgtggcttgctgaatcaa

SEQ ID NO: 73335 - DNA, 25 bp, Homo sapien
tctgtagccaggtaactcttagatc

SEQ ID NO: 73336 - DNA, 25 bp, Homo sapien
aagtaggtcttaagtgtcatctggc

SEQ ID NO: 73337 - DNA, 25 bp, Homo sapien
agtccctccgcagggttcctctggg

SEQ ID NO: 73338 - DNA, 25 bp, Homo sapien
attgatgtgattgaagtccctccgc

SEQ ID NO: 73339 - DNA, 25 bp, Homo sapien
aaggctgagttctacattgatgtga

SEQ ID NO: 73340 - DNA, 25 bp, Homo sapien
ccaccatttgtcaacccggagcctc

SEQ ID NO: 73341 - DNA, 25 bp, Homo sapien
acaaatagtccgaacggtagccagt

SEQ ID NO: 73342 - DNA, 25 bp, Homo sapien
atcttgtaacggaagcccagtgtaa

SEQ ID NO: 73343 - DNA, 25 bp, Homo sapien
tcctggataacaacgttgatgggga

SEQ ID NO: 73344 - DNA, 25 bp, Homo sapien
tttctgggcttgagatactgaacaa

SEQ ID NO: 73345 - DNA, 25 bp, Homo sapien
tttctgggcttgagatactgaacaa

SEQ ID NO: 73346 - DNA, 25 bp, Homo sapien
attgatgtgattgaagtccctccgc

SEQ ID NO: 73347 - DNA, 25 bp, Homo sapien
agtccctccgcagggttcctctggg

SEQ ID NO: 73348 - DNA, 25 bp, Homo sapien
aaggctgagttctacattgatgtga

SEQ ID NO: 73349 - DNA, 25 bp, Homo sapien
taactgttgtggcttgctgaatcaa

SEQ ID NO: 73350 - DNA, 25 bp, Homo sapien
ccaccatttgtcaacccggagcctc

SEQ ID NO: 73351 - DNA, 25 bp, Homo sapien
atcttgtaacggaagcccagtgtaa

SEQ ID NO: 73352 - DNA, 25 bp, Homo sapien
acaaatagtccgaacggtagccagt

SEQ ID NO: 73353 - DNA, 25 bp, Homo sapien
aagtaggtcttaagtgtcatctggc

SEQ ID NO: 73354 - DNA, 25 bp, Homo sapien
tcctggataacaacgttgatgggga

SEQ ID NO: 73355 - DNA, 25 bp, Homo sapien
tctgtagccaggtaactcttagatc

SEQ ID NO: 73356 - DNA, 25 bp, Homo sapien
agtccctccgcagggttcctctggg

SEQ ID NO: 73357 - DNA, 25 bp, Homo sapien
attgatgtgattgaagtccctccgc

SEQ ID NO: 73358 - DNA, 25 bp, Homo sapien
aaggctgagttctacattgatgtga

SEQ ID NO: 73359 - DNA, 25 bp, Homo sapien
ccaccatttgtcaacccggagcctc

SEQ ID NO: 73360 - DNA, 25 bp, Homo sapien
acaaatagtccgaacggtagccagt

SEQ ID NO: 73361 - DNA, 25 bp, Homo sapien
atcttgtaacggaagcccagtgtaa

SEQ ID NO: 73362 - DNA, 25 bp, Homo sapien
tcctggataacaacgttgatgggga

SEQ ID NO: 73363 - DNA, 25 bp, Homo sapien
tttctgggcttgagatactgaacaa

SEQ ID NO: 73364 - DNA, 25 bp, Homo sapien
taactgttgtggcttgctgaatcaa

SEQ ID NO: 73365 - DNA, 25 bp, Homo sapien
tctgtagccaggtaactcttagatc

SEQ ID NO: 73366 - DNA, 25 bp, Homo sapien
aagtaggtcttaagtgtcatctggc

SEQ ID NO: 73367 - DNA, 25 bp, Homo sapien
ccaccatttgtcaacccggagcctc

SEQ ID NO: 73368 - DNA, 25 bp, Homo sapien
tcctggataacaacgttgatgggga

SEQ ID NO: 73369 - DNA, 25 bp, Homo sapien
aagtaggtcttaagtgtcatctggc

SEQ ID NO: 73370 - DNA, 25 bp, Homo sapien
acaaatagtccgaacggtagccagt

SEQ ID NO: 73371 - DNA, 25 bp, Homo sapien
taactgttgtggcttgctgaatcaa

SEQ ID NO: 73372 - DNA, 25 bp, Homo sapien
attgatgtgattgaagtccctccgc

SEQ ID NO: 73373 - DNA, 25 bp, Homo sapien
atcttgtaacggaagcccagtgtaa

SEQ ID NO: 73374 - DNA, 25 bp, Homo sapien
aaggctgagttctacattgatgtga

SEQ ID NO: 73375 - DNA, 25 bp, Homo sapien
tttctgggcttgagatactgaacaa

SEQ ID NO: 73376 - DNA, 25 bp, Homo sapien
agtccctccgcagggttcctctggg

SEQ ID NO: 73377 - DNA, 25 bp, Homo sapien
tctgtagccaggtaactcttagatc

SEQ ID NO: 73378 - DNA, 25 bp, Homo sapien
taactgttgtggcttgctgaatcaa

SEQ ID NO: 73379 - DNA, 25 bp, Homo sapien
tctgtagccaggtaactcttagatc

SEQ ID NO: 73380 - DNA, 25 bp, Homo sapien
aagtaggtcttaagtgtcatctggc

SEQ ID NO: 73381 - DNA, 25 bp, Homo sapien
agtccctccgcagggttcctctggg

SEQ ID NO: 73382 - DNA, 25 bp, Homo sapien
attgatgtgattgaagtccctccgc

SEQ ID NO: 73383 - DNA, 25 bp, Homo sapien
aaggctgagttctacattgatgtga

SEQ ID NO: 73384 - DNA, 25 bp, Homo sapien
ccaccatttgtcaacccggagcctc

SEQ ID NO: 73385 - DNA, 25 bp, Homo sapien
acaaatagtccgaacggtagccagt

SEQ ID NO: 73386 - DNA, 25 bp, Homo sapien
atcttgtaacggaagcccagtgtaa

SEQ ID NO: 73387 - DNA, 25 bp, Homo sapien
tcctggataacaacgttgatgggga

SEQ ID NO: 73388 - DNA, 25 bp, Homo sapien
tttctgggcttgagatactgaacaa

SEQ ID NO: 73389 - DNA, 25 bp, Homo sapien
taactgttgtggcttgctgaatcaa

SEQ ID NO: 73390 - DNA, 25 bp, Homo sapien
tctgtagccaggtaactcttagatc

SEQ ID NO: 73391 - DNA, 25 bp, Homo sapien
aagtaggtcttaagtgtcatctggc

SEQ ID NO: 73392 - DNA, 25 bp, Homo sapien
agtccctccgcagggttcctctggg

SEQ ID NO: 73393 - DNA, 25 bp, Homo sapien
attgatgtgattgaagtccctccgc

SEQ ID NO: 73394 - DNA, 25 bp, Homo sapien
aaggctgagttctacattgatgtga

SEQ ID NO: 73395 - DNA, 25 bp, Homo sapien
ccaccatttgtcaacccggagcctc

SEQ ID NO: 73396 - DNA, 25 bp, Homo sapien
acaaatagtccgaacggtagccagt

SEQ ID NO: 73397 - DNA, 25 bp, Homo sapien
atcttgtaacggaagcccagtgtaa

SEQ ID NO: 73398 - DNA, 25 bp, Homo sapien
tcctggataacaacgttgatgggga

SEQ ID NO: 73399 - DNA, 25 bp, Homo sapien
tttctgggcttgagatactgaacaa

SEQ ID NO: 73400 - DNA, 25 bp, Homo sapien
ccaccatttgtcaacccggagcctc

SEQ ID NO: 73401 - DNA, 25 bp, Homo sapien
agtccctccgcagggttcctctggg

SEQ ID NO: 73402 - DNA, 25 bp, Homo sapien
taactgttgtggcttgctgaatcaa

SEQ ID NO: 73403 - DNA, 25 bp, Homo sapien
aagtaggtcttaagtgtcatctggc

SEQ ID NO: 73404 - DNA, 25 bp, Homo sapien
atcttgtaacggaagcccagtgtaa

SEQ ID NO: 73405 - DNA, 25 bp, Homo sapien
tctgtagccaggtaactcttagatc

SEQ ID NO: 73406 - DNA, 25 bp, Homo sapien
aaggctgagttctacattgatgtga

SEQ ID NO: 73407 - DNA, 25 bp, Homo sapien
tttctgggcttgagatactgaacaa

SEQ ID NO: 73408 - DNA, 25 bp, Homo sapien
tcctggataacaacgttgatgggga

SEQ ID NO: 73409 - DNA, 25 bp, Homo sapien
attgatgtgattgaagtccctccgc

SEQ ID NO: 73410 - DNA, 25 bp, Homo sapien
acaaatagtccgaacggtagccagt

SEQ ID NO: 73411 - DNA, 25 bp, Homo sapien
taactgttgtggcttgctgaatcaa

SEQ ID NO: 73412 - DNA, 25 bp, Homo sapien
tctgtagccaggtaactcttagatc

SEQ ID NO: 73413 - DNA, 25 bp, Homo sapien
aagtaggtcttaagtgtcatctggc

SEQ ID NO: 73414 - DNA, 25 bp, Homo sapien
agtccctccgcagggttcctctggg

SEQ ID NO: 73415 - DNA, 25 bp, Homo sapien
attgatgtgattgaagtccctccgc

SEQ ID NO: 73416 - DNA, 25 bp, Homo sapien
aaggctgagttctacattgatgtga

SEQ ID NO: 73417 - DNA, 25 bp, Homo sapien
ccaccatttgtcaacccggagcctc

SEQ ID NO: 73418 - DNA, 25 bp, Homo sapien
acaaatagtccgaacggtagccagt

SEQ ID NO: 73419 - DNA, 25 bp, Homo sapien
atcttgtaacggaagcccagtgtaa

SEQ ID NO: 73420 - DNA, 25 bp, Homo sapien
tcctggataacaacgttgatgggga

SEQ ID NO: 73421 - DNA, 25 bp, Homo sapien
tttctgggcttgagatactgaacaa

SEQ ID NO: 73422 - DNA, 25 bp, Homo sapien
aagtaggtcttaagtgtcatctggc

SEQ ID NO: 73423 - DNA, 25 bp, Homo sapien
atcttgtaacggaagcccagtgtaa

SEQ ID NO: 73424 - DNA, 25 bp, Homo sapien
tctgtagccaggtaactcttagatc

SEQ ID NO: 73425 - DNA, 25 bp, Homo sapien
acaaatagtccgaacggtagccagt

SEQ ID NO: 73426 - DNA, 25 bp, Homo sapien
agtccctccgcagggttcctctggg

SEQ ID NO: 73427 - DNA, 25 bp, Homo sapien
taactgttgtggcttgctgaatcaa

SEQ ID NO: 73428 - DNA, 25 bp, Homo sapien
aaggctgagttctacattgatgtga

SEQ ID NO: 73429 - DNA, 25 bp, Homo sapien
tttctgggcttgagatactgaacaa

SEQ ID NO: 73430 - DNA, 25 bp, Homo sapien
ccaccatttgtcaacccggagcctc

SEQ ID NO: 73431 - DNA, 25 bp, Homo sapien
tcctggataacaacgttgatgggga

SEQ ID NO: 73432 - DNA, 25 bp, Homo sapien
attgatgtgattgaagtccctccgc

SEQ ID NO: 73433 - DNA, 25 bp, Homo sapien
taactgttgtggcttgctgaatcaa

SEQ ID NO: 73434 - DNA, 25 bp, Homo sapien
tctgtagccaggtaactcttagatc

SEQ ID NO: 73435 - DNA, 25 bp, Homo sapien
aagtaggtcttaagtgtcatctggc

SEQ ID NO: 73436 - DNA, 25 bp, Homo sapien
agtccctccgcagggttcctctggg

SEQ ID NO: 73437 - DNA, 25 bp, Homo sapien
attgatgtgattgaagtccctccgc

SEQ ID NO: 73438 - DNA, 25 bp, Homo sapien
aaggctgagttctacattgatgtga

SEQ ID NO: 73439 - DNA, 25 bp, Homo sapien
ccaccatttgtcaacccggagcctc

SEQ ID NO: 73440 - DNA, 25 bp, Homo sapien
acaaatagtccgaacggtagccagt

SEQ ID NO: 73441 - DNA, 25 bp, Homo sapien
atcttgtaacggaagcccagtgtaa

SEQ ID NO: 73442 - DNA, 25 bp, Homo sapien
tcctggataacaacgttgatgggga

SEQ ID NO: 73443 - DNA, 25 bp, Homo sapien
tttctgggcttgagatactgaacaa

SEQ ID NO: 73444 - DNA, 25 bp, Homo sapien
attgatgtgattgaagtccctccgc

SEQ ID NO: 73445 - DNA, 25 bp, Homo sapien
tttctgggcttgagatactgaacaa

SEQ ID NO: 73446 - DNA, 25 bp, Homo sapien
acaaatagtccgaacggtagccagt

SEQ ID NO: 73447 - DNA, 25 bp, Homo sapien
ccaccatttgtcaacccggagcctc

SEQ ID NO: 73448 - DNA, 25 bp, Homo sapien
aaggctgagttctacattgatgtga

SEQ ID NO: 73449 - DNA, 25 bp, Homo sapien
agtccctccgcagggttcctctggg

SEQ ID NO: 73450 - DNA, 25 bp, Homo sapien
tctgtagccaggtaactcttagatc

SEQ ID NO: 73451 - DNA, 25 bp, Homo sapien
atcttgtaacggaagcccagtgtaa

SEQ ID NO: 73452 - DNA, 25 bp, Homo sapien
aagtaggtcttaagtgtcatctggc

SEQ ID NO: 73453 - DNA, 25 bp, Homo sapien
tcctggataacaacgttgatgggga

SEQ ID NO: 73454 - DNA, 25 bp, Homo sapien
taactgttgtggcttgctgaatcaa

SEQ ID NO: 73455 - DNA, 25 bp, Homo sapien
taactgttgtggcttgctgaatcaa

SEQ ID NO: 73456 - DNA, 25 bp, Homo sapien
tctgtagccaggtaactcttagatc

SEQ ID NO: 73457 - DNA, 25 bp, Homo sapien
aagtaggtcttaagtgtcatctggc

SEQ ID NO: 73458 - DNA, 25 bp, Homo sapien
agtccctccgcagggttcctctggg

SEQ ID NO: 73459 - DNA, 25 bp, Homo sapien
attgatgtgattgaagtccctccgc

SEQ ID NO: 73460 - DNA, 25 bp, Homo sapien
aaggctgagttctacattgatgtga

SEQ ID NO: 73461 - DNA, 25 bp, Homo sapien
ccaccatttgtcaacccggagcctc

SEQ ID NO: 73462 - DNA, 25 bp, Homo sapien
acaaatagtccgaacggtagccagt

SEQ ID NO: 73463 - DNA, 25 bp, Homo sapien
atcttgtaacggaagcccagtgtaa

SEQ ID NO: 73464 - DNA, 25 bp, Homo sapien
tcctggataacaacgttgatgggga

SEQ ID NO: 73465 - DNA, 25 bp, Homo sapien
tttctgggcttgagatactgaacaa

SEQ ID NO: 73466 - DNA, 25 bp, Homo sapien
tctgtagccaggtaactcttagatc

SEQ ID NO: 73467 - DNA, 25 bp, Homo sapien
acaaatagtccgaacggtagccagt

SEQ ID NO: 73468 - DNA, 25 bp, Homo sapien
attgatgtgattgaagtccctccgc

SEQ ID NO: 73469 - DNA, 25 bp, Homo sapien
tttctgggcttgagatactgaacaa

SEQ ID NO: 73470 - DNA, 25 bp, Homo sapien
aaggctgagttctacattgatgtga

SEQ ID NO: 73471 - DNA, 25 bp, Homo sapien
ccaccatttgtcaacccggagcctc

SEQ ID NO: 73472 - DNA, 25 bp, Homo sapien
aagtaggtcttaagtgtcatctggc

SEQ ID NO: 73473 - DNA, 25 bp, Homo sapien
taactgttgtggcttgctgaatcaa

SEQ ID NO: 73474 - DNA, 25 bp, Homo sapien
agtccctccgcagggttcctctggg

SEQ ID NO: 73475 - DNA, 25 bp, Homo sapien
atcttgtaacggaagcccagtgtaa

SEQ ID NO: 73476 - DNA, 25 bp, Homo sapien
tcctggataacaacgttgatgggga

SEQ ID NO: 73477 - DNA, 25 bp, Homo sapien
taactgttgtggcttgctgaatcaa

SEQ ID NO: 73478 - DNA, 25 bp, Homo sapien
tctgtagccaggtaactcttagatc

SEQ ID NO: 73479 - DNA, 25 bp, Homo sapien
aagtaggtcttaagtgtcatctggc

SEQ ID NO: 73480 - DNA, 25 bp, Homo sapien
agtccctccgcagggttcctctggg

SEQ ID NO: 73481 - DNA, 25 bp, Homo sapien
attgatgtgattgaagtccctccgc

SEQ ID NO: 73482 - DNA, 25 bp, Homo sapien
aaggctgagttctacattgatgtga

SEQ ID NO: 73483 - DNA, 25 bp, Homo sapien
ccaccatttgtcaacccggagcctc

SEQ ID NO: 73484 - DNA, 25 bp, Homo sapien
acaaatagtccgaacggtagccagt

SEQ ID NO: 73485 - DNA, 25 bp, Homo sapien
atcttgtaacggaagcccagtgtaa

SEQ ID NO: 73486 - DNA, 25 bp, Homo sapien
tcctggataacaacgttgatgggga

SEQ ID NO: 73487 - DNA, 25 bp, Homo sapien
tttctgggcttgagatactgaacaa

SEQ ID NO: 73488 - DNA, 25 bp, Homo sapien
attgatgtgattgaagtccctccgc

SEQ ID NO: 73489 - DNA, 25 bp, Homo sapien
tctgtagccaggtaactcttagatc

SEQ ID NO: 73490 - DNA, 25 bp, Homo sapien
agtccctccgcagggttcctctggg

SEQ ID NO: 73491 - DNA, 25 bp, Homo sapien
tcctggataacaacgttgatgggga

SEQ ID NO: 73492 - DNA, 25 bp, Homo sapien
ccaccatttgtcaacccggagcctc

SEQ ID NO: 73493 - DNA, 25 bp, Homo sapien
atcttgtaacggaagcccagtgtaa

SEQ ID NO: 73494 - DNA, 25 bp, Homo sapien
acaaatagtccgaacggtagccagt

SEQ ID NO: 73495 - DNA, 25 bp, Homo sapien
taactgttgtggcttgctgaatcaa

SEQ ID NO: 73496 - DNA, 25 bp, Homo sapien
tttctgggcttgagatactgaacaa

SEQ ID NO: 73497 - DNA, 25 bp, Homo sapien
aagtaggtcttaagtgtcatctggc

SEQ ID NO: 73498 - DNA, 25 bp, Homo sapien
aaggctgagttctacattgatgtga

SEQ ID NO: 73499 - DNA, 25 bp, Homo sapien
tttctgggcttgagatactgaacaa

SEQ ID NO: 73500 - DNA, 25 bp, Homo sapien
atcttgtaacggaagcccagtgtaa

SEQ ID NO: 73501 - DNA, 25 bp, Homo sapien
attgatgtgattgaagtccctccgc

SEQ ID NO: 73502 - DNA, 25 bp, Homo sapien
tcctggataacaacgttgatgggga

SEQ ID NO: 73503 - DNA, 25 bp, Homo sapien
tctgtagccaggtaactcttagatc

SEQ ID NO: 73504 - DNA, 25 bp, Homo sapien
aaggctgagttctacattgatgtga

SEQ ID NO: 73505 - DNA, 25 bp, Homo sapien
aagtaggtcttaagtgtcatctggc

SEQ ID NO: 73506 - DNA, 25 bp, Homo sapien
ccaccatttgtcaacccggagcctc

SEQ ID NO: 73507 - DNA, 25 bp, Homo sapien
acaaatagtccgaacggtagccagt

SEQ ID NO: 73508 - DNA, 25 bp, Homo sapien
agtccctccgcagggttcctctggg

SEQ ID NO: 73509 - DNA, 25 bp, Homo sapien
taactgttgtggcttgctgaatcaa

SEQ ID NO: 73510 - DNA, 25 bp, Homo sapien
taactgttgtggcttgctgaatcaa

SEQ ID NO: 73511 - DNA, 25 bp, Homo sapien
tctgtagccaggtaactcttagatc

SEQ ID NO: 73512 - DNA, 25 bp, Homo sapien
aagtaggtcttaagtgtcatctggc

SEQ ID NO: 73513 - DNA, 25 bp, Homo sapien
agtccctccgcagggttcctctggg

SEQ ID NO: 73514 - DNA, 25 bp, Homo sapien
attgatgtgattgaagtccctccgc

SEQ ID NO: 73515 - DNA, 25 bp, Homo sapien
aaggctgagttctacattgatgtga

SEQ ID NO: 73516 - DNA, 25 bp, Homo sapien
ccaccatttgtcaacccggagcctc

SEQ ID NO: 73517 - DNA, 25 bp, Homo sapien
acaaatagtccgaacggtagccagt

SEQ ID NO: 73518 - DNA, 25 bp, Homo sapien
atcttgtaacggaagcccagtgtaa

SEQ ID NO: 73519 - DNA, 25 bp, Homo sapien
tcctggataacaacgttgatgggga

SEQ ID NO: 73520 - DNA, 25 bp, Homo sapien
tttctgggcttgagatactgaacaa

SEQ ID NO: 73521 - DNA, 25 bp, Homo sapien
tcctggataacaacgttgatgggga

SEQ ID NO: 73522 - DNA, 25 bp, Homo sapien
agtccctccgcagggttcctctggg

SEQ ID NO: 73523 - DNA, 25 bp, Homo sapien
taactgttgtggcttgctgaatcaa

SEQ ID NO: 73524 - DNA, 25 bp, Homo sapien
tctgtagccaggtaactcttagatc

SEQ ID NO: 73525 - DNA, 25 bp, Homo sapien
aaggctgagttctacattgatgtga

SEQ ID NO: 73526 - DNA, 25 bp, Homo sapien
aagtaggtcttaagtgtcatctggc

SEQ ID NO: 73527 - DNA, 25 bp, Homo sapien
atcttgtaacggaagcccagtgtaa

SEQ ID NO: 73528 - DNA, 25 bp, Homo sapien
ccaccatttgtcaacccggagcctc

SEQ ID NO: 73529 - DNA, 25 bp, Homo sapien
acaaatagtccgaacggtagccagt

SEQ ID NO: 73530 - DNA, 25 bp, Homo sapien
attgatgtgattgaagtccctccgc

SEQ ID NO: 73531 - DNA, 25 bp, Homo sapien
tttctgggcttgagatactgaacaa

SEQ ID NO: 73532 - DNA, 25 bp, Homo sapien
taactgttgtggcttgctgaatcaa

SEQ ID NO: 73533 - DNA, 25 bp, Homo sapien
tctgtagccaggtaactcttagatc

SEQ ID NO: 73534 - DNA, 25 bp, Homo sapien
aagtaggtcttaagtgtcatctggc

SEQ ID NO: 73535 - DNA, 25 bp, Homo sapien
agtccctccgcagggttcctctggg

SEQ ID NO: 73536 - DNA, 25 bp, Homo sapien
attgatgtgattgaagtccctccgc

SEQ ID NO: 73537 - DNA, 25 bp, Homo sapien
aaggctgagttctacattgatgtga

SEQ ID NO: 73538 - DNA, 25 bp, Homo sapien
ccaccatttgtcaacccggagcctc

SEQ ID NO: 73539 - DNA, 25 bp, Homo sapien
acaaatagtccgaacggtagccagt

SEQ ID NO: 73540 - DNA, 25 bp, Homo sapien
atcttgtaacggaagcccagtgtaa

SEQ ID NO: 73541 - DNA, 25 bp, Homo sapien
tcctggataacaacgttgatgggga

SEQ ID NO: 73542 - DNA, 25 bp, Homo sapien
tttctgggcttgagatactgaacaa

SEQ ID NO: 73543 - DNA, 25 bp, Homo sapien
atcttgtaacggaagcccagtgtaa

SEQ ID NO: 73544 - DNA, 25 bp, Homo sapien
acaaatagtccgaacggtagccagt

SEQ ID NO: 73545 - DNA, 25 bp, Homo sapien
tcctggataacaacgttgatgggga

SEQ ID NO: 73546 - DNA, 25 bp, Homo sapien
ccaccatttgtcaacccggagcctc

SEQ ID NO: 73547 - DNA, 25 bp, Homo sapien
taactgttgtggcttgctgaatcaa

SEQ ID NO: 73548 - DNA, 25 bp, Homo sapien
aaggctgagttctacattgatgtga

SEQ ID NO: 73549 - DNA, 25 bp, Homo sapien
agtccctccgcagggttcctctggg

SEQ ID NO: 73550 - DNA, 25 bp, Homo sapien
tctgtagccaggtaactcttagatc

SEQ ID NO: 73551 - DNA, 25 bp, Homo sapien
attgatgtgattgaagtccctccgc

SEQ ID NO: 73552 - DNA, 25 bp, Homo sapien
tttctgggcttgagatactgaacaa

SEQ ID NO: 73553 - DNA, 25 bp, Homo sapien
aagtaggtcttaagtgtcatctggc

SEQ ID NO: 73554 - DNA, 25 bp, Homo sapien
taactgttgtggcttgctgaatcaa

SEQ ID NO: 73555 - DNA, 25 bp, Homo sapien
tctgtagccaggtaactcttagatc

SEQ ID NO: 73556 - DNA, 25 bp, Homo sapien
aagtaggtcttaagtgtcatctggc

SEQ ID NO: 73557 - DNA, 25 bp, Homo sapien
agtccctccgcagggttcctctggg

SEQ ID NO: 73558 - DNA, 25 bp, Homo sapien
attgatgtgattgaagtccctccgc

SEQ ID NO: 73559 - DNA, 25 bp, Homo sapien
aaggctgagttctacattgatgtga

SEQ ID NO: 73560 - DNA, 25 bp, Homo sapien
ccaccatttgtcaacccggagcctc

SEQ ID NO: 73561 - DNA, 25 bp, Homo sapien
acaaatagtccgaacggtagccagt

SEQ ID NO: 73562 - DNA, 25 bp, Homo sapien
atcttgtaacggaagcccagtgtaa

SEQ ID NO: 73563 - DNA, 25 bp, Homo sapien
tcctggataacaacgttgatgggga

SEQ ID NO: 73564 - DNA, 25 bp, Homo sapien
tttctgggcttgagatactgaacaa

SEQ ID NO: 73565 - DNA, 25 bp, Homo sapien
tttctgggcttgagatactgaacaa

SEQ ID NO: 73566 - DNA, 25 bp, Homo sapien
atcttgtaacggaagcccagtgtaa

SEQ ID NO: 73567 - DNA, 25 bp, Homo sapien
taactgttgtggcttgctgaatcaa

SEQ ID NO: 73568 - DNA, 25 bp, Homo sapien
tctgtagccaggtaactcttagatc

SEQ ID NO: 73569 - DNA, 25 bp, Homo sapien
aagtaggtcttaagtgtcatctggc

SEQ ID NO: 73570 - DNA, 25 bp, Homo sapien
tcctggataacaacgttgatgggga

SEQ ID NO: 73571 - DNA, 25 bp, Homo sapien
aaggctgagttctacattgatgtga

SEQ ID NO: 73572 - DNA, 25 bp, Homo sapien
acaaatagtccgaacggtagccagt

SEQ ID NO: 73573 - DNA, 25 bp, Homo sapien
attgatgtgattgaagtccctccgc

SEQ ID NO: 73574 - DNA, 25 bp, Homo sapien
ccaccatttgtcaacccggagcctc

SEQ ID NO: 73575 - DNA, 25 bp, Homo sapien
agtccctccgcagggttcctctggg

SEQ ID NO: 73576 - DNA, 25 bp, Homo sapien
taactgttgtggcttgctgaatcaa

SEQ ID NO: 73577 - DNA, 25 bp, Homo sapien
tctgtagccaggtaactcttagatc

SEQ ID NO: 73578 - DNA, 25 bp, Homo sapien
aagtaggtcttaagtgtcatctggc

SEQ ID NO: 73579 - DNA, 25 bp, Homo sapien
agtccctccgcagggttcctctggg

SEQ ID NO: 73580 - DNA, 25 bp, Homo sapien
attgatgtgattgaagtccctccgc

SEQ ID NO: 73581 - DNA, 25 bp, Homo sapien
aaggctgagttctacattgatgtga

SEQ ID NO: 73582 - DNA, 25 bp, Homo sapien
ccaccatttgtcaacccggagcctc

SEQ ID NO: 73583 - DNA, 25 bp, Homo sapien
acaaatagtccgaacggtagccagt

SEQ ID NO: 73584 - DNA, 25 bp, Homo sapien
atcttgtaacggaagcccagtgtaa

SEQ ID NO: 73585 - DNA, 25 bp, Homo sapien
tcctggataacaacgttgatgggga

SEQ ID NO: 73586 - DNA, 25 bp, Homo sapien
tttctgggcttgagatactgaacaa

SEQ ID NO: 73587 - DNA, 25 bp, Homo sapien
ccaccatttgtcaacccggagcctc

SEQ ID NO: 73588 - DNA, 25 bp, Homo sapien
aagtaggtcttaagtgtcatctggc

SEQ ID NO: 73589 - DNA, 25 bp, Homo sapien
tctgtagccaggtaactcttagatc

SEQ ID NO: 73590 - DNA, 25 bp, Homo sapien
aaggctgagttctacattgatgtga

SEQ ID NO: 73591 - DNA, 25 bp, Homo sapien
atcttgtaacggaagcccagtgtaa

SEQ ID NO: 73592 - DNA, 25 bp, Homo sapien
tcctggataacaacgttgatgggga

SEQ ID NO: 73593 - DNA, 25 bp, Homo sapien
taactgttgtggcttgctgaatcaa

SEQ ID NO: 73594 - DNA, 25 bp, Homo sapien
agtccctccgcagggttcctctggg

SEQ ID NO: 73595 - DNA, 25 bp, Homo sapien
attgatgtgattgaagtccctccgc

SEQ ID NO: 73596 - DNA, 25 bp, Homo sapien
acaaatagtccgaacggtagccagt

SEQ ID NO: 73597 - DNA, 25 bp, Homo sapien
tttctgggcttgagatactgaacaa

SEQ ID NO: 73598 - DNA, 25 bp, Homo sapien
taactgttgtggcttgctgaatcaa

SEQ ID NO: 73599 - DNA, 25 bp, Homo sapien
tctgtagccaggtaactcttagatc

SEQ ID NO: 73600 - DNA, 25 bp, Homo sapien
aagtaggtcttaagtgtcatctggc

SEQ ID NO: 73601 - DNA, 25 bp, Homo sapien
agtccctccgcagggttcctctggg

SEQ ID NO: 73602 - DNA, 25 bp, Homo sapien
attgatgtgattgaagtccctccgc

SEQ ID NO: 73603 - DNA, 25 bp, Homo sapien
aaggctgagttctacattgatgtga

SEQ ID NO: 73604 - DNA, 25 bp, Homo sapien
ccaccatttgtcaacccggagcctc

SEQ ID NO: 73605 - DNA, 25 bp, Homo sapien
acaaatagtccgaacggtagccagt

SEQ ID NO: 73606 - DNA, 25 bp, Homo sapien
atcttgtaacggaagcccagtgtaa

SEQ ID NO: 73607 - DNA, 25 bp, Homo sapien
tcctggataacaacgttgatgggga

SEQ ID NO: 73608 - DNA, 25 bp, Homo sapien
tttctgggcttgagatactgaacaa

SEQ ID NO: 73609 - DNA, 25 bp, Homo sapien
ccaccatttgtcaacccggagcctc

SEQ ID NO: 73610 - DNA, 25 bp, Homo sapien
tttctgggcttgagatactgaacaa

SEQ ID NO: 73611 - DNA, 25 bp, Homo sapien
attgatgtgattgaagtccctccgc

SEQ ID NO: 73612 - DNA, 25 bp, Homo sapien
atcttgtaacggaagcccagtgtaa

SEQ ID NO: 73613 - DNA, 25 bp, Homo sapien
tcctggataacaacgttgatgggga

SEQ ID NO: 73614 - DNA, 25 bp, Homo sapien
aagtaggtcttaagtgtcatctggc

SEQ ID NO: 73615 - DNA, 25 bp, Homo sapien
agtccctccgcagggttcctctggg

SEQ ID NO: 73616 - DNA, 25 bp, Homo sapien
taactgttgtggcttgctgaatcaa

SEQ ID NO: 73617 - DNA, 25 bp, Homo sapien
tctgtagccaggtaactcttagatc

SEQ ID NO: 73618 - DNA, 25 bp, Homo sapien
aaggctgagttctacattgatgtga

SEQ ID NO: 73619 - DNA, 25 bp, Homo sapien
acaaatagtccgaacggtagccagt

SEQ ID NO: 73620 - DNA, 25 bp, Homo sapien
taactgttgtggcttgctgaatcaa

SEQ ID NO: 73621 - DNA, 25 bp, Homo sapien
tctgtagccaggtaactcttagatc

SEQ ID NO: 73622 - DNA, 25 bp, Homo sapien
aagtaggtcttaagtgtcatctggc

SEQ ID NO: 73623 - DNA, 25 bp, Homo sapien
agtccctccgcagggttcctctggg

SEQ ID NO: 73624 - DNA, 25 bp, Homo sapien
attgatgtgattgaagtccctccgc

SEQ ID NO: 73625 - DNA, 25 bp, Homo sapien
aaggctgagttctacattgatgtga

SEQ ID NO: 73626 - DNA, 25 bp, Homo sapien
ccaccatttgtcaacccggagcctc

SEQ ID NO: 73627 - DNA, 25 bp, Homo sapien
acaaatagtccgaacggtagccagt

SEQ ID NO: 73628 - DNA, 25 bp, Homo sapien
atcttgtaacggaagcccagtgtaa

SEQ ID NO: 73629 - DNA, 25 bp, Homo sapien
tcctggataacaacgttgatgggga

SEQ ID NO: 73630 - DNA, 25 bp, Homo sapien
tttctgggcttgagatactgaacaa

SEQ ID NO: 73631 - DNA, 25 bp, Homo sapien
taactgttgtggcttgctgaatcaa

SEQ ID NO: 73632 - DNA, 25 bp, Homo sapien
tctgtagccaggtaactcttagatc

SEQ ID NO: 73633 - DNA, 25 bp, Homo sapien
aagtaggtcttaagtgtcatctggc

SEQ ID NO: 73634 - DNA, 25 bp, Homo sapien
agtccctccgcagggttcctctggg

SEQ ID NO: 73635 - DNA, 25 bp, Homo sapien
attgatgtgattgaagtccctccgc

SEQ ID NO: 73636 - DNA, 25 bp, Homo sapien
aaggctgagttctacattgatgtga

SEQ ID NO: 73637 - DNA, 25 bp, Homo sapien
ccaccatttgtcaacccggagcctc

SEQ ID NO: 73638 - DNA, 25 bp, Homo sapien
acaaatagtccgaacggtagccagt

SEQ ID NO: 73639 - DNA, 25 bp, Homo sapien
atcttgtaacggaagcccagtgtaa

SEQ ID NO: 73640 - DNA, 25 bp, Homo sapien
tcctggataacaacgttgatgggga

SEQ ID NO: 73641 - DNA, 25 bp, Homo sapien
tttctgggcttgagatactgaacaa

SEQ ID NO: 73642 - DNA, 25 bp, Homo sapien
taactgttgtggcttgctgaatcaa

SEQ ID NO: 73643 - DNA, 25 bp, Homo sapien
attgatgtgattgaagtccctccgc

SEQ ID NO: 73644 - DNA, 25 bp, Homo sapien
tcctggataacaacgttgatgggga

SEQ ID NO: 73645 - DNA, 25 bp, Homo sapien
tttctgggcttgagatactgaacaa

SEQ ID NO: 73646 - DNA, 25 bp, Homo sapien
atcttgtaacggaagcccagtgtaa

SEQ ID NO: 73647 - DNA, 25 bp, Homo sapien
acaaatagtccgaacggtagccagt

SEQ ID NO: 73648 - DNA, 25 bp, Homo sapien
aaggctgagttctacattgatgtga

SEQ ID NO: 73649 - DNA, 25 bp, Homo sapien
agtccctccgcagggttcctctggg

SEQ ID NO: 73650 - DNA, 25 bp, Homo sapien
ccaccatttgtcaacccggagcctc

SEQ ID NO: 73651 - DNA, 25 bp, Homo sapien
tctgtagccaggtaactcttagatc

SEQ ID NO: 73652 - DNA, 25 bp, Homo sapien
aagtaggtcttaagtgtcatctggc

SEQ ID NO: 73653 - DNA, 25 bp, Homo sapien
aaggctgagttctacattgatgtga

SEQ ID NO: 73654 - DNA, 25 bp, Homo sapien
taactgttgtggcttgctgaatcaa

SEQ ID NO: 73655 - DNA, 25 bp, Homo sapien
attgatgtgattgaagtccctccgc

SEQ ID NO: 73656 - DNA, 25 bp, Homo sapien
tcctggataacaacgttgatgggga

SEQ ID NO: 73657 - DNA, 25 bp, Homo sapien
tttctgggcttgagatactgaacaa

SEQ ID NO: 73658 - DNA, 25 bp, Homo sapien
atcttgtaacggaagcccagtgtaa

SEQ ID NO: 73659 - DNA, 25 bp, Homo sapien
acaaatagtccgaacggtagccagt

SEQ ID NO: 73660 - DNA, 25 bp, Homo sapien
agtccctccgcagggttcctctggg

SEQ ID NO: 73661 - DNA, 25 bp, Homo sapien
ccaccatttgtcaacccggagcctc

SEQ ID NO: 73662 - DNA, 25 bp, Homo sapien
tctgtagccaggtaactcttagatc

SEQ ID NO: 73663 - DNA, 25 bp, Homo sapien
aagtaggtcttaagtgtcatctggc

SEQ ID NO: 73664 - DNA, 25 bp, Homo sapien
aaggctgagttctacattgatgtga

SEQ ID NO: 73665 - DNA, 25 bp, Homo sapien
taactgttgtggcttgctgaatcaa

SEQ ID NO: 73666 - DNA, 25 bp, Homo sapien
attgatgtgattgaagtccctccgc

SEQ ID NO: 73667 - DNA, 25 bp, Homo sapien
tcctggataacaacgttgatgggga

SEQ ID NO: 73668 - DNA, 25 bp, Homo sapien
tttctgggcttgagatactgaacaa

SEQ ID NO: 73669 - DNA, 25 bp, Homo sapien
acaaatagtccgaacggtagccagt

SEQ ID NO: 73670 - DNA, 25 bp, Homo sapien
atcttgtaacggaagcccagtgtaa

SEQ ID NO: 73671 - DNA, 25 bp, Homo sapien
agtccctccgcagggttcctctggg

SEQ ID NO: 73672 - DNA, 25 bp, Homo sapien
ccaccatttgtcaacccggagcctc

SEQ ID NO: 73673 - DNA, 25 bp, Homo sapien
tctgtagccaggtaactcttagatc

SEQ ID NO: 73674 - DNA, 25 bp, Homo sapien
aagtaggtcttaagtgtcatctggc

SEQ ID NO: 73675 - DNA, 25 bp, Homo sapien
taactgttgtggcttgctgaatcaa

SEQ ID NO: 73676 - DNA, 25 bp, Homo sapien
attgatgtgattgaagtccctccgc

SEQ ID NO: 73677 - DNA, 25 bp, Homo sapien
tcctggataacaacgttgatgggga

SEQ ID NO: 73678 - DNA, 25 bp, Homo sapien
tttctgggcttgagatactgaacaa

SEQ ID NO: 73679 - DNA, 25 bp, Homo sapien
acaaatagtccgaacggtagccagt

SEQ ID NO: 73680 - DNA, 25 bp, Homo sapien
atcttgtaacggaagcccagtgtaa

SEQ ID NO: 73681 - DNA, 25 bp, Homo sapien
aaggctgagttctacattgatgtga

SEQ ID NO: 73682 - DNA, 25 bp, Homo sapien
agtccctccgcagggttcctctggg

SEQ ID NO: 73683 - DNA, 25 bp, Homo sapien
ccaccatttgtcaacccggagcctc

SEQ ID NO: 73684 - DNA, 25 bp, Homo sapien
aagtaggtcttaagtgtcatctggc

SEQ ID NO: 73685 - DNA, 25 bp, Homo sapien
tctgtagccaggtaactcttagatc

SEQ ID NO: 73686 - DNA, 25 bp, Homo sapien
attgatgtgattgaagtccctccgc

SEQ ID NO: 73687 - DNA, 25 bp, Homo sapien
taactgttgtggcttgctgaatcaa

SEQ ID NO: 73688 - DNA, 25 bp, Homo sapien
tcctggataacaacgttgatgggga

SEQ ID NO: 73689 - DNA, 25 bp, Homo sapien
tttctgggcttgagatactgaacaa

SEQ ID NO: 73690 - DNA, 25 bp, Homo sapien
acaaatagtccgaacggtagccagt

SEQ ID NO: 73691 - DNA, 25 bp, Homo sapien
atcttgtaacggaagcccagtgtaa

SEQ ID NO: 73692 - DNA, 25 bp, Homo sapien
aaggctgagttctacattgatgtga

SEQ ID NO: 73693 - DNA, 25 bp, Homo sapien
agtccctccgcagggttcctctggg

SEQ ID NO: 73694 - DNA, 25 bp, Homo sapien
ccaccatttgtcaacccggagcctc

SEQ ID NO: 73695 - DNA, 25 bp, Homo sapien
tctgtagccaggtaactcttagatc

SEQ ID NO: 73696 - DNA, 25 bp, Homo sapien
aagtaggtcttaagtgtcatctggc

SEQ ID NO: 73697 - DNA, 25 bp, Homo sapien
taactgttgtggcttgctgaatcaa

SEQ ID NO: 73698 - DNA, 25 bp, Homo sapien
attgatgtgattgaagtccctccgc

SEQ ID NO: 73699 - DNA, 25 bp, Homo sapien
tcctggataacaacgttgatgggga

SEQ ID NO: 73700 - DNA, 25 bp, Homo sapien
tttctgggcttgagatactgaacaa

SEQ ID NO: 73701 - DNA, 25 bp, Homo sapien
atcttgtaacggaagcccagtgtaa

SEQ ID NO: 73702 - DNA, 25 bp, Homo sapien
acaaatagtccgaacggtagccagt

SEQ ID NO: 73703 - DNA, 25 bp, Homo sapien
aaggctgagttctacattgatgtga

SEQ ID NO: 73704 - DNA, 25 bp, Homo sapien
agtccctccgcagggttcctctggg

SEQ ID NO: 73705 - DNA, 25 bp, Homo sapien
ccaccatttgtcaacccggagcctc

SEQ ID NO: 73706 - DNA, 25 bp, Homo sapien
tctgtagccaggtaactcttagatc

SEQ ID NO: 73707 - DNA, 25 bp, Homo sapien
aagtaggtcttaagtgtcatctggc

SEQ ID NO: 73708 - DNA, 25 bp, Homo sapien
taactgttgtggcttgctgaatcaa

SEQ ID NO: 73709 - DNA, 25 bp, Homo sapien
attgatgtgattgaagtccctccgc

SEQ ID NO: 73710 - DNA, 25 bp, Homo sapien
tcctggataacaacgttgatgggga

SEQ ID NO: 73711 - DNA, 25 bp, Homo sapien
tttctgggcttgagatactgaacaa

SEQ ID NO: 73712 - DNA, 25 bp, Homo sapien
acaaatagtccgaacggtagccagt

SEQ ID NO: 73713 - DNA, 25 bp, Homo sapien
atcttgtaacggaagcccagtgtaa

SEQ ID NO: 73714 - DNA, 25 bp, Homo sapien
aaggctgagttctacattgatgtga

SEQ ID NO: 73715 - DNA, 25 bp, Homo sapien
agtccctccgcagggttcctctggg

SEQ ID NO: 73716 - DNA, 25 bp, Homo sapien
ccaccatttgtcaacccggagcctc

SEQ ID NO: 73717 - DNA, 25 bp, Homo sapien
tctgtagccaggtaactcttagatc

SEQ ID NO: 73718 - DNA, 25 bp, Homo sapien
aagtaggtcttaagtgtcatctggc

SEQ ID NO: 73719 - DNA, 25 bp, Homo sapien
taactgttgtggcttgctgaatcaa

SEQ ID NO: 73720 - DNA, 25 bp, Homo sapien
attgatgtgattgaagtccctccgc

SEQ ID NO: 73721 - DNA, 25 bp, Homo sapien
tcctggataacaacgttgatgggga

SEQ ID NO: 73722 - DNA, 25 bp, Homo sapien
tttctgggcttgagatactgaacaa

SEQ ID NO: 73723 - DNA, 25 bp, Homo sapien
acaaatagtccgaacggtagccagt

SEQ ID NO: 73724 - DNA, 25 bp, Homo sapien
atcttgtaacggaagcccagtgtaa

SEQ ID NO: 73725 - DNA, 25 bp, Homo sapien
aaggctgagttctacattgatgtga

SEQ ID NO: 73726 - DNA, 25 bp, Homo sapien
agtccctccgcagggttcctctggg

SEQ ID NO: 73727 - DNA, 25 bp, Homo sapien
ccaccatttgtcaacccggagcctc

SEQ ID NO: 73728 - DNA, 25 bp, Homo sapien
aagtaggtcttaagtgtcatctggc

SEQ ID NO: 73729 - DNA, 25 bp, Homo sapien
tctgtagccaggtaactcttagatc

SEQ ID NO: 73730 - DNA, 25 bp, Homo sapien
taactgttgtggcttgctgaatcaa

SEQ ID NO: 73731 - DNA, 25 bp, Homo sapien
attgatgtgattgaagtccctccgc

SEQ ID NO: 73732 - DNA, 25 bp, Homo sapien
tcctggataacaacgttgatgggga

SEQ ID NO: 73733 - DNA, 25 bp, Homo sapien
tttctgggcttgagatactgaacaa

SEQ ID NO: 73734 - DNA, 25 bp, Homo sapien
acaaatagtccgaacggtagccagt

SEQ ID NO: 73735 - DNA, 25 bp, Homo sapien
atcttgtaacggaagcccagtgtaa

SEQ ID NO: 73736 - DNA, 25 bp, Homo sapien
aaggctgagttctacattgatgtga

SEQ ID NO: 73737 - DNA, 25 bp, Homo sapien
agtccctccgcagggttcctctggg

SEQ ID NO: 73738 - DNA, 25 bp, Homo sapien
ccaccatttgtcaacccggagcctc

SEQ ID NO: 73739 - DNA, 25 bp, Homo sapien
tctgtagccaggtaactcttagatc

SEQ ID NO: 73740 - DNA, 25 bp, Homo sapien
aagtaggtcttaagtgtcatctggc

SEQ ID NO: 73741 - DNA, 25 bp, Homo sapien
tttctgggcttgagatactgaacaa

SEQ ID NO: 73742 - DNA, 25 bp, Homo sapien
attgatgtgattgaagtccctccgc

SEQ ID NO: 73743 - DNA, 25 bp, Homo sapien
tcctggataacaacgttgatgggga

SEQ ID NO: 73744 - DNA, 25 bp, Homo sapien
atcttgtaacggaagcccagtgtaa

SEQ ID NO: 73745 - DNA, 25 bp, Homo sapien
aaggctgagttctacattgatgtga

SEQ ID NO: 73746 - DNA, 25 bp, Homo sapien
aagtaggtcttaagtgtcatctggc

SEQ ID NO: 73747 - DNA, 25 bp, Homo sapien
acaaatagtccgaacggtagccagt

SEQ ID NO: 73748 - DNA, 25 bp, Homo sapien
taactgttgtggcttgctgaatcaa

SEQ ID NO: 73749 - DNA, 25 bp, Homo sapien
agtccctccgcagggttcctctggg

SEQ ID NO: 73750 - DNA, 25 bp, Homo sapien
tctgtagccaggtaactcttagatc

SEQ ID NO: 73751 - DNA, 25 bp, Homo sapien
ccaccatttgtcaacccggagcctc

SEQ ID NO: 73752 - DNA, 25 bp, Homo sapien
taactgttgtggcttgctgaatcaa

SEQ ID NO: 73753 - DNA, 25 bp, Homo sapien
attgatgtgattgaagtccctccgc

SEQ ID NO: 73754 - DNA, 25 bp, Homo sapien
tcctggataacaacgttgatgggga

SEQ ID NO: 73755 - DNA, 25 bp, Homo sapien
tttctgggcttgagatactgaacaa

SEQ ID NO: 73756 - DNA, 25 bp, Homo sapien
atcttgtaacggaagcccagtgtaa

SEQ ID NO: 73757 - DNA, 25 bp, Homo sapien
acaaatagtccgaacggtagccagt

SEQ ID NO: 73758 - DNA, 25 bp, Homo sapien
aaggctgagttctacattgatgtga

SEQ ID NO: 73759 - DNA, 25 bp, Homo sapien
agtccctccgcagggttcctctggg

SEQ ID NO: 73760 - DNA, 25 bp, Homo sapien
ccaccatttgtcaacccggagcctc

SEQ ID NO: 73761 - DNA, 25 bp, Homo sapien
tctgtagccaggtaactcttagatc

SEQ ID NO: 73762 - DNA, 25 bp, Homo sapien
aagtaggtcttaagtgtcatctggc

SEQ ID NO: 73763 - DNA, 25 bp, Homo sapien
taactgttgtggcttgctgaatcaa

SEQ ID NO: 73764 - DNA, 25 bp, Homo sapien
tctgtagccaggtaactcttagatc

SEQ ID NO: 73765 - DNA, 25 bp, Homo sapien
aagtaggtcttaagtgtcatctggc

SEQ ID NO: 73766 - DNA, 25 bp, Homo sapien
agtccctccgcagggttcctctggg

SEQ ID NO: 73767 - DNA, 25 bp, Homo sapien
attgatgtgattgaagtccctccgc

SEQ ID NO: 73768 - DNA, 25 bp, Homo sapien
aaggctgagttctacattgatgtga

SEQ ID NO: 73769 - DNA, 25 bp, Homo sapien
ccaccatttgtcaacccggagcctc

SEQ ID NO: 73770 - DNA, 25 bp, Homo sapien
acaaatagtccgaacggtagccagt

SEQ ID NO: 73771 - DNA, 25 bp, Homo sapien
atcttgtaacggaagcccagtgtaa

SEQ ID NO: 73772 - DNA, 25 bp, Homo sapien
tcctggataacaacgttgatgggga

SEQ ID NO: 73773 - DNA, 25 bp, Homo sapien
tttctgggcttgagatactgaacaa

SEQ ID NO: 73774 - DNA, 25 bp, Homo sapien
gccagatgacacttaagacctactt

SEQ ID NO: 73775 - DNA, 25 bp, Homo sapien
ttgttcagtatctcaagcccagaaa

SEQ ID NO: 73776 - DNA, 25 bp, Homo sapien
actggctaccgttcggactatttgt

SEQ ID NO: 73777 - DNA, 25 bp, Homo sapien
tcacatcaatgtagaactcagcctt

SEQ ID NO: 73778 - DNA, 25 bp, Homo sapien
ttgattcagcaagccacaacagtta

SEQ ID NO: 73779 - DNA, 25 bp, Homo sapien
cccagaggaaccctgcggagggact

SEQ ID NO: 73780 - DNA, 25 bp, Homo sapien
gatctaagagttacctggctacaga

SEQ ID NO: 73781 - DNA, 25 bp, Homo sapien
ttacactgggcttccgttacaagat

SEQ ID NO: 73782 - DNA, 25 bp, Homo sapien
gaggctccgggttgacaaatggtgg

SEQ ID NO: 73783 - DNA, 25 bp, Homo sapien
tccccatcaacgttgttatccagga

SEQ ID NO: 73784 - DNA, 25 bp, Homo sapien
gcggagggacttcaatcacatcaat

SEQ ID NO: 73785 - DNA, 25 bp, Homo sapien
taactgttgtggcttgctgaatcaa

SEQ ID NO: 73786 - DNA, 25 bp, Homo sapien
attgatgtgattgaagtccctccgc

SEQ ID NO: 73787 - DNA, 25 bp, Homo sapien
tcctggataacaacgttgatgggga

SEQ ID NO: 73788 - DNA, 25 bp, Homo sapien
tttctgggcttgagatactgaacaa

SEQ ID NO: 73789 - DNA, 25 bp, Homo sapien
atcttgtaacggaagcccagtgtaa

SEQ ID NO: 73790 - DNA, 25 bp, Homo sapien
acaaatagtccgaacggtagccagt

SEQ ID NO: 73791 - DNA, 25 bp, Homo sapien
aaggctgagttctacattgatgtga

SEQ ID NO: 73792 - DNA, 25 bp, Homo sapien
agtccctccgcagggttcctctggg

SEQ ID NO: 73793 - DNA, 25 bp, Homo sapien
ccaccatttgtcaacccggagcctc

SEQ ID NO: 73794 - DNA, 25 bp, Homo sapien
tctgtagccaggtaactcttagatc

SEQ ID NO: 73795 - DNA, 25 bp, Homo sapien
aagtaggtcttaagtgtcatctggc

SEQ ID NO: 73796 - DNA, 25 bp, Homo sapien
aagtaggtcttaagtgtcatctggc

SEQ ID NO: 73797 - DNA, 25 bp, Homo sapien
ccaccatttgtcaacccggagcctc

SEQ ID NO: 73798 - DNA, 25 bp, Homo sapien
aaggctgagttctacattgatgtga

SEQ ID NO: 73799 - DNA, 25 bp, Homo sapien
acaaatagtccgaacggtagccagt

SEQ ID NO: 73800 - DNA, 25 bp, Homo sapien
tctgtagccaggtaactcttagatc

SEQ ID NO: 73801 - DNA, 25 bp, Homo sapien
taactgttgtggcttgctgaatcaa

SEQ ID NO: 73802 - DNA, 25 bp, Homo sapien
agtccctccgcagggttcctctggg

SEQ ID NO: 73803 - DNA, 25 bp, Homo sapien
atcttgtaacggaagcccagtgtaa

SEQ ID NO: 73804 - DNA, 25 bp, Homo sapien
tttctgggcttgagatactgaacaa

SEQ ID NO: 73805 - DNA, 25 bp, Homo sapien
tcctggataacaacgttgatgggga

SEQ ID NO: 73806 - DNA, 25 bp, Homo sapien
attgatgtgattgaagtccctccgc

SEQ ID NO: 73807 - DNA, 25 bp, Homo sapien
taactgttgtggcttgctgaatcaa

SEQ ID NO: 73808 - DNA, 25 bp, Homo sapien
tctgtagccaggtaactcttagatc

SEQ ID NO: 73809 - DNA, 25 bp, Homo sapien
aagtaggtcttaagtgtcatctggc

SEQ ID NO: 73810 - DNA, 25 bp, Homo sapien
agtccctccgcagggttcctctggg

SEQ ID NO: 73811 - DNA, 25 bp, Homo sapien
attgatgtgattgaagtccctccgc

SEQ ID NO: 73812 - DNA, 25 bp, Homo sapien
aaggctgagttctacattgatgtga

SEQ ID NO: 73813 - DNA, 25 bp, Homo sapien
ccaccatttgtcaacccggagcctc

SEQ ID NO: 73814 - DNA, 25 bp, Homo sapien
acaaatagtccgaacggtagccagt

SEQ ID NO: 73815 - DNA, 25 bp, Homo sapien
atcttgtaacggaagcccagtgtaa

SEQ ID NO: 73816 - DNA, 25 bp, Homo sapien
tcctggataacaacgttgatgggga

SEQ ID NO: 73817 - DNA, 25 bp, Homo sapien
tttctgggcttgagatactgaacaa

SEQ ID NO: 73818 - DNA, 25 bp, Homo sapien
tctgtagccaggtaactcttagatc

SEQ ID NO: 73819 - DNA, 25 bp, Homo sapien
atcttgtaacggaagcccagtgtaa

SEQ ID NO: 73820 - DNA, 25 bp, Homo sapien
attgatgtgattgaagtccctccgc

SEQ ID NO: 73821 - DNA, 25 bp, Homo sapien
tttctgggcttgagatactgaacaa

SEQ ID NO: 73822 - DNA, 25 bp, Homo sapien
acaaatagtccgaacggtagccagt

SEQ ID NO: 73823 - DNA, 25 bp, Homo sapien
agtccctccgcagggttcctctggg

SEQ ID NO: 73824 - DNA, 25 bp, Homo sapien
ccaccatttgtcaacccggagcctc

SEQ ID NO: 73825 - DNA, 25 bp, Homo sapien
aaggctgagttctacattgatgtga

SEQ ID NO: 73826 - DNA, 25 bp, Homo sapien
aagtaggtcttaagtgtcatctggc

SEQ ID NO: 73827 - DNA, 25 bp, Homo sapien
tcctggataacaacgttgatgggga

SEQ ID NO: 73828 - DNA, 25 bp, Homo sapien
taactgttgtggcttgctgaatcaa

SEQ ID NO: 73829 - DNA, 25 bp, Homo sapien
taactgttgtggcttgctgaatcaa

SEQ ID NO: 73830 - DNA, 25 bp, Homo sapien
tctgtagccaggtaactcttagatc

SEQ ID NO: 73831 - DNA, 25 bp, Homo sapien
aagtaggtcttaagtgtcatctggc

SEQ ID NO: 73832 - DNA, 25 bp, Homo sapien
agtccctccgcagggttcctctggg

SEQ ID NO: 73833 - DNA, 25 bp, Homo sapien
attgatgtgattgaagtccctccgc

SEQ ID NO: 73834 - DNA, 25 bp, Homo sapien
aaggctgagttctacattgatgtga

SEQ ID NO: 73835 - DNA, 25 bp, Homo sapien
ccaccatttgtcaacccggagcctc

SEQ ID NO: 73836 - DNA, 25 bp, Homo sapien
acaaatagtccgaacggtagccagt

SEQ ID NO: 73837 - DNA, 25 bp, Homo sapien
atcttgtaacggaagcccagtgtaa

SEQ ID NO: 73838 - DNA, 25 bp, Homo sapien
tcctggataacaacgttgatgggga

SEQ ID NO: 73839 - DNA, 25 bp, Homo sapien
tttctgggcttgagatactgaacaa

SEQ ID NO: 73840 - DNA, 25 bp, Homo sapien
acaaatagtccgaacggtagccagt

SEQ ID NO: 73841 - DNA, 25 bp, Homo sapien
tttctgggcttgagatactgaacaa

SEQ ID NO: 73842 - DNA, 25 bp, Homo sapien
attgatgtgattgaagtccctccgc

SEQ ID NO: 73843 - DNA, 25 bp, Homo sapien
tctgtagccaggtaactcttagatc

SEQ ID NO: 73844 - DNA, 25 bp, Homo sapien
aaggctgagttctacattgatgtga

SEQ ID NO: 73845 - DNA, 25 bp, Homo sapien
taactgttgtggcttgctgaatcaa

SEQ ID NO: 73846 - DNA, 25 bp, Homo sapien
aagtaggtcttaagtgtcatctggc

SEQ ID NO: 73847 - DNA, 25 bp, Homo sapien
tcctggataacaacgttgatgggga

SEQ ID NO: 73848 - DNA, 25 bp, Homo sapien
atcttgtaacggaagcccagtgtaa

SEQ ID NO: 73849 - DNA, 25 bp, Homo sapien
agtccctccgcagggttcctctggg

SEQ ID NO: 73850 - DNA, 25 bp, Homo sapien
ccaccatttgtcaacccggagcctc

SEQ ID NO: 73851 - DNA, 25 bp, Homo sapien
agtccctccgcagggttcctctggg

SEQ ID NO: 73852 - DNA, 25 bp, Homo sapien
attgatgtgattgaagtccctccgc

SEQ ID NO: 73853 - DNA, 25 bp, Homo sapien
aaggctgagttctacattgatgtga

SEQ ID NO: 73854 - DNA, 25 bp, Homo sapien
ccaccatttgtcaacccggagcctc

SEQ ID NO: 73855 - DNA, 25 bp, Homo sapien
acaaatagtccgaacggtagccagt

SEQ ID NO: 73856 - DNA, 25 bp, Homo sapien
atcttgtaacggaagcccagtgtaa

SEQ ID NO: 73857 - DNA, 25 bp, Homo sapien
tcctggataacaacgttgatgggga

SEQ ID NO: 73858 - DNA, 25 bp, Homo sapien
tttctgggcttgagatactgaacaa

SEQ ID NO: 73859 - DNA, 25 bp, Homo sapien
taactgttgtggcttgctgaatcaa

SEQ ID NO: 73860 - DNA, 25 bp, Homo sapien
tctgtagccaggtaactcttagatc

SEQ ID NO: 73861 - DNA, 25 bp, Homo sapien
aagtaggtcttaagtgtcatctggc

SEQ ID NO: 73862 - DNA, 25 bp, Homo sapien
taactgttgtggcttgctgaatcaa

SEQ ID NO: 73863 - DNA, 25 bp, Homo sapien
tctgtagccaggtaactcttagatc

SEQ ID NO: 73864 - DNA, 25 bp, Homo sapien
aagtaggtcttaagtgtcatctggc

SEQ ID NO: 73865 - DNA, 25 bp, Homo sapien
agtccctccgcagggttcctctggg

SEQ ID NO: 73866 - DNA, 25 bp, Homo sapien
attgatgtgattgaagtccctccgc

SEQ ID NO: 73867 - DNA, 25 bp, Homo sapien
aaggctgagttctacattgatgtga

SEQ ID NO: 73868 - DNA, 25 bp, Homo sapien
ccaccatttgtcaacccggagcctc

SEQ ID NO: 73869 - DNA, 25 bp, Homo sapien
acaaatagtccgaacggtagccagt

SEQ ID NO: 73870 - DNA, 25 bp, Homo sapien
atcttgtaacggaagcccagtgtaa

SEQ ID NO: 73871 - DNA, 25 bp, Homo sapien
tcctggataacaacgttgatgggga

SEQ ID NO: 73872 - DNA, 25 bp, Homo sapien
tttctgggcttgagatactgaacaa

SEQ ID NO: 73873 - DNA, 25 bp, Homo sapien
attgatgtgattgaagtccctccgc

SEQ ID NO: 73874 - DNA, 25 bp, Homo sapien
aaggctgagttctacattgatgtga

SEQ ID NO: 73875 - DNA, 25 bp, Homo sapien
tcctggataacaacgttgatgggga

SEQ ID NO: 73876 - DNA, 25 bp, Homo sapien
ccaccatttgtcaacccggagcctc

SEQ ID NO: 73877 - DNA, 25 bp, Homo sapien
atcttgtaacggaagcccagtgtaa

SEQ ID NO: 73878 - DNA, 25 bp, Homo sapien
tctgtagccaggtaactcttagatc

SEQ ID NO: 73879 - DNA, 25 bp, Homo sapien
tttctgggcttgagatactgaacaa

SEQ ID NO: 73880 - DNA, 25 bp, Homo sapien
agtccctccgcagggttcctctggg

SEQ ID NO: 73881 - DNA, 25 bp, Homo sapien
taactgttgtggcttgctgaatcaa

SEQ ID NO: 73882 - DNA, 25 bp, Homo sapien
acaaatagtccgaacggtagccagt

SEQ ID NO: 73883 - DNA, 25 bp, Homo sapien
aagtaggtcttaagtgtcatctggc

SEQ ID NO: 73884 - DNA, 25 bp, Homo sapien
taactgttgtggcttgctgaatcaa

SEQ ID NO: 73885 - DNA, 25 bp, Homo sapien
tctgtagccaggtaactcttagatc

SEQ ID NO: 73886 - DNA, 25 bp, Homo sapien
aagtaggtcttaagtgtcatctggc

SEQ ID NO: 73887 - DNA, 25 bp, Homo sapien
agtccctccgcagggttcctctggg

SEQ ID NO: 73888 - DNA, 25 bp, Homo sapien
attgatgtgattgaagtccctccgc

SEQ ID NO: 73889 - DNA, 25 bp, Homo sapien
aaggctgagttctacattgatgtga

SEQ ID NO: 73890 - DNA, 25 bp, Homo sapien
ccaccatttgtcaacccggagcctc

SEQ ID NO: 73891 - DNA, 25 bp, Homo sapien
acaaatagtccgaacggtagccagt

SEQ ID NO: 73892 - DNA, 25 bp, Homo sapien
atcttgtaacggaagcccagtgtaa

SEQ ID NO: 73893 - DNA, 25 bp, Homo sapien
tcctggataacaacgttgatgggga

SEQ ID NO: 73894 - DNA, 25 bp, Homo sapien
tttctgggcttgagatactgaacaa

SEQ ID NO: 73895 - DNA, 25 bp, Homo sapien
tttctgggcttgagatactgaacaa

SEQ ID NO: 73896 - DNA, 25 bp, Homo sapien
tcctggataacaacgttgatgggga

SEQ ID NO: 73897 - DNA, 25 bp, Homo sapien
acaaatagtccgaacggtagccagt

SEQ ID NO: 73898 - DNA, 25 bp, Homo sapien
atcttgtaacggaagcccagtgtaa

SEQ ID NO: 73899 - DNA, 25 bp, Homo sapien
agtccctccgcagggttcctctggg

SEQ ID NO: 73900 - DNA, 25 bp, Homo sapien
attgatgtgattgaagtccctccgc

SEQ ID NO: 73901 - DNA, 25 bp, Homo sapien
aagtaggtcttaagtgtcatctggc

SEQ ID NO: 73902 - DNA, 25 bp, Homo sapien
tctgtagccaggtaactcttagatc

SEQ ID NO: 73903 - DNA, 25 bp, Homo sapien
taactgttgtggcttgctgaatcaa

SEQ ID NO: 73904 - DNA, 25 bp, Homo sapien
ccaccatttgtcaacccggagcctc

SEQ ID NO: 73905 - DNA, 25 bp, Homo sapien
aaggctgagttctacattgatgtga

SEQ ID NO: 73906 - DNA, 25 bp, Homo sapien
taactgttgtggcttgctgaatcaa

SEQ ID NO: 73907 - DNA, 25 bp, Homo sapien
tctgtagccaggtaactcttagatc

SEQ ID NO: 73908 - DNA, 25 bp, Homo sapien
aagtaggtcttaagtgtcatctggc

SEQ ID NO: 73909 - DNA, 25 bp, Homo sapien
agtccctccgcagggttcctctggg

SEQ ID NO: 73910 - DNA, 25 bp, Homo sapien
attgatgtgattgaagtccctccgc

SEQ ID NO: 73911 - DNA, 25 bp, Homo sapien
aaggctgagttctacattgatgtga

SEQ ID NO: 73912 - DNA, 25 bp, Homo sapien
ccaccatttgtcaacccggagcctc

SEQ ID NO: 73913 - DNA, 25 bp, Homo sapien
acaaatagtccgaacggtagccagt

SEQ ID NO: 73914 - DNA, 25 bp, Homo sapien
atcttgtaacggaagcccagtgtaa

SEQ ID NO: 73915 - DNA, 25 bp, Homo sapien
tcctggataacaacgttgatgggga

SEQ ID NO: 73916 - DNA, 25 bp, Homo sapien
tttctgggcttgagatactgaacaa

SEQ ID NO: 73917 - DNA, 25 bp, Homo sapien
acaaatagtccgaacggtagccagt

SEQ ID NO: 73918 - DNA, 25 bp, Homo sapien
atcttgtaacggaagcccagtgtaa

SEQ ID NO: 73919 - DNA, 25 bp, Homo sapien
tttctgggcttgagatactgaacaa

SEQ ID NO: 73920 - DNA, 25 bp, Homo sapien
tctgtagccaggtaactcttagatc

SEQ ID NO: 73921 - DNA, 25 bp, Homo sapien
agtccctccgcagggttcctctggg

SEQ ID NO: 73922 - DNA, 25 bp, Homo sapien
ccaccatttgtcaacccggagcctc

SEQ ID NO: 73923 - DNA, 25 bp, Homo sapien
aagtaggtcttaagtgtcatctggc

SEQ ID NO: 73924 - DNA, 25 bp, Homo sapien
tcctggataacaacgttgatgggga

SEQ ID NO: 73925 - DNA, 25 bp, Homo sapien
aaggctgagttctacattgatgtga

SEQ ID NO: 73926 - DNA, 25 bp, Homo sapien
taactgttgtggcttgctgaatcaa

SEQ ID NO: 73927 - DNA, 25 bp, Homo sapien
attgatgtgattgaagtccctccgc

SEQ ID NO: 73928 - DNA, 25 bp, Homo sapien
taactgttgtggcttgctgaatcaa

SEQ ID NO: 73929 - DNA, 25 bp, Homo sapien
tctgtagccaggtaactcttagatc

SEQ ID NO: 73930 - DNA, 25 bp, Homo sapien
aagtaggtcttaagtgtcatctggc

SEQ ID NO: 73931 - DNA, 25 bp, Homo sapien
agtccctccgcagggttcctctggg

SEQ ID NO: 73932 - DNA, 25 bp, Homo sapien
attgatgtgattgaagtccctccgc

SEQ ID NO: 73933 - DNA, 25 bp, Homo sapien
aaggctgagttctacattgatgtga

SEQ ID NO: 73934 - DNA, 25 bp, Homo sapien
ccaccatttgtcaacccggagcctc

SEQ ID NO: 73935 - DNA, 25 bp, Homo sapien
acaaatagtccgaacggtagccagt

SEQ ID NO: 73936 - DNA, 25 bp, Homo sapien
atcttgtaacggaagcccagtgtaa

SEQ ID NO: 73937 - DNA, 25 bp, Homo sapien
tcctggataacaacgttgatgggga

SEQ ID NO: 73938 - DNA, 25 bp, Homo sapien
tttctgggcttgagatactgaacaa

SEQ ID NO: 73939 - DNA, 25 bp, Homo sapien
agtccctccgcagggttcctctggg

SEQ ID NO: 73940 - DNA, 25 bp, Homo sapien
tcctggataacaacgttgatgggga

SEQ ID NO: 73941 - DNA, 25 bp, Homo sapien
aaggctgagttctacattgatgtga

SEQ ID NO: 73942 - DNA, 25 bp, Homo sapien
tctgtagccaggtaactcttagatc

SEQ ID NO: 73943 - DNA, 25 bp, Homo sapien
taactgttgtggcttgctgaatcaa

SEQ ID NO: 73944 - DNA, 25 bp, Homo sapien
attgatgtgattgaagtccctccgc

SEQ ID NO: 73945 - DNA, 25 bp, Homo sapien
tttctgggcttgagatactgaacaa

SEQ ID NO: 73946 - DNA, 25 bp, Homo sapien
acaaatagtccgaacggtagccagt

SEQ ID NO: 73947 - DNA, 25 bp, Homo sapien
ccaccatttgtcaacccggagcctc

SEQ ID NO: 73948 - DNA, 25 bp, Homo sapien
aagtaggtcttaagtgtcatctggc

SEQ ID NO: 73949 - DNA, 25 bp, Homo sapien
atcttgtaacggaagcccagtgtaa

SEQ ID NO: 73950 - DNA, 25 bp, Homo sapien
taactgttgtggcttgctgaatcaa

SEQ ID NO: 73951 - DNA, 25 bp, Homo sapien
tctgtagccaggtaactcttagatc

SEQ ID NO: 73952 - DNA, 25 bp, Homo sapien
aagtaggtcttaagtgtcatctggc

SEQ ID NO: 73953 - DNA, 25 bp, Homo sapien
agtccctccgcagggttcctctggg

SEQ ID NO: 73954 - DNA, 25 bp, Homo sapien
attgatgtgattgaagtccctccgc

SEQ ID NO: 73955 - DNA, 25 bp, Homo sapien
aaggctgagttctacattgatgtga

SEQ ID NO: 73956 - DNA, 25 bp, Homo sapien
ccaccatttgtcaacccggagcctc

SEQ ID NO: 73957 - DNA, 25 bp, Homo sapien
acaaatagtccgaacggtagccagt

SEQ ID NO: 73958 - DNA, 25 bp, Homo sapien
atcttgtaacggaagcccagtgtaa

SEQ ID NO: 73959 - DNA, 25 bp, Homo sapien
tcctggataacaacgttgatgggga

SEQ ID NO: 73960 - DNA, 25 bp, Homo sapien
tttctgggcttgagatactgaacaa

SEQ ID NO: 73961 - DNA, 25 bp, Homo sapien
taactgttgtggcttgctgaatcaa

SEQ ID NO: 73962 - DNA, 25 bp, Homo sapien
attgatgtgattgaagtccctccgc

SEQ ID NO: 73963 - DNA, 25 bp, Homo sapien
tcctggataacaacgttgatgggga

SEQ ID NO: 73964 - DNA, 25 bp, Homo sapien
tttctgggcttgagatactgaacaa

SEQ ID NO: 73965 - DNA, 25 bp, Homo sapien
agtccctccgcagggttcctctggg

SEQ ID NO: 73966 - DNA, 25 bp, Homo sapien
acaaatagtccgaacggtagccagt

SEQ ID NO: 73967 - DNA, 25 bp, Homo sapien
aagtaggtcttaagtgtcatctggc

SEQ ID NO: 73968 - DNA, 25 bp, Homo sapien
atcttgtaacggaagcccagtgtaa

SEQ ID NO: 73969 - DNA, 25 bp, Homo sapien
ccaccatttgtcaacccggagcctc

SEQ ID NO: 73970 - DNA, 25 bp, Homo sapien
tctgtagccaggtaactcttagatc

SEQ ID NO: 73971 - DNA, 25 bp, Homo sapien
aaggctgagttctacattgatgtga

SEQ ID NO: 73972 - DNA, 25 bp, Homo sapien
taactgttgtggcttgctgaatcaa

SEQ ID NO: 73973 - DNA, 25 bp, Homo sapien
atcttgtaacggaagcccagtgtaa

SEQ ID NO: 73974 - DNA, 25 bp, Homo sapien
aaggctgagttctacattgatgtga

SEQ ID NO: 73975 - DNA, 25 bp, Homo sapien
aagtaggtcttaagtgtcatctggc

SEQ ID NO: 73976 - DNA, 25 bp, Homo sapien
tctgtagccaggtaactcttagatc

SEQ ID NO: 73977 - DNA, 25 bp, Homo sapien
attgatgtgattgaagtccctccgc

SEQ ID NO: 73978 - DNA, 25 bp, Homo sapien
agtccctccgcagggttcctctggg

SEQ ID NO: 73979 - DNA, 25 bp, Homo sapien
ccaccatttgtcaacccggagcctc

SEQ ID NO: 73980 - DNA, 25 bp, Homo sapien
acaaatagtccgaacggtagccagt

SEQ ID NO: 73981 - DNA, 25 bp, Homo sapien
tcctggataacaacgttgatgggga

SEQ ID NO: 73982 - DNA, 25 bp, Homo sapien
tttctgggcttgagatactgaacaa

SEQ ID NO: 73983 - DNA, 25 bp, Homo sapien
taactgttgtggcttgctgaatcaa

SEQ ID NO: 73984 - DNA, 25 bp, Homo sapien
tctgtagccaggtaactcttagatc

SEQ ID NO: 73985 - DNA, 25 bp, Homo sapien
aagtaggtcttaagtgtcatctggc

SEQ ID NO: 73986 - DNA, 25 bp, Homo sapien
agtccctccgcagggttcctctggg

SEQ ID NO: 73987 - DNA, 25 bp, Homo sapien
attgatgtgattgaagtccctccgc

SEQ ID NO: 73988 - DNA, 25 bp, Homo sapien
aaggctgagttctacattgatgtga

SEQ ID NO: 73989 - DNA, 25 bp, Homo sapien
ccaccatttgtcaacccggagcctc

SEQ ID NO: 73990 - DNA, 25 bp, Homo sapien
acaaatagtccgaacggtagccagt

SEQ ID NO: 73991 - DNA, 25 bp, Homo sapien
atcttgtaacggaagcccagtgtaa

SEQ ID NO: 73992 - DNA, 25 bp, Homo sapien
tcctggataacaacgttgatgggga

SEQ ID NO: 73993 - DNA, 25 bp, Homo sapien
tttctgggcttgagatactgaacaa

SEQ ID NO: 73994 - DNA, 25 bp, Homo sapien
agtccctccgcagggttcctctggg

SEQ ID NO: 73995 - DNA, 25 bp, Homo sapien
aaggctgagttctacattgatgtga

SEQ ID NO: 73996 - DNA, 25 bp, Homo sapien
ccaccatttgtcaacccggagcctc

SEQ ID NO: 73997 - DNA, 25 bp, Homo sapien
acaaatagtccgaacggtagccagt

SEQ ID NO: 73998 - DNA, 25 bp, Homo sapien
atcttgtaacggaagcccagtgtaa

SEQ ID NO: 73999 - DNA, 25 bp, Homo sapien
tctgtagccaggtaactcttagatc

SEQ ID NO: 74000 - DNA, 25 bp, Homo sapien
aagtaggtcttaagtgtcatctggc

SEQ ID NO: 74001 - DNA, 25 bp, Homo sapien
taactgttgtggcttgctgaatcaa

SEQ ID NO: 74002 - DNA, 25 bp, Homo sapien
tttctgggcttgagatactgaacaa

SEQ ID NO: 74003 - DNA, 25 bp, Homo sapien
attgatgtgattgaagtccctccgc

SEQ ID NO: 74004 - DNA, 25 bp, Homo sapien
tcctggataacaacgttgatgggga

SEQ ID NO: 74005 - DNA, 25 bp, Homo sapien
agtccctccgcagggttcctctggg

SEQ ID NO: 74006 - DNA, 25 bp, Homo sapien
attgatgtgattgaagtccctccgc

SEQ ID NO: 74007 - DNA, 25 bp, Homo sapien
aaggctgagttctacattgatgtga

SEQ ID NO: 74008 - DNA, 25 bp, Homo sapien
ccaccatttgtcaacccggagcctc

SEQ ID NO: 74009 - DNA, 25 bp, Homo sapien
acaaatagtccgaacggtagccagt

SEQ ID NO: 74010 - DNA, 25 bp, Homo sapien
atcttgtaacggaagcccagtgtaa

SEQ ID NO: 74011 - DNA, 25 bp, Homo sapien
tcctggataacaacgttgatgggga

SEQ ID NO: 74012 - DNA, 25 bp, Homo sapien
tttctgggcttgagatactgaacaa

SEQ ID NO: 74013 - DNA, 25 bp, Homo sapien
taactgttgtggcttgctgaatcaa

SEQ ID NO: 74014 - DNA, 25 bp, Homo sapien
tctgtagccaggtaactcttagatc

SEQ ID NO: 74015 - DNA, 25 bp, Homo sapien
aagtaggtcttaagtgtcatctggc

SEQ ID NO: 74016 - DNA, 25 bp, Homo sapien
ccaccatttgtcaacccggagcctc

SEQ ID NO: 74017 - DNA, 25 bp, Homo sapien
aaggctgagttctacattgatgtga

SEQ ID NO: 74018 - DNA, 25 bp, Homo sapien
taactgttgtggcttgctgaatcaa

SEQ ID NO: 74019 - DNA, 25 bp, Homo sapien
acaaatagtccgaacggtagccagt

SEQ ID NO: 74020 - DNA, 25 bp, Homo sapien
tctgtagccaggtaactcttagatc

SEQ ID NO: 74021 - DNA, 25 bp, Homo sapien
attgatgtgattgaagtccctccgc

SEQ ID NO: 74022 - DNA, 25 bp, Homo sapien
agtccctccgcagggttcctctggg

SEQ ID NO: 74023 - DNA, 25 bp, Homo sapien
atcttgtaacggaagcccagtgtaa

SEQ ID NO: 74024 - DNA, 25 bp, Homo sapien
tcctggataacaacgttgatgggga

SEQ ID NO: 74025 - DNA, 25 bp, Homo sapien
aagtaggtcttaagtgtcatctggc

SEQ ID NO: 74026 - DNA, 25 bp, Homo sapien
tttctgggcttgagatactgaacaa

SEQ ID NO: 74027 - DNA, 25 bp, Homo sapien
taactgttgtggcttgctgaatcaa

SEQ ID NO: 74028 - DNA, 25 bp, Homo sapien
tctgtagccaggtaactcttagatc

SEQ ID NO: 74029 - DNA, 25 bp, Homo sapien
aagtaggtcttaagtgtcatctggc

SEQ ID NO: 74030 - DNA, 25 bp, Homo sapien
agtccctccgcagggttcctctggg

SEQ ID NO: 74031 - DNA, 25 bp, Homo sapien
attgatgtgattgaagtccctccgc

SEQ ID NO: 74032 - DNA, 25 bp, Homo sapien
aaggctgagttctacattgatgtga

SEQ ID NO: 74033 - DNA, 25 bp, Homo sapien
ccaccatttgtcaacccggagcctc

SEQ ID NO: 74034 - DNA, 25 bp, Homo sapien
acaaatagtccgaacggtagccagt

SEQ ID NO: 74035 - DNA, 25 bp, Homo sapien
atcttgtaacggaagcccagtgtaa

SEQ ID NO: 74036 - DNA, 25 bp, Homo sapien
tcctggataacaacgttgatgggga

SEQ ID NO: 74037 - DNA, 25 bp, Homo sapien
tttctgggcttgagatactgaacaa

SEQ ID NO: 74038 - DNA, 25 bp, Homo sapien
acaaatagtccgaacggtagccagt

SEQ ID NO: 74039 - DNA, 25 bp, Homo sapien
tttctgggcttgagatactgaacaa

SEQ ID NO: 74040 - DNA, 25 bp, Homo sapien
aaggctgagttctacattgatgtga

SEQ ID NO: 74041 - DNA, 25 bp, Homo sapien
atcttgtaacggaagcccagtgtaa

SEQ ID NO: 74042 - DNA, 25 bp, Homo sapien
aagtaggtcttaagtgtcatctggc

SEQ ID NO: 74043 - DNA, 25 bp, Homo sapien
tctgtagccaggtaactcttagatc

SEQ ID NO: 74044 - DNA, 25 bp, Homo sapien
taactgttgtggcttgctgaatcaa

SEQ ID NO: 74045 - DNA, 25 bp, Homo sapien
ccaccatttgtcaacccggagcctc

SEQ ID NO: 74046 - DNA, 25 bp, Homo sapien
agtccctccgcagggttcctctggg

SEQ ID NO: 74047 - DNA, 25 bp, Homo sapien
attgatgtgattgaagtccctccgc

SEQ ID NO: 74048 - DNA, 25 bp, Homo sapien
tcctggataacaacgttgatgggga

SEQ ID NO: 74049 - DNA, 25 bp, Homo sapien
taactgttgtggcttgctgaatcaa

SEQ ID NO: 74050 - DNA, 25 bp, Homo sapien
tctgtagccaggtaactcttagatc

SEQ ID NO: 74051 - DNA, 25 bp, Homo sapien
aagtaggtcttaagtgtcatctggc

SEQ ID NO: 74052 - DNA, 25 bp, Homo sapien
agtccctccgcagggttcctctggg

SEQ ID NO: 74053 - DNA, 25 bp, Homo sapien
attgatgtgattgaagtccctccgc

SEQ ID NO: 74054 - DNA, 25 bp, Homo sapien
aaggctgagttctacattgatgtga

SEQ ID NO: 74055 - DNA, 25 bp, Homo sapien
ccaccatttgtcaacccggagcctc

SEQ ID NO: 74056 - DNA, 25 bp, Homo sapien
acaaatagtccgaacggtagccagt

SEQ ID NO: 74057 - DNA, 25 bp, Homo sapien
atcttgtaacggaagcccagtgtaa

SEQ ID NO: 74058 - DNA, 25 bp, Homo sapien
tcctggataacaacgttgatgggga

SEQ ID NO: 74059 - DNA, 25 bp, Homo sapien
tttctgggcttgagatactgaacaa

SEQ ID NO: 74060 - DNA, 25 bp, Homo sapien
acaaatagtccgaacggtagccagt

SEQ ID NO: 74061 - DNA, 25 bp, Homo sapien
atcttgtaacggaagcccagtgtaa

SEQ ID NO: 74062 - DNA, 25 bp, Homo sapien
ccaccatttgtcaacccggagcctc

SEQ ID NO: 74063 - DNA, 25 bp, Homo sapien
aagtaggtcttaagtgtcatctggc

SEQ ID NO: 74064 - DNA, 25 bp, Homo sapien
agtccctccgcagggttcctctggg

SEQ ID NO: 74065 - DNA, 25 bp, Homo sapien
tttctgggcttgagatactgaacaa

SEQ ID NO: 74066 - DNA, 25 bp, Homo sapien
taactgttgtggcttgctgaatcaa

SEQ ID NO: 74067 - DNA, 25 bp, Homo sapien
tcctggataacaacgttgatgggga

SEQ ID NO: 74068 - DNA, 25 bp, Homo sapien
tctgtagccaggtaactcttagatc

SEQ ID NO: 74069 - DNA, 25 bp, Homo sapien
aaggctgagttctacattgatgtga

SEQ ID NO: 74070 - DNA, 25 bp, Homo sapien
attgatgtgattgaagtccctccgc

SEQ ID NO: 74071 - DNA, 25 bp, Homo sapien
taactgttgtggcttgctgaatcaa

SEQ ID NO: 74072 - DNA, 25 bp, Homo sapien
tctgtagccaggtaactcttagatc

SEQ ID NO: 74073 - DNA, 25 bp, Homo sapien
aagtaggtcttaagtgtcatctggc

SEQ ID NO: 74074 - DNA, 25 bp, Homo sapien
agtccctccgcagggttcctctggg

SEQ ID NO: 74075 - DNA, 25 bp, Homo sapien
attgatgtgattgaagtccctccgc

SEQ ID NO: 74076 - DNA, 25 bp, Homo sapien
aaggctgagttctacattgatgtga

SEQ ID NO: 74077 - DNA, 25 bp, Homo sapien
ccaccatttgtcaacccggagcctc

SEQ ID NO: 74078 - DNA, 25 bp, Homo sapien
acaaatagtccgaacggtagccagt

SEQ ID NO: 74079 - DNA, 25 bp, Homo sapien
atcttgtaacggaagcccagtgtaa

SEQ ID NO: 74080 - DNA, 25 bp, Homo sapien
tcctggataacaacgttgatgggga

SEQ ID NO: 74081 - DNA, 25 bp, Homo sapien
tttctgggcttgagatactgaacaa

SEQ ID NO: 74082 - DNA, 25 bp, Homo sapien
agtccctccgcagggttcctctggg

SEQ ID NO: 74083 - DNA, 25 bp, Homo sapien
aaggctgagttctacattgatgtga

SEQ ID NO: 74084 - DNA, 25 bp, Homo sapien
attgatgtgattgaagtccctccgc

SEQ ID NO: 74085 - DNA, 25 bp, Homo sapien
tctgtagccaggtaactcttagatc

SEQ ID NO: 74086 - DNA, 25 bp, Homo sapien
tttctgggcttgagatactgaacaa

SEQ ID NO: 74087 - DNA, 25 bp, Homo sapien
tcctggataacaacgttgatgggga

SEQ ID NO: 74088 - DNA, 25 bp, Homo sapien
ccaccatttgtcaacccggagcctc

SEQ ID NO: 74089 - DNA, 25 bp, Homo sapien
aagtaggtcttaagtgtcatctggc

SEQ ID NO: 74090 - DNA, 25 bp, Homo sapien
atcttgtaacggaagcccagtgtaa

SEQ ID NO: 74091 - DNA, 25 bp, Homo sapien
acaaatagtccgaacggtagccagt

SEQ ID NO: 74092 - DNA, 25 bp, Homo sapien
taactgttgtggcttgctgaatcaa

SEQ ID NO: 74093 - DNA, 25 bp, Homo sapien
taactgttgtggcttgctgaatcaa

SEQ ID NO: 74094 - DNA, 25 bp, Homo sapien
tctgtagccaggtaactcttagatc

SEQ ID NO: 74095 - DNA, 25 bp, Homo sapien
aagtaggtcttaagtgtcatctggc

SEQ ID NO: 74096 - DNA, 25 bp, Homo sapien
agtccctccgcagggttcctctggg

SEQ ID NO: 74097 - DNA, 25 bp, Homo sapien
attgatgtgattgaagtccctccgc

SEQ ID NO: 74098 - DNA, 25 bp, Homo sapien
aaggctgagttctacattgatgtga

SEQ ID NO: 74099 - DNA, 25 bp, Homo sapien
ccaccatttgtcaacccggagcctc

SEQ ID NO: 74100 - DNA, 25 bp, Homo sapien
acaaatagtccgaacggtagccagt

SEQ ID NO: 74101 - DNA, 25 bp, Homo sapien
atcttgtaacggaagcccagtgtaa

SEQ ID NO: 74102 - DNA, 25 bp, Homo sapien
tcctggataacaacgttgatgggga

SEQ ID NO: 74103 - DNA, 25 bp, Homo sapien
tttctgggcttgagatactgaacaa

SEQ ID NO: 74104 - DNA, 25 bp, Homo sapien
taactgttgtggcttgctgaatcaa

SEQ ID NO: 74105 - DNA, 25 bp, Homo sapien
tctgtagccaggtaactcttagatc

SEQ ID NO: 74106 - DNA, 25 bp, Homo sapien
aagtaggtcttaagtgtcatctggc

SEQ ID NO: 74107 - DNA, 25 bp, Homo sapien
agtccctccgcagggttcctctggg

SEQ ID NO: 74108 - DNA, 25 bp, Homo sapien
attgatgtgattgaagtccctccgc

SEQ ID NO: 74109 - DNA, 25 bp, Homo sapien
aaggctgagttctacattgatgtga

SEQ ID NO: 74110 - DNA, 25 bp, Homo sapien
ccaccatttgtcaacccggagcctc

SEQ ID NO: 74111 - DNA, 25 bp, Homo sapien
acaaatagtccgaacggtagccagt

SEQ ID NO: 74112 - DNA, 25 bp, Homo sapien
atcttgtaacggaagcccagtgtaa

SEQ ID NO: 74113 - DNA, 25 bp, Homo sapien
tcctggataacaacgttgatgggga

SEQ ID NO: 74114 - DNA, 25 bp, Homo sapien
tttctgggcttgagatactgaacaa

SEQ ID NO: 74115 - DNA, 25 bp, Homo sapien
acaaatagtccgaacggtagccagt

SEQ ID NO: 74116 - DNA, 25 bp, Homo sapien
agtccctccgcagggttcctctggg

SEQ ID NO: 74117 - DNA, 25 bp, Homo sapien
aagtaggtcttaagtgtcatctggc

SEQ ID NO: 74118 - DNA, 25 bp, Homo sapien
tctgtagccaggtaactcttagatc

SEQ ID NO: 74119 - DNA, 25 bp, Homo sapien
taactgttgtggcttgctgaatcaa

SEQ ID NO: 74120 - DNA, 25 bp, Homo sapien
attgatgtgattgaagtccctccgc

SEQ ID NO: 74121 - DNA, 25 bp, Homo sapien
tcctggataacaacgttgatgggga

SEQ ID NO: 74122 - DNA, 25 bp, Homo sapien
aaggctgagttctacattgatgtga

SEQ ID NO: 74123 - DNA, 25 bp, Homo sapien
ccaccatttgtcaacccggagcctc

SEQ ID NO: 74124 - DNA, 25 bp, Homo sapien
tttctgggcttgagatactgaacaa

SEQ ID NO: 74125 - DNA, 25 bp, Homo sapien
atcttgtaacggaagcccagtgtaa

SEQ ID NO: 74126 - DNA, 25 bp, Homo sapien
taactgttgtggcttgctgaatcaa

SEQ ID NO: 74127 - DNA, 25 bp, Homo sapien
tctgtagccaggtaactcttagatc

SEQ ID NO: 74128 - DNA, 25 bp, Homo sapien
aagtaggtcttaagtgtcatctggc

SEQ ID NO: 74129 - DNA, 25 bp, Homo sapien
agtccctccgcagggttcctctggg

SEQ ID NO: 74130 - DNA, 25 bp, Homo sapien
attgatgtgattgaagtccctccgc

SEQ ID NO: 74131 - DNA, 25 bp, Homo sapien
aaggctgagttctacattgatgtga

SEQ ID NO: 74132 - DNA, 25 bp, Homo sapien
ccaccatttgtcaacccggagcctc

SEQ ID NO: 74133 - DNA, 25 bp, Homo sapien
acaaatagtccgaacggtagccagt

SEQ ID NO: 74134 - DNA, 25 bp, Homo sapien
atcttgtaacggaagcccagtgtaa

SEQ ID NO: 74135 - DNA, 25 bp, Homo sapien
tcctggataacaacgttgatgggga

SEQ ID NO: 74136 - DNA, 25 bp, Homo sapien
tttctgggcttgagatactgaacaa

SEQ ID NO: 74137 - DNA, 25 bp, Homo sapien
ccaccatttgtcaacccggagcctc

SEQ ID NO: 74138 - DNA, 25 bp, Homo sapien
tcctggataacaacgttgatgggga

SEQ ID NO: 74139 - DNA, 25 bp, Homo sapien
atcttgtaacggaagcccagtgtaa

SEQ ID NO: 74140 - DNA, 25 bp, Homo sapien
tctgtagccaggtaactcttagatc

SEQ ID NO: 74141 - DNA, 25 bp, Homo sapien
attgatgtgattgaagtccctccgc

SEQ ID NO: 74142 - DNA, 25 bp, Homo sapien
agtccctccgcagggttcctctggg

SEQ ID NO: 74143 - DNA, 25 bp, Homo sapien
acaaatagtccgaacggtagccagt

SEQ ID NO: 74144 - DNA, 25 bp, Homo sapien
aagtaggtcttaagtgtcatctggc

SEQ ID NO: 74145 - DNA, 25 bp, Homo sapien
tttctgggcttgagatactgaacaa

SEQ ID NO: 74146 - DNA, 25 bp, Homo sapien
aaggctgagttctacattgatgtga

SEQ ID NO: 74147 - DNA, 25 bp, Homo sapien
taactgttgtggcttgctgaatcaa

SEQ ID NO: 74148 - DNA, 25 bp, Homo sapien
taactgttgtggcttgctgaatcaa

SEQ ID NO: 74149 - DNA, 25 bp, Homo sapien
tctgtagccaggtaactcttagatc

SEQ ID NO: 74150 - DNA, 25 bp, Homo sapien
aagtaggtcttaagtgtcatctggc

SEQ ID NO: 74151 - DNA, 25 bp, Homo sapien
agtccctccgcagggttcctctggg

SEQ ID NO: 74152 - DNA, 25 bp, Homo sapien
attgatgtgattgaagtccctccgc

SEQ ID NO: 74153 - DNA, 25 bp, Homo sapien
aaggctgagttctacattgatgtga

SEQ ID NO: 74154 - DNA, 25 bp, Homo sapien
ccaccatttgtcaacccggagcctc

SEQ ID NO: 74155 - DNA, 25 bp, Homo sapien
acaaatagtccgaacggtagccagt

SEQ ID NO: 74156 - DNA, 25 bp, Homo sapien
atcttgtaacggaagcccagtgtaa

SEQ ID NO: 74157 - DNA, 25 bp, Homo sapien
tcctggataacaacgttgatgggga

SEQ ID NO: 74158 - DNA, 25 bp, Homo sapien
tttctgggcttgagatactgaacaa

SEQ ID NO: 74159 - DNA, 25 bp, Homo sapien
taactgttgtggcttgctgaatcaa

SEQ ID NO: 74160 - DNA, 25 bp, Homo sapien
aagtaggtcttaagtgtcatctggc

SEQ ID NO: 74161 - DNA, 25 bp, Homo sapien
tctgtagccaggtaactcttagatc

SEQ ID NO: 74162 - DNA, 25 bp, Homo sapien
attgatgtgattgaagtccctccgc

SEQ ID NO: 74163 - DNA, 25 bp, Homo sapien
tcctggataacaacgttgatgggga

SEQ ID NO: 74164 - DNA, 25 bp, Homo sapien
atcttgtaacggaagcccagtgtaa

SEQ ID NO: 74165 - DNA, 25 bp, Homo sapien
tttctgggcttgagatactgaacaa

SEQ ID NO: 74166 - DNA, 25 bp, Homo sapien
aaggctgagttctacattgatgtga

SEQ ID NO: 74167 - DNA, 25 bp, Homo sapien
ccaccatttgtcaacccggagcctc

SEQ ID NO: 74168 - DNA, 25 bp, Homo sapien
agtccctccgcagggttcctctggg

SEQ ID NO: 74169 - DNA, 25 bp, Homo sapien
acaaatagtccgaacggtagccagt

SEQ ID NO: 74170 - DNA, 25 bp, Homo sapien
taactgttgtggcttgctgaatcaa

SEQ ID NO: 74171 - DNA, 25 bp, Homo sapien
tctgtagccaggtaactcttagatc

SEQ ID NO: 74172 - DNA, 25 bp, Homo sapien
aagtaggtcttaagtgtcatctggc

SEQ ID NO: 74173 - DNA, 25 bp, Homo sapien
agtccctccgcagggttcctctggg

SEQ ID NO: 74174 - DNA, 25 bp, Homo sapien
attgatgtgattgaagtccctccgc

SEQ ID NO: 74175 - DNA, 25 bp, Homo sapien
aaggctgagttctacattgatgtga

SEQ ID NO: 74176 - DNA, 25 bp, Homo sapien
ccaccatttgtcaacccggagcctc

SEQ ID NO: 74177 - DNA, 25 bp, Homo sapien
acaaatagtccgaacggtagccagt

SEQ ID NO: 74178 - DNA, 25 bp, Homo sapien
atcttgtaacggaagcccagtgtaa

SEQ ID NO: 74179 - DNA, 25 bp, Homo sapien
tcctggataacaacgttgatgggga

SEQ ID NO: 74180 - DNA, 25 bp, Homo sapien
tttctgggcttgagatactgaacaa

SEQ ID NO: 74181 - DNA, 25 bp, Homo sapien
attgatgtgattgaagtccctccgc

SEQ ID NO: 74182 - DNA, 25 bp, Homo sapien
tctgtagccaggtaactcttagatc

SEQ ID NO: 74183 - DNA, 25 bp, Homo sapien
aagtaggtcttaagtgtcatctggc

SEQ ID NO: 74184 - DNA, 25 bp, Homo sapien
tcctggataacaacgttgatgggga

SEQ ID NO: 74185 - DNA, 25 bp, Homo sapien
atcttgtaacggaagcccagtgtaa

SEQ ID NO: 74186 - DNA, 25 bp, Homo sapien
ccaccatttgtcaacccggagcctc

SEQ ID NO: 74187 - DNA, 25 bp, Homo sapien
acaaatagtccgaacggtagccagt

SEQ ID NO: 74188 - DNA, 25 bp, Homo sapien
aaggctgagttctacattgatgtga

SEQ ID NO: 74189 - DNA, 25 bp, Homo sapien
agtccctccgcagggttcctctggg

SEQ ID NO: 74190 - DNA, 25 bp, Homo sapien
taactgttgtggcttgctgaatcaa

SEQ ID NO: 74191 - DNA, 25 bp, Homo sapien
tttctgggcttgagatactgaacaa

SEQ ID NO: 74192 - DNA, 25 bp, Homo sapien
taactgttgtggcttgctgaatcaa

SEQ ID NO: 74193 - DNA, 25 bp, Homo sapien
tctgtagccaggtaactcttagatc

SEQ ID NO: 74194 - DNA, 25 bp, Homo sapien
aagtaggtcttaagtgtcatctggc

SEQ ID NO: 74195 - DNA, 25 bp, Homo sapien
agtccctccgcagggttcctctggg

SEQ ID NO: 74196 - DNA, 25 bp, Homo sapien
attgatgtgattgaagtccctccgc

SEQ ID NO: 74197 - DNA, 25 bp, Homo sapien
aaggctgagttctacattgatgtga

SEQ ID NO: 74198 - DNA, 25 bp, Homo sapien
ccaccatttgtcaacccggagcctc

SEQ ID NO: 74199 - DNA, 25 bp, Homo sapien
acaaatagtccgaacggtagccagt

SEQ ID NO: 74200 - DNA, 25 bp, Homo sapien
atcttgtaacggaagcccagtgtaa

SEQ ID NO: 74201 - DNA, 25 bp, Homo sapien
tcctggataacaacgttgatgggga

SEQ ID NO: 74202 - DNA, 25 bp, Homo sapien
tttctgggcttgagatactgaacaa

SEQ ID NO: 74203 - DNA, 25 bp, Homo sapien
taactgttgtggcttgctgaatcaa

SEQ ID NO: 74204 - DNA, 25 bp, Homo sapien
attgatgtgattgaagtccctccgc

SEQ ID NO: 74205 - DNA, 25 bp, Homo sapien
tttctgggcttgagatactgaacaa

SEQ ID NO: 74206 - DNA, 25 bp, Homo sapien
aaggctgagttctacattgatgtga

SEQ ID NO: 74207 - DNA, 25 bp, Homo sapien
ccaccatttgtcaacccggagcctc

SEQ ID NO: 74208 - DNA, 25 bp, Homo sapien
acaaatagtccgaacggtagccagt

SEQ ID NO: 74209 - DNA, 25 bp, Homo sapien
tctgtagccaggtaactcttagatc

SEQ ID NO: 74210 - DNA, 25 bp, Homo sapien
tcctggataacaacgttgatgggga

SEQ ID NO: 74211 - DNA, 25 bp, Homo sapien
atcttgtaacggaagcccagtgtaa

SEQ ID NO: 74212 - DNA, 25 bp, Homo sapien
agtccctccgcagggttcctctggg

SEQ ID NO: 74213 - DNA, 25 bp, Homo sapien
aagtaggtcttaagtgtcatctggc

SEQ ID NO: 74214 - DNA, 25 bp, Homo sapien
tcctggataacaacgttgatgggga

SEQ ID NO: 74215 - DNA, 25 bp, Homo sapien
aagtaggtcttaagtgtcatctggc

SEQ ID NO: 74216 - DNA, 25 bp, Homo sapien
tctgtagccaggtaactcttagatc

SEQ ID NO: 74217 - DNA, 25 bp, Homo sapien
taactgttgtggcttgctgaatcaa

SEQ ID NO: 74218 - DNA, 25 bp, Homo sapien
aaggctgagttctacattgatgtga

SEQ ID NO: 74219 - DNA, 25 bp, Homo sapien
acaaatagtccgaacggtagccagt

SEQ ID NO: 74220 - DNA, 25 bp, Homo sapien
agtccctccgcagggttcctctggg

SEQ ID NO: 74221 - DNA, 25 bp, Homo sapien
attgatgtgattgaagtccctccgc

SEQ ID NO: 74222 - DNA, 25 bp, Homo sapien
ccaccatttgtcaacccggagcctc

SEQ ID NO: 74223 - DNA, 25 bp, Homo sapien
atcttgtaacggaagcccagtgtaa

SEQ ID NO: 74224 - DNA, 25 bp, Homo sapien
tttctgggcttgagatactgaacaa

SEQ ID NO: 74225 - DNA, 25 bp, Homo sapien
taactgttgtggcttgctgaatcaa

SEQ ID NO: 74226 - DNA, 25 bp, Homo sapien
tctgtagccaggtaactcttagatc

SEQ ID NO: 74227 - DNA, 25 bp, Homo sapien
aagtaggtcttaagtgtcatctggc

SEQ ID NO: 74228 - DNA, 25 bp, Homo sapien
agtccctccgcagggttcctctggg

SEQ ID NO: 74229 - DNA, 25 bp, Homo sapien
attgatgtgattgaagtccctccgc

SEQ ID NO: 74230 - DNA, 25 bp, Homo sapien
aaggctgagttctacattgatgtga

SEQ ID NO: 74231 - DNA, 25 bp, Homo sapien
ccaccatttgtcaacccggagcctc

SEQ ID NO: 74232 - DNA, 25 bp, Homo sapien
acaaatagtccgaacggtagccagt

SEQ ID NO: 74233 - DNA, 25 bp, Homo sapien
atcttgtaacggaagcccagtgtaa

SEQ ID NO: 74234 - DNA, 25 bp, Homo sapien
tcctggataacaacgttgatgggga

SEQ ID NO: 74235 - DNA, 25 bp, Homo sapien
tttctgggcttgagatactgaacaa

SEQ ID NO: 74236 - DNA, 25 bp, Homo sapien
aagtaggtcttaagtgtcatctggc

SEQ ID NO: 74237 - DNA, 25 bp, Homo sapien
agtccctccgcagggttcctctggg

SEQ ID NO: 74238 - DNA, 25 bp, Homo sapien
atcttgtaacggaagcccagtgtaa

SEQ ID NO: 74239 - DNA, 25 bp, Homo sapien
ccaccatttgtcaacccggagcctc

SEQ ID NO: 74240 - DNA, 25 bp, Homo sapien
aaggctgagttctacattgatgtga

SEQ ID NO: 74241 - DNA, 25 bp, Homo sapien
acaaatagtccgaacggtagccagt

SEQ ID NO: 74242 - DNA, 25 bp, Homo sapien
tcctggataacaacgttgatgggga

SEQ ID NO: 74243 - DNA, 25 bp, Homo sapien
taactgttgtggcttgctgaatcaa

SEQ ID NO: 74244 - DNA, 25 bp, Homo sapien
attgatgtgattgaagtccctccgc

SEQ ID NO: 74245 - DNA, 25 bp, Homo sapien
tctgtagccaggtaactcttagatc

SEQ ID NO: 74246 - DNA, 25 bp, Homo sapien
tttctgggcttgagatactgaacaa

SEQ ID NO: 74247 - DNA, 25 bp, Homo sapien
taactgttgtggcttgctgaatcaa

SEQ ID NO: 74248 - DNA, 25 bp, Homo sapien
tctgtagccaggtaactcttagatc

SEQ ID NO: 74249 - DNA, 25 bp, Homo sapien
aagtaggtcttaagtgtcatctggc

SEQ ID NO: 74250 - DNA, 25 bp, Homo sapien
agtccctccgcagggttcctctggg

SEQ ID NO: 74251 - DNA, 25 bp, Homo sapien
attgatgtgattgaagtccctccgc

SEQ ID NO: 74252 - DNA, 25 bp, Homo sapien
aaggctgagttctacattgatgtga

SEQ ID NO: 74253 - DNA, 25 bp, Homo sapien
ccaccatttgtcaacccggagcctc

SEQ ID NO: 74254 - DNA, 25 bp, Homo sapien
acaaatagtccgaacggtagccagt

SEQ ID NO: 74255 - DNA, 25 bp, Homo sapien
atcttgtaacggaagcccagtgtaa

SEQ ID NO: 74256 - DNA, 25 bp, Homo sapien
tcctggataacaacgttgatgggga

SEQ ID NO: 74257 - DNA, 25 bp, Homo sapien
tttctgggcttgagatactgaacaa

SEQ ID NO: 74258 - DNA, 25 bp, Homo sapien
tcctggataacaacgttgatgggga

SEQ ID NO: 74259 - DNA, 25 bp, Homo sapien
attgatgtgattgaagtccctccgc

SEQ ID NO: 74260 - DNA, 25 bp, Homo sapien
acaaatagtccgaacggtagccagt

SEQ ID NO: 74261 - DNA, 25 bp, Homo sapien
taactgttgtggcttgctgaatcaa

SEQ ID NO: 74262 - DNA, 25 bp, Homo sapien
ccaccatttgtcaacccggagcctc

SEQ ID NO: 74263 - DNA, 25 bp, Homo sapien
tctgtagccaggtaactcttagatc

SEQ ID NO: 74264 - DNA, 25 bp, Homo sapien
agtccctccgcagggttcctctggg

SEQ ID NO: 74265 - DNA, 25 bp, Homo sapien
aaggctgagttctacattgatgtga

SEQ ID NO: 74266 - DNA, 25 bp, Homo sapien
aagtaggtcttaagtgtcatctggc

SEQ ID NO: 74267 - DNA, 25 bp, Homo sapien
tttctgggcttgagatactgaacaa

SEQ ID NO: 74268 - DNA, 25 bp, Homo sapien
atcttgtaacggaagcccagtgtaa

SEQ ID NO: 74269 - DNA, 25 bp, Homo sapien
taactgttgtggcttgctgaatcaa

SEQ ID NO: 74270 - DNA, 25 bp, Homo sapien
tctgtagccaggtaactcttagatc

SEQ ID NO: 74271 - DNA, 25 bp, Homo sapien
aagtaggtcttaagtgtcatctggc

SEQ ID NO: 74272 - DNA, 25 bp, Homo sapien
agtccctccgcagggttcctctggg

SEQ ID NO: 74273 - DNA, 25 bp, Homo sapien
attgatgtgattgaagtccctccgc

SEQ ID NO: 74274 - DNA, 25 bp, Homo sapien
aaggctgagttctacattgatgtga

SEQ ID NO: 74275 - DNA, 25 bp, Homo sapien
ccaccatttgtcaacccggagcctc

SEQ ID NO: 74276 - DNA, 25 bp, Homo sapien
acaaatagtccgaacggtagccagt

SEQ ID NO: 74277 - DNA, 25 bp, Homo sapien
atcttgtaacggaagcccagtgtaa

SEQ ID NO: 74278 - DNA, 25 bp, Homo sapien
tcctggataacaacgttgatgggga

SEQ ID NO: 74279 - DNA, 25 bp, Homo sapien
tttctgggcttgagatactgaacaa

SEQ ID NO: 74280 - DNA, 25 bp, Homo sapien
tgcagctgcagtagcaggatatgca

SEQ ID NO: 74281 - DNA, 25 bp, Homo sapien
gataaccaatcataggtgcagctgc

SEQ ID NO: 74282 - DNA, 25 bp, Homo sapien
caggaatgtagagaaatatccaact

SEQ ID NO: 74283 - DNA, 25 bp, Homo sapien
ttgctgagtgctatcataaccattc

SEQ ID NO: 74284 - DNA, 25 bp, Homo sapien
ataccagcagacacaaaattacttc

SEQ ID NO: 74285 - DNA, 25 bp, Homo sapien
aagtccctgttggattaccagtcct

SEQ ID NO: 74286 - DNA, 25 bp, Homo sapien
taaagagcaattatgaaaaacagac

SEQ ID NO: 74287 - DNA, 25 bp, Homo sapien
ttgggaatatcctgttggcattgga

SEQ ID NO: 74288 - DNA, 25 bp, Homo sapien
cccattggtgtaatttgcagcactg

SEQ ID NO: 74289 - DNA, 25 bp, Homo sapien
ttaaatagcgaaaaagtgcaccata

SEQ ID NO: 74290 - DNA, 25 bp, Homo sapien
tttgcagcactgtaaacaccattct

SEQ ID NO: 74291 - DNA, 25 bp, Homo sapien
tttgcagcactgtaaacaccattct

SEQ ID NO: 74292 - DNA, 25 bp, Homo sapien
cccattggtgtaatttgcagcactg

SEQ ID NO: 74293 - DNA, 25 bp, Homo sapien
ataccagcagacacaaaattacttc

SEQ ID NO: 74294 - DNA, 25 bp, Homo sapien
aagtccctgttggattaccagtcct

SEQ ID NO: 74295 - DNA, 25 bp, Homo sapien
ttgctgagtgctatcataaccattc

SEQ ID NO: 74296 - DNA, 25 bp, Homo sapien
tgcagctgcagtagcaggatatgca

SEQ ID NO: 74297 - DNA, 25 bp, Homo sapien
gataaccaatcataggtgcagctgc

SEQ ID NO: 74298 - DNA, 25 bp, Homo sapien
ttgggaatatcctgttggcattgga

SEQ ID NO: 74299 - DNA, 25 bp, Homo sapien
taaagagcaattatgaaaaacagac

SEQ ID NO: 74300 - DNA, 25 bp, Homo sapien
ttaaatagcgaaaaagtgcaccata

SEQ ID NO: 74301 - DNA, 25 bp, Homo sapien
caggaatgtagagaaatatccaact

SEQ ID NO: 74302 - DNA, 25 bp, Homo sapien
aagtccctgttggattaccagtcct

SEQ ID NO: 74303 - DNA, 25 bp, Homo sapien
ataccagcagacacaaaattacttc

SEQ ID NO: 74304 - DNA, 25 bp, Homo sapien
tttgcagcactgtaaacaccattct

SEQ ID NO: 74305 - DNA, 25 bp, Homo sapien
ttgctgagtgctatcataaccattc

SEQ ID NO: 74306 - DNA, 25 bp, Homo sapien
cccattggtgtaatttgcagcactg

SEQ ID NO: 74307 - DNA, 25 bp, Homo sapien
gataaccaatcataggtgcagctgc

SEQ ID NO: 74308 - DNA, 25 bp, Homo sapien
ttaaatagcgaaaaagtgcaccata

SEQ ID NO: 74309 - DNA, 25 bp, Homo sapien
caggaatgtagagaaatatccaact

SEQ ID NO: 74310 - DNA, 25 bp, Homo sapien
taaagagcaattatgaaaaacagac

SEQ ID NO: 74311 - DNA, 25 bp, Homo sapien
ttgggaatatcctgttggcattgga

SEQ ID NO: 74312 - DNA, 25 bp, Homo sapien
tgcagctgcagtagcaggatatgca

SEQ ID NO: 74313 - DNA, 25 bp, Homo sapien
tttgcagcactgtaaacaccattct

SEQ ID NO: 74314 - DNA, 25 bp, Homo sapien
cccattggtgtaatttgcagcactg

SEQ ID NO: 74315 - DNA, 25 bp, Homo sapien
ataccagcagacacaaaattacttc

SEQ ID NO: 74316 - DNA, 25 bp, Homo sapien
aagtccctgttggattaccagtcct

SEQ ID NO: 74317 - DNA, 25 bp, Homo sapien
ttgctgagtgctatcataaccattc

SEQ ID NO: 74318 - DNA, 25 bp, Homo sapien
tgcagctgcagtagcaggatatgca

SEQ ID NO: 74319 - DNA, 25 bp, Homo sapien
gataaccaatcataggtgcagctgc

SEQ ID NO: 74320 - DNA, 25 bp, Homo sapien
ttgggaatatcctgttggcattgga

SEQ ID NO: 74321 - DNA, 25 bp, Homo sapien
taaagagcaattatgaaaaacagac

SEQ ID NO: 74322 - DNA, 25 bp, Homo sapien
ttaaatagcgaaaaagtgcaccata

SEQ ID NO: 74323 - DNA, 25 bp, Homo sapien
caggaatgtagagaaatatccaact

SEQ ID NO: 74324 - DNA, 25 bp, Homo sapien
tgcagctgcagtagcaggatatgca

SEQ ID NO: 74325 - DNA, 25 bp, Homo sapien
tttgcagcactgtaaacaccattct

SEQ ID NO: 74326 - DNA, 25 bp, Homo sapien
ttgggaatatcctgttggcattgga

SEQ ID NO: 74327 - DNA, 25 bp, Homo sapien
caggaatgtagagaaatatccaact

SEQ ID NO: 74328 - DNA, 25 bp, Homo sapien
gataaccaatcataggtgcagctgc

SEQ ID NO: 74329 - DNA, 25 bp, Homo sapien
ttaaatagcgaaaaagtgcaccata

SEQ ID NO: 74330 - DNA, 25 bp, Homo sapien
cccattggtgtaatttgcagcactg

SEQ ID NO: 74331 - DNA, 25 bp, Homo sapien
ttgctgagtgctatcataaccattc

SEQ ID NO: 74332 - DNA, 25 bp, Homo sapien
taaagagcaattatgaaaaacagac

SEQ ID NO: 74333 - DNA, 25 bp, Homo sapien
aagtccctgttggattaccagtcct

SEQ ID NO: 74334 - DNA, 25 bp, Homo sapien
ataccagcagacacaaaattacttc

SEQ ID NO: 74335 - DNA, 25 bp, Homo sapien
tttgcagcactgtaaacaccattct

SEQ ID NO: 74336 - DNA, 25 bp, Homo sapien
cccattggtgtaatttgcagcactg

SEQ ID NO: 74337 - DNA, 25 bp, Homo sapien
ataccagcagacacaaaattacttc

SEQ ID NO: 74338 - DNA, 25 bp, Homo sapien
aagtccctgttggattaccagtcct

SEQ ID NO: 74339 - DNA, 25 bp, Homo sapien
ttgctgagtgctatcataaccattc

SEQ ID NO: 74340 - DNA, 25 bp, Homo sapien
tgcagctgcagtagcaggatatgca

SEQ ID NO: 74341 - DNA, 25 bp, Homo sapien
gataaccaatcataggtgcagctgc

SEQ ID NO: 74342 - DNA, 25 bp, Homo sapien
ttgggaatatcctgttggcattgga

SEQ ID NO: 74343 - DNA, 25 bp, Homo sapien
taaagagcaattatgaaaaacagac

SEQ ID NO: 74344 - DNA, 25 bp, Homo sapien
ttaaatagcgaaaaagtgcaccata

SEQ ID NO: 74345 - DNA, 25 bp, Homo sapien
caggaatgtagagaaatatccaact

SEQ ID NO: 74346 - DNA, 25 bp, Homo sapien
tttgcagcactgtaaacaccattct

SEQ ID NO: 74347 - DNA, 25 bp, Homo sapien
cccattggtgtaatttgcagcactg

SEQ ID NO: 74348 - DNA, 25 bp, Homo sapien
ataccagcagacacaaaattacttc

SEQ ID NO: 74349 - DNA, 25 bp, Homo sapien
aagtccctgttggattaccagtcct

SEQ ID NO: 74350 - DNA, 25 bp, Homo sapien
ttgctgagtgctatcataaccattc

SEQ ID NO: 74351 - DNA, 25 bp, Homo sapien
tgcagctgcagtagcaggatatgca

SEQ ID NO: 74352 - DNA, 25 bp, Homo sapien
gataaccaatcataggtgcagctgc

SEQ ID NO: 74353 - DNA, 25 bp, Homo sapien
ttgggaatatcctgttggcattgga

SEQ ID NO: 74354 - DNA, 25 bp, Homo sapien
taaagagcaattatgaaaaacagac

SEQ ID NO: 74355 - DNA, 25 bp, Homo sapien
ttaaatagcgaaaaagtgcaccata

SEQ ID NO: 74356 - DNA, 25 bp, Homo sapien
caggaatgtagagaaatatccaact

SEQ ID NO: 74357 - DNA, 25 bp, Homo sapien
tttgcagcactgtaaacaccattct

SEQ ID NO: 74358 - DNA, 25 bp, Homo sapien
ttgggaatatcctgttggcattgga

SEQ ID NO: 74359 - DNA, 25 bp, Homo sapien
caggaatgtagagaaatatccaact

SEQ ID NO: 74360 - DNA, 25 bp, Homo sapien
cccattggtgtaatttgcagcactg

SEQ ID NO: 74361 - DNA, 25 bp, Homo sapien
ttgctgagtgctatcataaccattc

SEQ ID NO: 74362 - DNA, 25 bp, Homo sapien
ttaaatagcgaaaaagtgcaccata

SEQ ID NO: 74363 - DNA, 25 bp, Homo sapien
tgcagctgcagtagcaggatatgca

SEQ ID NO: 74364 - DNA, 25 bp, Homo sapien
aagtccctgttggattaccagtcct

SEQ ID NO: 74365 - DNA, 25 bp, Homo sapien
taaagagcaattatgaaaaacagac

SEQ ID NO: 74366 - DNA, 25 bp, Homo sapien
gataaccaatcataggtgcagctgc

SEQ ID NO: 74367 - DNA, 25 bp, Homo sapien
ataccagcagacacaaaattacttc

SEQ ID NO: 74368 - DNA, 25 bp, Homo sapien
tttgcagcactgtaaacaccattct

SEQ ID NO: 74369 - DNA, 25 bp, Homo sapien
cccattggtgtaatttgcagcactg

SEQ ID NO: 74370 - DNA, 25 bp, Homo sapien
ataccagcagacacaaaattacttc

SEQ ID NO: 74371 - DNA, 25 bp, Homo sapien
aagtccctgttggattaccagtcct

SEQ ID NO: 74372 - DNA, 25 bp, Homo sapien
ttgctgagtgctatcataaccattc

SEQ ID NO: 74373 - DNA, 25 bp, Homo sapien
tgcagctgcagtagcaggatatgca

SEQ ID NO: 74374 - DNA, 25 bp, Homo sapien
gataaccaatcataggtgcagctgc

SEQ ID NO: 74375 - DNA, 25 bp, Homo sapien
ttgggaatatcctgttggcattgga

SEQ ID NO: 74376 - DNA, 25 bp, Homo sapien
taaagagcaattatgaaaaacagac

SEQ ID NO: 74377 - DNA, 25 bp, Homo sapien
ttaaatagcgaaaaagtgcaccata

SEQ ID NO: 74378 - DNA, 25 bp, Homo sapien
caggaatgtagagaaatatccaact

SEQ ID NO: 74379 - DNA, 25 bp, Homo sapien
caggaatgtagagaaatatccaact

SEQ ID NO: 74380 - DNA, 25 bp, Homo sapien
gataaccaatcataggtgcagctgc

SEQ ID NO: 74381 - DNA, 25 bp, Homo sapien
ataccagcagacacaaaattacttc

SEQ ID NO: 74382 - DNA, 25 bp, Homo sapien
ttgggaatatcctgttggcattgga

SEQ ID NO: 74383 - DNA, 25 bp, Homo sapien
taaagagcaattatgaaaaacagac

SEQ ID NO: 74384 - DNA, 25 bp, Homo sapien
ttgctgagtgctatcataaccattc

SEQ ID NO: 74385 - DNA, 25 bp, Homo sapien
tttgcagcactgtaaacaccattct

SEQ ID NO: 74386 - DNA, 25 bp, Homo sapien
ttaaatagcgaaaaagtgcaccata

SEQ ID NO: 74387 - DNA, 25 bp, Homo sapien
tgcagctgcagtagcaggatatgca

SEQ ID NO: 74388 - DNA, 25 bp, Homo sapien
aagtccctgttggattaccagtcct

SEQ ID NO: 74389 - DNA, 25 bp, Homo sapien
cccattggtgtaatttgcagcactg

SEQ ID NO: 74390 - DNA, 25 bp, Homo sapien
tttgcagcactgtaaacaccattct

SEQ ID NO: 74391 - DNA, 25 bp, Homo sapien
cccattggtgtaatttgcagcactg

SEQ ID NO: 74392 - DNA, 25 bp, Homo sapien
ataccagcagacacaaaattacttc

SEQ ID NO: 74393 - DNA, 25 bp, Homo sapien
aagtccctgttggattaccagtcct

SEQ ID NO: 74394 - DNA, 25 bp, Homo sapien
ttgctgagtgctatcataaccattc

SEQ ID NO: 74395 - DNA, 25 bp, Homo sapien
tgcagctgcagtagcaggatatgca

SEQ ID NO: 74396 - DNA, 25 bp, Homo sapien
gataaccaatcataggtgcagctgc

SEQ ID NO: 74397 - DNA, 25 bp, Homo sapien
ttgggaatatcctgttggcattgga

SEQ ID NO: 74398 - DNA, 25 bp, Homo sapien
taaagagcaattatgaaaaacagac

SEQ ID NO: 74399 - DNA, 25 bp, Homo sapien
ttaaatagcgaaaaagtgcaccata

SEQ ID NO: 74400 - DNA, 25 bp, Homo sapien
caggaatgtagagaaatatccaact

SEQ ID NO: 74401 - DNA, 25 bp, Homo sapien
tttgcagcactgtaaacaccattct

SEQ ID NO: 74402 - DNA, 25 bp, Homo sapien
taaagagcaattatgaaaaacagac

SEQ ID NO: 74403 - DNA, 25 bp, Homo sapien
tgcagctgcagtagcaggatatgca

SEQ ID NO: 74404 - DNA, 25 bp, Homo sapien
ataccagcagacacaaaattacttc

SEQ ID NO: 74405 - DNA, 25 bp, Homo sapien
aagtccctgttggattaccagtcct

SEQ ID NO: 74406 - DNA, 25 bp, Homo sapien
ttaaatagcgaaaaagtgcaccata

SEQ ID NO: 74407 - DNA, 25 bp, Homo sapien
ttgctgagtgctatcataaccattc

SEQ ID NO: 74408 - DNA, 25 bp, Homo sapien
cccattggtgtaatttgcagcactg

SEQ ID NO: 74409 - DNA, 25 bp, Homo sapien
gataaccaatcataggtgcagctgc

SEQ ID NO: 74410 - DNA, 25 bp, Homo sapien
caggaatgtagagaaatatccaact

SEQ ID NO: 74411 - DNA, 25 bp, Homo sapien
ttgggaatatcctgttggcattgga

SEQ ID NO: 74412 - DNA, 25 bp, Homo sapien
tttgcagcactgtaaacaccattct

SEQ ID NO: 74413 - DNA, 25 bp, Homo sapien
cccattggtgtaatttgcagcactg

SEQ ID NO: 74414 - DNA, 25 bp, Homo sapien
ataccagcagacacaaaattacttc

SEQ ID NO: 74415 - DNA, 25 bp, Homo sapien
aagtccctgttggattaccagtcct

SEQ ID NO: 74416 - DNA, 25 bp, Homo sapien
ttgctgagtgctatcataaccattc

SEQ ID NO: 74417 - DNA, 25 bp, Homo sapien
tgcagctgcagtagcaggatatgca

SEQ ID NO: 74418 - DNA, 25 bp, Homo sapien
gataaccaatcataggtgcagctgc

SEQ ID NO: 74419 - DNA, 25 bp, Homo sapien
ttgggaatatcctgttggcattgga

SEQ ID NO: 74420 - DNA, 25 bp, Homo sapien
taaagagcaattatgaaaaacagac

SEQ ID NO: 74421 - DNA, 25 bp, Homo sapien
ttaaatagcgaaaaagtgcaccata

SEQ ID NO: 74422 - DNA, 25 bp, Homo sapien
caggaatgtagagaaatatccaact

SEQ ID NO: 74423 - DNA, 25 bp, Homo sapien
ttgctgagtgctatcataaccattc

SEQ ID NO: 74424 - DNA, 25 bp, Homo sapien
cccattggtgtaatttgcagcactg

SEQ ID NO: 74425 - DNA, 25 bp, Homo sapien
taaagagcaattatgaaaaacagac

SEQ ID NO: 74426 - DNA, 25 bp, Homo sapien
ataccagcagacacaaaattacttc

SEQ ID NO: 74427 - DNA, 25 bp, Homo sapien
aagtccctgttggattaccagtcct

SEQ ID NO: 74428 - DNA, 25 bp, Homo sapien
caggaatgtagagaaatatccaact

SEQ ID NO: 74429 - DNA, 25 bp, Homo sapien
ttaaatagcgaaaaagtgcaccata

SEQ ID NO: 74430 - DNA, 25 bp, Homo sapien
tgcagctgcagtagcaggatatgca

SEQ ID NO: 74431 - DNA, 25 bp, Homo sapien
tttgcagcactgtaaacaccattct

SEQ ID NO: 74432 - DNA, 25 bp, Homo sapien
ttgggaatatcctgttggcattgga

SEQ ID NO: 74433 - DNA, 25 bp, Homo sapien
gataaccaatcataggtgcagctgc

SEQ ID NO: 74434 - DNA, 25 bp, Homo sapien
tttgcagcactgtaaacaccattct

SEQ ID NO: 74435 - DNA, 25 bp, Homo sapien
cccattggtgtaatttgcagcactg

SEQ ID NO: 74436 - DNA, 25 bp, Homo sapien
ataccagcagacacaaaattacttc

SEQ ID NO: 74437 - DNA, 25 bp, Homo sapien
aagtccctgttggattaccagtcct

SEQ ID NO: 74438 - DNA, 25 bp, Homo sapien
ttgctgagtgctatcataaccattc

SEQ ID NO: 74439 - DNA, 25 bp, Homo sapien
tgcagctgcagtagcaggatatgca

SEQ ID NO: 74440 - DNA, 25 bp, Homo sapien
gataaccaatcataggtgcagctgc

SEQ ID NO: 74441 - DNA, 25 bp, Homo sapien
ttgggaatatcctgttggcattgga

SEQ ID NO: 74442 - DNA, 25 bp, Homo sapien
taaagagcaattatgaaaaacagac

SEQ ID NO: 74443 - DNA, 25 bp, Homo sapien
ttaaatagcgaaaaagtgcaccata

SEQ ID NO: 74444 - DNA, 25 bp, Homo sapien
caggaatgtagagaaatatccaact

SEQ ID NO: 74445 - DNA, 25 bp, Homo sapien
cccattggtgtaatttgcagcactg

SEQ ID NO: 74446 - DNA, 25 bp, Homo sapien
caggaatgtagagaaatatccaact

SEQ ID NO: 74447 - DNA, 25 bp, Homo sapien
gataaccaatcataggtgcagctgc

SEQ ID NO: 74448 - DNA, 25 bp, Homo sapien
aagtccctgttggattaccagtcct

SEQ ID NO: 74449 - DNA, 25 bp, Homo sapien
taaagagcaattatgaaaaacagac

SEQ ID NO: 74450 - DNA, 25 bp, Homo sapien
ttgctgagtgctatcataaccattc

SEQ ID NO: 74451 - DNA, 25 bp, Homo sapien
ataccagcagacacaaaattacttc

SEQ ID NO: 74452 - DNA, 25 bp, Homo sapien
tgcagctgcagtagcaggatatgca

SEQ ID NO: 74453 - DNA, 25 bp, Homo sapien
ttaaatagcgaaaaagtgcaccata

SEQ ID NO: 74454 - DNA, 25 bp, Homo sapien
tttgcagcactgtaaacaccattct

SEQ ID NO: 74455 - DNA, 25 bp, Homo sapien
ttgggaatatcctgttggcattgga

SEQ ID NO: 74456 - DNA, 25 bp, Homo sapien
caggaatgtagagaaatatccaact

SEQ ID NO: 74457 - DNA, 25 bp, Homo sapien
ttgggaatatcctgttggcattgga

SEQ ID NO: 74458 - DNA, 25 bp, Homo sapien
cccattggtgtaatttgcagcactg

SEQ ID NO: 74459 - DNA, 25 bp, Homo sapien
ttgctgagtgctatcataaccattc

SEQ ID NO: 74460 - DNA, 25 bp, Homo sapien
ataccagcagacacaaaattacttc

SEQ ID NO: 74461 - DNA, 25 bp, Homo sapien
gataaccaatcataggtgcagctgc

SEQ ID NO: 74462 - DNA, 25 bp, Homo sapien
tttgcagcactgtaaacaccattct

SEQ ID NO: 74463 - DNA, 25 bp, Homo sapien
ttaaatagcgaaaaagtgcaccata

SEQ ID NO: 74464 - DNA, 25 bp, Homo sapien
taaagagcaattatgaaaaacagac

SEQ ID NO: 74465 - DNA, 25 bp, Homo sapien
tgcagctgcagtagcaggatatgca

SEQ ID NO: 74466 - DNA, 25 bp, Homo sapien
aagtccctgttggattaccagtcct

SEQ ID NO: 74467 - DNA, 25 bp, Homo sapien
tttgcagcactgtaaacaccattct

SEQ ID NO: 74468 - DNA, 25 bp, Homo sapien
cccattggtgtaatttgcagcactg

SEQ ID NO: 74469 - DNA, 25 bp, Homo sapien
ataccagcagacacaaaattacttc

SEQ ID NO: 74470 - DNA, 25 bp, Homo sapien
aagtccctgttggattaccagtcct

SEQ ID NO: 74471 - DNA, 25 bp, Homo sapien
ttgctgagtgctatcataaccattc

SEQ ID NO: 74472 - DNA, 25 bp, Homo sapien
tgcagctgcagtagcaggatatgca

SEQ ID NO: 74473 - DNA, 25 bp, Homo sapien
gataaccaatcataggtgcagctgc

SEQ ID NO: 74474 - DNA, 25 bp, Homo sapien
ttgggaatatcctgttggcattgga

SEQ ID NO: 74475 - DNA, 25 bp, Homo sapien
taaagagcaattatgaaaaacagac

SEQ ID NO: 74476 - DNA, 25 bp, Homo sapien
ttaaatagcgaaaaagtgcaccata

SEQ ID NO: 74477 - DNA, 25 bp, Homo sapien
caggaatgtagagaaatatccaact

SEQ ID NO: 74478 - DNA, 25 bp, Homo sapien
caggaatgtagagaaatatccaact

SEQ ID NO: 74479 - DNA, 25 bp, Homo sapien
gataaccaatcataggtgcagctgc

SEQ ID NO: 74480 - DNA, 25 bp, Homo sapien
tttgcagcactgtaaacaccattct

SEQ ID NO: 74481 - DNA, 25 bp, Homo sapien
ttgctgagtgctatcataaccattc

SEQ ID NO: 74482 - DNA, 25 bp, Homo sapien
ataccagcagacacaaaattacttc

SEQ ID NO: 74483 - DNA, 25 bp, Homo sapien
taaagagcaattatgaaaaacagac

SEQ ID NO: 74484 - DNA, 25 bp, Homo sapien
cccattggtgtaatttgcagcactg

SEQ ID NO: 74485 - DNA, 25 bp, Homo sapien
ttgggaatatcctgttggcattgga

SEQ ID NO: 74486 - DNA, 25 bp, Homo sapien
ttaaatagcgaaaaagtgcaccata

SEQ ID NO: 74487 - DNA, 25 bp, Homo sapien
tgcagctgcagtagcaggatatgca

SEQ ID NO: 74488 - DNA, 25 bp, Homo sapien
aagtccctgttggattaccagtcct

SEQ ID NO: 74489 - DNA, 25 bp, Homo sapien
tttgcagcactgtaaacaccattct

SEQ ID NO: 74490 - DNA, 25 bp, Homo sapien
cccattggtgtaatttgcagcactg

SEQ ID NO: 74491 - DNA, 25 bp, Homo sapien
ataccagcagacacaaaattacttc

SEQ ID NO: 74492 - DNA, 25 bp, Homo sapien
aagtccctgttggattaccagtcct

SEQ ID NO: 74493 - DNA, 25 bp, Homo sapien
ttgctgagtgctatcataaccattc

SEQ ID NO: 74494 - DNA, 25 bp, Homo sapien
tgcagctgcagtagcaggatatgca

SEQ ID NO: 74495 - DNA, 25 bp, Homo sapien
gataaccaatcataggtgcagctgc

SEQ ID NO: 74496 - DNA, 25 bp, Homo sapien
ttgggaatatcctgttggcattgga

SEQ ID NO: 74497 - DNA, 25 bp, Homo sapien
taaagagcaattatgaaaaacagac

SEQ ID NO: 74498 - DNA, 25 bp, Homo sapien
ttaaatagcgaaaaagtgcaccata

SEQ ID NO: 74499 - DNA, 25 bp, Homo sapien
caggaatgtagagaaatatccaact

SEQ ID NO: 74500 - DNA, 25 bp, Homo sapien
tgcagctgcagtagcaggatatgca

SEQ ID NO: 74501 - DNA, 25 bp, Homo sapien
ataccagcagacacaaaattacttc

SEQ ID NO: 74502 - DNA, 25 bp, Homo sapien
ttaaatagcgaaaaagtgcaccata

SEQ ID NO: 74503 - DNA, 25 bp, Homo sapien
taaagagcaattatgaaaaacagac

SEQ ID NO: 74504 - DNA, 25 bp, Homo sapien
ttgggaatatcctgttggcattgga

SEQ ID NO: 74505 - DNA, 25 bp, Homo sapien
tttgcagcactgtaaacaccattct

SEQ ID NO: 74506 - DNA, 25 bp, Homo sapien
ttgctgagtgctatcataaccattc

SEQ ID NO: 74507 - DNA, 25 bp, Homo sapien
aagtccctgttggattaccagtcct

SEQ ID NO: 74508 - DNA, 25 bp, Homo sapien
gataaccaatcataggtgcagctgc

SEQ ID NO: 74509 - DNA, 25 bp, Homo sapien
cccattggtgtaatttgcagcactg

SEQ ID NO: 74510 - DNA, 25 bp, Homo sapien
caggaatgtagagaaatatccaact

SEQ ID NO: 74511 - DNA, 25 bp, Homo sapien
tttgcagcactgtaaacaccattct

SEQ ID NO: 74512 - DNA, 25 bp, Homo sapien
cccattggtgtaatttgcagcactg

SEQ ID NO: 74513 - DNA, 25 bp, Homo sapien
ataccagcagacacaaaattacttc

SEQ ID NO: 74514 - DNA, 25 bp, Homo sapien
aagtccctgttggattaccagtcct

SEQ ID NO: 74515 - DNA, 25 bp, Homo sapien
ttgctgagtgctatcataaccattc

SEQ ID NO: 74516 - DNA, 25 bp, Homo sapien
tgcagctgcagtagcaggatatgca

SEQ ID NO: 74517 - DNA, 25 bp, Homo sapien
gataaccaatcataggtgcagctgc

SEQ ID NO: 74518 - DNA, 25 bp, Homo sapien
ttgggaatatcctgttggcattgga

SEQ ID NO: 74519 - DNA, 25 bp, Homo sapien
taaagagcaattatgaaaaacagac

SEQ ID NO: 74520 - DNA, 25 bp, Homo sapien
ttaaatagcgaaaaagtgcaccata

SEQ ID NO: 74521 - DNA, 25 bp, Homo sapien
caggaatgtagagaaatatccaact

SEQ ID NO: 74522 - DNA, 25 bp, Homo sapien
ttgctgagtgctatcataaccattc

SEQ ID NO: 74523 - DNA, 25 bp, Homo sapien
taaagagcaattatgaaaaacagac

SEQ ID NO: 74524 - DNA, 25 bp, Homo sapien
ttaaatagcgaaaaagtgcaccata

SEQ ID NO: 74525 - DNA, 25 bp, Homo sapien
aagtccctgttggattaccagtcct

SEQ ID NO: 74526 - DNA, 25 bp, Homo sapien
caggaatgtagagaaatatccaact

SEQ ID NO: 74527 - DNA, 25 bp, Homo sapien
tttgcagcactgtaaacaccattct

SEQ ID NO: 74528 - DNA, 25 bp, Homo sapien
tgcagctgcagtagcaggatatgca

SEQ ID NO: 74529 - DNA, 25 bp, Homo sapien
cccattggtgtaatttgcagcactg

SEQ ID NO: 74530 - DNA, 25 bp, Homo sapien
ataccagcagacacaaaattacttc

SEQ ID NO: 74531 - DNA, 25 bp, Homo sapien
ttgggaatatcctgttggcattgga

SEQ ID NO: 74532 - DNA, 25 bp, Homo sapien
gataaccaatcataggtgcagctgc

SEQ ID NO: 74533 - DNA, 25 bp, Homo sapien
tttgcagcactgtaaacaccattct

SEQ ID NO: 74534 - DNA, 25 bp, Homo sapien
cccattggtgtaatttgcagcactg

SEQ ID NO: 74535 - DNA, 25 bp, Homo sapien
ataccagcagacacaaaattacttc

SEQ ID NO: 74536 - DNA, 25 bp, Homo sapien
aagtccctgttggattaccagtcct

SEQ ID NO: 74537 - DNA, 25 bp, Homo sapien
ttgctgagtgctatcataaccattc

SEQ ID NO: 74538 - DNA, 25 bp, Homo sapien
tgcagctgcagtagcaggatatgca

SEQ ID NO: 74539 - DNA, 25 bp, Homo sapien
gataaccaatcataggtgcagctgc

SEQ ID NO: 74540 - DNA, 25 bp, Homo sapien
ttgggaatatcctgttggcattgga

SEQ ID NO: 74541 - DNA, 25 bp, Homo sapien
taaagagcaattatgaaaaacagac

SEQ ID NO: 74542 - DNA, 25 bp, Homo sapien
ttaaatagcgaaaaagtgcaccata

SEQ ID NO: 74543 - DNA, 25 bp, Homo sapien
caggaatgtagagaaatatccaact

SEQ ID NO: 74544 - DNA, 25 bp, Homo sapien
tttgcagcactgtaaacaccattct

SEQ ID NO: 74545 - DNA, 25 bp, Homo sapien
ttgctgagtgctatcataaccattc

SEQ ID NO: 74546 - DNA, 25 bp, Homo sapien
taaagagcaattatgaaaaacagac

SEQ ID NO: 74547 - DNA, 25 bp, Homo sapien
aagtccctgttggattaccagtcct

SEQ ID NO: 74548 - DNA, 25 bp, Homo sapien
ttgggaatatcctgttggcattgga

SEQ ID NO: 74549 - DNA, 25 bp, Homo sapien
ataccagcagacacaaaattacttc

SEQ ID NO: 74550 - DNA, 25 bp, Homo sapien
caggaatgtagagaaatatccaact

SEQ ID NO: 74551 - DNA, 25 bp, Homo sapien
cccattggtgtaatttgcagcactg

SEQ ID NO: 74552 - DNA, 25 bp, Homo sapien
tgcagctgcagtagcaggatatgca

SEQ ID NO: 74553 - DNA, 25 bp, Homo sapien
ttaaatagcgaaaaagtgcaccata

SEQ ID NO: 74554 - DNA, 25 bp, Homo sapien
gataaccaatcataggtgcagctgc

SEQ ID NO: 74555 - DNA, 25 bp, Homo sapien
tttgcagcactgtaaacaccattct

SEQ ID NO: 74556 - DNA, 25 bp, Homo sapien
cccattggtgtaatttgcagcactg

SEQ ID NO: 74557 - DNA, 25 bp, Homo sapien
ataccagcagacacaaaattacttc

SEQ ID NO: 74558 - DNA, 25 bp, Homo sapien
aagtccctgttggattaccagtcct

SEQ ID NO: 74559 - DNA, 25 bp, Homo sapien
ttgctgagtgctatcataaccattc

SEQ ID NO: 74560 - DNA, 25 bp, Homo sapien
tgcagctgcagtagcaggatatgca

SEQ ID NO: 74561 - DNA, 25 bp, Homo sapien
gataaccaatcataggtgcagctgc

SEQ ID NO: 74562 - DNA, 25 bp, Homo sapien
ttgggaatatcctgttggcattgga

SEQ ID NO: 74563 - DNA, 25 bp, Homo sapien
taaagagcaattatgaaaaacagac

SEQ ID NO: 74564 - DNA, 25 bp, Homo sapien
ttaaatagcgaaaaagtgcaccata

SEQ ID NO: 74565 - DNA, 25 bp, Homo sapien
caggaatgtagagaaatatccaact

SEQ ID NO: 74566 - DNA, 25 bp, Homo sapien
ttgctgagtgctatcataaccattc

SEQ ID NO: 74567 - DNA, 25 bp, Homo sapien
taaagagcaattatgaaaaacagac

SEQ ID NO: 74568 - DNA, 25 bp, Homo sapien
ttgggaatatcctgttggcattgga

SEQ ID NO: 74569 - DNA, 25 bp, Homo sapien
ttaaatagcgaaaaagtgcaccata

SEQ ID NO: 74570 - DNA, 25 bp, Homo sapien
tgcagctgcagtagcaggatatgca

SEQ ID NO: 74571 - DNA, 25 bp, Homo sapien
aagtccctgttggattaccagtcct

SEQ ID NO: 74572 - DNA, 25 bp, Homo sapien
gataaccaatcataggtgcagctgc

SEQ ID NO: 74573 - DNA, 25 bp, Homo sapien
ataccagcagacacaaaattacttc

SEQ ID NO: 74574 - DNA, 25 bp, Homo sapien
cccattggtgtaatttgcagcactg

SEQ ID NO: 74575 - DNA, 25 bp, Homo sapien
caggaatgtagagaaatatccaact

SEQ ID NO: 74576 - DNA, 25 bp, Homo sapien
tttgcagcactgtaaacaccattct

SEQ ID NO: 74577 - DNA, 25 bp, Homo sapien
tttgcagcactgtaaacaccattct

SEQ ID NO: 74578 - DNA, 25 bp, Homo sapien
cccattggtgtaatttgcagcactg

SEQ ID NO: 74579 - DNA, 25 bp, Homo sapien
ataccagcagacacaaaattacttc

SEQ ID NO: 74580 - DNA, 25 bp, Homo sapien
aagtccctgttggattaccagtcct

SEQ ID NO: 74581 - DNA, 25 bp, Homo sapien
ttgctgagtgctatcataaccattc

SEQ ID NO: 74582 - DNA, 25 bp, Homo sapien
tgcagctgcagtagcaggatatgca

SEQ ID NO: 74583 - DNA, 25 bp, Homo sapien
gataaccaatcataggtgcagctgc

SEQ ID NO: 74584 - DNA, 25 bp, Homo sapien
ttgggaatatcctgttggcattgga

SEQ ID NO: 74585 - DNA, 25 bp, Homo sapien
taaagagcaattatgaaaaacagac

SEQ ID NO: 74586 - DNA, 25 bp, Homo sapien
ttaaatagcgaaaaagtgcaccata

SEQ ID NO: 74587 - DNA, 25 bp, Homo sapien
caggaatgtagagaaatatccaact

SEQ ID NO: 74588 - DNA, 25 bp, Homo sapien
tttgcagcactgtaaacaccattct

SEQ ID NO: 74589 - DNA, 25 bp, Homo sapien
cccattggtgtaatttgcagcactg

SEQ ID NO: 74590 - DNA, 25 bp, Homo sapien
ataccagcagacacaaaattacttc

SEQ ID NO: 74591 - DNA, 25 bp, Homo sapien
aagtccctgttggattaccagtcct

SEQ ID NO: 74592 - DNA, 25 bp, Homo sapien
ttgctgagtgctatcataaccattc

SEQ ID NO: 74593 - DNA, 25 bp, Homo sapien
tgcagctgcagtagcaggatatgca

SEQ ID NO: 74594 - DNA, 25 bp, Homo sapien
gataaccaatcataggtgcagctgc

SEQ ID NO: 74595 - DNA, 25 bp, Homo sapien
ttgggaatatcctgttggcattgga

SEQ ID NO: 74596 - DNA, 25 bp, Homo sapien
taaagagcaattatgaaaaacagac

SEQ ID NO: 74597 - DNA, 25 bp, Homo sapien
ttaaatagcgaaaaagtgcaccata

SEQ ID NO: 74598 - DNA, 25 bp, Homo sapien
caggaatgtagagaaatatccaact

SEQ ID NO: 74599 - DNA, 25 bp, Homo sapien
tgcagctgcagtagcaggatatgca

SEQ ID NO: 74600 - DNA, 25 bp, Homo sapien
caggaatgtagagaaatatccaact

SEQ ID NO: 74601 - DNA, 25 bp, Homo sapien
ttgggaatatcctgttggcattgga

SEQ ID NO: 74602 - DNA, 25 bp, Homo sapien
gataaccaatcataggtgcagctgc

SEQ ID NO: 74603 - DNA, 25 bp, Homo sapien
taaagagcaattatgaaaaacagac

SEQ ID NO: 74604 - DNA, 25 bp, Homo sapien
ataccagcagacacaaaattacttc

SEQ ID NO: 74605 - DNA, 25 bp, Homo sapien
aagtccctgttggattaccagtcct

SEQ ID NO: 74606 - DNA, 25 bp, Homo sapien
ttgctgagtgctatcataaccattc

SEQ ID NO: 74607 - DNA, 25 bp, Homo sapien
cccattggtgtaatttgcagcactg

SEQ ID NO: 74608 - DNA, 25 bp, Homo sapien
tttgcagcactgtaaacaccattct

SEQ ID NO: 74609 - DNA, 25 bp, Homo sapien
ttaaatagcgaaaaagtgcaccata

SEQ ID NO: 74610 - DNA, 25 bp, Homo sapien
tgcagctgcagtagcaggatatgca

SEQ ID NO: 74611 - DNA, 25 bp, Homo sapien
caggaatgtagagaaatatccaact

SEQ ID NO: 74612 - DNA, 25 bp, Homo sapien
ttgggaatatcctgttggcattgga

SEQ ID NO: 74613 - DNA, 25 bp, Homo sapien
ttgctgagtgctatcataaccattc

SEQ ID NO: 74614 - DNA, 25 bp, Homo sapien
gataaccaatcataggtgcagctgc

SEQ ID NO: 74615 - DNA, 25 bp, Homo sapien
taaagagcaattatgaaaaacagac

SEQ ID NO: 74616 - DNA, 25 bp, Homo sapien
ataccagcagacacaaaattacttc

SEQ ID NO: 74617 - DNA, 25 bp, Homo sapien
aagtccctgttggattaccagtcct

SEQ ID NO: 74618 - DNA, 25 bp, Homo sapien
cccattggtgtaatttgcagcactg

SEQ ID NO: 74619 - DNA, 25 bp, Homo sapien
tttgcagcactgtaaacaccattct

SEQ ID NO: 74620 - DNA, 25 bp, Homo sapien
ttaaatagcgaaaaagtgcaccata

SEQ ID NO: 74621 - DNA, 25 bp, Homo sapien
ttaaatagcgaaaaagtgcaccata

SEQ ID NO: 74622 - DNA, 25 bp, Homo sapien
tgcagctgcagtagcaggatatgca

SEQ ID NO: 74623 - DNA, 25 bp, Homo sapien
ttgctgagtgctatcataaccattc

SEQ ID NO: 74624 - DNA, 25 bp, Homo sapien
caggaatgtagagaaatatccaact

SEQ ID NO: 74625 - DNA, 25 bp, Homo sapien
ttgggaatatcctgttggcattgga

SEQ ID NO: 74626 - DNA, 25 bp, Homo sapien
taaagagcaattatgaaaaacagac

SEQ ID NO: 74627 - DNA, 25 bp, Homo sapien
gataaccaatcataggtgcagctgc

SEQ ID NO: 74628 - DNA, 25 bp, Homo sapien
ataccagcagacacaaaattacttc

SEQ ID NO: 74629 - DNA, 25 bp, Homo sapien
aagtccctgttggattaccagtcct

SEQ ID NO: 74630 - DNA, 25 bp, Homo sapien
cccattggtgtaatttgcagcactg

SEQ ID NO: 74631 - DNA, 25 bp, Homo sapien
tttgcagcactgtaaacaccattct

SEQ ID NO: 74632 - DNA, 25 bp, Homo sapien
tgcagctgcagtagcaggatatgca

SEQ ID NO: 74633 - DNA, 25 bp, Homo sapien
caggaatgtagagaaatatccaact

SEQ ID NO: 74634 - DNA, 25 bp, Homo sapien
ttgggaatatcctgttggcattgga

SEQ ID NO: 74635 - DNA, 25 bp, Homo sapien
gataaccaatcataggtgcagctgc

SEQ ID NO: 74636 - DNA, 25 bp, Homo sapien
taaagagcaattatgaaaaacagac

SEQ ID NO: 74637 - DNA, 25 bp, Homo sapien
ataccagcagacacaaaattacttc

SEQ ID NO: 74638 - DNA, 25 bp, Homo sapien
aagtccctgttggattaccagtcct

SEQ ID NO: 74639 - DNA, 25 bp, Homo sapien
ttgctgagtgctatcataaccattc

SEQ ID NO: 74640 - DNA, 25 bp, Homo sapien
cccattggtgtaatttgcagcactg

SEQ ID NO: 74641 - DNA, 25 bp, Homo sapien
tttgcagcactgtaaacaccattct

SEQ ID NO: 74642 - DNA, 25 bp, Homo sapien
ttaaatagcgaaaaagtgcaccata

SEQ ID NO: 74643 - DNA, 25 bp, Homo sapien
tgcagctgcagtagcaggatatgca

SEQ ID NO: 74644 - DNA, 25 bp, Homo sapien
caggaatgtagagaaatatccaact

SEQ ID NO: 74645 - DNA, 25 bp, Homo sapien
ttgggaatatcctgttggcattgga

SEQ ID NO: 74646 - DNA, 25 bp, Homo sapien
taaagagcaattatgaaaaacagac

SEQ ID NO: 74647 - DNA, 25 bp, Homo sapien
gataaccaatcataggtgcagctgc

SEQ ID NO: 74648 - DNA, 25 bp, Homo sapien
ataccagcagacacaaaattacttc

SEQ ID NO: 74649 - DNA, 25 bp, Homo sapien
aagtccctgttggattaccagtcct

SEQ ID NO: 74650 - DNA, 25 bp, Homo sapien
cccattggtgtaatttgcagcactg

SEQ ID NO: 74651 - DNA, 25 bp, Homo sapien
ttgctgagtgctatcataaccattc

SEQ ID NO: 74652 - DNA, 25 bp, Homo sapien
tttgcagcactgtaaacaccattct

SEQ ID NO: 74653 - DNA, 25 bp, Homo sapien
ttaaatagcgaaaaagtgcaccata

SEQ ID NO: 74654 - DNA, 25 bp, Homo sapien
ttaaatagcgaaaaagtgcaccata

SEQ ID NO: 74655 - DNA, 25 bp, Homo sapien
tgcagctgcagtagcaggatatgca

SEQ ID NO: 74656 - DNA, 25 bp, Homo sapien
caggaatgtagagaaatatccaact

SEQ ID NO: 74657 - DNA, 25 bp, Homo sapien
ttgggaatatcctgttggcattgga

SEQ ID NO: 74658 - DNA, 25 bp, Homo sapien
gataaccaatcataggtgcagctgc

SEQ ID NO: 74659 - DNA, 25 bp, Homo sapien
ataccagcagacacaaaattacttc

SEQ ID NO: 74660 - DNA, 25 bp, Homo sapien
taaagagcaattatgaaaaacagac

SEQ ID NO: 74661 - DNA, 25 bp, Homo sapien
aagtccctgttggattaccagtcct

SEQ ID NO: 74662 - DNA, 25 bp, Homo sapien
cccattggtgtaatttgcagcactg

SEQ ID NO: 74663 - DNA, 25 bp, Homo sapien
ttgctgagtgctatcataaccattc

SEQ ID NO: 74664 - DNA, 25 bp, Homo sapien
tttgcagcactgtaaacaccattct

SEQ ID NO: 74665 - DNA, 25 bp, Homo sapien
tgcagctgcagtagcaggatatgca

SEQ ID NO: 74666 - DNA, 25 bp, Homo sapien
caggaatgtagagaaatatccaact

SEQ ID NO: 74667 - DNA, 25 bp, Homo sapien
ttgggaatatcctgttggcattgga

SEQ ID NO: 74668 - DNA, 25 bp, Homo sapien
taaagagcaattatgaaaaacagac

SEQ ID NO: 74669 - DNA, 25 bp, Homo sapien
gataaccaatcataggtgcagctgc

SEQ ID NO: 74670 - DNA, 25 bp, Homo sapien
ataccagcagacacaaaattacttc

SEQ ID NO: 74671 - DNA, 25 bp, Homo sapien
aagtccctgttggattaccagtcct

SEQ ID NO: 74672 - DNA, 25 bp, Homo sapien
ttgctgagtgctatcataaccattc

SEQ ID NO: 74673 - DNA, 25 bp, Homo sapien
cccattggtgtaatttgcagcactg

SEQ ID NO: 74674 - DNA, 25 bp, Homo sapien
tttgcagcactgtaaacaccattct

SEQ ID NO: 74675 - DNA, 25 bp, Homo sapien
ttaaatagcgaaaaagtgcaccata

SEQ ID NO: 74676 - DNA, 25 bp, Homo sapien
tgcagctgcagtagcaggatatgca

SEQ ID NO: 74677 - DNA, 25 bp, Homo sapien
caggaatgtagagaaatatccaact

SEQ ID NO: 74678 - DNA, 25 bp, Homo sapien
ttgggaatatcctgttggcattgga

SEQ ID NO: 74679 - DNA, 25 bp, Homo sapien
gataaccaatcataggtgcagctgc

SEQ ID NO: 74680 - DNA, 25 bp, Homo sapien
taaagagcaattatgaaaaacagac

SEQ ID NO: 74681 - DNA, 25 bp, Homo sapien
ataccagcagacacaaaattacttc

SEQ ID NO: 74682 - DNA, 25 bp, Homo sapien
ttgctgagtgctatcataaccattc

SEQ ID NO: 74683 - DNA, 25 bp, Homo sapien
aagtccctgttggattaccagtcct

SEQ ID NO: 74684 - DNA, 25 bp, Homo sapien
cccattggtgtaatttgcagcactg

SEQ ID NO: 74685 - DNA, 25 bp, Homo sapien
tttgcagcactgtaaacaccattct

SEQ ID NO: 74686 - DNA, 25 bp, Homo sapien
ttaaatagcgaaaaagtgcaccata

SEQ ID NO: 74687 - DNA, 25 bp, Homo sapien
tgcagctgcagtagcaggatatgca

SEQ ID NO: 74688 - DNA, 25 bp, Homo sapien
ttgctgagtgctatcataaccattc

SEQ ID NO: 74689 - DNA, 25 bp, Homo sapien
caggaatgtagagaaatatccaact

SEQ ID NO: 74690 - DNA, 25 bp, Homo sapien
ttgggaatatcctgttggcattgga

SEQ ID NO: 74691 - DNA, 25 bp, Homo sapien
gataaccaatcataggtgcagctgc

SEQ ID NO: 74692 - DNA, 25 bp, Homo sapien
taaagagcaattatgaaaaacagac

SEQ ID NO: 74693 - DNA, 25 bp, Homo sapien
ataccagcagacacaaaattacttc

SEQ ID NO: 74694 - DNA, 25 bp, Homo sapien
aagtccctgttggattaccagtcct

SEQ ID NO: 74695 - DNA, 25 bp, Homo sapien
cccattggtgtaatttgcagcactg

SEQ ID NO: 74696 - DNA, 25 bp, Homo sapien
tttgcagcactgtaaacaccattct

SEQ ID NO: 74697 - DNA, 25 bp, Homo sapien
ttaaatagcgaaaaagtgcaccata

SEQ ID NO: 74698 - DNA, 25 bp, Homo sapien
ttgggaatatcctgttggcattgga

SEQ ID NO: 74699 - DNA, 25 bp, Homo sapien
ataccagcagacacaaaattacttc

SEQ ID NO: 74700 - DNA, 25 bp, Homo sapien
gataaccaatcataggtgcagctgc

SEQ ID NO: 74701 - DNA, 25 bp, Homo sapien
ttaaatagcgaaaaagtgcaccata

SEQ ID NO: 74702 - DNA, 25 bp, Homo sapien
tgcagctgcagtagcaggatatgca

SEQ ID NO: 74703 - DNA, 25 bp, Homo sapien
caggaatgtagagaaatatccaact

SEQ ID NO: 74704 - DNA, 25 bp, Homo sapien
tttgcagcactgtaaacaccattct

SEQ ID NO: 74705 - DNA, 25 bp, Homo sapien
ttgctgagtgctatcataaccattc

SEQ ID NO: 74706 - DNA, 25 bp, Homo sapien
taaagagcaattatgaaaaacagac

SEQ ID NO: 74707 - DNA, 25 bp, Homo sapien
cccattggtgtaatttgcagcactg

SEQ ID NO: 74708 - DNA, 25 bp, Homo sapien
aagtccctgttggattaccagtcct

SEQ ID NO: 74709 - DNA, 25 bp, Homo sapien
tgcagctgcagtagcaggatatgca

SEQ ID NO: 74710 - DNA, 25 bp, Homo sapien
ttgctgagtgctatcataaccattc

SEQ ID NO: 74711 - DNA, 25 bp, Homo sapien
caggaatgtagagaaatatccaact

SEQ ID NO: 74712 - DNA, 25 bp, Homo sapien
ttgggaatatcctgttggcattgga

SEQ ID NO: 74713 - DNA, 25 bp, Homo sapien
gataaccaatcataggtgcagctgc

SEQ ID NO: 74714 - DNA, 25 bp, Homo sapien
ataccagcagacacaaaattacttc

SEQ ID NO: 74715 - DNA, 25 bp, Homo sapien
taaagagcaattatgaaaaacagac

SEQ ID NO: 74716 - DNA, 25 bp, Homo sapien
aagtccctgttggattaccagtcct

SEQ ID NO: 74717 - DNA, 25 bp, Homo sapien
cccattggtgtaatttgcagcactg

SEQ ID NO: 74718 - DNA, 25 bp, Homo sapien
tttgcagcactgtaaacaccattct

SEQ ID NO: 74719 - DNA, 25 bp, Homo sapien
ttaaatagcgaaaaagtgcaccata

SEQ ID NO: 74720 - DNA, 25 bp, Homo sapien
tttgcagcactgtaaacaccattct

SEQ ID NO: 74721 - DNA, 25 bp, Homo sapien
cccattggtgtaatttgcagcactg

SEQ ID NO: 74722 - DNA, 25 bp, Homo sapien
ataccagcagacacaaaattacttc

SEQ ID NO: 74723 - DNA, 25 bp, Homo sapien
aagtccctgttggattaccagtcct

SEQ ID NO: 74724 - DNA, 25 bp, Homo sapien
ttgctgagtgctatcataaccattc

SEQ ID NO: 74725 - DNA, 25 bp, Homo sapien
tgcagctgcagtagcaggatatgca

SEQ ID NO: 74726 - DNA, 25 bp, Homo sapien
gataaccaatcataggtgcagctgc

SEQ ID NO: 74727 - DNA, 25 bp, Homo sapien
ttgggaatatcctgttggcattgga

SEQ ID NO: 74728 - DNA, 25 bp, Homo sapien
taaagagcaattatgaaaaacagac

SEQ ID NO: 74729 - DNA, 25 bp, Homo sapien
ttaaatagcgaaaaagtgcaccata

SEQ ID NO: 74730 - DNA, 25 bp, Homo sapien
caggaatgtagagaaatatccaact

SEQ ID NO: 74731 - DNA, 25 bp, Homo sapien
tgcatatcctgctactgcagctgca

SEQ ID NO: 74732 - DNA, 25 bp, Homo sapien
gtctgtttttcataattgctcttta

SEQ ID NO: 74733 - DNA, 25 bp, Homo sapien
agttggatatttctctacattcctg

SEQ ID NO: 74734 - DNA, 25 bp, Homo sapien
tccaatgccaacaggatattcccaa

SEQ ID NO: 74735 - DNA, 25 bp, Homo sapien
agaatggtgtttacagtgctgcaaa

SEQ ID NO: 74736 - DNA, 25 bp, Homo sapien
aggactggtaatccaacagggactt

SEQ ID NO: 74737 - DNA, 25 bp, Homo sapien
cagtgctgcaaattacaccaatggg

SEQ ID NO: 74738 - DNA, 25 bp, Homo sapien
gaatggttatgatagcactcagcaa

SEQ ID NO: 74739 - DNA, 25 bp, Homo sapien
tatggtgcactttttcgctatttaa

SEQ ID NO: 74740 - DNA, 25 bp, Homo sapien
gcagctgcacctatgattggttatc

SEQ ID NO: 74741 - DNA, 25 bp, Homo sapien
gaagtaattttgtgtctgctggtat

SEQ ID NO: 74742 - DNA, 25 bp, Homo sapien
ttgctgagtgctatcataaccattc

SEQ ID NO: 74743 - DNA, 25 bp, Homo sapien
ttaaatagcgaaaaagtgcaccata

SEQ ID NO: 74744 - DNA, 25 bp, Homo sapien
tgcagctgcagtagcaggatatgca

SEQ ID NO: 74745 - DNA, 25 bp, Homo sapien
caggaatgtagagaaatatccaact

SEQ ID NO: 74746 - DNA, 25 bp, Homo sapien
ttgggaatatcctgttggcattgga

SEQ ID NO: 74747 - DNA, 25 bp, Homo sapien
gataaccaatcataggtgcagctgc

SEQ ID NO: 74748 - DNA, 25 bp, Homo sapien
taaagagcaattatgaaaaacagac

SEQ ID NO: 74749 - DNA, 25 bp, Homo sapien
ataccagcagacacaaaattacttc

SEQ ID NO: 74750 - DNA, 25 bp, Homo sapien
aagtccctgttggattaccagtcct

SEQ ID NO: 74751 - DNA, 25 bp, Homo sapien
cccattggtgtaatttgcagcactg

SEQ ID NO: 74752 - DNA, 25 bp, Homo sapien
tttgcagcactgtaaacaccattct

SEQ ID NO: 74753 - DNA, 25 bp, Homo sapien
ttaaatagcgaaaaagtgcaccata

SEQ ID NO: 74754 - DNA, 25 bp, Homo sapien
aagtccctgttggattaccagtcct

SEQ ID NO: 74755 - DNA, 25 bp, Homo sapien
gataaccaatcataggtgcagctgc

SEQ ID NO: 74756 - DNA, 25 bp, Homo sapien
ttgggaatatcctgttggcattgga

SEQ ID NO: 74757 - DNA, 25 bp, Homo sapien
caggaatgtagagaaatatccaact

SEQ ID NO: 74758 - DNA, 25 bp, Homo sapien
tttgcagcactgtaaacaccattct

SEQ ID NO: 74759 - DNA, 25 bp, Homo sapien
tgcagctgcagtagcaggatatgca

SEQ ID NO: 74760 - DNA, 25 bp, Homo sapien
ttgctgagtgctatcataaccattc

SEQ ID NO: 74761 - DNA, 25 bp, Homo sapien
taaagagcaattatgaaaaacagac

SEQ ID NO: 74762 - DNA, 25 bp, Homo sapien
cccattggtgtaatttgcagcactg

SEQ ID NO: 74763 - DNA, 25 bp, Homo sapien
ataccagcagacacaaaattacttc

SEQ ID NO: 74764 - DNA, 25 bp, Homo sapien
tttgcagcactgtaaacaccattct

SEQ ID NO: 74765 - DNA, 25 bp, Homo sapien
cccattggtgtaatttgcagcactg

SEQ ID NO: 74766 - DNA, 25 bp, Homo sapien
ataccagcagacacaaaattacttc

SEQ ID NO: 74767 - DNA, 25 bp, Homo sapien
aagtccctgttggattaccagtcct

SEQ ID NO: 74768 - DNA, 25 bp, Homo sapien
ttgctgagtgctatcataaccattc

SEQ ID NO: 74769 - DNA, 25 bp, Homo sapien
tgcagctgcagtagcaggatatgca

SEQ ID NO: 74770 - DNA, 25 bp, Homo sapien
gataaccaatcataggtgcagctgc

SEQ ID NO: 74771 - DNA, 25 bp, Homo sapien
ttgggaatatcctgttggcattgga

SEQ ID NO: 74772 - DNA, 25 bp, Homo sapien
taaagagcaattatgaaaaacagac

SEQ ID NO: 74773 - DNA, 25 bp, Homo sapien
ttaaatagcgaaaaagtgcaccata

SEQ ID NO: 74774 - DNA, 25 bp, Homo sapien
caggaatgtagagaaatatccaact

SEQ ID NO: 74775 - DNA, 25 bp, Homo sapien
tttgcagcactgtaaacaccattct

SEQ ID NO: 74776 - DNA, 25 bp, Homo sapien
ttgctgagtgctatcataaccattc

SEQ ID NO: 74777 - DNA, 25 bp, Homo sapien
gataaccaatcataggtgcagctgc

SEQ ID NO: 74778 - DNA, 25 bp, Homo sapien
aagtccctgttggattaccagtcct

SEQ ID NO: 74779 - DNA, 25 bp, Homo sapien
ttgggaatatcctgttggcattgga

SEQ ID NO: 74780 - DNA, 25 bp, Homo sapien
tgcagctgcagtagcaggatatgca

SEQ ID NO: 74781 - DNA, 25 bp, Homo sapien
ataccagcagacacaaaattacttc

SEQ ID NO: 74782 - DNA, 25 bp, Homo sapien
cccattggtgtaatttgcagcactg

SEQ ID NO: 74783 - DNA, 25 bp, Homo sapien
ttaaatagcgaaaaagtgcaccata

SEQ ID NO: 74784 - DNA, 25 bp, Homo sapien
caggaatgtagagaaatatccaact

SEQ ID NO: 74785 - DNA, 25 bp, Homo sapien
taaagagcaattatgaaaaacagac

SEQ ID NO: 74786 - DNA, 25 bp, Homo sapien
tttgcagcactgtaaacaccattct

SEQ ID NO: 74787 - DNA, 25 bp, Homo sapien
cccattggtgtaatttgcagcactg

SEQ ID NO: 74788 - DNA, 25 bp, Homo sapien
ataccagcagacacaaaattacttc

SEQ ID NO: 74789 - DNA, 25 bp, Homo sapien
aagtccctgttggattaccagtcct

SEQ ID NO: 74790 - DNA, 25 bp, Homo sapien
ttgctgagtgctatcataaccattc

SEQ ID NO: 74791 - DNA, 25 bp, Homo sapien
tgcagctgcagtagcaggatatgca

SEQ ID NO: 74792 - DNA, 25 bp, Homo sapien
gataaccaatcataggtgcagctgc

SEQ ID NO: 74793 - DNA, 25 bp, Homo sapien
ttgggaatatcctgttggcattgga

SEQ ID NO: 74794 - DNA, 25 bp, Homo sapien
taaagagcaattatgaaaaacagac

SEQ ID NO: 74795 - DNA, 25 bp, Homo sapien
ttaaatagcgaaaaagtgcaccata

SEQ ID NO: 74796 - DNA, 25 bp, Homo sapien
caggaatgtagagaaatatccaact

SEQ ID NO: 74797 - DNA, 25 bp, Homo sapien
ttgggaatatcctgttggcattgga

SEQ ID NO: 74798 - DNA, 25 bp, Homo sapien
aagtccctgttggattaccagtcct

SEQ ID NO: 74799 - DNA, 25 bp, Homo sapien
tgcagctgcagtagcaggatatgca

SEQ ID NO: 74800 - DNA, 25 bp, Homo sapien
caggaatgtagagaaatatccaact

SEQ ID NO: 74801 - DNA, 25 bp, Homo sapien
cccattggtgtaatttgcagcactg

SEQ ID NO: 74802 - DNA, 25 bp, Homo sapien
gataaccaatcataggtgcagctgc

SEQ ID NO: 74803 - DNA, 25 bp, Homo sapien
ttgctgagtgctatcataaccattc

SEQ ID NO: 74804 - DNA, 25 bp, Homo sapien
tttgcagcactgtaaacaccattct

SEQ ID NO: 74805 - DNA, 25 bp, Homo sapien
ttaaatagcgaaaaagtgcaccata

SEQ ID NO: 74806 - DNA, 25 bp, Homo sapien
ataccagcagacacaaaattacttc

SEQ ID NO: 74807 - DNA, 25 bp, Homo sapien
taaagagcaattatgaaaaacagac

SEQ ID NO: 74808 - DNA, 25 bp, Homo sapien
tttgcagcactgtaaacaccattct

SEQ ID NO: 74809 - DNA, 25 bp, Homo sapien
cccattggtgtaatttgcagcactg

SEQ ID NO: 74810 - DNA, 25 bp, Homo sapien
ataccagcagacacaaaattacttc

SEQ ID NO: 74811 - DNA, 25 bp, Homo sapien
aagtccctgttggattaccagtcct

SEQ ID NO: 74812 - DNA, 25 bp, Homo sapien
ttgctgagtgctatcataaccattc

SEQ ID NO: 74813 - DNA, 25 bp, Homo sapien
tgcagctgcagtagcaggatatgca

SEQ ID NO: 74814 - DNA, 25 bp, Homo sapien
gataaccaatcataggtgcagctgc

SEQ ID NO: 74815 - DNA, 25 bp, Homo sapien
ttgggaatatcctgttggcattgga

SEQ ID NO: 74816 - DNA, 25 bp, Homo sapien
taaagagcaattatgaaaaacagac

SEQ ID NO: 74817 - DNA, 25 bp, Homo sapien
ttaaatagcgaaaaagtgcaccata

SEQ ID NO: 74818 - DNA, 25 bp, Homo sapien
caggaatgtagagaaatatccaact

SEQ ID NO: 74819 - DNA, 25 bp, Homo sapien
tttgcagcactgtaaacaccattct

SEQ ID NO: 74820 - DNA, 25 bp, Homo sapien
cccattggtgtaatttgcagcactg

SEQ ID NO: 74821 - DNA, 25 bp, Homo sapien
ataccagcagacacaaaattacttc

SEQ ID NO: 74822 - DNA, 25 bp, Homo sapien
aagtccctgttggattaccagtcct

SEQ ID NO: 74823 - DNA, 25 bp, Homo sapien
ttgctgagtgctatcataaccattc

SEQ ID NO: 74824 - DNA, 25 bp, Homo sapien
tgcagctgcagtagcaggatatgca

SEQ ID NO: 74825 - DNA, 25 bp, Homo sapien
gataaccaatcataggtgcagctgc

SEQ ID NO: 74826 - DNA, 25 bp, Homo sapien
ttgggaatatcctgttggcattgga

SEQ ID NO: 74827 - DNA, 25 bp, Homo sapien
taaagagcaattatgaaaaacagac

SEQ ID NO: 74828 - DNA, 25 bp, Homo sapien
ttaaatagcgaaaaagtgcaccata

SEQ ID NO: 74829 - DNA, 25 bp, Homo sapien
caggaatgtagagaaatatccaact

SEQ ID NO: 74830 - DNA, 25 bp, Homo sapien
caggaatgtagagaaatatccaact

SEQ ID NO: 74831 - DNA, 25 bp, Homo sapien
aagtccctgttggattaccagtcct

SEQ ID NO: 74832 - DNA, 25 bp, Homo sapien
tttgcagcactgtaaacaccattct

SEQ ID NO: 74833 - DNA, 25 bp, Homo sapien
ttgggaatatcctgttggcattgga

SEQ ID NO: 74834 - DNA, 25 bp, Homo sapien
ataccagcagacacaaaattacttc

SEQ ID NO: 74835 - DNA, 25 bp, Homo sapien
cccattggtgtaatttgcagcactg

SEQ ID NO: 74836 - DNA, 25 bp, Homo sapien
gataaccaatcataggtgcagctgc

SEQ ID NO: 74837 - DNA, 25 bp, Homo sapien
taaagagcaattatgaaaaacagac

SEQ ID NO: 74838 - DNA, 25 bp, Homo sapien
ttgctgagtgctatcataaccattc

SEQ ID NO: 74839 - DNA, 25 bp, Homo sapien
ttaaatagcgaaaaagtgcaccata

SEQ ID NO: 74840 - DNA, 25 bp, Homo sapien
tgcagctgcagtagcaggatatgca

SEQ ID NO: 74841 - DNA, 25 bp, Homo sapien
tttgcagcactgtaaacaccattct

SEQ ID NO: 74842 - DNA, 25 bp, Homo sapien
cccattggtgtaatttgcagcactg

SEQ ID NO: 74843 - DNA, 25 bp, Homo sapien
ataccagcagacacaaaattacttc

SEQ ID NO: 74844 - DNA, 25 bp, Homo sapien
aagtccctgttggattaccagtcct

SEQ ID NO: 74845 - DNA, 25 bp, Homo sapien
ttgctgagtgctatcataaccattc

SEQ ID NO: 74846 - DNA, 25 bp, Homo sapien
tgcagctgcagtagcaggatatgca

SEQ ID NO: 74847 - DNA, 25 bp, Homo sapien
gataaccaatcataggtgcagctgc

SEQ ID NO: 74848 - DNA, 25 bp, Homo sapien
ttgggaatatcctgttggcattgga

SEQ ID NO: 74849 - DNA, 25 bp, Homo sapien
taaagagcaattatgaaaaacagac

SEQ ID NO: 74850 - DNA, 25 bp, Homo sapien
ttaaatagcgaaaaagtgcaccata

SEQ ID NO: 74851 - DNA, 25 bp, Homo sapien
caggaatgtagagaaatatccaact

SEQ ID NO: 74852 - DNA, 25 bp, Homo sapien
taaagagcaattatgaaaaacagac

SEQ ID NO: 74853 - DNA, 25 bp, Homo sapien
cccattggtgtaatttgcagcactg

SEQ ID NO: 74854 - DNA, 25 bp, Homo sapien
tttgcagcactgtaaacaccattct

SEQ ID NO: 74855 - DNA, 25 bp, Homo sapien
aagtccctgttggattaccagtcct

SEQ ID NO: 74856 - DNA, 25 bp, Homo sapien
ataccagcagacacaaaattacttc

SEQ ID NO: 74857 - DNA, 25 bp, Homo sapien
ttgctgagtgctatcataaccattc

SEQ ID NO: 74858 - DNA, 25 bp, Homo sapien
ttgggaatatcctgttggcattgga

SEQ ID NO: 74859 - DNA, 25 bp, Homo sapien
gataaccaatcataggtgcagctgc

SEQ ID NO: 74860 - DNA, 25 bp, Homo sapien
ttaaatagcgaaaaagtgcaccata

SEQ ID NO: 74861 - DNA, 25 bp, Homo sapien
caggaatgtagagaaatatccaact

SEQ ID NO: 74862 - DNA, 25 bp, Homo sapien
tgcagctgcagtagcaggatatgca

SEQ ID NO: 74863 - DNA, 25 bp, Homo sapien
tttgcagcactgtaaacaccattct

SEQ ID NO: 74864 - DNA, 25 bp, Homo sapien
cccattggtgtaatttgcagcactg

SEQ ID NO: 74865 - DNA, 25 bp, Homo sapien
ataccagcagacacaaaattacttc

SEQ ID NO: 74866 - DNA, 25 bp, Homo sapien
aagtccctgttggattaccagtcct

SEQ ID NO: 74867 - DNA, 25 bp, Homo sapien
ttgctgagtgctatcataaccattc

SEQ ID NO: 74868 - DNA, 25 bp, Homo sapien
tgcagctgcagtagcaggatatgca

SEQ ID NO: 74869 - DNA, 25 bp, Homo sapien
gataaccaatcataggtgcagctgc

SEQ ID NO: 74870 - DNA, 25 bp, Homo sapien
ttgggaatatcctgttggcattgga

SEQ ID NO: 74871 - DNA, 25 bp, Homo sapien
taaagagcaattatgaaaaacagac

SEQ ID NO: 74872 - DNA, 25 bp, Homo sapien
ttaaatagcgaaaaagtgcaccata

SEQ ID NO: 74873 - DNA, 25 bp, Homo sapien
caggaatgtagagaaatatccaact

SEQ ID NO: 74874 - DNA, 25 bp, Homo sapien
ttaaatagcgaaaaagtgcaccata

SEQ ID NO: 74875 - DNA, 25 bp, Homo sapien
gataaccaatcataggtgcagctgc

SEQ ID NO: 74876 - DNA, 25 bp, Homo sapien
ataccagcagacacaaaattacttc

SEQ ID NO: 74877 - DNA, 25 bp, Homo sapien
tgcagctgcagtagcaggatatgca

SEQ ID NO: 74878 - DNA, 25 bp, Homo sapien
cccattggtgtaatttgcagcactg

SEQ ID NO: 74879 - DNA, 25 bp, Homo sapien
aagtccctgttggattaccagtcct

SEQ ID NO: 74880 - DNA, 25 bp, Homo sapien
taaagagcaattatgaaaaacagac

SEQ ID NO: 74881 - DNA, 25 bp, Homo sapien
tttgcagcactgtaaacaccattct

SEQ ID NO: 74882 - DNA, 25 bp, Homo sapien
ttgctgagtgctatcataaccattc

SEQ ID NO: 74883 - DNA, 25 bp, Homo sapien
ttgggaatatcctgttggcattgga

SEQ ID NO: 74884 - DNA, 25 bp, Homo sapien
caggaatgtagagaaatatccaact

SEQ ID NO: 74885 - DNA, 25 bp, Homo sapien
tttgcagcactgtaaacaccattct

SEQ ID NO: 74886 - DNA, 25 bp, Homo sapien
cccattggtgtaatttgcagcactg

SEQ ID NO: 74887 - DNA, 25 bp, Homo sapien
ataccagcagacacaaaattacttc

SEQ ID NO: 74888 - DNA, 25 bp, Homo sapien
aagtccctgttggattaccagtcct

SEQ ID NO: 74889 - DNA, 25 bp, Homo sapien
ttgctgagtgctatcataaccattc

SEQ ID NO: 74890 - DNA, 25 bp, Homo sapien
tgcagctgcagtagcaggatatgca

SEQ ID NO: 74891 - DNA, 25 bp, Homo sapien
gataaccaatcataggtgcagctgc

SEQ ID NO: 74892 - DNA, 25 bp, Homo sapien
ttgggaatatcctgttggcattgga

SEQ ID NO: 74893 - DNA, 25 bp, Homo sapien
taaagagcaattatgaaaaacagac

SEQ ID NO: 74894 - DNA, 25 bp, Homo sapien
ttaaatagcgaaaaagtgcaccata

SEQ ID NO: 74895 - DNA, 25 bp, Homo sapien
caggaatgtagagaaatatccaact

SEQ ID NO: 74896 - DNA, 25 bp, Homo sapien
caggaatgtagagaaatatccaact

SEQ ID NO: 74897 - DNA, 25 bp, Homo sapien
ataccagcagacacaaaattacttc

SEQ ID NO: 74898 - DNA, 25 bp, Homo sapien
gataaccaatcataggtgcagctgc

SEQ ID NO: 74899 - DNA, 25 bp, Homo sapien
cccattggtgtaatttgcagcactg

SEQ ID NO: 74900 - DNA, 25 bp, Homo sapien
ttgggaatatcctgttggcattgga

SEQ ID NO: 74901 - DNA, 25 bp, Homo sapien
tgcagctgcagtagcaggatatgca

SEQ ID NO: 74902 - DNA, 25 bp, Homo sapien
taaagagcaattatgaaaaacagac

SEQ ID NO: 74903 - DNA, 25 bp, Homo sapien
ttaaatagcgaaaaagtgcaccata

SEQ ID NO: 74904 - DNA, 25 bp, Homo sapien
ttgctgagtgctatcataaccattc

SEQ ID NO: 74905 - DNA, 25 bp, Homo sapien
tttgcagcactgtaaacaccattct

SEQ ID NO: 74906 - DNA, 25 bp, Homo sapien
aagtccctgttggattaccagtcct

SEQ ID NO: 74907 - DNA, 25 bp, Homo sapien
tttgcagcactgtaaacaccattct

SEQ ID NO: 74908 - DNA, 25 bp, Homo sapien
cccattggtgtaatttgcagcactg

SEQ ID NO: 74909 - DNA, 25 bp, Homo sapien
ataccagcagacacaaaattacttc

SEQ ID NO: 74910 - DNA, 25 bp, Homo sapien
aagtccctgttggattaccagtcct

SEQ ID NO: 74911 - DNA, 25 bp, Homo sapien
ttgctgagtgctatcataaccattc

SEQ ID NO: 74912 - DNA, 25 bp, Homo sapien
tgcagctgcagtagcaggatatgca

SEQ ID NO: 74913 - DNA, 25 bp, Homo sapien
gataaccaatcataggtgcagctgc

SEQ ID NO: 74914 - DNA, 25 bp, Homo sapien
ttgggaatatcctgttggcattgga

SEQ ID NO: 74915 - DNA, 25 bp, Homo sapien
taaagagcaattatgaaaaacagac

SEQ ID NO: 74916 - DNA, 25 bp, Homo sapien
ttaaatagcgaaaaagtgcaccata

SEQ ID NO: 74917 - DNA, 25 bp, Homo sapien
caggaatgtagagaaatatccaact

SEQ ID NO: 74918 - DNA, 25 bp, Homo sapien
aagtccctgttggattaccagtcct

SEQ ID NO: 74919 - DNA, 25 bp, Homo sapien
ttaaatagcgaaaaagtgcaccata

SEQ ID NO: 74920 - DNA, 25 bp, Homo sapien
ataccagcagacacaaaattacttc

SEQ ID NO: 74921 - DNA, 25 bp, Homo sapien
ttgctgagtgctatcataaccattc

SEQ ID NO: 74922 - DNA, 25 bp, Homo sapien
taaagagcaattatgaaaaacagac

SEQ ID NO: 74923 - DNA, 25 bp, Homo sapien
caggaatgtagagaaatatccaact

SEQ ID NO: 74924 - DNA, 25 bp, Homo sapien
ttgggaatatcctgttggcattgga

SEQ ID NO: 74925 - DNA, 25 bp, Homo sapien
tgcagctgcagtagcaggatatgca

SEQ ID NO: 74926 - DNA, 25 bp, Homo sapien
tttgcagcactgtaaacaccattct

SEQ ID NO: 74927 - DNA, 25 bp, Homo sapien
cccattggtgtaatttgcagcactg

SEQ ID NO: 74928 - DNA, 25 bp, Homo sapien
gataaccaatcataggtgcagctgc

SEQ ID NO: 74929 - DNA, 25 bp, Homo sapien
taaagagcaattatgaaaaacagac

SEQ ID NO: 74930 - DNA, 25 bp, Homo sapien
ttaaatagcgaaaaagtgcaccata

SEQ ID NO: 74931 - DNA, 25 bp, Homo sapien
tgcagctgcagtagcaggatatgca

SEQ ID NO: 74932 - DNA, 25 bp, Homo sapien
aagtccctgttggattaccagtcct

SEQ ID NO: 74933 - DNA, 25 bp, Homo sapien
ttgctgagtgctatcataaccattc

SEQ ID NO: 74934 - DNA, 25 bp, Homo sapien
gataaccaatcataggtgcagctgc

SEQ ID NO: 74935 - DNA, 25 bp, Homo sapien
tttgcagcactgtaaacaccattct

SEQ ID NO: 74936 - DNA, 25 bp, Homo sapien
cccattggtgtaatttgcagcactg

SEQ ID NO: 74937 - DNA, 25 bp, Homo sapien
caggaatgtagagaaatatccaact

SEQ ID NO: 74938 - DNA, 25 bp, Homo sapien
ttgggaatatcctgttggcattgga

SEQ ID NO: 74939 - DNA, 25 bp, Homo sapien
ataccagcagacacaaaattacttc

SEQ ID NO: 74940 - DNA, 25 bp, Homo sapien
tttgcagcactgtaaacaccattct

SEQ ID NO: 74941 - DNA, 25 bp, Homo sapien
cccattggtgtaatttgcagcactg

SEQ ID NO: 74942 - DNA, 25 bp, Homo sapien
ataccagcagacacaaaattacttc

SEQ ID NO: 74943 - DNA, 25 bp, Homo sapien
aagtccctgttggattaccagtcct

SEQ ID NO: 74944 - DNA, 25 bp, Homo sapien
ttgctgagtgctatcataaccattc

SEQ ID NO: 74945 - DNA, 25 bp, Homo sapien
tgcagctgcagtagcaggatatgca

SEQ ID NO: 74946 - DNA, 25 bp, Homo sapien
gataaccaatcataggtgcagctgc

SEQ ID NO: 74947 - DNA, 25 bp, Homo sapien
ttgggaatatcctgttggcattgga

SEQ ID NO: 74948 - DNA, 25 bp, Homo sapien
taaagagcaattatgaaaaacagac

SEQ ID NO: 74949 - DNA, 25 bp, Homo sapien
ttaaatagcgaaaaagtgcaccata

SEQ ID NO: 74950 - DNA, 25 bp, Homo sapien
caggaatgtagagaaatatccaact

SEQ ID NO: 74951 - DNA, 25 bp, Homo sapien
caggaatgtagagaaatatccaact

SEQ ID NO: 74952 - DNA, 25 bp, Homo sapien
ttaaatagcgaaaaagtgcaccata

SEQ ID NO: 74953 - DNA, 25 bp, Homo sapien
ttgctgagtgctatcataaccattc

SEQ ID NO: 74954 - DNA, 25 bp, Homo sapien
ataccagcagacacaaaattacttc

SEQ ID NO: 74955 - DNA, 25 bp, Homo sapien
tttgcagcactgtaaacaccattct

SEQ ID NO: 74956 - DNA, 25 bp, Homo sapien
aagtccctgttggattaccagtcct

SEQ ID NO: 74957 - DNA, 25 bp, Homo sapien
taaagagcaattatgaaaaacagac

SEQ ID NO: 74958 - DNA, 25 bp, Homo sapien
tgcagctgcagtagcaggatatgca

SEQ ID NO: 74959 - DNA, 25 bp, Homo sapien
cccattggtgtaatttgcagcactg

SEQ ID NO: 74960 - DNA, 25 bp, Homo sapien
ttgggaatatcctgttggcattgga

SEQ ID NO: 74961 - DNA, 25 bp, Homo sapien
gataaccaatcataggtgcagctgc

SEQ ID NO: 74962 - DNA, 25 bp, Homo sapien
tttgcagcactgtaaacaccattct

SEQ ID NO: 74963 - DNA, 25 bp, Homo sapien
cccattggtgtaatttgcagcactg

SEQ ID NO: 74964 - DNA, 25 bp, Homo sapien
ataccagcagacacaaaattacttc

SEQ ID NO: 74965 - DNA, 25 bp, Homo sapien
aagtccctgttggattaccagtcct

SEQ ID NO: 74966 - DNA, 25 bp, Homo sapien
ttgctgagtgctatcataaccattc

SEQ ID NO: 74967 - DNA, 25 bp, Homo sapien
tgcagctgcagtagcaggatatgca

SEQ ID NO: 74968 - DNA, 25 bp, Homo sapien
gataaccaatcataggtgcagctgc

SEQ ID NO: 74969 - DNA, 25 bp, Homo sapien
ttgggaatatcctgttggcattgga

SEQ ID NO: 74970 - DNA, 25 bp, Homo sapien
taaagagcaattatgaaaaacagac

SEQ ID NO: 74971 - DNA, 25 bp, Homo sapien
ttaaatagcgaaaaagtgcaccata

SEQ ID NO: 74972 - DNA, 25 bp, Homo sapien
caggaatgtagagaaatatccaact

SEQ ID NO: 74973 - DNA, 25 bp, Homo sapien
tgcagctgcagtagcaggatatgca

SEQ ID NO: 74974 - DNA, 25 bp, Homo sapien
tttgcagcactgtaaacaccattct

SEQ ID NO: 74975 - DNA, 25 bp, Homo sapien
gataaccaatcataggtgcagctgc

SEQ ID NO: 74976 - DNA, 25 bp, Homo sapien
ttaaatagcgaaaaagtgcaccata

SEQ ID NO: 74977 - DNA, 25 bp, Homo sapien
caggaatgtagagaaatatccaact

SEQ ID NO: 74978 - DNA, 25 bp, Homo sapien
taaagagcaattatgaaaaacagac

SEQ ID NO: 74979 - DNA, 25 bp, Homo sapien
ataccagcagacacaaaattacttc

SEQ ID NO: 74980 - DNA, 25 bp, Homo sapien
cccattggtgtaatttgcagcactg

SEQ ID NO: 74981 - DNA, 25 bp, Homo sapien
aagtccctgttggattaccagtcct

SEQ ID NO: 74982 - DNA, 25 bp, Homo sapien
ttgctgagtgctatcataaccattc

SEQ ID NO: 74983 - DNA, 25 bp, Homo sapien
ttgggaatatcctgttggcattgga

SEQ ID NO: 74984 - DNA, 25 bp, Homo sapien
tttgcagcactgtaaacaccattct

SEQ ID NO: 74985 - DNA, 25 bp, Homo sapien
cccattggtgtaatttgcagcactg

SEQ ID NO: 74986 - DNA, 25 bp, Homo sapien
ataccagcagacacaaaattacttc

SEQ ID NO: 74987 - DNA, 25 bp, Homo sapien
aagtccctgttggattaccagtcct

SEQ ID NO: 74988 - DNA, 25 bp, Homo sapien
ttgctgagtgctatcataaccattc

SEQ ID NO: 74989 - DNA, 25 bp, Homo sapien
tgcagctgcagtagcaggatatgca

SEQ ID NO: 74990 - DNA, 25 bp, Homo sapien
gataaccaatcataggtgcagctgc

SEQ ID NO: 74991 - DNA, 25 bp, Homo sapien
ttgggaatatcctgttggcattgga

SEQ ID NO: 74992 - DNA, 25 bp, Homo sapien
taaagagcaattatgaaaaacagac

SEQ ID NO: 74993 - DNA, 25 bp, Homo sapien
ttaaatagcgaaaaagtgcaccata

SEQ ID NO: 74994 - DNA, 25 bp, Homo sapien
caggaatgtagagaaatatccaact

SEQ ID NO: 74995 - DNA, 25 bp, Homo sapien
tttgcagcactgtaaacaccattct

SEQ ID NO: 74996 - DNA, 25 bp, Homo sapien
caggaatgtagagaaatatccaact

SEQ ID NO: 74997 - DNA, 25 bp, Homo sapien
gataaccaatcataggtgcagctgc

SEQ ID NO: 74998 - DNA, 25 bp, Homo sapien
ttgctgagtgctatcataaccattc

SEQ ID NO: 74999 - DNA, 25 bp, Homo sapien
aagtccctgttggattaccagtcct

SEQ ID NO: 75000 - DNA, 25 bp, Homo sapien
tgcagctgcagtagcaggatatgca

SEQ ID NO: 75001 - DNA, 25 bp, Homo sapien
ttgggaatatcctgttggcattgga

SEQ ID NO: 75002 - DNA, 25 bp, Homo sapien
ttaaatagcgaaaaagtgcaccata

SEQ ID NO: 75003 - DNA, 25 bp, Homo sapien
taaagagcaattatgaaaaacagac

SEQ ID NO: 75004 - DNA, 25 bp, Homo sapien
ataccagcagacacaaaattacttc

SEQ ID NO: 75005 - DNA, 25 bp, Homo sapien
cccattggtgtaatttgcagcactg

SEQ ID NO: 75006 - DNA, 25 bp, Homo sapien
tttgcagcactgtaaacaccattct

SEQ ID NO: 75007 - DNA, 25 bp, Homo sapien
cccattggtgtaatttgcagcactg

SEQ ID NO: 75008 - DNA, 25 bp, Homo sapien
ataccagcagacacaaaattacttc

SEQ ID NO: 75009 - DNA, 25 bp, Homo sapien
aagtccctgttggattaccagtcct

SEQ ID NO: 75010 - DNA, 25 bp, Homo sapien
ttgctgagtgctatcataaccattc

SEQ ID NO: 75011 - DNA, 25 bp, Homo sapien
tgcagctgcagtagcaggatatgca

SEQ ID NO: 75012 - DNA, 25 bp, Homo sapien
gataaccaatcataggtgcagctgc

SEQ ID NO: 75013 - DNA, 25 bp, Homo sapien
ttgggaatatcctgttggcattgga

SEQ ID NO: 75014 - DNA, 25 bp, Homo sapien
taaagagcaattatgaaaaacagac

SEQ ID NO: 75015 - DNA, 25 bp, Homo sapien
ttaaatagcgaaaaagtgcaccata

SEQ ID NO: 75016 - DNA, 25 bp, Homo sapien
caggaatgtagagaaatatccaact

SEQ ID NO: 75017 - DNA, 25 bp, Homo sapien
gataaccaatcataggtgcagctgc

SEQ ID NO: 75018 - DNA, 25 bp, Homo sapien
ttgggaatatcctgttggcattgga

SEQ ID NO: 75019 - DNA, 25 bp, Homo sapien
cccattggtgtaatttgcagcactg

SEQ ID NO: 75020 - DNA, 25 bp, Homo sapien
tgcagctgcagtagcaggatatgca

SEQ ID NO: 75021 - DNA, 25 bp, Homo sapien
ttgctgagtgctatcataaccattc

SEQ ID NO: 75022 - DNA, 25 bp, Homo sapien
aagtccctgttggattaccagtcct

SEQ ID NO: 75023 - DNA, 25 bp, Homo sapien
ttaaatagcgaaaaagtgcaccata

SEQ ID NO: 75024 - DNA, 25 bp, Homo sapien
ataccagcagacacaaaattacttc

SEQ ID NO: 75025 - DNA, 25 bp, Homo sapien
caggaatgtagagaaatatccaact

SEQ ID NO: 75026 - DNA, 25 bp, Homo sapien
taaagagcaattatgaaaaacagac

SEQ ID NO: 75027 - DNA, 25 bp, Homo sapien
tttgcagcactgtaaacaccattct

SEQ ID NO: 75028 - DNA, 25 bp, Homo sapien
tttgcagcactgtaaacaccattct

SEQ ID NO: 75029 - DNA, 25 bp, Homo sapien
cccattggtgtaatttgcagcactg

SEQ ID NO: 75030 - DNA, 25 bp, Homo sapien
ataccagcagacacaaaattacttc

SEQ ID NO: 75031 - DNA, 25 bp, Homo sapien
aagtccctgttggattaccagtcct

SEQ ID NO: 75032 - DNA, 25 bp, Homo sapien
ttgctgagtgctatcataaccattc

SEQ ID NO: 75033 - DNA, 25 bp, Homo sapien
tgcagctgcagtagcaggatatgca

SEQ ID NO: 75034 - DNA, 25 bp, Homo sapien
gataaccaatcataggtgcagctgc

SEQ ID NO: 75035 - DNA, 25 bp, Homo sapien
ttgggaatatcctgttggcattgga

SEQ ID NO: 75036 - DNA, 25 bp, Homo sapien
taaagagcaattatgaaaaacagac

SEQ ID NO: 75037 - DNA, 25 bp, Homo sapien
ttaaatagcgaaaaagtgcaccata

SEQ ID NO: 75038 - DNA, 25 bp, Homo sapien
caggaatgtagagaaatatccaact

SEQ ID NO: 75039 - DNA, 25 bp, Homo sapien
tgcagctgcagtagcaggatatgca

SEQ ID NO: 75040 - DNA, 25 bp, Homo sapien
taaagagcaattatgaaaaacagac

SEQ ID NO: 75041 - DNA, 25 bp, Homo sapien
ttaaatagcgaaaaagtgcaccata

SEQ ID NO: 75042 - DNA, 25 bp, Homo sapien
cccattggtgtaatttgcagcactg

SEQ ID NO: 75043 - DNA, 25 bp, Homo sapien
tttgcagcactgtaaacaccattct

SEQ ID NO: 75044 - DNA, 25 bp, Homo sapien
ataccagcagacacaaaattacttc

SEQ ID NO: 75045 - DNA, 25 bp, Homo sapien
caggaatgtagagaaatatccaact

SEQ ID NO: 75046 - DNA, 25 bp, Homo sapien
ttgctgagtgctatcataaccattc

SEQ ID NO: 75047 - DNA, 25 bp, Homo sapien
gataaccaatcataggtgcagctgc

SEQ ID NO: 75048 - DNA, 25 bp, Homo sapien
ttgggaatatcctgttggcattgga

SEQ ID NO: 75049 - DNA, 25 bp, Homo sapien
aagtccctgttggattaccagtcct

SEQ ID NO: 75050 - DNA, 25 bp, Homo sapien
tttgcagcactgtaaacaccattct

SEQ ID NO: 75051 - DNA, 25 bp, Homo sapien
cccattggtgtaatttgcagcactg

SEQ ID NO: 75052 - DNA, 25 bp, Homo sapien
ataccagcagacacaaaattacttc

SEQ ID NO: 75053 - DNA, 25 bp, Homo sapien
aagtccctgttggattaccagtcct

SEQ ID NO: 75054 - DNA, 25 bp, Homo sapien
ttgctgagtgctatcataaccattc

SEQ ID NO: 75055 - DNA, 25 bp, Homo sapien
tgcagctgcagtagcaggatatgca

SEQ ID NO: 75056 - DNA, 25 bp, Homo sapien
gataaccaatcataggtgcagctgc

SEQ ID NO: 75057 - DNA, 25 bp, Homo sapien
ttgggaatatcctgttggcattgga

SEQ ID NO: 75058 - DNA, 25 bp, Homo sapien
taaagagcaattatgaaaaacagac

SEQ ID NO: 75059 - DNA, 25 bp, Homo sapien
ttaaatagcgaaaaagtgcaccata

SEQ ID NO: 75060 - DNA, 25 bp, Homo sapien
caggaatgtagagaaatatccaact

SEQ ID NO: 75061 - DNA, 25 bp, Homo sapien
tttgcagcactgtaaacaccattct

SEQ ID NO: 75062 - DNA, 25 bp, Homo sapien
cccattggtgtaatttgcagcactg

SEQ ID NO: 75063 - DNA, 25 bp, Homo sapien
ataccagcagacacaaaattacttc

SEQ ID NO: 75064 - DNA, 25 bp, Homo sapien
aagtccctgttggattaccagtcct

SEQ ID NO: 75065 - DNA, 25 bp, Homo sapien
ttgctgagtgctatcataaccattc

SEQ ID NO: 75066 - DNA, 25 bp, Homo sapien
tgcagctgcagtagcaggatatgca

SEQ ID NO: 75067 - DNA, 25 bp, Homo sapien
gataaccaatcataggtgcagctgc

SEQ ID NO: 75068 - DNA, 25 bp, Homo sapien
ttgggaatatcctgttggcattgga

SEQ ID NO: 75069 - DNA, 25 bp, Homo sapien
taaagagcaattatgaaaaacagac

SEQ ID NO: 75070 - DNA, 25 bp, Homo sapien
ttaaatagcgaaaaagtgcaccata

SEQ ID NO: 75071 - DNA, 25 bp, Homo sapien
caggaatgtagagaaatatccaact

SEQ ID NO: 75072 - DNA, 25 bp, Homo sapien
tttgcagcactgtaaacaccattct

SEQ ID NO: 75073 - DNA, 25 bp, Homo sapien
taaagagcaattatgaaaaacagac

SEQ ID NO: 75074 - DNA, 25 bp, Homo sapien
cccattggtgtaatttgcagcactg

SEQ ID NO: 75075 - DNA, 25 bp, Homo sapien
ttaaatagcgaaaaagtgcaccata

SEQ ID NO: 75076 - DNA, 25 bp, Homo sapien
aagtccctgttggattaccagtcct

SEQ ID NO: 75077 - DNA, 25 bp, Homo sapien
tgcagctgcagtagcaggatatgca

SEQ ID NO: 75078 - DNA, 25 bp, Homo sapien
ataccagcagacacaaaattacttc

SEQ ID NO: 75079 - DNA, 25 bp, Homo sapien
caggaatgtagagaaatatccaact

SEQ ID NO: 75080 - DNA, 25 bp, Homo sapien
gataaccaatcataggtgcagctgc

SEQ ID NO: 75081 - DNA, 25 bp, Homo sapien
ttgctgagtgctatcataaccattc

SEQ ID NO: 75082 - DNA, 25 bp, Homo sapien
ttgggaatatcctgttggcattgga

SEQ ID NO: 75083 - DNA, 25 bp, Homo sapien
tttgcagcactgtaaacaccattct

SEQ ID NO: 75084 - DNA, 25 bp, Homo sapien
cccattggtgtaatttgcagcactg

SEQ ID NO: 75085 - DNA, 25 bp, Homo sapien
ataccagcagacacaaaattacttc

SEQ ID NO: 75086 - DNA, 25 bp, Homo sapien
aagtccctgttggattaccagtcct

SEQ ID NO: 75087 - DNA, 25 bp, Homo sapien
ttgctgagtgctatcataaccattc

SEQ ID NO: 75088 - DNA, 25 bp, Homo sapien
tgcagctgcagtagcaggatatgca

SEQ ID NO: 75089 - DNA, 25 bp, Homo sapien
gataaccaatcataggtgcagctgc

SEQ ID NO: 75090 - DNA, 25 bp, Homo sapien
ttgggaatatcctgttggcattgga

SEQ ID NO: 75091 - DNA, 25 bp, Homo sapien
taaagagcaattatgaaaaacagac

SEQ ID NO: 75092 - DNA, 25 bp, Homo sapien
ttaaatagcgaaaaagtgcaccata

SEQ ID NO: 75093 - DNA, 25 bp, Homo sapien
caggaatgtagagaaatatccaact

SEQ ID NO: 75094 - DNA, 25 bp, Homo sapien
gataaccaatcataggtgcagctgc

SEQ ID NO: 75095 - DNA, 25 bp, Homo sapien
cccattggtgtaatttgcagcactg

SEQ ID NO: 75096 - DNA, 25 bp, Homo sapien
ataccagcagacacaaaattacttc

SEQ ID NO: 75097 - DNA, 25 bp, Homo sapien
aagtccctgttggattaccagtcct

SEQ ID NO: 75098 - DNA, 25 bp, Homo sapien
tgcagctgcagtagcaggatatgca

SEQ ID NO: 75099 - DNA, 25 bp, Homo sapien
ttaaatagcgaaaaagtgcaccata

SEQ ID NO: 75100 - DNA, 25 bp, Homo sapien
ttgggaatatcctgttggcattgga

SEQ ID NO: 75101 - DNA, 25 bp, Homo sapien
ttgctgagtgctatcataaccattc

SEQ ID NO: 75102 - DNA, 25 bp, Homo sapien
tttgcagcactgtaaacaccattct

SEQ ID NO: 75103 - DNA, 25 bp, Homo sapien
taaagagcaattatgaaaaacagac

SEQ ID NO: 75104 - DNA, 25 bp, Homo sapien
caggaatgtagagaaatatccaact

SEQ ID NO: 75105 - DNA, 25 bp, Homo sapien
tttgcagcactgtaaacaccattct

SEQ ID NO: 75106 - DNA, 25 bp, Homo sapien
cccattggtgtaatttgcagcactg

SEQ ID NO: 75107 - DNA, 25 bp, Homo sapien
ataccagcagacacaaaattacttc

SEQ ID NO: 75108 - DNA, 25 bp, Homo sapien
aagtccctgttggattaccagtcct

SEQ ID NO: 75109 - DNA, 25 bp, Homo sapien
ttgctgagtgctatcataaccattc

SEQ ID NO: 75110 - DNA, 25 bp, Homo sapien
tgcagctgcagtagcaggatatgca

SEQ ID NO: 75111 - DNA, 25 bp, Homo sapien
gataaccaatcataggtgcagctgc

SEQ ID NO: 75112 - DNA, 25 bp, Homo sapien
ttgggaatatcctgttggcattgga

SEQ ID NO: 75113 - DNA, 25 bp, Homo sapien
taaagagcaattatgaaaaacagac

SEQ ID NO: 75114 - DNA, 25 bp, Homo sapien
ttaaatagcgaaaaagtgcaccata

SEQ ID NO: 75115 - DNA, 25 bp, Homo sapien
caggaatgtagagaaatatccaact

SEQ ID NO: 75116 - DNA, 25 bp, Homo sapien
ttgggaatatcctgttggcattgga

SEQ ID NO: 75117 - DNA, 25 bp, Homo sapien
ttgctgagtgctatcataaccattc

SEQ ID NO: 75118 - DNA, 25 bp, Homo sapien
caggaatgtagagaaatatccaact

SEQ ID NO: 75119 - DNA, 25 bp, Homo sapien
gataaccaatcataggtgcagctgc

SEQ ID NO: 75120 - DNA, 25 bp, Homo sapien
ataccagcagacacaaaattacttc

SEQ ID NO: 75121 - DNA, 25 bp, Homo sapien
cccattggtgtaatttgcagcactg

SEQ ID NO: 75122 - DNA, 25 bp, Homo sapien
tttgcagcactgtaaacaccattct

SEQ ID NO: 75123 - DNA, 25 bp, Homo sapien
ttaaatagcgaaaaagtgcaccata

SEQ ID NO: 75124 - DNA, 25 bp, Homo sapien
tgcagctgcagtagcaggatatgca

SEQ ID NO: 75125 - DNA, 25 bp, Homo sapien
aagtccctgttggattaccagtcct

SEQ ID NO: 75126 - DNA, 25 bp, Homo sapien
taaagagcaattatgaaaaacagac

SEQ ID NO: 75127 - DNA, 25 bp, Homo sapien
tttgcagcactgtaaacaccattct

SEQ ID NO: 75128 - DNA, 25 bp, Homo sapien
cccattggtgtaatttgcagcactg

SEQ ID NO: 75129 - DNA, 25 bp, Homo sapien
ataccagcagacacaaaattacttc

SEQ ID NO: 75130 - DNA, 25 bp, Homo sapien
aagtccctgttggattaccagtcct

SEQ ID NO: 75131 - DNA, 25 bp, Homo sapien
ttgctgagtgctatcataaccattc

SEQ ID NO: 75132 - DNA, 25 bp, Homo sapien
tgcagctgcagtagcaggatatgca

SEQ ID NO: 75133 - DNA, 25 bp, Homo sapien
gataaccaatcataggtgcagctgc

SEQ ID NO: 75134 - DNA, 25 bp, Homo sapien
ttgggaatatcctgttggcattgga

SEQ ID NO: 75135 - DNA, 25 bp, Homo sapien
taaagagcaattatgaaaaacagac

SEQ ID NO: 75136 - DNA, 25 bp, Homo sapien
ttaaatagcgaaaaagtgcaccata

SEQ ID NO: 75137 - DNA, 25 bp, Homo sapien
caggaatgtagagaaatatccaact

SEQ ID NO: 75138 - DNA, 25 bp, Homo sapien
tgcagctgcagtagcaggatatgca

SEQ ID NO: 75139 - DNA, 25 bp, Homo sapien
cccattggtgtaatttgcagcactg

SEQ ID NO: 75140 - DNA, 25 bp, Homo sapien
ataccagcagacacaaaattacttc

SEQ ID NO: 75141 - DNA, 25 bp, Homo sapien
taaagagcaattatgaaaaacagac

SEQ ID NO: 75142 - DNA, 25 bp, Homo sapien
ttgggaatatcctgttggcattgga

SEQ ID NO: 75143 - DNA, 25 bp, Homo sapien
ttaaatagcgaaaaagtgcaccata

SEQ ID NO: 75144 - DNA, 25 bp, Homo sapien
aagtccctgttggattaccagtcct

SEQ ID NO: 75145 - DNA, 25 bp, Homo sapien
tttgcagcactgtaaacaccattct

SEQ ID NO: 75146 - DNA, 25 bp, Homo sapien
gataaccaatcataggtgcagctgc

SEQ ID NO: 75147 - DNA, 25 bp, Homo sapien
ttgctgagtgctatcataaccattc

SEQ ID NO: 75148 - DNA, 25 bp, Homo sapien
caggaatgtagagaaatatccaact

SEQ ID NO: 75149 - DNA, 25 bp, Homo sapien
tttgcagcactgtaaacaccattct

SEQ ID NO: 75150 - DNA, 25 bp, Homo sapien
cccattggtgtaatttgcagcactg

SEQ ID NO: 75151 - DNA, 25 bp, Homo sapien
ataccagcagacacaaaattacttc

SEQ ID NO: 75152 - DNA, 25 bp, Homo sapien
aagtccctgttggattaccagtcct

SEQ ID NO: 75153 - DNA, 25 bp, Homo sapien
ttgctgagtgctatcataaccattc

SEQ ID NO: 75154 - DNA, 25 bp, Homo sapien
tgcagctgcagtagcaggatatgca

SEQ ID NO: 75155 - DNA, 25 bp, Homo sapien
gataaccaatcataggtgcagctgc

SEQ ID NO: 75156 - DNA, 25 bp, Homo sapien
ttgggaatatcctgttggcattgga

SEQ ID NO: 75157 - DNA, 25 bp, Homo sapien
taaagagcaattatgaaaaacagac

SEQ ID NO: 75158 - DNA, 25 bp, Homo sapien
ttaaatagcgaaaaagtgcaccata

SEQ ID NO: 75159 - DNA, 25 bp, Homo sapien
caggaatgtagagaaatatccaact

SEQ ID NO: 75160 - DNA, 25 bp, Homo sapien
ataccagcagacacaaaattacttc

SEQ ID NO: 75161 - DNA, 25 bp, Homo sapien
tgcagctgcagtagcaggatatgca

SEQ ID NO: 75162 - DNA, 25 bp, Homo sapien
cccattggtgtaatttgcagcactg

SEQ ID NO: 75163 - DNA, 25 bp, Homo sapien
ttgctgagtgctatcataaccattc

SEQ ID NO: 75164 - DNA, 25 bp, Homo sapien
aagtccctgttggattaccagtcct

SEQ ID NO: 75165 - DNA, 25 bp, Homo sapien
taaagagcaattatgaaaaacagac

SEQ ID NO: 75166 - DNA, 25 bp, Homo sapien
ttgggaatatcctgttggcattgga

SEQ ID NO: 75167 - DNA, 25 bp, Homo sapien
gataaccaatcataggtgcagctgc

SEQ ID NO: 75168 - DNA, 25 bp, Homo sapien
tttgcagcactgtaaacaccattct

SEQ ID NO: 75169 - DNA, 25 bp, Homo sapien
caggaatgtagagaaatatccaact

SEQ ID NO: 75170 - DNA, 25 bp, Homo sapien
ttaaatagcgaaaaagtgcaccata

SEQ ID NO: 75171 - DNA, 25 bp, Homo sapien
taaagagcaattatgaaaaacagac

SEQ ID NO: 75172 - DNA, 25 bp, Homo sapien
cccattggtgtaatttgcagcactg

SEQ ID NO: 75173 - DNA, 25 bp, Homo sapien
caggaatgtagagaaatatccaact

SEQ ID NO: 75174 - DNA, 25 bp, Homo sapien
gataaccaatcataggtgcagctgc

SEQ ID NO: 75175 - DNA, 25 bp, Homo sapien
aagtccctgttggattaccagtcct

SEQ ID NO: 75176 - DNA, 25 bp, Homo sapien
tttgcagcactgtaaacaccattct

SEQ ID NO: 75177 - DNA, 25 bp, Homo sapien
ttgctgagtgctatcataaccattc

SEQ ID NO: 75178 - DNA, 25 bp, Homo sapien
ttgggaatatcctgttggcattgga

SEQ ID NO: 75179 - DNA, 25 bp, Homo sapien
ataccagcagacacaaaattacttc

SEQ ID NO: 75180 - DNA, 25 bp, Homo sapien
ttaaatagcgaaaaagtgcaccata

SEQ ID NO: 75181 - DNA, 25 bp, Homo sapien
tgcagctgcagtagcaggatatgca

SEQ ID NO: 75182 - DNA, 25 bp, Homo sapien
tttgcagcactgtaaacaccattct

SEQ ID NO: 75183 - DNA, 25 bp, Homo sapien
cccattggtgtaatttgcagcactg

SEQ ID NO: 75184 - DNA, 25 bp, Homo sapien
ataccagcagacacaaaattacttc

SEQ ID NO: 75185 - DNA, 25 bp, Homo sapien
aagtccctgttggattaccagtcct

SEQ ID NO: 75186 - DNA, 25 bp, Homo sapien
ttgctgagtgctatcataaccattc

SEQ ID NO: 75187 - DNA, 25 bp, Homo sapien
tgcagctgcagtagcaggatatgca

SEQ ID NO: 75188 - DNA, 25 bp, Homo sapien
gataaccaatcataggtgcagctgc

SEQ ID NO: 75189 - DNA, 25 bp, Homo sapien
ttgggaatatcctgttggcattgga

SEQ ID NO: 75190 - DNA, 25 bp, Homo sapien
taaagagcaattatgaaaaacagac

SEQ ID NO: 75191 - DNA, 25 bp, Homo sapien
ttaaatagcgaaaaagtgcaccata

SEQ ID NO: 75192 - DNA, 25 bp, Homo sapien
caggaatgtagagaaatatccaact

SEQ ID NO: 75193 - DNA, 25 bp, Homo sapien
tgcagctgcagtagcaggatatgca

SEQ ID NO: 75194 - DNA, 25 bp, Homo sapien
aagtccctgttggattaccagtcct

SEQ ID NO: 75195 - DNA, 25 bp, Homo sapien
ataccagcagacacaaaattacttc

SEQ ID NO: 75196 - DNA, 25 bp, Homo sapien
cccattggtgtaatttgcagcactg

SEQ ID NO: 75197 - DNA, 25 bp, Homo sapien
ttgctgagtgctatcataaccattc

SEQ ID NO: 75198 - DNA, 25 bp, Homo sapien
tttgcagcactgtaaacaccattct

SEQ ID NO: 75199 - DNA, 25 bp, Homo sapien
caggaatgtagagaaatatccaact

SEQ ID NO: 75200 - DNA, 25 bp, Homo sapien
ttgggaatatcctgttggcattgga

SEQ ID NO: 75201 - DNA, 25 bp, Homo sapien
gataaccaatcataggtgcagctgc

SEQ ID NO: 75202 - DNA, 25 bp, Homo sapien
taaagagcaattatgaaaaacagac

SEQ ID NO: 75203 - DNA, 25 bp, Homo sapien
ttaaatagcgaaaaagtgcaccata

SEQ ID NO: 75204 - DNA, 25 bp, Homo sapien
tttgcagcactgtaaacaccattct

SEQ ID NO: 75205 - DNA, 25 bp, Homo sapien
cccattggtgtaatttgcagcactg

SEQ ID NO: 75206 - DNA, 25 bp, Homo sapien
ataccagcagacacaaaattacttc

SEQ ID NO: 75207 - DNA, 25 bp, Homo sapien
aagtccctgttggattaccagtcct

SEQ ID NO: 75208 - DNA, 25 bp, Homo sapien
ttgctgagtgctatcataaccattc

SEQ ID NO: 75209 - DNA, 25 bp, Homo sapien
tgcagctgcagtagcaggatatgca

SEQ ID NO: 75210 - DNA, 25 bp, Homo sapien
gataaccaatcataggtgcagctgc

SEQ ID NO: 75211 - DNA, 25 bp, Homo sapien
ttgggaatatcctgttggcattgga

SEQ ID NO: 75212 - DNA, 25 bp, Homo sapien
taaagagcaattatgaaaaacagac

SEQ ID NO: 75213 - DNA, 25 bp, Homo sapien
ttaaatagcgaaaaagtgcaccata

SEQ ID NO: 75214 - DNA, 25 bp, Homo sapien
caggaatgtagagaaatatccaact

SEQ ID NO: 75215 - DNA, 25 bp, Homo sapien
caggaatgtagagaaatatccaact

SEQ ID NO: 75216 - DNA, 25 bp, Homo sapien
cccattggtgtaatttgcagcactg

SEQ ID NO: 75217 - DNA, 25 bp, Homo sapien
tttgcagcactgtaaacaccattct

SEQ ID NO: 75218 - DNA, 25 bp, Homo sapien
ttaaatagcgaaaaagtgcaccata

SEQ ID NO: 75219 - DNA, 25 bp, Homo sapien
gataaccaatcataggtgcagctgc

SEQ ID NO: 75220 - DNA, 25 bp, Homo sapien
aagtccctgttggattaccagtcct

SEQ ID NO: 75221 - DNA, 25 bp, Homo sapien
ataccagcagacacaaaattacttc

SEQ ID NO: 75222 - DNA, 25 bp, Homo sapien
ttgggaatatcctgttggcattgga

SEQ ID NO: 75223 - DNA, 25 bp, Homo sapien
taaagagcaattatgaaaaacagac

SEQ ID NO: 75224 - DNA, 25 bp, Homo sapien
tgcagctgcagtagcaggatatgca

SEQ ID NO: 75225 - DNA, 25 bp, Homo sapien
ttgctgagtgctatcataaccattc

SEQ ID NO: 75226 - DNA, 25 bp, Homo sapien
tttgcagcactgtaaacaccattct

SEQ ID NO: 75227 - DNA, 25 bp, Homo sapien
cccattggtgtaatttgcagcactg

SEQ ID NO: 75228 - DNA, 25 bp, Homo sapien
ataccagcagacacaaaattacttc

SEQ ID NO: 75229 - DNA, 25 bp, Homo sapien
aagtccctgttggattaccagtcct

SEQ ID NO: 75230 - DNA, 25 bp, Homo sapien
ttgctgagtgctatcataaccattc

SEQ ID NO: 75231 - DNA, 25 bp, Homo sapien
tgcagctgcagtagcaggatatgca

SEQ ID NO: 75232 - DNA, 25 bp, Homo sapien
gataaccaatcataggtgcagctgc

SEQ ID NO: 75233 - DNA, 25 bp, Homo sapien
ttgggaatatcctgttggcattgga

SEQ ID NO: 75234 - DNA, 25 bp, Homo sapien
taaagagcaattatgaaaaacagac

SEQ ID NO: 75235 - DNA, 25 bp, Homo sapien
ttaaatagcgaaaaagtgcaccata

SEQ ID NO: 75236 - DNA, 25 bp, Homo sapien
caggaatgtagagaaatatccaact

SEQ ID NO: 75237 - DNA, 25 bp, Homo sapien
cgtggctcaacagctttcgaggcac

SEQ ID NO: 75238 - DNA, 25 bp, Homo sapien
caatcttgcgctgctccgtaatctc

SEQ ID NO: 75239 - DNA, 25 bp, Homo sapien
gaagtaagcatcagtaagatgtttt

SEQ ID NO: 75240 - DNA, 25 bp, Homo sapien
gggtaatgctggctcgcagttttct

SEQ ID NO: 75241 - DNA, 25 bp, Homo sapien
ctgaagggttttttgccgtggctca

SEQ ID NO: 75242 - DNA, 25 bp, Homo sapien
gtaggataatatctaggcattttgc

SEQ ID NO: 75243 - DNA, 25 bp, Homo sapien
tcttgcccctgtggcgtccagtgag

SEQ ID NO: 75244 - DNA, 25 bp, Homo sapien
ataaattccattcgtcagagcaaac

SEQ ID NO: 75245 - DNA, 25 bp, Homo sapien
ttagaacaccaatttgtgaggataa

SEQ ID NO: 75246 - DNA, 25 bp, Homo sapien
ttctcacgtgctgactgaagggttt

SEQ ID NO: 75247 - DNA, 25 bp, Homo sapien
aagtaataagccactagccagctgc

SEQ ID NO: 75248 - DNA, 25 bp, Homo sapien
gtaggataatatctaggcattttgc

SEQ ID NO: 75249 - DNA, 25 bp, Homo sapien
cgtggctcaacagctttcgaggcac

SEQ ID NO: 75250 - DNA, 25 bp, Homo sapien
ctgaagggttttttgccgtggctca

SEQ ID NO: 75251 - DNA, 25 bp, Homo sapien
ttctcacgtgctgactgaagggttt

SEQ ID NO: 75252 - DNA, 25 bp, Homo sapien
gggtaatgctggctcgcagttttct

SEQ ID NO: 75253 - DNA, 25 bp, Homo sapien
tcttgcccctgtggcgtccagtgag

SEQ ID NO: 75254 - DNA, 25 bp, Homo sapien
aagtaataagccactagccagctgc

SEQ ID NO: 75255 - DNA, 25 bp, Homo sapien
gaagtaagcatcagtaagatgtttt

SEQ ID NO: 75256 - DNA, 25 bp, Homo sapien
caatcttgcgctgctccgtaatctc

SEQ ID NO: 75257 - DNA, 25 bp, Homo sapien
ataaattccattcgtcagagcaaac

SEQ ID NO: 75258 - DNA, 25 bp, Homo sapien
ttagaacaccaatttgtgaggataa

SEQ ID NO: 75259 - DNA, 25 bp, Homo sapien
caatcttgcgctgctccgtaatctc

SEQ ID NO: 75260 - DNA, 25 bp, Homo sapien
ataaattccattcgtcagagcaaac

SEQ ID NO: 75261 - DNA, 25 bp, Homo sapien
ttctcacgtgctgactgaagggttt

SEQ ID NO: 75262 - DNA, 25 bp, Homo sapien
gtaggataatatctaggcattttgc

SEQ ID NO: 75263 - DNA, 25 bp, Homo sapien
gggtaatgctggctcgcagttttct

SEQ ID NO: 75264 - DNA, 25 bp, Homo sapien
ctgaagggttttttgccgtggctca

SEQ ID NO: 75265 - DNA, 25 bp, Homo sapien
cgtggctcaacagctttcgaggcac

SEQ ID NO: 75266 - DNA, 25 bp, Homo sapien
aagtaataagccactagccagctgc

SEQ ID NO: 75267 - DNA, 25 bp, Homo sapien
ttagaacaccaatttgtgaggataa

SEQ ID NO: 75268 - DNA, 25 bp, Homo sapien
tcttgcccctgtggcgtccagtgag

SEQ ID NO: 75269 - DNA, 25 bp, Homo sapien
gaagtaagcatcagtaagatgtttt

SEQ ID NO: 75270 - DNA, 25 bp, Homo sapien
ctgaagggttttttgccgtggctca

SEQ ID NO: 75271 - DNA, 25 bp, Homo sapien
ttctcacgtgctgactgaagggttt

SEQ ID NO: 75272 - DNA, 25 bp, Homo sapien
gggtaatgctggctcgcagttttct

SEQ ID NO: 75273 - DNA, 25 bp, Homo sapien
tcttgcccctgtggcgtccagtgag

SEQ ID NO: 75274 - DNA, 25 bp, Homo sapien
aagtaataagccactagccagctgc

SEQ ID NO: 75275 - DNA, 25 bp, Homo sapien
gaagtaagcatcagtaagatgtttt

SEQ ID NO: 75276 - DNA, 25 bp, Homo sapien
caatcttgcgctgctccgtaatctc

SEQ ID NO: 75277 - DNA, 25 bp, Homo sapien
ataaattccattcgtcagagcaaac

SEQ ID NO: 75278 - DNA, 25 bp, Homo sapien
ttagaacaccaatttgtgaggataa

SEQ ID NO: 75279 - DNA, 25 bp, Homo sapien
gtaggataatatctaggcattttgc

SEQ ID NO: 75280 - DNA, 25 bp, Homo sapien
cgtggctcaacagctttcgaggcac

SEQ ID NO: 75281 - DNA, 25 bp, Homo sapien
ataaattccattcgtcagagcaaac

SEQ ID NO: 75282 - DNA, 25 bp, Homo sapien
gtaggataatatctaggcattttgc

SEQ ID NO: 75283 - DNA, 25 bp, Homo sapien
gggtaatgctggctcgcagttttct

SEQ ID NO: 75284 - DNA, 25 bp, Homo sapien
ttctcacgtgctgactgaagggttt

SEQ ID NO: 75285 - DNA, 25 bp, Homo sapien
cgtggctcaacagctttcgaggcac

SEQ ID NO: 75286 - DNA, 25 bp, Homo sapien
ctgaagggttttttgccgtggctca

SEQ ID NO: 75287 - DNA, 25 bp, Homo sapien
aagtaataagccactagccagctgc

SEQ ID NO: 75288 - DNA, 25 bp, Homo sapien
caatcttgcgctgctccgtaatctc

SEQ ID NO: 75289 - DNA, 25 bp, Homo sapien
tcttgcccctgtggcgtccagtgag

SEQ ID NO: 75290 - DNA, 25 bp, Homo sapien
ttagaacaccaatttgtgaggataa

SEQ ID NO: 75291 - DNA, 25 bp, Homo sapien
gaagtaagcatcagtaagatgtttt

SEQ ID NO: 75292 - DNA, 25 bp, Homo sapien
gtaggataatatctaggcattttgc

SEQ ID NO: 75293 - DNA, 25 bp, Homo sapien
cgtggctcaacagctttcgaggcac

SEQ ID NO: 75294 - DNA, 25 bp, Homo sapien
ctgaagggttttttgccgtggctca

SEQ ID NO: 75295 - DNA, 25 bp, Homo sapien
ttctcacgtgctgactgaagggttt

SEQ ID NO: 75296 - DNA, 25 bp, Homo sapien
gggtaatgctggctcgcagttttct

SEQ ID NO: 75297 - DNA, 25 bp, Homo sapien
tcttgcccctgtggcgtccagtgag

SEQ ID NO: 75298 - DNA, 25 bp, Homo sapien
aagtaataagccactagccagctgc

SEQ ID NO: 75299 - DNA, 25 bp, Homo sapien
gaagtaagcatcagtaagatgtttt

SEQ ID NO: 75300 - DNA, 25 bp, Homo sapien
caatcttgcgctgctccgtaatctc

SEQ ID NO: 75301 - DNA, 25 bp, Homo sapien
ataaattccattcgtcagagcaaac

SEQ ID NO: 75302 - DNA, 25 bp, Homo sapien
ttagaacaccaatttgtgaggataa

SEQ ID NO: 75303 - DNA, 25 bp, Homo sapien
gtaggataatatctaggcattttgc

SEQ ID NO: 75304 - DNA, 25 bp, Homo sapien
cgtggctcaacagctttcgaggcac

SEQ ID NO: 75305 - DNA, 25 bp, Homo sapien
ctgaagggttttttgccgtggctca

SEQ ID NO: 75306 - DNA, 25 bp, Homo sapien
ttctcacgtgctgactgaagggttt

SEQ ID NO: 75307 - DNA, 25 bp, Homo sapien
gggtaatgctggctcgcagttttct

SEQ ID NO: 75308 - DNA, 25 bp, Homo sapien
tcttgcccctgtggcgtccagtgag

SEQ ID NO: 75309 - DNA, 25 bp, Homo sapien
aagtaataagccactagccagctgc

SEQ ID NO: 75310 - DNA, 25 bp, Homo sapien
gaagtaagcatcagtaagatgtttt

SEQ ID NO: 75311 - DNA, 25 bp, Homo sapien
caatcttgcgctgctccgtaatctc

SEQ ID NO: 75312 - DNA, 25 bp, Homo sapien
ataaattccattcgtcagagcaaac

SEQ ID NO: 75313 - DNA, 25 bp, Homo sapien
ttagaacaccaatttgtgaggataa

SEQ ID NO: 75314 - DNA, 25 bp, Homo sapien
cgtggctcaacagctttcgaggcac

SEQ ID NO: 75315 - DNA, 25 bp, Homo sapien
ataaattccattcgtcagagcaaac

SEQ ID NO: 75316 - DNA, 25 bp, Homo sapien
tcttgcccctgtggcgtccagtgag

SEQ ID NO: 75317 - DNA, 25 bp, Homo sapien
ttctcacgtgctgactgaagggttt

SEQ ID NO: 75318 - DNA, 25 bp, Homo sapien
aagtaataagccactagccagctgc

SEQ ID NO: 75319 - DNA, 25 bp, Homo sapien
gtaggataatatctaggcattttgc

SEQ ID NO: 75320 - DNA, 25 bp, Homo sapien
gggtaatgctggctcgcagttttct

SEQ ID NO: 75321 - DNA, 25 bp, Homo sapien
ctgaagggttttttgccgtggctca

SEQ ID NO: 75322 - DNA, 25 bp, Homo sapien
caatcttgcgctgctccgtaatctc

SEQ ID NO: 75323 - DNA, 25 bp, Homo sapien
gaagtaagcatcagtaagatgtttt

SEQ ID NO: 75324 - DNA, 25 bp, Homo sapien
ttagaacaccaatttgtgaggataa

SEQ ID NO: 75325 - DNA, 25 bp, Homo sapien
gtaggataatatctaggcattttgc

SEQ ID NO: 75326 - DNA, 25 bp, Homo sapien
cgtggctcaacagctttcgaggcac

SEQ ID NO: 75327 - DNA, 25 bp, Homo sapien
ctgaagggttttttgccgtggctca

SEQ ID NO: 75328 - DNA, 25 bp, Homo sapien
ttctcacgtgctgactgaagggttt

SEQ ID NO: 75329 - DNA, 25 bp, Homo sapien
gggtaatgctggctcgcagttttct

SEQ ID NO: 75330 - DNA, 25 bp, Homo sapien
tcttgcccctgtggcgtccagtgag

SEQ ID NO: 75331 - DNA, 25 bp, Homo sapien
aagtaataagccactagccagctgc

SEQ ID NO: 75332 - DNA, 25 bp, Homo sapien
gaagtaagcatcagtaagatgtttt

SEQ ID NO: 75333 - DNA, 25 bp, Homo sapien
caatcttgcgctgctccgtaatctc

SEQ ID NO: 75334 - DNA, 25 bp, Homo sapien
ataaattccattcgtcagagcaaac

SEQ ID NO: 75335 - DNA, 25 bp, Homo sapien
ttagaacaccaatttgtgaggataa

SEQ ID NO: 75336 - DNA, 25 bp, Homo sapien
gtaggataatatctaggcattttgc

SEQ ID NO: 75337 - DNA, 25 bp, Homo sapien
tcttgcccctgtggcgtccagtgag

SEQ ID NO: 75338 - DNA, 25 bp, Homo sapien
ttagaacaccaatttgtgaggataa

SEQ ID NO: 75339 - DNA, 25 bp, Homo sapien
gggtaatgctggctcgcagttttct

SEQ ID NO: 75340 - DNA, 25 bp, Homo sapien
aagtaataagccactagccagctgc

SEQ ID NO: 75341 - DNA, 25 bp, Homo sapien
ctgaagggttttttgccgtggctca

SEQ ID NO: 75342 - DNA, 25 bp, Homo sapien
gaagtaagcatcagtaagatgtttt

SEQ ID NO: 75343 - DNA, 25 bp, Homo sapien
ttctcacgtgctgactgaagggttt

SEQ ID NO: 75344 - DNA, 25 bp, Homo sapien
caatcttgcgctgctccgtaatctc

SEQ ID NO: 75345 - DNA, 25 bp, Homo sapien
ataaattccattcgtcagagcaaac

SEQ ID NO: 75346 - DNA, 25 bp, Homo sapien
cgtggctcaacagctttcgaggcac

SEQ ID NO: 75347 - DNA, 25 bp, Homo sapien
gtaggataatatctaggcattttgc

SEQ ID NO: 75348 - DNA, 25 bp, Homo sapien
cgtggctcaacagctttcgaggcac

SEQ ID NO: 75349 - DNA, 25 bp, Homo sapien
ctgaagggttttttgccgtggctca

SEQ ID NO: 75350 - DNA, 25 bp, Homo sapien
ttctcacgtgctgactgaagggttt

SEQ ID NO: 75351 - DNA, 25 bp, Homo sapien
gggtaatgctggctcgcagttttct

SEQ ID NO: 75352 - DNA, 25 bp, Homo sapien
tcttgcccctgtggcgtccagtgag

SEQ ID NO: 75353 - DNA, 25 bp, Homo sapien
aagtaataagccactagccagctgc

SEQ ID NO: 75354 - DNA, 25 bp, Homo sapien
gaagtaagcatcagtaagatgtttt

SEQ ID NO: 75355 - DNA, 25 bp, Homo sapien
caatcttgcgctgctccgtaatctc

SEQ ID NO: 75356 - DNA, 25 bp, Homo sapien
ataaattccattcgtcagagcaaac

SEQ ID NO: 75357 - DNA, 25 bp, Homo sapien
ttagaacaccaatttgtgaggataa

SEQ ID NO: 75358 - DNA, 25 bp, Homo sapien
ttagaacaccaatttgtgaggataa

SEQ ID NO: 75359 - DNA, 25 bp, Homo sapien
gaagtaagcatcagtaagatgtttt

SEQ ID NO: 75360 - DNA, 25 bp, Homo sapien
aagtaataagccactagccagctgc

SEQ ID NO: 75361 - DNA, 25 bp, Homo sapien
ctgaagggttttttgccgtggctca

SEQ ID NO: 75362 - DNA, 25 bp, Homo sapien
gggtaatgctggctcgcagttttct

SEQ ID NO: 75363 - DNA, 25 bp, Homo sapien
tcttgcccctgtggcgtccagtgag

SEQ ID NO: 75364 - DNA, 25 bp, Homo sapien
caatcttgcgctgctccgtaatctc

SEQ ID NO: 75365 - DNA, 25 bp, Homo sapien
gtaggataatatctaggcattttgc

SEQ ID NO: 75366 - DNA, 25 bp, Homo sapien
cgtggctcaacagctttcgaggcac

SEQ ID NO: 75367 - DNA, 25 bp, Homo sapien
ataaattccattcgtcagagcaaac

SEQ ID NO: 75368 - DNA, 25 bp, Homo sapien
ttctcacgtgctgactgaagggttt

SEQ ID NO: 75369 - DNA, 25 bp, Homo sapien
gtaggataatatctaggcattttgc

SEQ ID NO: 75370 - DNA, 25 bp, Homo sapien
cgtggctcaacagctttcgaggcac

SEQ ID NO: 75371 - DNA, 25 bp, Homo sapien
ctgaagggttttttgccgtggctca

SEQ ID NO: 75372 - DNA, 25 bp, Homo sapien
ttctcacgtgctgactgaagggttt

SEQ ID NO: 75373 - DNA, 25 bp, Homo sapien
gggtaatgctggctcgcagttttct

SEQ ID NO: 75374 - DNA, 25 bp, Homo sapien
tcttgcccctgtggcgtccagtgag

SEQ ID NO: 75375 - DNA, 25 bp, Homo sapien
aagtaataagccactagccagctgc

SEQ ID NO: 75376 - DNA, 25 bp, Homo sapien
gaagtaagcatcagtaagatgtttt

SEQ ID NO: 75377 - DNA, 25 bp, Homo sapien
caatcttgcgctgctccgtaatctc

SEQ ID NO: 75378 - DNA, 25 bp, Homo sapien
ataaattccattcgtcagagcaaac

SEQ ID NO: 75379 - DNA, 25 bp, Homo sapien
ttagaacaccaatttgtgaggataa

SEQ ID NO: 75380 - DNA, 25 bp, Homo sapien
aagtaataagccactagccagctgc

SEQ ID NO: 75381 - DNA, 25 bp, Homo sapien
ttagaacaccaatttgtgaggataa

SEQ ID NO: 75382 - DNA, 25 bp, Homo sapien
tcttgcccctgtggcgtccagtgag

SEQ ID NO: 75383 - DNA, 25 bp, Homo sapien
ataaattccattcgtcagagcaaac

SEQ ID NO: 75384 - DNA, 25 bp, Homo sapien
ctgaagggttttttgccgtggctca

SEQ ID NO: 75385 - DNA, 25 bp, Homo sapien
gaagtaagcatcagtaagatgtttt

SEQ ID NO: 75386 - DNA, 25 bp, Homo sapien
caatcttgcgctgctccgtaatctc

SEQ ID NO: 75387 - DNA, 25 bp, Homo sapien
gggtaatgctggctcgcagttttct

SEQ ID NO: 75388 - DNA, 25 bp, Homo sapien
gtaggataatatctaggcattttgc

SEQ ID NO: 75389 - DNA, 25 bp, Homo sapien
ttctcacgtgctgactgaagggttt

SEQ ID NO: 75390 - DNA, 25 bp, Homo sapien
cgtggctcaacagctttcgaggcac

SEQ ID NO: 75391 - DNA, 25 bp, Homo sapien
gtaggataatatctaggcattttgc

SEQ ID NO: 75392 - DNA, 25 bp, Homo sapien
cgtggctcaacagctttcgaggcac

SEQ ID NO: 75393 - DNA, 25 bp, Homo sapien
ctgaagggttttttgccgtggctca

SEQ ID NO: 75394 - DNA, 25 bp, Homo sapien
ttctcacgtgctgactgaagggttt

SEQ ID NO: 75395 - DNA, 25 bp, Homo sapien
gggtaatgctggctcgcagttttct

SEQ ID NO: 75396 - DNA, 25 bp, Homo sapien
tcttgcccctgtggcgtccagtgag

SEQ ID NO: 75397 - DNA, 25 bp, Homo sapien
aagtaataagccactagccagctgc

SEQ ID NO: 75398 - DNA, 25 bp, Homo sapien
gaagtaagcatcagtaagatgtttt

SEQ ID NO: 75399 - DNA, 25 bp, Homo sapien
caatcttgcgctgctccgtaatctc

SEQ ID NO: 75400 - DNA, 25 bp, Homo sapien
ataaattccattcgtcagagcaaac

SEQ ID NO: 75401 - DNA, 25 bp, Homo sapien
ttagaacaccaatttgtgaggataa

SEQ ID NO: 75402 - DNA, 25 bp, Homo sapien
cgtggctcaacagctttcgaggcac

SEQ ID NO: 75403 - DNA, 25 bp, Homo sapien
gtaggataatatctaggcattttgc

SEQ ID NO: 75404 - DNA, 25 bp, Homo sapien
ataaattccattcgtcagagcaaac

SEQ ID NO: 75405 - DNA, 25 bp, Homo sapien
tcttgcccctgtggcgtccagtgag

SEQ ID NO: 75406 - DNA, 25 bp, Homo sapien
aagtaataagccactagccagctgc

SEQ ID NO: 75407 - DNA, 25 bp, Homo sapien
gggtaatgctggctcgcagttttct

SEQ ID NO: 75408 - DNA, 25 bp, Homo sapien
ctgaagggttttttgccgtggctca

SEQ ID NO: 75409 - DNA, 25 bp, Homo sapien
gaagtaagcatcagtaagatgtttt

SEQ ID NO: 75410 - DNA, 25 bp, Homo sapien
ttctcacgtgctgactgaagggttt

SEQ ID NO: 75411 - DNA, 25 bp, Homo sapien
caatcttgcgctgctccgtaatctc

SEQ ID NO: 75412 - DNA, 25 bp, Homo sapien
ttagaacaccaatttgtgaggataa

SEQ ID NO: 75413 - DNA, 25 bp, Homo sapien
ctgaagggttttttgccgtggctca

SEQ ID NO: 75414 - DNA, 25 bp, Homo sapien
aagtaataagccactagccagctgc

SEQ ID NO: 75415 - DNA, 25 bp, Homo sapien
ttagaacaccaatttgtgaggataa

SEQ ID NO: 75416 - DNA, 25 bp, Homo sapien
ttctcacgtgctgactgaagggttt

SEQ ID NO: 75417 - DNA, 25 bp, Homo sapien
tcttgcccctgtggcgtccagtgag

SEQ ID NO: 75418 - DNA, 25 bp, Homo sapien
gggtaatgctggctcgcagttttct

SEQ ID NO: 75419 - DNA, 25 bp, Homo sapien
caatcttgcgctgctccgtaatctc

SEQ ID NO: 75420 - DNA, 25 bp, Homo sapien
gaagtaagcatcagtaagatgtttt

SEQ ID NO: 75421 - DNA, 25 bp, Homo sapien
gtaggataatatctaggcattttgc

SEQ ID NO: 75422 - DNA, 25 bp, Homo sapien
cgtggctcaacagctttcgaggcac

SEQ ID NO: 75423 - DNA, 25 bp, Homo sapien
ataaattccattcgtcagagcaaac

SEQ ID NO: 75424 - DNA, 25 bp, Homo sapien
gtaggataatatctaggcattttgc

SEQ ID NO: 75425 - DNA, 25 bp, Homo sapien
cgtggctcaacagctttcgaggcac

SEQ ID NO: 75426 - DNA, 25 bp, Homo sapien
ctgaagggttttttgccgtggctca

SEQ ID NO: 75427 - DNA, 25 bp, Homo sapien
ttctcacgtgctgactgaagggttt

SEQ ID NO: 75428 - DNA, 25 bp, Homo sapien
gggtaatgctggctcgcagttttct

SEQ ID NO: 75429 - DNA, 25 bp, Homo sapien
tcttgcccctgtggcgtccagtgag

SEQ ID NO: 75430 - DNA, 25 bp, Homo sapien
aagtaataagccactagccagctgc

SEQ ID NO: 75431 - DNA, 25 bp, Homo sapien
gaagtaagcatcagtaagatgtttt

SEQ ID NO: 75432 - DNA, 25 bp, Homo sapien
caatcttgcgctgctccgtaatctc

SEQ ID NO: 75433 - DNA, 25 bp, Homo sapien
ataaattccattcgtcagagcaaac

SEQ ID NO: 75434 - DNA, 25 bp, Homo sapien
ttagaacaccaatttgtgaggataa

SEQ ID NO: 75435 - DNA, 25 bp, Homo sapien
gaagtaagcatcagtaagatgtttt

SEQ ID NO: 75436 - DNA, 25 bp, Homo sapien
gtaggataatatctaggcattttgc

SEQ ID NO: 75437 - DNA, 25 bp, Homo sapien
aagtaataagccactagccagctgc

SEQ ID NO: 75438 - DNA, 25 bp, Homo sapien
ttctcacgtgctgactgaagggttt

SEQ ID NO: 75439 - DNA, 25 bp, Homo sapien
gggtaatgctggctcgcagttttct

SEQ ID NO: 75440 - DNA, 25 bp, Homo sapien
caatcttgcgctgctccgtaatctc

SEQ ID NO: 75441 - DNA, 25 bp, Homo sapien
cgtggctcaacagctttcgaggcac

SEQ ID NO: 75442 - DNA, 25 bp, Homo sapien
ataaattccattcgtcagagcaaac

SEQ ID NO: 75443 - DNA, 25 bp, Homo sapien
ctgaagggttttttgccgtggctca

SEQ ID NO: 75444 - DNA, 25 bp, Homo sapien
tcttgcccctgtggcgtccagtgag

SEQ ID NO: 75445 - DNA, 25 bp, Homo sapien
ttagaacaccaatttgtgaggataa

SEQ ID NO: 75446 - DNA, 25 bp, Homo sapien
gtaggataatatctaggcattttgc

SEQ ID NO: 75447 - DNA, 25 bp, Homo sapien
cgtggctcaacagctttcgaggcac

SEQ ID NO: 75448 - DNA, 25 bp, Homo sapien
ctgaagggttttttgccgtggctca

SEQ ID NO: 75449 - DNA, 25 bp, Homo sapien
ttctcacgtgctgactgaagggttt

SEQ ID NO: 75450 - DNA, 25 bp, Homo sapien
gggtaatgctggctcgcagttttct

SEQ ID NO: 75451 - DNA, 25 bp, Homo sapien
tcttgcccctgtggcgtccagtgag

SEQ ID NO: 75452 - DNA, 25 bp, Homo sapien
aagtaataagccactagccagctgc

SEQ ID NO: 75453 - DNA, 25 bp, Homo sapien
gaagtaagcatcagtaagatgtttt

SEQ ID NO: 75454 - DNA, 25 bp, Homo sapien
caatcttgcgctgctccgtaatctc

SEQ ID NO: 75455 - DNA, 25 bp, Homo sapien
ataaattccattcgtcagagcaaac

SEQ ID NO: 75456 - DNA, 25 bp, Homo sapien
ttagaacaccaatttgtgaggataa

SEQ ID NO: 75457 - DNA, 25 bp, Homo sapien
ttctcacgtgctgactgaagggttt

SEQ ID NO: 75458 - DNA, 25 bp, Homo sapien
gtaggataatatctaggcattttgc

SEQ ID NO: 75459 - DNA, 25 bp, Homo sapien
gggtaatgctggctcgcagttttct

SEQ ID NO: 75460 - DNA, 25 bp, Homo sapien
aagtaataagccactagccagctgc

SEQ ID NO: 75461 - DNA, 25 bp, Homo sapien
caatcttgcgctgctccgtaatctc

SEQ ID NO: 75462 - DNA, 25 bp, Homo sapien
ttagaacaccaatttgtgaggataa

SEQ ID NO: 75463 - DNA, 25 bp, Homo sapien
gaagtaagcatcagtaagatgtttt

SEQ ID NO: 75464 - DNA, 25 bp, Homo sapien
cgtggctcaacagctttcgaggcac

SEQ ID NO: 75465 - DNA, 25 bp, Homo sapien
tcttgcccctgtggcgtccagtgag

SEQ ID NO: 75466 - DNA, 25 bp, Homo sapien
ctgaagggttttttgccgtggctca

SEQ ID NO: 75467 - DNA, 25 bp, Homo sapien
ataaattccattcgtcagagcaaac

SEQ ID NO: 75468 - DNA, 25 bp, Homo sapien
gtaggataatatctaggcattttgc

SEQ ID NO: 75469 - DNA, 25 bp, Homo sapien
cgtggctcaacagctttcgaggcac

SEQ ID NO: 75470 - DNA, 25 bp, Homo sapien
ctgaagggttttttgccgtggctca

SEQ ID NO: 75471 - DNA, 25 bp, Homo sapien
ttctcacgtgctgactgaagggttt

SEQ ID NO: 75472 - DNA, 25 bp, Homo sapien
gggtaatgctggctcgcagttttct

SEQ ID NO: 75473 - DNA, 25 bp, Homo sapien
tcttgcccctgtggcgtccagtgag

SEQ ID NO: 75474 - DNA, 25 bp, Homo sapien
aagtaataagccactagccagctgc

SEQ ID NO: 75475 - DNA, 25 bp, Homo sapien
gaagtaagcatcagtaagatgtttt

SEQ ID NO: 75476 - DNA, 25 bp, Homo sapien
caatcttgcgctgctccgtaatctc

SEQ ID NO: 75477 - DNA, 25 bp, Homo sapien
ataaattccattcgtcagagcaaac

SEQ ID NO: 75478 - DNA, 25 bp, Homo sapien
ttagaacaccaatttgtgaggataa

SEQ ID NO: 75479 - DNA, 25 bp, Homo sapien
cgtggctcaacagctttcgaggcac

SEQ ID NO: 75480 - DNA, 25 bp, Homo sapien
gggtaatgctggctcgcagttttct

SEQ ID NO: 75481 - DNA, 25 bp, Homo sapien
ttagaacaccaatttgtgaggataa

SEQ ID NO: 75482 - DNA, 25 bp, Homo sapien
ataaattccattcgtcagagcaaac

SEQ ID NO: 75483 - DNA, 25 bp, Homo sapien
aagtaataagccactagccagctgc

SEQ ID NO: 75484 - DNA, 25 bp, Homo sapien
gtaggataatatctaggcattttgc

SEQ ID NO: 75485 - DNA, 25 bp, Homo sapien
ctgaagggttttttgccgtggctca

SEQ ID NO: 75486 - DNA, 25 bp, Homo sapien
gaagtaagcatcagtaagatgtttt

SEQ ID NO: 75487 - DNA, 25 bp, Homo sapien
caatcttgcgctgctccgtaatctc

SEQ ID NO: 75488 - DNA, 25 bp, Homo sapien
tcttgcccctgtggcgtccagtgag

SEQ ID NO: 75489 - DNA, 25 bp, Homo sapien
ttctcacgtgctgactgaagggttt

SEQ ID NO: 75490 - DNA, 25 bp, Homo sapien
gtaggataatatctaggcattttgc

SEQ ID NO: 75491 - DNA, 25 bp, Homo sapien
cgtggctcaacagctttcgaggcac

SEQ ID NO: 75492 - DNA, 25 bp, Homo sapien
ctgaagggttttttgccgtggctca

SEQ ID NO: 75493 - DNA, 25 bp, Homo sapien
ttctcacgtgctgactgaagggttt

SEQ ID NO: 75494 - DNA, 25 bp, Homo sapien
gggtaatgctggctcgcagttttct

SEQ ID NO: 75495 - DNA, 25 bp, Homo sapien
tcttgcccctgtggcgtccagtgag

SEQ ID NO: 75496 - DNA, 25 bp, Homo sapien
aagtaataagccactagccagctgc

SEQ ID NO: 75497 - DNA, 25 bp, Homo sapien
gaagtaagcatcagtaagatgtttt

SEQ ID NO: 75498 - DNA, 25 bp, Homo sapien
caatcttgcgctgctccgtaatctc

SEQ ID NO: 75499 - DNA, 25 bp, Homo sapien
ataaattccattcgtcagagcaaac

SEQ ID NO: 75500 - DNA, 25 bp, Homo sapien
ttagaacaccaatttgtgaggataa

SEQ ID NO: 75501 - DNA, 25 bp, Homo sapien
ttagaacaccaatttgtgaggataa

SEQ ID NO: 75502 - DNA, 25 bp, Homo sapien
ttctcacgtgctgactgaagggttt

SEQ ID NO: 75503 - DNA, 25 bp, Homo sapien
gaagtaagcatcagtaagatgtttt

SEQ ID NO: 75504 - DNA, 25 bp, Homo sapien
gtaggataatatctaggcattttgc

SEQ ID NO: 75505 - DNA, 25 bp, Homo sapien
ataaattccattcgtcagagcaaac

SEQ ID NO: 75506 - DNA, 25 bp, Homo sapien
aagtaataagccactagccagctgc

SEQ ID NO: 75507 - DNA, 25 bp, Homo sapien
ctgaagggttttttgccgtggctca

SEQ ID NO: 75508 - DNA, 25 bp, Homo sapien
gggtaatgctggctcgcagttttct

SEQ ID NO: 75509 - DNA, 25 bp, Homo sapien
tcttgcccctgtggcgtccagtgag

SEQ ID NO: 75510 - DNA, 25 bp, Homo sapien
caatcttgcgctgctccgtaatctc

SEQ ID NO: 75511 - DNA, 25 bp, Homo sapien
cgtggctcaacagctttcgaggcac

SEQ ID NO: 75512 - DNA, 25 bp, Homo sapien
gtaggataatatctaggcattttgc

SEQ ID NO: 75513 - DNA, 25 bp, Homo sapien
cgtggctcaacagctttcgaggcac

SEQ ID NO: 75514 - DNA, 25 bp, Homo sapien
ctgaagggttttttgccgtggctca

SEQ ID NO: 75515 - DNA, 25 bp, Homo sapien
ttctcacgtgctgactgaagggttt

SEQ ID NO: 75516 - DNA, 25 bp, Homo sapien
gggtaatgctggctcgcagttttct

SEQ ID NO: 75517 - DNA, 25 bp, Homo sapien
tcttgcccctgtggcgtccagtgag

SEQ ID NO: 75518 - DNA, 25 bp, Homo sapien
aagtaataagccactagccagctgc

SEQ ID NO: 75519 - DNA, 25 bp, Homo sapien
gaagtaagcatcagtaagatgtttt

SEQ ID NO: 75520 - DNA, 25 bp, Homo sapien
caatcttgcgctgctccgtaatctc

SEQ ID NO: 75521 - DNA, 25 bp, Homo sapien
ataaattccattcgtcagagcaaac

SEQ ID NO: 75522 - DNA, 25 bp, Homo sapien
ttagaacaccaatttgtgaggataa

SEQ ID NO: 75523 - DNA, 25 bp, Homo sapien
aagtaataagccactagccagctgc

SEQ ID NO: 75524 - DNA, 25 bp, Homo sapien
ataaattccattcgtcagagcaaac

SEQ ID NO: 75525 - DNA, 25 bp, Homo sapien
gggtaatgctggctcgcagttttct

SEQ ID NO: 75526 - DNA, 25 bp, Homo sapien
gaagtaagcatcagtaagatgtttt

SEQ ID NO: 75527 - DNA, 25 bp, Homo sapien
cgtggctcaacagctttcgaggcac

SEQ ID NO: 75528 - DNA, 25 bp, Homo sapien
ttctcacgtgctgactgaagggttt

SEQ ID NO: 75529 - DNA, 25 bp, Homo sapien
gtaggataatatctaggcattttgc

SEQ ID NO: 75530 - DNA, 25 bp, Homo sapien
ttagaacaccaatttgtgaggataa

SEQ ID NO: 75531 - DNA, 25 bp, Homo sapien
tcttgcccctgtggcgtccagtgag

SEQ ID NO: 75532 - DNA, 25 bp, Homo sapien
ctgaagggttttttgccgtggctca

SEQ ID NO: 75533 - DNA, 25 bp, Homo sapien
caatcttgcgctgctccgtaatctc

SEQ ID NO: 75534 - DNA, 25 bp, Homo sapien
gtaggataatatctaggcattttgc

SEQ ID NO: 75535 - DNA, 25 bp, Homo sapien
cgtggctcaacagctttcgaggcac

SEQ ID NO: 75536 - DNA, 25 bp, Homo sapien
ctgaagggttttttgccgtggctca

SEQ ID NO: 75537 - DNA, 25 bp, Homo sapien
ttctcacgtgctgactgaagggttt

SEQ ID NO: 75538 - DNA, 25 bp, Homo sapien
gggtaatgctggctcgcagttttct

SEQ ID NO: 75539 - DNA, 25 bp, Homo sapien
tcttgcccctgtggcgtccagtgag

SEQ ID NO: 75540 - DNA, 25 bp, Homo sapien
aagtaataagccactagccagctgc

SEQ ID NO: 75541 - DNA, 25 bp, Homo sapien
gaagtaagcatcagtaagatgtttt

SEQ ID NO: 75542 - DNA, 25 bp, Homo sapien
caatcttgcgctgctccgtaatctc

SEQ ID NO: 75543 - DNA, 25 bp, Homo sapien
ataaattccattcgtcagagcaaac

SEQ ID NO: 75544 - DNA, 25 bp, Homo sapien
ttagaacaccaatttgtgaggataa

SEQ ID NO: 75545 - DNA, 25 bp, Homo sapien
gtaggataatatctaggcattttgc

SEQ ID NO: 75546 - DNA, 25 bp, Homo sapien
cgtggctcaacagctttcgaggcac

SEQ ID NO: 75547 - DNA, 25 bp, Homo sapien
ctgaagggttttttgccgtggctca

SEQ ID NO: 75548 - DNA, 25 bp, Homo sapien
ttctcacgtgctgactgaagggttt

SEQ ID NO: 75549 - DNA, 25 bp, Homo sapien
gggtaatgctggctcgcagttttct

SEQ ID NO: 75550 - DNA, 25 bp, Homo sapien
tcttgcccctgtggcgtccagtgag

SEQ ID NO: 75551 - DNA, 25 bp, Homo sapien
aagtaataagccactagccagctgc

SEQ ID NO: 75552 - DNA, 25 bp, Homo sapien
gaagtaagcatcagtaagatgtttt

SEQ ID NO: 75553 - DNA, 25 bp, Homo sapien
caatcttgcgctgctccgtaatctc

SEQ ID NO: 75554 - DNA, 25 bp, Homo sapien
ataaattccattcgtcagagcaaac

SEQ ID NO: 75555 - DNA, 25 bp, Homo sapien
ttagaacaccaatttgtgaggataa

SEQ ID NO: 75556 - DNA, 25 bp, Homo sapien
ataaattccattcgtcagagcaaac

SEQ ID NO: 75557 - DNA, 25 bp, Homo sapien
gaagtaagcatcagtaagatgtttt

SEQ ID NO: 75558 - DNA, 25 bp, Homo sapien
caatcttgcgctgctccgtaatctc

SEQ ID NO: 75559 - DNA, 25 bp, Homo sapien
cgtggctcaacagctttcgaggcac

SEQ ID NO: 75560 - DNA, 25 bp, Homo sapien
tcttgcccctgtggcgtccagtgag

SEQ ID NO: 75561 - DNA, 25 bp, Homo sapien
aagtaataagccactagccagctgc

SEQ ID NO: 75562 - DNA, 25 bp, Homo sapien
ttctcacgtgctgactgaagggttt

SEQ ID NO: 75563 - DNA, 25 bp, Homo sapien
ctgaagggttttttgccgtggctca

SEQ ID NO: 75564 - DNA, 25 bp, Homo sapien
gtaggataatatctaggcattttgc

SEQ ID NO: 75565 - DNA, 25 bp, Homo sapien
gggtaatgctggctcgcagttttct

SEQ ID NO: 75566 - DNA, 25 bp, Homo sapien
ttagaacaccaatttgtgaggataa

SEQ ID NO: 75567 - DNA, 25 bp, Homo sapien
ataaattccattcgtcagagcaaac

SEQ ID NO: 75568 - DNA, 25 bp, Homo sapien
gaagtaagcatcagtaagatgtttt

SEQ ID NO: 75569 - DNA, 25 bp, Homo sapien
caatcttgcgctgctccgtaatctc

SEQ ID NO: 75570 - DNA, 25 bp, Homo sapien
cgtggctcaacagctttcgaggcac

SEQ ID NO: 75571 - DNA, 25 bp, Homo sapien
tcttgcccctgtggcgtccagtgag

SEQ ID NO: 75572 - DNA, 25 bp, Homo sapien
aagtaataagccactagccagctgc

SEQ ID NO: 75573 - DNA, 25 bp, Homo sapien
gggtaatgctggctcgcagttttct

SEQ ID NO: 75574 - DNA, 25 bp, Homo sapien
ttctcacgtgctgactgaagggttt

SEQ ID NO: 75575 - DNA, 25 bp, Homo sapien
ctgaagggttttttgccgtggctca

SEQ ID NO: 75576 - DNA, 25 bp, Homo sapien
gtaggataatatctaggcattttgc

SEQ ID NO: 75577 - DNA, 25 bp, Homo sapien
ttagaacaccaatttgtgaggataa

SEQ ID NO: 75578 - DNA, 25 bp, Homo sapien
ataaattccattcgtcagagcaaac

SEQ ID NO: 75579 - DNA, 25 bp, Homo sapien
gaagtaagcatcagtaagatgtttt

SEQ ID NO: 75580 - DNA, 25 bp, Homo sapien
caatcttgcgctgctccgtaatctc

SEQ ID NO: 75581 - DNA, 25 bp, Homo sapien
cgtggctcaacagctttcgaggcac

SEQ ID NO: 75582 - DNA, 25 bp, Homo sapien
tcttgcccctgtggcgtccagtgag

SEQ ID NO: 75583 - DNA, 25 bp, Homo sapien
ttctcacgtgctgactgaagggttt

SEQ ID NO: 75584 - DNA, 25 bp, Homo sapien
aagtaataagccactagccagctgc

SEQ ID NO: 75585 - DNA, 25 bp, Homo sapien
ctgaagggttttttgccgtggctca

SEQ ID NO: 75586 - DNA, 25 bp, Homo sapien
gtaggataatatctaggcattttgc

SEQ ID NO: 75587 - DNA, 25 bp, Homo sapien
gggtaatgctggctcgcagttttct

SEQ ID NO: 75588 - DNA, 25 bp, Homo sapien
ttagaacaccaatttgtgaggataa

SEQ ID NO: 75589 - DNA, 25 bp, Homo sapien
gaagtaagcatcagtaagatgtttt

SEQ ID NO: 75590 - DNA, 25 bp, Homo sapien
ataaattccattcgtcagagcaaac

SEQ ID NO: 75591 - DNA, 25 bp, Homo sapien
caatcttgcgctgctccgtaatctc

SEQ ID NO: 75592 - DNA, 25 bp, Homo sapien
cgtggctcaacagctttcgaggcac

SEQ ID NO: 75593 - DNA, 25 bp, Homo sapien
tcttgcccctgtggcgtccagtgag

SEQ ID NO: 75594 - DNA, 25 bp, Homo sapien
ttctcacgtgctgactgaagggttt

SEQ ID NO: 75595 - DNA, 25 bp, Homo sapien
aagtaataagccactagccagctgc

SEQ ID NO: 75596 - DNA, 25 bp, Homo sapien
ctgaagggttttttgccgtggctca

SEQ ID NO: 75597 - DNA, 25 bp, Homo sapien
gggtaatgctggctcgcagttttct

SEQ ID NO: 75598 - DNA, 25 bp, Homo sapien
gtaggataatatctaggcattttgc

SEQ ID NO: 75599 - DNA, 25 bp, Homo sapien
ttagaacaccaatttgtgaggataa

SEQ ID NO: 75600 - DNA, 25 bp, Homo sapien
ataaattccattcgtcagagcaaac

SEQ ID NO: 75601 - DNA, 25 bp, Homo sapien
gaagtaagcatcagtaagatgtttt

SEQ ID NO: 75602 - DNA, 25 bp, Homo sapien
caatcttgcgctgctccgtaatctc

SEQ ID NO: 75603 - DNA, 25 bp, Homo sapien
cgtggctcaacagctttcgaggcac

SEQ ID NO: 75604 - DNA, 25 bp, Homo sapien
tcttgcccctgtggcgtccagtgag

SEQ ID NO: 75605 - DNA, 25 bp, Homo sapien
aagtaataagccactagccagctgc

SEQ ID NO: 75606 - DNA, 25 bp, Homo sapien
ttctcacgtgctgactgaagggttt

SEQ ID NO: 75607 - DNA, 25 bp, Homo sapien
ctgaagggttttttgccgtggctca

SEQ ID NO: 75608 - DNA, 25 bp, Homo sapien
gtaggataatatctaggcattttgc

SEQ ID NO: 75609 - DNA, 25 bp, Homo sapien
ttagaacaccaatttgtgaggataa

SEQ ID NO: 75610 - DNA, 25 bp, Homo sapien
gggtaatgctggctcgcagttttct

SEQ ID NO: 75611 - DNA, 25 bp, Homo sapien
gaagtaagcatcagtaagatgtttt

SEQ ID NO: 75612 - DNA, 25 bp, Homo sapien
ataaattccattcgtcagagcaaac

SEQ ID NO: 75613 - DNA, 25 bp, Homo sapien
caatcttgcgctgctccgtaatctc

SEQ ID NO: 75614 - DNA, 25 bp, Homo sapien
cgtggctcaacagctttcgaggcac

SEQ ID NO: 75615 - DNA, 25 bp, Homo sapien
tcttgcccctgtggcgtccagtgag

SEQ ID NO: 75616 - DNA, 25 bp, Homo sapien
ttctcacgtgctgactgaagggttt

SEQ ID NO: 75617 - DNA, 25 bp, Homo sapien
aagtaataagccactagccagctgc

SEQ ID NO: 75618 - DNA, 25 bp, Homo sapien
gtaggataatatctaggcattttgc

SEQ ID NO: 75619 - DNA, 25 bp, Homo sapien
ctgaagggttttttgccgtggctca

SEQ ID NO: 75620 - DNA, 25 bp, Homo sapien
gggtaatgctggctcgcagttttct

SEQ ID NO: 75621 - DNA, 25 bp, Homo sapien
ttagaacaccaatttgtgaggataa

SEQ ID NO: 75622 - DNA, 25 bp, Homo sapien
ataaattccattcgtcagagcaaac

SEQ ID NO: 75623 - DNA, 25 bp, Homo sapien
gaagtaagcatcagtaagatgtttt

SEQ ID NO: 75624 - DNA, 25 bp, Homo sapien
caatcttgcgctgctccgtaatctc

SEQ ID NO: 75625 - DNA, 25 bp, Homo sapien
cgtggctcaacagctttcgaggcac

SEQ ID NO: 75626 - DNA, 25 bp, Homo sapien
tcttgcccctgtggcgtccagtgag

SEQ ID NO: 75627 - DNA, 25 bp, Homo sapien
aagtaataagccactagccagctgc

SEQ ID NO: 75628 - DNA, 25 bp, Homo sapien
ttctcacgtgctgactgaagggttt

SEQ ID NO: 75629 - DNA, 25 bp, Homo sapien
gtaggataatatctaggcattttgc

SEQ ID NO: 75630 - DNA, 25 bp, Homo sapien
ctgaagggttttttgccgtggctca

SEQ ID NO: 75631 - DNA, 25 bp, Homo sapien
gggtaatgctggctcgcagttttct

SEQ ID NO: 75632 - DNA, 25 bp, Homo sapien
ttagaacaccaatttgtgaggataa

SEQ ID NO: 75633 - DNA, 25 bp, Homo sapien
ataaattccattcgtcagagcaaac

SEQ ID NO: 75634 - DNA, 25 bp, Homo sapien
gaagtaagcatcagtaagatgtttt

SEQ ID NO: 75635 - DNA, 25 bp, Homo sapien
caatcttgcgctgctccgtaatctc

SEQ ID NO: 75636 - DNA, 25 bp, Homo sapien
cgtggctcaacagctttcgaggcac

SEQ ID NO: 75637 - DNA, 25 bp, Homo sapien
tcttgcccctgtggcgtccagtgag

SEQ ID NO: 75638 - DNA, 25 bp, Homo sapien
ttctcacgtgctgactgaagggttt

SEQ ID NO: 75639 - DNA, 25 bp, Homo sapien
aagtaataagccactagccagctgc

SEQ ID NO: 75640 - DNA, 25 bp, Homo sapien
gtaggataatatctaggcattttgc

SEQ ID NO: 75641 - DNA, 25 bp, Homo sapien
ctgaagggttttttgccgtggctca

SEQ ID NO: 75642 - DNA, 25 bp, Homo sapien
gggtaatgctggctcgcagttttct

SEQ ID NO: 75643 - DNA, 25 bp, Homo sapien
ttagaacaccaatttgtgaggataa

SEQ ID NO: 75644 - DNA, 25 bp, Homo sapien
ataaattccattcgtcagagcaaac

SEQ ID NO: 75645 - DNA, 25 bp, Homo sapien
gaagtaagcatcagtaagatgtttt

SEQ ID NO: 75646 - DNA, 25 bp, Homo sapien
caatcttgcgctgctccgtaatctc

SEQ ID NO: 75647 - DNA, 25 bp, Homo sapien
cgtggctcaacagctttcgaggcac

SEQ ID NO: 75648 - DNA, 25 bp, Homo sapien
tcttgcccctgtggcgtccagtgag

SEQ ID NO: 75649 - DNA, 25 bp, Homo sapien
aagtaataagccactagccagctgc

SEQ ID NO: 75650 - DNA, 25 bp, Homo sapien
ttctcacgtgctgactgaagggttt

SEQ ID NO: 75651 - DNA, 25 bp, Homo sapien
gtaggataatatctaggcattttgc

SEQ ID NO: 75652 - DNA, 25 bp, Homo sapien
gggtaatgctggctcgcagttttct

SEQ ID NO: 75653 - DNA, 25 bp, Homo sapien
ctgaagggttttttgccgtggctca

SEQ ID NO: 75654 - DNA, 25 bp, Homo sapien
ttagaacaccaatttgtgaggataa

SEQ ID NO: 75655 - DNA, 25 bp, Homo sapien
gtaggataatatctaggcattttgc

SEQ ID NO: 75656 - DNA, 25 bp, Homo sapien
tcttgcccctgtggcgtccagtgag

SEQ ID NO: 75657 - DNA, 25 bp, Homo sapien
caatcttgcgctgctccgtaatctc

SEQ ID NO: 75658 - DNA, 25 bp, Homo sapien
ataaattccattcgtcagagcaaac

SEQ ID NO: 75659 - DNA, 25 bp, Homo sapien
gggtaatgctggctcgcagttttct

SEQ ID NO: 75660 - DNA, 25 bp, Homo sapien
ttagaacaccaatttgtgaggataa

SEQ ID NO: 75661 - DNA, 25 bp, Homo sapien
gaagtaagcatcagtaagatgtttt

SEQ ID NO: 75662 - DNA, 25 bp, Homo sapien
ctgaagggttttttgccgtggctca

SEQ ID NO: 75663 - DNA, 25 bp, Homo sapien
aagtaataagccactagccagctgc

SEQ ID NO: 75664 - DNA, 25 bp, Homo sapien
cgtggctcaacagctttcgaggcac

SEQ ID NO: 75665 - DNA, 25 bp, Homo sapien
ttctcacgtgctgactgaagggttt

SEQ ID NO: 75666 - DNA, 25 bp, Homo sapien
ataaattccattcgtcagagcaaac

SEQ ID NO: 75667 - DNA, 25 bp, Homo sapien
gaagtaagcatcagtaagatgtttt

SEQ ID NO: 75668 - DNA, 25 bp, Homo sapien
caatcttgcgctgctccgtaatctc

SEQ ID NO: 75669 - DNA, 25 bp, Homo sapien
cgtggctcaacagctttcgaggcac

SEQ ID NO: 75670 - DNA, 25 bp, Homo sapien
tcttgcccctgtggcgtccagtgag

SEQ ID NO: 75671 - DNA, 25 bp, Homo sapien
ttctcacgtgctgactgaagggttt

SEQ ID NO: 75672 - DNA, 25 bp, Homo sapien
aagtaataagccactagccagctgc

SEQ ID NO: 75673 - DNA, 25 bp, Homo sapien
gggtaatgctggctcgcagttttct

SEQ ID NO: 75674 - DNA, 25 bp, Homo sapien
gtaggataatatctaggcattttgc

SEQ ID NO: 75675 - DNA, 25 bp, Homo sapien
ctgaagggttttttgccgtggctca

SEQ ID NO: 75676 - DNA, 25 bp, Homo sapien
ttagaacaccaatttgtgaggataa

SEQ ID NO: 75677 - DNA, 25 bp, Homo sapien
gtaggataatatctaggcattttgc

SEQ ID NO: 75678 - DNA, 25 bp, Homo sapien
cgtggctcaacagctttcgaggcac

SEQ ID NO: 75679 - DNA, 25 bp, Homo sapien
ctgaagggttttttgccgtggctca

SEQ ID NO: 75680 - DNA, 25 bp, Homo sapien
ttctcacgtgctgactgaagggttt

SEQ ID NO: 75681 - DNA, 25 bp, Homo sapien
gggtaatgctggctcgcagttttct

SEQ ID NO: 75682 - DNA, 25 bp, Homo sapien
tcttgcccctgtggcgtccagtgag

SEQ ID NO: 75683 - DNA, 25 bp, Homo sapien
aagtaataagccactagccagctgc

SEQ ID NO: 75684 - DNA, 25 bp, Homo sapien
gaagtaagcatcagtaagatgtttt

SEQ ID NO: 75685 - DNA, 25 bp, Homo sapien
caatcttgcgctgctccgtaatctc

SEQ ID NO: 75686 - DNA, 25 bp, Homo sapien
ataaattccattcgtcagagcaaac

SEQ ID NO: 75687 - DNA, 25 bp, Homo sapien
ttagaacaccaatttgtgaggataa

SEQ ID NO: 75688 - DNA, 25 bp, Homo sapien
ctcactggacgccacaggggcaaga

SEQ ID NO: 75689 - DNA, 25 bp, Homo sapien
ttatcctcacaaattggtgttctaa

SEQ ID NO: 75690 - DNA, 25 bp, Homo sapien
agaaaactgcgagccagcattaccc

SEQ ID NO: 75691 - DNA, 25 bp, Homo sapien
gagattacggagcagcgcaagattg

SEQ ID NO: 75692 - DNA, 25 bp, Homo sapien
gtttgctctgacgaatggaatttat

SEQ ID NO: 75693 - DNA, 25 bp, Homo sapien
gcagctggctagtggcttattactt

SEQ ID NO: 75694 - DNA, 25 bp, Homo sapien
aaacccttcagtcagcacgtgagaa

SEQ ID NO: 75695 - DNA, 25 bp, Homo sapien
gtgcctcgaaagctgttgagccacg

SEQ ID NO: 75696 - DNA, 25 bp, Homo sapien
aaaacatcttactgatgcttacttc

SEQ ID NO: 75697 - DNA, 25 bp, Homo sapien
gcaaaatgcctagatattatcctac

SEQ ID NO: 75698 - DNA, 25 bp, Homo sapien
tgagccacggcaaaaaacccttcag

SEQ ID NO: 75699 - DNA, 25 bp, Homo sapien
ataaattccattcgtcagagcaaac

SEQ ID NO: 75700 - DNA, 25 bp, Homo sapien
gaagtaagcatcagtaagatgtttt

SEQ ID NO: 75701 - DNA, 25 bp, Homo sapien
caatcttgcgctgctccgtaatctc

SEQ ID NO: 75702 - DNA, 25 bp, Homo sapien
cgtggctcaacagctttcgaggcac

SEQ ID NO: 75703 - DNA, 25 bp, Homo sapien
tcttgcccctgtggcgtccagtgag

SEQ ID NO: 75704 - DNA, 25 bp, Homo sapien
ttctcacgtgctgactgaagggttt

SEQ ID NO: 75705 - DNA, 25 bp, Homo sapien
aagtaataagccactagccagctgc

SEQ ID NO: 75706 - DNA, 25 bp, Homo sapien
ctgaagggttttttgccgtggctca

SEQ ID NO: 75707 - DNA, 25 bp, Homo sapien
gtaggataatatctaggcattttgc

SEQ ID NO: 75708 - DNA, 25 bp, Homo sapien
ttagaacaccaatttgtgaggataa

SEQ ID NO: 75709 - DNA, 25 bp, Homo sapien
gggtaatgctggctcgcagttttct

SEQ ID NO: 75710 - DNA, 25 bp, Homo sapien
gaagtaagcatcagtaagatgtttt

SEQ ID NO: 75711 - DNA, 25 bp, Homo sapien
ctgaagggttttttgccgtggctca

SEQ ID NO: 75712 - DNA, 25 bp, Homo sapien
gtaggataatatctaggcattttgc

SEQ ID NO: 75713 - DNA, 25 bp, Homo sapien
ttagaacaccaatttgtgaggataa

SEQ ID NO: 75714 - DNA, 25 bp, Homo sapien
caatcttgcgctgctccgtaatctc

SEQ ID NO: 75715 - DNA, 25 bp, Homo sapien
cgtggctcaacagctttcgaggcac

SEQ ID NO: 75716 - DNA, 25 bp, Homo sapien
gggtaatgctggctcgcagttttct

SEQ ID NO: 75717 - DNA, 25 bp, Homo sapien
tcttgcccctgtggcgtccagtgag

SEQ ID NO: 75718 - DNA, 25 bp, Homo sapien
aagtaataagccactagccagctgc

SEQ ID NO: 75719 - DNA, 25 bp, Homo sapien
ataaattccattcgtcagagcaaac

SEQ ID NO: 75720 - DNA, 25 bp, Homo sapien
ttctcacgtgctgactgaagggttt

SEQ ID NO: 75721 - DNA, 25 bp, Homo sapien
gtaggataatatctaggcattttgc

SEQ ID NO: 75722 - DNA, 25 bp, Homo sapien
cgtggctcaacagctttcgaggcac

SEQ ID NO: 75723 - DNA, 25 bp, Homo sapien
ctgaagggttttttgccgtggctca

SEQ ID NO: 75724 - DNA, 25 bp, Homo sapien
ttctcacgtgctgactgaagggttt

SEQ ID NO: 75725 - DNA, 25 bp, Homo sapien
gggtaatgctggctcgcagttttct

SEQ ID NO: 75726 - DNA, 25 bp, Homo sapien
tcttgcccctgtggcgtccagtgag

SEQ ID NO: 75727 - DNA, 25 bp, Homo sapien
aagtaataagccactagccagctgc

SEQ ID NO: 75728 - DNA, 25 bp, Homo sapien
gaagtaagcatcagtaagatgtttt

SEQ ID NO: 75729 - DNA, 25 bp, Homo sapien
caatcttgcgctgctccgtaatctc

SEQ ID NO: 75730 - DNA, 25 bp, Homo sapien
ataaattccattcgtcagagcaaac

SEQ ID NO: 75731 - DNA, 25 bp, Homo sapien
ttagaacaccaatttgtgaggataa

SEQ ID NO: 75732 - DNA, 25 bp, Homo sapien
gggtaatgctggctcgcagttttct

SEQ ID NO: 75733 - DNA, 25 bp, Homo sapien
ttagaacaccaatttgtgaggataa

SEQ ID NO: 75734 - DNA, 25 bp, Homo sapien
cgtggctcaacagctttcgaggcac

SEQ ID NO: 75735 - DNA, 25 bp, Homo sapien
gaagtaagcatcagtaagatgtttt

SEQ ID NO: 75736 - DNA, 25 bp, Homo sapien
tcttgcccctgtggcgtccagtgag

SEQ ID NO: 75737 - DNA, 25 bp, Homo sapien
aagtaataagccactagccagctgc

SEQ ID NO: 75738 - DNA, 25 bp, Homo sapien
caatcttgcgctgctccgtaatctc

SEQ ID NO: 75739 - DNA, 25 bp, Homo sapien
ctgaagggttttttgccgtggctca

SEQ ID NO: 75740 - DNA, 25 bp, Homo sapien
ataaattccattcgtcagagcaaac

SEQ ID NO: 75741 - DNA, 25 bp, Homo sapien
gtaggataatatctaggcattttgc

SEQ ID NO: 75742 - DNA, 25 bp, Homo sapien
ttctcacgtgctgactgaagggttt

SEQ ID NO: 75743 - DNA, 25 bp, Homo sapien
gtaggataatatctaggcattttgc

SEQ ID NO: 75744 - DNA, 25 bp, Homo sapien
cgtggctcaacagctttcgaggcac

SEQ ID NO: 75745 - DNA, 25 bp, Homo sapien
ctgaagggttttttgccgtggctca

SEQ ID NO: 75746 - DNA, 25 bp, Homo sapien
ttctcacgtgctgactgaagggttt

SEQ ID NO: 75747 - DNA, 25 bp, Homo sapien
gggtaatgctggctcgcagttttct

SEQ ID NO: 75748 - DNA, 25 bp, Homo sapien
tcttgcccctgtggcgtccagtgag

SEQ ID NO: 75749 - DNA, 25 bp, Homo sapien
aagtaataagccactagccagctgc

SEQ ID NO: 75750 - DNA, 25 bp, Homo sapien
gaagtaagcatcagtaagatgtttt

SEQ ID NO: 75751 - DNA, 25 bp, Homo sapien
caatcttgcgctgctccgtaatctc

SEQ ID NO: 75752 - DNA, 25 bp, Homo sapien
ataaattccattcgtcagagcaaac

SEQ ID NO: 75753 - DNA, 25 bp, Homo sapien
ttagaacaccaatttgtgaggataa

SEQ ID NO: 75754 - DNA, 25 bp, Homo sapien
gtaggataatatctaggcattttgc

SEQ ID NO: 75755 - DNA, 25 bp, Homo sapien
ctgaagggttttttgccgtggctca

SEQ ID NO: 75756 - DNA, 25 bp, Homo sapien
ttctcacgtgctgactgaagggttt

SEQ ID NO: 75757 - DNA, 25 bp, Homo sapien
aagtaataagccactagccagctgc

SEQ ID NO: 75758 - DNA, 25 bp, Homo sapien
gggtaatgctggctcgcagttttct

SEQ ID NO: 75759 - DNA, 25 bp, Homo sapien
ataaattccattcgtcagagcaaac

SEQ ID NO: 75760 - DNA, 25 bp, Homo sapien
gaagtaagcatcagtaagatgtttt

SEQ ID NO: 75761 - DNA, 25 bp, Homo sapien
ttagaacaccaatttgtgaggataa

SEQ ID NO: 75762 - DNA, 25 bp, Homo sapien
tcttgcccctgtggcgtccagtgag

SEQ ID NO: 75763 - DNA, 25 bp, Homo sapien
cgtggctcaacagctttcgaggcac

SEQ ID NO: 75764 - DNA, 25 bp, Homo sapien
caatcttgcgctgctccgtaatctc

SEQ ID NO: 75765 - DNA, 25 bp, Homo sapien
ctgaagggttttttgccgtggctca

SEQ ID NO: 75766 - DNA, 25 bp, Homo sapien
ttctcacgtgctgactgaagggttt

SEQ ID NO: 75767 - DNA, 25 bp, Homo sapien
gggtaatgctggctcgcagttttct

SEQ ID NO: 75768 - DNA, 25 bp, Homo sapien
tcttgcccctgtggcgtccagtgag

SEQ ID NO: 75769 - DNA, 25 bp, Homo sapien
aagtaataagccactagccagctgc

SEQ ID NO: 75770 - DNA, 25 bp, Homo sapien
gaagtaagcatcagtaagatgtttt

SEQ ID NO: 75771 - DNA, 25 bp, Homo sapien
caatcttgcgctgctccgtaatctc

SEQ ID NO: 75772 - DNA, 25 bp, Homo sapien
ataaattccattcgtcagagcaaac

SEQ ID NO: 75773 - DNA, 25 bp, Homo sapien
ttagaacaccaatttgtgaggataa

SEQ ID NO: 75774 - DNA, 25 bp, Homo sapien
gtaggataatatctaggcattttgc

SEQ ID NO: 75775 - DNA, 25 bp, Homo sapien
cgtggctcaacagctttcgaggcac

SEQ ID NO: 75776 - DNA, 25 bp, Homo sapien
gtaggataatatctaggcattttgc

SEQ ID NO: 75777 - DNA, 25 bp, Homo sapien
cgtggctcaacagctttcgaggcac

SEQ ID NO: 75778 - DNA, 25 bp, Homo sapien
ctgaagggttttttgccgtggctca

SEQ ID NO: 75779 - DNA, 25 bp, Homo sapien
ttctcacgtgctgactgaagggttt

SEQ ID NO: 75780 - DNA, 25 bp, Homo sapien
gggtaatgctggctcgcagttttct

SEQ ID NO: 75781 - DNA, 25 bp, Homo sapien
tcttgcccctgtggcgtccagtgag

SEQ ID NO: 75782 - DNA, 25 bp, Homo sapien
aagtaataagccactagccagctgc

SEQ ID NO: 75783 - DNA, 25 bp, Homo sapien
gaagtaagcatcagtaagatgtttt

SEQ ID NO: 75784 - DNA, 25 bp, Homo sapien
caatcttgcgctgctccgtaatctc

SEQ ID NO: 75785 - DNA, 25 bp, Homo sapien
ataaattccattcgtcagagcaaac

SEQ ID NO: 75786 - DNA, 25 bp, Homo sapien
ttagaacaccaatttgtgaggataa

SEQ ID NO: 75787 - DNA, 25 bp, Homo sapien
caatcttgcgctgctccgtaatctc

SEQ ID NO: 75788 - DNA, 25 bp, Homo sapien
aagtaataagccactagccagctgc

SEQ ID NO: 75789 - DNA, 25 bp, Homo sapien
gaagtaagcatcagtaagatgtttt

SEQ ID NO: 75790 - DNA, 25 bp, Homo sapien
ataaattccattcgtcagagcaaac

SEQ ID NO: 75791 - DNA, 25 bp, Homo sapien
tcttgcccctgtggcgtccagtgag

SEQ ID NO: 75792 - DNA, 25 bp, Homo sapien
gtaggataatatctaggcattttgc

SEQ ID NO: 75793 - DNA, 25 bp, Homo sapien
cgtggctcaacagctttcgaggcac

SEQ ID NO: 75794 - DNA, 25 bp, Homo sapien
ctgaagggttttttgccgtggctca

SEQ ID NO: 75795 - DNA, 25 bp, Homo sapien
ttagaacaccaatttgtgaggataa

SEQ ID NO: 75796 - DNA, 25 bp, Homo sapien
ttctcacgtgctgactgaagggttt

SEQ ID NO: 75797 - DNA, 25 bp, Homo sapien
gggtaatgctggctcgcagttttct

SEQ ID NO: 75798 - DNA, 25 bp, Homo sapien
gtaggataatatctaggcattttgc

SEQ ID NO: 75799 - DNA, 25 bp, Homo sapien
cgtggctcaacagctttcgaggcac

SEQ ID NO: 75800 - DNA, 25 bp, Homo sapien
ctgaagggttttttgccgtggctca

SEQ ID NO: 75801 - DNA, 25 bp, Homo sapien
ttctcacgtgctgactgaagggttt

SEQ ID NO: 75802 - DNA, 25 bp, Homo sapien
gggtaatgctggctcgcagttttct

SEQ ID NO: 75803 - DNA, 25 bp, Homo sapien
tcttgcccctgtggcgtccagtgag

SEQ ID NO: 75804 - DNA, 25 bp, Homo sapien
aagtaataagccactagccagctgc

SEQ ID NO: 75805 - DNA, 25 bp, Homo sapien
gaagtaagcatcagtaagatgtttt

SEQ ID NO: 75806 - DNA, 25 bp, Homo sapien
caatcttgcgctgctccgtaatctc

SEQ ID NO: 75807 - DNA, 25 bp, Homo sapien
ataaattccattcgtcagagcaaac

SEQ ID NO: 75808 - DNA, 25 bp, Homo sapien
ttagaacaccaatttgtgaggataa

SEQ ID NO: 75809 - DNA, 25 bp, Homo sapien
ataaattccattcgtcagagcaaac

SEQ ID NO: 75810 - DNA, 25 bp, Homo sapien
aagtaataagccactagccagctgc

SEQ ID NO: 75811 - DNA, 25 bp, Homo sapien
gggtaatgctggctcgcagttttct

SEQ ID NO: 75812 - DNA, 25 bp, Homo sapien
gtaggataatatctaggcattttgc

SEQ ID NO: 75813 - DNA, 25 bp, Homo sapien
ttctcacgtgctgactgaagggttt

SEQ ID NO: 75814 - DNA, 25 bp, Homo sapien
tcttgcccctgtggcgtccagtgag

SEQ ID NO: 75815 - DNA, 25 bp, Homo sapien
gaagtaagcatcagtaagatgtttt

SEQ ID NO: 75816 - DNA, 25 bp, Homo sapien
ctgaagggttttttgccgtggctca

SEQ ID NO: 75817 - DNA, 25 bp, Homo sapien
caatcttgcgctgctccgtaatctc

SEQ ID NO: 75818 - DNA, 25 bp, Homo sapien
ttagaacaccaatttgtgaggataa

SEQ ID NO: 75819 - DNA, 25 bp, Homo sapien
cgtggctcaacagctttcgaggcac

SEQ ID NO: 75820 - DNA, 25 bp, Homo sapien
gtaggataatatctaggcattttgc

SEQ ID NO: 75821 - DNA, 25 bp, Homo sapien
cgtggctcaacagctttcgaggcac

SEQ ID NO: 75822 - DNA, 25 bp, Homo sapien
ctgaagggttttttgccgtggctca

SEQ ID NO: 75823 - DNA, 25 bp, Homo sapien
ttctcacgtgctgactgaagggttt

SEQ ID NO: 75824 - DNA, 25 bp, Homo sapien
gggtaatgctggctcgcagttttct

SEQ ID NO: 75825 - DNA, 25 bp, Homo sapien
tcttgcccctgtggcgtccagtgag

SEQ ID NO: 75826 - DNA, 25 bp, Homo sapien
aagtaataagccactagccagctgc

SEQ ID NO: 75827 - DNA, 25 bp, Homo sapien
gaagtaagcatcagtaagatgtttt

SEQ ID NO: 75828 - DNA, 25 bp, Homo sapien
caatcttgcgctgctccgtaatctc

SEQ ID NO: 75829 - DNA, 25 bp, Homo sapien
ataaattccattcgtcagagcaaac

SEQ ID NO: 75830 - DNA, 25 bp, Homo sapien
ttagaacaccaatttgtgaggataa

SEQ ID NO: 75831 - DNA, 25 bp, Homo sapien
ctgaagggttttttgccgtggctca

SEQ ID NO: 75832 - DNA, 25 bp, Homo sapien
tcttgcccctgtggcgtccagtgag

SEQ ID NO: 75833 - DNA, 25 bp, Homo sapien
aagtaataagccactagccagctgc

SEQ ID NO: 75834 - DNA, 25 bp, Homo sapien
caatcttgcgctgctccgtaatctc

SEQ ID NO: 75835 - DNA, 25 bp, Homo sapien
ataaattccattcgtcagagcaaac

SEQ ID NO: 75836 - DNA, 25 bp, Homo sapien
ttctcacgtgctgactgaagggttt

SEQ ID NO: 75837 - DNA, 25 bp, Homo sapien
gtaggataatatctaggcattttgc

SEQ ID NO: 75838 - DNA, 25 bp, Homo sapien
gggtaatgctggctcgcagttttct

SEQ ID NO: 75839 - DNA, 25 bp, Homo sapien
gaagtaagcatcagtaagatgtttt

SEQ ID NO: 75840 - DNA, 25 bp, Homo sapien
cgtggctcaacagctttcgaggcac

SEQ ID NO: 75841 - DNA, 25 bp, Homo sapien
ttagaacaccaatttgtgaggataa

SEQ ID NO: 75842 - DNA, 25 bp, Homo sapien
gtaggataatatctaggcattttgc

SEQ ID NO: 75843 - DNA, 25 bp, Homo sapien
cgtggctcaacagctttcgaggcac

SEQ ID NO: 75844 - DNA, 25 bp, Homo sapien
ctgaagggttttttgccgtggctca

SEQ ID NO: 75845 - DNA, 25 bp, Homo sapien
ttctcacgtgctgactgaagggttt

SEQ ID NO: 75846 - DNA, 25 bp, Homo sapien
gggtaatgctggctcgcagttttct

SEQ ID NO: 75847 - DNA, 25 bp, Homo sapien
tcttgcccctgtggcgtccagtgag

SEQ ID NO: 75848 - DNA, 25 bp, Homo sapien
aagtaataagccactagccagctgc

SEQ ID NO: 75849 - DNA, 25 bp, Homo sapien
gaagtaagcatcagtaagatgtttt

SEQ ID NO: 75850 - DNA, 25 bp, Homo sapien
caatcttgcgctgctccgtaatctc

SEQ ID NO: 75851 - DNA, 25 bp, Homo sapien
ataaattccattcgtcagagcaaac

SEQ ID NO: 75852 - DNA, 25 bp, Homo sapien
ttagaacaccaatttgtgaggataa

SEQ ID NO: 75853 - DNA, 25 bp, Homo sapien
caatcttgcgctgctccgtaatctc

SEQ ID NO: 75854 - DNA, 25 bp, Homo sapien
aagtaataagccactagccagctgc

SEQ ID NO: 75855 - DNA, 25 bp, Homo sapien
gggtaatgctggctcgcagttttct

SEQ ID NO: 75856 - DNA, 25 bp, Homo sapien
ttagaacaccaatttgtgaggataa

SEQ ID NO: 75857 - DNA, 25 bp, Homo sapien
tcttgcccctgtggcgtccagtgag

SEQ ID NO: 75858 - DNA, 25 bp, Homo sapien
ataaattccattcgtcagagcaaac

SEQ ID NO: 75859 - DNA, 25 bp, Homo sapien
cgtggctcaacagctttcgaggcac

SEQ ID NO: 75860 - DNA, 25 bp, Homo sapien
gtaggataatatctaggcattttgc

SEQ ID NO: 75861 - DNA, 25 bp, Homo sapien
gaagtaagcatcagtaagatgtttt

SEQ ID NO: 75862 - DNA, 25 bp, Homo sapien
ttctcacgtgctgactgaagggttt

SEQ ID NO: 75863 - DNA, 25 bp, Homo sapien
ctgaagggttttttgccgtggctca

SEQ ID NO: 75864 - DNA, 25 bp, Homo sapien
gtaggataatatctaggcattttgc

SEQ ID NO: 75865 - DNA, 25 bp, Homo sapien
cgtggctcaacagctttcgaggcac

SEQ ID NO: 75866 - DNA, 25 bp, Homo sapien
ctgaagggttttttgccgtggctca

SEQ ID NO: 75867 - DNA, 25 bp, Homo sapien
ttctcacgtgctgactgaagggttt

SEQ ID NO: 75868 - DNA, 25 bp, Homo sapien
gggtaatgctggctcgcagttttct

SEQ ID NO: 75869 - DNA, 25 bp, Homo sapien
tcttgcccctgtggcgtccagtgag

SEQ ID NO: 75870 - DNA, 25 bp, Homo sapien
aagtaataagccactagccagctgc

SEQ ID NO: 75871 - DNA, 25 bp, Homo sapien
gaagtaagcatcagtaagatgtttt

SEQ ID NO: 75872 - DNA, 25 bp, Homo sapien
caatcttgcgctgctccgtaatctc

SEQ ID NO: 75873 - DNA, 25 bp, Homo sapien
ataaattccattcgtcagagcaaac

SEQ ID NO: 75874 - DNA, 25 bp, Homo sapien
ttagaacaccaatttgtgaggataa

SEQ ID NO: 75875 - DNA, 25 bp, Homo sapien
ttctcacgtgctgactgaagggttt

SEQ ID NO: 75876 - DNA, 25 bp, Homo sapien
ctgaagggttttttgccgtggctca

SEQ ID NO: 75877 - DNA, 25 bp, Homo sapien
ttagaacaccaatttgtgaggataa

SEQ ID NO: 75878 - DNA, 25 bp, Homo sapien
gaagtaagcatcagtaagatgtttt

SEQ ID NO: 75879 - DNA, 25 bp, Homo sapien
aagtaataagccactagccagctgc

SEQ ID NO: 75880 - DNA, 25 bp, Homo sapien
cgtggctcaacagctttcgaggcac

SEQ ID NO: 75881 - DNA, 25 bp, Homo sapien
gggtaatgctggctcgcagttttct

SEQ ID NO: 75882 - DNA, 25 bp, Homo sapien
gtaggataatatctaggcattttgc

SEQ ID NO: 75883 - DNA, 25 bp, Homo sapien
tcttgcccctgtggcgtccagtgag

SEQ ID NO: 75884 - DNA, 25 bp, Homo sapien
ataaattccattcgtcagagcaaac

SEQ ID NO: 75885 - DNA, 25 bp, Homo sapien
caatcttgcgctgctccgtaatctc

SEQ ID NO: 75886 - DNA, 25 bp, Homo sapien
cgtggctcaacagctttcgaggcac

SEQ ID NO: 75887 - DNA, 25 bp, Homo sapien
ataaattccattcgtcagagcaaac

SEQ ID NO: 75888 - DNA, 25 bp, Homo sapien
gtaggataatatctaggcattttgc

SEQ ID NO: 75889 - DNA, 25 bp, Homo sapien
aagtaataagccactagccagctgc

SEQ ID NO: 75890 - DNA, 25 bp, Homo sapien
gggtaatgctggctcgcagttttct

SEQ ID NO: 75891 - DNA, 25 bp, Homo sapien
ttagaacaccaatttgtgaggataa

SEQ ID NO: 75892 - DNA, 25 bp, Homo sapien
caatcttgcgctgctccgtaatctc

SEQ ID NO: 75893 - DNA, 25 bp, Homo sapien
ctgaagggttttttgccgtggctca

SEQ ID NO: 75894 - DNA, 25 bp, Homo sapien
ttctcacgtgctgactgaagggttt

SEQ ID NO: 75895 - DNA, 25 bp, Homo sapien
gaagtaagcatcagtaagatgtttt

SEQ ID NO: 75896 - DNA, 25 bp, Homo sapien
tcttgcccctgtggcgtccagtgag

SEQ ID NO: 75897 - DNA, 25 bp, Homo sapien
gtaggataatatctaggcattttgc

SEQ ID NO: 75898 - DNA, 25 bp, Homo sapien
cgtggctcaacagctttcgaggcac

SEQ ID NO: 75899 - DNA, 25 bp, Homo sapien
ctgaagggttttttgccgtggctca

SEQ ID NO: 75900 - DNA, 25 bp, Homo sapien
ttctcacgtgctgactgaagggttt

SEQ ID NO: 75901 - DNA, 25 bp, Homo sapien
gggtaatgctggctcgcagttttct

SEQ ID NO: 75902 - DNA, 25 bp, Homo sapien
tcttgcccctgtggcgtccagtgag

SEQ ID NO: 75903 - DNA, 25 bp, Homo sapien
aagtaataagccactagccagctgc

SEQ ID NO: 75904 - DNA, 25 bp, Homo sapien
gaagtaagcatcagtaagatgtttt

SEQ ID NO: 75905 - DNA, 25 bp, Homo sapien
caatcttgcgctgctccgtaatctc

SEQ ID NO: 75906 - DNA, 25 bp, Homo sapien
ataaattccattcgtcagagcaaac

SEQ ID NO: 75907 - DNA, 25 bp, Homo sapien
ttagaacaccaatttgtgaggataa

SEQ ID NO: 75908 - DNA, 25 bp, Homo sapien
ataaattccattcgtcagagcaaac

SEQ ID NO: 75909 - DNA, 25 bp, Homo sapien
ctgaagggttttttgccgtggctca

SEQ ID NO: 75910 - DNA, 25 bp, Homo sapien
gggtaatgctggctcgcagttttct

SEQ ID NO: 75911 - DNA, 25 bp, Homo sapien
ttagaacaccaatttgtgaggataa

SEQ ID NO: 75912 - DNA, 25 bp, Homo sapien
cgtggctcaacagctttcgaggcac

SEQ ID NO: 75913 - DNA, 25 bp, Homo sapien
aagtaataagccactagccagctgc

SEQ ID NO: 75914 - DNA, 25 bp, Homo sapien
caatcttgcgctgctccgtaatctc

SEQ ID NO: 75915 - DNA, 25 bp, Homo sapien
gaagtaagcatcagtaagatgtttt

SEQ ID NO: 75916 - DNA, 25 bp, Homo sapien
tcttgcccctgtggcgtccagtgag

SEQ ID NO: 75917 - DNA, 25 bp, Homo sapien
ttctcacgtgctgactgaagggttt

SEQ ID NO: 75918 - DNA, 25 bp, Homo sapien
gtaggataatatctaggcattttgc

SEQ ID NO: 75919 - DNA, 25 bp, Homo sapien
ctgaagggttttttgccgtggctca

SEQ ID NO: 75920 - DNA, 25 bp, Homo sapien
ttctcacgtgctgactgaagggttt

SEQ ID NO: 75921 - DNA, 25 bp, Homo sapien
gggtaatgctggctcgcagttttct

SEQ ID NO: 75922 - DNA, 25 bp, Homo sapien
tcttgcccctgtggcgtccagtgag

SEQ ID NO: 75923 - DNA, 25 bp, Homo sapien
aagtaataagccactagccagctgc

SEQ ID NO: 75924 - DNA, 25 bp, Homo sapien
gaagtaagcatcagtaagatgtttt

SEQ ID NO: 75925 - DNA, 25 bp, Homo sapien
caatcttgcgctgctccgtaatctc

SEQ ID NO: 75926 - DNA, 25 bp, Homo sapien
ataaattccattcgtcagagcaaac

SEQ ID NO: 75927 - DNA, 25 bp, Homo sapien
ttagaacaccaatttgtgaggataa

SEQ ID NO: 75928 - DNA, 25 bp, Homo sapien
gtaggataatatctaggcattttgc

SEQ ID NO: 75929 - DNA, 25 bp, Homo sapien
cgtggctcaacagctttcgaggcac

SEQ ID NO: 75930 - DNA, 25 bp, Homo sapien
caatcttgcgctgctccgtaatctc

SEQ ID NO: 75931 - DNA, 25 bp, Homo sapien
ttagaacaccaatttgtgaggataa

SEQ ID NO: 75932 - DNA, 25 bp, Homo sapien
tcttgcccctgtggcgtccagtgag

SEQ ID NO: 75933 - DNA, 25 bp, Homo sapien
ataaattccattcgtcagagcaaac

SEQ ID NO: 75934 - DNA, 25 bp, Homo sapien
aagtaataagccactagccagctgc

SEQ ID NO: 75935 - DNA, 25 bp, Homo sapien
ttctcacgtgctgactgaagggttt

SEQ ID NO: 75936 - DNA, 25 bp, Homo sapien
gaagtaagcatcagtaagatgtttt

SEQ ID NO: 75937 - DNA, 25 bp, Homo sapien
gtaggataatatctaggcattttgc

SEQ ID NO: 75938 - DNA, 25 bp, Homo sapien
ctgaagggttttttgccgtggctca

SEQ ID NO: 75939 - DNA, 25 bp, Homo sapien
cgtggctcaacagctttcgaggcac

SEQ ID NO: 75940 - DNA, 25 bp, Homo sapien
gggtaatgctggctcgcagttttct

SEQ ID NO: 75941 - DNA, 25 bp, Homo sapien
gtaggataatatctaggcattttgc

SEQ ID NO: 75942 - DNA, 25 bp, Homo sapien
cgtggctcaacagctttcgaggcac

SEQ ID NO: 75943 - DNA, 25 bp, Homo sapien
ctgaagggttttttgccgtggctca

SEQ ID NO: 75944 - DNA, 25 bp, Homo sapien
ttctcacgtgctgactgaagggttt

SEQ ID NO: 75945 - DNA, 25 bp, Homo sapien
gggtaatgctggctcgcagttttct

SEQ ID NO: 75946 - DNA, 25 bp, Homo sapien
tcttgcccctgtggcgtccagtgag

SEQ ID NO: 75947 - DNA, 25 bp, Homo sapien
aagtaataagccactagccagctgc

SEQ ID NO: 75948 - DNA, 25 bp, Homo sapien
gaagtaagcatcagtaagatgtttt

SEQ ID NO: 75949 - DNA, 25 bp, Homo sapien
caatcttgcgctgctccgtaatctc

SEQ ID NO: 75950 - DNA, 25 bp, Homo sapien
ataaattccattcgtcagagcaaac

SEQ ID NO: 75951 - DNA, 25 bp, Homo sapien
ttagaacaccaatttgtgaggataa

SEQ ID NO: 75952 - DNA, 25 bp, Homo sapien
gggtaatgctggctcgcagttttct

SEQ ID NO: 75953 - DNA, 25 bp, Homo sapien
cgtggctcaacagctttcgaggcac

SEQ ID NO: 75954 - DNA, 25 bp, Homo sapien
tcttgcccctgtggcgtccagtgag

SEQ ID NO: 75955 - DNA, 25 bp, Homo sapien
gaagtaagcatcagtaagatgtttt

SEQ ID NO: 75956 - DNA, 25 bp, Homo sapien
ttagaacaccaatttgtgaggataa

SEQ ID NO: 75957 - DNA, 25 bp, Homo sapien
ataaattccattcgtcagagcaaac

SEQ ID NO: 75958 - DNA, 25 bp, Homo sapien
ttctcacgtgctgactgaagggttt

SEQ ID NO: 75959 - DNA, 25 bp, Homo sapien
aagtaataagccactagccagctgc

SEQ ID NO: 75960 - DNA, 25 bp, Homo sapien
gtaggataatatctaggcattttgc

SEQ ID NO: 75961 - DNA, 25 bp, Homo sapien
caatcttgcgctgctccgtaatctc

SEQ ID NO: 75962 - DNA, 25 bp, Homo sapien
ctgaagggttttttgccgtggctca

SEQ ID NO: 75963 - DNA, 25 bp, Homo sapien
gtaggataatatctaggcattttgc

SEQ ID NO: 75964 - DNA, 25 bp, Homo sapien
cgtggctcaacagctttcgaggcac

SEQ ID NO: 75965 - DNA, 25 bp, Homo sapien
ctgaagggttttttgccgtggctca

SEQ ID NO: 75966 - DNA, 25 bp, Homo sapien
ttctcacgtgctgactgaagggttt

SEQ ID NO: 75967 - DNA, 25 bp, Homo sapien
gggtaatgctggctcgcagttttct

SEQ ID NO: 75968 - DNA, 25 bp, Homo sapien
tcttgcccctgtggcgtccagtgag

SEQ ID NO: 75969 - DNA, 25 bp, Homo sapien
aagtaataagccactagccagctgc

SEQ ID NO: 75970 - DNA, 25 bp, Homo sapien
gaagtaagcatcagtaagatgtttt

SEQ ID NO: 75971 - DNA, 25 bp, Homo sapien
caatcttgcgctgctccgtaatctc

SEQ ID NO: 75972 - DNA, 25 bp, Homo sapien
ataaattccattcgtcagagcaaac

SEQ ID NO: 75973 - DNA, 25 bp, Homo sapien
ttagaacaccaatttgtgaggataa

SEQ ID NO: 75974 - DNA, 25 bp, Homo sapien
aagtaataagccactagccagctgc

SEQ ID NO: 75975 - DNA, 25 bp, Homo sapien
gaagtaagcatcagtaagatgtttt

SEQ ID NO: 75976 - DNA, 25 bp, Homo sapien
gtaggataatatctaggcattttgc

SEQ ID NO: 75977 - DNA, 25 bp, Homo sapien
gggtaatgctggctcgcagttttct

SEQ ID NO: 75978 - DNA, 25 bp, Homo sapien
ctgaagggttttttgccgtggctca

SEQ ID NO: 75979 - DNA, 25 bp, Homo sapien
ttctcacgtgctgactgaagggttt

SEQ ID NO: 75980 - DNA, 25 bp, Homo sapien
tcttgcccctgtggcgtccagtgag

SEQ ID NO: 75981 - DNA, 25 bp, Homo sapien
cgtggctcaacagctttcgaggcac

SEQ ID NO: 75982 - DNA, 25 bp, Homo sapien
caatcttgcgctgctccgtaatctc

SEQ ID NO: 75983 - DNA, 25 bp, Homo sapien
ataaattccattcgtcagagcaaac

SEQ ID NO: 75984 - DNA, 25 bp, Homo sapien
ttagaacaccaatttgtgaggataa

SEQ ID NO: 75985 - DNA, 25 bp, Homo sapien
gtaggataatatctaggcattttgc

SEQ ID NO: 75986 - DNA, 25 bp, Homo sapien
cgtggctcaacagctttcgaggcac

SEQ ID NO: 75987 - DNA, 25 bp, Homo sapien
ctgaagggttttttgccgtggctca

SEQ ID NO: 75988 - DNA, 25 bp, Homo sapien
ttctcacgtgctgactgaagggttt

SEQ ID NO: 75989 - DNA, 25 bp, Homo sapien
gggtaatgctggctcgcagttttct

SEQ ID NO: 75990 - DNA, 25 bp, Homo sapien
tcttgcccctgtggcgtccagtgag

SEQ ID NO: 75991 - DNA, 25 bp, Homo sapien
aagtaataagccactagccagctgc

SEQ ID NO: 75992 - DNA, 25 bp, Homo sapien
gaagtaagcatcagtaagatgtttt

SEQ ID NO: 75993 - DNA, 25 bp, Homo sapien
caatcttgcgctgctccgtaatctc

SEQ ID NO: 75994 - DNA, 25 bp, Homo sapien
ataaattccattcgtcagagcaaac

SEQ ID NO: 75995 - DNA, 25 bp, Homo sapien
ttagaacaccaatttgtgaggataa

SEQ ID NO: 75996 - DNA, 25 bp, Homo sapien
ttagaacaccaatttgtgaggataa

SEQ ID NO: 75997 - DNA, 25 bp, Homo sapien
gggtaatgctggctcgcagttttct

SEQ ID NO: 75998 - DNA, 25 bp, Homo sapien
cgtggctcaacagctttcgaggcac

SEQ ID NO: 75999 - DNA, 25 bp, Homo sapien
ataaattccattcgtcagagcaaac

SEQ ID NO: 76000 - DNA, 25 bp, Homo sapien
ttctcacgtgctgactgaagggttt

SEQ ID NO: 76001 - DNA, 25 bp, Homo sapien
gtaggataatatctaggcattttgc

SEQ ID NO: 76002 - DNA, 25 bp, Homo sapien
aagtaataagccactagccagctgc

SEQ ID NO: 76003 - DNA, 25 bp, Homo sapien
tcttgcccctgtggcgtccagtgag

SEQ ID NO: 76004 - DNA, 25 bp, Homo sapien
ctgaagggttttttgccgtggctca

SEQ ID NO: 76005 - DNA, 25 bp, Homo sapien
gaagtaagcatcagtaagatgtttt

SEQ ID NO: 76006 - DNA, 25 bp, Homo sapien
caatcttgcgctgctccgtaatctc

SEQ ID NO: 76007 - DNA, 25 bp, Homo sapien
gtaggataatatctaggcattttgc

SEQ ID NO: 76008 - DNA, 25 bp, Homo sapien
cgtggctcaacagctttcgaggcac

SEQ ID NO: 76009 - DNA, 25 bp, Homo sapien
ctgaagggttttttgccgtggctca

SEQ ID NO: 76010 - DNA, 25 bp, Homo sapien
ttctcacgtgctgactgaagggttt

SEQ ID NO: 76011 - DNA, 25 bp, Homo sapien
gggtaatgctggctcgcagttttct

SEQ ID NO: 76012 - DNA, 25 bp, Homo sapien
tcttgcccctgtggcgtccagtgag

SEQ ID NO: 76013 - DNA, 25 bp, Homo sapien
aagtaataagccactagccagctgc

SEQ ID NO: 76014 - DNA, 25 bp, Homo sapien
gaagtaagcatcagtaagatgtttt

SEQ ID NO: 76015 - DNA, 25 bp, Homo sapien
caatcttgcgctgctccgtaatctc

SEQ ID NO: 76016 - DNA, 25 bp, Homo sapien
ataaattccattcgtcagagcaaac

SEQ ID NO: 76017 - DNA, 25 bp, Homo sapien
ttagaacaccaatttgtgaggataa

SEQ ID NO: 76018 - DNA, 25 bp, Homo sapien
gtaggataatatctaggcattttgc

SEQ ID NO: 76019 - DNA, 25 bp, Homo sapien
cgtggctcaacagctttcgaggcac

SEQ ID NO: 76020 - DNA, 25 bp, Homo sapien
ctgaagggttttttgccgtggctca

SEQ ID NO: 76021 - DNA, 25 bp, Homo sapien
ttctcacgtgctgactgaagggttt

SEQ ID NO: 76022 - DNA, 25 bp, Homo sapien
gggtaatgctggctcgcagttttct

SEQ ID NO: 76023 - DNA, 25 bp, Homo sapien
tcttgcccctgtggcgtccagtgag

SEQ ID NO: 76024 - DNA, 25 bp, Homo sapien
aagtaataagccactagccagctgc

SEQ ID NO: 76025 - DNA, 25 bp, Homo sapien
gaagtaagcatcagtaagatgtttt

SEQ ID NO: 76026 - DNA, 25 bp, Homo sapien
caatcttgcgctgctccgtaatctc

SEQ ID NO: 76027 - DNA, 25 bp, Homo sapien
ataaattccattcgtcagagcaaac

SEQ ID NO: 76028 - DNA, 25 bp, Homo sapien
ttagaacaccaatttgtgaggataa

SEQ ID NO: 76029 - DNA, 25 bp, Homo sapien
cgtggctcaacagctttcgaggcac

SEQ ID NO: 76030 - DNA, 25 bp, Homo sapien
ttagaacaccaatttgtgaggataa

SEQ ID NO: 76031 - DNA, 25 bp, Homo sapien
gggtaatgctggctcgcagttttct

SEQ ID NO: 76032 - DNA, 25 bp, Homo sapien
ttctcacgtgctgactgaagggttt

SEQ ID NO: 76033 - DNA, 25 bp, Homo sapien
ataaattccattcgtcagagcaaac

SEQ ID NO: 76034 - DNA, 25 bp, Homo sapien
ctgaagggttttttgccgtggctca

SEQ ID NO: 76035 - DNA, 25 bp, Homo sapien
caatcttgcgctgctccgtaatctc

SEQ ID NO: 76036 - DNA, 25 bp, Homo sapien
aagtaataagccactagccagctgc

SEQ ID NO: 76037 - DNA, 25 bp, Homo sapien
gaagtaagcatcagtaagatgtttt

SEQ ID NO: 76038 - DNA, 25 bp, Homo sapien
tcttgcccctgtggcgtccagtgag

SEQ ID NO: 76039 - DNA, 25 bp, Homo sapien
gtaggataatatctaggcattttgc

SEQ ID NO: 76040 - DNA, 25 bp, Homo sapien
gtaggataatatctaggcattttgc

SEQ ID NO: 76041 - DNA, 25 bp, Homo sapien
cgtggctcaacagctttcgaggcac

SEQ ID NO: 76042 - DNA, 25 bp, Homo sapien
ctgaagggttttttgccgtggctca

SEQ ID NO: 76043 - DNA, 25 bp, Homo sapien
ttctcacgtgctgactgaagggttt

SEQ ID NO: 76044 - DNA, 25 bp, Homo sapien
gggtaatgctggctcgcagttttct

SEQ ID NO: 76045 - DNA, 25 bp, Homo sapien
tcttgcccctgtggcgtccagtgag

SEQ ID NO: 76046 - DNA, 25 bp, Homo sapien
aagtaataagccactagccagctgc

SEQ ID NO: 76047 - DNA, 25 bp, Homo sapien
gaagtaagcatcagtaagatgtttt

SEQ ID NO: 76048 - DNA, 25 bp, Homo sapien
caatcttgcgctgctccgtaatctc

SEQ ID NO: 76049 - DNA, 25 bp, Homo sapien
ataaattccattcgtcagagcaaac

SEQ ID NO: 76050 - DNA, 25 bp, Homo sapien
ttagaacaccaatttgtgaggataa

SEQ ID NO: 76051 - DNA, 25 bp, Homo sapien
ttagaacaccaatttgtgaggataa

SEQ ID NO: 76052 - DNA, 25 bp, Homo sapien
ctgaagggttttttgccgtggctca

SEQ ID NO: 76053 - DNA, 25 bp, Homo sapien
gggtaatgctggctcgcagttttct

SEQ ID NO: 76054 - DNA, 25 bp, Homo sapien
tcttgcccctgtggcgtccagtgag

SEQ ID NO: 76055 - DNA, 25 bp, Homo sapien
gtaggataatatctaggcattttgc

SEQ ID NO: 76056 - DNA, 25 bp, Homo sapien
ttctcacgtgctgactgaagggttt

SEQ ID NO: 76057 - DNA, 25 bp, Homo sapien
cgtggctcaacagctttcgaggcac

SEQ ID NO: 76058 - DNA, 25 bp, Homo sapien
aagtaataagccactagccagctgc

SEQ ID NO: 76059 - DNA, 25 bp, Homo sapien
ataaattccattcgtcagagcaaac

SEQ ID NO: 76060 - DNA, 25 bp, Homo sapien
gaagtaagcatcagtaagatgtttt

SEQ ID NO: 76061 - DNA, 25 bp, Homo sapien
caatcttgcgctgctccgtaatctc

SEQ ID NO: 76062 - DNA, 25 bp, Homo sapien
gtaggataatatctaggcattttgc

SEQ ID NO: 76063 - DNA, 25 bp, Homo sapien
cgtggctcaacagctttcgaggcac

SEQ ID NO: 76064 - DNA, 25 bp, Homo sapien
ctgaagggttttttgccgtggctca

SEQ ID NO: 76065 - DNA, 25 bp, Homo sapien
ttctcacgtgctgactgaagggttt

SEQ ID NO: 76066 - DNA, 25 bp, Homo sapien
gggtaatgctggctcgcagttttct

SEQ ID NO: 76067 - DNA, 25 bp, Homo sapien
tcttgcccctgtggcgtccagtgag

SEQ ID NO: 76068 - DNA, 25 bp, Homo sapien
aagtaataagccactagccagctgc

SEQ ID NO: 76069 - DNA, 25 bp, Homo sapien
gaagtaagcatcagtaagatgtttt

SEQ ID NO: 76070 - DNA, 25 bp, Homo sapien
caatcttgcgctgctccgtaatctc

SEQ ID NO: 76071 - DNA, 25 bp, Homo sapien
ataaattccattcgtcagagcaaac

SEQ ID NO: 76072 - DNA, 25 bp, Homo sapien
ttagaacaccaatttgtgaggataa

SEQ ID NO: 76073 - DNA, 25 bp, Homo sapien
caatcttgcgctgctccgtaatctc

SEQ ID NO: 76074 - DNA, 25 bp, Homo sapien
gggtaatgctggctcgcagttttct

SEQ ID NO: 76075 - DNA, 25 bp, Homo sapien
gaagtaagcatcagtaagatgtttt

SEQ ID NO: 76076 - DNA, 25 bp, Homo sapien
ataaattccattcgtcagagcaaac

SEQ ID NO: 76077 - DNA, 25 bp, Homo sapien
ttagaacaccaatttgtgaggataa

SEQ ID NO: 76078 - DNA, 25 bp, Homo sapien
ctgaagggttttttgccgtggctca

SEQ ID NO: 76079 - DNA, 25 bp, Homo sapien
tcttgcccctgtggcgtccagtgag

SEQ ID NO: 76080 - DNA, 25 bp, Homo sapien
aagtaataagccactagccagctgc

SEQ ID NO: 76081 - DNA, 25 bp, Homo sapien
gtaggataatatctaggcattttgc

SEQ ID NO: 76082 - DNA, 25 bp, Homo sapien
cgtggctcaacagctttcgaggcac

SEQ ID NO: 76083 - DNA, 25 bp, Homo sapien
ttctcacgtgctgactgaagggttt

SEQ ID NO: 76084 - DNA, 25 bp, Homo sapien
gtaggataatatctaggcattttgc

SEQ ID NO: 76085 - DNA, 25 bp, Homo sapien
cgtggctcaacagctttcgaggcac

SEQ ID NO: 76086 - DNA, 25 bp, Homo sapien
ctgaagggttttttgccgtggctca

SEQ ID NO: 76087 - DNA, 25 bp, Homo sapien
ttctcacgtgctgactgaagggttt

SEQ ID NO: 76088 - DNA, 25 bp, Homo sapien
gggtaatgctggctcgcagttttct

SEQ ID NO: 76089 - DNA, 25 bp, Homo sapien
tcttgcccctgtggcgtccagtgag

SEQ ID NO: 76090 - DNA, 25 bp, Homo sapien
aagtaataagccactagccagctgc

SEQ ID NO: 76091 - DNA, 25 bp, Homo sapien
gaagtaagcatcagtaagatgtttt

SEQ ID NO: 76092 - DNA, 25 bp, Homo sapien
caatcttgcgctgctccgtaatctc

SEQ ID NO: 76093 - DNA, 25 bp, Homo sapien
ataaattccattcgtcagagcaaac

SEQ ID NO: 76094 - DNA, 25 bp, Homo sapien
ttagaacaccaatttgtgaggataa

SEQ ID NO: 76095 - DNA, 25 bp, Homo sapien
ataaattccattcgtcagagcaaac

SEQ ID NO: 76096 - DNA, 25 bp, Homo sapien
aagtaataagccactagccagctgc

SEQ ID NO: 76097 - DNA, 25 bp, Homo sapien
ttagaacaccaatttgtgaggataa

SEQ ID NO: 76098 - DNA, 25 bp, Homo sapien
gaagtaagcatcagtaagatgtttt

SEQ ID NO: 76099 - DNA, 25 bp, Homo sapien
cgtggctcaacagctttcgaggcac

SEQ ID NO: 76100 - DNA, 25 bp, Homo sapien
tcttgcccctgtggcgtccagtgag

SEQ ID NO: 76101 - DNA, 25 bp, Homo sapien
gtaggataatatctaggcattttgc

SEQ ID NO: 76102 - DNA, 25 bp, Homo sapien
gggtaatgctggctcgcagttttct

SEQ ID NO: 76103 - DNA, 25 bp, Homo sapien
ttctcacgtgctgactgaagggttt

SEQ ID NO: 76104 - DNA, 25 bp, Homo sapien
ctgaagggttttttgccgtggctca

SEQ ID NO: 76105 - DNA, 25 bp, Homo sapien
caatcttgcgctgctccgtaatctc

SEQ ID NO: 76106 - DNA, 25 bp, Homo sapien
gtaggataatatctaggcattttgc

SEQ ID NO: 76107 - DNA, 25 bp, Homo sapien
cgtggctcaacagctttcgaggcac

SEQ ID NO: 76108 - DNA, 25 bp, Homo sapien
ctgaagggttttttgccgtggctca

SEQ ID NO: 76109 - DNA, 25 bp, Homo sapien
ttctcacgtgctgactgaagggttt

SEQ ID NO: 76110 - DNA, 25 bp, Homo sapien
gggtaatgctggctcgcagttttct

SEQ ID NO: 76111 - DNA, 25 bp, Homo sapien
tcttgcccctgtggcgtccagtgag

SEQ ID NO: 76112 - DNA, 25 bp, Homo sapien
aagtaataagccactagccagctgc

SEQ ID NO: 76113 - DNA, 25 bp, Homo sapien
gaagtaagcatcagtaagatgtttt

SEQ ID NO: 76114 - DNA, 25 bp, Homo sapien
caatcttgcgctgctccgtaatctc

SEQ ID NO: 76115 - DNA, 25 bp, Homo sapien
ataaattccattcgtcagagcaaac

SEQ ID NO: 76116 - DNA, 25 bp, Homo sapien
ttagaacaccaatttgtgaggataa

SEQ ID NO: 76117 - DNA, 25 bp, Homo sapien
tcttgcccctgtggcgtccagtgag

SEQ ID NO: 76118 - DNA, 25 bp, Homo sapien
ataaattccattcgtcagagcaaac

SEQ ID NO: 76119 - DNA, 25 bp, Homo sapien
gtaggataatatctaggcattttgc

SEQ ID NO: 76120 - DNA, 25 bp, Homo sapien
cgtggctcaacagctttcgaggcac

SEQ ID NO: 76121 - DNA, 25 bp, Homo sapien
gaagtaagcatcagtaagatgtttt

SEQ ID NO: 76122 - DNA, 25 bp, Homo sapien
ttctcacgtgctgactgaagggttt

SEQ ID NO: 76123 - DNA, 25 bp, Homo sapien
ctgaagggttttttgccgtggctca

SEQ ID NO: 76124 - DNA, 25 bp, Homo sapien
aagtaataagccactagccagctgc

SEQ ID NO: 76125 - DNA, 25 bp, Homo sapien
gggtaatgctggctcgcagttttct

SEQ ID NO: 76126 - DNA, 25 bp, Homo sapien
caatcttgcgctgctccgtaatctc

SEQ ID NO: 76127 - DNA, 25 bp, Homo sapien
ttagaacaccaatttgtgaggataa

SEQ ID NO: 76128 - DNA, 25 bp, Homo sapien
ctgaagggttttttgccgtggctca

SEQ ID NO: 76129 - DNA, 25 bp, Homo sapien
gggtaatgctggctcgcagttttct

SEQ ID NO: 76130 - DNA, 25 bp, Homo sapien
cgtggctcaacagctttcgaggcac

SEQ ID NO: 76131 - DNA, 25 bp, Homo sapien
gaagtaagcatcagtaagatgtttt

SEQ ID NO: 76132 - DNA, 25 bp, Homo sapien
aagtaataagccactagccagctgc

SEQ ID NO: 76133 - DNA, 25 bp, Homo sapien
ttctcacgtgctgactgaagggttt

SEQ ID NO: 76134 - DNA, 25 bp, Homo sapien
ataaattccattcgtcagagcaaac

SEQ ID NO: 76135 - DNA, 25 bp, Homo sapien
tcttgcccctgtggcgtccagtgag

SEQ ID NO: 76136 - DNA, 25 bp, Homo sapien
gtaggataatatctaggcattttgc

SEQ ID NO: 76137 - DNA, 25 bp, Homo sapien
caatcttgcgctgctccgtaatctc

SEQ ID NO: 76138 - DNA, 25 bp, Homo sapien
ttagaacaccaatttgtgaggataa

SEQ ID NO: 76139 - DNA, 25 bp, Homo sapien
gtaggataatatctaggcattttgc

SEQ ID NO: 76140 - DNA, 25 bp, Homo sapien
cgtggctcaacagctttcgaggcac

SEQ ID NO: 76141 - DNA, 25 bp, Homo sapien
ctgaagggttttttgccgtggctca

SEQ ID NO: 76142 - DNA, 25 bp, Homo sapien
ttctcacgtgctgactgaagggttt

SEQ ID NO: 76143 - DNA, 25 bp, Homo sapien
gggtaatgctggctcgcagttttct

SEQ ID NO: 76144 - DNA, 25 bp, Homo sapien
tcttgcccctgtggcgtccagtgag

SEQ ID NO: 76145 - DNA, 25 bp, Homo sapien
aagtaataagccactagccagctgc

SEQ ID NO: 76146 - DNA, 25 bp, Homo sapien
gaagtaagcatcagtaagatgtttt

SEQ ID NO: 76147 - DNA, 25 bp, Homo sapien
caatcttgcgctgctccgtaatctc

SEQ ID NO: 76148 - DNA, 25 bp, Homo sapien
ataaattccattcgtcagagcaaac

SEQ ID NO: 76149 - DNA, 25 bp, Homo sapien
ttagaacaccaatttgtgaggataa

SEQ ID NO: 76150 - DNA, 25 bp, Homo sapien
ctgaagggttttttgccgtggctca

SEQ ID NO: 76151 - DNA, 25 bp, Homo sapien
tcttgcccctgtggcgtccagtgag

SEQ ID NO: 76152 - DNA, 25 bp, Homo sapien
ataaattccattcgtcagagcaaac

SEQ ID NO: 76153 - DNA, 25 bp, Homo sapien
ttagaacaccaatttgtgaggataa

SEQ ID NO: 76154 - DNA, 25 bp, Homo sapien
gtaggataatatctaggcattttgc

SEQ ID NO: 76155 - DNA, 25 bp, Homo sapien
ttctcacgtgctgactgaagggttt

SEQ ID NO: 76156 - DNA, 25 bp, Homo sapien
cgtggctcaacagctttcgaggcac

SEQ ID NO: 76157 - DNA, 25 bp, Homo sapien
gggtaatgctggctcgcagttttct

SEQ ID NO: 76158 - DNA, 25 bp, Homo sapien
gaagtaagcatcagtaagatgtttt

SEQ ID NO: 76159 - DNA, 25 bp, Homo sapien
aagtaataagccactagccagctgc

SEQ ID NO: 76160 - DNA, 25 bp, Homo sapien
caatcttgcgctgctccgtaatctc

SEQ ID NO: 76161 - DNA, 25 bp, Homo sapien
gtaggataatatctaggcattttgc

SEQ ID NO: 76162 - DNA, 25 bp, Homo sapien
cgtggctcaacagctttcgaggcac

SEQ ID NO: 76163 - DNA, 25 bp, Homo sapien
ctgaagggttttttgccgtggctca

SEQ ID NO: 76164 - DNA, 25 bp, Homo sapien
ttctcacgtgctgactgaagggttt

SEQ ID NO: 76165 - DNA, 25 bp, Homo sapien
gggtaatgctggctcgcagttttct

SEQ ID NO: 76166 - DNA, 25 bp, Homo sapien
tcttgcccctgtggcgtccagtgag

SEQ ID NO: 76167 - DNA, 25 bp, Homo sapien
aagtaataagccactagccagctgc

SEQ ID NO: 76168 - DNA, 25 bp, Homo sapien
gaagtaagcatcagtaagatgtttt

SEQ ID NO: 76169 - DNA, 25 bp, Homo sapien
caatcttgcgctgctccgtaatctc

SEQ ID NO: 76170 - DNA, 25 bp, Homo sapien
ataaattccattcgtcagagcaaac

SEQ ID NO: 76171 - DNA, 25 bp, Homo sapien
ttagaacaccaatttgtgaggataa

SEQ ID NO: 76172 - DNA, 25 bp, Homo sapien
ataaattccattcgtcagagcaaac

SEQ ID NO: 76173 - DNA, 25 bp, Homo sapien
ttagaacaccaatttgtgaggataa

SEQ ID NO: 76174 - DNA, 25 bp, Homo sapien
aagtaataagccactagccagctgc

SEQ ID NO: 76175 - DNA, 25 bp, Homo sapien
tcttgcccctgtggcgtccagtgag

SEQ ID NO: 76176 - DNA, 25 bp, Homo sapien
cgtggctcaacagctttcgaggcac

SEQ ID NO: 76177 - DNA, 25 bp, Homo sapien
gggtaatgctggctcgcagttttct

SEQ ID NO: 76178 - DNA, 25 bp, Homo sapien
ctgaagggttttttgccgtggctca

SEQ ID NO: 76179 - DNA, 25 bp, Homo sapien
gaagtaagcatcagtaagatgtttt

SEQ ID NO: 76180 - DNA, 25 bp, Homo sapien
ttctcacgtgctgactgaagggttt

SEQ ID NO: 76181 - DNA, 25 bp, Homo sapien
caatcttgcgctgctccgtaatctc

SEQ ID NO: 76182 - DNA, 25 bp, Homo sapien
gtaggataatatctaggcattttgc

SEQ ID NO: 76183 - DNA, 25 bp, Homo sapien
gtaggataatatctaggcattttgc

SEQ ID NO: 76184 - DNA, 25 bp, Homo sapien
cgtggctcaacagctttcgaggcac

SEQ ID NO: 76185 - DNA, 25 bp, Homo sapien
ctgaagggttttttgccgtggctca

SEQ ID NO: 76186 - DNA, 25 bp, Homo sapien
ttctcacgtgctgactgaagggttt

SEQ ID NO: 76187 - DNA, 25 bp, Homo sapien
gggtaatgctggctcgcagttttct

SEQ ID NO: 76188 - DNA, 25 bp, Homo sapien
tcttgcccctgtggcgtccagtgag

SEQ ID NO: 76189 - DNA, 25 bp, Homo sapien
aagtaataagccactagccagctgc

SEQ ID NO: 76190 - DNA, 25 bp, Homo sapien
gaagtaagcatcagtaagatgtttt

SEQ ID NO: 76191 - DNA, 25 bp, Homo sapien
caatcttgcgctgctccgtaatctc

SEQ ID NO: 76192 - DNA, 25 bp, Homo sapien
ataaattccattcgtcagagcaaac

SEQ ID NO: 76193 - DNA, 25 bp, Homo sapien
ttagaacaccaatttgtgaggataa

SEQ ID NO: 76194 - DNA, 25 bp, Homo sapien
gagcctcctggatcaccgtatgtct

SEQ ID NO: 76195 - DNA, 25 bp, Homo sapien
cagactccaagtggagtgtagggct

SEQ ID NO: 76196 - DNA, 25 bp, Homo sapien
tggcccatgtgtccatccagactcc

SEQ ID NO: 76197 - DNA, 25 bp, Homo sapien
aaaagacacaaagctggttacaggt

SEQ ID NO: 76198 - DNA, 25 bp, Homo sapien
gtgtgaacacgaagttaagagtgag

SEQ ID NO: 76199 - DNA, 25 bp, Homo sapien
gctgcttcagagcccctggcccatg

SEQ ID NO: 76200 - DNA, 25 bp, Homo sapien
ctggggtttccatggagtgtgaaca

SEQ ID NO: 76201 - DNA, 25 bp, Homo sapien
taggcttccgcctgtgtcccagtct

SEQ ID NO: 76202 - DNA, 25 bp, Homo sapien
atcccagtatcccacccacagccca

SEQ ID NO: 76203 - DNA, 25 bp, Homo sapien
tcctcacattggacagggcatcaga

SEQ ID NO: 76204 - DNA, 25 bp, Homo sapien
gcatcccaagggctcgccctccctt

SEQ ID NO: 76205 - DNA, 25 bp, Homo sapien
gcatcccaagggctcgccctccctt

SEQ ID NO: 76206 - DNA, 25 bp, Homo sapien
tcctcacattggacagggcatcaga

SEQ ID NO: 76207 - DNA, 25 bp, Homo sapien
cagactccaagtggagtgtagggct

SEQ ID NO: 76208 - DNA, 25 bp, Homo sapien
tggcccatgtgtccatccagactcc

SEQ ID NO: 76209 - DNA, 25 bp, Homo sapien
gctgcttcagagcccctggcccatg

SEQ ID NO: 76210 - DNA, 25 bp, Homo sapien
gtgtgaacacgaagttaagagtgag

SEQ ID NO: 76211 - DNA, 25 bp, Homo sapien
ctggggtttccatggagtgtgaaca

SEQ ID NO: 76212 - DNA, 25 bp, Homo sapien
taggcttccgcctgtgtcccagtct

SEQ ID NO: 76213 - DNA, 25 bp, Homo sapien
gagcctcctggatcaccgtatgtct

SEQ ID NO: 76214 - DNA, 25 bp, Homo sapien
atcccagtatcccacccacagccca

SEQ ID NO: 76215 - DNA, 25 bp, Homo sapien
aaaagacacaaagctggttacaggt

SEQ ID NO: 76216 - DNA, 25 bp, Homo sapien
atcccagtatcccacccacagccca

SEQ ID NO: 76217 - DNA, 25 bp, Homo sapien
gtgtgaacacgaagttaagagtgag

SEQ ID NO: 76218 - DNA, 25 bp, Homo sapien
taggcttccgcctgtgtcccagtct

SEQ ID NO: 76219 - DNA, 25 bp, Homo sapien
ctggggtttccatggagtgtgaaca

SEQ ID NO: 76220 - DNA, 25 bp, Homo sapien
aaaagacacaaagctggttacaggt

SEQ ID NO: 76221 - DNA, 25 bp, Homo sapien
gcatcccaagggctcgccctccctt

SEQ ID NO: 76222 - DNA, 25 bp, Homo sapien
gctgcttcagagcccctggcccatg

SEQ ID NO: 76223 - DNA, 25 bp, Homo sapien
gagcctcctggatcaccgtatgtct

SEQ ID NO: 76224 - DNA, 25 bp, Homo sapien
cagactccaagtggagtgtagggct

SEQ ID NO: 76225 - DNA, 25 bp, Homo sapien
tcctcacattggacagggcatcaga

SEQ ID NO: 76226 - DNA, 25 bp, Homo sapien
tggcccatgtgtccatccagactcc

SEQ ID NO: 76227 - DNA, 25 bp, Homo sapien
gcatcccaagggctcgccctccctt

SEQ ID NO: 76228 - DNA, 25 bp, Homo sapien
tcctcacattggacagggcatcaga

SEQ ID NO: 76229 - DNA, 25 bp, Homo sapien
cagactccaagtggagtgtagggct

SEQ ID NO: 76230 - DNA, 25 bp, Homo sapien
tggcccatgtgtccatccagactcc

SEQ ID NO: 76231 - DNA, 25 bp, Homo sapien
gctgcttcagagcccctggcccatg

SEQ ID NO: 76232 - DNA, 25 bp, Homo sapien
gtgtgaacacgaagttaagagtgag

SEQ ID NO: 76233 - DNA, 25 bp, Homo sapien
ctggggtttccatggagtgtgaaca

SEQ ID NO: 76234 - DNA, 25 bp, Homo sapien
taggcttccgcctgtgtcccagtct

SEQ ID NO: 76235 - DNA, 25 bp, Homo sapien
gagcctcctggatcaccgtatgtct

SEQ ID NO: 76236 - DNA, 25 bp, Homo sapien
atcccagtatcccacccacagccca

SEQ ID NO: 76237 - DNA, 25 bp, Homo sapien
aaaagacacaaagctggttacaggt

SEQ ID NO: 76238 - DNA, 25 bp, Homo sapien
tcctcacattggacagggcatcaga

SEQ ID NO: 76239 - DNA, 25 bp, Homo sapien
gctgcttcagagcccctggcccatg

SEQ ID NO: 76240 - DNA, 25 bp, Homo sapien
atcccagtatcccacccacagccca

SEQ ID NO: 76241 - DNA, 25 bp, Homo sapien
aaaagacacaaagctggttacaggt

SEQ ID NO: 76242 - DNA, 25 bp, Homo sapien
gcatcccaagggctcgccctccctt

SEQ ID NO: 76243 - DNA, 25 bp, Homo sapien
gtgtgaacacgaagttaagagtgag

SEQ ID NO: 76244 - DNA, 25 bp, Homo sapien
cagactccaagtggagtgtagggct

SEQ ID NO: 76245 - DNA, 25 bp, Homo sapien
ctggggtttccatggagtgtgaaca

SEQ ID NO: 76246 - DNA, 25 bp, Homo sapien
tggcccatgtgtccatccagactcc

SEQ ID NO: 76247 - DNA, 25 bp, Homo sapien
gagcctcctggatcaccgtatgtct

SEQ ID NO: 76248 - DNA, 25 bp, Homo sapien
taggcttccgcctgtgtcccagtct

SEQ ID NO: 76249 - DNA, 25 bp, Homo sapien
gcatcccaagggctcgccctccctt

SEQ ID NO: 76250 - DNA, 25 bp, Homo sapien
tcctcacattggacagggcatcaga

SEQ ID NO: 76251 - DNA, 25 bp, Homo sapien
cagactccaagtggagtgtagggct

SEQ ID NO: 76252 - DNA, 25 bp, Homo sapien
tggcccatgtgtccatccagactcc

SEQ ID NO: 76253 - DNA, 25 bp, Homo sapien
gctgcttcagagcccctggcccatg

SEQ ID NO: 76254 - DNA, 25 bp, Homo sapien
gtgtgaacacgaagttaagagtgag

SEQ ID NO: 76255 - DNA, 25 bp, Homo sapien
ctggggtttccatggagtgtgaaca

SEQ ID NO: 76256 - DNA, 25 bp, Homo sapien
taggcttccgcctgtgtcccagtct

SEQ ID NO: 76257 - DNA, 25 bp, Homo sapien
gagcctcctggatcaccgtatgtct

SEQ ID NO: 76258 - DNA, 25 bp, Homo sapien
atcccagtatcccacccacagccca

SEQ ID NO: 76259 - DNA, 25 bp, Homo sapien
aaaagacacaaagctggttacaggt

SEQ ID NO: 76260 - DNA, 25 bp, Homo sapien
gcatcccaagggctcgccctccctt

SEQ ID NO: 76261 - DNA, 25 bp, Homo sapien
tcctcacattggacagggcatcaga

SEQ ID NO: 76262 - DNA, 25 bp, Homo sapien
cagactccaagtggagtgtagggct

SEQ ID NO: 76263 - DNA, 25 bp, Homo sapien
tggcccatgtgtccatccagactcc

SEQ ID NO: 76264 - DNA, 25 bp, Homo sapien
gctgcttcagagcccctggcccatg

SEQ ID NO: 76265 - DNA, 25 bp, Homo sapien
gtgtgaacacgaagttaagagtgag

SEQ ID NO: 76266 - DNA, 25 bp, Homo sapien
ctggggtttccatggagtgtgaaca

SEQ ID NO: 76267 - DNA, 25 bp, Homo sapien
taggcttccgcctgtgtcccagtct

SEQ ID NO: 76268 - DNA, 25 bp, Homo sapien
gagcctcctggatcaccgtatgtct

SEQ ID NO: 76269 - DNA, 25 bp, Homo sapien
atcccagtatcccacccacagccca

SEQ ID NO: 76270 - DNA, 25 bp, Homo sapien
aaaagacacaaagctggttacaggt

SEQ ID NO: 76271 - DNA, 25 bp, Homo sapien
atcccagtatcccacccacagccca

SEQ ID NO: 76272 - DNA, 25 bp, Homo sapien
tggcccatgtgtccatccagactcc

SEQ ID NO: 76273 - DNA, 25 bp, Homo sapien
gcatcccaagggctcgccctccctt

SEQ ID NO: 76274 - DNA, 25 bp, Homo sapien
aaaagacacaaagctggttacaggt

SEQ ID NO: 76275 - DNA, 25 bp, Homo sapien
gagcctcctggatcaccgtatgtct

SEQ ID NO: 76276 - DNA, 25 bp, Homo sapien
gctgcttcagagcccctggcccatg

SEQ ID NO: 76277 - DNA, 25 bp, Homo sapien
ctggggtttccatggagtgtgaaca

SEQ ID NO: 76278 - DNA, 25 bp, Homo sapien
taggcttccgcctgtgtcccagtct

SEQ ID NO: 76279 - DNA, 25 bp, Homo sapien
tcctcacattggacagggcatcaga

SEQ ID NO: 76280 - DNA, 25 bp, Homo sapien
gtgtgaacacgaagttaagagtgag

SEQ ID NO: 76281 - DNA, 25 bp, Homo sapien
cagactccaagtggagtgtagggct

SEQ ID NO: 76282 - DNA, 25 bp, Homo sapien
gcatcccaagggctcgccctccctt

SEQ ID NO: 76283 - DNA, 25 bp, Homo sapien
tcctcacattggacagggcatcaga

SEQ ID NO: 76284 - DNA, 25 bp, Homo sapien
cagactccaagtggagtgtagggct

SEQ ID NO: 76285 - DNA, 25 bp, Homo sapien
tggcccatgtgtccatccagactcc

SEQ ID NO: 76286 - DNA, 25 bp, Homo sapien
gctgcttcagagcccctggcccatg

SEQ ID NO: 76287 - DNA, 25 bp, Homo sapien
gtgtgaacacgaagttaagagtgag

SEQ ID NO: 76288 - DNA, 25 bp, Homo sapien
ctggggtttccatggagtgtgaaca

SEQ ID NO: 76289 - DNA, 25 bp, Homo sapien
taggcttccgcctgtgtcccagtct

SEQ ID NO: 76290 - DNA, 25 bp, Homo sapien
gagcctcctggatcaccgtatgtct

SEQ ID NO: 76291 - DNA, 25 bp, Homo sapien
atcccagtatcccacccacagccca

SEQ ID NO: 76292 - DNA, 25 bp, Homo sapien
aaaagacacaaagctggttacaggt

SEQ ID NO: 76293 - DNA, 25 bp, Homo sapien
taggcttccgcctgtgtcccagtct

SEQ ID NO: 76294 - DNA, 25 bp, Homo sapien
tggcccatgtgtccatccagactcc

SEQ ID NO: 76295 - DNA, 25 bp, Homo sapien
tcctcacattggacagggcatcaga

SEQ ID NO: 76296 - DNA, 25 bp, Homo sapien
atcccagtatcccacccacagccca

SEQ ID NO: 76297 - DNA, 25 bp, Homo sapien
gtgtgaacacgaagttaagagtgag

SEQ ID NO: 76298 - DNA, 25 bp, Homo sapien
gagcctcctggatcaccgtatgtct

SEQ ID NO: 76299 - DNA, 25 bp, Homo sapien
aaaagacacaaagctggttacaggt

SEQ ID NO: 76300 - DNA, 25 bp, Homo sapien
gcatcccaagggctcgccctccctt

SEQ ID NO: 76301 - DNA, 25 bp, Homo sapien
gctgcttcagagcccctggcccatg

SEQ ID NO: 76302 - DNA, 25 bp, Homo sapien
ctggggtttccatggagtgtgaaca

SEQ ID NO: 76303 - DNA, 25 bp, Homo sapien
cagactccaagtggagtgtagggct

SEQ ID NO: 76304 - DNA, 25 bp, Homo sapien
gcatcccaagggctcgccctccctt

SEQ ID NO: 76305 - DNA, 25 bp, Homo sapien
tcctcacattggacagggcatcaga

SEQ ID NO: 76306 - DNA, 25 bp, Homo sapien
cagactccaagtggagtgtagggct

SEQ ID NO: 76307 - DNA, 25 bp, Homo sapien
tggcccatgtgtccatccagactcc

SEQ ID NO: 76308 - DNA, 25 bp, Homo sapien
gctgcttcagagcccctggcccatg

SEQ ID NO: 76309 - DNA, 25 bp, Homo sapien
gtgtgaacacgaagttaagagtgag

SEQ ID NO: 76310 - DNA, 25 bp, Homo sapien
ctggggtttccatggagtgtgaaca

SEQ ID NO: 76311 - DNA, 25 bp, Homo sapien
taggcttccgcctgtgtcccagtct

SEQ ID NO: 76312 - DNA, 25 bp, Homo sapien
gagcctcctggatcaccgtatgtct

SEQ ID NO: 76313 - DNA, 25 bp, Homo sapien
atcccagtatcccacccacagccca

SEQ ID NO: 76314 - DNA, 25 bp, Homo sapien
aaaagacacaaagctggttacaggt

SEQ ID NO: 76315 - DNA, 25 bp, Homo sapien
gctgcttcagagcccctggcccatg

SEQ ID NO: 76316 - DNA, 25 bp, Homo sapien
ctggggtttccatggagtgtgaaca

SEQ ID NO: 76317 - DNA, 25 bp, Homo sapien
tcctcacattggacagggcatcaga

SEQ ID NO: 76318 - DNA, 25 bp, Homo sapien
atcccagtatcccacccacagccca

SEQ ID NO: 76319 - DNA, 25 bp, Homo sapien
gtgtgaacacgaagttaagagtgag

SEQ ID NO: 76320 - DNA, 25 bp, Homo sapien
gagcctcctggatcaccgtatgtct

SEQ ID NO: 76321 - DNA, 25 bp, Homo sapien
gcatcccaagggctcgccctccctt

SEQ ID NO: 76322 - DNA, 25 bp, Homo sapien
tggcccatgtgtccatccagactcc

SEQ ID NO: 76323 - DNA, 25 bp, Homo sapien
taggcttccgcctgtgtcccagtct

SEQ ID NO: 76324 - DNA, 25 bp, Homo sapien
aaaagacacaaagctggttacaggt

SEQ ID NO: 76325 - DNA, 25 bp, Homo sapien
cagactccaagtggagtgtagggct

SEQ ID NO: 76326 - DNA, 25 bp, Homo sapien
gcatcccaagggctcgccctccctt

SEQ ID NO: 76327 - DNA, 25 bp, Homo sapien
tcctcacattggacagggcatcaga

SEQ ID NO: 76328 - DNA, 25 bp, Homo sapien
cagactccaagtggagtgtagggct

SEQ ID NO: 76329 - DNA, 25 bp, Homo sapien
tggcccatgtgtccatccagactcc

SEQ ID NO: 76330 - DNA, 25 bp, Homo sapien
gctgcttcagagcccctggcccatg

SEQ ID NO: 76331 - DNA, 25 bp, Homo sapien
gtgtgaacacgaagttaagagtgag

SEQ ID NO: 76332 - DNA, 25 bp, Homo sapien
ctggggtttccatggagtgtgaaca

SEQ ID NO: 76333 - DNA, 25 bp, Homo sapien
taggcttccgcctgtgtcccagtct

SEQ ID NO: 76334 - DNA, 25 bp, Homo sapien
gagcctcctggatcaccgtatgtct

SEQ ID NO: 76335 - DNA, 25 bp, Homo sapien
atcccagtatcccacccacagccca

SEQ ID NO: 76336 - DNA, 25 bp, Homo sapien
aaaagacacaaagctggttacaggt

SEQ ID NO: 76337 - DNA, 25 bp, Homo sapien
aaaagacacaaagctggttacaggt

SEQ ID NO: 76338 - DNA, 25 bp, Homo sapien
tggcccatgtgtccatccagactcc

SEQ ID NO: 76339 - DNA, 25 bp, Homo sapien
atcccagtatcccacccacagccca

SEQ ID NO: 76340 - DNA, 25 bp, Homo sapien
taggcttccgcctgtgtcccagtct

SEQ ID NO: 76341 - DNA, 25 bp, Homo sapien
tcctcacattggacagggcatcaga

SEQ ID NO: 76342 - DNA, 25 bp, Homo sapien
gcatcccaagggctcgccctccctt

SEQ ID NO: 76343 - DNA, 25 bp, Homo sapien
cagactccaagtggagtgtagggct

SEQ ID NO: 76344 - DNA, 25 bp, Homo sapien
ctggggtttccatggagtgtgaaca

SEQ ID NO: 76345 - DNA, 25 bp, Homo sapien
gtgtgaacacgaagttaagagtgag

SEQ ID NO: 76346 - DNA, 25 bp, Homo sapien
gctgcttcagagcccctggcccatg

SEQ ID NO: 76347 - DNA, 25 bp, Homo sapien
gagcctcctggatcaccgtatgtct

SEQ ID NO: 76348 - DNA, 25 bp, Homo sapien
gcatcccaagggctcgccctccctt

SEQ ID NO: 76349 - DNA, 25 bp, Homo sapien
tcctcacattggacagggcatcaga

SEQ ID NO: 76350 - DNA, 25 bp, Homo sapien
cagactccaagtggagtgtagggct

SEQ ID NO: 76351 - DNA, 25 bp, Homo sapien
tggcccatgtgtccatccagactcc

SEQ ID NO: 76352 - DNA, 25 bp, Homo sapien
gctgcttcagagcccctggcccatg

SEQ ID NO: 76353 - DNA, 25 bp, Homo sapien
gtgtgaacacgaagttaagagtgag

SEQ ID NO: 76354 - DNA, 25 bp, Homo sapien
ctggggtttccatggagtgtgaaca

SEQ ID NO: 76355 - DNA, 25 bp, Homo sapien
taggcttccgcctgtgtcccagtct

SEQ ID NO: 76356 - DNA, 25 bp, Homo sapien
gagcctcctggatcaccgtatgtct

SEQ ID NO: 76357 - DNA, 25 bp, Homo sapien
atcccagtatcccacccacagccca

SEQ ID NO: 76358 - DNA, 25 bp, Homo sapien
aaaagacacaaagctggttacaggt

SEQ ID NO: 76359 - DNA, 25 bp, Homo sapien
aaaagacacaaagctggttacaggt

SEQ ID NO: 76360 - DNA, 25 bp, Homo sapien
cagactccaagtggagtgtagggct

SEQ ID NO: 76361 - DNA, 25 bp, Homo sapien
atcccagtatcccacccacagccca

SEQ ID NO: 76362 - DNA, 25 bp, Homo sapien
tggcccatgtgtccatccagactcc

SEQ ID NO: 76363 - DNA, 25 bp, Homo sapien
tcctcacattggacagggcatcaga

SEQ ID NO: 76364 - DNA, 25 bp, Homo sapien
ctggggtttccatggagtgtgaaca

SEQ ID NO: 76365 - DNA, 25 bp, Homo sapien
gcatcccaagggctcgccctccctt

SEQ ID NO: 76366 - DNA, 25 bp, Homo sapien
taggcttccgcctgtgtcccagtct

SEQ ID NO: 76367 - DNA, 25 bp, Homo sapien
gagcctcctggatcaccgtatgtct

SEQ ID NO: 76368 - DNA, 25 bp, Homo sapien
gctgcttcagagcccctggcccatg

SEQ ID NO: 76369 - DNA, 25 bp, Homo sapien
gtgtgaacacgaagttaagagtgag

SEQ ID NO: 76370 - DNA, 25 bp, Homo sapien
gtgtgaacacgaagttaagagtgag

SEQ ID NO: 76371 - DNA, 25 bp, Homo sapien
atcccagtatcccacccacagccca

SEQ ID NO: 76372 - DNA, 25 bp, Homo sapien
tcctcacattggacagggcatcaga

SEQ ID NO: 76373 - DNA, 25 bp, Homo sapien
ctggggtttccatggagtgtgaaca

SEQ ID NO: 76374 - DNA, 25 bp, Homo sapien
gctgcttcagagcccctggcccatg

SEQ ID NO: 76375 - DNA, 25 bp, Homo sapien
tggcccatgtgtccatccagactcc

SEQ ID NO: 76376 - DNA, 25 bp, Homo sapien
gagcctcctggatcaccgtatgtct

SEQ ID NO: 76377 - DNA, 25 bp, Homo sapien
gcatcccaagggctcgccctccctt

SEQ ID NO: 76378 - DNA, 25 bp, Homo sapien
taggcttccgcctgtgtcccagtct

SEQ ID NO: 76379 - DNA, 25 bp, Homo sapien
aaaagacacaaagctggttacaggt

SEQ ID NO: 76380 - DNA, 25 bp, Homo sapien
cagactccaagtggagtgtagggct

SEQ ID NO: 76381 - DNA, 25 bp, Homo sapien
gcatcccaagggctcgccctccctt

SEQ ID NO: 76382 - DNA, 25 bp, Homo sapien
tcctcacattggacagggcatcaga

SEQ ID NO: 76383 - DNA, 25 bp, Homo sapien
cagactccaagtggagtgtagggct

SEQ ID NO: 76384 - DNA, 25 bp, Homo sapien
tggcccatgtgtccatccagactcc

SEQ ID NO: 76385 - DNA, 25 bp, Homo sapien
gctgcttcagagcccctggcccatg

SEQ ID NO: 76386 - DNA, 25 bp, Homo sapien
gtgtgaacacgaagttaagagtgag

SEQ ID NO: 76387 - DNA, 25 bp, Homo sapien
ctggggtttccatggagtgtgaaca

SEQ ID NO: 76388 - DNA, 25 bp, Homo sapien
taggcttccgcctgtgtcccagtct

SEQ ID NO: 76389 - DNA, 25 bp, Homo sapien
gagcctcctggatcaccgtatgtct

SEQ ID NO: 76390 - DNA, 25 bp, Homo sapien
atcccagtatcccacccacagccca

SEQ ID NO: 76391 - DNA, 25 bp, Homo sapien
aaaagacacaaagctggttacaggt

SEQ ID NO: 76392 - DNA, 25 bp, Homo sapien
tcctcacattggacagggcatcaga

SEQ ID NO: 76393 - DNA, 25 bp, Homo sapien
cagactccaagtggagtgtagggct

SEQ ID NO: 76394 - DNA, 25 bp, Homo sapien
gagcctcctggatcaccgtatgtct

SEQ ID NO: 76395 - DNA, 25 bp, Homo sapien
gctgcttcagagcccctggcccatg

SEQ ID NO: 76396 - DNA, 25 bp, Homo sapien
atcccagtatcccacccacagccca

SEQ ID NO: 76397 - DNA, 25 bp, Homo sapien
gcatcccaagggctcgccctccctt

SEQ ID NO: 76398 - DNA, 25 bp, Homo sapien
tggcccatgtgtccatccagactcc

SEQ ID NO: 76399 - DNA, 25 bp, Homo sapien
gtgtgaacacgaagttaagagtgag

SEQ ID NO: 76400 - DNA, 25 bp, Homo sapien
taggcttccgcctgtgtcccagtct

SEQ ID NO: 76401 - DNA, 25 bp, Homo sapien
ctggggtttccatggagtgtgaaca

SEQ ID NO: 76402 - DNA, 25 bp, Homo sapien
aaaagacacaaagctggttacaggt

SEQ ID NO: 76403 - DNA, 25 bp, Homo sapien
gcatcccaagggctcgccctccctt

SEQ ID NO: 76404 - DNA, 25 bp, Homo sapien
tcctcacattggacagggcatcaga

SEQ ID NO: 76405 - DNA, 25 bp, Homo sapien
cagactccaagtggagtgtagggct

SEQ ID NO: 76406 - DNA, 25 bp, Homo sapien
tggcccatgtgtccatccagactcc

SEQ ID NO: 76407 - DNA, 25 bp, Homo sapien
gctgcttcagagcccctggcccatg

SEQ ID NO: 76408 - DNA, 25 bp, Homo sapien
gtgtgaacacgaagttaagagtgag

SEQ ID NO: 76409 - DNA, 25 bp, Homo sapien
ctggggtttccatggagtgtgaaca

SEQ ID NO: 76410 - DNA, 25 bp, Homo sapien
taggcttccgcctgtgtcccagtct

SEQ ID NO: 76411 - DNA, 25 bp, Homo sapien
gagcctcctggatcaccgtatgtct

SEQ ID NO: 76412 - DNA, 25 bp, Homo sapien
atcccagtatcccacccacagccca

SEQ ID NO: 76413 - DNA, 25 bp, Homo sapien
aaaagacacaaagctggttacaggt

SEQ ID NO: 76414 - DNA, 25 bp, Homo sapien
gctgcttcagagcccctggcccatg

SEQ ID NO: 76415 - DNA, 25 bp, Homo sapien
tggcccatgtgtccatccagactcc

SEQ ID NO: 76416 - DNA, 25 bp, Homo sapien
gcatcccaagggctcgccctccctt

SEQ ID NO: 76417 - DNA, 25 bp, Homo sapien
tcctcacattggacagggcatcaga

SEQ ID NO: 76418 - DNA, 25 bp, Homo sapien
gagcctcctggatcaccgtatgtct

SEQ ID NO: 76419 - DNA, 25 bp, Homo sapien
cagactccaagtggagtgtagggct

SEQ ID NO: 76420 - DNA, 25 bp, Homo sapien
ctggggtttccatggagtgtgaaca

SEQ ID NO: 76421 - DNA, 25 bp, Homo sapien
gtgtgaacacgaagttaagagtgag

SEQ ID NO: 76422 - DNA, 25 bp, Homo sapien
atcccagtatcccacccacagccca

SEQ ID NO: 76423 - DNA, 25 bp, Homo sapien
aaaagacacaaagctggttacaggt

SEQ ID NO: 76424 - DNA, 25 bp, Homo sapien
taggcttccgcctgtgtcccagtct

SEQ ID NO: 76425 - DNA, 25 bp, Homo sapien
gcatcccaagggctcgccctccctt

SEQ ID NO: 76426 - DNA, 25 bp, Homo sapien
tcctcacattggacagggcatcaga

SEQ ID NO: 76427 - DNA, 25 bp, Homo sapien
cagactccaagtggagtgtagggct

SEQ ID NO: 76428 - DNA, 25 bp, Homo sapien
tggcccatgtgtccatccagactcc

SEQ ID NO: 76429 - DNA, 25 bp, Homo sapien
gctgcttcagagcccctggcccatg

SEQ ID NO: 76430 - DNA, 25 bp, Homo sapien
gtgtgaacacgaagttaagagtgag

SEQ ID NO: 76431 - DNA, 25 bp, Homo sapien
ctggggtttccatggagtgtgaaca

SEQ ID NO: 76432 - DNA, 25 bp, Homo sapien
taggcttccgcctgtgtcccagtct

SEQ ID NO: 76433 - DNA, 25 bp, Homo sapien
gagcctcctggatcaccgtatgtct

SEQ ID NO: 76434 - DNA, 25 bp, Homo sapien
atcccagtatcccacccacagccca

SEQ ID NO: 76435 - DNA, 25 bp, Homo sapien
aaaagacacaaagctggttacaggt

SEQ ID NO: 76436 - DNA, 25 bp, Homo sapien
atcccagtatcccacccacagccca

SEQ ID NO: 76437 - DNA, 25 bp, Homo sapien
gtgtgaacacgaagttaagagtgag

SEQ ID NO: 76438 - DNA, 25 bp, Homo sapien
tggcccatgtgtccatccagactcc

SEQ ID NO: 76439 - DNA, 25 bp, Homo sapien
aaaagacacaaagctggttacaggt

SEQ ID NO: 76440 - DNA, 25 bp, Homo sapien
cagactccaagtggagtgtagggct

SEQ ID NO: 76441 - DNA, 25 bp, Homo sapien
gagcctcctggatcaccgtatgtct

SEQ ID NO: 76442 - DNA, 25 bp, Homo sapien
taggcttccgcctgtgtcccagtct

SEQ ID NO: 76443 - DNA, 25 bp, Homo sapien
gcatcccaagggctcgccctccctt

SEQ ID NO: 76444 - DNA, 25 bp, Homo sapien
ctggggtttccatggagtgtgaaca

SEQ ID NO: 76445 - DNA, 25 bp, Homo sapien
tcctcacattggacagggcatcaga

SEQ ID NO: 76446 - DNA, 25 bp, Homo sapien
gctgcttcagagcccctggcccatg

SEQ ID NO: 76447 - DNA, 25 bp, Homo sapien
gcatcccaagggctcgccctccctt

SEQ ID NO: 76448 - DNA, 25 bp, Homo sapien
tcctcacattggacagggcatcaga

SEQ ID NO: 76449 - DNA, 25 bp, Homo sapien
cagactccaagtggagtgtagggct

SEQ ID NO: 76450 - DNA, 25 bp, Homo sapien
tggcccatgtgtccatccagactcc

SEQ ID NO: 76451 - DNA, 25 bp, Homo sapien
gctgcttcagagcccctggcccatg

SEQ ID NO: 76452 - DNA, 25 bp, Homo sapien
gtgtgaacacgaagttaagagtgag

SEQ ID NO: 76453 - DNA, 25 bp, Homo sapien
ctggggtttccatggagtgtgaaca

SEQ ID NO: 76454 - DNA, 25 bp, Homo sapien
taggcttccgcctgtgtcccagtct

SEQ ID NO: 76455 - DNA, 25 bp, Homo sapien
gagcctcctggatcaccgtatgtct

SEQ ID NO: 76456 - DNA, 25 bp, Homo sapien
atcccagtatcccacccacagccca

SEQ ID NO: 76457 - DNA, 25 bp, Homo sapien
aaaagacacaaagctggttacaggt

SEQ ID NO: 76458 - DNA, 25 bp, Homo sapien
gctgcttcagagcccctggcccatg

SEQ ID NO: 76459 - DNA, 25 bp, Homo sapien
gagcctcctggatcaccgtatgtct

SEQ ID NO: 76460 - DNA, 25 bp, Homo sapien
tggcccatgtgtccatccagactcc

SEQ ID NO: 76461 - DNA, 25 bp, Homo sapien
gtgtgaacacgaagttaagagtgag

SEQ ID NO: 76462 - DNA, 25 bp, Homo sapien
tcctcacattggacagggcatcaga

SEQ ID NO: 76463 - DNA, 25 bp, Homo sapien
atcccagtatcccacccacagccca

SEQ ID NO: 76464 - DNA, 25 bp, Homo sapien
cagactccaagtggagtgtagggct

SEQ ID NO: 76465 - DNA, 25 bp, Homo sapien
taggcttccgcctgtgtcccagtct

SEQ ID NO: 76466 - DNA, 25 bp, Homo sapien
aaaagacacaaagctggttacaggt

SEQ ID NO: 76467 - DNA, 25 bp, Homo sapien
gcatcccaagggctcgccctccctt

SEQ ID NO: 76468 - DNA, 25 bp, Homo sapien
ctggggtttccatggagtgtgaaca

SEQ ID NO: 76469 - DNA, 25 bp, Homo sapien
gcatcccaagggctcgccctccctt

SEQ ID NO: 76470 - DNA, 25 bp, Homo sapien
tcctcacattggacagggcatcaga

SEQ ID NO: 76471 - DNA, 25 bp, Homo sapien
cagactccaagtggagtgtagggct

SEQ ID NO: 76472 - DNA, 25 bp, Homo sapien
tggcccatgtgtccatccagactcc

SEQ ID NO: 76473 - DNA, 25 bp, Homo sapien
gctgcttcagagcccctggcccatg

SEQ ID NO: 76474 - DNA, 25 bp, Homo sapien
gtgtgaacacgaagttaagagtgag

SEQ ID NO: 76475 - DNA, 25 bp, Homo sapien
ctggggtttccatggagtgtgaaca

SEQ ID NO: 76476 - DNA, 25 bp, Homo sapien
taggcttccgcctgtgtcccagtct

SEQ ID NO: 76477 - DNA, 25 bp, Homo sapien
gagcctcctggatcaccgtatgtct

SEQ ID NO: 76478 - DNA, 25 bp, Homo sapien
atcccagtatcccacccacagccca

SEQ ID NO: 76479 - DNA, 25 bp, Homo sapien
aaaagacacaaagctggttacaggt

SEQ ID NO: 76480 - DNA, 25 bp, Homo sapien
cagactccaagtggagtgtagggct

SEQ ID NO: 76481 - DNA, 25 bp, Homo sapien
taggcttccgcctgtgtcccagtct

SEQ ID NO: 76482 - DNA, 25 bp, Homo sapien
gtgtgaacacgaagttaagagtgag

SEQ ID NO: 76483 - DNA, 25 bp, Homo sapien
ctggggtttccatggagtgtgaaca

SEQ ID NO: 76484 - DNA, 25 bp, Homo sapien
atcccagtatcccacccacagccca

SEQ ID NO: 76485 - DNA, 25 bp, Homo sapien
gcatcccaagggctcgccctccctt

SEQ ID NO: 76486 - DNA, 25 bp, Homo sapien
gagcctcctggatcaccgtatgtct

SEQ ID NO: 76487 - DNA, 25 bp, Homo sapien
gctgcttcagagcccctggcccatg

SEQ ID NO: 76488 - DNA, 25 bp, Homo sapien
tggcccatgtgtccatccagactcc

SEQ ID NO: 76489 - DNA, 25 bp, Homo sapien
aaaagacacaaagctggttacaggt

SEQ ID NO: 76490 - DNA, 25 bp, Homo sapien
tcctcacattggacagggcatcaga

SEQ ID NO: 76491 - DNA, 25 bp, Homo sapien
gcatcccaagggctcgccctccctt

SEQ ID NO: 76492 - DNA, 25 bp, Homo sapien
tcctcacattggacagggcatcaga

SEQ ID NO: 76493 - DNA, 25 bp, Homo sapien
cagactccaagtggagtgtagggct

SEQ ID NO: 76494 - DNA, 25 bp, Homo sapien
tggcccatgtgtccatccagactcc

SEQ ID NO: 76495 - DNA, 25 bp, Homo sapien
gctgcttcagagcccctggcccatg

SEQ ID NO: 76496 - DNA, 25 bp, Homo sapien
gtgtgaacacgaagttaagagtgag

SEQ ID NO: 76497 - DNA, 25 bp, Homo sapien
ctggggtttccatggagtgtgaaca

SEQ ID NO: 76498 - DNA, 25 bp, Homo sapien
taggcttccgcctgtgtcccagtct

SEQ ID NO: 76499 - DNA, 25 bp, Homo sapien
gagcctcctggatcaccgtatgtct

SEQ ID NO: 76500 - DNA, 25 bp, Homo sapien
atcccagtatcccacccacagccca

SEQ ID NO: 76501 - DNA, 25 bp, Homo sapien
aaaagacacaaagctggttacaggt

SEQ ID NO: 76502 - DNA, 25 bp, Homo sapien
gcatcccaagggctcgccctccctt

SEQ ID NO: 76503 - DNA, 25 bp, Homo sapien
tcctcacattggacagggcatcaga

SEQ ID NO: 76504 - DNA, 25 bp, Homo sapien
cagactccaagtggagtgtagggct

SEQ ID NO: 76505 - DNA, 25 bp, Homo sapien
tggcccatgtgtccatccagactcc

SEQ ID NO: 76506 - DNA, 25 bp, Homo sapien
gctgcttcagagcccctggcccatg

SEQ ID NO: 76507 - DNA, 25 bp, Homo sapien
gtgtgaacacgaagttaagagtgag

SEQ ID NO: 76508 - DNA, 25 bp, Homo sapien
ctggggtttccatggagtgtgaaca

SEQ ID NO: 76509 - DNA, 25 bp, Homo sapien
taggcttccgcctgtgtcccagtct

SEQ ID NO: 76510 - DNA, 25 bp, Homo sapien
gagcctcctggatcaccgtatgtct

SEQ ID NO: 76511 - DNA, 25 bp, Homo sapien
atcccagtatcccacccacagccca

SEQ ID NO: 76512 - DNA, 25 bp, Homo sapien
aaaagacacaaagctggttacaggt

SEQ ID NO: 76513 - DNA, 25 bp, Homo sapien
atcccagtatcccacccacagccca

SEQ ID NO: 76514 - DNA, 25 bp, Homo sapien
cagactccaagtggagtgtagggct

SEQ ID NO: 76515 - DNA, 25 bp, Homo sapien
gagcctcctggatcaccgtatgtct

SEQ ID NO: 76516 - DNA, 25 bp, Homo sapien
tcctcacattggacagggcatcaga

SEQ ID NO: 76517 - DNA, 25 bp, Homo sapien
taggcttccgcctgtgtcccagtct

SEQ ID NO: 76518 - DNA, 25 bp, Homo sapien
aaaagacacaaagctggttacaggt

SEQ ID NO: 76519 - DNA, 25 bp, Homo sapien
tggcccatgtgtccatccagactcc

SEQ ID NO: 76520 - DNA, 25 bp, Homo sapien
ctggggtttccatggagtgtgaaca

SEQ ID NO: 76521 - DNA, 25 bp, Homo sapien
gtgtgaacacgaagttaagagtgag

SEQ ID NO: 76522 - DNA, 25 bp, Homo sapien
gctgcttcagagcccctggcccatg

SEQ ID NO: 76523 - DNA, 25 bp, Homo sapien
gcatcccaagggctcgccctccctt

SEQ ID NO: 76524 - DNA, 25 bp, Homo sapien
atcccagtatcccacccacagccca

SEQ ID NO: 76525 - DNA, 25 bp, Homo sapien
tcctcacattggacagggcatcaga

SEQ ID NO: 76526 - DNA, 25 bp, Homo sapien
gagcctcctggatcaccgtatgtct

SEQ ID NO: 76527 - DNA, 25 bp, Homo sapien
cagactccaagtggagtgtagggct

SEQ ID NO: 76528 - DNA, 25 bp, Homo sapien
taggcttccgcctgtgtcccagtct

SEQ ID NO: 76529 - DNA, 25 bp, Homo sapien
aaaagacacaaagctggttacaggt

SEQ ID NO: 76530 - DNA, 25 bp, Homo sapien
tggcccatgtgtccatccagactcc

SEQ ID NO: 76531 - DNA, 25 bp, Homo sapien
ctggggtttccatggagtgtgaaca

SEQ ID NO: 76532 - DNA, 25 bp, Homo sapien
gtgtgaacacgaagttaagagtgag

SEQ ID NO: 76533 - DNA, 25 bp, Homo sapien
gctgcttcagagcccctggcccatg

SEQ ID NO: 76534 - DNA, 25 bp, Homo sapien
gcatcccaagggctcgccctccctt

SEQ ID NO: 76535 - DNA, 25 bp, Homo sapien
atcccagtatcccacccacagccca

SEQ ID NO: 76536 - DNA, 25 bp, Homo sapien
cagactccaagtggagtgtagggct

SEQ ID NO: 76537 - DNA, 25 bp, Homo sapien
gagcctcctggatcaccgtatgtct

SEQ ID NO: 76538 - DNA, 25 bp, Homo sapien
taggcttccgcctgtgtcccagtct

SEQ ID NO: 76539 - DNA, 25 bp, Homo sapien
tcctcacattggacagggcatcaga

SEQ ID NO: 76540 - DNA, 25 bp, Homo sapien
aaaagacacaaagctggttacaggt

SEQ ID NO: 76541 - DNA, 25 bp, Homo sapien
tggcccatgtgtccatccagactcc

SEQ ID NO: 76542 - DNA, 25 bp, Homo sapien
ctggggtttccatggagtgtgaaca

SEQ ID NO: 76543 - DNA, 25 bp, Homo sapien
gtgtgaacacgaagttaagagtgag

SEQ ID NO: 76544 - DNA, 25 bp, Homo sapien
gctgcttcagagcccctggcccatg

SEQ ID NO: 76545 - DNA, 25 bp, Homo sapien
gcatcccaagggctcgccctccctt

SEQ ID NO: 76546 - DNA, 25 bp, Homo sapien
atcccagtatcccacccacagccca

SEQ ID NO: 76547 - DNA, 25 bp, Homo sapien
gagcctcctggatcaccgtatgtct

SEQ ID NO: 76548 - DNA, 25 bp, Homo sapien
cagactccaagtggagtgtagggct

SEQ ID NO: 76549 - DNA, 25 bp, Homo sapien
tcctcacattggacagggcatcaga

SEQ ID NO: 76550 - DNA, 25 bp, Homo sapien
taggcttccgcctgtgtcccagtct

SEQ ID NO: 76551 - DNA, 25 bp, Homo sapien
aaaagacacaaagctggttacaggt

SEQ ID NO: 76552 - DNA, 25 bp, Homo sapien
tggcccatgtgtccatccagactcc

SEQ ID NO: 76553 - DNA, 25 bp, Homo sapien
ctggggtttccatggagtgtgaaca

SEQ ID NO: 76554 - DNA, 25 bp, Homo sapien
gtgtgaacacgaagttaagagtgag

SEQ ID NO: 76555 - DNA, 25 bp, Homo sapien
gctgcttcagagcccctggcccatg

SEQ ID NO: 76556 - DNA, 25 bp, Homo sapien
gcatcccaagggctcgccctccctt

SEQ ID NO: 76557 - DNA, 25 bp, Homo sapien
atcccagtatcccacccacagccca

SEQ ID NO: 76558 - DNA, 25 bp, Homo sapien
cagactccaagtggagtgtagggct

SEQ ID NO: 76559 - DNA, 25 bp, Homo sapien
gagcctcctggatcaccgtatgtct

SEQ ID NO: 76560 - DNA, 25 bp, Homo sapien
tcctcacattggacagggcatcaga

SEQ ID NO: 76561 - DNA, 25 bp, Homo sapien
aaaagacacaaagctggttacaggt

SEQ ID NO: 76562 - DNA, 25 bp, Homo sapien
taggcttccgcctgtgtcccagtct

SEQ ID NO: 76563 - DNA, 25 bp, Homo sapien
tggcccatgtgtccatccagactcc

SEQ ID NO: 76564 - DNA, 25 bp, Homo sapien
ctggggtttccatggagtgtgaaca

SEQ ID NO: 76565 - DNA, 25 bp, Homo sapien
gtgtgaacacgaagttaagagtgag

SEQ ID NO: 76566 - DNA, 25 bp, Homo sapien
gctgcttcagagcccctggcccatg

SEQ ID NO: 76567 - DNA, 25 bp, Homo sapien
gcatcccaagggctcgccctccctt

SEQ ID NO: 76568 - DNA, 25 bp, Homo sapien
atcccagtatcccacccacagccca

SEQ ID NO: 76569 - DNA, 25 bp, Homo sapien
cagactccaagtggagtgtagggct

SEQ ID NO: 76570 - DNA, 25 bp, Homo sapien
tcctcacattggacagggcatcaga

SEQ ID NO: 76571 - DNA, 25 bp, Homo sapien
gagcctcctggatcaccgtatgtct

SEQ ID NO: 76572 - DNA, 25 bp, Homo sapien
taggcttccgcctgtgtcccagtct

SEQ ID NO: 76573 - DNA, 25 bp, Homo sapien
aaaagacacaaagctggttacaggt

SEQ ID NO: 76574 - DNA, 25 bp, Homo sapien
tggcccatgtgtccatccagactcc

SEQ ID NO: 76575 - DNA, 25 bp, Homo sapien
ctggggtttccatggagtgtgaaca

SEQ ID NO: 76576 - DNA, 25 bp, Homo sapien
gtgtgaacacgaagttaagagtgag

SEQ ID NO: 76577 - DNA, 25 bp, Homo sapien
gctgcttcagagcccctggcccatg

SEQ ID NO: 76578 - DNA, 25 bp, Homo sapien
gcatcccaagggctcgccctccctt

SEQ ID NO: 76579 - DNA, 25 bp, Homo sapien
atcccagtatcccacccacagccca

SEQ ID NO: 76580 - DNA, 25 bp, Homo sapien
gagcctcctggatcaccgtatgtct

SEQ ID NO: 76581 - DNA, 25 bp, Homo sapien
tcctcacattggacagggcatcaga

SEQ ID NO: 76582 - DNA, 25 bp, Homo sapien
cagactccaagtggagtgtagggct

SEQ ID NO: 76583 - DNA, 25 bp, Homo sapien
aaaagacacaaagctggttacaggt

SEQ ID NO: 76584 - DNA, 25 bp, Homo sapien
taggcttccgcctgtgtcccagtct

SEQ ID NO: 76585 - DNA, 25 bp, Homo sapien
tggcccatgtgtccatccagactcc

SEQ ID NO: 76586 - DNA, 25 bp, Homo sapien
ctggggtttccatggagtgtgaaca

SEQ ID NO: 76587 - DNA, 25 bp, Homo sapien
gtgtgaacacgaagttaagagtgag

SEQ ID NO: 76588 - DNA, 25 bp, Homo sapien
gctgcttcagagcccctggcccatg

SEQ ID NO: 76589 - DNA, 25 bp, Homo sapien
gcatcccaagggctcgccctccctt

SEQ ID NO: 76590 - DNA, 25 bp, Homo sapien
atcccagtatcccacccacagccca

SEQ ID NO: 76591 - DNA, 25 bp, Homo sapien
cagactccaagtggagtgtagggct

SEQ ID NO: 76592 - DNA, 25 bp, Homo sapien
gagcctcctggatcaccgtatgtct

SEQ ID NO: 76593 - DNA, 25 bp, Homo sapien
tcctcacattggacagggcatcaga

SEQ ID NO: 76594 - DNA, 25 bp, Homo sapien
aaaagacacaaagctggttacaggt

SEQ ID NO: 76595 - DNA, 25 bp, Homo sapien
taggcttccgcctgtgtcccagtct

SEQ ID NO: 76596 - DNA, 25 bp, Homo sapien
tggcccatgtgtccatccagactcc

SEQ ID NO: 76597 - DNA, 25 bp, Homo sapien
ctggggtttccatggagtgtgaaca

SEQ ID NO: 76598 - DNA, 25 bp, Homo sapien
gtgtgaacacgaagttaagagtgag

SEQ ID NO: 76599 - DNA, 25 bp, Homo sapien
gctgcttcagagcccctggcccatg

SEQ ID NO: 76600 - DNA, 25 bp, Homo sapien
gcatcccaagggctcgccctccctt

SEQ ID NO: 76601 - DNA, 25 bp, Homo sapien
atcccagtatcccacccacagccca

SEQ ID NO: 76602 - DNA, 25 bp, Homo sapien
cagactccaagtggagtgtagggct

SEQ ID NO: 76603 - DNA, 25 bp, Homo sapien
gagcctcctggatcaccgtatgtct

SEQ ID NO: 76604 - DNA, 25 bp, Homo sapien
tcctcacattggacagggcatcaga

SEQ ID NO: 76605 - DNA, 25 bp, Homo sapien
taggcttccgcctgtgtcccagtct

SEQ ID NO: 76606 - DNA, 25 bp, Homo sapien
aaaagacacaaagctggttacaggt

SEQ ID NO: 76607 - DNA, 25 bp, Homo sapien
tggcccatgtgtccatccagactcc

SEQ ID NO: 76608 - DNA, 25 bp, Homo sapien
ctggggtttccatggagtgtgaaca

SEQ ID NO: 76609 - DNA, 25 bp, Homo sapien
gtgtgaacacgaagttaagagtgag

SEQ ID NO: 76610 - DNA, 25 bp, Homo sapien
gctgcttcagagcccctggcccatg

SEQ ID NO: 76611 - DNA, 25 bp, Homo sapien
gcatcccaagggctcgccctccctt

SEQ ID NO: 76612 - DNA, 25 bp, Homo sapien
gtgtgaacacgaagttaagagtgag

SEQ ID NO: 76613 - DNA, 25 bp, Homo sapien
tcctcacattggacagggcatcaga

SEQ ID NO: 76614 - DNA, 25 bp, Homo sapien
gctgcttcagagcccctggcccatg

SEQ ID NO: 76615 - DNA, 25 bp, Homo sapien
tggcccatgtgtccatccagactcc

SEQ ID NO: 76616 - DNA, 25 bp, Homo sapien
gagcctcctggatcaccgtatgtct

SEQ ID NO: 76617 - DNA, 25 bp, Homo sapien
ctggggtttccatggagtgtgaaca

SEQ ID NO: 76618 - DNA, 25 bp, Homo sapien
taggcttccgcctgtgtcccagtct

SEQ ID NO: 76619 - DNA, 25 bp, Homo sapien
gcatcccaagggctcgccctccctt

SEQ ID NO: 76620 - DNA, 25 bp, Homo sapien
cagactccaagtggagtgtagggct

SEQ ID NO: 76621 - DNA, 25 bp, Homo sapien
atcccagtatcccacccacagccca

SEQ ID NO: 76622 - DNA, 25 bp, Homo sapien
aaaagacacaaagctggttacaggt

SEQ ID NO: 76623 - DNA, 25 bp, Homo sapien
atcccagtatcccacccacagccca

SEQ ID NO: 76624 - DNA, 25 bp, Homo sapien
cagactccaagtggagtgtagggct

SEQ ID NO: 76625 - DNA, 25 bp, Homo sapien
tcctcacattggacagggcatcaga

SEQ ID NO: 76626 - DNA, 25 bp, Homo sapien
gagcctcctggatcaccgtatgtct

SEQ ID NO: 76627 - DNA, 25 bp, Homo sapien
aaaagacacaaagctggttacaggt

SEQ ID NO: 76628 - DNA, 25 bp, Homo sapien
taggcttccgcctgtgtcccagtct

SEQ ID NO: 76629 - DNA, 25 bp, Homo sapien
tggcccatgtgtccatccagactcc

SEQ ID NO: 76630 - DNA, 25 bp, Homo sapien
ctggggtttccatggagtgtgaaca

SEQ ID NO: 76631 - DNA, 25 bp, Homo sapien
gtgtgaacacgaagttaagagtgag

SEQ ID NO: 76632 - DNA, 25 bp, Homo sapien
gctgcttcagagcccctggcccatg

SEQ ID NO: 76633 - DNA, 25 bp, Homo sapien
gcatcccaagggctcgccctccctt

SEQ ID NO: 76634 - DNA, 25 bp, Homo sapien
gcatcccaagggctcgccctccctt

SEQ ID NO: 76635 - DNA, 25 bp, Homo sapien
tcctcacattggacagggcatcaga

SEQ ID NO: 76636 - DNA, 25 bp, Homo sapien
cagactccaagtggagtgtagggct

SEQ ID NO: 76637 - DNA, 25 bp, Homo sapien
tggcccatgtgtccatccagactcc

SEQ ID NO: 76638 - DNA, 25 bp, Homo sapien
gctgcttcagagcccctggcccatg

SEQ ID NO: 76639 - DNA, 25 bp, Homo sapien
gtgtgaacacgaagttaagagtgag

SEQ ID NO: 76640 - DNA, 25 bp, Homo sapien
ctggggtttccatggagtgtgaaca

SEQ ID NO: 76641 - DNA, 25 bp, Homo sapien
taggcttccgcctgtgtcccagtct

SEQ ID NO: 76642 - DNA, 25 bp, Homo sapien
gagcctcctggatcaccgtatgtct

SEQ ID NO: 76643 - DNA, 25 bp, Homo sapien
atcccagtatcccacccacagccca

SEQ ID NO: 76644 - DNA, 25 bp, Homo sapien
aaaagacacaaagctggttacaggt

SEQ ID NO: 76645 - DNA, 25 bp, Homo sapien
agactgggacacaggcggaagccta

SEQ ID NO: 76646 - DNA, 25 bp, Homo sapien
agccctacactccacttggagtctg

SEQ ID NO: 76647 - DNA, 25 bp, Homo sapien
tgttcacactccatggaaaccccag

SEQ ID NO: 76648 - DNA, 25 bp, Homo sapien
tgggctgtgggtgggatactgggat

SEQ ID NO: 76649 - DNA, 25 bp, Homo sapien
tctgatgccctgtccaatgtgagga

SEQ ID NO: 76650 - DNA, 25 bp, Homo sapien
ggagtctggatggacacatgggcca

SEQ ID NO: 76651 - DNA, 25 bp, Homo sapien
acctgtaaccagctttgtgtctttt

SEQ ID NO: 76652 - DNA, 25 bp, Homo sapien
ctcactcttaacttcgtgttcacac

SEQ ID NO: 76653 - DNA, 25 bp, Homo sapien
catgggccaggggctctgaagcagc

SEQ ID NO: 76654 - DNA, 25 bp, Homo sapien
agacatacggtgatccaggaggctc

SEQ ID NO: 76655 - DNA, 25 bp, Homo sapien
aagggagggcgagcccttgggatgc

SEQ ID NO: 76656 - DNA, 25 bp, Homo sapien
atcccagtatcccacccacagccca

SEQ ID NO: 76657 - DNA, 25 bp, Homo sapien
cagactccaagtggagtgtagggct

SEQ ID NO: 76658 - DNA, 25 bp, Homo sapien
gagcctcctggatcaccgtatgtct

SEQ ID NO: 76659 - DNA, 25 bp, Homo sapien
tcctcacattggacagggcatcaga

SEQ ID NO: 76660 - DNA, 25 bp, Homo sapien
taggcttccgcctgtgtcccagtct

SEQ ID NO: 76661 - DNA, 25 bp, Homo sapien
aaaagacacaaagctggttacaggt

SEQ ID NO: 76662 - DNA, 25 bp, Homo sapien
tggcccatgtgtccatccagactcc

SEQ ID NO: 76663 - DNA, 25 bp, Homo sapien
ctggggtttccatggagtgtgaaca

SEQ ID NO: 76664 - DNA, 25 bp, Homo sapien
gtgtgaacacgaagttaagagtgag

SEQ ID NO: 76665 - DNA, 25 bp, Homo sapien
gctgcttcagagcccctggcccatg

SEQ ID NO: 76666 - DNA, 25 bp, Homo sapien
gcatcccaagggctcgccctccctt

SEQ ID NO: 76667 - DNA, 25 bp, Homo sapien
cagactccaagtggagtgtagggct

SEQ ID NO: 76668 - DNA, 25 bp, Homo sapien
taggcttccgcctgtgtcccagtct

SEQ ID NO: 76669 - DNA, 25 bp, Homo sapien
gagcctcctggatcaccgtatgtct

SEQ ID NO: 76670 - DNA, 25 bp, Homo sapien
gcatcccaagggctcgccctccctt

SEQ ID NO: 76671 - DNA, 25 bp, Homo sapien
gctgcttcagagcccctggcccatg

SEQ ID NO: 76672 - DNA, 25 bp, Homo sapien
aaaagacacaaagctggttacaggt

SEQ ID NO: 76673 - DNA, 25 bp, Homo sapien
gtgtgaacacgaagttaagagtgag

SEQ ID NO: 76674 - DNA, 25 bp, Homo sapien
tcctcacattggacagggcatcaga

SEQ ID NO: 76675 - DNA, 25 bp, Homo sapien
tggcccatgtgtccatccagactcc

SEQ ID NO: 76676 - DNA, 25 bp, Homo sapien
atcccagtatcccacccacagccca

SEQ ID NO: 76677 - DNA, 25 bp, Homo sapien
ctggggtttccatggagtgtgaaca

SEQ ID NO: 76678 - DNA, 25 bp, Homo sapien
gcatcccaagggctcgccctccctt

SEQ ID NO: 76679 - DNA, 25 bp, Homo sapien
tcctcacattggacagggcatcaga

SEQ ID NO: 76680 - DNA, 25 bp, Homo sapien
cagactccaagtggagtgtagggct

SEQ ID NO: 76681 - DNA, 25 bp, Homo sapien
tggcccatgtgtccatccagactcc

SEQ ID NO: 76682 - DNA, 25 bp, Homo sapien
gctgcttcagagcccctggcccatg

SEQ ID NO: 76683 - DNA, 25 bp, Homo sapien
gtgtgaacacgaagttaagagtgag

SEQ ID NO: 76684 - DNA, 25 bp, Homo sapien
ctggggtttccatggagtgtgaaca

SEQ ID NO: 76685 - DNA, 25 bp, Homo sapien
taggcttccgcctgtgtcccagtct

SEQ ID NO: 76686 - DNA, 25 bp, Homo sapien
gagcctcctggatcaccgtatgtct

SEQ ID NO: 76687 - DNA, 25 bp, Homo sapien
atcccagtatcccacccacagccca

SEQ ID NO: 76688 - DNA, 25 bp, Homo sapien
aaaagacacaaagctggttacaggt

SEQ ID NO: 76689 - DNA, 25 bp, Homo sapien
gctgcttcagagcccctggcccatg

SEQ ID NO: 76690 - DNA, 25 bp, Homo sapien
ctggggtttccatggagtgtgaaca

SEQ ID NO: 76691 - DNA, 25 bp, Homo sapien
gagcctcctggatcaccgtatgtct

SEQ ID NO: 76692 - DNA, 25 bp, Homo sapien
gcatcccaagggctcgccctccctt

SEQ ID NO: 76693 - DNA, 25 bp, Homo sapien
atcccagtatcccacccacagccca

SEQ ID NO: 76694 - DNA, 25 bp, Homo sapien
aaaagacacaaagctggttacaggt

SEQ ID NO: 76695 - DNA, 25 bp, Homo sapien
taggcttccgcctgtgtcccagtct

SEQ ID NO: 76696 - DNA, 25 bp, Homo sapien
tcctcacattggacagggcatcaga

SEQ ID NO: 76697 - DNA, 25 bp, Homo sapien
tggcccatgtgtccatccagactcc

SEQ ID NO: 76698 - DNA, 25 bp, Homo sapien
cagactccaagtggagtgtagggct

SEQ ID NO: 76699 - DNA, 25 bp, Homo sapien
gtgtgaacacgaagttaagagtgag

SEQ ID NO: 76700 - DNA, 25 bp, Homo sapien
gcatcccaagggctcgccctccctt

SEQ ID NO: 76701 - DNA, 25 bp, Homo sapien
tcctcacattggacagggcatcaga

SEQ ID NO: 76702 - DNA, 25 bp, Homo sapien
cagactccaagtggagtgtagggct

SEQ ID NO: 76703 - DNA, 25 bp, Homo sapien
tggcccatgtgtccatccagactcc

SEQ ID NO: 76704 - DNA, 25 bp, Homo sapien
gctgcttcagagcccctggcccatg

SEQ ID NO: 76705 - DNA, 25 bp, Homo sapien
gtgtgaacacgaagttaagagtgag

SEQ ID NO: 76706 - DNA, 25 bp, Homo sapien
ctggggtttccatggagtgtgaaca

SEQ ID NO: 76707 - DNA, 25 bp, Homo sapien
taggcttccgcctgtgtcccagtct

SEQ ID NO: 76708 - DNA, 25 bp, Homo sapien
gagcctcctggatcaccgtatgtct

SEQ ID NO: 76709 - DNA, 25 bp, Homo sapien
atcccagtatcccacccacagccca

SEQ ID NO: 76710 - DNA, 25 bp, Homo sapien
aaaagacacaaagctggttacaggt

SEQ ID NO: 76711 - DNA, 25 bp, Homo sapien
taggcttccgcctgtgtcccagtct

SEQ ID NO: 76712 - DNA, 25 bp, Homo sapien
ctggggtttccatggagtgtgaaca

SEQ ID NO: 76713 - DNA, 25 bp, Homo sapien
aaaagacacaaagctggttacaggt

SEQ ID NO: 76714 - DNA, 25 bp, Homo sapien
gagcctcctggatcaccgtatgtct

SEQ ID NO: 76715 - DNA, 25 bp, Homo sapien
tggcccatgtgtccatccagactcc

SEQ ID NO: 76716 - DNA, 25 bp, Homo sapien
cagactccaagtggagtgtagggct

SEQ ID NO: 76717 - DNA, 25 bp, Homo sapien
gctgcttcagagcccctggcccatg

SEQ ID NO: 76718 - DNA, 25 bp, Homo sapien
gcatcccaagggctcgccctccctt

SEQ ID NO: 76719 - DNA, 25 bp, Homo sapien
atcccagtatcccacccacagccca

SEQ ID NO: 76720 - DNA, 25 bp, Homo sapien
tcctcacattggacagggcatcaga

SEQ ID NO: 76721 - DNA, 25 bp, Homo sapien
gtgtgaacacgaagttaagagtgag

SEQ ID NO: 76722 - DNA, 25 bp, Homo sapien
gcatcccaagggctcgccctccctt

SEQ ID NO: 76723 - DNA, 25 bp, Homo sapien
tcctcacattggacagggcatcaga

SEQ ID NO: 76724 - DNA, 25 bp, Homo sapien
cagactccaagtggagtgtagggct

SEQ ID NO: 76725 - DNA, 25 bp, Homo sapien
tggcccatgtgtccatccagactcc

SEQ ID NO: 76726 - DNA, 25 bp, Homo sapien
gctgcttcagagcccctggcccatg

SEQ ID NO: 76727 - DNA, 25 bp, Homo sapien
gtgtgaacacgaagttaagagtgag

SEQ ID NO: 76728 - DNA, 25 bp, Homo sapien
ctggggtttccatggagtgtgaaca

SEQ ID NO: 76729 - DNA, 25 bp, Homo sapien
taggcttccgcctgtgtcccagtct

SEQ ID NO: 76730 - DNA, 25 bp, Homo sapien
gagcctcctggatcaccgtatgtct

SEQ ID NO: 76731 - DNA, 25 bp, Homo sapien
atcccagtatcccacccacagccca

SEQ ID NO: 76732 - DNA, 25 bp, Homo sapien
aaaagacacaaagctggttacaggt

SEQ ID NO: 76733 - DNA, 25 bp, Homo sapien
gcatcccaagggctcgccctccctt

SEQ ID NO: 76734 - DNA, 25 bp, Homo sapien
tcctcacattggacagggcatcaga

SEQ ID NO: 76735 - DNA, 25 bp, Homo sapien
cagactccaagtggagtgtagggct

SEQ ID NO: 76736 - DNA, 25 bp, Homo sapien
tggcccatgtgtccatccagactcc

SEQ ID NO: 76737 - DNA, 25 bp, Homo sapien
gctgcttcagagcccctggcccatg

SEQ ID NO: 76738 - DNA, 25 bp, Homo sapien
gtgtgaacacgaagttaagagtgag

SEQ ID NO: 76739 - DNA, 25 bp, Homo sapien
ctggggtttccatggagtgtgaaca

SEQ ID NO: 76740 - DNA, 25 bp, Homo sapien
taggcttccgcctgtgtcccagtct

SEQ ID NO: 76741 - DNA, 25 bp, Homo sapien
gagcctcctggatcaccgtatgtct

SEQ ID NO: 76742 - DNA, 25 bp, Homo sapien
atcccagtatcccacccacagccca

SEQ ID NO: 76743 - DNA, 25 bp, Homo sapien
aaaagacacaaagctggttacaggt

SEQ ID NO: 76744 - DNA, 25 bp, Homo sapien
gagcctcctggatcaccgtatgtct

SEQ ID NO: 76745 - DNA, 25 bp, Homo sapien
gtgtgaacacgaagttaagagtgag

SEQ ID NO: 76746 - DNA, 25 bp, Homo sapien
taggcttccgcctgtgtcccagtct

SEQ ID NO: 76747 - DNA, 25 bp, Homo sapien
cagactccaagtggagtgtagggct

SEQ ID NO: 76748 - DNA, 25 bp, Homo sapien
tcctcacattggacagggcatcaga

SEQ ID NO: 76749 - DNA, 25 bp, Homo sapien
aaaagacacaaagctggttacaggt

SEQ ID NO: 76750 - DNA, 25 bp, Homo sapien
gctgcttcagagcccctggcccatg

SEQ ID NO: 76751 - DNA, 25 bp, Homo sapien
ctggggtttccatggagtgtgaaca

SEQ ID NO: 76752 - DNA, 25 bp, Homo sapien
tggcccatgtgtccatccagactcc

SEQ ID NO: 76753 - DNA, 25 bp, Homo sapien
atcccagtatcccacccacagccca

SEQ ID NO: 76754 - DNA, 25 bp, Homo sapien
gcatcccaagggctcgccctccctt

SEQ ID NO: 76755 - DNA, 25 bp, Homo sapien
gcatcccaagggctcgccctccctt

SEQ ID NO: 76756 - DNA, 25 bp, Homo sapien
tcctcacattggacagggcatcaga

SEQ ID NO: 76757 - DNA, 25 bp, Homo sapien
cagactccaagtggagtgtagggct

SEQ ID NO: 76758 - DNA, 25 bp, Homo sapien
tggcccatgtgtccatccagactcc

SEQ ID NO: 76759 - DNA, 25 bp, Homo sapien
gctgcttcagagcccctggcccatg

SEQ ID NO: 76760 - DNA, 25 bp, Homo sapien
gtgtgaacacgaagttaagagtgag

SEQ ID NO: 76761 - DNA, 25 bp, Homo sapien
ctggggtttccatggagtgtgaaca

SEQ ID NO: 76762 - DNA, 25 bp, Homo sapien
taggcttccgcctgtgtcccagtct

SEQ ID NO: 76763 - DNA, 25 bp, Homo sapien
gagcctcctggatcaccgtatgtct

SEQ ID NO: 76764 - DNA, 25 bp, Homo sapien
atcccagtatcccacccacagccca

SEQ ID NO: 76765 - DNA, 25 bp, Homo sapien
aaaagacacaaagctggttacaggt

SEQ ID NO: 76766 - DNA, 25 bp, Homo sapien
gctgcttcagagcccctggcccatg

SEQ ID NO: 76767 - DNA, 25 bp, Homo sapien
tcctcacattggacagggcatcaga

SEQ ID NO: 76768 - DNA, 25 bp, Homo sapien
cagactccaagtggagtgtagggct

SEQ ID NO: 76769 - DNA, 25 bp, Homo sapien
taggcttccgcctgtgtcccagtct

SEQ ID NO: 76770 - DNA, 25 bp, Homo sapien
atcccagtatcccacccacagccca

SEQ ID NO: 76771 - DNA, 25 bp, Homo sapien
gagcctcctggatcaccgtatgtct

SEQ ID NO: 76772 - DNA, 25 bp, Homo sapien
gtgtgaacacgaagttaagagtgag

SEQ ID NO: 76773 - DNA, 25 bp, Homo sapien
ctggggtttccatggagtgtgaaca

SEQ ID NO: 76774 - DNA, 25 bp, Homo sapien
gcatcccaagggctcgccctccctt

SEQ ID NO: 76775 - DNA, 25 bp, Homo sapien
aaaagacacaaagctggttacaggt

SEQ ID NO: 76776 - DNA, 25 bp, Homo sapien
tggcccatgtgtccatccagactcc

SEQ ID NO: 76777 - DNA, 25 bp, Homo sapien
gcatcccaagggctcgccctccctt

SEQ ID NO: 76778 - DNA, 25 bp, Homo sapien
tcctcacattggacagggcatcaga

SEQ ID NO: 76779 - DNA, 25 bp, Homo sapien
cagactccaagtggagtgtagggct

SEQ ID NO: 76780 - DNA, 25 bp, Homo sapien
tggcccatgtgtccatccagactcc

SEQ ID NO: 76781 - DNA, 25 bp, Homo sapien
gctgcttcagagcccctggcccatg

SEQ ID NO: 76782 - DNA, 25 bp, Homo sapien
gtgtgaacacgaagttaagagtgag

SEQ ID NO: 76783 - DNA, 25 bp, Homo sapien
ctggggtttccatggagtgtgaaca

SEQ ID NO: 76784 - DNA, 25 bp, Homo sapien
taggcttccgcctgtgtcccagtct

SEQ ID NO: 76785 - DNA, 25 bp, Homo sapien
gagcctcctggatcaccgtatgtct

SEQ ID NO: 76786 - DNA, 25 bp, Homo sapien
atcccagtatcccacccacagccca

SEQ ID NO: 76787 - DNA, 25 bp, Homo sapien
aaaagacacaaagctggttacaggt

SEQ ID NO: 76788 - DNA, 25 bp, Homo sapien
ctggggtttccatggagtgtgaaca

SEQ ID NO: 76789 - DNA, 25 bp, Homo sapien
gagcctcctggatcaccgtatgtct

SEQ ID NO: 76790 - DNA, 25 bp, Homo sapien
gtgtgaacacgaagttaagagtgag

SEQ ID NO: 76791 - DNA, 25 bp, Homo sapien
tggcccatgtgtccatccagactcc

SEQ ID NO: 76792 - DNA, 25 bp, Homo sapien
cagactccaagtggagtgtagggct

SEQ ID NO: 76793 - DNA, 25 bp, Homo sapien
gcatcccaagggctcgccctccctt

SEQ ID NO: 76794 - DNA, 25 bp, Homo sapien
taggcttccgcctgtgtcccagtct

SEQ ID NO: 76795 - DNA, 25 bp, Homo sapien
tcctcacattggacagggcatcaga

SEQ ID NO: 76796 - DNA, 25 bp, Homo sapien
aaaagacacaaagctggttacaggt

SEQ ID NO: 76797 - DNA, 25 bp, Homo sapien
gctgcttcagagcccctggcccatg

SEQ ID NO: 76798 - DNA, 25 bp, Homo sapien
atcccagtatcccacccacagccca

SEQ ID NO: 76799 - DNA, 25 bp, Homo sapien
gcatcccaagggctcgccctccctt

SEQ ID NO: 76800 - DNA, 25 bp, Homo sapien
tcctcacattggacagggcatcaga

SEQ ID NO: 76801 - DNA, 25 bp, Homo sapien
cagactccaagtggagtgtagggct

SEQ ID NO: 76802 - DNA, 25 bp, Homo sapien
tggcccatgtgtccatccagactcc

SEQ ID NO: 76803 - DNA, 25 bp, Homo sapien
gctgcttcagagcccctggcccatg

SEQ ID NO: 76804 - DNA, 25 bp, Homo sapien
gtgtgaacacgaagttaagagtgag

SEQ ID NO: 76805 - DNA, 25 bp, Homo sapien
ctggggtttccatggagtgtgaaca

SEQ ID NO: 76806 - DNA, 25 bp, Homo sapien
taggcttccgcctgtgtcccagtct

SEQ ID NO: 76807 - DNA, 25 bp, Homo sapien
gagcctcctggatcaccgtatgtct

SEQ ID NO: 76808 - DNA, 25 bp, Homo sapien
atcccagtatcccacccacagccca

SEQ ID NO: 76809 - DNA, 25 bp, Homo sapien
aaaagacacaaagctggttacaggt

SEQ ID NO: 76810 - DNA, 25 bp, Homo sapien
gcatcccaagggctcgccctccctt

SEQ ID NO: 76811 - DNA, 25 bp, Homo sapien
tcctcacattggacagggcatcaga

SEQ ID NO: 76812 - DNA, 25 bp, Homo sapien
tggcccatgtgtccatccagactcc

SEQ ID NO: 76813 - DNA, 25 bp, Homo sapien
atcccagtatcccacccacagccca

SEQ ID NO: 76814 - DNA, 25 bp, Homo sapien
ctggggtttccatggagtgtgaaca

SEQ ID NO: 76815 - DNA, 25 bp, Homo sapien
cagactccaagtggagtgtagggct

SEQ ID NO: 76816 - DNA, 25 bp, Homo sapien
gtgtgaacacgaagttaagagtgag

SEQ ID NO: 76817 - DNA, 25 bp, Homo sapien
gctgcttcagagcccctggcccatg

SEQ ID NO: 76818 - DNA, 25 bp, Homo sapien
taggcttccgcctgtgtcccagtct

SEQ ID NO: 76819 - DNA, 25 bp, Homo sapien
aaaagacacaaagctggttacaggt

SEQ ID NO: 76820 - DNA, 25 bp, Homo sapien
gagcctcctggatcaccgtatgtct

SEQ ID NO: 76821 - DNA, 25 bp, Homo sapien
gcatcccaagggctcgccctccctt

SEQ ID NO: 76822 - DNA, 25 bp, Homo sapien
tcctcacattggacagggcatcaga

SEQ ID NO: 76823 - DNA, 25 bp, Homo sapien
cagactccaagtggagtgtagggct

SEQ ID NO: 76824 - DNA, 25 bp, Homo sapien
tggcccatgtgtccatccagactcc

SEQ ID NO: 76825 - DNA, 25 bp, Homo sapien
gctgcttcagagcccctggcccatg

SEQ ID NO: 76826 - DNA, 25 bp, Homo sapien
gtgtgaacacgaagttaagagtgag

SEQ ID NO: 76827 - DNA, 25 bp, Homo sapien
ctggggtttccatggagtgtgaaca

SEQ ID NO: 76828 - DNA, 25 bp, Homo sapien
taggcttccgcctgtgtcccagtct

SEQ ID NO: 76829 - DNA, 25 bp, Homo sapien
gagcctcctggatcaccgtatgtct

SEQ ID NO: 76830 - DNA, 25 bp, Homo sapien
atcccagtatcccacccacagccca

SEQ ID NO: 76831 - DNA, 25 bp, Homo sapien
aaaagacacaaagctggttacaggt

SEQ ID NO: 76832 - DNA, 25 bp, Homo sapien
tggcccatgtgtccatccagactcc

SEQ ID NO: 76833 - DNA, 25 bp, Homo sapien
atcccagtatcccacccacagccca

SEQ ID NO: 76834 - DNA, 25 bp, Homo sapien
tcctcacattggacagggcatcaga

SEQ ID NO: 76835 - DNA, 25 bp, Homo sapien
gagcctcctggatcaccgtatgtct

SEQ ID NO: 76836 - DNA, 25 bp, Homo sapien
cagactccaagtggagtgtagggct

SEQ ID NO: 76837 - DNA, 25 bp, Homo sapien
ctggggtttccatggagtgtgaaca

SEQ ID NO: 76838 - DNA, 25 bp, Homo sapien
gctgcttcagagcccctggcccatg

SEQ ID NO: 76839 - DNA, 25 bp, Homo sapien
gcatcccaagggctcgccctccctt

SEQ ID NO: 76840 - DNA, 25 bp, Homo sapien
taggcttccgcctgtgtcccagtct

SEQ ID NO: 76841 - DNA, 25 bp, Homo sapien
aaaagacacaaagctggttacaggt

SEQ ID NO: 76842 - DNA, 25 bp, Homo sapien
gtgtgaacacgaagttaagagtgag

SEQ ID NO: 76843 - DNA, 25 bp, Homo sapien
gtgtgaacacgaagttaagagtgag

SEQ ID NO: 76844 - DNA, 25 bp, Homo sapien
ctggggtttccatggagtgtgaaca

SEQ ID NO: 76845 - DNA, 25 bp, Homo sapien
aaaagacacaaagctggttacaggt

SEQ ID NO: 76846 - DNA, 25 bp, Homo sapien
gctgcttcagagcccctggcccatg

SEQ ID NO: 76847 - DNA, 25 bp, Homo sapien
gagcctcctggatcaccgtatgtct

SEQ ID NO: 76848 - DNA, 25 bp, Homo sapien
gcatcccaagggctcgccctccctt

SEQ ID NO: 76849 - DNA, 25 bp, Homo sapien
taggcttccgcctgtgtcccagtct

SEQ ID NO: 76850 - DNA, 25 bp, Homo sapien
tggcccatgtgtccatccagactcc

SEQ ID NO: 76851 - DNA, 25 bp, Homo sapien
cagactccaagtggagtgtagggct

SEQ ID NO: 76852 - DNA, 25 bp, Homo sapien
atcccagtatcccacccacagccca

SEQ ID NO: 76853 - DNA, 25 bp, Homo sapien
tcctcacattggacagggcatcaga

SEQ ID NO: 76854 - DNA, 25 bp, Homo sapien
gcatcccaagggctcgccctccctt

SEQ ID NO: 76855 - DNA, 25 bp, Homo sapien
tcctcacattggacagggcatcaga

SEQ ID NO: 76856 - DNA, 25 bp, Homo sapien
cagactccaagtggagtgtagggct

SEQ ID NO: 76857 - DNA, 25 bp, Homo sapien
tggcccatgtgtccatccagactcc

SEQ ID NO: 76858 - DNA, 25 bp, Homo sapien
gctgcttcagagcccctggcccatg

SEQ ID NO: 76859 - DNA, 25 bp, Homo sapien
gtgtgaacacgaagttaagagtgag

SEQ ID NO: 76860 - DNA, 25 bp, Homo sapien
ctggggtttccatggagtgtgaaca

SEQ ID NO: 76861 - DNA, 25 bp, Homo sapien
taggcttccgcctgtgtcccagtct

SEQ ID NO: 76862 - DNA, 25 bp, Homo sapien
gagcctcctggatcaccgtatgtct

SEQ ID NO: 76863 - DNA, 25 bp, Homo sapien
atcccagtatcccacccacagccca

SEQ ID NO: 76864 - DNA, 25 bp, Homo sapien
aaaagacacaaagctggttacaggt

SEQ ID NO: 76865 - DNA, 25 bp, Homo sapien
gcatcccaagggctcgccctccctt

SEQ ID NO: 76866 - DNA, 25 bp, Homo sapien
atcccagtatcccacccacagccca

SEQ ID NO: 76867 - DNA, 25 bp, Homo sapien
aaaagacacaaagctggttacaggt

SEQ ID NO: 76868 - DNA, 25 bp, Homo sapien
gtgtgaacacgaagttaagagtgag

SEQ ID NO: 76869 - DNA, 25 bp, Homo sapien
tcctcacattggacagggcatcaga

SEQ ID NO: 76870 - DNA, 25 bp, Homo sapien
gctgcttcagagcccctggcccatg

SEQ ID NO: 76871 - DNA, 25 bp, Homo sapien
gagcctcctggatcaccgtatgtct

SEQ ID NO: 76872 - DNA, 25 bp, Homo sapien
taggcttccgcctgtgtcccagtct

SEQ ID NO: 76873 - DNA, 25 bp, Homo sapien
cagactccaagtggagtgtagggct

SEQ ID NO: 76874 - DNA, 25 bp, Homo sapien
ctggggtttccatggagtgtgaaca

SEQ ID NO: 76875 - DNA, 25 bp, Homo sapien
tggcccatgtgtccatccagactcc

SEQ ID NO: 76876 - DNA, 25 bp, Homo sapien
gcatcccaagggctcgccctccctt

SEQ ID NO: 76877 - DNA, 25 bp, Homo sapien
tcctcacattggacagggcatcaga

SEQ ID NO: 76878 - DNA, 25 bp, Homo sapien
cagactccaagtggagtgtagggct

SEQ ID NO: 76879 - DNA, 25 bp, Homo sapien
tggcccatgtgtccatccagactcc

SEQ ID NO: 76880 - DNA, 25 bp, Homo sapien
gctgcttcagagcccctggcccatg

SEQ ID NO: 76881 - DNA, 25 bp, Homo sapien
gtgtgaacacgaagttaagagtgag

SEQ ID NO: 76882 - DNA, 25 bp, Homo sapien
ctggggtttccatggagtgtgaaca

SEQ ID NO: 76883 - DNA, 25 bp, Homo sapien
taggcttccgcctgtgtcccagtct

SEQ ID NO: 76884 - DNA, 25 bp, Homo sapien
gagcctcctggatcaccgtatgtct

SEQ ID NO: 76885 - DNA, 25 bp, Homo sapien
atcccagtatcccacccacagccca

SEQ ID NO: 76886 - DNA, 25 bp, Homo sapien
aaaagacacaaagctggttacaggt

SEQ ID NO: 76887 - DNA, 25 bp, Homo sapien
gagcctcctggatcaccgtatgtct

SEQ ID NO: 76888 - DNA, 25 bp, Homo sapien
atcccagtatcccacccacagccca

SEQ ID NO: 76889 - DNA, 25 bp, Homo sapien
tcctcacattggacagggcatcaga

SEQ ID NO: 76890 - DNA, 25 bp, Homo sapien
ctggggtttccatggagtgtgaaca

SEQ ID NO: 76891 - DNA, 25 bp, Homo sapien
tggcccatgtgtccatccagactcc

SEQ ID NO: 76892 - DNA, 25 bp, Homo sapien
gtgtgaacacgaagttaagagtgag

SEQ ID NO: 76893 - DNA, 25 bp, Homo sapien
taggcttccgcctgtgtcccagtct

SEQ ID NO: 76894 - DNA, 25 bp, Homo sapien
aaaagacacaaagctggttacaggt

SEQ ID NO: 76895 - DNA, 25 bp, Homo sapien
gcatcccaagggctcgccctccctt

SEQ ID NO: 76896 - DNA, 25 bp, Homo sapien
cagactccaagtggagtgtagggct

SEQ ID NO: 76897 - DNA, 25 bp, Homo sapien
gctgcttcagagcccctggcccatg

SEQ ID NO: 76898 - DNA, 25 bp, Homo sapien
gcatcccaagggctcgccctccctt

SEQ ID NO: 76899 - DNA, 25 bp, Homo sapien
tcctcacattggacagggcatcaga

SEQ ID NO: 76900 - DNA, 25 bp, Homo sapien
cagactccaagtggagtgtagggct

SEQ ID NO: 76901 - DNA, 25 bp, Homo sapien
tggcccatgtgtccatccagactcc

SEQ ID NO: 76902 - DNA, 25 bp, Homo sapien
gctgcttcagagcccctggcccatg

SEQ ID NO: 76903 - DNA, 25 bp, Homo sapien
gtgtgaacacgaagttaagagtgag

SEQ ID NO: 76904 - DNA, 25 bp, Homo sapien
ctggggtttccatggagtgtgaaca

SEQ ID NO: 76905 - DNA, 25 bp, Homo sapien
taggcttccgcctgtgtcccagtct

SEQ ID NO: 76906 - DNA, 25 bp, Homo sapien
gagcctcctggatcaccgtatgtct

SEQ ID NO: 76907 - DNA, 25 bp, Homo sapien
atcccagtatcccacccacagccca

SEQ ID NO: 76908 - DNA, 25 bp, Homo sapien
aaaagacacaaagctggttacaggt

SEQ ID NO: 76909 - DNA, 25 bp, Homo sapien
tcctcacattggacagggcatcaga

SEQ ID NO: 76910 - DNA, 25 bp, Homo sapien
gagcctcctggatcaccgtatgtct

SEQ ID NO: 76911 - DNA, 25 bp, Homo sapien
gtgtgaacacgaagttaagagtgag

SEQ ID NO: 76912 - DNA, 25 bp, Homo sapien
gctgcttcagagcccctggcccatg

SEQ ID NO: 76913 - DNA, 25 bp, Homo sapien
cagactccaagtggagtgtagggct

SEQ ID NO: 76914 - DNA, 25 bp, Homo sapien
atcccagtatcccacccacagccca

SEQ ID NO: 76915 - DNA, 25 bp, Homo sapien
aaaagacacaaagctggttacaggt

SEQ ID NO: 76916 - DNA, 25 bp, Homo sapien
gcatcccaagggctcgccctccctt

SEQ ID NO: 76917 - DNA, 25 bp, Homo sapien
tggcccatgtgtccatccagactcc

SEQ ID NO: 76918 - DNA, 25 bp, Homo sapien
taggcttccgcctgtgtcccagtct

SEQ ID NO: 76919 - DNA, 25 bp, Homo sapien
ctggggtttccatggagtgtgaaca

SEQ ID NO: 76920 - DNA, 25 bp, Homo sapien
gcatcccaagggctcgccctccctt

SEQ ID NO: 76921 - DNA, 25 bp, Homo sapien
tcctcacattggacagggcatcaga

SEQ ID NO: 76922 - DNA, 25 bp, Homo sapien
cagactccaagtggagtgtagggct

SEQ ID NO: 76923 - DNA, 25 bp, Homo sapien
tggcccatgtgtccatccagactcc

SEQ ID NO: 76924 - DNA, 25 bp, Homo sapien
gctgcttcagagcccctggcccatg

SEQ ID NO: 76925 - DNA, 25 bp, Homo sapien
gtgtgaacacgaagttaagagtgag

SEQ ID NO: 76926 - DNA, 25 bp, Homo sapien
ctggggtttccatggagtgtgaaca

SEQ ID NO: 76927 - DNA, 25 bp, Homo sapien
taggcttccgcctgtgtcccagtct

SEQ ID NO: 76928 - DNA, 25 bp, Homo sapien
gagcctcctggatcaccgtatgtct

SEQ ID NO: 76929 - DNA, 25 bp, Homo sapien
atcccagtatcccacccacagccca

SEQ ID NO: 76930 - DNA, 25 bp, Homo sapien
aaaagacacaaagctggttacaggt

SEQ ID NO: 76931 - DNA, 25 bp, Homo sapien
aaaagacacaaagctggttacaggt

SEQ ID NO: 76932 - DNA, 25 bp, Homo sapien
tcctcacattggacagggcatcaga

SEQ ID NO: 76933 - DNA, 25 bp, Homo sapien
gctgcttcagagcccctggcccatg

SEQ ID NO: 76934 - DNA, 25 bp, Homo sapien
taggcttccgcctgtgtcccagtct

SEQ ID NO: 76935 - DNA, 25 bp, Homo sapien
gtgtgaacacgaagttaagagtgag

SEQ ID NO: 76936 - DNA, 25 bp, Homo sapien
gcatcccaagggctcgccctccctt

SEQ ID NO: 76937 - DNA, 25 bp, Homo sapien
atcccagtatcccacccacagccca

SEQ ID NO: 76938 - DNA, 25 bp, Homo sapien
cagactccaagtggagtgtagggct

SEQ ID NO: 76939 - DNA, 25 bp, Homo sapien
ctggggtttccatggagtgtgaaca

SEQ ID NO: 76940 - DNA, 25 bp, Homo sapien
gagcctcctggatcaccgtatgtct

SEQ ID NO: 76941 - DNA, 25 bp, Homo sapien
tggcccatgtgtccatccagactcc

SEQ ID NO: 76942 - DNA, 25 bp, Homo sapien
gcatcccaagggctcgccctccctt

SEQ ID NO: 76943 - DNA, 25 bp, Homo sapien
tcctcacattggacagggcatcaga

SEQ ID NO: 76944 - DNA, 25 bp, Homo sapien
cagactccaagtggagtgtagggct

SEQ ID NO: 76945 - DNA, 25 bp, Homo sapien
tggcccatgtgtccatccagactcc

SEQ ID NO: 76946 - DNA, 25 bp, Homo sapien
gctgcttcagagcccctggcccatg

SEQ ID NO: 76947 - DNA, 25 bp, Homo sapien
gtgtgaacacgaagttaagagtgag

SEQ ID NO: 76948 - DNA, 25 bp, Homo sapien
ctggggtttccatggagtgtgaaca

SEQ ID NO: 76949 - DNA, 25 bp, Homo sapien
taggcttccgcctgtgtcccagtct

SEQ ID NO: 76950 - DNA, 25 bp, Homo sapien
gagcctcctggatcaccgtatgtct

SEQ ID NO: 76951 - DNA, 25 bp, Homo sapien
atcccagtatcccacccacagccca

SEQ ID NO: 76952 - DNA, 25 bp, Homo sapien
aaaagacacaaagctggttacaggt

SEQ ID NO: 76953 - DNA, 25 bp, Homo sapien
gtgtgaacacgaagttaagagtgag

SEQ ID NO: 76954 - DNA, 25 bp, Homo sapien
tcctcacattggacagggcatcaga

SEQ ID NO: 76955 - DNA, 25 bp, Homo sapien
gctgcttcagagcccctggcccatg

SEQ ID NO: 76956 - DNA, 25 bp, Homo sapien
taggcttccgcctgtgtcccagtct

SEQ ID NO: 76957 - DNA, 25 bp, Homo sapien
gcatcccaagggctcgccctccctt

SEQ ID NO: 76958 - DNA, 25 bp, Homo sapien
aaaagacacaaagctggttacaggt

SEQ ID NO: 76959 - DNA, 25 bp, Homo sapien
gagcctcctggatcaccgtatgtct

SEQ ID NO: 76960 - DNA, 25 bp, Homo sapien
tggcccatgtgtccatccagactcc

SEQ ID NO: 76961 - DNA, 25 bp, Homo sapien
cagactccaagtggagtgtagggct

SEQ ID NO: 76962 - DNA, 25 bp, Homo sapien
ctggggtttccatggagtgtgaaca

SEQ ID NO: 76963 - DNA, 25 bp, Homo sapien
atcccagtatcccacccacagccca

SEQ ID NO: 76964 - DNA, 25 bp, Homo sapien
gcatcccaagggctcgccctccctt

SEQ ID NO: 76965 - DNA, 25 bp, Homo sapien
tcctcacattggacagggcatcaga

SEQ ID NO: 76966 - DNA, 25 bp, Homo sapien
cagactccaagtggagtgtagggct

SEQ ID NO: 76967 - DNA, 25 bp, Homo sapien
tggcccatgtgtccatccagactcc

SEQ ID NO: 76968 - DNA, 25 bp, Homo sapien
gctgcttcagagcccctggcccatg

SEQ ID NO: 76969 - DNA, 25 bp, Homo sapien
gtgtgaacacgaagttaagagtgag

SEQ ID NO: 76970 - DNA, 25 bp, Homo sapien
ctggggtttccatggagtgtgaaca

SEQ ID NO: 76971 - DNA, 25 bp, Homo sapien
taggcttccgcctgtgtcccagtct

SEQ ID NO: 76972 - DNA, 25 bp, Homo sapien
gagcctcctggatcaccgtatgtct

SEQ ID NO: 76973 - DNA, 25 bp, Homo sapien
atcccagtatcccacccacagccca

SEQ ID NO: 76974 - DNA, 25 bp, Homo sapien
aaaagacacaaagctggttacaggt

SEQ ID NO: 76975 - DNA, 25 bp, Homo sapien
gcatcccaagggctcgccctccctt

SEQ ID NO: 76976 - DNA, 25 bp, Homo sapien
tcctcacattggacagggcatcaga

SEQ ID NO: 76977 - DNA, 25 bp, Homo sapien
cagactccaagtggagtgtagggct

SEQ ID NO: 76978 - DNA, 25 bp, Homo sapien
tggcccatgtgtccatccagactcc

SEQ ID NO: 76979 - DNA, 25 bp, Homo sapien
gctgcttcagagcccctggcccatg

SEQ ID NO: 76980 - DNA, 25 bp, Homo sapien
gtgtgaacacgaagttaagagtgag

SEQ ID NO: 76981 - DNA, 25 bp, Homo sapien
ctggggtttccatggagtgtgaaca

SEQ ID NO: 76982 - DNA, 25 bp, Homo sapien
taggcttccgcctgtgtcccagtct

SEQ ID NO: 76983 - DNA, 25 bp, Homo sapien
gagcctcctggatcaccgtatgtct

SEQ ID NO: 76984 - DNA, 25 bp, Homo sapien
atcccagtatcccacccacagccca

SEQ ID NO: 76985 - DNA, 25 bp, Homo sapien
aaaagacacaaagctggttacaggt

SEQ ID NO: 76986 - DNA, 25 bp, Homo sapien
atcccagtatcccacccacagccca

SEQ ID NO: 76987 - DNA, 25 bp, Homo sapien
cagactccaagtggagtgtagggct

SEQ ID NO: 76988 - DNA, 25 bp, Homo sapien
aaaagacacaaagctggttacaggt

SEQ ID NO: 76989 - DNA, 25 bp, Homo sapien
gcatcccaagggctcgccctccctt

SEQ ID NO: 76990 - DNA, 25 bp, Homo sapien
tcctcacattggacagggcatcaga

SEQ ID NO: 76991 - DNA, 25 bp, Homo sapien
gtgtgaacacgaagttaagagtgag

SEQ ID NO: 76992 - DNA, 25 bp, Homo sapien
gctgcttcagagcccctggcccatg

SEQ ID NO: 76993 - DNA, 25 bp, Homo sapien
tggcccatgtgtccatccagactcc

SEQ ID NO: 76994 - DNA, 25 bp, Homo sapien
ctggggtttccatggagtgtgaaca

SEQ ID NO: 76995 - DNA, 25 bp, Homo sapien
gagcctcctggatcaccgtatgtct

SEQ ID NO: 76996 - DNA, 25 bp, Homo sapien
taggcttccgcctgtgtcccagtct

SEQ ID NO: 76997 - DNA, 25 bp, Homo sapien
gcatcccaagggctcgccctccctt

SEQ ID NO: 76998 - DNA, 25 bp, Homo sapien
tcctcacattggacagggcatcaga

SEQ ID NO: 76999 - DNA, 25 bp, Homo sapien
cagactccaagtggagtgtagggct

SEQ ID NO: 77000 - DNA, 25 bp, Homo sapien
tggcccatgtgtccatccagactcc

SEQ ID NO: 77001 - DNA, 25 bp, Homo sapien
gctgcttcagagcccctggcccatg

SEQ ID NO: 77002 - DNA, 25 bp, Homo sapien
gtgtgaacacgaagttaagagtgag

SEQ ID NO: 77003 - DNA, 25 bp, Homo sapien
ctggggtttccatggagtgtgaaca

SEQ ID NO: 77004 - DNA, 25 bp, Homo sapien
taggcttccgcctgtgtcccagtct

SEQ ID NO: 77005 - DNA, 25 bp, Homo sapien
gagcctcctggatcaccgtatgtct

SEQ ID NO: 77006 - DNA, 25 bp, Homo sapien
atcccagtatcccacccacagccca

SEQ ID NO: 77007 - DNA, 25 bp, Homo sapien
aaaagacacaaagctggttacaggt

SEQ ID NO: 77008 - DNA, 25 bp, Homo sapien
gtgtgaacacgaagttaagagtgag

SEQ ID NO: 77009 - DNA, 25 bp, Homo sapien
gcatcccaagggctcgccctccctt

SEQ ID NO: 77010 - DNA, 25 bp, Homo sapien
gctgcttcagagcccctggcccatg

SEQ ID NO: 77011 - DNA, 25 bp, Homo sapien
tggcccatgtgtccatccagactcc

SEQ ID NO: 77012 - DNA, 25 bp, Homo sapien
gagcctcctggatcaccgtatgtct

SEQ ID NO: 77013 - DNA, 25 bp, Homo sapien
cagactccaagtggagtgtagggct

SEQ ID NO: 77014 - DNA, 25 bp, Homo sapien
atcccagtatcccacccacagccca

SEQ ID NO: 77015 - DNA, 25 bp, Homo sapien
tcctcacattggacagggcatcaga

SEQ ID NO: 77016 - DNA, 25 bp, Homo sapien
taggcttccgcctgtgtcccagtct

SEQ ID NO: 77017 - DNA, 25 bp, Homo sapien
ctggggtttccatggagtgtgaaca

SEQ ID NO: 77018 - DNA, 25 bp, Homo sapien
aaaagacacaaagctggttacaggt

SEQ ID NO: 77019 - DNA, 25 bp, Homo sapien
gcatcccaagggctcgccctccctt

SEQ ID NO: 77020 - DNA, 25 bp, Homo sapien
tcctcacattggacagggcatcaga

SEQ ID NO: 77021 - DNA, 25 bp, Homo sapien
cagactccaagtggagtgtagggct

SEQ ID NO: 77022 - DNA, 25 bp, Homo sapien
tggcccatgtgtccatccagactcc

SEQ ID NO: 77023 - DNA, 25 bp, Homo sapien
gctgcttcagagcccctggcccatg

SEQ ID NO: 77024 - DNA, 25 bp, Homo sapien
gtgtgaacacgaagttaagagtgag

SEQ ID NO: 77025 - DNA, 25 bp, Homo sapien
ctggggtttccatggagtgtgaaca

SEQ ID NO: 77026 - DNA, 25 bp, Homo sapien
taggcttccgcctgtgtcccagtct

SEQ ID NO: 77027 - DNA, 25 bp, Homo sapien
gagcctcctggatcaccgtatgtct

SEQ ID NO: 77028 - DNA, 25 bp, Homo sapien
atcccagtatcccacccacagccca

SEQ ID NO: 77029 - DNA, 25 bp, Homo sapien
aaaagacacaaagctggttacaggt

SEQ ID NO: 77030 - DNA, 25 bp, Homo sapien
aaaagacacaaagctggttacaggt

SEQ ID NO: 77031 - DNA, 25 bp, Homo sapien
cagactccaagtggagtgtagggct

SEQ ID NO: 77032 - DNA, 25 bp, Homo sapien
gagcctcctggatcaccgtatgtct

SEQ ID NO: 77033 - DNA, 25 bp, Homo sapien
gctgcttcagagcccctggcccatg

SEQ ID NO: 77034 - DNA, 25 bp, Homo sapien
tggcccatgtgtccatccagactcc

SEQ ID NO: 77035 - DNA, 25 bp, Homo sapien
gcatcccaagggctcgccctccctt

SEQ ID NO: 77036 - DNA, 25 bp, Homo sapien
ctggggtttccatggagtgtgaaca

SEQ ID NO: 77037 - DNA, 25 bp, Homo sapien
gtgtgaacacgaagttaagagtgag

SEQ ID NO: 77038 - DNA, 25 bp, Homo sapien
atcccagtatcccacccacagccca

SEQ ID NO: 77039 - DNA, 25 bp, Homo sapien
taggcttccgcctgtgtcccagtct

SEQ ID NO: 77040 - DNA, 25 bp, Homo sapien
tcctcacattggacagggcatcaga

SEQ ID NO: 77041 - DNA, 25 bp, Homo sapien
gcatcccaagggctcgccctccctt

SEQ ID NO: 77042 - DNA, 25 bp, Homo sapien
tcctcacattggacagggcatcaga

SEQ ID NO: 77043 - DNA, 25 bp, Homo sapien
cagactccaagtggagtgtagggct

SEQ ID NO: 77044 - DNA, 25 bp, Homo sapien
tggcccatgtgtccatccagactcc

SEQ ID NO: 77045 - DNA, 25 bp, Homo sapien
gctgcttcagagcccctggcccatg

SEQ ID NO: 77046 - DNA, 25 bp, Homo sapien
gtgtgaacacgaagttaagagtgag

SEQ ID NO: 77047 - DNA, 25 bp, Homo sapien
ctggggtttccatggagtgtgaaca

SEQ ID NO: 77048 - DNA, 25 bp, Homo sapien
taggcttccgcctgtgtcccagtct

SEQ ID NO: 77049 - DNA, 25 bp, Homo sapien
gagcctcctggatcaccgtatgtct

SEQ ID NO: 77050 - DNA, 25 bp, Homo sapien
atcccagtatcccacccacagccca

SEQ ID NO: 77051 - DNA, 25 bp, Homo sapien
aaaagacacaaagctggttacaggt

SEQ ID NO: 77052 - DNA, 25 bp, Homo sapien
cagactccaagtggagtgtagggct

SEQ ID NO: 77053 - DNA, 25 bp, Homo sapien
tggcccatgtgtccatccagactcc

SEQ ID NO: 77054 - DNA, 25 bp, Homo sapien
gagcctcctggatcaccgtatgtct

SEQ ID NO: 77055 - DNA, 25 bp, Homo sapien
aaaagacacaaagctggttacaggt

SEQ ID NO: 77056 - DNA, 25 bp, Homo sapien
tcctcacattggacagggcatcaga

SEQ ID NO: 77057 - DNA, 25 bp, Homo sapien
gtgtgaacacgaagttaagagtgag

SEQ ID NO: 77058 - DNA, 25 bp, Homo sapien
taggcttccgcctgtgtcccagtct

SEQ ID NO: 77059 - DNA, 25 bp, Homo sapien
ctggggtttccatggagtgtgaaca

SEQ ID NO: 77060 - DNA, 25 bp, Homo sapien
gcatcccaagggctcgccctccctt

SEQ ID NO: 77061 - DNA, 25 bp, Homo sapien
gctgcttcagagcccctggcccatg

SEQ ID NO: 77062 - DNA, 25 bp, Homo sapien
atcccagtatcccacccacagccca

SEQ ID NO: 77063 - DNA, 25 bp, Homo sapien
gcatcccaagggctcgccctccctt

SEQ ID NO: 77064 - DNA, 25 bp, Homo sapien
tcctcacattggacagggcatcaga

SEQ ID NO: 77065 - DNA, 25 bp, Homo sapien
cagactccaagtggagtgtagggct

SEQ ID NO: 77066 - DNA, 25 bp, Homo sapien
tggcccatgtgtccatccagactcc

SEQ ID NO: 77067 - DNA, 25 bp, Homo sapien
gctgcttcagagcccctggcccatg

SEQ ID NO: 77068 - DNA, 25 bp, Homo sapien
gtgtgaacacgaagttaagagtgag

SEQ ID NO: 77069 - DNA, 25 bp, Homo sapien
ctggggtttccatggagtgtgaaca

SEQ ID NO: 77070 - DNA, 25 bp, Homo sapien
taggcttccgcctgtgtcccagtct

SEQ ID NO: 77071 - DNA, 25 bp, Homo sapien
gagcctcctggatcaccgtatgtct

SEQ ID NO: 77072 - DNA, 25 bp, Homo sapien
atcccagtatcccacccacagccca

SEQ ID NO: 77073 - DNA, 25 bp, Homo sapien
aaaagacacaaagctggttacaggt

SEQ ID NO: 77074 - DNA, 25 bp, Homo sapien
atcccagtatcccacccacagccca

SEQ ID NO: 77075 - DNA, 25 bp, Homo sapien
gagcctcctggatcaccgtatgtct

SEQ ID NO: 77076 - DNA, 25 bp, Homo sapien
gctgcttcagagcccctggcccatg

SEQ ID NO: 77077 - DNA, 25 bp, Homo sapien
cagactccaagtggagtgtagggct

SEQ ID NO: 77078 - DNA, 25 bp, Homo sapien
taggcttccgcctgtgtcccagtct

SEQ ID NO: 77079 - DNA, 25 bp, Homo sapien
aaaagacacaaagctggttacaggt

SEQ ID NO: 77080 - DNA, 25 bp, Homo sapien
ctggggtttccatggagtgtgaaca

SEQ ID NO: 77081 - DNA, 25 bp, Homo sapien
tggcccatgtgtccatccagactcc

SEQ ID NO: 77082 - DNA, 25 bp, Homo sapien
tcctcacattggacagggcatcaga

SEQ ID NO: 77083 - DNA, 25 bp, Homo sapien
gtgtgaacacgaagttaagagtgag

SEQ ID NO: 77084 - DNA, 25 bp, Homo sapien
gcatcccaagggctcgccctccctt

SEQ ID NO: 77085 - DNA, 25 bp, Homo sapien
tcctcacattggacagggcatcaga

SEQ ID NO: 77086 - DNA, 25 bp, Homo sapien
atcccagtatcccacccacagccca

SEQ ID NO: 77087 - DNA, 25 bp, Homo sapien
gcatcccaagggctcgccctccctt

SEQ ID NO: 77088 - DNA, 25 bp, Homo sapien
tggcccatgtgtccatccagactcc

SEQ ID NO: 77089 - DNA, 25 bp, Homo sapien
gctgcttcagagcccctggcccatg

SEQ ID NO: 77090 - DNA, 25 bp, Homo sapien
aaaagacacaaagctggttacaggt

SEQ ID NO: 77091 - DNA, 25 bp, Homo sapien
cagactccaagtggagtgtagggct

SEQ ID NO: 77092 - DNA, 25 bp, Homo sapien
gtgtgaacacgaagttaagagtgag

SEQ ID NO: 77093 - DNA, 25 bp, Homo sapien
taggcttccgcctgtgtcccagtct

SEQ ID NO: 77094 - DNA, 25 bp, Homo sapien
ctggggtttccatggagtgtgaaca

SEQ ID NO: 77095 - DNA, 25 bp, Homo sapien
gagcctcctggatcaccgtatgtct

SEQ ID NO: 77096 - DNA, 25 bp, Homo sapien
gcatcccaagggctcgccctccctt

SEQ ID NO: 77097 - DNA, 25 bp, Homo sapien
tcctcacattggacagggcatcaga

SEQ ID NO: 77098 - DNA, 25 bp, Homo sapien
cagactccaagtggagtgtagggct

SEQ ID NO: 77099 - DNA, 25 bp, Homo sapien
tggcccatgtgtccatccagactcc

SEQ ID NO: 77100 - DNA, 25 bp, Homo sapien
gctgcttcagagcccctggcccatg

SEQ ID NO: 77101 - DNA, 25 bp, Homo sapien
gtgtgaacacgaagttaagagtgag

SEQ ID NO: 77102 - DNA, 25 bp, Homo sapien
ctggggtttccatggagtgtgaaca

SEQ ID NO: 77103 - DNA, 25 bp, Homo sapien
taggcttccgcctgtgtcccagtct

SEQ ID NO: 77104 - DNA, 25 bp, Homo sapien
gagcctcctggatcaccgtatgtct

SEQ ID NO: 77105 - DNA, 25 bp, Homo sapien
atcccagtatcccacccacagccca

SEQ ID NO: 77106 - DNA, 25 bp, Homo sapien
aaaagacacaaagctggttacaggt

SEQ ID NO: 77107 - DNA, 25 bp, Homo sapien
atcccagtatcccacccacagccca

SEQ ID NO: 77108 - DNA, 25 bp, Homo sapien
gcatcccaagggctcgccctccctt

SEQ ID NO: 77109 - DNA, 25 bp, Homo sapien
tcctcacattggacagggcatcaga

SEQ ID NO: 77110 - DNA, 25 bp, Homo sapien
cagactccaagtggagtgtagggct

SEQ ID NO: 77111 - DNA, 25 bp, Homo sapien
ctggggtttccatggagtgtgaaca

SEQ ID NO: 77112 - DNA, 25 bp, Homo sapien
aaaagacacaaagctggttacaggt

SEQ ID NO: 77113 - DNA, 25 bp, Homo sapien
gagcctcctggatcaccgtatgtct

SEQ ID NO: 77114 - DNA, 25 bp, Homo sapien
taggcttccgcctgtgtcccagtct

SEQ ID NO: 77115 - DNA, 25 bp, Homo sapien
gtgtgaacacgaagttaagagtgag

SEQ ID NO: 77116 - DNA, 25 bp, Homo sapien
tggcccatgtgtccatccagactcc

SEQ ID NO: 77117 - DNA, 25 bp, Homo sapien
gctgcttcagagcccctggcccatg

SEQ ID NO: 77118 - DNA, 25 bp, Homo sapien
gcatcccaagggctcgccctccctt

SEQ ID NO: 77119 - DNA, 25 bp, Homo sapien
tcctcacattggacagggcatcaga

SEQ ID NO: 77120 - DNA, 25 bp, Homo sapien
cagactccaagtggagtgtagggct

SEQ ID NO: 77121 - DNA, 25 bp, Homo sapien
tggcccatgtgtccatccagactcc

SEQ ID NO: 77122 - DNA, 25 bp, Homo sapien
gctgcttcagagcccctggcccatg

SEQ ID NO: 77123 - DNA, 25 bp, Homo sapien
gtgtgaacacgaagttaagagtgag

SEQ ID NO: 77124 - DNA, 25 bp, Homo sapien
ctggggtttccatggagtgtgaaca

SEQ ID NO: 77125 - DNA, 25 bp, Homo sapien
taggcttccgcctgtgtcccagtct

SEQ ID NO: 77126 - DNA, 25 bp, Homo sapien
gagcctcctggatcaccgtatgtct

SEQ ID NO: 77127 - DNA, 25 bp, Homo sapien
atcccagtatcccacccacagccca

SEQ ID NO: 77128 - DNA, 25 bp, Homo sapien
aaaagacacaaagctggttacaggt

SEQ ID NO: 77129 - DNA, 25 bp, Homo sapien
atcccagtatcccacccacagccca

SEQ ID NO: 77130 - DNA, 25 bp, Homo sapien
gagcctcctggatcaccgtatgtct

SEQ ID NO: 77131 - DNA, 25 bp, Homo sapien
gctgcttcagagcccctggcccatg

SEQ ID NO: 77132 - DNA, 25 bp, Homo sapien
cagactccaagtggagtgtagggct

SEQ ID NO: 77133 - DNA, 25 bp, Homo sapien
aaaagacacaaagctggttacaggt

SEQ ID NO: 77134 - DNA, 25 bp, Homo sapien
tggcccatgtgtccatccagactcc

SEQ ID NO: 77135 - DNA, 25 bp, Homo sapien
taggcttccgcctgtgtcccagtct

SEQ ID NO: 77136 - DNA, 25 bp, Homo sapien
gtgtgaacacgaagttaagagtgag

SEQ ID NO: 77137 - DNA, 25 bp, Homo sapien
tcctcacattggacagggcatcaga

SEQ ID NO: 77138 - DNA, 25 bp, Homo sapien
gcatcccaagggctcgccctccctt

SEQ ID NO: 77139 - DNA, 25 bp, Homo sapien
ctggggtttccatggagtgtgaaca

SEQ ID NO: 77140 - DNA, 25 bp, Homo sapien
gcatcccaagggctcgccctccctt

SEQ ID NO: 77141 - DNA, 25 bp, Homo sapien
tcctcacattggacagggcatcaga

SEQ ID NO: 77142 - DNA, 25 bp, Homo sapien
cagactccaagtggagtgtagggct

SEQ ID NO: 77143 - DNA, 25 bp, Homo sapien
tggcccatgtgtccatccagactcc

SEQ ID NO: 77144 - DNA, 25 bp, Homo sapien
gctgcttcagagcccctggcccatg

SEQ ID NO: 77145 - DNA, 25 bp, Homo sapien
gtgtgaacacgaagttaagagtgag

SEQ ID NO: 77146 - DNA, 25 bp, Homo sapien
ctggggtttccatggagtgtgaaca

SEQ ID NO: 77147 - DNA, 25 bp, Homo sapien
taggcttccgcctgtgtcccagtct

SEQ ID NO: 77148 - DNA, 25 bp, Homo sapien
gagcctcctggatcaccgtatgtct

SEQ ID NO: 77149 - DNA, 25 bp, Homo sapien
atcccagtatcccacccacagccca

SEQ ID NO: 77150 - DNA, 25 bp, Homo sapien
aaaagacacaaagctggttacaggt

SEQ ID NO: 77151 - DNA, 25 bp, Homo sapien
tagcctcgtcacagtgctgctggtc

SEQ ID NO: 77152 - DNA, 25 bp, Homo sapien
ctgccttatttaaacctgggccgag

SEQ ID NO: 77153 - DNA, 25 bp, Homo sapien
ctctgaggccaaaaacgcatcatac

SEQ ID NO: 77154 - DNA, 25 bp, Homo sapien
ctggggatcatagttcttcaagctg

SEQ ID NO: 77155 - DNA, 25 bp, Homo sapien
gcgcttgtccttctggggatcatag

SEQ ID NO: 77156 - DNA, 25 bp, Homo sapien
gttgagttttttcagcgcctcgatg

SEQ ID NO: 77157 - DNA, 25 bp, Homo sapien
gtggaatctgcttgatcagagactc

SEQ ID NO: 77158 - DNA, 25 bp, Homo sapien
gatcagagactctgaggccaaaaac

SEQ ID NO: 77159 - DNA, 25 bp, Homo sapien
gccgaggattcgtggaatctgcttg

SEQ ID NO: 77160 - DNA, 25 bp, Homo sapien
ggggatatccacggccttagcctcg

SEQ ID NO: 77161 - DNA, 25 bp, Homo sapien
atgttttcgttgtgtgtgagcaggg

SEQ ID NO: 77162 - DNA, 25 bp, Homo sapien
gttgagttttttcagcgcctcgatg

SEQ ID NO: 77163 - DNA, 25 bp, Homo sapien
ctctgaggccaaaaacgcatcatac

SEQ ID NO: 77164 - DNA, 25 bp, Homo sapien
gatcagagactctgaggccaaaaac

SEQ ID NO: 77165 - DNA, 25 bp, Homo sapien
gtggaatctgcttgatcagagactc

SEQ ID NO: 77166 - DNA, 25 bp, Homo sapien
gccgaggattcgtggaatctgcttg

SEQ ID NO: 77167 - DNA, 25 bp, Homo sapien
ctgccttatttaaacctgggccgag

SEQ ID NO: 77168 - DNA, 25 bp, Homo sapien
atgttttcgttgtgtgtgagcaggg

SEQ ID NO: 77169 - DNA, 25 bp, Homo sapien
ctggggatcatagttcttcaagctg

SEQ ID NO: 77170 - DNA, 25 bp, Homo sapien
gcgcttgtccttctggggatcatag

SEQ ID NO: 77171 - DNA, 25 bp, Homo sapien
tagcctcgtcacagtgctgctggtc

SEQ ID NO: 77172 - DNA, 25 bp, Homo sapien
ggggatatccacggccttagcctcg

SEQ ID NO: 77173 - DNA, 25 bp, Homo sapien
gatcagagactctgaggccaaaaac

SEQ ID NO: 77174 - DNA, 25 bp, Homo sapien
ggggatatccacggccttagcctcg

SEQ ID NO: 77175 - DNA, 25 bp, Homo sapien
gccgaggattcgtggaatctgcttg

SEQ ID NO: 77176 - DNA, 25 bp, Homo sapien
ctggggatcatagttcttcaagctg

SEQ ID NO: 77177 - DNA, 25 bp, Homo sapien
gtggaatctgcttgatcagagactc

SEQ ID NO: 77178 - DNA, 25 bp, Homo sapien
tagcctcgtcacagtgctgctggtc

SEQ ID NO: 77179 - DNA, 25 bp, Homo sapien
atgttttcgttgtgtgtgagcaggg

SEQ ID NO: 77180 - DNA, 25 bp, Homo sapien
ctgccttatttaaacctgggccgag

SEQ ID NO: 77181 - DNA, 25 bp, Homo sapien
gttgagttttttcagcgcctcgatg

SEQ ID NO: 77182 - DNA, 25 bp, Homo sapien
gcgcttgtccttctggggatcatag

SEQ ID NO: 77183 - DNA, 25 bp, Homo sapien
ctctgaggccaaaaacgcatcatac

SEQ ID NO: 77184 - DNA, 25 bp, Homo sapien
ctggggatcatagttcttcaagctg

SEQ ID NO: 77185 - DNA, 25 bp, Homo sapien
gcgcttgtccttctggggatcatag

SEQ ID NO: 77186 - DNA, 25 bp, Homo sapien
tagcctcgtcacagtgctgctggtc

SEQ ID NO: 77187 - DNA, 25 bp, Homo sapien
ggggatatccacggccttagcctcg

SEQ ID NO: 77188 - DNA, 25 bp, Homo sapien
gttgagttttttcagcgcctcgatg

SEQ ID NO: 77189 - DNA, 25 bp, Homo sapien
ctctgaggccaaaaacgcatcatac

SEQ ID NO: 77190 - DNA, 25 bp, Homo sapien
gatcagagactctgaggccaaaaac

SEQ ID NO: 77191 - DNA, 25 bp, Homo sapien
gtggaatctgcttgatcagagactc

SEQ ID NO: 77192 - DNA, 25 bp, Homo sapien
gccgaggattcgtggaatctgcttg

SEQ ID NO: 77193 - DNA, 25 bp, Homo sapien
ctgccttatttaaacctgggccgag

SEQ ID NO: 77194 - DNA, 25 bp, Homo sapien
atgttttcgttgtgtgtgagcaggg

SEQ ID NO: 77195 - DNA, 25 bp, Homo sapien
gccgaggattcgtggaatctgcttg

SEQ ID NO: 77196 - DNA, 25 bp, Homo sapien
ctgccttatttaaacctgggccgag

SEQ ID NO: 77197 - DNA, 25 bp, Homo sapien
ctctgaggccaaaaacgcatcatac

SEQ ID NO: 77198 - DNA, 25 bp, Homo sapien
gatcagagactctgaggccaaaaac

SEQ ID NO: 77199 - DNA, 25 bp, Homo sapien
gcgcttgtccttctggggatcatag

SEQ ID NO: 77200 - DNA, 25 bp, Homo sapien
ggggatatccacggccttagcctcg

SEQ ID NO: 77201 - DNA, 25 bp, Homo sapien
gttgagttttttcagcgcctcgatg

SEQ ID NO: 77202 - DNA, 25 bp, Homo sapien
gtggaatctgcttgatcagagactc

SEQ ID NO: 77203 - DNA, 25 bp, Homo sapien
ctggggatcatagttcttcaagctg

SEQ ID NO: 77204 - DNA, 25 bp, Homo sapien
atgttttcgttgtgtgtgagcaggg

SEQ ID NO: 77205 - DNA, 25 bp, Homo sapien
tagcctcgtcacagtgctgctggtc

SEQ ID NO: 77206 - DNA, 25 bp, Homo sapien
gttgagttttttcagcgcctcgatg

SEQ ID NO: 77207 - DNA, 25 bp, Homo sapien
ctctgaggccaaaaacgcatcatac

SEQ ID NO: 77208 - DNA, 25 bp, Homo sapien
gatcagagactctgaggccaaaaac

SEQ ID NO: 77209 - DNA, 25 bp, Homo sapien
gtggaatctgcttgatcagagactc

SEQ ID NO: 77210 - DNA, 25 bp, Homo sapien
gccgaggattcgtggaatctgcttg

SEQ ID NO: 77211 - DNA, 25 bp, Homo sapien
ctgccttatttaaacctgggccgag

SEQ ID NO: 77212 - DNA, 25 bp, Homo sapien
atgttttcgttgtgtgtgagcaggg

SEQ ID NO: 77213 - DNA, 25 bp, Homo sapien
ctggggatcatagttcttcaagctg

SEQ ID NO: 77214 - DNA, 25 bp, Homo sapien
gcgcttgtccttctggggatcatag

SEQ ID NO: 77215 - DNA, 25 bp, Homo sapien
tagcctcgtcacagtgctgctggtc

SEQ ID NO: 77216 - DNA, 25 bp, Homo sapien
ggggatatccacggccttagcctcg

SEQ ID NO: 77217 - DNA, 25 bp, Homo sapien
gttgagttttttcagcgcctcgatg

SEQ ID NO: 77218 - DNA, 25 bp, Homo sapien
ctctgaggccaaaaacgcatcatac

SEQ ID NO: 77219 - DNA, 25 bp, Homo sapien
gatcagagactctgaggccaaaaac

SEQ ID NO: 77220 - DNA, 25 bp, Homo sapien
gtggaatctgcttgatcagagactc

SEQ ID NO: 77221 - DNA, 25 bp, Homo sapien
gccgaggattcgtggaatctgcttg

SEQ ID NO: 77222 - DNA, 25 bp, Homo sapien
ctgccttatttaaacctgggccgag

SEQ ID NO: 77223 - DNA, 25 bp, Homo sapien
atgttttcgttgtgtgtgagcaggg

SEQ ID NO: 77224 - DNA, 25 bp, Homo sapien
ctggggatcatagttcttcaagctg

SEQ ID NO: 77225 - DNA, 25 bp, Homo sapien
gcgcttgtccttctggggatcatag

SEQ ID NO: 77226 - DNA, 25 bp, Homo sapien
tagcctcgtcacagtgctgctggtc

SEQ ID NO: 77227 - DNA, 25 bp, Homo sapien
ggggatatccacggccttagcctcg

SEQ ID NO: 77228 - DNA, 25 bp, Homo sapien
gttgagttttttcagcgcctcgatg

SEQ ID NO: 77229 - DNA, 25 bp, Homo sapien
ctggggatcatagttcttcaagctg

SEQ ID NO: 77230 - DNA, 25 bp, Homo sapien
gcgcttgtccttctggggatcatag

SEQ ID NO: 77231 - DNA, 25 bp, Homo sapien
atgttttcgttgtgtgtgagcaggg

SEQ ID NO: 77232 - DNA, 25 bp, Homo sapien
gccgaggattcgtggaatctgcttg

SEQ ID NO: 77233 - DNA, 25 bp, Homo sapien
gatcagagactctgaggccaaaaac

SEQ ID NO: 77234 - DNA, 25 bp, Homo sapien
gtggaatctgcttgatcagagactc

SEQ ID NO: 77235 - DNA, 25 bp, Homo sapien
ctgccttatttaaacctgggccgag

SEQ ID NO: 77236 - DNA, 25 bp, Homo sapien
tagcctcgtcacagtgctgctggtc

SEQ ID NO: 77237 - DNA, 25 bp, Homo sapien
ctctgaggccaaaaacgcatcatac

SEQ ID NO: 77238 - DNA, 25 bp, Homo sapien
ggggatatccacggccttagcctcg

SEQ ID NO: 77239 - DNA, 25 bp, Homo sapien
gttgagttttttcagcgcctcgatg

SEQ ID NO: 77240 - DNA, 25 bp, Homo sapien
ctctgaggccaaaaacgcatcatac

SEQ ID NO: 77241 - DNA, 25 bp, Homo sapien
gatcagagactctgaggccaaaaac

SEQ ID NO: 77242 - DNA, 25 bp, Homo sapien
gtggaatctgcttgatcagagactc

SEQ ID NO: 77243 - DNA, 25 bp, Homo sapien
gccgaggattcgtggaatctgcttg

SEQ ID NO: 77244 - DNA, 25 bp, Homo sapien
ctgccttatttaaacctgggccgag

SEQ ID NO: 77245 - DNA, 25 bp, Homo sapien
atgttttcgttgtgtgtgagcaggg

SEQ ID NO: 77246 - DNA, 25 bp, Homo sapien
ctggggatcatagttcttcaagctg

SEQ ID NO: 77247 - DNA, 25 bp, Homo sapien
gcgcttgtccttctggggatcatag

SEQ ID NO: 77248 - DNA, 25 bp, Homo sapien
tagcctcgtcacagtgctgctggtc

SEQ ID NO: 77249 - DNA, 25 bp, Homo sapien
ggggatatccacggccttagcctcg

SEQ ID NO: 77250 - DNA, 25 bp, Homo sapien
gatcagagactctgaggccaaaaac

SEQ ID NO: 77251 - DNA, 25 bp, Homo sapien
ctctgaggccaaaaacgcatcatac

SEQ ID NO: 77252 - DNA, 25 bp, Homo sapien
tagcctcgtcacagtgctgctggtc

SEQ ID NO: 77253 - DNA, 25 bp, Homo sapien
gttgagttttttcagcgcctcgatg

SEQ ID NO: 77254 - DNA, 25 bp, Homo sapien
atgttttcgttgtgtgtgagcaggg

SEQ ID NO: 77255 - DNA, 25 bp, Homo sapien
ggggatatccacggccttagcctcg

SEQ ID NO: 77256 - DNA, 25 bp, Homo sapien
ctgccttatttaaacctgggccgag

SEQ ID NO: 77257 - DNA, 25 bp, Homo sapien
ctggggatcatagttcttcaagctg

SEQ ID NO: 77258 - DNA, 25 bp, Homo sapien
gcgcttgtccttctggggatcatag

SEQ ID NO: 77259 - DNA, 25 bp, Homo sapien
gtggaatctgcttgatcagagactc

SEQ ID NO: 77260 - DNA, 25 bp, Homo sapien
gccgaggattcgtggaatctgcttg

SEQ ID NO: 77261 - DNA, 25 bp, Homo sapien
gttgagttttttcagcgcctcgatg

SEQ ID NO: 77262 - DNA, 25 bp, Homo sapien
ctctgaggccaaaaacgcatcatac

SEQ ID NO: 77263 - DNA, 25 bp, Homo sapien
gatcagagactctgaggccaaaaac

SEQ ID NO: 77264 - DNA, 25 bp, Homo sapien
gtggaatctgcttgatcagagactc

SEQ ID NO: 77265 - DNA, 25 bp, Homo sapien
gccgaggattcgtggaatctgcttg

SEQ ID NO: 77266 - DNA, 25 bp, Homo sapien
ctgccttatttaaacctgggccgag

SEQ ID NO: 77267 - DNA, 25 bp, Homo sapien
atgttttcgttgtgtgtgagcaggg

SEQ ID NO: 77268 - DNA, 25 bp, Homo sapien
ctggggatcatagttcttcaagctg

SEQ ID NO: 77269 - DNA, 25 bp, Homo sapien
gcgcttgtccttctggggatcatag

SEQ ID NO: 77270 - DNA, 25 bp, Homo sapien
tagcctcgtcacagtgctgctggtc

SEQ ID NO: 77271 - DNA, 25 bp, Homo sapien
ggggatatccacggccttagcctcg

SEQ ID NO: 77272 - DNA, 25 bp, Homo sapien
gttgagttttttcagcgcctcgatg

SEQ ID NO: 77273 - DNA, 25 bp, Homo sapien
gatcagagactctgaggccaaaaac

SEQ ID NO: 77274 - DNA, 25 bp, Homo sapien
gccgaggattcgtggaatctgcttg

SEQ ID NO: 77275 - DNA, 25 bp, Homo sapien
tagcctcgtcacagtgctgctggtc

SEQ ID NO: 77276 - DNA, 25 bp, Homo sapien
ggggatatccacggccttagcctcg

SEQ ID NO: 77277 - DNA, 25 bp, Homo sapien
ctgccttatttaaacctgggccgag

SEQ ID NO: 77278 - DNA, 25 bp, Homo sapien
atgttttcgttgtgtgtgagcaggg

SEQ ID NO: 77279 - DNA, 25 bp, Homo sapien
ctctgaggccaaaaacgcatcatac

SEQ ID NO: 77280 - DNA, 25 bp, Homo sapien
ctggggatcatagttcttcaagctg

SEQ ID NO: 77281 - DNA, 25 bp, Homo sapien
gtggaatctgcttgatcagagactc

SEQ ID NO: 77282 - DNA, 25 bp, Homo sapien
gcgcttgtccttctggggatcatag

SEQ ID NO: 77283 - DNA, 25 bp, Homo sapien
gttgagttttttcagcgcctcgatg

SEQ ID NO: 77284 - DNA, 25 bp, Homo sapien
ctctgaggccaaaaacgcatcatac

SEQ ID NO: 77285 - DNA, 25 bp, Homo sapien
gatcagagactctgaggccaaaaac

SEQ ID NO: 77286 - DNA, 25 bp, Homo sapien
gtggaatctgcttgatcagagactc

SEQ ID NO: 77287 - DNA, 25 bp, Homo sapien
gccgaggattcgtggaatctgcttg

SEQ ID NO: 77288 - DNA, 25 bp, Homo sapien
ctgccttatttaaacctgggccgag

SEQ ID NO: 77289 - DNA, 25 bp, Homo sapien
atgttttcgttgtgtgtgagcaggg

SEQ ID NO: 77290 - DNA, 25 bp, Homo sapien
ctggggatcatagttcttcaagctg

SEQ ID NO: 77291 - DNA, 25 bp, Homo sapien
gcgcttgtccttctggggatcatag

SEQ ID NO: 77292 - DNA, 25 bp, Homo sapien
tagcctcgtcacagtgctgctggtc

SEQ ID NO: 77293 - DNA, 25 bp, Homo sapien
ggggatatccacggccttagcctcg

SEQ ID NO: 77294 - DNA, 25 bp, Homo sapien
tagcctcgtcacagtgctgctggtc

SEQ ID NO: 77295 - DNA, 25 bp, Homo sapien
ctctgaggccaaaaacgcatcatac

SEQ ID NO: 77296 - DNA, 25 bp, Homo sapien
gtggaatctgcttgatcagagactc

SEQ ID NO: 77297 - DNA, 25 bp, Homo sapien
gatcagagactctgaggccaaaaac

SEQ ID NO: 77298 - DNA, 25 bp, Homo sapien
gttgagttttttcagcgcctcgatg

SEQ ID NO: 77299 - DNA, 25 bp, Homo sapien
ctggggatcatagttcttcaagctg

SEQ ID NO: 77300 - DNA, 25 bp, Homo sapien
ggggatatccacggccttagcctcg

SEQ ID NO: 77301 - DNA, 25 bp, Homo sapien
gcgcttgtccttctggggatcatag

SEQ ID NO: 77302 - DNA, 25 bp, Homo sapien
gccgaggattcgtggaatctgcttg

SEQ ID NO: 77303 - DNA, 25 bp, Homo sapien
atgttttcgttgtgtgtgagcaggg

SEQ ID NO: 77304 - DNA, 25 bp, Homo sapien
ctgccttatttaaacctgggccgag

SEQ ID NO: 77305 - DNA, 25 bp, Homo sapien
gttgagttttttcagcgcctcgatg

SEQ ID NO: 77306 - DNA, 25 bp, Homo sapien
ctctgaggccaaaaacgcatcatac

SEQ ID NO: 77307 - DNA, 25 bp, Homo sapien
gatcagagactctgaggccaaaaac

SEQ ID NO: 77308 - DNA, 25 bp, Homo sapien
gtggaatctgcttgatcagagactc

SEQ ID NO: 77309 - DNA, 25 bp, Homo sapien
gccgaggattcgtggaatctgcttg

SEQ ID NO: 77310 - DNA, 25 bp, Homo sapien
ctgccttatttaaacctgggccgag

SEQ ID NO: 77311 - DNA, 25 bp, Homo sapien
atgttttcgttgtgtgtgagcaggg

SEQ ID NO: 77312 - DNA, 25 bp, Homo sapien
ctggggatcatagttcttcaagctg

SEQ ID NO: 77313 - DNA, 25 bp, Homo sapien
gcgcttgtccttctggggatcatag

SEQ ID NO: 77314 - DNA, 25 bp, Homo sapien
tagcctcgtcacagtgctgctggtc

SEQ ID NO: 77315 - DNA, 25 bp, Homo sapien
ggggatatccacggccttagcctcg

SEQ ID NO: 77316 - DNA, 25 bp, Homo sapien
gccgaggattcgtggaatctgcttg

SEQ ID NO: 77317 - DNA, 25 bp, Homo sapien
ctggggatcatagttcttcaagctg

SEQ ID NO: 77318 - DNA, 25 bp, Homo sapien
gttgagttttttcagcgcctcgatg

SEQ ID NO: 77319 - DNA, 25 bp, Homo sapien
ctctgaggccaaaaacgcatcatac

SEQ ID NO: 77320 - DNA, 25 bp, Homo sapien
atgttttcgttgtgtgtgagcaggg

SEQ ID NO: 77321 - DNA, 25 bp, Homo sapien
ctgccttatttaaacctgggccgag

SEQ ID NO: 77322 - DNA, 25 bp, Homo sapien
ggggatatccacggccttagcctcg

SEQ ID NO: 77323 - DNA, 25 bp, Homo sapien
gtggaatctgcttgatcagagactc

SEQ ID NO: 77324 - DNA, 25 bp, Homo sapien
gcgcttgtccttctggggatcatag

SEQ ID NO: 77325 - DNA, 25 bp, Homo sapien
gatcagagactctgaggccaaaaac

SEQ ID NO: 77326 - DNA, 25 bp, Homo sapien
tagcctcgtcacagtgctgctggtc

SEQ ID NO: 77327 - DNA, 25 bp, Homo sapien
ctggggatcatagttcttcaagctg

SEQ ID NO: 77328 - DNA, 25 bp, Homo sapien
gttgagttttttcagcgcctcgatg

SEQ ID NO: 77329 - DNA, 25 bp, Homo sapien
tagcctcgtcacagtgctgctggtc

SEQ ID NO: 77330 - DNA, 25 bp, Homo sapien
ctctgaggccaaaaacgcatcatac

SEQ ID NO: 77331 - DNA, 25 bp, Homo sapien
gtggaatctgcttgatcagagactc

SEQ ID NO: 77332 - DNA, 25 bp, Homo sapien
gatcagagactctgaggccaaaaac

SEQ ID NO: 77333 - DNA, 25 bp, Homo sapien
ggggatatccacggccttagcctcg

SEQ ID NO: 77334 - DNA, 25 bp, Homo sapien
gccgaggattcgtggaatctgcttg

SEQ ID NO: 77335 - DNA, 25 bp, Homo sapien
ctgccttatttaaacctgggccgag

SEQ ID NO: 77336 - DNA, 25 bp, Homo sapien
gcgcttgtccttctggggatcatag

SEQ ID NO: 77337 - DNA, 25 bp, Homo sapien
atgttttcgttgtgtgtgagcaggg

SEQ ID NO: 77338 - DNA, 25 bp, Homo sapien
gttgagttttttcagcgcctcgatg

SEQ ID NO: 77339 - DNA, 25 bp, Homo sapien
ctctgaggccaaaaacgcatcatac

SEQ ID NO: 77340 - DNA, 25 bp, Homo sapien
gatcagagactctgaggccaaaaac

SEQ ID NO: 77341 - DNA, 25 bp, Homo sapien
gtggaatctgcttgatcagagactc

SEQ ID NO: 77342 - DNA, 25 bp, Homo sapien
gccgaggattcgtggaatctgcttg

SEQ ID NO: 77343 - DNA, 25 bp, Homo sapien
ctgccttatttaaacctgggccgag

SEQ ID NO: 77344 - DNA, 25 bp, Homo sapien
atgttttcgttgtgtgtgagcaggg

SEQ ID NO: 77345 - DNA, 25 bp, Homo sapien
ctggggatcatagttcttcaagctg

SEQ ID NO: 77346 - DNA, 25 bp, Homo sapien
gcgcttgtccttctggggatcatag

SEQ ID NO: 77347 - DNA, 25 bp, Homo sapien
tagcctcgtcacagtgctgctggtc

SEQ ID NO: 77348 - DNA, 25 bp, Homo sapien
ggggatatccacggccttagcctcg

SEQ ID NO: 77349 - DNA, 25 bp, Homo sapien
ggggatatccacggccttagcctcg

SEQ ID NO: 77350 - DNA, 25 bp, Homo sapien
ctgccttatttaaacctgggccgag

SEQ ID NO: 77351 - DNA, 25 bp, Homo sapien
ctctgaggccaaaaacgcatcatac

SEQ ID NO: 77352 - DNA, 25 bp, Homo sapien
gcgcttgtccttctggggatcatag

SEQ ID NO: 77353 - DNA, 25 bp, Homo sapien
gtggaatctgcttgatcagagactc

SEQ ID NO: 77354 - DNA, 25 bp, Homo sapien
atgttttcgttgtgtgtgagcaggg

SEQ ID NO: 77355 - DNA, 25 bp, Homo sapien
gccgaggattcgtggaatctgcttg

SEQ ID NO: 77356 - DNA, 25 bp, Homo sapien
gttgagttttttcagcgcctcgatg

SEQ ID NO: 77357 - DNA, 25 bp, Homo sapien
ctggggatcatagttcttcaagctg

SEQ ID NO: 77358 - DNA, 25 bp, Homo sapien
tagcctcgtcacagtgctgctggtc

SEQ ID NO: 77359 - DNA, 25 bp, Homo sapien
gatcagagactctgaggccaaaaac

SEQ ID NO: 77360 - DNA, 25 bp, Homo sapien
gttgagttttttcagcgcctcgatg

SEQ ID NO: 77361 - DNA, 25 bp, Homo sapien
ctctgaggccaaaaacgcatcatac

SEQ ID NO: 77362 - DNA, 25 bp, Homo sapien
gatcagagactctgaggccaaaaac

SEQ ID NO: 77363 - DNA, 25 bp, Homo sapien
gtggaatctgcttgatcagagactc

SEQ ID NO: 77364 - DNA, 25 bp, Homo sapien
gccgaggattcgtggaatctgcttg

SEQ ID NO: 77365 - DNA, 25 bp, Homo sapien
ctgccttatttaaacctgggccgag

SEQ ID NO: 77366 - DNA, 25 bp, Homo sapien
atgttttcgttgtgtgtgagcaggg

SEQ ID NO: 77367 - DNA, 25 bp, Homo sapien
ctggggatcatagttcttcaagctg

SEQ ID NO: 77368 - DNA, 25 bp, Homo sapien
gcgcttgtccttctggggatcatag

SEQ ID NO: 77369 - DNA, 25 bp, Homo sapien
tagcctcgtcacagtgctgctggtc

SEQ ID NO: 77370 - DNA, 25 bp, Homo sapien
ggggatatccacggccttagcctcg

SEQ ID NO: 77371 - DNA, 25 bp, Homo sapien
gcgcttgtccttctggggatcatag

SEQ ID NO: 77372 - DNA, 25 bp, Homo sapien
gccgaggattcgtggaatctgcttg

SEQ ID NO: 77373 - DNA, 25 bp, Homo sapien
gtggaatctgcttgatcagagactc

SEQ ID NO: 77374 - DNA, 25 bp, Homo sapien
gttgagttttttcagcgcctcgatg

SEQ ID NO: 77375 - DNA, 25 bp, Homo sapien
tagcctcgtcacagtgctgctggtc

SEQ ID NO: 77376 - DNA, 25 bp, Homo sapien
ggggatatccacggccttagcctcg

SEQ ID NO: 77377 - DNA, 25 bp, Homo sapien
ctggggatcatagttcttcaagctg

SEQ ID NO: 77378 - DNA, 25 bp, Homo sapien
gatcagagactctgaggccaaaaac

SEQ ID NO: 77379 - DNA, 25 bp, Homo sapien
ctgccttatttaaacctgggccgag

SEQ ID NO: 77380 - DNA, 25 bp, Homo sapien
ctctgaggccaaaaacgcatcatac

SEQ ID NO: 77381 - DNA, 25 bp, Homo sapien
atgttttcgttgtgtgtgagcaggg

SEQ ID NO: 77382 - DNA, 25 bp, Homo sapien
gttgagttttttcagcgcctcgatg

SEQ ID NO: 77383 - DNA, 25 bp, Homo sapien
ctctgaggccaaaaacgcatcatac

SEQ ID NO: 77384 - DNA, 25 bp, Homo sapien
gatcagagactctgaggccaaaaac

SEQ ID NO: 77385 - DNA, 25 bp, Homo sapien
gtggaatctgcttgatcagagactc

SEQ ID NO: 77386 - DNA, 25 bp, Homo sapien
gccgaggattcgtggaatctgcttg

SEQ ID NO: 77387 - DNA, 25 bp, Homo sapien
ctgccttatttaaacctgggccgag

SEQ ID NO: 77388 - DNA, 25 bp, Homo sapien
atgttttcgttgtgtgtgagcaggg

SEQ ID NO: 77389 - DNA, 25 bp, Homo sapien
ctggggatcatagttcttcaagctg

SEQ ID NO: 77390 - DNA, 25 bp, Homo sapien
gcgcttgtccttctggggatcatag

SEQ ID NO: 77391 - DNA, 25 bp, Homo sapien
tagcctcgtcacagtgctgctggtc

SEQ ID NO: 77392 - DNA, 25 bp, Homo sapien
ggggatatccacggccttagcctcg

SEQ ID NO: 77393 - DNA, 25 bp, Homo sapien
ctgccttatttaaacctgggccgag

SEQ ID NO: 77394 - DNA, 25 bp, Homo sapien
gcgcttgtccttctggggatcatag

SEQ ID NO: 77395 - DNA, 25 bp, Homo sapien
gtggaatctgcttgatcagagactc

SEQ ID NO: 77396 - DNA, 25 bp, Homo sapien
gatcagagactctgaggccaaaaac

SEQ ID NO: 77397 - DNA, 25 bp, Homo sapien
ctctgaggccaaaaacgcatcatac

SEQ ID NO: 77398 - DNA, 25 bp, Homo sapien
tagcctcgtcacagtgctgctggtc

SEQ ID NO: 77399 - DNA, 25 bp, Homo sapien
ctggggatcatagttcttcaagctg

SEQ ID NO: 77400 - DNA, 25 bp, Homo sapien
ggggatatccacggccttagcctcg

SEQ ID NO: 77401 - DNA, 25 bp, Homo sapien
gccgaggattcgtggaatctgcttg

SEQ ID NO: 77402 - DNA, 25 bp, Homo sapien
gttgagttttttcagcgcctcgatg

SEQ ID NO: 77403 - DNA, 25 bp, Homo sapien
atgttttcgttgtgtgtgagcaggg

SEQ ID NO: 77404 - DNA, 25 bp, Homo sapien
gttgagttttttcagcgcctcgatg

SEQ ID NO: 77405 - DNA, 25 bp, Homo sapien
ctctgaggccaaaaacgcatcatac

SEQ ID NO: 77406 - DNA, 25 bp, Homo sapien
gatcagagactctgaggccaaaaac

SEQ ID NO: 77407 - DNA, 25 bp, Homo sapien
gtggaatctgcttgatcagagactc

SEQ ID NO: 77408 - DNA, 25 bp, Homo sapien
gccgaggattcgtggaatctgcttg

SEQ ID NO: 77409 - DNA, 25 bp, Homo sapien
ctgccttatttaaacctgggccgag

SEQ ID NO: 77410 - DNA, 25 bp, Homo sapien
atgttttcgttgtgtgtgagcaggg

SEQ ID NO: 77411 - DNA, 25 bp, Homo sapien
ctggggatcatagttcttcaagctg

SEQ ID NO: 77412 - DNA, 25 bp, Homo sapien
gcgcttgtccttctggggatcatag

SEQ ID NO: 77413 - DNA, 25 bp, Homo sapien
tagcctcgtcacagtgctgctggtc

SEQ ID NO: 77414 - DNA, 25 bp, Homo sapien
ggggatatccacggccttagcctcg

SEQ ID NO: 77415 - DNA, 25 bp, Homo sapien
atgttttcgttgtgtgtgagcaggg

SEQ ID NO: 77416 - DNA, 25 bp, Homo sapien
gtggaatctgcttgatcagagactc

SEQ ID NO: 77417 - DNA, 25 bp, Homo sapien
gccgaggattcgtggaatctgcttg

SEQ ID NO: 77418 - DNA, 25 bp, Homo sapien
ggggatatccacggccttagcctcg

SEQ ID NO: 77419 - DNA, 25 bp, Homo sapien
tagcctcgtcacagtgctgctggtc

SEQ ID NO: 77420 - DNA, 25 bp, Homo sapien
gcgcttgtccttctggggatcatag

SEQ ID NO: 77421 - DNA, 25 bp, Homo sapien
gatcagagactctgaggccaaaaac

SEQ ID NO: 77422 - DNA, 25 bp, Homo sapien
ctggggatcatagttcttcaagctg

SEQ ID NO: 77423 - DNA, 25 bp, Homo sapien
ctgccttatttaaacctgggccgag

SEQ ID NO: 77424 - DNA, 25 bp, Homo sapien
ctctgaggccaaaaacgcatcatac

SEQ ID NO: 77425 - DNA, 25 bp, Homo sapien
gttgagttttttcagcgcctcgatg

SEQ ID NO: 77426 - DNA, 25 bp, Homo sapien
gttgagttttttcagcgcctcgatg

SEQ ID NO: 77427 - DNA, 25 bp, Homo sapien
ctctgaggccaaaaacgcatcatac

SEQ ID NO: 77428 - DNA, 25 bp, Homo sapien
gatcagagactctgaggccaaaaac

SEQ ID NO: 77429 - DNA, 25 bp, Homo sapien
gtggaatctgcttgatcagagactc

SEQ ID NO: 77430 - DNA, 25 bp, Homo sapien
gccgaggattcgtggaatctgcttg

SEQ ID NO: 77431 - DNA, 25 bp, Homo sapien
ctgccttatttaaacctgggccgag

SEQ ID NO: 77432 - DNA, 25 bp, Homo sapien
atgttttcgttgtgtgtgagcaggg

SEQ ID NO: 77433 - DNA, 25 bp, Homo sapien
ctggggatcatagttcttcaagctg

SEQ ID NO: 77434 - DNA, 25 bp, Homo sapien
gcgcttgtccttctggggatcatag

SEQ ID NO: 77435 - DNA, 25 bp, Homo sapien
tagcctcgtcacagtgctgctggtc

SEQ ID NO: 77436 - DNA, 25 bp, Homo sapien
ggggatatccacggccttagcctcg

SEQ ID NO: 77437 - DNA, 25 bp, Homo sapien
ctctgaggccaaaaacgcatcatac

SEQ ID NO: 77438 - DNA, 25 bp, Homo sapien
gccgaggattcgtggaatctgcttg

SEQ ID NO: 77439 - DNA, 25 bp, Homo sapien
atgttttcgttgtgtgtgagcaggg

SEQ ID NO: 77440 - DNA, 25 bp, Homo sapien
gcgcttgtccttctggggatcatag

SEQ ID NO: 77441 - DNA, 25 bp, Homo sapien
ctgccttatttaaacctgggccgag

SEQ ID NO: 77442 - DNA, 25 bp, Homo sapien
gttgagttttttcagcgcctcgatg

SEQ ID NO: 77443 - DNA, 25 bp, Homo sapien
tagcctcgtcacagtgctgctggtc

SEQ ID NO: 77444 - DNA, 25 bp, Homo sapien
gatcagagactctgaggccaaaaac

SEQ ID NO: 77445 - DNA, 25 bp, Homo sapien
gtggaatctgcttgatcagagactc

SEQ ID NO: 77446 - DNA, 25 bp, Homo sapien
ggggatatccacggccttagcctcg

SEQ ID NO: 77447 - DNA, 25 bp, Homo sapien
ctggggatcatagttcttcaagctg

SEQ ID NO: 77448 - DNA, 25 bp, Homo sapien
gttgagttttttcagcgcctcgatg

SEQ ID NO: 77449 - DNA, 25 bp, Homo sapien
ctctgaggccaaaaacgcatcatac

SEQ ID NO: 77450 - DNA, 25 bp, Homo sapien
gatcagagactctgaggccaaaaac

SEQ ID NO: 77451 - DNA, 25 bp, Homo sapien
gtggaatctgcttgatcagagactc

SEQ ID NO: 77452 - DNA, 25 bp, Homo sapien
gccgaggattcgtggaatctgcttg

SEQ ID NO: 77453 - DNA, 25 bp, Homo sapien
ctgccttatttaaacctgggccgag

SEQ ID NO: 77454 - DNA, 25 bp, Homo sapien
atgttttcgttgtgtgtgagcaggg

SEQ ID NO: 77455 - DNA, 25 bp, Homo sapien
ctggggatcatagttcttcaagctg

SEQ ID NO: 77456 - DNA, 25 bp, Homo sapien
gcgcttgtccttctggggatcatag

SEQ ID NO: 77457 - DNA, 25 bp, Homo sapien
tagcctcgtcacagtgctgctggtc

SEQ ID NO: 77458 - DNA, 25 bp, Homo sapien
ggggatatccacggccttagcctcg

SEQ ID NO: 77459 - DNA, 25 bp, Homo sapien
gttgagttttttcagcgcctcgatg

SEQ ID NO: 77460 - DNA, 25 bp, Homo sapien
ctctgaggccaaaaacgcatcatac

SEQ ID NO: 77461 - DNA, 25 bp, Homo sapien
gatcagagactctgaggccaaaaac

SEQ ID NO: 77462 - DNA, 25 bp, Homo sapien
gtggaatctgcttgatcagagactc

SEQ ID NO: 77463 - DNA, 25 bp, Homo sapien
gccgaggattcgtggaatctgcttg

SEQ ID NO: 77464 - DNA, 25 bp, Homo sapien
ctgccttatttaaacctgggccgag

SEQ ID NO: 77465 - DNA, 25 bp, Homo sapien
atgttttcgttgtgtgtgagcaggg

SEQ ID NO: 77466 - DNA, 25 bp, Homo sapien
ctggggatcatagttcttcaagctg

SEQ ID NO: 77467 - DNA, 25 bp, Homo sapien
gcgcttgtccttctggggatcatag

SEQ ID NO: 77468 - DNA, 25 bp, Homo sapien
tagcctcgtcacagtgctgctggtc

SEQ ID NO: 77469 - DNA, 25 bp, Homo sapien
ggggatatccacggccttagcctcg

SEQ ID NO: 77470 - DNA, 25 bp, Homo sapien
ctctgaggccaaaaacgcatcatac

SEQ ID NO: 77471 - DNA, 25 bp, Homo sapien
ctgccttatttaaacctgggccgag

SEQ ID NO: 77472 - DNA, 25 bp, Homo sapien
tagcctcgtcacagtgctgctggtc

SEQ ID NO: 77473 - DNA, 25 bp, Homo sapien
atgttttcgttgtgtgtgagcaggg

SEQ ID NO: 77474 - DNA, 25 bp, Homo sapien
ggggatatccacggccttagcctcg

SEQ ID NO: 77475 - DNA, 25 bp, Homo sapien
gatcagagactctgaggccaaaaac

SEQ ID NO: 77476 - DNA, 25 bp, Homo sapien
gcgcttgtccttctggggatcatag

SEQ ID NO: 77477 - DNA, 25 bp, Homo sapien
gccgaggattcgtggaatctgcttg

SEQ ID NO: 77478 - DNA, 25 bp, Homo sapien
gtggaatctgcttgatcagagactc

SEQ ID NO: 77479 - DNA, 25 bp, Homo sapien
gttgagttttttcagcgcctcgatg

SEQ ID NO: 77480 - DNA, 25 bp, Homo sapien
ctggggatcatagttcttcaagctg

SEQ ID NO: 77481 - DNA, 25 bp, Homo sapien
ctctgaggccaaaaacgcatcatac

SEQ ID NO: 77482 - DNA, 25 bp, Homo sapien
ctgccttatttaaacctgggccgag

SEQ ID NO: 77483 - DNA, 25 bp, Homo sapien
tagcctcgtcacagtgctgctggtc

SEQ ID NO: 77484 - DNA, 25 bp, Homo sapien
atgttttcgttgtgtgtgagcaggg

SEQ ID NO: 77485 - DNA, 25 bp, Homo sapien
gatcagagactctgaggccaaaaac

SEQ ID NO: 77486 - DNA, 25 bp, Homo sapien
ctggggatcatagttcttcaagctg

SEQ ID NO: 77487 - DNA, 25 bp, Homo sapien
ggggatatccacggccttagcctcg

SEQ ID NO: 77488 - DNA, 25 bp, Homo sapien
gcgcttgtccttctggggatcatag

SEQ ID NO: 77489 - DNA, 25 bp, Homo sapien
gccgaggattcgtggaatctgcttg

SEQ ID NO: 77490 - DNA, 25 bp, Homo sapien
gttgagttttttcagcgcctcgatg

SEQ ID NO: 77491 - DNA, 25 bp, Homo sapien
gtggaatctgcttgatcagagactc

SEQ ID NO: 77492 - DNA, 25 bp, Homo sapien
ctggggatcatagttcttcaagctg

SEQ ID NO: 77493 - DNA, 25 bp, Homo sapien
ctctgaggccaaaaacgcatcatac

SEQ ID NO: 77494 - DNA, 25 bp, Homo sapien
ctgccttatttaaacctgggccgag

SEQ ID NO: 77495 - DNA, 25 bp, Homo sapien
tagcctcgtcacagtgctgctggtc

SEQ ID NO: 77496 - DNA, 25 bp, Homo sapien
atgttttcgttgtgtgtgagcaggg

SEQ ID NO: 77497 - DNA, 25 bp, Homo sapien
ggggatatccacggccttagcctcg

SEQ ID NO: 77498 - DNA, 25 bp, Homo sapien
gttgagttttttcagcgcctcgatg

SEQ ID NO: 77499 - DNA, 25 bp, Homo sapien
gatcagagactctgaggccaaaaac

SEQ ID NO: 77500 - DNA, 25 bp, Homo sapien
gcgcttgtccttctggggatcatag

SEQ ID NO: 77501 - DNA, 25 bp, Homo sapien
gccgaggattcgtggaatctgcttg

SEQ ID NO: 77502 - DNA, 25 bp, Homo sapien
gtggaatctgcttgatcagagactc

SEQ ID NO: 77503 - DNA, 25 bp, Homo sapien
ctctgaggccaaaaacgcatcatac

SEQ ID NO: 77504 - DNA, 25 bp, Homo sapien
ctgccttatttaaacctgggccgag

SEQ ID NO: 77505 - DNA, 25 bp, Homo sapien
tagcctcgtcacagtgctgctggtc

SEQ ID NO: 77506 - DNA, 25 bp, Homo sapien
atgttttcgttgtgtgtgagcaggg

SEQ ID NO: 77507 - DNA, 25 bp, Homo sapien
ggggatatccacggccttagcctcg

SEQ ID NO: 77508 - DNA, 25 bp, Homo sapien
gatcagagactctgaggccaaaaac

SEQ ID NO: 77509 - DNA, 25 bp, Homo sapien
gcgcttgtccttctggggatcatag

SEQ ID NO: 77510 - DNA, 25 bp, Homo sapien
gccgaggattcgtggaatctgcttg

SEQ ID NO: 77511 - DNA, 25 bp, Homo sapien
gtggaatctgcttgatcagagactc

SEQ ID NO: 77512 - DNA, 25 bp, Homo sapien
gttgagttttttcagcgcctcgatg

SEQ ID NO: 77513 - DNA, 25 bp, Homo sapien
ctggggatcatagttcttcaagctg

SEQ ID NO: 77514 - DNA, 25 bp, Homo sapien
ctgccttatttaaacctgggccgag

SEQ ID NO: 77515 - DNA, 25 bp, Homo sapien
ctctgaggccaaaaacgcatcatac

SEQ ID NO: 77516 - DNA, 25 bp, Homo sapien
tagcctcgtcacagtgctgctggtc

SEQ ID NO: 77517 - DNA, 25 bp, Homo sapien
atgttttcgttgtgtgtgagcaggg

SEQ ID NO: 77518 - DNA, 25 bp, Homo sapien
ctggggatcatagttcttcaagctg

SEQ ID NO: 77519 - DNA, 25 bp, Homo sapien
ggggatatccacggccttagcctcg

SEQ ID NO: 77520 - DNA, 25 bp, Homo sapien
gatcagagactctgaggccaaaaac

SEQ ID NO: 77521 - DNA, 25 bp, Homo sapien
gcgcttgtccttctggggatcatag

SEQ ID NO: 77522 - DNA, 25 bp, Homo sapien
gccgaggattcgtggaatctgcttg

SEQ ID NO: 77523 - DNA, 25 bp, Homo sapien
gtggaatctgcttgatcagagactc

SEQ ID NO: 77524 - DNA, 25 bp, Homo sapien
gttgagttttttcagcgcctcgatg

SEQ ID NO: 77525 - DNA, 25 bp, Homo sapien
ctggggatcatagttcttcaagctg

SEQ ID NO: 77526 - DNA, 25 bp, Homo sapien
ctctgaggccaaaaacgcatcatac

SEQ ID NO: 77527 - DNA, 25 bp, Homo sapien
ctgccttatttaaacctgggccgag

SEQ ID NO: 77528 - DNA, 25 bp, Homo sapien
tagcctcgtcacagtgctgctggtc

SEQ ID NO: 77529 - DNA, 25 bp, Homo sapien
atgttttcgttgtgtgtgagcaggg

SEQ ID NO: 77530 - DNA, 25 bp, Homo sapien
gatcagagactctgaggccaaaaac

SEQ ID NO: 77531 - DNA, 25 bp, Homo sapien
ggggatatccacggccttagcctcg

SEQ ID NO: 77532 - DNA, 25 bp, Homo sapien
gcgcttgtccttctggggatcatag

SEQ ID NO: 77533 - DNA, 25 bp, Homo sapien
gtggaatctgcttgatcagagactc

SEQ ID NO: 77534 - DNA, 25 bp, Homo sapien
gccgaggattcgtggaatctgcttg

SEQ ID NO: 77535 - DNA, 25 bp, Homo sapien
gttgagttttttcagcgcctcgatg

SEQ ID NO: 77536 - DNA, 25 bp, Homo sapien
ctgccttatttaaacctgggccgag

SEQ ID NO: 77537 - DNA, 25 bp, Homo sapien
ctctgaggccaaaaacgcatcatac

SEQ ID NO: 77538 - DNA, 25 bp, Homo sapien
atgttttcgttgtgtgtgagcaggg

SEQ ID NO: 77539 - DNA, 25 bp, Homo sapien
tagcctcgtcacagtgctgctggtc

SEQ ID NO: 77540 - DNA, 25 bp, Homo sapien
ggggatatccacggccttagcctcg

SEQ ID NO: 77541 - DNA, 25 bp, Homo sapien
gatcagagactctgaggccaaaaac

SEQ ID NO: 77542 - DNA, 25 bp, Homo sapien
gcgcttgtccttctggggatcatag

SEQ ID NO: 77543 - DNA, 25 bp, Homo sapien
ctggggatcatagttcttcaagctg

SEQ ID NO: 77544 - DNA, 25 bp, Homo sapien
gccgaggattcgtggaatctgcttg

SEQ ID NO: 77545 - DNA, 25 bp, Homo sapien
gtggaatctgcttgatcagagactc

SEQ ID NO: 77546 - DNA, 25 bp, Homo sapien
gttgagttttttcagcgcctcgatg

SEQ ID NO: 77547 - DNA, 25 bp, Homo sapien
ctctgaggccaaaaacgcatcatac

SEQ ID NO: 77548 - DNA, 25 bp, Homo sapien
ctgccttatttaaacctgggccgag

SEQ ID NO: 77549 - DNA, 25 bp, Homo sapien
tagcctcgtcacagtgctgctggtc

SEQ ID NO: 77550 - DNA, 25 bp, Homo sapien
atgttttcgttgtgtgtgagcaggg

SEQ ID NO: 77551 - DNA, 25 bp, Homo sapien
gcgcttgtccttctggggatcatag

SEQ ID NO: 77552 - DNA, 25 bp, Homo sapien
ggggatatccacggccttagcctcg

SEQ ID NO: 77553 - DNA, 25 bp, Homo sapien
gatcagagactctgaggccaaaaac

SEQ ID NO: 77554 - DNA, 25 bp, Homo sapien
gttgagttttttcagcgcctcgatg

SEQ ID NO: 77555 - DNA, 25 bp, Homo sapien
gtggaatctgcttgatcagagactc

SEQ ID NO: 77556 - DNA, 25 bp, Homo sapien
gccgaggattcgtggaatctgcttg

SEQ ID NO: 77557 - DNA, 25 bp, Homo sapien
ctggggatcatagttcttcaagctg

SEQ ID NO: 77558 - DNA, 25 bp, Homo sapien
ctgccttatttaaacctgggccgag

SEQ ID NO: 77559 - DNA, 25 bp, Homo sapien
ctctgaggccaaaaacgcatcatac

SEQ ID NO: 77560 - DNA, 25 bp, Homo sapien
atgttttcgttgtgtgtgagcaggg

SEQ ID NO: 77561 - DNA, 25 bp, Homo sapien
tagcctcgtcacagtgctgctggtc

SEQ ID NO: 77562 - DNA, 25 bp, Homo sapien
gcgcttgtccttctggggatcatag

SEQ ID NO: 77563 - DNA, 25 bp, Homo sapien
gatcagagactctgaggccaaaaac

SEQ ID NO: 77564 - DNA, 25 bp, Homo sapien
ggggatatccacggccttagcctcg

SEQ ID NO: 77565 - DNA, 25 bp, Homo sapien
gccgaggattcgtggaatctgcttg

SEQ ID NO: 77566 - DNA, 25 bp, Homo sapien
gtggaatctgcttgatcagagactc

SEQ ID NO: 77567 - DNA, 25 bp, Homo sapien
gttgagttttttcagcgcctcgatg

SEQ ID NO: 77568 - DNA, 25 bp, Homo sapien
ctggggatcatagttcttcaagctg

SEQ ID NO: 77569 - DNA, 25 bp, Homo sapien
gccgaggattcgtggaatctgcttg

SEQ ID NO: 77570 - DNA, 25 bp, Homo sapien
gttgagttttttcagcgcctcgatg

SEQ ID NO: 77571 - DNA, 25 bp, Homo sapien
gcgcttgtccttctggggatcatag

SEQ ID NO: 77572 - DNA, 25 bp, Homo sapien
atgttttcgttgtgtgtgagcaggg

SEQ ID NO: 77573 - DNA, 25 bp, Homo sapien
tagcctcgtcacagtgctgctggtc

SEQ ID NO: 77574 - DNA, 25 bp, Homo sapien
ctgccttatttaaacctgggccgag

SEQ ID NO: 77575 - DNA, 25 bp, Homo sapien
ctctgaggccaaaaacgcatcatac

SEQ ID NO: 77576 - DNA, 25 bp, Homo sapien
ggggatatccacggccttagcctcg

SEQ ID NO: 77577 - DNA, 25 bp, Homo sapien
gatcagagactctgaggccaaaaac

SEQ ID NO: 77578 - DNA, 25 bp, Homo sapien
ctggggatcatagttcttcaagctg

SEQ ID NO: 77579 - DNA, 25 bp, Homo sapien
gtggaatctgcttgatcagagactc

SEQ ID NO: 77580 - DNA, 25 bp, Homo sapien
ctctgaggccaaaaacgcatcatac

SEQ ID NO: 77581 - DNA, 25 bp, Homo sapien
ctgccttatttaaacctgggccgag

SEQ ID NO: 77582 - DNA, 25 bp, Homo sapien
tagcctcgtcacagtgctgctggtc

SEQ ID NO: 77583 - DNA, 25 bp, Homo sapien
atgttttcgttgtgtgtgagcaggg

SEQ ID NO: 77584 - DNA, 25 bp, Homo sapien
ggggatatccacggccttagcctcg

SEQ ID NO: 77585 - DNA, 25 bp, Homo sapien
gatcagagactctgaggccaaaaac

SEQ ID NO: 77586 - DNA, 25 bp, Homo sapien
gcgcttgtccttctggggatcatag

SEQ ID NO: 77587 - DNA, 25 bp, Homo sapien
gttgagttttttcagcgcctcgatg

SEQ ID NO: 77588 - DNA, 25 bp, Homo sapien
gccgaggattcgtggaatctgcttg

SEQ ID NO: 77589 - DNA, 25 bp, Homo sapien
gtggaatctgcttgatcagagactc

SEQ ID NO: 77590 - DNA, 25 bp, Homo sapien
ctggggatcatagttcttcaagctg

SEQ ID NO: 77591 - DNA, 25 bp, Homo sapien
gttgagttttttcagcgcctcgatg

SEQ ID NO: 77592 - DNA, 25 bp, Homo sapien
ctctgaggccaaaaacgcatcatac

SEQ ID NO: 77593 - DNA, 25 bp, Homo sapien
gatcagagactctgaggccaaaaac

SEQ ID NO: 77594 - DNA, 25 bp, Homo sapien
gtggaatctgcttgatcagagactc

SEQ ID NO: 77595 - DNA, 25 bp, Homo sapien
gccgaggattcgtggaatctgcttg

SEQ ID NO: 77596 - DNA, 25 bp, Homo sapien
ctgccttatttaaacctgggccgag

SEQ ID NO: 77597 - DNA, 25 bp, Homo sapien
atgttttcgttgtgtgtgagcaggg

SEQ ID NO: 77598 - DNA, 25 bp, Homo sapien
ctggggatcatagttcttcaagctg

SEQ ID NO: 77599 - DNA, 25 bp, Homo sapien
gcgcttgtccttctggggatcatag

SEQ ID NO: 77600 - DNA, 25 bp, Homo sapien
tagcctcgtcacagtgctgctggtc

SEQ ID NO: 77601 - DNA, 25 bp, Homo sapien
ggggatatccacggccttagcctcg

SEQ ID NO: 77602 - DNA, 25 bp, Homo sapien
gtatgatgcgtttttggcctcagag

SEQ ID NO: 77603 - DNA, 25 bp, Homo sapien
caagcagattccacgaatcctcggc

SEQ ID NO: 77604 - DNA, 25 bp, Homo sapien
cagcttgaagaactatgatccccag

SEQ ID NO: 77605 - DNA, 25 bp, Homo sapien
catcgaggcgctgaaaaaactcaac

SEQ ID NO: 77606 - DNA, 25 bp, Homo sapien
cgaggctaaggccgtggatatcccc

SEQ ID NO: 77607 - DNA, 25 bp, Homo sapien
ctcggcccaggtttaaataaggcag

SEQ ID NO: 77608 - DNA, 25 bp, Homo sapien
gaccagcagcactgtgacgaggcta

SEQ ID NO: 77609 - DNA, 25 bp, Homo sapien
ccctgctcacacacaacgaaaacat

SEQ ID NO: 77610 - DNA, 25 bp, Homo sapien
gtttttggcctcagagtctctgatc

SEQ ID NO: 77611 - DNA, 25 bp, Homo sapien
ctatgatccccagaaggacaagcgc

SEQ ID NO: 77612 - DNA, 25 bp, Homo sapien
gagtctctgatcaagcagattccac

SEQ ID NO: 77613 - DNA, 25 bp, Homo sapien
ctctgaggccaaaaacgcatcatac

SEQ ID NO: 77614 - DNA, 25 bp, Homo sapien
ctgccttatttaaacctgggccgag

SEQ ID NO: 77615 - DNA, 25 bp, Homo sapien
tagcctcgtcacagtgctgctggtc

SEQ ID NO: 77616 - DNA, 25 bp, Homo sapien
atgttttcgttgtgtgtgagcaggg

SEQ ID NO: 77617 - DNA, 25 bp, Homo sapien
gatcagagactctgaggccaaaaac

SEQ ID NO: 77618 - DNA, 25 bp, Homo sapien
ggggatatccacggccttagcctcg

SEQ ID NO: 77619 - DNA, 25 bp, Homo sapien
gcgcttgtccttctggggatcatag

SEQ ID NO: 77620 - DNA, 25 bp, Homo sapien
ctggggatcatagttcttcaagctg

SEQ ID NO: 77621 - DNA, 25 bp, Homo sapien
gccgaggattcgtggaatctgcttg

SEQ ID NO: 77622 - DNA, 25 bp, Homo sapien
gtggaatctgcttgatcagagactc

SEQ ID NO: 77623 - DNA, 25 bp, Homo sapien
gttgagttttttcagcgcctcgatg

SEQ ID NO: 77624 - DNA, 25 bp, Homo sapien
atgttttcgttgtgtgtgagcaggg

SEQ ID NO: 77625 - DNA, 25 bp, Homo sapien
ggggatatccacggccttagcctcg

SEQ ID NO: 77626 - DNA, 25 bp, Homo sapien
gatcagagactctgaggccaaaaac

SEQ ID NO: 77627 - DNA, 25 bp, Homo sapien
ctgccttatttaaacctgggccgag

SEQ ID NO: 77628 - DNA, 25 bp, Homo sapien
gccgaggattcgtggaatctgcttg

SEQ ID NO: 77629 - DNA, 25 bp, Homo sapien
gttgagttttttcagcgcctcgatg

SEQ ID NO: 77630 - DNA, 25 bp, Homo sapien
ctggggatcatagttcttcaagctg

SEQ ID NO: 77631 - DNA, 25 bp, Homo sapien
ctctgaggccaaaaacgcatcatac

SEQ ID NO: 77632 - DNA, 25 bp, Homo sapien
gcgcttgtccttctggggatcatag

SEQ ID NO: 77633 - DNA, 25 bp, Homo sapien
gtggaatctgcttgatcagagactc

SEQ ID NO: 77634 - DNA, 25 bp, Homo sapien
tagcctcgtcacagtgctgctggtc

SEQ ID NO: 77635 - DNA, 25 bp, Homo sapien
gttgagttttttcagcgcctcgatg

SEQ ID NO: 77636 - DNA, 25 bp, Homo sapien
ctctgaggccaaaaacgcatcatac

SEQ ID NO: 77637 - DNA, 25 bp, Homo sapien
gatcagagactctgaggccaaaaac

SEQ ID NO: 77638 - DNA, 25 bp, Homo sapien
gtggaatctgcttgatcagagactc

SEQ ID NO: 77639 - DNA, 25 bp, Homo sapien
gccgaggattcgtggaatctgcttg

SEQ ID NO: 77640 - DNA, 25 bp, Homo sapien
ctgccttatttaaacctgggccgag

SEQ ID NO: 77641 - DNA, 25 bp, Homo sapien
atgttttcgttgtgtgtgagcaggg

SEQ ID NO: 77642 - DNA, 25 bp, Homo sapien
ctggggatcatagttcttcaagctg

SEQ ID NO: 77643 - DNA, 25 bp, Homo sapien
gcgcttgtccttctggggatcatag

SEQ ID NO: 77644 - DNA, 25 bp, Homo sapien
tagcctcgtcacagtgctgctggtc

SEQ ID NO: 77645 - DNA, 25 bp, Homo sapien
ggggatatccacggccttagcctcg

SEQ ID NO: 77646 - DNA, 25 bp, Homo sapien
tagcctcgtcacagtgctgctggtc

SEQ ID NO: 77647 - DNA, 25 bp, Homo sapien
ctgccttatttaaacctgggccgag

SEQ ID NO: 77648 - DNA, 25 bp, Homo sapien
atgttttcgttgtgtgtgagcaggg

SEQ ID NO: 77649 - DNA, 25 bp, Homo sapien
gcgcttgtccttctggggatcatag

SEQ ID NO: 77650 - DNA, 25 bp, Homo sapien
ctctgaggccaaaaacgcatcatac

SEQ ID NO: 77651 - DNA, 25 bp, Homo sapien
gccgaggattcgtggaatctgcttg

SEQ ID NO: 77652 - DNA, 25 bp, Homo sapien
ctggggatcatagttcttcaagctg

SEQ ID NO: 77653 - DNA, 25 bp, Homo sapien
gtggaatctgcttgatcagagactc

SEQ ID NO: 77654 - DNA, 25 bp, Homo sapien
gttgagttttttcagcgcctcgatg

SEQ ID NO: 77655 - DNA, 25 bp, Homo sapien
ggggatatccacggccttagcctcg

SEQ ID NO: 77656 - DNA, 25 bp, Homo sapien
gatcagagactctgaggccaaaaac

SEQ ID NO: 77657 - DNA, 25 bp, Homo sapien
gttgagttttttcagcgcctcgatg

SEQ ID NO: 77658 - DNA, 25 bp, Homo sapien
ctctgaggccaaaaacgcatcatac

SEQ ID NO: 77659 - DNA, 25 bp, Homo sapien
gatcagagactctgaggccaaaaac

SEQ ID NO: 77660 - DNA, 25 bp, Homo sapien
gtggaatctgcttgatcagagactc

SEQ ID NO: 77661 - DNA, 25 bp, Homo sapien
gccgaggattcgtggaatctgcttg

SEQ ID NO: 77662 - DNA, 25 bp, Homo sapien
ctgccttatttaaacctgggccgag

SEQ ID NO: 77663 - DNA, 25 bp, Homo sapien
atgttttcgttgtgtgtgagcaggg

SEQ ID NO: 77664 - DNA, 25 bp, Homo sapien
ctggggatcatagttcttcaagctg

SEQ ID NO: 77665 - DNA, 25 bp, Homo sapien
gcgcttgtccttctggggatcatag

SEQ ID NO: 77666 - DNA, 25 bp, Homo sapien
tagcctcgtcacagtgctgctggtc

SEQ ID NO: 77667 - DNA, 25 bp, Homo sapien
ggggatatccacggccttagcctcg

SEQ ID NO: 77668 - DNA, 25 bp, Homo sapien
tagcctcgtcacagtgctgctggtc

SEQ ID NO: 77669 - DNA, 25 bp, Homo sapien
ctgccttatttaaacctgggccgag

SEQ ID NO: 77670 - DNA, 25 bp, Homo sapien
ggggatatccacggccttagcctcg

SEQ ID NO: 77671 - DNA, 25 bp, Homo sapien
ctctgaggccaaaaacgcatcatac

SEQ ID NO: 77672 - DNA, 25 bp, Homo sapien
atgttttcgttgtgtgtgagcaggg

SEQ ID NO: 77673 - DNA, 25 bp, Homo sapien
gcgcttgtccttctggggatcatag

SEQ ID NO: 77674 - DNA, 25 bp, Homo sapien
ctggggatcatagttcttcaagctg

SEQ ID NO: 77675 - DNA, 25 bp, Homo sapien
gatcagagactctgaggccaaaaac

SEQ ID NO: 77676 - DNA, 25 bp, Homo sapien
gccgaggattcgtggaatctgcttg

SEQ ID NO: 77677 - DNA, 25 bp, Homo sapien
gtggaatctgcttgatcagagactc

SEQ ID NO: 77678 - DNA, 25 bp, Homo sapien
gttgagttttttcagcgcctcgatg

SEQ ID NO: 77679 - DNA, 25 bp, Homo sapien
ctggggatcatagttcttcaagctg

SEQ ID NO: 77680 - DNA, 25 bp, Homo sapien
gcgcttgtccttctggggatcatag

SEQ ID NO: 77681 - DNA, 25 bp, Homo sapien
tagcctcgtcacagtgctgctggtc

SEQ ID NO: 77682 - DNA, 25 bp, Homo sapien
ggggatatccacggccttagcctcg

SEQ ID NO: 77683 - DNA, 25 bp, Homo sapien
gttgagttttttcagcgcctcgatg

SEQ ID NO: 77684 - DNA, 25 bp, Homo sapien
ctctgaggccaaaaacgcatcatac

SEQ ID NO: 77685 - DNA, 25 bp, Homo sapien
gatcagagactctgaggccaaaaac

SEQ ID NO: 77686 - DNA, 25 bp, Homo sapien
gtggaatctgcttgatcagagactc

SEQ ID NO: 77687 - DNA, 25 bp, Homo sapien
gccgaggattcgtggaatctgcttg

SEQ ID NO: 77688 - DNA, 25 bp, Homo sapien
ctgccttatttaaacctgggccgag

SEQ ID NO: 77689 - DNA, 25 bp, Homo sapien
atgttttcgttgtgtgtgagcaggg

SEQ ID NO: 77690 - DNA, 25 bp, Homo sapien
gttgagttttttcagcgcctcgatg

SEQ ID NO: 77691 - DNA, 25 bp, Homo sapien
ctctgaggccaaaaacgcatcatac

SEQ ID NO: 77692 - DNA, 25 bp, Homo sapien
gatcagagactctgaggccaaaaac

SEQ ID NO: 77693 - DNA, 25 bp, Homo sapien
gtggaatctgcttgatcagagactc

SEQ ID NO: 77694 - DNA, 25 bp, Homo sapien
gccgaggattcgtggaatctgcttg

SEQ ID NO: 77695 - DNA, 25 bp, Homo sapien
ctgccttatttaaacctgggccgag

SEQ ID NO: 77696 - DNA, 25 bp, Homo sapien
atgttttcgttgtgtgtgagcaggg

SEQ ID NO: 77697 - DNA, 25 bp, Homo sapien
ctggggatcatagttcttcaagctg

SEQ ID NO: 77698 - DNA, 25 bp, Homo sapien
gcgcttgtccttctggggatcatag

SEQ ID NO: 77699 - DNA, 25 bp, Homo sapien
tagcctcgtcacagtgctgctggtc

SEQ ID NO: 77700 - DNA, 25 bp, Homo sapien
ggggatatccacggccttagcctcg

SEQ ID NO: 77701 - DNA, 25 bp, Homo sapien
tagcctcgtcacagtgctgctggtc

SEQ ID NO: 77702 - DNA, 25 bp, Homo sapien
gcgcttgtccttctggggatcatag

SEQ ID NO: 77703 - DNA, 25 bp, Homo sapien
ctggggatcatagttcttcaagctg

SEQ ID NO: 77704 - DNA, 25 bp, Homo sapien
ggggatatccacggccttagcctcg

SEQ ID NO: 77705 - DNA, 25 bp, Homo sapien
ctctgaggccaaaaacgcatcatac

SEQ ID NO: 77706 - DNA, 25 bp, Homo sapien
ctgccttatttaaacctgggccgag

SEQ ID NO: 77707 - DNA, 25 bp, Homo sapien
gccgaggattcgtggaatctgcttg

SEQ ID NO: 77708 - DNA, 25 bp, Homo sapien
gttgagttttttcagcgcctcgatg

SEQ ID NO: 77709 - DNA, 25 bp, Homo sapien
gatcagagactctgaggccaaaaac

SEQ ID NO: 77710 - DNA, 25 bp, Homo sapien
atgttttcgttgtgtgtgagcaggg

SEQ ID NO: 77711 - DNA, 25 bp, Homo sapien
gtggaatctgcttgatcagagactc

SEQ ID NO: 77712 - DNA, 25 bp, Homo sapien
gttgagttttttcagcgcctcgatg

SEQ ID NO: 77713 - DNA, 25 bp, Homo sapien
ctctgaggccaaaaacgcatcatac

SEQ ID NO: 77714 - DNA, 25 bp, Homo sapien
gatcagagactctgaggccaaaaac

SEQ ID NO: 77715 - DNA, 25 bp, Homo sapien
gtggaatctgcttgatcagagactc

SEQ ID NO: 77716 - DNA, 25 bp, Homo sapien
gccgaggattcgtggaatctgcttg

SEQ ID NO: 77717 - DNA, 25 bp, Homo sapien
ctgccttatttaaacctgggccgag

SEQ ID NO: 77718 - DNA, 25 bp, Homo sapien
atgttttcgttgtgtgtgagcaggg

SEQ ID NO: 77719 - DNA, 25 bp, Homo sapien
ctggggatcatagttcttcaagctg

SEQ ID NO: 77720 - DNA, 25 bp, Homo sapien
gcgcttgtccttctggggatcatag

SEQ ID NO: 77721 - DNA, 25 bp, Homo sapien
tagcctcgtcacagtgctgctggtc

SEQ ID NO: 77722 - DNA, 25 bp, Homo sapien
ggggatatccacggccttagcctcg

SEQ ID NO: 77723 - DNA, 25 bp, Homo sapien
ctgccttatttaaacctgggccgag

SEQ ID NO: 77724 - DNA, 25 bp, Homo sapien
tagcctcgtcacagtgctgctggtc

SEQ ID NO: 77725 - DNA, 25 bp, Homo sapien
gcgcttgtccttctggggatcatag

SEQ ID NO: 77726 - DNA, 25 bp, Homo sapien
gatcagagactctgaggccaaaaac

SEQ ID NO: 77727 - DNA, 25 bp, Homo sapien
ctctgaggccaaaaacgcatcatac

SEQ ID NO: 77728 - DNA, 25 bp, Homo sapien
gttgagttttttcagcgcctcgatg

SEQ ID NO: 77729 - DNA, 25 bp, Homo sapien
ggggatatccacggccttagcctcg

SEQ ID NO: 77730 - DNA, 25 bp, Homo sapien
gtggaatctgcttgatcagagactc

SEQ ID NO: 77731 - DNA, 25 bp, Homo sapien
ctggggatcatagttcttcaagctg

SEQ ID NO: 77732 - DNA, 25 bp, Homo sapien
gccgaggattcgtggaatctgcttg

SEQ ID NO: 77733 - DNA, 25 bp, Homo sapien
atgttttcgttgtgtgtgagcaggg

SEQ ID NO: 77734 - DNA, 25 bp, Homo sapien
gttgagttttttcagcgcctcgatg

SEQ ID NO: 77735 - DNA, 25 bp, Homo sapien
ctctgaggccaaaaacgcatcatac

SEQ ID NO: 77736 - DNA, 25 bp, Homo sapien
gatcagagactctgaggccaaaaac

SEQ ID NO: 77737 - DNA, 25 bp, Homo sapien
gtggaatctgcttgatcagagactc

SEQ ID NO: 77738 - DNA, 25 bp, Homo sapien
gccgaggattcgtggaatctgcttg

SEQ ID NO: 77739 - DNA, 25 bp, Homo sapien
ctgccttatttaaacctgggccgag

SEQ ID NO: 77740 - DNA, 25 bp, Homo sapien
atgttttcgttgtgtgtgagcaggg

SEQ ID NO: 77741 - DNA, 25 bp, Homo sapien
ctggggatcatagttcttcaagctg

SEQ ID NO: 77742 - DNA, 25 bp, Homo sapien
gcgcttgtccttctggggatcatag

SEQ ID NO: 77743 - DNA, 25 bp, Homo sapien
tagcctcgtcacagtgctgctggtc

SEQ ID NO: 77744 - DNA, 25 bp, Homo sapien
ggggatatccacggccttagcctcg

SEQ ID NO: 77745 - DNA, 25 bp, Homo sapien
ctgccttatttaaacctgggccgag

SEQ ID NO: 77746 - DNA, 25 bp, Homo sapien
ggggatatccacggccttagcctcg

SEQ ID NO: 77747 - DNA, 25 bp, Homo sapien
gccgaggattcgtggaatctgcttg

SEQ ID NO: 77748 - DNA, 25 bp, Homo sapien
atgttttcgttgtgtgtgagcaggg

SEQ ID NO: 77749 - DNA, 25 bp, Homo sapien
gttgagttttttcagcgcctcgatg

SEQ ID NO: 77750 - DNA, 25 bp, Homo sapien
ctctgaggccaaaaacgcatcatac

SEQ ID NO: 77751 - DNA, 25 bp, Homo sapien
gtggaatctgcttgatcagagactc

SEQ ID NO: 77752 - DNA, 25 bp, Homo sapien
gcgcttgtccttctggggatcatag

SEQ ID NO: 77753 - DNA, 25 bp, Homo sapien
gatcagagactctgaggccaaaaac

SEQ ID NO: 77754 - DNA, 25 bp, Homo sapien
ctggggatcatagttcttcaagctg

SEQ ID NO: 77755 - DNA, 25 bp, Homo sapien
tagcctcgtcacagtgctgctggtc

SEQ ID NO: 77756 - DNA, 25 bp, Homo sapien
gttgagttttttcagcgcctcgatg

SEQ ID NO: 77757 - DNA, 25 bp, Homo sapien
ctctgaggccaaaaacgcatcatac

SEQ ID NO: 77758 - DNA, 25 bp, Homo sapien
gatcagagactctgaggccaaaaac

SEQ ID NO: 77759 - DNA, 25 bp, Homo sapien
gtggaatctgcttgatcagagactc

SEQ ID NO: 77760 - DNA, 25 bp, Homo sapien
gccgaggattcgtggaatctgcttg

SEQ ID NO: 77761 - DNA, 25 bp, Homo sapien
ctgccttatttaaacctgggccgag

SEQ ID NO: 77762 - DNA, 25 bp, Homo sapien
atgttttcgttgtgtgtgagcaggg

SEQ ID NO: 77763 - DNA, 25 bp, Homo sapien
ctggggatcatagttcttcaagctg

SEQ ID NO: 77764 - DNA, 25 bp, Homo sapien
gcgcttgtccttctggggatcatag

SEQ ID NO: 77765 - DNA, 25 bp, Homo sapien
tagcctcgtcacagtgctgctggtc

SEQ ID NO: 77766 - DNA, 25 bp, Homo sapien
ggggatatccacggccttagcctcg

SEQ ID NO: 77767 - DNA, 25 bp, Homo sapien
gttgagttttttcagcgcctcgatg

SEQ ID NO: 77768 - DNA, 25 bp, Homo sapien
gatcagagactctgaggccaaaaac

SEQ ID NO: 77769 - DNA, 25 bp, Homo sapien
gtggaatctgcttgatcagagactc

SEQ ID NO: 77770 - DNA, 25 bp, Homo sapien
ggggatatccacggccttagcctcg

SEQ ID NO: 77771 - DNA, 25 bp, Homo sapien
tagcctcgtcacagtgctgctggtc

SEQ ID NO: 77772 - DNA, 25 bp, Homo sapien
gccgaggattcgtggaatctgcttg

SEQ ID NO: 77773 - DNA, 25 bp, Homo sapien
gcgcttgtccttctggggatcatag

SEQ ID NO: 77774 - DNA, 25 bp, Homo sapien
ctgccttatttaaacctgggccgag

SEQ ID NO: 77775 - DNA, 25 bp, Homo sapien
ctctgaggccaaaaacgcatcatac

SEQ ID NO: 77776 - DNA, 25 bp, Homo sapien
atgttttcgttgtgtgtgagcaggg

SEQ ID NO: 77777 - DNA, 25 bp, Homo sapien
ctggggatcatagttcttcaagctg

SEQ ID NO: 77778 - DNA, 25 bp, Homo sapien
gttgagttttttcagcgcctcgatg

SEQ ID NO: 77779 - DNA, 25 bp, Homo sapien
ctctgaggccaaaaacgcatcatac

SEQ ID NO: 77780 - DNA, 25 bp, Homo sapien
gatcagagactctgaggccaaaaac

SEQ ID NO: 77781 - DNA, 25 bp, Homo sapien
gtggaatctgcttgatcagagactc

SEQ ID NO: 77782 - DNA, 25 bp, Homo sapien
gccgaggattcgtggaatctgcttg

SEQ ID NO: 77783 - DNA, 25 bp, Homo sapien
ctgccttatttaaacctgggccgag

SEQ ID NO: 77784 - DNA, 25 bp, Homo sapien
atgttttcgttgtgtgtgagcaggg

SEQ ID NO: 77785 - DNA, 25 bp, Homo sapien
ctggggatcatagttcttcaagctg

SEQ ID NO: 77786 - DNA, 25 bp, Homo sapien
gcgcttgtccttctggggatcatag

SEQ ID NO: 77787 - DNA, 25 bp, Homo sapien
tagcctcgtcacagtgctgctggtc

SEQ ID NO: 77788 - DNA, 25 bp, Homo sapien
ggggatatccacggccttagcctcg

SEQ ID NO: 77789 - DNA, 25 bp, Homo sapien
gccgaggattcgtggaatctgcttg

SEQ ID NO: 77790 - DNA, 25 bp, Homo sapien
ctggggatcatagttcttcaagctg

SEQ ID NO: 77791 - DNA, 25 bp, Homo sapien
ctctgaggccaaaaacgcatcatac

SEQ ID NO: 77792 - DNA, 25 bp, Homo sapien
ctgccttatttaaacctgggccgag

SEQ ID NO: 77793 - DNA, 25 bp, Homo sapien
gtggaatctgcttgatcagagactc

SEQ ID NO: 77794 - DNA, 25 bp, Homo sapien
gcgcttgtccttctggggatcatag

SEQ ID NO: 77795 - DNA, 25 bp, Homo sapien
gatcagagactctgaggccaaaaac

SEQ ID NO: 77796 - DNA, 25 bp, Homo sapien
tagcctcgtcacagtgctgctggtc

SEQ ID NO: 77797 - DNA, 25 bp, Homo sapien
atgttttcgttgtgtgtgagcaggg

SEQ ID NO: 77798 - DNA, 25 bp, Homo sapien
gttgagttttttcagcgcctcgatg

SEQ ID NO: 77799 - DNA, 25 bp, Homo sapien
ggggatatccacggccttagcctcg

SEQ ID NO: 77800 - DNA, 25 bp, Homo sapien
ggggatatccacggccttagcctcg

SEQ ID NO: 77801 - DNA, 25 bp, Homo sapien
gccgaggattcgtggaatctgcttg

SEQ ID NO: 77802 - DNA, 25 bp, Homo sapien
gttgagttttttcagcgcctcgatg

SEQ ID NO: 77803 - DNA, 25 bp, Homo sapien
gatcagagactctgaggccaaaaac

SEQ ID NO: 77804 - DNA, 25 bp, Homo sapien
gcgcttgtccttctggggatcatag

SEQ ID NO: 77805 - DNA, 25 bp, Homo sapien
ctgccttatttaaacctgggccgag

SEQ ID NO: 77806 - DNA, 25 bp, Homo sapien
ctctgaggccaaaaacgcatcatac

SEQ ID NO: 77807 - DNA, 25 bp, Homo sapien
atgttttcgttgtgtgtgagcaggg

SEQ ID NO: 77808 - DNA, 25 bp, Homo sapien
tagcctcgtcacagtgctgctggtc

SEQ ID NO: 77809 - DNA, 25 bp, Homo sapien
gtggaatctgcttgatcagagactc

SEQ ID NO: 77810 - DNA, 25 bp, Homo sapien
ctggggatcatagttcttcaagctg

SEQ ID NO: 77811 - DNA, 25 bp, Homo sapien
gttgagttttttcagcgcctcgatg

SEQ ID NO: 77812 - DNA, 25 bp, Homo sapien
ctctgaggccaaaaacgcatcatac

SEQ ID NO: 77813 - DNA, 25 bp, Homo sapien
gatcagagactctgaggccaaaaac

SEQ ID NO: 77814 - DNA, 25 bp, Homo sapien
gtggaatctgcttgatcagagactc

SEQ ID NO: 77815 - DNA, 25 bp, Homo sapien
gccgaggattcgtggaatctgcttg

SEQ ID NO: 77816 - DNA, 25 bp, Homo sapien
ctgccttatttaaacctgggccgag

SEQ ID NO: 77817 - DNA, 25 bp, Homo sapien
atgttttcgttgtgtgtgagcaggg

SEQ ID NO: 77818 - DNA, 25 bp, Homo sapien
ctggggatcatagttcttcaagctg

SEQ ID NO: 77819 - DNA, 25 bp, Homo sapien
gcgcttgtccttctggggatcatag

SEQ ID NO: 77820 - DNA, 25 bp, Homo sapien
tagcctcgtcacagtgctgctggtc

SEQ ID NO: 77821 - DNA, 25 bp, Homo sapien
ggggatatccacggccttagcctcg

SEQ ID NO: 77822 - DNA, 25 bp, Homo sapien
tagcctcgtcacagtgctgctggtc

SEQ ID NO: 77823 - DNA, 25 bp, Homo sapien
gccgaggattcgtggaatctgcttg

SEQ ID NO: 77824 - DNA, 25 bp, Homo sapien
gatcagagactctgaggccaaaaac

SEQ ID NO: 77825 - DNA, 25 bp, Homo sapien
ctctgaggccaaaaacgcatcatac

SEQ ID NO: 77826 - DNA, 25 bp, Homo sapien
ggggatatccacggccttagcctcg

SEQ ID NO: 77827 - DNA, 25 bp, Homo sapien
ctgccttatttaaacctgggccgag

SEQ ID NO: 77828 - DNA, 25 bp, Homo sapien
gtggaatctgcttgatcagagactc

SEQ ID NO: 77829 - DNA, 25 bp, Homo sapien
gcgcttgtccttctggggatcatag

SEQ ID NO: 77830 - DNA, 25 bp, Homo sapien
atgttttcgttgtgtgtgagcaggg

SEQ ID NO: 77831 - DNA, 25 bp, Homo sapien
gttgagttttttcagcgcctcgatg

SEQ ID NO: 77832 - DNA, 25 bp, Homo sapien
ctggggatcatagttcttcaagctg

SEQ ID NO: 77833 - DNA, 25 bp, Homo sapien
ctggggatcatagttcttcaagctg

SEQ ID NO: 77834 - DNA, 25 bp, Homo sapien
gcgcttgtccttctggggatcatag

SEQ ID NO: 77835 - DNA, 25 bp, Homo sapien
tagcctcgtcacagtgctgctggtc

SEQ ID NO: 77836 - DNA, 25 bp, Homo sapien
ggggatatccacggccttagcctcg

SEQ ID NO: 77837 - DNA, 25 bp, Homo sapien
gttgagttttttcagcgcctcgatg

SEQ ID NO: 77838 - DNA, 25 bp, Homo sapien
ctctgaggccaaaaacgcatcatac

SEQ ID NO: 77839 - DNA, 25 bp, Homo sapien
gatcagagactctgaggccaaaaac

SEQ ID NO: 77840 - DNA, 25 bp, Homo sapien
gtggaatctgcttgatcagagactc

SEQ ID NO: 77841 - DNA, 25 bp, Homo sapien
gccgaggattcgtggaatctgcttg

SEQ ID NO: 77842 - DNA, 25 bp, Homo sapien
ctgccttatttaaacctgggccgag

SEQ ID NO: 77843 - DNA, 25 bp, Homo sapien
atgttttcgttgtgtgtgagcaggg

SEQ ID NO: 77844 - DNA, 25 bp, Homo sapien
gtggaatctgcttgatcagagactc

SEQ ID NO: 77845 - DNA, 25 bp, Homo sapien
ggggatatccacggccttagcctcg

SEQ ID NO: 77846 - DNA, 25 bp, Homo sapien
ctctgaggccaaaaacgcatcatac

SEQ ID NO: 77847 - DNA, 25 bp, Homo sapien
gcgcttgtccttctggggatcatag

SEQ ID NO: 77848 - DNA, 25 bp, Homo sapien
atgttttcgttgtgtgtgagcaggg

SEQ ID NO: 77849 - DNA, 25 bp, Homo sapien
ctggggatcatagttcttcaagctg

SEQ ID NO: 77850 - DNA, 25 bp, Homo sapien
gttgagttttttcagcgcctcgatg

SEQ ID NO: 77851 - DNA, 25 bp, Homo sapien
ctgccttatttaaacctgggccgag

SEQ ID NO: 77852 - DNA, 25 bp, Homo sapien
gccgaggattcgtggaatctgcttg

SEQ ID NO: 77853 - DNA, 25 bp, Homo sapien
tagcctcgtcacagtgctgctggtc

SEQ ID NO: 77854 - DNA, 25 bp, Homo sapien
gatcagagactctgaggccaaaaac

SEQ ID NO: 77855 - DNA, 25 bp, Homo sapien
gttgagttttttcagcgcctcgatg

SEQ ID NO: 77856 - DNA, 25 bp, Homo sapien
ctctgaggccaaaaacgcatcatac

SEQ ID NO: 77857 - DNA, 25 bp, Homo sapien
gatcagagactctgaggccaaaaac

SEQ ID NO: 77858 - DNA, 25 bp, Homo sapien
gtggaatctgcttgatcagagactc

SEQ ID NO: 77859 - DNA, 25 bp, Homo sapien
gccgaggattcgtggaatctgcttg

SEQ ID NO: 77860 - DNA, 25 bp, Homo sapien
ctgccttatttaaacctgggccgag

SEQ ID NO: 77861 - DNA, 25 bp, Homo sapien
atgttttcgttgtgtgtgagcaggg

SEQ ID NO: 77862 - DNA, 25 bp, Homo sapien
ctggggatcatagttcttcaagctg

SEQ ID NO: 77863 - DNA, 25 bp, Homo sapien
gcgcttgtccttctggggatcatag

SEQ ID NO: 77864 - DNA, 25 bp, Homo sapien
tagcctcgtcacagtgctgctggtc

SEQ ID NO: 77865 - DNA, 25 bp, Homo sapien
ggggatatccacggccttagcctcg

SEQ ID NO: 77866 - DNA, 25 bp, Homo sapien
gtggaatctgcttgatcagagactc

SEQ ID NO: 77867 - DNA, 25 bp, Homo sapien
ctctgaggccaaaaacgcatcatac

SEQ ID NO: 77868 - DNA, 25 bp, Homo sapien
ggggatatccacggccttagcctcg

SEQ ID NO: 77869 - DNA, 25 bp, Homo sapien
tagcctcgtcacagtgctgctggtc

SEQ ID NO: 77870 - DNA, 25 bp, Homo sapien
atgttttcgttgtgtgtgagcaggg

SEQ ID NO: 77871 - DNA, 25 bp, Homo sapien
gccgaggattcgtggaatctgcttg

SEQ ID NO: 77872 - DNA, 25 bp, Homo sapien
ctggggatcatagttcttcaagctg

SEQ ID NO: 77873 - DNA, 25 bp, Homo sapien
gcgcttgtccttctggggatcatag

SEQ ID NO: 77874 - DNA, 25 bp, Homo sapien
ctgccttatttaaacctgggccgag

SEQ ID NO: 77875 - DNA, 25 bp, Homo sapien
gttgagttttttcagcgcctcgatg

SEQ ID NO: 77876 - DNA, 25 bp, Homo sapien
gatcagagactctgaggccaaaaac

SEQ ID NO: 77877 - DNA, 25 bp, Homo sapien
gttgagttttttcagcgcctcgatg

SEQ ID NO: 77878 - DNA, 25 bp, Homo sapien
ctctgaggccaaaaacgcatcatac

SEQ ID NO: 77879 - DNA, 25 bp, Homo sapien
gatcagagactctgaggccaaaaac

SEQ ID NO: 77880 - DNA, 25 bp, Homo sapien
gtggaatctgcttgatcagagactc

SEQ ID NO: 77881 - DNA, 25 bp, Homo sapien
gccgaggattcgtggaatctgcttg

SEQ ID NO: 77882 - DNA, 25 bp, Homo sapien
ctgccttatttaaacctgggccgag

SEQ ID NO: 77883 - DNA, 25 bp, Homo sapien
atgttttcgttgtgtgtgagcaggg

SEQ ID NO: 77884 - DNA, 25 bp, Homo sapien
ctggggatcatagttcttcaagctg

SEQ ID NO: 77885 - DNA, 25 bp, Homo sapien
gcgcttgtccttctggggatcatag

SEQ ID NO: 77886 - DNA, 25 bp, Homo sapien
tagcctcgtcacagtgctgctggtc

SEQ ID NO: 77887 - DNA, 25 bp, Homo sapien
ggggatatccacggccttagcctcg

SEQ ID NO: 77888 - DNA, 25 bp, Homo sapien
ctgccttatttaaacctgggccgag

SEQ ID NO: 77889 - DNA, 25 bp, Homo sapien
ctctgaggccaaaaacgcatcatac

SEQ ID NO: 77890 - DNA, 25 bp, Homo sapien
gtggaatctgcttgatcagagactc

SEQ ID NO: 77891 - DNA, 25 bp, Homo sapien
ggggatatccacggccttagcctcg

SEQ ID NO: 77892 - DNA, 25 bp, Homo sapien
ctggggatcatagttcttcaagctg

SEQ ID NO: 77893 - DNA, 25 bp, Homo sapien
gccgaggattcgtggaatctgcttg

SEQ ID NO: 77894 - DNA, 25 bp, Homo sapien
gttgagttttttcagcgcctcgatg

SEQ ID NO: 77895 - DNA, 25 bp, Homo sapien
gatcagagactctgaggccaaaaac

SEQ ID NO: 77896 - DNA, 25 bp, Homo sapien
gcgcttgtccttctggggatcatag

SEQ ID NO: 77897 - DNA, 25 bp, Homo sapien
tagcctcgtcacagtgctgctggtc

SEQ ID NO: 77898 - DNA, 25 bp, Homo sapien
atgttttcgttgtgtgtgagcaggg

SEQ ID NO: 77899 - DNA, 25 bp, Homo sapien
gttgagttttttcagcgcctcgatg

SEQ ID NO: 77900 - DNA, 25 bp, Homo sapien
ctctgaggccaaaaacgcatcatac

SEQ ID NO: 77901 - DNA, 25 bp, Homo sapien
gatcagagactctgaggccaaaaac

SEQ ID NO: 77902 - DNA, 25 bp, Homo sapien
gtggaatctgcttgatcagagactc

SEQ ID NO: 77903 - DNA, 25 bp, Homo sapien
gccgaggattcgtggaatctgcttg

SEQ ID NO: 77904 - DNA, 25 bp, Homo sapien
ctgccttatttaaacctgggccgag

SEQ ID NO: 77905 - DNA, 25 bp, Homo sapien
atgttttcgttgtgtgtgagcaggg

SEQ ID NO: 77906 - DNA, 25 bp, Homo sapien
ctggggatcatagttcttcaagctg

SEQ ID NO: 77907 - DNA, 25 bp, Homo sapien
gcgcttgtccttctggggatcatag

SEQ ID NO: 77908 - DNA, 25 bp, Homo sapien
tagcctcgtcacagtgctgctggtc

SEQ ID NO: 77909 - DNA, 25 bp, Homo sapien
ggggatatccacggccttagcctcg

SEQ ID NO: 77910 - DNA, 25 bp, Homo sapien
gcgcttgtccttctggggatcatag

SEQ ID NO: 77911 - DNA, 25 bp, Homo sapien
ctctgaggccaaaaacgcatcatac

SEQ ID NO: 77912 - DNA, 25 bp, Homo sapien
gtggaatctgcttgatcagagactc

SEQ ID NO: 77913 - DNA, 25 bp, Homo sapien
gatcagagactctgaggccaaaaac

SEQ ID NO: 77914 - DNA, 25 bp, Homo sapien
gccgaggattcgtggaatctgcttg

SEQ ID NO: 77915 - DNA, 25 bp, Homo sapien
ggggatatccacggccttagcctcg

SEQ ID NO: 77916 - DNA, 25 bp, Homo sapien
ctgccttatttaaacctgggccgag

SEQ ID NO: 77917 - DNA, 25 bp, Homo sapien
ctggggatcatagttcttcaagctg

SEQ ID NO: 77918 - DNA, 25 bp, Homo sapien
tagcctcgtcacagtgctgctggtc

SEQ ID NO: 77919 - DNA, 25 bp, Homo sapien
gttgagttttttcagcgcctcgatg

SEQ ID NO: 77920 - DNA, 25 bp, Homo sapien
atgttttcgttgtgtgtgagcaggg

SEQ ID NO: 77921 - DNA, 25 bp, Homo sapien
gttgagttttttcagcgcctcgatg

SEQ ID NO: 77922 - DNA, 25 bp, Homo sapien
ctctgaggccaaaaacgcatcatac

SEQ ID NO: 77923 - DNA, 25 bp, Homo sapien
gatcagagactctgaggccaaaaac

SEQ ID NO: 77924 - DNA, 25 bp, Homo sapien
gtggaatctgcttgatcagagactc

SEQ ID NO: 77925 - DNA, 25 bp, Homo sapien
gccgaggattcgtggaatctgcttg

SEQ ID NO: 77926 - DNA, 25 bp, Homo sapien
ctgccttatttaaacctgggccgag

SEQ ID NO: 77927 - DNA, 25 bp, Homo sapien
atgttttcgttgtgtgtgagcaggg

SEQ ID NO: 77928 - DNA, 25 bp, Homo sapien
ctggggatcatagttcttcaagctg

SEQ ID NO: 77929 - DNA, 25 bp, Homo sapien
gcgcttgtccttctggggatcatag

SEQ ID NO: 77930 - DNA, 25 bp, Homo sapien
tagcctcgtcacagtgctgctggtc

SEQ ID NO: 77931 - DNA, 25 bp, Homo sapien
ggggatatccacggccttagcctcg

SEQ ID NO: 77932 - DNA, 25 bp, Homo sapien
gttgagttttttcagcgcctcgatg

SEQ ID NO: 77933 - DNA, 25 bp, Homo sapien
ctctgaggccaaaaacgcatcatac

SEQ ID NO: 77934 - DNA, 25 bp, Homo sapien
gatcagagactctgaggccaaaaac

SEQ ID NO: 77935 - DNA, 25 bp, Homo sapien
gtggaatctgcttgatcagagactc

SEQ ID NO: 77936 - DNA, 25 bp, Homo sapien
gccgaggattcgtggaatctgcttg

SEQ ID NO: 77937 - DNA, 25 bp, Homo sapien
ctgccttatttaaacctgggccgag

SEQ ID NO: 77938 - DNA, 25 bp, Homo sapien
atgttttcgttgtgtgtgagcaggg

SEQ ID NO: 77939 - DNA, 25 bp, Homo sapien
ctggggatcatagttcttcaagctg

SEQ ID NO: 77940 - DNA, 25 bp, Homo sapien
gcgcttgtccttctggggatcatag

SEQ ID NO: 77941 - DNA, 25 bp, Homo sapien
tagcctcgtcacagtgctgctggtc

SEQ ID NO: 77942 - DNA, 25 bp, Homo sapien
ggggatatccacggccttagcctcg

SEQ ID NO: 77943 - DNA, 25 bp, Homo sapien
gcgcttgtccttctggggatcatag

SEQ ID NO: 77944 - DNA, 25 bp, Homo sapien
atgttttcgttgtgtgtgagcaggg

SEQ ID NO: 77945 - DNA, 25 bp, Homo sapien
ctggggatcatagttcttcaagctg

SEQ ID NO: 77946 - DNA, 25 bp, Homo sapien
gatcagagactctgaggccaaaaac

SEQ ID NO: 77947 - DNA, 25 bp, Homo sapien
gccgaggattcgtggaatctgcttg

SEQ ID NO: 77948 - DNA, 25 bp, Homo sapien
ctctgaggccaaaaacgcatcatac

SEQ ID NO: 77949 - DNA, 25 bp, Homo sapien
ggggatatccacggccttagcctcg

SEQ ID NO: 77950 - DNA, 25 bp, Homo sapien
gtggaatctgcttgatcagagactc

SEQ ID NO: 77951 - DNA, 25 bp, Homo sapien
ctgccttatttaaacctgggccgag

SEQ ID NO: 77952 - DNA, 25 bp, Homo sapien
tagcctcgtcacagtgctgctggtc

SEQ ID NO: 77953 - DNA, 25 bp, Homo sapien
gttgagttttttcagcgcctcgatg

SEQ ID NO: 77954 - DNA, 25 bp, Homo sapien
gttgagttttttcagcgcctcgatg

SEQ ID NO: 77955 - DNA, 25 bp, Homo sapien
ctctgaggccaaaaacgcatcatac

SEQ ID NO: 77956 - DNA, 25 bp, Homo sapien
gatcagagactctgaggccaaaaac

SEQ ID NO: 77957 - DNA, 25 bp, Homo sapien
gtggaatctgcttgatcagagactc

SEQ ID NO: 77958 - DNA, 25 bp, Homo sapien
gccgaggattcgtggaatctgcttg

SEQ ID NO: 77959 - DNA, 25 bp, Homo sapien
ctgccttatttaaacctgggccgag

SEQ ID NO: 77960 - DNA, 25 bp, Homo sapien
atgttttcgttgtgtgtgagcaggg

SEQ ID NO: 77961 - DNA, 25 bp, Homo sapien
ctggggatcatagttcttcaagctg

SEQ ID NO: 77962 - DNA, 25 bp, Homo sapien
gcgcttgtccttctggggatcatag

SEQ ID NO: 77963 - DNA, 25 bp, Homo sapien
tagcctcgtcacagtgctgctggtc

SEQ ID NO: 77964 - DNA, 25 bp, Homo sapien
ggggatatccacggccttagcctcg

SEQ ID NO: 77965 - DNA, 25 bp, Homo sapien
gatcagagactctgaggccaaaaac

SEQ ID NO: 77966 - DNA, 25 bp, Homo sapien
gtggaatctgcttgatcagagactc

SEQ ID NO: 77967 - DNA, 25 bp, Homo sapien
ctctgaggccaaaaacgcatcatac

SEQ ID NO: 77968 - DNA, 25 bp, Homo sapien
atgttttcgttgtgtgtgagcaggg

SEQ ID NO: 77969 - DNA, 25 bp, Homo sapien
gttgagttttttcagcgcctcgatg

SEQ ID NO: 77970 - DNA, 25 bp, Homo sapien
tagcctcgtcacagtgctgctggtc

SEQ ID NO: 77971 - DNA, 25 bp, Homo sapien
ctgccttatttaaacctgggccgag

SEQ ID NO: 77972 - DNA, 25 bp, Homo sapien
gcgcttgtccttctggggatcatag

SEQ ID NO: 77973 - DNA, 25 bp, Homo sapien
ggggatatccacggccttagcctcg

SEQ ID NO: 77974 - DNA, 25 bp, Homo sapien
gccgaggattcgtggaatctgcttg

SEQ ID NO: 77975 - DNA, 25 bp, Homo sapien
ctggggatcatagttcttcaagctg

SEQ ID NO: 77976 - DNA, 25 bp, Homo sapien
gttgagttttttcagcgcctcgatg

SEQ ID NO: 77977 - DNA, 25 bp, Homo sapien
ctctgaggccaaaaacgcatcatac

SEQ ID NO: 77978 - DNA, 25 bp, Homo sapien
gatcagagactctgaggccaaaaac

SEQ ID NO: 77979 - DNA, 25 bp, Homo sapien
gtggaatctgcttgatcagagactc

SEQ ID NO: 77980 - DNA, 25 bp, Homo sapien
gccgaggattcgtggaatctgcttg

SEQ ID NO: 77981 - DNA, 25 bp, Homo sapien
ctgccttatttaaacctgggccgag

SEQ ID NO: 77982 - DNA, 25 bp, Homo sapien
atgttttcgttgtgtgtgagcaggg

SEQ ID NO: 77983 - DNA, 25 bp, Homo sapien
ctggggatcatagttcttcaagctg

SEQ ID NO: 77984 - DNA, 25 bp, Homo sapien
gcgcttgtccttctggggatcatag

SEQ ID NO: 77985 - DNA, 25 bp, Homo sapien
tagcctcgtcacagtgctgctggtc

SEQ ID NO: 77986 - DNA, 25 bp, Homo sapien
ggggatatccacggccttagcctcg

SEQ ID NO: 77987 - DNA, 25 bp, Homo sapien
ctgccttatttaaacctgggccgag

SEQ ID NO: 77988 - DNA, 25 bp, Homo sapien
ctggggatcatagttcttcaagctg

SEQ ID NO: 77989 - DNA, 25 bp, Homo sapien
atgttttcgttgtgtgtgagcaggg

SEQ ID NO: 77990 - DNA, 25 bp, Homo sapien
tagcctcgtcacagtgctgctggtc

SEQ ID NO: 77991 - DNA, 25 bp, Homo sapien
gcgcttgtccttctggggatcatag

SEQ ID NO: 77992 - DNA, 25 bp, Homo sapien
ctctgaggccaaaaacgcatcatac

SEQ ID NO: 77993 - DNA, 25 bp, Homo sapien
gtggaatctgcttgatcagagactc

SEQ ID NO: 77994 - DNA, 25 bp, Homo sapien
ggggatatccacggccttagcctcg

SEQ ID NO: 77995 - DNA, 25 bp, Homo sapien
gccgaggattcgtggaatctgcttg

SEQ ID NO: 77996 - DNA, 25 bp, Homo sapien
gttgagttttttcagcgcctcgatg

SEQ ID NO: 77997 - DNA, 25 bp, Homo sapien
gatcagagactctgaggccaaaaac

SEQ ID NO: 77998 - DNA, 25 bp, Homo sapien
gttgagttttttcagcgcctcgatg

SEQ ID NO: 77999 - DNA, 25 bp, Homo sapien
ctctgaggccaaaaacgcatcatac

SEQ ID NO: 78000 - DNA, 25 bp, Homo sapien
gatcagagactctgaggccaaaaac

SEQ ID NO: 78001 - DNA, 25 bp, Homo sapien
gtggaatctgcttgatcagagactc

SEQ ID NO: 78002 - DNA, 25 bp, Homo sapien
gccgaggattcgtggaatctgcttg

SEQ ID NO: 78003 - DNA, 25 bp, Homo sapien
ctgccttatttaaacctgggccgag

SEQ ID NO: 78004 - DNA, 25 bp, Homo sapien
atgttttcgttgtgtgtgagcaggg

SEQ ID NO: 78005 - DNA, 25 bp, Homo sapien
ctggggatcatagttcttcaagctg

SEQ ID NO: 78006 - DNA, 25 bp, Homo sapien
gcgcttgtccttctggggatcatag

SEQ ID NO: 78007 - DNA, 25 bp, Homo sapien
tagcctcgtcacagtgctgctggtc

SEQ ID NO: 78008 - DNA, 25 bp, Homo sapien
ggggatatccacggccttagcctcg

SEQ ID NO: 78009 - DNA, 25 bp, Homo sapien
ctggggatcatagttcttcaagctg

SEQ ID NO: 78010 - DNA, 25 bp, Homo sapien
ctctgaggccaaaaacgcatcatac

SEQ ID NO: 78011 - DNA, 25 bp, Homo sapien
gttgagttttttcagcgcctcgatg

SEQ ID NO: 78012 - DNA, 25 bp, Homo sapien
gtggaatctgcttgatcagagactc

SEQ ID NO: 78013 - DNA, 25 bp, Homo sapien
gccgaggattcgtggaatctgcttg

SEQ ID NO: 78014 - DNA, 25 bp, Homo sapien
tagcctcgtcacagtgctgctggtc

SEQ ID NO: 78015 - DNA, 25 bp, Homo sapien
ggggatatccacggccttagcctcg

SEQ ID NO: 78016 - DNA, 25 bp, Homo sapien
ctgccttatttaaacctgggccgag

SEQ ID NO: 78017 - DNA, 25 bp, Homo sapien
gcgcttgtccttctggggatcatag

SEQ ID NO: 78018 - DNA, 25 bp, Homo sapien
gatcagagactctgaggccaaaaac

SEQ ID NO: 78019 - DNA, 25 bp, Homo sapien
atgttttcgttgtgtgtgagcaggg

SEQ ID NO: 78020 - DNA, 25 bp, Homo sapien
gttgagttttttcagcgcctcgatg

SEQ ID NO: 78021 - DNA, 25 bp, Homo sapien
ctctgaggccaaaaacgcatcatac

SEQ ID NO: 78022 - DNA, 25 bp, Homo sapien
gatcagagactctgaggccaaaaac

SEQ ID NO: 78023 - DNA, 25 bp, Homo sapien
gtggaatctgcttgatcagagactc

SEQ ID NO: 78024 - DNA, 25 bp, Homo sapien
gccgaggattcgtggaatctgcttg

SEQ ID NO: 78025 - DNA, 25 bp, Homo sapien
ctgccttatttaaacctgggccgag

SEQ ID NO: 78026 - DNA, 25 bp, Homo sapien
atgttttcgttgtgtgtgagcaggg

SEQ ID NO: 78027 - DNA, 25 bp, Homo sapien
ctggggatcatagttcttcaagctg

SEQ ID NO: 78028 - DNA, 25 bp, Homo sapien
gcgcttgtccttctggggatcatag

SEQ ID NO: 78029 - DNA, 25 bp, Homo sapien
tagcctcgtcacagtgctgctggtc

SEQ ID NO: 78030 - DNA, 25 bp, Homo sapien
ggggatatccacggccttagcctcg

SEQ ID NO: 78031 - DNA, 25 bp, Homo sapien
gatcagagactctgaggccaaaaac

SEQ ID NO: 78032 - DNA, 25 bp, Homo sapien
ggggatatccacggccttagcctcg

SEQ ID NO: 78033 - DNA, 25 bp, Homo sapien
tagcctcgtcacagtgctgctggtc

SEQ ID NO: 78034 - DNA, 25 bp, Homo sapien
ctgccttatttaaacctgggccgag

SEQ ID NO: 78035 - DNA, 25 bp, Homo sapien
ctctgaggccaaaaacgcatcatac

SEQ ID NO: 78036 - DNA, 25 bp, Homo sapien
gttgagttttttcagcgcctcgatg

SEQ ID NO: 78037 - DNA, 25 bp, Homo sapien
ctggggatcatagttcttcaagctg

SEQ ID NO: 78038 - DNA, 25 bp, Homo sapien
gcgcttgtccttctggggatcatag

SEQ ID NO: 78039 - DNA, 25 bp, Homo sapien
gtggaatctgcttgatcagagactc

SEQ ID NO: 78040 - DNA, 25 bp, Homo sapien
gccgaggattcgtggaatctgcttg

SEQ ID NO: 78041 - DNA, 25 bp, Homo sapien
atgttttcgttgtgtgtgagcaggg

SEQ ID NO: 78042 - DNA, 25 bp, Homo sapien
ggggatatccacggccttagcctcg

SEQ ID NO: 78043 - DNA, 25 bp, Homo sapien
gccgaggattcgtggaatctgcttg

SEQ ID NO: 78044 - DNA, 25 bp, Homo sapien
gttgagttttttcagcgcctcgatg

SEQ ID NO: 78045 - DNA, 25 bp, Homo sapien
gatcagagactctgaggccaaaaac

SEQ ID NO: 78046 - DNA, 25 bp, Homo sapien
ctctgaggccaaaaacgcatcatac

SEQ ID NO: 78047 - DNA, 25 bp, Homo sapien
gcgcttgtccttctggggatcatag

SEQ ID NO: 78048 - DNA, 25 bp, Homo sapien
tagcctcgtcacagtgctgctggtc

SEQ ID NO: 78049 - DNA, 25 bp, Homo sapien
ctgccttatttaaacctgggccgag

SEQ ID NO: 78050 - DNA, 25 bp, Homo sapien
atgttttcgttgtgtgtgagcaggg

SEQ ID NO: 78051 - DNA, 25 bp, Homo sapien
ctggggatcatagttcttcaagctg

SEQ ID NO: 78052 - DNA, 25 bp, Homo sapien
gtggaatctgcttgatcagagactc

SEQ ID NO: 78053 - DNA, 25 bp, Homo sapien
gttgagttttttcagcgcctcgatg

SEQ ID NO: 78054 - DNA, 25 bp, Homo sapien
ctctgaggccaaaaacgcatcatac

SEQ ID NO: 78055 - DNA, 25 bp, Homo sapien
gatcagagactctgaggccaaaaac

SEQ ID NO: 78056 - DNA, 25 bp, Homo sapien
gtggaatctgcttgatcagagactc

SEQ ID NO: 78057 - DNA, 25 bp, Homo sapien
gccgaggattcgtggaatctgcttg

SEQ ID NO: 78058 - DNA, 25 bp, Homo sapien
ctgccttatttaaacctgggccgag

SEQ ID NO: 78059 - DNA, 25 bp, Homo sapien
atgttttcgttgtgtgtgagcaggg

SEQ ID NO: 78060 - DNA, 25 bp, Homo sapien
ctggggatcatagttcttcaagctg

SEQ ID NO: 78061 - DNA, 25 bp, Homo sapien
gcgcttgtccttctggggatcatag

SEQ ID NO: 78062 - DNA, 25 bp, Homo sapien
tagcctcgtcacagtgctgctggtc

SEQ ID NO: 78063 - DNA, 25 bp, Homo sapien
ggggatatccacggccttagcctcg

SEQ ID NO: 78064 - DNA, 25 bp, Homo sapien
atgttttcgttgtgtgtgagcaggg

SEQ ID NO: 78065 - DNA, 25 bp, Homo sapien
gtggaatctgcttgatcagagactc

SEQ ID NO: 78066 - DNA, 25 bp, Homo sapien
ggggatatccacggccttagcctcg

SEQ ID NO: 78067 - DNA, 25 bp, Homo sapien
gttgagttttttcagcgcctcgatg

SEQ ID NO: 78068 - DNA, 25 bp, Homo sapien
gatcagagactctgaggccaaaaac

SEQ ID NO: 78069 - DNA, 25 bp, Homo sapien
tagcctcgtcacagtgctgctggtc

SEQ ID NO: 78070 - DNA, 25 bp, Homo sapien
ctggggatcatagttcttcaagctg

SEQ ID NO: 78071 - DNA, 25 bp, Homo sapien
ctgccttatttaaacctgggccgag

SEQ ID NO: 78072 - DNA, 25 bp, Homo sapien
ctctgaggccaaaaacgcatcatac

SEQ ID NO: 78073 - DNA, 25 bp, Homo sapien
gccgaggattcgtggaatctgcttg

SEQ ID NO: 78074 - DNA, 25 bp, Homo sapien
gcgcttgtccttctggggatcatag

SEQ ID NO: 78075 - DNA, 25 bp, Homo sapien
gttgagttttttcagcgcctcgatg

SEQ ID NO: 78076 - DNA, 25 bp, Homo sapien
ctctgaggccaaaaacgcatcatac

SEQ ID NO: 78077 - DNA, 25 bp, Homo sapien
gatcagagactctgaggccaaaaac

SEQ ID NO: 78078 - DNA, 25 bp, Homo sapien
gtggaatctgcttgatcagagactc

SEQ ID NO: 78079 - DNA, 25 bp, Homo sapien
gccgaggattcgtggaatctgcttg

SEQ ID NO: 78080 - DNA, 25 bp, Homo sapien
ctgccttatttaaacctgggccgag

SEQ ID NO: 78081 - DNA, 25 bp, Homo sapien
atgttttcgttgtgtgtgagcaggg

SEQ ID NO: 78082 - DNA, 25 bp, Homo sapien
ctggggatcatagttcttcaagctg

SEQ ID NO: 78083 - DNA, 25 bp, Homo sapien
gcgcttgtccttctggggatcatag

SEQ ID NO: 78084 - DNA, 25 bp, Homo sapien
tagcctcgtcacagtgctgctggtc

SEQ ID NO: 78085 - DNA, 25 bp, Homo sapien
ggggatatccacggccttagcctcg

SEQ ID NO: 78086 - DNA, 25 bp, Homo sapien
tagcctcgtcacagtgctgctggtc

SEQ ID NO: 78087 - DNA, 25 bp, Homo sapien
gccgaggattcgtggaatctgcttg

SEQ ID NO: 78088 - DNA, 25 bp, Homo sapien
gtggaatctgcttgatcagagactc

SEQ ID NO: 78089 - DNA, 25 bp, Homo sapien
atgttttcgttgtgtgtgagcaggg

SEQ ID NO: 78090 - DNA, 25 bp, Homo sapien
ctgccttatttaaacctgggccgag

SEQ ID NO: 78091 - DNA, 25 bp, Homo sapien
gttgagttttttcagcgcctcgatg

SEQ ID NO: 78092 - DNA, 25 bp, Homo sapien
ggggatatccacggccttagcctcg

SEQ ID NO: 78093 - DNA, 25 bp, Homo sapien
gatcagagactctgaggccaaaaac

SEQ ID NO: 78094 - DNA, 25 bp, Homo sapien
ctggggatcatagttcttcaagctg

SEQ ID NO: 78095 - DNA, 25 bp, Homo sapien
ctctgaggccaaaaacgcatcatac

SEQ ID NO: 78096 - DNA, 25 bp, Homo sapien
gcgcttgtccttctggggatcatag

SEQ ID NO: 78097 - DNA, 25 bp, Homo sapien
gttgagttttttcagcgcctcgatg

SEQ ID NO: 78098 - DNA, 25 bp, Homo sapien
ctctgaggccaaaaacgcatcatac

SEQ ID NO: 78099 - DNA, 25 bp, Homo sapien
gatcagagactctgaggccaaaaac

SEQ ID NO: 78100 - DNA, 25 bp, Homo sapien
gtggaatctgcttgatcagagactc

SEQ ID NO: 78101 - DNA, 25 bp, Homo sapien
gccgaggattcgtggaatctgcttg

SEQ ID NO: 78102 - DNA, 25 bp, Homo sapien
ctgccttatttaaacctgggccgag

SEQ ID NO: 78103 - DNA, 25 bp, Homo sapien
atgttttcgttgtgtgtgagcaggg

SEQ ID NO: 78104 - DNA, 25 bp, Homo sapien
ctggggatcatagttcttcaagctg

SEQ ID NO: 78105 - DNA, 25 bp, Homo sapien
gcgcttgtccttctggggatcatag

SEQ ID NO: 78106 - DNA, 25 bp, Homo sapien
tagcctcgtcacagtgctgctggtc

SEQ ID NO: 78107 - DNA, 25 bp, Homo sapien
ggggatatccacggccttagcctcg

SEQ ID NO: 78108 - DNA, 25 bp, Homo sapien
atgtaatgaattggggtaaagaaaa

SEQ ID NO: 78109 - DNA, 25 bp, Homo sapien
acatgcaggtcaataggttaggtta

SEQ ID NO: 78110 - DNA, 25 bp, Homo sapien
cgctagggaaacttttaaatgttca

SEQ ID NO: 78111 - DNA, 25 bp, Homo sapien
gaaccagtaaagcaaactcaagatt

SEQ ID NO: 78112 - DNA, 25 bp, Homo sapien
actcaagattgagcctccatgtaat

SEQ ID NO: 78113 - DNA, 25 bp, Homo sapien
taggttacaaaaggttgttcacaca

SEQ ID NO: 78114 - DNA, 25 bp, Homo sapien
agtaaacaatatacagttggataac

SEQ ID NO: 78115 - DNA, 25 bp, Homo sapien
tttatgacagcaggtcctaaactgc

SEQ ID NO: 78116 - DNA, 25 bp, Homo sapien
cattttgctaaggaatggcccgcta

SEQ ID NO: 78117 - DNA, 25 bp, Homo sapien
ttagtcaatgtagcaacagggattc

SEQ ID NO: 78118 - DNA, 25 bp, Homo sapien
tcctaaactgccaacacctctaacc

SEQ ID NO: 78119 - DNA, 25 bp, Homo sapien
cgctagggaaacttttaaatgttca

SEQ ID NO: 78120 - DNA, 25 bp, Homo sapien
cattttgctaaggaatggcccgcta

SEQ ID NO: 78121 - DNA, 25 bp, Homo sapien
ttagtcaatgtagcaacagggattc

SEQ ID NO: 78122 - DNA, 25 bp, Homo sapien
tcctaaactgccaacacctctaacc

SEQ ID NO: 78123 - DNA, 25 bp, Homo sapien
tttatgacagcaggtcctaaactgc

SEQ ID NO: 78124 - DNA, 25 bp, Homo sapien
taggttacaaaaggttgttcacaca

SEQ ID NO: 78125 - DNA, 25 bp, Homo sapien
acatgcaggtcaataggttaggtta

SEQ ID NO: 78126 - DNA, 25 bp, Homo sapien
atgtaatgaattggggtaaagaaaa

SEQ ID NO: 78127 - DNA, 25 bp, Homo sapien
actcaagattgagcctccatgtaat

SEQ ID NO: 78128 - DNA, 25 bp, Homo sapien
gaaccagtaaagcaaactcaagatt

SEQ ID NO: 78129 - DNA, 25 bp, Homo sapien
agtaaacaatatacagttggataac

SEQ ID NO: 78130 - DNA, 25 bp, Homo sapien
tcctaaactgccaacacctctaacc

SEQ ID NO: 78131 - DNA, 25 bp, Homo sapien
acatgcaggtcaataggttaggtta

SEQ ID NO: 78132 - DNA, 25 bp, Homo sapien
gaaccagtaaagcaaactcaagatt

SEQ ID NO: 78133 - DNA, 25 bp, Homo sapien
atgtaatgaattggggtaaagaaaa

SEQ ID NO: 78134 - DNA, 25 bp, Homo sapien
cgctagggaaacttttaaatgttca

SEQ ID NO: 78135 - DNA, 25 bp, Homo sapien
actcaagattgagcctccatgtaat

SEQ ID NO: 78136 - DNA, 25 bp, Homo sapien
taggttacaaaaggttgttcacaca

SEQ ID NO: 78137 - DNA, 25 bp, Homo sapien
agtaaacaatatacagttggataac

SEQ ID NO: 78138 - DNA, 25 bp, Homo sapien
tttatgacagcaggtcctaaactgc

SEQ ID NO: 78139 - DNA, 25 bp, Homo sapien
cattttgctaaggaatggcccgcta

SEQ ID NO: 78140 - DNA, 25 bp, Homo sapien
ttagtcaatgtagcaacagggattc

SEQ ID NO: 78141 - DNA, 25 bp, Homo sapien
gaaccagtaaagcaaactcaagatt

SEQ ID NO: 78142 - DNA, 25 bp, Homo sapien
agtaaacaatatacagttggataac

SEQ ID NO: 78143 - DNA, 25 bp, Homo sapien
cgctagggaaacttttaaatgttca

SEQ ID NO: 78144 - DNA, 25 bp, Homo sapien
cattttgctaaggaatggcccgcta

SEQ ID NO: 78145 - DNA, 25 bp, Homo sapien
ttagtcaatgtagcaacagggattc

SEQ ID NO: 78146 - DNA, 25 bp, Homo sapien
tcctaaactgccaacacctctaacc

SEQ ID NO: 78147 - DNA, 25 bp, Homo sapien
tttatgacagcaggtcctaaactgc

SEQ ID NO: 78148 - DNA, 25 bp, Homo sapien
taggttacaaaaggttgttcacaca

SEQ ID NO: 78149 - DNA, 25 bp, Homo sapien
acatgcaggtcaataggttaggtta

SEQ ID NO: 78150 - DNA, 25 bp, Homo sapien
atgtaatgaattggggtaaagaaaa

SEQ ID NO: 78151 - DNA, 25 bp, Homo sapien
actcaagattgagcctccatgtaat

SEQ ID NO: 78152 - DNA, 25 bp, Homo sapien
acatgcaggtcaataggttaggtta

SEQ ID NO: 78153 - DNA, 25 bp, Homo sapien
cattttgctaaggaatggcccgcta

SEQ ID NO: 78154 - DNA, 25 bp, Homo sapien
atgtaatgaattggggtaaagaaaa

SEQ ID NO: 78155 - DNA, 25 bp, Homo sapien
tcctaaactgccaacacctctaacc

SEQ ID NO: 78156 - DNA, 25 bp, Homo sapien
actcaagattgagcctccatgtaat

SEQ ID NO: 78157 - DNA, 25 bp, Homo sapien
cgctagggaaacttttaaatgttca

SEQ ID NO: 78158 - DNA, 25 bp, Homo sapien
tttatgacagcaggtcctaaactgc

SEQ ID NO: 78159 - DNA, 25 bp, Homo sapien
ttagtcaatgtagcaacagggattc

SEQ ID NO: 78160 - DNA, 25 bp, Homo sapien
taggttacaaaaggttgttcacaca

SEQ ID NO: 78161 - DNA, 25 bp, Homo sapien
agtaaacaatatacagttggataac

SEQ ID NO: 78162 - DNA, 25 bp, Homo sapien
gaaccagtaaagcaaactcaagatt

SEQ ID NO: 78163 - DNA, 25 bp, Homo sapien
cgctagggaaacttttaaatgttca

SEQ ID NO: 78164 - DNA, 25 bp, Homo sapien
cattttgctaaggaatggcccgcta

SEQ ID NO: 78165 - DNA, 25 bp, Homo sapien
ttagtcaatgtagcaacagggattc

SEQ ID NO: 78166 - DNA, 25 bp, Homo sapien
tcctaaactgccaacacctctaacc

SEQ ID NO: 78167 - DNA, 25 bp, Homo sapien
tttatgacagcaggtcctaaactgc

SEQ ID NO: 78168 - DNA, 25 bp, Homo sapien
taggttacaaaaggttgttcacaca

SEQ ID NO: 78169 - DNA, 25 bp, Homo sapien
acatgcaggtcaataggttaggtta

SEQ ID NO: 78170 - DNA, 25 bp, Homo sapien
atgtaatgaattggggtaaagaaaa

SEQ ID NO: 78171 - DNA, 25 bp, Homo sapien
actcaagattgagcctccatgtaat

SEQ ID NO: 78172 - DNA, 25 bp, Homo sapien
gaaccagtaaagcaaactcaagatt

SEQ ID NO: 78173 - DNA, 25 bp, Homo sapien
agtaaacaatatacagttggataac

SEQ ID NO: 78174 - DNA, 25 bp, Homo sapien
cgctagggaaacttttaaatgttca

SEQ ID NO: 78175 - DNA, 25 bp, Homo sapien
cattttgctaaggaatggcccgcta

SEQ ID NO: 78176 - DNA, 25 bp, Homo sapien
ttagtcaatgtagcaacagggattc

SEQ ID NO: 78177 - DNA, 25 bp, Homo sapien
tcctaaactgccaacacctctaacc

SEQ ID NO: 78178 - DNA, 25 bp, Homo sapien
tttatgacagcaggtcctaaactgc

SEQ ID NO: 78179 - DNA, 25 bp, Homo sapien
taggttacaaaaggttgttcacaca

SEQ ID NO: 78180 - DNA, 25 bp, Homo sapien
acatgcaggtcaataggttaggtta

SEQ ID NO: 78181 - DNA, 25 bp, Homo sapien
atgtaatgaattggggtaaagaaaa

SEQ ID NO: 78182 - DNA, 25 bp, Homo sapien
actcaagattgagcctccatgtaat

SEQ ID NO: 78183 - DNA, 25 bp, Homo sapien
gaaccagtaaagcaaactcaagatt

SEQ ID NO: 78184 - DNA, 25 bp, Homo sapien
agtaaacaatatacagttggataac

SEQ ID NO: 78185 - DNA, 25 bp, Homo sapien
cattttgctaaggaatggcccgcta

SEQ ID NO: 78186 - DNA, 25 bp, Homo sapien
taggttacaaaaggttgttcacaca

SEQ ID NO: 78187 - DNA, 25 bp, Homo sapien
actcaagattgagcctccatgtaat

SEQ ID NO: 78188 - DNA, 25 bp, Homo sapien
gaaccagtaaagcaaactcaagatt

SEQ ID NO: 78189 - DNA, 25 bp, Homo sapien
agtaaacaatatacagttggataac

SEQ ID NO: 78190 - DNA, 25 bp, Homo sapien
atgtaatgaattggggtaaagaaaa

SEQ ID NO: 78191 - DNA, 25 bp, Homo sapien
tttatgacagcaggtcctaaactgc

SEQ ID NO: 78192 - DNA, 25 bp, Homo sapien
ttagtcaatgtagcaacagggattc

SEQ ID NO: 78193 - DNA, 25 bp, Homo sapien
tcctaaactgccaacacctctaacc

SEQ ID NO: 78194 - DNA, 25 bp, Homo sapien
cgctagggaaacttttaaatgttca

SEQ ID NO: 78195 - DNA, 25 bp, Homo sapien
acatgcaggtcaataggttaggtta

SEQ ID NO: 78196 - DNA, 25 bp, Homo sapien
cgctagggaaacttttaaatgttca

SEQ ID NO: 78197 - DNA, 25 bp, Homo sapien
cattttgctaaggaatggcccgcta

SEQ ID NO: 78198 - DNA, 25 bp, Homo sapien
ttagtcaatgtagcaacagggattc

SEQ ID NO: 78199 - DNA, 25 bp, Homo sapien
tcctaaactgccaacacctctaacc

SEQ ID NO: 78200 - DNA, 25 bp, Homo sapien
tttatgacagcaggtcctaaactgc

SEQ ID NO: 78201 - DNA, 25 bp, Homo sapien
taggttacaaaaggttgttcacaca

SEQ ID NO: 78202 - DNA, 25 bp, Homo sapien
acatgcaggtcaataggttaggtta

SEQ ID NO: 78203 - DNA, 25 bp, Homo sapien
atgtaatgaattggggtaaagaaaa

SEQ ID NO: 78204 - DNA, 25 bp, Homo sapien
actcaagattgagcctccatgtaat

SEQ ID NO: 78205 - DNA, 25 bp, Homo sapien
gaaccagtaaagcaaactcaagatt

SEQ ID NO: 78206 - DNA, 25 bp, Homo sapien
agtaaacaatatacagttggataac

SEQ ID NO: 78207 - DNA, 25 bp, Homo sapien
gaaccagtaaagcaaactcaagatt

SEQ ID NO: 78208 - DNA, 25 bp, Homo sapien
cattttgctaaggaatggcccgcta

SEQ ID NO: 78209 - DNA, 25 bp, Homo sapien
cgctagggaaacttttaaatgttca

SEQ ID NO: 78210 - DNA, 25 bp, Homo sapien
taggttacaaaaggttgttcacaca

SEQ ID NO: 78211 - DNA, 25 bp, Homo sapien
agtaaacaatatacagttggataac

SEQ ID NO: 78212 - DNA, 25 bp, Homo sapien
tttatgacagcaggtcctaaactgc

SEQ ID NO: 78213 - DNA, 25 bp, Homo sapien
actcaagattgagcctccatgtaat

SEQ ID NO: 78214 - DNA, 25 bp, Homo sapien
acatgcaggtcaataggttaggtta

SEQ ID NO: 78215 - DNA, 25 bp, Homo sapien
ttagtcaatgtagcaacagggattc

SEQ ID NO: 78216 - DNA, 25 bp, Homo sapien
atgtaatgaattggggtaaagaaaa

SEQ ID NO: 78217 - DNA, 25 bp, Homo sapien
tcctaaactgccaacacctctaacc

SEQ ID NO: 78218 - DNA, 25 bp, Homo sapien
cgctagggaaacttttaaatgttca

SEQ ID NO: 78219 - DNA, 25 bp, Homo sapien
cattttgctaaggaatggcccgcta

SEQ ID NO: 78220 - DNA, 25 bp, Homo sapien
ttagtcaatgtagcaacagggattc

SEQ ID NO: 78221 - DNA, 25 bp, Homo sapien
tcctaaactgccaacacctctaacc

SEQ ID NO: 78222 - DNA, 25 bp, Homo sapien
tttatgacagcaggtcctaaactgc

SEQ ID NO: 78223 - DNA, 25 bp, Homo sapien
taggttacaaaaggttgttcacaca

SEQ ID NO: 78224 - DNA, 25 bp, Homo sapien
acatgcaggtcaataggttaggtta

SEQ ID NO: 78225 - DNA, 25 bp, Homo sapien
atgtaatgaattggggtaaagaaaa

SEQ ID NO: 78226 - DNA, 25 bp, Homo sapien
actcaagattgagcctccatgtaat

SEQ ID NO: 78227 - DNA, 25 bp, Homo sapien
gaaccagtaaagcaaactcaagatt

SEQ ID NO: 78228 - DNA, 25 bp, Homo sapien
agtaaacaatatacagttggataac

SEQ ID NO: 78229 - DNA, 25 bp, Homo sapien
atgtaatgaattggggtaaagaaaa

SEQ ID NO: 78230 - DNA, 25 bp, Homo sapien
acatgcaggtcaataggttaggtta

SEQ ID NO: 78231 - DNA, 25 bp, Homo sapien
agtaaacaatatacagttggataac

SEQ ID NO: 78232 - DNA, 25 bp, Homo sapien
cgctagggaaacttttaaatgttca

SEQ ID NO: 78233 - DNA, 25 bp, Homo sapien
gaaccagtaaagcaaactcaagatt

SEQ ID NO: 78234 - DNA, 25 bp, Homo sapien
taggttacaaaaggttgttcacaca

SEQ ID NO: 78235 - DNA, 25 bp, Homo sapien
actcaagattgagcctccatgtaat

SEQ ID NO: 78236 - DNA, 25 bp, Homo sapien
tcctaaactgccaacacctctaacc

SEQ ID NO: 78237 - DNA, 25 bp, Homo sapien
tttatgacagcaggtcctaaactgc

SEQ ID NO: 78238 - DNA, 25 bp, Homo sapien
cattttgctaaggaatggcccgcta

SEQ ID NO: 78239 - DNA, 25 bp, Homo sapien
ttagtcaatgtagcaacagggattc

SEQ ID NO: 78240 - DNA, 25 bp, Homo sapien
cgctagggaaacttttaaatgttca

SEQ ID NO: 78241 - DNA, 25 bp, Homo sapien
cattttgctaaggaatggcccgcta

SEQ ID NO: 78242 - DNA, 25 bp, Homo sapien
ttagtcaatgtagcaacagggattc

SEQ ID NO: 78243 - DNA, 25 bp, Homo sapien
tcctaaactgccaacacctctaacc

SEQ ID NO: 78244 - DNA, 25 bp, Homo sapien
tttatgacagcaggtcctaaactgc

SEQ ID NO: 78245 - DNA, 25 bp, Homo sapien
taggttacaaaaggttgttcacaca

SEQ ID NO: 78246 - DNA, 25 bp, Homo sapien
acatgcaggtcaataggttaggtta

SEQ ID NO: 78247 - DNA, 25 bp, Homo sapien
atgtaatgaattggggtaaagaaaa

SEQ ID NO: 78248 - DNA, 25 bp, Homo sapien
actcaagattgagcctccatgtaat

SEQ ID NO: 78249 - DNA, 25 bp, Homo sapien
gaaccagtaaagcaaactcaagatt

SEQ ID NO: 78250 - DNA, 25 bp, Homo sapien
agtaaacaatatacagttggataac

SEQ ID NO: 78251 - DNA, 25 bp, Homo sapien
cgctagggaaacttttaaatgttca

SEQ ID NO: 78252 - DNA, 25 bp, Homo sapien
agtaaacaatatacagttggataac

SEQ ID NO: 78253 - DNA, 25 bp, Homo sapien
ttagtcaatgtagcaacagggattc

SEQ ID NO: 78254 - DNA, 25 bp, Homo sapien
taggttacaaaaggttgttcacaca

SEQ ID NO: 78255 - DNA, 25 bp, Homo sapien
atgtaatgaattggggtaaagaaaa

SEQ ID NO: 78256 - DNA, 25 bp, Homo sapien
tcctaaactgccaacacctctaacc

SEQ ID NO: 78257 - DNA, 25 bp, Homo sapien
gaaccagtaaagcaaactcaagatt

SEQ ID NO: 78258 - DNA, 25 bp, Homo sapien
tttatgacagcaggtcctaaactgc

SEQ ID NO: 78259 - DNA, 25 bp, Homo sapien
acatgcaggtcaataggttaggtta

SEQ ID NO: 78260 - DNA, 25 bp, Homo sapien
cattttgctaaggaatggcccgcta

SEQ ID NO: 78261 - DNA, 25 bp, Homo sapien
actcaagattgagcctccatgtaat

SEQ ID NO: 78262 - DNA, 25 bp, Homo sapien
cgctagggaaacttttaaatgttca

SEQ ID NO: 78263 - DNA, 25 bp, Homo sapien
cattttgctaaggaatggcccgcta

SEQ ID NO: 78264 - DNA, 25 bp, Homo sapien
ttagtcaatgtagcaacagggattc

SEQ ID NO: 78265 - DNA, 25 bp, Homo sapien
tcctaaactgccaacacctctaacc

SEQ ID NO: 78266 - DNA, 25 bp, Homo sapien
tttatgacagcaggtcctaaactgc

SEQ ID NO: 78267 - DNA, 25 bp, Homo sapien
taggttacaaaaggttgttcacaca

SEQ ID NO: 78268 - DNA, 25 bp, Homo sapien
acatgcaggtcaataggttaggtta

SEQ ID NO: 78269 - DNA, 25 bp, Homo sapien
atgtaatgaattggggtaaagaaaa

SEQ ID NO: 78270 - DNA, 25 bp, Homo sapien
actcaagattgagcctccatgtaat

SEQ ID NO: 78271 - DNA, 25 bp, Homo sapien
gaaccagtaaagcaaactcaagatt

SEQ ID NO: 78272 - DNA, 25 bp, Homo sapien
agtaaacaatatacagttggataac

SEQ ID NO: 78273 - DNA, 25 bp, Homo sapien
ttagtcaatgtagcaacagggattc

SEQ ID NO: 78274 - DNA, 25 bp, Homo sapien
atgtaatgaattggggtaaagaaaa

SEQ ID NO: 78275 - DNA, 25 bp, Homo sapien
tttatgacagcaggtcctaaactgc

SEQ ID NO: 78276 - DNA, 25 bp, Homo sapien
taggttacaaaaggttgttcacaca

SEQ ID NO: 78277 - DNA, 25 bp, Homo sapien
tcctaaactgccaacacctctaacc

SEQ ID NO: 78278 - DNA, 25 bp, Homo sapien
cattttgctaaggaatggcccgcta

SEQ ID NO: 78279 - DNA, 25 bp, Homo sapien
gaaccagtaaagcaaactcaagatt

SEQ ID NO: 78280 - DNA, 25 bp, Homo sapien
cgctagggaaacttttaaatgttca

SEQ ID NO: 78281 - DNA, 25 bp, Homo sapien
agtaaacaatatacagttggataac

SEQ ID NO: 78282 - DNA, 25 bp, Homo sapien
actcaagattgagcctccatgtaat

SEQ ID NO: 78283 - DNA, 25 bp, Homo sapien
acatgcaggtcaataggttaggtta

SEQ ID NO: 78284 - DNA, 25 bp, Homo sapien
agtaaacaatatacagttggataac

SEQ ID NO: 78285 - DNA, 25 bp, Homo sapien
cgctagggaaacttttaaatgttca

SEQ ID NO: 78286 - DNA, 25 bp, Homo sapien
ttagtcaatgtagcaacagggattc

SEQ ID NO: 78287 - DNA, 25 bp, Homo sapien
acatgcaggtcaataggttaggtta

SEQ ID NO: 78288 - DNA, 25 bp, Homo sapien
gaaccagtaaagcaaactcaagatt

SEQ ID NO: 78289 - DNA, 25 bp, Homo sapien
tttatgacagcaggtcctaaactgc

SEQ ID NO: 78290 - DNA, 25 bp, Homo sapien
atgtaatgaattggggtaaagaaaa

SEQ ID NO: 78291 - DNA, 25 bp, Homo sapien
cattttgctaaggaatggcccgcta

SEQ ID NO: 78292 - DNA, 25 bp, Homo sapien
tcctaaactgccaacacctctaacc

SEQ ID NO: 78293 - DNA, 25 bp, Homo sapien
actcaagattgagcctccatgtaat

SEQ ID NO: 78294 - DNA, 25 bp, Homo sapien
taggttacaaaaggttgttcacaca

SEQ ID NO: 78295 - DNA, 25 bp, Homo sapien
cgctagggaaacttttaaatgttca

SEQ ID NO: 78296 - DNA, 25 bp, Homo sapien
cattttgctaaggaatggcccgcta

SEQ ID NO: 78297 - DNA, 25 bp, Homo sapien
ttagtcaatgtagcaacagggattc

SEQ ID NO: 78298 - DNA, 25 bp, Homo sapien
tcctaaactgccaacacctctaacc

SEQ ID NO: 78299 - DNA, 25 bp, Homo sapien
tttatgacagcaggtcctaaactgc

SEQ ID NO: 78300 - DNA, 25 bp, Homo sapien
taggttacaaaaggttgttcacaca

SEQ ID NO: 78301 - DNA, 25 bp, Homo sapien
acatgcaggtcaataggttaggtta

SEQ ID NO: 78302 - DNA, 25 bp, Homo sapien
atgtaatgaattggggtaaagaaaa

SEQ ID NO: 78303 - DNA, 25 bp, Homo sapien
actcaagattgagcctccatgtaat

SEQ ID NO: 78304 - DNA, 25 bp, Homo sapien
gaaccagtaaagcaaactcaagatt

SEQ ID NO: 78305 - DNA, 25 bp, Homo sapien
agtaaacaatatacagttggataac

SEQ ID NO: 78306 - DNA, 25 bp, Homo sapien
cgctagggaaacttttaaatgttca

SEQ ID NO: 78307 - DNA, 25 bp, Homo sapien
actcaagattgagcctccatgtaat

SEQ ID NO: 78308 - DNA, 25 bp, Homo sapien
gaaccagtaaagcaaactcaagatt

SEQ ID NO: 78309 - DNA, 25 bp, Homo sapien
taggttacaaaaggttgttcacaca

SEQ ID NO: 78310 - DNA, 25 bp, Homo sapien
tcctaaactgccaacacctctaacc

SEQ ID NO: 78311 - DNA, 25 bp, Homo sapien
ttagtcaatgtagcaacagggattc

SEQ ID NO: 78312 - DNA, 25 bp, Homo sapien
atgtaatgaattggggtaaagaaaa

SEQ ID NO: 78313 - DNA, 25 bp, Homo sapien
tttatgacagcaggtcctaaactgc

SEQ ID NO: 78314 - DNA, 25 bp, Homo sapien
agtaaacaatatacagttggataac

SEQ ID NO: 78315 - DNA, 25 bp, Homo sapien
acatgcaggtcaataggttaggtta

SEQ ID NO: 78316 - DNA, 25 bp, Homo sapien
cattttgctaaggaatggcccgcta

SEQ ID NO: 78317 - DNA, 25 bp, Homo sapien
cgctagggaaacttttaaatgttca

SEQ ID NO: 78318 - DNA, 25 bp, Homo sapien
cattttgctaaggaatggcccgcta

SEQ ID NO: 78319 - DNA, 25 bp, Homo sapien
ttagtcaatgtagcaacagggattc

SEQ ID NO: 78320 - DNA, 25 bp, Homo sapien
tcctaaactgccaacacctctaacc

SEQ ID NO: 78321 - DNA, 25 bp, Homo sapien
tttatgacagcaggtcctaaactgc

SEQ ID NO: 78322 - DNA, 25 bp, Homo sapien
taggttacaaaaggttgttcacaca

SEQ ID NO: 78323 - DNA, 25 bp, Homo sapien
acatgcaggtcaataggttaggtta

SEQ ID NO: 78324 - DNA, 25 bp, Homo sapien
atgtaatgaattggggtaaagaaaa

SEQ ID NO: 78325 - DNA, 25 bp, Homo sapien
actcaagattgagcctccatgtaat

SEQ ID NO: 78326 - DNA, 25 bp, Homo sapien
gaaccagtaaagcaaactcaagatt

SEQ ID NO: 78327 - DNA, 25 bp, Homo sapien
agtaaacaatatacagttggataac

SEQ ID NO: 78328 - DNA, 25 bp, Homo sapien
taggttacaaaaggttgttcacaca

SEQ ID NO: 78329 - DNA, 25 bp, Homo sapien
tcctaaactgccaacacctctaacc

SEQ ID NO: 78330 - DNA, 25 bp, Homo sapien
atgtaatgaattggggtaaagaaaa

SEQ ID NO: 78331 - DNA, 25 bp, Homo sapien
acatgcaggtcaataggttaggtta

SEQ ID NO: 78332 - DNA, 25 bp, Homo sapien
cattttgctaaggaatggcccgcta

SEQ ID NO: 78333 - DNA, 25 bp, Homo sapien
tttatgacagcaggtcctaaactgc

SEQ ID NO: 78334 - DNA, 25 bp, Homo sapien
cgctagggaaacttttaaatgttca

SEQ ID NO: 78335 - DNA, 25 bp, Homo sapien
gaaccagtaaagcaaactcaagatt

SEQ ID NO: 78336 - DNA, 25 bp, Homo sapien
actcaagattgagcctccatgtaat

SEQ ID NO: 78337 - DNA, 25 bp, Homo sapien
agtaaacaatatacagttggataac

SEQ ID NO: 78338 - DNA, 25 bp, Homo sapien
ttagtcaatgtagcaacagggattc

SEQ ID NO: 78339 - DNA, 25 bp, Homo sapien
cgctagggaaacttttaaatgttca

SEQ ID NO: 78340 - DNA, 25 bp, Homo sapien
cattttgctaaggaatggcccgcta

SEQ ID NO: 78341 - DNA, 25 bp, Homo sapien
ttagtcaatgtagcaacagggattc

SEQ ID NO: 78342 - DNA, 25 bp, Homo sapien
tcctaaactgccaacacctctaacc

SEQ ID NO: 78343 - DNA, 25 bp, Homo sapien
tttatgacagcaggtcctaaactgc

SEQ ID NO: 78344 - DNA, 25 bp, Homo sapien
taggttacaaaaggttgttcacaca

SEQ ID NO: 78345 - DNA, 25 bp, Homo sapien
acatgcaggtcaataggttaggtta

SEQ ID NO: 78346 - DNA, 25 bp, Homo sapien
atgtaatgaattggggtaaagaaaa

SEQ ID NO: 78347 - DNA, 25 bp, Homo sapien
actcaagattgagcctccatgtaat

SEQ ID NO: 78348 - DNA, 25 bp, Homo sapien
gaaccagtaaagcaaactcaagatt

SEQ ID NO: 78349 - DNA, 25 bp, Homo sapien
agtaaacaatatacagttggataac

SEQ ID NO: 78350 - DNA, 25 bp, Homo sapien
acatgcaggtcaataggttaggtta

SEQ ID NO: 78351 - DNA, 25 bp, Homo sapien
ttagtcaatgtagcaacagggattc

SEQ ID NO: 78352 - DNA, 25 bp, Homo sapien
agtaaacaatatacagttggataac

SEQ ID NO: 78353 - DNA, 25 bp, Homo sapien
tttatgacagcaggtcctaaactgc

SEQ ID NO: 78354 - DNA, 25 bp, Homo sapien
atgtaatgaattggggtaaagaaaa

SEQ ID NO: 78355 - DNA, 25 bp, Homo sapien
cattttgctaaggaatggcccgcta

SEQ ID NO: 78356 - DNA, 25 bp, Homo sapien
taggttacaaaaggttgttcacaca

SEQ ID NO: 78357 - DNA, 25 bp, Homo sapien
actcaagattgagcctccatgtaat

SEQ ID NO: 78358 - DNA, 25 bp, Homo sapien
tcctaaactgccaacacctctaacc

SEQ ID NO: 78359 - DNA, 25 bp, Homo sapien
gaaccagtaaagcaaactcaagatt

SEQ ID NO: 78360 - DNA, 25 bp, Homo sapien
cgctagggaaacttttaaatgttca

SEQ ID NO: 78361 - DNA, 25 bp, Homo sapien
cgctagggaaacttttaaatgttca

SEQ ID NO: 78362 - DNA, 25 bp, Homo sapien
cattttgctaaggaatggcccgcta

SEQ ID NO: 78363 - DNA, 25 bp, Homo sapien
ttagtcaatgtagcaacagggattc

SEQ ID NO: 78364 - DNA, 25 bp, Homo sapien
tcctaaactgccaacacctctaacc

SEQ ID NO: 78365 - DNA, 25 bp, Homo sapien
tttatgacagcaggtcctaaactgc

SEQ ID NO: 78366 - DNA, 25 bp, Homo sapien
taggttacaaaaggttgttcacaca

SEQ ID NO: 78367 - DNA, 25 bp, Homo sapien
acatgcaggtcaataggttaggtta

SEQ ID NO: 78368 - DNA, 25 bp, Homo sapien
atgtaatgaattggggtaaagaaaa

SEQ ID NO: 78369 - DNA, 25 bp, Homo sapien
actcaagattgagcctccatgtaat

SEQ ID NO: 78370 - DNA, 25 bp, Homo sapien
gaaccagtaaagcaaactcaagatt

SEQ ID NO: 78371 - DNA, 25 bp, Homo sapien
agtaaacaatatacagttggataac

SEQ ID NO: 78372 - DNA, 25 bp, Homo sapien
agtaaacaatatacagttggataac

SEQ ID NO: 78373 - DNA, 25 bp, Homo sapien
ttagtcaatgtagcaacagggattc

SEQ ID NO: 78374 - DNA, 25 bp, Homo sapien
taggttacaaaaggttgttcacaca

SEQ ID NO: 78375 - DNA, 25 bp, Homo sapien
gaaccagtaaagcaaactcaagatt

SEQ ID NO: 78376 - DNA, 25 bp, Homo sapien
cgctagggaaacttttaaatgttca

SEQ ID NO: 78377 - DNA, 25 bp, Homo sapien
atgtaatgaattggggtaaagaaaa

SEQ ID NO: 78378 - DNA, 25 bp, Homo sapien
tcctaaactgccaacacctctaacc

SEQ ID NO: 78379 - DNA, 25 bp, Homo sapien
cattttgctaaggaatggcccgcta

SEQ ID NO: 78380 - DNA, 25 bp, Homo sapien
tttatgacagcaggtcctaaactgc

SEQ ID NO: 78381 - DNA, 25 bp, Homo sapien
acatgcaggtcaataggttaggtta

SEQ ID NO: 78382 - DNA, 25 bp, Homo sapien
actcaagattgagcctccatgtaat

SEQ ID NO: 78383 - DNA, 25 bp, Homo sapien
cgctagggaaacttttaaatgttca

SEQ ID NO: 78384 - DNA, 25 bp, Homo sapien
cattttgctaaggaatggcccgcta

SEQ ID NO: 78385 - DNA, 25 bp, Homo sapien
ttagtcaatgtagcaacagggattc

SEQ ID NO: 78386 - DNA, 25 bp, Homo sapien
tcctaaactgccaacacctctaacc

SEQ ID NO: 78387 - DNA, 25 bp, Homo sapien
tttatgacagcaggtcctaaactgc

SEQ ID NO: 78388 - DNA, 25 bp, Homo sapien
taggttacaaaaggttgttcacaca

SEQ ID NO: 78389 - DNA, 25 bp, Homo sapien
acatgcaggtcaataggttaggtta

SEQ ID NO: 78390 - DNA, 25 bp, Homo sapien
atgtaatgaattggggtaaagaaaa

SEQ ID NO: 78391 - DNA, 25 bp, Homo sapien
actcaagattgagcctccatgtaat

SEQ ID NO: 78392 - DNA, 25 bp, Homo sapien
gaaccagtaaagcaaactcaagatt

SEQ ID NO: 78393 - DNA, 25 bp, Homo sapien
agtaaacaatatacagttggataac

SEQ ID NO: 78394 - DNA, 25 bp, Homo sapien
cattttgctaaggaatggcccgcta

SEQ ID NO: 78395 - DNA, 25 bp, Homo sapien
gaaccagtaaagcaaactcaagatt

SEQ ID NO: 78396 - DNA, 25 bp, Homo sapien
taggttacaaaaggttgttcacaca

SEQ ID NO: 78397 - DNA, 25 bp, Homo sapien
atgtaatgaattggggtaaagaaaa

SEQ ID NO: 78398 - DNA, 25 bp, Homo sapien
ttagtcaatgtagcaacagggattc

SEQ ID NO: 78399 - DNA, 25 bp, Homo sapien
cgctagggaaacttttaaatgttca

SEQ ID NO: 78400 - DNA, 25 bp, Homo sapien
acatgcaggtcaataggttaggtta

SEQ ID NO: 78401 - DNA, 25 bp, Homo sapien
tcctaaactgccaacacctctaacc

SEQ ID NO: 78402 - DNA, 25 bp, Homo sapien
actcaagattgagcctccatgtaat

SEQ ID NO: 78403 - DNA, 25 bp, Homo sapien
agtaaacaatatacagttggataac

SEQ ID NO: 78404 - DNA, 25 bp, Homo sapien
tttatgacagcaggtcctaaactgc

SEQ ID NO: 78405 - DNA, 25 bp, Homo sapien
cgctagggaaacttttaaatgttca

SEQ ID NO: 78406 - DNA, 25 bp, Homo sapien
cattttgctaaggaatggcccgcta

SEQ ID NO: 78407 - DNA, 25 bp, Homo sapien
ttagtcaatgtagcaacagggattc

SEQ ID NO: 78408 - DNA, 25 bp, Homo sapien
tcctaaactgccaacacctctaacc

SEQ ID NO: 78409 - DNA, 25 bp, Homo sapien
tttatgacagcaggtcctaaactgc

SEQ ID NO: 78410 - DNA, 25 bp, Homo sapien
taggttacaaaaggttgttcacaca

SEQ ID NO: 78411 - DNA, 25 bp, Homo sapien
acatgcaggtcaataggttaggtta

SEQ ID NO: 78412 - DNA, 25 bp, Homo sapien
atgtaatgaattggggtaaagaaaa

SEQ ID NO: 78413 - DNA, 25 bp, Homo sapien
actcaagattgagcctccatgtaat

SEQ ID NO: 78414 - DNA, 25 bp, Homo sapien
gaaccagtaaagcaaactcaagatt

SEQ ID NO: 78415 - DNA, 25 bp, Homo sapien
agtaaacaatatacagttggataac

SEQ ID NO: 78416 - DNA, 25 bp, Homo sapien
cgctagggaaacttttaaatgttca

SEQ ID NO: 78417 - DNA, 25 bp, Homo sapien
cattttgctaaggaatggcccgcta

SEQ ID NO: 78418 - DNA, 25 bp, Homo sapien
ttagtcaatgtagcaacagggattc

SEQ ID NO: 78419 - DNA, 25 bp, Homo sapien
tcctaaactgccaacacctctaacc

SEQ ID NO: 78420 - DNA, 25 bp, Homo sapien
tttatgacagcaggtcctaaactgc

SEQ ID NO: 78421 - DNA, 25 bp, Homo sapien
taggttacaaaaggttgttcacaca

SEQ ID NO: 78422 - DNA, 25 bp, Homo sapien
acatgcaggtcaataggttaggtta

SEQ ID NO: 78423 - DNA, 25 bp, Homo sapien
atgtaatgaattggggtaaagaaaa

SEQ ID NO: 78424 - DNA, 25 bp, Homo sapien
actcaagattgagcctccatgtaat

SEQ ID NO: 78425 - DNA, 25 bp, Homo sapien
gaaccagtaaagcaaactcaagatt

SEQ ID NO: 78426 - DNA, 25 bp, Homo sapien
agtaaacaatatacagttggataac

SEQ ID NO: 78427 - DNA, 25 bp, Homo sapien
acatgcaggtcaataggttaggtta

SEQ ID NO: 78428 - DNA, 25 bp, Homo sapien
actcaagattgagcctccatgtaat

SEQ ID NO: 78429 - DNA, 25 bp, Homo sapien
cgctagggaaacttttaaatgttca

SEQ ID NO: 78430 - DNA, 25 bp, Homo sapien
atgtaatgaattggggtaaagaaaa

SEQ ID NO: 78431 - DNA, 25 bp, Homo sapien
gaaccagtaaagcaaactcaagatt

SEQ ID NO: 78432 - DNA, 25 bp, Homo sapien
cattttgctaaggaatggcccgcta

SEQ ID NO: 78433 - DNA, 25 bp, Homo sapien
agtaaacaatatacagttggataac

SEQ ID NO: 78434 - DNA, 25 bp, Homo sapien
taggttacaaaaggttgttcacaca

SEQ ID NO: 78435 - DNA, 25 bp, Homo sapien
tcctaaactgccaacacctctaacc

SEQ ID NO: 78436 - DNA, 25 bp, Homo sapien
ttagtcaatgtagcaacagggattc

SEQ ID NO: 78437 - DNA, 25 bp, Homo sapien
tttatgacagcaggtcctaaactgc

SEQ ID NO: 78438 - DNA, 25 bp, Homo sapien
actcaagattgagcctccatgtaat

SEQ ID NO: 78439 - DNA, 25 bp, Homo sapien
cgctagggaaacttttaaatgttca

SEQ ID NO: 78440 - DNA, 25 bp, Homo sapien
gaaccagtaaagcaaactcaagatt

SEQ ID NO: 78441 - DNA, 25 bp, Homo sapien
atgtaatgaattggggtaaagaaaa

SEQ ID NO: 78442 - DNA, 25 bp, Homo sapien
cattttgctaaggaatggcccgcta

SEQ ID NO: 78443 - DNA, 25 bp, Homo sapien
taggttacaaaaggttgttcacaca

SEQ ID NO: 78444 - DNA, 25 bp, Homo sapien
acatgcaggtcaataggttaggtta

SEQ ID NO: 78445 - DNA, 25 bp, Homo sapien
agtaaacaatatacagttggataac

SEQ ID NO: 78446 - DNA, 25 bp, Homo sapien
tcctaaactgccaacacctctaacc

SEQ ID NO: 78447 - DNA, 25 bp, Homo sapien
ttagtcaatgtagcaacagggattc

SEQ ID NO: 78448 - DNA, 25 bp, Homo sapien
tttatgacagcaggtcctaaactgc

SEQ ID NO: 78449 - DNA, 25 bp, Homo sapien
actcaagattgagcctccatgtaat

SEQ ID NO: 78450 - DNA, 25 bp, Homo sapien
acatgcaggtcaataggttaggtta

SEQ ID NO: 78451 - DNA, 25 bp, Homo sapien
cgctagggaaacttttaaatgttca

SEQ ID NO: 78452 - DNA, 25 bp, Homo sapien
atgtaatgaattggggtaaagaaaa

SEQ ID NO: 78453 - DNA, 25 bp, Homo sapien
gaaccagtaaagcaaactcaagatt

SEQ ID NO: 78454 - DNA, 25 bp, Homo sapien
cattttgctaaggaatggcccgcta

SEQ ID NO: 78455 - DNA, 25 bp, Homo sapien
taggttacaaaaggttgttcacaca

SEQ ID NO: 78456 - DNA, 25 bp, Homo sapien
agtaaacaatatacagttggataac

SEQ ID NO: 78457 - DNA, 25 bp, Homo sapien
tcctaaactgccaacacctctaacc

SEQ ID NO: 78458 - DNA, 25 bp, Homo sapien
ttagtcaatgtagcaacagggattc

SEQ ID NO: 78459 - DNA, 25 bp, Homo sapien
tttatgacagcaggtcctaaactgc

SEQ ID NO: 78460 - DNA, 25 bp, Homo sapien
acatgcaggtcaataggttaggtta

SEQ ID NO: 78461 - DNA, 25 bp, Homo sapien
actcaagattgagcctccatgtaat

SEQ ID NO: 78462 - DNA, 25 bp, Homo sapien
cgctagggaaacttttaaatgttca

SEQ ID NO: 78463 - DNA, 25 bp, Homo sapien
atgtaatgaattggggtaaagaaaa

SEQ ID NO: 78464 - DNA, 25 bp, Homo sapien
gaaccagtaaagcaaactcaagatt

SEQ ID NO: 78465 - DNA, 25 bp, Homo sapien
cattttgctaaggaatggcccgcta

SEQ ID NO: 78466 - DNA, 25 bp, Homo sapien
agtaaacaatatacagttggataac

SEQ ID NO: 78467 - DNA, 25 bp, Homo sapien
taggttacaaaaggttgttcacaca

SEQ ID NO: 78468 - DNA, 25 bp, Homo sapien
tcctaaactgccaacacctctaacc

SEQ ID NO: 78469 - DNA, 25 bp, Homo sapien
ttagtcaatgtagcaacagggattc

SEQ ID NO: 78470 - DNA, 25 bp, Homo sapien
tttatgacagcaggtcctaaactgc

SEQ ID NO: 78471 - DNA, 25 bp, Homo sapien
actcaagattgagcctccatgtaat

SEQ ID NO: 78472 - DNA, 25 bp, Homo sapien
cgctagggaaacttttaaatgttca

SEQ ID NO: 78473 - DNA, 25 bp, Homo sapien
atgtaatgaattggggtaaagaaaa

SEQ ID NO: 78474 - DNA, 25 bp, Homo sapien
gaaccagtaaagcaaactcaagatt

SEQ ID NO: 78475 - DNA, 25 bp, Homo sapien
cattttgctaaggaatggcccgcta

SEQ ID NO: 78476 - DNA, 25 bp, Homo sapien
taggttacaaaaggttgttcacaca

SEQ ID NO: 78477 - DNA, 25 bp, Homo sapien
acatgcaggtcaataggttaggtta

SEQ ID NO: 78478 - DNA, 25 bp, Homo sapien
agtaaacaatatacagttggataac

SEQ ID NO: 78479 - DNA, 25 bp, Homo sapien
tcctaaactgccaacacctctaacc

SEQ ID NO: 78480 - DNA, 25 bp, Homo sapien
ttagtcaatgtagcaacagggattc

SEQ ID NO: 78481 - DNA, 25 bp, Homo sapien
tttatgacagcaggtcctaaactgc

SEQ ID NO: 78482 - DNA, 25 bp, Homo sapien
actcaagattgagcctccatgtaat

SEQ ID NO: 78483 - DNA, 25 bp, Homo sapien
cgctagggaaacttttaaatgttca

SEQ ID NO: 78484 - DNA, 25 bp, Homo sapien
atgtaatgaattggggtaaagaaaa

SEQ ID NO: 78485 - DNA, 25 bp, Homo sapien
gaaccagtaaagcaaactcaagatt

SEQ ID NO: 78486 - DNA, 25 bp, Homo sapien
cattttgctaaggaatggcccgcta

SEQ ID NO: 78487 - DNA, 25 bp, Homo sapien
taggttacaaaaggttgttcacaca

SEQ ID NO: 78488 - DNA, 25 bp, Homo sapien
agtaaacaatatacagttggataac

SEQ ID NO: 78489 - DNA, 25 bp, Homo sapien
acatgcaggtcaataggttaggtta

SEQ ID NO: 78490 - DNA, 25 bp, Homo sapien
tcctaaactgccaacacctctaacc

SEQ ID NO: 78491 - DNA, 25 bp, Homo sapien
ttagtcaatgtagcaacagggattc

SEQ ID NO: 78492 - DNA, 25 bp, Homo sapien
tttatgacagcaggtcctaaactgc

SEQ ID NO: 78493 - DNA, 25 bp, Homo sapien
actcaagattgagcctccatgtaat

SEQ ID NO: 78494 - DNA, 25 bp, Homo sapien
cgctagggaaacttttaaatgttca

SEQ ID NO: 78495 - DNA, 25 bp, Homo sapien
gaaccagtaaagcaaactcaagatt

SEQ ID NO: 78496 - DNA, 25 bp, Homo sapien
atgtaatgaattggggtaaagaaaa

SEQ ID NO: 78497 - DNA, 25 bp, Homo sapien
acatgcaggtcaataggttaggtta

SEQ ID NO: 78498 - DNA, 25 bp, Homo sapien
cattttgctaaggaatggcccgcta

SEQ ID NO: 78499 - DNA, 25 bp, Homo sapien
agtaaacaatatacagttggataac

SEQ ID NO: 78500 - DNA, 25 bp, Homo sapien
taggttacaaaaggttgttcacaca

SEQ ID NO: 78501 - DNA, 25 bp, Homo sapien
tcctaaactgccaacacctctaacc

SEQ ID NO: 78502 - DNA, 25 bp, Homo sapien
ttagtcaatgtagcaacagggattc

SEQ ID NO: 78503 - DNA, 25 bp, Homo sapien
tttatgacagcaggtcctaaactgc

SEQ ID NO: 78504 - DNA, 25 bp, Homo sapien
actcaagattgagcctccatgtaat

SEQ ID NO: 78505 - DNA, 25 bp, Homo sapien
cgctagggaaacttttaaatgttca

SEQ ID NO: 78506 - DNA, 25 bp, Homo sapien
acatgcaggtcaataggttaggtta

SEQ ID NO: 78507 - DNA, 25 bp, Homo sapien
atgtaatgaattggggtaaagaaaa

SEQ ID NO: 78508 - DNA, 25 bp, Homo sapien
gaaccagtaaagcaaactcaagatt

SEQ ID NO: 78509 - DNA, 25 bp, Homo sapien
cattttgctaaggaatggcccgcta

SEQ ID NO: 78510 - DNA, 25 bp, Homo sapien
taggttacaaaaggttgttcacaca

SEQ ID NO: 78511 - DNA, 25 bp, Homo sapien
agtaaacaatatacagttggataac

SEQ ID NO: 78512 - DNA, 25 bp, Homo sapien
tcctaaactgccaacacctctaacc

SEQ ID NO: 78513 - DNA, 25 bp, Homo sapien
ttagtcaatgtagcaacagggattc

SEQ ID NO: 78514 - DNA, 25 bp, Homo sapien
tttatgacagcaggtcctaaactgc

SEQ ID NO: 78515 - DNA, 25 bp, Homo sapien
actcaagattgagcctccatgtaat

SEQ ID NO: 78516 - DNA, 25 bp, Homo sapien
cgctagggaaacttttaaatgttca

SEQ ID NO: 78517 - DNA, 25 bp, Homo sapien
gaaccagtaaagcaaactcaagatt

SEQ ID NO: 78518 - DNA, 25 bp, Homo sapien
atgtaatgaattggggtaaagaaaa

SEQ ID NO: 78519 - DNA, 25 bp, Homo sapien
cattttgctaaggaatggcccgcta

SEQ ID NO: 78520 - DNA, 25 bp, Homo sapien
taggttacaaaaggttgttcacaca

SEQ ID NO: 78521 - DNA, 25 bp, Homo sapien
acatgcaggtcaataggttaggtta

SEQ ID NO: 78522 - DNA, 25 bp, Homo sapien
tcctaaactgccaacacctctaacc

SEQ ID NO: 78523 - DNA, 25 bp, Homo sapien
agtaaacaatatacagttggataac

SEQ ID NO: 78524 - DNA, 25 bp, Homo sapien
ttagtcaatgtagcaacagggattc

SEQ ID NO: 78525 - DNA, 25 bp, Homo sapien
tttatgacagcaggtcctaaactgc

SEQ ID NO: 78526 - DNA, 25 bp, Homo sapien
ttagtcaatgtagcaacagggattc

SEQ ID NO: 78527 - DNA, 25 bp, Homo sapien
gaaccagtaaagcaaactcaagatt

SEQ ID NO: 78528 - DNA, 25 bp, Homo sapien
acatgcaggtcaataggttaggtta

SEQ ID NO: 78529 - DNA, 25 bp, Homo sapien
atgtaatgaattggggtaaagaaaa

SEQ ID NO: 78530 - DNA, 25 bp, Homo sapien
actcaagattgagcctccatgtaat

SEQ ID NO: 78531 - DNA, 25 bp, Homo sapien
taggttacaaaaggttgttcacaca

SEQ ID NO: 78532 - DNA, 25 bp, Homo sapien
agtaaacaatatacagttggataac

SEQ ID NO: 78533 - DNA, 25 bp, Homo sapien
tttatgacagcaggtcctaaactgc

SEQ ID NO: 78534 - DNA, 25 bp, Homo sapien
tcctaaactgccaacacctctaacc

SEQ ID NO: 78535 - DNA, 25 bp, Homo sapien
cgctagggaaacttttaaatgttca

SEQ ID NO: 78536 - DNA, 25 bp, Homo sapien
cattttgctaaggaatggcccgcta

SEQ ID NO: 78537 - DNA, 25 bp, Homo sapien
actcaagattgagcctccatgtaat

SEQ ID NO: 78538 - DNA, 25 bp, Homo sapien
cgctagggaaacttttaaatgttca

SEQ ID NO: 78539 - DNA, 25 bp, Homo sapien
atgtaatgaattggggtaaagaaaa

SEQ ID NO: 78540 - DNA, 25 bp, Homo sapien
gaaccagtaaagcaaactcaagatt

SEQ ID NO: 78541 - DNA, 25 bp, Homo sapien
cattttgctaaggaatggcccgcta

SEQ ID NO: 78542 - DNA, 25 bp, Homo sapien
taggttacaaaaggttgttcacaca

SEQ ID NO: 78543 - DNA, 25 bp, Homo sapien
acatgcaggtcaataggttaggtta

SEQ ID NO: 78544 - DNA, 25 bp, Homo sapien
agtaaacaatatacagttggataac

SEQ ID NO: 78545 - DNA, 25 bp, Homo sapien
tcctaaactgccaacacctctaacc

SEQ ID NO: 78546 - DNA, 25 bp, Homo sapien
ttagtcaatgtagcaacagggattc

SEQ ID NO: 78547 - DNA, 25 bp, Homo sapien
tttatgacagcaggtcctaaactgc

SEQ ID NO: 78548 - DNA, 25 bp, Homo sapien
cgctagggaaacttttaaatgttca

SEQ ID NO: 78549 - DNA, 25 bp, Homo sapien
cattttgctaaggaatggcccgcta

SEQ ID NO: 78550 - DNA, 25 bp, Homo sapien
ttagtcaatgtagcaacagggattc

SEQ ID NO: 78551 - DNA, 25 bp, Homo sapien
tcctaaactgccaacacctctaacc

SEQ ID NO: 78552 - DNA, 25 bp, Homo sapien
tttatgacagcaggtcctaaactgc

SEQ ID NO: 78553 - DNA, 25 bp, Homo sapien
taggttacaaaaggttgttcacaca

SEQ ID NO: 78554 - DNA, 25 bp, Homo sapien
acatgcaggtcaataggttaggtta

SEQ ID NO: 78555 - DNA, 25 bp, Homo sapien
atgtaatgaattggggtaaagaaaa

SEQ ID NO: 78556 - DNA, 25 bp, Homo sapien
actcaagattgagcctccatgtaat

SEQ ID NO: 78557 - DNA, 25 bp, Homo sapien
gaaccagtaaagcaaactcaagatt

SEQ ID NO: 78558 - DNA, 25 bp, Homo sapien
agtaaacaatatacagttggataac

SEQ ID NO: 78559 - DNA, 25 bp, Homo sapien
tagcgggccattccttagcaaaatg

SEQ ID NO: 78560 - DNA, 25 bp, Homo sapien
gcagtttaggacctgctgtcataaa

SEQ ID NO: 78561 - DNA, 25 bp, Homo sapien
taacctaacctattgacctgcatgt

SEQ ID NO: 78562 - DNA, 25 bp, Homo sapien
gttatccaactgtatattgtttact

SEQ ID NO: 78563 - DNA, 25 bp, Homo sapien
gaatccctgttgctacattgactaa

SEQ ID NO: 78564 - DNA, 25 bp, Homo sapien
tgaacatttaaaagtttccctagcg

SEQ ID NO: 78565 - DNA, 25 bp, Homo sapien
ttttctttaccccaattcattacat

SEQ ID NO: 78566 - DNA, 25 bp, Homo sapien
tgtgtgaacaaccttttgtaaccta

SEQ ID NO: 78567 - DNA, 25 bp, Homo sapien
attacatggaggctcaatcttgagt

SEQ ID NO: 78568 - DNA, 25 bp, Homo sapien
aatcttgagtttgctttactggttc

SEQ ID NO: 78569 - DNA, 25 bp, Homo sapien
ggttagaggtgttggcagtttagga

SEQ ID NO: 78570 - DNA, 25 bp, Homo sapien
actcaagattgagcctccatgtaat

SEQ ID NO: 78571 - DNA, 25 bp, Homo sapien
cgctagggaaacttttaaatgttca

SEQ ID NO: 78572 - DNA, 25 bp, Homo sapien
acatgcaggtcaataggttaggtta

SEQ ID NO: 78573 - DNA, 25 bp, Homo sapien
atgtaatgaattggggtaaagaaaa

SEQ ID NO: 78574 - DNA, 25 bp, Homo sapien
gaaccagtaaagcaaactcaagatt

SEQ ID NO: 78575 - DNA, 25 bp, Homo sapien
cattttgctaaggaatggcccgcta

SEQ ID NO: 78576 - DNA, 25 bp, Homo sapien
agtaaacaatatacagttggataac

SEQ ID NO: 78577 - DNA, 25 bp, Homo sapien
taggttacaaaaggttgttcacaca

SEQ ID NO: 78578 - DNA, 25 bp, Homo sapien
tcctaaactgccaacacctctaacc

SEQ ID NO: 78579 - DNA, 25 bp, Homo sapien
ttagtcaatgtagcaacagggattc

SEQ ID NO: 78580 - DNA, 25 bp, Homo sapien
tttatgacagcaggtcctaaactgc

SEQ ID NO: 78581 - DNA, 25 bp, Homo sapien
cattttgctaaggaatggcccgcta

SEQ ID NO: 78582 - DNA, 25 bp, Homo sapien
tcctaaactgccaacacctctaacc

SEQ ID NO: 78583 - DNA, 25 bp, Homo sapien
tttatgacagcaggtcctaaactgc

SEQ ID NO: 78584 - DNA, 25 bp, Homo sapien
agtaaacaatatacagttggataac

SEQ ID NO: 78585 - DNA, 25 bp, Homo sapien
actcaagattgagcctccatgtaat

SEQ ID NO: 78586 - DNA, 25 bp, Homo sapien
gaaccagtaaagcaaactcaagatt

SEQ ID NO: 78587 - DNA, 25 bp, Homo sapien
ttagtcaatgtagcaacagggattc

SEQ ID NO: 78588 - DNA, 25 bp, Homo sapien
atgtaatgaattggggtaaagaaaa

SEQ ID NO: 78589 - DNA, 25 bp, Homo sapien
taggttacaaaaggttgttcacaca

SEQ ID NO: 78590 - DNA, 25 bp, Homo sapien
acatgcaggtcaataggttaggtta

SEQ ID NO: 78591 - DNA, 25 bp, Homo sapien
cgctagggaaacttttaaatgttca

SEQ ID NO: 78592 - DNA, 25 bp, Homo sapien
cgctagggaaacttttaaatgttca

SEQ ID NO: 78593 - DNA, 25 bp, Homo sapien
cattttgctaaggaatggcccgcta

SEQ ID NO: 78594 - DNA, 25 bp, Homo sapien
ttagtcaatgtagcaacagggattc

SEQ ID NO: 78595 - DNA, 25 bp, Homo sapien
tcctaaactgccaacacctctaacc

SEQ ID NO: 78596 - DNA, 25 bp, Homo sapien
tttatgacagcaggtcctaaactgc

SEQ ID NO: 78597 - DNA, 25 bp, Homo sapien
taggttacaaaaggttgttcacaca

SEQ ID NO: 78598 - DNA, 25 bp, Homo sapien
acatgcaggtcaataggttaggtta

SEQ ID NO: 78599 - DNA, 25 bp, Homo sapien
atgtaatgaattggggtaaagaaaa

SEQ ID NO: 78600 - DNA, 25 bp, Homo sapien
actcaagattgagcctccatgtaat

SEQ ID NO: 78601 - DNA, 25 bp, Homo sapien
gaaccagtaaagcaaactcaagatt

SEQ ID NO: 78602 - DNA, 25 bp, Homo sapien
agtaaacaatatacagttggataac

SEQ ID NO: 78603 - DNA, 25 bp, Homo sapien
actcaagattgagcctccatgtaat

SEQ ID NO: 78604 - DNA, 25 bp, Homo sapien
cgctagggaaacttttaaatgttca

SEQ ID NO: 78605 - DNA, 25 bp, Homo sapien
cattttgctaaggaatggcccgcta

SEQ ID NO: 78606 - DNA, 25 bp, Homo sapien
acatgcaggtcaataggttaggtta

SEQ ID NO: 78607 - DNA, 25 bp, Homo sapien
gaaccagtaaagcaaactcaagatt

SEQ ID NO: 78608 - DNA, 25 bp, Homo sapien
taggttacaaaaggttgttcacaca

SEQ ID NO: 78609 - DNA, 25 bp, Homo sapien
atgtaatgaattggggtaaagaaaa

SEQ ID NO: 78610 - DNA, 25 bp, Homo sapien
ttagtcaatgtagcaacagggattc

SEQ ID NO: 78611 - DNA, 25 bp, Homo sapien
tttatgacagcaggtcctaaactgc

SEQ ID NO: 78612 - DNA, 25 bp, Homo sapien
tcctaaactgccaacacctctaacc

SEQ ID NO: 78613 - DNA, 25 bp, Homo sapien
agtaaacaatatacagttggataac

SEQ ID NO: 78614 - DNA, 25 bp, Homo sapien
cgctagggaaacttttaaatgttca

SEQ ID NO: 78615 - DNA, 25 bp, Homo sapien
cattttgctaaggaatggcccgcta

SEQ ID NO: 78616 - DNA, 25 bp, Homo sapien
ttagtcaatgtagcaacagggattc

SEQ ID NO: 78617 - DNA, 25 bp, Homo sapien
tcctaaactgccaacacctctaacc

SEQ ID NO: 78618 - DNA, 25 bp, Homo sapien
tttatgacagcaggtcctaaactgc

SEQ ID NO: 78619 - DNA, 25 bp, Homo sapien
taggttacaaaaggttgttcacaca

SEQ ID NO: 78620 - DNA, 25 bp, Homo sapien
acatgcaggtcaataggttaggtta

SEQ ID NO: 78621 - DNA, 25 bp, Homo sapien
atgtaatgaattggggtaaagaaaa

SEQ ID NO: 78622 - DNA, 25 bp, Homo sapien
actcaagattgagcctccatgtaat

SEQ ID NO: 78623 - DNA, 25 bp, Homo sapien
gaaccagtaaagcaaactcaagatt

SEQ ID NO: 78624 - DNA, 25 bp, Homo sapien
agtaaacaatatacagttggataac

SEQ ID NO: 78625 - DNA, 25 bp, Homo sapien
taggttacaaaaggttgttcacaca

SEQ ID NO: 78626 - DNA, 25 bp, Homo sapien
acatgcaggtcaataggttaggtta

SEQ ID NO: 78627 - DNA, 25 bp, Homo sapien
cgctagggaaacttttaaatgttca

SEQ ID NO: 78628 - DNA, 25 bp, Homo sapien
gaaccagtaaagcaaactcaagatt

SEQ ID NO: 78629 - DNA, 25 bp, Homo sapien
atgtaatgaattggggtaaagaaaa

SEQ ID NO: 78630 - DNA, 25 bp, Homo sapien
cattttgctaaggaatggcccgcta

SEQ ID NO: 78631 - DNA, 25 bp, Homo sapien
actcaagattgagcctccatgtaat

SEQ ID NO: 78632 - DNA, 25 bp, Homo sapien
tcctaaactgccaacacctctaacc

SEQ ID NO: 78633 - DNA, 25 bp, Homo sapien
agtaaacaatatacagttggataac

SEQ ID NO: 78634 - DNA, 25 bp, Homo sapien
tttatgacagcaggtcctaaactgc

SEQ ID NO: 78635 - DNA, 25 bp, Homo sapien
ttagtcaatgtagcaacagggattc

SEQ ID NO: 78636 - DNA, 25 bp, Homo sapien
gaaccagtaaagcaaactcaagatt

SEQ ID NO: 78637 - DNA, 25 bp, Homo sapien
agtaaacaatatacagttggataac

SEQ ID NO: 78638 - DNA, 25 bp, Homo sapien
cgctagggaaacttttaaatgttca

SEQ ID NO: 78639 - DNA, 25 bp, Homo sapien
cattttgctaaggaatggcccgcta

SEQ ID NO: 78640 - DNA, 25 bp, Homo sapien
ttagtcaatgtagcaacagggattc

SEQ ID NO: 78641 - DNA, 25 bp, Homo sapien
tcctaaactgccaacacctctaacc

SEQ ID NO: 78642 - DNA, 25 bp, Homo sapien
tttatgacagcaggtcctaaactgc

SEQ ID NO: 78643 - DNA, 25 bp, Homo sapien
taggttacaaaaggttgttcacaca

SEQ ID NO: 78644 - DNA, 25 bp, Homo sapien
acatgcaggtcaataggttaggtta

SEQ ID NO: 78645 - DNA, 25 bp, Homo sapien
atgtaatgaattggggtaaagaaaa

SEQ ID NO: 78646 - DNA, 25 bp, Homo sapien
actcaagattgagcctccatgtaat

SEQ ID NO: 78647 - DNA, 25 bp, Homo sapien
cgctagggaaacttttaaatgttca

SEQ ID NO: 78648 - DNA, 25 bp, Homo sapien
cattttgctaaggaatggcccgcta

SEQ ID NO: 78649 - DNA, 25 bp, Homo sapien
ttagtcaatgtagcaacagggattc

SEQ ID NO: 78650 - DNA, 25 bp, Homo sapien
tcctaaactgccaacacctctaacc

SEQ ID NO: 78651 - DNA, 25 bp, Homo sapien
tttatgacagcaggtcctaaactgc

SEQ ID NO: 78652 - DNA, 25 bp, Homo sapien
taggttacaaaaggttgttcacaca

SEQ ID NO: 78653 - DNA, 25 bp, Homo sapien
acatgcaggtcaataggttaggtta

SEQ ID NO: 78654 - DNA, 25 bp, Homo sapien
atgtaatgaattggggtaaagaaaa

SEQ ID NO: 78655 - DNA, 25 bp, Homo sapien
actcaagattgagcctccatgtaat

SEQ ID NO: 78656 - DNA, 25 bp, Homo sapien
gaaccagtaaagcaaactcaagatt

SEQ ID NO: 78657 - DNA, 25 bp, Homo sapien
agtaaacaatatacagttggataac

SEQ ID NO: 78658 - DNA, 25 bp, Homo sapien
acatgcaggtcaataggttaggtta

SEQ ID NO: 78659 - DNA, 25 bp, Homo sapien
tcctaaactgccaacacctctaacc

SEQ ID NO: 78660 - DNA, 25 bp, Homo sapien
atgtaatgaattggggtaaagaaaa

SEQ ID NO: 78661 - DNA, 25 bp, Homo sapien
cgctagggaaacttttaaatgttca

SEQ ID NO: 78662 - DNA, 25 bp, Homo sapien
taggttacaaaaggttgttcacaca

SEQ ID NO: 78663 - DNA, 25 bp, Homo sapien
tttatgacagcaggtcctaaactgc

SEQ ID NO: 78664 - DNA, 25 bp, Homo sapien
cattttgctaaggaatggcccgcta

SEQ ID NO: 78665 - DNA, 25 bp, Homo sapien
actcaagattgagcctccatgtaat

SEQ ID NO: 78666 - DNA, 25 bp, Homo sapien
ttagtcaatgtagcaacagggattc

SEQ ID NO: 78667 - DNA, 25 bp, Homo sapien
gaaccagtaaagcaaactcaagatt

SEQ ID NO: 78668 - DNA, 25 bp, Homo sapien
agtaaacaatatacagttggataac

SEQ ID NO: 78669 - DNA, 25 bp, Homo sapien
cgctagggaaacttttaaatgttca

SEQ ID NO: 78670 - DNA, 25 bp, Homo sapien
cattttgctaaggaatggcccgcta

SEQ ID NO: 78671 - DNA, 25 bp, Homo sapien
ttagtcaatgtagcaacagggattc

SEQ ID NO: 78672 - DNA, 25 bp, Homo sapien
tcctaaactgccaacacctctaacc

SEQ ID NO: 78673 - DNA, 25 bp, Homo sapien
tttatgacagcaggtcctaaactgc

SEQ ID NO: 78674 - DNA, 25 bp, Homo sapien
taggttacaaaaggttgttcacaca

SEQ ID NO: 78675 - DNA, 25 bp, Homo sapien
acatgcaggtcaataggttaggtta

SEQ ID NO: 78676 - DNA, 25 bp, Homo sapien
atgtaatgaattggggtaaagaaaa

SEQ ID NO: 78677 - DNA, 25 bp, Homo sapien
actcaagattgagcctccatgtaat

SEQ ID NO: 78678 - DNA, 25 bp, Homo sapien
gaaccagtaaagcaaactcaagatt

SEQ ID NO: 78679 - DNA, 25 bp, Homo sapien
agtaaacaatatacagttggataac

SEQ ID NO: 78680 - DNA, 25 bp, Homo sapien
cgctagggaaacttttaaatgttca

SEQ ID NO: 78681 - DNA, 25 bp, Homo sapien
acatgcaggtcaataggttaggtta

SEQ ID NO: 78682 - DNA, 25 bp, Homo sapien
ttagtcaatgtagcaacagggattc

SEQ ID NO: 78683 - DNA, 25 bp, Homo sapien
tttatgacagcaggtcctaaactgc

SEQ ID NO: 78684 - DNA, 25 bp, Homo sapien
actcaagattgagcctccatgtaat

SEQ ID NO: 78685 - DNA, 25 bp, Homo sapien
atgtaatgaattggggtaaagaaaa

SEQ ID NO: 78686 - DNA, 25 bp, Homo sapien
taggttacaaaaggttgttcacaca

SEQ ID NO: 78687 - DNA, 25 bp, Homo sapien
agtaaacaatatacagttggataac

SEQ ID NO: 78688 - DNA, 25 bp, Homo sapien
gaaccagtaaagcaaactcaagatt

SEQ ID NO: 78689 - DNA, 25 bp, Homo sapien
tcctaaactgccaacacctctaacc

SEQ ID NO: 78690 - DNA, 25 bp, Homo sapien
cattttgctaaggaatggcccgcta

SEQ ID NO: 78691 - DNA, 25 bp, Homo sapien
cgctagggaaacttttaaatgttca

SEQ ID NO: 78692 - DNA, 25 bp, Homo sapien
cattttgctaaggaatggcccgcta

SEQ ID NO: 78693 - DNA, 25 bp, Homo sapien
ttagtcaatgtagcaacagggattc

SEQ ID NO: 78694 - DNA, 25 bp, Homo sapien
tcctaaactgccaacacctctaacc

SEQ ID NO: 78695 - DNA, 25 bp, Homo sapien
tttatgacagcaggtcctaaactgc

SEQ ID NO: 78696 - DNA, 25 bp, Homo sapien
taggttacaaaaggttgttcacaca

SEQ ID NO: 78697 - DNA, 25 bp, Homo sapien
acatgcaggtcaataggttaggtta

SEQ ID NO: 78698 - DNA, 25 bp, Homo sapien
atgtaatgaattggggtaaagaaaa

SEQ ID NO: 78699 - DNA, 25 bp, Homo sapien
actcaagattgagcctccatgtaat

SEQ ID NO: 78700 - DNA, 25 bp, Homo sapien
gaaccagtaaagcaaactcaagatt

SEQ ID NO: 78701 - DNA, 25 bp, Homo sapien
agtaaacaatatacagttggataac

SEQ ID NO: 78702 - DNA, 25 bp, Homo sapien
acatgcaggtcaataggttaggtta

SEQ ID NO: 78703 - DNA, 25 bp, Homo sapien
atgtaatgaattggggtaaagaaaa

SEQ ID NO: 78704 - DNA, 25 bp, Homo sapien
cgctagggaaacttttaaatgttca

SEQ ID NO: 78705 - DNA, 25 bp, Homo sapien
taggttacaaaaggttgttcacaca

SEQ ID NO: 78706 - DNA, 25 bp, Homo sapien
agtaaacaatatacagttggataac

SEQ ID NO: 78707 - DNA, 25 bp, Homo sapien
tttatgacagcaggtcctaaactgc

SEQ ID NO: 78708 - DNA, 25 bp, Homo sapien
ttagtcaatgtagcaacagggattc

SEQ ID NO: 78709 - DNA, 25 bp, Homo sapien
gaaccagtaaagcaaactcaagatt

SEQ ID NO: 78710 - DNA, 25 bp, Homo sapien
cattttgctaaggaatggcccgcta

SEQ ID NO: 78711 - DNA, 25 bp, Homo sapien
tcctaaactgccaacacctctaacc

SEQ ID NO: 78712 - DNA, 25 bp, Homo sapien
actcaagattgagcctccatgtaat

SEQ ID NO: 78713 - DNA, 25 bp, Homo sapien
cgctagggaaacttttaaatgttca

SEQ ID NO: 78714 - DNA, 25 bp, Homo sapien
cattttgctaaggaatggcccgcta

SEQ ID NO: 78715 - DNA, 25 bp, Homo sapien
ttagtcaatgtagcaacagggattc

SEQ ID NO: 78716 - DNA, 25 bp, Homo sapien
tcctaaactgccaacacctctaacc

SEQ ID NO: 78717 - DNA, 25 bp, Homo sapien
tttatgacagcaggtcctaaactgc

SEQ ID NO: 78718 - DNA, 25 bp, Homo sapien
taggttacaaaaggttgttcacaca

SEQ ID NO: 78719 - DNA, 25 bp, Homo sapien
acatgcaggtcaataggttaggtta

SEQ ID NO: 78720 - DNA, 25 bp, Homo sapien
atgtaatgaattggggtaaagaaaa

SEQ ID NO: 78721 - DNA, 25 bp, Homo sapien
actcaagattgagcctccatgtaat

SEQ ID NO: 78722 - DNA, 25 bp, Homo sapien
gaaccagtaaagcaaactcaagatt

SEQ ID NO: 78723 - DNA, 25 bp, Homo sapien
agtaaacaatatacagttggataac

SEQ ID NO: 78724 - DNA, 25 bp, Homo sapien
acatgcaggtcaataggttaggtta

SEQ ID NO: 78725 - DNA, 25 bp, Homo sapien
actcaagattgagcctccatgtaat

SEQ ID NO: 78726 - DNA, 25 bp, Homo sapien
tttatgacagcaggtcctaaactgc

SEQ ID NO: 78727 - DNA, 25 bp, Homo sapien
gaaccagtaaagcaaactcaagatt

SEQ ID NO: 78728 - DNA, 25 bp, Homo sapien
ttagtcaatgtagcaacagggattc

SEQ ID NO: 78729 - DNA, 25 bp, Homo sapien
atgtaatgaattggggtaaagaaaa

SEQ ID NO: 78730 - DNA, 25 bp, Homo sapien
agtaaacaatatacagttggataac

SEQ ID NO: 78731 - DNA, 25 bp, Homo sapien
taggttacaaaaggttgttcacaca

SEQ ID NO: 78732 - DNA, 25 bp, Homo sapien
tcctaaactgccaacacctctaacc

SEQ ID NO: 78733 - DNA, 25 bp, Homo sapien
cgctagggaaacttttaaatgttca

SEQ ID NO: 78734 - DNA, 25 bp, Homo sapien
cattttgctaaggaatggcccgcta

SEQ ID NO: 78735 - DNA, 25 bp, Homo sapien
cgctagggaaacttttaaatgttca

SEQ ID NO: 78736 - DNA, 25 bp, Homo sapien
cattttgctaaggaatggcccgcta

SEQ ID NO: 78737 - DNA, 25 bp, Homo sapien
ttagtcaatgtagcaacagggattc

SEQ ID NO: 78738 - DNA, 25 bp, Homo sapien
tcctaaactgccaacacctctaacc

SEQ ID NO: 78739 - DNA, 25 bp, Homo sapien
tttatgacagcaggtcctaaactgc

SEQ ID NO: 78740 - DNA, 25 bp, Homo sapien
taggttacaaaaggttgttcacaca

SEQ ID NO: 78741 - DNA, 25 bp, Homo sapien
acatgcaggtcaataggttaggtta

SEQ ID NO: 78742 - DNA, 25 bp, Homo sapien
atgtaatgaattggggtaaagaaaa

SEQ ID NO: 78743 - DNA, 25 bp, Homo sapien
actcaagattgagcctccatgtaat

SEQ ID NO: 78744 - DNA, 25 bp, Homo sapien
gaaccagtaaagcaaactcaagatt

SEQ ID NO: 78745 - DNA, 25 bp, Homo sapien
agtaaacaatatacagttggataac

SEQ ID NO: 78746 - DNA, 25 bp, Homo sapien
tcctaaactgccaacacctctaacc

SEQ ID NO: 78747 - DNA, 25 bp, Homo sapien
ttagtcaatgtagcaacagggattc

SEQ ID NO: 78748 - DNA, 25 bp, Homo sapien
taggttacaaaaggttgttcacaca

SEQ ID NO: 78749 - DNA, 25 bp, Homo sapien
gaaccagtaaagcaaactcaagatt

SEQ ID NO: 78750 - DNA, 25 bp, Homo sapien
actcaagattgagcctccatgtaat

SEQ ID NO: 78751 - DNA, 25 bp, Homo sapien
cattttgctaaggaatggcccgcta

SEQ ID NO: 78752 - DNA, 25 bp, Homo sapien
agtaaacaatatacagttggataac

SEQ ID NO: 78753 - DNA, 25 bp, Homo sapien
acatgcaggtcaataggttaggtta

SEQ ID NO: 78754 - DNA, 25 bp, Homo sapien
tttatgacagcaggtcctaaactgc

SEQ ID NO: 78755 - DNA, 25 bp, Homo sapien
cgctagggaaacttttaaatgttca

SEQ ID NO: 78756 - DNA, 25 bp, Homo sapien
atgtaatgaattggggtaaagaaaa

SEQ ID NO: 78757 - DNA, 25 bp, Homo sapien
cattttgctaaggaatggcccgcta

SEQ ID NO: 78758 - DNA, 25 bp, Homo sapien
agtaaacaatatacagttggataac

SEQ ID NO: 78759 - DNA, 25 bp, Homo sapien
tttatgacagcaggtcctaaactgc

SEQ ID NO: 78760 - DNA, 25 bp, Homo sapien
atgtaatgaattggggtaaagaaaa

SEQ ID NO: 78761 - DNA, 25 bp, Homo sapien
tcctaaactgccaacacctctaacc

SEQ ID NO: 78762 - DNA, 25 bp, Homo sapien
taggttacaaaaggttgttcacaca

SEQ ID NO: 78763 - DNA, 25 bp, Homo sapien
gaaccagtaaagcaaactcaagatt

SEQ ID NO: 78764 - DNA, 25 bp, Homo sapien
cgctagggaaacttttaaatgttca

SEQ ID NO: 78765 - DNA, 25 bp, Homo sapien
acatgcaggtcaataggttaggtta

SEQ ID NO: 78766 - DNA, 25 bp, Homo sapien
actcaagattgagcctccatgtaat

SEQ ID NO: 78767 - DNA, 25 bp, Homo sapien
ttagtcaatgtagcaacagggattc

SEQ ID NO: 78768 - DNA, 25 bp, Homo sapien
cgctagggaaacttttaaatgttca

SEQ ID NO: 78769 - DNA, 25 bp, Homo sapien
cattttgctaaggaatggcccgcta

SEQ ID NO: 78770 - DNA, 25 bp, Homo sapien
ttagtcaatgtagcaacagggattc

SEQ ID NO: 78771 - DNA, 25 bp, Homo sapien
tcctaaactgccaacacctctaacc

SEQ ID NO: 78772 - DNA, 25 bp, Homo sapien
tttatgacagcaggtcctaaactgc

SEQ ID NO: 78773 - DNA, 25 bp, Homo sapien
taggttacaaaaggttgttcacaca

SEQ ID NO: 78774 - DNA, 25 bp, Homo sapien
acatgcaggtcaataggttaggtta

SEQ ID NO: 78775 - DNA, 25 bp, Homo sapien
atgtaatgaattggggtaaagaaaa

SEQ ID NO: 78776 - DNA, 25 bp, Homo sapien
actcaagattgagcctccatgtaat

SEQ ID NO: 78777 - DNA, 25 bp, Homo sapien
gaaccagtaaagcaaactcaagatt

SEQ ID NO: 78778 - DNA, 25 bp, Homo sapien
agtaaacaatatacagttggataac

SEQ ID NO: 78779 - DNA, 25 bp, Homo sapien
tcctaaactgccaacacctctaacc

SEQ ID NO: 78780 - DNA, 25 bp, Homo sapien
acatgcaggtcaataggttaggtta

SEQ ID NO: 78781 - DNA, 25 bp, Homo sapien
agtaaacaatatacagttggataac

SEQ ID NO: 78782 - DNA, 25 bp, Homo sapien
taggttacaaaaggttgttcacaca

SEQ ID NO: 78783 - DNA, 25 bp, Homo sapien
atgtaatgaattggggtaaagaaaa

SEQ ID NO: 78784 - DNA, 25 bp, Homo sapien
cattttgctaaggaatggcccgcta

SEQ ID NO: 78785 - DNA, 25 bp, Homo sapien
actcaagattgagcctccatgtaat

SEQ ID NO: 78786 - DNA, 25 bp, Homo sapien
tttatgacagcaggtcctaaactgc

SEQ ID NO: 78787 - DNA, 25 bp, Homo sapien
ttagtcaatgtagcaacagggattc

SEQ ID NO: 78788 - DNA, 25 bp, Homo sapien
gaaccagtaaagcaaactcaagatt

SEQ ID NO: 78789 - DNA, 25 bp, Homo sapien
cgctagggaaacttttaaatgttca

SEQ ID NO: 78790 - DNA, 25 bp, Homo sapien
gaaccagtaaagcaaactcaagatt

SEQ ID NO: 78791 - DNA, 25 bp, Homo sapien
agtaaacaatatacagttggataac

SEQ ID NO: 78792 - DNA, 25 bp, Homo sapien
cgctagggaaacttttaaatgttca

SEQ ID NO: 78793 - DNA, 25 bp, Homo sapien
cattttgctaaggaatggcccgcta

SEQ ID NO: 78794 - DNA, 25 bp, Homo sapien
ttagtcaatgtagcaacagggattc

SEQ ID NO: 78795 - DNA, 25 bp, Homo sapien
tcctaaactgccaacacctctaacc

SEQ ID NO: 78796 - DNA, 25 bp, Homo sapien
tttatgacagcaggtcctaaactgc

SEQ ID NO: 78797 - DNA, 25 bp, Homo sapien
taggttacaaaaggttgttcacaca

SEQ ID NO: 78798 - DNA, 25 bp, Homo sapien
acatgcaggtcaataggttaggtta

SEQ ID NO: 78799 - DNA, 25 bp, Homo sapien
atgtaatgaattggggtaaagaaaa

SEQ ID NO: 78800 - DNA, 25 bp, Homo sapien
actcaagattgagcctccatgtaat

SEQ ID NO: 78801 - DNA, 25 bp, Homo sapien
acatgcaggtcaataggttaggtta

SEQ ID NO: 78802 - DNA, 25 bp, Homo sapien
cattttgctaaggaatggcccgcta

SEQ ID NO: 78803 - DNA, 25 bp, Homo sapien
atgtaatgaattggggtaaagaaaa

SEQ ID NO: 78804 - DNA, 25 bp, Homo sapien
ttagtcaatgtagcaacagggattc

SEQ ID NO: 78805 - DNA, 25 bp, Homo sapien
taggttacaaaaggttgttcacaca

SEQ ID NO: 78806 - DNA, 25 bp, Homo sapien
actcaagattgagcctccatgtaat

SEQ ID NO: 78807 - DNA, 25 bp, Homo sapien
cgctagggaaacttttaaatgttca

SEQ ID NO: 78808 - DNA, 25 bp, Homo sapien
tttatgacagcaggtcctaaactgc

SEQ ID NO: 78809 - DNA, 25 bp, Homo sapien
tcctaaactgccaacacctctaacc

SEQ ID NO: 78810 - DNA, 25 bp, Homo sapien
agtaaacaatatacagttggataac

SEQ ID NO: 78811 - DNA, 25 bp, Homo sapien
gaaccagtaaagcaaactcaagatt

SEQ ID NO: 78812 - DNA, 25 bp, Homo sapien
cgctagggaaacttttaaatgttca

SEQ ID NO: 78813 - DNA, 25 bp, Homo sapien
cattttgctaaggaatggcccgcta

SEQ ID NO: 78814 - DNA, 25 bp, Homo sapien
ttagtcaatgtagcaacagggattc

SEQ ID NO: 78815 - DNA, 25 bp, Homo sapien
tcctaaactgccaacacctctaacc

SEQ ID NO: 78816 - DNA, 25 bp, Homo sapien
tttatgacagcaggtcctaaactgc

SEQ ID NO: 78817 - DNA, 25 bp, Homo sapien
taggttacaaaaggttgttcacaca

SEQ ID NO: 78818 - DNA, 25 bp, Homo sapien
acatgcaggtcaataggttaggtta

SEQ ID NO: 78819 - DNA, 25 bp, Homo sapien
atgtaatgaattggggtaaagaaaa

SEQ ID NO: 78820 - DNA, 25 bp, Homo sapien
actcaagattgagcctccatgtaat

SEQ ID NO: 78821 - DNA, 25 bp, Homo sapien
gaaccagtaaagcaaactcaagatt

SEQ ID NO: 78822 - DNA, 25 bp, Homo sapien
agtaaacaatatacagttggataac

SEQ ID NO: 78823 - DNA, 25 bp, Homo sapien
cgctagggaaacttttaaatgttca

SEQ ID NO: 78824 - DNA, 25 bp, Homo sapien
actcaagattgagcctccatgtaat

SEQ ID NO: 78825 - DNA, 25 bp, Homo sapien
taggttacaaaaggttgttcacaca

SEQ ID NO: 78826 - DNA, 25 bp, Homo sapien
tttatgacagcaggtcctaaactgc

SEQ ID NO: 78827 - DNA, 25 bp, Homo sapien
ttagtcaatgtagcaacagggattc

SEQ ID NO: 78828 - DNA, 25 bp, Homo sapien
acatgcaggtcaataggttaggtta

SEQ ID NO: 78829 - DNA, 25 bp, Homo sapien
agtaaacaatatacagttggataac

SEQ ID NO: 78830 - DNA, 25 bp, Homo sapien
tcctaaactgccaacacctctaacc

SEQ ID NO: 78831 - DNA, 25 bp, Homo sapien
atgtaatgaattggggtaaagaaaa

SEQ ID NO: 78832 - DNA, 25 bp, Homo sapien
cattttgctaaggaatggcccgcta

SEQ ID NO: 78833 - DNA, 25 bp, Homo sapien
gaaccagtaaagcaaactcaagatt

SEQ ID NO: 78834 - DNA, 25 bp, Homo sapien
cgctagggaaacttttaaatgttca

SEQ ID NO: 78835 - DNA, 25 bp, Homo sapien
cattttgctaaggaatggcccgcta

SEQ ID NO: 78836 - DNA, 25 bp, Homo sapien
ttagtcaatgtagcaacagggattc

SEQ ID NO: 78837 - DNA, 25 bp, Homo sapien
tcctaaactgccaacacctctaacc

SEQ ID NO: 78838 - DNA, 25 bp, Homo sapien
tttatgacagcaggtcctaaactgc

SEQ ID NO: 78839 - DNA, 25 bp, Homo sapien
taggttacaaaaggttgttcacaca

SEQ ID NO: 78840 - DNA, 25 bp, Homo sapien
acatgcaggtcaataggttaggtta

SEQ ID NO: 78841 - DNA, 25 bp, Homo sapien
atgtaatgaattggggtaaagaaaa

SEQ ID NO: 78842 - DNA, 25 bp, Homo sapien
actcaagattgagcctccatgtaat

SEQ ID NO: 78843 - DNA, 25 bp, Homo sapien
gaaccagtaaagcaaactcaagatt

SEQ ID NO: 78844 - DNA, 25 bp, Homo sapien
agtaaacaatatacagttggataac

SEQ ID NO: 78845 - DNA, 25 bp, Homo sapien
acatgcaggtcaataggttaggtta

SEQ ID NO: 78846 - DNA, 25 bp, Homo sapien
tcctaaactgccaacacctctaacc

SEQ ID NO: 78847 - DNA, 25 bp, Homo sapien
ttagtcaatgtagcaacagggattc

SEQ ID NO: 78848 - DNA, 25 bp, Homo sapien
taggttacaaaaggttgttcacaca

SEQ ID NO: 78849 - DNA, 25 bp, Homo sapien
cattttgctaaggaatggcccgcta

SEQ ID NO: 78850 - DNA, 25 bp, Homo sapien
tttatgacagcaggtcctaaactgc

SEQ ID NO: 78851 - DNA, 25 bp, Homo sapien
actcaagattgagcctccatgtaat

SEQ ID NO: 78852 - DNA, 25 bp, Homo sapien
agtaaacaatatacagttggataac

SEQ ID NO: 78853 - DNA, 25 bp, Homo sapien
cgctagggaaacttttaaatgttca

SEQ ID NO: 78854 - DNA, 25 bp, Homo sapien
gaaccagtaaagcaaactcaagatt

SEQ ID NO: 78855 - DNA, 25 bp, Homo sapien
atgtaatgaattggggtaaagaaaa

SEQ ID NO: 78856 - DNA, 25 bp, Homo sapien
cgctagggaaacttttaaatgttca

SEQ ID NO: 78857 - DNA, 25 bp, Homo sapien
cattttgctaaggaatggcccgcta

SEQ ID NO: 78858 - DNA, 25 bp, Homo sapien
ttagtcaatgtagcaacagggattc

SEQ ID NO: 78859 - DNA, 25 bp, Homo sapien
tcctaaactgccaacacctctaacc

SEQ ID NO: 78860 - DNA, 25 bp, Homo sapien
tttatgacagcaggtcctaaactgc

SEQ ID NO: 78861 - DNA, 25 bp, Homo sapien
taggttacaaaaggttgttcacaca

SEQ ID NO: 78862 - DNA, 25 bp, Homo sapien
acatgcaggtcaataggttaggtta

SEQ ID NO: 78863 - DNA, 25 bp, Homo sapien
atgtaatgaattggggtaaagaaaa

SEQ ID NO: 78864 - DNA, 25 bp, Homo sapien
actcaagattgagcctccatgtaat

SEQ ID NO: 78865 - DNA, 25 bp, Homo sapien
gaaccagtaaagcaaactcaagatt

SEQ ID NO: 78866 - DNA, 25 bp, Homo sapien
agtaaacaatatacagttggataac

SEQ ID NO: 78867 - DNA, 25 bp, Homo sapien
taggttacaaaaggttgttcacaca

SEQ ID NO: 78868 - DNA, 25 bp, Homo sapien
atgtaatgaattggggtaaagaaaa

SEQ ID NO: 78869 - DNA, 25 bp, Homo sapien
actcaagattgagcctccatgtaat

SEQ ID NO: 78870 - DNA, 25 bp, Homo sapien
acatgcaggtcaataggttaggtta

SEQ ID NO: 78871 - DNA, 25 bp, Homo sapien
gaaccagtaaagcaaactcaagatt

SEQ ID NO: 78872 - DNA, 25 bp, Homo sapien
cattttgctaaggaatggcccgcta

SEQ ID NO: 78873 - DNA, 25 bp, Homo sapien
cgctagggaaacttttaaatgttca

SEQ ID NO: 78874 - DNA, 25 bp, Homo sapien
tttatgacagcaggtcctaaactgc

SEQ ID NO: 78875 - DNA, 25 bp, Homo sapien
ttagtcaatgtagcaacagggattc

SEQ ID NO: 78876 - DNA, 25 bp, Homo sapien
agtaaacaatatacagttggataac

SEQ ID NO: 78877 - DNA, 25 bp, Homo sapien
tcctaaactgccaacacctctaacc

SEQ ID NO: 78878 - DNA, 25 bp, Homo sapien
cgctagggaaacttttaaatgttca

SEQ ID NO: 78879 - DNA, 25 bp, Homo sapien
cattttgctaaggaatggcccgcta

SEQ ID NO: 78880 - DNA, 25 bp, Homo sapien
ttagtcaatgtagcaacagggattc

SEQ ID NO: 78881 - DNA, 25 bp, Homo sapien
tcctaaactgccaacacctctaacc

SEQ ID NO: 78882 - DNA, 25 bp, Homo sapien
tttatgacagcaggtcctaaactgc

SEQ ID NO: 78883 - DNA, 25 bp, Homo sapien
taggttacaaaaggttgttcacaca

SEQ ID NO: 78884 - DNA, 25 bp, Homo sapien
acatgcaggtcaataggttaggtta

SEQ ID NO: 78885 - DNA, 25 bp, Homo sapien
atgtaatgaattggggtaaagaaaa

SEQ ID NO: 78886 - DNA, 25 bp, Homo sapien
actcaagattgagcctccatgtaat

SEQ ID NO: 78887 - DNA, 25 bp, Homo sapien
gaaccagtaaagcaaactcaagatt

SEQ ID NO: 78888 - DNA, 25 bp, Homo sapien
agtaaacaatatacagttggataac

SEQ ID NO: 78889 - DNA, 25 bp, Homo sapien
cgctagggaaacttttaaatgttca

SEQ ID NO: 78890 - DNA, 25 bp, Homo sapien
cattttgctaaggaatggcccgcta

SEQ ID NO: 78891 - DNA, 25 bp, Homo sapien
ttagtcaatgtagcaacagggattc

SEQ ID NO: 78892 - DNA, 25 bp, Homo sapien
tcctaaactgccaacacctctaacc

SEQ ID NO: 78893 - DNA, 25 bp, Homo sapien
tttatgacagcaggtcctaaactgc

SEQ ID NO: 78894 - DNA, 25 bp, Homo sapien
taggttacaaaaggttgttcacaca

SEQ ID NO: 78895 - DNA, 25 bp, Homo sapien
acatgcaggtcaataggttaggtta

SEQ ID NO: 78896 - DNA, 25 bp, Homo sapien
atgtaatgaattggggtaaagaaaa

SEQ ID NO: 78897 - DNA, 25 bp, Homo sapien
actcaagattgagcctccatgtaat

SEQ ID NO: 78898 - DNA, 25 bp, Homo sapien
gaaccagtaaagcaaactcaagatt

SEQ ID NO: 78899 - DNA, 25 bp, Homo sapien
agtaaacaatatacagttggataac

SEQ ID NO: 78900 - DNA, 25 bp, Homo sapien
gaaccagtaaagcaaactcaagatt

SEQ ID NO: 78901 - DNA, 25 bp, Homo sapien
cattttgctaaggaatggcccgcta

SEQ ID NO: 78902 - DNA, 25 bp, Homo sapien
taggttacaaaaggttgttcacaca

SEQ ID NO: 78903 - DNA, 25 bp, Homo sapien
cgctagggaaacttttaaatgttca

SEQ ID NO: 78904 - DNA, 25 bp, Homo sapien
tttatgacagcaggtcctaaactgc

SEQ ID NO: 78905 - DNA, 25 bp, Homo sapien
ttagtcaatgtagcaacagggattc

SEQ ID NO: 78906 - DNA, 25 bp, Homo sapien
agtaaacaatatacagttggataac

SEQ ID NO: 78907 - DNA, 25 bp, Homo sapien
tcctaaactgccaacacctctaacc

SEQ ID NO: 78908 - DNA, 25 bp, Homo sapien
acatgcaggtcaataggttaggtta

SEQ ID NO: 78909 - DNA, 25 bp, Homo sapien
atgtaatgaattggggtaaagaaaa

SEQ ID NO: 78910 - DNA, 25 bp, Homo sapien
actcaagattgagcctccatgtaat

SEQ ID NO: 78911 - DNA, 25 bp, Homo sapien
cgctagggaaacttttaaatgttca

SEQ ID NO: 78912 - DNA, 25 bp, Homo sapien
cattttgctaaggaatggcccgcta

SEQ ID NO: 78913 - DNA, 25 bp, Homo sapien
ttagtcaatgtagcaacagggattc

SEQ ID NO: 78914 - DNA, 25 bp, Homo sapien
tcctaaactgccaacacctctaacc

SEQ ID NO: 78915 - DNA, 25 bp, Homo sapien
tttatgacagcaggtcctaaactgc

SEQ ID NO: 78916 - DNA, 25 bp, Homo sapien
taggttacaaaaggttgttcacaca

SEQ ID NO: 78917 - DNA, 25 bp, Homo sapien
acatgcaggtcaataggttaggtta

SEQ ID NO: 78918 - DNA, 25 bp, Homo sapien
atgtaatgaattggggtaaagaaaa

SEQ ID NO: 78919 - DNA, 25 bp, Homo sapien
actcaagattgagcctccatgtaat

SEQ ID NO: 78920 - DNA, 25 bp, Homo sapien
gaaccagtaaagcaaactcaagatt

SEQ ID NO: 78921 - DNA, 25 bp, Homo sapien
agtaaacaatatacagttggataac

SEQ ID NO: 78922 - DNA, 25 bp, Homo sapien
gaaccagtaaagcaaactcaagatt

SEQ ID NO: 78923 - DNA, 25 bp, Homo sapien
cattttgctaaggaatggcccgcta

SEQ ID NO: 78924 - DNA, 25 bp, Homo sapien
tcctaaactgccaacacctctaacc

SEQ ID NO: 78925 - DNA, 25 bp, Homo sapien
cgctagggaaacttttaaatgttca

SEQ ID NO: 78926 - DNA, 25 bp, Homo sapien
atgtaatgaattggggtaaagaaaa

SEQ ID NO: 78927 - DNA, 25 bp, Homo sapien
ttagtcaatgtagcaacagggattc

SEQ ID NO: 78928 - DNA, 25 bp, Homo sapien
agtaaacaatatacagttggataac

SEQ ID NO: 78929 - DNA, 25 bp, Homo sapien
tttatgacagcaggtcctaaactgc

SEQ ID NO: 78930 - DNA, 25 bp, Homo sapien
actcaagattgagcctccatgtaat

SEQ ID NO: 78931 - DNA, 25 bp, Homo sapien
taggttacaaaaggttgttcacaca

SEQ ID NO: 78932 - DNA, 25 bp, Homo sapien
acatgcaggtcaataggttaggtta

SEQ ID NO: 78933 - DNA, 25 bp, Homo sapien
cgctagggaaacttttaaatgttca

SEQ ID NO: 78934 - DNA, 25 bp, Homo sapien
cattttgctaaggaatggcccgcta

SEQ ID NO: 78935 - DNA, 25 bp, Homo sapien
ttagtcaatgtagcaacagggattc

SEQ ID NO: 78936 - DNA, 25 bp, Homo sapien
tcctaaactgccaacacctctaacc

SEQ ID NO: 78937 - DNA, 25 bp, Homo sapien
tttatgacagcaggtcctaaactgc

SEQ ID NO: 78938 - DNA, 25 bp, Homo sapien
taggttacaaaaggttgttcacaca

SEQ ID NO: 78939 - DNA, 25 bp, Homo sapien
acatgcaggtcaataggttaggtta

SEQ ID NO: 78940 - DNA, 25 bp, Homo sapien
atgtaatgaattggggtaaagaaaa

SEQ ID NO: 78941 - DNA, 25 bp, Homo sapien
actcaagattgagcctccatgtaat

SEQ ID NO: 78942 - DNA, 25 bp, Homo sapien
gaaccagtaaagcaaactcaagatt

SEQ ID NO: 78943 - DNA, 25 bp, Homo sapien
agtaaacaatatacagttggataac

SEQ ID NO: 78944 - DNA, 25 bp, Homo sapien
tttatgacagcaggtcctaaactgc

SEQ ID NO: 78945 - DNA, 25 bp, Homo sapien
taggttacaaaaggttgttcacaca

SEQ ID NO: 78946 - DNA, 25 bp, Homo sapien
ttagtcaatgtagcaacagggattc

SEQ ID NO: 78947 - DNA, 25 bp, Homo sapien
cgctagggaaacttttaaatgttca

SEQ ID NO: 78948 - DNA, 25 bp, Homo sapien
actcaagattgagcctccatgtaat

SEQ ID NO: 78949 - DNA, 25 bp, Homo sapien
cattttgctaaggaatggcccgcta

SEQ ID NO: 78950 - DNA, 25 bp, Homo sapien
atgtaatgaattggggtaaagaaaa

SEQ ID NO: 78951 - DNA, 25 bp, Homo sapien
tcctaaactgccaacacctctaacc

SEQ ID NO: 78952 - DNA, 25 bp, Homo sapien
acatgcaggtcaataggttaggtta

SEQ ID NO: 78953 - DNA, 25 bp, Homo sapien
gaaccagtaaagcaaactcaagatt

SEQ ID NO: 78954 - DNA, 25 bp, Homo sapien
agtaaacaatatacagttggataac

SEQ ID NO: 78955 - DNA, 25 bp, Homo sapien
cgctagggaaacttttaaatgttca

SEQ ID NO: 78956 - DNA, 25 bp, Homo sapien
cattttgctaaggaatggcccgcta

SEQ ID NO: 78957 - DNA, 25 bp, Homo sapien
ttagtcaatgtagcaacagggattc

SEQ ID NO: 78958 - DNA, 25 bp, Homo sapien
tcctaaactgccaacacctctaacc

SEQ ID NO: 78959 - DNA, 25 bp, Homo sapien
tttatgacagcaggtcctaaactgc

SEQ ID NO: 78960 - DNA, 25 bp, Homo sapien
taggttacaaaaggttgttcacaca

SEQ ID NO: 78961 - DNA, 25 bp, Homo sapien
acatgcaggtcaataggttaggtta

SEQ ID NO: 78962 - DNA, 25 bp, Homo sapien
atgtaatgaattggggtaaagaaaa

SEQ ID NO: 78963 - DNA, 25 bp, Homo sapien
actcaagattgagcctccatgtaat

SEQ ID NO: 78964 - DNA, 25 bp, Homo sapien
gaaccagtaaagcaaactcaagatt

SEQ ID NO: 78965 - DNA, 25 bp, Homo sapien
agtaaacaatatacagttggataac

SEQ ID NO: 78966 - DNA, 25 bp, Homo sapien
agtaaacaatatacagttggataac

SEQ ID NO: 78967 - DNA, 25 bp, Homo sapien
gaaccagtaaagcaaactcaagatt

SEQ ID NO: 78968 - DNA, 25 bp, Homo sapien
tttatgacagcaggtcctaaactgc

SEQ ID NO: 78969 - DNA, 25 bp, Homo sapien
tcctaaactgccaacacctctaacc

SEQ ID NO: 78970 - DNA, 25 bp, Homo sapien
actcaagattgagcctccatgtaat

SEQ ID NO: 78971 - DNA, 25 bp, Homo sapien
cattttgctaaggaatggcccgcta

SEQ ID NO: 78972 - DNA, 25 bp, Homo sapien
atgtaatgaattggggtaaagaaaa

SEQ ID NO: 78973 - DNA, 25 bp, Homo sapien
acatgcaggtcaataggttaggtta

SEQ ID NO: 78974 - DNA, 25 bp, Homo sapien
cgctagggaaacttttaaatgttca

SEQ ID NO: 78975 - DNA, 25 bp, Homo sapien
taggttacaaaaggttgttcacaca

SEQ ID NO: 78976 - DNA, 25 bp, Homo sapien
ttagtcaatgtagcaacagggattc

SEQ ID NO: 78977 - DNA, 25 bp, Homo sapien
cgctagggaaacttttaaatgttca

SEQ ID NO: 78978 - DNA, 25 bp, Homo sapien
cattttgctaaggaatggcccgcta

SEQ ID NO: 78979 - DNA, 25 bp, Homo sapien
ttagtcaatgtagcaacagggattc

SEQ ID NO: 78980 - DNA, 25 bp, Homo sapien
tcctaaactgccaacacctctaacc

SEQ ID NO: 78981 - DNA, 25 bp, Homo sapien
tttatgacagcaggtcctaaactgc

SEQ ID NO: 78982 - DNA, 25 bp, Homo sapien
taggttacaaaaggttgttcacaca

SEQ ID NO: 78983 - DNA, 25 bp, Homo sapien
acatgcaggtcaataggttaggtta

SEQ ID NO: 78984 - DNA, 25 bp, Homo sapien
atgtaatgaattggggtaaagaaaa

SEQ ID NO: 78985 - DNA, 25 bp, Homo sapien
actcaagattgagcctccatgtaat

SEQ ID NO: 78986 - DNA, 25 bp, Homo sapien
gaaccagtaaagcaaactcaagatt

SEQ ID NO: 78987 - DNA, 25 bp, Homo sapien
agtaaacaatatacagttggataac

SEQ ID NO: 78988 - DNA, 25 bp, Homo sapien
actcaagattgagcctccatgtaat

SEQ ID NO: 78989 - DNA, 25 bp, Homo sapien
ttagtcaatgtagcaacagggattc

SEQ ID NO: 78990 - DNA, 25 bp, Homo sapien
tcctaaactgccaacacctctaacc

SEQ ID NO: 78991 - DNA, 25 bp, Homo sapien
atgtaatgaattggggtaaagaaaa

SEQ ID NO: 78992 - DNA, 25 bp, Homo sapien
cgctagggaaacttttaaatgttca

SEQ ID NO: 78993 - DNA, 25 bp, Homo sapien
agtaaacaatatacagttggataac

SEQ ID NO: 78994 - DNA, 25 bp, Homo sapien
gaaccagtaaagcaaactcaagatt

SEQ ID NO: 78995 - DNA, 25 bp, Homo sapien
tttatgacagcaggtcctaaactgc

SEQ ID NO: 78996 - DNA, 25 bp, Homo sapien
acatgcaggtcaataggttaggtta

SEQ ID NO: 78997 - DNA, 25 bp, Homo sapien
cattttgctaaggaatggcccgcta

SEQ ID NO: 78998 - DNA, 25 bp, Homo sapien
taggttacaaaaggttgttcacaca

SEQ ID NO: 78999 - DNA, 25 bp, Homo sapien
tttatgacagcaggtcctaaactgc

SEQ ID NO: 79000 - DNA, 25 bp, Homo sapien
taggttacaaaaggttgttcacaca

SEQ ID NO: 79001 - DNA, 25 bp, Homo sapien
cattttgctaaggaatggcccgcta

SEQ ID NO: 79002 - DNA, 25 bp, Homo sapien
agtaaacaatatacagttggataac

SEQ ID NO: 79003 - DNA, 25 bp, Homo sapien
tcctaaactgccaacacctctaacc

SEQ ID NO: 79004 - DNA, 25 bp, Homo sapien
gaaccagtaaagcaaactcaagatt

SEQ ID NO: 79005 - DNA, 25 bp, Homo sapien
ttagtcaatgtagcaacagggattc

SEQ ID NO: 79006 - DNA, 25 bp, Homo sapien
atgtaatgaattggggtaaagaaaa

SEQ ID NO: 79007 - DNA, 25 bp, Homo sapien
actcaagattgagcctccatgtaat

SEQ ID NO: 79008 - DNA, 25 bp, Homo sapien
cgctagggaaacttttaaatgttca

SEQ ID NO: 79009 - DNA, 25 bp, Homo sapien
acatgcaggtcaataggttaggtta

SEQ ID NO: 79010 - DNA, 25 bp, Homo sapien
cgctagggaaacttttaaatgttca

SEQ ID NO: 79011 - DNA, 25 bp, Homo sapien
cattttgctaaggaatggcccgcta

SEQ ID NO: 79012 - DNA, 25 bp, Homo sapien
ttagtcaatgtagcaacagggattc

SEQ ID NO: 79013 - DNA, 25 bp, Homo sapien
tcctaaactgccaacacctctaacc

SEQ ID NO: 79014 - DNA, 25 bp, Homo sapien
tttatgacagcaggtcctaaactgc

SEQ ID NO: 79015 - DNA, 25 bp, Homo sapien
taggttacaaaaggttgttcacaca

SEQ ID NO: 79016 - DNA, 25 bp, Homo sapien
acatgcaggtcaataggttaggtta

SEQ ID NO: 79017 - DNA, 25 bp, Homo sapien
atgtaatgaattggggtaaagaaaa

SEQ ID NO: 79018 - DNA, 25 bp, Homo sapien
actcaagattgagcctccatgtaat

SEQ ID NO: 79019 - DNA, 25 bp, Homo sapien
gaaccagtaaagcaaactcaagatt

SEQ ID NO: 79020 - DNA, 25 bp, Homo sapien
agtaaacaatatacagttggataac

SEQ ID NO: 79021 - DNA, 25 bp, Homo sapien
cgctagggaaacttttaaatgttca

SEQ ID NO: 79022 - DNA, 25 bp, Homo sapien
tcctaaactgccaacacctctaacc

SEQ ID NO: 79023 - DNA, 25 bp, Homo sapien
acatgcaggtcaataggttaggtta

SEQ ID NO: 79024 - DNA, 25 bp, Homo sapien
tttatgacagcaggtcctaaactgc

SEQ ID NO: 79025 - DNA, 25 bp, Homo sapien
ttagtcaatgtagcaacagggattc

SEQ ID NO: 79026 - DNA, 25 bp, Homo sapien
actcaagattgagcctccatgtaat

SEQ ID NO: 79027 - DNA, 25 bp, Homo sapien
cattttgctaaggaatggcccgcta

SEQ ID NO: 79028 - DNA, 25 bp, Homo sapien
gaaccagtaaagcaaactcaagatt

SEQ ID NO: 79029 - DNA, 25 bp, Homo sapien
agtaaacaatatacagttggataac

SEQ ID NO: 79030 - DNA, 25 bp, Homo sapien
atgtaatgaattggggtaaagaaaa

SEQ ID NO: 79031 - DNA, 25 bp, Homo sapien
taggttacaaaaggttgttcacaca

SEQ ID NO: 79032 - DNA, 25 bp, Homo sapien
cgctagggaaacttttaaatgttca

SEQ ID NO: 79033 - DNA, 25 bp, Homo sapien
cattttgctaaggaatggcccgcta

SEQ ID NO: 79034 - DNA, 25 bp, Homo sapien
ttagtcaatgtagcaacagggattc

SEQ ID NO: 79035 - DNA, 25 bp, Homo sapien
tcctaaactgccaacacctctaacc

SEQ ID NO: 79036 - DNA, 25 bp, Homo sapien
tttatgacagcaggtcctaaactgc

SEQ ID NO: 79037 - DNA, 25 bp, Homo sapien
taggttacaaaaggttgttcacaca

SEQ ID NO: 79038 - DNA, 25 bp, Homo sapien
acatgcaggtcaataggttaggtta

SEQ ID NO: 79039 - DNA, 25 bp, Homo sapien
atgtaatgaattggggtaaagaaaa

SEQ ID NO: 79040 - DNA, 25 bp, Homo sapien
actcaagattgagcctccatgtaat

SEQ ID NO: 79041 - DNA, 25 bp, Homo sapien
gaaccagtaaagcaaactcaagatt

SEQ ID NO: 79042 - DNA, 25 bp, Homo sapien
agtaaacaatatacagttggataac

SEQ ID NO: 79043 - DNA, 25 bp, Homo sapien
acatgcaggtcaataggttaggtta

SEQ ID NO: 79044 - DNA, 25 bp, Homo sapien
actcaagattgagcctccatgtaat

SEQ ID NO: 79045 - DNA, 25 bp, Homo sapien
cattttgctaaggaatggcccgcta

SEQ ID NO: 79046 - DNA, 25 bp, Homo sapien
cgctagggaaacttttaaatgttca

SEQ ID NO: 79047 - DNA, 25 bp, Homo sapien
atgtaatgaattggggtaaagaaaa

SEQ ID NO: 79048 - DNA, 25 bp, Homo sapien
tcctaaactgccaacacctctaacc

SEQ ID NO: 79049 - DNA, 25 bp, Homo sapien
taggttacaaaaggttgttcacaca

SEQ ID NO: 79050 - DNA, 25 bp, Homo sapien
tttatgacagcaggtcctaaactgc

SEQ ID NO: 79051 - DNA, 25 bp, Homo sapien
agtaaacaatatacagttggataac

SEQ ID NO: 79052 - DNA, 25 bp, Homo sapien
ttagtcaatgtagcaacagggattc

SEQ ID NO: 79053 - DNA, 25 bp, Homo sapien
gaaccagtaaagcaaactcaagatt

SEQ ID NO: 79054 - DNA, 25 bp, Homo sapien
cgctagggaaacttttaaatgttca

SEQ ID NO: 79055 - DNA, 25 bp, Homo sapien
cattttgctaaggaatggcccgcta

SEQ ID NO: 79056 - DNA, 25 bp, Homo sapien
ttagtcaatgtagcaacagggattc

SEQ ID NO: 79057 - DNA, 25 bp, Homo sapien
tcctaaactgccaacacctctaacc

SEQ ID NO: 79058 - DNA, 25 bp, Homo sapien
tttatgacagcaggtcctaaactgc

SEQ ID NO: 79059 - DNA, 25 bp, Homo sapien
taggttacaaaaggttgttcacaca

SEQ ID NO: 79060 - DNA, 25 bp, Homo sapien
acatgcaggtcaataggttaggtta

SEQ ID NO: 79061 - DNA, 25 bp, Homo sapien
atgtaatgaattggggtaaagaaaa

SEQ ID NO: 79062 - DNA, 25 bp, Homo sapien
actcaagattgagcctccatgtaat

SEQ ID NO: 79063 - DNA, 25 bp, Homo sapien
gaaccagtaaagcaaactcaagatt

SEQ ID NO: 79064 - DNA, 25 bp, Homo sapien
agtaaacaatatacagttggataac

SEQ ID NO: 79065 - DNA, 25 bp, Homo sapien
ttttgggccaccgaccttgtgtcca

SEQ ID NO: 79066 - DNA, 25 bp, Homo sapien
caatgaccagagaatctacatctaa

SEQ ID NO: 79067 - DNA, 25 bp, Homo sapien
ctgcgcacacctgccaactccacca

SEQ ID NO: 79068 - DNA, 25 bp, Homo sapien
gcatacccttgatggcctgagcagt

SEQ ID NO: 79069 - DNA, 25 bp, Homo sapien
gccccattgcttggcctgcgcacac

SEQ ID NO: 79070 - DNA, 25 bp, Homo sapien
gttcacttggatatgctcaatgacc

SEQ ID NO: 79071 - DNA, 25 bp, Homo sapien
taacgtcggaatggtacacactgtt

SEQ ID NO: 79072 - DNA, 25 bp, Homo sapien
taagcatgtgcagcaaaaattcagc

SEQ ID NO: 79073 - DNA, 25 bp, Homo sapien
tcagcactctttttgggccaccgac

SEQ ID NO: 79074 - DNA, 25 bp, Homo sapien
ttaaagtgaacacgaagattggaac

SEQ ID NO: 79075 - DNA, 25 bp, Homo sapien
gcctgagcagtttcacgagtgttct

SEQ ID NO: 79076 - DNA, 25 bp, Homo sapien
ttaaagtgaacacgaagattggaac

SEQ ID NO: 79077 - DNA, 25 bp, Homo sapien
gcctgagcagtttcacgagtgttct

SEQ ID NO: 79078 - DNA, 25 bp, Homo sapien
gcatacccttgatggcctgagcagt

SEQ ID NO: 79079 - DNA, 25 bp, Homo sapien
taacgtcggaatggtacacactgtt

SEQ ID NO: 79080 - DNA, 25 bp, Homo sapien
ctgcgcacacctgccaactccacca

SEQ ID NO: 79081 - DNA, 25 bp, Homo sapien
gccccattgcttggcctgcgcacac

SEQ ID NO: 79082 - DNA, 25 bp, Homo sapien
ttttgggccaccgaccttgtgtcca

SEQ ID NO: 79083 - DNA, 25 bp, Homo sapien
tcagcactctttttgggccaccgac

SEQ ID NO: 79084 - DNA, 25 bp, Homo sapien
taagcatgtgcagcaaaaattcagc

SEQ ID NO: 79085 - DNA, 25 bp, Homo sapien
caatgaccagagaatctacatctaa

SEQ ID NO: 79086 - DNA, 25 bp, Homo sapien
gttcacttggatatgctcaatgacc

SEQ ID NO: 79087 - DNA, 25 bp, Homo sapien
gcctgagcagtttcacgagtgttct

SEQ ID NO: 79088 - DNA, 25 bp, Homo sapien
gccccattgcttggcctgcgcacac

SEQ ID NO: 79089 - DNA, 25 bp, Homo sapien
gcatacccttgatggcctgagcagt

SEQ ID NO: 79090 - DNA, 25 bp, Homo sapien
ttaaagtgaacacgaagattggaac

SEQ ID NO: 79091 - DNA, 25 bp, Homo sapien
ttttgggccaccgaccttgtgtcca

SEQ ID NO: 79092 - DNA, 25 bp, Homo sapien
tcagcactctttttgggccaccgac

SEQ ID NO: 79093 - DNA, 25 bp, Homo sapien
caatgaccagagaatctacatctaa

SEQ ID NO: 79094 - DNA, 25 bp, Homo sapien
ctgcgcacacctgccaactccacca

SEQ ID NO: 79095 - DNA, 25 bp, Homo sapien
gttcacttggatatgctcaatgacc

SEQ ID NO: 79096 - DNA, 25 bp, Homo sapien
taacgtcggaatggtacacactgtt

SEQ ID NO: 79097 - DNA, 25 bp, Homo sapien
taagcatgtgcagcaaaaattcagc

SEQ ID NO: 79098 - DNA, 25 bp, Homo sapien
ttaaagtgaacacgaagattggaac

SEQ ID NO: 79099 - DNA, 25 bp, Homo sapien
gcctgagcagtttcacgagtgttct

SEQ ID NO: 79100 - DNA, 25 bp, Homo sapien
gcatacccttgatggcctgagcagt

SEQ ID NO: 79101 - DNA, 25 bp, Homo sapien
taacgtcggaatggtacacactgtt

SEQ ID NO: 79102 - DNA, 25 bp, Homo sapien
ctgcgcacacctgccaactccacca

SEQ ID NO: 79103 - DNA, 25 bp, Homo sapien
gccccattgcttggcctgcgcacac

SEQ ID NO: 79104 - DNA, 25 bp, Homo sapien
ttttgggccaccgaccttgtgtcca

SEQ ID NO: 79105 - DNA, 25 bp, Homo sapien
tcagcactctttttgggccaccgac

SEQ ID NO: 79106 - DNA, 25 bp, Homo sapien
taagcatgtgcagcaaaaattcagc

SEQ ID NO: 79107 - DNA, 25 bp, Homo sapien
caatgaccagagaatctacatctaa

SEQ ID NO: 79108 - DNA, 25 bp, Homo sapien
gttcacttggatatgctcaatgacc

SEQ ID NO: 79109 - DNA, 25 bp, Homo sapien
gccccattgcttggcctgcgcacac

SEQ ID NO: 79110 - DNA, 25 bp, Homo sapien
gcatacccttgatggcctgagcagt

SEQ ID NO: 79111 - DNA, 25 bp, Homo sapien
ttaaagtgaacacgaagattggaac

SEQ ID NO: 79112 - DNA, 25 bp, Homo sapien
tcagcactctttttgggccaccgac

SEQ ID NO: 79113 - DNA, 25 bp, Homo sapien
gcctgagcagtttcacgagtgttct

SEQ ID NO: 79114 - DNA, 25 bp, Homo sapien
ctgcgcacacctgccaactccacca

SEQ ID NO: 79115 - DNA, 25 bp, Homo sapien
gttcacttggatatgctcaatgacc

SEQ ID NO: 79116 - DNA, 25 bp, Homo sapien
taacgtcggaatggtacacactgtt

SEQ ID NO: 79117 - DNA, 25 bp, Homo sapien
ttttgggccaccgaccttgtgtcca

SEQ ID NO: 79118 - DNA, 25 bp, Homo sapien
taagcatgtgcagcaaaaattcagc

SEQ ID NO: 79119 - DNA, 25 bp, Homo sapien
caatgaccagagaatctacatctaa

SEQ ID NO: 79120 - DNA, 25 bp, Homo sapien
ttaaagtgaacacgaagattggaac

SEQ ID NO: 79121 - DNA, 25 bp, Homo sapien
gcctgagcagtttcacgagtgttct

SEQ ID NO: 79122 - DNA, 25 bp, Homo sapien
gcatacccttgatggcctgagcagt

SEQ ID NO: 79123 - DNA, 25 bp, Homo sapien
taacgtcggaatggtacacactgtt

SEQ ID NO: 79124 - DNA, 25 bp, Homo sapien
ctgcgcacacctgccaactccacca

SEQ ID NO: 79125 - DNA, 25 bp, Homo sapien
gccccattgcttggcctgcgcacac

SEQ ID NO: 79126 - DNA, 25 bp, Homo sapien
ttttgggccaccgaccttgtgtcca

SEQ ID NO: 79127 - DNA, 25 bp, Homo sapien
tcagcactctttttgggccaccgac

SEQ ID NO: 79128 - DNA, 25 bp, Homo sapien
taagcatgtgcagcaaaaattcagc

SEQ ID NO: 79129 - DNA, 25 bp, Homo sapien
caatgaccagagaatctacatctaa

SEQ ID NO: 79130 - DNA, 25 bp, Homo sapien
gttcacttggatatgctcaatgacc

SEQ ID NO: 79131 - DNA, 25 bp, Homo sapien
ttaaagtgaacacgaagattggaac

SEQ ID NO: 79132 - DNA, 25 bp, Homo sapien
gcctgagcagtttcacgagtgttct

SEQ ID NO: 79133 - DNA, 25 bp, Homo sapien
gcatacccttgatggcctgagcagt

SEQ ID NO: 79134 - DNA, 25 bp, Homo sapien
taacgtcggaatggtacacactgtt

SEQ ID NO: 79135 - DNA, 25 bp, Homo sapien
ctgcgcacacctgccaactccacca

SEQ ID NO: 79136 - DNA, 25 bp, Homo sapien
gccccattgcttggcctgcgcacac

SEQ ID NO: 79137 - DNA, 25 bp, Homo sapien
ttttgggccaccgaccttgtgtcca

SEQ ID NO: 79138 - DNA, 25 bp, Homo sapien
tcagcactctttttgggccaccgac

SEQ ID NO: 79139 - DNA, 25 bp, Homo sapien
taagcatgtgcagcaaaaattcagc

SEQ ID NO: 79140 - DNA, 25 bp, Homo sapien
caatgaccagagaatctacatctaa

SEQ ID NO: 79141 - DNA, 25 bp, Homo sapien
gttcacttggatatgctcaatgacc

SEQ ID NO: 79142 - DNA, 25 bp, Homo sapien
gcctgagcagtttcacgagtgttct

SEQ ID NO: 79143 - DNA, 25 bp, Homo sapien
gcatacccttgatggcctgagcagt

SEQ ID NO: 79144 - DNA, 25 bp, Homo sapien
taacgtcggaatggtacacactgtt

SEQ ID NO: 79145 - DNA, 25 bp, Homo sapien
tcagcactctttttgggccaccgac

SEQ ID NO: 79146 - DNA, 25 bp, Homo sapien
ttaaagtgaacacgaagattggaac

SEQ ID NO: 79147 - DNA, 25 bp, Homo sapien
ctgcgcacacctgccaactccacca

SEQ ID NO: 79148 - DNA, 25 bp, Homo sapien
gccccattgcttggcctgcgcacac

SEQ ID NO: 79149 - DNA, 25 bp, Homo sapien
ttttgggccaccgaccttgtgtcca

SEQ ID NO: 79150 - DNA, 25 bp, Homo sapien
gttcacttggatatgctcaatgacc

SEQ ID NO: 79151 - DNA, 25 bp, Homo sapien
taagcatgtgcagcaaaaattcagc

SEQ ID NO: 79152 - DNA, 25 bp, Homo sapien
caatgaccagagaatctacatctaa

SEQ ID NO: 79153 - DNA, 25 bp, Homo sapien
ttaaagtgaacacgaagattggaac

SEQ ID NO: 79154 - DNA, 25 bp, Homo sapien
gcctgagcagtttcacgagtgttct

SEQ ID NO: 79155 - DNA, 25 bp, Homo sapien
gcatacccttgatggcctgagcagt

SEQ ID NO: 79156 - DNA, 25 bp, Homo sapien
taacgtcggaatggtacacactgtt

SEQ ID NO: 79157 - DNA, 25 bp, Homo sapien
ctgcgcacacctgccaactccacca

SEQ ID NO: 79158 - DNA, 25 bp, Homo sapien
gccccattgcttggcctgcgcacac

SEQ ID NO: 79159 - DNA, 25 bp, Homo sapien
ttttgggccaccgaccttgtgtcca

SEQ ID NO: 79160 - DNA, 25 bp, Homo sapien
tcagcactctttttgggccaccgac

SEQ ID NO: 79161 - DNA, 25 bp, Homo sapien
taagcatgtgcagcaaaaattcagc

SEQ ID NO: 79162 - DNA, 25 bp, Homo sapien
caatgaccagagaatctacatctaa

SEQ ID NO: 79163 - DNA, 25 bp, Homo sapien
gttcacttggatatgctcaatgacc

SEQ ID NO: 79164 - DNA, 25 bp, Homo sapien
gcctgagcagtttcacgagtgttct

SEQ ID NO: 79165 - DNA, 25 bp, Homo sapien
taagcatgtgcagcaaaaattcagc

SEQ ID NO: 79166 - DNA, 25 bp, Homo sapien
gttcacttggatatgctcaatgacc

SEQ ID NO: 79167 - DNA, 25 bp, Homo sapien
ttttgggccaccgaccttgtgtcca

SEQ ID NO: 79168 - DNA, 25 bp, Homo sapien
tcagcactctttttgggccaccgac

SEQ ID NO: 79169 - DNA, 25 bp, Homo sapien
gccccattgcttggcctgcgcacac

SEQ ID NO: 79170 - DNA, 25 bp, Homo sapien
ttaaagtgaacacgaagattggaac

SEQ ID NO: 79171 - DNA, 25 bp, Homo sapien
taacgtcggaatggtacacactgtt

SEQ ID NO: 79172 - DNA, 25 bp, Homo sapien
ctgcgcacacctgccaactccacca

SEQ ID NO: 79173 - DNA, 25 bp, Homo sapien
gcatacccttgatggcctgagcagt

SEQ ID NO: 79174 - DNA, 25 bp, Homo sapien
caatgaccagagaatctacatctaa

SEQ ID NO: 79175 - DNA, 25 bp, Homo sapien
ttaaagtgaacacgaagattggaac

SEQ ID NO: 79176 - DNA, 25 bp, Homo sapien
gcctgagcagtttcacgagtgttct

SEQ ID NO: 79177 - DNA, 25 bp, Homo sapien
gcatacccttgatggcctgagcagt

SEQ ID NO: 79178 - DNA, 25 bp, Homo sapien
taacgtcggaatggtacacactgtt

SEQ ID NO: 79179 - DNA, 25 bp, Homo sapien
ctgcgcacacctgccaactccacca

SEQ ID NO: 79180 - DNA, 25 bp, Homo sapien
gccccattgcttggcctgcgcacac

SEQ ID NO: 79181 - DNA, 25 bp, Homo sapien
ttttgggccaccgaccttgtgtcca

SEQ ID NO: 79182 - DNA, 25 bp, Homo sapien
tcagcactctttttgggccaccgac

SEQ ID NO: 79183 - DNA, 25 bp, Homo sapien
taagcatgtgcagcaaaaattcagc

SEQ ID NO: 79184 - DNA, 25 bp, Homo sapien
caatgaccagagaatctacatctaa

SEQ ID NO: 79185 - DNA, 25 bp, Homo sapien
gttcacttggatatgctcaatgacc

SEQ ID NO: 79186 - DNA, 25 bp, Homo sapien
tcagcactctttttgggccaccgac

SEQ ID NO: 79187 - DNA, 25 bp, Homo sapien
taagcatgtgcagcaaaaattcagc

SEQ ID NO: 79188 - DNA, 25 bp, Homo sapien
gcatacccttgatggcctgagcagt

SEQ ID NO: 79189 - DNA, 25 bp, Homo sapien
gcctgagcagtttcacgagtgttct

SEQ ID NO: 79190 - DNA, 25 bp, Homo sapien
gccccattgcttggcctgcgcacac

SEQ ID NO: 79191 - DNA, 25 bp, Homo sapien
taacgtcggaatggtacacactgtt

SEQ ID NO: 79192 - DNA, 25 bp, Homo sapien
caatgaccagagaatctacatctaa

SEQ ID NO: 79193 - DNA, 25 bp, Homo sapien
ttttgggccaccgaccttgtgtcca

SEQ ID NO: 79194 - DNA, 25 bp, Homo sapien
gttcacttggatatgctcaatgacc

SEQ ID NO: 79195 - DNA, 25 bp, Homo sapien
ttaaagtgaacacgaagattggaac

SEQ ID NO: 79196 - DNA, 25 bp, Homo sapien
ctgcgcacacctgccaactccacca

SEQ ID NO: 79197 - DNA, 25 bp, Homo sapien
ttaaagtgaacacgaagattggaac

SEQ ID NO: 79198 - DNA, 25 bp, Homo sapien
gcctgagcagtttcacgagtgttct

SEQ ID NO: 79199 - DNA, 25 bp, Homo sapien
gcatacccttgatggcctgagcagt

SEQ ID NO: 79200 - DNA, 25 bp, Homo sapien
taacgtcggaatggtacacactgtt

SEQ ID NO: 79201 - DNA, 25 bp, Homo sapien
ctgcgcacacctgccaactccacca

SEQ ID NO: 79202 - DNA, 25 bp, Homo sapien
gccccattgcttggcctgcgcacac

SEQ ID NO: 79203 - DNA, 25 bp, Homo sapien
ttttgggccaccgaccttgtgtcca

SEQ ID NO: 79204 - DNA, 25 bp, Homo sapien
tcagcactctttttgggccaccgac

SEQ ID NO: 79205 - DNA, 25 bp, Homo sapien
taagcatgtgcagcaaaaattcagc

SEQ ID NO: 79206 - DNA, 25 bp, Homo sapien
caatgaccagagaatctacatctaa

SEQ ID NO: 79207 - DNA, 25 bp, Homo sapien
gttcacttggatatgctcaatgacc

SEQ ID NO: 79208 - DNA, 25 bp, Homo sapien
ttaaagtgaacacgaagattggaac

SEQ ID NO: 79209 - DNA, 25 bp, Homo sapien
taacgtcggaatggtacacactgtt

SEQ ID NO: 79210 - DNA, 25 bp, Homo sapien
gcctgagcagtttcacgagtgttct

SEQ ID NO: 79211 - DNA, 25 bp, Homo sapien
caatgaccagagaatctacatctaa

SEQ ID NO: 79212 - DNA, 25 bp, Homo sapien
ttttgggccaccgaccttgtgtcca

SEQ ID NO: 79213 - DNA, 25 bp, Homo sapien
gttcacttggatatgctcaatgacc

SEQ ID NO: 79214 - DNA, 25 bp, Homo sapien
taagcatgtgcagcaaaaattcagc

SEQ ID NO: 79215 - DNA, 25 bp, Homo sapien
tcagcactctttttgggccaccgac

SEQ ID NO: 79216 - DNA, 25 bp, Homo sapien
gccccattgcttggcctgcgcacac

SEQ ID NO: 79217 - DNA, 25 bp, Homo sapien
ctgcgcacacctgccaactccacca

SEQ ID NO: 79218 - DNA, 25 bp, Homo sapien
gcatacccttgatggcctgagcagt

SEQ ID NO: 79219 - DNA, 25 bp, Homo sapien
ttaaagtgaacacgaagattggaac

SEQ ID NO: 79220 - DNA, 25 bp, Homo sapien
gcctgagcagtttcacgagtgttct

SEQ ID NO: 79221 - DNA, 25 bp, Homo sapien
gcatacccttgatggcctgagcagt

SEQ ID NO: 79222 - DNA, 25 bp, Homo sapien
taacgtcggaatggtacacactgtt

SEQ ID NO: 79223 - DNA, 25 bp, Homo sapien
ctgcgcacacctgccaactccacca

SEQ ID NO: 79224 - DNA, 25 bp, Homo sapien
gccccattgcttggcctgcgcacac

SEQ ID NO: 79225 - DNA, 25 bp, Homo sapien
ttttgggccaccgaccttgtgtcca

SEQ ID NO: 79226 - DNA, 25 bp, Homo sapien
tcagcactctttttgggccaccgac

SEQ ID NO: 79227 - DNA, 25 bp, Homo sapien
taagcatgtgcagcaaaaattcagc

SEQ ID NO: 79228 - DNA, 25 bp, Homo sapien
caatgaccagagaatctacatctaa

SEQ ID NO: 79229 - DNA, 25 bp, Homo sapien
gttcacttggatatgctcaatgacc

SEQ ID NO: 79230 - DNA, 25 bp, Homo sapien
gcctgagcagtttcacgagtgttct

SEQ ID NO: 79231 - DNA, 25 bp, Homo sapien
gttcacttggatatgctcaatgacc

SEQ ID NO: 79232 - DNA, 25 bp, Homo sapien
gccccattgcttggcctgcgcacac

SEQ ID NO: 79233 - DNA, 25 bp, Homo sapien
gcatacccttgatggcctgagcagt

SEQ ID NO: 79234 - DNA, 25 bp, Homo sapien
ttttgggccaccgaccttgtgtcca

SEQ ID NO: 79235 - DNA, 25 bp, Homo sapien
ttaaagtgaacacgaagattggaac

SEQ ID NO: 79236 - DNA, 25 bp, Homo sapien
tcagcactctttttgggccaccgac

SEQ ID NO: 79237 - DNA, 25 bp, Homo sapien
taagcatgtgcagcaaaaattcagc

SEQ ID NO: 79238 - DNA, 25 bp, Homo sapien
taacgtcggaatggtacacactgtt

SEQ ID NO: 79239 - DNA, 25 bp, Homo sapien
ctgcgcacacctgccaactccacca

SEQ ID NO: 79240 - DNA, 25 bp, Homo sapien
caatgaccagagaatctacatctaa

SEQ ID NO: 79241 - DNA, 25 bp, Homo sapien
gcatacccttgatggcctgagcagt

SEQ ID NO: 79242 - DNA, 25 bp, Homo sapien
ttttgggccaccgaccttgtgtcca

SEQ ID NO: 79243 - DNA, 25 bp, Homo sapien
taacgtcggaatggtacacactgtt

SEQ ID NO: 79244 - DNA, 25 bp, Homo sapien
gccccattgcttggcctgcgcacac

SEQ ID NO: 79245 - DNA, 25 bp, Homo sapien
caatgaccagagaatctacatctaa

SEQ ID NO: 79246 - DNA, 25 bp, Homo sapien
gcctgagcagtttcacgagtgttct

SEQ ID NO: 79247 - DNA, 25 bp, Homo sapien
tcagcactctttttgggccaccgac

SEQ ID NO: 79248 - DNA, 25 bp, Homo sapien
ctgcgcacacctgccaactccacca

SEQ ID NO: 79249 - DNA, 25 bp, Homo sapien
ttaaagtgaacacgaagattggaac

SEQ ID NO: 79250 - DNA, 25 bp, Homo sapien
taagcatgtgcagcaaaaattcagc

SEQ ID NO: 79251 - DNA, 25 bp, Homo sapien
gttcacttggatatgctcaatgacc

SEQ ID NO: 79252 - DNA, 25 bp, Homo sapien
ttaaagtgaacacgaagattggaac

SEQ ID NO: 79253 - DNA, 25 bp, Homo sapien
gcctgagcagtttcacgagtgttct

SEQ ID NO: 79254 - DNA, 25 bp, Homo sapien
gcatacccttgatggcctgagcagt

SEQ ID NO: 79255 - DNA, 25 bp, Homo sapien
taacgtcggaatggtacacactgtt

SEQ ID NO: 79256 - DNA, 25 bp, Homo sapien
ctgcgcacacctgccaactccacca

SEQ ID NO: 79257 - DNA, 25 bp, Homo sapien
gccccattgcttggcctgcgcacac
